United States Patent Application Publication US 2005/0153317 A1 - sequence listing, part 15

SEQ ID NO: 65088 - DNA, 506 bp, Chicken  19866894331744_5
taagatgtacttcaagctatctcaaagtactgtgaaggatacacaggtacagctttaggctgttaatatgatactatataggatgccattttctaataaakaagttaygcgacaggttgaagtaaaccgtactgaacttgtatgtctaaaagactgaagcttaaattggagtaacctggaaaaagaagggctgatatttttggcataattgtgtaaaaatgcatttctgtgttcctgcaagctagtcatttaggtaaaattttcaggaatagctttgtgtgagtctcttgctagatcccratttccaatatcctgaacacttacagatatagtggtctggtcccagacaaataatttaatgtctctagtcagcttttaaatgttcatttatgaatacattttacctggcttatatactcactttgtaatgcagtctgatagacaattacataagattataaacctacctatttctaaataactgttcagtataaatttaatcatct

SEQ ID NO: 65089 - DNA, 599 bp, Chicken  19866894331749_1
  misc_feature (1)..(135): n is any nucleotide
nnnnnnnnnnnnnnnnnnnnnnnnnnnnnnnnnnnnnnnnnnnnnnnnnnnnnnnnnnnnnnnnnnnnnnnnnnnnnnnnnnnnnnnnnnnnnnnnnnnnnnnnnnnnnnnnnnnnnnnnnnnnnnnnnnnnnnnaaaagcacagaaccacaggtgaaatacaaaaggtagattcacattggttacctctccagctgggtgatccctgaagcagcaccccagcagagggacacaagcagggacacaggcactgctgagcttggtccgtgtagagggatctctgcccctgctgtttacttytgtttttcaagggtttgctcaggcatggtttactaccgtgctttaatcttcactgtgctttgatcttcttcatatcaagtcagggaactcaagcatgtccaacagggtgcctcaaagtctatcgcatgcctgtgttatctatgcacagatgttctacaacaatggtattttcctacccgacccccctccaggctttaagtcatgctagctacaggacacttgagcaggctttcaatcctcctcaccaagtttgtgttctgaactacactagcaaaagacagtatattctgaaatgacag

SEQ ID NO: 65090 - DNA, 600 bp, Chicken  19866894331749_2
ttactaccgtgctttaatcttcactgtgctttgatcttcttcatatcaagtcagggaactcaagcatgtccaacagggtgcctcaaagtctatcgcatgcctgtgttatctatgcacagatgttctacaacaatggtattttcctacccgacccccctccaggctttaagtcatgctagctacaggacacttgagcaggctttcaatcctcctcaccaagtttgtgttctgaactacactagcaaaagacagtatattctgaaatgacagtgtgacagctgtcatctcaggagtggggtscattgtagaattgtagattttacttcaacatttgcattgggagtagatgtgtagaaccactctgtagtggaaatgctaagtcatggcttgatccagtgactgagcacctggtgggaaggcagggccaacccaggggagcttaggtgcatgcagtgcacctgaatgactggaaggagccaggatacaccccttcccagacctcatttcagggttggcagcagaggtctagaggtttcctagttttgcaagtgtaggcacagtgtgttcttttatgaaagagattatcttatcctgttcctc

SEQ ID NO: 65091 - DNA, 517 bp, Chicken  19866894331752_1
ggacagtcaatcaaataaatcattctgaattgttatattccctttagaacagttttgctccaaagatttcagagcctgacaggtattatttcccccatttcacagaagaggaagctgacgtcagcaggattatgtaactcactcaggtcacctgtcagctaagtgacaagccaaggctttaagctgaagatctccttgaactcttgatttttcaacactgctgctttgggcaggaggcagagcatgtcttacccaataaaagttgaggaggaatttagaaaggccagtgcaagggtacaygtcaaaatacggtgaatgaagcaaccataccctttggaaaaacatcacggtatgtttaatcatcagaggttaataatgttggcattactccctaaagttgaagatctgcagatgccacagctgggtaggtcgtttcttctccttcatgcaaatgagatatgcttgattaatgtagtactgcattagttattaatctgccacatgtgaatgattcctg

SEQ ID NO: 65092 - DNA, 600 bp, Chicken  19866894331753_1
aatgacttctgccttgctcctttattgaatagggttttcaacttaagttacataccaaatcttaagtacagtctgttaggctacaactgagcctgcaaaactaagtgtactctaacttcttgtatgatagatgaaaatatcaaaatagtgcgctttaccaagatgtgcataaaggcatatcctacctcagaaattgattatttgttagaaacataaggttgtgtaattggaggaccaaagtatccttcctcattttcgtctacactgttttccatcacttgctgaggagaacatcctgtkcagttgtgccaaaaaccttaatgaaatctgagatatttgtcaccttggcgtgtatacatgtattttaagttctgtattactagaagaacctcatagattcgtgttaacagaacgaagggaaaacattctgtattgttcaagagcttaagctcttgattttgttccattctacatacagctccttataatactgcataacacattactctgattctttatccttcttaatatttgctttacatattggagtgtccaatttattcccatcaatcacagtcacaggattataaactgtcccat

SEQ ID NO: 65093 - DNA, 600 bp, Chicken  19866894331758_1
tgattgctctaagctaactcagtcatgttagtcgggagtacagctttgacatgtgagtatatggcccttctggagcttgtagtatttgttaccttaagctcctgcaccttccacagtccattttctctcttgctgtaagtttgcagggggagaactgtgcatccaaataaggcttctgctgagagagagcagggttctgaaagctgcaggggtgtagcacattgcttcctccatagtgtctgcctacagaagcaggatgcagctcaagccttctgcacaagtccagctgccatggggccmtctcagcctgctctgggttgtcccctyggtgtccaggtacctgaagccatgtgtcactgttgagcacagttgagctcagaatagtagttttcagagtagcctcagactgggcctgttgctttgctggccaacttttcaacagtagcctgttgaatttgttcctttagttaggctgaaatgcctacagtaatgtctcgaacctatacattaaatatggtgggatatctactggtatcaacgcttgtgttccctctggaatggctcattggcagccatgagcaagatgagggatcttggtct

SEQ ID NO: 65094 - DNA, 600 bp, Chicken  19866894331758_2
ttagtcgggagtacagctttgacatgtgagtatatggcccttctggagcttgtagtatttgttaccttaagctcctgcaccttccacagtccattttctctcttgctgtaagtttgcagggggagaactgtgcatccaaataaggcttctgctgagagagagcagggttctgaaagctgcaggggtgtagcacattgcttcctccatagtgtctgcctacagaagcaggatgcagctcaagccttctgcacaagtccagctgccatggggccmtctcagcctgctctgggttgtcccctyggtgtccaggtacctgaagccatgtgtcactgttgagcacagttgagctcagaatagtagttttcagagtagcctcagactgggcctgttgctttgctggccaacttttcaacagtagcctgttgaatttgttcctttagttaggctgaaatgcctacagtaatgtctcgaacctatacattaaatatggtgggatatctactggtatcaacgcttgtgttccctctggaatggctcattggcagccatgagcaagatgagggatcttggtctctaacactggactggaactttctaaac

SEQ ID NO: 65095 - DNA, 600 bp, Chicken  19866894331758_3
cttactaagcctgtgctgcaagcctgcagagagcgttatgtacaaggaatcaggagtgggtttgcagcccatggggcagtctgagcagggaaagctgcatgtctgagccttggtgctgctgctgggtgtgatggcactgaggggaagctgccgtcccctggtgctcatgcatcaggctggggcctggggagcagcctgctggccctgccttgcacgttgtggtctgtagtgcttggctactggcatgcctgcctcctattcatggagctgggagcgggcagcctcctgcagagatgggayggggatccagaatggaggggggggatggttgctgtactgtgggtgaggagcagggctcttctcagtgcaaagaatgcttgtatgagtgccttgtgtgctgtgggccctggcaggtgcctctgcctcctgctgctgaccccagttctgatccccaggcaatacgaaagtggctctcaaatctgctgcctcagtgcagtcacagaagcaaaaacatgaaccagaatttggcaggtatgaatgatgtttgcagggaaaactacaagcgccctatttttccttgccccatcaagcacagcattt

SEQ ID NO: 65096 - DNA, 600 bp, Chicken  19866894331758_4
ggggggatggttgctgtactgtgggtgaggagcagggctcttctcagtgcaaagaatgcttgtatgagtgccttgtgtgctgtgggccctggcaggtgcctctgcctcctgctgctgaccccagttctgatccccaggcaatacgaaagtggctctcaaatctgctgcctcagtgcagtcacagaagcaaaaacatgaaccagaatttggcaggtatgaatgatgtttgcagggaaaactacaagcgccctatttttccttgccccatcaagcacagcatttgaaccccaaaatgccttkgtatgagaaggtaagcagtctctatgggtactgactgcagggctggcactgcagttgctgccttctcatatgctgtgtggtgaacagttcttagttctgttttcttcccttaggagacagcaaaatactctggtccatccctcccctttattttgtgttgcccatttttaggctgtagcctctccagggtagcagtatgactcgtttgagccctgctggcagtgaactccaccaagcagcagagttctccaactcagatgtctcacagcatgctgggtggctggggagcaatcccataat

SEQ ID NO: 65097 - DNA, 600 bp, Chicken  19866894331758_5
cctatttttccttgccccatcaagcacagcatttgaaccccaaaatgccttkgtatgagaaggtaagcagtctctatgggtactgactgcagggctggcactgcagttgctgccttctcatatgctgtgtggtgaacagttcttagttctgttttcttcccttaggagacagcaaaatactctggtccatccctcccctttattttgtgttgcccatttttaggctgtagcctctccagggtagcagtatgactcgtttgagccctgctggcagtgaactccaccaagcagcagagttckccaactcagatgtctcacagcatgctgggtggctggggagcaatcccataatgagcaggatgaaattaagaccaatacaatgggagctgactgtcgggagatctggaagaccttttttttctttcttattcttttcttttcccatctaaaatcccattgtttgtgatacattacagaactaattatgtactggtctctgaggaccaagcaagaggcgttactgggtctcttgtggttcaggttggcaggagtggggaatctctctgcagcttttggaggaggaggaggagtgggaaatag

SEQ ID NO: 65098 - DNA, 600 bp, Chicken  19866894331763_1
gatttaaatattcaagttgcttttggaattatattaaattttaatactttacaatcctcaattctatattctgctacagtatagcacttttgttctgagttttctgcatattctctaatgtaactaagagtttactcaaattatttttttgaaaatacttcattttctttctccttctggctcacctctagtttttgtattgataggctgatgatcagattacttaagctggaaatcaaaaccaaagcttttgtcagctacactgacagagaatatgtatgaaaaaaaaaataagataargcttactacttaccaggctttaggcattgctggcaagakttttactttagctataatgataaggcaactatctacttgctgcaggaagacagtctccttatcactacagataaagcagtaacaatataccacagcacagacttcttttggctgatgcaggccacmttaaaacactacatttttggaggagcctactcagaacaccaaggtaccaactaatctttcagcaatgaagccccaagttgggcaactattatggttagtcctataaccttaggagatactaaaagtgtagaaaaa

SEQ ID NO: 65099 - DNA, 600 bp, Chicken  19866894331763_2
tttaatactttacaatcctcaattctatattctgctacagtatagcacttttgttctgagttttctgcatattctctaatgtaactaagagtttactcaaattatttttttgaaaatacttcattttctttctccttctggctcacctctagtttttgtattgataggctgatgatcagattacttaagctggaaatcaaaaccaaagcttttgtcagctacactgacagagaatatgtatgaaaaaaaaaataagataargcttactacttaccaggctttaggcattgctggcaagakttttactttagctataatgataaggcaactatctacttgctgcaggaagacagtctccttatcactacagataaagcagtaacaatataccacagcacagacttcttttggctgatgcaggccacmttaaaacactacatttttggaggagcctactcagaacaccaaggtaccaactaatctttcagcaatgaagccccaagttgggcaactattatggttagtcctataaccttaggagatactaaaagtgtagaaaaagctctgcaaaaattccagttgctttttgatttccttcat

SEQ ID NO: 65100 - DNA, 600 bp, Chicken  19866894331763_3
tctttctccttctggctcacctctagtttttgtattgataggctgatgatcagattacttaagctggaaatcaaaaccaaagcttttgtcagctacactgacagagaatatgtatgaaaaaaaaaataagataargcttactacttaccaggctttaggcattgctggcaagakttttactttagctataatgataaggcaactatctacttgctgcaggaagacagtctccttatcactacagataaagcagtaacaatataccacagcacagacttcttttggctgatgcaggccacmttaaaacactacatttttggaggagcctactcagaacaccaaggtaccaactaatctttcagcaatgaagccccaagttgggcaactattatggttagtcctataaccttaggagatactaaaagtgtagaaaaagctctgcaaaaattccagttgctttttgatttccttcatgttatctcttggaattcccggacctgttctggaggcagccggttcatccatctccatatagaagacaagtgtattcttgtttgtggcattgttatcaaagactaaggcaaggataaaacaaacaaa

SEQ ID NO: 65101 - DNA, 600 bp, Chicken  19866894331763_4
ttcagcaatgaagccccaagttgggcaactattatggttagtcctataaccttaggagatactaaaagtgtagaaaaagctctgcaaaaattccagttgctttttgatttccttcatgttatctcttggaattcccggacctgttctggaggcagccggttcatccatctccatatagaagacaagtgtattcttgtttgtggcattgttatcaaagactaaggcaaggataaaacaaacaaacaaaccctaatccaaagtattttaactacagcattagatctagcaaacccactgatyactgctccttatgcatggcagataatgggactatcagtgtatttggagtgtattcttaaaactactcggtaraagcaggctttgattttgtagatggataggtctacaatgctctctgctcagttctgctgttttctgcataagcacagcacaatgctatttaacactttaacaacaaaggaagacatacagtgaacagtattttgaggaaatatagtgccttctgataatgaactatctttgcataaagtagtctaagagggaaatgcaatatggcagaaaagcttttaaactacacag

SEQ ID NO: 65102 - DNA, 600 bp, Chicken  19866894331763_5
gaaaaagctctgcaaaaattccagttgctttttgatttccttcatgttatctcttggaattcccggacctgttctggaggcagccggttcatccatctccatatagaagacaagtgtattcttgtttgtggcattgttatcaaagactaaggcaaggataaaacaaacaaacaaaccctaatccaaagtattttaactacagcattagatctagcaaacccactgatyactgctccttatgcatggcagataatgggactatcagtgtatttggagtgtattcttaaaactactcggtaraagcaggctttgattttgtagatggataggtctacaatgctctctgctcagttctgctgttttctgcataagcacagcacaatgctatttaacactttaacaacaaaggaagacatacagtgaacagtattttgaggaaatatagtgccttctgataatgaactatctttgcataaagtagtctaagagggaaatgcaatatggcagaaaagcttttaaactacacagaagtaaagacctgtcacacatatatagttatctttccctaaaataaaataatcctgtaaaatacagcatgga

SEQ ID NO: 65103 - DNA, 557 bp, Chicken  19866894331764_1
gagagcaaggggacttagggacttaggccaagtgcaaggtgctgcacttgggtcagggcaaccccaggtatttatacaaacaggtggaagacctccttgaaagcagccctgtggagaaggacttgggggtcctggtagacaagaagctgcacatgagccagcagtgtgcacttgcagcccagaaggccaactgtgttctgggctgcattaaaaaaggggtggccagcagggagagggaggtgattgtcccaatctactcgactcttgtgaggccccatctggagtactgcgtccaggccrggggcctccagtacaggaaggacgtgtagctcctggagcgggtacagaggagggctactaagatgaccagagggctggagcacctctcttaggaggaaaagttgagggaactgggcttgtttagcttggcgaagagaaggcaccagggagacctaattgcggccttccagtacttgaagggagcatatgaacaggaagggagacagctgtttaacagagtggatagtgataggacaaaaggaaatggatttaaactg

SEQ ID NO: 65104 - DNA, 600 bp, Chicken  19866894331765_1
agcaccgctgggggtgaggaggacgctgacagcagagggatacgtggctctcacacgatggctcctgcagcgcagtgtcacccttttggaaggagcttttcgcatgggcagggagaagcttggctggaggtgtgggctgggatcactcctcttcttgctgacaccacacaaacacgtcagggttaggagggaagccatggaccagcgccagatttgcaggctctgttttcaccagtgataatcaggtttaactgaactgatgatgcattcttcccctgggagaaaaacgggatgtggagrggtggggaaagcgggggttgggctttgggatccggtcccatgtcaggaggtttggggaatatttagggcccatgsaaagctggtgctgggcagggcagggagggaatcgcttgggcagtgatgctgcagccgtgcacccaccctgcttccatccttgcaagcacacttttgctgttccgatggagcagccaacaaagagacctgcttaaatcaccaggcaggacaggcagtgcaaggtcagcctgatcatcctgcacactcagcatgggcacagagaccatcccattgsagagggctctg

SEQ ID NO: 65105 - DNA, 600 bp, Chicken  19866894331765_2
tgtcacccttttggaaggagcttttcgcatgggcagggagaagcttggctggaggtgtgggctgggatcactcctcttcttgctgacaccacacaaacacgtcagggttaggagggaagccatggaccagcgccagatttgcaggctctgttttcaccagtgataatcaggtttaactgaactgatgatgcattcttcccctgggagaaaaacgggatgtggagrggtggggaaagcgggggttgggctttgggatccggtcccatgtcaggaggtttggggaatatttagggcccatgsaaagctggtgctgggcagggcagggagggaatcgcttgggcagtgatgctgcagccgtgcacccaccctgcttccatccttgcaagcacacttttgctgttccgatggagcagccaacaaagagacctgcttaaatcaccaggcaggacaggcagtgcaaggtcagcctgatcatcctgcacactcagcatgggcacagagaccatcccattgsagagggctctggagcctcacagctccaagcactgcttggatggctccttgcctccaaatcctgactggggggcaggtgggagccct

SEQ ID NO: 65106 - DNA, 510 bp, Chicken  19866894331765_3
ggatgtggagrggtggggaaagcgggggttgggctttgggatccggtcccatgtcaggaggtttggggaatatttagggcccatgsaaagctggtgctgggcagggcagggagggaatcgcttgggcagtgatgctgcagccgtgcacccaccctgcttccatccttgcaagcacacttttgctgttccgatggagcagccaacaaagagacctgcttaaatcaccaggcaggacaggcagtgcaaggtcagcctgatcatcctgcacactcagcatgggcacagagaccatcccattgsagagggctctggagcctcacagctccaagcactgcttggatggctccttgcctccaaatcctgactggggggcaggtgggagccctgcctctgctgtcagtgctgcttaaagaaaggctgctcccactgagcttcctccacaaatcatcctaattacccattccagtggcagctaatgagctcaaagctttcacagcccacgcctcttgc

SEQ ID NO: 65107 - DNA, 600 bp, Chicken  19866894331770_1
gttagtgagttctgaagatgagaagacatactgtgagctccatcctggctgcagcagtcaataataaagttctcattgtctatagtgaaaatagaagtgagctttttgcattttaactatgatatttcttcttttatttttgaggatccactgtgaacactttttctctgtatcagtcttgtagtcatctgttatcctggacagcagacattatcccttttttatctatgtgcatttatacaggaaattactggtattaaaggctatttcattgacttggtgcttagaaacagttcttasttgacagagaaatattgcattycagtatatctttcttcttctttacaaaacagtaagaattttgccagaaagtatgtgaatgtaacaaattcaccctttattcttctgtaaaagttacactttgtatcaaagctccttatgtgagcctgaaatttgggatgaatatccattcgcatgaatgtatctttgaccatttgcataaacatatggacaagacatattctttacagaaacacactgtgtgctcaaagcagaggttcaaacaggtttagcttgagtcttttaagattttttttcctg

SEQ ID NO: 65108 - DNA, 600 bp, Chicken  19866894331770_2
aagacatactgtgagctccatcctggctgcagcagtcaataataaagttctcattgtctatagtgaaaatagaagtgagctttttgcattttaactatgatatttcttcttttatttttgaggatccactgtgaacactttttctctgtatcagtcttgtagtcatctgttatcctggacagcagacattatcccttttttatctatgtgcatttatacaggaaattactggtattaaaggctatttcattgacttggtgcttagaaacagttcttasttgacagagaaatattgcattycagtatatctttcttcttctttacaaaacagtaagaattttgccagaaagtatgtgaatgtaacaaattcaccctttattcttctgtaaaagttacactttgtatcaaagctccttatgtgagcctgaaatttgggatgaatatccattcgcatgaatgtatctttgaccatttgcataaacatatggacaagacatattctttacagaaacacactgtgtgctcaaagcagaggttcaaacaggtttagcttgagtcttttaagattttttttcctgattagacaggtttgaatttcag

SEQ ID NO: 65109 - DNA, 489 bp, Chicken  19866894331777_1
gaaaactaagattatatcaaaaattgaagatcgtatttgttgattgatttggacaacaggggggtcccattggtgaccttttttagatgtgtgtaatcggtcaccactgcaaataggaagaggtgcgtctcaagaatggctttatgctgctcagagaaagactggaaatcaaatattcttggaggctttagttttaaaggaaatttacgtgagtgtagaggcaaataaaaagcaattatggaagaagtgggaaatacacatgcatttataaaatataagcatctgtaaaaagaactgctrtgttatgaaagaaagaggtaaaagacaaaattattgttccagaatcagggattaaagattgagtttatcacgttcctgtttattgctttggaaacagctctgtaggttctcatctaaacttgctacttccacctctgccctgtgataaacacaacatgttcctttgaggtgcactgaaagataaagcct

SEQ ID NO: 65110 - DNA, 600 bp, Chicken  19866894331784_1
acagagttaaatcacccaggtgttagaacacacaattcgggaaaataagataacatctttccacactgtctctggtgcccgcacaatgtaccttacttatagccagcagaaataacccatgaagaactggaatgaagaatttttcagatggccaatgaggatgtcctcaaagatccaggacagtcagtgaacatcacctccctgaccctggaatatccatgttatcacaggtactggtaggattgacaggcatgtgcaactcctgctcagcacagctcccatcttttcaactagatcatrctttatattgaagctgtttggatcaccacagtcatcagaaaccatagccwccataggaaagaaacccaggtctgaatcagggtctacacgcaagtgaagttttattttatccacatcacttcagctcatcagtccaaacttttataacttttgtggctgcctagaaagtactgtcacaacacagagcagttacttgaagggcatctatccccctcaaactaagaacaatccagattctaccctgcaaataagagcacgcgcacatagctcagttttacacatcattcagatgtactcagc

SEQ ID NO: 65111 - DNA, 600 bp, Chicken  19866894331784_2
taacatctttccacactgtctctggtgcccgcacaatgtaccttacttatagccagcagaaataacccatgaagaactggaatgaagaatttttcagatggccaatgaggatgtcctcaaagatccaggacagtcagtgaacatcacctccctgaccctggaatatccatgttatcacaggtactggtaggattgacaggcatgtgcaactcctgctcagcacagctcccatcttttcaactagatcatrctttatattgaagctgtttggatcaccacagtcatcagaaaccatagccwccataggaaagaaacccaggtctgaatcagggtctacacgcaagtgaagttttattttatccacatcacttcagctcatcagtccaaacttttataacttttgtggctgcctagaaagtactgtcacaacacagagcagttacttgaagggcatctatccccctcaaactaagaacaatccagattctaccctgcaaataagagcacgcgcacatagctcagttttacacatcattcagatgtactcagcacccaccaaatgcacagcaratgacmagagccaaggtcagtcagagacaa

SEQ ID NO: 65112 - DNA, 600 bp, Chicken  19866894331784_3
gatcaccacagtcatcagaaaccatagccwccataggaaagaaacccaggtctgaatcagggtctacacgcaagtgaagttttattttatccacatcacttcagctcatcagtccaaacttttataacttttgtggctgcctagaaagtactgtcacaacacagagcagttacttgaagggcatctatccccctcaaactaagaacaatccagattctaccctgcaaataagagcacgcgcacatagctcagttttacacatcattcagatgtactcagcacccaccaaatgcacagcaratgacmagagccaaggtcagtcagagacaaccgcatttctattttatacattgtggctaaaacatatattcttaggaggatatagtaatgcccattttcctcttcgatgctccagcagaagagaaaaatggttggagagctcaggaaagaaggcaaaaccacccaagcacccaaggctgtaacatactctgcagtagaaataataccatcrcaaggaacagcatcagcaaagtaatcacagaagatttcttactatcttcctgtctcctaaaatgacaactgaggcctacaaacttactg

SEQ ID NO: 65113 - DNA, 600 bp, Chicken  19866894331784_4
cacagtcatcagaaaccatagccwccataggaaagaaacccaggtctgaatcagggtctacacgcaagtgaagttttattttatccacatcacttcagctcatcagtccaaacttttataacttttgtggctgcctagaaagtactgtcacaacacagagcagttacttgaagggcatctatccccctcaaactaagaacaatccagattctaccctgcaaataagagcacgcgcacatagctcagttttacacatcattcagatgtactcagcacccaccaaatgcacagcaratgacmagagccaaggtcagtcagagacaaccgcatttctattttatacattgtggctaaaacatatattcttaggaggatatagtaatgcccattttcctcttcgatgctccagcagaagagaaaaatggttggagagctcaggaaagaaggcaaaaccacccaagcacccaaggctgtaacatactctgcagtagaaataataccatcrcaaggaacagcatcagcaaagtaatcacagaagatttcttactatcttcctgtctcctaaaatgacaactgaggcctacaaacttactggcatag

SEQ ID NO: 65114 - DNA, 600 bp, Chicken  19866894331784_5
agattctaccctgcaaataagagcacgcgcacatagctcagttttacacatcattcagatgtactcagcacccaccaaatgcacagcaratgacmagagccaaggtcagtcagagacaaccgcatttctattttatacattgtggctaaaacatatattcttaggaggatatagtaatgcccattttcctcttcgatgctccagcagaagagaaaaatggttggagagctcaggaaagaaggcaaaaccacccaagcacccaaggctgtaacatactctgcagtagaaataataccatcrcaaggaacagcatcagcaaagtaatcacagaagatttcttactatcttcctgtctcctaaaatgacaactgaggcctacaaacttactggcatagaacacaaaagatggataactaacagcatgagaagagctttgaaagtcaggcaaacagaaagagcagatgtggagcaggtgtctgctctctgctttgtaaagtgatggcttttcaggcttaccactgaaataagagaaacttgaagcagaatgtaaatcctgagaaggcctccatgtcaggcttaccaacatcaaacaggggccat

SEQ ID NO: 65115 - DNA, 600 bp, Chicken  19866894331804_1
agaattaattggagtagagaaaagaagaggaaaaaaaagaattaaagcaaaattaattagtagtctttgttgttttctcttgtggccacttctcctcatttcaagactttaactttaaaagctattgatagtaatattttcttttaaacctctcctctcctttaacatcctagtgatattttatacacaccactgaagtccattacaaggatagttcttgtatgtagcaaaaagcaacataaaatccatgtagcatgaaaacagaagctaagcaccaaatgactgctaaatgacaaaagrcaatgaagaccctaaaaaacacaagggtaagcacgtaaactaaggaaacaacatgcttattccttaaaaggaaaaacaaagctaataaaagatcaaataaaagtgacacatcaagtaagattttttttcagctttcacttgggagatttcttttgaagaagtatttaaacatccctttatgctacaagctaaatgaagaggcagaaaagcaaaaaacaggcagattaacacacaatccatgaaaacaacttttgaagcaacagaaattgagaggcagtaatttactacgcttctgaccag

SEQ ID NO: 65116 - DNA, 600 bp, Chicken  19866894331806_1
gtggtgatttaattacttcattttttaagttctacctctctgaaacacactactgaggcaggtttgctttcaactacacacttattcttcagttgaaaatgccaaaactttatctgaatgtttctttccactgagtattcctttcttctgaaagtctataaaaatctgtaattctatatactgagttccataagtatgtttagtgataattaaactacatcccctggatgtataaaatatatactaagcattgattaaaatcttaatgcacagagacggagaagccaaacaaaactgttyatctcatcatctggaagtattacaaatcttccttgttttatcagtatataaagtgggcacactgacaccctgattaactcttattaagtttgaaaattaatatcatcactgaatatttgcattgacatttttgaaagattagaataaatgcttaattcatattcagtcttagtgagaaataagtatccatatgaagctgtgcattagaggacactttgctttctgttcttacacatattcctcttgttagcattcccaactgtctattctacaaggagaaaagtatggcaaaacacttaa

SEQ ID NO: 65117 - DNA, 600 bp, Chicken  19866894331810_1
atctgtggcacttcacagggtacacaaaagctaaaaaaacctttctgttaaatattttatagtttgggtatctagattccaatcagggctaccgaagcacaaactataaagtggtatttacacggagggagttgtgcaaagtcgtgtcaggctatagctagtaactatggcagctgcatgggtgtgacacagcctcatctggaggtaacccattaaaccctctcatcaccatccttctgacacagcagccactcagggaaagctggcctgaagttcttcccccttcacggcctttaaatrttttcacagtttaatgctgggctgcttctcctcttcattcatgttttacgtcacctttaggactgattcatcatttcatctttttttggaacagaacttccagccttcgctgccgctgtgctaccctaagactgctgtattccttcacttacgagttcatgttgccatcagggcgcacaggaacgagatgtgcaacttcttggtagttacagtattgccacagtgcaggacccgcgttttgctggtaatagcaccaaacccaagcttccccaaaacatgctggggaaggtattgctgttc

SEQ ID NO: 65118 - DNA, 600 bp, Chicken  19866894331821_1
ctccttttagagaactattagcattggcaatgacatcaagcaccaattcatcaagagccacagtgtcaacttcagtttggtagtgcaaaacaaacagaaagctgagatgctcttctggggagaggaaaactgctctggggaaggcatcacattatgggcaccttcttctttcaacaataacatttaatagccttttaaagagcattttccccattcccccaagtaatttcttggcaggcagttaagagaaaggaagaagtttttttctaagggcttttatatgatactaaataaatctakcagccttcagaacaacaaaccccctcccctgcttatgcctattgtgctgcccagactgtctcttaataccagccctagagtggcctgatggtgtctgtctggtaagtgctgagagcattatcaaaccacactcaaggctcagctctcgagcagatgccagatggaaccagcatcaagttattattattatttattaattacgcacctgactaatgtgcagagcaatttgtggcagttaaaatgcacattataaatggaaaacaagagaccttttctcaaagaatgtatctgttatccagg

SEQ ID NO: 65119 - DNA, 600 bp, Chicken  19866894331827_1
gagaccgaaggtgttgtgagtgtagtaacggggtgtgcttttcagcagaaagcagcagccatcttcactggtggtgtttctacttagttgtatgaagtcattgcttttgaaagcagaaaaagctgaaatgctgacttccagtgtaagtcttccctgcgagtgctgggctggggctcaaacagtgagctcttggcctggctcagggcatcccagcagctgtctgtggcatcaaccagcatcagcaggaaacagcttttccctcagctcgaccacagctctgaaggggtgtgctcgttctarttgttaatagccttaattggaagtataggtgaggaagaccaattgtaggagggatgagattgtacatctgccttgcggagcacaatcatacctgcagtgtgttgcattctctmtgaatctttcctgtacttttgcaagcaaygaacgtgcaacagatcgtcactgaaaatgctcccatctctgagtgatagcagcagtgggcagggagatgttcctggagaagcatggcttgttgcagctcaggtaggacttagcaacagggcttcagactgtktgcatcatacccgtttcacacgctcc

SEQ ID NO: 65120 - DNA, 600 bp, Chicken  19866894331827_2
cagaaaaagctgaaatgctgacttccagtgtaagtcttccctgcgagtgctgggctggggctcaaacagtgagctcttggcctggctcagggcatcccagcagctgtctgtggcatcaaccagcatcagcaggaaacagcttttccctcagctcgaccacagctctgaaggggtgtgctcgttctarttgttaatagccttaattggaagtataggtgaggaagaccaattgtaggagggatgagattgtacatctgccttgcggagcacaatcatacctgcagtgtgttgcattctctmtgaatctttcctgtacttttgcaagcaaygaacgtgcaacagatcgtcactgaaaatgctcccatctctgagtgatagcagcagtgggcagggagatgttcctggagaagcatggcttgttgcagctcaggtaggacttagcaacagggcttcagactgtktgcatcatacccgtttcacacgctccaaggctgtgttggctttggttctgtgagctgagacctacatggagaaraaagatacagcaagccacagactgcagggctttgcttcccacccctcctccaggcgtttgtgagc

SEQ ID NO: 65121 - DNA, 600 bp, Chicken  19866894331827_3
gtaagtcttccctgcgagtgctgggctggggctcaaacagtgagctcttggcctggctcagggcatcccagcagctgtctgtggcatcaaccagcatcagcaggaaacagcttttccctcagctcgaccacagctctgaaggggtgtgctcgttctarttgttaatagccttaattggaagtataggtgaggaagaccaattgtaggagggatgagattgtacatctgccttgcggagcacaatcatacctgcagtgtgttgcattctctmtgaatctttcctgtacttttgcaagcaaygaacgtgcaacagatcgtcactgaaaatgctcccatctctgagtgatagcagcagtgggcagggagatgttcctggagaagcatggcttgttgcagctcaggtaggacttagcaacagggcttcagactgtktgcatcatacccgtttcacacgctccaaggctgtgttggctttggttctgtgagctgagacctacatggagaaraaagatacagcaagccacagactgcagggctttgcttcccacccctcctccaggcgtttgtgagctcttgtggtgccctgctgtagaaaaccat

SEQ ID NO: 65122 - DNA, 580 bp, Chicken  19866894331827_4
gctctgaaggggtgtgctcgttctarttgttaatagccttaattggaagtataggtgaggaagaccaattgtaggagggatgagattgtacatctgccttgcggagcacaatcatacctgcagtgtgttgcattctctmtgaatctttcctgtacttttgcaagcaaygaacgtgcaacagatcgtcactgaaaatgctcccatctctgagtgatagcagcagtgggcagggagatgttcctggagaagcatggcttgttgcagctcaggtaggacttagcaacagggcttcagactgtktgcatcatacccgtttcacacgctccaaggctgtgttggctttggttctgtgagctgagacctacatggagaaraaagatacagcaagccacagactgcagggctttgcttcccacccctcctccaggcgtttgtgagctcttgtggtgccctgctgtagaaaaccatagtctaaacttgttctatttrggagagggcggatgggaattaaataattctttgtatatcagctcttcccgaagcaatttcccaaatttttttccactcttgagacattcct

SEQ ID NO: 65123 - DNA, 506 bp, Chicken  19866894331827_5
gagggatgagattgtacatctgccttgcggagcacaatcatacctgcagtgtgttgcattctctmtgaatctttcctgtacttttgcaagcaaygaacgtgcaacagatcgtcactgaaaatgctcccatctctgagtgatagcagcagtgggcagggagatgttcctggagaagcatggcttgttgcagctcaggtaggacttagcaacagggcttcagactgtktgcatcatacccgtttcacacgctccaaggctgtgttggctttggttctgtgagctgagacctacatggagaaraaagatacagcaagccacagactgcagggctttgcttcccacccctcctccaggcgtttgtgagctcttgtggtgccctgctgtagaaaaccatagtctaaacttgttctatttrggagagggcggatgggaattaaataattctttgtatatcagctcttcccgaagcaatttcccaaatttttttccactcttgagacattcct

SEQ ID NO: 65124 - DNA, 391 bp, Chicken  19866894331827_6
tgaaaatgctcccatctctgagtgatagcagcagtgggcagggagatgttcctggagaagcatggcttgttgcagctcaggtaggacttagcaacagggcttcagactgtktgcatcatacccgtttcacacgctccaaggctgtgttggctttggttctgtgagctgagacctacatggagaaraaagatacagcaagccacagactgcagggctttgcttcccacccctcctccaggcgtttgtgagctcttgtggtgccctgctgtagaaaaccatagtctaaacttgttctatttrggagagggcggatgggaattaaataattctttgtatatcagctcttcccgaagcaatttcccaaatttttttccactcttgagacattcct

SEQ ID NO: 65125 - DNA, 600 bp, Chicken  19866894331833_1
aaataccatcacttctcacagctggaagagcgagggaaggcggcagcggcctcccgcgctcggaggggccctgcgcagccggacacgggcaaggagggcgctgcgctccgaagtccgctgtgctccgcgacagcgcagactgcagcctgcaggggacagagggctgcgcagcctccacgggcatccccaggtataggtcgagcgtccgcaccccacggcagacttcgcttgccaactcagaaaccaccacctggagccacctctccagcaagacacgggggcaggcagtgtggcggactrggggggggggatttttttgtttgtttgtttgtttgatatttgagacaggaaaagattgagggagagaactatggccagaaaggaaaggcacatcaaaagtataatagctccccctctcccatcttgcatgcttcttgggtgcgctgaaggaagcggcaggcagcagcggcggcgttacgatgcaaatcacaaagcgagcaactttcactgccgctgtggctatttttgatttctatcctgagaacgggctttttttggtgcgtgatgccttccccccagccctttccatacgactgttag

SEQ ID NO: 65126 - DNA, 600 bp, Chicken  19866894331841_1
caaccaggtcccttctttgtttccagagccctcaccaaaggttgccgctgtgtggaactggactgctgggatggccctaactcggaacctatcatttatcatggctacactctcacctccaagatcctcttcagtgatgtcattaaggccatcaagaactatgctttcaaagtaaggatgagagtcctgagactctctaagatttctcatactataactgatagcagatttctgctctcccagcagagagcttaaaattgaatacttcaccttaactttcctatgagtagaagatgtgtkcttctgtctaggcatccaggttctgctttgtcaacagatccattcctggaagtttctggtcaggcagggcacagcctgaggatgagtttaagtctgtactagcacagctagatattgaacccccctgcaatgaaaatgttgcccaacttcttgaacatacatggtaggaaatgcaagcaaacctttggtttacttggctttgatgcctcagggtctgttcttacactgaasgaattatatgtgtgtgtattggagggactgatgcaaaagactgcttttttatccttttttttatcccta

SEQ ID NO: 65127 - DNA, 600 bp, Chicken  19866894331841_2
ctgctctcccagcagagagcttaaaattgaatacttcaccttaactttcctatgagtagaagatgtgtkcttctgtctaggcatccaggttctgctttgtcaacagatccattcctggaagtttctggtcaggcagggcacagcctgaggatgagtttaagtctgtactagcacagctagatattgaacccccctgcaatgaaaatgttgcccaacttcttgaacatacatggtaggaaatgcaagcaaacctttggtttacttggctttgatgcctcagggtctgttcttacactgaasgaattatatgtgtgtgtattggagggactgatgcaaaagactgcttttttatccttttttttatccctactgctgacacactcatttccagagaaaacaacaatggagtttataccagttgctataggatgttaaaatttcagagttcaattatgatggatgttactgtcttgtcctagacttcgccataccctgtcatcatctccctggagaaccactgcagcctcgagcagcagaaggtcatggctcagcacatgacaacgatcctgcaggacatgctcctggtcgccccgattgatg

SEQ ID NO: 65128 - DNA, 600 bp, Chicken  19866894331842_1
tgctttattgcaacaatatcaattcaaacatctttttgttttatggcttctcccactgggacattattcagtattttgtctttattttcatccagaatggcacacacagcatttactacacactattcaaatttgatgctgaagttaccaatttattcatggttctacatagcactcattattaggatgctagatctttgtattattttaacccctgatctcaagagttcatcctttgcttcttattcctcactatctttgcacacctatttgtatcttctatttccaatctcactcctrcaacgcrtgtctcctcttcccacttcccggttttttagtccccatgtatcccaacaagtttgttcagaccttgcctttcctattcattctcaggcctagaacctaagcaaataacccaggccgcacagagtgccttaagggcccttaatgcagcttttgtgtgagtatatggacaccaaaaaaacgtgttaaaatgctgtgcattgtaagaccataaagcactggagagaaggagagaaagctgtgagtttccaccacaggcaacttctagattaagtttacctttatgtatctaaattt

SEQ ID NO: 65129 - DNA, 600 bp, Chicken  19866894331842_2
ttgcaacaatatcaattcaaacatctttttgttttatggcttctcccactgggacattattcagtattttgtctttattttcatccagaatggcacacacagcatttactacacactattcaaatttgatgctgaagttaccaatttattcatggttctacatagcactcattattaggatgctagatctttgtattattttaacccctgatctcaagagttcatcctttgcttcttattcctcactatctttgcacacctatttgtatcttctatttccaatctcactcctrcaacgcrtgtctcctcttcccacttcccggttttttagtccccatgtatcccaacaagtttgttcagaccttgcctttcctattcattctcaggcctagaacctaagcaaataacccaggccgcacagagtgccttaagggcccttaatgcagcttttgtgtgagtatatggacaccaaaaaaacgtgttaaaatgctgtgcattgtaagaccataaagcactggagagaaggagagaaagctgtgagtttccaccacaggcaacttctagattaagtttacctttatgtatctaaatttaaataga

SEQ ID NO: 65130 - DNA, 599 bp, Chicken  19866894331843_1
  misc_feature (1)..(137): n is any nucleotide
nnnnnnnnnnnnnnnnnnnnnnnnnnnnnnnnnnnnnnnnnnnnnnnnnnnnnnnnnnnnnnnnnnnnnnnnnnnnnnnnnnnnnnnnnnnnnnnnnnnnnnnnnnnnnnnnnnnnnnnnnnnnnnnnnnnnnnnnnctgcccctccctgcttggttcgcttgctgaagctgtaccctcaggatgctgacatctgtatcttaataatccagaagtcctggggctgccaggaagcagtataaatcataagactgcatacctgtctagcacctctcacttgagaatccaaagctgtctgctrcgtactgttcatctgcgtaccactcgtaccagctggggtttgccgttcctgtttttgcagcctgggaagctgagacacaaagtaggaggatgttctgtccaaagttgaagtgattccagaaatacggtcaacttccaagactatgagattctgtccctctgtgctatatgtaatttgtccccagraggaaagggttgagtggtttcaagcagtatttcatttgcagtgatccacggctattttggcatcccagtaattccaatctgagacaaacaagcaattgcaagatttctccaaag

SEQ ID NO: 65131 - DNA, 600 bp, Chicken  19866894331843_2
ctgacatctgtatcttaataatccagaagtcctggggctgccaggaagcagtataaatcataagactgcatacctgtctagcacctctcacttgagaatccaaagctgtctgctrcgtactgttcatctgcgtaccactcgtaccagctggggtttgccgttcctgtttttgcagcctgggaagctgagacacaaagtaggaggatgttctgtccaaagttgaagtgattccagaaatacggtcaacttccaagactatgagattctgtccctctgtgctatatgtaatttgtccccagraggaaagggttgagtggtttcaagcagtatttcatttgcagtgatccacggctattttggcatcccagtaattccaatctgagacaaacaagcaattgcaagatttctccaaagtaagttaacattcctcgtctacgagtgggtgtcagtaatatggtttgcaggagragtattgtatctacaaagtattgtatcttagggtcagtttggagcgatgcgaggtggggacaagtgttcgtggcagatctgaacgggggaaagaccctgctgtacttcagggggtggtgacagggctgatga

SEQ ID NO: 65132 - DNA, 600 bp, Chicken  19866894331843_3
tttgcagcctgggaagctgagacacaaagtaggaggatgttctgtccaaagttgaagtgattccagaaatacggtcaacttccaagactatgagattctgtccctctgtgctatatgtaatttgtccccagraggaaagggttgagtggtttcaagcagtatttcatttgcagtgatccacggctattttggcatcccagtaattccaatctgagacaaacaagcaattgcaagatttctccaaagtaagttaacattcctcgtctacgagtgggtgtcagtaatatggtttgcaggagragtattgtatctacaaagtattgtatcttagggtcagtttggagcgatgcgaggtggggacaagtgttcgtggcagatctgaacgggggaaagaccctgctgtacttcagggggtggtgacagggctgatgaaaacctgcccgtgggggctgagtggtcaaccccgggctgtccccaatgcgcgtggkgaccttctgagagccagggctgttcaggctctctcctggagagccataagcctctctagggcttttggctcttgatggaaaccacaggcaggccatgtcaaattgctagagt

SEQ ID NO: 65133 - DNA, 417 bp, Chicken  19866894331843_4
ttggcatcccagtaattccaatctgagacaaacaagcaattgcaagatttctccaaagtaagttaacattcctcgtctacgagtgggtgtcagtaatatggtttgcaggagragtattgtatctacaaagtattgtatcttagggtcagtttggagcgatgcgaggtggggacaagtgttcgtggcagatctgaacgggggaaagaccctgctgtacttcagggggtggtgacagggctgatgaaaacctgcccgtgggggctgagtggtcaaccccgggctgtccccaatgcgcgtggkgaccttctgagagccagggctgttcaggctctctcctggagagccataagcctctctagggcttttggctcttgatggaaaccacaggcaggccatgtcaaattgctagagtctacc

SEQ ID NO: 65134 - DNA, 600 bp, Chicken  19866894331846_1
tggcaccattccccttagattttagtttccttatatttattgcatcagtgtattgctttcacattcaataattaaccttgctagctaatatctgttataaagatttcagcatatgtttgaaataattaatgttaattgctgcatgaactttgggtgatccactaggaaaccgttcattccaaaaagaacattttccatttgagcacatgctcattaaaatacattaatctattaatccttgcacctttatgctgtttccctcttcttctgccaagaaaacaagaaaaaaaagtattatcycagagctaccattgattttgatttcatagggaagaattcaagggaatacattttaaaacttgggggctcgaatttccctaagggtaactgggcaaaaatacttataatgccagtgttatttcttttaattttcctaatgaattactatgttaagaattatcttaacaaagtccttatacttcatttatcacagttttaatactgtatatttcagaatatgtccccagacttaactttcttgtgcaaacaactggtaagagctgagaagcattgaaatcatggttaatttttataatttga

SEQ ID NO: 65135 - DNA, 600 bp, Chicken  19866894331850_1
cagcaggaagaacatctgagctgcaagttctgccccatgcctacatctctccaggcaacgtcttggatggcgtgagcacagcaaggaagagcgtgggtggaatagaagcataactttttagaattatagaattgtggaatcaggtatcagccagtgcataatgtgtccatgtttgaggagcaccctggcagattctttgggcaccttctgatcgtgagcagcttgcagaaggtaacggtgactggttaccttacaaaaaggtaaatggccaaactgactcaaaccaggaggaaaaggtgyataccctgatgagagcaatcagtctggaaaaggaaaaaaaaatggttgaaaggaggaaagaaacctctacaggaataccagcactgccaatggcactaactgggaacctcagtgacctgcccagggaaagcagaaagagaaaccagcactgaacagcgttccaaggggacgttgcttaacttctgcgtgaagatttctgcctgtgacatcatcaacttgacacagctgcaaaacattgctaaaaggcatgcttcattcatcttttgggttttaattgatgtgatgacagcaaatccaggg

SEQ ID NO: 65136 - DNA, 600 bp, Chicken  19866894331851_1
ataaagatcataagaattagcaaaataagaaagaaagcttggttaatggaggtctaaattaagatctgctgatgttacaacaaacatgcccagaactgcattctttttcatataccttccccctcagctctcacgggcacatcccattggagtccatgagtttccagtttgctcaagtattttttaatcctcttgcaacaagggtatctcttccttgcttcagacttctgccttcatttctgagtgttgccattcctgaaagccagtcttactcataaaatggaggcaaagaaggcagtwtctcagccttttccatgtcctgtgtaaacaggtgtaaacaggttccttatctcctccagcagtagacccacatgttccttagtcttccttttgtcacctaggtacttttctacttttcttacttttcttggcctttttttttttttttttttttgtattgacattcagattcaattccattaaggctttagcattcctaagttcatccagggtcacttgaataatgtcactgtattcttcccaagcccttctccaaattcatcttttcttctgccctccctgttcttggtttctgtgttt

SEQ ID NO: 65137 - DNA, 600 bp, Chicken  19866894331851_2
gtgtaaacaggttccttatctcctccagcagtagacccacatgttccttagtcttccttttgtcacctaggtacttttctacttttcttacttttcttggcctttttttttttttttttttttgtattgacattcagattcaattccattaaggctttagcattcctaagttcatccagggtcacttgaataatgtcactgtattcttcccaagcccttctccaaattcatcttttcttctgccctccctgttcttggtttctgtgtttgactttgcccaggatccatgcagggcacctygcatttctgtctgacttcctgttcattcgtttgtgcctctcttgagcttggagaaagtaattcttgaatattaacaagatttcttgggctcttcttccttctagggacttatcttaggacactctaccaagtaaatccctcaaaaggtcaatgtttgttctcctgaagtccagagcaatgagcttatactgctgtaaggatcttgatctccatcatttcatagtcactgcagcccaggttgcctttcaccttcacattcctaacaagttaccctttcttggtgagaatgaagtacagcag

SEQ ID NO: 65138 - DNA, 600 bp, Chicken  19866894331852_1
agcatgtcctttcctaacaaaagaacacccagagggaatagctaacactgctcccactgcttgtcccaacccaaaacagattttgcctggacaagggctatgttttcagtgatctgagttgcagctgtctctggcatgaggggtttgaaaccggcagcactgctaaaatggcacatattgtcctacttgtggcataccctgggtaagcaccaagtctctagcaggggctggcagaggtagaatgcttcatggtgctacaaaagcgccgtgatgacaggttcaaaaaattcggaaattggrgaaacatggaagtctctaagactaaaggggactaattaaggaacaggcttccgcactttggaaagagctccagattacttcaaaattaaccaggaaattaaaataaataaataaatctctacaagaattcacaatatgtgaggtaattgttggctggtgcagcattacatctacttctacagattcctttagtattaccctcacacagcataaggggaaggaaacactgttttcatcactgttgatcctttcactgatcccagaacacagacgtttcgcttcttagaaatatggggttat

SEQ ID NO: 65139 - DNA, 600 bp, Chicken  19866894331853_1
caaatttggcgaagtatcaaaatcttgaagatactatgttctaacacaaaacaggtcatcatgacacgcagtgcaggatctctaggcagcctataatgctgtttatttcctctgtcagtggtctctcaacgcagtatctacgggtccagggccaagtggccaaccagcactgacctcccttgcctttctgctgaaaaagatctgtaggtgatacatgaggctcagtgatgttatgaggggagcgaagaagtctggggaaatggaaggctggtaaggttactgctctagtaatgttcgacmaagaaatactgaaggtattatagatgtgaaagggttgaaaagatgcttaagaggattgttgcaattcttgctgaaggatttaggggatatgtcagagaatctgagggtgctacatttcaacattgactaccatgggataccacaattcatttgtaatgtctytcagtttcaatgataaattgaaattttgtacctttttaaaagttctaatagaaaattgatccgtttgtgcttcaaatctgagctaccttgaaatctctactctttatcttgaagaaggacactaatcaaacacaatct

SEQ ID NO: 65140 - DNA, 600 bp, Chicken  19866894331853_2
accagcactgacctcccttgcctttctgctgaaaaagatctgtaggtgatacatgaggctcagtgatgttatgaggggagcgaagaagtctggggaaatggaaggctggtaaggttactgctctagtaatgttcgacmaagaaatactgaaggtattatagatgtgaaagggttgaaaagatgcttaagaggattgttgcaattcttgctgaaggatttaggggatatgtcagagaatctgagggtgctacatttcaacattgactaccatgggataccacaattcatttgtaatgtctytcagtttcaatgataaattgaaattttgtacctttttaaaagttctaatagaaaattgatccgtttgtgcttcaaatctgagctaccttgaaatctctactctttatcttgaagaaggacactaatcaaacacaatcttcctgtccttaatccactttgttccaaagtcctatcatatcctggtctttaagagactacatataacagtatctcatgtcaagaacaagcattcctattattgtgctgcagtgaaaaatatatacctttgcagaaaatattaccaggcaatcatgtccatat

SEQ ID NO: 65141 - DNA, 599 bp, Chicken  19866894331855_1
  misc_feature (1)..(1): n is any nucleotide
nctaacacagcagatctgtatttagtcggcagttccatctgtgagaactttaaactcctgggcctccttctgctgttaagatgagcagctcaatttgctgttgctggtcacaagccactctcttgttctgatgtaacatgaatgtcctcctacatttttgttgtttaaccatatttatctctgaatctggagtagttctataatactaagaatgtatttctgtctaaaatacaccttctttttttcctctggtaactctacacttaggtctttaaatcctttcagctgttaataagaackgcacaaaaccttttaactaattctaatgagttaatcacatacccatattttaattctttccccagtctgtaagggtttagattcctatcttggaggcatgaaacaatcaatttcttgctgaattaactgctcagtcctgtggtgcttcacagggtaggaaacaaatatcacaagtggagaagtatacytatttttcatgtaaagcttcagttttctcccaaccaatatagaagtatgcataaagcaactaccataggtactttaaaactgcaaaggcattctyatctcttctgtttaag

SEQ ID NO: 65142 - DNA, 600 bp, Chicken  19866894331855_2
ggagtagttctataatactaagaatgtatttctgtctaaaatacaccttctttttttcctctggtaactctacacttaggtctttaaatcctttcagctgttaataagaackgcacaaaaccttttaactaattctaatgagttaatcacatacccatattttaattctttccccagtctgtaagggtttagattcctatcttggaggcatgaaacaatcaatttcttgctgaattaactgctcagtcctgtggtgcttcacagggtaggaaacaaatatcacaagtggagaagtatacytatttttcatgtaaagcttcagttttctcccaaccaatatagaagtatgcataaagcaactaccataggtactttaaaactgcaaaggcattctyatctcttctgtttaagtaataaagccattttgtattgctaaatctgaataatacctacccagcgtattttaatcaaacacaagcacatatgcaagtgaatcagcattaagcattaccttccattttaacttggtttcttctgaaatttaaatttaatattgctttactttcaactttcaatatttgcattatataagctattttt

SEQ ID NO: 65143 - DNA, 600 bp, Chicken  19866894331855_3
agctgttaataagaackgcacaaaaccttttaactaattctaatgagttaatcacatacccatattttaattctttccccagtctgtaagggtttagattcctatcttggaggcatgaaacaatcaatttcttgctgaattaactgctcagtcctgtggtgcttcacagggtaggaaacaaatatcacaagtggagaagtatacytatttttcatgtaaagcttcagttttctcccaaccaatatagaagtatgcataaagcaactaccataggtactttaaaactgcaaaggcattctyatctcttctgtttaagtaataaagccattttgtattgctaaatctgaataatacctacccagcgtattttaatcaaacacaagcacatatgcaagtgaatcagcattaagcattaccttccattttaacttggtttcttctgaaatttaaatttaatattgctttactttcaactttcaatatttgcattatataagctatttttatttcctgcatacatacgtaaaactaaaagtctttttctgtataaggcaaaatcaagtgaaataaattttattaaacgttgcaatgttggcaact

SEQ ID NO: 65144 - DNA, 439 bp, Chicken  19866894331856_1
atgcaggacaagagctagggaaatgaagagcctaggaaactttctctgttaattaaaatcctgttttcaagtagctgcctctggcaacagggaatatagtatacagcactggaagggatttaggagcaggtttagaactggaatggtgctacttggatgaaagcaccgtctttttttactacaaaggaagaaaaacaagaagaccgtggtttaattagcccactagtgtaataacccatctgggaatgttactgttttccttaagcctctctcctctttggaggactgtgtcaacttccytctgctagggccctgaggatacaggatcagagtggctgaggttggaaggggcctcaggagaccatccagtacaactccccactcaaagcagcatccactagagcagatatcacaggagcaggactgtgagcagattgat

SEQ ID NO: 65145 - DNA, 600 bp, Chicken  19866894331866_1
agtaatagtaaaagtctttcaaagcatcagtatatctccgctcaagttaagcatcaacatctattaggcttcagcaacatatcagtcagctattaattaccaccactgacctaagcttattgatccagtaatagcatccattaccaggatgagcagcttgtttcaaaagctacaggacccattctcatttccctaaatttccttaagaggagagccatccaggaagaaaaaaaactacacttcaaacctcttccagaacagcctactggaagtcaggcttcagatgtcttgggtcatagwttcagattctgcattagtagtatgataaggacaagatgctggaaacaatgaatcaattgtatcttaccaggagagttctagaactgaaaagatctgttgtagcattccaagcttatcatttcttattaagtcaggaaacaacgtgttacagcctaattcttgtgttgtccatggccacgtgaattttacttgtgctgttgtgctaatacttacatcaaccctgcagtccatcagacacagcctattctgctgccaaagctccccactggcaacatgctgaaacagcctgctggacaactt

SEQ ID NO: 65146 - DNA, 600 bp, Chicken  19866894331873_1
tgtgccgtatgcatcatttctcagcagtcaggggattgttttccctaggttattcattttatgttatctaggaaacagggaggtactttgtaagtcagtgtagtacttaactgcccaagtggaacttctctttaaaagaaatgtttgtcacataggacgtgcaaggtttgtgctcttgatcacaaaatattgggctgaattaaccagatggaggtgctattagaaataataatataataacaataatctgttcttttaatcctgtacttcttctctgctccttaaaaatatttttttttycaagtgattttgatctgcaaagattgcagttgtggcagttcgtgctctgccacagtgagcgtgagctgcagttcttgcaagagtcacttggtgggatactgcaaagttagcatcaaagccagaaaacgggttgaccagcatgactgcagcttaatgaaatgattctgaataatgcaacaaattggacctcagaagtgctttgttcagtgccatgaggcggcattcaggtgttcgcgtggtgtctacacgagtggctgtaaagccaagcagaggttgttagcaggtgctgaggacagtggt

SEQ ID NO: 65147 - DNA, 600 bp, Chicken  19866894331877_1
ctacatcatttatattacagcaaatgtaaattcaagttgtgtcatgctattagctataattggatacctcaaacttaacggacaatgctgcagtgaggctagaagatacagctgttagatttcttaagttgcagactcctttactcagagtttctttccaattctttcacatcaattgtaagaacccctttggaaatatgtaactgtcttctgggagctttaaatattcacttaaatcaatatgctgacaaggactgaacagcttgactgagtttgttaaattttcttatttgaaattcrcatcacacctatgagagaacagagtaagagctgctgcctgtcgcagtgctgtgtccacaaaatcattaatgttttaagcctggtgaataacccagcaaacttaccaactgctgagagagagatacttagcattaaaaccttcaatcatccttgtgagcatataagatgctttccccaaaaggtactagagcctcagaaaggggaaaaggactcaactgcacacagaatctagacaaccactgggaagggcttcagcagagcacagagatggagggtgagctggacgtggccagttgcagc

SEQ ID NO: 65148 - DNA, 600 bp, Chicken  19866894331890_1
gcctgaattgtgctctgcgtatacatatgagctgtgtcttattaaaactgttaatgcaaactagtggtcagtactgctttaactattattcagagctttgttagctaaaacgtgagtgacttgtgctgacataaccacagtaaggtagaagtgctgtgtaagcttgaaaatggagctaagtcagatttttatggttgtgcccctctaacccttgcatggtgtggttatcaaatatatgcaataatagtatatagtaacagtacaattatttaagtgggaaacaagcatttattacgtatytgatagatgacaatttatatcccaagcattgggtgaacacagaatacaatgctatactgatccattcagagcatcttcattcagcttgcatttggataggtctgtgcaagatactattaaactctcgtctgtattctctcacttcattttttatttttcctcttccctcttacaccacctggaggggatctctgtctttctcagacagaatgatgttgatcttgttctgtaggtggatagttagcgtgtcacgcagctctgacaagaagcctcgctcggtgttactgtgttcacacagaa

SEQ ID NO: 65149 - DNA, 600 bp, Chicken  19866894331892_1
ttctgtgtctctacttaaaactgtcagtatttaagactacggtttaacaatccaaacacttgcatttgaccaaggttgtgcaatggttaaccaccgtgaggcttgtgacagctacaaaacgtgtgacaagagaccatcagctttgctgcctgctgtgtacgtcaagcaagtccacagcatattccttacagctggattgaaacctgaaagtgaaatgaggtcactagaattacccaggccatgctggtgctatctgccaacttcagatccctcaaaagtcttttaggaaaaaaaaaaaamcaaaccaaaaagtgtttccagatcagcttacacctcagactaaatcagtcaagagaactccaatttccacccactgtcagaacaataattaaaaaaaaaaaaacaacaaaaaagcaatttggaaagtgtttcaagaaaataattttgcaccagaatagccttacgctaaagctcgcatgcgcacagggctgggaggatcagcttcctcttggccaggcccatttaaaggtcacttctggaattgttctgttgaagacagcaacagtgttatcaagacagagcaagcagcaggtggctgat

SEQ ID NO: 65150 - DNA, 600 bp, Chicken  19866894331898_1
tgtctgagccacaaaactgcaatgcacagtttttgtgcactcaccatcttcgggctcagccttcttgcggataaatgcctggcagaggagagatgatggcaaagaaaggggagatgagaaaaaagtgtccttctccgagaggaaatcagaaaggtgagaatcataactttcacacattttacccagaaatagtgatagcatagcacaaacacccttatcaccaaaacatactgaagttaatcattctcgtgtcagccccaccacttcagtgctaggactcctactgatctgtgccttaayattgaacaaatgtgcatctctgctgacaagtttgtttccccagcaagttccactgacgttctgtttttaacaatggaaccacaaaatcctgggtttctacttccagataagaagcagaactccaagagacactatctgcaaggcagaactctacccttctgcagggatcttctggcagctctgacaggctggaggccccggtgctgcagcaggagctcagtggggtagcaatggaggaggaaacctgaggagagcagtagttcccttcccatctcctgcccatgacctaaaagacaaaat

SEQ ID NO: 65151 - DNA, 599 bp, Chicken  19866894331899_1
  misc_feature (1)..(132): n is any nucleotide
nnnnnnnnnnnnnnnnnnnnnnnnnnnnnnnnnnnnnnnnnnnnnnnnnnnnnnnnnnnnnnnnnnnnnnnnnnnnnnnnnnnnnnnnnnnnnnnnnnnnnnnnnnnnnnnnnnnnnnnnnnnnnnnnnnnnaatgttgtgttattttttagtttggacagtttaaaacaccctacatctcaaaaacaatcttccctgttgcatattttcccattttttatcgaatttcccataaaggctgggaataacctctgtccgtggtgctcagtcaacagcttgagctgtaacttcagctcaggmtggcattatatagccagaatgctgcaaaattaagtctcagaagttctatcagctatatccaggacagtttaaatatcagaatcaaggttttcaaactaggagtgtcttgaccagcagaaaaccatcygacagactgaaagacacaaagagataccaaggaacagatgaaaaggcctgcaggaaaaatgtttaatccacttttgaagaaaagtaatgatatagtctgttacttcaaaaggaatattaattctttgtgtttgtattggaaccaccagtttgatggctcagttcatttgagg

SEQ ID NO: 65152 - DNA, 599 bp, Chicken  19866894331899_2
  misc_feature (1)..(5): n is any nucleotide
nnnnnaatgttgtgttattttttagtttggacagtttaaaacaccctacatctcaaaaacaatcttccctgttgcatattttcccattttttatcgaatttcccataaaggctgggaataacctctgtccgtggtgctcagtcaacagcttgagctgtaacttcagctcaggmtggcattatatagccagaatgctgcaaaattaagtctcagaagttctatcagctatatccaggacagtttaaatatcagaatcaaggttttcaaactaggagtgtcttgaccagcagaaaaccatcygacagactgaaagacacaaagagataccaaggaacagatgaaaaggcctgcaggaaaaatgtttaatccacttttgaagaaaagtaatgatatagtctgttacttcaaaaggaatattaattctttgtgtttgtattggaaccaccagtttgatggctcagttcatttgaggtagtctgtcaaacatcagagatatcctgggtaggttggtgttttggacagtacattttgttcacagaaatgcaactggctcccaaagcagaaagggttgtggagatgagtccttgggacataaaaaa

SEQ ID NO: 65153 - DNA, 425 bp, Chicken  19866894331899_3
caggaaaaatgtttaatccacttttgaagaaaagtaatgatatagtctgttacttcaaaaggaatattaattctttgtgtttgtattggaaccaccagtttgatggctcagttcatttgaggtagtctgtcaaacatcagagatatcctgggtaggttggtgttttggacagtacattttgttcacagaaatgcaactggctcccaaagcagaaagggttgtggagatgagtccttgggacataaaaaaacacttgggacataaaaatatcttgcacacttccaagaacaattcaaaaawcycagcctgccaaaaagggatgttttttgtttgcttttcttgaggctatccaaatttactaacagcacacacaaaaagaggtatttatttacccaaataagttgagcattcagtacagagcagca

SEQ ID NO: 65154 - DNA, 423 bp, Chicken  19866894331899_4
ggaaaaatgtttaatccacttttgaagaaaagtaatgatatagtctgttacttcaaaaggaatattaattctttgtgtttgtattggaaccaccagtttgatggctcagttcatttgaggtagtctgtcaaacatcagagatatcctgggtaggttggtgttttggacagtacattttgttcacagaaatgcaactggctcccaaagcagaaagggttgtggagatgagtccttgggacataaaaaaacacttgggacataaaaatatcttgcacacttccaagaacaattcaaaaawcycagcctgccaaaaagggatgttttttgtttgcttttcttgaggctatccaaatttactaacagcacacacaaaaagaggtatttatttacccaaataagttgagcattcagtacagagcagca

SEQ ID NO: 65155 - DNA, 600 bp, Chicken  19866894331910_1
ctgcagtgtaggataaggtcatagcgtatgtgatgcatgcaagacccaagagacagacaagggcattgcttgcttaatggggaaaggaatacattttttagtgcccatatgagagtcagacttacatcttaaaagttttctcaaagcagctgcttcttggggtgtttttagggctggggatatgtgccctgatggggtgagacttgggctatttcagttaaagtgactgttcttttccagttccatccttcttatttgtggtgagcacagaggcttgaggctttatcagctccttcaccmttttcctgctgtgaaatgtgaatagtactggtgcagaatgatggaggggctcagcttcacacagtgttgtggtgcatcactgatgcagaattaacatgtagtaattcaacatttttcttgcttggcattattctgtattttttttgccttatattctatggattcttattttttgtattttttaactattgggaacagaagtgaagaagaacatcataatttccatctcttcttccctctcttaatataggttgtcacctccttatggagtcgaggatgagaagatgaactttaaggctc

SEQ ID NO: 65156 - DNA, 600 bp, Chicken  19866894331910_2
ggattcttattttttgtattttttaactattgggaacagaagtgaagaagaacatcataatttccatctcttcttccctctcttaatataggttgtcacctccttatggagtcgaggatgagaagatgaactttaaggctctaggaaacagaacgtgatacaaatttgcttttattttagtcacattttcaagacagtctaacgatgatcagagggctggagcacctcccctacgaggacaggttgagagagctggggctcttcagcctggagaagacaaggctccaaggagaccttatrgtggccttccagtacatgaagggggcctacagaaaagctgggggaggactttttatcatggcatggagcaacaggatgaggggaaacggttttaactggaagagggtagattcagattaggtatcaggaagacattcttcactgtgagggtggtgagacactggaacaggttgcccagaaaggctgcgaatgccccctacgtggaggcattcaaggactgtctgaaaggggctttgggcaacctggtctagtgggaggtgcctctgcctagagcagggggttggaactagctgatcttaa

SEQ ID NO: 65157 - DNA, 600 bp, Chicken  19866894331922_1
gtactgtcagattttggagaagcacctcctgggtgtttgcctcctcacttccagctggggcactccatgtcctctggtctccaggagcacacagccacgtgccccagggctgctgaccttccccagcctctgtgtttctgatgaaaccagtctcaccaaaggcttttcccccatcactggtgatgtggaggagccgctggcagcctgctgtgccccactgggtcctgctgtgccactggggttgggtgctgcagaatagaacagccccctgtttgctagcagtggctccatcacaagtgycttgtgctgaaacgttcagtcagatttttgggagcaggcagcaagttcattgggaaatcagaaactagctcaagtctgcattagttcctaatgagagctctgccataacctctgagagcactgggaacacaagctcatttttcccctactaatgatagcagccagcttcctggcttccgagaaaggaaaaaggcaaaatacagcacatagccatacagcttctcatgagggggtagtcttgttggcttaaaagtgagacaagtcaggacaatctgacccatattatgttagatgcttaca

SEQ ID NO: 65158 - DNA, 599 bp, Chicken  19866894331924_1
  misc_feature (1)..(216): n is any nucleotide
nnnnnnnnnnnnnnnnnnnnnnnnnnnnnnnnnnnnnnnnnnnnnnnnnnnnnnnnnnnnnnnnnnnnnnnnnnnnnnnnnnnnnnnnnnnnnnnnnnnnnnnnnnnnnnnnnnnnnnnnnnnnnnnnnnnnnnnnnnnnnnnnnnnnnnnnnnnnnnnnnnnnnnnnnnnnnnnnnnnnnnnnnnnnnnnnnnnnnnnnnnnnnnnnnnnnnnnnatttccctttttggagtccttggaagggaaggaagagggttcctttgggttctggtggagcacccctggaaaatgctcctgccrtcagcagatgtcagcaacccgacagatccttccgaaggggagtcactgcgttgcagagctgagaggtgtgagtaggagggcaaatgggcacaacccagccagtgtgtgcaaggcagtaatgccaggccaggttagaagtgatgctttatcctgaactcccaggctgagcaggcaagcagaarcccagcttaggagctgcagctcccaggagctctccccagtggttcctctaaaggttaattctcctttggaagtgcctagaaggaaacctggagcgttcagagagaattaggctcggt

SEQ ID NO: 65159 - DNA, 599 bp, Chicken  19866894331924_2
  misc_feature (1)..(34): n is any nucleotide
nnnnnnnnnnnnnnnnnnnnnnnnnnnnnnnnnnatttccctttttggagtccttggaagggaaggaagagggttcctttgggttctggtggagcacccctggaaaatgctcctgccrtcagcagatgtcagcaacccgacagatccttccgaaggggagtcactgcgttgcagagctgagaggtgtgagtaggagggcaaatgggcacaacccagccagtgtgtgcaaggcagtaatgccaggccaggttagaagtgatgctttatcctgaactcccaggctgagcaggcaagcagaarcccagcttaggagctgcagctcccaggagctctccccagtggttcctctaaaggttaattctcctttggaagtgcctagaaggaaacctggagcgttcagagagaattaggctcggtacaaaaggtctttaagtttgtggggggtttttttttcgggagtctttgctttttaaatgttaaaatttgctcctattcatttccttttttttgagaaataaaataaaatggggggaaaaaaaaatcctaagcttgccccccagtgcaagggcacaaagagagagccgttcctacagtcagta

SEQ ID NO: 65160 - DNA, 600 bp, Chicken  19866894331925_1
aacctggctgagactcatctgttcttacccttttattttgggtatctctctgatttgtagtggtgcgttttttcaaaccagtacacagtgagtcatgagggccactcaaatagcagcacagagttcatctccaggctttgattttttttttttcagtttttccccctggaaacactgttcattcatagctatgcaaaatggctctcactttggctattttgggctttaaaagatgcagaagcttaaatctgaactagtgacgtgaagcccctgcagctgtggaagagaacaaacccccgrtgatgttgaatttcttctctgtctcagcctgagatgagtctctgcagtggracagctttcccctgaggaagcccccggaggtgccctcagcttagaggctgacatttcgtcctggtctgtaggggcaggactgtaaatctgtgtcttgtaaataccttcctaaagcttgcggttctttccctaaaacttgcagtttaaaattcagagcaggagaagtgctgctgcattactgtgtgatggctgggagacatgtagtggtgatggaatgcccccggggtggagaatatggctgtggaygtg

SEQ ID NO: 65161 - DNA, 600 bp, Chicken  19866894331925_2
gatttgtagtggtgcgttttttcaaaccagtacacagtgagtcatgagggccactcaaatagcagcacagagttcatctccaggctttgattttttttttttcagtttttccccctggaaacactgttcattcatagctatgcaaaatggctctcactttggctattttgggctttaaaagatgcagaagcttaaatctgaactagtgacgtgaagcccctgcagctgtggaagagaacaaacccccgrtgatgttgaatttcttctctgtctcagcctgagatgagtctctgcagtggracagctttcccctgaggaagcccccggaggtgccctcagcttagaggctgacatttcgtcctggtctgtaggggcaggactgtaaatctgtgtcttgtaaataccttcctaaagcttgcggttctttccctaaaacttgcagtttaaaattcagagcaggagaagtgctgctgcattactgtgtgatggctgggagacatgtagtggtgatggaatgcccccggggtggagaatatggctgtggaygtgcaacttctgtgccttataaggcatggtgagcattctgagctctttgtgcac

SEQ ID NO: 65162 - DNA, 600 bp, Chicken  19866894331925_3
cgrtgatgttgaatttcttctctgtctcagcctgagatgagtctctgcagtggracagctttcccctgaggaagcccccggaggtgccctcagcttagaggctgacatttcgtcctggtctgtaggggcaggactgtaaatctgtgtcttgtaaataccttcctaaagcttgcggttctttccctaaaacttgcagtttaaaattcagagcaggagaagtgctgctgcattactgtgtgatggctgggagacatgtagtggtgatggaatgcccccggggtggagaatatggctgtggaygtgcaacttctgtgccttataaggcatggtgagcattctgagctctttgtgcacagggctgtgtgtacagcattggaccagtgagcagacatgggtacctgcactgcctgcctttgccatgtgatgtttttggtggtcagaagcctctgcagactctcatttattgttttttttccaattgttttttaatctctgcattaggaagatttactgatttggggcatgggtgtgagtaaatggattcctgacttgttttttgtgggttaaatattgctgctgatggtagcagtatcctttctt

SEQ ID NO: 65163 - DNA, 600 bp, Chicken  19866894331925_4
tttccctggcagtccttgattatggtgtttgctcatttggttcactcacaactggaaccactcctcgagttcctgtgcagtctccccggaccaacaggcaagcctgccctggagtttgtgatggctgaatggatgagcagacagcacctgttctatgggcagtatgaaggcaaagtcaggtaggatgctctgtaagctgcacacgtgccttaatcgcagctgactgatcatccccttgcaattaaacatgctgtgtgtgagggaagggggagctggttcacacttgtagtgctgcacccrcattgagcaaaatgaattattttcctgcgctgtcagctcggttcaggagagctgtggtaattggagcaatccctgatgttcctctgagtgctgctactgctgccctgtgttctgtgctggaatgggggcacccgggtgggaaggggcgtctcaagtgagcatgggactggttgtgacattacagttacatgagcaggatgagaattgtttctggacatgaaattctcattataaactgcagtagaaggtcagggcattgtagagggttttctaagagaatttcatcatttctcattattt

SEQ ID NO: 65164 - DNA, 600 bp, Chicken  19866894331927_1
tctatggcatagagaatgtagcgccctattctaagctatgcagcattatttcctacaaaatgctttatataacactacttcaaaagccagaaatatttcctaactacaagccacactttctaaaagctaattaaagtgctctaggattgcaggatgtataacgccagaaaacagggaaatgttaacagtggtggtaagaggatcacaccgaatgctgatgtagtgattcctacataagtctacccaattcttcagctgcagtacgcatttactgcatataaattcttcactcagcacagrcagtatgmagttagccctgttccttgagaactcagccccttatctgtatgcagactgcttttgttctgagcctttcttcatgttctccctctcttcttaattaacagaaaacagttatgaatattaaagaagaaattaacaacagtgtaaataatttctgggtgtttgtagattccatatttagtttttaattaacccccactggtttcaaaaagctgtttaagagaaagatatactttcaaaatttcccttgtgtttaaaaaagaaaaggaaataaggtaaaactgtaaaacagcagct

SEQ ID NO: 65165 - DNA, 600 bp, Chicken  19866894331927_2
atagagaatgtagcgccctattctaagctatgcagcattatttcctacaaaatgctttatataacactacttcaaaagccagaaatatttcctaactacaagccacactttctaaaagctaattaaagtgctctaggattgcaggatgtataacgccagaaaacagggaaatgttaacagtggtggtaagaggatcacaccgaatgctgatgtagtgattcctacataagtctacccaattcttcagctgcagtacgcatttactgcatataaattcttcactcagcacagrcagtatgmagttagccctgttccttgagaactcagccccttatctgtatgcagactgcttttgttctgagcctttcttcatgttctccctctcttcttaattaacagaaaacagttatgaatattaaagaagaaattaacaacagtgtaaataatttctgggtgtttgtagattccatatttagtttttaattaacccccactggtttcaaaaagctgtttaagagaaagatatactttcaaaatttcccttgtgtttaaaaaagaaaaggaaataaggtaaaactgtaaaacagcagcttggcattg

SEQ ID NO: 65166 - DNA, 599 bp, Chicken  19866894331929_1
  misc_feature (1)..(189): n is any nucleotide
nnnnnnnnnnnnnnnnnnnnnnnnnnnnnnnnnnnnnnnnnnnnnnnnnnnnnnnnnnnnnnnnnnnnnnnnnnnnnnnnnnnnnnnnnnnnnnnnnnnnnnnnnnnnnnnnnnnnnnnnnnnnnnnnnnnnnnnnnnnnnnnnnnnnnnnnnnnnnnnnnnnnnnnnnnnnnnnnnnnnnnnnnnnnnctttggtagcccaagtatttaaatactattacttaaaatgcattcatcagcaatggcattctttgttcattgccaaacatgcacttaaatatacaagagctgtcttattcrtatgcagtattttttacctaaaattagtgcagcttctttccatagttttaattaaacaattatgccgatgctttcaagacccagaagtcatatttgttactgagtttcttaaaaactttttacttaaagttatatcaaactcattcatgacttagtttttaagaaagctttcaagaggaagttgtgtatgttagtcctcaattaccagaagatatggatctgaaaattaaattagtatacttgagttggtgacttctatctgaaagggatgatgataataaagacaaaaatataaaatt

SEQ ID NO: 65167 - DNA, 600 bp, Chicken  19866894331934_1
cctccccagtgcaatcattatctcttatcctataatttcaggtatctacacctactgctgcatcgcctttgccttacagaaaatagtgctggcctgcaggacaacagactacttgagcctaaaatgaagtgtattacatgcaatatttctaccataaccaggagttcatttgatctcagtgtctcacacaaatcccttctcctctctgcatctcagctttgtcatctgcaaaactttgcagagtatatgaacaaaaggcactgcagaaatgcagaaagtcgctgagcagaatgggaacaytggggccaagcagacaattgcctcagatttcccaaagatggttatttattcattctcacattgtttcaggagcaccaagaagccttaactgtgataaaggtccaacagttgccaactgagtacttttctttaatcacatttgatgccgttcttaaagcagtctgtcagcttctggagtcattcgattaaacacaagtatgacttcaaagcaaacaaacaagggatacatttctatttgtttgtttcagtgtttctaagtggtgttttgttagaattttcagcgtgaaggaaattcacggc

SEQ ID NO: 65168 - DNA, 600 bp, Chicken  19866894331942_1
ttgcaagactttgaagaaggtgatgtctcagaacatgaggcaggggacagaggagaatgtttggcactactgacactcacattgctctatcaggaaaagctacagaatggttgaacatatctggaagttctggcactaccctggtgtgatacctcctgcaatgagacttctctatggtgctcagtgactttttctgaagtaccactccgtttcaccagaactgttcatcaggtagtaattggaaaacaataaaaaacaacagtagcaaaaacatattaaaacaaattctgtagaaaaaayatactctcagatatacaaaagatatatttgaataagaaaatctaaaaggaatgacactggaaactatgagataatagtggtgtccagtgaagaaaattacaagaagataagaagattctttatcaggtaagagatttgataaaatcctagaacagatttagtgttgttatgctattgattagagatgagcctatactggtacctcttctcgagttgacttgagcacagttttgtcttaatgtgtctgtatgacttactggtaataagttttttagtgaaggagtatagtattatgtctgc

SEQ ID NO: 65169 - DNA, 600 bp, Chicken  19866894331943_1
gaaattcctttgtgaaataataaggacattccaaacaggtttatcgcagaagctgccagcagattcatttagtgctgatcaatctgtccaaattatctctattcacacactcacctccattgtgagaggaaaaagaagcacagcccagaaaaacatataaacaaaaaaataaatcccttttcctgtgctttgacaaaagcaaaactatttcctcccagagaagccacagagaagtaggtgtctaatggaagaagtgcacgtcaggcagaagtctcaagggtattgagggtgacataacgyttccacagagccaagcagagttatatgccaaaacttttggtgtcccaaaactgtgcaatccttctatgcttttatgtgggagactgttttgcacagggagcccctctgcatgcctcagaccatggggaaattatgctctgcagtccttggctgtgttctcttggggtgttgctcctggggttcacctccatatcaaaagatcttccccctgcagcatctctgtgtccagacaccatcatcagctagagagattagctgcctcatgccatcagggctgtgtcaggcataaggtttgcagcc

SEQ ID NO: 65170 - DNA, 600 bp, Chicken  19866894331954_1
cagaaggagtcgtggtatggttacaaaattgccattactttaatggattaatgtttttcagacttccctacattaatctgtgagcagtgaggttgaatgcaaattgcaaataaagattataatcaaggataattgatttttttttttgtagatccgtttgttatcctgtcttttccagcccaaacctcttgtcacagtatagtcattaaaataattattactaagaaagcagtctcaaaaacagtgtaaaattcttataatacttacttgaattctgatcactatactctaggagcaaayttaaatatggtagtgagatcatccatgagttgattttactaatgctatgttcattagagctgtctaaaggtctgaacccctctattttcccatttcataaagtgagaaacaaagagaagtttcttttcttyaaaaacagtcatctaatttatgttgtgatttccaatgacaastgcactggaaccaaagaaactgccattttatgacagtgaaaacgaaaaaaagaatacctctccctgggaaatcaattacataaaggattacacctgtaaaacactgcatttttaatatctttaatat

SEQ ID NO: 65171 - DNA, 600 bp, Chicken  19866894331954_2
attgatttttttttttgtagatccgtttgttatcctgtcttttccagcccaaacctcttgtcacagtatagtcattaaaataattattactaagaaagcagtctcaaaaacagtgtaaaattcttataatacttacttgaattctgatcactatactctaggagcaaayttaaatatggtagtgagatcatccatgagttgattttactaatgctatgttcattagagctgtctaaaggtctgaacccctctattttcccatttcataaagtgagaaacaaagagaagtttcttttcttyaaaaacagtcatctaatttatgttgtgatttccaatgacaastgcactggaaccaaagaaactgccattttatgacagtgaaaacgaaaaaaagaatacctctccctgggaaatcaattacataaaggattacacctgtaaaacactgcatttttaatatctttaatatactgagcactgtataaagcatgtttttcattagaaaaaaatattaaagatgactataaaatttccataagtgcattcacttatgctttttatggaaatgaattttggaagcatcagcatttaatgctattt

SEQ ID NO: 65172 - DNA, 600 bp, Chicken  19866894331954_3
tccagcccaaacctcttgtcacagtatagtcattaaaataattattactaagaaagcagtctcaaaaacagtgtaaaattcttataatacttacttgaattctgatcactatactctaggagcaaayttaaatatggtagtgagatcatccatgagttgattttactaatgctatgttcattagagctgtctaaaggtctgaacccctctattttcccatttcataaagtgagaaacaaagagaagtttcttttcttyaaaaacagtcatctaatttatgttgtgatttccaatgacaastgcactggaaccaaagaaactgccattttatgacagtgaaaacgaaaaaaagaatacctctccctgggaaatcaattacataaaggattacacctgtaaaacactgcatttttaatatctttaatatactgagcactgtataaagcatgtttttcattagaaaaaaatattaaagatgactataaaatttccataagtgcattcacttatgctttttatggaaatgaattttggaagcatcagcatttaatgctattttagattaaagagggtacttagaatttcactaacacgctcaaa

SEQ ID NO: 65173 - DNA, 600 bp, Chicken  19866894331957_1
tttttgctcgctttgcaggcacaaagcgtggccgcgtgtcctcaggtggtgtcaccgagtcccccggagccctccccaaacacatccgctctgacacagacttctctcctgtgaagagtgccctggggtgagcgggctgcagtacacctccctgctgcgtgctgcctctctgcagtgtgggagtgttcttcctgcactgcaacagctggcataaaccagctcgaggcacacataaccccacactcatcctttccctacttgtgtatgcagagccctaaagaggcgcagtcctctcagccwtcccttttgcaatctcatctgcttgccttgcagtgaggacaaggcgagctactccacrtcrcagcctgagcccggcaccggcggcgcgctgtgggacagcagcacgggcagcatcgaccgcctggtgcagggcatcagcttctcccagcctgcctgccctgagcacatgctgctcaacagccagctgctcggcacgccaggctcctcccaggtgtgctcccttaggatttggtgtgcagcattgcaaccttttagatgcagcgtttgtaatgccaggatgtaaccttgcaacctctgggg

SEQ ID NO: 65174 - DNA, 600 bp, Chicken  19866894331957_2
gtcccccggagccctccccaaacacatccgctctgacacagacttctctcctgtgaagagtgccctggggtgagcgggctgcagtacacctccctgctgcgtgctgcctctctgcagtgtgggagtgttcttcctgcactgcaacagctggcataaaccagctcgaggcacacataaccccacactcatcctttccctacttgtgtatgcagagccctaaagaggcgcagtcctctcagccwtcccttttgcaatctcatctgcttgccttgcagtgaggacaaggcgagctactccacrtcrcagcctgagcccggcaccggcggcgcgctgtgggacagcagcacgggcagcatcgaccgcctggtgcagggcatcagcttctcccagcctgcctgccctgagcacatgctgctcaacagccagctgctcggcacgccaggctcctcccaggtgtgctcccttaggatttggtgtgcagcattgcaaccttttagatgcagcgtttgtaatgccaggatgtaaccttgcaacctctggggtacagctttgcagtatttctaatcctaaggggctgctttgcaatactggagatgctgc

SEQ ID NO: 65175 - DNA, 600 bp, Chicken  19866894331957_3
ccccggagccctccccaaacacatccgctctgacacagacttctctcctgtgaagagtgccctggggtgagcgggctgcagtacacctccctgctgcgtgctgcctctctgcagtgtgggagtgttcttcctgcactgcaacagctggcataaaccagctcgaggcacacataaccccacactcatcctttccctacttgtgtatgcagagccctaaagaggcgcagtcctctcagccwtcccttttgcaatctcatctgcttgccttgcagtgaggacaaggcgagctactccacrtcrcagcctgagcccggcaccggcggcgcgctgtgggacagcagcacgggcagcatcgaccgcctggtgcagggcatcagcttctcccagcctgcctgccctgagcacatgctgctcaacagccagctgctcggcacgccaggctcctcccaggtgtgctcccttaggatttggtgtgcagcattgcaaccttttagatgcagcgtttgtaatgccaggatgtaaccttgcaacctctggggtacagctttgcagtatttctaatcctaaggggctgctttgcaatactggagatgctgcttt

SEQ ID NO: 65176 - DNA, 600 bp, Chicken  19866894331957_4
agcccggcaccggcggcgcgctgtgggacagcagcacgggcagcatcgaccgcctggtgcagggcatcagcttctcccagcctgcctgccctgagcacatgctgctcaacagccagctgctcggcacgccaggctcctcccaggtgtgctcccttaggatttggtgtgcagcattgcaaccttttagatgcagcgtttgtaatgccaggatgtaaccttgcaacctctggggtacagctttgcagtatttctaatcctaaggggctgctttgcaatactggagatgctgctttgcaatgyttataatactggggctgagggtttgcaatacctcagatgtttggggtgcrgttttgcaggactggggatgccgtttcccactgttctgtagcaccagcgtgcagcccgcaacctttaccacaagggggtgcaacttgctaacattgcacacggatgtgcagtagcggggatacaacttggtgcgccttcacgctctggggctgcagggaccactttgcacccacacagtggggctgaggagtggggtgcgggcgcagctttgcagcactcctgatgcactgtgtgctgcagagcccgtgg

SEQ ID NO: 65177 - DNA, 600 bp, Chicken  19866894331957_5
cgcctggtgcagggcatcagcttctcccagcctgcctgccctgagcacatgctgctcaacagccagctgctcggcacgccaggctcctcccaggtgtgctcccttaggatttggtgtgcagcattgcaaccttttagatgcagcgtttgtaatgccaggatgtaaccttgcaacctctggggtacagctttgcagtatttctaatcctaaggggctgctttgcaatactggagatgctgctttgcaatgyttataatactggggctgagggtttgcaatacctcagatgtttggggtgcrgttttgcaggactggggatgccgtttcccactgttctgtagcaccagcgtgcagcccgcaacctttaccacaagggggtgcaacttgctaacattgcacacggatgtgcagtagcggggatacaacttggtgcgccttcacgctctggggctgcagggaccactttgcacccacacagtggggctgaggagtggggtgcgggcgcagctttgcagcactcctgatgcactgtgtgctgcagagcccgtggcagcgcctggtgaggcggatgacgcgcttcttcaccaagctggacgccga

SEQ ID NO: 65178 - DNA, 600 bp, Chicken  19866894331972_1
acaagtgcgggcaaaccaagtggtttgcagcccccggcgtttcccacctctgacattttcctgactgcttgatctctgaatgtggcatggcaatgtcatctgttggggttaattctttaaatgagcaaaacagcagatttatgttgttgatccttatgctcgtgcatagtttgcatcgcccctggccccagccctgcaccaggctctgctgctggcatggcaggttgcagcagtgttctccagcttggctctagtgctgttaaaggtgctgttagtctatatttaagcagtggaagttcrgattttggtgactaaattcaatcagagaacaacttaaggattcttgtgacatttaccatgttacaaaacacagatgtagtgctgccagaaagggtctgtgggaggaattatacatttccaacttgtctttttccaacctttttcttttttttctttccctccaaaattgtaattaaaaggctatggtgttgccttttgtttttgatagtttttctggattctgtttctatctgtcttttaagctgtgatttacacaactgttttcttggtaggagatagtcctgtgatttttccatttat

SEQ ID NO: 65179 - DNA, 501 bp, Chicken  19866894331972_2
tttggtgactaaattcaatcagagaacaacttaaggattcttgtgacatttaccatgttacaaaacacagatgtagtgctgccagaaagggtctgtgggaggaattatacatttccaacttgtctttttccaacctttttcttttttttctttccctccaaaattgtaattaaaaggctatggtgttgccttttgtttttgatagtttttctggattctgtttctatctgtcttttaagctgtgatttacacaactgttttcttggtaggagatagtcctgtgatttttccatttatttmtttccctaaatggctgcttgcatcaataagtccaggtttagtatccctaaatactattcaattaaggaaaataacagaatgcttcttaggtttgcagctgtaggtctgctgacttaggcacagtggttgtagtttttcttggggttactctttctcacatggccacttggcacagggactctctgttgctgttaggggtct

SEQ ID NO: 65180 - DNA, 600 bp, Chicken  19866894331984_1
gtaaaggaagaagtaattacacctagaaaagcaaagaatcggtagagacgattgaaacgcttggaaaggacgacgtttctccccccgttacctcaggtacggcagcacgggctgttacccgaggcgttctcctcacagaaacaccgagacgcagcacacaaagatgccacgttattaaaagggaccccgcacggccgggctgcccccggctgaggagggctcggcccacccgggtgctgccctgcgtgggtgcagcgggcagctccccctccgttcccgcgctcccccgggaccgccccyacagcgctcaccacgaggccgagccctgctggggccgagccatgagtgccgcggcctggagcgctgctgctgccggcagactggagaggagccgctcccgckcagcaccgctaatcacgtgaccgaaccacgtgaccccggccctacggcggcccgagaggggcgacgtgatcaacgtgagcgcggccctacggcggccgggaggggccgcatggcggcggcgggcggttggcgcgcggcgagcgggcggcggaggaggaagagaggggagaaggaggaggaaagcggagtcgcggtgct

SEQ ID NO: 65181 - DNA, 511 bp, Chicken  19866894331984_2
cagcacgggctgttacccgaggcgttctcctcacagaaacaccgagacgcagcacacaaagatgccacgttattaaaagggaccccgcacggccgggctgcccccggctgaggagggctcggcccacccgggtgctgccctgcgtgggtgcagcgggcagctccccctccgttcccgcgctcccccgggaccgccccyacagcgctcaccacgaggccgagccctgctggggccgagccatgagtgccgcggcctggagcgctgctgctgccggcagactggagaggagccgctcccgckcagcaccgctaatcacgtgaccgaaccacgtgaccccggccctacggcggcccgagaggggcgacgtgatcaacgtgagcgcggccctacggcggccgggaggggccgcatggcggcggcgggcggttggcgcgcggcgagcgggcggcggaggaggaagagaggggagaaggaggaggaaagcggagtcgcggtgctgaggcggctgcgg

SEQ ID NO: 65182 - DNA, 600 bp, Chicken  19866894331997_1
tcctgattgggttttattaaaagaaatgagacctactggaaatggtcacagtgtagctgattctggctgagtagaggaagtagttggccacttaatatctttccttccttacattgttgtgccttgtttttagagcttaataatgtaaaatgtaatgtaaaattatgtttttatttctagttactgtctattcctgacttgatttctgcattgacaacggcagaacagagagcagcaacttccttaaagtggagaactcatgagaagttactacaaaaatatgcgtgtctccctcaaatmctatcaagtgatcagatttattaccgttttcttcacagaatgttgacaatcattttgacaaacgtgagcctgcctctttctggttcttcatttgtttagagtatttagaacacttaccactaggtatttttagcattatttataaatttatctttaagtaatgtttctcattgcatatggtatatcacactgttttatttcatataaggctgaaaaaatgctgagaagttctttcccctaattcragtagcaaaatttgtgttgagaggttgtgttcctttcccaccactcttctctcct

SEQ ID NO: 65183 - DNA, 523 bp, Chicken  19866894331997_2
aaagtggagaactcatgagaagttactacaaaaatatgcgtgtctccctcaaatmctatcaagtgatcagatttattaccgttttcttcacagaatgttgacaatcattttgacaaacgtgagcctgcctctttctggttcttcatttgtttagagtatttagaacacttaccactaggtatttttagcattatttataaatttatctttaagtaatgtttctcattgcatatggtatatcacactgttttatttcatataaggctgaaaaaatgctgagaagttctttcccctaattcragtagcaaaatttgtgttgagaggttgtgttcctttcccaccactcttctctcctttgtgctcattatcagtttgcttctaggtaaatggaaaatctttttcctagtttcactgattactttgcatcatgtttcattatttgagagagcactttaagtctaaaagtgagcaatcacttagaactactgatctgagattgtagtgaattgattcaagagtaaaa

SEQ ID NO: 65184 - DNA, 600 bp, Chicken  19866894332001_1
aagaggtacgggggaagaattcaggaattagtagcagtctcacctgtggagaagataagtgtgtattttaatgagtttaaacaagaaactaaaggagaaaccaaacaaaaccaccagctaaataaataatttttcactgtaaggtgaaaaacgtttctcagcctacccactcatttcacacatggtaatgtggaagtataattctaccaaaaactagaagacagtcaccagatttgtttcacttgtttgctcatctgaacttcaaagagggtttctgaagctggaagactttgccagccygacttactgacaactgaagacagaaaggggccttccctcatctgttagggtcttgcacgacatggaggctatggaggtggacacttttttaaacagaaggagcagcaacatgttcagcatatttcacaatgaactcaaaacattattcaatacagatttgacatcaaaaaaatatatggaagctgacaagttccagaggttcctcggtaaatacacccctataaaacttcctaaacatgctaaaacagggacaatttctgaattagcgaggtcgttaaagtaagcaacctcccacaaggg

SEQ ID NO: 65185 - DNA, 599 bp, Chicken  19866894332005_1
  misc_feature (1)..(166): n is any nucleotide
nnnnnnnnnnnnnnnnnnnnnnnnnnnnnnnnnnnnnnnnnnnnnnnnnnnnnnnnnnnnnnnnnnnnnnnnnnnnnnnnnnnnnnnnnnnnnnnnnnnnnnnnnnnnnnnnnnnnnnnnnnnnnnnnnnnnnnnnnnnnnnnnnnnnnnnnnnnnnnnnnnnnnnttgggaaggttccatccctcccgccatcagatgctgacaacctaagcctatttactttagtaaatacctggtaatgtggtcccagaccttcctctgggctcagcagagctgatgacctgtaagagaacagaagygtctgggtggaaaccgaatgttttcagtcagacagctgtggtgcattggctttggttgtactgatgacaaagctgccctgtcgcaaatagaagtgggctcctggccttgctctgagagcactgcagccccaggaacctctggatccctctcctggggctgcatctcagcatcrtgtccccactcagtgcccagggctgccctgtgccagagcagaacccagcactgctcctgtcattcctcatgtggctgccaatgcrcatccctctgatctaagatctctctgcaacaccttttcccc

SEQ ID NO: 65186 - DNA, 600 bp, Chicken  19866894332005_2
ggttccatccctcccgccatcagatgctgacaacctaagcctatttactttagtaaatacctggtaatgtggtcccagaccttcctctgggctcagcagagctgatgacctgtaagagaacagaagygtctgggtggaaaccgaatgttttcagtcagacagctgtggtgcattggctttggttgtactgatgacaaagctgccctgtcgcaaatagaagtgggctcctggccttgctctgagagcactgcagccccaggaacctctggatccctctcctggggctgcatctcagcatcrtgtccccactcagtgcccagggctgccctgtgccagagcagaacccagcactgctcctgtcattcctcatgtggctgccaatgcrcatccctctgatctaagatctctctgcaacaccttttcccctctccagggaagcagcagctcctcccagttcagtgtcttctgcaaactgactcagtgtgccttccagccctggatccaagttgttgaagaaaacatccaagagaactggccccaaaacagagccctgcaaaccccagcagtgactgaagcaacaaaagggtcactctgatttgc

SEQ ID NO: 65187 - DNA, 600 bp, Chicken  19866894332005_3
tctgggctcagcagagctgatgacctgtaagagaacagaagygtctgggtggaaaccgaatgttttcagtcagacagctgtggtgcattggctttggttgtactgatgacaaagctgccctgtcgcaaatagaagtgggctcctggccttgctctgagagcactgcagccccaggaacctctggatccctctcctggggctgcatctcagcatcrtgtccccactcagtgcccagggctgccctgtgccagagcagaacccagcactgctcctgtcattcctcatgtggctgccaatgcrcatccctctgatctaagatctctctgcaacaccttttcccctctccagggaagcagcagctcctcccagttcagtgtcttctgcaaactgactcagtgtgccttccagccctggatccaagttgttgaagaaaacatccaagagaactggccccaaaacagagccctgcaaaccccagcagtgactgaagcaacaaaagggtcactctgatttgcaccaactgcaagggataagcagagcggcactaggacagaaagcaagcttgtctgtagctatgccagcatctcacttggacacact

SEQ ID NO: 65188 - DNA, 600 bp, Chicken  19866894332007_1
ggctggatggggccctgagccgcctaatctggtgagtggcaaccctgcctctggtgggggattgaaactggatggagtttaatgtcccttccagctgaagccattctacaattctattattctattgaaagagcggaaaggttcagcctcaggcccaagcaattattgggagtttggaaatcacagtggatgctaaccaaggtttggacctgaggggtttttgtatggaaagctaacaatcagggcctgaaggcagatttaaacattggccaatcctctgtgttgatatagctttttaartgttaatataacacttgttttgccttttttttttctgyatctcttttcttggatgaacatatattgctttgcaaggtgccctccctctgtgtgacttcacttgaaacagcagggaaatgcatcttgctctttcatgacagaaatttatcaggctgaggaccatcaagacagcattcttccagcatcttgaaacttatctgtctcgtctgagtagctgtgctagtagttcgtggtgctactgctatatgaagcagtaattatttattgatttctttcattgcagagagacttcccacccct

SEQ ID NO: 65189 - DNA, 600 bp, Chicken  19866894332007_2
gcaaccctgcctctggtgggggattgaaactggatggagtttaatgtcccttccagctgaagccattctacaattctattattctattgaaagagcggaaaggttcagcctcaggcccaagcaattattgggagtttggaaatcacagtggatgctaaccaaggtttggacctgaggggtttttgtatggaaagctaacaatcagggcctgaaggcagatttaaacattggccaatcctctgtgttgatatagctttttaartgttaatataacacttgttttgccttttttttttctgyatctcttttcttggatgaacatatattgctttgcaaggtgccctccctctgtgtgacttcacttgaaacagcagggaaatgcatcttgctctttcatgacagaaatttatcaggctgaggaccatcaagacagcattcttccagcatcttgaaacttatctgtctcgtctgagtagctgtgctagtagttcgtggtgctactgctatatgaagcagtaattatttattgatttctttcattgcagagagacttcccacccctcactctgagaggtgacaaaggaatctttaaagtagaat

SEQ ID NO: 65190 - DNA, 600 bp, Chicken  19866894332016_1
attctatgaagttcacatgtggcttaaataacaaacggctatgcccttcatttcactaattaatcttagattcagactgtcaagaactccgactcctgctgaatttcaagttcatagtaagtactttcctatgcttagaatacaaagtgaacagagactgcatttaatgatgtctcaaactaaacccttgagccaagactgaggaaatgttcctaacaatgagaacactgagcactgccttcctcattacactcttcctcattacagtcttcctccaacactcttcacaaaatatgttasaagtgcaagtagtctttgcagcatcacaagaaaaataaacaccaatgtttaaaggccagttaagcatacagtgaagcttctctcagtccaggccaatgtatagaagtaacctaaattatagataaatcctacattcttmttaatggagaattcactctctcaggccataagagattaaatggctatattaatacagaaaatattgtaggcataaatccacagtgtttacagctacccttgaaaagtgttcataaaacctgtgtcagttttaagtttgctgttatgattttggtaatctgg

SEQ ID NO: 65191 - DNA, 600 bp, Chicken  19866894332016_2
atacaaagtgaacagagactgcatttaatgatgtctcaaactaaacccttgagccaagactgaggaaatgttcctaacaatgagaacactgagcactgccttcctcattacactcttcctcattacagtcttcctccaacactcttcacaaaatatgttasaagtgcaagtagtctttgcagcatcacaagaaaaataaacaccaatgtttaaaggccagttaagcatacagtgaagcttctctcagtccaggccaatgtatagaagtaacctaaattatagataaatcctacattcttmttaatggagaattcactctctcaggccataagagattaaatggctatattaatacagaaaatattgtaggcataaatccacagtgtttacagctacccttgaaaagtgttcataaaacctgtgtcagttttaagtttgctgttatgattttggtaatctggaagactgaatgcaagcataaacaaaagtagcttgaacaacagaaaggttatttgaaaaacaggacaaagactacttattttcacccaatgctgtgtcagactacagattcctcaaaaaacatttaccacttcagattac

SEQ ID NO: 65192 - DNA, 600 bp, Chicken  19866894332016_3
aggcataaatccacagtgtttacagctacccttgaaaagtgttcataaaacctgtgtcagttttaagtttgctgttatgattttggtaatctggaagactgaatgcaagcataaacaaaagtagcttgaacaacagaaaggttatttgaaaaacaggacaaagactacttattttcacccaatgctgtgtcagactacagattcctcaaaaaacatttaccacttcagattactcataacatttccatctcaaaaaaaaaaaaatcacaactcaaaggatttttttaaagctattatgamctyttttttttcctaaatgctgaaacccctcaaaaaataactattgaagtttctcattgattctttaaggatgttctcaccacaacaaattatacatacccccaatattaagaacaagcttccaaggtttgtggatgatacatgaatctgaggcactaaaaataaatgacagcacaagcatctttaacagaacttcaatcatttaagtgattgctccaacagatggcaaaagcacttcagcacacaattgcaaaataatttgcctggaagcaagcaacaaagacaaagaaagtgtactaa

SEQ ID NO: 65193 - DNA, 600 bp, Chicken  19866894332016_4
cataaatccacagtgtttacagctacccttgaaaagtgttcataaaacctgtgtcagttttaagtttgctgttatgattttggtaatctggaagactgaatgcaagcataaacaaaagtagcttgaacaacagaaaggttatttgaaaaacaggacaaagactacttattttcacccaatgctgtgtcagactacagattcctcaaaaaacatttaccacttcagattactcataacatttccatctcaaaaaaaaaaaaatcacaactcaaaggatttttttaaagctattatgamctyttttttttcctaaatgctgaaacccctcaaaaaataactattgaagtttctcattgattctttaaggatgttctcaccacaacaaattatacatacccccaatattaagaacaagcttccaaggtttgtggatgatacatgaatctgaggcactaaaaataaatgacagcacaagcatctttaacagaacttcaatcatttaagtgattgctccaacagatggcaaaagcacttcagcacacaattgcaaaataatttgcctggaagcaagcaacaaagacaaagaaagtgtactaagtg

SEQ ID NO: 65194 - DNA, 599 bp, Chicken  19866894332018_1
  misc_feature (1)..(157): n is any nucleotide
nnnnnnnnnnnnnnnnnnnnnnnnnnnnnnnnnnnnnnnnnnnnnnnnnnnnnnnnnnnnnnnnnnnnnnnnnnnnnnnnnnnnnnnnnnnnnnnnnnnnnnnnnnnnnnnnnnnnnnnnnnnnnnnnnnnnnnnnnnnnnnnnnnnnnnnnnnnnnatttgaagcttttctgtaagattgcagacaaagcttgtcatattgaaaggcttgatataattcagctatgagctcagaactgaaggtgggatccttatcccctctccagcctgcttgttcaacataaagagctgcaatcacaygtaggggcataaagtctccagctctgggatttcaatgaggaaaaaaaaaggggggcggggggttagggcaaaataattacttacacaaatgcagaacatattattggctaaccagttytggagctgctgggcaagccaggttgaccctgtatcaacagtggcatgtgtggggaagacaaggtaccatggtggagtgcatgagcaaaagtatggtcagactgaggcatggaagagctgtgcttcagcaaaactrcacagcttacttgaaatcagaggtcttgaaaccacatgcagtggca

SEQ ID NO: 65195 - DNA, 599 bp, Chicken  19866894332018_2
  misc_feature (1)..(39): n is any nucleotide
nnnnnnnnnnnnnnnnnnnnnnnnnnnnnnnnnnnnnnnatttgaagcttttctgtaagattgcagacaaagcttgtcatattgaaaggcttgatataattcagctatgagctcagaactgaaggtgggatccttatcccctctccagcctgcttgttcaacataaagagctgcaatcacaygtaggggcataaagtctccagctctgggatttcaatgaggaaaaaaaaaggggggcggggggttagggcaaaataattacttacacaaatgcagaacatattattggctaaccagttytggagctgctgggcaagccaggttgaccctgtatcaacagtggcatgtgtggggaagacaaggtaccatggtggagtgcatgagcaaaagtatggtcagactgaggcatggaagagctgtgcttcagcaaaactrcacagcttacttgaaatcagaggtcttgaaaccacatgcagtggcagaagatgggacacattggagctcatagacaagagaagtatcttgctttcctaatccaaggcaaaggcagtatcttaagctgaaggcttagatattaggaaaagcctycaagaggtaaa

SEQ ID NO: 65196 - DNA, 600 bp, Chicken  19866894332018_3
atcccctctccagcctgcttgttcaacataaagagctgcaatcacaygtaggggcataaagtctccagctctgggatttcaatgaggaaaaaaaaaggggggcggggggttagggcaaaataattacttacacaaatgcagaacatattattggctaaccagttytggagctgctgggcaagccaggttgaccctgtatcaacagtggcatgtgtggggaagacaaggtaccatggtggagtgcatgagcaaaagtatggtcagactgaggcatggaagagctgtgcttcagcaaaactrcacagcttacttgaaatcagaggtcttgaaaccacatgcagtggcagaagatgggacacattggagctcatagacaagagaagtatcttgctttcctaatccaaggcaaaggcagtatcttaagctgaaggcttagatattaggaaaagcctycaagaggtaaagctaatgaaaaagagcaatgggctgtcgtggggcaatgcagaaatgcaacagtggagatcttcaaggaccaagttacacaaacacatcaggcatgataaatgtacagtagatcctgctgtaggctgatcagatgga

SEQ ID NO: 65197 - DNA, 557 bp, Chicken  19866894332018_4
gctaaccagttytggagctgctgggcaagccaggttgaccctgtatcaacagtggcatgtgtggggaagacaaggtaccatggtggagtgcatgagcaaaagtatggtcagactgaggcatggaagagctgtgcttcagcaaaactrcacagcttacttgaaatcagaggtcttgaaaccacatgcagtggcagaagatgggacacattggagctcatagacaagagaagtatcttgctttcctaatccaaggcaaaggcagtatcttaagctgaaggcttagatattaggaaaagcctycaagaggtaaagctaatgaaaaagagcaatgggctgtcgtggggcaatgcagaaatgcaacagtggagatcttcaaggaccaagttacacaaacacatcaggcatgataaatgtacagtagatcctgctgtaggctgatcagatggactagatgtgttcctgaggtttttccagacttttttccctacaatttgagcctaaagtcatttacataaccctaaaggccttttcaggttacctttgagatccttccaggc

SEQ ID NO: 65198 - DNA, 560 bp, Chicken  19866894332029_1
gagcatcgcagcgtggttcgcagaggctggcacactctgctccagataacagcagagctgctgcacttctgctgcggtggtagcaggcgtgcgatgtgtgcgttataccagagcagcaaaggatgatgcttaaaagtcaggaagtgtgcgcgagtgcgtgagaaaccttcaccttccctcatctaggtgtgggttgctccaggagcagtgagtttatcggggaggagtttggtggccacacaattcagagggattcctctggaaggagagatgtgcaggtttctcctgctggcagcagcrcggggtgttgggcgggcacacggggagctgcaccaaggtgctctgcgtgcagtcagacatgggtttggcagcccaggttcatcctgcacctaggaaatgagtccttaaggaaacagcgtaattcaaagcaagcagcatctgctttgccgtttgttctgtttacgtttcatattgactggagctgccgtaaaattagggggggggggggggggcaaagcaaaaaacaaaaccaccttttttaatggcagccacgaagtttt

SEQ ID NO: 65199 - DNA, 600 bp, Chicken  19866894332050_1
ttaggcagagtgacttcattggtatttacatataagtttcagttggtagctactctacagtcagagagctgaaaactcaactacacaaagtcataacagaaaaccagcccagaggagagaaggctccagggagacctgatagaggccttccagtatctaaagtgggactataagaaagaaaggaacagactcatctgctgtcataggacaaggggaaatggtttcaaactaaaagagatgtagaggcaaaaaggttttttatgataaggatagtgaagcactttgacagattgcctagaratgtggtggatgccccattgctggagacattcaaggtctggctggatggcactctgagcaacccgatggagctgtaggtgtccctgttcagtgcagaggagttggactagatgrtctttaaaggtcccttccaactcaaactcaaacaattatatgattctatgattctgttcaagaaaaagttttgagaccctgaatagctgtgtgtagcagaggactagtggcaaatggaaacagacgatccacatctttgcaattcttggttgctccctcttaaatctttcatctggcaacacgaga

SEQ ID NO: 65200 - DNA, 600 bp, Chicken  19866894332050_2
gagagaaggctccagggagacctgatagaggccttccagtatctaaagtgggactataagaaagaaaggaacagactcatctgctgtcataggacaaggggaaatggtttcaaactaaaagagatgtagaggcaaaaaggttttttatgataaggatagtgaagcactttgacagattgcctagaratgtggtggatgccccattgctggagacattcaaggtctggctggatggcactctgagcaacccgatggagctgtaggtgtccctgttcagtgcagaggagttggactagatgrtctttaaaggtcccttccaactcaaactcaaacaattatatgattctatgattctgttcaagaaaaagttttgagaccctgaatagctgtgtgtagcagaggactagtggcaaatggaaacagacgatccacatctttgcaattcttggttgctccctcttaaatctttcatctggcaacacgagaaagatctctgctgacctaagcagtagtagtggcatgaggacaaatgactgtcagcagagatgagtgatatacacaaaacagtgctgccatgactgtaaggaaagtagtattgca

SEQ ID NO: 65201 - DNA, 600 bp, Chicken  19866894332056_1
caaagtcattccacactccatgttaccctctgcttgtaacggcccatttctaacccatcatttaaggttcattcgcctttcctattcccacactactattacagcttgcaatctggtgcttaaatgggtaggactgaaatgccaatttgctccaaaacactgcggagatttctgttcctatgaaggggacactctacttgccttctttggaggctgtttgctctgtgggaagtaattcaggactcatcgggctggagaagaacagctgtgtgtccgaagtgtaattgttagggcattaawgcaggaaaaaaagmcattctggtctctgctcttgtaraacactttcaaagctaaaactagaactcaagtcttcctatctgagagagataacatwaaaaagtcactgagcaatgttattactcaggtgggttgcccatctcctggaccccatgggtgtgttaggttcatacatcatcctgctctatcccagctttcctgctctctccatgctgagtttgcaaaccccaatgggggttcagactctgactcatcccactgagtgcacaggcagcaccggagccacgcacaggatgcatgaca

SEQ ID NO: 65202 - DNA, 600 bp, Chicken  19866894332056_2
actccatgttaccctctgcttgtaacggcccatttctaacccatcatttaaggttcattcgcctttcctattcccacactactattacagcttgcaatctggtgcttaaatgggtaggactgaaatgccaatttgctccaaaacactgcggagatttctgttcctatgaaggggacactctacttgccttctttggaggctgtttgctctgtgggaagtaattcaggactcatcgggctggagaagaacagctgtgtgtccgaagtgtaattgttagggcattaawgcaggaaaaaaagmcattctggtctctgctcttgtaraacactttcaaagctaaaactagaactcaagtcttcctatctgagagagataacatwaaaaagtcactgagcaatgttattactcaggtgggttgcccatctcctggaccccatgggtgtgttaggttcatacatcatcctgctctatcccagctttcctgctctctccatgctgagtttgcaaaccccaatgggggttcagactctgactcatcccactgagtgcacaggcagcaccggagccacgcacaggatgcatgacaggcatgtgagccac

SEQ ID NO: 65203 - DNA, 600 bp, Chicken  19866894332056_3
aacggcccatttctaacccatcatttaaggttcattcgcctttcctattcccacactactattacagcttgcaatctggtgcttaaatgggtaggactgaaatgccaatttgctccaaaacactgcggagatttctgttcctatgaaggggacactctacttgccttctttggaggctgtttgctctgtgggaagtaattcaggactcatcgggctggagaagaacagctgtgtgtccgaagtgtaattgttagggcattaawgcaggaaaaaaagmcattctggtctctgctcttgtaraacactttcaaagctaaaactagaactcaagtcttcctatctgagagagataacatwaaaaagtcactgagcaatgttattactcaggtgggttgcccatctcctggaccccatgggtgtgttaggttcatacatcatcctgctctatcccagctttcctgctctctccatgctgagtttgcaaaccccaatgggggttcagactctgactcatcccactgagtgcacaggcagcaccggagccacgcacaggatgcatgacaggcatgtgagccacatggactgctactggagaccaga

SEQ ID NO: 65204 - DNA, 593 bp, Chicken  19866894332056_4
actattacagcttgcaatctggtgcttaaatgggtaggactgaaatgccaatttgctccaaaacactgcggagatttctgttcctatgaaggggacactctacttgccttctttggaggctgtttgctctgtgggaagtaattcaggactcatcgggctggagaagaacagctgtgtgtccgaagtgtaattgttagggcattaawgcaggaaaaaaagmcattctggtctctgctcttgtaraacactttcaaagctaaaactagaactcaagtcttcctatctgagagagataacatwaaaaagtcactgagcaatgttattactcaggtgggttgcccatctcctggaccccatgggtgtgttaggttcatacatcatcctgctctatcccagctttcctgctctctccatgctgagtttgcaaaccccaatgggggttcagactctgactcatcccactgagtgcacaggcagcaccggagccacgcacaggatgcatgacaggcatgtgagccacatggactgctactggagaccagactggtcctgctcagcctatatcccagcctggcaatctaaaaggagtgacc

SEQ ID NO: 65205 - DNA, 599 bp, Chicken  19866894332058_1
  misc_feature (1)..(49): n is any nucleotide
nnnnnnnnnnnnnnnnnnnnnnnnnnnnnnnnnnnnnnnnnnnnnnnnncctttgttttccgtggaatgagagtaccttcagattagaggcaatctttccatttattttatatttctgagctgttaaagatgaattgtcattgttcctacttttccctactgtccttaatgagagtgactatcaggctaacctttagacgccttcatctgggttctataaatctcaccactttatgaaatcatccaccccaactgttatgttgtattacactataaataaaattaatagatatctgtgcrggctggggcaaagtacctctgctgttgataactagatatgagcccttgttctgaatatgttattgtagtttatgactgtttccagctgccttagcagtgatgtctagactagaaaattaaacagtgctatggatcatccccaggcactgcagcttgcttgcctgtaatgtcaaattgttagaacagtcactggtctacttctgcctgtgccagctagtatcctttccaaacaattcctgcttatagttcaggaattagcgtgggctagtgactggctccagtacacagtctggatgagg

SEQ ID NO: 65206 - DNA, 600 bp, Chicken  19866894332058_2
attacctgttctgtgccttctccaaggtagcagcttgtgtaaaacaaatgggtcagtgctgtcccaaaatttattttgcataacagaaaactgatagattcccaggttgactgagtagtttgttttcaaccttttttttttgtgcttcttttatgaaaattttcactcaaaaatattgtaagaaaaatcaaatggaagcaatcttttgagctgaatcatagaatcatagaatggtctgggttgaaaaggacctcaaagatcatctagtttcaatgcctcctctgctatgtgcagggtcascaaccactagaccaggctgcccagagccacattcagcctggtcttgaatgcctccaggaatggtgcatccacaagttctatgggcaacctgaaaactataatgaatcaaaatggtttgggtttttggtgaatactgtaagacacttcgctttccataatttgtgttttggaaaggaagcctttccaaagaaatgcatggtatgacttcagaaatccgaattctcatagcataaaaatgcaaccttccctcagccacacacttttcttaactaagtgtacgccacacaagattccatcttg

SEQ ID NO: 65207 - DNA, 599 bp, Chicken  19866894332066_1
  misc_feature (1)..(139): n is any nucleotide
nnnnnnnnnnnnnnnnnnnnnnnnnnnnnnnnnnnnnnnnnnnnnnnnnnnnnnnnnnnnnnnnnnnnnnnnnnnnnnnnnnnnnnnnnnnnnnnnnnnnnnnnnnnnnnnnnnnnnnnnnnnnnnnnnnnnnnnnnnnggagttgtgccaagggaggttcatgttggatgttaggaaacatttctcctctgaaagagtggagacgtattggcacaggctgcccagggaggtgatggagtcagcatccctggaggtgttcaaggaatggtagagatgtggtactgagggacatggatagwgggtacagtgttcacagttggacttgatgaacttagtggtcctctccaacctaacgattctatgaagtttccccatggggactgtcagacactggaagacatcatgggatctctgaccttggaggttttcaagacccaggtgggagaagcaaactgctcagaatgcagcacttgccctgcttggcactgggctacagacctcccaaggttactttagccaagatggctgcagaagcacatcatcgccaggaaaaattacatacaaataagtcccttacgaattctgggagtgggacagc

SEQ ID NO: 65208 - DNA, 600 bp, Chicken  19866894332074_1
atgcttgaaaactgtcacattttaataccaataagcaacatcaataaataatgtgaagatggaaagtatgtaaaaattttactacagaatcaaatcaatctgtgattatttagttattgttcatttatgtactttgtcagctcaccaccgcatgttgtagaaaacacaggagaaatctggtctttagtagaaattattcctactggggaagttgctgtttatatttgaagaatgggaaaggggtgtggggaggaaagcaagatactatttgaaagcagcagaagaaaatgcagagacatkaaagatagataaattgtggaaaagctaagtatattcaatcagttgctctctgttggcttgagggtaatctttgccatattaccatgtactgatatatggactaattagttgtacaaaacaaaaatatttatagaaagtatttctttcaagcagccaccaaaccaaccaaacaaaaggaaaatggattctctgtgttaaaaaattaaattcaatctatatttatgagcccattcaaaatgtagagccgttttgctctcagatttccagtaagcagaaataccccatgcatcataacctaat

SEQ ID NO: 65209 - DNA, 599 bp, Chicken  19866894332076_1
  misc_feature (1)..(91): n is any nucleotide
nnnnnnnnnnnnnnnnnnnnnnnnnnnnnnnnnnnnnnnnnnnnnnnnnnnnnnnnnnnnnnnnnnnnnnnnnnnnnnnnnnnnnnnnnnntgagagaagggagaagtgaatgtagggtgggctggaaagagtggttcagcctttttttgagaagccacatgtctgcaggggccaggtcacttctgtcccaaggagaatgcacgtgttggtttctgcagcactccgtagtggagccagggaatcctggctgtaacacccagctctccgaactgagtctgttctccagctgctgcctcagsaaagcatttctgcaaaggctactgctgcagagaaaaaacatttcagttcattttatttaattcaagttgtgaatgaagatgtctagaattagaataaatacagacttatcaatgacacagaattaagtggcaatctgtacactaaacattcagagtcagtaatggcaatacagcagatgaattatgatacacagcattagtaaacagctacgtgtttcccagctctgtagctaataaccagaatcacagtccatatactatatccagtccatatacagtccatatacatatatccatat

SEQ ID NO: 65210 - DNA, 600 bp, Chicken  19866894332077_1
atattttttatgattcaataatttaattgttacacacacacacacagagaaaagaattttttatcaaaatataaaagtgcaatgaaatacggtatgtacgatttcccagtcattctcatgaagaacttaaagtcattttggttttatccagtaggtaaagatggcacgatttcacaacacccattggaatgacttttaaaaatgttcagtaccctcttcctgcacagcagctgactgacgctggtctttcagttctacctgtgatgctgtcagagttacaaagctctcatgaggcttttwctccagttcttacatagaaatataagatccctctccctgctgtaccacactcttaaggggttttgcaggcatgtggacaaggaatccggtgtgtacgtactgtattccccagactctttcttaagaaaatggagggaaatggatgagattcacccttcaaggtgtatcagagtagcatgtctgtgaaaaaatacatactgccactggatgtcactgatgtgccatttacactccatacataattaacatcaggtaaaagcaaacccagatagaagactctccctcacacactaagacacc

SEQ ID NO: 65211 - DNA, 600 bp, Chicken  19866894332079_1
atttataaccaaattcagaagaaagggtactcagcttgcaattctaaatggcttccccttacagtacgtctgtaattcctcttgctatattgctatatttttcaatacttaaactgattaggaaatgccctgtaatttattaatatcatgctttagatacttacacacaaagacgcagaagtgaataattctagcccataatatttttaacttccattgctgaacaaaatcagcactaggagtaaaacagctttggaacagctactgcaagttgtattttcacaagcccatagctcatckgtcatgccatgccatgcaggttaagagagctgaatagttacaagcgctctttgtgtgaatggcaaaggtctgtcacgctacactgaaatttagagtttaaagtccactagagacggaataaagagattgtttcagtagcatttttgcaggcatgttttctactcttgaccgtatttagaaaggcctatggcttctgaaggatagcagtcatgtaatctgatctcacatgttagagacagacataacagtggcctcgtggaaccaagtcagataccagtgttttagcaatgcctagtggaa

SEQ ID NO: 65212 - DNA, 600 bp, Chicken  19866894332079_2
agagctgaatagttacaagcgctctttgtgtgaatggcaaaggtctgtcacgctacactgaaatttagagtttaaagtccactagagacggaataaagagattgtttcagtagcatttttgcaggcatgttttctactcttgaccgtatttagaaaggcctatggcttctgaaggatagcagtcatgtaatctgatctcacatgttagagacagacataacagtggcctcgtggaaccaagtcagataccagtgttttagcaatgcctagtggaacacattcagccacaagtagaaactyggagtgctgtgtttccagcrtgtcaaagttaactgatgccaaaacttcactatttccaactgaatgattttgaaaagttatttttgttgccttttccctaaaagagacaacctagccttgttgaagcagcagatccctttgccccragtacatacagccctctagtatgtacaagatggaacacacctccttactgctgtatgtagaatgtggccattaaaccagaggaaraaccttttccctatgaagatagttaagatatgatgggtgttgccgagagaggtagtacagtcttcatcc

SEQ ID NO: 65213 - DNA, 600 bp, Chicken  19866894332079_3
gctctttgtgtgaatggcaaaggtctgtcacgctacactgaaatttagagtttaaagtccactagagacggaataaagagattgtttcagtagcatttttgcaggcatgttttctactcttgaccgtatttagaaaggcctatggcttctgaaggatagcagtcatgtaatctgatctcacatgttagagacagacataacagtggcctcgtggaaccaagtcagataccagtgttttagcaatgcctagtggaacacattcagccacaagtagaaactyggagtgctgtgtttccagcrtgtcaaagttaactgatgccaaaacttcactatttccaactgaatgattttgaaaagttatttttgttgccttttccctaaaagagacaacctagccttgttgaagcagcagatccctttgccccragtacatacagccctctagtatgtacaagatggaacacacctccttactgctgtatgtagaatgtggccattaaaccagaggaaraaccttttccctatgaagatagttaagatatgatgggtgttgccgagagaggtagtacagtcttcatcctcagaggttttcaaaaccca

SEQ ID NO: 65214 - DNA, 600 bp, Chicken  19866894332079_4
tatttagaaaggcctatggcttctgaaggatagcagtcatgtaatctgatctcacatgttagagacagacataacagtggcctcgtggaaccaagtcagataccagtgttttagcaatgcctagtggaacacattcagccacaagtagaaactyggagtgctgtgtttccagcrtgtcaaagttaactgatgccaaaacttcactatttccaactgaatgattttgaaaagttatttttgttgccttttccctaaaagagacaacctagccttgttgaagcagcagatccctttgccccragtacatacagccctctagtatgtacaagatggaacacacctccttactgctgtatgtagaatgtggccattaaaccagaggaaraaccttttccctatgaagatagttaagatatgatgggtgttgccgagagaggtagtacagtcttcatcctcagaggttttcaaaacccaaccaatgccctgaacagcctggtctgagttcagtgctgacctggctttgagcaggaggttgaaccagtggtccctcccagttcgaaggatttgccagttttttcccctccagaattacaactctct

SEQ ID NO: 65215 - DNA, 580 bp, Chicken  19866894332079_5
tggaaccaagtcagataccagtgttttagcaatgcctagtggaacacattcagccacaagtagaaactyggagtgctgtgtttccagcrtgtcaaagttaactgatgccaaaacttcactatttccaactgaatgattttgaaaagttatttttgttgccttttccctaaaagagacaacctagccttgttgaagcagcagatccctttgccccragtacatacagccctctagtatgtacaagatggaacacacctccttactgctgtatgtagaatgtggccattaaaccagaggaaraaccttttccctatgaagatagttaagatatgatgggtgttgccgagagaggtagtacagtcttcatcctcagaggttttcaaaacccaaccaatgccctgaacagcctggtctgagttcagtgctgacctggctttgagcaggaggttgaaccagtggtccctcccagttcgaaggatttgccagttttttcccctccagaattacaactctctcttcatcttccactcccatcgaggcattcaactacagtgggtgcatcagtaaccaaataaaacag

SEQ ID NO: 65216 - DNA, 600 bp, Chicken  19866894332082_1
ggctcaagctctcactgttcccacaaatttccactttttgcttacatacagcaattctgggcagtcagtcctgtgaacctgctttcctatgatatttgtgctgatcaggcattactctctgattaatgcatctttgtttatcattgtcaatgccaacaccacctaccattcagggacaccttgttacagagcttaaagccactgggggctgttaatttgccataataaacaggatccttttcagtcacccatgcccagtacaagctgagctgtgccacttgctgtttccatagacccttrgtttagactcgaactcacaggttccatctcagcaatcttaatgaaaatcatcacctgttttatttctagagttgaaataaaacttactacaatagcagcctgctattataactttggagctgataatcatccttcttactcggagtgaagctggacattcccagcctgtgtttatgatcagggacgtggcagaataatgtatttaaattgagctttattgatcattgaacatctgttggcacttaaatacgtggacacataaacatgaacataagctttgcaagtttgcatttttgatgt

SEQ ID NO: 65217 - DNA, 600 bp, Chicken  19866894332083_1
tccctttagatatttcttaacatttatcagatcccctctcagtcttcttttccccaggctgaacagacccaggttactcagtctttccttgtatgggagatgctccaggccaattcagaatatctctgcttagagccacgatcatttggcctatggtccctctgtgaagccctttgcattccaatgtgacttccttgcactaatgtcctactggggttaatggttcaaagtaataaaactgggcccatttgtgtccttcatctcatactgttgagtttactgtgggttgagattgtcctrtgtgtaaatggaagtttgtcctatggagtctgaatgctcctctataattatagagtccgacatcgatgactcagtatagttaaactttcccacagggaaatcttggaactgaaaacttgtcttcctgcaagtgcatagcatgggatctgccatcacagactccctaactggggaggagctgttcattccttgtttcaactattccagaagaaacttgtaaaaagtggcagtgagttctaaccataatgtacttgtatgtctgttgtagaaaaggctggtccctgaaactggcttttaaaa

SEQ ID NO: 65218 - DNA, 600 bp, Chicken  19866894332083_2
tcttctacatgaagatattgcttgtattaaatatgggtggaagtattttctttgtggttagagctgtggttatattatagaaagatacccatacagttcctgtgaaaccactggcctatctgactgaaacaatatccgctgggatgaataatgagaacgatctgaatctgaaacggcttgacaggccttactttattgctcatggcataagcacgcaagtgggatcgagagggatcatgttagcatgtagtgggtgcacaatagcacaagcaatcacctctgtcactgtaagaagctggrtgytgggagagagctctccttttgcagaaagccatacattacagatgtttctacattttctgcagattccacacatatacacgtgcaaagagtaaatgagtccctgatatagctctacaggatgagaaagatgagaaggtactttgaaaaaatctgagtcttgtattggctcatggctaatgggcaactctaacactgggctacaggatgtatacacaaaaatactcatgctatgattttttttaatctgaatggtaaaaccccctaatgcagaaggtctcagaccagctgtataacata

SEQ ID NO: 65219 - DNA, 600 bp, Chicken  19866894332083_3
tctacatgaagatattgcttgtattaaatatgggtggaagtattttctttgtggttagagctgtggttatattatagaaagatacccatacagttcctgtgaaaccactggcctatctgactgaaacaatatccgctgggatgaataatgagaacgatctgaatctgaaacggcttgacaggccttactttattgctcatggcataagcacgcaagtgggatcgagagggatcatgttagcatgtagtgggtgcacaatagcacaagcaatcacctctgtcactgtaagaagctggrtgytgggagagagctctccttttgcagaaagccatacattacagatgtttctacattttctgcagattccacacatatacacgtgcaaagagtaaatgagtccctgatatagctctacaggatgagaaagatgagaaggtactttgaaaaaatctgagtcttgtattggctcatggctaatgggcaactctaacactgggctacaggatgtatacacaaaaatactcatgctatgattttttttaatctgaatggtaaaaccccctaatgcagaaggtctcagaccagctgtataacatactg

SEQ ID NO: 65220 - DNA, 600 bp, Chicken  19866894332088_1
tgcagaaagatgcttttgtctttacttagatccattggattctctctctctctctctctctctctctctctctctctctttttttttcctcagcaaataccttctgacttcagaatttttataatagtccggaaaatggtctttctgtattattggttttaggtttcggatctattgatctgagaactctcagaacaaacctgaatgacttatcagtttgtatttgtaattttcattaaacttcgttaagaaagaatcataggagaatataaggtggcttcagttcagaaactagctctmatagtttaaaagcacaacaaacagtctgaaactcagaatatgccaagggatagtaccaggttgatccatattcttcatcctgtgccttcaggagatggggatgtgtgattatgggtaacgctgtaaaatggttggatgtttccctggaagagacagggttcagcagaaacggtgactgcccagagccatggggtgtattctgcctatgtctacagagccatcatttctctgctgcgcttgccaacagggcgtgtgttcttgtggagtgatgtgtaattctctccatgagcgcatggaagc

SEQ ID NO: 65221 - DNA, 600 bp, Chicken  19866894332097_1
acacgtcctggtgtgttagtcctgaaggaagacaggatttccttcttgttgctgtgttctgcttcccttctatttctgccctaggtgaagacttgcaggacttggttgcctaagcaaacaactgcaagttggatgtggatatggtgaatcagctgacttgcagtaattgcatacctatacactcccagtaaatacaaaatagattcatttcctcttcattataggataagctgcgcatattctttcataaacttgacagtgagctgtgaatagccagtgctagaatgactccatcttccwtaasattaaactgttataaagtctttttccaaggaaggctgcctccctttttgttttttccttccctttaagtgacaatggcttttttattcagtgttgggtttgctgattttttttttttaagttttgatgcagaaagtaatttttttcacaataatagcaaaaagaataaagaggttatttcttctaagtttatttgcttatttcacatttgtctgaaagctgtacaaatagtctggaacctgtatatatttcagggaatgaactctagaaagatctcctaggtgagcttttgaaatc

SEQ ID NO: 65222 - DNA, 600 bp, Chicken  19866894332097_2
gtcctggtgtgttagtcctgaaggaagacaggatttccttcttgttgctgtgttctgcttcccttctatttctgccctaggtgaagacttgcaggacttggttgcctaagcaaacaactgcaagttggatgtggatatggtgaatcagctgacttgcagtaattgcatacctatacactcccagtaaatacaaaatagattcatttcctcttcattataggataagctgcgcatattctttcataaacttgacagtgagctgtgaatagccagtgctagaatgactccatcttccwtaasattaaactgttataaagtctttttccaaggaaggctgcctccctttttgttttttccttccctttaagtgacaatggcttttttattcagtgttgggtttgctgattttttttttttaagttttgatgcagaaagtaatttttttcacaataatagcaaaaagaataaagaggttatttcttctaagtttatttgcttatttcacatttgtctgaaagctgtacaaatagtctggaacctgtatatatttcagggaatgaactctagaaagatctcctaggtgagcttttgaaatcaggt

SEQ ID NO: 65223 - DNA, 599 bp, Chicken  19866894332112_1
  misc_feature (1)..(151): n is any nucleotide
nnnnnnnnnnnnnnnnnnnnnnnnnnnnnnnnnnnnnnnnnnnnnnnnnnnnnnnnnnnnnnnnnnnnnnnnnnnnnnnnnnnnnnnnnnnnnnnnnnnnnnnnnnnnnnnnnnnnnnnnnnnnnnnnnnnnnnnnnnnnnnnnnnnnnnncctctgaattttagcacatgaagatccagaaggcgcaatttctcagtttcccattctgttaaaactccccccacaacgtgctttcctcctcacatccctacagaattatcacagcagtgcactaaacatagcaactctgcatttcgggraggttttctgctcgggctctgttagtgctcagaaactgaggctccatgttaaaaaacttttggctaagctcacaatgcgtgtgggagcatgccattaaacctctaacatctctgaaataagaagatattttgccacagagagattgaaaaaaaaaatagaagtgcaacattagattctgatgttaccatctcctatgtgcatacttaattttaagtgcataatagtcatactaactctacagggactagtcctgcgaataaattayggacattatgcaataacttttaaatgagtttta

SEQ ID NO: 65224 - DNA, 600 bp, Chicken  19866894332112_2
agtgcactaaacatagcaactctgcatttcgggraggttttctgctcgggctctgttagtgctcagaaactgaggctccatgttaaaaaacttttggctaagctcacaatgcgtgtgggagcatgccattaaacctctaacatctctgaaataagaagatattttgccacagagagattgaaaaaaaaaatagaagtgcaacattagattctgatgttaccatctcctatgtgcatacttaattttaagtgcataatagtcatactaactctacagggactagtcctgcgaataaattayggacattatgcaataacttttaaatgagttttactctgtctcatcataaaataattcaattgttcctgctgctcccccaggagatttccattctccgctgacaaacgcaggcagcagacatggctgagacctcatgcaccttccattccttacagccccaggtgtgggctggcagcagcgggmagagcccagggagcatcacagctgtgataaatgctgagaaattccacccaagtcacaccactgatgctggccaggggactcacagctccttctaactgtgtttgtcaaagtaggaat

SEQ ID NO: 65225 - DNA, 541 bp, Chicken  19866894332112_3
aaaaaaatagaagtgcaacattagattctgatgttaccatctcctatgtgcatacttaattttaagtgcataatagtcatactaactctacagggactagtcctgcgaataaattayggacattatgcaataacttttaaatgagttttactctgtctcatcataaaataattcaattgttcctgctgctcccccaggagatttccattctccgctgacaaacgcaggcagcagacatggctgagacctcatgcaccttccattccttacagccccaggtgtgggctggcagcagcgggmagagcccagggagcatcacagctgtgataaatgctgagaaattccacccaagtcacaccactgatgctggccaggggactcacagctccttctaactgtgtttgtcaaagtaggaatcttacaaataatcgtaacgtgctcccaggcatcagagctgcaggaaaggcaagtcccacttctttgcagcactccactatttctttgttgggaaagaaaaaaggtctcttacacaggagcacag

SEQ ID NO: 65226 - DNA, 600 bp, Chicken  19866894332117_1
ctggccttaagaattcccctcacgtactgtaccagcggcatagtaaacatctgtaattctaaatagctgtaaaaagtgatctaaatctttcagaaacgttttagattttgtggaatgaccactggtttattttgcacagatagctcaacaactgttgtactggaacccttttacttgctccggattaaaaaaacaaaaggaacatgaaattatcctatattctcatcattcactgcagctgtccagtcacagaccatttttttccatcactttttaactccagaaagatgatctataacygcacttcagaggaagaagctctgtccattctctaaaatgatttttttacttgtttactctgttgtaaaacaaggcggtccgtagaacctgtttcctgcagcttatagctacctgagatactgagaataggtttcagaaactgttccaattttaagttattgaaggcaaagagagactcagtttcatgcagtcctagctcctgacttcagagtactcctcratttgaactgcacaattcatgcacatacacagccttctggcagccctaagttcaggtgatcatatcgagacagaattata

SEQ ID NO: 65227 - DNA, 496 bp, Chicken  19866894332117_2
tctcatcattcactgcagctgtccagtcacagaccatttttttccatcactttttaactccagaaagatgatctataacygcacttcagaggaagaagctctgtccattctctaaaatgatttttttacttgtttactctgttgtaaaacaaggcggtccgtagaacctgtttcctgcagcttatagctacctgagatactgagaataggtttcagaaactgttccaattttaagttattgaaggcaaagagagactcagtttcatgcagtcctagctcctgacttcagagtactcctcratttgaactgcacaattcatgcacatacacagccttctggcagccctaagttcaggtgatcatatcgagacagaattatactcactcaaaacttttgtgctcacttttaccacaccaaaacaaacaaagattttagacaacaaggtatgatgatatgataaaaaatatgataaactcgtcaataaatgcatttgaa

SEQ ID NO: 65228 - DNA, 599 bp, Chicken  19866894332126_1
  misc_feature (1)..(79): n is any nucleotide
nnnnnnnnnnnnnnnnnnnnnnnnnnnnnnnnnnnnnnnnnnnnnnnnnnnnnnnnnnnnnnnnnnnnnnnnnnnnnnngatatttctgtcattgcaaacttacagtgcatcacagatcctcatgtcagtgcagaactaacctcagccctgaagatacatgggattcatggcaatgtttcataaatatgggtcaggtggaaataaagggggcaatacaaaagttgtaacagcactgtaaaatggctatttctggtcttagcacagctgcaccttcagtcaagtttttaactcacattaaraggtttgagaytgtcgtttttgaagggtactttaaacatgtacggtatcaccttcccagcacccaacaggtacctgcttggtctgacaaacacgggacctccacacagcagaagctgcagacagtgaaaattcatcatctggttccaagaataccaaactctgcagtttatgtaatcagctcaccacctaaacaggtccctgtcagcctccacatcagtgctgcctgccccagcagcacagaacagacttatagtaaactgtgctcttctgccatcaccacagagagcacaaccttccg

SEQ ID NO: 65229 - DNA, 599 bp, Chicken  19866894332126_2
  misc_feature (1)..(68): n is any nucleotide
nnnnnnnnnnnnnnnnnnnnnnnnnnnnnnnnnnnnnnnnnnnnnnnnnnnnnnnnnnnnnnnnnnnngatatttctgtcattgcaaacttacagtgcatcacagatcctcatgtcagtgcagaactaacctcagccctgaagatacatgggattcatggcaatgtttcataaatatgggtcaggtggaaataaagggggcaatacaaaagttgtaacagcactgtaaaatggctatttctggtcttagcacagctgcaccttcagtcaagtttttaactcacattaaraggtttgagaytgtcgtttttgaagggtactttaaacatgtacggtatcaccttcccagcacccaacaggtacctgcttggtctgacaaacacgggacctccacacagcagaagctgcagacagtgaaaattcatcatctggttccaagaataccaaactctgcagtttatgtaatcagctcaccacctaaacaggtccctgtcagcctccacatcagtgctgcctgccccagcagcacagaacagacttatagtaaactgtgctcttctgccatcaccacagagagcacaaccttccgttatggtctct

SEQ ID NO: 65230 - DNA, 600 bp, Chicken  19866894332126_3
tttgaagggtactttaaacatgtacggtatcaccttcccagcacccaacaggtacctgcttggtctgacaaacacgggacctccacacagcagaagctgcagacagtgaaaattcatcatctggttccaagaataccaaactctgcagtttatgtaatcagctcaccacctaaacaggtccctgtcagcctccacatcagtgctgcctgccccagcagcacagaacagacttatagtaaactgtgctcttctgccatcaccacagagagcacaaccttccgttatggtctcttctaaaamagaaagcgcagaccccttggtaccacattccttgtattaaactaaaaagttgtaaatccgcaatgcgtggcctcagtctgataccagttaaaacgctgttcaagcagggagtatttttcagtggcgtaactttaaagagaaaactccaacggtattcacagcgactttcagaaaagtgaatacccacactttttgcaagaatactgccacaagcaagcacagatgggaaggctggcaacattaccctgcagtaataaccgtacatttccatcaacacaaaacaacaacaaaattaaccac

SEQ ID NO: 65231 - DNA, 599 bp, Chicken  19866894332137_1
  misc_feature (1)..(9): n is any nucleotide
nnnnnnnnntgtaatttataaattaacattgctgcagcattaggaaataaatagctctggacagctgtttccaggagtgagtgccaatggcagcgaggctgagcacaggtccctgctcccaggggatgtggcgatgtgaccagcacagccctcgctgctcacccgctgtgcactgctgtgacccaaaatgctgtggcttgacatgcttgggcggccagccgggcacatcttgctcttaacacgtgcatgcaaactgtacggcgagcgctgcctgcgtcccactgcatgacacctttagarcagctcgtcccgtgggtcccgaaatactgagcgcggtcacacactgcccatatgggctactttgaatgctgctgctaygagtgcatgcataagtgcagatctgtgtatagggccggagcctgatgtgttctcttgaacgccaccacacagtgccacatcctgcagtgagcaccccgggtacccactgagatgctgatgcccaagctgcagttgcagtgttgtcagcacaaacccacagccctgcactgtgcccacccccatcccacgaaccccatccaggggtgaggtgagtcctccca

SEQ ID NO: 65232 - DNA, 600 bp, Chicken  19866894332137_2
gagtgccaatggcagcgaggctgagcacaggtccctgctcccaggggatgtggcgatgtgaccagcacagccctcgctgctcacccgctgtgcactgctgtgacccaaaatgctgtggcttgacatgcttgggcggccagccgggcacatcttgctcttaacacgtgcatgcaaactgtacggcgagcgctgcctgcgtcccactgcatgacacctttagarcagctcgtcccgtgggtcccgaaatactgagcgcggtcacacactgcccatatgggctactttgaatgctgctgctaygagtgcatgcataagtgcagatctgtgtatagggccggagcctgatgtgttctcttgaacgccaccacacagtgccacatcctgcagtgagcaccccgggtacccactgagatgctgatgcccaagctgcagttgcagtgttgtcagcacaaacccacagccctgcactgtgcccacccccatcccacgaaccccatccaggggtgaggtgagtcctcccatgcacacggccgtgatggatcgctgccatccacctgcagcatcctcagctctgcgctcccagcggagcggctggcagtg

SEQ ID NO: 65233 - DNA, 600 bp, Chicken  19866894332145_1
ggtgagactgactggcctgtagtaccctggatcttctttttttcccttcttgaaaatggtggttatgtttccccttttccaatcagtgggatcttcaccatacagccatgacctttcaaatatgatggatagcagcttggcaacttcatccaccagttccctcacaacccatggatggatctcatcgagtcccatggccttgtgaaccttcaggttctttagatgggtctgcacccaaagacatggaggtcctggaacacatccagagaagggcaacgaagttggtgaggggtctggaayataagtcttataagcagcggctaagggaactgaaatttttcagcctggagaataggaggctcaggggagacctcattgtcctctgcaagtacctgaagggagattgtgacaaggtgggaatcagcctcttctcccaggaaaccagcaataggatgagaggggatggactctagtagcaccaggggagattcaggttggatattaggaaaaatttcttctccaaaagagtggtcaggcactggaatgggctgcccagggaggtggttgtgtcactgtccctggaggtgttcaagaaatgtg

SEQ ID NO: 65234 - DNA, 600 bp, Chicken  19866894332145_2
ttagaggtcttttccaacgttaataattctatgattctacaattctatttgttatgcacttcaactgccatagctgtaaaactaaaaagaaccaaaggctttgtgaagtccattaatgtttccctgtacaagcagaatttggtgccaggcagaacagcaatgggccctcatacttcagctccattttcctttcagctgaaatagtcaaaacaatttacctgcactctgatgaaatatccatccccaactcactggttttcccctattttcccagattttacaagttcttttacataaacrtttccttaatctgtgcagcacaactgccaaaatcagaacctgagtgtggtcccttcaatgcctgagcattgtactttactgttttactgtgcattcctgcaacactgcacacaatcagttatcttttcagcactggtttaagacaaaaattgtactacctttcaattatgtcttgagctcaccagttcaataaattatacaaatccctcatattttaactagtagaaacacagtcatttaactcctaggcttacaacagaaatacttagccaacaaaatctataacagtgtctgaaagaa

SEQ ID NO: 65235 - DNA, 599 bp, Chicken  19866894332150_1
  misc_feature (1)..(89): n is any nucleotide
nnnnnnnnnnnnnnnnnnnnnnnnnnnnnnnnnnnnnnnnnnnnnnnnnnnnnnnnnnnnnnnnnnnnnnnnnnnnnnnnnnnnnnnnnttataggcttgttcctcccagagggcacctgatggcttctgtttttggctttcttcaatgaacgatgtagatttaggcagaaacaattccctgaacatatcccaaagaatgatggcaatattagacaaacaaacaacttgcatgagactgctgatgtgcacatttgaagcagcaagaagcaatgctttcccttccatctcacatctgcctrtgcttgacaagtttgcagcagttttacccagtgctaagattatgagaattagtcagatctgggctgcatctgaattttcagcactgtgatggtacaatataaccccgctcatcctggcagccataacactgaaaatggcagttttctggtaatactaaatgttattaatttaaatatacatttacatgttcatagtgttcaattttagttgatattattcaaaaaaaaggacaagtctaagtcatacttgccaatgcagaatcccttcattaggccttcagacaaaatcacccatctct

SEQ ID NO: 65236 - DNA, 600 bp, Chicken  19866894332158_1
aaatgagagtgagatctttcaaacctgaataatttgtttttataaaggactgtttacttgatctcgcttgacaaaaatatgaatagatgctatttcaggtctgaattacttttatgaaatagtcatttagctattcagtgattgttacctttaattcagtctcaaaatttaatagctataaccctcttctggtgtcacgagataagtgaggaaaatattctctttgctgaatgagctgtccagatgcacctaaaggatatatatgcattagcagatcatttgaggatggcctgctatttraagtataaatctctatcatcataaatatttttctgagtattctatatactgctcaccttctgctacagtaagtaatcttaagcaaccttttataccaaggcagaatagcaaaaaaaawttctgtatctttraacttactttcactgagctgtgttgttgtttgtatttttattttttaacatagcactgtgtaataattatgtataatagctacataatggttaatcagaagcaatcattttaggatcttcttccagcatgtttcagtctgacagctttacaaattaactacagttatgt

SEQ ID NO: 65237 - DNA, 532 bp, Chicken  19866894332158_2
atagtcatttagctattcagtgattgttacctttaattcagtctcaaaatttaatagctataaccctcttctggtgtcacgagataagtgaggaaaatattctctttgctgaatgagctgtccagatgcacctaaaggatatatatgcattagcagatcatttgaggatggcctgctatttaaagtataaatctctatcatcataaatatttttctgagtattctatatactgctcaccttctgctacagtaagtaatcttaagcaaccttttataccaaggcagaatagcaaaaaaaawttctgtatctttraacttactttcactgagctgtgttgttgtttgtatttttattttttaacatagcactgtgtaataattatgtataatagctacataatggttaatcagaagcaatcattttaggatcttcttccagcatgtttcagtctgacagctttacaaattaactacagttatgttaggataatagaggtttgatttttttctgtgtcataagagcttggaaatt

SEQ ID NO: 65238 - DNA, 519 bp, Chicken  19866894332158_3
tattcagtgattgttacctttaattcagtctcaaaatttaatagctataaccctcttctggtgtcacgagataagtgaggaaaatattctctttgctgaatgagctgtccagatgcacctaaaggatatatatgcattagcagatcatttgaggatggcctgctatttaaagtataaatctctatcatcataaatatttttctgagtattctatatactgctcaccttctgctacagtaagtaatcttaagcaaccttttataccaaggcagaatagcaaaaaaaawttctgtatctttraacttactttcactgagctgtgttgttgtttgtatttttattttttaacatagcactgtgtaataattatgtataatagctacataatggttaatcagaagcaatcattttaggatcttcttccagcatgtttcagtctgacagctttacaaattaactacagttatgttaggataatagaggtttgatttttttctgtgtcataagagcttggaaatt

SEQ ID NO: 65239 - DNA, 600 bp, Chicken  19866894332173_1
gctggaatggctggaaaagactttgtgcatcatttagtacaaaatctggggtgacatcagtggatccaacaccaccagctccaaaactggacaccccatggtttcctggtcgttcttatccttcctgggcatctccaataacaacacatcagcagttcccttggttgtttgaacagaactccccctgtgcaggctgttattaaattctcttacatctttattagacatcagatgtgatgaaaggtgacatctccagggaaatattgcacagggtgtggggatgggatgttaatgtactgwggtgacagagcatctgcaaatgtaatcatcttytaatgtccttgtgaaagaactgagatccagctctctttttttttctctgaaaaacgaagggtattgaggactgcacagcaaaaggcacttacctcttccctcttgcctaactctgttttctctctgtctacttctcctttttgttttaagaatgttcttggtggcattgctttttattattttgccactttccaatcttcatcctttttgttttagctgttggtacagctgatgagttctgctttccctccgacagattcatttcaa

SEQ ID NO: 65240 - DNA, 600 bp, Chicken  19866894332173_2
ttagtacaaaatctggggtgacatcagtggatccaacaccaccagctccaaaactggacaccccatggtttcctggtcgttcttatccttcctgggcatctccaataacaacacatcagcagttcccttggttgtttgaacagaactccccctgtgcaggctgttattaaattctcttacatctttattagacatcagatgtgatgaaaggtgacatctccagggaaatattgcacagggtgtggggatgggatgttaatgtactgwggtgacagagcatctgcaaatgtaatcatcttytaatgtccttgtgaaagaactgagatccagctctctttttttttctctgaaaaacgaagggtattgaggactgcacagcaaaaggcacttacctcttccctcttgcctaactctgttttctctctgtctacttctcctttttgttttaagaatgttcttggtggcattgctttttattattttgccactttccaatcttcatcctttttgttttagctgttggtacagctgatgagttctgctttccctccgacagattcatttcaaaggaaaatggcaacatcactacagaatcaatac

SEQ ID NO: 65241 - DNA, 600 bp, Chicken  19866894332184_1
ggccctcaggaggatctgctccatgatcttaccaggcacagaggcaagactgactagcctgtagttccctggatcttctttttctccctttttgaaaagggggttatgcttctccttttccaatcagtgggaacttcaccagactgccatgacctttcaaatatgatggatagtggcttggcagtttcatctgccagttccctcagaactgggtctcgttgggtcccatggacttgtgcaccttcaggttcttaagatggtctcaaacctgatcttcacttacagcagacagatcttccktctccaagttcttacctttgctattttatcttccatcaggcaatgttttgctcctttttccctagtctcttaattacagatgatgatgctgtctattgagaacacttagaagtaatctcactgtgctgttttcttgtaattttttatttttcttctatctggttctgttgctctccaaggaatttttctccatatcctcacttaggactccagtctgtgctggaccttgtcatctttgaatcacctgtgaaacattacatttttttctctgttagtttttttttgtttttcacttattag

SEQ ID NO: 65242 - DNA, 600 bp, Chicken  19866894332184_2
aagggaaagttatgacaagattgatgttggactttcctaggctgatatcctgtgctgaaggcaacataaatgtagggaatcttaatgtagctgctatattatctcccttgcttgtctatccttgaagcagtgtgaaatgcagctctttcaactagcataactactttatcaaaagtagcacgtgggtcatgaattccaatagctcaattggaaaagaataatttctctttcttttttgtactgaatgtttccttccaggatatgcatctcatgtgtcaggttccacaaatgaccaacaayaggtatcaagccataaaaattgcagacttatgattcttcacagttttgtgaccctgtcctgcttcatcacctcagtactgtgtgttaagttgaaatagttgtctcccaagggcaattctggaagtcttacttcagggctgaagtcgttagacattttttcataaatattgtggaggtcagcatttcactggcaggcctaatatcttccattaaactcaagattttcaggcttacagatgtggctcactaacttaagaaaatttgattttcaagacataacattaattttttctaaatgta

SEQ ID NO: 65243 - DNA, 600 bp, Chicken  19866894332185_1
acaggcaattgtttgtaaaaaataactatttcagcaaacagcaaatcttacgctgtgtatattagtcaatatccacaggagttaacaacactgaaaactctgttgtaatagttacaaatagaagtgacagcaacacaccaaagagatgattcattctgacccatgtctgtccctgcagtgaatggctggattcactgctaggcagagactagagatgctttacagttacatgtatgtatgagatactggtggtgggttacacttctggaacacaacggctaaaagtgtaacctacatctyatgaactaatcttaaaaaatatttcaattcttacatttatacaagtaatgggatcttctcatttgagtaaacaaaatagagaagaacagaagttgaagagatgtttggggataatgtgtattgtcagttgtagcagtgagcatcctctgagccatgttcaacattattttaaacagtttcagtgcagcagtgttgtttgaaagcctaaagtaatcagataaaaaccaccaccattaaagtggcacttagagattccaatgaggggaggacatgcagtgcctccctcctgttcccaaccct

SEQ ID NO: 65244 - DNA, 600 bp, Chicken  19866894332193_1
gctgtagcattcctgtaataagtcttcagaaatggctttatttactgtaacaacagaattaatgcatgtttctactggtatttttctttttttcataagaagcaacatgagttctgattgtgaaaatggtttgaattcctgcactgtggcccactgctgaataaagtgttaaggttcttatgtgatttgctaaatctcaatcaaattaagcacatacttaaatacttttgagtcctaatacaatgccctgctaaacctgactgcacacaactgtacactgccaagctagcaaaagctggmgtacaaaacttggttcatgggccaaggagagtttgctataacctgagtcttagatatttactcagaaaactttatttatcaaaatttaagtcttgctagctgcagagcgcctttggctctgtttgaagtaaacaggaattgaagatatttgagaaatgcaggagcctacgcactactagtatcaatcacatgggtacaaggccatcttaaaaagaaatggttcatctgaaagcttgagcaccaagagatcttcattcaaattcatttcacctttcagggctgccatctttttctctagta

SEQ ID NO: 65245 - DNA, 600 bp, Chicken  19866894332194_1
ccacgactacgctcacagaagtggaaaaacctgcaacagtacattagtttcacagaaaaggaaacatacttgagtgaaagctgatttggttccttttcagggttatttaaaaccttaaacagcatcagttttttttttctggtgcaaaaaatcttcctttttttaaaggtgctccaatttattctaaggaaatatttacacgggtagcagagccaaaacagagacttattattgtaaaaacttgaatccagtcaataatccaaggatgaagcgataggatgaagcgtatcattcaaacamtatgtacagagtcaatsagttcctcagtgagaagaggttgaatgcttccaattaaagtaccgggcgatacagagtttgctgtttcaaatgaattttgcaagaaactgtaataagacagtaagcacgatgactgtattggagaaaaacatgaagtactgcagcacattgaacaaaargtcrttttcctacgaatgcagcaataaaattaaaaaaaaaattcatttctaaatgagtgcacctgaaggtttggttttcagctggtgcaagttgtgtatctgcataccacgtatggaaaatgaa

SEQ ID NO: 65246 - DNA, 600 bp, Chicken  19866894332194_2
gaagtggaaaaacctgcaacagtacattagtttcacagaaaaggaaacatacttgagtgaaagctgatttggttccttttcagggttatttaaaaccttaaacagcatcagttttttttttctggtgcaaaaaatcttcctttttttaaaggtgctccaatttattctaaggaaatatttacacgggtagcagagccaaaacagagacttattattgtaaaaacttgaatccagtcaataatccaaggatgaagcgataggatgaagcgtatcattcaaacamtatgtacagagtcaatsagttcctcagtgagaagaggttgaatgcttccaattaaagtaccgggcgatacagagtttgctgtttcaaatgaattttgcaagaaactgtaataagacagtaagcacgatgactgtattggagaaaaacatgaagtactgcagcacattgaacaaaargtcrttttcctacgaatgcagcaataaaattaaaaaaaaaattcatttctaaatgagtgcacctgaaggtttggttttcagctggtgcaagttgtgtatctgcataccacgtatggaaaatgaagaaaggagaaacaaata

SEQ ID NO: 65247 - DNA, 581 bp, Chicken  19866894332194_3
atttattctaaggaaatatttacacgggtagcagagccaaaacagagacttattattgtaaaaacttgaatccagtcaataatccaaggatgaagcgataggatgaagcgtatcattcaaacamtatgtacagagtcaatsagttcctcagtgagaagaggttgaatgcttccaattaaagtaccgggcgatacagagtttgctgtttcaaatgaattttgcaagaaactgtaataagacagtaagcacgatgactgtattggagaaaaacatgaagtactgcagcacattgaacaaaargtcrttttcctacgaatgcagcaataaaattaaaaaaaaaattcatttctaaatgagtgcacctgaaggtttggttttcagctggtgcaagttgtgtatctgcataccacgtatggaaaatgaagaaaggagaaacaaatataaacgcatcaagttgaaaaaaaaataagcagcccttatgcagcacgtcatcaaaaaattcagttcccatgtcagtaagataagcacttggaacaaagacatctgacaacagcaacttcatattatcactagcaaatctg

SEQ ID NO: 65248 - DNA, 577 bp, Chicken  19866894332194_4
attctaaggaaatatttacacgggtagcagagccaaaacagagacttattattgtaaaaacttgaatccagtcaataatccaaggatgaagcgataggatgaagcgtatcattcaaacamtatgtacagagtcaatsagttcctcagtgagaagaggttgaatgcttccaattaaagtaccgggcgatacagagtttgctgtttcaaatgaattttgcaagaaactgtaataagacagtaagcacgatgactgtattggagaaaaacatgaagtactgcagcacattgaacaaaargtcrttttcctacgaatgcagcaataaaattaaaaaaaaaattcatttctaaatgagtgcacctgaaggtttggttttcagctggtgcaagttgtgtatctgcataccacgtatggaaaatgaagaaaggagaaacaaatataaacgcatcaagttgaaaaaaaaataagcagcccttatgcagcacgtcatcaaaaaattcagttcccatgtcagtaagataagcacttggaacaaagacatctgacaacagcaacttcatattatcactagcaaatctg

SEQ ID NO: 65249 - DNA, 600 bp, Chicken  19866894332196_1
aggctcggtttccctgcatgcttcctgaaagcccacttgtgctgctcctgcaggacattccaagtgcagcagcctgcctgagagggttttgcaaggcagcatgcaaatgctgtgcagagatatgatattcttacaataaggatgagggaaaaaaagctgaaggaaggcaggcagatttaactaggtgggctggggcagctgagcagcctccattcatccatgcctcctgttccccctctgcagtgctgacaagtcatatatcccccgcaccacactgcagtttttctccagctctgggastccaagtgccaaatatggtagatcagcctgctgaccagctgcatctgttgcatctaaagccaatgagaagctgtggaccgtatgytcctctttgaggacaactcagtacttgtcacagcacctgggtcagatgggggtgcaggtcaagggcagaggcctgctctgttgctcactcttatgctcctcctagggtgtgccagacccagttggagcctggggaacatgctgatgggcttacacaattggcagatccagcccagccagctgccaaatcccttggctgcaaggagtcccaaggag

SEQ ID NO: 65250 - DNA, 600 bp, Chicken  19866894332196_2
gttttgcaaggcagcatgcaaatgctgtgcagagatatgatattcttacaataaggatgagggaaaaaaagctgaaggaaggcaggcagatttaactaggtgggctggggcagctgagcagcctccattcatccatgcctcctgttccccctctgcagtgctgacaagtcatatatcccccgcaccacactgcagtttttctccagctctgggastccaagtgccaaatatggtagatcagcctgctgaccagctgcatctgttgcatctaaagccaatgagaagctgtggaccgtatgytcctctttgaggacaactcagtacttgtcacagcacctgggtcagatgggggtgcaggtcaagggcagaggcctgctctgttgctcactcttatgctcctcctagggtgtgccagacccagttggagcctggggaacatgctgatgggcttacacaattggcagatccagcccagccagctgccaaatcccttggctgcaaggagtcccaaggaggaggttttctgtccccacgccaacactcactcagtgtyccacctgcccaagctgctctgttaataygattgaggaaactcctgac

SEQ ID NO: 65251 - DNA, 431 bp, Chicken  19866894332196_3
ctgcatctgttgcatctaaagccaatgagaagctgtggaccgtatgytcctctttgaggacaactcagtacttgtcacagcacctgggtcagatgggggtgcaggtcaagggcagaggcctgctctgttgctcactcttatgctcctcctagggtgtgccagacccagttggagcctggggaacatgctgatgggcttacacaattggcagatccagcccagccagctgccaaatcccttggctgcaaggagtcccaaggaggaggttttctgtccccacgccaacactcactcagtgtyccacctgcccaagctgctctgttaataygattgaggaaactcctgacaccaatgaggagatgagctccgaacatgggggctttacagtgctctctgtccacacccagtacagcaaagactccctaacatgg

SEQ ID NO: 65252 - DNA, 403 bp, Chicken  19866894332196_4
gaagctgtggaccgtatgytcctctttgaggacaactcagtacttgtcacagcacctgggtcagatgggggtgcaggtcaagggcagaggcctgctctgttgctcactcttatgctcctcctagggtgtgccagacccagttggagcctggggaacatgctgatgggcttacacaattggcagatccagcccagccagctgccaaatcccttggctgcaaggagtcccaaggaggaggttttctgtccccacgccaacactcactcagtgtyccacctgcccaagctgctctgttaataygattgaggaaactcctgacaccaatgaggagatgagctccgaacatgggggctttacagtgctctctgtccacacccagtacagcaaagactccctaacatgg

SEQ ID NO: 65253 - DNA, 599 bp, Chicken  19866894332200_1
  misc_feature (1)..(97): n is any nucleotide
nnnnnnnnnnnnnnnnnnnnnnnnnnnnnnnnnnnnnnnnnnnnnnnnnnnnnnnnnnnnnnnnnnnnnnnnnnnnnnnnnnnnnnnnnnnnnnnnnctgtgccctccattatcatttaagaaaatccaggataaattatgtagtagttaaaaatctgtcctccatactcacttaatggaaaagagctgagcatctttaagggataacagaacaggcagaatgaagatacgtgctactctgagtccacccagtaaccccaggaccctcactgtgagctgacacaagcccacccctcacayctaccactgcatgttagcataactaaagtaccagagggaaagaaaaaaaaagaaagaaagaaagaaagaaaaaagctgtaaaggagagcactcaggtcatggcagtaaatcacagcccttaatttcacgtgaaagaagggaatgttagactaacacaggaccctcaaagagtcctttgttaggatggaggcttgtgcataaataggtttcagaagcgcagagaaaggaggtttagaaaggaaaatgactctggatttttattttatttgccttgttttaccaccattcagagagtaaaa

SEQ ID NO: 65254 - DNA, 599 bp, Chicken  19866894332200_2
  misc_feature (1)..(45): n is any nucleotide
nnnnnnnnnnnnnnnnnnnnnnnnnnnnnnnnnnnnnnnnnnnnnctgtgccctccattatcatttaagaaaatccaggataaattatgtagtagttaaaaatctgtcctccatactcacttaatggaaaagagctgagcatctttaagggataacagaacaggcagaatgaagatacgtgctactctgagtccacccagtaaccccaggaccctcactgtgagctgacacaagcccacccctcacayctaccactgcatgttagcataactaaagtaccagagggaaagaaaaaaaaayaaagaaagaaagaaagaaaaaagctgtaaaggagagcactcaggtcatggcagtaaatcacagcccttaatttcacgtgaaagaagggaatgttagactaacacaggaccctcaaagagtcctttgttaggatggaggcttgtgcataaataggtttcagaagcgcagagaaaggaggtttagaaaggaaaatgactctggatttttattttatttgccttgttttaccaccattcagagagtaaaagagctgaaaaaaaatccagcagagatagaactgacaattaaccttcgcctga

SEQ ID NO: 65255 - DNA, 600 bp, Chicken  19866894332202_1
tcataagaccaattttctacatcataatttgcctaaaatgcagtggacatgatttgcagttgtgtagtttactctcaggctgctcagtgtggcagcccacatacccttctaccccatacccagcccaggctgacacctcaagggaaacactagggcacaagaccattgtctacaggaatctccttctgaaagctaggcatcttctaccttagagtacccagagtggcaagatcatactgttcaggagccatattacattgcttaggtgccttcctgccttatcactttgggcatgtgtartagytgaaggcaatgaacttttcatgggatttctaaaacgtttgctttctttccagctctgtgatgaagtgggaattaagcagcatgccatcctrccaccactccctcaccattgaccrgtgtttcgcatggtaggtgttttctcacagtcattttctttcccttctctatttcctctgttaaatgtcacttcaaaagataagccttctcttctaaatcacggatgtcctctctgtcttactgttaaatgcagcttagtctggccctggttctccctttttgtctgcctgcagcttcaca

SEQ ID NO: 65256 - DNA, 600 bp, Chicken  19866894332202_2
aagaccaattttctacatcataatttgcctaaaatgcagtggacatgatttgcagttgtgtagtttactctcaggctgctcagtgtggcagcccacatacccttctaccccatacccagcccaggctgacacctcaagggaaacactagggcacaagaccattgtctacaggaatctccttctgaaagctaggcatcttctaccttagagtacccagagtggcaagatcatactgttcaggagccatattacattgcttaggtgccttcctgccttatcactttgggcatgtgtartagytgaaggcaatgaacttttcatgggatttctaaaacgtttgctttctttccagctctgtgatgaagtgggaattaagcagcatgccatcctrccaccactccctcaccattgaccrgtgtttcgcatggtaggtgttttctcacagtcattttctttcccttctctatttcctctgttaaatgtcacttcaaaagataagccttctcttctaaatcacggatgtcctctctgtcttactgttaaatgcagcttagtctggccctggttctccctttttgtctgcctgcagcttcacagtca

SEQ ID NO: 65257 - DNA, 600 bp, Chicken  19866894332202_3
cccacatacccttctaccccatacccagcccaggctgacacctcaagggaaacactagggcacaagaccattgtctacaggaatctccttctgaaagctaggcatcttctaccttagagtacccagagtggcaagatcatactgttcaggagccatattacattgcttaggtgccttcctgccttatcactttgggcatgtgtartagytgaaggcaatgaacttttcatgggatttctaaaacgtttgctttctttccagctctgtgatgaagtgggaattaagcagcatgccatcctrccaccactccctcaccattgaccrgtgtttcgcatggtaggtgttttctcacagtcattttctttcccttctctatttcctctgttaaatgtcacttcaaaagataagccttctcttctaaatcacggatgtcctctctgtcttactgttaaatgcagcttagtctggccctggttctccctttttgtctgcctgcagcttcacagtcagtgttttatagctctgtaatgacagctgttcatcatagaatcatagaatggcttggattggaagggacctccaggatcttcaagctccaac

SEQ ID NO: 65258 - DNA, 600 bp, Chicken  19866894332202_4
ccagcccaggctgacacctcaagggaaacactagggcacaagaccattgtctacaggaatctccttctgaaagctaggcatcttctaccttagagtacccagagtggcaagatcatactgttcaggagccatattacattgcttaggtgccttcctgccttatcactttgggcatgtgtartagytgaaggcaatgaacttttcatgggatttctaaaacgtttgctttctttccagctctgtgatgaagtgggaattaagcagcatgccatcctrccaccactccctcaccattgaccrgtgtttcgcatggtaggtgttttctcacagtcattttctttcccttctctatttcctctgttaaatgtcacttcaaaagataagccttctcttctaaatcacggatgtcctctctgtcttactgttaaatgcagcttagtctggccctggttctccctttttgtctgcctgcagcttcacagtcagtgttttatagctctgtaatgacagctgttcatcatagaatcatagaatggcttggattggaagggacctccaggatcttcaagctccaacctcccttcctcaggcagggccact

SEQ ID NO: 65259 - DNA, 600 bp, Chicken  19866894332204_1
ccgtagtgatttcttgtctagcagttaatcaagctgccagaccctctggcctacatcaaaagcagaaccctagtaacccgtacccttatgctaatctgagcagtccagtagcccacagttatatggtatatggcatatactaactacccaagtgtttacccatcctcttagacaggttttgtgctccagaaaggccccacatttgtcatgactagaaatgaacttctcccagttagacatcccagagttttatgttcttgctatagtaaagatacagcaagtaactatggtgcagataayaattactgagacttttatacttcctgtggcttctgttacagtctgtattccacagtctgttaggaaacaacccttccttccggagcgacaaaatctacatcaagtcccactttttcttctttggagaaccttctgcaagaaacacgctgccctactgcaataagccagtaagaaacaactacttaaaattgtacgcccgctgtttggatggctgtgatatttcttcattgagatttgcagctcttccagggtagggtatatatgtggactataattcaatggactaccatcacaacaaag

SEQ ID NO: 65260 - DNA, 599 bp, Chicken  19866894332218_1
  misc_feature (1)..(184): n is any nucleotide
nnnnnnnnnnnnnnnnnnnnnnnnnnnnnnnnnnnnnnnnnnnnnnnnnnnnnnnnnnnnnnnnnnnnnnnnnnnnnnnnnnnnnnnnnnnnnnnnnnnnnnnnnnnnnnnnnnnnnnnnnnnnnnnnnnnnnnnnnnnnnnnnnnnnnnnnnnnnnnnnnnnnnnnnnnnnnnnnnnnnnnnnactgctgcagcacgtgcttactgccctatctcacacaggctgagatctgatgagataatggataacgtgatcgtgcctgcttgggcaccttttggggtggaagctgagcccttgcwctgygggtacccggctgtagggtgctgggggcttcagaaagagcctacagagggacctgtggggttgagatgctcctggacaatgcagcactgggggagggcagaggttcagggtcttcattttggatgtttctcttccattctgggtgctgaatgccttttctggagttgggtttaaaattagggaagaattttttctagctcctttcacaggaaaagcgtgggccaggagggaggacagccctattgagcgctgctggtaaccccttaatgatggggcgagcagcacagccaggaat

SEQ ID NO: 65261 - DNA, 599 bp, Chicken  19866894332218_2
  misc_feature (1)..(180): n is any nucleotide
nnnnnnnnnnnnnnnnnnnnnnnnnnnnnnnnnnnnnnnnnnnnnnnnnnnnnnnnnnnnnnnnnnnnnnnnnnnnnnnnnnnnnnnnnnnnnnnnnnnnnnnnnnnnnnnnnnnnnnnnnnnnnnnnnnnnnnnnnnnnnnnnnnnnnnnnnnnnnnnnnnnnnnnnnnnnnnnnnnnnactgctgcagcacgtgcttactgccctatctcacacaggctgagatctgatgagataatggataacgtgatcgtgcctgcttgggcaccttttggggtggaagctgagcccttgcwctgygggtacccggctgtagggtgctgggggcttcagaaagagcctacagagggacctgtggggttgagatgctcctggacaatgcagcactgggggagggcagaggttcagggtcttcattttggatgtttctcttccattctgggtgctgaatgccttttctggagttgggtttaaaattagggaagaattttttctagctcctttcacaggaaaagcgtgggccaggagggaggacagccctattgagcgctgctggtaaccccttaatgatggggcgagcagcacagccaggaatagac

SEQ ID NO: 65262 - DNA, 600 bp, Chicken  19866894332227_1
gttctctcacaataagcccttgggaggtgcagaaaatgtgagagttatgagatacgaagttgtccagtgcatgttcccttcaaagaattcaggcatgctgctatgccagtcttctttgccttggggggtatgatactgactattaagatctaaatgatgttgaatgaatctgaattgtttgtttttttttccacctccagattcatcatccaatccccctctctctttctgtgtgtatttgtaaaaatccaccgaacgttaaatttgtctaataagcactgactttgggggctgttgtaratgttcacgctttgggttctttcactatccatttgctttccattattccaaacatgtccactgattcctgatgccactcattattcttaatttcctgggctgtgaagtgatgtgaaattgaggatctctctttggtgttctctctccagggatagttcatcagtagcagaaaatttgcacctttcatttacarttttcattatggagtattcattttgctttagagacccaagattcgcctcagtgatcagaacaaaacactaatatgcctgctgctgatagcaaaatgttaaagtttgt

SEQ ID NO: 65263 - DNA, 600 bp, Chicken  19866894332227_2
cctccagattcatcatccaatccccctctctctttctgtgtgtatttgtaaaaatccaccgaacgttaaatttgtctaataagcactgactttgggggctgttgtaratgttcacgctttgggttctttcactatccatttgctttccattattccaaacatgtccactgattcctgatgccactcattattcttaatttcctgggctgtgaagtgatgtgaaattgaggatctctctttggtgttctctctccagggatagttcatcagtagcagaaaatttgcacctttcatttacarttttcattatggagtattcattttgctttagagacccaagattcgcctcagtgatcagaacaaaacactaatatgcctgctgctgatagcaaaatgttaaagtttgtattgattaaacattaaaacagactgactgcttgaagatatgttccttgattaaaaacactagagcttttcacggggaagtattttgcactgcatccataatgatttcaagatgacatttggaaagaacacgcataaaacttcttatgctcaaattytgctagaagtgatacagctgtaatttaaattttctgg

SEQ ID NO: 65264 - DNA, 600 bp, Chicken  19866894332227_3
tcatcagtagcagaaaatttgcacctttcatttacarttttcattatggagtattcattttgctttagagacccaagattcgcctcagtgatcagaacaaaacactaatatgcctgctgctgatagcaaaatgttaaagtttgtattgattaaacattaaaacagactgactgcttgaagatatgttccttgattaaaaacactagagcttttcacggggaagtattttgcactgcatccataatgatttcaagatgacatttggaaagaacacgcataaaacttcttatgctcaaattytgctagaagtgatacagctgtaatttaaattttctgggtcttaagtgacagcagataaaacacacaggaaaatgtcctaatactagctcccctgctttacacttaatttttttgaattgtctttgtatgagatatgaaaacttactctttctggttgcttgcaactcagaatgagaatagagatcttccctagctttctccgtcagataatcgtgatttctgaagctatggcaacaagacctgatctcttctttacagacctgtacagccaactgttggagggcctgggttctttggagt

SEQ ID NO: 65265 - DNA, 600 bp, Chicken  19866894332230_1
atataaatatatttattgaaataagtttcactatttgctatgttactgaaaaattgttttccctaaagattttgttgtaggtgtgggtatgtgagtgtgtgcctacaagtgtttaggttttttttattgcgtatgttttgtgtttcatagcaaattgaagtaatttgtacaaataacaaagtcacagttaaatattttcaaggaactgattacttcttcatgaaaacacattgagtttgtttcaaagttacaagaacttcctagctgtgaattaaatgtctttgaactaacagatgaaaygaagaaaatcagtggtaagtgacccatccccagatctcagttgctactactaaaacttagtggacaggaaaaaaatcctattatattagattttaatatctcagtgcacatccttttaatgaatagattttagactgttttctattaattgcagagacgtaagactaaatccagctgctgtgaataatgaagtgaatcttctcaagaatttctctgggaaaggagaggatacagtactggaatcactggaatatacatcaggtccaaattttatcatatctaatgtttacttataccctt

SEQ ID NO: 65266 - DNA, 600 bp, Chicken  19866894332232_1
aaacaggacgagattatgggtttgttacctgagtgactgcgtggagatggggagcagcggacaccggcgtcccgctggcacgccgcatctcggtgacaattagggacgtgcgagcggtgtggcgggcgggggtggcgggatgacaaaatgctggtcacgccgtccagcagagcagaaaatgaggttacaattgggagataatgtttgcatatgtaaccatatttcagcaagctgggcaacttcagggagcggaggagatgggctatcgtaaacaacaccgctgcgcgcggcgagctttcygcgacctctgcgtgagaaacccgggcaccacgtcctaatgagctgcctgctggacrcagcctgagggcaagaatttcctaaaagaaggcagctccagccccgagggcaaagggagcgcatgggagcgggttagcgcgggtgcgccgtcccctccctctgccttccctcatcggaggggatttgtttcgccttgcggcagcgcatccccaagcagagcattcttggatttgcatggcaacgttttggcggtagtaggctgccgggggtgtgacatgatggtcaaaatatcttctgatttat

SEQ ID NO: 65267 - DNA, 600 bp, Chicken  19866894332232_2
gcggacaccggcgtcccgctggcacgccgcatctcggtgacaattagggacgtgcgagcggtgtggcgggcgggggtggcgggatgacaaaatgctggtcacgccgtccagcagagcagaaaatgaggttacaattgggagataatgtttgcatatgtaaccatatttcagcaagctgggcaacttcagggagcggaggagatgggctatcgtaaacaacaccgctgcgcgcggcgagctttcygcgacctctgcgtgagaaacccgggcaccacgtcctaatgagctgcctgctggacrcagcctgagggcaagaatttcctaaaagaaggcagctccagccccgagggcaaagggagcgcatgggagcgggttagcgcgggtgcgccgtcccctccctctgccttccctcatcggaggggatttgtttcgccttgcggcagcgcatccccaagcagagcattcttggatttgcatggcaacgttttggcggtagtaggctgccgggggtgtgacatgatggtcaaaatatcttctgatttataatggcctcctttaattaggaacttggtgctttttttgcccctagtagtgagcaat

SEQ ID NO: 65268 - DNA, 599 bp, Chicken  19866894332240_1
  misc_feature (1)..(58): n is any nucleotide
nnnnnnnnnnnnnnnnnnnnnnnnnnnnnnnnnnnnnnnnnnnnnnnnnnnnnnnnnnaactaagaaaaaacaaagtcactgcttccctcctcttgcttaacataatattattaaaatttattttaaaataatcataaactgtgaaaaggtttgggttggaaggcatcagctagtcccaatcccaccaccaccagggatacggacaaaagatatctcactttgatgttaccaaaagactgcacaaaagtactacttttatttcattatttccatttccagatggctttatgtgctgctgkggyactcaggagctgcagcagagcaagggtcacaaagaatgaacctgcagaactttgtgggtttctttttaatagacttcaggttccacttggaagctacttagaactttcacagtggtgtatagtccatctcacatctattttacacacagaacgttcagaagtttcgttagcaatttgtagcagaaaggcacggaattggttatcatggaaaaatagctccaagccaagagctgtctctgggttatggcagggaaacagtcacctattgctgctgttcatgaggtatgcgagcaaat

SEQ ID NO: 65269 - DNA, 599 bp, Chicken  19866894332240_2
  misc_feature (1)..(55): n is any nucleotide
nnnnnnnnnnnnnnnnnnnnnnnnnnnnnnnnnnnnnnnnnnnnnnnnnnnnnnnaactaagaaaaaacaaagtcactgcttccctcctcttgcttaacataatattattaaaatttattttaaaataatcataaactgtgaaaaggtttgggttggaaggcatcagctagtcccaatcccaccaccaccagggatacggacaaaagatatctcactttgatgttaccaaaagactgcacaaaagtactacttttatttcattatttccatttccagatggctttatgtgctgctgkggyactcaggagctgcagcagagcaagggtcacaaagaatgaacctgcagaactttgtgggtttctttttaatagacttcaggttccacttggaagctacttagaactttcacagtggtgtatagtccatctcacatctattttacacacagaacgttcagaagtttcgttagcaatttgtagcagaaaggcacggaattggttatcatggaaaaatagctccaagccaagagctgtctctgggttatggcagggaaacagtcacctattgctgctgttcatgaggtatgcgagcaaataaa

SEQ ID NO: 65270 - DNA, 600 bp, Chicken  19866894332242_1
atattgtgagatgttgaaacttgtcctatttagaaggatatttgattaaagggtacttgatatttctccagtgcactggtattggtctttctccaatatgcattgtgtccagtcacttatattaacttattttaagccatgtttgttaagtacccaggatgtagacttatttgacagatgatgcagaacattcgctcactattttaagttccactgagtgttatcagtcattattatggctaactgtatttgtacctctcagaataattctttgtaccaataaaatcaaaaccttttctktaaaaaaagcttaatgatagcaatgatagattacctcctattcatcatawgaaaaaaaaaaagtaagtaatgaggagttagcagaaaccaacatacaaaaatcagagctagttttcagtgagacaaaagaatgtaatattcaagagagcagtggaaagactttgttttgtgttcaaaactgtttaaaatatttcttcctttggaatggtgccatgcccatagcaggtagtgtaatgtattttctgcttcaactttccattcattcactgttgttaaaaaattatacatggataaactgtg

SEQ ID NO: 65271 - DNA, 600 bp, Chicken  19866894332242_2
gggtacttgatatttctccagtgcactggtattggtctttctccaatatgcattgtgtccagtcacttatattaacttattttaagccatgtttgttaagtacccaggatgtagacttatttgacagatgatgcagaacattcgctcactattttaagttccactgagtgttatcagtcattattatggctaactgtatttgtacctctcagaataattctttgtaccaataaaatcaaaaccttttctktaaaaaaagcttaatgatagcaatgatagattacctcctattcatcatawgaaaaaaaaaaagtaagtaatgaggagttagcagaaaccaacatacaaaaatcagagctagttttcagtgagacaaaagaatgtaatattcaagagagcagtggaaagactttgttttgtgttcaaaactgtttaaaatatttcttcctttggaatggtgccatgcccatagcaggtagtgtaatgtattttctgcttcaactttccattcattcactgttgttaaaaaattatacatggataaactgtggaatagacggtgagagagagaaagaacatttgagtggctattagtaacat

SEQ ID NO: 65272 - DNA, 599 bp, Chicken  19866894332249_1
  misc_feature (1)..(255): n is any nucleotide
nnnnnnnnnnnnnnnnnnnnnnnnnnnnnnnnnnnnnnnnnnnnnnnnnnnnnnnnnnnnnnnnnnnnnnnnnnnnnnnnnnnnnnnnnnnnnnnnnnnnnnnnnnnnnnnnnnnnnnnnnnnnnnnnnnnnnnnnnnnnnnnnnnnnnnnnnnnnnnnnnnnnnnnnnnnnnnnnnnnnnnnnnnnnnnnnnnnnnnnnnnnnnnnnnnnnnnnnnnnnnnnnnnnnnnnnnnnnnnnnnnnnnnnnnnnnnnntcatcaagaagcatgatgaaaaagaggtccataatacatagaggrtatgattgatgtattacatatataatgtaatctgtaacacaaaagatttaatttattccatgacataaagsttaaattttgtttccattttgatctgaaataatggaactatatttgagtatgtttccctttgcatctgtcattgattactgtaatccacaacaaaattaaaagacacaatggatcaaacaaaggtattaaaaagataactattttacagtacagaagtaaaggctagcatatacaggggaactatgttaactatgttgacttttccccccatgctgttggaaaggaga

SEQ ID NO: 65273 - DNA, 599 bp, Chicken  19866894332249_2
  misc_feature (1)..(184): n is any nucleotide
nnnnnnnnnnnnnnnnnnnnnnnnnnnnnnnnnnnnnnnnnnnnnnnnnnnnnnnnnnnnnnnnnnnnnnnnnnnnnnnnnnnnnnnnnnnnnnnnnnnnnnnnnnnnnnnnnnnnnnnnnnnnnnnnnnnnnnnnnnnnnnnnnnnnnnnnnnnnnnnnnnnnnnnnnnnnnnnnnnnnnnnntcatcaagaagcatgatgaaaaagaggtccataatacatagaggrtatgattgatgtattacatatataatgtaatctgtaacacaaaagatttaatttattccatgacataaagsttaaattttgtttccattttgatctgaaataatggaactatatttgagtatgtttccctttgcatctgtcattgattactgtaatccacaacaaaattaaaagacacaatggatcaaacaaaggtattaaaaagataactattttacagtacagaagtaaaggctagcatatacaggggaactatgttaactatgttgacttttccccccatgctgttggaaaggagaggttatgattaatagcctaaataccaacagttaggcctactcaccatgatatcttatctaactgtctgaaa

SEQ ID NO: 65274 - DNA, 359 bp, Chicken  19866894332249_3
atgattaatagcctaaataccaacagttaggcctactcaccatgatatcttatctaactgtctgaaatggcatgtggtgttaatgtgttaaatatgatagcttttttatcttctgacttcttttttgagaaatggcatgtgttttcacacgcataagaaatgcaggcagactactattttctcacatgaagtctaataccttggatgggtgaagttcttttcttctagaaaaagactaggatgtatatgtagcctataatttttcttgctaattggctatttttttagaagctctcaatktgtctgtttttatgttatactgttaaccctctatatcataaggaattttgcagtcagaa

SEQ ID NO: 65275 - DNA, 600 bp, Chicken  19866894332256_1
attatatagaagttcttgacccttcctaaatattttttttcttctacattgatatttatttttcagcatgttatttgattgaacttatacagaaaatagatacgtgaaattttcaaatacattttttttcatttatgttctccatatacagtatatgctttagctgctgtctctttctgatttttcaattgataaaaaagtcagctattaaagtttgaaaaagtagagcacagtgttgttttttttttttaagctagacgatgtcatcctttcaaattgtttttacctttgagcaaaatyactgcatactgaatgaaaaacaattttttaatgtagcaggatactttgcaattgatgccaaaaaataaatcagccaaatgattatcttttgtcttaagacttatataaatcatgaggcctagatgcatagtttaataacacgatgctgcaactttaacaaggactacatttgtctttaagtccacatgatagtgaaagcttaatatgaaaaacttttgtctagcacaagtgatttgaagatgttttgctccatgcatgtgaactcagcaggtgattcttgcctatctttgatgtcaaaca

SEQ ID NO: 65276 - DNA, 600 bp, Chicken  19866894332263_1
gtgcaagggcagcacaacaatcagcagagctcttctggaagttggagttttcatctgatccattcatgaagataagagggattcacatgccatctgcctggccctgaaagggtagcagctgatataagcaagtgctgctgtcagctgtcttgtgccaaaatgaaggtaactgcctccaaaggacttctgccatgtaaagactgctcactccagagccatctttgtgcagacaaaaaagtgagaacatggatgccatcctgcactgtctcctccgtcctctaactatggtgagacaaccartattaaagagaatttgcaccttcatggacctggtacagaacaaatcatcagcaccaaagctctactctgggatttattaaatgatcaattcttgcctggatatgaaggactgtgggttagtacaggactcacatagagttgaattgctgcattaccacattttgagccaggagcagcatcagtactgacaataaggaggacaggatgctggaaggtaaataagaatattctgtatgatatttcacatgcatatcccatgtcttctcataaaataagatttacttggtaaagaacacttct

SEQ ID NO: 65277 - DNA, 600 bp, Chicken  19866894332264_1
gttttaaacagtgccctaatagattcccatccttcacatgttggtattgaaagctactcagacaagttagcaccaatagatctgctctgtaccttccctttacttatttggtttggtatgacatcatcttgtttcttggtattgaaggggccaccctcgtgatgagctttgtcgttggtagctgtgagcattggatagcctgagtcagagccccagagtgggaaacctgaggtaaaaccaacagctgttgaaaaatgaaccctctcttagccgtgtgattgctaaaccatcctgtgtgaytctgccttttcaaacaaccacccagaactgggagatacacagaagcaaaaccgaaccctgcgtgttgtgggttcatcctgggatatgggatcatttggattcaggcaatctgaccagggatacagattttatctgatgtcaccaagtcaaacctattcctatttatgacccacacttcaattcatttatgactctggttgctgtgacagtggcacagctcagagtaaacactcaacctgtttgcataagcatagcaattcatctgagaagcccaaggcagccaaaaacatatcactggta

SEQ ID NO: 65278 - DNA, 600 bp, Chicken  19866894332264_2
tgggatatgggatcatttggattcaggcaatctgaccagggatacagattttatctgatgtcaccaagtcaaacctattcctatttatgacccacacttcaattcatttatgactctggttgctgtgacagtggcacagctcagagtaaacactcaacctgtttgcataagcatagcaattcatctgagaagcccaaggcagccaaaaacatatcactggtaaacattacatcacctacactgtaaaagacagacaagagagtcacaataaggaagtagcagggaaacaggcgcacctgraacacgggttgttttccccacatagaacaaaggcttttctcccccgtgacaaaagagagcacagagagaggctgcaggatggagggcactcgtgaygctgttagagctcccgcagagatcaccaggttgggaagcttttcttcttttgtaaccagtgggtctggttctgttggtgcagcgaaggagcagagtggcaaaaacacaccctgtggacttcagaccagagaatggttaagaatgggaacaggctcctcagtccttctgcttcctggcacaactcccctgaatccaaccccttcc

SEQ ID NO: 65279 - DNA, 600 bp, Chicken  19866894332264_3
cttcaattcatttatgactctggttgctgtgacagtggcacagctcagagtaaacactcaacctgtttgcataagcatagcaattcatctgagaagcccaaggcagccaaaaacatatcactggtaaacattacatcacctacactgtaaaagacagacaagagagtcacaataaggaagtagcagggaaacaggcgcacctgraacacgggttgttttccccacatagaacaaaggcttttctcccccgtgacaaaagagagcacagagagaggctgcaggatggagggcactcgtgaygctgttagagctcccgcagagatcaccaggttgggaagcttttcttcttttgtaaccagtgggtctggttctgttggtgcagcgaaggagcagagtggcaaaaacacaccctgtggacttcagaccagagaatggttaagaatgggaacaggctcctcagtccttctgcttcctggcacaactcccctgaatccaaccccttcccctcttcccaggcgcttgcaggactctctgctaacagctttcttgacaggatggaggtagggatgatttccttcttaaatgtattcagagaagttg

SEQ ID NO: 65280 - DNA, 599 bp, Chicken  19866894332266_1
  misc_feature (1)..(62): n is any nucleotide
nnnnnnnnnnnnnnnnnnnnnnnnnnnnnnnnnnnnnnnnnnnnnnnnnnnnnnnnnnnnnncgtggagggtaccgctgctgagattgttgctgtgggtgtaactgagacaaggtgtagtgatgcttgctctcttgcctggccccagtgccacgtcctggcaggagatgctgcaggatgggatgcttgggcagcatccccagggtttggaccctggctcggaggtggcagggctgcagggagtgactctaaagcataatcaaaggatcctgcaagcagtaagaagacagcgactcccagmatctgaccttaatgctcacccctgctctgaaggctggctccagactcaaaaagctgttcccaccctcagcctttgcttgctccaagctgctaactcagtggagaaacagggaggaaagatgtccagatcttgctgcttctttgcagtaagtaagtgttagtattccactgatatttatagttccctgtgggaggggaggcattacacacaacttccagtgggtattttcagaaagccacctgctcaccaccattgtgcaggaacaccattgttctgcaacagaaaggtcggcagacgag

SEQ ID NO: 65281 - DNA, 600 bp, Chicken  19866894332267_1
aaatcagtgtgttgaagtaaagatttctcaaagtcttgagcagatctttagtggaatatgaccaattatgtccaaaagaaaataaacaaaatgggaaaggtggacatttttatagttatgtctctctaatacccactttgaggcatccatgagattaatctttttctaatctaaaaaatgagcactactgaccagcactatgtactcataagttcattcaaatatattaaacttacaaagggagagaagtttatgtaagttctatgaaaatcatataaacgtactatcagatctaatcamttttctaaatatcatattttagacagtaatatgaagactgaaccagcattcttctactgtgttggtttaaactacttgccttgtttcaccaatatatgttaacttgaggattaggagtgactgtttcagggggatgatgaatgtgtagataactaatatctggacttagatccccatgtcatgagcacataaaaatagcaggctaaaccttctggtcccaattaacaaactgaaaatactctccagcttctttggtgaaaagtgtcgtgatgtttttggaaagtaagacgggttaatttt

SEQ ID NO: 65282 - DNA, 599 bp, Chicken  19866894332277_1
  misc_feature (1)..(141): n is any nucleotide
nnnnnnnnnnnnnnnnnnnnnnnnnnnnnnnnnnnnnnnnnnnnnnnnnnnnnnnnnnnnnnnnnnnnnnnnnnnnnnnnnnnnnnnnnnnnnnnnnnnnnnnnnnnnnnnnnnnnnnnnnnnnnnnnnnnnnnnnnnnnncgactgtatgttcctctaacagtgcaacaattatcagccacattttggataacgctttgctgtcagggttgatatgtgctgctaatgctatgatgactttgtctttgggcttcagagaactatccagttgtggagctttacctccaaaatgacaacatrctgctgactactggtcccaaggagaacattcattcctatcaaattttcmaaacactcaaggatgactgcttgattctcaaaatgtttctcaaaatgtctggcccataaaacaatccaacctatttagctgaatggattttgagatacatttccaagtttccggtcagacaatataatagcaactgcatacttaacccacatggaggacctttttgccttgttaatagatctcctgtcctctgacatctggcattagaaattgtcgtgtgtttattttgactcctgcttagtttcttttt

SEQ ID NO: 65283 - DNA, 599 bp, Chicken  19866894332277_2
  misc_feature (1)..(92): n is any nucleotide
nnnnnnnnnnnnnnnnnnnnnnnnnnnnnnnnnnnnnnnnnnnnnnnnnnnnnnnnnnnnnnnnnnnnnnnnnnnnnnnnnnnnnnnnnnnncgactgtatgttcctctaacagtgcaacaattatcagccacattttggataacgctttgctgtcagggttgatatgtgctgctaatgctatgatgactttgtctttgggcttcagagaactatccagttgtggagctttacctccaaaatgacaacatrctgctgactactggtcccaaggagaacattcattcctatcaaattttcmaaacactcaaggatgactgcttgattctcaaaatgtttctcaaaatgtctggcccataaaacaatccaacctatttagctgaatggattttgagatacatttccaagtttccggtcagacaatataatagcaactgcatacttaacccacatggaggacctttttgccttgttaatagatctcctgtcctctgacatctggcattagaaattgtcgtgtgtttattttgactcctgcttagtttctttttgtggttactttctccaactctgggatcaagggtgatagtgctgacagct

SEQ ID NO: 65284 - DNA, 600 bp, Chicken  19866894332277_3
acctttttgccttgttaatagatctcctgtcctctgacatctggcattagaaattgtcgtgtgtttattttgactcctgcttagtttctttttgtggttactttctccaactctgggatcaagggtgatagtgctgacagctcaagagggcgacaatctcctgctctctctttggttgcatacagccagaccttgaccctccaatccaaagacccctcctggtacacagcaaaagttggtgtacaggtactgcttattggctttgagcaagaaacaagcacctacttcaactggctggtkttctaatcccagcttggttctcctatttatcacttagtgaataatttattcactaaactctatctcctgctcagcttcattagaaggaaataattattcagtcacagcttccaatgataaaattcatcacatactcaagaaactcacacatagttcatgatgaaatggattccaatctggctttttttcctgggatctccatctctgtcacaccactcacaaaaagcacagataacagatggcctaaacctacttctccaggagtccctttaactcagaccaacaagacgcaataatgta

SEQ ID NO: 65285 - DNA, 600 bp, Chicken  19866894332283_1
ctcagctacagtttacttaaactgtatagttcttccccagtactatttaaacacttcaagtaaccatggccttcaaaacctcagtattcctgaacttctaatgttcctgaatacttcagagcccaagaacagaagaaaaggacaacgaggtcttctacctgatgaagagatgatgaagaacaaacagatttctgtagcaactggcttttgtatgtggcagaatgtgtgttctcttgggatattctacctattaaaacaggttgtggtccatgtttccctgggctgtttcctctcatctcrtgaargagtaaaacatggcaactatggtgttaacagagcagcgtgggttacagccagagctgctgcagctgagatccagagctctgaatgaagctcagaaaacaggtcagtaattaagtagattgtttcttttgccagggctgcctgcgattatgttgcttttacaataacaacagcccagattactgagcacctctgctgttagaactacaggaacattcgttccttgctggtgtttgctggtcacagagctgtgcagatgatgaaggcttgcaagagagaaatgaaacaacagtcttc

SEQ ID NO: 65286 - DNA, 600 bp, Chicken  19866894332283_2
ctacagtttacttaaactgtatagttcttccccagtactatttaaacacttcaagtaaccatggccttcaaaacctcagtattcctgaacttctaatgttcctgaatacttcagagcccaagaacagaagaaaaggacaacgaggtcttctacctgatgaagagatgatgaagaacaaacagatttctgtagcaactggcttttgtatgtggcagaatgtgtgttctcttgggatattctacctattaaaacaggttgtggtccatgtttccctgggctgtttcctctcatctcrtgaargagtaaaacatggcaactatggtgttaacagagcagcgtgggttacagccagagctgctgcagctgagatccagagctctgaatgaagctcagaaaacaggtcagtaattaagtagattgtttcttttgccagggctgcctgcgattatgttgcttttacaataacaacagcccagattactgagcacctctgctgttagaactacaggaacattcgttccttgctggtgtttgctggtcacagagctgtgcagatgatgaaggcttgcaagagagaaatgaaacaacagtcttccagga

SEQ ID NO: 65287 - DNA, 599 bp, Chicken  19866894332300_1
  misc_feature (1)..(177): n is any nucleotide
nnnnnnnnnnnnnnnnnnnnnnnnnnnnnnnnnnnnnnnnnnnnnnnnnnnnnnnnnnnnnnnnnnnnnnnnnnnnnnnnnnnnnnnnnnnnnnnnnnnnnnnnnnnnnnnnnnnnnnnnnnnnnnnnnnnnnnnnnnnnnnnnnnnnnnnnnnnnnnnnnnnnnnnnnnnnnnnnntgtgttggtttttttccccctctttttttacatggtaaaaacgagcttaaagattgactttttaaagaacttccttcagggaggtaaactggaaaagaatacacaaacaaagaaaaatcaatrcatgacagagactgtgactctccagagtctgaatcaatgtaaataaacctcaaaccaacccatttcagctggcaaaaaaaaaaaaaaaaaaaagcctgtgaattaagagcagccatcatcagccacaagtattttctcacagcagcctcctaagcaagtcattctatagaaaattttgtactgagaaaagagtttcaatgctattatcaaaaagctaagtgttaactatgataaacaaactgataacrtattaaggaaagcaagacagactaacagtgagtaccaacatcactgaaatt

SEQ ID NO: 65288 - DNA, 600 bp, Chicken  19866894332300_2
tccttcagggaggtaaactggaaaagaatacacaaacaaagaaaaatcaatrcatgacagagactgtgactctccagagtctgaatcaatgtaaataaacctcaaaccaacccatttcagctggcaaaaaaaaaaaaaaaaaaaagcctgtgaattaagagcagccatcatcagccacaagtattttctcacagcagcctcctaagcaagtcattctatagaaaattttgtactgagaaaagagtttcaatgctattatcaaaaagctaagtgttaactatgataaacaaactgataacrtattaaggaaagcaagacagactaacagtgagtaccaacatcactgaaattgttttcagtgtaagtatgatcattccacagatgcttactattcagtaaaaataaaaagctttaaacaggacttgatgttgtttcaggagtggtatgatgtatgtcaacagttttgcctaacagcaaatgaaatccatgtatatatgtacatgctgaacatacagtacattcaaattataaagtctcattaataatgctttatatttgtcaagtcaagaaagtattattgaataacagaaatttaactaa

SEQ ID NO: 65289 - DNA, 551 bp, Chicken  19866894332309_1
ttctccaaatgcttgttaggaaagcaagttttttttccctccaatccattttgcaggagatacagccttgagcagttgacaatacacctattactggctgaacaacgtagcaaactacagaagagcacaatgctttgaaatgatttctaaagttttgcttgctgtcaataggaaactaaatggaaaaaggaaaaaaagaacactacctagtacctgaactgataacacattcatttccaggcctgctttcccatttaatttccatttattttactaaacctttaaaatacaatgaagttkataaaagtatctgaccagagacctaaacacagttaccttcctcctggtttctctggtttatatgagctggcatctagaaaggcacgctctggtatgcaaaggccaacagtgcccctgaaacatcctgacaggctgcttctcagaaacaagcagacattatctccccaaaagccctgctctgaaagtgttctcctctgcacatcagccagctatcacggcgtgccacgttacctgtaattcacgtaatcgca

SEQ ID NO: 65290 - DNA, 599 bp, Chicken  19866894332314_1
  misc_feature (1)..(75): n is any nucleotide
nnnnnnnnnnnnnnnnnnnnnnnnnnnnnnnnnnnnnnnnnnnnnnnnnnnnnnnnnnnnnnnnnnnnnnnnnnnccacgtctatccccccgtccatggctagcggttgcggtagatacctcctctaccgtcattgtggcctcccaacatgctaagtccaattcaacatcagtacagagtcactgggcgaccactatcgccgtaattggcctgcctagtcagattaagacagacaatggatcatgtttcacctcacgctcaacgaaagaatggctggtggtgtgggggatctcccacatwacgggcatccctggtaattcccagggtcaggtgatagtggaacgcgccaaccgactcctcaaggataagatacgtgtccttggggagggggaaggatatagggataggatacctgtcggtagrcaggttgagctcctggcgaaagccctctacgcattgaaccactttgagcgtggtgacagtaagcgaacgccaatgcagaagaactggcagccgaagatcttgggtgaagggcctccagtcagagtaaaaacagatagtggactatgggaagcaggatggaggatattggtatgggg

SEQ ID NO: 65291 - DNA, 600 bp, Chicken  19866894332314_2
tctaccgtcattgtggcctcccaacatgctaagtccaattcaacatcagtacagagtcactgggcgaccactatcgccgtaattggcctgcctagtcagattaagacagacaatggatcatgtttcacctcacgctcaacgaaagaatggctggtggtgtgggggatctcccacatwacgggcatccctggtaattcccagggtcaggtgatagtggaacgcgccaaccgactcctcaaggataagatacgtgtccttggggagggggaaggatatagggataggatacctgtcggtagrcaggttgagctcctggcgaaagccctctacgcattgaaccactttgagcgtggtgacagtaagcgaacgccaatgcagaagaactggcagccgaagatcttgggtgaagggcctccagtcagagtaaaaacagatagtggactatgggaagcaggatggaggatattggtatggggtaggggatacaccgcagtaaaacatgaggaaaaattttatggactccatcgcaagttccttcttgcagaagctgctggtgggaaaaccgaagccaacaccagaacaaccgggggacggatgaca

SEQ ID NO: 65292 - DNA, 471 bp, Chicken  19866894332316_1
taatttagccactgggatttataatgtgacctgcctgggacaatgcataaatagtctcattctgtcagtgtgacagaatgacaaagagcccagtatgtgctgaaatatgcactccccttgctaagcctgtaattccagctttgattttcttttttcttatttttttcttttttttttcttttgtttaagtaatcagcacaaacttagaatgaatcagaaattgcacatttaatttcagcttcagcttggctttcatctctgatcagcagtagaacaggatgagctgagggacctccatgkcttcctccctcagatgatgttaaaagccagcttgtcatacagagtggcatcacagtaattatttgcttggtcataaccacagaatccctcctgccttctctctaatttcctccagaaagacaccaaaagcacagacgcacttccctgattttggcacctgctgccattctg

SEQ ID NO: 65293 - DNA, 600 bp, Chicken  19866894332320_1
atttagcaccatgactgggtacttctaaaatgtaaaggctgtgctggcaagtaatttcttcctggttttcatgctgtgatttgtgatcaactaagatgtttgaaaactgttaggaaagccatgtatcaattctgactttgtgtaaatatatggttatttctaatagcatgttaaaatgtttgttgactcatgacatcaataaataaaacctgagaggaagtgtatggtactgtaccatggtagtggtagcatgttgtggattaagccttcaggactggctgagcatgactgaaaaataarctttcagcctctagaacataaaaggagaagacagaggttaatgaacttgttkcttttgcttatctttgrtactggtcagccacaaagaatgcaaatggcctttttgagggcactcagcagcttcttgcagtgtgacaaatctaggattgtgctgccacagaggtaaataaagacaggcttgggcagcagcttttctcctctaaagcaaagctagcttgcatttctagggaaatactacaggggcaggatgaagagaatgagaaagatgttaaacttgggggtgatcatgaaactctgcat

SEQ ID NO: 65294 - DNA, 600 bp, Chicken  19866894332320_2
aatttcttcctggttttcatgctgtgatttgtgatcaactaagatgtttgaaaactgttaggaaagccatgtatcaattctgactttgtgtaaatatatggttatttctaatagcatgttaaaatgtttgttgactcatgacatcaataaataaaacctgagaggaagtgtatggtactgtaccatggtagtggtagcatgttgtggattaagccttcaggactggctgagcatgactgaaaaataarctttcagcctctagaacataaaaggagaagacagaggttaatgaacttgttkcttttgcttatctttgrtactggtcagccacaaagaatgcaaatggcctttttgagggcactcagcagcttcttgcagtgtgacaaatctaggattgtgctgccacagaggtaaataaagacaggcttgggcagcagcttttctcctctaaagcaaagctagcttgcatttctagggaaatactacaggggcaggatgaagagaatgagaaagatgttaaacttgggggtgatcatgaaactctgcatattgagctagcattgrcttaaacyratgctattgccaggcagattcaattgc

SEQ ID NO: 65295 - DNA, 600 bp, Chicken  19866894332320_3
catgctgtgatttgtgatcaactaagatgtttgaaaactgttaggaaagccatgtatcaattctgactttgtgtaaatatatggttatttctaatagcatgttaaaatgtttgttgactcatgacatcaataaataaaacctgagaggaagtgtatggtactgtaccatggtagtggtagcatgttgtggattaagccttcaggactggctgagcatgactgaaaaataarctttcagcctctagaacataaaaggagaagacagaggttaatgaacttgttkcttttgcttatctttgrtactggtcagccacaaagaatgcaaatggcctttttgagggcactcagcagcttcttgcagtgtgacaaatctaggattgtgctgccacagaggtaaataaagacaggcttgggcagcagcttttctcctctaaagcaaagctagcttgcatttctagggaaatactacaggggcaggatgaagagaatgagaaagatgttaaacttgggggtgatcatgaaactctgcatattgagctagcattgrcttaaacyratgctattgccaggcagattcaattgcttttttaatagaattaa

SEQ ID NO: 65296 - DNA, 600 bp, Chicken  19866894332320_4
cataaaaggagaagacagaggttaatgaacttgttkcttttgcttatctttgrtactggtcagccacaaagaatgcaaatggcctttttgagggcactcagcagcttcttgcagtgtgacaaatctaggattgtgctgccacagaggtaaataaagacaggcttgggcagcagcttttctcctctaaagcaaagctagcttgcatttctagggaaatactacaggggcaggatgaagagaatgagaaagatgttaaacttgggggtgatcatgaaactctgcatattgagctagcattgrcttaaacyratgctattgccaggcagattcaattgcttttttaatagaattaaaaaatgtaatggaaagacagaatccaaaacctgctctctgtctgcagtgaagatgggcactaactgtaatcttggcaaaacccatttcttctttctgccctttctaatgtctctagaccttcacttgccaaagaagagwtcacagctccaagctgggtggaagccaggcagaaagcaacagcttttgtgtttgggtttatacatagttcttagtctggggttgcagttggattccaaggatgattgt

SEQ ID NO: 65297 - DNA, 600 bp, Chicken  19866894332320_5
gagaagacagaggttaatgaacttgttkcttttgcttatctttgrtactggtcagccacaaagaatgcaaatggcctttttgagggcactcagcagcttcttgcagtgtgacaaatctaggattgtgctgccacagaggtaaataaagacaggcttgggcagcagcttttctcctctaaagcaaagctagcttgcatttctagggaaatactacaggggcaggatgaagagaatgagaaagatgttaaacttgggggtgatcatgaaactctgcatattgagctagcattgrcttaaacyratgctattgccaggcagattcaattgcttttttaatagaattaaaaaatgtaatggaaagacagaatccaaaacctgctctctgtctgcagtgaagatgggcactaactgtaatcttggcaaaacccatttcttctttctgccctttctaatgtctctagaccttcacttgccaaagaagagwtcacagctccaagctgggtggaagccaggcagaaagcaacagcttttgtgtttgggtttatacatagttcttagtctggggttgcagttggattccaaggatgattgtgtactttt

SEQ ID NO: 65298 - DNA, 600 bp, Chicken  19866894332320_6
agaagacagaggttaatgaacttgttkcttttgcttatctttgrtactggtcagccacaaagaatgcaaatggcctttttgagggcactcagcagcttcttgcagtgtgacaaatctaggattgtgctgccacagaggtaaataaagacaggcttgggcagcagcttttctcctctaaagcaaagctagcttgcatttctagggaaatactacaggggcaggatgaagagaatgagaaagatgttaaacttgggggtgatcatgaaactctgcatattgagctagcattgrcttaaacyratgctattgccaggcagattcaattgcttttttaatagaattaaaaaatgtaatggaaagacagaatccaaaacctgctctctgtctgcagtgaagatgggcactaactgtaatcttggcaaaacccatttcttctttctgccctttctaatgtctctagaccttcacttgccaaagaagagwtcacagctccaagctgggtggaagccaggcagaaagcaacagcttttgtgtttgggtttatacatagttcttagtctggggttgcagttggattccaaggatgattgtgtacttttg

SEQ ID NO: 65299 - DNA, 600 bp, Chicken  19866894332320_7
ttttgcttatctttgrtactggtcagccacaaagaatgcaaatggcctttttgagggcactcagcagcttcttgcagtgtgacaaatctaggattgtgctgccacagaggtaaataaagacaggcttgggcagcagcttttctcctctaaagcaaagctagcttgcatttctagggaaatactacaggggcaggatgaagagaatgagaaagatgttaaacttgggggtgatcatgaaactctgcatattgagctagcattgrcttaaacyratgctattgccaggcagattcaattgcrtttttaatagaattaaaaaatgtaatggaaagacagaatccaaaacctgctctctgtctgcagtgaagatgggcactaactgtaatcttggcaaaacccatttcttctttctgccctttctaatgtctctagaccttcacttgccaaagaagagwtcacagctccaagctgggtggaagccaggcagaaagcaacagcttttgtgtttgggtttatacatagttcttagtctggggttgcagttggattccaaggatgattgtgtacttttggagcccgttgcctttgctgcctgctgtt

SEQ ID NO: 65300 - DNA, 600 bp, Chicken  19866894332320_8
agctagcttgcatttctagggaaatactacaggggcaggatgaagagaatgagaaagatgttaaacttgggggtgatcatgaaactctgcatattgagctagcattgrcttaaacyratgctattgccaggcagattcaattgcttttttaatagaattaaaaaatgtaatggaaagacagaatccaaaacctgctctctgtctgcagtgaagatgggcactaactgtaatcttggcaaaacccatttcttctttctgccctttctaatgtctctagaccttcacttgccaaagaagagwtcacagctccaagctgggtggaagccaggcagaaagcaacagcttttgtgtttgggtttatacatagttcttagtctggggttgcagttggattccaaggatgattgtgtacttttggagcccgttgcctttgctgcctgctgttccaccacaaaaggagtgatgttccagtattcccctcccatctatgctggatatgtgccacttgacatactcaaaagagggtgaagagtggtgttacaaagttcacaaatgatgcagaattaggttagtaaaaataaaagctgattgcaatgaatt

SEQ ID NO: 65301 - DNA, 599 bp, Chicken  19866894332321_1
  misc_feature (1)..(97): n is any nucleotide
nnnnnnnnnnnnnnnnnnnnnnnnnnnnnnnnnnnnnnnnnnnnnnnnnnnnnnnnnnnnnnnnnnnnnnnnnnnnnnnnnnnnnnnnnnnnnnnnntgccgatgtgttccactccgcgcacacgcagcagtgcagccatgtttgtcaactgaaggtttatctctccaaagggccgcctgcttttgtcctaccgaaaggctttgcagctttaatgatcagctgcctctggaacctacacaaaaacaggctgaagaagtgcaaggcagagctgttcccaggtgtttcactgaaattccacrcacactttgcttccttgttttaagggctgtcacgcagctcgtccatacagcaccctataaggactatcccatatacactgcagcaagcaacaacrtttttkggggggaaaagaactgagtgcccaagatgatgaagttgattgggaggaattttagaatcacagaccggccttgagttggaagggacctcaaagcccacccagtccaaccccgtgccrtgggcagggctgccccccagcagttcagctgcacagggccccatccaacctggccttgagcaccwccagggatggagaacc

SEQ ID NO: 65302 - DNA, 599 bp, Chicken  19866894332321_2
  misc_feature (1)..(2): n is any nucleotide
nntgccgatgtgttccactccgcgcacacgcagcagtgcagccatgtttgtcaactgaaggtttatctctccaaagggccgcctgcttttgtcctaccgaaaggctttgcagctttaatgatcagctgcctctggaacctacacaaaaacaggctgaagaagtgcaaggcagagctgttcccaggtgtttcactgaaattccacrcacactttgcttccttgttttaagggctgtcacgcagctcgtccatacagcaccctataaggactatcccatatacactgcagcaagcaacaacrtttttkggggggaaaagaactgagtgcccaagatgatgaagttgattgggaggaattttagaatcacagaccggccttgagttggaagggacctcaaagcccacccagtccaaccccgtgccrtgggcagggctgccccccagcagttcagctgcacagggccccatccaacctggccttgagcaccwccagggatggagaacccacagcttctctgggcagcctgctccattctagccaaaagacactgtccctcaaatgcaaagcatcactgagaacatatactgattgttttctag

SEQ ID NO: 65303 - DNA, 600 bp, Chicken  19866894332321_3
gatgtgttccactccgcgcacacgcagcagtgcagccatgtttgtcaactgaaggtttatctctccaaagggccgcctgcttttgtcctaccgaaaggctttgcagctttaatgatcagctgcctctggaacctacacaaaaacaggctgaagaagtgcaaggcagagctgttcccaggtgtttcactgaaattccacrcacactttgcttccttgttttaagggctgtcacgcagctcgtccatacagcaccctataaggactatcccatatacactgcagcaagcaacaacrtttttkggggggaaaagaactgagtgcccaagatgatgaagttgattgggaggaattttagaatcacagaccggccttgagttggaagggacctcaaagcccacccagtccaaccccgtgccrtgggcagggctgccccccagcagttcagctgcacagggccccatccaacctggccttgagcaccwccagggatggagaacccacagcttctctgggcagcctgctccattctagccaaaagacactgtccctcaaatgcaaagcatcactgagaacatatactgattgttttctaggaaaata

SEQ ID NO: 65304 - DNA, 600 bp, Chicken  19866894332321_4
agctgcctctggaacctacacaaaaacaggctgaagaagtgcaaggcagagctgttcccaggtgtttcactgaaattccacrcacactttgcttccttgttttaagggctgtcacgcagctcgtccatacagcaccctataaggactatcccatatacactgcagcaagcaacaacrtttttkggggggaaaagaactgagtgcccaagatgatgaagttgattgggaggaattttagaatcacagaccggccttgagttggaagggacctcaaagcccacccagtccaaccccgtgccrtgggcagggctgccccccagcagttcagctgcacagggccccatccaacctggccttgagcaccwccagggatggagaacccacagcttctctgggcagcctgctccattctagccaaaagacactgtccctcaaatgcaaagcatcactgagaacatatactgattgttttctaggaaaatattagattgctttgctttttaaactacactgtaaaatagcagaatgcctgtgggttgtgtgagcagagttaggctgcaagtgtgttcctcccatggwggggagctgctggtggagccc

SEQ ID NO: 65305 - DNA, 586 bp, Chicken  19866894332321_5
ttcactgaaattccacrcacactttgcttccttgttttaagggctgtcacgcagctcgtccatacagcaccctataaggactatcccatatacactgcagcaagcaacaacrtttttkggggggaaaagaactgagtgcccaagatgatgaagttgattgggaggaattttagaatcacagaccggccttgagttggaagggacctcaaagcccacccagtccaaccccgtgccrtgggcagggctgccccccagcagttcagctgcacagggccccatccaacctggccttgagcaccwccagggatggagaacccacagcttctctgggcagcctgctccattctagccaaaagacactgtccctcaaatgcaaagcatcactgagaacatatactgattgttttctaggaaaatattagattgctttgctttttaaactacactgtaaaatagcagaatgcctgtgggttgtgtgagcagagttaggctgcaagtgtgttcctcccatggwggggagctgctggtggagcccaaactgcagcttgggctttattgatatgggtaaataaactcaggaaaatag

SEQ ID NO: 65306 - DNA, 372 bp, Chicken  19866894332321_6
acccagtccaaccccgtgccrtgggcagggctgccccccagcagttcagctgcacagggccccatccaacctggccttgagcaccwccagggatggagaacccacagcttctctgggcagcctgctccattctagccaaaagacactgtccctcaaatgcaaagcatcactgagaacatatactgattgttttctaggaaaatattagattgctttgctttttaaactacactgtaaaatagcagaatgcctgtgggttgtgtgagcagagttaggctgcaagtgtgttcctcccatggwggggagctgctggtggagcccaaactgcagcttgggctttattgatatgggtaaataaactcaggaaaatag

SEQ ID NO: 65307 - DNA, 599 bp, Chicken  19866894332327_1
  misc_feature (1)..(159): n is any nucleotide
nnnnnnnnnnnnnnnnnnnnnnnnnnnnnnnnnnnnnnnnnnnnnnnnnnnnnnnnnnnnnnnnnnnnnnnnnnnnnnnnnnnnnnnnnnnnnnnnnnnnnnnnnnnnnnnnnnnnnnnnnnnnnnnnnnnnnnnnnnnnnnnnnnnnnnnnnnnnnnntctatgaaaatgtccagaagtataataaaagaaacagcccacctattttgagtgagaaaaaaaaaaaagttgttaatatatttcacttttttattcttatttatttttaaattccttctcatagaatagaatcataggatygctaaggttggaaaagaccatccagtccaaccattcacccaccaccagtggtttgctaaaccgtgttcctcaacacaacatccaaatgttccttgaacacctccagggttggcgactccaccacctytctgggcagcccattccagtgcctgaccaccctttcagagaagtagtatttcctaacatccagcctgaaccttccctggtgcagcttgaagccattccctctagtcctatcactagtgacatgagagaagaggctgacccccagctcactacaaccwcctttcaggtagtta

SEQ ID NO: 65308 - DNA, 599 bp, Chicken  19866894332327_2
  misc_feature (1)..(32): n is any nucleotide
nnnnnnnnnnnnnnnnnnnnnnnnnnnnnnnntctatgaaaatgtccagaagtataataaaagaaacagcccacctattttgagtgagaaaaaaaaaaaagttgttaatatatttcacttttttattcttatttatttttaaattccttctcatagaatagaatcataggatygctaaggttggaaaagaccatccagtccaaccattcacccaccaccagtggtttgctaaaccgtgttcctcaacacaacatccaaatgttccttgaacacctccagggttggcgactccaccacctytctgggcagcccattccagtgcctgaccaccctttcagagaagtagtatttcctaacatccagcctgaaccttccctggtgcagcttgaagccattccctctagtcctatcactagtgacatgagagaagaggctgacccccagctcactacaaccwcctttcaggtagttatagagagcaataaggtctcccctsagcctcctcttctctagacggaacaatcccagctccttcagctgctcttcataaggcctgtgctccagacccctcaccagctttgttgcccttctctggacac

SEQ ID NO: 65309 - DNA, 600 bp, Chicken  19866894332327_3
atagaatcataggatygctaaggttggaaaagaccatccagtccaaccattcacccaccaccagtggtttgctaaaccgtgttcctcaacacaacatccaaatgttccttgaacacctccagggttggcgactccaccacctytctgggcagcccattccagtgcctgaccaccctttcagagaagtagtatttcctaacatccagcctgaaccttccctggtgcagcttgaagccattccctctagtcctatcactagtgacatgagagaagaggctgacccccagctcactacaaccwcctttcaggtagttatagagagcaataaggtctcccctsagcctcctcttctctagacggaacaatcccagctccttcagctgctcttcataaggcctgtgctccagacccctcaccagctttgttgcccttctctggacacgctccagggccttgatgtctttcttacagtgaggggcacaaaactggacacggtacttgaggtgcaacctaatattctcatattcttctcactctaaacttgtcaaaaaatcatctacaagaaattccttcactatagatgaatagaatttgtagcaa

SEQ ID NO: 65310 - DNA, 600 bp, Chicken  19866894332327_4
agtccaaccattcacccaccaccagtggtttgctaaaccgtgttcctcaacacaacatccaaatgttccttgaacacctccagggttggcgactccaccacctytctgggcagcccattccagtgcctgaccaccctttcagagaagtagtatttcctaacatccagcctgaaccttccctggtgcagcttgaagccattccctctagtcctatcactagtgacatgagagaagaggctgacccccagctcactacaaccwcctttcaggtagttatagagagcaataaggtctcccctsagcctcctcttctctagacggaacaatcccagctccttcagctgctcttcataaggcctgtgctccagacccctcaccagctttgttgcccttctctggacacgctccagggccttgatgtctttcttacagtgaggggcacaaaactggacacggtacttgaggtgcaacctaatattctcatattcttctcactctaaacttgtcaaaaaatcatctacaagaaattccttcactatagatgaatagaatttgtagcaaaaaataatcatctgaattgattcccatcttcaccattcc

SEQ ID NO: 65311 - DNA, 600 bp, Chicken  19866894332329_1
tttgcagatcttctgtatgcatttgtatgtgcatgcacacctgtgagtgaaatcagtggatctggaataactagcgtcatttaaggtcaggctctggaagctgcttttaggtgataggaagaaagaactaccagacactatgattgtgtttgattgttctctattcactaatgcttagattcatatttgtggagtgacttgtagaatggcatagtatttaacaagattaaggaccttgtgctggttacaaaaaatcctcgcaaatcctgggccaattttctgccacagtcagacttttgraaacattaggcaattaaatagttttaccatcagatatctgcagaaaaattatgctattgttatcttctgtataacttctaaacaatgctctcttattcatatatttctgaaaaaagaatatttcttctaatcctactggtgatgacaaaggtatatgcggccctatgaacatctgtttagaatctgtatctattacagttctgttcatttttgaccatctgtaccttccatgcagtaattaatatgcaagaatttagctgcgtaattgattcctgaggagcattaaagtcacgctaatca

SEQ ID NO: 65312 - DNA, 600 bp, Chicken  19866894332340_1
agggaggctgtacgagatgatctccaaaatcccttccaacctcaaccattctgtgattctcttattctgtgaagacgagtgaggccaattgaataagcagttcttatatgttcacggcatttttgcaagtaatttaggaaaaaaatatagcatggctatataaattgtctacttttgctaacaatcaagagttattgcaatactatattttaactccatactgtaatttgcaaaaatgctggtatattattaagttctgtccttgctctcttcagcattttagacacttgagtcagtcartcattttaaacatagctacagttctgcagaggtattattacaatctcaacaaaggaagcactaactgcataaattctgcttaagttccaaaaatagttgccagaaaaataataaattggttgaaatgaatttcctttgtccctaaccagacaccttttacaagtattttataaatggcaaaatctgctgttataactaggtcttagcctattccagcacatttttacatattctctaaatactgatgtgtgaggagccccatggaattggtctcygtatgaaattgttgggtaatgcagc

SEQ ID NO: 65313 - DNA, 600 bp, Chicken  19866894332340_2
cattttagacacttgagtcagtcartcattttaaacatagctacagttctgcagaggtattattacaatctcaacaaaggaagcactaactgcataaattctgcttaagttccaaaaatagttgccagaaaaataataaattggttgaaatgaatttcctttgtccctaaccagacaccttttacaagtattttataaatggcaaaatctgctgttataactaggtcttagcctattccagcacatttttacatattctctaaatactgatgtgtgaggagccccatggaattggtctcygtatgaaattgttgggtaatgcagcgccttggatttgaatttccaggggaaatgttgcgttcatcaggattaatttttgtgttcccccaggtttagatatatgatctaaaagtgttctatgcatctgtttcctttattctgctgtcatgctagggatctgtgggaagagttctctctttcctaccccattcttcttgtagtaatgccacaaatattcacttggaactgaaacgtgtttctcaacttttactaaatcattaaatcacctggagttcttattcttggaatgtataacagata

SEQ ID NO: 65314 - DNA, 600 bp, Chicken  19866894332355_1
ggagaccttttcagtgacctctctgaatgttaggccctcatacagagacacaagtagtctgtttgtgattttcttcctgaaaaaaagcacacgttacctttcccagggctcttcttgggcagttttttgaaatgcacagaatgcattcaaggctccattctcagcagcagcagaagctcagagtagattctctgggaatatctggatgctgacccttatgtatctggccctgaatgagacactgatatactacagtgcctccctgtgtcccacatgcgctccatccatccctaaaggagratgttggtctcctgtaggccctgcatttcatctgtcagccccatacaggtgtctcagctgactccrggtatttaagatagttccagatgtctatcttcagacacctcaagcccacccactgttagagtcatttagctgaataaatagtgatcaagtttatctttaaaatgagatgttgggaaattaaatgatcctatataaaatgagtagggttttcattccagagtgaagctaggtctgtaccctctgcactgctgggaggtgggctggcaccttcactcagcagctgggtggtttggt

SEQ ID NO: 65315 - DNA, 600 bp, Chicken  19866894332355_2
gattttcttcctgaaaaaaagcacacgttacctttcccagggctcttcttgggcagttttttgaaatgcacagaatgcattcaaggctccattctcagcagcagcagaagctcagagtagattctctgggaatatctggatgctgacccttatgtatctggccctgaatgagacactgatatactacagtgcctccctgtgtcccacatgcgctccatccatccctaaaggagratgttggtctcctgtaggccctgcatttcatctgtcagccccatacaggtgtctcagctgactccrggtatttaagatagttccagatgtctatcttcagacacctcaagcccacccactgttagagtcatttagctgaataaatagtgatcaagtttatctttaaaatgagatgttgggaaattaaatgatcctatataaaatgagtagggttttcattccagagtgaagctaggtctgtaccctctgcactgctgggaggtgggctggcaccttcactcagcagctgggtggtttggttggatggatcccaggtgaatgttgccatgtctatgggtagcactgaggcaggtgtgtgtttaagtg

SEQ ID NO: 65316 - DNA, 599 bp, Chicken  19866894332359_1
  misc_feature (1)..(37): n is any nucleotide
nnnnnnnnnnnnnnnnnnnnnnnnnnnnnnnnnnnnnccccttcgttttttttcccagaatttttattttcttattttggtagggcagaagattgcatgtttattacaagtatgcattaggattagcagttcttagcttagaagctagaagcagagactggaaaagtgaatcatttttccgaaagtacagaaagttgtgtcaaagtgagaaataccttctcaagcgttggcagtgttagaattcactgttttactttgtgttgcaagagattgggtaagacaaagggaatgtcaaaggaygcaggatgtctctttctctttcccactgccaaactaaaccagagcagatgtgatttgcaggattttgttccattcttttttttttycccaaagtaaaataatcttgctgatctgttctttgaaatttgtctactttttctttcttccaaagtgccattacttacttttcaactataggacccaagtgatgaaataaagttttcttagctgcttaagataccactagaagataggatagcatacaagagttcataatattgaatttatgttacaagtatgtaatatcaaatacaataata

SEQ ID NO: 65317 - DNA, 600 bp, Chicken  19866894332359_2
agaagattgcatgtttattacaagtatgcattaggattagcagttcttagcttagaagctagaagcagagactggaaaagtgaatcatttttccgaaagtacagaaagttgtgtcaaagtgagaaataccttctcaagcgttggcagtgttagaattcactgttttactttgtgttgcaagagattgggtaagacaaagggaatgtcaaaggaygcaggatgtctctttctctttcccactgccaaactaaaccagagcagatgtgatttgcaggattttgttccattcttttttttttycccaaagtaaaataatcttgctgatctgttctttgaaatttgtctactttttctttcttccaaagtgccattacttacttttcaactataggacccaagtgatgaaataaagttttcttagctgcttaagataccactagaagataggatagcatacaagagttcataatattgaatttatgttacaagtatgtaatatcaaatacaataatagttgcactgtcagtttgcatacatacacaaagcagagcattttartacttagagaaaacaatgaagagaatctaaggatattttatt

SEQ ID NO: 65318 - DNA, 600 bp, Chicken  19866894332359_3
cagatgtgatttgcaggattttgttccattcttttttttttycccaaagtaaaataatcttgctgatctgttctttgaaatttgtctactttttctttcttccaaagtgccattacttacttttcaactataggacccaagtgatgaaataaagttttcttagctgcttaagataccactagaagataggatagcatacaagagttcataatattgaatttatgttacaagtatgtaatatcaaatacaataatagttgcactgtcagtttgcatacatacacaaagcagagcattttartacttagagaaaacaatgaagagaatctaaggatattttattgttttatatacagtctgtgtgtgtatgtatrtatacatgcatgtgtgtttatggcattgtagatagtgattctgaccttgattaaatgagtttcctgacctccttttgcttcagctattccagctggaaaattgggtgaaaatgtagattctttgtaaaccagatgttgttgaagctgagcttttctttgtaaatagactgaaaaagaatactcatttctgcaacgtagcatagatagaaatagcaaatattggagtt

SEQ ID NO: 65319 - DNA, 547 bp, Chicken  19866894332359_4
tttgaaatttgtctactttttctttcttccaaagtgccattacttacttttcaactataggacccaagtgatgaaataaagttttcttagctgcttaagataccactagaagataggatagcatacaagagttcataatattgaatttatgttacaagtatgtaatatcaaatacaataatagttgcactgtcagtttgcatacatacacaaagcagagcattttartacttagagaaaacaatgaagagaatctaaggatattttattgttttatatacagtctgtgtgtgtatgtatrtatacatgcatgtgtgtttatggcattgtagatagtgattctgaccttgattaaatgagtttcctgacctccttttgcttcagctattccagctggaaaattgggtgaaaatgtagattctttgtaaaccagatgttgttgaagctgagcttttctttgtaaatagactgaaaaagaatactcatttctgcaacgtagcatagatagaaatagcaaatattggagttgcaaatattagagttacaat

SEQ ID NO: 65320 - DNA, 600 bp, Chicken  19866894332364_1
tctgggggtagccttgagaaagagctctaataaagggggttcactttgagtgtggttagacatgcaaacctgctgcagtcaggccatgaattcttggcaacaacataggaagggaattcaaagtttgttatttgacagtggtagttagtgaagtttttgttactcagtcatttcttttatttcagtttatgctgatttcttcctctaaaaatgcattttttaaaaacaggttttgatatagtgacaatcaaatgtcaatttgaggtgttttagtcttagtgtctgagacacagtaaaaakaaaatgagcttctttttcttctgtgctgtttagtgctgagctctcagcatcaacatgaccaaatactctgaaattgaccaaaaagatgggctggttttatttgaatttttgaagtacttggcagcatggacttaaaacctttctggcaacctcttcttcctaactcaattcttatctgtcctctcccaaattgaaagaattggattattatctatgcactactgaagctaataaggaatcaaaaggcacagatataaaaaggttgttttactcctgtgagattaaactagaccaaagttt

SEQ ID NO: 65321 - DNA, 600 bp, Chicken  19866894332364_2
caaagtttttactgtccccattaatgctgtgtctgtgcactgccatgttacttggctatgcaaacatgatgtttctggtaagccgatcagagtatgtggtacaaaattcaggctgggaaatacagggcatgttgctcggtttgccatactgcttccatctgccctatactcattagctgtggtacagtgggaagcttatgctgctgcatttgggcatgtttggtggctctggtaggccataggcctttgttttgaagaaaaatacttggtgttctaaaagaaactttcatagataaaagmtaaatactgtgcctttgtttctgcaaaagaccttggcattgcaagggtattttgctgagtttacctccccactttctgaacacctttgcttggctacagtaatgagtatctaaccatgacagcaaacttgcaagaggcaatgcaaaggtacacagggtttctgaagcaggcgtggcatgaattacctacagtgagatggcctgagagaggagtggtgctgcccagcctgtctggggataaggaggagatggaagatgttcagcttctctggggatggagaattcagagttgagacttcag

SEQ ID NO: 65322 - DNA, 576 bp, Chicken  19866894332368_1
cttatgaataactcttttgaaaatgctttaattgtggccctgtgattgacttgattgctgtttcctccctcaggttcaatcaaagaccacccgcagcagcagcccggcatgctctcccgtgtgactggtggcatcttcagtgtgacaaagggagctgtgggtgccacaatcgggggtgttgcttggataggaggaaagagcttggaaatcaccaaaacagcagtcacatcagtgccttcaatgggagtggggctggtcaaaggaagtgtttctgccgtggctggaggcgttacagcagtrggatctgctgttgcaagcaaagtgcctttaacgggaaagaaaaaggacaagtctgactaaagccaaaactgagagacatacttgattttctagaatattaacttggcggcattaaaatctgctaagatttggaccatgagaagccatgtgtcttagacgctgtcttctgaagagaaagctgatttcatccggaaaggacagaagaagcttggctagcacagcatatgaagatttgttatggcctagtttcaagctttgtacctggtgaaatgtaca

SEQ ID NO: 65323 - DNA, 600 bp, Chicken  19866894332374_1
caggactccatttgcaaaagttcctcaaaggatgaaggtcttgagctgggatctcagagcagagctccctgtaacaaatggaaatgatggaaaataaaacctgatgtttgcccaaggctatatgggaagtttggtacagatttacacagatctttgtgtcctctgtagtttggcaggcccagccctgctctaaagtttcagataatgaaggtgggcgagtactagataaggtagtgctcctaggtatttctctaattaaatctgcataagccacactatctcatttgttatcaggtacawaaccatcactgtgagctctccctggaaagcaggagaccctacacccaacatggatccccagaccagcttcgtgccctcctccacttgacaagacagctgtccaacccaaagcacagggatttcaagcacatccttcaaaacaaagtaaacaagccccagatgaactgatgaaaacatgaaaaagttgaatccaaacaaatcaatcaaggggaataaaaggccttctcctcgctcctgccactcccctcatgagcgcttcctagtcataaaatgggcagtctggtttctgtgcctagcaca

SEQ ID NO: 65324 - DNA, 600 bp, Chicken  19866894332383_1
ccatcaaagtctatctcctcaccacctccaccactgtatcaccaagggcctgagtctcaggaaacagcttccacctcttgggtattcagccccaatagggagcagaacggaagaaaagacagcaaatcccactgtctttgatgcaaattatctcactaactataactcattctcactccagaaatgaagagagttttggatcaaaccccagaaaatcactcttggcatggcaaacaatctttgagggtgcaacatctgaaagaaacaagtgaaatgggatgaatgagactgtctggcccyttttgtaactgtcactccaaacatttcaggactgtgggagagcagatgtgcagtcctgataaatgttgcttccctgaacattctcgggggcctcaggagagcttgtgttaccaacgagataatcacagatcctccagtgaaaacaagatcttgagagatggagaatgaaatctgaaattagcaattctttcataggttctgttattagatcctattattatgtttctaaattagaaataccagttcttaccggagcaagawataagtaccctcagatctacagacattctgctggcccag

SEQ ID NO: 65325 - DNA, 600 bp, Chicken  19866894332383_2
gaaacaagtgaaatgggatgaatgagactgtctggcccyttttgtaactgtcactccaaacatttcaggactgtgggagagcagatgtgcagtcctgataaatgttgcttccctgaacattctcgggggcctcaggagagcttgtgttaccaacgagataatcacagatcctccagtgaaaacaagatcttgagagatggagaatgaaatctgaaattagcaattctttcataggttctgttattagatcctattattatgtttctaaattagaaataccagttcttaccggagcaagawataagtaccctcagatctacagacattctgctggcccagtggctcatgatgagaggccaggccctaacccattgatgactccccttctgctggtgctgccagctacaagtgctccccagtccttccgtgttgtatacaggaggcaaacttctggacaaacaccacccattgaaataaaatgcgtagcttcagtcctgaacattaggcagaagtatctacatcttagcaaaactaaaaccaaaaccaaaaagcagcaagctgagctctttcagaagaacatctcaaactctcagtataaat

SEQ ID NO: 65326 - DNA, 599 bp, Chicken  19866894332385_1
  misc_feature (1)..(11): n is any nucleotide
nnnnnnnnnnnctgtggttgtgtacagaatcgaattgcataaagttagggaaataaaattgcagggagaaaaatgtcagaatagtatttctgacaagcactacaaagatgatagaatgtactatgagagtttaagcccaaaattgttagcaatttagccactttcaagttaactgtccagagaatcataattggggattatttcttataaataattttaaagacaccagtcataaatctggaagatctttctcaatgaagtatattttattaagacagaatggtcaaagttgtggtcctrttacttaaactcctattcagctgagttctattaaaattaacttctagaaatgtactaccattacttttctgaaagaaaacagatcactggtacgttccattttaatatatatcgtttgattgctacttagttgataaaattctctgagaagaatatggaaaaagggcaaggatagccttttattgcctcgcaatttaatgccttataactgttccttttttactttgttaaaaaggtaattaactcttcttaatgaataacattttctttctaaaatgttgtgctttttactacacata

SEQ ID NO: 65327 - DNA, 426 bp, Chicken  19866894332386_1
ggaaaaaggtgtgtcttacgggaacgatccagacgtggtagcaccgagctgtgatgggtcgccagcggaaaacctgaacagccaaggatttgctttgactccaggccctctccacccaaaggcttgactggtgtcccagcaatggagagctcgtgtctccagatgttatcaggttgcccaaactgtgtgaagtttgcctataatcttggcagcagggagcagttctcctctcggctgccagtgtatgagaaggagccacagtgctgaggaggaatcggagtgccagggctcagcccggcygcccagggctccttgtgttgagcaattagagcaggcgcaggagggaggatgctccaggtgactaggcattttctttgtttggtaagtggtacttcagacctttttgtatcctattttacgctacta

SEQ ID NO: 65328 - DNA, 600 bp, Chicken  19866894332398_1
agtgcttctaagcgacattagtaactcatctctgagggcagccaagggtgtatttatcagtacttctcaacacctggctactgctgaatgccttgttaggcaaaggctgctttcttttatgtcattagtctctgctccttagtacacatagtcattaaaccactgtgagtagtggagatgttatattcatggaggtctgcatatatagtttagccactgaagaacatcagaaataactcccatatgcattcctgcatttgtaaggtccctgagcatagtctactcttggagaaattcttsttgagtaaggagcagctgaattttctgtataaaaacaaagcatgcttatgattgtcagtctgttaatagaatgtaggtattgataagcagaatctatgctctaaggctaattagcagaatggtgcatatagatcactataacagaaaccgaattgctgtcctgaagaacacaaatcgtgcttttcagcaccgatcccaatgcgtaaacatgcgtgcatgctcccatgtgtaaacagtgcacccacctatgcatgtcctttggcactgctgtgaccatccagtgtgtaagtataacagcga

SEQ ID NO: 65329 - DNA, 600 bp, Chicken  19866894332402_1
agagatcagataggtcttcagtcctagagaaaagatataaacggtgagaacggagggaagacaaaaataacacgactttggacttgtcagataggaaatagagtagccagcagagcacgatggaggctcgggaacagcacaaaaggagtaccagggaacacaccgggaacacagacgcactgtgccaagcagtggcaaccaggattgcccaacatctgctgccccagatcccacagactgggacccgcagcagcagccatgccccacacgtgcttgctttactccatttgcactcagacrctctggaaaaaagaccttaggcttcaggcattggcttccaagctgtaatttgagctgagacgttaactctttacttttagaaagggttttgcagccttttttccagcgaggcctggactgacattgcactcctgcaaagcagtgtgtgctcccccctcgcgctctccatttctcgccgagatgtggcaaagctcccttcgtgcttggaaaaggaaatggcgtttcagcgctacaaattctgacgggtttgcatagagcagacttcacatttctaaagaacaaactcaatctctcacgccc

SEQ ID NO: 65330 - DNA, 600 bp, Chicken  19866894332412_1
aaggaaaagaaaatagatacggggtgggacctaggttaacttttatttaaaacacatgtctgatggaggaaacagtctgcaaaaacaaacaaacaaacaaagaaaaaaacatctgatactactgcactgtaatctccatttgccagagcaacatccttctgggttttgaggggaaaatattacatgtaagatgcactgattctggaaaatgtatgaaaacataagaggtttgtttgaaaaagcatgcagtgtatatatacatttatataacactacaataattagtctcctaagaatttkaacagagtttaagtagaggttaaaaagatacagtctaacaaaagtagagaaacaagaatagaaactgttaaacatagctactttacagaatgttgccatctgaggagacagagaaatcaaaaatttaacttgaaacattgtaggctcgttttcattcagttccagtatgataggcattctgctgcttttttttttcatgttctcatcctcaatatatcctttctactacctcctacaacttcatagtaagaaatattgaataatgcttgtctaccaagtgttgttgatcaagggttcaac

SEQ ID NO: 65331 - DNA, 600 bp, Chicken  19866894332416_1
cttggcagtagaggcaaacctgggcagagctctgtcagggtcaaaggaggtgagcagctaccgacgcctgccagctccagcaggagaaaagtctctctgaatagcacagcttgagatgtagggaatgcaggaagataaaatccctgacaaagtgttgcacatatttttctgacagataaatcagctaggcacaggcagggcctgttcaaactaagtattagtgtaaacatgcttcttctgtcattacttcatttatagcttttataaaaaactgcaatcacgttgttcattttggacttytgaaatacttaatactgacagtcctcaatcaccgcatattggttcacactgtagagaagaatgaaagcacagatctcagaactccttctggacaaagcaaaacgagatgtactccaagagtgcacctggtgcactgcaactactgcttatttgagctcatgtgaagcaaaccaccacaaaccatcatgcagacgtgcagtcccagcactaagtgtgctgctctacaaatcacttttcataggctgctctagtttcaaacatagactttgctaaaacagactgaaacaaaccacaaaagtt

SEQ ID NO: 65332 - DNA, 600 bp, Chicken  19866894332430_1
actgccagatgtaagctccctaccttcctccaggtcgttcctcagggaagcctccagcagagcaacactggcttcaaaagacactttcttccggttaacagcatttctcttcttttcatgcttccgcttcttgtgctgcatctccttctcgtactgcgcccatttcttcagctgctgagccctccgcttctgggctgcccgcagcctctccagcgtgggcaccttgtccagcagctgcagctctgtcaggaggtccacgtgggcatccattgcttctgccaggagagaggggccaaaggrcgtcccagctggaaatggtgtcctaccacaggtcctcgggatcacggctgcctggtgctataccagcatcttggggccaggctgggaagggcccatcgcagtctgatgagaagatggtggaagcctgaaatgagaggtaagtatgagggatccactctcactgttccacgcagacaaatgattaagatcagtccactggaaaactcaacaggcaccacctaccatctcaaaagaaggttcatttcattgcattttcatcacttgtttcttctctctggcttttgtgattccacctctcac

SEQ ID NO: 65333 - DNA, 600 bp, Chicken  19866894332430_2
caaactcagccagagcacacaggcaggtcgcttcatctagcaaagggccaacagaaggccaagggcagcttcagtggtcctcacaaaccttattttgagagtttcagaatagacgggaacaaaaataaaactgtttatgtcccatgaggactcaagattgcaaaactaaattaacaataataatagtaataataatgtttcagctccatgctggtacaaacccaaaaccttgcaaagtttttcataagagggatcctacacggcaatccaaggagttgcccaagatgccctccacagaaygggcatcaatgcagccctcttcccaaaaaccctttatttggagactgacacccttctcaagyacagcaccttgctgggaagctcttcccaccccccatgaacccagctctggcccacgtgggcgttcctgcaggtatctctcttggcgatctccgctgcagtaacacgggctgcagatctgaagcccgctgacaataccccgagtggcagagataagggcaggaaatgcctctcggcatagcgcatcggcactcccacccagcgcctttcccagctcgcttccaccattgtttgctgaaa

SEQ ID NO: 65334 - DNA, 600 bp, Chicken  19866894332430_3
gggcagcttcagtggtcctcacaaaccttattttgagagtttcagaatagacgggaacaaaaataaaactgtttatgtcccatgaggactcaagattgcaaaactaaattaacaataataatagtaataataatgtttcagctccatgctggtacaaacccaaaaccttgcaaagtttttcataagagggatcctacacggcaatccaaggagttgcccaagatgccctccacagaaygggcatcaatgcagccctcttcccaaaaaccctttatttggagactgacacccttctcaagyacagcaccttgctgggaagctcttcccaccccccatgaacccagctctggcccacgtgggcgttcctgcaggtatctctcttggcgatctccgctgcagtaacacgggctgcagatctgaagcccgctgacaataccccgagtggcagagataagggcaggaaatgcctctcggcatagcgcatcggcactcccacccagcgcctttcccagctcgcttccaccattgtttgctgaaagatgaataaatacacccccaaaagacacctgaagtagaaatgatggcttaattctgcaggtt

SEQ ID NO: 65335 - DNA, 600 bp, Chicken  19866894332433_1
tttaaaagccgatttctatgtttctgtgtacattggagttattggcacctgattaagcaattacttttgcatctaaattcggttgtattctaacagataagtgctaaggaggaaagcaggttgtctttgcaattgtttattctcaaggcagcatatcaagaccaatttgtgttagtctgtgaagtggtaactgtattaaactggcaatccagcacagaaaattctagcatctaattccccgttcccagagcgacctacagttccctatgtaacacagcatatcttcctggctgttcaacrtatagtctttaaactttcctaattcttaagtaagcttccttaacacagacttctgaattttattcttatgcatacggtttcctccttattagtttgtgtaatgttccctccactatgagagaaaataataatccacaagacaagttctcattttatcttgaacttgtcacatattaagattctcctactctgtcagacttgtaagcttgtctaatgtctgtcgtttgttcccaaaattaacagagtctatccacgctgtatggtttttcagttcctctgattttgattatacataataat

SEQ ID NO: 65336 - DNA, 600 bp, Chicken  19866894332433_2
tcctccttattagtttgtgtaatgttccctccactatgagagaaaataataatccacaagacaagttctcattttatcttgaacttgtcacatattaagattctcctactctgtcagacttgtaagcttgtctaatgtctgtcgtttgttcccaaaattaacagagtctatccacgctgtatggtttttcagttcctctgattttgattatacataataatttgtaatttaaattcacagaaagcgtgcctatgtagcaatgtgttttccttgtcagctttaaaggcttggcctttactractgataccaaagccctgttttttccgctsattgcagagttccggtaatgcttgtactgaccaattacttatagtaattcgattatgtaccctttttcttttattatttacccgtttaacagaggattgatcagaagaaagagagtcaattaaatatactgcaataaagccagtatgaataacaacagcaggaattgaagtcaaaccagcagcagataggaaacactgagataaggctgaaatcttgtctttaacttctcttatttttcttgtgcgttgctttgccagggttccaaacag

SEQ ID NO: 65337 - DNA, 600 bp, Chicken  19866894332433_3
ccactatgagagaaaataataatccacaagacaagttctcattttatcttgaacttgtcacatattaagattctcctactctgtcagacttgtaagcttgtctaatgtctgtcgtttgttcccaaaattaacagagtctatccacgctgtatggtttttcagttcctctgattttgattatacataataatttgtaatttaaattcacagaaagcgtgcctatgtagcaatgtgttttccttgtcagctttaaaggcttggcctttactractgataccaaagccctgttttttccgctsattgcagagttccggtaatgcttgtactgaccaattacttatagtaattcgattatgtaccctttttcttttattatttacccgtttaacagaggattgatcagaagaaagagagtcaattaaatatactgcaataaagccagtatgaataacaacagcaggaattgaagtcaaaccagcagcagataggaaacactgagataaggctgaaatcttgtctttaacttctcttatttttcttgtgcgttgctttgccagggttccaaacagaaggatattactctaacattcagtaattca

SEQ ID NO: 65338 - DNA, 600 bp, Chicken  19866894332435_1
caacttggtaacaaagtcactaaaaggtatgctagattttctgcataattcaacatacttatgggtttataccacttgaataattagtttacctcaggcattttcataccagcattagctgaactagtccaagacagttccctcatctccagctacctctaaaaagcctaaggcagaaaaggctaaaacaaaaagacaactctgcaacgatacactgcttgctcttcttttccccctgctattattctgcatgcacgtatgaccaacttgatttatatttgaacaaggacagtgctacaygtcaactttttttccatctcatacacagacaatactcaaaactcccaccagcactgacctgttaactatgatgtgctacagttcaaaacccctaattgaccctccatgaattaatcaaatactcatcgttacttttccccctcacttaaacaaggaaataaaactaggtgctcaacagccaaaaataaagtaaaaatcagtaaaaaaatgagttttcccatgacaatgcaataaacattacgagttctgttatgtgaacagaaactactgaaaagcataaacctgtgtctggtgagacag

SEQ ID NO: 65339 - DNA, 600 bp, Chicken  19866894332437_1
caggtatcatgctgtaatgctttaagttgttctattttgaattgctactgtaggtctatgataatactgcctatttgtcacactatatctgttttatgtttgcttataataattcttccagtcttcctttgagtgatgaagcttatgtttcttcttgtagctgccaaaatgatgtactatttagatccttccagtcagaaaagagcggtggagctggcaatgaccctggatgaatccctcattaacagaaatcttcaggtaacagatataaattgtaaactactactacttctctgtctrcaaaakctgtgtgcaagctacggaggtaagaggaaactgaaatgattactgttagggaggttaggttgtcatgtgagagaaagggctgtcatctgagctgaaaatctgtcctttttgcacacgtaatgtagcaaatagctaggcagcaacagaaaccatcttatttctccagtggaagtgcccttaaaaaataagaacctgaaggagtttaggcacttcttgtaacgtgttctcctaagcaaagaagagacgtttgattttcagaagggaccaacggtctcagggcacgctgcagatgtt

SEQ ID NO: 65340 - DNA, 600 bp, Chicken  19866894332437_2
tcatgctgtaatgctttaagttgttctattttgaattgctactgtaggtctatgataatactgcctatttgtcacactatatctgttttatgtttgcttataataattcttccagtcttcctttgagtgatgaagcttatgtttcttcttgtagctgccaaaatgatgtactatttagatccttccagtcagaaaagagcggtggagctggcaatgaccctggatgaatccctcattaacagaaatcttcaggtaacagatataaattgtaaactactactacttctctgtctrcaaaakctgtgtgcaagctacggaggtaagaggaaactgaaatgattactgttagggaggttaggttgtcatgtgagagaaagggctgtcatctgagctgaaaatctgtcctttttgcacacgtaatgtagcaaatagctaggcagcaacagaaaccatcttatttctccagtggaagtgcccttaaaaaataagaacctgaaggagtttaggcacttcttgtaacgtgttctcctaagcaaagaagagacgtttgattttcagaagggaccaacggtctcagggcacgctgcagatgttaaatgg

SEQ ID NO: 65341 - DNA, 600 bp, Chicken  19866894332453_1
aagtgctcagcacttttgaaaatgaatctaaaatgcttgtaagtagttggggcactacagaaaatcatatttgcaactaatttccctgattttgttctgacatcaacaccaatcataaaataatttgatatctagataacagcagaattgatcatatatggagcaagtccaagagaaagaaatattgtttagaaatgaattaaagaatgtaatggtgtttaaatatgggagatgatacacaactttgacttcaattgaattaaatgcactggttgtgcagcagttatttccaaactcaawgctgccatcagctaaatactcatccctcagaaaggagtggagctgtatctggtgtacactatgcagcagagctgagtccatgcggactggactggcctctccgggaaatcataaattattcatctgtagccactggaaggatgtggcaacaaacactcccatagttcaagcagcccctcgaagtcttgtttgacattggatggtttcagaaaacatttggcaagagaggttaacaacagacttcctcagcacttcagtggattggatgtatgtgaatcccaccctgttcaatgcaacaca

SEQ ID NO: 65342 - DNA, 600 bp, Chicken  19866894332477_1
gaataagaatcctttctcagcattgttgcatgaatgtaaaaaactcaacaatcaaaagggactgtaatgccctctagtctgatctcgtgggtagcatacacacaacacttacatgatagctcctgtgtcggtttgtgtttgctcactaagcttgcaacagaaggctgatttaaaacgttcaagatttggagaaacatcatgcccttaaacatctctctccactaattaaatatgctcattgaatttaaaacagatttttctagccttactttgccaggcttcagcttccatcttctactrcaggatttcacctagtatgttcttctgtcataaagctccttctcatgtaggaactctaaacacaagtcactttaagcttctgtggatgaattaaattctttgtttagtcactgatggtctttcaaaagtatgcactcaatctcattaacagatgtttttttctgcactaaaaaaatctgaagggtaagaacttcagttttttaatagtgtgacgctcagaggccaagcagcaatgtgacctgagctatatgataagaacaaatagttggtattttttcattctcacttttcaaaaatgaa

SEQ ID NO: 65343 - DNA, 600 bp, Chicken  19866894332477_2
tcattaacagatgtttttttctgcactaaaaaaatctgaagggtaagaacttcagttttttaatagtgtgacgctcagaggccaagcagcaatgtgacctgagctatatgataagaacaaatagttggtattttttcattctcacttttcaaaaatgaaataaattaagacattattctgcatgtccataaaaatgctggggaataccttaatctgatttaagtgatcataggtgtactggaactggtagagtctagataacctgcatatgctagccaactgccacatcagctggcattyctaaagcaggactgcagggcaattcttttcatgaagcagaaaagcaaggagttctgtgagtagtggaactaatgaagctttgcctcccgtttttcccagcaacttgcactatcttgcctctttctgacagcttccaatgttatttccagagctccctgtcccttataccataatttcctgcatcctccagatctgttaggccaggcaagaagcagctgatactttggctggatcagagctagctatagcatgctgtccaggatgtgcatgccaatcaggtagtttgccaatagcagatca

SEQ ID NO: 65344 - DNA, 600 bp, Chicken  19866894332477_3
gaaaagcaaggagttctgtgagtagtggaactaatgaagctttgcctcccgtttttcccagcaacttgcactatcttgcctctttctgacagcttccaatgttatttccagagctccctgtcccttataccataatttcctgcatcctccagatctgttaggccaggcaagaagcagctgatactttggctggatcagagctagctatagcatgctgtccaggatgtgcatgccaatcaggtagtttgccaatagcagatcaaacagggagaactaagtcctccttgtctttcttttcamgagggcattaactgagatcttacaacyctcatctgctgactttgacagcatttttattaagttaatatatctgtgagctgtatccttctactaaattygtttgaaatttgtcaagtaacctaacagttaccaggacaaactgacacatggaaaaatcacatacacctcattgtatgtccttggggaagtgaggctatataatacattatatatgcattccttaatacattaataatacattataatacattccttaatagtgtaacagaattgactgctatgacactattttgtagcgta

SEQ ID NO: 65345 - DNA, 600 bp, Chicken  19866894332477_4
gaactaatgaagctttgcctcccgtttttcccagcaacttgcactatcttgcctctttctgacagcttccaatgttatttccagagctccctgtcccttataccataatttcctgcatcctccagatctgttaggccaggcaagaagcagctgatactttggctggatcagagctagctatagcatgctgtccaggatgtgcatgccaatcaggtagtttgccaatagcagatcaaacagggagaactaagtcctccttgtctttcttttcamgagggcattaactgagatcttacaacyctcatctgctgactttgacagcatttttattaagttaatatatctgtgagctgtatccttctactaaattygtttgaaatttgtcaagtaacctaacagttaccaggacaaactgacacatggaaaaatcacatacacctcattgtatgtccttggggaagtgaggctatataatacattatatatgcattccttaatacattaataatacattataatacattccttaatagtgtaacagaattgactgctatgacactattttgtagcgtaacacaggatgtagttttactgaaattg

SEQ ID NO: 65346 - DNA, 600 bp, Chicken  19866894332477_5
atgttatttccagagctccctgtcccttataccataatttcctgcatcctccagatctgttaggccaggcaagaagcagctgatactttggctggatcagagctagctatagcatgctgtccaggatgtgcatgccaatcaggtagtttgccaatagcagatcaaacagggagaactaagtcctccttgtctttcttttcamgagggcattaactgagatcttacaacyctcatctgctgactttgacagcatttttattaagttaatatatctgtgagctgtatccttctactaaattygtttgaaatttgtcaagtaacctaacagttaccaggacaaactgacacatggaaaaatcacatacacctcattgtatgtccttggggaagtgaggctatataatacattatatatgcattccttaatacattaataatacattataatacattccttaatagtgtaacagaattgactgctatgacactattttgtagcgtaacacaggatgtagttttactgaaattgtcaagttaaaattagtaattgtacttctgcttgacgacacacaagacgtcatgctgttataatagtatgtt

SEQ ID NO: 65347 - DNA, 599 bp, Chicken  19866894332480_1
  misc_feature (1)..(138): n is any nucleotide
nnnnnnnnnnnnnnnnnnnnnnnnnnnnnnnnnnnnnnnnnnnnnnnnnnnnnnnnnnnnnnnnnnnnnnnnnnnnnnnnnnnnnnnnnnnnnnnnnnnnnnnnnnnnnnnnnnnnnnnnnnnnnnnnnnnnnnnnnnttaattctgaggtatcggcctcgtttggtccacccatttccctgactgcctctgttagaacagcagggtttgtgtccccggtggtggtggcggtggtaaggtgtgtcccatcctcacagctcagtgtccatccctccatgctgcctttcccacgccagaaaygttcgattttctttgtgcccatccgtcctctgagaaattccaatgcgggaagaaacaataaaaacacagagtgagactggatattgacacagcccgcaagcacacagccatactggcgtgtcaggtatgtacataccatttcagcccacgataaagaggcaccgggtgacctttggatgctcgttgttgacactgcctatcttaaacttgtaatgagtccccacaacagccggctcgcgctgctcacacggctgtgtttcttttcctaaggatgcaccggcgctgatcggcaccaaact

SEQ ID NO: 65348 - DNA, 600 bp, Chicken  19866894332480_2
gtcctctgagaaattccaatgcgggaagaaacaataaaaacacagagtgagactggatattgacacagcccgcaagcacacagccatactggcgtgtcaggtatgtacataccatttcagcccacgataaagaggcaccgggtgacctttggatgctcgttgttgacactgcctatcttaaacttgtaatgagtccccacaacagccggctcgcgctgctcacacggctgtgtttcttttcctaaggatgcaccggcgctgatcggcaccaaactgctctccgctgttcggtttggggtrcgagagacctcaacagtgcgaccccaacgtgccgcgttgtctgcagacagaccccgggcctcatttcccttggaaaaaamcakctgaaatgctgacggcaaaaggcctttgtgcgctccagtgccggcagggctgggcacggaggtgtggaggcggcacagcgctgcgcagtgctgcacgtgtggctgacgggcagtgggtgccggcgcacagcgcggggctcgggccgcacccacagctggtttgctccgtttcctctccgcccgtcgcggtccttttggcaccggggaggcgtgaaag

SEQ ID NO: 65349 - DNA, 567 bp, Chicken  19866894332480_3
cagccatactggcgtgtcaggtatgtacataccatttcagcccacgataaagaggcaccgggtgacctttggatgctcgttgttgacactgcctatcttaaacttgtaatgagtccccacaacagccggctcgcgctgctcacacggctgtgtttcttttcctaaggatgcaccggcgctgatcggcaccaaactgctctccgctgttcggtttggggtrcgagagacctcaacagtgcgaccccaacgtgccgcgttgtctgcagacagaccccgggcctcatttcccttggaaaaaamcakctgaaatgctgacggcaaaaggcctttgtgcgctccagtgccggcagggctgggcacggaggtgtggaggcggcacagcgctgcgcagtgctgcacgtgtggctgacgggcagtgggtgccggcgcacagcgcggggctcgggccgcacccacagctggtttgctccgtttcctctccgcccgtcgcggtccttttggcaccggggaggcgtgaaagcaccattctcccgcttcagaattcctcggctccccatctcccacctg

SEQ ID NO: 65350 - DNA, 564 bp, Chicken  19866894332480_4
ccatactggcgtgtcaggtatgtacataccatttcagcccacgataaagaggcaccgggtgacctttggatgctcgttgttgacactgcctatcttaaacttgtaatgagtccccacaacagccggctcgcgctgctcacacggctgtgtttcttttcctaaggatgcaccggcgctgatcggcaccaaactgctctccgctgttcggtttggggtrcgagagacctcaacagtgcgaccccaacgtgccgcgttgtctgcagacagaccccgggcctcatttcccttggaaaaaamcakctgaaatgctgacggcaaaaggcctttgtgcgctccagtgccggcagggctgggcacggaggtgtggaggcggcacagcgctgcgcagtgctgcacgtgtggctgacgggcagtgggtgccggcgcacagcgcggggctcgggccgcacccacagctggtttgctccgtttcctctccgcccgtcgcggtccttttggcaccggggaggcgtgaaagcaccattctcccgcttcagaattcctcggctccccatctcccacctg

SEQ ID NO: 65351 - DNA, 600 bp, Chicken  19866894332481_1
gtctgcattgtgtatttattacttattgtcaaaaagtgagttattgatttggcagatctgtgtcatagatgtccataagagatcttgacagcctaagaggaggttttttgactaacatgtctgcaaggaattaatattttgactttctgcaggatttgttaaatatatttttattctgttttggtagtggtacatgactaatacattggataagtgcatatgtgggtgtataggaggcggctgaatgtcttttctttttttaaatagtaataaatcagtctttgactttttaaagtaccygataaagtcataaaatcagtgattggaattcttataaccttgcaggtcattttatgcacttgctgatccactgcattatttcctcagacctccactttaaacgtcccaaatgtgggggacttcttcctttcaccatgcaagacttttactagcatagggagctgtggctttgtttgggcaggtgatggaaatccacaatacacttatattgaaaaaaaaaaaaaaaaaaaaaaaagtttaattttatacctttgaatgtgatgatccctgttaaatccttgctctagaggggcctaaaaa

SEQ ID NO: 65352 - DNA, 599 bp, Chicken  19866894332484_1
  misc_feature (1)..(91): n is any nucleotide
nnnnnnnnnnnnnnnnnnnnnnnnnnnnnnnnnnnnnnnnnnnnnnnnnnnnnnnnnnnnnnnnnnnnnnnnnnnnnnnnnnnnnnnnnnntgtgtttttcttcagatatgtcttctgctgtgcttggtcattcacagagtcatccaggacatccaaagagaaaatattttttcaaagttggctgttgcattttgactgttgcatatgcttgcctgtactttcttcaaaactgtataaaggatcctccttgtcatctgacatctattgttgcagcattagttaattattatgtgccaccrctgttaaactctgcaaataacgttgaattgttgcagattaatgaacagagcacaggcacacccaacaagttgttgatggggatcttacaagggaagatctctttgagagcagccccacggagaaggacttgggggtcctggtagatgagaagctggacatgagccagcagtgcgcttgcagcccagaaggccaactgtgttctgggctacattaaaaaaggggtggccagaagggagagggaagtgattgtccccctctactcagctcttgtgaggccccatctgcagtactgcgtcca

SEQ ID NO: 65353 - DNA, 600 bp, Chicken  19866894332487_1
cttaaaatgatagcaaatgtctcatactcgatgagaattacagagctgaaaatagagaagaacactgagctgacaagggagcagtgtgtcataacttttaagatttgtttgtttggcttatattacttcttaaccctttccatttatcttgttacttttccgtagcatatgttttgttattgaattttctaggagatcaataaaggaaaaagaaagatgagctttacagaatttacaaattctgcaagcttctcttgtcaaataaagcactcacaacacttctgctctggaaatcccagrattcaaagcagccttctagtatgtaaggacaaactaatcttttcacgtggttctaatctttatcttggatagtttttgttttaaagcatttgaaaaatcattcattgaacattacgatagtttcatacaaagcttgacatttggtcatttagctgckcttcatctgataaggcaaaggaaaatgaagaacctttataatgtgtttttattaatcctaagagagagagttgttttccttaacctttgcaaacatcttattttagcaacagaaagaaggaataatgtgaacttctgggctct

SEQ ID NO: 65354 - DNA, 600 bp, Chicken  19866894332487_2
ttccgtagcatatgttttgttattgaattttctaggagatcaataaaggaaaaagaaagatgagctttacagaatttacaaattctgcaagcttctcttgtcaaataaagcactcacaacacttctgctctggaaatcccagrattcaaagcagccttctagtatgtaaggacaaactaatcttttcacgtggttctaatctttatcttggatagtttttgttttaaagcatttgaaaaatcattcattgaacattacgatagtttcatacaaagcttgacatttggtcatttagctgckcttcatctgataaggcaaaggaaaatgaagaacctttataatgtgtttttattaatcctaagagagagagttgttttccttaacctttgcaaacatcttattttagcaacagaaagaaggaataatgtgaacttctgggctctttgaagcttttatttatttttttctcttatcttaaaaaggccagagagttgtcctcgctgaataaagagttagaaacaggcaaatgaaatcccccccttacctacctcctagtaaaatcccaagcatttacttctctacttaattataaagcatttt

SEQ ID NO: 65355 - DNA, 600 bp, Chicken  19866894332496_1
gccccgagccgctgcccttcagcaagaaacgtgcattgggggtcgggtattggggagcaactccaatctatagcgatgtcagtaggagaaggatccatctcgggctgccccagatccgctgctccatatccataggtgtcaatgagaattagataagcagaacgggaacggtttatggttctaaatctatccctgtatgcgtgcgagagtgccataaaatcttcatgaggggtaaactagattaccaaatgcattagaacagaatcgctacgtgttacgaaaggaacaacatcggcagcrggcgtcagagctcaaacgtagccctgaacgtgcaaaactgtaagagaaagaaggatggggtatttctgtttctctaagataacagaattggtttcatccatcagccgtaaaagttaacgtggctcactgagagctgggatgcttgcagcgacgcggcgcgcggctgcaaagactttgtcctttcccatttcccactgatgcactgcctcctttgttgctggcaggaaatcgtggccgcagcccacgtgaggttcacctgaccgcaaactgctgccccacgtctgcaacccaaacccacag

SEQ ID NO: 65356 - DNA, 599 bp, Chicken  19866894332501_1
  misc_feature (1)..(23): n is any nucleotide
nnnnnnnnnnnnnnnnnnnnnnnaaaactgagttgtttgttggatacacttttttgaaatgcatcccaagccttccctgcagacgttatgatgtgcatattaaaacctatgggtttttttttttgcagtaactacatttttccatgattcaggggcatgaagggacatcttgtcttctagaattttagaagtattttatatttcgtagtcaccttgattttagttctagaaattaaaatatagctgtgaataagcaacagggtcagcctccttactgcagaggtacacatacaacgctaytrcttctgtgtgctttgtgtggtagaaccacaactcaagcatttggtgcttgccatcagaaggctgaatcagtaccagtggattaactgggggggtgaaaaacagctgttgcagacatctaccctaattaaaatagtttaaaaccattcatgagttttggcttgtgataagaaaacaaakaaaaaaaaaaaggattttcaaaacataatctaaattctgctcctaaaggacaggcgttgatggacaacatggtctgtggacttagtattcagttttcatggtaaaaaaaaaaactgacc

SEQ ID NO: 65357 - DNA, 599 bp, Chicken  19866894332501_2
  misc_feature (1)..(21): n is any nucleotide
nnnnnnnnnnnnnnnnnnnnnaaaactgagttgtttgttggatacacttttttgaaatgcatcccaagccttccctgcagacgttatgatgtgcatattaaaacctatgggtttttttttttgcagtaactacatttttccatgattcaggggcatgaagggacatcttgtcttctagaattttagaagtattttatatttcgtagtcaccttgattttagttctagaaattaaaatatagctgtgaataagcaacagggtcagcctccttactgcagaggtacacatacaacgctaytrcttctgtgtgctttgtgtggtagaaccacaactcaagcatttggtgcttgccatcagaaggctgaatcagtaccagtggattaactgggggggtgaaaaacagctgttgcagacatctaccctaattaaaatagtttaaaaccattcatgagttttggcttgtgataagaaaacaaakaaaaaaaaaaaggattttcaaaacataatctaaattctgctcctaaaggacaggcgttgatggacaacatggtctgtggacttagtattcagttttcatggtaaaaaaaaaaactgaccaa

SEQ ID NO: 65358 - DNA, 590 bp, Chicken  19866894332501_3
aattttagaagtattttatatttcgtagtcaccttgattttagttctagaaattaaaatatagctgtgaataagcaacagggtcagcctccttactgcagaggtacacatacaacgctaytrcttctgtgtgctttgtgtggtagaaccacaactcaagcatttggtgcttgccatcagaaggctgaatcagtaccagtggattaactgggggggtgaaaaacagctgttgcagacatctaccctaattaaaatagtttaaaaccattcatgagttttggcttgtgataagaaaacaaakaaaaaaaaaaaggattttcaaaacataatctaaattctgctcctaaaggacaggcgttgatggacaacatggtctgtggacttagtattcagttttcatggtaaaaaaaaaaactgaccaaaatgattactattaaactagttgaaacaaattcatttaaattattatgagtcaggataacaagtgacactggtaactaacagctctgctcacaaagaaacaaaactgcctctgacaggttctcagcaataccagacaaagctagaggtacagcataagccaataagcat

SEQ ID NO: 65359 - DNA, 599 bp, Chicken  19866894332508_1
  misc_feature (1)..(80): n is any nucleotide
nnnnnnnnnnnnnnnnnnnnnnnnnnnnnnnnnnnnnnnnnnnnnnnnnnnnnnnnnnnnnnnnnnnnnnnnnnnnnnnncctcagtatagacacagctagtatatttccttttttcacattattctggatttggcaaagtatttgtatgagtggggagagaggggggaaaaaaccacaagggagggatgtcagaccaaaataaatcaaaggtaagcatgtttcttaagacacaggaaattaaatatgcaaaaagcagtgggatattttttccaagcttgctttctgtctgtcttctctyactatagagattctccacctttgagacctttcctggtgggacttcatgyaagcagtaacaattatccccagtactgaggctacagtgtctcaggaggaggcctttgcctcccckaatagtatgcagatccatacattaaactgaaaaagagaagtctaaggaacaggtgcaaatgtttcagtctgccactgacgcgtcccatggactgacatcaaccattacagctgcttgctccattgcacagtaacagtgattttttttgacacataataaatactgcctacagaatacagccagac

SEQ ID NO: 65360 - DNA, 599 bp, Chicken  19866894332508_2
  misc_feature (1)..(31): n is any nucleotide
nnnnnnnnnnnnnnnnnnnnnnnnnnnnnnncctcagtatagacacagctagtatatttccttttttcacattattctggatttggcaaagtatttgtatgagtggggagagaggggggaaaaaaccacaagggagggatgtcagaccaaaataaatcaaaggtaagcatgtttcttaagacacaggaaattaaatatgcaaaaagcagtgggatattttttccaagcttgctttctgtctgtcttctctyactatagagattctccacctttgagacctttcctggtgggacttcatgyaagcagtaacaattatccccagtactgaggctacagtgtctcaggaggaggcctttgcctcccckaatagtatgcagatccatacattaaactgaaaaagagaagtctaaggaacaggtgcaaatgtttcagtctgccactgacgcgtcccatggactgacatcaaccattacagctgcttgctccattgcacagtaacagtgattttttttgacacataataaatactgcctacagaatacagccagacattctgacacatctcacctggcctgtaacaaacaaaagtcggaacaaat

SEQ ID NO: 65361 - DNA, 600 bp, Chicken  19866894332508_3
ttcacattattctggatttggcaaagtatttgtatgagtggggagagaggggggaaaaaaccacaagggagggatgtcagaccaaaataaatcaaaggtaagcatgtttcttaagacacaggaaattaaatatgcaaaaagcagtgggatattttttccaagcttgctttctgtctgtcttctctyactatagagattctccacctttgagacctttcctggtgggacttcatgyaagcagtaacaattatccccagtactgaggctacagtgtctcaggaggaggcctttgcctcccckaatagtatgcagatccatacattaaactgaaaaagagaagtctaaggaacaggtgcaaatgtttcagtctgccactgacgcgtcccatggactgacatcaaccattacagctgcttgctccattgcacagtaacagtgattttttttgacacataataaatactgcctacagaatacagccagacattctgacacatctcacctggcctgtaacaaacaaaagtcggaacaaatgaaaaacccaaagatcagtccgctattggcacaatcaatgcattcaaactccattgcatttaggat

SEQ ID NO: 65362 - DNA, 599 bp, Chicken  19866894332521_1
  misc_feature (1)..(63): n is any nucleotide
nnnnnnnnnnnnnnnnnnnnnnnnnnnnnnnnnnnnnnnnnnnnnnnnnnnnnnnnnnnnnnnatgaagttccagaaggcacagttgaagcaaggactccactgcctacactgaggaggtgggatttgtccggcccggtgaaatgacattgtaaataaagctttaataaaaagtggcagttattgatgagttgcgttaaccttgtctaaagccatttaggcgaattaaaactccacgctgtatttccctgccacgttaaaagcagcaaggcataaagcagattgaagctgctggccgcaytggctctttgtgagctctgtatgagcaacatccagagcagacrttggggtagcacaacatagggtgctggaagggaggaggggagcaggaggccatggtgcacatcagcccacagtgcagaggagcacagctcaggatcacaggatctgctttaggctgggtcacactgactttcctccagcactttgttaagactctcacacacaggagaagcaacttccgtaggcagaatggtaacagcgtgaaggaatattgctttttattgtcctggtactatttctaatgtaattgagcatctc

SEQ ID NO: 65363 - DNA, 599 bp, Chicken  19866894332521_2
  misc_feature (1)..(20): n is any nucleotide
nnnnnnnnnnnnnnnnnnnnatgaagttccagaaggcacagttgaagcaaggactccactgcctacactgaggaggtgggatttgtccggcccggtgaaatgacattgtaaataaagctttaataaaaagtggcagttattgatgagttgcgttaaccttgtctaaagccatttaggcgaattaaaactccacgctgtatttccctgccacgttaaaagcagcaaggcataaagcagattgaagctgctggccgcaytggctctttgtgagctctgtatgagcaacatccagagcagacrttggggtagcacaacatagggtgctggaagggaggaggggagcaggaggccatggtgcacatcagcccacagtgcagaggagcacagctcaggatcacaggatctgctttaggctgggtcacactgactttcctccagcactttgttaagactctcacacacaggagaagcaacttccgtaggcagaatggtaacagcgtgaaggaatattgctttttattgtcctggtactatttctaatgtaattgagcatctctggaattcacagagtggaagaggaagatggatctttttgaact

SEQ ID NO: 65364 - DNA, 600 bp, Chicken  19866894332529_1
gacctagcaaagtgttttcttcgattaatataaaacaggaatatagtgttcataaagagaaatgtgttatccccgctgacttcatgcttgctataggactacaagattacatgataataaaagacaagaatagaaggatatttttagtatttttatttacatgatttttagaaaaattcctttaagcttgcaaagtactgagatacctaaaaccatgtaattccctgacaaaaagctttaggacaatgtgtgtgattctccccatctcgtccactaaaaagcatctcaagaaacatagcrawctctaayaaaaacttaccgccttgctctgtaactacccaakttcaaacaacagcaatactgtacacttacactgtaatgacttacaataagaaatcagagcacatctatattcagaacaatacaaaatattattatctcatttacaatatggaaacttcaatgcagtatcattacagcaaactaatactgaagacgaaaagttcattgtattcgaggcgaacaaactcaattcatagatatagataaaatgtgtgtattaatttgaccaatttttttattctcctgtactgaagtcct

SEQ ID NO: 65365 - DNA, 600 bp, Chicken  19866894332529_2
cctagcaaagtgttttcttcgattaatataaaacaggaatatagtgttcataaagagaaatgtgttatccccgctgacttcatgcttgctataggactacaagattacatgataataaaagacaagaatagaaggatatttttagtatttttatttacatgatttttagaaaaattcctttaagcttgcaaagtactgagatacctaaaaccatgtaattccctgacaaaaagctttaggacaatgtgtgtgattctccccatctcgtccactaaaaagcatctcaagaaacatagcrawctctaayaaaaacttaccgccttgctctgtaactacccaakttcaaacaacagcaatactgtacacttacactgtaatgacttacaataagaaatcagagcacatctatattcagaacaatacaaaatattattatctcatttacaatatggaaacttcaatgcagtatcattacagcaaactaatactgaagacgaaaagttcattgtattcgaggcgaacaaactcaattcatagatatagataaaatgtgtgtattaatttgaccaatttttttattctcctgtactgaagtccttg

SEQ ID NO: 65366 - DNA, 600 bp, Chicken  19866894332529_3
aagtgttttcttcgattaatataaaacaggaatatagtgttcataaagagaaatgtgttatccccgctgacttcatgcttgctataggactacaagattacatgataataaaagacaagaatagaaggatatttttagtatttttatttacatgatttttagaaaaattcctttaagcttgcaaagtactgagatacctaaaaccatgtaattccctgacaaaaagctttaggacaatgtgtgtgattctccccatctcgtccactaaaaagcatctcaagaaacatagcrawctctaayaaaaacttaccgccttgctctgtaactacccaakttcaaacaacagcaatactgtacacttacactgtaatgacttacaataagaaatcagagcacatctatattcagaacaatacaaaatattattatctcatttacaatatggaaacttcaatgcagtatcattacagcaaactaatactgaagacgaaaagttcattgtattcgaggcgaacaaactcaattcatagatatagataaaatgtgtgtattaatttgaccaatttttttattctcctgtactgaagtccttgaagcgtt

SEQ ID NO: 65367 - DNA, 600 bp, Chicken  19866894332529_4
tagtgttcataaagagaaatgtgttatccccgctgacttcatgcttgctataggactacaagattacatgataataaaagacaagaatagaaggatatttttagtatttttatttacatgatttttagaaaaattcctttaagcttgcaaagtactgagatacctaaaaccatgtaattccctgacaaaaagctttaggacaatgtgtgtgattctccccatctcgtccactaaaaagcatctcaagaaacatagcrawctctaayaaaaacttaccgccttgctctgtaactacccaakttcaaacaacagcaatactgtacacttacactgtaatgacttacaataagaaatcagagcacatctatattcagaacaatacaaaatattattatctcatttacaatatggaaacttcaatgcagtatcattacagcaaactaatactgaagacgaaaagttcattgtattcgaggcgaacaaactcaattcatagatatagataaaatgtgtgtattaatttgaccaatttttttattctcctgtactgaagtccttgaagcgtttgcactgtgactcacaaaagcagtttcacaaaac

SEQ ID NO: 65368 - DNA, 599 bp, Chicken  19866894332539_1
  misc_feature (1)..(52): n is any nucleotide
nnnnnnnnnnnnnnnnnnnnnnnnnnnnnnnnnnnnnnnnnnnnnnnnnnnnctgcaagactttcaaaatggagcaagatgaaatgtgcaatggcattgatcaaagacagaattttctttacaaactcagtgaactgcaatttctatttgcctgaaattaggatgaaaatagttaacacatcacttattgagaattcccccacagaatgatgacatttcaaacgagcacttggtattacagtcctccctgagggtgcgtgccactgattcatttgcaaataattgggtttggctcaatayccacattcccgtctgaattctaagtactatacgtatgccacagaaaagactcgtggtttgcttagctcactcttcagtatggaaactgctgtgcaaagctagatcacaacataagggttcaaaaaatccacagccttttagatgaaatcagaaagagcccagaggagatttcacyctctccaggtcacaagtcaaagggtataccttgtccttgaactscccgttaccacaagcaaaaagaaaatccaggcaaccaaggaggccttcagatgaagtgtctaagcgtgacagatgcacaa

SEQ ID NO: 65369 - DNA, 600 bp, Chicken  19866894332539_2
acacatcacttattgagaattcccccacagaatgatgacatttcaaacgagcacttggtattacagtcctccctgagggtgcgtgccactgattcatttgcaaataattgggtttggctcaatayccacattcccgtctgaattctaagtactatacgtatgccacagaaaagactcgtggtttgcttagctcactcttcagtatggaaactgctgtgcaaagctagatcacaacataagggttcaaaaaatccacagccttttagatgaaatcagaaagagcccagaggagatttcacyctctccaggtcacaagtcaaagggtataccttgtccttgaactscccgttaccacaagcaaaaagaaaatccaggcaaccaaggaggccttcagatgaagtgtctaagcgtgacagatgcacaaggacaaatatgattacatgtcaagcagagatatttgcaattcaccctcttgcattcttgccccttcaggtagtagattaatatgtatgttttataattgcgaacaactggctggctgagcactggaggctgatagataaactgcagaacccatttgttgtgctcctaatattaagg

SEQ ID NO: 65370 - DNA, 600 bp, Chicken  19866894332539_3
aaacgagcacttggtattacagtcctccctgagggtgcgtgccactgattcatttgcaaataattgggtttggctcaatayccacattcccgtctgaattctaagtactatacgtatgccacagaaaagactcgtggtttgcttagctcactcttcagtatggaaactgctgtgcaaagctagatcacaacataagggttcaaaaaatccacagccttttagatgaaatcagaaagagcccagaggagatttcacyctctccaggtcacaagtcaaagggtataccttgtccttgaactscccgttaccacaagcaaaaagaaaatccaggcaaccaaggaggccttcagatgaagtgtctaagcgtgacagatgcacaaggacaaatatgattacatgtcaagcagagatatttgcaattcaccctcttgcattcttgccccttcaggtagtagattaatatgtatgttttataattgcgaacaactggctggctgagcactggaggctgatagataaactgcagaacccatttgttgtgctcctaatattaaggaaacaataacttctgtatttgttttatcctttcccttttgtttc

SEQ ID NO: 65371 - DNA, 378 bp, Chicken  19866894332539_4
gtagattaatatgtatgttttataattgcgaacaactggctggctgagcactggaggctgatagataaactgcagaacccatttgttgtgctcctaatattaaggaaacaataacttctgtatttgttttatcctttcccttttgtttcctgttgtaaggaaagatggacaaaatctaacccttttctcatcaaacaatggaaaacattgaaaattcagaaaataacttctcttcatgcaattctaagttaggcacattgcttctgttcactgtacatagcatttcctatttaccctttrtttattaaagttaaatccttgatcattactgtatgtccctgaagcatatcccatatgcatcactgtctatataaagtt

SEQ ID NO: 65372 - DNA, 599 bp, Chicken  19866894332540_1
  misc_feature (1)..(120): n is any nucleotide
nnnnnnnnnnnnnnnnnnnnnnnnnnnnnnnnnnnnnnnnnnnnnnnnnnnnnnnnnnnnnnnnnnnnnnnnnnnnnnnnnnnnnnnnnnnnnnnnnnnnnnnnnnnnnnnnnnnnnnnntacttataagataaaattaagtctataaaattaatgctaaaaaaaatgctttgaagatgaaactatacatacaggctgcaatccaagtctaaacttaatgaagctgttttaaaaccatttacccaaacaaaagcattttagtgccatcaagtggcaaaacggattcaaaaacattgctgraagagttatcagtgtgcaagggcaacaaaagggggaacctaaaagcagctatacgaagggcaatgatgcagcagggctttaacagccagcagaagtaaacttctactggaccttaagttaaccgcttactgagaacaatgaacctaactgcgaaacaggattggaatgtgggaaaagcaagcacctaatcattaattcagtactgtaaagattaaactacaatggaaatcaatgcatgtttatctacatgtacttcctgagctatggaaaaaattgatctgagcttgtttactgacctt

SEQ ID NO: 65373 - DNA, 599 bp, Chicken  19866894332541_1
  misc_feature (1)..(38): n is any nucleotide
nnnnnnnnnnnnnnnnnnnnnnnnnnnnnnnnnnnnnntctcccctctgggcagataatttattaatacactttttctgaattaatgaagactgaatacactgagaaagacatatatgtcagtgaaaagaaacccaccactagtgactaaccaaatatcttgttccttaaatctacctagtactcaacaggttgttctgctgatacacagtacaaatcaggtcaggaagcatagacaattacatgcaacagagagactaataatgatatcagaaactaaaagtacaagagcttcagccaygagagacttgaatttaaggatcttagctctgcattagtgctttgcaggcaaagcagaccgcaaatrgggagacagcaagtcattctataccatgagatcaaaaagaataactgtcatagkgttcgtacgatactaagtaaaatttccttttaaaacacagattacatggcttagggcaataagcccatatataaacctggaggattacaactgaacatgcacagctaatatacataattttcttagcacaagaactaaggaacattcagctttactttttttctactaaacatcctggc

SEQ ID NO: 65374 - DNA, 600 bp, Chicken  19866894332541_2
tacactttttctgaattaatgaagactgaatacactgagaaagacatatatgtcagtgaaaagaaacccaccactagtgactaaccaaatatcttgttccttaaatctacctagtactcaacaggttgttctgctgatacacagtacaaatcaggtcaggaagcatagacaattacatgcaacagagagactaataatgatatcagaaactaaaagtacaagagcttcagccaygagagacttgaatttaaggatcttagctctgcattagtgctttgcaggcaaagcagaccgcaaatrgggagacagcaagtcattctataccatgagatcaaaaagaataactgtcatagkgttcgtacgatactaagtaaaatttccttttaaaacacagattacatggcttagggcaataagcccatatataaacctggaggattacaactgaacatgcacagctaatatacataattttcttagcacaagaactaaggaacattcagctttactttttttctactaaacatcctggcaacattctcccatttatcttaagtttctgttttgtctaacagttattagactgagcattacttctat

SEQ ID NO: 65375 - DNA, 600 bp, Chicken  19866894332541_3
agtgaaaagaaacccaccactagtgactaaccaaatatcttgttccttaaatctacctagtactcaacaggttgttctgctgatacacagtacaaatcaggtcaggaagcatagacaattacatgcaacagagagactaataatgatatcagaaactaaaagtacaagagcttcagccaygagagacttgaatttaaggatcttagctctgcattagtgctttgcaggcaaagcagaccgcaaatrgggagacagcaagtcattctataccatgagatcaaaaagaataactgtcatagkgttcgtacgatactaagtaaaatttccttttaaaacacagattacatggcttagggcaataagcccatatataaacctggaggattacaactgaacatgcacagctaatatacataattttcttagcacaagaactaaggaacattcagctttactttttttctactaaacatcctggcaacattctcccatttatcttaagtttctgttttgtctaacagttattagactgagcattacttctatgggtcagaaaactgcacaaggctgatgttctcatgccaaggaagaaaaaaatga

SEQ ID NO: 65376 - DNA, 600 bp, Chicken  19866894332543_1
catgtcatttttgcatactcaatgtacaacagcatgcagtcacttctatcacccaaattgaagcatgtattttagattggtgtctttggctagataattagattgctattgactccaaacatggttaaaatctgatgccctgcctatctcttaaggagatcagttttgtaattggaggcacttcaatgtggtacccatggtctgactgtgctacctgtgcaaaacatgctgtcaggggtattctcaaaatgaaaattatgttgaaatctttttgtatccaacttctaaatgcgatcttaytgtatcacagcagcactgaaaatctgtttcaaagttccttcataactttgagtgagctgaaatgctttggcaatgtaacaaaatggagaagtactaagcaacttgttttcactttatatttgcaagaaaaagttgtcctaaaaacattagggaatcataaaattgttaaggattattctgttacagaactatttctataccaaatgcacgctttaccacaaagtgaaaatactttttgcatacaaaatgctcttttaaaaggagtcacttgaaaatgggagaaatatgattctcttcact

SEQ ID NO: 65377 - DNA, 600 bp, Chicken  19866894332543_2
caaagttccttcataactttgagtgagctgaaatgctttggcaatgtaacaaaatggagaagtactaagcaacttgttttcactttatatttgcaagaaaaagttgtcctaaaaacattagggaatcataaaattgttaaggattattctgttacagaactatttctataccaaatgcacgctttaccacaaagtgaaaatactttttgcatacaaaatgctcttttaaaaggagtcacttgaaaatgggagaaatatgattctcttcactagaaggaagaagctcaaggcagtacacaraagacctacagaaattaagaaattgaatctaattttttttgctgtactgttttccattcaactatgaacttgtacagactttttgacaaaatttttcttaaaaggaaagcaacaatagaaatgagactgtttgttggaatcttgctgaaaggtaagaacttgcatggagaatcaaatctcccaaataggatctctgctggacagctagtggcagcagaagtgttaactgccagagtccttatggcagaacattcagataaatagtttgtggaatctcccagttctcctcagttcatacaa

SEQ ID NO: 65378 - DNA, 518 bp, Chicken  19866894332544_1
atctgccacactatcagcagtaaaccctagattacttacagaatgaaattgctttgacaggtgattaggtttttgaagggtcaaccaaacctccaaacctctcattctcttgtgacaaacaattgcattttattctggatttcatgcaatacaggtactacactgtaggctttgcacacaaatcagatttgattcatttgaaggcatctggacttgtatgacgttgggtagctatcccattactatccaatgagcatgggcatctaaatgaaaagagtacaaaggaaactgacaccaagmatagggacatactcttacatactctgaagttttaaaagggatttcaagcagctctgaaaatcagagggcactggaaaattcccttacaaatcaggctacaaaataggtaacacttcagtgtgtcagtagtaaaacagtaacctactgctctatgcttcttttcttttttgaagatgccaagtcatactcaaacttttccactctcatcccaccttatg

SEQ ID NO: 65379 - DNA, 600 bp, Chicken  19866894332546_1
tcttggcagcaaagcgccgggtgtgcatctcttttcagcagtaccccaagaatccccataagggcagtgccccgaaccacgtcctgtgtcaatagttgcaccctctgcctctcaacgtggcactgacagcagccgtagctcttcagcaagtgtctctcaagcaaatggagtctttgttttttccttcttcccaataacaaccaactgcttctcgactctctgaaaggggcaacccccccacgccggcctcattgagctgttctctcctaagacaggctgtgctgtgtccccccccccccmcctccaccgccaattgcacaagtgatgcttttaaacttgcttttatcgcgctacctttgatatccaggcaggagctgagactgtgatacttattaaaaccttaccgggaggctgtgtggcaaatagcaaagcaaggggagcagctcagtcgtagtagagctgataaaatgctgtacgtgcagaaagtgcttcacacaagtgtcagtggttttgcttgttattagggcgcaggagagtttggcatgagggctgtgcacatggtgtacagctgctgcagctcagcttggagaagggactgag

SEQ ID NO: 65380 - DNA, 600 bp, Chicken  19866894332550_1
caaagcgccacgcggccgctcagcggagcgctgtgctgctctgtgtcacacgtggggctttatgtccgactttgacgtcagtgggaagggcagcgcctgctctctgtgtgtgttatgtgctgggctggtgtttggtacgctcttgagggggtgctgagaggaaggcaaatggaaacagggatataattccagcaaaattcttcttgtaggataggcttgagatcaaaacgatagcaacgtgtttgtcagcacttcactcgtcaaattcctttctctctgatacaagcctcagtaggatgycctgctgagaacttgaacgtggtcggtcttggtgaaactctgtaaggactcatccattgatgacttgtccactctggtgccatgargttcacacctcacagccatgaagcaggaaacccccaaataaaaagcagagaggaaagaaatctgtcctaaggacaggtgatagaatcatagaatggcctgggttgaaaaggaccacaatgatcattgagtttcaaccccctgctatgtgcagggtcaccaaccaccagaccaggcagcccagagccacatccagcctggccttgaatgcctcca

SEQ ID NO: 65381 - DNA, 598 bp, Chicken  19866894332550_2
agggcagcgcctgctctctgtgtgtgttatgtgctgggctggtgtttggtacgctcttgagggggtgctgagaggaaggcaaatggaaacagggatataattccagcaaaattcttcttgtaggataggcttgagatcaaaacgatagcaacgtgtttgtcagcacttcactcgtcaaattcctttctctctgatacaagcctcagtaggatgycctgctgagaacttgaacgtggtcggtcttggtgaaactctgtaaggactcatccattgatgacttgtccactctggtgccatgargttcacacctcacagccatgaagcaggaaacccccaaataaaaagcagagaggaaagaaatctgtcctaaggacaggtgatagaatcatagaatggcctgggttgaaaaggaccacaatgatcattgagtttcaaccccctgctatgtgcagggtcaccaaccaccagaccaggcagcccagagccacatccagcctggccttgaatgcctccagggatggggcatccacaacctccttgggcaacctgttccagtgtgtcaccaccctctgagtgaaaaacttcttactaagtgatg

SEQ ID NO: 65382 - DNA, 600 bp, Chicken  19866894332555_1
tccttatcctcagtcgtcacattctccactgcatcaaacaaacgatagaaattctccttggttcttctcttaccactgatatatttgtaaaaggatttcttattcttttctactgcagtggccaatctgagttcaagctgggctttttccttcctaacttcctccccacataccttaccaaattccttgtaatctccccaagtagcctgtcccttcttccagaggacatagactctctttttcttccggagtcttaacagtagttcctagttcatccacacactgatcttctttccctayggctcgccttacagcattcagggacagcctattcttgtgcctttaagatttccatcttgagaagcacccgggcttcctggagccctttacccttaaggagcgactcccaagggatctgtgctayaagtgtcctgaacaggtcaaagtccgccctcttgaagttcaagatagcagctttgctagtcacccttctaacatctccaataatagataatttcacaatttcatggccactctgctcaagacagtccccagccttcacatttcccaccagtccctcactgttagtgaagagtagat

SEQ ID NO: 65383 - DNA, 600 bp, Chicken  19866894332555_2
atctgagttcaagctgggctttttccttcctaacttcctccccacataccttaccaaattccttgtaatctccccaagtagcctgtcccttcttccagaggacatagactctctttttcttccggagtcttaacagtagttcctagttcatccacacactgatcttctttccctayggctcgccttacagcattcagggacagcctattcttgtgcctttaagatttccatcttgagaagcacccgggcttcctggagccctttacccttaaggagcgactcccaagggatctgtgctayaagtgtcctgaacaggtcaaagtccgccctcttgaagttcaagatagcagctttgctagtcacccttctaacatctccaataatagataatttcacaatttcatggccactctgctcaagacagtccccagccttcacatttcccaccagtccctcactgttagtgaagagtagatctagaagggcaccatccctggtaggctctcataccagctgcataaggaagctatcttccgcacactctagaaacctcttggactgctatcagagaagtcgaagtctcccatgagaatgagtgct

SEQ ID NO: 65384 - DNA, 547 bp, Chicken  19866894332555_3
acatcaaaacagtctttaacataaagggccacacaacaacccttccctcctcatctcttccttctaaagagcttgtagccatccatcacagcactccagtcatgagagtgttcccaccatgtttcggtaatagcaactaggtcatatttagcctgacacacaatcgcttccaattcttcctgcttgttgcccatgctgcgtgcattggtgtagatgtacttcagctgagtcatctgccttaccccagctcaagcatcattcccataggctcatctcaggtgagccccattttgtcccctwcccccattgtaggtagtttaaagctcttttgataagccctgctggctcctgcactagcattcattgccacctttgggataggtgggttccatggatggacaactggccaggggctaagtaaactgccccatgatcaaagaacccaaagtttctgcttcagcaccagcctctgtgccatttattcattggcttggtgctttccaagcccactccgtgtcccttactacccctgaaggaatagaactaa

SEQ ID NO: 65385 - DNA, 599 bp, Chicken  19866894332584_1
  misc_feature (1)..(48): n is any nucleotide
nnnnnnnnnnnnnnnnnnnnnnnnnnnnnnnnnnnnnnnnnnnnnnnntgcctgtctgtagaggggagctgacaggcagctcacatccccagtgctggctgcctcctgctttggcccatcataaaacccacattcagcagaagggtttaggctattcccagctacccaagctggcatctgctccagtatttacgcagtgctagactgaagcatgtggaggggctcttggtgctctggggggatgttggcactgggataaagaacccagtagcatcccattgccactgagtgatggagagrggctcagctggggaggggtctgctggayatacatagacaggagcctggagcatactgccagaacacacagaccccagtatttgtctctgctgcatgctgggggggatttatctcatcctggagaaagctggagagwggagccagccatggcaggctgaccacaggtttgggggcagctccaggggaatccaagctggaggaatggggagcatggcactccaagaagatacccacacygcttcagcacccactgaagacctgtcctcatgtgccattagcacagagagttttgccctctg

SEQ ID NO: 65386 - DNA, 600 bp, Chicken  19866894332584_10
gttttccttgccagagggcaggcacagcatgaaggcatcccagcaagctgggctggagctgggttcctgcacaaaacaccctgccactgagcagcctgcagagcaccaacagctccagagcacagccgtcagacacaagaacctcctgtgcattcacccaaaggaarmcacatcccacatactctggaagtggctgtgcaggytttctatgcacccaggaggagcccccacagttgttcacacagcagaggatgcgctgccraaaggaagcatccccatctgcttagtctaacctagcaycgctgcattgttctttgagcagccttggaccgaagcaaagaataaatccaaattattaaagcccttagtcacttcttgtgattaagggagaagggacaaggatgggagcatcagggacagccacagaatgctgctgtggggctgagatagggcaaagctsagccaccacaggtggtctcccacagaccctggccaccacctggctgcccatagcaggtctgtgaggctcccaggcactttttggcccccatccttcttcccctgtaagcatcgtggggccagcagtgccactctgcgagg

SEQ ID NO: 65387 - DNA, 600 bp, Chicken  19866894332584_11
aaggaarmcacatcccacatactctggaagtggctgtgcaggytttctatgcacccaggaggagcccccacagttgttcacacagcagaggatgcgctgccraaaggaagcatccccatctgcttagtctaacctagcaycgctgcattgttctttgagcagccttggaccgaagcaaagaataaatccaaattattaaagcccttagtcacttcttgtgattaagggagaagggacaaggatgggagcatcagggacagccacagaatgctgctgtggggctgagatagggcaaagctsagccaccacaggtggtctcccacagaccctggccaccacctggctgcccatagcaggtctgtgaggctcccaggcactttttggcccccatccttcttcccctgtaagcatcgtggggccagcagtgccactctgcgaggagcactgaagatggtgaggtatattactatggtaacgagactgctacatacctgaggcagaccaggaggataagacctccataaaaagggtggagaggcgcaggggatcaggaggcttatcctggcccttgctatctaggagcaggcaccttgctgtaag

SEQ ID NO: 65388 - DNA, 599 bp, Chicken  19866894332584_2
  misc_feature (1)..(20): n is any nucleotide
nnnnnnnnnnnnnnnnnnnntgcctgtctgtagaggggagctgacaggcagctcacatccccagtgctggctgcctcctgctttggcccatcataaaacccacattcagcagaagggtttaggctattcccagctacccaagctggcatctgctccagtatttacgcagtgctagactgaagcatgtggaggggctcttggtgctctggggggatgttggcactgggataaagaacccagtagcatcccattgccactgagtgatggagagrggctcagctggggaggggtctgctggayatacatagacaggagcctggagcatactgccagaacacacagaccccagtatttgtctctgctgcatgctgggggggatttatctcatcctggagaaagctggagagwggagccagccatggcaggctgaccacaggtttgggggcagctccaggggaatccaagctggaggaatggggagcatggcactccaagaagatacccacacygcttcagcacccactgaagacctgtcctcatgtgccattagcacagagagttttgccctctggttttgagtgccarattcccatttccat

SEQ ID NO: 65389 - DNA, 600 bp, Chicken  19866894332584_3
gcagaagggtttaggctattcccagctacccaagctggcatctgctccagtatttacgcagtgctagactgaagcatgtggaggggctcttggtgctctggggggatgttggcactgggataaagaacccagtagcatcccattgccactgagtgatggagagrggctcagctggggaggggtctgctggayatacatagacaggagcctggagcatactgccagaacacacagaccccagtatttgtctctgctgcatgctgggggggatttatctcatcctggagaaagctggagagwggagccagccatggcaggctgaccacaggtttgggggcagctccaggggaatccaagctggaggaatggggagcatggcactccaagaagatacccacacygcttcagcacccactgaagacctgtcctcatgtgccattagcacagagagttttgccctctggttttgagtgccarattcccatttccatcagcaagctgagctcacagccaccccaaacaaagcctcctcgccccttcagaagccgtgcaacatcaggtttccatgttttccttgccagagggcaggcacagcatgaa

SEQ ID NO: 65390 - DNA, 600 bp, Chicken  19866894332584_4
ggggatgttggcactgggataaagaacccagtagcatcccattgccactgagtgatggagagrggctcagctggggaggggtctgctggayatacatagacaggagcctggagcatactgccagaacacacagaccccagtatttgtctctgctgcatgctgggggggatttatctcatcctggagaaagctggagagwggagccagccatggcaggctgaccacaggtttgggggcagctccaggggaatccaagctggaggaatggggagcatggcactccaagaagatacccacacygcttcagcacccactgaagacctgtcctcatgtgccattagcacagagagttttgccctctggttttgagtgccarattcccatttccatcagcaagctgagctcacagccaccccaaacaaagcctcctcgccccttcagaagccgtgcaacatcaggtttccatgttttccttgccagagggcaggcacagcatgaaggcatcccagcaagctgggctggagctgggttcctgcacaaaacaccctgccactgagcagcctgcagagcaccaacagctccagagcacagccgtcagac

SEQ ID NO: 65391 - DNA, 600 bp, Chicken  19866894332584_5
aggggtctgctggayatacatagacaggagcctggagcatactgccagaacacacagaccccagtatttgtctctgctgcatgctgggggggatttatctcatcctggagaaagctggagagwggagccagccatggcaggctgaccacaggtttgggggcagctccaggggaatccaagctggaggaatggggagcatggcactccaagaagatacccacacygcttcagcacccactgaagacctgtcctcatgtgccattagcacagagagttttgccctctggttttgagtgccarattcccatttccatcagcaagctgagctcacagccaccccaaacaaagcctcctcgccccttcagaagccgtgcaacatcaggtttccatgttttccttgccagagggcaggcacagcatgaaggcatcccagcaagctgggctggagctgggttcctgcacaaaacaccctgccactgagcagcctgcagagcaccaacagctccagagcacagccgtcagacacaagaacctcctgtgcattcacccaaaggaarmcacatcccacatactctggaagtggctgtgcaggytttctat

SEQ ID NO: 65392 - DNA, 600 bp, Chicken  19866894332584_6
gccattagcacagagagttttgccctctggttttgagtgccarattcccatttccatcagcaagctgagctcacagccaccccaaacaaagcctcctcgccccttcagaagccgtgcaacatcaggtttccatgttttccttgccagagggcaggcacagcatgaaggcatcccagcaagctgggctggagctgggttcctgcacaaaacaccctgccactgagcagcctgcagagcaccaacagctccagagcacagccgtcagacacaagaacctcctgtgcattcacccaaaggaarmcacatcccacatactctggaagtggctgtgcaggytttctatgcacccaggaggagcccccacagttgttcacacagcagaggatgcgctgccraaaggaagcatccccatctgcttagtctaacctagcaycgctgcattgttctttgagcagccttggaccgaagcaaagaataaatccaaattattaaagcccttagtcacttcttgtgattaagggagaagggacaaggatgggagcatcagggacagccacagaatgctgctgtggggctgagatagggcaaagctsagccacc

SEQ ID NO: 65393 - DNA, 600 bp, Chicken  19866894332584_7
ccattagcacagagagttttgccctctggttttgagtgccarattcccatttccatcagcaagctgagctcacagccaccccaaacaaagcctcctcgccccttcagaagccgtgcaacatcaggtttccatgttttccttgccagagggcaggcacagcatgaaggcatcccagcaagctgggctggagctgggttcctgcacaaaacaccctgccactgagcagcctgcagagcaccaacagctccagagcacagccgtcagacacaagaacctcctgtgcattcacccaaaggaarmcacatcccacatactctggaagtggctgtgcaggytttctatgcacccaggaggagcccccacagttgttcacacagcagaggatgcgctgccraaaggaagcatccccatctgcttagtctaacctagcaycgctgcattgttctttgagcagccttggaccgaagcaaagaataaatccaaattattaaagcccttagtcacttcttgtgattaagggagaagggacaaggatgggagcatcagggacagccacagaatgctgctgtggggctgagatagggcaaagctsagccacca

SEQ ID NO: 65394 - DNA, 600 bp, Chicken  19866894332584_8
gtgccarattcccatttccatcagcaagctgagctcacagccaccccaaacaaagcctcctcgccccttcagaagccgtgcaacatcaggtttccatgttttccttgccagagggcaggcacagcatgaaggcatcccagcaagctgggctggagctgggttcctgcacaaaacaccctgccactgagcagcctgcagagcaccaacagctccagagcacagccgtcagacacaagaacctcctgtgcattcacccaaaggaarmcacatcccacatactctggaagtggctgtgcaggytttctatgcacccaggaggagcccccacagttgttcacacagcagaggatgcgctgccraaaggaagcatccccatctgcttagtctaacctagcaycgctgcattgttctttgagcagccttggaccgaagcaaagaataaatccaaattattaaagcccttagtcacttcttgtgattaagggagaagggacaaggatgggagcatcagggacagccacagaatgctgctgtggggctgagatagggcaaagctsagccaccacaggtggtctcccacagaccctggccaccacctgg

SEQ ID NO: 65395 - DNA, 600 bp, Chicken  19866894332584_9
ctcgccccttcagaagccgtgcaacatcaggtttccatgttttccttgccagagggcaggcacagcatgaaggcatcccagcaagctgggctggagctgggttcctgcacaaaacaccctgccactgagcagcctgcagagcaccaacagctccagagcacagccgtcagacacaagaacctcctgtgcattcacccaaaggaarmcacatcccacatactctggaagtggctgtgcaggytttctatgcacccaggaggagcccccacagttgttcacacagcagaggatgcgctgccraaaggaagcatccccatctgcttagtctaacctagcaycgctgcattgttctttgagcagccttggaccgaagcaaagaataaatccaaattattaaagcccttagtcacttcttgtgattaagggagaagggacaaggatgggagcatcagggacagccacagaatgctgctgtggggctgagatagggcaaagctsagccaccacaggtggtctcccacagaccctggccaccacctggctgcccatagcaggtctgtgaggctcccaggcactttttggcccccatccttcttcccc

SEQ ID NO: 65396 - DNA, 600 bp, Chicken  19866894332587_1
ctctctttgttatgttttattaaaaaaaaacaataaaaaataagttttgtttcttatatacattaacgatattatatatttttgagcgctgctctgagagtaatgcctcctgttttgttatggtggcctactatctcagagataaacgttggtgatatggcagtagagggtgaagagggtgaaccttcccaccaatattccattaaattttgttgccatatggcagatggcagcagagggacagtccaacaaaatgtagtatgaaatgggagtacatataaagcaaaggtgtggaatttrattcctttatgtagagaaaatagcatccactgacattcactgctgcttgctgaacatttatgtagaccaaacaggggatgtcatcacagtgaggctgtgggtggtgtgttttagcagcagtgacagtgacagtgggtcatctccagtgagtgatgtagatttttacgagcatgacatkcttgttcttgtacatcactggcaaaaatgcatagctaatggcagtgactacactgaaaaacagtgttttatagctgagaattttctctatccaagagtgtttttctactctttgtatttgtt

SEQ ID NO: 65397 - DNA, 600 bp, Chicken  19866894332587_2
gtgaaccttcccaccaatattccattaaattttgttgccatatggcagatggcagcagagggacagtccaacaaaatgtagtatgaaatgggagtacatataaagcaaaggtgtggaatttrattcctttatgtagagaaaatagcatccactgacattcactgctgcttgctgaacatttatgtagaccaaacaggggatgtcatcacagtgaggctgtgggtggtgtgttttagcagcagtgacagtgacagtgggtcatctccagtgagtgatgtagatttttacgagcatgacatkcttgttcttgtacatcactggcaaaaatgcatagctaatggcagtgactacactgaaaaacagtgttttatagctgagaattttctctatccaagagtgtttttctactctttgtatttgttgtcatttccatggaaataaatatgaggcattagtgtcagaatgatctacctctatgcagcccaagacagttcctcttcagtcaaggtggcccaagtaggccaaaagtttggacacccatgctccatattgtccattatataaatctgcccggcaccctccattgattatggagagcac

SEQ ID NO: 65398 - DNA, 600 bp, Chicken  19866894332588_1
gtgttgatataggtactgggccttaatgggagtgtcccaaatggcactgttaaactaagtaatgctttctgtgccatagaatcatagaattcctcagattggaaaagaccctaaagatcattgagtccaacccacaacccttacccatactaccctaactcttaacaaccctccgctaaatcatttccctgagcaccacatccaaatgatgtttaaacatgtttggggatggtgacccaaccaccttcctggggagcctattccagtgcttaacaaccctttctgtaaagaagtttttcytgttatccaacctaaacttaccctggtgcaacttgagaccatttccccttgtcctttcacctgtcaccgcrgtgcttttcttcatgtgagttacaaattatgaagctgcttaattctggatattttcaaaatatcttagaccccttgtygttgtaaaaagtgtatcgacacggtggagttttctaaatacagaattgaggaacaataactcaaattatgtttttgaaaatgttaaagaaaaaggattgacagccatcattcttatttccgtaacaagtatgtaatttatatccccttccc

SEQ ID NO: 65399 - DNA, 600 bp, Chicken  19866894332588_2
tgccatagaatcatagaattcctcagattggaaaagaccctaaagatcattgagtccaacccacaacccttacccatactaccctaactcttaacaaccctccgctaaatcatttccctgagcaccacatccaaatgatgtttaaacatgtttggggatggtgacccaaccaccttcctggggagcctattccagtgcttaacaaccctttctgtaaagaagtttttcytgttatccaacctaaacttaccctggtgcaacttgagaccatttccccttgtcctttcacctgtcaccgcrgtgcttttcttcatgtgagttacaaattatgaagctgcttaattctggatattttcaaaatatcttagaccccttgtygttgtaaaaagtgtatcgacacggtggagttttctaaatacagaattgaggaacaataactcaaattatgtttttgaaaatgttaaagaaaaaggattgacagccatcattcttatttccgtaacaagtatgtaatttatatccccttcccacattttcagcatgtgttgccatcaactcctcatgctgcagtgtttgaacataaactttcagcaatacaat

SEQ ID NO: 65400 - DNA, 600 bp, Chicken  19866894332588_3
ctaccctaactcttaacaaccctccgctaaatcatttccctgagcaccacatccaaatgatgtttaaacatgtttggggatggtgacccaaccaccttcctggggagcctattccagtgcttaacaaccctttctgtaaagaagtttttcytgttatccaacctaaacttaccctggtgcaacttgagaccatttccccttgtcctttcacctgtcaccgcrgtgcttttcttcatgtgagttacaaattatgaagctgcttaattctggatattttcaaaatatcttagaccccttgtygttgtaaaaagtgtatcgacacggtggagttttctaaatacagaattgaggaacaataactcaaattatgtttttgaaaatgttaaagaaaaaggattgacagccatcattcttatttccgtaacaagtatgtaatttatatccccttcccacattttcagcatgtgttgccatcaactcctcatgctgcagtgtttgaacataaactttcagcaatacaatttgaacagcgttcaaattgtatttctttacactaaggcaaggggctgtcttttgtcttaatttcacatcgtatctcaa

SEQ ID NO: 65401 - DNA, 599 bp, Chicken  19866894332601_1
  misc_feature (1)..(55): n is any nucleotide
nnnnnnnnnnnnnnnnnnnnnnnnnnnnnnnnnnnnnnnnnnnnnnnnnnnnnnnttatttaggtacctgttttcagtttatcttgacacataactacttaggaagttattatgaagtttaaacctatgactaatgacttctctgaatttatctatttcccaaagtcttattcttcgttgccttgctacactgaaagaaactacataaacagcagaacacgcagtcagaagcaccaaacaacgaaatactgagtcctctcactgccgaacttgataattttcagtaaacaggtcttattyttgtctcatagcagataataaatcttaatttaaaggtactatatccatagtattatatctatattattggtgctgctaagctattacttcttgtaaacttcaacagtttgaaaagaacaacaggaaagagaaagagaaattaaagagattcttcagtccaaaacattacaagcagaacactttaaatgtattaatgccttcaggaaagtattacatgtatcccaaagggtattgtacatttaaatatatatatatctgtccccargtgtcaccattacctgtctcttggaagagctgtc

SEQ ID NO: 65402 - DNA, 600 bp, Chicken  19866894332601_2
cgaacttgataattttcagtaaacaggtcttattyttgtctcatagcagataataaatcttaatttaaaggtactatatccatagtattatatctatattattggtgctgctaagctattacttcttgtaaacttcaacagtttgaaaagaacaacaggaaagagaaagagaaattaaagagattcttcagtccaaaacattacaagcagaacactttaaatgtattaatgccttcaggaaagtattacatgtatcccaaagggtattgtacatttaaatatatatatatctgtccccargtgtcaccattacctgtctcttggaagagctgtccaggcaagactatgaagaggttcctgctgaaatttgttgaattgaaactccatctaaaccactgactttcttcggtttggtaatgggaccagtagagtttccctggccacactgtcccattgaattgttaccccaagcataaacttcattatctataattgtaaatagagcagaaaacagaatctgagatacaactgcttttgatcacataaaggaagattacatatcttcacccttaatttattttaccatgagaaagtgccaaa

SEQ ID NO: 65403 - DNA, 600 bp, Chicken  19866894332606_1
ctgtaggcttttgttcctggcctccaacaggcattcaagttgaagctttcagtaaagcagctactcagaaagaaagtttctgcaagggttaacattttactgggaaaggaatagggtgagagttagagttaaacaaatacatttctgacataaatttattaaaacggagggggacttgccagggaaatatgtctacatattaatgtataatcaactaatgtatgtaacaacatttttgtgtgtgtgtttcattttcttgaaaagtgaccagcagactttagctagatatgaaagattacyttgagaaaacttagggaattggggtatttttcgtctcagttgcattctctggcagacacacaaaagaaatgtcctctctagcacccagcagctcagcttgccttttgtatgtgtgtatgattctcttttctgagactgcaaaacctctaaaatctccattaaaatgcactataaacctcctctctttgggagtactatgcatctatgaaaagaagaccatacaactgaagccagaataaataaaccttattccaaatgagtgtggattggcaagctgaagaatcattagttttgccttag

SEQ ID NO: 65404 - DNA, 600 bp, Chicken  19866894332608_1
acctgctgctttgtgaaattgcatcgttaatagccttgttgacttgttcgtagttataattttggtcacttgcatgtttccacatgtgggacttcagggaagggggatggctacatacatatccacagagagaacacctaaggaaaagaagtggagaagagatgcatttaagagttaagttttactataatggtaatgcatttttttctcccaaaaggatgactcagcagtaagatacacatcaatcctcataactaggtgaaataagtttgcacaatttcattctacaatgtaatttakagagtatgagaatttaagatcggctttttaaactccttaaacaacttaactgaaatcttatctatttgacctgttaaatctgtttaaatactgcaaaaatgaaatagttctaacgactgcagaaacatggagtatatctgtatggcagctggcaggctgagctttctctgccattgctctgaaccaagcagaaattgtaataattagcactgctaatttaaacagaattgataaagcctttcttggtgcagcatttattagtttatttgaggatcacagaattgcagaagttggaaggca

SEQ ID NO: 65405 - DNA, 600 bp, Chicken  19866894332610_1
cacactcagtgtcccgtgcctttgtccccaacaccccacagccaccaggctgcaggagagccagcatacccagcaagctgccaccaaagcacttgcagagagggacaggaccatcgcccagctgcagagcagaatggacaccatgcagagggagtacgagaagatcttccacgtgagtggggacgcggctgcaggtggctcccctcagcacggttccccctcctcaccaccctctcccccaactaggatagcctggacctggtgctggccaaggtggcagatgccaggcagcactgggargaggaaggcacaaccatctgcctggagaacaagcagcgcctgcaggagttcggcctcaaccccctggagatatagcactcagggacmccccggagaggacagactctcagcctctatcagcacagctgccccaggattctgtctgtccctgggatatgctgctgagcgacagaccccccaacacaccactcacgtgaacggcagcatggatttgtcctttaatcactctccaaagcggtgacatgggaacagtgctgtgatgggtgcaggtaccacccagcagttcgcagaggaggagca

SEQ ID NO: 65406 - DNA, 600 bp, Chicken  19866894332610_2
agcacttgcagagagggacaggaccatcgcccagctgcagagcagaatggacaccatgcagagggagtacgagaagatcttccacgtgagtggggacgcggctgcaggtggctcccctcagcacggttccccctcctcaccaccctctcccccaactaggatagcctggacctggtgctggccaaggtggcagatgccaggcagcactgggargaggaaggcacaaccatctgcctggagaacaagcagcgcctgcaggagttcggcctcaaccccctggagatatagcactcagggacmccccggagaggacagactctcagcctctatcagcacagctgccccaggattctgtctgtccctgggatatgctgctgagcgacagaccccccaacacaccactcacgtgaacggcagcatggatttgtcctttaatcactctccaaagcggtgacatgggaacagtgctgtgatgggtgcaggtaccacccagcagttcgcagaggaggagcacgagggagatgtccacgcagggcagacctgagccccgatgagagctggggggttcctccagcatccttttccccttggcccaaagtc

SEQ ID NO: 65407 - DNA, 600 bp, Chicken  19866894332618_1
catgcatcgcaaacagatttcagaaccagctctgccttgagaaggcagcagagtcacagctctatccacaatgctactgaatggtgacaaacaacgtgacatttacaacaggattacagaggcagaaaagtagcatactgctcatgatttctcaggagaccctgctgcctccctgagaccttatttgaaggtgaacacagctttatttactctcatttggtgtatgtgttgagtgagtcctatgtaagtttagctttcccttgagggaagacaaggttaaagtctaattcataccaatgwcagagccaggggaggttgcttgctagaagggagaaaaggttcccctgcttgttaaatggcacatttacagttcagaaacgtttccaccttccagagctgcttagagagcagtgtgcaggcttctaagttctgcaagagccaatataaatcaagagactgaaaataattcagtgacgtatcggacaatgcctttctgtacagtgcatggcaggggtctttgggcctttcctcccgtgctttttttgctttcagaacaagaatgactgcactgaatgttctcccaccaccagtatgcagcag

SEQ ID NO: 65408 - DNA, 600 bp, Chicken  19866894332622_1
tgtccaatgtctcaaaggagaggttcttcattagcccctgaggttggcagtgtgatatactattggatatgggggatgtgaaagcctgacagatcccgttcttcaatctgcttgaatttctattgacgtctcatcttcccctctcagacaattgggattagagagaagccactgaaacagagctatgaagtcaggagtttatggtgctctaattccaatgtgcggaagtacagggatacaccctttgttaaaggtagcaattaaggaatgaaaataacttccaaaaaaaccccaagaagrataaataactgatgaagggggaaacctgtgaaacgattgatctgctcagcccatgttgctgcaaacagggaagytctctgaaagaagttacaagaatgcttgcttgtcttgcttgaggatttgtattcgtacaccttgttgcagcatgtgaactccaataatactgttttgttcaattgattctttttcactgttatgtcttgctttaccaatagattaaacagaaaatagctgggattttaagaagttcacatctctctgtgagcaactagagcagaaaatctttgtagtaattgacct

SEQ ID NO: 65409 - DNA, 600 bp, Chicken  19866894332622_2
gatgtgaaagcctgacagatcccgttcttcaatctgcttgaatttctattgacgtctcatcttcccctctcagacaattgggattagagagaagccactgaaacagagctatgaagtcaggagtttatggtgctctaattccaatgtgcggaagtacagggatacaccctttgttaaaggtagcaattaaggaatgaaaataacttccaaaaaaaccccaagaagrataaataactgatgaagggggaaacctgtgaaacgattgatctgctcagcccatgttgctgcaaacagggaagytctctgaaagaagttacaagaatgcttgcttgtcttgcttgaggatttgtattcgtacaccttgttgcagcatgtgaactccaataatactgttttgttcaattgattctttttcactgttatgtcttgctttaccaatagattaaacagaaaatagctgggattttaagaagttcacatctctctgtgagcaactagagcagaaaatctttgtagtaattgacctgctgagactaattcaaatattcagtggctctaatgtcttctgccttatttcaccaaagctgaatacagcagtct

SEQ ID NO: 65410 - DNA, 599 bp, Chicken  19866894332623_1
  misc_feature (1)..(62): n is any nucleotide
nnnnnnnnnnnnnnnnnnnnnnnnnnnnnnnnnnnnnnnnnnnnnnnnnnnnnnnnnnnnnnatggaggaaaaaagttgaaatgggggaagtaggcaaggaaggaaagagagaagaaagggcttccgattcccagttcagctagtcttgaactgggttttagcaattgtacagaaatgctctaatctggctgttttccactgcctgcagattcctggaaaatctggaactgtgggagattttctattctgttaaactttaaaaatttggggagcacttgtgtatattttaaactactgaytttttttaaagtgacttaagaaactgaatgtaaacttaacactgaataaatgtgagattacttcgaggtttctcttgaaaaataaaatccagaatgacaattaaatgttggctagtgtgctgktttgtttttttttttgaatttgttttctctgccatttgcataaatacatactctgtacaatgaaattgccacgatcgtgatcttcatgggagctattaaaatttcctcatgtggagtccactattagaatcccagagtagttactttgtcagaggtttcattgcttactcttytcc

SEQ ID NO: 65411 - DNA, 600 bp, Chicken  19866894332623_2
tccgattcccagttcagctagtcttgaactgggttttagcaattgtacagaaatgctctaatctggctgttttccactgcctgcagattcctggaaaatctggaactgtgggagattttctattctgttaaactttaaaaatttggggagcacttgtgtatattttaaactactgattttttttaaagtgacttaagaaactgaatgtaaacttaacactgaataaatgtgagattacttcgaggtttctcttgaaaaataaaatccagaatgacaattaaatgttggctagtgtgctgktttgtttttttttttgaatttgttttctctgccatttgcataaatacatactctgtacaatgaaattgccacgatcgtgatcttcatgggagctattaaaatttcctcatgtggagtccactattagaatcccagagtagttactttgtcagaggtttcattgcttactcttytccttgaagtaggaattttttggaatcactgttcactgtatttgtattgtgacacggcaccttatcacagtgtgatttgcaatgttgctctaaggtgtgagattttcctgtttctattgcttttagc

SEQ ID NO: 65412 - DNA, 600 bp, Chicken  19866894332623_3
tgattttttttaaagtgacttaagaaactgaatgtaaacttaacactgaataaatgtgagattacttcgaggtttctcttgaaaaataaaatccagaatgacaattaaatgttggctagtgtgctgktttgtttttttttttgaatttgttttctctgccatttgcataaatacatactctgtacaatgaaattgccacgatcgtgatcttcatgggagctattaaaatttcctcatgtggagtccactattagaatcccagagtagttactttgtcagaggtttcattgcttactcttytccttgaagtaggaattttttggaatcactgttcactgtatttgtattgtgacacggcaccttatcacagtgtgatttgcaatgttgctctaaggtgtgagattttcctgtttctattgcttttagctgggaaagccttgctatgcatattctttctgatcttttgcacaactttatcttgtagtcactactgtggtgttccaggaaatggaagcgcagtaggtaattccatactgaggtaccttgtgtttatttttctatatctatatattcatacatacatttcatgatggaacatat

SEQ ID NO: 65413 - DNA, 600 bp, Chicken  19866894332624_1
gtgtataggaagttggacagaatggctattaggaaaaaaagtttagcatctgttcggtgagttttcatgcatgatttgttaggtaaaggttatccaaaaagtcaatacaagtatgctcagaaaacataacatcaattaaacctcttgacaggtgcattacaaagcagcagaagatcattcaaagctgcccaggaaaattcagttgctcctgaggggagaaatgcctcatcatcctcctgggctgctttatgaacctgctggtctgctaggctgaaagccattgctttgctcccagatggygtgagctgcatttggagaggcaagcagcatctctcatccctccgatrtgccagtctggcagtctttgaaagcaggtggatgagcattgttttaaaagtggatttttatactcacagtagataccagcttgagactagtggaagctcaagtccttagcttacccatggaatttgcacagtgggggggtgcttggcagtatacagagcacccacacagatatttttcagagaaaacacaggaactttgggttcatgtgttgagtttccagcacagctgctatgtctgaagagaccacagttc

SEQ ID NO: 65414 - DNA, 600 bp, Chicken  19866894332624_2
atctgttcggtgagttttcatgcatgatttgttaggtaaaggttatccaaaaagtcaatacaagtatgctcagaaaacataacatcaattaaacctcttgacaggtgcattacaaagcagcagaagatcattcaaagctgcccaggaaaattcagttgctcctgaggggagaaatgcctcatcatcctcctgggctgctttatgaacctgctggtctgctaggctgaaagccattgctttgctcccagatggygtgagctgcatttggagaggcaagcagcatctctcatccctccgatrtgccagtctggcagtctttgaaagcaggtggatgagcattgttttaaaagtggatttttatactcacagtagataccagcttgagactagtggaagctcaagtccttagcttacccatggaatttgcacagtgggggggtgcttggcagtatacagagcacccacacagatatttttcagagaaaacacaggaactttgggttcatgtgttgagtttccagcacagctgctatgtctgaagagaccacagttctctctcattgtattatgcttctcgctcctgttgccagccctctctct

SEQ ID NO: 65415 - DNA, 600 bp, Chicken  19866894332626_1
tcaaccctggtttaggtcttattcaacctttgtttaggtcttattctttccttggaaagaagtgaaaacagattacctgatgcggtggcaggaagacgaagtgcactgagagattaagactccatcagacaacagcaaggagtcatgaaagaacgattctgttcttaattagtttcttccctgtggccaaatgtacatcattatggtggactaagagaagtcagcatgccaacagacactagccattcccatttcatcatcaatgcagtaacagaagattacaaggaactgcaacttttygagccttctctactgggactagagatgtgttctaargagcactgccttcacgggtacttaaagcagagaaacaagaaacccctttctgccaggacagaaagcacacgcgttgggctgcaaagacctcgctgatgctttttcttctaggctctaactatacctcggtagatgaaaccctttctcagcraactagtgacaatcttattaagacagccttttgcacagagatagaccttgactatttatctctgatcattttagagcaaggctataaagaacaggcatttttcccaccaccgc

SEQ ID NO: 65416 - DNA, 600 bp, Chicken  19866894332626_2
ggtcttattctttccttggaaagaagtgaaaacagattacctgatgcggtggcaggaagacgaagtgcactgagagattaagactccatcagacaacagcaaggagtcatgaaagaacgattctgttcttaattagtttcttccctgtggccaaatgtacatcattatggtggactaagagaagtcagcatgccaacagacactagccattcccatttcatcatcaatgcagtaacagaagattacaaggaactgcaacttttygagccttctctactgggactagagatgtgttctaargagcactgccttcacgggtacttaaagcagagaaacaagaaacccctttctgccaggacagaaagcacacgcgttgggctgcaaagacctcgctgatgctttttcttctaggctctaactatacctcggtagatgaaaccctttctcagcraactagtgacaatcttattaagacagccttttgcacagagatagaccttgactatttatctctgatcattttagagcaaggctataaagaacaggcatttttcccaccaccgcttcccttggtccagtgaatgcaaggaatgtttatgc

SEQ ID NO: 65417 - DNA, 600 bp, Chicken  19866894332626_3
caaatgtacatcattatggtggactaagagaagtcagcatgccaacagacactagccattcccatttcatcatcaatgcagtaacagaagattacaaggaactgcaacttttygagccttctctactgggactagagatgtgttctaargagcactgccttcacgggtacttaaagcagagaaacaagaaacccctttctgccaggacagaaagcacacgcgttgggctgcaaagacctcgctgatgctttttcttctaggctctaactatacctcggtagatgaaaccctttctcagcraactagtgacaatcttattaagacagccttttgcacagagatagaccttgactatttatctctgatcattttagagcaaggctataaagaacaggcatttttcccaccaccgcttcccttggtccagtgaatgcaaggaatgtttatgcaactggttacattcaatactgagattttaaatggcatctggagrtgtaagtyggtttgttacagcagggactgaacccctctggacamctctatgttttttcagtgtcacttccgcgaagagaggaacagatgagtcagatttgtccctca

SEQ ID NO: 65418 - DNA, 600 bp, Chicken  19866894332626_4
cctttctgccaggacagaaagcacacgcgttgggctgcaaagacctcgctgatgctttttcttctaggctctaactatacctcggtagatgaaaccctttctcagcraactagtgacaatcttattaagacagccttttgcacagagatagaccttgactatttatctctgatcattttagagcaaggctataaagaacaggcatttttcccaccaccgcttcccttggtccagtgaatgcaaggaatgtttatgcaactggttacattcaatactgagattttaaatggcatctggagrtgtaagtyggtttgttacagcagggactgaacccctctggacamctctatgttttttcagtgtcacttccgcgaagagaggaacagatgagtcagatttgtccctcaagggcttgaatttttcctcctttattatctttaagcatgctgcctaatgaaaaggctcccaagacctaagagcgagtaacacgactgagggctccttccttgtattcccatatttgctctattaccagtagaagatacatacagttacacttaatacactgtaaggcatcactccctggaacagcatcttcct

SEQ ID NO: 65419 - DNA, 600 bp, Chicken  19866894332626_5
ccaggacagaaagcacacgcgttgggctgcaaagacctcgctgatgctttttcttctaggctctaactatacctcggtagatgaaaccctttctcagcraactagtgacaatcttattaagacagccttttgcacagagatagaccttgactatttatctctgatcattttagagcaaggctataaagaacaggcatttttcccaccaccgcttcccttggtccagtgaatgcaaggaatgtttatgcaactggttacattcaatactgagattttaaatggcatctggagrtgtaagtyggtttgttacagcagggactgaacccctctggacamctctatgttttttcagtgtcacttccgcgaagagaggaacagatgagtcagatttgtccctcaagggcttgaatttttcctcctttattatctttaagcatgctgcctaatgaaaaggctcccaagacctaagagcgagtaacacgactgagggctccttccttgtattcccatatttgctctattaccagtagaagatacatacagttacacttaatacactgtaaggcatcactccctggaacagcatcttcctctatcctc

SEQ ID NO: 65420 - DNA, 581 bp, Chicken  19866894332626_6
ctcgctgatgctttttcttctaggctctaactatacctcggtagatgaaaccctttctcagcraactagtgacaatcttattaagacagccttttgcacagagatagaccttgactatttatctctgatcattttagagcaaggctataaagaacaggcatttttcccaccaccgcttcccttggtccagtgaatgcaaggaatgtttatgcaactggttacattcaatactgagattttaaatggcatctggagrtgtaagtyggtttgttacagcagggactgaacccctctggacamctctatgttttttcagtgtcacttccgcgaagagaggaacagatgagtcagatttgtccctcaagggcttgaatttttcctcctttattatctttaagcatgctgcctaatgaaaaggctcccaagacctaagagcgagtaacacgactgagggctccttccttgtattcccatatttgctctattaccagtagaagatacatacagttacacttaatacactgtaaggcatcactccctggaacagcatcttcctctatcctctcttgtccacatatttt

SEQ ID NO: 65421 - DNA, 600 bp, Chicken  19866894332631_1
gctctcaccctctgctgtgccccaagacggggctctcccacccctcatcccaccccagctggttatacaccccctgcagggacggggctttgtgaccacgaaggacctgggtcccaactccaccactcaccgccgcagttgggccaccttctccctctccgagatatccaccgtgctcaccacggcctccgctttcttcttcatctgctccattttcttcagcatctgcggggacagcaaagggtcagagatgatggggagcagagcggggggaccaaggacccagccaggagcacagcyccactcacccgccgcttcttccgagctttggcctctgccaccttcttgatggggcgggcgttgatttgacgccagcgctgccgatattcctcgaccgtctgcttgtccagggggatctgcttgcgtcggtgctgcttctcctcctctgtgaaccactctggcagctctccctcctcctcattgaaggagtacctgcaggaaaggggagccaggtgaactgtggggtccccccccttgatacacctgccacaccgtaatcacagaatggtttgggttggaagggacccttaagatcacaca

SEQ ID NO: 65422 - DNA, 600 bp, Chicken  19866894332634_1
caaactctgcctcccgccttcccgtggttctattacatgcatttattgaaattcaatttgtagttagggaaagagagaactttttaaggcagtttatggctgtaggtaatagaaaagccataaatctgcgactgaggaagtttctggtcagtgagactccaagcagttgttactggtggtgtttcatcaaccatgggaaatctcaaacaaatgccgtaaaaaaaatgttcacaaagactctgagccattgttaaagagaaaaaacttaaatccccatgtactttttttgtgcatgttgtytttctcaagtttcccctttgtgccaccagaaatgcttgggaaagtcacagaagcatgtcttagagggcacagtttaatatagatggaagattttgagacatttttaagacttttttacttgtrgtgaaaagtttctcaacagatatctgccttcaaatagcccagagctgaaagtaatagaatttccctgctctaaaagggttgtttctgaatagagggtaatggtacagattccatatgcaactgtaattttttgctgttaacaagaaacatggyattgcttcccaggtagctggcagt

SEQ ID NO: 65423 - DNA, 600 bp, Chicken  19866894332634_2
atctgcgactgaggaagtttctggtcagtgagactccaagcagttgttactggtggtgtttcatcaaccatgggaaatctcaaacaaatgccgtaaaaaaaatgttcacaaagactctgagccattgttaaagagaaaaaacttaaatccccatgtactttttttgtgcatgttgtytttctcaagtttcccctttgtgccaccagaaatgcttgggaaagtcacagaagcatgtcttagagggcacagtttaatatagatggaagattttgagacatttttaagacttttttacttgtrgtgaaaagtttctcaacagatatctgccttcaaatagcccagagctgaaagtaatagaatttccctgctctaaaagggttgtttctgaatagagggtaatggtacagattccatatgcaactgtaattttttgctgttaacaagaaacatggyattgcttcccaggtagctggcagtggttctctacccatagcaacacagcaaaggttcattcctattttaaactgtgatgagacttcctamtgctcttcttcctcatcacgtgggatgatggcccctaacacgcactacacacagagg

SEQ ID NO: 65424 - DNA, 600 bp, Chicken  19866894332634_3
tgtactttttttgtgcatgttgtytttctcaagtttcccctttgtgccaccagaaatgcttgggaaagtcacagaagcatgtcttagagggcacagtttaatatagatggaagattttgagacatttttaagacttttttacttgtrgtgaaaagtttctcaacagatatctgccttcaaatagcccagagctgaaagtaatagaatttccctgctctaaaagggttgtttctgaatagagggtaatggtacagattccatatgcaactgtaattttttgctgttaacaagaaacatggyattgcttcccaggtagctggcagtggttctctacccatagcaacacagcaaaggttcattcctattttaaactgtgatgagacttcctamtgctcttcttcctcatcacgtgggatgatggcccctaacacgcactacacacagaggtgcagggccaccagtgaccyggggctgcagaaaagaaagtcctcaggcttccatggtgctcaggatgaggagtaggcaggaatgtgcgtacatgaccaaggaagtgggagactgtgtctaacagagggcaaccctgaacttattttggcctta

SEQ ID NO: 65425 - DNA, 600 bp, Chicken  19866894332634_4
gcacagtttaatatagatggaagattttgagacatttttaagacttttttacttgtrgtgaaaagtttctcaacagatatctgccttcaaatagcccagagctgaaagtaatagaatttccctgctctaaaagggttgtttctgaatagagggtaatggtacagattccatatgcaactgtaattttttgctgttaacaagaaacatggyattgcttcccaggtagctggcagtggttctctacccatagcaacacagcaaaggttcattcctattttaaactgtgatgagacttcctamtgctcttcttcctcatcacgtgggatgatggcccctaacacgcactacacacagaggtgcagggccaccagtgaccyggggctgcagaaaagaaagtcctcaggcttccatggtgctcaggatgaggagtaggcaggaatgtgcgtacatgaccaaggaagtgggagactgtgtctaacagagggcaaccctgaacttattttggccttaaagatgtcccccttctgcctacaggttgctgattgctctgatttgttggatgcttgagaaatgtacccaggtctacttgttgcatctcat

SEQ ID NO: 65426 - DNA, 600 bp, Chicken  19866894332634_5
tatctgccttcaaatagcccagagctgaaagtaatagaatttccctgctctaaaagggttgtttctgaatagagggtaatggtacagattccatatgcaactgtaattttttgctgttaacaagaaacatggyattgcttcccaggtagctggcagtggttctctacccatagcaacacagcaaaggttcattcctattttaaactgtgatgagacttcctamtgctcttcttcctcatcacgtgggatgatggcccctaacacgcactacacacagaggtgcagggccaccagtgaccyggggctgcagaaaagaaagtcctcaggcttccatggtgctcaggatgaggagtaggcaggaatgtgcgtacatgaccaaggaagtgggagactgtgtctaacagagggcaaccctgaacttattttggccttaaagatgtcccccttctgcctacaggttgctgattgctctgatttgttggatgcttgagaaatgtacccaggtctacttgttgcatctcatccctagttagcttgtcagttctttaagatgaagctaatctttctgaaatattgtacttactcagtgtgacagaagct

SEQ ID NO: 65427 - DNA, 600 bp, Chicken  19866894332637_1
gagcttctagtatgctccatacaaaaagctaactgaaaattatcctctgtattaaattccatttgtttatttctggaaataatttctaccagccagcactgtatgaaagtggaatggctccatcccccatcacactgaaggtctcttcccaaagggacttttcctgggtttcggaactctttcctaccctcagctcacaggtgagcatcaacatgtacttcctcaggaggctaaaatagcacatgccacagctgggaaggaatacgatccctgtgggagagagctggctgcagcttggamagcaccaacaggcagcaggagccaaagtgcccccatcatcctgagccagggaaagtccctctccrgctctacagctggaggactgcctgtcacccaccgtgtgatcaagtgggrtcaaagagcctcacaactcrgagggtcccctgatccacttcacagacyggtctgagggaygaccagctgaggtcaaccatcatcttttcagaaagggaaggaagaaatcctctggagcacagccaggctgtttactaatcatcatcacttttcacagacagctatatgctgcttctgtgtggaaag

SEQ ID NO: 65428 - DNA, 600 bp, Chicken  19866894332637_2
tttatttctggaaataatttctaccagccagcactgtatgaaagtggaatggctccatcccccatcacactgaaggtctcttcccaaagggacttttcctgggtttcggaactctttcctaccctcagctcacaggtgagcatcaacatgtacttcctcaggaggctaaaatagcacatgccacagctgggaaggaatacgatccctgtgggagagagctggctgcagcttggamagcaccaacaggcagcaggagccaaagtgcccccatcatcctgagccagggaaagtccctctccrgctctacagctggaggactgcctgtcacccaccgtgtgatcaagtgggrtcaaagagcctcacaactcrgagggtcccctgatccacttcacagacyggtctgagggaygaccagctgaggtcaaccatcatcttttcagaaagggaaggaagaaatcctctggagcacagccaggctgtttactaatcatcatcacttttcacagacagctatatgctgcttctgtgtggaaagcaagagctggcactgtagcagaggaaaggctcagccttcttctctaaccttttcctgcagaaatc

SEQ ID NO: 65429 - DNA, 600 bp, Chicken  19866894332637_3
tggctccatcccccatcacactgaaggtctcttcccaaagggacttttcctgggtttcggaactctttcctaccctcagctcacaggtgagcatcaacatgtacttcctcaggaggctaaaatagcacatgccacagctgggaaggaatacgatccctgtgggagagagctggctgcagcttggamagcaccaacaggcagcaggagccaaagtgcccccatcatcctgagccagggaaagtccctctccrgctctacagctggaggactgcctgtcacccaccgtgtgatcaagtgggrtcaaagagcctcacaactcrgagggtcccctgatccacttcacagacyggtctgagggaygaccagctgaggtcaaccatcatcttttcagaaagggaaggaagaaatcctctggagcacagccaggctgtttactaatcatcatcacttttcacagacagctatatgctgcttctgtgtggaaagcaagagctggcactgtagcagaggaaaggctcagccttcttctctaaccttttcctgcagaaatccctaccacgtactgctcgtatctacccaagtgccccacagccccagaag

SEQ ID NO: 65430 - DNA, 600 bp, Chicken  19866894332637_4
ctgaaggtctcttcccaaagggacttttcctgggtttcggaactctttcctaccctcagctcacaggtgagcatcaacatgtacttcctcaggaggctaaaatagcacatgccacagctgggaaggaatacgatccctgtgggagagagctggctgcagcttggamagcaccaacaggcagcaggagccaaagtgcccccatcatcctgagccagggaaagtccctctccrgctctacagctggaggactgcctgtcacccaccgtgtgatcaagtgggrtcaaagagcctcacaactcrgagggtcccctgatccacttcacagacyggtctgagggaygaccagctgaggtcaaccatcatcttttcagaaagggaaggaagaaatcctctggagcacagccaggctgtttactaatcatcatcacttttcacagacagctatatgctgcttctgtgtggaaagcaagagctggcactgtagcagaggaaaggctcagccttcttctctaaccttttcctgcagaaatccctaccacgtactgctcgtatctacccaagtgccccacagccccagaaggcaagcagacagcacgaagc

SEQ ID NO: 65431 - DNA, 600 bp, Chicken  19866894332637_5
cctgggtttcggaactctttcctaccctcagctcacaggtgagcatcaacatgtacttcctcaggaggctaaaatagcacatgccacagctgggaaggaatacgatccctgtgggagagagctggctgcagcttggamagcaccaacaggcagcaggagccaaagtgcccccatcatcctgagccagggaaagtccctctccrgctctacagctggaggactgcctgtcacccaccgtgtgatcaagtgggrtcaaagagcctcacaactcrgagggtcccctgatccacttcacagacyggtctgagggaygaccagctgaggtcaaccatcatcttttcagaaagggaaggaagaaatcctctggagcacagccaggctgtttactaatcatcatcacttttcacagacagctatatgctgcttctgtgtggaaagcaagagctggcactgtagcagaggaaaggctcagccttcttctctaaccttttcctgcagaaatccctaccacgtactgctcgtatctacccaagtgccccacagccccagaaggcaagcagacagcacgaagctctcctccttcacatccccttgccccaa

SEQ ID NO: 65432 - DNA, 600 bp, Chicken  19866894332637_6
aactctttcctaccctcagctcacaggtgagcatcaacatgtacttcctcaggaggctaaaatagcacatgccacagctgggaaggaatacgatccctgtgggagagagctggctgcagcttggamagcaccaacaggcagcaggagccaaagtgcccccatcatcctgagccagggaaagtccctctccrgctctacagctggaggactgcctgtcacccaccgtgtgatcaagtgggrtcaaagagcctcacaactcrgagggtcccctgatccacttcacagacyggtctgagggaygaccagctgaggtcaaccatcatcttttcagaaagggaaggaagaaatcctctggagcacagccaggctgtttactaatcatcatcacttttcacagacagctatatgctgcttctgtgtggaaagcaagagctggcactgtagcagaggaaaggctcagccttcttctctaaccttttcctgcagaaatccctaccacgtactgctcgtatctacccaagtgccccacagccccagaaggcaagcagacagcacgaagctctcctccttcacatccccttgccccaagaagtggtgctt

SEQ ID NO: 65433 - DNA, 600 bp, Chicken  19866894332638_1
tgttattactgcattggctttaatgttttcccactcccatttgttgccaagctatagttttcaactgctgtgaaaacatttgattcatacagttcattgtttctcctgcaaaggaatcatcatctaaaataacctgcatatgctggagtaaatgcagtaaagactgacattccatgctcactctcacagtttgaagcctcgtaggctattgcatagcaaatgagaaataagaaagataaacaagtgccactgtctggaatgggaaaggagctcaagatagtcttctcagcatggcattgkttttttggtgcaggtattttcctgctgaggaagtattagggctaggctgcgccaagtcagtacagaatagcatatcttggattcaggaccacctcacaccttcctgttaattagcagagaagaatcaagagcatgaggtgctggcatcacagtyagttgttttgaactaaacctgagagctatcagagtagctcatctgactaaaaagaactgagggatagatttaccacgagcctaggctgtggtatggccaagagggcacacttytcactggagggtgcccacagccacatgcacgtt

SEQ ID NO: 65434 - DNA, 600 bp, Chicken  19866894332638_2
cagtaaagactgacattccatgctcactctcacagtttgaagcctcgtaggctattgcatagcaaatgagaaataagaaagataaacaagtgccactgtctggaatgggaaaggagctcaagatagtcttctcagcatggcattgkttttttggtgcaggtattttcctgctgaggaagtattagggctaggctgcgccaagtcagtacagaatagcatatcttggattcaggaccacctcacaccttcctgttaattagcagagaagaatcaagagcatgaggtgctggcatcacagtyagttgttttgaactaaacctgagagctatcagagtagctcatctgactaaaaagaactgagggatagatttaccacgagcctaggctgtggtatggccaagagggcacacttytcactggagggtgcccacagccacatgcacgttcacaacatgctatcatggagcatggcagtcacagaagacaacgcgctgctgaatgggctcccagccctgcagtggggacatagaggagagccgtggggatgaagttctcccttcagcaaaggctgtgaacctcagacactgaatgatggcttcc

SEQ ID NO: 65435 - DNA, 600 bp, Chicken  19866894332638_3
gagctcaagatagtcttctcagcatggcattgkttttttggtgcaggtattttcctgctgaggaagtattagggctaggctgcgccaagtcagtacagaatagcatatcttggattcaggaccacctcacaccttcctgttaattagcagagaagaatcaagagcatgaggtgctggcatcacagtyagttgttttgaactaaacctgagagctatcagagtagctcatctgactaaaaagaactgagggatagatttaccacgagcctaggctgtggtatggccaagagggcacacttytcactggagggtgcccacagccacatgcacgttcacaacatgctatcatggagcatggcagtcacagaagacaacgcgctgctgaatgggctcccagccctgcagtggggacatagaggagagccgtggggatgaagttctcccttcagcaaaggctgtgaacctcagacactgaatgatggcttccacggccacctttgctcaacccaaccaagaacattcttctcaagtttaggaacataaggtttttcctcaagagaataatwtcttaagatgctggggtaatgtccccttttaacc

SEQ ID NO: 65436 - DNA, 600 bp, Chicken  19866894332638_4
cctaggctgtggtatggccaagagggcacacttytcactggagggtgcccacagccacatgcacgttcacaacatgctatcatggagcatggcagtcacagaagacaacgcgctgctgaatgggctcccagccctgcagtggggacatagaggagagccgtggggatgaagttctcccttcagcaaaggctgtgaacctcagacactgaatgatggcttccacggccacctttgctcaacccaaccaagaacattcttctcaagtttaggaacataaggtttttcctcaagagaataatwtcttaagatgctggggtaatgtccccttttaacccagcaacaaggaagtgggagacatctgcccgaagagatccaaacccacatctcccatgaaaatgacccaacggctaaattacagggtgttccaggtgaagtggttccccaccyatcctttgatgacagtccagcatgcagcacagtgaaagacatattgagcagaagagaaggagaattattaaaaccacggtcgaggcacttattttgccttgttttaccacttactgcagtaccaaatgacaccgtggtcagccctttgcaaaa

SEQ ID NO: 65437 - DNA, 600 bp, Chicken  19866894332638_5
tagaggagagccgtggggatgaagttctcccttcagcaaaggctgtgaacctcagacactgaatgatggcttccacggccacctttgctcaacccaaccaagaacattcttctcaagtttaggaacataaggtttttcctcaagagaataatwtcttaagatgctggggtaatgtccccttttaacccagcaacaaggaagtgggagacatctgcccgaagagatccaaacccacatctcccatgaaaatgacccaacggctaaattacagggtgttccaggtgaagtggttccccaccyatcctttgatgacagtccagcatgcagcacagtgaaagacatattgagcagaagagaaggagaattattaaaaccacggtcgaggcacttattttgccttgttttaccacttactgcagtaccaaatgacaccgtggtcagccctttgcaaaagaatgccatttgaaccacaaaatccctattcagtccttcagtgaatttcatcatcttatgtattcaattcacctacaagttaatttccctcttaactttgtcagttcaccttttagattttcttcccttttttaggtgccaattctc

SEQ ID NO: 65438 - DNA, 600 bp, Chicken  19866894332639_1
aatagaaagacttgaataatcttgatctcaaaagtatcatgatgttttaaagaaggaaacctttcctcatctaaaattcctaaatagtgaaatggacctaggaaatctgattggacagaatttaaaaatttcacattcagttacaaaactatttctctaaaaattcttatgagggatgcaattaggtacagagtttttttcttacaaacattctgtagtcattataatacagataaagtttacttattgtttgatgttttgagtaagcaattcataaagctgtgtagagtggaagaactytggggggaaggaagagtcartagtatcctatgaaactttgggatataaatggaaaaagataactgggaagcagagacygaggcctcagtgaaggactgtgtaagattggagaaataaggtagaaaggcacaatagcrggggaattggcaaagagcatgaagaaaaggcccctcttatcccagcaaaggacctgaactcagcccaaaattcactctgataaagctattaagtgcgttgaagtagtactgtaaaattttgctcaataaacacatgaacaagtgtgtgacagaggtgtgaggt

SEQ ID NO: 65439 - DNA, 600 bp, Chicken  19866894332639_2
cttgatctcaaaagtatcatgatgttttaaagaaggaaacctttcctcatctaaaattcctaaatagtgaaatggacctaggaaatctgattggacagaatttaaaaatttcacattcagttacaaaactatttctctaaaaattcttatgagggatgcaattaggtacagagtttttttcttacaaacattctgtagtcattataatacagataaagtttacttattgtttgatgttttgagtaagcaattcataaagctgtgtagagtggaagaactytggggggaaggaagagtcartagtatcctatgaaactttgggatataaatggaaaaagataactgggaagcagagacygaggcctcagtgaaggactgtgtaagattggagaaataaggtagaaaggcacaatagcrggggaattggcaaagagcatgaagaaaaggcccctcttatcccagcaaaggacctgaactcagcccaaaattcactctgataaagctattaagtgcgttgaagtagtactgtaaaattttgctcaataaacacatgaacaagtgtgtgacagaggtgtgaggtgtctgtgtgcattacctaac

SEQ ID NO: 65440 - DNA, 600 bp, Chicken  19866894332639_3
cctaaatagtgaaatggacctaggaaatctgattggacagaatttaaaaatttcacattcagttacaaaactatttctctaaaaattcttatgagggatgcaattaggtacagagtttttttcttacaaacattctgtagtcattataatacagataaagtttacttattgtttgatgttttgagtaagcaattcataaagctgtgtagagtggaagaactytggggggaaggaagagtcartagtatcctatgaaactttgggatataaatggaaaaagataactgggaagcagagacygaggcctcagtgaaggactgtgtaagattggagaaataaggtagaaaggcacaatagcrggggaattggcaaagagcatgaagaaaaggcccctcttatcccagcaaaggacctgaactcagcccaaaattcactctgataaagctattaagtgcgttgaagtagtactgtaaaattttgctcaataaacacatgaacaagtgtgtgacagaggtgtgaggtgtctgtgtgcattacctaacaccttctttgaaacaagtgaattcagccagtcattgtgaaatatcactggtagtatag

SEQ ID NO: 65441 - DNA, 590 bp, Chicken  19866894332639_4
cagttacaaaactatttctctaaaaattcttatgagggatgcaattaggtacagagtttttttcttacaaacattctgtagtcattataatacagataaagtttacttattgtttgatgttttgagtaagcaattcataaagctgtgtagagtggaagaactytggggggaaggaagagtcartagtatcctatgaaactttgggatataaatggaaaaagataactgggaagcagagacygaggcctcagtgaaggactgtgtaagattggagaaataaggtagaaaggcacaatagcrggggaattggcaaagagcatgaagaaaaggcccctcttatcccagcaaaggacctgaactcagcccaaaattcactctgataaagctattaagtgcgttgaagtagtactgtaaaattttgctcaataaacacatgaacaagtgtgtgacagaggtgtgaggtgtctgtgtgcattacctaacaccttctttgaaacaagtgaattcagccagtcattgtgaaatatcactggtagtatagacctctggcaaacagattgtaaagcaccatttccactaaggggtcaggg

SEQ ID NO: 65442 - DNA, 575 bp, Chicken  19866894332646_1
cagatggcagcttacactgggtgtgccacagcctgttgttaagggagttgtgtaaccactcacatctgagttcctattgcacttgtgctgcaacgtaattagtggggaaaggggggcaaagaatgacactgttgtagtaatatgtcactaatctacttcctaaaataaaatacatgcaccttgcctttcaatgtggttccatacaaatatgttctgcagagctgaatggtgatactccaccgttctgaggtaggattcagccctccggttttttctacagaaggttttcatcgtgagtgytccgacaccgaaaataacacaactttaagctgcacttgagtcgaaggtccgcatctgtgttccgcacgcagctccctcgaaggcagggcgcgggagagcgcagacattgctgaggaaagaacgtgtaacgacagagctgccctctttcggcaacgtggagaactgtttcgtgctctcacggcacgaggataccaacttcaggttcgtgtagcagccccgaggtgccgcagcgctgcacggtgcccgccggagcactcacacccgcgggctctcca

SEQ ID NO: 65443 - DNA, 600 bp, Chicken  19866894332647_1
acgcgaaagccccgcggagccaattcagtgctgaacttaatagcacccaacgtctccatgggacactgccagacgcttcagacttcggctttgtctcagaaagtgagccagatgtgagaaacggcacagggctgaggggagcactgggggcctgaagggctggcaggtccagcaaaggccagcagtggctagcgaaccctcaaactgtcatttaagacccttgcagtattgcaactcagtttattgcttctaaaatctcccataaattccaggaaaagaactgaataggagcagagtggktttttttagcagttactgaggatactccaagaggacagagcctcaggaggttgttgtctccattgcagggcagtaagggcagtatttcctgcctgcagcttgcaagctttccacccatccccttttatcttacacatgttaacagaggtactgaaatgcattcttccagagagaagcaggtcccaatggagctaagcataatcctccttagcacagtacggaataagtgaagctggctaatctttcctgtgatcgtatgctctattggaggggtatatgctgaatgtactaactataaac

SEQ ID NO: 65444 - DNA, 600 bp, Chicken  19866894332647_2
aggaggttgttgtctccattgcagggcagtaagggcagtatttcctgcctgcagcttgcaagctttccacccatccccttttatcttacacatgttaacagaggtactgaaatgcattcttccagagagaagcaggtcccaatggagctaagcataatcctccttagcacagtacggaataagtgaagctggctaatctttcctgtgatcgtatgctctattggaggggtatatgctgaatgtactaactataaacagttattttctaatgcgatttgaaacgcctcccatgaattttgratgagatacatgactcttaaatagttttcagtaatcaggtaccgcattttaacttactgattatttctgagtgagcaagagattgtcaggaacataaaatagaagaattaatttcctacttgtatttgctcaagtgtttcctttacccccccccgccccccccccataacacttcagcagtctgtgtttgtcatttgctaacaatagggtcactccaacatattccaggcaggaaatcatgtgctgtataaatagggctccaacgtagatgacaacagtcttttgattttggatggtttc

SEQ ID NO: 65445 - DNA, 600 bp, Chicken  19866894332648_1
tctgagtgcaggacagacgtgaggaaagaaaccatctcctgctgcagcagcagtaaaagtcctttgcaattgttaaagccagatggaaactaatttttctcttttttttgcagcctctcatcttttcccttccttccctggctggtacaagacactccaatgctgagaaaaggcaatcacaattaaatgtttcactcctaaatgaacagcttggtttgcaaatgacaacggtgacccaaaaaatgcagctctcagcaaaagcggcccagctttctttgcaagatatcccaggtcttcagwaaggaaactgctcctcctggcaccattctgagctctccaaaggtgctcttttgcccctccgacccctcttcaccccagatttacagcctgtcagaggtaatatgaagaagtggatgaggcacggagacacactggcctggaagctattcttctgaaaaagcactgcaaacctgctcctttagataaataaatagcacgtcccctgcgagacatcatccgcaaagcactatcgtacgatgcctccgctgccataattccccatgtccttattgcccgacagcctccataaagagccggcag

SEQ ID NO: 65446 - DNA, 508 bp, Chicken  19866894332648_2
acagcctgtcagaggtaatatgaagaagtggatgaggcacggagacacactggcctggaagctattcttctgaaaaagcactgcaaacctgctcctttagataaataaatagcacgtcccctgcgagacatcatccgcaaagcactatcgtacgatgcctccgctgccataattccccatgtccttattgcccgacagcctccataaagagccggcaggtttatgtgccacttaaaaccaacctattactagcagcaaacttctttcaacgagttgctgtgtgctttgactcaaaacgaraccatcgcgtcgcagcctgaccagtgagtgtggctcatgctcyyttccagggcacagggacaggcgggcactgccccacacaaagggaggatcctccagcactgtggctgtgggcagtcacaccgaactgagtacaattacagcagaagatcgaacccagcatgcacaatttatacgctgcaagacataaatgatgtttccccatagg

SEQ ID NO: 65447 - DNA, 465 bp, Chicken  19866894332648_3
gacacactggcctggaagctattcttctgaaaaagcactgcaaacctgctcctttagataaataaatagcacgtcccctgcgagacatcatccgcaaagcactatcgtacgatgcctccgctgccataattccccatgtccttattgcccgacagcctccataaagagccggcaggtttatgtgccacttaaaaccaacctattactagcagcaaacttctttcaacgagttgctgtgtgctttgactcaaaacgaraccatcgcgtcgcagcctgaccagtgagtgtggctcatgctcyyttccagggcacagggacaggcgggcactgccccacacaaagggaggatcctccagcactgtggctgtgggcagtcacaccgaactgagtacaattacagcagaagatcgaacccagcatgcacaatttatacgctgcaagacataaatgatgtttccccatagg

SEQ ID NO: 65448 - DNA, 464 bp, Chicken  19866894332648_4
acacactggcctggaagctattcttctgaaaaagcactgcaaacctgctcctttagataaataaatagcacgtcccctgcgagacatcatccgcaaagcactatcgtacgatgcctccgctgccataattccccatgtccttattgcccgacagcctccataaagagccggcaggtttatgtgccacttaaaaccaacctattactagcagcaaacttctttcaacgagttgctgtgtgctttgactcaaaacgaraccatcgcgtcgcagcctgaccagtgagtgtggctcatgctcyyttccagggcacagggacaggcgggcactgccccacacaaagggaggatcctccagcactgtggctgtgggcagtcacaccgaactgagtacaattacagcagaagatcgaacccagcatgcacaatttatacgctgcaagacataaatgatgtttccccatagg

SEQ ID NO: 65449 - DNA, 600 bp, Chicken  19866894332649_1
ctcatcataagtcctgtgttgagactccacttccttgatttggtcatcatttacctctgacactcaagagacacagcagaaaatctggaactccctctgtgtctaaataatgtgagatcatctgcactgttcttcctggtaagagacatttaatggaggatgacacacaaataagctaggttgatttacaggtgaactggcaggtggtggagatgtgtctggtgtgatgggaaggaaaagaagcagtgagagagtctgtaagcaaggggcatggaagatccactcttttttcctaataakaattactccagttagactgttagactctcctctgcttgtttattggtctgtttgtttgtttgttttttgtttttgggttttttttttttttttgccagttcataaacagctcagctggcatcagatgctttttttaggcatgacactgatagtagcaggggtagtttagacagagattatgggcttcaggaagggcactctgctgcagcctgaatccttctaggctctctgccatcctcagaggagccctgggacctgtctgtgccaagcaggcaaagttagttcagtgatcagctgtcc

SEQ ID NO: 65450 - DNA, 600 bp, Chicken  19866894332650_1
ctatcagtaagtataaatgtttatttaatatggtgtacagcagcctctactggtgcatgtctgaagagaaaagcaatgtgtcatgcagataatgacattacttttgtgctttctattttttttcctcttttaatggcacagctatttaaagaaataccttttttttcagaaaagtatttaaaattctcaatatattctattaacattgaatgaaataagtggaattcaagtaaaaagaatcattaaattcctttcaagcaaaattttttttcccatcatatctactcaaatattatttcyttagactatacactgtcaaatcaacaccatgctttcagctctatttatatacaaataatccaggcttcacttactgtgatggatgctttagaaacttagatcagatctgttttaagatctaaacctcattactatgctgtctccccttccagattaccattttaaactcatctttaaatttaactactggaaggtgtagattcctctttttcagcactgttttcactgaactctcttaactgcagcatatggacastgaggagtgattcctgatcagtaatgccatccattgtgcttctt

SEQ ID NO: 65451 - DNA, 600 bp, Chicken  19866894332650_2
agcaaaattttttttcccatcatatctactcaaatattatttcyttagactatacactgtcaaatcaacaccatgctttcagctctatttatatacaaataatccaggcttcacttactgtgatggatgctttagaaacttagatcagatctgttttaagatctaaacctcattactatgctgtctccccttccagattaccattttaaactcatctttaaatttaactactggaaggtgtagattcctctttttcagcactgttttcactgaactctcttaactgcagcatatggacastgaggagtgattcctgatcagtaatgccatccattgtgcttcttttygcactacatctcctgagtgtaaagaatacttctattctgattcttattttcatgttgatgctacaaagatgctagtttttaacaattagaatctgaacctgatttgacctaaagaagagaataaagcaccaggattgagaaggagaatccagattctcactgcagaatgccaagcaagtaggatacgtaactgtagcattattttagtttactataactcacccctggcagcaacattaagtgttacagtgac

SEQ ID NO: 65452 - DNA, 600 bp, Chicken  19866894332650_3
gactatacactgtcaaatcaacaccatgctttcagctctatttatatacaaataatccaggcttcacttactgtgatggatgctttagaaacttagatcagatctgttttaagatctaaacctcattactatgctgtctccccttccagattaccattttaaactcatctttaaatttaactactggaaggtgtagattcctctttttcagcactgttttcactgaactctcttaactgcagcatatggacastgaggagtgattcctgatcagtaatgccatccattgtgcttcttttygcactacatctcctgagtgtaaagaatacttctattctgattcttattttcatgttgatgctacaaagatgctagtttttaacaattagaatctgaacctgatttgacctaaagaagagaataaagcaccaggattgagaaggagaatccagattctcactgcagaatgccaagcaagtaggatacgtaactgtagcattattttagtttactataactcacccctggcagcaacattaagtgttacagtgacagatttagtaataccttgcttatttttttaaagcaacgtttacttta

SEQ ID NO: 65453 - DNA, 600 bp, Chicken  19866894332654_1
tttgaatagtctggttgtcaagctataaaggaaaaacagtgaaaaacagaacttctttcttcctctttaaataagaaaagtaggcagaaagcttacactgaacactacagaagatatcagccaaatccagattgacttatcactgaacatcctgtgagaggatttaggaatctactgggactgtgtgtgtattttatacaacttttctttcatgcttgcgtgagagaaccacatcagctcacattactgtgtgtggtacagatgaaagtgctgtatataaccaaagcaaaaggtttcagmagcatctggcagcattaacagcaaagctctaaaacagaggaagaatgaagcctgaaagtaacttccgaaattattgtatagatctctgccatttttcttctcaagctgaaggggagagggcagggttcagtacaacattagagtgaatctaaattttgtttgtgattgattttactgtcttacttacataacacacctaatcctgcctctcagctctgtaaatcacagcccacggccttattcttaggcatcaactcagaggatcatgatgaaaagaaaatctcattaccgatcagcaga

SEQ ID NO: 65454 - DNA, 600 bp, Chicken  19866894332655_1
agtaactgctctacaaaattattctgctgtgtctgtatgaacactagaaacatacataagtttggaatttacgatagctgctctgaaattatgcctcctattttattatgttggcccacgacatcagaagcggatgttggtggtacggcagtagaggctgaaccttcccgccaatattccattacattttgctgctgtgtgacagatggcagcagaggggcagtctgataaaatggtgtctgacatggaagtgcataagaaacaaaggggcatcaccaaattcctccatgcagaaaaaayggcacacattgacacttgctgaatgtttgtagagaccaaagagtggatgtgagcacagtgaggcagtgggtggtgcatttcaacagtggcaacagtgatgtgaaagacaagccacactccagatagccatgcacagctgtcacaccatgaaatgaagagcatctcaaccagctcatcagtgcaaatcggctaatggtgaccacgatgaaaagctgtgctttgtagatgagaatttgttctataaaataatgttactgtgctctttgtatctggtgctcgttttcacgagaagaattactt

SEQ ID NO: 65455 - DNA, 600 bp, Chicken  19866894332657_1
gaatcagagtcctgtcatttcatgatttgagatattcatgctttaactcaagtacatacagaaatgctacctactgcatcaacaattaaaactcaaaatacaggcagcacatgggaaagaaaatgttaaagagcgctatgttttatcaagattgatatgtacaaaagtatttgacagcagtgatttggaagtgattaaatggacaatattgtcatttgtatagtcaaatagagtcctaagatatttttatttaaaaagcaattctatttttatgtctccaaaccaaagatttctttctcwaattctgtattattttttttaatctcatccaaacagtactaaagaatataagatattttttaagttttgaatcagaaacacagggatatggcatgtggtttaactaagagtcctaagtattttgtggtcacaaaggaaaaactgaaagtatcactggagaattaataatgctaattcatgatgcagtgactctctcagctttccaatattatttactttaatagcagcaatatattccatattcaccagaaaagtattagaaaggtacggaagtttgacctttttcttgtgtcagtgttt

SEQ ID NO: 65456 - DNA, 600 bp, Chicken  19866894332659_1
aacctctcaaccatggtcctaaggaggttaaagtctgccctctggaagtccaaggtggcagttctgctgactcccctccgtggttcaacaaggattgagaaatctagcatctcatgatcactctgccccaggtggcctccaacctttacgtcccccacaagaccttctctgttaaaaaacagcaggttcaggattttgcttccgctcatcagctcccttaccagctgtgtcaggaagttatcttccacacactctaggaacctccaggactgttccctatctgctatattataaacccakcagatgtcagggaagttgaagtcctccacaagaacaaggggtagagatgtcaagacctcactcaacagtctatgaagtgtcttatccacctcttatccacccaccatcctgctttggtggtctgcagtaaacttctacaataatgcccttcttattgtccctcgcttttattctgacccataaggtctcatccccatcagcaccatcattcatttccatacattcacattctttcttaacacagagggctacaccactgtctttcctgctttgcctatctcacttgaaaagttggtagct

SEQ ID NO: 65457 - DNA, 527 bp, Chicken  19866894332661_1
acgaacaagtattaataaatcaccatgctccaagaattagtgaaacgcattgcaaaaacagacaccagtcttcctatgttattttttctaacagcctctgcatagcagcctgcacttcagctggagctgatctaaattacagctgggtcagattttgcctgattttaaataggttcttattgattgaaagtggatctgagctcaggcagaggcaggagaggccctgccatcagcaggtcccattatgccacataggggctgcagctggagctcagcacagcccccacacatccagcaaaygctttagtgctctgcaggacctgtgccagagatctctgcccgttacaagatggagttaccaggcagatggaagtgctccaaagcagggctctgcagcagaaaaagcagcagattacagccctcagctaaaggctgctattctcctccctggctgacagcagaaggtgctctcaaagcacccatggtgaagaggaagggcagtgcgacactgccactcagcacagcca

SEQ ID NO: 65458 - DNA, 599 bp, Chicken  19866894332662_1
  misc_feature (1)..(17): n is any nucleotide
nnnnnnnnnnnnnnnnnatctaaatacagcatgcatgccatgagtgtgtaatttttggtgatgtgctttggccaagctaagctatactgacacagctatgtagtttagatatcttcatttaagcttttcctggcagaaatcctttaggtgcttgtagtacagatagttaagtacatctataagtccttggcatgtaaggactgggatgctgggtggctttgtagtctatgctacactgaagaccacacatgaaataaactgaagggaatagagaaatttagcaacaactggtctacaggratattcatcataatggcatcaaatttataatcctggaggtatttcattaacttttcattacataagagatgctgacaagcagatgagaacacaktggtcagttctgatacatgactgagtgaaaacataactatttctagaagggtaggatcaagaaaacatatttcaccratgaagtgaacaagctcagcatatatctggtacttccacttgactgcatggggctgctggaaggaaaagagaacttcttattcctactgaagattataygaaagcaaagagtagttgtatctcatttt

SEQ ID NO: 65459 - DNA, 600 bp, Chicken  19866894332662_2
gctatgtagtttagatatcttcatttaagcttttcctggcagaaatcctttaggtgcttgtagtacagatagttaagtacatctataagtccttggcatgtaaggactgggatgctgggtggctttgtagtctatgctacactgaagaccacacatgaaataaactgaagggaatagagaaatttagcaacaactggtctacaggratattcatcataatggcatcaaatttataatcctggaggtatttcattaacttttcattacataagagatgctgacaagcagatgagaacacaktggtcagttctgatacatgactgagtgaaaacataactatttctagaagggtaggatcaagaaaacatatttcaccratgaagtgaacaagctcagcatatatctggtacttccacttgactgcatggggctgctggaaggaaaagagaacttcttattcctactgaagattataygaaagcaaagagtagttgtatctcattttgtaacttgatctttaatctttagctctataaaatgtttgctaaggtaagttgttggagtttaaagaccacattttaaaccagggtaaaaaaacat

SEQ ID NO: 65460 - DNA, 592 bp, Chicken  19866894332662_3
tacatctataagtccttggcatgtaaggactgggatgctgggtggctttgtagtctatgctacactgaagaccacacatgaaataaactgaagggaatagagaaatttagcaacaactggtctacaggratattcatcataatggcatcaaatttataatcctggaggtatttcattaacttttcattacataagagatgctgacaagcagatgagaacacaktggtcagttctgatacatgactgagtgaaaacataactatttctagaagggtaggatcaagaaaacatatttcaccratgaagtgaacaagctcagcatatatctggtacttccacttgactgcatggggctgctggaaggaaaagagaacttcttattcctactgaagattataygaaagcaaagagtagttgtatctcattttgtaacttgatctttaatctttagctctataaaatgtttgctaaggtaagttgttggagtttaaagaccacattttaaaccagggtaaaaaaacattgataagagtggcatgggagagatctcaggcaaggagcatttccttgcatttaagctatcttaaatatc

SEQ ID NO: 65461 - DNA, 493 bp, Chicken  19866894332662_4
gagaaatttagcaacaactggtctacaggratattcatcataatggcatcaaatttataatcctggaggtatttcattaacttttcattacataagagatgctgacaagcagatgagaacacaktggtcagttctgatacatgactgagtgaaaacataactatttctagaagggtaggatcaagaaaacatatttcaccratgaagtgaacaagctcagcatatatctggtacttccacttgactgcatggggctgctggaaggaaaagagaacttcttattcctactgaagattataygaaagcaaagagtagttgtatctcattttgtaacttgatctttaatctttagctctataaaatgtttgctaaggtaagttgttggagtttaaagaccacattttaaaccagggtaaaaaaacattgataagagtggcatgggagagatctcaggcaaggagcatttccttgcatttaagctatcttaaatatc

SEQ ID NO: 65462 - DNA, 600 bp, Chicken  19866894332667_1
acaacctctttcaatttaggtcatgaactacaagtacagatacaatgtggtgagtaggcaacatgcaggctgcatggcatgaggtgaaagaatcattcttcacagaagcttgccccagggaaatgttatttctaaagacagtcatatctgacggattcagtgccactgaatctggggagcaggacacaaggtgatgggatgtgactcatttatttatgaaggagcctgcagtgatacattacagactatcatcactaagtaatactatgtccacttgtctagagagacctactttgtacyggagacaaaaagagaagtggaataaatgattactcaatcccagatggcaaaaaacccactctattgatagtaatattgatgtgaatccagaaaggttttgtgaagagcctaaatgggattttaaaatgtgaccagtattatgagctggttgtgacaattttactgaaactgttctgaaccgacacaagctgttacrygcaaaaatatttaaaagaattatcttgatttctttgcagtttttgacagtaaagttttggagttttaaactaagcaaatgagtctcttttcttgggaaaagag

SEQ ID NO: 65463 - DNA, 600 bp, Chicken  19866894332667_2
ggatgtgactcatttatttatgaaggagcctgcagtgatacattacagactatcatcactaagtaatactatgtccacttgtctagagagacctactttgtacyggagacaaaaagagaagtggaataaatgattactcaatcccagatggcaaaaaacccactctattgatagtaatattgatgtgaatccagaaaggttttgtgaagagcctaaatgggattttaaaatgtgaccagtattatgagctggttgtgacaattttactgaaactgttctgaaccgacacaagctgttacrygcaaaaatatttaaaagaattatcttgatttctttgcagtttttgacagtaaagttttggagttttaaactaagcaaatgagtctcttttcttgggaaaagagagcatcagcctattctcccagagtatgaatttgtgagtccactggattttcagtaggacagaatgacagaatgctttgaaggaagctaattaacaactttagccaatttcatacaggttggaaaaccctgggccagctcctcactatccactatccattttatcctttgaactttgtatgtttaatgtctgcaaaa

SEQ ID NO: 65464 - DNA, 600 bp, Chicken  19866894332667_3
gatgtgactcatttatttatgaaggagcctgcagtgatacattacagactatcatcactaagtaatactatgtccacttgtctagagagacctactttgtacyggagacaaaaagagaagtggaataaatgattactcaatcccagatggcaaaaaacccactctattgatagtaatattgatgtgaatccagaaaggttttgtgaagagcctaaatgggattttaaaatgtgaccagtattatgagctggttgtgacaattttactgaaactgttctgaaccgacacaagctgttacrygcaaaaatatttaaaagaattatcttgatttctttgcagtttttgacagtaaagttttggagttttaaactaagcaaatgagtctcttttcttgggaaaagagagcatcagcctattctcccagagtatgaatttgtgagtccactggattttcagtaggacagaatgacagaatgctttgaaggaagctaattaacaactttagccaatttcatacaggttggaaaaccctgggccagctcctcactatccactatccattttatcctttgaactttgtatgtttaatgtctgcaaaat

SEQ ID NO: 65465 - DNA, 599 bp, Chicken  19866894332668_1
  misc_feature (1)..(62): n is any nucleotide
nnnnnnnnnnnnnnnnnnnnnnnnnnnnnnnnnnnnnnnnnnnnnnnnnnnnnnnnnnnnnnctgagatctgttagatcagtgactgttgtttgttcttaaactcgtagccaaggatgacaagtagccttctgtgtagagatggaggaagcaggggttaggctactgccagaacaacttcaggcttcaaagacaagtgatgctgcatacttctttccagtgtagctaaatgactgtaattattgaagtacatggggtgttgcactggaaatatgagggctgcttcaaaagtaatgctgcstctttcattatgttgacagaggcaggtgttggtggtacggcagaagaggctgaacctttccgtctgtatcccattacatgtttttttgccatgtgagagatggcagcagaaagacagtctgactaaatggcatctgacgtgccagtgcgtatgtagcaaaggtgtgtcattgaattcttctgcgcaggaaaaaatagcacccrctgacattcaatgaatgtttgtggagatcaaacagtggatgtgagtccagtgagacagtgggtggtgcatttcagcagtaaytgtcgactgaagtc

SEQ ID NO: 65466 - DNA, 600 bp, Chicken  19866894332668_2
gcatacttctttccagtgtagctaaatgactgtaattattgaagtacatggggtgttgcactggaaatatgagggctgcttcaaaagtaatgctgcstctttcattatgttgacagaggcaggtgttggtggtacggcagaagaggctgaacctttccgtctgtatcccattacatgtttttttgccatgtgagagatggcagcagaaagacagtctgactaaatggcatctgacgtgccagtgcgtatgtagcaaaggtgtgtcattgaattcttctgcgcaggaaaaaatagcacccrctgacattcaatgaatgtttgtggagatcaaacagtggatgtgagtccagtgagacagtgggtggtgcatttcagcagtaaytgtcgactgaagtcctgctaccaaagcatctcctccacygaagttgtaggaacatgctgattaaaaggataatttatttattttctgtttctgtcaacaacacaagaatgctatgtatccatccatggatcataaagatccagtattagaaaagttgtgaactcttgttgtggtttaacgctgtaggcagttcagcactacatgggttgtttgctcac

SEQ ID NO: 65467 - DNA, 600 bp, Chicken  19866894332668_3
aaaagtaatgctgcstctttcattatgttgacagaggcaggtgttggtggtacggcagaagaggctgaacctttccgtctgtatcccattacatgtttttttgccatgtgagagatggcagcagaaagacagtctgactaaatggcatctgacgtgccagtgcgtatgtagcaaaggtgtgtcattgaattcttctgcgcaggaaaaaatagcacccrctgacattcaatgaatgtttgtggagatcaaacagtggatgtgagtccagtgagacagtgggtggtgcatttcagcagtaaytgtcgactgaagtcctgctaccaaagcatctcctccacygaagttgtaggaacatgctgattaaaaggataatttatttattttctgtttctgtcaacaacacaagaatgctatgtatccatccatggatcataaagatccagtattagaaaagttgtgaactcttgttgtggtttaacgctgtaggcagttcagcactacatgggttgtttgctcactccctcctccctgtgggattgtgagagaattgggggggcaggggagggggaggaacccacacaagtaagagaactcctgggc

SEQ ID NO: 65468 - DNA, 579 bp, Chicken  19866894332668_4
ggtgttggtggtacggcagaagaggctgaacctttccgtctgtatcccattacatgtttttttgccatgtgagagatggcagcagaaagacagtctgactaaatggcatctgacgtgccagtgcgtatgtagcaaaggtgtgtcattgaattcttctgcgcaggaaaaaatagcacccrctgacattcaatgaatgtttgtggagatcaaacagtggatgtgagtccagtgagacagtgggtggtgcatttcagcagtaaytgtcgactgaagtcctgctaccaaagcatctcctccacygaagttgtaggaacatgctgattaaaaggataatttatttattttctgtttctgtcaacaacacaagaatgctatgtatccatccatggatcataaagatccagtattagaaaagttgtgaactcttgttgtggtttaacgctgtaggcagttcagcactacatgggttgtttgctcactccctcctccctgtgggattgtgagagaattgggggggcaggggagggggaggaacccacacaagtaagagaactcctgggcagagatgaaagctatttg

SEQ ID NO: 65469 - DNA, 600 bp, Chicken  19866894332670_1
aattagcaaaaatggtgtgtgtgttcaatgagaggttgcaggagccactgtccagtttgaggaattaatgaaggaatgtgtcaacctgtatcatgtggcgtaagtatggagaccatggaccaggacagcgcttacgcacacaaccctacctgcctctcagcaaaaatgcattcctgaatcagagctccttgaaggtgtggtagttgaaatcaggcagggggaagcaaggctgaagcccaattctcccaggtccattattaaagccatataatttcaaactggtataaatgaaacaagagytggggaaagccatctcaagggataggaaaagtgcagtttgttggggcagggggagctggaagggttcctttcccagcagtgttggtgaagcaggctcacagtacatggcttggaggagaagccataacgttgtaaataaatacttactgggaacagagggggaaaacccctgctcgtttgctgataacagcatgttttgtttcacttcagaagaacaaaggtttaaagtaaactgtagaatgccttaaaccttgtcatggcgttgttccagaagggaggatatggctagctgcagttatt

SEQ ID NO: 65470 - DNA, 600 bp, Chicken  19866894332676_1
acagcagtgggaaccccgtggtcagcagttcctacaaaggcagccttatcaggtcagggtattctagggatgggagactgctccattggagcatccctacaaccatgcctggcaactgagccacatgaagccccacctcatgtcattatgctgggaggatcccaatagccccactgctccaccataagcaggggctgggatgggcgcaggggagctctgatcttctgatcttgctggggatttcccagctcctttcacttgtggccaaacctaagcagtatttaaacaccatcacctcaytccccctccctttcttattgtcacctgcaaatttagattaacaagaaggtttgacaaagtgctactgcatatgttaataaagccattagtgtcggcccgcctgacatataacctgcagagtctccaatgtttactaatatgattgtcaaagcagaggaacattactttttaatgacatttcatatcacttcagttgaagtaatatcctgggacatgataatcagaaagccatttagccacagaactatgtgccgaatagaggctggtgcatgaaaaatgctcattttgtcagaattaaaa

SEQ ID NO: 65471 - DNA, 599 bp, Chicken  19866894332681_1
  misc_feature (1)..(73): n is any nucleotide
nnnnnnnnnnnnnnnnnnnnnnnnnnnnnnnnnnnnnnnnnnnnnnnnnnnnnnnnnnnnnnnnnnnnnnnnncctttgagattaagggctgagcctttccaagtgcaacagggaagccacagctttggccaggaccagggtgggactgtgtgtacagaagtgattcataactcttgactgagcaaatccaagtaagctcagggggaactggtcactctctgggatattcttcagcactttgggttcagccacacgagccagggcagaacagacacaaaggtgggtgctctccccagaasagaacctgggacagcagggctcacaggatcaggcccgtgaaggtccattgctcatactgcaacacacaccacactgaacaagttttgtttgtctccgctgctggctatgaatgcagaacaatgcattaacaaagagcacttatgctccccgcgctatccaaaatagcaaccagttgtaaactgctgtgtgactgatggtttctctgactggggcagctactcttaccagctcctcgttagatgtagccctacaaattattgccatatagctctcaagccatgatgtcaatgcaatgtac

SEQ ID NO: 65472 - DNA, 600 bp, Chicken  19866894332686_1
tttaacacaagacattttccagactgagtaaagatgggtgggtgtttggtctttagccataaacaaatatttctgtcaaatcacctgctgactctctggagtcattgcttgggaaaaatgataaattgtaaatgaacaaataaattttcatttttaattattttcacttccaggttatacttccaggaactgtctgattcagttggttttaatatcagtgacaagattccaactaggtgaatataaattcttgctatttgatgtgtagaacagtgaaaaacaatcatgcccatgttttcyttgctttttaagtgtctgcgtcccaggtccaaggaaaatgcatctaaagattttaatggaagtcacggagatccattttaacaacttagtttcaatctgctatacccattaagtgtcttttgttctatcagttttcagctgcatgttccagccaagttctaagtgtgtgtaaactggagctacttgttcaatgtataaaagctgtcttaagcttgagcaggagctgccagtcctagagaacaaacaacaaatcatcctttctgtctattgaagttttccaaaagctgttgtatttctttt

SEQ ID NO: 65473 - DNA, 599 bp, Chicken  19866894332687_1
  misc_feature (1)..(59): n is any nucleotide
nnnnnnnnnnnnnnnnnnnnnnnnnnnnnnnnnnnnnnnnnnnnnnnnnnnnnnnnnnncaaagtaacttgctattacacatcaaggtgcatgtttgatgtttacaagttaaatgctaatatgatatctgcatgttttgacacttgtatacttcaaacaaggaacccctgacagtaatggcaaggatacatgtgtagtggcaggagtgagtttcttggtctaatgtctttcagccacactgtacatatgctctgtatgttaatcactatagaaaatgtataaaataccaaatgtcatttwaaaaaaaagtttaatttcattgacaggaatctgcagtatttctcataacatatttctgaacccttattatctgaagtagtaggagctggttaaagatgcaaaactccagacttcctgccaaggagtgaaatgctttaacatcaaaggcaatggccttatggtaaagatgtgaaagcttcctcccacatttcagttcatgtggaacaaggacagcaaacttacaaagatgaaacaaagaaaagttcttcagggatggtgtttggaaggtgttgctgcataggctgaatcctcagttagca

SEQ ID NO: 65474 - DNA, 600 bp, Chicken  19866894332689_1
gctctgaaggctgggctctccgggacataggctgtgggctgggtatggcaccaccctcgggctctgcctgcccaccgaggccttcaaggaaagagaaagatatggctgagacatctcttaagaacgtaacacacctgcagcctcttaaccccaccagtaaacgtaattagcttcatttcaaagctgaagttaagaaaatccacacagggtagcactgtgccgtgcaagaactcttgtctggtgtactgagcagctcttccagctctgctctttgggttctgcaccttcccctcggtctcyaagtgcatgtggtgggaggttccattttaccttcagtgctctgctcattatttatcctctcaccagcttcagacctcaggtctttatggtttacacactcacttaagtgaaggattttaacccaaacacacacatcatgcttgttggaacacagcacttccaggacctgagccactctttggagatgcaatcagaaatggccatccaccaccacgtcagcttctccccaaggcctcaccacattcaggagacacagaggggccgggcaagaaattcagagctgggcaggcagcaaaggag

SEQ ID NO: 65475 - DNA, 600 bp, Chicken  19866894332691_1
gtctcctgctccatgttaggcggtgagcacagcagtggtgcctactcactgcttttgcaggttcatagtcatacttttagcgtgactactggaggagggccaaacaggaacagatgggtagggaaagatgtgtatgaatatagatagtgatagatggtggagacagcataagccttcatgcagaggagcttagggtacagctaaatagcgtgatgtaaaatttaactttttctagcagtttcatggactgagaatctgtccatttccactgtaaagtgtgtcctaacctttgcagacagrcaggaaaaagtacagaagaggaaaaacagttgcaattgttctatgttgagttctactaatgaatgagtagggaatttcattgtgggttggatggtatttctctgcattttgtggcaaaacctggaagagttcattaatcttagaggactgtagatggggaagaatgtattgtaatggttagaagaagaggaaaaaagttttgaaagaaatcatgagagagatgagttgagaatgaaagagaatgtcaactttgaagaaagtaagttaagaattgtgatagtgggtatggatgtagaggaa

SEQ ID NO: 65476 - DNA, 600 bp, Chicken  19866894332698_1
aatgctgcctctttgagaaacgcttcccccatcagccgagcaggtctccaacacgttttggaggagcacagcatctctgcatgcacacacatggagaagcgtagaggtttctcatgccctccttcgtgctgctggctttataagcagaggtgtcagccaggctccctgcgtggcagggctttgaaaagggaaatcccacccagttatctcagttcctgacccgtgtaccagcacacctcgacctcagcttcgcaaggctggggaaggctgaggcaagcaaacccagcgcgcagctttccrgcagcttgtgcagagatacctacaggtttatgagtggtgataaaacacagtgaatgaaaaacagatgcagaagaacagagaggggggagagagcattgtctgcctttgcgaacgtttggcaggccattaaaaaaaaccaaagggatgggaaaacacttccattcgaaaggcatatccttccaatctctctctagaggacttctgaaccccacaaatccctccacaagatcatccatgagaggtgtacaatgctgaaagggcttaaaaactaagctgtccagaatctcttgacctctgagc

SEQ ID NO: 65477 - DNA, 600 bp, Chicken  19866894332698_2
gcattgtctgcctttgcgaacgtttggcaggccattaaaaaaaaccaaagggatgggaaaacacttccattcgaaaggcatatccttccaatctctctctagaggacttctgaaccccacaaatccctccacaagatcatccatgagaggtgtacaatgctgaaagggcttaaaaactaagctgtccagaatctcttgacctctgagcatgccttaatactcactgcttatgtattgcataaggatgcttttaggcctgcctggggcatatgctgagctacggcaccaggaaagaaatcrgarctccagatctggaatcagagctcacgcagcccaaggtagatcactacrcttaagtctgcttgtgtttctttatagcttatcatcttcaaatcaattaacatgaaggacatcatctagatttctgacacatgacaataaagtaccattcagttccaaatatcttgttatagccagaattatctgctattarctcatcccaaactacacggaataaagatccacgtatcctcaggtcccaatcccttgattagaatttaattaatggtaaatacaatggtcacataactcaaaatgggc

SEQ ID NO: 65478 - DNA, 600 bp, Chicken  19866894332698_3
ttgtctgcctttgcgaacgtttggcaggccattaaaaaaaaccaaagggatgggaaaacacttccattcgaaaggcatatccttccaatctctctctagaggacttctgaaccccacaaatccctccacaagatcatccatgagaggtgtacaatgctgaaagggcttaaaaactaagctgtccagaatctcttgacctctgagcatgccttaatactcactgcttatgtattgcataaggatgcttttaggcctgcctggggcatatgctgagctacggcaccaggaaagaaatcrgarctccagatctggaatcagagctcacgcagcccaaggtagatcactacrcttaagtctgcttgtgtttctttatagcttatcatcttcaaatcaattaacatgaaggacatcatctagatttctgacacatgacaataaagtaccattcagttccaaatatcttgttatagccagaattatctgctattarctcatcccaaactacacggaataaagatccacgtatcctcaggtcccaatcccttgattagaatttaattaatggtaaatacaatggtcacataactcaaaatgggcttc

SEQ ID NO: 65479 - DNA, 600 bp, Chicken  19866894332698_4
gatgggaaaacacttccattcgaaaggcatatccttccaatctctctctagaggacttctgaaccccacaaatccctccacaagatcatccatgagaggtgtacaatgctgaaagggcttaaaaactaagctgtccagaatctcttgacctctgagcatgccttaatactcactgcttatgtattgcataaggatgcttttaggcctgcctggggcatatgctgagctacggcaccaggaaagaaatcrgarctccagatctggaatcagagctcacgcagcccaaggtagatcactacrcttaagtctgcttgtgtttctttatagcttatcatcttcaaatcaattaacatgaaggacatcatctagatttctgacacatgacaataaagtaccattcagttccaaatatcttgttatagccagaattatctgctattarctcatcccaaactacacggaataaagatccacgtatcctcaggtcccaatcccttgattagaatttaattaatggtaaatacaatggtcacataactcaaaatgggcttcggcctccacagccgargcaaagctgcagtacattgttgctgtgggatt

SEQ ID NO: 65480 - DNA, 600 bp, Chicken  19866894332698_5
tcttgacctctgagcatgccttaatactcactgcttatgtattgcataaggatgcttttaggcctgcctggggcatatgctgagctacggcaccaggaaagaaatcrgarctccagatctggaatcagagctcacgcagcccaaggtagatcactacrcttaagtctgcttgtgtttctttatagcttatcatcttcaaatcaattaacatgaaggacatcatctagatttctgacacatgacaataaagtaccattcagttccaaatatcttgttatagccagaattatctgctattarctcatcccaaactacacggaataaagatccacgtatcctcaggtcccaatcccttgattagaatttaattaatggtaaatacaatggtcacataactcaaaatgggcttcggcctccacagccgargcaaagctgcagtacattgttgctgtgggattaagagtracacacaaaggatgtgggaacacctccaggggtgtctgtgtaactgtaaggccaggttaagaatctcgcataggaattcacaccaccttaacagcttcacctaacaggagaataaaaaggtcagttcctctgccc

SEQ ID NO: 65481 - DNA, 600 bp, Chicken  19866894332698_6
agagctcacgcagcccaaggtagatcactacrcttaagtctgcttgtgtttctttatagcttatcatcttcaaatcaattaacatgaaggacatcatctagatttctgacacatgacaataaagtaccattcagttccaaatatcttgttatagccagaattatctgctattarctcatcccaaactacacggaataaagatccacgtatcctcaggtcccaatcccttgattagaatttaattaatggtaaatacaatggtcacataactcaaaatgggcttcggcctccacagccgargcaaagctgcagtacattgttgctgtgggattaagagtracacacaaaggatgtgggaacacctccaggggtgtctgtgtaactgtaaggccaggttaagaatctcgcataggaattcacaccaccttaacagcttcacctaacaggagaataaaaaggtcagttcctctgccctaacatgatgtgctatgcgttataagacttcagagaaattgacgtctgagggaatttttaaatagaagcaatgctgttagccatgcaataatctctaatttatcactgcgttttggaaaagccacc

SEQ ID NO: 65482 - DNA, 600 bp, Chicken  19866894332698_7
ctgcttgtgtttctttatagcttatcatcttcaaatcaattaacatgaaggacatcatctagatttctgacacatgacaataaagtaccattcagttccaaatatcttgttatagccagaattatctgctattarctcatcccaaactacacggaataaagatccacgtatcctcaggtcccaatcccttgattagaatttaattaatggtaaatacaatggtcacataactcaaaatgggcttcggcctccacagccgargcaaagctgcagtacattgttgctgtgggattaagagtracacacaaaggatgtgggaacacctccaggggtgtctgtgtaactgtaaggccaggttaagaatctcgcataggaattcacaccaccttaacagcttcacctaacaggagaataaaaaggtcagttcctctgccctaacatgatgtgctatgcgttataagacttcagagaaattgacgtctgagggaatttttaaatagaagcaatgctgttagccatgcaataatctctaatttatcactgcgttttggaaaagccacctctctttaaaataattagcattcatccgatggcttccct

SEQ ID NO: 65483 - DNA, 599 bp, Chicken  19866894332702_1
  misc_feature (1)..(33): n is any nucleotide
nnnnnnnnnnnnnnnnnnnnnnnnnnnnnnnnncctttgtagttggtttacatgatgcacatgagagaaagaaaagcaggaatgaaaaggaaagcaactcaaactggagctcaagctttcaccattaatcttgttcaaacagagtgagaaacttgttcacatctttgtcaacagtaatggcattgcaaattgttgtagtagaaaaaaagttacagtgtgcactggaaatagaaaacaaggtccagagagatattttagcaaaaatatttaattcaagtatgaaaagaataaattaaagtwagtgcagtattccttgtaaccccctaggaaacatatacaaaatagtttcccataattttttwttattattattattatttggttataagagtgtcttgccaaccctttctaatggctcatttaagacagtggaacaaaccattcgcatttttcaagttctgagaaaaaacacagtaagagtaacagaacatataatacagactttgagaataaggcttgcgtctgccatgccaaactgcaagcaacaagtctgaagcaggcttagattttggtaaaagcatcagaaggaccaactgcat

SEQ ID NO: 65484 - DNA, 600 bp, Chicken  19866894332702_2
gagagaaagaaaagcaggaatgaaaaggaaagcaactcaaactggagctcaagctttcaccattaatcttgttcaaacagagtgagaaacttgttcacatctttgtcaacagtaatggcattgcaaattgttgtagtagaaaaaaagttacagtgtgcactggaaatagaaaacaaggtccagagagatattttagcaaaaatatttaattcaagtatgaaaagaataaattaaagtwagtgcagtattccttgtaaccccctaggaaacatatacaaaatagtttcccataattttttwttattattattattatttggttataagagtgtcttgccaaccctttctaatggctcatttaagacagtggaacaaaccattcgcatttttcaagttctgagaaaaaacacagtaagagtaacagaacatataatacagactttgagaataaggcttgcgtctgccatgccaaactgcaagcaacaagtctgaagcaggcttagattttggtaaaagcatcagaaggaccaactgcattttctctttcttctcctctcacctttcatttcctctttccatctctttgtccctcttccaaca

SEQ ID NO: 65485 - DNA, 599 bp, Chicken  19866894332703_1
  misc_feature (1)..(165): n is any nucleotide
nnnnnnnnnnnnnnnnnnnnnnnnnnnnnnnnnnnnnnnnnnnnnnnnnnnnnnnnnnnnnnnnnnnnnnnnnnnnnnnnnnnnnnnnnnnnnnnnnnnnnnnnnnnnnnnnnnnnnnnnnnnnnnnnnnnnnnnnnnnnnnnnnnnnnnnnnnnnnnnnnnnnnaggttataaaaaggggaatcctcggggcagatgttttctcaaagacatcggaacaaagcactgcagtgaccaggaaatgtgtggaaaatatgtggctgttaaaagatggcagcagccacatggttcagattaacrgcaaygactgcaaagacaaagtgcagcagcaggtgagtcaggcctcagcagagctgcagctgtgcaacaggtcctgagtcctccattcactttgcagtgatggaaacacctggaaaggtgacttcagacctcmcactcttcatcttaaatgttaaattctacagcaacctcttctttaagcctttttttatttgaaggaataagacgacctggaaagacaatagtcaagcaaagaaactgcccgaaaaatgtacatggggggttttgaaacagaagagtatgagcccatggatgtatag

SEQ ID NO: 65486 - DNA, 599 bp, Chicken  19866894332703_2
  misc_feature (1)..(160): n is any nucleotide
nnnnnnnnnnnnnnnnnnnnnnnnnnnnnnnnnnnnnnnnnnnnnnnnnnnnnnnnnnnnnnnnnnnnnnnnnnnnnnnnnnnnnnnnnnnnnnnnnnnnnnnnnnnnnnnnnnnnnnnnnnnnnnnnnnnnnnnnnnnnnnnnnnnnnnnnnnnnnnnnaggttataaaaaggggaatcctcggggcagatgttttctcaaagacatcggaacaaagcactgcagtgaccaggaaatgtgtggaaaatatgtggctgttaaaagatggcagcagccacatggttcagattaacrgcaaygactgcaaagacaaagtgcagcagcaggtgagtcaggcctcagcagagctgcagctgtgcaacaggtcctgagtcctccattcactttgcagtgatggaaacacctggaaaggtgacttcagacctcmcactcttcatcttaaatgttaaattctacagcaacctcttctttaagcctttttttatttgaaggaataagacgacctggaaagacaatagtcaagcaaagaaactgcccgaaaaatgtacatggggggttttgaaacagaagagtatgagcccatggatgtatagatgtg

SEQ ID NO: 65487 - DNA, 599 bp, Chicken  19866894332703_3
  misc_feature (1)..(32): n is any nucleotide
nnnnnnnnnnnnnnnnnnnnnnnnnnnnnnnnaggttataaaaaggggaatcctcggggcagatgttttctcaaagacatcggaacaaagcactgcagtgaccaggaaatgtgtggaaaatatgtggctgttaaaagatggcagcagccacatggttcagattaacrgcaaygactgcaaagacaaagtgcagcagcaggtgagtcaggcctcagcagagctgcagctgtgcaacaggtcctgagtcctccattcactttgcagtgatggaaacacctggaaaggtgacttcagacctcmcactcttcatcttaaatgttaaattctacagcaacctcttctttaagcctttttttatttgaaggaataagacgacctggaaagacaatagtcaagcaaagaaactgcccgaaaaatgtacatggggggttttgaaacagaagagtatgagcccatggatgtatagatgtggtgttcagcyccagtccctgttacagaaaagccaatggtgctggataccatctgaaaggatggagccactttgggatcaccaggctgtcagtcagtgttttggcaagcccatcactgctctgtggttt

SEQ ID NO: 65488 - DNA, 600 bp, Chicken  19866894332703_4
gacaaagtgcagcagcaggtgagtcaggcctcagcagagctgcagctgtgcaacaggtcctgagtcctccattcactttgcagtgatggaaacacctggaaaggtgacttcagacctcmcactcttcatcttaaatgttaaattctacagcaacctcttctttaagcctttttttatttgaaggaataagacgacctggaaagacaatagtcaagcaaagaaactgcccgaaaaatgtacatggggggttttgaaacagaagagtatgagcccatggatgtatagatgtggtgttcagcyccagtccctgttacagaaaagccaatggtgctggataccatctgaaaggatggagccactttgggatcaccaggctgtcagtcagtgttttggcaagcccatcactgctctgtggtttgggcaacaggagctgaagtagggcaggttcctgaagagtgttagactcatttagcttggctcctgctcagcaagatctgttttattcgttttcctcttggtacagtgcaattttatgcttcatttttactgtataggaattatctgcgcattttggatagaatgcctgccaaaaggaaaaaa

SEQ ID NO: 65489 - DNA, 600 bp, Chicken  19866894332718_1
tttatttttaaatttcaagctcccaaagcagtcctgatggtctttgaggtgcagctctgccagggtctgcttggtggtgtacaaataaggaagatctgatcaggcccaccagagagcagcagtgcacttaggcaaaactgctctctttctcagctctgaagggtattttgttaagatgtcttttgtagtaagtattgaatttctataaaaatcaatttaagaagcaaaagtacaccaggaaatccttttgcaatgctacttagggtgtatttatttgtatttataactcttaaggtctcygggtactgatgttacatacttgattatttgagttctctccaagtaagagggtaaaacktttctcctgaggtatcagctttgtctcctctaaaggttgtgaagaaaacttgaaaaaatagcaagtgaaaatggactttcacagtctgtcactgaattagctaagagtaagtgtttatttctgtgttggttttttttttttttaacaatacttctggctgttagtatggcaaggagtacttgaatgccaatgagcgattcctggtaactttgcctatcagctcttagtatttcacacctgta

SEQ ID NO: 65490 - DNA, 600 bp, Chicken  19866894332718_2
gccagggtctgcttggtggtgtacaaataaggaagatctgatcaggcccaccagagagcagcagtgcacttaggcaaaactgctctctttctcagctctgaagggtattttgttaagatgtcttttgtagtaagtattgaatttctataaaaatcaatttaagaagcaaaagtacaccaggaaatccttttgcaatgctacttagggtgtatttatttgtatttataactcttaaggtctcygggtactgatgttacatacttgattatttgagttctctccaagtaagagggtaaaacktttctcctgaggtatcagctttgtctcctctaaaggttgtgaagaaaacttgaaaaaatagcaagtgaaaatggactttcacagtctgtcactgaattagctaagagtaagtgtttatttctgtgttggttttttttttttttaacaatacttctggctgttagtatggcaaggagtacttgaatgccaatgagcgattcctggtaactttgcctatcagctcttagtatttcacacctgtatatatgattattctttaagttaccagttgatacaaattcagactacactctgagacta

SEQ ID NO: 65491 - DNA, 600 bp, Chicken  19866894332718_3
acttgaaaaaatagcaagtgaaaatggactttcacagtctgtcactgaattagctaagagtaagtgtttatttctgtgttggttttttttttttttaacaatacttctggctgttagtatggcaaggagtacttgaatgccaatgagcgattcctggtaactttgcctatcagctcttagtatttcacacctgtatatatgattattctttaagttaccagttgatacaaattcagactacactctgagactatctgcagtgtcttcctttcaggtattcttagcagactctgatcagaycttgccttctctttgatgctgttggaaatgtttggatatactttactgaatagagtattctgttgattaatgagtttagctttgtttttttgttttttccctacagggttaaagggaataaaaagtcttaatgttactttatgtaaaacttataatcaagtcctacttttgaattacctaggtgcttgggaataaagacatttaggtcctattcatacttttgattgctttagtggagggacttcatgagttctggcttaacaaggtgatttattgtagattatgcaagcataagtagtt

SEQ ID NO: 65492 - DNA, 600 bp, Chicken  19866894332722_1
cagcagctacatgccatccacctggatggattctcctgtgcatctgaatgcagaagaaatgaggcagagggttgttttagttaatatctgctgtgtgatttttccaggtgctgtgcagctcctatcttgccttgtaacctctgttccttcaattctaaagtcctgcctgtgctaacagtactgcatgccatccttgaccctactcctggctttgtgttgctcccatatcccttgacagagacctttccttaaaatgaatatgtttgtgatgccttgaggggataggaagggcttaggggytgagtgacacgatctcttggcaggtcctgggagttctcccaggtgatgggctggagctgctggcatggattctggaatgaattagtttgagaggtgttcctggatgcctatgggttcacagcagaaatcttggtactcccactgtattccattagcagcaaagtgtgaggttgcataccttggattagaaagcacttgaggatgtcatttacacgggcagatttcccagctgactgagcattcctattccactaattacaaaccaagagggtgttgtatgcagtggcacccagacaagag

SEQ ID NO: 65493 - DNA, 600 bp, Chicken  19866894332722_2
tctcccaggtgatgggctggagctgctggcatggattctggaatgaattagtttgagaggtgttcctggatgcctatgggttcacagcagaaatcttggtactcccactgtattccattagcagcaaagtgtgaggttgcataccttggattagaaagcacttgaggatgtcatttacacgggcagatttcccagctgactgagcattcctattccactaattacaaaccaagagggtgttgtatgcagtggcacccagacaagaggagctttcctccctaatgggggcaggttgggaaraagcagaatggatatgctaattgttatcctctcccattatatgcaatcarttggaacaaagtaaagcttcctttggtagctcctgagaaatgtggcgctcagatgctgcagctggctccttccaacagccagcatccgagtcagcactgtagatgaagtgtatcagaaagggatagctcagagccaggactggctggaactggcagcttttctgaagtcacctggaatagtcaaggmttagggagcagatgacagagctgccctacccaaatctttggtwagygtttgaccaaagtgttg

SEQ ID NO: 65494 - DNA, 600 bp, Chicken  19866894332722_3
gtttgagaggtgttcctggatgcctatgggttcacagcagaaatcttggtactcccactgtattccattagcagcaaagtgtgaggttgcataccttggattagaaagcacttgaggatgtcatttacacgggcagatttcccagctgactgagcattcctattccactaattacaaaccaagagggtgttgtatgcagtggcacccagacaagaggagctttcctccctaatgggggcaggttgggaaraagcagaatggatatgctaattgttatcctctcccattatatgcaatcarttggaacaaagtaaagcttcctttggtagctcctgagaaatgtggcgctcagatgctgcagctggctccttccaacagccagcatccgagtcagcactgtagatgaagtgtatcagaaagggatagctcagagccaggactggctggaactggcagcttttctgaagtcacctggaatagtcaaggmttagggagcagatgacagagctgccctacccaaatctttggtwagygtttgaccaaagtgttgcagggctgtgttgttctgtttctagccggtgtgggatgcaraagacgaag

SEQ ID NO: 65495 - DNA, 546 bp, Chicken  19866894332722_4
tgttgtatgcagtggcacccagacaagaggagctttcctccctaatgggggcaggttgggaaraagcagaatggatatgctaattgttatcctctcccattatatgcaatcarttggaacaaagtaaagcttcctttggtagctcctgagaaatgtggcgctcagatgctgcagctggctccttccaacagccagcatccgagtcagcactgtagatgaagtgtatcagaaagggatagctcagagccaggactggctggaactggcagcttttctgaagtcacctggaatagtcaaggmttagggagcagatgacagagctgccctacccaaatctttggtwagygtttgaccaaagtgttgcagggctgtgttgttctgtttctagccggtgtgggatgcaraagacgaagttgctttttcaaatttcccagcactgaaggtgtggggctgagaggaagcagtgaccctcaaaatcctaccaacctctgggcttcccgctgcgtagggttgctctcagtcaggtggtttgatcttcctgctgct

SEQ ID NO: 65496 - DNA, 503 bp, Chicken  19866894332722_5
aatgggggcaggttgggaaraagcagaatggatatgctaattgttatcctctcccattatatgcaatcarttggaacaaagtaaagcttcctttggtagctcctgagaaatgtggcgctcagatgctgcagctggctccttccaacagccagcatccgagtcagcactgtagatgaagtgtatcagaaagggatagctcagagccaggactggctggaactggcagcttttctgaagtcacctggaatagtcaaggmttagggagcagatgacagagctgccctacccaaatctttggtwagygtttgaccaaagtgttgcagggctgtgttgttctgtttctagccggtgtgggatgcaraagacgaagttgctttttcaaatttcccagcactgaaggtgtggggctgagaggaagcagtgaccctcaaaatcctaccaacctctgggcttcccgctgcgtagggttgctctcagtcaggtggtttgatcttcctgctgct

SEQ ID NO: 65497 - DNA, 500 bp, Chicken  19866894332722_6
gggggcaggttgggaaraagcagaatggatatgctaattgttatcctctcccattatatgcaatcarttggaacaaagtaaagcttcctttggtagctcctgagaaatgtggcgctcagatgctgcagctggctccttccaacagccagcatccgagtcagcactgtagatgaagtgtatcagaaagggatagctcagagccaggactggctggaactggcagcttttctgaagtcacctggaatagtcaaggmttagggagcagatgacagagctgccctacccaaatctttggtwagygtttgaccaaagtgttgcagggctgtgttgttctgtttctagccggtgtgggatgcaraagacgaagttgctttttcaaatttcccagcactgaaggtgtggggctgagaggaagcagtgaccctcaaaatcctaccaacctctgggcttcccgctgcgtagggttgctctcagtcaggtggtttgatcttcctgctgct

SEQ ID NO: 65498 - DNA, 442 bp, Chicken  19866894332722_7
tgcaatcarttggaacaaagtaaagcttcctttggtagctcctgagaaatgtggcgctcagatgctgcagctggctccttccaacagccagcatccgagtcagcactgtagatgaagtgtatcagaaagggatagctcagagccaggactggctggaactggcagcttttctgaagtcacctggaatagtcaaggmttagggagcagatgacagagctgccctacccaaatctttggtwagygtttgaccaaagtgttgcagggctgtgttgttctgtttctagccggtgtgggatgcaraagacgaagttgctttttcaaatttcccagcactgaaggtgtggggctgagaggaagcagtgaccctcaaaatcctaccaacctctgggcttcccgctgcgtagggttgctctcagtcaggtggtttgatcttcctgctgct

SEQ ID NO: 65499 - DNA, 600 bp, Chicken  19866894332723_1
gatgcagcaacatgcaccacatccacaatgaatgtgcagtggtcacatttcgggagtagttgcatactgtaatttttcacaaataaacaatagatctcacatctctgaaaaaaaaagaaagcagaggtggcttctggcccaccagctatgatctcagactgagacaagaattcacatgaggatgtgagagaagcagttggagggatctaaacccatgtgatccagaaaaatattcctggtattgcatatctacagtggaacgttctttactattttcaaactataaagtaagagaagagsaacagagcwtcttcccaaatgaaccagggatggtgattaaagcatgagtgacgcagcctcctatttccttttctctcagatagyacttggcttctggttcacagggtaaaaggagagcacctcatctcaccttcactgcaatttaataggttgtgatccaagtacgtatcctgggtcaggctgcacaaaggaagacaaatctgttcctctcgtaaaactcrtcagcttatccctctggactattgaccacctacaaaatggtaattatagtaacttttctcaggggcagtcaagtgacga

SEQ ID NO: 65500 - DNA, 600 bp, Chicken  19866894332723_2
acatgcaccacatccacaatgaatgtgcagtggtcacatttcgggagtagttgcatactgtaatttttcacaaataaacaatagatctcacatctctgaaaaaaaaagaaagcagaggtggcttctggcccaccagctatgatctcagactgagacaagaattcacatgaggatgtgagagaagcagttggagggatctaaacccatgtgatccagaaaaatattcctggtattgcatatctacagtggaacgttctttactattttcaaactataaagtaagagaagagsaacagagcwtcttcccaaatgaaccagggatggtgattaaagcatgagtgacgcagcctcctatttccttttctctcagatagyacttggcttctggttcacagggtaaaaggagagcacctcatctcaccttcactgcaatttaataggttgtgatccaagtacgtatcctgggtcaggctgcacaaaggaagacaaatctgttcctctcgtaaaactcrtcagcttatccctctggactattgaccacctacaaaatggtaattatagtaacttttctcaggggcagtcaagtgacgaataagtatg

SEQ ID NO: 65501 - DNA, 600 bp, Chicken  19866894332723_3
aaacaatagatctcacatctctgaaaaaaaaagaaagcagaggtggcttctggcccaccagctatgatctcagactgagacaagaattcacatgaggatgtgagagaagcagttggagggatctaaacccatgtgatccagaaaaatattcctggtattgcatatctacagtggaacgttctttactattttcaaactataaagtaagagaagagsaacagagcwtcttcccaaatgaaccagggatggtgattaaagcatgagtgacgcagcctcctatttccttttctctcagatagyacttggcttctggttcacagggtaaaaggagagcacctcatctcaccttcactgcaatttaataggttgtgatccaagtacgtatcctgggtcaggctgcacaaaggaagacaaatctgttcctctcgtaaaactcrtcagcttatccctctggactattgaccacctacaaaatggtaattatagtaacttttctcaggggcagtcaagtgacgaataagtatgaaatggatcacagaaaacgtgtttcttatcttgaaagcattcaaaatatccaactgcttttttgaaaatttatgc

SEQ ID NO: 65502 - DNA, 600 bp, Chicken  19866894332723_4
ccagaaaaatattcctggtattgcatatctacagtggaacgttctttactattttcaaactataaagtaagagaagagsaacagagcwtcttcccaaatgaaccagggatggtgattaaagcatgagtgacgcagcctcctatttccttttctctcagatagyacttggcttctggttcacagggtaaaaggagagcacctcatctcaccttcactgcaatttaataggttgtgatccaagtacgtatcctgggtcaggctgcacaaaggaagacaaatctgttcctctcgtaaaactcrtcagcttatccctctggactattgaccacctacaaaatggtaattatagtaacttttctcaggggcagtcaagtgacgaataagtatgaaatggatcacagaaaacgtgtttcttatcttgaaagcattcaaaatatccaactgcttttttgaaaatttatgcaaagtacaacccttaatatttgcactgttctagagaaaaatatgaaatagtagcttgaaagataactgcaaattatcatcagcacaaaataatttgtaggcgtaatgattcctgtccctgcagcaaaatgccttcag

SEQ ID NO: 65503 - DNA, 600 bp, Chicken  19866894332726_1
cagcccctgggagcttacactttaaacagaaagcaagggcaaagaaatgattattcatcctcagtttgcagatgagcagctgatgtacacaggagctaaatgtcccccctaacatcatgaagtaaatctgtgagagagctgaaaacttaactcaggcttccagtgtcccagcctggtattgtctttcctctattcaccacttgcaacttggtattttacttcccttggtatatctaccttgctcgacgtttgaaactgccattgtctgagatcttccttatatgagaagcaatgttatgkgaagggcaaagtgtgagtgagaggtctaacagcagccattcctttgccacatgggcaatgatgacaccagcagggtgttaaccatgctgactgctgaaatcctgcagtctgtgcaggcctatccattggtttaatcagatgcttagtaaagccacccttacaagcctggcggtccctcagcctgcatgctctgcaatgtatcatttcctttggctgccgaagcgatgtcagtttttatacgttttgggtgatatatgaatatgrctcctctgacacatcactgcataattctgccttctg

SEQ ID NO: 65504 - DNA, 600 bp, Chicken  19866894332726_2
tctgagatcttccttatatgagaagcaatgttatgkgaagggcaaagtgtgagtgagaggtctaacagcagccattcctttgccacatgggcaatgatgacaccagcagggtgttaaccatgctgactgctgaaatcctgcagtctgtgcaggcctatccattggtttaatcagatgcttagtaaagccacccttacaagcctggcggtccctcagcctgcatgctctgcaatgtatcatttcctttggctgccgaagcgatgtcagtttttatacgttttgggtgatatatgaatatgrctcctctgacacatcactgcataattctgccttctgtgccgtgtagatgtgagttgtcatatatgttaygtggccattttccygtgacrctgactgtgacaacttgagggtggttacccagatctggggacagcacaaagggtaatcacctccaaggctgggccagargtgctccccattgggagtcagaaagaaaaagcaagctgagagtctttcatagtgaaggaaacattctgatataacctatcccagtgatggcatttcatgctggacattttaacgccacaaagcaggttacaa

SEQ ID NO: 65505 - DNA, 600 bp, Chicken  19866894332726_3
agccattcctttgccacatgggcaatgatgacaccagcagggtgttaaccatgctgactgctgaaatcctgcagtctgtgcaggcctatccattggtttaatcagatgcttagtaaagccacccttacaagcctggcggtccctcagcctgcatgctctgcaatgtatcatttcctttggctgccgaagcgatgtcagtttttatacgttttgggtgatatatgaatatgrctcctctgacacatcactgcataattctgccttctgtgccgtgtagatgtgagttgtcatatatgttaygtggccattttccygtgacrctgactgtgacaacttgagggtggttacccagatctggggacagcacaaagggtaatcacctccaaggctgggccagargtgctccccattgggagtcagaaagaaaaagcaagctgagagtctttcatagtgaaggaaacattctgatataacctatcccagtgatggcatttcatgctggacattttaacgccacaaagcaggttacaagtaaatctctattctcttggacacttcaaagctctgaagacgctgtatcccatgaattgcggagtggca

SEQ ID NO: 65506 - DNA, 600 bp, Chicken  19866894332726_4
cacatgggcaatgatgacaccagcagggtgttaaccatgctgactgctgaaatcctgcagtctgtgcaggcctatccattggtttaatcagatgcttagtaaagccacccttacaagcctggcggtccctcagcctgcatgctctgcaatgtatcatttcctttggctgccgaagcgatgtcagtttttatacgttttgggtgatatatgaatatgrctcctctgacacatcactgcataattctgccttctgtgccgtgtagatgtgagttgtcatatatgttaygtggccattttccygtgacrctgactgtgacaacttgagggtggttacccagatctggggacagcacaaagggtaatcacctccaaggctgggccagargtgctccccattgggagtcagaaagaaaaagcaagctgagagtctttcatagtgaaggaaacattctgatataacctatcccagtgatggcatttcatgctggacattttaacgccacaaagcaggttacaagtaaatctctattctcttggacacttcaaagctctgaagacgctgtatcccatgaattgcggagtggcattacaaacgaagct

SEQ ID NO: 65507 - DNA, 600 bp, Chicken  19866894332726_5
ggcaatgatgacaccagcagggtgttaaccatgctgactgctgaaatcctgcagtctgtgcaggcctatccattggtttaatcagatgcttagtaaagccacccttacaagcctggcggtccctcagcctgcatgctctgcaatgtatcatttcctttggctgccgaagcgatgtcagtttttatacgttttgggtgatatatgaatatgrctcctctgacacatcactgcataattctgccttctgtgccgtgtagatgtgagttgtcatatatgttaygtggccattttccygtgacrctgactgtgacaacttgagggtggttacccagatctggggacagcacaaagggtaatcacctccaaggctgggccagargtgctccccattgggagtcagaaagaaaaagcaagctgagagtctttcatagtgaaggaaacattctgatataacctatcccagtgatggcatttcatgctggacattttaacgccacaaagcaggttacaagtaaatctctattctcttggacacttcaaagctctgaagacgctgtatcccatgaattgcggagtggcattacaaacgaagctctatcc

SEQ ID NO: 65508 - DNA, 600 bp, Chicken  19866894332726_6
aatcagatgcttagtaaagccacccttacaagcctggcggtccctcagcctgcatgctctgcaatgtatcatttcctttggctgccgaagcgatgtcagtttttatacgttttgggtgatatatgaatatgrctcctctgacacatcactgcataattctgccttctgtgccgtgtagatgtgagttgtcatatatgttaygtggccattttccygtgacrctgactgtgacaacttgagggtggttacccagatctggggacagcacaaagggtaatcacctccaaggctgggccagargtgctccccattgggagtcagaaagaaaaagcaagctgagagtctttcatagtgaaggaaacattctgatataacctatcccagtgatggcatttcatgctggacattttaacgccacaaagcaggttacaagtaaatctctattctcttggacacttcaaagctctgaagacgctgtatcccatgaattgcggagtggcattacaaacgaagctctatcctgatgctgcaggagctttggggtccagactgtacagcacttcttggcacacagttcatcattccattgtatccaataca

SEQ ID NO: 65509 - DNA, 600 bp, Chicken  19866894332727_1
aacaataattgtcaacgttttccaacccaagcaccttaaattagacacacaaatccaagcgctggcaccggatcaaagcaaagcggcgcgatgctcagagatgctgagctcacatgcagctctcgcctggcggtgctggaggttgcactcaggactgcacaaagcgcagcccgcttggaactgatcccgcaccaagctcagtgttccaaacatggatttcaacaccttgctgtaggcaccttggatttgaaaagaaaggaggaaaattggcccagcagtgctacagccatttttccctcrgtggggtggaagctggattttcgtggggaaagggccgggtggcacagcggtgtcctctcagggtgcacaaaaggatgccacgtcctaccgtggggatctcatgaaggtccctcctggcttgagccggggctgcctgctttggggtgacgcccagcacgggttcccccctgcaggtctgtgggcacagtggatgcagcaggcccagggcacacggccatccctayccctgctgtcacactccgtggtggccatcaaagccccactgaggccaatactcccattgcatctctgtgccccacg

SEQ ID NO: 65510 - DNA, 551 bp, Chicken  19866894332727_2
ccttgctgtaggcaccttggatttgaaaagaaaggaggaaaattggcccagcagtgctacagccatttttccctcrgtggggtggaagctggattttcgtggggaaagggccgggtggcacagcggtgtcctctcagggtgcacaaaaggatgccacgtcctaccgtggggatctcatgaaggtccctcctggcttgagccggggctgcctgctttggggtgacgcccagcacgggttcccccctgcaggtctgtgggcacagtggatgcagcaggcccagggcacacggccatccctayccctgctgtcacactccgtggtggccatcaaagccccactgaggccaatactcccattgcatctctgtgccccacgatgtgtcccgtgcctttgatgagcgcttcacctctgggtgctctccccactccctgccccaccccaaattagtgcttttgctttatttttagcagtgggttggaaattgctggggctctgctttttttttttcccctctctttttttttctccctctctttcccctttttccccc

SEQ ID NO: 65511 - DNA, 600 bp, Chicken  19866894332730_1
gtgaattgtgggacaaactagatacttgcagttctttttcatattctactgcttcagattattctgaaacacttaattcccaatatctttggtcactgcattctttcttcttgtttgctctggaagatgaaataaaacaattttttatctagcaatggattaatttattcattcattcatagtaacttcacacagttacagattataagcttgtcctttccttatataccaagatgtttatttccttagtggaaactcatagacggaaaaatgttgagggatggctccacagccaagggrgtaatgggtctcttgaacagttatacgagcagaacaggcctaacaattggcaggagatacagatggaaaagtactaactygttataatggctgtgagctcgggtgctatgtgcacaacccacrctatgagtccttgaagttgacaaagcaggaagacaaactgaggcttcagttaagataagggggtagctcgcctgggaagagattaagactgtggaatggtatgaaaacatgcatgaccaatggtattgttaggcagggggcttttcgcaatgctccaaccaattacaagctgacgca

SEQ ID NO: 65512 - DNA, 600 bp, Chicken  19866894332730_2
caatatctttggtcactgcattctttcttcttgtttgctctggaagatgaaataaaacaattttttatctagcaatggattaatttattcattcattcatagtaacttcacacagttacagattataagcttgtcctttccttatataccaagatgtttatttccttagtggaaactcatagacggaaaaatgttgagggatggctccacagccaagggrgtaatgggtctcttgaacagttatacgagcagaacaggcctaacaattggcaggagatacagatggaaaagtactaactygttataatggctgtgagctcgggtgctatgtgcacaacccacrctatgagtccttgaagttgacaaagcaggaagacaaactgaggcttcagttaagataagggggtagctcgcctgggaagagattaagactgtggaatggtatgaaaacatgcatgaccaatggtattgttaggcagggggcttttcgcaatgctccaaccaattacaagctgacgcacgttcgccacgatctatatatgtgtgtaagtaacgaataataaacggagactctgatgcactcatattgggtcatrtcat

SEQ ID NO: 65513 - DNA, 600 bp, Chicken  19866894332730_3
aagatgaaataaaacaattttttatctagcaatggattaatttattcattcattcatagtaacttcacacagttacagattataagcttgtcctttccttatataccaagatgtttatttccttagtggaaactcatagacggaaaaatgttgagggatggctccacagccaagggrgtaatgggtctcttgaacagttatacgagcagaacaggcctaacaattggcaggagatacagatggaaaagtactaactygttataatggctgtgagctcgggtgctatgtgcacaacccacrctatgagtccttgaagttgacaaagcaggaagacaaactgaggcttcagttaagataagggggtagctcgcctgggaagagattaagactgtggaatggtatgaaaacatgcatgaccaatggtattgttaggcagggggcttttcgcaatgctccaaccaattacaagctgacgcacgttcgccacgatctatatatgtgtgtaagtaacgaataataaacggagactctgatgcactcatattgggtcatrtcatcactccccacgcggctcagccagcgaacggactagattccagt

SEQ ID NO: 65514 - DNA, 565 bp, Chicken  19866894332730_4
actygttataatggctgtgagctcgggtgctatgtgcacaacccacrctatgagtccttgaagttgacaaagcaggaagacaaactgaggcttcagttaagataagggggtagctcgcctgggaagagattaagactgtggaatggtatgaaaacatgcatgaccaatggtattgttaggcagggggcttttcgcaatgctccaaccaattacaagctgacgcacgttcgccacgatctatatatgtgtgtaagtaacgaataataaacggagactctgatgcactcatattgggtcatrtcatcactccccacgcggctcagccagcgaacggactagattccagtttcgaacccttgggggtccgcaacatcaaaacactacttcagttgaaatcagatgagaatgtttttaataatcagttttacaaaacaaaaactagaaaaattactttggatcaatttctacaaattacatgcttgagttcttaatgtttttaatttctttcttgagtttaacactcagatttatttatttcaggttaaaaggctctcaaaatttcaag

SEQ ID NO: 65515 - DNA, 600 bp, Chicken  19866894332735_1
gctcattacttaggaagtattcccaagtaatagcagttgaaattcaattgtttgaatctttttgcagctacagtttataatatgcagaatttctggcaaatgtacacaatatggttgtgcctttatcacaacagcacatcaagcagggttggcaagtcagagataaattaaaagccagcaagtaagagtgaattctacattcacttggcttcatgcagataattactgtgattttgtccatatatcacatatagttttagattttctgcttcatctgaaagtggagtacttgtgataacracataaaatatcatctgaaccaaaccaaatttctgaatatgaaagcaataattcagatacagttcattgacgccattcattttaatcatgatccagtccaaaaattatatgccttcttattaaactataataactcatttaatttgccagaagcacaaaaaatgaataaaaataagatcagaaaatctcacggctaaattttgcaatttttttttttttttttaagcatgattgcaaaatgtagttctaatagttgcttgtatcaaagtgctagtcattttatgattctgaaactgatag

SEQ ID NO: 65516 - DNA, 599 bp, Chicken  19866894332737_1
  misc_feature (1)..(186): n is any nucleotide
nnnnnnnnnnnnnnnnnnnnnnnnnnnnnnnnnnnnnnnnnnnnnnnnnnnnnnnnnnnnnnnnnnnnnnnnnnnnnnnnnnnnnnnnnnnnnnnnnnnnnnnnnnnnnnnnnnnnnnnnnnnnnnnnnnnnnnnnnnnnnnnnnnnnnnnnnnnnnnnnnnnnnnnnnnnnnnnnnnnnnnnnnncttgctgcagattctcctgatggctctgacatcaaccagttaactttattaaaccatcctttggttcactccagttggtgttcgtgatcttaataggtagaacactcgctgccrctgttgttgctgttrtttgataaagttacacaaatctttaataattcgtaaaattacagcaagatgatgaatcatgttgccctaccagcttctgagatcaaaggtttcaagggagagatgagatgtcaggaacagtttaagaccattgcagtagcagaaaagaatgcaaggaaaaaaaaaatcctcaacaaactgaatggcaaaggaagagagcagtttagcattacaatgcatgaagcaggrggcattgagacttaggtttgatataaagtagaaatacacatgtttaatcttctggt

SEQ ID NO: 65517 - DNA, 599 bp, Chicken  19866894332737_2
  misc_feature (1)..(171): n is any nucleotide
nnnnnnnnnnnnnnnnnnnnnnnnnnnnnnnnnnnnnnnnnnnnnnnnnnnnnnnnnnnnnnnnnnnnnnnnnnnnnnnnnnnnnnnnnnnnnnnnnnnnnnnnnnnnnnnnnnnnnnnnnnnnnnnnnnnnnnnnnnnnnnnnnnnnnnnnnnnnnnnnnnnnnnnnnnncttgctgcagattctcctgatggctctgacatcaaccagttaactttattaaaccatcctttggttcactccagttggtgttcgtgatcttaataggtagaacactcgctgccrctgttgttgctgttrtttgataaagttacacaaatctttaataattcgtaaaattacagcaagatgatgaatcatgttgccctaccagcttctgagatcaaaggtttcaagggagagatgagatgtcaggaacagtttaagaccattgcagtagcagaaaagaatgcaaggaaaaaaaaaatcctcaacaaactgaatggcaaaggaagagagcagtttagcattacaatgcatgaagcaggrggcattgagacttaggtttgatataaagtagaaatacacatgtttaatcttctggttagataggcattaac

SEQ ID NO: 65518 - DNA, 600 bp, Chicken  19866894332737_3
cctttggttcactccagttggtgttcgtgatcttaataggtagaacactcgctgccrctgttgttgctgttrtttgataaagttacacaaatctttaataattcgtaaaattacagcaagatgatgaatcatgttgccctaccagcttctgagatcaaaggtttcaagggagagatgagatgtcaggaacagtttaagaccattgcagtagcagaaaagaatgcaaggaaaaaaaaaatcctcaacaaactgaatggcaaaggaagagagcagtttagcattacaatgcatgaagcaggrggcattgagacttaggtttgatataaagtagaaatacacatgtttaatcttctggttagataggcattaacagtcagtcttgtagcagcaagaagggacaaagcactgttcagcaaagacaatcagagttacttggcctaatgaagccttcatttattcctctttaaataacctttgttgcccttatttgacarggcttcagctgctacacggattgtgcctctcgtctgcacaacttatctaaacagatgctattagtctggtgcatatatgcccacttgtttgaatcatgattggttg

SEQ ID NO: 65519 - DNA, 472 bp, Chicken  19866894332737_4
taagaccattgcagtagcagaaaagaatgcaaggaaaaaaaaaatcctcaacaaactgaatggcaaaggaagagagcagtttagcattacaatgcatgaagcaggrggcattgagacttaggtttgatataaagtagaaatacacatgtttaatcttctggttagataggcattaacagtcagtcttgtagcagcaagaagggacaaagcactgttcagcaaagacaatcagagttacttggcctaatgaagccttcatttattcctctttaaataacctttgttgcccttatttgacarggcttcagctgctacacggattgtgcctctcgtctgcacaacttatctaaacagatgctattagtctggtgcatatatgcccacttgtttgaatcatgattggttgtgattccatatcagcaaagcatgcttcagggagaacttaatttctcctctgtacagaagattaaag

SEQ ID NO: 65520 - DNA, 600 bp, Chicken  19866894332747_1
aattcctctgaaagaggaaccaaaacaaagaagccggtatactgtaccttgtgccttctgccaccctggagggacatgcatccatcgtgtgatgtaaaggaaatgatttgcacaactgtttgagagaacagcttatcattacttagaactgtccattccaaggaaaactacacaggaatgaaagtgagtcaactttcacaggaaaaaaaaaaaaggagaagccgtgaccagaggaaagggtaggggatgatgtatactttttgtttcagtaagaagattgctcctcacagataatgagaygttagtatctgtagccaatgctttggcactgcttgaaagcatcggactgaagcagaagaggtagctggtctttgayggactcttcaggatgaatcaagtgcaacaaggcaaatgtggaagcataaagaaaaaaaagtaaatccactgtrtaggaccctactttgcctcattataggacgtgttagtaacataggaaaattatttttaaactcctttccaaaaatctctgtgcatatgcagcattccatagaatctgccaaaaatataagtgttaccttgaaacattgtcagggaccctgc

SEQ ID NO: 65521 - DNA, 600 bp, Chicken  19866894332747_2
tgcatccatcgtgtgatgtaaaggaaatgatttgcacaactgtttgagagaacagcttatcattacttagaactgtccattccaaggaaaactacacaggaatgaaagtgagtcaactttcacaggaaaaaaaaaaaaggagaagccgtgaccagaggaaagggtaggggatgatgtatactttttgtttcagtaagaagattgctcctcacagataatgagaygttagtatctgtagccaatgctttggcactgcttgaaagcatcggactgaagcagaagaggtagctggtctttgayggactcttcaggatgaatcaagtgcaacaaggcaaatgtggaagcataaagaaaaaaaagtaaatccactgtrtaggaccctactttgcctcattataggacgtgttagtaacataggaaaattatttttaaactcctttccaaaaatctctgtgcatatgcagcattccatagaatctgccaaaaatataagtgttaccttgaaacattgtcagggaccctgcatctattcagtgaaaacctcctggtactatgcagatatgcttcaatgctaccatatgctacraagattaaaaatat

SEQ ID NO: 65522 - DNA, 600 bp, Chicken  19866894332747_3
tgtccattccaaggaaaactacacaggaatgaaagtgagtcaactttcacaggaaaaaaaaaaaaggagaagccgtgaccagaggaaagggtaggggatgatgtatactttttgtttcagtaagaagattgctcctcacagataatgagaygttagtatctgtagccaatgctttggcactgcttgaaagcatcggactgaagcagaagaggtagctggtctttgayggactcttcaggatgaatcaagtgcaacaaggcaaatgtggaagcataaagaaaaaaaagtaaatccactgtrtaggaccctactttgcctcattataggacgtgttagtaacataggaaaattatttttaaactcctttccaaaaatctctgtgcatatgcagcattccatagaatctgccaaaaatataagtgttaccttgaaacattgtcagggaccctgcatctattcagtgaaaacctcctggtactatgcagatatgcttcaatgctaccatatgctacraagattaaaaatatgatggaaatctacagaatggcttccaagcaaaasgtcagttcatacagaaaaccccacactaataggcctgta

SEQ ID NO: 65523 - DNA, 600 bp, Chicken  19866894332747_4
agctggtctttgayggactcttcaggatgaatcaagtgcaacaaggcaaatgtggaagcataaagaaaaaaaagtaaatccactgtrtaggaccctactttgcctcattataggacgtgttagtaacataggaaaattatttttaaactcctttccaaaaatctctgtgcatatgcagcattccatagaatctgccaaaaatataagtgttaccttgaaacattgtcagggaccctgcatctattcagtgaaaacctcctggtactatgcagatatgcttcaatgctaccatatgctacraagattaaaaatatgatggaaatctacagaatggcttccaagcaaaasgtcagttcatacagaaaaccccacactaataggcctgtaataactgcttgcctgcaaaagttcgttacattcagactcacattctctgctcatttttctaccatagttttcaaaaagactgtargaatctcctggattaagggggaattcacaatccgagagcatgtgatattcaaccagtcctaaggctattacagcacagcgttcccatgcagagataggcaatggtttagaaaaatatgtgagcagttc

SEQ ID NO: 65524 - DNA, 600 bp, Chicken  19866894332747_5
aatgtggaagcataaagaaaaaaaagtaaatccactgtrtaggaccctactttgcctcattataggacgtgttagtaacataggaaaattatttttaaactcctttccaaaaatctctgtgcatatgcagcattccatagaatctgccaaaaatataagtgttaccttgaaacattgtcagggaccctgcatctattcagtgaaaacctcctggtactatgcagatatgcttcaatgctaccatatgctacraagattaaaaatatgatggaaatctacagaatggcttccaagcaaaasgtcagttcatacagaaaaccccacactaataggcctgtaataactgcttgcctgcaaaagttcgttacattcagactcacattctctgctcatttttctaccatagttttcaaaaagactgtargaatctcctggattaagggggaattcacaatccgagagcatgtgatattcaaccagtcctaaggctattacagcacagcgttcccatgcagagataggcaatggtttagaaaaatatgtgagcagttccaaacatcaagatgatttcacaccctgatggaaaatatgcaggctaat

SEQ ID NO: 65525 - DNA, 600 bp, Chicken  19866894332747_6
atgcagcattccatagaatctgccaaaaatataagtgttaccttgaaacattgtcagggaccctgcatctattcagtgaaaacctcctggtactatgcagatatgcttcaatgctaccatatgctacraagattaaaaatatgatggaaatctacagaatggcttccaagcaaaasgtcagttcatacagaaaaccccacactaataggcctgtaataactgcttgcctgcaaaagttcgttacattcagactcacattctctgctcatttttctaccatagttttcaaaaagactgtargaatctcctggattaagggggaattcacaatccgagagcatgtgatattcaaccagtcctaaggctattacagcacagcgttcccatgcagagataggcaatggtttagaaaaatatgtgagcagttccaaacatcaagatgatttcacaccctgatggaaaatatgcaggctaatatcacagcagtcattatggcattcagcatatcgtcatgctaaaatccacagaagaatacagctacattccttcacaggattaaaagactgatccaaaggccgctgaaatcattcaggttttttt

SEQ ID NO: 65526 - DNA, 600 bp, Chicken  19866894332748_1
ttaattttggtgttgaggtgtgaggctgccttacttctgtatctctggttttgttctacaagaggtgagtctaagtaggtgcgcagctcagtgggcaggtccccagctggccatggtggagtgataattggcctgctaaggaaatgagtaataaaagttaggaaaaaagcaaattaattaaaattgatatgtgactttggtacagttctagccaaaagaccaaaaattaattacgtgggtacttactaaggttcttacatttctctttttttacacttcagcagcatagaaatcagatakgaagtagatgctaaagtaatgaagattaaagccaattgctttcagttgatctagttttgcatagcatagaacagcagatttttgaaggtttctgatgaagttagacaggagaaggggaatcagatgagtctccargatttccaaaatcttagacctttaaggcttgctatatgttcttctgagaagtatgaatgtgttagaggtgctttctaaaagcaaatacctgaagatatttgtgcatatgaattagaacttgtttagttaaacaacttaaaatttagaatggttgttcagatcaaa

SEQ ID NO: 65527 - DNA, 600 bp, Chicken  19866894332748_2
ctaaggaaatgagtaataaaagttaggaaaaaagcaaattaattaaaattgatatgtgactttggtacagttctagccaaaagaccaaaaattaattacgtgggtacttactaaggttcttacatttctctttttttacacttcagcagcatagaaatcagatakgaagtagatgctaaagtaatgaagattaaagccaattgctttcagttgatctagttttgcatagcatagaacagcagatttttgaaggtttctgatgaagttagacaggagaaggggaatcagatgagtctccargatttccaaaatcttagacctttaaggcttgctatatgttcttctgagaagtatgaatgtgttagaggtgctttctaaaagcaaatacctgaagatatttgtgcatatgaattagaacttgtttagttaaacaacttaaaatttagaatggttgttcagatcaaaacaaagactaaagtttcagaagagggaatgtcattaatggggggagatcctgctctgagatgtgtgcaaaaccagatctaattgatagctaaatggagttaaaatgtatgacattttctggctccagtgggtctt

SEQ ID NO: 65528 - DNA, 599 bp, Chicken  19866894332751_1
  misc_feature (1)..(209): n is any nucleotide
nnnnnnnnnnnnnnnnnnnnnnnnnnnnnnnnnnnnnnnnnnnnnnnnnnnnnnnnnnnnnnnnnnnnnnnnnnnnnnnnnnnnnnnnnnnnnnnnnnnnnnnnnnnnnnnnnnnnnnnnnnnnnnnnnnnnnnnnnnnnnnnnnnnnnnnnnnnnnnnnnnnnnnnnnnnnnnnnnnnnnnnnnnnnnnnnnnnnnnnnnnnnnnnnntaaggctgtttttctttctttcccagcaattactggaccagctccttcaaaggaacactgaagtgacaaaggattctcttgcctatcatcrtaattggatctcccaatgcctttgactgttagataagccataaaacttgctgttatcttaattacctggaggtatttttcttatctttggcgctttatataaaaagaaagatcatttatatttcaatygaaattttaatgcaactttcaagtaagcaaaggcagtctaaaaaggagcacagctgtttcagagcatcaacttatggtcagtgtacccagaggaaataattttaagaatttttaatgcaaataccraattacggtggtgttatttatcttaatctgtttcaaagtatacat

SEQ ID NO: 65529 - DNA, 599 bp, Chicken  19866894332751_2
  misc_feature (1)..(81): n is any nucleotide
nnnnnnnnnnnnnnnnnnnnnnnnnnnnnnnnnnnnnnnnnnnnnnnnnnnnnnnnnnnnnnnnnnnnnnnnnnnnnnnnntaaggctgtttttctttctttcccagcaattactggaccagctccttcaaaggaacactgaagtgacaaaggattctcttgcctatcatcrtaattggatctcccaatgcctttgactgttagataagccataaaacttgctgttatcttaattacctggaggtatttttcttatctttggcgctttatataaaaagaaagatcatttatatttcaatygaaattttaatgcaactttcaagtaagcaaaggcagtctaaaaaggagcacagctgtttcagagcatcaacttatggtcagtgtacccagaggaaataattttaagaatttttaatgcaaataccraattacggtggtgttatttatcttaatctgtttcaaagtatacatctctgtagcaatagagccgagtttataagacctgggaaacttatttctctgaagcattctattaattgatttcctgcgagttaaatccttgaactaaagaaaaacgaatatcattatttgttatgttt

SEQ ID NO: 65530 - DNA, 600 bp, Chicken  19866894332751_3
ttcaaaggaacactgaagtgacaaaggattctcttgcctatcatcrtaattggatctcccaatgcctttgactgttagataagccataaaacttgctgttatcttaattacctggaggtatttttcttatctttggcgctttatataaaaagaaagatcatttatatttcaatygaaattttaatgcaactttcaagtaagcaaaggcagtctaaaaaggagcacagctgtttcagagcatcaacttatggtcagtgtacccagaggaaataattttaagaatttttaatgcaaataccraattacggtggtgttatttatcttaatctgtttcaaagtatacatctctgtagcaatagagccgagtttataagacctgggaaacttatttctctgaagcattctattaattgatttcctgcgagttaaatccttgaactaaagaaaaacgaatatcattatttgttatgtttagaaactagctgaaatagcattaccacataatcatagcagcagcagtttcacattaatacttaacataccaaaagggaccaatcttggagctctctgaaggactctattcctgtttatgtagtgaat

SEQ ID NO: 65531 - DNA, 600 bp, Chicken  19866894332755_1
ccatcctctgtgcacccgtgctcaccagaagccagaaggtgtgagcacatggaggccacccgctgtcattgggttctccatctctgaactgtgcaaatgtcacatggagccaaaatttaggacttctgtggggccaggtatggtcacaaaacaagatcacactgaaggatgtgaggctttgtgtcccttgtgccatatatccttccctccagccccctctggttataaccccagggctttctcagccagccagtagaatgtggctggggttttgtagttcagctccttattttgtagttyagctcagttatttcattctcrtggctcaccacaagagcaaaataactggatgggatctggactgtccatctccacattcaratcctctaagtttatctcatcctccctcataaagattcctttggccagcttgggagcagtttaaaagaaaattaagacaacaaagatgcaatcgtggagtgacatatcataatgagacctttcagtctctmcaaactttctcattaacttgcaccgaatgcagactttagaattacaaaaggattttctctcgcagcccataaatagtctgtgcttaaa

SEQ ID NO: 65532 - DNA, 600 bp, Chicken  19866894332755_2
tcaccagaagccagaaggtgtgagcacatggaggccacccgctgtcattgggttctccatctctgaactgtgcaaatgtcacatggagccaaaatttaggacttctgtggggccaggtatggtcacaaaacaagatcacactgaaggatgtgaggctttgtgtcccttgtgccatatatccttccctccagccccctctggttataaccccagggctttctcagccagccagtagaatgtggctggggttttgtagttcagctccttattttgtagttyagctcagttatttcattctcrtggctcaccacaagagcaaaataactggatgggatctggactgtccatctccacattcaratcctctaagtttatctcatcctccctcataaagattcctttggccagcttgggagcagtttaaaagaaaattaagacaacaaagatgcaatcgtggagtgacatatcataatgagacctttcagtctctmcaaactttctcattaacttgcaccgaatgcagactttagaattacaaaaggattttctctcgcagcccataaatagtctgtgcttaaaacataccacattgtctccatc

SEQ ID NO: 65533 - DNA, 600 bp, Chicken  19866894332755_3
ctctgaactgtgcaaatgtcacatggagccaaaatttaggacttctgtggggccaggtatggtcacaaaacaagatcacactgaaggatgtgaggctttgtgtcccttgtgccatatatccttccctccagccccctctggttataaccccagggctttctcagccagccagtagaatgtggctggggttttgtagttcagctccttattttgtagttyagctcagttatttcattctcrtggctcaccacaagagcaaaataactggatgggatctggactgtccatctccacattcaratcctctaagtttatctcatcctccctcataaagattcctttggccagcttgggagcagtttaaaagaaaattaagacaacaaagatgcaatcgtggagtgacatatcataatgagacctttcagtctctmcaaactttctcattaacttgcaccgaatgcagactttagaattacaaaaggattttctctcgcagcccataaatagtctgtgcttaaaacataccacattgtctccatctttttggcttgttcccaaagcagcttcttttggcgtgctgcagttgatgggaatgatatt

SEQ ID NO: 65534 - DNA, 600 bp, Chicken  19866894332755_4
ccccctctggttataaccccagggctttctcagccagccagtagaatgtggctggggttttgtagttcagctccttattttgtagttyagctcagttatttcattctcrtggctcaccacaagagcaaaataactggatgggatctggactgtccatctccacattcaratcctctaagtttatctcatcctccctcataaagattcctttggccagcttgggagcagtttaaaagaaaattaagacaacaaagatgcaatcgtggagtgacatatcataatgagacctttcagtctctmcaaactttctcattaacttgcaccgaatgcagactttagaattacaaaaggattttctctcgcagcccataaatagtctgtgcttaaaacataccacattgtctccatctttttggcttgttcccaaagcagcttcttttggcgtgctgcagttgatgggaatgatattgaaggaagaacaaagtacagtttttccaaaggaaataataaatctgctgtgggctttcaaagcaggctcacataatcagcgagcttctcttttttgcctgagaatgtaggaagagcacagatgttgctttg

SEQ ID NO: 65535 - DNA, 600 bp, Chicken  19866894332755_5
agttgatgggaatgatattgaaggaagaacaaagtacagtttttccaaaggaaataataaatctgctgtgggctttcaaagcaggctcacataatcagcgagcttctcttttttgcctgagaatgtaggaagagcacagatgttgctttggaccattaacatctcagctataaagacatgcaaagtatttcccaatggcttttctctctttttgtttattttcttattttattaagctgaaagctttttttttaccttgtgtattaaacatacagcccccaaacaccacagttctgcccrgctgcccatgtgttagcacaaacaattgctgtttccctctgcagaatcattttatttatgaatcagcttgtcatctcatgttttatctccttaatgtataaatggaaggaagatatctagctgaaaaggagctccatctgccaaacaagggtggcagattggattgttggcatgagataaccaacccatcacagtaagaatgaccaaagagagagaggcaaaaaccaacatgttcttcatgtcatgttcctcctgtcaaataataattaataatatccattgatgaaatttagctacaga

SEQ ID NO: 65536 - DNA, 599 bp, Chicken  19866894332757_1
  misc_feature (1)..(100): n is any nucleotide
nnnnnnnnnnnnnnnnnnnnnnnnnnnnnnnnnnnnnnnnnnnnnnnnnnnnnnnnnnnnnnnnnnnnnnnnnnnnnnnnnnnnnnnnnnnnnnnnnnnntaccatgtctctatgcccatgccatgtctccatgcccataccatgtctccatgcccataccatctctccatgtccataccatctctccatgtgcataccatgtctctatgcccaagccacgtccccacatccacactgtgcccaagagttgtttgtctcagggcaaagcaatgcccttagccaagtggacaatggaattygtgcacccaggaacatgcaccagcacaggtcccgttcccagaagaaacaatctctccctccgagcaggatgacagcacctggtggaaacaccagtcctgccctagggagacaggcatggactggggctgcctgaccctgcagtgctgagtgttggtgggaacattctgctctgctgccacgtstgctgtgctgctatggggagaccgggtggctgcacgggaataagcgctcaggcccaagcagartgcttctcccttggatctgagcatgagggtgcttccctcacactgtcatgttg

SEQ ID NO: 65537 - DNA, 600 bp, Chicken  19866894332757_2
tctccatgtgcataccatgtctctatgcccaagccacgtccccacatccacactgtgcccaagagttgtttgtctcagggcaaagcaatgcccttagccaagtggacaatggaattygtgcacccaggaacatgcaccagcacaggtcccgttcccagaagaaacaatctctccctccgagcaggatgacagcacctggtggaaacaccagtcctgccctagggagacaggcatggactggggctgcctgaccctgcagtgctgagtgttggtgggaacattctgctctgctgccacgtstgctgtgctgctatggggagaccgggtggctgcacgggaataagcgctcaggcccaagcagartgcttctcccttggatctgagcatgagggtgcttccctcacactgtcatgttgtcacgttgcagcgggcagctgtgccgagcgctggtttctatttgactgaagccacaattccctgctgctcctgggagctcaggcacgtgcgtgctgtggaaagggagaggagccaccagggcttggcacccacagctaccatgtgctgcagggacaccctggaagagatgcagtggcaaaagtg

SEQ ID NO: 65538 - DNA, 600 bp, Chicken  19866894332757_3
agttgtttgtctcagggcaaagcaatgcccttagccaagtggacaatggaattygtgcacccaggaacatgcaccagcacaggtcccgttcccagaagaaacaatctctccctccgagcaggatgacagcacctggtggaaacaccagtcctgccctagggagacaggcatggactggggctgcctgaccctgcagtgctgagtgttggtgggaacattctgctctgctgccacgtstgctgtgctgctatggggagaccgggtggctgcacgggaataagcgctcaggcccaagcagartgcttctcccttggatctgagcatgagggtgcttccctcacactgtcatgttgtcacgttgcagcgggcagctgtgccgagcgctggtttctatttgactgaagccacaattccctgctgctcctgggagctcaggcacgtgcgtgctgtggaaagggagaggagccaccagggcttggcacccacagctaccatgtgctgcagggacaccctggaagagatgcagtggcaaaagtgatggctctgggaaggagtgatagaagtgccatcacgcacagctctggaacgaacagcaaagcc

SEQ ID NO: 65539 - DNA, 600 bp, Chicken  19866894332764_1
ttcttttctattcttctcttttctttttccacttgcttaaataagcacagcagagctgttttttatcacggtcctgctcctgcatttttccaacccaattaggccattaccagggctaaatgaggcatggagccttcaaaagtcacaccgtcgtcccggagatgaagcgcgtagagctgcagagttggcaggtaggtgaggtgatggggctcactggagtgtgaccccggctgtttctgtgttccagaaagatcaccttcagaatgaggtggggagggaggaagtcaattgaaaatattrattttaaaaggcacggtgctaactaggggttgcaatgctgtggtcgagtgatgcagctgtgttcaytggggatgcgtagaggatcgaagtcagcctcctctcccatgtaactagcagtaggactagggggaacagcctcaagttgtgccaggggagattcaacttggacattaggaaattcttcttctctggaagagtggtgaggcgctggaatgggctgcctatggatgtggttgagtcactgtccctggaagtgttcaagaaacatgtaaatgttgtactgagggycatggtttagtg

SEQ ID NO: 65540 - DNA, 600 bp, Chicken  19866894332764_2
cacggtcctgctcctgcatttttccaacccaattaggccattaccagggctaaatgaggcatggagccttcaaaagtcacaccgtcgtcccggagatgaagcgcgtagagctgcagagttggcaggtaggtgaggtgatggggctcactggagtgtgaccccggctgtttctgtgttccagaaagatcaccttcagaatgaggtggggagggaggaagtcaattgaaaatattrattttaaaaggcacggtgctaactaggggttgcaatgctgtggtcgagtgatgcagctgtgttcaytggggatgcgtagaggatcgaagtcagcctcctctcccatgtaactagcagtaggactagggggaacagcctcaagttgtgccaggggagattcaacttggacattaggaaattcttcttctctggaagagtggtgaggcgctggaatgggctgcctatggatgtggttgagtcactgtccctggaagtgttcaagaaacatgtaaatgttgtactgagggycatggtttagtgcaaaatattggtgataggtggaagttggactggatgatcttggaggtctttttcaaccttggtgat

SEQ ID NO: 65541 - DNA, 600 bp, Chicken  19866894332764_3
ttgaaaatattrattttaaaaggcacggtgctaactaggggttgcaatgctgtggtcgagtgatgcagctgtgttcaytggggatgcgtagaggatcgaagtcagcctcctctcccatgtaactagcagtaggactagggggaacagcctcaagttgtgccaggggagattcaacttggacattaggaaattcttcttctctggaagagtggtgaggcgctggaatgggctgcctatggatgtggttgagtcactgtccctggaagtgttcaagaaacatgtaaatgttgtactgagggycatggtttagtgcaaaatattggtgataggtggaagttggactggatgatcttggaggtctttttcaaccttggtgattctatgattctaagtgggtcttactgcagggtgttgatggtgratgttccctggtgccacactggggactcttcactcttcacatggaactgctgtagaggttcatctgtccttccctgaagctctgataactcttgccaatatttcttctgatacaaattgggaaaacttatatatctaacacaagaagaaaaaaggctccatttataaagacaaggaatg

SEQ ID NO: 65542 - DNA, 600 bp, Chicken  19866894332764_4
actagcagtaggactagggggaacagcctcaagttgtgccaggggagattcaacttggacattaggaaattcttcttctctggaagagtggtgaggcgctggaatgggctgcctatggatgtggttgagtcactgtccctggaagtgttcaagaaacatgtaaatgttgtactgagggycatggtttagtgcaaaatattggtgataggtggaagttggactggatgatcttggaggtctttttcaaccttggtgattctatgattctaagtgggtcttactgcagggtgttgatggtgratgttccctggtgccacactggggactcttcactcttcacatggaactgctgtagaggttcatctgtccttccctgaagctctgataactcttgccaatatttcttctgatacaaattgggaaaacttatatatctaacacaagaagaaaaaaggctccatttataaagacaaggaatgcaaagccaagcaattaggctcaccaaagacaagcttgggatcccctgctatgtttcagggaggagctctgacagaacgaatgtcccatacctttttaaacacttcagtttttgagtactga

SEQ ID NO: 65543 - DNA, 600 bp, Chicken  19866894332771_1
acatagttgagtacagagcagttctctggccccaggcaacagggcttgttaagaccttggagaatacaccctatgaggagaggctgaaggaactggggctgtttagcatggagaaaaggaggctgaggggagaccttattgctgtcttccaatatctgaaaggtgactgcagcacagtggggttggtctcttctcactggtgacaggacaaggggaaatggccttaagttgcgccaggggaggtttaggttggatatcaggaaacacttctttacagaaagggttgtttagcactggaayaggctccctagggaggtggttgaatcaccatgcctggatgtgtttaaaatccgtttggatgtgstgctcagggacatgatttagcagagggctgttaaaattagggtagtatggttagatcatggttggactctatgatctttaaggtcttttctaaactgagcaattctatgaaggcaaagaactgtggagcagaactgtgtgcagctttgctagccctgccttggggagatatgccaagagccccacatcacagcctgggggaaagcagcagctgcccctgtctaatcagacaacctc

SEQ ID NO: 65544 - DNA, 600 bp, Chicken  19866894332771_2
tacaccctatgaggagaggctgaaggaactggggctgtttagcatggagaaaaggaggctgaggggagaccttattgctgtcttccaatatctgaaaggtgactgcagcacagtggggttggtctcttctcactggtgacaggacaaggggaaatggccttaagttgcgccaggggaggtttaggttggatatcaggaaacacttctttacagaaagggttgtttagcactggaayaggctccctagggaggtggttgaatcaccatgcctggatgtgtttaaaatccgtttggatgtgstgctcagggacatgatttagcagagggctgttaaaattagggtagtatggttagatcatggttggactctatgatctttaaggtcttttctaaactgagcaattctatgaaggcaaagaactgtggagcagaactgtgtgcagctttgctagccctgccttggggagatatgccaagagccccacatcacagcctgggggaaagcagcagctgcccctgtctaatcagacaacctcctatcagtctctttcgggtacggccagctgtgtgcctacctgcccatcggaatcatagccccag

SEQ ID NO: 65545 - DNA, 459 bp, Chicken  19866894332776_1
gagtttctattgaaatctgtattttcattttctgtgacaactaacacaattcctgtaatccttttcaaatattcactggcagtcttcccagacatatattttgaaggctaaatggtttaggatttatgtactctactacataggtagatctgaataagctaataagcccgtacggccactccattgccatgaccagcttggatctctggaagactatagctgtggcagcatagagttggagctggttaatggactgtggttctcatctctctgctgggctaatgagcccagggtgaggcrytgggctggaaaaacrctgttactggttgcagtgctcacttgggtattgttacatagtgctgcttcacgtggtgtacctgcctggcagcttgaggttttggctttctgtccaggagcatctctggtttttttttttttttttttttttttttttttttt

SEQ ID NO: 65546 - DNA, 458 bp, Chicken  19866894332776_2
agtttctattgaaatctgtattttcattttctgtgacaactaacacaattcctgtaatccttttcaaatattcactggcagtcttcccagacatatattttgaaggctaaatggtttaggatttatgtactctactacataggtagatctgaataagctaataagcccgtacggccactccattgccatgaccagcttggatctctggaagactatagctgtggcagcatagagttggagctggttaatggactgtggttctcatctctctgctgggctaatgagcccagggtgaggcrytgggctggaaaaacrctgttactggttgcagtgctcacttgggtattgttacatagtgctgcttcacgtggtgtacctgcctggcagcttgaggttttggctttctgtccaggagcatctctggtttttttttttttttttttttttttttttttttt

SEQ ID NO: 65547 - DNA, 443 bp, Chicken  19866894332776_3
ctgtattttcattttctgtgacaactaacacaattcctgtaatccttttcaaatattcactggcagtcttcccagacatatattttgaaggctaaatggtttaggatttatgtactctactacataggtagatctgaataagctaataagcccgtacggccactccattgccatgaccagcttggatctctggaagactatagctgtggcagcatagagttggagctggttaatggactgtggttctcatctctctgctgggctaatgagcccagggtgaggcrytgggctggaaaaacrctgttactggttgcagtgctcacttgggtattgttacatagtgctgcttcacgtggtgtacctgcctggcagcttgaggttttggctttctgtccaggagcatctctggtttttttttttttttttttttttttttttttttt

SEQ ID NO: 65548 - DNA, 600 bp, Chicken  19866894332789_1
cctattatcaaagagcttgtacacgataaagcacaattgcctgcgtgtcttaagagctaattatcagtaacttgttttattcttatctcagagctgcttgtgaagagatgagacaaagatctacaccagggccatgggctggtggcttgactttcccttgactctctttcaaggctgcactaattgccttgagcagaagggcacctgtggctgctgtgcagacccaggctgaggggaaggaggattgctcccatccatcacaaggcagagccagcacttccctcttacaaactcattctrtaatgctgcataagttattttaacatcttgttttctttttcacaaagggggggtgacagtgctgctggcctggtggaggtgtgctgaggacggagatgtgaggctgagatgtttgatatggagatgaggcagacaaggaccaggaagagactgaagagagtgagcagtgatggagtctgggkttcccagtgcagctctgcagtgggcagagcctgtggcacaggggaggcatcacacagatctgggaggagaaggaatgccatgtgctccatcagaaacccaacagtaaggcaacagggg

SEQ ID NO: 65549 - DNA, 600 bp, Chicken  19866894332789_2
attgccttgagcagaagggcacctgtggctgctgtgcagacccaggctgaggggaaggaggattgctcccatccatcacaaggcagagccagcacttccctcttacaaactcattctrtaatgctgcataagttattttaacatcttgttttctttttcacaaagggggggtgacagtgctgctggcctggtggaggtgtgctgaggacggagatgtgaggctgagatgtttgatatggagatgaggcagacaaggaccaggaagagactgaagagagtgagcagtgatggagtctgggkttcccagtgcagctctgcagtgggcagagcctgtggcacaggggaggcatcacacagatctgggaggagaaggaatgccatgtgctccatcagaaacccaacagtaaggcaacaggggcctcagatcccaggaccggggggacgctgatgtataagcctcaaatatttgtctcttgggcacatgccaacaggagagcttaagcacgccatgctggcacaagtgacaggattacgagcagtttcaatctgatgcagatggtcttcccatttgcttccttgtttaaacagcaatttggcaag

SEQ ID NO: 65550 - DNA, 600 bp, Chicken  19866894332790_1
gccaagtctccgtgtgatcacagagcttctctgccaaacttggagctcccaccgccttttgaagagcctttgaagtgtttgttccaattacacagagtattttgaaagttctgattcacattaactgttcggccatttacttgcaggtagtcataggtggcagctggacacatgcttgctgcagcagctgcaaactgcttttgaagatcaccatttccacagcaggcttcagagcttgcaacagctcaagcagcctcactggaggctgtccttaagaatctagcgtggtggagtctttgygygctctggctttgtaggattggttttgcctttcttgtggacaagggtagggagaaamcccagcagaggcagcagcagaccacactggtgtccatctaacactgtgttgtgttctgcctgctgcagtgaggagtgcctgctgatgcagaagagtgccagaccagtaatacatggccagctgcgtgctgttacactctgaagaagctgtgtgataggagaagraatataaatgacattcttcctcacttgcaccggcatcttatttcagagcatgtgcaacttgtgtcctggtgtagcagc

SEQ ID NO: 65551 - DNA, 600 bp, Chicken  19866894332790_2
caagtctccgtgtgatcacagagcttctctgccaaacttggagctcccaccgccttttgaagagcctttgaagtgtttgttccaattacacagagtattttgaaagttctgattcacattaactgttcggccatttacttgcaggtagtcataggtggcagctggacacatgcttgctgcagcagctgcaaactgcttttgaagatcaccatttccacagcaggcttcagagcttgcaacagctcaagcagcctcactggaggctgtccttaagaatctagcgtggtggagtctttgygygctctggctttgtaggattggttttgcctttcttgtggacaagggtagggagaaamcccagcagaggcagcagcagaccacactggtgtccatctaacactgtgttgtgttctgcctgctgcagtgaggagtgcctgctgatgcagaagagtgccagaccagtaatacatggccagctgcgtgctgttacactctgaagaagctgtgtgataggagaagraatataaatgacattcttcctcacttgcaccggcatcttatttcagagcatgtgcaacttgtgtcctggtgtagcagcag

SEQ ID NO: 65552 - DNA, 600 bp, Chicken  19866894332790_3
ttgaagagcctttgaagtgtttgttccaattacacagagtattttgaaagttctgattcacattaactgttcggccatttacttgcaggtagtcataggtggcagctggacacatgcttgctgcagcagctgcaaactgcttttgaagatcaccatttccacagcaggcttcagagcttgcaacagctcaagcagcctcactggaggctgtccttaagaatctagcgtggtggagtctttgygygctctggctttgtaggattggttttgcctttcttgtggacaagggtagggagaaamcccagcagaggcagcagcagaccacactggtgtccatctaacactgtgttgtgttctgcctgctgcagtgaggagtgcctgctgatgcagaagagtgccagaccagtaatacatggccagctgcgtgctgttacactctgaagaagctgtgtgataggagaagraatataaatgacattcttcctcacttgcaccggcatcttatttcagagcatgtgcaacttgtgtcctggtgtagcagcagatggtgcttctctttgtggaagggtctgactccaggcaaggaacaggggagatgtt

SEQ ID NO: 65553 - DNA, 600 bp, Chicken  19866894332790_4
caggcttcagagcttgcaacagctcaagcagcctcactggaggctgtccttaagaatctagcgtggtggagtctttgygygctctggctttgtaggattggttttgcctttcttgtggacaagggtagggagaaamcccagcagaggcagcagcagaccacactggtgtccatctaacactgtgttgtgttctgcctgctgcagtgaggagtgcctgctgatgcagaagagtgccagaccagtaatacatggccagctgcgtgctgttacactctgaagaagctgtgtgataggagaagraatataaatgacattcttcctcacttgcaccggcatcttatttcagagcatgtgcaacttgtgtcctggtgtagcagcagatggtgcttctctttgtggaagggtctgactccaggcaaggaacaggggagatgttcacccgagagcatttttgtgaaagttacttctgtagatgtcatgattcaatgctgttaaacattctaggcaacgattgtagaaaatgagtgggttttatacatctctgtccttatggtgaactactagaaagtttgtgagctgctctggggacacggagtgctt

SEQ ID NO: 65554 - DNA, 600 bp, Chicken  19866894332794_1
ttgattcagccccaaatgatttttcctttagtttttcaaatgggcaagcaaaacctctaaagcccctctttgcttataaaatcctaacgctcccttcagtgccccctacatgtaaaatatggttaatatttcccgtctaggagaagggctcagagaaccttggagatccccaactggaagaacccattgtgtcaatggagagcctcatctttctggccagctctgagagatgcagaggaggaacagggctcctgctacatggacacgttgtgcattgcgatggctgcacactgcctgtgrggctcggtgtgtttgatcctggcaacaggcacaacctgtacacaggctgcatgctgctgagtggtgttcgagctgcacacccgggctgcgagctgttttgaagcctcagcaagcttagcttttgattcgaggctgagcttttattgccacgagctgggggaggccttggatggaggggagcacttggcaggtgctaatcttcagcctttgacttgtgccccgtggggtgcaaagcgtagagaattgcaaagtcaagacctattgtgatgtgcacctctcgccactggtgcaacctctctt

SEQ ID NO: 65555 - DNA, 600 bp, Chicken  19866894332798_1
tttccccgccatgacgggaccgaatctgatcacaaagtcaatgggaatgggatgggtaatgcttcttttagaataagcaccaagcgccaggatacattttctcgctattgaaacgggcggcagaaggcatttttcatacgtttgcacaatcctccatcgtcccccagtaaaaacgcgctggctttcttgctgttattcgtcatttcgcctcagcagaagaatgacaggcatctgtgaggaaacaacgccgaaaagttgatagaatcccgagttcagcaaactctgcaattagcagttgcsagaacacgctgaaagcaaacgggagctttacggggctttagctttgtcacacagacatagttagggaacgtgctcgttggtatgcgtgcctcatttcttattctttttcgattttattttgaaaagaagtctatttttaactaggtaaaaacaaacaaacaaaaaaagaacaaccaacctggagaaagggaaagagaaaattagcagtgtgcgtgtgcttaagccctcagatcgttatcgttcacggttcctgtcatcccttttgttgctttcgtcgagtttttgacgtgctcgctccga

SEQ ID NO: 65556 - DNA, 554 bp, Chicken  19866894332798_2
acaaaaaaagaacaaccaacctggagaaagggaaagagaaaattagcagtgtgcgtgtgcttaagccctcagatcgttatcgttcacggttcctgtcatcccttttgttgctttcgtcgagtttttgacgtgctcgctccgaaactcgagcagccccggggaatgggagccactgctgacaaccgcaaggcgctcccgtggagacgccccgtgatgcggctgcccgggctcatggggtctcagccggagccccacgccgtaccgagccgggacgagccgagtcctcatcgcgttagatckcccgataactttcattgtgttttcctgtccccccccctcccttccccccttttcatgggcgccgatcaattattcagaagtacatttatctcccctgcaatatggagaattcatattcatatctctgttttagtggcctgacactgattaatgtaatatgcaccgcggctccgagcgtagaccctctctatgaatcatgcactataaagtttcaatcgtccttgcggatgagacagactattacaaagagtgcg

SEQ ID NO: 65557 - DNA, 600 bp, Chicken  19866894332801_1
taatcagacttatgtcggctttgatccagagagcttttttttctctttttccctgagtcactgacattggattttttgacttagaccaggcttatatttgtggcatgtatagtaactcttgacaacttcttaaatgtcgttttgtatttgtctagtataccttttcttttcctcctggctcctttttttattttattatttattttttttaaatttttcctctggtgttttatttcttaactggcctttatatatgcttataatgagttgcaatatctgggtgtggccatgaactgtgargaatggaaagcaatctttgctcgttgcacttatcctatgtacttgtcacaaagcagcaaacctctctgacactggtggtgtctcttcagggctggacattatgttgtacctccccagctgtgtgcgttctctttttgagctgctgctctagcaagtgcagtgtgtgttttgtcaaaccactagcatttgtttgtgctaaaacaaaccaaataaaaacaacaaacaggtttagagaaaacctctgtacttggctcttctgcacttcctctaggtgttccacaggagggatggaasctatga

SEQ ID NO: 65558 - DNA, 600 bp, Chicken  19866894332801_2
tgtgargaatggaaagcaatctttgctcgttgcacttatcctatgtacttgtcacaaagcagcaaacctctctgacactggtggtgtctcttcagggctggacattatgttgtacctccccagctgtgtgcgttctctttttgagctgctgctctagcaagtgcagtgtgtgttttgtcaaaccactagcatttgtttgtgctaaaacaaaccaaataaaaacaacaaacaggtttagagaaaacctctgtacttggctcttctgcacttcctctaggtgttccacaggagggatggaasctatgagctgtctgtcatgtttatmcttagctcgcaaaccatataaaaaagaagagactttattttcagtgtgactgaaggaggccatgaaatggttatacatggcttgtagtcaagattgagaataactgtttcttataaaaaggcaggtgtaatttacaacatctgtatacaaaatctgaagccttatcttccattatgtgcattggtgctattctttgtaagtgctgatgagccctatggcattcacctttgttttcctccatgctgccataggagaacattagtgatacccttcct

SEQ ID NO: 65559 - DNA, 600 bp, Chicken  19866894332801_3
ctcgttgcacttatcctatgtacttgtcacaaagcagcaaacctctctgacactggtggtgtctcttcagggctggacattatgttgtacctccccagctgtgtgcgttctctttttgagctgctgctctagcaagtgcagtgtgtgttttgtcaaaccactagcatttgtttgtgctaaaacaaaccaaataaaaacaacaaacaggtttagagaaaacctctgtacttggctcttctgcacttcctctaggtgttccacaggagggatggaasctatgagctgtctgtcatgtttatmcttagctcgcaaaccatataaaaaagaagagactttattttcagtgtgactgaaggaggccatgaaatggttatacatggcttgtagtcaagattgagaataactgtttcttataaaaaggcaggtgtaatttacaacatctgtatacaaaatctgaagccttatcttccattatgtgcattggtgctattctttgtaagtgctgatgagccctatggcattcacctttgttttcctccatgctgccataggagaacattagtgatacccttcctgagcaactgcttattacacttactg

SEQ ID NO: 65560 - DNA, 600 bp, Chicken  19866894332809_1
cagtgacgggacggggaaggacagctggggggggagcagaacggagccatcagctccgctgccactccggagggaaagccgttgggatttccgagcgcgagttgtgctctgtgtgtgctgctgcatctgctgagctgcagcgatcagtggtgcgaccccgcgggacgcagaggggttgggaactgcgcaggtgttttctgcacagagtaagggcacggagtggcaggagcagacttcaggcccagagctgaacaactcaaagccagtgtgttagtggctgtgctgaacagtatagctgtkttagacacagacctcagcaagtcttctttcataggattatgattctctcttcttaggagcgtggctgtacgcaccatttatttgtaatatcagctgtagcatatcacacagcaggctgcatttataagaaactgggcgttatgctcccagggagaagtgttcctcgtagtcccaatgcatctccgtasggtgttgggaggagcgcagggctgagaactctgggtccgggcaccgctgctcggtgaaaacaggttattacttgtttctttgtttttcacgcgtacaacacagcacctctgc

SEQ ID NO: 65561 - DNA, 600 bp, Chicken  19866894332809_2
aggtgttttctgcacagagtaagggcacggagtggcaggagcagacttcaggcccagagctgaacaactcaaagccagtgtgttagtggctgtgctgaacagtatagctgtkttagacacagacctcagcaagtcttctttcataggattatgattctctcttcttaggagcgtggctgtacgcaccatttatttgtaatatcagctgtagcatatcacacagcaggctgcatttataagaaactgggcgttatgctcccagggagaagtgttcctcgtagtcccaatgcatctccgtasggtgttgggaggagcgcagggctgagaactctgggtccgggcaccgctgctcggtgaaaacaggttattacttgtttctttgtttttcacgcgtacaacacagcacctctgcatagtgagtttccaactcgtgttgctaacacaaccgtcccacagccccaccgaacggccgccagagggaccccgctccgcccggtcacgcaccgcccggccacgcgcccatcacaccccccccgggccctccgtctcgcggcgctcaccgcggatgcccggcggacaggcgcacacgtagccctcggg

SEQ ID NO: 65562 - DNA, 600 bp, Chicken  19866894332812_1
ttaggagtaaaacagctcagcttgctttcctccagccatgcttcaagagttgtaataaatgttctattaaacgttttcctggggcataagccattctgctgttaaatgtcttacctaaacaggtaagtgcagtgttgctaattggtgatttcatggctgtgggtcttactgtggtacacatctgtatttcagaaactctgcagcgatgctcaggtgcgagtgtttgggaagtgttgccagctgaagcctggaggagatagctcttcttctttggatagttcaatcaattcatcctcctcrttctccgatgcaaaagaacaatgcccaaaatatcaggtgagtcttcccttcccttgtttggtgtaactgtcaaatatatacagcagttgaagtaytgaatgttttaaaacacttgaaattaaatgctggtggtggagagaagtttctaatcaaaaccagactttgggtctgactgaatcatgtctaattctgtagctttgagtctgtagtttaaaaccaaccagctggggctctcaggatgggtgttgagtagcagaagcttctccaaggcatttgttctgtcttatgacctggtgataa

SEQ ID NO: 65563 - DNA, 600 bp, Chicken  19866894332812_2
ctgctgttaaatgtcttacctaaacaggtaagtgcagtgttgctaattggtgatttcatggctgtgggtcttactgtggtacacatctgtatttcagaaactctgcagcgatgctcaggtgcgagtgtttgggaagtgttgccagctgaagcctggaggagatagctcttcttctttggatagttcaatcaattcatcctcctcrttctccgatgcaaaagaacaatgcccaaaatatcaggtgagtcttcccttcccttgtttggtgtaactgtcaaatatatacagcagttgaagtaytgaatgttttaaaacacttgaaattaaatgctggtggtggagagaagtttctaatcaaaaccagactttgggtctgactgaatcatgtctaattctgtagctttgagtctgtagtttaaaaccaaccagctggggctctcaggatgggtgttgagtagcagaagcttctccaaggcatttgttctgtcttatgacctggtgataacactcgttcagtatgatcacacttggcacacatatcctatcttggtaaaaacaaggtagttcgttttacttagtacctaaatgccagggaagcac

SEQ ID NO: 65564 - DNA, 600 bp, Chicken  19866894332835_1
tacccattttggtgatgctgagtttgagcaatgcttgtttttttttgttgtttttttttttcctgtttccttttcatcttatatatttttgtcttatttttattactggtagcacttgcatttaccaaagcatttcttttaattctgtcttttcctttgctttcttcctctcttcggtatttattgctgctggtgcaggtttcaaccaaagcagggacgtaacaaggagagatgtcaaacactgagtgttacaatatcaagtgcacatgaagggaatcatgccacaaagactttgtggayttttttttatgttcctgtttacttggtcattctcaaagagagaaaaacaaaagtttgggcttttcctggagtggagtttttgtgcatcatgccaagttaccttccctctcaaaattaaatgacccaaatagtgagacttacttatagcactgcttgagagactattcagcaatctacttcatckccctggtgaagaaatatggaagtatttagaagtgttattcttgtgctggacccatatrttccaccttaaatatgaaaccgctgtccctgtaaccctttcttccaaattatgtaatt

SEQ ID NO: 65565 - DNA, 600 bp, Chicken  19866894332835_2
tgctgctggtgcaggtttcaaccaaagcagggacgtaacaaggagagatgtcaaacactgagtgttacaatatcaagtgcacatgaagggaatcatgccacaaagactttgtggatttttttttatgttcctgtttacttggtcattctcaaagagagaaaaacaaaagtttgggcttttcctggagtggagtttttgtgcatcatgccaagttaccttccctctcaaaattaaatgacccaaatagtgagacttacttatagcactgcttgagagactattcagcaatctacttcatckccctggtgaagaaatatggaagtatttagaagtgttattcttgtgctggacccatatrttccaccttaaatatgaaaccgctgtccctgtaaccctttcttccaaattatgtaatttcagtttctcatggttgatagcaccaggaagatacttcattgctacatcttgctttccatgcgcacggtcagctccccattcgtttcacacaatccaatcattctgatgttgctttatagcagccwtccaatttatattcacttttcaagtaagtgtagacaagtgagccctttgaagatgtga

SEQ ID NO: 65566 - DNA, 600 bp, Chicken  19866894332835_3
tgagtgttacaatatcaagtgcacatgaagggaatcatgccacaaagactttgtggatttttttttatgttcctgtttacttggtcattctcaaagagagaaaaacaaaagtttgggcttttcctggagtggagtttttgtgcatcatgccaagttaccttccctctcaaaattaaatgacccaaatagtgagacttacttatagcactgcttgagagactattcagcaatctacttcatckccctggtgaagaaatatggaagtatttagaagtgttattcttgtgctggacccatatrttccaccttaaatatgaaaccgctgtccctgtaaccctttcttccaaattatgtaatttcagtttctcatggttgatagcaccaggaagatacttcattgctacatcttgctttccatgcgcacggtcagctccccattcgtttcacacaatccaatcattctgatgttgctttatagcagccwtccaatttatattcacttttcaagtaagtgtagacaagtgagccctttgaagatgtgaggtaactgcttacctcttcttaaggcaaatacaaacacattgcactgggarcgtcttt

SEQ ID NO: 65567 - DNA, 600 bp, Chicken  19866894332835_4
aatagtgagacttacttatagcactgcttgagagactattcagcaatctacttcatckccctggtgaagaaatatggaagtatttagaagtgttattcttgtgctggacccatatrttccaccttaaatatgaaaccgctgtccctgtaaccctttcttccaaattatgtaatttcagtttctcatggttgatagcaccaggaagatacttcattgctacatcttgctttccatgcgcacggtcagctccccattcgtttcacacaatccaatcattctgatgttgctttatagcagccwtccaatttatattcacttttcaagtaagtgtagacaagtgagccctttgaagatgtgaggtaactgcttacctcttcttaaggcaaatacaaacacattgcactgggarcgtctttggtgttcagagacatgtataatacaattcagtctagtattacttagacaaaagtatagacaatggaaggggaaccggatattaagttctgaagcaggcagtaacagccactgtagttcccatgctcctttgtactcatttctgagcattgattggatgtattaaaattattttacccatccaag

SEQ ID NO: 65568 - DNA, 600 bp, Chicken  19866894332835_5
ccatatrttccaccttaaatatgaaaccgctgtccctgtaaccctttcttccaaattatgtaatttcagtttctcatggttgatagcaccaggaagatacttcattgctacatcttgctttccatgcgcacggtcagctccccattcgtttcacacaatccaatcattctgatgttgctttatagcagccwtccaatttatattcacttttcaagtaagtgtagacaagtgagccctttgaagatgtgaggtaactgcttacctcttcttaaggcaaatacaaacacattgcactgggarcgtctttggtgttcagagacatgtataatacaattcagtctagtattacttagacaaaagtatagacaatggaaggggaaccggatattaagttctgaagcaggcagtaacagccactgtagttcccatgctcctttgtactcatttctgagcattgattggatgtattaaaattattttacccatccaagcattgctacactatttctactcctggcttacatgggaattctatgttttgttcgtctggctcagttaaggtggactgttgtaaaatgtaacttgaccaataatgcagac

SEQ ID NO: 65569 - DNA, 600 bp, Chicken  19866894332840_1
gactgcagtcaatgtgatgttgctttgttttgttgttttggagggtggtgtttgttttctaaccctaacaaatggaagcccagactaaactgtttattctagcagcagaactttcctgtctacagaaaggcaatgttactatttgacaggaaaggaactttttttttaggctatttgtgaaagttgaggtcatcctggctgcagttcgggtggcttctacaaatgttatgttgcaaacagttaaatatagtagctggatattggatacttctggtagtaccagtggaaaatagaatacarcttgacaacactgcatttttgttgtttaaagcaaagagagctttatttygtgttgccacaaacatgcagtattgtttttaacagttcttcgcctgtaataacaaggaaactgtcagaatagttcactgcatgcataggtttttagcacagtattaatggtattagctgtaattaattacctgcttctctcactttaggaaaacgttaaagaagtgtaaaacccttcttgcattttctgcttttcttctcaactcttctggaaatgtctgtgcatctcctaacaacgcttttgttttgcaa

SEQ ID NO: 65570 - DNA, 600 bp, Chicken  19866894332840_2
gtttgttttctaaccctaacaaatggaagcccagactaaactgtttattctagcagcagaactttcctgtctacagaaaggcaatgttactatttgacaggaaaggaactttttttttaggctatttgtgaaagttgaggtcatcctggctgcagttcgggtggcttctacaaatgttatgttgcaaacagttaaatatagtagctggatattggatacttctggtagtaccagtggaaaatagaatacarcttgacaacactgcatttttgttgtttaaagcaaagagagctttatttygtgttgccacaaacatgcagtattgtttttaacagttcttcgcctgtaataacaaggaaactgtcagaatagttcactgcatgcataggtttttagcacagtattaatggtattagctgtaattaattacctgcttctctcactttaggaaaacgttaaagaagtgtaaaacccttcttgcattttctgcttttcttctcaactcttctggaaatgtctgtgcatctcctaacaacgcttttgttttgcaaaacattacctaatgtctctttaatagcaaatttgcagctttgctacatc

SEQ ID NO: 65571 - DNA, 599 bp, Chicken  19866894332841_1
  misc_feature (1)..(170): n is any nucleotide
nnnnnnnnnnnnnnnnnnnnnnnnnnnnnnnnnnnnnnnnnnnnnnnnnnnnnnnnnnnnnnnnnnnnnnnnnnnnnnnnnnnnnnnnnnnnnnnnnnnnnnnnnnnnnnnnnnnnnnnnnnnnnnnnnnnnnnnnnnnnnnnnnnnnnnnnnnnnnnnnnnnnnnnnnnccatctctcccatttaccccaaccctcataagctccccatccaaccatgtatttgccccgtgtcatccatgttgacaccttaactcgttgttttagattttgtttgctctacatcttgttcttgtgtccraggagctggctgaaggcagacttatatagagagtagaatgctgatctgcttctcaaggagtagttgaggtggttgtataggaacagagctgctggtttgtggcacrtytcaccgtgctcttgtgggatgctgtatctctctcttttaaaggtgagaggattcccaaaattagtgactaagaatttttgtggaccaaactcaaaggaaaatggagaaccagtgaaagtgagagagaaatttaacataagtccaggtcaagcagcagcaagtgctaatacattactgagtacattactgaa

SEQ ID NO: 65572 - DNA, 599 bp, Chicken  19866894332841_2
  misc_feature (1)..(64): n is any nucleotide
nnnnnnnnnnnnnnnnnnnnnnnnnnnnnnnnnnnnnnnnnnnnnnnnnnnnnnnnnnnnnnnnccatctctcccatttaccccaaccctcataagctccccatccaaccatgtatttgccccgtgtcatccatgttgacaccttaactcgttgttttagattttgtttgctctacatcttgttcttgtgtccraggagctggctgaaggcagacttatatagagagtagaatgctgatctgcttctcaaggagtagttgaggtggttgtataggaacagagctgctggtttgtggcacrtytcaccgtgctcttgtgggatgctgtatctctctcttttaaaggtgagaggattcccaaaattagtgactaagaatttttgtggaccaaactcaaaggaaaatggagaaccagtgaaagtgagagagaaatttaacataagtccaggtcaagcagcagcaagtgctaatacattactgagtacattactgaatgcgggtgtgctatgtgtttaaamtcaccaaartaaggacaaccaaagtcatcgctgatctkcttgcttaaaccacagctgcagtggtaagagtggtgtggttcat

SEQ ID NO: 65573 - DNA, 599 bp, Chicken  19866894332841_3
  misc_feature (1)..(62): n is any nucleotide
nnnnnnnnnnnnnnnnnnnnnnnnnnnnnnnnnnnnnnnnnnnnnnnnnnnnnnnnnnnnnnccatctctcccatttaccccaaccctcataagctccccatccaaccatgtatttgccccgtgtcatccatgttgacaccttaactcgttgttttagattttgtttgctctacatcttgttcttgtgtccraggagctggctgaaggcagacttatatagagagtagaatgctgatctgcttctcaaggagtagttgaggtggttgtataggaacagagctgctggtttgtggcacrtytcaccgtgctcttgtgggatgctgtatctctctcttttaaaggtgagaggattcccaaaattagtgactaagaatttttgtggaccaaactcaaaggaaaatggagaaccagtgaaagtgagagagaaatttaacataagtccaggtcaagcagcagcaagtgctaatacattactgagtacattactgaatgcgggtgtgctatgtgtttaaamtcaccaaartaaggacaaccaaagtcatcgctgatctkcttgcttaaaccacagctgcagtggtaagagtggtgtggttcatgg

SEQ ID NO: 65574 - DNA, 563 bp, Chicken  19866894332841_4
atatagagagtagaatgctgatctgcttctcaaggagtagttgaggtggttgtataggaacagagctgctggtttgtggcacrtytcaccgtgctcttgtgggatgctgtatctctctcttttaaaggtgagaggattcccaaaattagtgactaagaatttttgtggaccaaactcaaaggaaaatggagaaccagtgaaagtgagagagaaatttaacataagtccaggtcaagcagcagcaagtgctaatacattactgagtacattactgaatgcgggtgtgctatgtgtttaaamtcaccaaartaaggacaaccaaagtcatcgctgatctkcttgcttaaaccacagctgcagtggtaagagtggtgtggttcatggataggggtctacaaaagcattcttcagtgctgcatctaagctgttacaagtgaattggggctatttctgcttgatttgcatgtgtggttaagtggtgcctgcatagagatagtgaactagtggcagattgggttcatcaaggggaggcatctactcagcagttaagtttggtctgttat

SEQ ID NO: 65575 - DNA, 554 bp, Chicken  19866894332841_5
gtagaatgctgatctgcttctcaaggagtagttgaggtggttgtataggaacagagctgctggtttgtggcacrtytcaccgtgctcttgtgggatgctgtatctctctcttttaaaggtgagaggattcccaaaattagtgactaagaatttttgtggaccaaactcaaaggaaaatggagaaccagtgaaagtgagagagaaatttaacataagtccaggtcaagcagcagcaagtgctaatacattactgagtacattactgaatgcgggtgtgctatgtgtttaaamtcaccaaartaaggacaaccaaagtcatcgctgatctkcttgcttaaaccacagctgcagtggtaagagtggtgtggttcatggataggggtctacaaaagcattcttcagtgctgcatctaagctgttacaagtgaattggggctatttctgcttgatttgcatgtgtggttaagtggtgcctgcatagagatagtgaactagtggcagattgggttcatcaaggggaggcatctactcagcagttaagtttggtctgttat

SEQ ID NO: 65576 - DNA, 525 bp, Chicken  19866894332841_6
agttgaggtggttgtataggaacagagctgctggtttgtggcacrtytcaccgtgctcttgtgggatgctgtatctctctcttttaaaggtgagaggattcccaaaattagtgactaagaatttttgtggaccaaactcaaaggaaaatggagaaccagtgaaagtgagagagaaatttaacataagtccaggtcaagcagcagcaagtgctaatacattactgagtacattactgaatgcgggtgtgctatgtgtttaaamtcaccaaartaaggacaaccaaagtcatcgctgatctkcttgcttaaaccacagctgcagtggtaagagtggtgtggttcatggataggggtctacaaaagcattcttcagtgctgcatctaagctgttacaagtgaattggggctatttctgcttgatttgcatgtgtggttaagtggtgcctgcatagagatagtgaactagtggcagattgggttcatcaaggggaggcatctactcagcagttaagtttggtctgttat

SEQ ID NO: 65577 - DNA, 600 bp, Chicken  19866894332843_1
tgcgctgggactgctgggactgccccaacaattgggctcctgcaatgtgtggggcactgggggtgcagagagatggaaaaagcagaaggcaaatacccacactgcgaggtaggggcagctgaaagtcattgctcctggccagtcctgaaggactgcttggaagtcatgcaggctctgcgttgcgttttgctgggggaagggtttggtgctggggaaactcggtgtgatttccgtattgctgaagcagcccaggcaggtttgctcagacctctgtgttgctcagtgttgcttttgaagagwcwtagtcttctacgctttccgtttggaattttcctttttccctcccatttctacctctccctgttttttttttttcctctcttggcttatgaatgcactctttgatagcaggcattcagccccaggccgcagcatgtctgcatggcgcagcttcgccttttggggtggctgcaaaccccactgcagaccacacgtctcccattggcacagcgcaggggggtccccctgtaggacccctcctctcccatcccatcccagctttgggactttgggtttgggactctgcggcacctctcagct

SEQ ID NO: 65578 - DNA, 600 bp, Chicken  19866894332843_2
cgctgggactgctgggactgccccaacaattgggctcctgcaatgtgtggggcactgggggtgcagagagatggaaaaagcagaaggcaaatacccacactgcgaggtaggggcagctgaaagtcattgctcctggccagtcctgaaggactgcttggaagtcatgcaggctctgcgttgcgttttgctgggggaagggtttggtgctggggaaactcggtgtgatttccgtattgctgaagcagcccaggcaggtttgctcagacctctgtgttgctcagtgttgcttttgaagagwcwtagtcttctacgctttccgtttggaattttcctttttccctcccatttctacctctccctgttttttttttttcctctcttggcttatgaatgcactctttgatagcaggcattcagccccaggccgcagcatgtctgcatggcgcagcttcgccttttggggtggctgcaaaccccactgcagaccacacgtctcccattggcacagcgcaggggggtccccctgtaggacccctcctctcccatcccatcccagctttgggactttgggtttgggactctgcggcacctctcagctca

SEQ ID NO: 65579 - DNA, 600 bp, Chicken  19866894332843_3
gcagagagatggaaaaagcagaaggcaaatacccacactgcgaggtaggggcagctgaaagtcattgctcctggccagtcctgaaggactgcttggaagtcatgcaggctctgcgttgcgttttgctgggggaagggtttggtgctggggaaactcggtgtgatttccgtattgctgaagcagcccaggcaggtttgctcagacctctgtgttgctcagtgttgcttttgaagagwcwtagtcttctacgctttccgtttggaattttcctttttccctcccatttctacctctccctgwtttttttttttcctctcttggcttatgaatgcactctttgatagcaggcattcagccccaggccgcagcatgtctgcatggcgcagcttcgccttttggggtggctgcaaaccccactgcagaccacacgtctcccattggcacagcgcaggggggtccccctgtaggacccctcctctcccatcccatcccagctttgggactttgggtttgggactctgcggcacctctcagctcagcagcggttatgatggaggtggtgaaccacaaacagccgtgtaacctgggaggggaacaaaa

SEQ ID NO: 65580 - DNA, 600 bp, Chicken  19866894332851_1
agtgctatcagaaaacaaatgtgatgagtttgcatttttgaacagcagccaaaagaccaaaatgaactagggctgtttacagaggataggcatcaaactagacatcaggcgaccagatctgtgtggtctgtctctgcactgccaagtcatttgtcataaatatatttcctctcccttctttagaactgaagcaaaatgtttttactctgaataagtttgtattggataaagtttatttgtaactcctcaggtcaactagcagtaccagttagaatgtgctacttggctatatttttcatwaaaaaaaaaaaaaaaaaatcagataagtagaaggacagatttgatagcaagtccgtcacccatgctcaagtggttatctagatttggcatcattttcagctcttggctataatcctttccaaaagaaaaactgtctctgtaaatcatacattactttgagtgcaagcttatcatttttaattattgttaacttctggtttcttctgagtcaacaggacatcttctagcatggtagagcagttctactaccaccaagaaaaagaaaccttcaagcctctttcttaatatgtatcccacaag

SEQ ID NO: 65581 - DNA, 600 bp, Chicken  19866894332851_2
gtgctatcagaaaacaaatgtgatgagtttgcatttttgaacagcagccaaaagaccaaaatgaactagggctgtttacagaggataggcatcaaactagacatcaggcgaccagatctgtgtggtctgtctctgcactgccaagtcatttgtcataaatatatttcctctcccttctttagaactgaagcaaaatgtttttactctgaataagtttgtattggataaagtttatttgtaactcctcaggtcaactagcagtaccagttagaatgtgctacttggctatatttttcatawaaaaaaaaaaaaaaaaatcagataagtagaaggacagatttgatagcaagtccgtcacccatgctcaagtggttatctagatttggcatcattttcagctcttggctataatcctttccaaaagaaaaactgtctctgtaaatcatacattactttgagtgcaagcttatcatttttaattattgttaacttctggtttcttctgagtcaacaggacatcttctagcatggtagagcagttctactaccaccaagaaaaagaaaccttcaagcctctttcttaatatgtatcccacaagc

SEQ ID NO: 65582 - DNA, 600 bp, Chicken  19866894332851_3
tgctatcagaaaacaaatgtgatgagtttgcatttttgaacagcagccaaaagaccaaaatgaactagggctgtttacagaggataggcatcaaactagacatcaggcgaccagatctgtgtggtctgtctctgcactgccaagtcatttgtcataaatatatttcctctcccttctttagaactgaagcaaaatgtttttactctgaataagtttgtattggataaagtttatttgtaactcctcaggtcaactagcagtaccagttagaatgtgctacttggctatatttttcataawaaaaaaaaaaaaaaaatcagataagtagaaggacagatttgatagcaagtccgtcacccatgctcaagtggttatctagatttggcatcattttcagctcttggctataatcctttccaaaagaaaaactgtctctgtaaatcatacattactttgagtgcaagcttatcatttttaattattgttaacttctggtttcttctgagtcaacaggacatcttctagcatggtagagcagttctactaccaccaagaaaaagaaaccttcaagcctctttcttaatatgtatcccacaagcg

SEQ ID NO: 65583 - DNA, 599 bp, Chicken  19866894332857_1
  misc_feature (1)..(135): n is any nucleotide
nnnnnnnnnnnnnnnnnnnnnnnnnnnnnnnnnnnnnnnnnnnnnnnnnnnnnnnnnnnnnnnnnnnnnnnnnnnnnnnnnnnnnnnnnnnnnnnnnnnnnnnnnnnnnnnnnnnnnnnnnnnnnnnnnnnnnnnccttacgtattgttgtttgaaatggatggatggacgtagctaaaataggagttgaagaacacatcttgctaaaggttctaatggtgttatgagaagcttgaactatgctttaaactaaaataaagcctgctagtatttaatcagtaaaaatactaacaaatttcrgaagataaatatcctaattccttcagtataaggacttttgtatttttaatgtacataatcttagatyatgtatagttctgatatacatgatgtaacatctgttttgaggatgaatgtagcttggaaataactcttgatttttcttgaatactcttatattgctttacgggctttgttgtattggattaaaacttgtggagttaagagtataatttcagatacttctctacatcccttctattttacagcaagttcaagtactgttacacctggarcagaatccttacttagatgacgag

SEQ ID NO: 65584 - DNA, 599 bp, Chicken  19866894332857_2
  misc_feature (1)..(68): n is any nucleotide
nnnnnnnnnnnnnnnnnnnnnnnnnnnnnnnnnnnnnnnnnnnnnnnnnnnnnnnnnnnnnnnnnnnnccttacgtattgttgtttgaaatggatggatggacgtagctaaaataggagttgaagaacacatcttgctaaaggttctaatggtgttatgagaagcttgaactatgctttaaactaaaataaagcctgctagtatttaatcagtaaaaatactaacaaatttcrgaagataaatatcctaattccttcagtataaggacttttgtatttttaatgtacataatcttagatyatgtatagttctgatatacatgatgtaacatctgttttgaggatgaatgtagcttggaaataactcttgatttttcttgaatactcttatattgctttacgggctttgttgtattggattaaaacttgtggagttaagagtataatttcagatacttctctacatcccttctattttacagcaagttcaagtactgttacacctggarcagaatccttacttagatgacgagaatgaaagattaaattgcttttcaacaatattaagcgaataaactgtagagtaataagcatctgttt

SEQ ID NO: 65585 - DNA, 600 bp, Chicken  19866894332857_3
tcagtaaaaatactaacaaatttcrgaagataaatatcctaattccttcagtataaggacttttgtatttttaatgtacataatcttagatyatgtatagttctgatatacatgatgtaacatctgttttgaggatgaatgtagcttggaaataactcttgatttttcttgaatactcttatattgctttacgggctttgttgtattggattaaaacttgtggagttaagagtataatttcagatacttctctacatcccttctattttacagcaagttcaagtactgttacacctggarcagaatccttacttagatgacgagaatgaaagattaaattgcttttcaacaatattaagcgaataaactgtagagtaataagcatctgtttaattctttagttgggcaccttggcatttctcattcctagagatcagtccttgaaaatctgcagcataagaatgagttttttctctccaagacagtaacgagttggttgcgttgattggaataatcttgcactgaagcaatgccacatgcaacactgggaaatgtattaaatgactgcactgtcactaatgctctaactatatacacact

SEQ ID NO: 65586 - DNA, 600 bp, Chicken  19866894332876_1
cctgaatatcctaacagatgtttttatttctagatttttttggccaataaatgccatgtgtatggtacatactagttatgtcttcttttcccatcacaataagaagttattatttcacagcttttgaatttgtcagtgcaagctgattacttctgctcatttccctttctgtaggtatgactgtaagaagaaattacattctaaacattaaaaatacaaaatgaattctctgctttgtcttctgtgtctgctatagaaggttgcatcatttttaagagtgtgtctaatatttcacttggrgaagggaaacttgggraactagcagtcctcaccagatgaccacagagacaagtggtacacatgactttgtcatttgccatacttcaaagtatgcatgccaatatttttattatcaacattgacatgactttctatacttcatgatagcttgatagtctcatggcgatatactcttttcgactgtttatgatagtgattgtattcactctcacataggctaaaactaaattgttttacagtgagttttgattcctcctcagtgtgtgtgcttcaagatcttaaatggatcggttacagggg

SEQ ID NO: 65587 - DNA, 600 bp, Chicken  19866894332876_2
gatgtttttatttctagatttttttggccaataaatgccatgtgtatggtacatactagttatgtcttcttttcccatcacaataagaagttattatttcacagcttttgaatttgtcagtgcaagctgattacttctgctcatttccctttctgtaggtatgactgtaagaagaaattacattctaaacattaaaaatacaaaatgaattctctgctttgtcttctgtgtctgctatagaaggttgcatcatttttaagagtgtgtctaatatttcacttggrgaagggaaacttgggraactagcagtcctcaccagatgaccacagagacaagtggtacacatgactttgtcatttgccatacttcaaagtatgcatgccaatatttttattatcaacattgacatgactttctatacttcatgatagcttgatagtctcatggcgatatactcttttcgactgtttatgatagtgattgtattcactctcacataggctaaaactaaattgttttacagtgagttttgattcctcctcagtgtgtgtgcttcaagatcttaaatggatcggttacaggggaagagggatgtaaaca

SEQ ID NO: 65588 - DNA, 600 bp, Chicken  19866894332876_3
gtggtacacatgactttgtcatttgccatacttcaaagtatgcatgccaatatttttattatcaacattgacatgactttctatacttcatgatagcttgatagtctcatggcgatatactcttttcgactgtttatgatagtgattgtattcactctcacataggctaaaactaaattgttttacagtgagttttgattcctcctcagtgtgtgtgcttcaagatcttaaatggatcggttacaggggaagagggatgtaaacaaatgtagaccttccttggattagaaatcagggtayatgtaatgtcttttttcattgagcggtatgcgaaatatttaaggaactcaaatgatgaaacacagggaaatcaacatgacattgtacaactgcatttttgaaggaggagaagtttgtattaaaactgtttgttaactgttgttaatcaaacacttcaaagtcctgatatacttaggtcctttgtagcaatttctaatgatataaattcatccctttccctatggaatttgtgtcttattcatttctcaggatacagtactgtcagaggaggaaacaaggcagtataggacaggggatgag

SEQ ID NO: 65589 - DNA, 600 bp, Chicken  19866894332880_1
caacatcagtccttgcatttgttgcgcctacggggacagtcagcagtacaggcactgagatcagtgtagtcctttacattttttatatagggtttcagcaagggtgaattaggtctgatggtgataccagtaggttcagccttacttaaaaagtaaccccgaagagaaatgggactagtgaactaccaggggcaccagagctcgtctgagctggtgtggaaaggtggcacagctcgctgcctctgctcttggaaacaatgcctgctggtagagcagaagacgaaatgtgtaatgtaggaktgctctgcgagcagtgagctctgcccctttgagccctggggaataccttgctttgggaagagataaccggggaatttccccagcgcaatctgaggaaggaggcagygctccagcgggagcaaaggtgctgatctgagatgggaggtgactgcagtgacatggggcagaggtggctgcagtgacatggggcagaggtggcagcccatagcagggctgcagaatacagcagagccagagatttgtgggacagaacgaattgctgggcaggaggtgggcagatggagagagatcttggaggag

SEQ ID NO: 65590 - DNA, 600 bp, Chicken  19866894332880_2
aattaggtctgatggtgataccagtaggttcagccttacttaaaaagtaaccccgaagagaaatgggactagtgaactaccaggggcaccagagctcgtctgagctggtgtggaaaggtggcacagctcgctgcctctgctcttggaaacaatgcctgctggtagagcagaagacgaaatgtgtaatgtaggaktgctctgcgagcagtgagctctgcccctttgagccctggggaataccttgctttgggaagagataaccggggaatttccccagcgcaatctgaggaaggaggcagygctccagcgggagcaaaggtgctgatctgagatgggaggtgactgcagtgacatggggcagaggtggctgcagtgacatggggcagaggtggcagcccatagcagggctgcagaatacagcagagccagagatttgtgggacagaacgaattgctgggcaggaggtgggcagatggagagagatcttggaggaggtcccaaaattgccctgtttagtacatttgggagagtcatcgctcttctcatcacgcatatgttttgggagtgggccaggggaggtctcaacagaatcagaatcac

SEQ ID NO: 65591 - DNA, 599 bp, Chicken  19866894332889_1
  misc_feature (1)..(107): n is any nucleotide
nnnnnnnnnnnnnnnnnnnnnnnnnnnnnnnnnnnnnnnnnnnnnnnnnnnnnnnnnnnnnnnnnnnnnnnnnnnnnnnnnnnnnnnnnnnnnnnnnnnnnnnnnnngctgcactgtgctgagttcagagtgtgtttactcttgtttctttgtagaaattcatatgcaagaatttaatacgatcgaacttatttcttttaagtgaataagttgcttccactgttcttgcctaaactgaagcacgggaagaaagtggattgcttgatacggatggaaacagggaggaaatcaggagtttaygtttccatgtggtggtcactaagcttgggctcacatttaacgatccagtttgtggatagcccaggagcctgcatggggttgtaccggggtttgtcgcagtggtgctgcacagaaggatgtgaatgctgtgctcagcccgctagaggggggtgtgctctgctcggaggccgtccagctgcaggacagagctttcctcctcctgcaaactttctcctcttttcttttctcttctctccttttgcagtggaggagtgatgatttactttgacagaatcgaggtggtgaatttcctgatccag

SEQ ID NO: 65592 - DNA, 600 bp, Chicken  19866894332898_1
taaaccctgttcccagcagtggacttgaagccttgctccagatgtaaaggtggatctggcaagaaagccctcccgaccctctccatgccttggatctgttgcagacacacaagtcatgtggcctttttagtttgttttcctgaagtcagatcacagaggcccctacctcacagacttagcaatatataaagactttacggttgaggtgtcaaaaattttgcttcagatgaaacagcaagtgacaatttctcttacttctcttgtaaaattttcacacatgaaagatatggaaaacatctratgaggcattgtagtgcagctgagataagataacgtcattgtactcagatgaacactgaaaaaaaggcaaaagctaaaagataaaacaatccaaaattttggacaggtcatgttttctgtaagaacttgttctagagcccattgttgtctctctgttctctacagtgaacttcattaaatcatctgggatgctgtggttatgtaaatagaaactgttcaagttcttttcccttttcttccttgtgaaaatctgtatttcatctgcatctttctgttttccaaagtctggaagggtattgc

SEQ ID NO: 65593 - DNA, 518 bp, Chicken  19866894332900_1
ggaggcagttacgttgtgcagcagtagtcagcttttcctgcgagtttgtgcccatgagcaatcatagctgttgtgcttgcattcttgccagatgattaatagtcctcctaggctagtgaaggaagggcacatttaattaatgcattatttataaatattcattgcaataggtgagctttgaattcaaagaggggatgcagtaaaaaataaaataaaatgctccaggccaaataatgaaatggtaacagtgtaaaattaaagtacattttataaaagtcacaactgcgagcattctttgcrttccaaaatacccggggatatttgttagcrggaatgcaatgagatcgaatcaaaacagtgttattttcttccttagtttatatcgacacgattagggattagtaatacccatcagcagcaggacaggctatttaccagaacagaaagatagtggtaagaacagggacagtacaactctatggcaatctaacgagttgattcctgacgtttattattaa

SEQ ID NO: 65594 - DNA, 488 bp, Chicken  19866894332900_2
gcttttcctgcgagtttgtgcccatgagcaatcatagctgttgtgcttgcattcttgccagatgattaatagtcctcctaggctagtgaaggaagggcacatttaattaatgcattatttataaatattcattgcaataggtgagctttgaattcaaagaggggatgcagtaaaaaataaaataaaatgctccaggccaaataatgaaatggtaacagtgtaaaattaaagtacattttataaaagtcacaactgcgagcattctttgcrttccaaaatacccggggatatttgttagcrggaatgcaatgagatcgaatcaaaacagtgttattttcttccttagtttatatcgacacgattagggattagtaatacccatcagcagcaggacaggctatttaccagaacagaaagatagtggtaagaacagggacagtacaactctatggcaatctaacgagttgattcctgacgtttattattaa

SEQ ID NO: 65595 - DNA, 600 bp, Chicken  19866894332904_1
tagactacaggaccttcatgacataagtcacttgttcagctttaatttttcataatgcctagcagaatggaaccctatgcattatttgcacacaattacagtagacatgtaagggatctcttttaatcttctaagtacatcctattccttatattacttggctcttggaacaattatagattaatgttaagataaccattattattcaaggagaagtaagacctagcagaagcattgccctttccttccatatactttcttgaaggccataggtcaggctaattttctatactccttcayatgctctgaatcctactggaatgggaagcagaagttctgaattattagatactctgttctcattgtccgtactgttttttgatgattaattttccattaacacacacttacatcataagactcacgacactctcacatttcaaatgatcccaggtttgaatatattcaaatcaggagttttgasctatgagtaatacaggtagaaatcacctgtataattctaaaggtttctgattttagtttctaggactgcaaccataaatcttcaaaatagttgttttattttttctgctccctaca

SEQ ID NO: 65596 - DNA, 600 bp, Chicken  19866894332904_2
tgttaagataaccattattattcaaggagaagtaagacctagcagaagcattgccctttccttccatatactttcttgaaggccataggtcaggctaattttctatactccttcayatgctctgaatcctactggaatgggaagcagaagttctgaattattagatactctgttctcattgtccgtactgttttttgatgattaattttccattaacacacacttacatcataagactcacgacactctcacatttcaaatgatcccaggtttgaatatattcaaatcaggagttttgasctatgagtaatacaggtagaaatcacctgtataattctaaaggtttctgattttagtttctaggactgcaaccataaatcttcaaaatagttgttttattttttctgctccctacaatctatactgacttctgtaaataaattcataattttgtttcttatctgatcgcttataccaaagcctctaaatgtgggtccagaacggaaaacataaatttattgtcaattttttgagtttcaaacttcactaccagacctccaccatccacctctgatgtcatgggccaatgtcataaaatag

SEQ ID NO: 65597 - DNA, 600 bp, Chicken  19866894332908_1
ctgaaggaaaggtcttgcaagcgcttgacgtttctgaaactggtggatgatggtggaacagacaccaaaaatccccttctgctttgttaaggtgcttggagagtcccaaaggctggttgcggtaaagctgaggacagtttctgaccactgagcccatgccaaacgatgactttatcactgttggggcaccagcgtgttgttaacgatgtgcaagggtgcccaaaggtcccggattggacaccggcctcgttggagtaatccaagataaataaataaaaaaataaatacgcgtcttgcgtygagctctgccagcaaaggcattgctgagtctttatcaaatgtgctcctgcttcttcgtggctgtgttcccgagcctcagggagctttatgtttgagcagaagacagataatttcgtagaatcaaaacagcaaaacctcagcctgggcgatgctccaggcctgcagcaacttgttggtcccacataaatccaggagttcagtcgtggctagtctataaagagttagtaaactgttcacaaagagctagggagtgttatacaacccaacagtgcaggaaattgagtagaaatatttatagtg

SEQ ID NO: 65598 - DNA, 600 bp, Chicken  19866894332919_1
gtagcagcagatatgagagcgagtgagttttgctgctgacaatctactctgtttttattagcagggcattgacactagagctggagcgtccacagggacattttggggctggcctggtgtatgaacacaaggacaacatctgcttctcagcagtgcaatgtttgttcagtgaaacccttcaccttgagtagtgaaactgaggactggaccccgggctgaagactttgctgatggcttgacttcaaagctaaaatccaggggattggtcccaggcagagcaacatttctggctttttgtcrtggagtgccaggacgtgttggagtgtcagagggtgcatcagggataggtgggctgcagttgcagacaccaggttgcccaactcagaaattggataagtgcatgtagagatccacgtgctggagcgggtgcagggtttattggagagccatggtcatgtcagctatagaatgaatgtcaggatttcaggatgagacactgatgagatgtttggttcctctgctagcagctcttggagcagtgcatgggacctacctgcaccagccaggcagtgacactgccctgtcacctctctttcagcc

SEQ ID NO: 65599 - DNA, 600 bp, Chicken  19866894332927_1
aggttggaggtggcggccacttcattatgcttctgtgggagagagtagactcatcaagagcagggttagagataaagccacagttatgctacataggggtggtgtacccgacctgcccctccccactttccctacttcaagccttttcctagtggacagaagtaatctcaagtgtaggcgctttcctcaagcaatgatacaacaatatatttcatgttttccccctaaaatctactacaaactcaaggacctgctgaatgatgcaatgactttgtattgagcaaggggcggtgcacagasagagggctgtcactggaatgcaartgtgggcagaagaaagctggagaaggaaacgtttctttctccagctaccaacactatctgatagaaaaggaaaacaggaagaaggatgccagctgtttggatagctgttctcagtttaatgtttcttccaaggtaaatatactctcctaaaggaacaagattataataggggctgtgaaaatttgcctctcaaagcactacagaactcacagcactgcaccctgtagccaggagaaaaaggcaaaagaaaaaggcaaagagaaaatgctgcttgag

SEQ ID NO: 65600 - DNA, 600 bp, Chicken  19866894332927_2
ttatgcttctgtgggagagagtagactcatcaagagcagggttagagataaagccacagttatgctacataggggtggtgtacccgacctgcccctccccactttccctacttcaagccttttcctagtggacagaagtaatctcaagtgtaggcgctttcctcaagcaatgatacaacaatatatttcatgttttccccctaaaatctactacaaactcaaggacctgctgaatgatgcaatgactttgtattgagcaaggggcggtgcacagasagagggctgtcactggaatgcaartgtgggcagaagaaagctggagaaggaaacgtttctttctccagctaccaacactatctgatagaaaaggaaaacaggaagaaggatgccagctgtttggatagctgttctcagtttaatgtttcttccaaggtaaatatactctcctaaaggaacaagattataataggggctgtgaaaatttgcctctcaaagcactacagaactcacagcactgcaccctgtagccaggagaaaaaggcaaaagaaaaaggcaaagagaaaatgctgcttgagggctacaatacattaagacctaac

SEQ ID NO: 65601 - DNA, 600 bp, Chicken  19866894332933_1
gggtactgcatgggtgacaggcttaattaccgagttgggtgacagatcataaacagaaattgccaagataccagtacctggtttttagaaggttttactcaagtcatagctttttgctttgctatacaggataagacagtcataacctcaaatcaacctaaatatttttctctggggtgcaaatatgatttctaagggttctgttgtgcctgctagcagcagctccattttacttgcataggctacattgctattttgcaaagtacggcaaggcccagagatgctctctgcaaagtattmatccctagtatagccacacgataaatactacctgcttgccttcagaacaaacacaaatcatagcttagcaaaaccttgatgagtttgctggagtggatggcactgtgtgacttctactccacagcatgaacaccaacctggacagtcaggttgtaacaaggtgcaattgtcagtattttgttataaatgcaatataccatcctaactcttaattgcaatgttttctgttgcttctggctctgctgggcatctggacctggcttattctgcataaatgcatcacacttggcttgcctttta

SEQ ID NO: 65602 - DNA, 600 bp, Chicken  19866894332934_1
aaaggtctcttcagagtgggcaggctgccagtgagctctgtcagagatgctggggagcatctctgcaagcaggggtgaccaagggcatgtctctgagggggtgggataatgggcagatctctgggagacatctctgtgagtgctttgcaacacaaaacaagagagtttgtgtttagaaaagcagagtgtgctttggaaagtgtgctgtagatggagcacatctggctcagctggatgtggtgcgtgctgtgaacgcctcgcagttctctcctgtgcctcaggctgggatggggctcactstgtgcttgtgggctctctacgtccacttaccagagctgctggttcagttgctttgctggactcacagagmcatgctagggacctgaaatctgaaatgtcgggggaaagtcttgcaaactgtgagcactgaatggaatgttttctacaacatctgcccatctaccttctgcagtcacctgtgacccaagtgtgtgtcttgttctctcctagtgatgtggtgctcagcttctgttgatatccttttcctcctggatggctcctacagcattggcagaggcagctttgaaagatcgaagcact

SEQ ID NO: 65603 - DNA, 600 bp, Chicken  19866894332934_2
aggggtgaccaagggcatgtctctgagggggtgggataatgggcagatctctgggagacatctctgtgagtgctttgcaacacaaaacaagagagtttgtgtttagaaaagcagagtgtgctttggaaagtgtgctgtagatggagcacatctggctcagctggatgtggtgcgtgctgtgaacgcctcgcagttctctcctgtgcctcaggctgggatggggctcactstgtgcttgtgggctctctacgtccacttaccagagctgctggttcagttgctttgctggactcacagagmcatgctagggacctgaaatctgaaatgtcgggggaaagtcttgcaaactgtgagcactgaatggaatgttttctacaacatctgcccatctaccttctgcagtcacctgtgacccaagtgtgtgtcttgttctctcctagtgatgtggtgctcagcttctgttgatatccttttcctcctggatggctcctacagcattggcagaggcagctttgaaagatcgaagcactttgcaggcaagctctgtgatgccctggacatccatccaggcagggtgagtgttgggaatgattccttttg

SEQ ID NO: 65604 - DNA, 600 bp, Chicken  19866894332938_1
cctcctgaattgacccaggcctctatgccagagtcacctgaggaaaaggaattggcgattctcagctacttgcatgaaagggatgctagcccctctgtacctggggcctccagtcctgcctgggggcccctaatattaactgactgtgttttggtcccaaaagaatatagggtgagttatggcactagctgatgtgggtgcagaaatgtcaattatttatggtgatccaaccaaattccatggagatgaggtggtgattggtgggtttggggcatagaccgtgcctgtaacccagacacsgttaaagttgggtgtcttccacaccaggagtgtaaggtgtctattgccccagttctgaagtatataacaggcacagacatgttatggggtctgactctccagatgaccataggagagctcagactgagagagagagatgtattagtttccaggtagtgcaggcaatattaagaggccatgtgaaacgtgaacgtattcacttgcccattctgtgctagattactagtactaaacagtatagattcccagagggtcaagaggaaatacttagaatggttcaggagctagaaaaagtaggga

SEQ ID NO: 65605 - DNA, 600 bp, Chicken  19866894332960_1
gttttaaaggcttactccgagggcaccagctgttttctcctgtcatttagcagtactttagaaaatacacttatacacagtacaaggaaaagccgagaataaaacctggagatattttacttgcaaataacagcacgaaagctgcaaaatctgtgagcatgcaggcaggatgctgatgatggagagatttcaccatcatatgggctactttcctaagaagaggaataccctcttttccagtaggaggggatgaaataacaatcattttatcctttactgatacacaataactaaagaggmtgatgttcagtacttgccttttctatctgttatttcctatggcgttttttcctcctaatattgcaaagagtaactgctttttgcaacactgtgaatgatggttaatgcttcgattagatgtgagctgggaggcagagaaggattaaatgcagagatgatactgtcttaacagactactggcctttgtcttaagtgagctatcaaacttatacccaacaaaatccatcaggagaacagcagttttgccagcagccattacaaaggggatagggaataatttcacatcaaggggaataaatt

SEQ ID NO: 65606 - DNA, 599 bp, Chicken  19866894332963_1
  misc_feature (1)..(166): n is any nucleotide
nnnnnnnnnnnnnnnnnnnnnnnnnnnnnnnnnnnnnnnnnnnnnnnnnnnnnnnnnnnnnnnnnnnnnnnnnnnnnnnnnnnnnnnnnnnnnnnnnnnnnnnnnnnnnnnnnnnnnnnnnnnnnnnnnnnnnnnnnnnnnnnnnnnnnnnnnnnnnnnnnnnnnngatgctcaataaaataagtgaatgactcaatttaaagaagccatctttgcttattccatcattagagttcattcatattttcactaaaaccaccctatggtatgccaaaataacgaatacacagtaatagtttstgcatacatatgggttgatacatgttagtctatattctcaagtgttttgactgacatttaayacccttgcaccacttgaaaagaaaaaataasaaatatagggatgtgctgaataagcttaaatgcagaataagatttactcatagatggataagcagtagaactatgcaatattgatgtaatctaatggcacatatcaactggcattttaaacttgacatgctaaccaaaataattcttattgtagttaagtatttagaacatgttctaacagccactaaatattctgggataagttt

SEQ ID NO: 65607 - DNA, 599 bp, Chicken  19866894332963_2
  misc_feature (1)..(104): n is any nucleotide
nnnnnnnnnnnnnnnnnnnnnnnnnnnnnnnnnnnnnnnnnnnnnnnnnnnnnnnnnnnnnnnnnnnnnnnnnnnnnnnnnnnnnnnnnnnnnnnnnnnnnnnngatgctcaataaaataagtgaatgactcaatttaaagaagccatctttgcttattccatcattagagttcattcatattttcactaaaaccaccctatggtatgccaaaataacgaatacacagtaatagtttstgcatacatatgggttgatacatgttagtctatattctcaagtgttttgactgacatttaayacccttgcaccacttgaaaagaaaaaataasaaatatagggatgtgctgaataagcttaaatgcagaataagatttactcatagatggataagcagtagaactatgcaatattgatgtaatctaatggcacatatcaactggcattttaaacttgacatgctaaccaaaataattcttattgtagttaagtatttagaacatgttctaacagccactaaatattctgggataagtttaaaggactttgctgagatctctgtcagccttcaaaaaatccatcattttgagagagattaag

SEQ ID NO: 65608 - DNA, 599 bp, Chicken  19866894332963_3
  misc_feature (1)..(73): n is any nucleotide
nnnnnnnnnnnnnnnnnnnnnnnnnnnnnnnnnnnnnnnnnnnnnnnnnnnnnnnnnnnnnnnnnnnnnnnnngatgctcaataaaataagtgaatgactcaatttaaagaagccatctttgcttattccatcattagagttcattcatattttcactaaaaccaccctatggtatgccaaaataacgaatacacagtaatagtttstgcatacatatgggttgatacatgttagtctatattctcaagtgttttgactgacatttaayacccttgcaccacttgaaaagaaaaaataasaaatatagggatgtgctgaataagcttaaatgcagaataagatttactcatagatggataagcagtagaactatgcaatattgatgtaatctaatggcacatatcaactggcattttaaacttgacatgctaaccaaaataattcttattgtagttaagtatttagaacatgttctaacagccactaaatattctgggataagtttaaaggactttgctgagatctctgtcagccttcaaaaaatccatcattttgagagagattaagtcatcttctcacagcatttttttctgccact

SEQ ID NO: 65609 - DNA, 600 bp, Chicken  19866894332963_4
ctatgcaatattgatgtaatctaatggcacatatcaactggcattttaaacttgacatgctaaccaaaataattcttattgtagttaagtatttagaacatgttctaacagccactaaatattctgggataagtttaaaggactttgctgagatctctgtcagccttcaaaaaatccatcattttgagagagattaagtcatcttctcacagcatttttttctgccactctaggaaaaatgtatttagtataaaagttatggatagtttaaaatgcaagggtatttcaataactcttgamatatttatctatctctaaaaatccaaattgtgtatcattaaatattaaagattaaggtgctataattaagactacaatactaaaggtacattagtactgagataccatctggtcacagtcattaaatacccagtcctatctaacaacttacatatgcatgtgcagttgatagtagttttttctcctgcagaagcactttgatttcttaaggaacacctctgaactattgtactggtattttcaagtgtccgaataaagctaaatgtggatactccgggtagaagcttttctttcagatag

SEQ ID NO: 65610 - DNA, 600 bp, Chicken  19866894332964_1
tactggtttgcattttaatagaaagtcttaattttatcttttcccttcctcttcttattttaatttaacaaattatgaagcaatacattatttactaaaatgtttggcctaacactggacatttttaaatgcttatttaaacataaaaatttacacacaaagatgctgtatattaatatggtgaaaatgatgacccattcagatctgcatgaatattctgtagtgacattttgagaaattacctcaagtgtaataaatgctgatttgtgagtttattcttccttcccctaaaaccactcmattttttctttaaaacccaggaactataaagaacagtaaaaataaggcagaaaatgttgagcaaatacataaaactccatactaggtctgtttctagacgtgaaacagcagtgtcagaaaaaagcagaatttttaagcatgcagttgttaataagaacaggatgccaagtatttctatatcttggggagataggagttaggttgcaagttcagttatgctcagccaactagatttctactagaggtagaaacatatctgccagttaagggcatgagctttctttttccaaacaaatgtaa

SEQ ID NO: 65611 - DNA, 600 bp, Chicken  19866894332967_1
acccacagaagaaactgggatgatggcagttgggatctgttgtccctctccttttgcctattgctgagctccagatggtagctctgcagcacagtgaggtgtgagcaaggagaaggggagcagccatccctccagggccacacaggcacacgcggtgcagggctgaggtctgggatcctgtgtttgctttatgaagagctcaacacagccattactcagcaaataacagcgagaaacaggtttgtaattggtttgttcagactgcagccaattattagcacttactatggtctcgtgtaygtaraacccagggtgaatgctgtcatgtaagggcctgtcctgcagcgtcagctctggctacgagctcagctgagyggggtcacagacagcagcgcatggctcagcacagaaccccttcctgtttaggctttgagagccacagaatcacagaatggttgagttggaagggaccttccaagcccctcaggtccccattccctgcaatgagcagggacacccacagctccatcgcagcctgtgctgggtgcctgcacctccccgggcagcccgtgccaccctggccctgcagacagatctgtg

SEQ ID NO: 65612 - DNA, 600 bp, Chicken  19866894332967_2
acagaagaaactgggatgatggcagttgggatctgttgtccctctccttttgcctattgctgagctccagatggtagctctgcagcacagtgaggtgtgagcaaggagaaggggagcagccatccctccagggccacacaggcacacgcggtgcagggctgaggtctgggatcctgtgtttgctttatgaagagctcaacacagccattactcagcaaataacagcgagaaacaggtttgtaattggtttgttcagactgcagccaattattagcacttactatggtctcgtgtaygtaraacccagggtgaatgctgtcatgtaagggcctgtcctgcagcgtcagctctggctacgagctcagctgagyggggtcacagacagcagcgcatggctcagcacagaaccccttcctgtttaggctttgagagccacagaatcacagaatggttgagttggaagggaccttccaagcccctcaggtccccattccctgcaatgagcagggacacccacagctccatcgcagcctgtgctgggtgcctgcacctccccgggcagcccgtgccaccctggccctgcagacagatctgtgggga

SEQ ID NO: 65613 - DNA, 600 bp, Chicken  19866894332967_3
tggtagctctgcagcacagtgaggtgtgagcaaggagaaggggagcagccatccctccagggccacacaggcacacgcggtgcagggctgaggtctgggatcctgtgtttgctttatgaagagctcaacacagccattactcagcaaataacagcgagaaacaggtttgtaattggtttgttcagactgcagccaattattagcacttactatggtctcgtgtaygtaraacccagggtgaatgctgtcatgtaagggcctgtcctgcagcgtcagctctggctacgagctcagctgagyggggtcacagacagcagcgcatggctcagcacagaaccccttcctgtttaggctttgagagccacagaatcacagaatggttgagttggaagggaccttccaagcccctcaggtccccattccctgcaatgagcagggacacccacagctccatcgcagcctgtgctgggtgcctgcacctccccgggcagcccgtgccaccctggccctgcagacagatctgtggggaagcactccaagggctgctgggtggcagcggaggacacagcagcgctccagaataaagcaggaggtttctta

SEQ ID NO: 65614 - DNA, 599 bp, Chicken  19866894332968_1
  misc_feature (1)..(194): n is any nucleotide
nnnnnnnnnnnnnnnnnnnnnnnnnnnnnnnnnnnnnnnnnnnnnnnnnnnnnnnnnnnnnnnnnnnnnnnnnnnnnnnnnnnnnnnnnnnnnnnnnnnnnnnnnnnnnnnnnnnnnnnnnnnnnnnnnnnnnnnnnnnnnnnnnnnnnnnnnnnnnnnnnnnnnnnnnnnnnnnnnnnnnnnnnnnnnnnnnnaatctgggcctaggtggcagaatcatactggttcattctttttctgtcactcttttttgtgactttcaaacaagcatgtaaccatactgtagtgcatttcttttayagaaaactagattagtaaaacatgcagttttggaaggcttcattagtaaaacttaaaatgctgtgttgatgatcttccatgcaagttttcatggtgttttaattatatatggtaaaatcttcagacaaaggtgaataaagaaaatttctatgaaactgcatatttagatattgggtttgcaagagcagaagggtttcctaaaggagtaccataaagtgcattcttcatgtgtttttcaaagtgtttatgtataaagaactttattgggaagaagttcagggacattagtaatttgtcag

SEQ ID NO: 65615 - DNA, 599 bp, Chicken  19866894332970_1
  misc_feature (1)..(56): n is any nucleotide
nnnnnnnnnnnnnnnnnnnnnnnnnnnnnnnnnnnnnnnnnnnnnnnnnnnnnnnnctattgtagctctgcttcctgttatcagcaagggtaattactaaagcatgagaacaaaggcatggagaatcaaaaatccacaagctcagcttagacttatcactctgaattccttcagcaaggaaacatgctatcttcttaaatactgacagaaaatgtcaattttgagaaggtgaatatcaggcttaaagggaaatatataaaataagagagaacaattcctatttacacatttgcatgaatycctatgatcttttgtttctaagcattctcatcttgaatttgaactctgtttcactggactctcttgcttagaacaaaagttatcccaatatgcagaatcctcaggtgtaattggaattccaggtgcaactaaatcttcaaaagtcaataatgtaaactgtggtcgatgaggttgcatggaacatacctaaggaaaacagayattaatttttcatgaatcagtaaatctccattttcttcctgcagcctcccctgtaaagttaaaactacattttcctttctgaataaagaaaacattcc

SEQ ID NO: 65616 - DNA, 600 bp, Chicken  19866894332970_2
ctgacagaaaatgtcaattttgagaaggtgaatatcaggcttaaagggaaatatataaaataagagagaacaattcctatttacacatttgcatgaatycctatgatcttttgtttctaagcattctcatcttgaatttgaactctgtttcactggactctcttgcttagaacaaaagttatcccaatatgcagaatcctcaggtgtaattggaattccaggtgcaactaaatcttcaaaagtcaataatgtaaactgtggtcgatgaggttgcatggaacatacctaaggaaaacagayattaatttttcatgaatcagtaaatctccattttcttcctgcagcctcccctgtaaagttaaaactacattttcctttctgaataaagaaaacattccagttaaatccaatgtcactgttgctaatttgggctatacatcaactaacagaagcacataatggtgcacagaaaagtaagttctgctttgtttcagttcagaaaactgagagaactagggacagagaatcccataaacaccatagaatgactgtttaagctcagaaaaagcaaaaaacaaaactactacattctacatcaga

SEQ ID NO: 65617 - DNA, 479 bp, Chicken  19866894332971_1
ataggcatcaaagagtttaggagaggattagagagtactgagcatggtatctttgaccaaaacgtaattgtagcctgaagtgaaagatgagctactccaaggcatttgaaaaatgctgatagctagcatagctgaagaaacaaatttgaagtccttcattagcttatgaaagctttaaaataagtttatattaatgatcaactgggttttattaattatttatttgtgtggtgtgttatctagcatccagtatcttagctctaagaaaatttacctttcacgtaaccctgtgaattttgygcctttctctgtgtgtttcaacttggcatcatatgaatgtgactggaacaacgtggtctcttctcttcctcctccctctcaccaccaccccaaaatactgacttcttagtcaatatatatatattggaaaaaatattttttttttccaagaactctcacataaacactaagctgggtca

SEQ ID NO: 65618 - DNA, 600 bp, Chicken  19866894332973_1
cctatacacgagaactgtctcttcgataatttatatgaagtaaattccaggcatagcactgataatgtgacagatacaaccaagaaaatctgaactaattataatgctttcttcctagattctgtccagcattcactgtaattattgtaattattcaactttcatgtcgcacaacaattatagctgtggggaaacatacatgatgtcctcttggccagaagcagagaagctaaaaatccaggagacagaagctgcaacaagtaatacagcaaaactatcccttgttactacagggttccwacactacaaggataatttatcagactcccagcataaaacatgtatatctcaaatataatttttgaatgcagggggcatttctccagggcttttctctgactgcagcagcattggcaagtgtgccaagtactctgccactgatttagtgggctggaagccacactccatcattgtgccttacctgccattaccttcaggtttttgctgtccctcgacatccttctcacagcagaaaattattcacttgcttgtacagtacacacaaaacacactatttttagccacctgcatctatcacag

SEQ ID NO: 65619 - DNA, 600 bp, Chicken  19866894332974_1
ttggcaattattgttattgttggcagggtctctacttaattaatacttcttaggctcaataaaaaatttaaaaaggaaaaaaaaggtaaatattttcaagatgcagccaatgtttatcagtattgcaacctatcccaacttctaaaaggcaaaattctcaagagtctgtgcattaaggagtttcattcttagcttcaaaaccatcattgctgaatttccagacctacagaaattcagagacacacctttagcttcgttttaaaccttcccatgcatgaactgaccccattataaacaagraagtaatattcaaggatctttttccttaaataaggtcttctgtttttgccagactattacaatcatgaggccttgttaccagtccctgagccttccatggtagattctttagaattgaattaagatgacaagagaagcytcatgtactggaaaaatagtctgttcactttcctggagctgaggcaggtgaaaagtaaaaggaatatgcattttggaataggaagaacagtgcacagaaatatttagaaaaaagatgtaaaggcaaaatgcacagaaaatgaagagaaatagagaactaga

SEQ ID NO: 65620 - DNA, 600 bp, Chicken  19866894332974_2
ttctaaaaggcaaaattctcaagagtctgtgcattaaggagtttcattcttagcttcaaaaccatcattgctgaatttccagacctacagaaattcagagacacacctttagcttcgttttaaaccttcccatgcatgaactgaccccattataaacaagraagtaatattcaaggatctttttccttaaataaggtcttctgtttttgccagactattacaatcatgaggccttgttaccagtccctgagccttccatggtagattctttagaattgaattaagatgacaagagaagcytcatgtactggaaaaatagtctgttcactttcctggagctgaggcaggtgaaaagtaaaaggaatatgcattttggaataggaagaacagtgcacagaaatatttagaaaaaagatgtaaaggcaaaatgcacagaaaatgaagagaaatagagaactagaaaatcaaaacagcaaaacagaaaaaaaatggaaaaaagtgagtaagagatgaactggaaaaaaaaaaaaaaaaaaaaggaaatttaaacacacrccaacaacaaagtgctgtagcacaatatttaccagcgtgctccac

SEQ ID NO: 65621 - DNA, 600 bp, Chicken  19866894332974_3
ccatggtagattctttagaattgaattaagatgacaagagaagcytcatgtactggaaaaatagtctgttcactttcctggagctgaggcaggtgaaaagtaaaaggaatatgcattttggaataggaagaacagtgcacagaaatatttagaaaaaagatgtaaaggcaaaatgcacagaaaatgaagagaaatagagaactagaaaatcaaaacagcaaaacagaaaaaaaatggaaaaaagtgagtaagagatgaactggaaaaaaaaaaaaaaaaaaaaggaaatttaaacacacrccaacaacaaagtgctgtagcacaatatttaccagcgtgctccactcctctgcttcctgtactttccaaacagggcatgaagaactgatttttttttttttttctcaactctgaatgtaagcaaagtacaatttacagaagaagcagtcgcacgcaaactgctctttgtacttggaaaaaatcagtgtgaccaaagtgttagttaaaaataaaaaagccttgtatgtactcgggttgctccaaaagtaatgcctcctatttgtttccaggacactataatagatacaaagagcgtaataa

SEQ ID NO: 65622 - DNA, 600 bp, Chicken  19866894332975_1
gtcacaagggccaggagctgctggcttttttgatcgaagctgggcagtttttggcttctctgccaatgattgttcccttgctttgctagcctggttgtggagggtagtatagaatcaccaaatcatagagcagtttgggttggaaaggacctcgaagatcattcagttccaatctccctgctgtgagcagggttgctgactgctagattaagcactagatcaggtttcccaggccctgtccaacctggccatcaaccattctgcgtcctgcttgcaccaacagctgtctgagaggggaawtcatgttctttaaacgagcagagcctcctgctcaaaggaacatcaggctttattgacagaaggaataaatattgaccactggaaagttaaagccaatatttacactgagcttccctaaatctaaatgtttatagtgtgtgaaatgggaagtgctgatcccaaatttcccatttgtgatggtgcctcagtgcagtggggctgatgtccaggtctgttggtcctgagagcatctgcattccgattgccaggccttctcatacaactgtcatatggtgaggtctgaccttcatgcatctcctc

SEQ ID NO: 65623 - DNA, 600 bp, Chicken  19866894332975_2
cctcctgctcaaaggaacatcaggctttattgacagaaggaataaatattgaccactggaaagttaaagccaatatttacactgagcttccctaaatctaaatgtttatagtgtgtgaaatgggaagtgctgatcccaaatttcccatttgtgatggtgcctcagtgcagtggggctgatgtccaggtctgttggtcctgagagcatctgcattccgattgccaggccttctcatacaactgtcatatggtgaggtctgaccttcatgcatctcctcttaggctttccccagtcctccamataaacaagatgaaagggttgagacagtggagcaaagcatctgtaaagaaagctccagatatttcactgggcacccaaacccagaggtctctgtttctaacacctgaatgctgtctatgaagcaggcatcaggttttgggtgccagtcctgtctctaacacaacaacaatcaggtttgtataaggaaaacagaatcacacttttgcatagatctgtgagcgttaatttagcctgaaatctgtgtgcagatgtaaatctcagtgtttttctcagtgcagtgctctgttgcgctgcgtcagc

SEQ ID NO: 65624 - DNA, 600 bp, Chicken  19866894332984_1
agtgcaaaggcatggcttttctccctatggaggtcggctgcctacatcagagcagggtactggtgtggggccgcggtgatgtaatgtgctctgagggtatgctgcggggctgaaaatgctgcattcactgcaggcatcatcaaatgcaagctgactctaactgaaagaagatgatgaatgggagaaaatcccccatgtgtttttcagcgtggtgaatgaggaggaccgttctgtgcaggcagtttcactttctttgctatgggccagttttgtcctgaaggcttgaacaaagagcagtcsraaagctgagccatccttcctccacctttcccctccactcacacacacaaatgtacccaaaagagagatttaagtctcagggagaccagaatgcatgtacagcagacgatcagaacactgagatttttagggcaatgcagtcagcattcctctgagacagaactgtatgaaaaacatcatacatcttacagccgaagcagggcaaatacaatacagacgtcatttgcttatggagcaggaagaagcttcggtccttgatggatgctgtagggcctcagcagtgtcacaggctccttttgc

SEQ ID NO: 65625 - DNA, 600 bp, Chicken  19866894332984_2
gtgcaaaggcatggcttttctccctatggaggtcggctgcctacatcagagcagggtactggtgtggggccgcggtgatgtaatgtgctctgagggtatgctgcggggctgaaaatgctgcattcactgcaggcatcatcaaatgcaagctgactctaactgaaagaagatgatgaatgggagaaaatcccccatgtgtttttcagcgtggtgaatgaggaggaccgttctgtgcaggcagtttcactttctttgctatgggccagttttgtcctgaaggcttgaacaaagagcagtcsraaagctgagccatccttcctccacctttcccctccactcacacacacaaatgtacccaaaagagagatttaagtctcagggagaccagaatgcatgtacagcagacgatcagaacactgagatttttagggcaatgcagtcagcattcctctgagacagaactgtatgaaaaacatcatacatcttacagccgaagcagggcaaatacaatacagacgtcatttgcttatggagcaggaagaagcttcggtccttgatggatgctgtagggcctcagcagtgtcacaggctccttttgct

SEQ ID NO: 65626 - DNA, 600 bp, Chicken  19866894332990_1
ctggcatccagcaccaggccctgaggtcatcccggtggatcacacagcagggagccctcctaccagggtcctcaccggtctgacttggcaagaaaatccttcccagatctgaccattaacgcctggggttggcaccggatgatcttctcggtccctttgttctcatggctctgtcggggctgctgtaggataatcccctttctctctgatgtctcctgaggaatgtgcttcatgggaaagtgagaaacgggcaccccagctgggggctgaagtgggacccagcacacctgaatgggtcayggctgggctgtgtgctccaagcagaagaaagggctggagagcccagctgcactctgttccaagaagaacatcccatggtttcagyctcatgacatctgagtctttacaagacaagcgagaaccattctagcaggggctagtaaggaaggggttggaaaatgcagtgtcctgtctcttcagatgacccagcctttaagrgctgcatggcagycagacactacagagggtctgatcactgcctccagccctttccaaacaaagcaaggttgcaaagtgagcagacaaccagttagagaacct

SEQ ID NO: 65627 - DNA, 600 bp, Chicken  19866894332990_2
tggcaagaaaatccttcccagatctgaccattaacgcctggggttggcaccggatgatcttctcggtccctttgttctcatggctctgtcggggctgctgtaggataatcccctttctctctgatgtctcctgaggaatgtgcttcatgggaaagtgagaaacgggcaccccagctgggggctgaagtgggacccagcacacctgaatgggtcayggctgggctgtgtgctccaagcagaagaaagggctggagagcccagctgcactctgttccaagaagaacatcccatggtttcagyctcatgacatctgagtctttacaagacaagcgagaaccattctagcaggggctagtaaggaaggggttggaaaatgcagtgtcctgtctcttcagatgacccagcctttaagrgctgcatggcagycagacactacagagggtctgatcactgcctccagccctttccaaacaaagcaaggttgcaaagtgagcagacaaccagttagagaacctccattcacctrtgactactggagtataggctaagaagcagaaccagggtggccgcctactagtaagtccaagcattgccttgctg

SEQ ID NO: 65628 - DNA, 600 bp, Chicken  19866894332990_3
tttctctctgatgtctcctgaggaatgtgcttcatgggaaagtgagaaacgggcaccccagctgggggctgaagtgggacccagcacacctgaatgggtcayggctgggctgtgtgctccaagcagaagaaagggctggagagcccagctgcactctgttccaagaagaacatcccatggtttcagyctcatgacatctgagtctttacaagacaagcgagaaccattctagcaggggctagtaaggaaggggttggaaaatgcagtgtcctgtctcttcagatgacccagcctttaagrgctgcatggcagycagacactacagagggtctgatcactgcctccagccctttccaaacaaagcaaggttgcaaagtgagcagacaaccagttagagaacctccattcacctrtgactactggagtataggctaagaagcagaaccagggtggccgcctactagtaagtccaagcattgccttgctggtcaagaaacaagagaagcacaatctgctttcaccacgtgtcaaggaaaagtgccataacccaggaaggaatgaagcacaaccaaagtgcaaccacaacttccctctcatcaa

SEQ ID NO: 65629 - DNA, 600 bp, Chicken  19866894332990_4
tctcctgaggaatgtgcttcatgggaaagtgagaaacgggcaccccagctgggggctgaagtgggacccagcacacctgaatgggtcayggctgggctgtgtgctccaagcagaagaaagggctggagagcccagctgcactctgttccaagaagaacatcccatggtttcagyctcatgacatctgagtctttacaagacaagcgagaaccattctagcaggggctagtaaggaaggggttggaaaatgcagtgtcctgtctcttcagatgacccagcctttaagrgctgcatggcagycagacactacagagggtctgatcactgcctccagccctttccaaacaaagcaaggttgcaaagtgagcagacaaccagttagagaacctccattcacctrtgactactggagtataggctaagaagcagaaccagggtggccgcctactagtaagtccaagcattgccttgctggtcaagaaacaagagaagcacaatctgctttcaccacgtgtcaaggaaaagtgccataacccaggaaggaatgaagcacaaccaaagtgcaaccacaacttccctctcatcaatggtttccaccaa

SEQ ID NO: 65630 - DNA, 600 bp, Chicken  19866894332990_5
gtgctccaagcagaagaaagggctggagagcccagctgcactctgttccaagaagaacatcccatggtttcagyctcatgacatctgagtctttacaagacaagcgagaaccattctagcaggggctagtaaggaaggggttggaaaatgcagtgtcctgtctcttcagatgacccagcctttaagrgctgcatggcagycagacactacagagggtctgatcactgcctccagccctttccaaacaaagcaaggttgcaaagtgagcagacaaccagttagagaacctccattcacctrtgactactggagtataggctaagaagcagaaccagggtggccgcctactagtaagtccaagcattgccttgctggtcaagaaacaagagaagcacaatctgctttcaccacgtgtcaaggaaaagtgccataacccaggaaggaatgaagcacaaccaaagtgcaaccacaacttccctctcatcaatggtttccaccaaagaaaaccaagagatcgggcacctgacaacacatgcagttcccaacctcaaaacctcagctattctgacaggcagaaagatggtgcatggaagtttatca

SEQ ID NO: 65631 - DNA, 600 bp, Chicken  19866894332991_1
accagctgtgaaatccttcatgtgctactcctcacagccagagtagcacacagaagccgatttttcttttcttgttagaatatccttaagagaaagggttgttatctgatagcaactgcctagcgtttatctgtgttagccatctttgaaagaaaaagatgcgtggttatgtggaagtgagaagtgatttgtcaaggagcagccaaggagaagactgagaaagcaaaggaaataaatagtgttgtgaattctcaaggcaggtgtataggcgttatttttaggtttctcttggggatctgyagagataagagacaaatttagcagagtcgttctctactggaagctgagtgcttcagtgagtcctacattcttgtggagtttcttctggtacatgagttttcttggtgtcatgtatgcaattatagtgaaggaatatgatctattcaattaagtgcattatatgcttttatcctacacccgcagatatcaatcattctgtcccaagggatattttgactacgcttcgtcataggctgaatcaactggatatattctagaaagcaaactagaaactacatttcccttaaaaaaaaaaattaa

SEQ ID NO: 65632 - DNA, 600 bp, Chicken  19866894332991_2
cttctggtacatgagttttcttggtgtcatgtatgcaattatagtgaaggaatatgatctattcaattaagtgcattatatgcttttatcctacacccgcagatatcaatcattctgtcccaagggatattttgactacgcttcgtcataggctgaatcaactggatatattctagaaagcaaactagaaactacatttcccttaaaaaaaaaaattaaaattccaatatatgaagcctttcccagctttcctacagaacacctctatactgttcagatatgtatatccaaaacaaagcrgcaaaatgaagggcatcatggtctatcaggattagagagatgagagatttctggtttgagactagcagtcgaggttgctgacagttagtatttgacaagttgcaggagaaaagtttgaaggaatgctcataggaagaacattaatggattttatcacaagactattaaatcaaattttccatttccatcttggttcaatccagaagagacccttgctgaacatggtagttcagaggcttctcaatgaaggggaacagtgcacacaaataaaaatgaaagttccatgtaacattaactatt

SEQ ID NO: 65633 - DNA, 599 bp, Chicken  19866894333000_1
  misc_feature (1)..(65): n is any nucleotide
nnnnnnnnnnnnnnnnnnnnnnnnnnnnnnnnnnnnnnnnnnnnnnnnnnnnnnnnnnnnnnnnncacttgagtgtaccactcaatataattttggtccttgacttttccctgtttgcctttgtggttttttccagacctgtgctggaacatgccaagaagagagatagttagtggcaacacgtggtcatttgccacctacctccaggtttccatgagctagtttgcattttgaaaaccttcacacatagtgtgagaacccagaatgtgaacgaccatgtttgcttttccagctaatgtrtacagagccaccggtaaccttacactatgygatcaatgcatctttggcatgaagacaggaggttgtttttatgagcttactgtatactatgtcacaactgttaaacacagtyccaagagtctgcaagatattccttataaaatggcattgttttctttaggtmtgagttgtgggtttgatctatgtaggtgttttaagttgttaggtctcagtagtttgcctgtcctttgatcctgaagagatcttatttttctcttcrtaaaatagctctcatgtcattccttttaaaactttaagct

SEQ ID NO: 65634 - DNA, 599 bp, Chicken  19866894333000_2
  misc_feature (1)..(35): n is any nucleotide
nnnnnnnnnnnnnnnnnnnnnnnnnnnnnnnnnnncacttgagtgtaccactcaatataattttggtccttgacttttccctgtttgcctttgtggttttttccagacctgtgctggaacatgccaagaagagagatagttagtggcaacacgtggtcatttgccacctacctccaggtttccatgagctagtttgcattttgaaaaccttcacacatagtgtgagaacccagaatgtgaacgaccatgtttgcttttccagctaatgtrtacagagccaccggtaaccttacactatgygatcaatgcatctttggcatgaagacaggaggttgtttttatgagcttactgtatactatgtcacaactgttaaacacagtyccaagagtctgcaagatattccttataaaatggcattgttttctttaggtmtgagttgtgggtttgatctatgtaggtgttttaagttgttaggtctcagtagtttgcctgtcctttgatcctgaagagatcttatttttctcttcrtaaaatagctctcatgtcattccttttaaaactttaagctagcaaatccctgaggaacagccagtatgct

SEQ ID NO: 65635 - DNA, 600 bp, Chicken  19866894333000_3
gtttgcctttgtggttttttccagacctgtgctggaacatgccaagaagagagatagttagtggcaacacgtggtcatttgccacctacctccaggtttccatgagctagtttgcattttgaaaaccttcacacatagtgtgagaacccagaatgtgaacgaccatgtttgcttttccagctaatgtrtacagagccaccggtaaccttacactatgygatcaatgcatctttggcatgaagacaggaggttgtttttatgagcttactgtatactatgtcacaactgttaaacacagtyccaagagtctgcaagatattccttataaaatggcattgttttctttaggtmtgagttgtgggtttgatctatgtaggtgttttaagttgttaggtctcagtagtttgcctgtcctttgatcctgaagagatcttatttttctcttcrtaaaatagctctcatgtcattccttttaaaactttaagctagcaaatccctgaggaacagccagtatgctcacattaaatcctcctggcttcgcaaaatacatctgaatagctgtacttatttctgaagtacaaggagtatattcctttgtac

SEQ ID NO: 65636 - DNA, 600 bp, Chicken  19866894333000_4
agatagttagtggcaacacgtggtcatttgccacctacctccaggtttccatgagctagtttgcattttgaaaaccttcacacatagtgtgagaacccagaatgtgaacgaccatgtttgcttttccagctaatgtrtacagagccaccggtaaccttacactatgygatcaatgcatctttggcatgaagacaggaggttgtttttatgagcttactgtatactatgtcacaactgttaaacacagtyccaagagtctgcaagatattccttataaaatggcattgttttctttaggtmtgagttgtgggtttgatctatgtaggtgttttaagttgttaggtctcagtagtttgcctgtcctttgatcctgaagagatcttatttttctcttcrtaaaatagctctcatgtcattccttttaaaactttaagctagcaaatccctgaggaacagccagtatgctcacattaaatcctcctggcttcgcaaaatacatctgaatagctgtacttatttctgaagtacaaggagtatattcctttgtacactgtgggtctcaggagtctgctgcataattagcagcttgaagtagggaag

SEQ ID NO: 65637 - DNA, 600 bp, Chicken  19866894333000_5
ccagaatgtgaacgaccatgtttgcttttccagctaatgtrtacagagccaccggtaaccttacactatgygatcaatgcatctttggcatgaagacaggaggttgtttttatgagcttactgtatactatgtcacaactgttaaacacagtyccaagagtctgcaagatattccttataaaatggcattgttttctttaggtmtgagttgtgggtttgatctatgtaggtgttttaagttgttaggtctcagtagtttgcctgtcctttgatcctgaagagatcttatttttctcttcrtaaaatagctctcatgtcattccttttaaaactttaagctagcaaatccctgaggaacagccagtatgctcacattaaatcctcctggcttcgcaaaatacatctgaatagctgtacttatttctgaagtacaaggagtatattcctttgtacactgtgggtctcaggagtctgctgcataattagcagcttgaagtagggaagtaaaagagaacacgaatgtgccttggagcccaagcaacaaagcctgtactgtatttcagacctacatgtagcttttcaaactgttctctccctaaa

SEQ ID NO: 65638 - DNA, 600 bp, Chicken  19866894333007_1
agaaacaccacagtcctggaggtagcttcatttggggtggaaacaccatgggacagctctgcttgctgtggcctggggaggcccacagcctgccaagcacccacgttgcactggtgggacatgggccacctgaatgcattcaaccagagcaaacacaaccctccctgcatctcttggagacagagcaggaagcttcttccatttgcagtttgctgcaggtactcatgatgaggatggaaaaacaaggagcccagccagaaaggtccaaaggaaagagatgaaacagcagcaacaatactykgtccaagaagtttgyctgaaaccacacagaaaactgtgctaaccatgtttccttattctatatccaaatttggagtctgttgtccagaaacgagtataaacaacgctttcctcctygctacacaattatcacttttgtaagaataacacaagccaaaacaacacaaagccatcccgaacctcagggcagcacagaattcattgccttaaatcacatctcccagcacagttatttagacagtgctttttaattcttttttcctcctctttaagacggcattttaagtaaaattttctgcc

SEQ ID NO: 65639 - DNA, 600 bp, Chicken  19866894333007_2
gaaacaccacagtcctggaggtagcttcatttggggtggaaacaccatgggacagctctgcttgctgtggcctggggaggcccacagcctgccaagcacccacgttgcactggtgggacatgggccacctgaatgcattcaaccagagcaaacacaaccctccctgcatctcttggagacagagcaggaagcttcttccatttgcagtttgctgcaggtactcatgatgaggatggaaaaacaaggagcccagccagaaaggtccaaaggaaagagatgaaacagcagcaacaatactykgtccaagaagtttgyctgaaaccacacagaaaactgtgctaaccatgtttccttattctatatccaaatttggagtctgttgtccagaaacgagtataaacaacgctttcctcctygctacacaattatcacttttgtaagaataacacaagccaaaacaacacaaagccatcccgaacctcagggcagcacagaattcattgccttaaatcacatctcccagcacagttatttagacagtgctttttaattcttttttcctcctctttaagacggcattttaagtaaaattttctgcct

SEQ ID NO: 65640 - DNA, 600 bp, Chicken  19866894333007_3
tggaggtagcttcatttggggtggaaacaccatgggacagctctgcttgctgtggcctggggaggcccacagcctgccaagcacccacgttgcactggtgggacatgggccacctgaatgcattcaaccagagcaaacacaaccctccctgcatctcttggagacagagcaggaagcttcttccatttgcagtttgctgcaggtactcatgatgaggatggaaaaacaaggagcccagccagaaaggtccaaaggaaagagatgaaacagcagcaacaatactykgtccaagaagtttgyctgaaaccacacagaaaactgtgctaaccatgtttccttattctatatccaaatttggagtctgttgtccagaaacgagtataaacaacgctttcctcctygctacacaattatcacttttgtaagaataacacaagccaaaacaacacaaagccatcccgaacctcagggcagcacagaattcattgccttaaatcacatctcccagcacagttatttagacagtgctttttaattcttttttcctcctctttaagacggcattttaagtaaaattttctgcctcctttcctatccatg

SEQ ID NO: 65641 - DNA, 600 bp, Chicken  19866894333007_4
gacatgggccacctgaatgcattcaaccagagcaaacacaaccctccctgcatctcttggagacagagcaggaagcttcttccatttgcagtttgctgcaggtactcatgatgaggatggaaaaacaaggagcccagccagaaaggtccaaaggaaagagatgaaacagcagcaacaatactykgtccaagaagtttgyctgaaaccacacagaaaactgtgctaaccatgtttccttattctatatccaaatttggagtctgttgtccagaaacgagtataaacaacgctttcctcctygctacacaattatcacttttgtaagaataacacaagccaaaacaacacaaagccatcccgaacctcagggcagcacagaattcattgccttaaatcacatctcccagcacagttatttagacagtgctttttaattcttttttcctcctctttaagacggcattttaagtaaaattttctgcctcctttcctatccatgaccacattgtgaccaggggcagatttctgccagtcacagcaaaacacagcacgctgaaacacaaccgcttcctgaaattcaactccaggaagctctggttg

SEQ ID NO: 65642 - DNA, 600 bp, Chicken  19866894333015_1
tgagctgggttttctgagcatatattaaatgggcttaggtcatccagaatagtaaatatctggatgggtttttgtaaaagccctgtgtattctcagcaccaaggagctcttcacagtaaagccagcagcgtgccagtatgaaaagatgggatagcacatcagccacttagccagcacagactgttccttgctatcatctcccttcccttctcagatatgggaagctttaaaaagatatatataatttcagcgcgtcttaaattttaagaaggggggaaaaaagactgtgaattatcataytaatgttttcagagtacgctgaaaagggacacaagtatggcagaaatggagtacccctacttytcagctgctgtgctcacgcatgtggccagagcactttcctcaaaagagaacatttccttcctttaaaggacactctgttgccaaacaaatgggcaactttctaggatcagttccccagactgcctccccgcaattgcttctgattgaagatagcacaagaattctgttttgcacaaaggcattaggtagaaacactttaattattaaaagagtgtgaattaagcagacactgtgctg

SEQ ID NO: 65643 - DNA, 600 bp, Chicken  19866894333015_2
atgggtttttgtaaaagccctgtgtattctcagcaccaaggagctcttcacagtaaagccagcagcgtgccagtatgaaaagatgggatagcacatcagccacttagccagcacagactgttccttgctatcatctcccttcccttctcagatatgggaagctttaaaaagatatatataatttcagcgcgtcttaaattttaagaaggggggaaaaaagactgtgaattatcataytaatgttttcagagtacgctgaaaagggacacaagtatggcagaaatggagtacccctacttytcagctgctgtgctcacgcatgtggccagagcactttcctcaaaagagaacatttccttcctttaaaggacactctgttgccaaacaaatgggcaactttctaggatcagttccccagactgcctccccgcaattgcttctgattgaagatagcacaagaattctgttttgcacaaaggcattaggtagaaacactttaattattaaaagagtgtgaattaagcagacactgtgctgcacctacagagtcttggtgagaaggggctcggtaaacagaattattatttcatcaacacagaa

SEQ ID NO: 65644 - DNA, 600 bp, Chicken  19866894333018_1
gaatcggtacttctcagtgcatatcctgagcaataatcttgattaaatgaagtttgtttaaggatcagaaaaaataaatagtgtacatgtatttccatagttccccaaattccctccagcttctacctatttttccacttgttttttttttctgatggaagctgtttgcaaattacagtttctattactaatacatatgtgcatctatagcattttttgtcaaagcagtgttcctgttttcacccaagaatttctcatttcttccccctaaattatgtcctgtctgttccccacagtatyggaagtcaggattatcaagcagggtttcagttgattatagtgtacatcatcttccaaagtggtgggtccagagacatttacagatcagaaataccacctgaagccattctcagcagataaatgcatctatttctgagcgctgtggtcatgtaaaaaccaggcacaacatccaagctacaaaacagtcaaaaaaagtattgattttgatgtaccaaatctattagtgcttctgcttgcaaagcagggggatgaacagttacccttagctacccatatggaaacagaaagactttccccttt

SEQ ID NO: 65645 - DNA, 600 bp, Chicken  19866894333018_2
agtaacgaatagttttgtgtgtctactacaaaagatcaggaagccagacccacttttttatttaacacgtggagccagattctcagctggtatatgctgaaattgctctactgatgcgaagaaaaatatactgattaacatcagccaaatttctgctctacatattatgtttgcaaagtaaatggcataaatcatggaaattgtacttactttttccattttgagatattcttcctcagtattccctgagaaaacattgttgtcttgttaaggtgctaaggattcaattaacaacaacayaaaaaaagtggggtcaaaatgcatccacaaaacttcagaacttttctagtacttttcatctcttttacctctacagtcacagcgtcaaagggatgaatagttcctcatttcttctcctgtctattattgctttaatatgtcaaaattgtacataaatgtggagggatgaatgcatgcacacatacgatgcgctctgcactgtgatacacacctctctttctctctggcttccagagctcaggctactggaatttccatcagctgagtatatccaagtggccagatgattcatcagcagtg

SEQ ID NO: 65646 - DNA, 600 bp, Chicken  19866894333018_3; identical to SEQ ID NO: 65645

SEQ ID NO: 65647 - DNA, 600 bp, Chicken  19866894333020_1
tttctatgaaaatgttttattatttttcttgtttttcaaatgagatatctatacatatgaatgcatatatggctttcaaaatggtttttttctgctctggaaagctgaggtgtgacaccttttcataagtcatcagaaaatatatgtgcatacctgtttcgtaagtatgaaaattattatcacataataaacttcttggtatttttaaaaaatattttgtcactgtgtatattttaaacagattgtttgaagaatagttagcaaaccaactatatgcaccctataaaatcatgttataayaaaaaaaaaaaaaaatctgatgaaggaacaaagtggcttaactggtcattctctacaaattgccaaaatgaacattaatacacttaccaaaatcaaaatatgctgagtttacagaagcttttggaattcatactctctacttgattatgagggtgaagttagtagagaaattagtagtacatttcctacttaggacatcattaargtgttttttgtttgtttgtttgtttttttccagtggtcctcaggaagtactgttttcaatacaagaaaaatattgtattccactaaaggagtaaa

SEQ ID NO: 65648 - DNA, 600 bp, Chicken  19866894333020_2
taaaaaatattttgtcactgtgtatattttaaacagattgtttgaagaatagttagcaaaccaactatatgcaccctataaaatcatgttataaaaaaaaaaaaaaaaaatctgatgaaggaacaaagtggcttaactggtcattctctacaaattgccaaaatgaacattaatacacttaccaaaatcaaaatatgctgagtttacagaagcttttggaattcatactctctacttgattatgagggtgaagttagtagagaaattagtagtacatttcctacttaggacatcattaargtgttttttgtttgtttgtttgtttttttccagtggtcctcaggaagtactgttttcaatacaagaaaaatattgtattccactaaaggagtaaaaggttggtagtacgaagtgccaaaggaaaaaccaaggcccctgttactacaaaaaatataacattagaacatctctcttagagacaaaagctgaactaatttttttaagttaactgtatatattgtcttgtgtcatttatataccaaagtaagattcctgaaattagaaacctgatcaattttcaccctcagtaatattagcctt

SEQ ID NO: 65649 - DNA, 599 bp, Chicken  19866894333027_1
  misc_feature (1)..(83): n is any nucleotide
nnnnnnnnnnnnnnnnnnnnnnnnnnnnnnnnnnnnnnnnnnnnnnnnnnnnnnnnnnnnnnnnnnnnnnnnnnnnnnnnnnnctgtgacatcccgacgtggttcgtctccaccctactcctcagagctgagaaggccatgaggagatccaggcagtcccacgtgagacctcctgagctccacggggctgctggtatctctgctgctgtgatgacagcccttcccatggctgagggatgggaatgtgcacactgcagagccagaaaaaagccctcaggtgttcaatacgaagcagcattrggcttctaaagtgttaacagtacatatgttgcacgtgtcatcctgcacttcaaagctttttattgaagctgataaacacrggtacttgcaacttttacccagaaacagcagcacgatgatgttcagcagcaaacattcaccaagccactcagtgccaggaacgagagcagacagacagacagttcagctgcggtaccacagccagcactgrtctcggtacttccttcaccaggtgcttgggtcagcactgagaggcttagaggctaaatcactccgcgtacgaatgagaaacaacgcca

SEQ ID NO: 65650 - DNA, 599 bp, Chicken  19866894333027_2
  misc_feature (1)..(3): n is any nucleotide
nnnctgtgacatcccgacgtggttcgtctccaccctactcctcagagctgagaaggccatgaggagatccaggcagtcccacgtgagacctcctgagctccacggggctgctggtatctctgctgctgtgatgacagcccttcccatggctgagggatgggaatgtgcacactgcagagccagaaaaaagccctcaggtgttcaatacgaagcagcattrggcttctaaagtgttaacagtacatatgttgcacgtgtcatcctgcacttcaaagctttttattgaagctgataaacacrggtacttgcaacttttacccagaaacagcagcacgatgatgttcagcagcaaacattcaccaagccactcagtgccaggaacgagagcagacagacagacagttcagctgcggtaccacagccagcactgrtctcggtacttccttcaccaggtgcttgggtcagcactgagaggcttagaggctaaatcactccgcgtacgaatgagaaacaacgccacttgtttcagcagctgcacgcaggagagctcagcccggccctgttgagttgatataaaacaaagagcaataccaaaacgt

SEQ ID NO: 65651 - DNA, 600 bp, Chicken  19866894333027_3
tgacagcccttcccatggctgagggatgggaatgtgcacactgcagagccagaaaaaagccctcaggtgttcaatacgaagcagcattrggcttctaaagtgttaacagtacatatgttgcacgtgtcatcctgcacttcaaagctttttattgaagctgataaacacrggtacttgcaacttttacccagaaacagcagcacgatgatgttcagcagcaaacattcaccaagccactcagtgccaggaacgagagcagacagacagacagttcagctgcggtaccacagccagcactgrtctcggtacttccttcaccaggtgcttgggtcagcactgagaggcttagaggctaaatcactccgcgtacgaatgagaaacaacgccacttgtttcagcagctgcacgcaggagagctcagcccggccctgttgagttgatataaaacaaagagcaataccaaaacgtatttcactttccaggtcagagtcagaggacgccaggtttggagctgcagtgcagacayggagcrgccccagctcaggcgtcttccccatcaggaatggaaccttgcacacaaatgcagcggtatttctgtgt

SEQ ID NO: 65652 - DNA, 555 bp, Chicken  19866894333027_4
caccaagccactcagtgccaggaacgagagcagacagacagacagttcagctgcggtaccacagccagcactgrtctcggtacttccttcaccaggtgcttgggtcagcactgagaggcttagaggctaaatcactccgcgtacgaatgagaaacaacgccacttgtttcagcagctgcacgcaggagagctcagcccggccctgttgagttgatataaaacaaagagcaataccaaaacgtatttcactttccaggtcagagtcagaggacgccaggtttggagctgcagtgcagacayggagcrgccccagctcaggcgtcttccccatcaggaatggaaccttgcacacaaatgcagcggtatttctgtgtctctcatctgttgacatcatctttgctgagtgcacacagctagcaataaacatgcatttgggagcagtttccctttgttctaagtgatttcaggctggcggctctcccttacatgcatgccggctgaatcacgatgaaggccttctccagtaatactttacactaacataatccaattaaa

SEQ ID NO: 65653 - DNA, 549 bp, Chicken  19866894333027_5
gccactcagtgccaggaacgagagcagacagacagacagttcagctgcggtaccacagccagcactgrtctcggtacttccttcaccaggtgcttgggtcagcactgagaggcttagaggctaaatcactccgcgtacgaatgagaaacaacgccacttgtttcagcagctgcacgcaggagagctcagcccggccctgttgagttgatataaaacaaagagcaataccaaaacgtatttcactttccaggtcagagtcagaggacgccaggtttggagctgcagtgcagacayggagcrgccccagctcaggcgtcttccccatcaggaatggaaccttgcacacaaatgcagcggtatttctgtgtctctcatctgttgacatcatctttgctgagtgcacacagctagcaataaacatgcatttgggagcagtttccctttgttctaagtgatttcaggctggcggctctcccttacatgcatgccggctgaatcacgatgaaggccttctccagtaatactttacactaacataatccaattaaa

SEQ ID NO: 65654 - DNA, 600 bp, Chicken  19866894333028_1
ctaaaagaatattacaggctttacactctgacaaaatcacctttacgccttcttttattttatcctagttaggtaacgtcattgcagccttcttgacctcatatcattaagaattgaataccatgaatatttgcctgcagtggcaagattctcgttcttgctggaaattttttacagtggtttgctttttagaatacactgaaattcaaagcatgatgttacctttgcaaaattctatccaaaatctccagctcagcttaagctaacagggagaactgatgaaaaatattggttgaactrctgataaacaacaaaggatgttttcctatccaactttcttcatcttcaaacaacaacatcctgactgtttcaaaattgaacagcatcaacaaaattcactgcctcttaacaaacaaatcatgttcacatggttatcagagaaattatcttaaatgcagagacaagaaagaactcctcgtcaagcaagacaattacactaaaacatccaaatcagtcaactgcataatgaatcaaatggaaagcagtttaacattctgttagacaaacatcttacaaaccacagccacagctgttgttgct

SEQ ID NO: 65655 - DNA, 600 bp, Chicken  19866894333034_1
tagtgttccccaggggtcggtgctggggtctgtcctgtttaagatctttattgatgacctagatgaagggattgagtgtaccctctgtaagtttgcagatgacaccaagttgggaggtggtgttggtagggaggggtagggaggcccttcagaggggtctagataagctggatcactgggctaatgtgaacgggatgatgttcaacaaggccaagtgcttgtggccacagtaaccccaggcagcgctataggtttggggatgagtggctggacgactgtgaagaggaaaggggcctgggsgtgttrgttgatgactcgaggaaatggccacaagttgtaccagaggaggtttacgttagacgtaaggaagaactttttctctcagagagtggtaaggtgctgaaaygtcctgcccagggtggtggtggagtttctgtccctggcagtgttcaagaggcatctggctgaggatctacgagatatggcttagtggcttgtggtagcaagggtaatgggaggacgtctggactatatgatcttgtaggtcctttccaaccttgtgattttatgattctatgatgattctatgattctattttc

SEQ ID NO: 65656 - DNA, 600 bp, Chicken  19866894333034_2
tccccaggggtcggtgctggggtctgtcctgtttaagatctttattgatgacctagatgaagggattgagtgtaccctctgtaagtttgcagatgacaccaagttgggaggtggtgttggtagggaggggtagggaggcccttcagaggggtctagataagctggatcactgggctaatgtgaacgggatgatgttcaacaaggccaagtgcttgtggccacagtaaccccaggcagcgctataggtttggggatgagtggctggacgactgtgaagaggaaaggggcctgggsgtgttrgttgatgactcgaggaaatggccacaagttgtaccagaggaggtttacgttagacgtaaggaagaactttttctctcagagagtggtaaggtgctgaaaygtcctgcccagggtggtggtggagtttctgtccctggcagtgttcaagaggcatctggctgaggatctacgagatatggcttagtggcttgtggtagcaagggtaatgggaggacgtctggactatatgatcttgtaggtcctttccaaccttgtgattttatgattctatgatgattctatgattctattttcctgact

SEQ ID NO: 65657 - DNA, 600 bp, Chicken  19866894333034_3
aagttgggaggtggtgttggtagggaggggtagggaggcccttcagaggggtctagataagctggatcactgggctaatgtgaacgggatgatgttcaacaaggccaagtgcttgtggccacagtaaccccaggcagcgctataggtttggggatgagtggctggacgactgtgaagaggaaaggggcctgggsgtgttrgttgatgactcgaggaaatggccacaagttgtaccagaggaggtttacgttagacgtaaggaagaactttttctctcagagagtggtaaggtgctgaaaygtcctgcccagggtggtggtggagtttctgtccctggcagtgttcaagaggcatctggctgaggatctacgagatatggcttagtggcttgtggtagcaagggtaatgggaggacgtctggactatatgatcttgtaggtcctttccaaccttgtgattttatgattctatgatgattctatgattctattttcctgactgccactgttttatgcttagtgtcctttcttgacaatatctgaagtgatagcgtacagtctattatattgcaccagtatttgagaatacagtctcagacta

SEQ ID NO: 65658 - DNA, 599 bp, Chicken  19866894333046_1
  misc_feature (1)..(137): n is any nucleotide
nnnnnnnnnnnnnnnnnnnnnnnnnnnnnnnnnnnnnnnnnnnnnnnnnnnnnnnnnnnnnnnnnnnnnnnnnnnnnnnnnnnnnnnnnnnnnnnnnnnnnnnnnnnnnnnnnnnnnnnnnnnnnnnnnnnnnnnnnctaagttagaattgagtgttacttgcatatcccctttatttgccatgtctcttgtccaagcagagatttcagactgctttctgtgtttaaatgtaggcctgttcctagcagaactagtccctctaaggcacacacacctcgtcatgaggagcacatgcagaaygtgcgcaggtttcatgagtccttgcagcaagcagaaggaaatgcacaacgggcagccaggatggattcgctgtcactgtcgtcgcgtgcttctcttctgactgctctcaggtaaggcaaagccttagatttacaaagcacagcttgaaacttcagaattcctgcactgaattttaaagagaatgaaaaacacagcgactgataaaaaaaagtatcagtgtaatttgcagaaggatttttctgctgtctagattccagactaacagatcagctctaaattttgggagragaatgtttatt

SEQ ID NO: 65659 - DNA, 466 bp, Chicken  19866894333046_2
gcacatgcagaaygtgcgcaggtttcatgagtccttgcagcaagcagaaggaaatgcacaacgggcagccaggatggattcgctgtcactgtcgtcgcgtgcttctcttctgactgctctcaggtaaggcaaagccttagatttacaaagcacagcttgaaacttcagaattcctgcactgaattttaaagagaatgaaaaacacagcgactgataaaaaaaagtatcagtgtaatttgcagaaggatttttctgctgtctagattccagactaacagatcagctctaaattttgggagragaatgtttattatctgcaggaatgtaagactgacctctatatcagtcgtgaagtcaagtaataccctttcctttaagacctctactggaaggtcattgcaaatccaactttgaatgagtatgtttaaaactagctgttttttttttttttagttcccagcctaaa

SEQ ID NO: 65660 - DNA, 600 bp, Chicken  19866894333057_1
aggctagagctggatgttcttctgtttggtgtttcaggcacttgccgatgattgcagctctgctacacggccgtgttcacctcaatttccaggagttcaggcagcagaaccacttgaccttcttcatacacgtcctggggatcctggagctgcttcagccacaggtcttccagaatgagcaccaggcggcgctatgggactgtctactctccttcatccgtctgctgttggtaggcaaagtccttgctgcacattgtgtgtgggctgccggccgctagagggagaagctaatgtaacacrgagccagcccgatgttctgctatacgaagggagaaccttcttatatcttaagagccaaaagatgtatagaataccttggagagattataagaggggaagccagcgatcagtaatctaactcctgggccccagrggtgcaggacagagcaatgaatcattgctgtttttgttaactcatcatctctaccctttctcagaactacaggaaatcctcacgacacctggctgccttcatcagcaaatatgtccagtttatccagaagtacatcacgtgcaatgcacaagcagctgtctccttct

SEQ ID NO: 65661 - DNA, 600 bp, Chicken  19866894333057_2
cctggggatcctggagctgcttcagccacaggtcttccagaatgagcaccaggcggcgctatgggactgtctactctccttcatccgtctgctgttggtaggcaaagtccttgctgcacattgtgtgtgggctgccggccgctagagggagaagctaatgtaacacrgagccagcccgatgttctgctatacgaagggagaaccttcttatatcttaagagccaaaagatgtatagaataccttggagagattataagaggggaagccagcgatcagtaatctaactcctgggccccagrggtgcaggacagagcaatgaatcattgctgtttttgttaactcatcatctctaccctttctcagaactacaggaaatcctcacgacacctggctgccttcatcagcaaatatgtccagtttatccagaagtacatcacgtgcaatgcacaagcagctgtctccttcttgcagaagcactcggatcctctacagtaagctttcttactccagttagcccatgggttagttcatggagagcttgctcaggtagggtgccatgagataatcaggcaggggacagcaaggtaatgtgrcaacag

SEQ ID NO: 65662 - DNA, 600 bp, Chicken  19866894333057_3
cccagrggtgcaggacagagcaatgaatcattgctgtttttgttaactcatcatctctaccctttctcagaactacaggaaatcctcacgacacctggctgccttcatcagcaaatatgtccagtttatccagaagtacatcacgtgcaatgcacaagcagctgtctccttcttgcagaagcactcggatcctctacagtaagctttcttactccagttagcccatgggttagttcatggagagcttgctcaggtagggtgccatgagataatcaggcaggggacagcaaggtaatgtgrcaacagttgttaatgtggcacttcttcacccttgcttaaatgtctattgacatgagcagcatctccctttttatagatgaaaactgaagctgacgaagttgggtggtaatctgaactcgcataatgacttaaatgctctgataaggtattgtcgtgctctgcagtcatttccagagagccagcaatggagtctttacctggagcaataacagcaggatcacagctgcagatacagggacaaacttaaattgagttctaataggtcactctgaaagtaatgccccctattatttccccaca

SEQ ID NO: 65663 - DNA, 600 bp, Chicken  19866894333060_1
cacatcagctttctctttcagaaccctaggatgggtatcatctggccccatggatttaaacacgttcaatttcatgagatttcatggtacctttccaaaccaagccattctatgaccttctagacgaccacaggttattttatgttttattcctttatgaaaaaatgtatctgtactgatatctgagttaaagtcatgaatacaaggcacgtgaaaggtgttcagcagtattgaacttgcattattagtacattgatggggctactattttaatgttgaaaaatgatgatctaaagagtstatatgctgtaggtgttaggcagcggatctctaagaagtgaaggaggtgttgaaacttgatgaaaaagctacctgtgtctcttctrcagattgttctgtgtcagaacaacattcgccaccagtcccatatgaaccgagtggttgcgcatgaattgatacatgcttttgatcactgccgtgctcatgttgactggtttaaaaatgtcaaacatttggcctgctcagaggtaagttaaaatgattctaatgttatcactgaattcattgctgattgttattagggtcatttaattagatgtc

SEQ ID NO: 65664 - DNA, 600 bp, Chicken  19866894333060_2
gtacctttccaaaccaagccattctatgaccttctagacgaccacaggttattttatgttttattcctttatgaaaaaatgtatctgtactgatatctgagttaaagtcatgaatacaaggcacgtgaaaggtgttcagcagtattgaacttgcattattagtacattgatggggctactattttaatgttgaaaaatgatgatctaaagagtstatatgctgtaggtgttaggcagcggatctctaagaagtgaaggaggtgttgaaacttgatgaaaaagctacctgtgtctcttctrcagattgttctgtgtcagaacaacattcgccaccagtcccatatgaaccgagtggttgcgcatgaattgatacatgcttttgatcactgccgtgctcatgttgactggtttaaaaatgtcaaacatttggcctgctcagaggtaagttaaaatgattctaatgttatcactgaattcattgctgattgttattagggtcatttaattagatgtcctgttacattaatgattagttaatgctcttgagatattttattctttctgtctggtcaacctaaccagttttcactcagagaacaa

SEQ ID NO: 65665 - DNA, 599 bp, Chicken  19866894333066_1
  misc_feature (1)..(119): n is any nucleotide
nnnnnnnnnnnnnnnnnnnnnnnnnnnnnnnnnnnnnnnnnnnnnnnnnnnnnnnnnnnnnnnnnnnnnnnnnnnnnnnnnnnnnnnnnnnnnnnnnnnnnnnnnnnnnnnnnnnnnnntgtcagacctcttaatatgtcagatgactgagcatcgattgaatcgaaatcaatttcacttatttctctgtttagtttaaatgcatgttataccgtttacattggtactacgtttctgtgctagtatttcaactgagacaaagttgtaccacagcttagttaagtcaaaactgtttgaacraagtagaactggcaggttgaatttgcttaccagaatgtaacataccagacattggyttccactaaaaccattggtttaaattgtaaagayagatttaattgtattattgaacaacgacctttaggcaacaatgtaataagaccttcattgacaatttatactgctagttaatgaggaacattgactgaagatggagtcatttgcagttgattatttaactttttgggaactgaagatggcatctaagaagtgaaacttgtaatatttaacgtgtagtcttttaaaacaattattctgca

SEQ ID NO: 65666 - DNA, 599 bp, Chicken  19866894333066_2
  misc_feature (1)..(63): n is any nucleotide
nnnnnnnnnnnnnnnnnnnnnnnnnnnnnnnnnnnnnnnnnnnnnnnnnnnnnnnnnnnnnnntgtcagacctcttaatatgtcagatgactgagcatcgattgaatcgaaatcaatttcacttatttctctgtttagtttaaatgcatgttataccgtttacattggtactacgtttctgtgctagtatttcaactgagacaaagttgtaccacagcttagttaagtcaaaactgtttgaacraagtagaactggcaggttgaatttgcttaccagaatgtaacataccagacattggyttccactaaaaccattggtttaaattgtaaagayagatttaattgtattattgaacaacgacctttaggcaacaatgtaataagaccttcattgacaatttatactgctagttaatgaggaacattgactgaagatggagtcatttgcagttgattatttaactttttgggaactgaagatggcatctaagaagtgaaacttgtaatatttaacgtgtagtcttttaaaacaattattctgcattgtgaaatttgacttctgcatttgattttatacaggtagagaaatatatttaact

SEQ ID NO: 65667 - DNA, 599 bp, Chicken  19866894333066_3
  misc_feature (1)..(29): n is any nucleotide
nnnnnnnnnnnnnnnnnnnnnnnnnnnnntgtcagacctcttaatatgtcagatgactgagcatcgattgaatcgaaatcaatttcacttatttctctgtttagtttaaatgcatgttataccgtttacattggtactacgtttctgtgctagtatttcaactgagacaaagttgtaccacagcttagttaagtcaaaactgtttgaacraagtagaactggcaggttgaatttgcttaccagaatgtaacataccagacattggyttccactaaaaccattggtttaaattgtaaagayagatttaattgtattattgaacaacgacctttaggcaacaatgtaataagaccttcattgacaatttatactgctagttaatgaggaacattgactgaagatggagtcatttgcagttgattatttaactttttgggaactgaagatggcatctaagaagtgaaacttgtaatatttaacgtgtagtcttttaaaacaattattctgcattgtgaaatttgacttctgcatttgattttatacaggtagagaaatatatttaactttatcccatgtacaattttgtaattaatrgaaac

SEQ ID NO: 65668 - DNA, 600 bp, Chicken  19866894333066_4
aaagayagatttaattgtattattgaacaacgacctttaggcaacaatgtaataagaccttcattgacaatttatactgctagttaatgaggaacattgactgaagatggagtcatttgcagttgattatttaactttttgggaactgaagatggcatctaagaagtgaaacttgtaatatttaacgtgtagtcttttaaaacaattattctgcattgtgaaatttgacttctgcatttgattttatacaggtagagaaatatatttaactttatcccatgtacaattttgtaattaatrgaaactgtaaaaccttgacatttttcattttcattgaataaatgggaatgttttaaattctaataatgataggttgatcatgaaaattatgtttacttacagagagaacaggaaatgagaatgggtgatatgggtcctcgtggagcaattaacatgggaggtagggatctgaaggaaaaaggcttctgtaatgtaaaatttctttttctttgggactgtacatgttactcaagtgtaattcattagtggcaactactggtgaaatggagtaaacggtattgggaagtaggaaacaaaaaa

SEQ ID NO: 65669 - DNA, 503 bp, Chicken  19866894333066_5
gggaggtagggatctgaaggaaaaaggcttctgtaatgtaaaatttctttttctttgggactgtacatgttactcaagtgtaattcattagtggcaactactggtgaaatggagtaaacggtattgggaagtaggaaacaaaaaaatgatttccttacagacagcttttttatttccagttaatgtgttttaaatacctgctgggagaaaaaagctatgtgcaaggtgacagaaaacaagaggcaaggaaaggtagtactccagaaattatgcaatgcaagacatgaattttctgtttcsaaagtgtttggtgttctgctgkgggaatatgatcagaaaaattggaactgtaactgtgcacagtgagaggatttagtgtttaaaataggtcagttcttgtccaaattttaataaataattgtgcctataaatttattgtgaatctgtatttgcaagaaattctcagtttccttttgtaacttagactactgtcactgcaaaag

SEQ ID NO: 65670 - DNA, 481 bp, Chicken  19866894333066_6
aaaggcttctgtaatgtaaaatttctttttctttgggactgtacatgttactcaagtgtaattcattagtggcaactactggtgaaatggagtaaacggtattgggaagtaggaaacaaaaaaatgatttccttacagacagcttttttatttccagttaatgtgttttaaatacctgctgggagaaaaaagctatgtgcaaggtgacagaaaacaagaggcaaggaaaggtagtactccagaaattatgcaatgcaagacatgaattttctgtttcsaaagtgtttggtgttctgctgkgggaatatgatcagaaaaattggaactgtaactgtgcacagtgagaggatttagtgtttaaaataggtcagttcttgtccaaattttaataaataattgtgcctataaatttattgtgaatctgtatttgcaagaaattctcagtttccttttgtaacttagactactgtcactgcaaaag

SEQ ID NO: 65671 - DNA, 600 bp, Chicken  19866894333078_1
agcagcaattcattttacaccaacgatacacattttatgaggggaaaaactactaaagatttaatggtgtcaattaaaaagccgagagtttgaatggttcgatggctgagtcacagacctttgcctataataggttccattatagccctgagctcaagctgtgggaagaggcttgcagatgagtaagaggaatcggtatttctaaatgttattgcaaaggaaggtgtcctttaagcattgcacagttgtgactgtatcagtctgtgcttatccagattcctagctccattttagaagttytgaagtttgcaggcacattacaactgcaaatactttgacagaaattaagcccatcagtgcgaagccctcacaactttaattacgattttcatacacacgtccaaacttgaaatacttcaatacttacaatttttgttatcactcctgacttttggtattcatttatgtttacaggtaacaaggtaagatagctcaagactaaataagtttgtacttaaccacaggatgtctacaaacaagaggagaagaaaattaaaggctaatatgcatctcacgatgactcccactaaagccagggaa

SEQ ID NO: 65672 - DNA, 599 bp, Chicken  19866894333081_1
  misc_feature (1)..(200): n is any nucleotide
nnnnnnnnnnnnnnnnnnnnnnnnnnnnnnnnnnnnnnnnnnnnnnnnnnnnnnnnnnnnnnnnnnnnnnnnnnnnnnnnnnnnnnnnnnnnnnnnnnnnnnnnnnnnnnnnnnnnnnnnnnnnnnnnnnnnnnnnnnnnnnnnnnnnnnnnnnnnnnnnnnnnnnnnnnnnnnnnnnnnnnnnnnnnnnnnnnnnnnnntgcaaagtaatagcagtcacaggtcacagccaaatgctctttaggaaaattcttccaaagccttctttgctttttttcttctcttttgaaagccaggctygctcctcagttcctcgtcacactggaagatgctatgtaccccagtgaggcatacatggcttccacactgcttctcctgcttacagagtggagctgcttctgtctgacagcattggaaaggttcctatcacctgcagagaggtgttaatgaaaaactggaggataattaatgttgtagataggtttcaagaccagaagtatgcatatttcygtacagtaaaatcattctcctttgcttcatactctgtaaagaacagaaggcagccctgatcctgcctggggtattaacagaactaatac

SEQ ID NO: 65673 - DNA, 600 bp, Chicken  19866894333081_2
tagcagtcacaggtcacagccaaatgctctttaggaaaattcttccaaagccttctttgctttttttcttctcttttgaaagccaggctygctcctcagttcctcgtcacactggaagatgctatgtaccccagtgaggcatacatggcttccacactgcttctcctgcttacagagtggagctgcttctgtctgacagcattggaaaggttcctatcacctgcagagaggtgttaatgaaaaactggaggataattaatgttgtagataggtttcaagaccagaagtatgcatatttcygtacagtaaaatcattctcctttgcttcatactctgtaaagaacagaaggcagccctgatcctgcctggggtattaacagaactaatacataactgtgagactgctcacacttgccagcaattacagatactatataatactacaattacttgcatatatagatattgtgtacagtacagcccacaataggaatccagaattctcttgagaatcccaggctctgctggaaacacatgcacagagatgtttcagctgatgytcagaaagccaacattctcttcttctcagaatcacagttc

SEQ ID NO: 65674 - DNA, 600 bp, Chicken  19866894333081_3
gttgtagataggtttcaagaccagaagtatgcatatttcygtacagtaaaatcattctcctttgcttcatactctgtaaagaacagaaggcagccctgatcctgcctggggtattaacagaactaatacataactgtgagactgctcacacttgccagcaattacagatactatataatactacaattacttgcatatatagatattgtgtacagtacagcccacaataggaatccagaattctcttgagaatcccaggctctgctggaaacacatgcacagagatgtttcagctgatgytcagaaagccaacattctcttcttctcagaatcacagttccaggcacaagtttctaaaacttgctttgcatttcactctaagtcctgctttactttggaacagggctgcttttcttgtagccacaactagtacaatcgggaacagtacagcagcacaagtatttaactaaatactactaccaatgctgtcaaagcatcatctccctgtctcagctccttcaaaagtaatgcagcttctgaaagacacagctcaagaggcctctaagtcttgcagtgttggggaagaagagcacttgaatg

SEQ ID NO: 65675 - DNA, 600 bp, Chicken  19866894333082_1
gcagctgtgggggaacagccctggcaaacagggatggattgtggtagtgtggaagtgcactagtggagtgaaaaaaaaaaatcccacaatgttttaaaatgatgaaagatggagttaacactcaaaataaatatcaagacagctcacagaaacgctcttactgtaggattgtaggtgtctggtgtcagcctgagcaggtgtgtaatctattcttgaagagctctggttgcagagtgcaattgctcagggagcagagtccttcttcccttcatttccctcttaataactgccagttcctcytgccaccttacctatgtctctgctgctgtaattcaggcccatcaggtcttggctacccaccacagagacaaagcaggttgtttccctccttcacaatagtctcctgcagatttaaagacgcgctctgagtctacagggaatgctgttttctgagtaaaaccacatcagttcactctgtcctctgtcacaggtgatgttttccaagctgccaaagccctccttggtgctctcctcggagctctctctgggagatgaacatctaccctggagtgctctgtactccatgtactctggcaggaa

SEQ ID NO: 65676 - DNA, 600 bp, Chicken  19866894333084_1
aaacaaatattgaatggaaaaaagaaagtaaatcaagaagtctctgctaaagtgacaagtgagtgcagaaagaataaagtcgaaaaacagtaaaaggtcacttaaagttcaaaactagcatttataatgtcacggaggccaagagagtgatgatattgatgtactaaaatacatacaaaattatagtagatgacagaatgacagaatggtttgacccatgggcagggacaccttccactattcaacttttcccattcaacctggccttggaaacttctagggagatgacatcaacaattmcatatcttagatgaccttgtatgtgttacattggccagtatactgttggaagatgctttctctaacagtgaacctttcacagtacctggctgagcctagaagctgggaggggctggacctcccaagctgctgaaaatgccactgaaaatgctgaggagcgggggctgaaaataagagagactgaaataagcccaaggttacattgaggctattctcattgtcttcattgtgaattaagttttggtgctagatttgatttagtaaaggctggattttttctctcataaaaattaatatttt

SEQ ID NO: 65677 - DNA, 600 bp, Chicken  19866894333085_1
cttgggctgatctgatgctacagagcccagagctgagcacttttcccaactacttgctggtgaggaaagagaagcagacgtgaggtgaggagttggaaagggtgagaactggatgtgtcatgaggagagctgcctcactccgggcttgcttgcttgttatctgaactactgcactgctctttgggcaaggagacagggtttgcatttgtgacttccaaaccagcaccacctgtgctcagagggggtggacttagcatgggatctatatgagggtataagggtggagctggagaaccatgragaccattgccttttataaatctccctataaagcagcgtagctgcaggtttacataattgttgtgagcaaccctggtgtttacaccatccattacaaagtcctttggcaagtgcccacctgccacagctcagccaacataaccagccaaattctgatctcacagcctcgtagaaacgatttggatttatatggatctgaatgaggtcaggacctggcccagaatccacatggatggtcaaagttggtgcatggatctgcatacaaatcccttcctctgtgctggacattgactgtgaatc

SEQ ID NO: 65678 - DNA, 598 bp, Chicken  19866894333089_1
agagacacaaacaaaccaacaaagccagaggccaatccatctgctgtaagtcttgtaaatagaagagattccagcagaaaggcaagctttcccaaatgcagcgcattactgtgttacttcagctgcccaggagagcccactgatggcttttttcagcaggccatttacttcgtgcattctccatctttcttaggactgagcttacagccctacatgggcagtcttcacagactgaaaaggtggcagagggacttggtaagtcagtgctaacctagcaacagacagtatgtagagaaaggraaaaaaaaaaagggggtatgggggggagaatgctgagtaagagcatttcatcatttccgtttggcatttatttgcatagccagtgatggaaagggctgttcaactcctgcatcctcagcctggcaaggatgcagacagtgcaggagctccagaacacagctgacagaagaggagcaagaagagatcagaacagaagagctgtaagatcagaaaaggctctcgtccagccccacagtgcaattcaccatacagagaaggtcaaggattgatctgacaacagttcaagtgcctaaaagag

SEQ ID NO: 65679 - DNA, 600 bp, Chicken  19866894333100_1
ccttcctatactgaggactccacatctgtacacagtactccaggtgaggcctcacagctcagagcagaggggcaggatcacctcctttgtcctgctggccacactgctttggatgcagcccaggacatggttggctttctaggctgccagggcccattgcttgctcatgtccatcttcccatccaccaggtcctttttgacaaggttgtattatatccttacctcccccatctgttctgtgcatggtcggattatatctgcatagcttgtctcatttaaaaataaacaatctctgttttsaaagcagtagaagagtatttattgttttgataggttctagaaatctttccaagccaattcactggcaacagaatgaaagggcagttcatttccatggcgatgccaactgaatcactccagagcagctgaagaatggatccttacctgggtgggtgctggttgccgtccagtaatcgtgcagccagcaagtactctgtaatgctacataaccataaaactgttagttttcattcacacttgttttttctctgcattctttagaagcttcaaaagttcggggtttcacatctggcgggtaat

SEQ ID NO: 65680 - DNA, 600 bp, Chicken  19866894333104_1
gttggcctttgctgcacgtactgcctgttaaatgaaaggattatttcaagctacaagaatatcctagatatttttttttaaagctgttggcctgtaggcttatcacagagttcccagttggctgtggacaaatcctttaagcactttgctagagtgtggggagcaccaggaagagtcagtgctgctctgggcactgtgcagagtgcagtgagtggcggacatgctggcaggttgcatgcagactgctggaagggacagacctcggtgagtgctgtgagagcagcatggcatgtgagttcytaatctccatttttgttttatctggggaagragatggtagggaagcagggctrtgtagagaaataccgaaggggaactgctgggattttgagaaaacaactagtgctgctttcacaatttagatttggaaactcccttgaaacagctgtggctgctcttccccttttggtctaagtctgtgatggtggctcctttttgcatatatatatattattccttcaacttgaaagggagctctgcttgcatcctgaccctggsagtgtgggagggagtgggaaacttcagcagttgtgggtcagg

SEQ ID NO: 65681 - DNA, 600 bp, Chicken  19866894333104_2
atgaaaggattatttcaagctacaagaatatcctagatatttttttttaaagctgttggcctgtaggcttatcacagagttcccagttggctgtggacaaatcctttaagcactttgctagagtgtggggagcaccaggaagagtcagtgctgctctgggcactgtgcagagtgcagtgagtggcggacatgctggcaggttgcatgcagactgctggaagggacagacctcggtgagtgctgtgagagcagcatggcatgtgagttcytaatctccatttttgttttatctggggaagragatggtagggaagcagggctrtgtagagaaataccgaaggggaactgctgggattttgagaaaacaactagtgctgctttcacaatttagatttggaaactcccttgaaacagctgtggctgctcttccccttttggtctaagtctgtgatggtggctcctttttgcatatatatatattattccttcaacttgaaagggagctctgcttgcatcctgaccctggsagtgtgggagggagtgggaaacttcagcagttgtgggtcaggaatgagtgtggaggagcagctctggctggct

SEQ ID NO: 65682 - DNA, 600 bp, Chicken  19866894333104_3
caagaatatcctagatatttttttttaaagctgttggcctgtaggcttatcacagagttcccagttggctgtggacaaatcctttaagcactttgctagagtgtggggagcaccaggaagagtcagtgctgctctgggcactgtgcagagtgcagtgagtggcggacatgctggcaggttgcatgcagactgctggaagggacagacctcggtgagtgctgtgagagcagcatggcatgtgagttcytaatctccatttttgttttatctggggaagragatggtagggaagcagggctrtgtagagaaataccgaaggggaactgctgggattttgagaaaacaactagtgctgctttcacaatttagatttggaaactcccttgaaacagctgtggctgctcttccccttttggtctaagtctgtgatggtggctcctttttgcatatatatatattattccttcaacttgaaagggagctctgcttgcatcctgaccctggsagtgtgggagggagtgggaaacttcagcagttgtgggtcaggaatgagtgtggaggagcagctctggctggctttatttagcctgctaatgtttc

SEQ ID NO: 65683 - DNA, 600 bp, Chicken  19866894333104_4
gagtgcagtgagtggcggacatgctggcaggttgcatgcagactgctggaagggacagacctcggtgagtgctgtgagagcagcatggcatgtgagttcytaatctccatttttgttttatctggggaagragatggtagggaagcagggctrtgtagagaaataccgaaggggaactgctgggattttgagaaaacaactagtgctgctttcacaatttagatttggaaactcccttgaaacagctgtggctgctcttccccttttggtctaagtctgtgatggtggctcctttttgcrtatatatatattattccttcaacttgaaagggagctctgcttgcatcctgaccctggsagtgtgggagggagtgggaaacttcagcagttgtgggtcaggaatgagtgtggaggagcagctctggctggctttatttagcctgctaatgtttccatttcccatctgttcagtgggaataacctaagtgttggggatcaattcactgagtatctgatcgccacacagacactatagcactaaggtactaaaaatgtctatacataaaaataacctcttagactctctggcaccgtgccctt

SEQ ID NO: 65684 - DNA, 600 bp, Chicken  19866894333104_5
agtgcagtgagtggcggacatgctggcaggttgcatgcagactgctggaagggacagacctcggtgagtgctgtgagagcagcatggcatgtgagttcytaatctccatttttgttttatctggggaagragatggtagggaagcagggctrtgtagagaaataccgaaggggaactgctgggattttgagaaaacaactagtgctgctttcacaatttagatttggaaactcccttgaaacagctgtggctgctcttccccttttggtctaagtctgtgatggtggctcctttttgcaratatatatattattccttcaacttgaaagggagctctgcttgcatcctgaccctggsagtgtgggagggagtgggaaacttcagcagttgtgggtcaggaatgagtgtggaggagcagctctggctggctttatttagcctgctaatgtttccatttcccatctgttcagtgggaataacctaagtgttggggatcaattcactgagtatctgatcgccacacagacactatagcactaaggtactaaaaatgtctatacataaaaataacctcttagactctctggcaccgtgcccttg

SEQ ID NO: 65685 - DNA, 600 bp, Chicken  19866894333104_6
acctcggtgagtgctgtgagagcagcatggcatgtgagttcytaatctccatttttgttttatctggggaagragatggtagggaagcagggctrtgtagagaaataccgaaggggaactgctgggattttgagaaaacaactagtgctgctttcacaatttagatttggaaactcccttgaaacagctgtggctgctcttccccttttggtctaagtctgtgatggtggctcctttttgcatatatatatattattccttcaacttgaaagggagctctgcttgcatcctgaccctggsagtgtgggagggagtgggaaacttcagcagttgtgggtcaggaatgagtgtggaggagcagctctggctggctttatttagcctgctaatgtttccatttcccatctgttcagtgggaataacctaagtgttggggatcaattcactgagtatctgatcgccacacagacactatagcactaaggtactaaaaatgtctatacataaaaataacctcttagactctctggcaccgtgcccttggcacatcacaggtcataaagattctgccagacaaaattaactggcagcctcgttcag

SEQ ID NO: 65686 - DNA, 599 bp, Chicken  19866894333108_1
  misc_feature (1)..(24): n is any nucleotide
nnnnnnnnnnnnnnnnnnnnnnnntgggatattacagcaggaaagtgtgtccctgatgagagtgatcactgctgtcatcagtaaggagagctgcaagggcagacagtgtcttaggcattagcctttttaccccccccttttttcttgttttctgtaagacactgtttttctggtctggaagaaatgtgggcttcttcatgctttgcaccttcatgctcagaccaaacaaacttggtgaaaacgggggaggtgtctgcagctttcagttctgagccggagcaaaacaaggctgatgtgctsaaggtcacaaaggaagccggtggctgagctggatacgggaaatcagctttcctggagcagcaaccgtcctccgtgagccttccgcagtcaccgctgtaacgagttgcgttccagatattgctgggacaaacataactcaccctgttcttggaagcatttggctgtctgtgtagcactcgggggcttttaaaactttcctgggaatggggggcatccaggcatgtctacagcccctttggctttcttcagccccagaaagagctttgtgcctgagcggtgatgcagaacatcggatggcc

SEQ ID NO: 65687 - DNA, 600 bp, Chicken  19866894333116_1
agctatggaaaaaaaaggaaaaaaataacaactatttgcccaaatttggggctgctgcttctgctgggaccgcatcccctccttccagccctttgtggctttgctgtcgccatcctttgcctctgaaatcccaggtcctttgtcacctgcgtgaacacccggctttgcaggtgacagctgctgccgtgaggatttctgccactcctgagagccacgggcagacgagtgatgctgcagggggagagcgcggtggagctgcctgcaggctgcagcccctgcaaacccccctcgagctgaaaygatacatgaaataacatcagrtcatcgcttgggaagcactctgggagatgctggaggcgccggggatgccggcgtgctcagggatggccccgctgctgtgcaaaaggtttgctaaaatggacccaggctgaggctggaagctgaaggctgtgctgcagggactgctttgggtgagtgcagacaaggcgagggttgtggtgacggcggcggtgccacgcgggtgtatccacgcgctttgctttggccagacccaactctttcccaagttgtttttaactttgtggggactcacgtggttca

SEQ ID NO: 65688 - DNA, 600 bp, Chicken  19866894333116_2
aaaataacaactatttgcccaaatttggggctgctgcttctgctgggaccgcatcccctccttccagccctttgtggctttgctgtcgccatcctttgcctctgaaatcccaggtcctttgtcacctgcgtgaacacccggctttgcaggtgacagctgctgccgtgaggatttctgccactcctgagagccacgggcagacgagtgatgctgcagggggagagcgcggtggagctgcctgcaggctgcagcccctgcaaacccccctcgagctgaaaygatacatgaaataacatcagrtcatcgcttgggaagcactctgggagatgctggaggcgccggggatgccggcgtgctcagggatggccccgctgctgtgcaaaaggtttgctaaaatggacccaggctgaggctggaagctgaaggctgtgctgcagggactgctttgggtgagtgcagacaaggcgagggttgtggtgacggcggcggtgccacgcgggtgtatccacgcgctttgctttggccagacccaactctttcccaagttgtttttaactttgtggggactcacgtggttcaccttgggagcaccaggggagg

SEQ ID NO: 65689 - DNA, 600 bp, Chicken  19866894333117_1
ctttttcaaattaaacctaagcatatactacactgattaagttatccggttttcattttccactgtgcaaactcataaaactatgctcacatgataaataaactaactttttgaagtagaagtataaaactgcttaccctagaatacttgaaaaggtgccactgaatatgcaatttctggactattattctcatcaaagaaaaaatgttttcaatgctgtggttatatttataataagttatttcatattttgaacatttataagctgttatcggggatgctcaacataatttgagcaakaagttttaagttcaataatcacacttatcactgtctcactgaagtcatcctaactccatgaaggcaaagaaaggaagataacgtgatatcaacrgtatcactgtgaattacctaaggttttccttaacagggtttgtttcaaatgtaacttaggtcaggctgaaaacctataaaaagcagcaacatgtagagagaagatcttatgcttaattctaacagcctacacaactaccgtttttaaaaacatcaaaaaaaagttatctggataaacttatagaaacatgacctaacaaatgctat

SEQ ID NO: 65690 - DNA, 600 bp, Chicken  19866894333117_2
taaataaactaactttttgaagtagaagtataaaactgcttaccctagaatacttgaaaaggtgccactgaatatgcaatttctggactattattctcatcaaagaaaaaatgttttcaatgctgtggttatatttataataagttatttcatattttgaacatttataagctgttatcggggatgctcaacataatttgagcaakaagttttaagttcaataatcacacttatcactgtctcactgaagtcatcctaactccatgaaggcaaagaaaggaagataacgtgatatcaacrgtatcactgtgaattacctaaggttttccttaacagggtttgtttcaaatgtaacttaggtcaggctgaaaacctataaaaagcagcaacatgtagagagaagatcttatgcttaattctaacagcctacacaactaccgtttttaaaaacatcaaaaaaaagttatctggataaacttatagaaacatgacctaacaaatgctattttggacactttatacaaacatagaatcacagaattgcttggttgggaaggggccttaaagcccttaaagttccaactcctctggcattgaata

SEQ ID NO: 65691 - DNA, 599 bp, Chicken  19866894333119_1
  misc_feature (1)..(3): n is any nucleotide
nnnctgcagctcttcattgcagcttgatgctttttttcccccctttttgcattgcctaattttaattagcattcacgcagcttcaggcagcgcagaagacttctagcgacttccccttccccctccgtggcataaaatcaagccagcagcctgaaagatgtgttttggcctggaagcttttgcacagagttgcaagaactgactcataatgctcagccctcttccagcctatctcacaccaatcacgataaggcagcctgtgttctgtaaactgttctctgctagtgacagaagacgacrgggatcagggagggaaactgtgccttgctctaggatgaattaccctattttgttaactcagctaactgattttatagtcttgatttagatgataactcttgactgaaaaaggagtgggtgatagccgtagtgctgctattgtgtactaaaatatccttatcctgtgatcaagtctccagctaaggttctggttgcaagtcctgtatggacaaagcttcaagaaatcgcatgcacagttctcttaatgttgtgtttgagggacgcagtgccttgctcagacttttcattactgccttcag

SEQ ID NO: 65692 - DNA, 600 bp, Chicken  19866894333122_1
ccagtggacccccagcactgtgcagctgattaatgtccaggttctcccctgtagacttactgccagcaaatcagtgcccagcatccccctcatggacccaccatccagccaattagtgcccaggatccaccctccatagaccaactgcctggccaatcagtgctcagcttccctctcataaaccagctgcccagccaatcagtgcccagcatttccctcatggacccactgcccagctaattagtgcccaggatccatcccccatggaccaactgcttggccaatcagtgctctgcattmcccccatggacccactgcccagccaatcagtgtccaggatccctctccatgtatacactgtgttccccagccaatcaccatgcagactcctgcccagacctgcagcacyacccatgcagacagcaggatcctccacagaccttccacactgctcaaccaatcaatgcccaggatccctctctacactcctcaccaatcagccagtaggatccacactctccccagccagtcagcacccagaaggcccccaacgcccctcccacttccccccccacccccccgaactccatctcccagcca

SEQ ID NO: 65693 - DNA, 600 bp, Chicken  19866894333122_2
caattagtgcccaggatccaccctccatagaccaactgcctggccaatcagtgctcagcttccctctcataaaccagctgcccagccaatcagtgcccagcatttccctcatggacccactgcccagctaattagtgcccaggatccatcccccatggaccaactgcttggccaatcagtgctctgcattmcccccatggacccactgcccagccaatcagtgtccaggatccctctccatgtatacactgtgttccccagccaatcaccatgcagactcctgcccagacctgcagcacyacccatgcagacagcaggatcctccacagaccttccacactgctcaaccaatcaatgcccaggatccctctctacactcctcaccaatcagccagtaggatccacactctccccagccagtcagcacccagaaggcccccaacgcccctcccacttccccccccacccccccgaactccatctcccagccaatstcccaccctaggggatggggtgccccatgggrrtgacacctgtgtccctgtccctgcagagagcattcctgaggacttctacatgcgttttggggggccagaggtg

SEQ ID NO: 65694 - DNA, 600 bp, Chicken  19866894333122_3
ccatggacccactgcccagccaatcagtgtccaggatccctctccatgtatacactgtgttccccagccaatcaccatgcagactcctgcccagacctgcagcacyacccatgcagacagcaggatcctccacagaccttccacactgctcaaccaatcaatgcccaggatccctctctacactcctcaccaatcagccagtaggatccacactctccccagccagtcagcacccagaaggcccccaacgcccctcccacttccccccccacccccccgaactccatctcccagccaatstcccaccctaggggatggggtgccccatgggrrtgacacctgtgtccctgtccctgcagagagcattcctgaggacttctacatgcgttttggggggccagaggtgcctcccaccagcactctgcccttcccaaccactgaggggtctgacagctgccccccaccaggggtgaccaaggccaagggtctccccaagacgccagggggccccgccttcccggggggctgggagggaggcctccctcggggcctacgccggcctgggcccacaacaccgctgtacggccgggcccaccggca

SEQ ID NO: 65695 - DNA, 600 bp, Chicken  19866894333122_4
aggatccctctccatgtatacactgtgttccccagccaatcaccatgcagactcctgcccagacctgcagcacyacccatgcagacagcaggatcctccacagaccttccacactgctcaaccaatcaatgcccaggatccctctctacactcctcaccaatcagccagtaggatccacactctccccagccagtcagcacccagaaggcccccaacgcccctcccacttccccccccacccccccgaactccatctcccagccaatstcccaccctaggggatggggtgccccatgggrrtgacacctgtgtccctgtccctgcagagagcattcctgaggacttctacatgcgttttggggggccagaggtgcctcccaccagcactctgcccttcccaaccactgaggggtctgacagctgccccccaccaggggtgaccaaggccaagggtctccccaagacgccagggggccccgccttcccggggggctgggagggaggcctccctcggggcctacgccggcctgggcccacaacaccgctgtacggccgggcccaccggcacctggccaccaacagcaagactgaggtcaccg

SEQ ID NO: 65696 - DNA, 600 bp, Chicken  19866894333122_5
ggatccctctccatgtatacactgtgttccccagccaatcaccatgcagactcctgcccagacctgcagcacyacccatgcagacagcaggatcctccacagaccttccacactgctcaaccaatcaatgcccaggatccctctctacactcctcaccaatcagccagtaggatccacactctccccagccagtcagcacccagaaggcccccaacgcccctcccacttccccccccacccccccgaactccatctcccagccaatstcccaccctaggggatggggtgccccatgggrrtgacacctgtgtccctgtccctgcagagagcattcctgaggacttctacatgcgttttggggggccagaggtgcctcccaccagcactctgcccttcccaaccactgaggggtctgacagctgccccccaccaggggtgaccaaggccaagggtctccccaagacgccagggggccccgccttcccggggggctgggagggaggcctccctcggggcctacgccggcctgggcccacaacaccgctgtacggccgggcccaccggcacctggccaccaacagcaagactgaggtcaccgt

SEQ ID NO: 65697 - DNA, 599 bp, Chicken  19866894333123_1
  misc_feature (1)..(149): n is any nucleotide
nnnnnnnnnnnnnnnnnnnnnnnnnnnnnnnnnnnnnnnnnnnnnnnnnnnnnnnnnnnnnnnnnnnnnnnnnnnnnnnnnnnnnnnnnnnnnnnnnnnnnnnnnnnnnnnnnnnnnnnnnnnnnnnnnnnnnnnnnnnnnnnnnnnnnttctggaggaacttatagcagccttccgtacctgaaagggacctacagaaagctgaggaggcatgtagcaacagggcaaggaataacagctataaactgaaagagagtggatatagattaaatataaggaagaaattcttcactacgaggrtggtgagacactggaacaggttgcccagagaaactgtgaacgctccctctttggaggttttcaaggccaggctggatgggactttgagcaacctgctctagtgggatgtgtatttgcccatagcagggagattggaactagatgatcttaaaagtcccttccaacccatactattctatgaccagtgttatcaagagtattctcatctgaaatccaaaacatagaaccataccaacttctaggaataaagttaactctgtcctctctgaaactaggataagacatctagcaagtgtgct

SEQ ID NO: 65698 - DNA, 381 bp, Chicken  19866894333123_2
ttctggaggaacttatagcagccttccgtacctgaaagggacctacagaaagctgaggaggcatgtagcaacagggcaaggaataacagctataaactgaaagagagtggatatagattaaatataaggaagaaattcttcactacgaggrtggtgagacactggaacaggttgcccagagaaactgtgaacgctccctctttggaggttttcaaggccaggctggatgggactttgagcaacctgctctagtgggatgtgtatttgcccatagcagggagattggaactagatgatctrattacttcgcaggtgtacacaattaaaaaatgtttttttcatttttcattcaaagggagcatttatcaactcttcattata

SEQ ID NO: 65699 - DNA, 600 bp, Chicken  19866894333129_1
ctgaatgatgttctgcatttttttttcctttcctgtgaaggctgcatattgagagatcctagcagcagggtgcccatactgcctcagtaagagccatgtgtcacatacctgctagtgtgctgaacctcactacttcagaagcaagaaagttttacttaaagccaacttctgaccctggctgttatgagtctgattatctgataggtgttgttctattactgaggagctgacagtcttttgatgtccaagtgattagaatgaactctttccaagaattcatgctagtagttaatcgttttrtcttgatgcctttagatgaggagactgagcatgcatataatttgttctatgcactttgttattcaacgtggtatcccatttattgtttctgtctccagcctagagggaacccctttgacctaggctgccatgtccattgagacttaagaaagaggatttgatgtttgccagatctttttatgttctggttattactggtgatcaaaactgcttctatgaagtctgtccttttaggagaagagcaataagaattgaatatgttagacaaaaaggtgcaattctcttttttataatattgct

SEQ ID NO: 65700 - DNA, 528 bp, Chicken  19866894333134_1
aacttgtctgtttgtgggtgcctaattcattgtaatggagatccaccattgaaccacactcactgttttccagcagggacattgcctgctaaggggtgtgtttcaggcaaacactgccagcatttcctccagtgaattagcctttgggacttcatgtctctgactttgtcttaaggcactaaacagcttctcacctgaagcaaaactgcaagcaggcatgctgttgcctgcagatttcacacagcctccagcacaatcacagaacctgtgagctgctcgggtatatttagaatcccacgytgtcattactttcatcctacaaaagggagggaaaaaaatcaaagaagaatggaagcagacgataaatgcacagctggagaatgtcagcagtcacctcagcactggctgggcctgatgcacctgttgtttaacagaaagtgagcagataaaccagagaaaagaaaatcaaagttgatttctactgctgtggtcaatacacattgtgtgtacagtagtccatctagtcat

SEQ ID NO: 65701 - DNA, 599 bp, Chicken  19866894333139_1
  misc_feature (1)..(110): n is any nucleotide
nnnnnnnnnnnnnnnnnnnnnnnnnnnnnnnnnnnnnnnnnnnnnnnnnnnnnnnnnnnnnnnnnnnnnnnnnnnnnnnnnnnnnnnnnnnnnnnnnnnnnnnnnnnnnnctgcttctaatactgacgtcagctttttctcatctcgtgtcactgcgagcttctcttcttgcagccaccatatctgccatcttccaggcgaacctcctgctgcagaaatctccactgcagccatgctcataaagcacccacccccaacacatggggcccatagcacctgggtgagccccttccctgcacygyctacactccaaccctcttccttaagtcttttcccactgaatgtgatcaaaagcgtttcagtgactccaggtcagaaacaagcaatgaaccacacacaaaccctccttgaggcacacgcttcctctgcaatgggatgagatagacttgacaaaggggtcaggctgccagtgctgcatctgtccttggctgctttctccctttcccacacggtcattgaccacgcttgacatttccaaacccgtgtttgcaaacaagaactcacatttgctattcagggcctgcacttctcagcaggtt

SEQ ID NO: 65702 - DNA, 599 bp, Chicken  19866894333139_2
  misc_feature (1)..(108): n is any nucleotide
nnnnnnnnnnnnnnnnnnnnnnnnnnnnnnnnnnnnnnnnnnnnnnnnnnnnnnnnnnnnnnnnnnnnnnnnnnnnnnnnnnnnnnnnnnnnnnnnnnnnnnnnnnnnctgcttctaatactgacgtcagctttttctcatctcgtgtcactgcgagcttctcttcttgcagccaccatatctgccatcttccaggcgaacctcctgctgcagaaatctccactgcagccatgctcataaagcacccacccccaacacatggggcccatagcacctgggtgagccccttccctgcacygyctacactccaaccctcttccttaagtcttttcccactgaatgtgatcaaaagcgtttcagtgactccaggtcagaaacaagcaatgaaccacacacaaaccctccttgaggcacacgcttcctctgcaatgggatgagatagacttgacaaaggggtcaggctgccagtgctgcatctgtccttggctgctttctccctttcccacacggtcattgaccacgcttgacatttccaaacccgtgtttgcaaacaagaactcacatttgctattcagggcctgcacttctcagcaggttcc

SEQ ID NO: 65703 - DNA, 600 bp, Chicken  19866894333141_1
acagtcacaagttaaaaaaaagttaccagcatccttaaatgaaaaaataacatgctgacacatgaagtcagataaccattagccacaaacttgtaggttccttttcttccctgatattacagttacattcacttttgggggaatgacatcagaacaggaactatttaaattaagtttgcttcctactaggtctgaggaggttgtctgccaaataagaccaaggaaggacagatgagacgcaggcatggtttctcctgcctcttaccatacagcctcgcttctgcctccccttctcccttmmgggatgctctgtcttgctttaaactgcacagcaagaaaaggtaaataaatggtttgggaaaacacaagcctttttccagctttcaacacaaagcttgaatagtgctgaaaagggaggcaaccagtaaataacagccatacaaagtgatctctcctccattcttcatgggaaattctttcaaggaggacagtgccagcaggcagctctgcaaaccctgaagtactactccatgctcttaggactttcagaaaacttgataattttatgagggctgctctaaaataatacctcctatttta

SEQ ID NO: 65704 - DNA, 600 bp, Chicken  19866894333141_2
cagtcacaagttaaaaaaaagttaccagcatccttaaatgaaaaaataacatgctgacacatgaagtcagataaccattagccacaaacttgtaggttccttttcttccctgatattacagttacattcacttttgggggaatgacatcagaacaggaactatttaaattaagtttgcttcctactaggtctgaggaggttgtctgccaaataagaccaaggaaggacagatgagacgcaggcatggtttctcctgcctcttaccatacagcctcgcttctgcctccccttctcccttmmgggatgctctgtcttgctttaaactgcacagcaagaaaaggtaaataaatggtttgggaaaacacaagcctttttccagctttcaacacaaagcttgaatagtgctgaaaagggaggcaaccagtaaataacagccatacaaagtgatctctcctccattcttcatgggaaattctttcaaggaggacagtgccagcaggcagctctgcaaaccctgaagtactactccatgctcttaggactttcagaaaacttgataattttatgagggctgctctaaaataatacctcctattttat

SEQ ID NO: 65705 - DNA, 517 bp, Chicken  19866894333142_1
tcgaggagatggggatggctgcagctccacggcacgatacaaatagtgcacccgagtcattttcccttgagacttggctgaacccagcctctttcacccagcagtcaccttcccagcagctctgtgcatgcaaaccgccgccagcactcctggccccgcagcctccgagtgtggggtcagcaggtggaattcccactggaaagtcaggaaaacagaccttgggtttggcaccagcatggctggcagggagctgcagactgctgacacgggtgccacggtgctgatgggtgccacatccaygctctccaagcggcacaacgagagccccaagcacatcccttcaccctatgaagagcatgagtgccttttgtcgccctctgtggccaggacatgctctcaagcacattgtcccttcctcaatcctctttccttcccatggagcccagcaaccacaccttctccttagtggttactgaaggattaacattgctgctgacgtgctactcgaggaagaaga

SEQ ID NO: 65706 - DNA, 600 bp, Chicken  19866894333143_1
gtgtccacatctgcacgtttcttaaggagtgaatgttgactaaaaaatgttagtcttgttaggatttagatgtaaaagtcccttccaactctcaggattctatgattctgtgactaaaatgttattggtatttcttgctgttaatctcctgtatgaacacagcatgggcctggggacagcagggatgcctgggtgggtctgagactgctctgtaagaactgcaaagctgtaggagacgtggggggtctggtcacaaccagactgggaaaagagtgcctggattcacaggattataggatwtcctgagttggaagggatccataacgttcattgagcccaacgcagtccacctgagctatctgttcagaagttactccattgggcagatgttgagatgttcctcagagcagcccatggagaacccagagcagccactcagcagctcatggatggatggaggctctgcagaagctctcggcacatctctgcaccattcccaggcctgcagctcagctgcaccgacctcaccttcttctgttctcctgggctgaaccctgacccactcctccatgctgctcagctcaaaccaaactcttttta

SEQ ID NO: 65707 - DNA, 600 bp, Chicken  19866894333145_1
cctgggctctcagtctgcaacagtgctgtcaaacctggctcctacagtctgtaaagcatgcagagagaaagccaagtttctctttcttgtgttgtgacactgtgacaagagaaaaaaaggtgacttctgttaagccccaaatttctttgaaattacagtaaatctttgtatggataaccaaacaggtagggctaacaacctgcgtggagggaaaatagatgatgtctaactgggttgcacaaatgtcaggatcaaggcatcaagatgcagcagcaaaaaaaaaaaccatttttgtttgtstgaatatctatgcctctagatatttatggactagagctatctcaagacaaattcttgactgtccttgctggactcagtaatccagttcagtgaaatggaatgtaacttgaaatctgaacaaagcagtgtgtgagagagggagggaatgtttagtctatgttgagctgtctgataaaagccttgaaaaawaggattttcctctgtctatcttctcatagtcctatttcatgaatagtgctctggaagcctggacgttgccttccagctccccagaaggattcaaattcatacaagcagtac

SEQ ID NO: 65708 - DNA, 600 bp, Chicken  19866894333145_2
ggctaacaacctgcgtggagggaaaatagatgatgtctaactgggttgcacaaatgtcaggatcaaggcatcaagatgcagcagcaaaaaaaaaaaccatttttgtttgtstgaatatctatgcctctagatatttatggactagagctatctcaagacaaattcttgactgtccttgctggactcagtaatccagttcagtgaaatggaatgtaacttgaaatctgaacaaagcagtgtgtgagagagggagggaatgtttagtctatgttgagctgtctgataaaagccttgaaaaawaggattttcctctgtctatcttctcatagtcctatttcatgaatagtgctctggaagcctggacgttgccttccagctccccagaaggattcaaattcatacaagcagtaccagataaagtggaaatcttagcaaacacagagaaatcctacatttcttcagtaagctgtaatagcaaccttgaatatgtcagtgattctgggtttacacaacacttcacataaagatctcaaagagctttaaagcaatgtatttacactgctctttttcctaaagcagaaccaacccccaccccaactc

SEQ ID NO: 65709 - DNA, 599 bp, Chicken  19866894333153_1
  misc_feature (1)..(62): n is any nucleotide
nnnnnnnnnnnnnnnnnnnnnnnnnnnnnnnnnnnnnnnnnnnnnnnnnnnnnnnnnnnnnncgcttgggcgcccagatggatgggtttccaccacagagcagggacaaatgtatcttgttcagtccaaaactgcacctaagttgttgttgtccagtgtcaccactatgtaaaataaagctcagctgactactagtacagagtctgcagcctttttcccatagtctgaatctatacattgcagctccaggctaaatcatacatcagcagcaagtgtaaaatagcaacagagctcaggagygcaaatgactggggaatcatgtggtaatgagatataaattgtatttttcttcccaaacacaaagggactatttgaattggagacttttccctggtgtaaagaccatttctgagttctttttcttattgtttttagcatcgttccactaaggctactaggaagaaggcagtatcagctgtgaatgacacaagaacaactggggaagaggatgagaaaaytgtgaaagaattgctgggggagatgcctggggacattggcagtgttttgagccagcttctgaagaaaacctggagaagtct

SEQ ID NO: 65710 - DNA, 563 bp, Chicken  19866894333153_2
catagtctgaatctatacattgcagctccaggctaaatcatacatcagcagcaagtgtaaaatagcaacagagctcaggagygcaaatgactggggaatcatgtggtaatgagatataaattgtatttttcttcccaaacacaaagggactatttgaattggagacttttccctggtgtaaagaccatttctgagttctttttcttattgtttttagcatcgttccactaaggctactaggaagaaggcagtatcagctgtgaatgacacaagaacaactggggaagaggatgagaaaaytgtgaaagaattgctgggggagatgcctggggacattggcagtgttttgagccagcttctgaagaaaacctggagaagtcttactggagctgaagttgctgcatgaaggatagagggaaacaagggtggatcctcttccccacagtgatgccatgataaaggatgaccaatagctgtaaggagaaagaacatataagggacaagccgagataacacttagtaagggatggaaaatgccaggccttcatatggtctactgactc

SEQ ID NO: 65711 - DNA, 599 bp, Chicken  19866894333161_1
  misc_feature (1)..(78): n is any nucleotide
nnnnnnnnnnnnnnnnnnnnnnnnnnnnnnnnnnnnnnnnnnnnnnnnnnnnnnnnnnnnnnnnnnnnnnnnnnnnnnattcaagaaactattagcatggagtaagatggtgacacagaagtgatgtacctactttaaactaactaataacagcaaacaggccagatttagctggaagccaaattcctggccccaagttcaccaggaaagaggaaaaaaaaaaaatgcagctttctggaaatagttgtgtgctgtttatatttctcaagatgcttaaatgtgtcttactgcagtggaagrctgagtcgtatcagttgatacgtttctactgtgagtttggagaaaaacatgagatatgctcctgcaagaaaatgtttcagttttctcaaacataagctcagtagttttgagtttttgagagttttttttttgttccatttgttttagtagtattctgaaaagattctgttggtagggcctggggacaggttacaagtatatagcaaggttgtgatattctcttggactattgaaaaaaggcaaataaaaccactcaaactcacaaatacagccatttctcagatcataccatgttgtaa

SEQ ID NO: 65712 - DNA, 600 bp, Chicken  19866894333161_2
gatgtacctactttaaactaactaataacagcaaacaggccagatttagctggaagccaaattcctggccccaagttcaccaggaaagaggaaaaaaaaaaaatgcagctttctggaaatagttgtgtgctgtttatatttctcaagatgcttaaatgtgtcttactgcagtggaagrctgagtcgtatcagttgatacgtttctactgtgagtttggagaaaaacatgagatatgctcctgcaagaaaatgtttcagttttctcaaacataagctcagtagttttgagtttttgagagrtttttttttgttccatttgttttagtagtattctgaaaagattctgttggtagggcctggggacaggttacaagtatatagcaaggttgtgatattctcttggactattgaaaaaaggcaaataaaaccactcaaactcacaaatacagccatttctcagatcataccatgttgtaaggctggagatggatgtaaagctacaaagagaatcatttatcaggtaagaacaagttgctgagatgcacaaatcaaagcaagtgtgatgcattctgcttaaattgttgcttgcttttctttttt

SEQ ID NO: 65713 - DNA, 600 bp, Chicken  19866894333164_1
ccaaaacttaggcatatgaataacctaaatagctagcctcccagatacaatggtaataacccctcaccacatttcaaacagctgctgatggcaagattgcccaatgcataaatcctgggagtatgcattacataatctccaaaagtcacttgcaggcaacatgcctgtcattttatgttcttgcttttacaggtcacttagctcttcctataattctaaatcacagttaataaacctttggagactagaccacgcacaaacagaaggaacttgtgtttatcttctaccaagcaacttccygaactaccctagtgccatgccatctctccttacatcaccattactgaaccatgggcagtttagaaacgttcttgcaaatgcctttagcctgattgccttctgatatctgctgcctctgtggtatgtgaacacagaagtctctcttatatggtagaaggtccagattcccaactcccccaggctaaggaaataacagcaacagtttcaaacacacctccttcaagaaaagagagcaataaaaagaaacctgagtattctgcagtctgttctagcactgaatggggacagaaaatcagtaca

SEQ ID NO: 65714 - DNA, 600 bp, Chicken  19866894333165_1
atccatgggaaccacttgatgggggcatataaacccgaaggggcatttatacttgaagggagcatataaacaggagggggaatggctgtttatgagggtggatagaacaagggggaatggtcttaaactgagacagaggaggtttaggttggatattaggaggacgtttttcacacagagggtggtgacgcactggaacaggttgcccaaggaggttgtggatgccccatccctggaggcactcaaggccaggctggatgtggctctgggcagcctggtctggtggttggcgaccctgcrcatagcaggggggttggaactagatggtcattgtggtccttttcaaccaaggccattctatgattctatgaaagacagtgttgttgctttctgttgttaaacttgcattttaaatttatccatattctctccttttctaaggaggcacacacacacttcaaagatgattttgtcagattttaggcatataaaaagatgcagccatgctcacttccttgttcttgaaaactggtttggccatggaaacagtagaactgtcacacagcttttgcagtggggtctgaaaacagtgtcaatata

SEQ ID NO: 65715 - DNA, 599 bp, Chicken  19866894333166_1
  misc_feature (1)..(273): n is any nucleotide
nnnnnnnnnnnnnnnnnnnnnnnnnnnnnnnnnnnnnnnnnnnnnnnnnnnnnnnnnnnnnnnnnnnnnnnnnnnnnnnnnnnnnnnnnnnnnnnnnnnnnnnnnnnnnnnnnnnnnnnnnnnnnnnnnnnnnnnnnnnnnnnnnnnnnnnnnnnnnnnnnnnnnnnnnnnnnnnnnnnnnnnnnnnnnnnnnnnnnnnnnnnnnnnnnnnnnnnnnnnnnnnnnnnnnnnnnnnnnnnnnnnnnnnnnnnnnnnnnnnnnnnnnnnnnnnnnaaacctcttaaaactcagtcacttaartttgaagacagaaagaacatgaataacgtacagcaaatgtgatgtgccaaagataactgtgggaagaagcactacttaaattcttaagaacttatttgtgtaatcattcacatacattatgaactggaaaaactccagcattgggtaaattaccacagatttaacacttcacatatcagaaaagaattttatttctctgctggactagaaagcaattagaaagattttcaaggtgcaaatcatagtttaatttcattccatagtgccagacagtgtgggtttctttcttctgagaaata

SEQ ID NO: 65716 - DNA, 600 bp, Chicken  19866894333168_1
aaaaacattactcagcagcaaatcattggactttgaagtcatctcaagtgtgtcagtttttgttccccctgctgatgctgtacgtcaccacacatgatgaccagagagcccgtgactgtggctgacccagcactaaaatgacgatgatgagggttttggtggtgcacagtaaacacatctttcaatgtgactgtgttgaaattatgactgttcaggggataggacagtgcctttgagctgataatgtgactgcgtgcatgggatgcaaatgcagtgtgtacagccaccccgtggtgcacrggtttaatagagcagatcttcattgactccgtgcgaagatgaaaattttctagtcatgtttaatcttagcttgataaatcactgggaaaacaaacaaacgcacagctaaatgagttaaatgtacagttgtggcactccagcagaagatgggcttggttttggagagctgtcagtggaagacagctcagccaggggctgggaaacacagaaggagatcgactaaaagcccaggggtgggctgggtgggactgccagcagcacagagccgagcacccaccgtggtggtgaccatggtggctg

SEQ ID NO: 65717 - DNA, 599 bp, Chicken  19866894333170_1
  misc_feature (1)..(118): n is any nucleotide
nnnnnnnnnnnnnnnnnnnnnnnnnnnnnnnnnnnnnnnnnnnnnnnnnnnnnnnnnnnnnnnnnnnnnnnnnnnnnnnnnnnnnnnnnnnnnnnnnnnnnnnnnnnnnnnnnnnnnntgaggaaaggttgagggaactgggcttgtttagtttggagaaggctcagaggagacgtcattgtggccttccagcacttgaagggatattataaacaggacaggcaatggctgtatatgagggtggacggtgataggacaagggggaatggttttaaactgagacaggggaggtttgggttsgatattaggaggaagttttttacccagagggtggtgacacactggaacaggttgcccagagaggttgtggctgccccatccctggaggcattcaagaccaggctggatgtggctcagatctttaactcctatagctcctttgtacataagctttgtaagaaagcaaccgatgcaaatacagccttacacccccggtggattttctactacgcgtatttttttaattcamagttctcagaaacctttctccatgcaccacggtacagatgcgaccgggcagcggggatacaaayaccgaa

SEQ ID NO: 65718 - DNA, 600 bp, Chicken  19866894333170_2
tgtatatgagggtggacggtgataggacaagggggaatggttttaaactgagacaggggaggtttgggttsgatattaggaggaagttttttacccagagggtggtgacacactggaacaggttgcccagagaggttgtggctgccccatccctggaggcattcaagaccaggctggatgtggctcagatctttaactcctatagctcctttgtacataagctttgtaagaaagcaaccgatgcaaatacagccttacacccccggtggattttctactacgcgtatttttttaattcamagttctcagaaacctttctccatgcaccacggtacagatgcgaccgggcagcggggatacaaayaccgaaccgaaaagaagcgctggatgccgcagtgccacagcccttccggggagctgaccgcgattctccccgccagcaacgcggcggttacggaccactcccaccaggaagcacagcaacgcgcggcacttccaacacatagcaacaaaagcccccacctcaccccgcgcgcaggaacactcgtgaccaggggatgagaatccaagagcagcagaggaactcagtcccgcgcaatt

SEQ ID NO: 65719 - DNA, 600 bp, Chicken  19866894333170_3
tgggttsgatattaggaggaagttttttacccagagggtggtgacacactggaacaggttgcccagagaggttgtggctgccccatccctggaggcattcaagaccaggctggatgtggctcagatctttaactcctatagctcctttgtacataagctttgtaagaaagcaaccgatgcaaatacagccttacacccccggtggattttctactacgcgtatttttttaattcamagttctcagaaacctttctccatgcaccacggtacagatgcgaccgggcagcggggatacaaayaccgaaccgaaaagaagcgctggatgccgcagtgccacagcccttccggggagctgaccgcgattctccccgccagcaacgcggcggttacggaccactcccaccaggaagcacagcaacgcgcggcacttccaacacatagcaacaaaagcccccacctcaccccgcgcgcaggaacactcgtgaccaggggatgagaatccaagagcagcagaggaactcagtcccgcgcaatttaaatggcgccgagacccgcccgcgcgcccgcccgcctatgcagggcggagcggcctcccgcac

SEQ ID NO: 65720 - DNA, 599 bp, Chicken  19866894333177_1
  misc_feature (1)..(43): n is any nucleotide
nnnnnnnnnnnnnnnnnnnnnnnnnnnnnnnnnnnnnnnnnnngtgtgctctgcctcctttagcagaactgtgtgaaacttagccatctacacagggcaatgatcttgttgtctcagatacagcaattatattggcatatgaaatgactaaggaaaggtcaagctgcaagctgtgatttgccaagtcattttctacttttatatccctgttctctaagttacgaagctcattgcaagtcaatttaaagcaaaatactacagtagaaaaattaaccgaacctatgattttaacaactgatmctatatattattttgaacctactcttacagtggtattttaaaaatttcaactgattgaatccaggaatacttatcctaaagccttcagccctttccatcaacctccaaaaagaacactgaaagaaaatgctccacaacttcgaaacagcattcctgttccaaatttcaaatgtcatctagcaacacataacttccgcctggtatattagctaaaatacactaagcaaagcaatgccacgtgtgttctctccaaatttcttccctttattttactcattccaggaggtaatcacccatgc

SEQ ID NO: 65721 - DNA, 599 bp, Chicken  19866894333194_1
  misc_feature (1)..(25): n is any nucleotide
nnnnnnnnnnnnnnnnnnnnnnnnngttggtctgttgttgttgctgttgttagttccttgttcttgaaggttctggttctgcatatatttgacattctagcacgttatctttggtttttagttcttttaatgacagcaagatactttccatgactgaagacattaagtagttaaagctatgagatgacattctgaattgtagtctgcttgaatgttgtctgggaacgtgtgtatatatgttcaaaataaggttaccatgacatctttttggtttggtaaatattcttgggctatccatcrttcagtcaaaattcacttcttttcccatgtgacccccatagttccttctaccatttgctaaggactgcctctaacactgttctgcctctttcttttcagatgaagttccttctcccaaagacctgcagtttgtggaggtttctgacgtcaaggtcaccatcatgtggaccccaccccagagccaagtgtctggctatcgggtggaagcaatccctgtcaatcgccctggccagcacggccagagattgcccattactagaagctcttttgctgaagttgttgacctgctcccaggaacr

SEQ ID NO: 65722 - DNA, 600 bp, Chicken  19866894333194_2
rttcagtcaaaattcacttcttttcccatgtgacccccatagttccttctaccatttgctaaggactgcctctaacactgttctgcctctttcttttcagatgaagttccttctcccaaagacctgcagtttgtggaggtttctgacgtcaaggtcaccatcatgtggaccccaccccagagccaagtgtctggctatcgggtggaagcaatccctgtcaatcgccctggccagcacggccagagattgcccattactagaagctcttttgctgaagttgttgacctgctcccaggaacracctatctctttaagatctttgccgtgagccatggcagggagagcaaacctttgactggagagcaaaccaccagtaagtacctttcctttgtgctttcctcaaccttttgaggtgcttacacctctgtygcttagagaaatacataaacagagcacttgaattggaacagttgtagcccaggaggtatcccttaactaggatgacagggcagggaattcattcagtcaaacaatgatcttttcagcagatttatcctccttcagggctttccaatgggagtttaactctcatggaacttt

SEQ ID NO: 65723 - DNA, 600 bp, Chicken  19866894333194_3
tttgtggaggtttctgacgtcaaggtcaccatcatgtggaccccaccccagagccaagtgtctggctatcgggtggaagcaatccctgtcaatcgccctggccagcacggccagagattgcccattactagaagctcttttgctgaagttgttgacctgctcccaggaacracctatctctttaagatctttgccgtgagccatggcagggagagcaaacctttgactggagagcaaaccaccagtaagtacctttcctttgtgctttcctcaaccttttgaggtgcttacacctctgtygcttagagaaatacataaacagagcacttgaattggaacagttgtagcccaggaggtatcccttaactaggatgacagggcagggaattcattcagtcaaacaatgatcttttcagcagatttatcctccttcagggctttccaatgggagtttaactctcatggaactttaaaacaattttgtatggctggaattcaacttttttattactggctgagaattgatgggccctgcagttcttttactgtgcagatcacagcccatgatttttttggagaataccttagggcagatttcag

SEQ ID NO: 65724 - DNA, 600 bp, Chicken  19866894333201_1
gcccaactgctggcaacccactgttaccccgggttggtcagtgaccgtttcccagcgtagaaaacctatttcccctgtcgtggtttcggccagaggtaaaatgtgatagctggtagcagagctggggtcaccttctgggagagcagtgcctgcagacacagtgagtgcctcccagtaccgacgtttgtcaggagagatctgcacgtttctttgaactgatgtattcacatcctcctcattatgtgagagaaatctcacagaccttatcacaaaggaacccgatgctacggttgtgctttyccccctctagtygggtttgtttttaaagcaccaaaccttaatggtttctttgaagagttttcttatcaatcatttcagcagctgcaaacaccacgagtgcagaacgggctgcctctgagcaacgggagcagcattctacttttacagcttgggatgaacttaccaaaaggaaactggcactyggattctgatgctacaccgggtaatcctatcaccctacacaacccagcagttactgagcactgacactggcatgggagcccatcgtgcccctaaaggagtggggcccctaaagcaggg

SEQ ID NO: 65725 - DNA, 600 bp, Chicken  19866894333201_2
gcaacccactgttaccccgggttggtcagtgaccgtttcccagcgtagaaaacctatttcccctgtcgtggtttcggccagaggtaaaatgtgatagctggtagcagagctggggtcaccttctgggagagcagtgcctgcagacacagtgagtgcctcccagtaccgacgtttgtcaggagagatctgcacgtttctttgaactgatgtattcacatcctcctcattatgtgagagaaatctcacagaccttatcacaaaggaacccgatgctacggttgtgctttyccccctctagtygggtttgtttttaaagcaccaaaccttaatggtttctttgaagagttttcttatcaatcatttcagcagctgcaaacaccacgagtgcagaacgggctgcctctgagcaacgggagcagcattctacttttacagcttgggatgaacttaccaaaaggaaactggcactyggattctgatgctacaccgggtaatcctatcaccctacacaacccagcagttactgagcactgacactggcatgggagcccatcgtgcccctaaaggagtggggcccctaaagcagggggcamagcagga

SEQ ID NO: 65726 - DNA, 600 bp, Chicken  19866894333201_3
gtttgtcaggagagatctgcacgtttctttgaactgatgtattcacatcctcctcattatgtgagagaaatctcacagaccttatcacaaaggaacccgatgctacggttgtgctttyccccctctagtygggtttgtttttaaagcaccaaaccttaatggtttctttgaagagttttcttatcaatcatttcagcagctgcaaacaccacgagtgcagaacgggctgcctctgagcaacgggagcagcattctacttttacagcttgggatgaacttaccaaaaggaaactggcactyggattctgatgctacaccgggtaatcctatcaccctacacaacccagcagttactgagcactgacactggcatgggagcccatcgtgcccctaaaggagtggggcccctaaagcagggggcamagcaggaccagcagccagcagcctgcaagcaggccttggtgcagagagctgcaggagagatgaacagatgggaggacaaaggcaggaatcaaagcasggaacgcagygaggagggccttggccggcgcacaccctgcaggttttgtgccctaagtgggtcaagtgcgctctgtccct

SEQ ID NO: 65727 - DNA, 600 bp, Chicken  19866894333201_4
tctagtygggtttgtttttaaagcaccaaaccttaatggtttctttgaagagttttcttatcaatcatttcagcagctgcaaacaccacgagtgcagaacgggctgcctctgagcaacgggagcagcattctacttttacagcttgggatgaacttaccaaaaggaaactggcactyggattctgatgctacaccgggtaatcctatcaccctacacaacccagcagttactgagcactgacactggcatgggagcccatcgtgcccctaaaggagtggggcccctaaagcagggggcamagcaggaccagcagccagcagcctgcaagcaggccttggtgcagagagctgcaggagagatgaacagatgggaggacaaaggcaggaatcaaagcasggaacgcagygaggagggccttggccggcgcacaccctgcaggttttgtgccctaagtgggtcaagtgcgctctgtcccttactgctgtcagcagcaacacgtgctgaaatgagacaggcaaaaccctgcrgggcacagacagcgttggaagccctctaaacaaggaaacggggcaaattcaccacgctcatttcagtgctgt

SEQ ID NO: 65728 - DNA, 600 bp, Chicken  19866894333201_5
aacgggctgcctctgagcaacgggagcagcattctacttttacagcttgggatgaacttaccaaaaggaaactggcactyggattctgatgctacaccgggtaatcctatcaccctacacaacccagcagttactgagcactgacactggcatgggagcccatcgtgcccctaaaggagtggggcccctaaagcagggggcamagcaggaccagcagccagcagcctgcaagcaggccttggtgcagagagctgcaggagagatgaacagatgggaggacaaaggcaggaatcaaagcasggaacgcagygaggagggccttggccggcgcacaccctgcaggttttgtgccctaagtgggtcaagtgcgctctgtcccttactgctgtcagcagcaacacgtgctgaaatgagacaggcaaaaccctgcrgggcacagacagcgttggaagccctctaaacaaggaaacggggcaaattcaccacgctcatttcagtgctgtgagcaaatcacgttcgcacaacacaatgcagcccaggcgcagcgcgatgcaccaccggagaacacgtggatgtacagaatgtgccaagtgcctctct

SEQ ID NO: 65729 - DNA, 600 bp, Chicken  19866894333201_6
ctctgagcaacgggagcagcattctacttttacagcttgggatgaacttaccaaaaggaaactggcactyggattctgatgctacaccgggtaatcctatcaccctacacaacccagcagttactgagcactgacactggcatgggagcccatcgtgcccctaaaggagtggggcccctaaagcagggggcamagcaggaccagcagccagcagcctgcaagcaggccttggtgcagagagctgcaggagagatgaacagatgggaggacaaaggcaggaatcaaagcasggaacgcagygaggagggccttggccggcgcacaccctgcaggttttgtgccctaagtgggtcaagtgcgctctgtcccttactgctgtcagcagcaacacgtgctgaaatgagacaggcaaaaccctgcrgggcacagacagcgttggaagccctctaaacaaggaaacggggcaaattcaccacgctcatttcagtgctgtgagcaaatcacgttcgcacaacacaatgcagcccaggcgcagcgcgatgcaccaccggagaacacgtggatgtacagaatgtgccaagtgcctctctgaccaacagc

SEQ ID NO: 65730 - DNA, 600 bp, Chicken  19866894333201_7
tactgagcactgacactggcatgggagcccatcgtgcccctaaaggagtggggcccctaaagcagggggcamagcaggaccagcagccagcagcctgcaagcaggccttggtgcagagagctgcaggagagatgaacagatgggaggacaaaggcaggaatcaaagcasggaacgcagygaggagggccttggccggcgcacaccctgcaggttttgtgccctaagtgggtcaagtgcgctctgtcccttactgctgtcagcagcaacacgtgctgaaatgagacaggcaaaaccctgcrgggcacagacagcgttggaagccctctaaacaaggaaacggggcaaattcaccacgctcatttcagtgctgtgagcaaatcacgttcgcacaacacaatgcagcccaggcgcagcgcgatgcaccaccggagaacacgtggatgtacagaatgtgccaagtgcctctctgaccaacagcgaggctgaaagaagtaggaacttacacaccgtgctgacagaacgcagagccttggtaactgcagtcagtgctcttagcaataggggtgattkttccttaatcttaagttcctcartactct

SEQ ID NO: 65731 - DNA, 600 bp, Chicken  19866894333201_8
tgctgaaatgagacaggcaaaaccctgcrgggcacagacagcgttggaagccctctaaacaaggaaacggggcaaattcaccacgctcatttcagtgctgtgagcaaatcacgttcgcacaacacaatgcagcccaggcgcagcgcgatgcaccaccggagaacacgtggatgtacagaatgtgccaagtgcctctctgaccaacagcgaggctgaaagaagtaggaacttacacaccgtgctgacagaacgcagagccttggtaactgcagtcagtgctcttagcaataggggtgattkttccttaatcttaagttcctcartactctgctatcgaagcagatttgtgatgctgataaaaaatccactttatttgttggcatcccgtggccacaggtctgcaaacacacaagctgaagatctttggagcaaactaagagttatttgggcaagcctccagaatttggccaactattacaaaacccgaaatcatcgcagctaccccttacagccatgaacaacaaaaggctctgctctccctgcacatccacaccattcagtgctgcaacactggcatatggggagataatcccaagcagg

SEQ ID NO: 65732 - DNA, 600 bp, Chicken  19866894333201_9
cctgcrgggcacagacagcgttggaagccctctaaacaaggaaacggggcaaattcaccacgctcatttcagtgctgtgagcaaatcacgttcgcacaacacaatgcagcccaggcgcagcgcgatgcaccaccggagaacacgtggatgtacagaatgtgccaagtgcctctctgaccaacagcgaggctgaaagaagtaggaacttacacaccgtgctgacagaacgcagagccttggtaactgcagtcagtgctcttagcaataggggtgattkttccttaatcttaagttcctcartactctgctatcgaagcagatttgtgatgctgataaaaaatccactttatttgttggcatcccgtggccacaggtctgcaaacacacaagctgaagatctttggagcaaactaagagttatttgggcaagcctccagaatttggccaactattacaaaacccgaaatcatcgcagctaccccttacagccatgaacaacaaaaggctctgctctccctgcacatccacaccattcagtgctgcaacactggcatatggggagataatcccaagcaggatgattctggatgctaagcaacc

SEQ ID NO: 65733 - DNA, 599 bp, Chicken  19866894333208_1
  misc_feature (1)..(155): n is any nucleotide
nnnnnnnnnnnnnnnnnnnnnnnnnnnnnnnnnnnnnnnnnnnnnnnnnnnnnnnnnnnnnnnnnnnnnnnnnnnnnnnnnnnnnnnnnnnnnnnnnnnnnnnnnnnnnnnnnnnnnnnnnnnnnnnnnnnnnnnnnnnnnnnnnnnnnnnnnnncggtcctcgcctggtctacatcacgtgtgatagataaagggtagagccggggaaggaggaaatggagaaggacaacagtcatgggggggctccctctgcagaaagaaatctgttttgattggcattttggaagtattttattccyacttaaygaagaccgggaaagaaatgaagaatgagaacaggatggctgggaatcagcktggcgacaaatggttgaaaaggtcctgaatttcacataagcaggattcaagactttcagattatttttcatgtgtatttattacagtttaccccgtgttctgttactgcacgggatgcagtaagcaccttcataatgtcacagtctgggtggcagtgaatcggtggctcccctggggarggtcctgggggcagggaagttggcagtgcctccaggtcccagcatggtcctgtgagctgcag

SEQ ID NO: 65734 - DNA, 599 bp, Chicken  19866894333208_2
  misc_feature (1)..(148): n is any nucleotide
nnnnnnnnnnnnnnnnnnnnnnnnnnnnnnnnnnnnnnnnnnnnnnnnnnnnnnnnnnnnnnnnnnnnnnnnnnnnnnnnnnnnnnnnnnnnnnnnnnnnnnnnnnnnnnnnnnnnnnnnnnnnnnnnnnnnnnnnnnnnnnnnnnnncggtcctcgcctggtctacatcacgtgtgatagataaagggtagagccggggaaggaggaaatggagaaggacaacagtcatgggggggctccctctgcagaaagaaatctgttttgattggcattttggaagtattttattccyacttaaygaagaccgggaaagaaatgaagaatgagaacaggatggctgggaatcagcktggcgacaaatggttgaaaaggtcctgaatttcacataagcaggattcaagactttcagattatttttcatgtgtatttattacagtttaccccgtgttctgttactgcacgggatgcagtaagcaccttcataatgtcacagtctgggtggcagtgaatcggtggctcccctggggarggtcctgggggcagggaagttggcagtgcctccaggtcccagcatggtcctgtgagctgcaggggyaga

SEQ ID NO: 65735 - DNA, 599 bp, Chicken  19866894333208_3
  misc_feature (1)..(97): n is any nucleotide
nnnnnnnnnnnnnnnnnnnnnnnnnnnnnnnnnnnnnnnnnnnnnnnnnnnnnnnnnnnnnnnnnnnnnnnnnnnnnnnnnnnnnnnnnnnnnnnnncggtcctcgcctggtctacatcacgtgtgatagataaagggtagagccggggaaggaggaaatggagaaggacaacagtcatgggggggctccctctgcagaaagaaatctgttttgattggcattttggaagtattttattccyacttaaygaagaccgggaaagaaatgaagaatgagaacaggatggctgggaatcagcktggcgacaaatggttgaaaaggtcctgaatttcacataagcaggattcaagactttcagattatttttcatgtgtatttattacagtttaccccgtgttctgttactgcacgggatgcagtaagcaccttcataatgtcacagtctgggtggcagtgaatcggtggctcccctggggarggtcctgggggcagggaagttggcagtgcctccaggtcccagcatggtcctgtgagctgcaggggyagatcttggccaggagcagctgtcactgctccattgagctgatgaatctgtgac

SEQ ID NO: 65736 - DNA, 600 bp, Chicken  19866894333208_4
gggggggctccctctgcagaaagaaatctgttttgattggcattttggaagtattttattccyacttaaygaagaccgggaaagaaatgaagaatgagaacaggatggctgggaatcagcktggcgacaaatggttgaaaaggtcctgaatttcacataagcaggattcaagactttcagattatttttcatgtgtatttattacagtttaccccgtgttctgttactgcacgggatgcagtaagcaccttcataatgtcacagtctgggtggcagtgaatcggtggctcccctggggarggtcctgggggcagggaagttggcagtgcctccaggtcccagcatggtcctgtgagctgcaggggyagatcttggccaggagcagctgtcactgctccattgagctgatgaatctgtgacatcggtaaggaacgagccctataactttggctgcgaacaccgatgacagagcattgatgtgaccatccacaaaaagaggattctaagatccgcctgctggggagctggggcagagtaagggtaagtgttttgcagagtcattggtaaaatctcatttagactgcagcatagagacttgga

SEQ ID NO: 65737 - DNA, 561 bp, Chicken  19866894333208_5
taaygaagaccgggaaagaaatgaagaatgagaacaggatggctgggaatcagcktggcgacaaatggttgaaaaggtcctgaatttcacataagcaggattcaagactttcagattatttttcatgtgtatttattacagtttaccccgtgttctgttactgcacgggatgcagtaagcaccttcataatgtcacagtctgggtggcagtgaatcggtggctcccctggggarggtcctgggggcagggaagttggcagtgcctccaggtcccagcatggtcctgtgagctgcaggggyagatcttggccaggagcagctgtcactgctccattgagctgatgaatctgtgacatcggtaaggaacgagccctataactttggctgcgaacaccgatgacagagcattgatgtgaccatccacaaaaagaggattctaagatccgcctgctggggagctggggcagagtaagggtaagtgttttgcagagtcattggtaaaatctcatttagactgcagcatagagacttggacagctgcgttcaggaaaactgaaatca

SEQ ID NO: 65738 - DNA, 600 bp, Chicken  19866894333212_1
gtttctatagtgataactttctcttgattatatagttgtgaggtcaataaatctggctttactttgctctgcaatgttataatttttctttttttgtgtatttttcattattttgctccttgttctttctgccctctcatttataatcccccgaagaaccagtagatagagaagtctggctagaagacgaagtgagtggtcagattctcagatgttatctttttcccagaacgcactggtactgggtgtcatgacatgttctatacatctttctagtgtcaacctcattaaacaaatacwacttgatctatagctctcaagaaatgaaatttcatgcaatgaattttctgtattccagtttgtgttctcccactcctttctgcttcagcagaaattctgtgcattcttgacttctagtataatgttgtgccatcattattgataagtttgtaccctgaaattgatcagtgtttatctcttatttaaagaaatacccatctttgaagctcacaacttgatgtttgttgctttctaaggaagaaaccattgccactatagtggatgtgatataccatttagagtgtcattcagtatgtttca

SEQ ID NO: 65739 - DNA, 600 bp, Chicken  19866894333213_1
gggagggacatacagaccaaagaagctcagctggaagaataatgaactgtttgacaaagcttacttgctgctatttaacagacatctgatgaatagaacaagctttttttaaggctgctatccaaaacctgtggtcaagcagacctctacaaacataataaagccttcaatttaattttattttacagatttcgctcaattcagatacaacactggagaaattgctgatcctggcacacaaacactagcctgtaaggctctcccctcacttatatgagatgcagaatgttagcagtttaygaagaccaattatttctcaatacaaagcaacagataccaacatttttacacaatttatcagtttatattaaaagcacacaaacaagaaacrrccaacaataaatgcacaagattgaaaataagagaacttttacatctcagaagtcgaggaaagcatccccagggttatcaaagatcatccttaaaaactcccaccaatcccagaayaaacagacwtccacatctttctttccacctccattccctccttcttccagcttgtacagtgcagctaagatcagcaaagcagcatgttggatt

SEQ ID NO: 65740 - DNA, 600 bp, Chicken  19866894333213_2
aatagaacaagctttttttaaggctgctatccaaaacctgtggtcaagcagacctctacaaacataataaagccttcaatttaattttattttacagatttcgctcaattcagatacaacactggagaaattgctgatcctggcacacaaacactagcctgtaaggctctcccctcacttatatgagatgcagaatgttagcagtttaygaagaccaattatttctcaatacaaagcaacagataccaacatttttacacaatttatcagtttatattaaaagcacacaaacaagaaacrrccaacaataaatgcacaagattgaaaataagagaacttttacatctcagaagtcgaggaaagcatccccagggttatcaaagatcatccttaaaaactcccaccaatcccagaayaaacagacwtccacatctttctttccacctccattccctccttcttccagcttgtacagtgcagctaagatcagcaaagcagcatgttggatttgaagcagtgtgtaaggccctaaacaggattccttcctgtactcctagagagttacctcacaactcagactgcgaacgcaggcctggcgca

SEQ ID NO: 65741 - DNA, 600 bp, Chicken  19866894333213_3
atagaacaagctttttttaaggctgctatccaaaacctgtggtcaagcagacctctacaaacataataaagccttcaatttaattttattttacagatttcgctcaattcagatacaacactggagaaattgctgatcctggcacacaaacactagcctgtaaggctctcccctcacttatatgagatgcagaatgttagcagtttaygaagaccaattatttctcaatacaaagcaacagataccaacatttttacacaatttatcagtttatattaaaagcacacaaacaagaaacrrccaacaataaatgcacaagattgaaaataagagaacttttacatctcagaagtcgaggaaagcatccccagggttatcaaagatcatccttaaaaactcccaccaatcccagaayaaacagacwtccacatctttctttccacctccattccctccttcttccagcttgtacagtgcagctaagatcagcaaagcagcatgttggatttgaagcagtgtgtaaggccctaaacaggattccttcctgtactcctagagagttacctcacaactcagactgcgaacgcaggcctggcgcac

SEQ ID NO: 65742 - DNA, 600 bp, Chicken  19866894333213_4
caacactggagaaattgctgatcctggcacacaaacactagcctgtaaggctctcccctcacttatatgagatgcagaatgttagcagtttaygaagaccaattatttctcaatacaaagcaacagataccaacatttttacacaatttatcagtttatattaaaagcacacaaacaagaaacrrccaacaataaatgcacaagattgaaaataagagaacttttacatctcagaagtcgaggaaagcatccccagggttatcaaagatcatccttaaaaactcccaccaatcccagaayaaacagacwtccacatctttctttccacctccattccctccttcttccagcttgtacagtgcagctaagatcagcaaagcagcatgttggatttgaagcagtgtgtaaggccctaaacaggattccttcctgtactcctagagagttacctcacaactcagactgcgaacgcaggcctggcgcacaatgctgaacagctggggatggttttgggtgttggtgactgacatacttgatcgaagtctccttgtcatgactgacaaatccaggatgtcctcctgcaagagagcggcaaccctg

SEQ ID NO: 65743 - DNA, 600 bp, Chicken  19866894333213_5
agaaattgctgatcctggcacacaaacactagcctgtaaggctctcccctcacttatatgagatgcagaatgttagcagtttaygaagaccaattatttctcaatacaaagcaacagataccaacatttttacacaatttatcagtttatattaaaagcacacaaacaagaaacrrccaacaataaatgcacaagattgaaaataagagaacttttacatctcagaagtcgaggaaagcatccccagggttatcaaagatcatccttaaaaactcccaccaatcccagaayaaacagacwtccacatctttctttccacctccattccctccttcttccagcttgtacagtgcagctaagatcagcaaagcagcatgttggatttgaagcagtgtgtaaggccctaaacaggattccttcctgtactcctagagagttacctcacaactcagactgcgaacgcaggcctggcgcacaatgctgaacagctggggatggttttgggtgttggtgactgacatacttgatcgaagtctccttgtcatgactgacaaatccaggatgtcctcctgcaagagagcggcaaccctgaagacagaa

SEQ ID NO: 65744 - DNA, 600 bp, Chicken  19866894333221_1
tgaagcaaaaatagaaattaaatcgttatggctaaaacatacacccttcggaaatttcccaacacttcacattaagtaagtggtcttgtaagaactcttctccagcaaggtttaagatgaacaatatggtaaagcccgtgcggttcttttagctctagttcaggcaatgcttttacagtcttgagatacttgttcttttgcagctccaaaaaattaccgaaaatgaaaactaaaatttgcaccgtgtgcctttaacacatctccatttctgtgcgtgtgtggttttgtatatttctagtygactggcttttgaccctgaagcccaagttctttaatgtgatacagcaaaaacaatatttatattatatatttatatatatatagtgtacttgaacagtagcaacttaaaccctgcacaaactttctggaaaataaactttttttttttttcttttgcactcttacatatataaataatcttatagaatcagcacctttttcccaggagttgtattttttctgactttttttttttaaaaagggatgtgccaatttctgaactcctatcacagctataaatttcaagttattgaccatctg

SEQ ID NO: 65745 - DNA, 577 bp, Chicken  19866894333221_2
tgcggttcttttagctctagttcaggcaatgcttttacagtcttgagatacttgttcttttgcagctccaaaaaattaccgaaaatgaaaactaaaatttgcaccgtgtgcctttaacacatctccatttctgtgcgtgtgtggttttgtatatttctagtygactggcttttgaccctgaagcccaagttctttaatgtgatacagcaaaaacaatatttatattatatatttatatatatatagtgtacttgaacagtagcaacttaaaccctgcacaaactttctggaaaataaacyttttttttttttcttttgcactcttacatatataaataatcttatagaatcagcacctttttcccaggagttgtattttttctgactttttttttttaaaaagggatgtgccaatttctgaactcctatcacagctataaatttcaagttattgaccatctgaatgaattgctaatgatgatttacctaaaatcacactacagtcacttctctactgagaaaacacaacctacaatatagtcccatatagctaatgatagatacacagtcttttcta

SEQ ID NO: 65746 - DNA, 600 bp, Chicken  19866894333230_1
ttgtaagtttatagattgcattaactcagaatgcttttctcttacttgcattccgaccgattcttattatcaatatactgttgcttagctgtgccaacgaaaggcaaaggagattgagaatgatgctatgttgccggaacaacgagaagagcacaaaacctatcttcttaaaagaaagcattacttgatgaaggtcattgatgaaagctcctgtgatccttcagtagccaacaaagtaagtaattcctgcttaacagcttgtttggagaggtggagtggtttagcttactgttgcagaakgaaacaatttgctttcaaatcagactttaaaacggactttgctttgtggcaagttaaacttgttccctcaaccaaataacttgctttactccagtaggctgataggtcckgggaagcttctgtgaaggtaccggattatgaaatgtttttgactgtctgtagatgacagcttttgtgtaaacaaatggcttttgctctctgtcttcttagtgaggttgatagttcgcaaatagaattgatgcttgtgtgaattgtcctcttacattaattttaacagatgtaaggctttcctggggggaa

SEQ ID NO: 65747 - DNA, 600 bp, Chicken  19866894333230_2
agattgagaatgatgctatgttgccggaacaacgagaagagcacaaaacctatcttcttaaaagaaagcattacttgatgaaggtcattgatgaaagctcctgtgatccttcagtagccaacaaagtaagtaattcctgcttaacagcttgtttggagaggtggagtggtttagcttactgttgcagaakgaaacaatttgctttcaaatcagactttaaaacggactttgctttgtggcaagttaaacttgttccctcaaccaaataacttgctttactccagtaggctgataggtcckgggaagcttctgtgaaggtaccggattatgaaatgtttttgactgtctgtagatgacagcttttgtgtaaacaaatggcttttgctctctgtcttcttagtgaggttgatagttcgcaaatagaattgatgcttgtgtgaattgtcctcttacattaattttaacagatgtaaggctttcctggggggaatacaacaacaaaaaaaacccacctagaatttctgtaaagaaagccttgtgaactgttcagctgtagatcagaacacagtctgttggtctgaggaagaattggattcatgt

SEQ ID NO: 65748 - DNA, 600 bp, Chicken  19866894333238_1
tacatactgttataaaaagtccctccccagctttgaggccccttccaacccaagtcattctatgatcctatgaaaatgaaaggcctaagactttcctctaagacttcagctaagcacccaattcaacacaattaaatcagaaggatgattcaagtaacacagatctttataagcttggagatcccaatgtttttgtaaaacactgatttatcattctttctggggggaaaggaaagacccccaaaacgtcaaaaacaaataaagggtaaagaactaataaaaggcaggtctaatctaagycccattggtttcaaagggatttgtatatggcccggtgctgccakggtatttttcacacctgtggggcattaaaggaaataaccaaatcttgaaattaaagttgggtgtcccttgtggcagtgcagaggaactaagcctttttccttgccccttcattttcttttcatcttcagttttgtttgccactgctaacttaatatacaggagttaatttctttcctgacttgaggtatcactaggggaatattgggtgttactgtggcggctggaagtcattacatctatataaatattaacctg

SEQ ID NO: 65749 - DNA, 600 bp, Chicken  19866894333238_2
ccaacccaagtcattctatgatcctatgaaaatgaaaggcctaagactttcctctaagacttcagctaagcacccaattcaacacaattaaatcagaaggatgattcaagtaacacagatctttataagcttggagatcccaatgtttttgtaaaacactgatttatcattctttctggggggaaaggaaagacccccaaaacgtcaaaaacaaataaagggtaaagaactaataaaaggcaggtctaatctaagycccattggtttcaaagggatttgtatatggcccggtgctgccakggtatttttcacacctgtggggcattaaaggaaataaccaaatcttgaaattaaagttgggtgtcccttgtggcagtgcagaggaactaagcctttttccttgccccttcattttcttttcatcttcagttttgtttgccactgctaacttaatatacaggagttaatttctttcctgacttgaggtatcactaggggaatattgggtgttactgtggcggctggaagtcattacatctatataaatattaacctgtggcactactcttaatctttttttttctttctttcttcttttat

SEQ ID NO: 65750 - DNA, 600 bp, Chicken  19866894333243_1
gcaagagccttgataaaactagtatgtcagatacagaggaattatttcactccaaagtggaaactgagagtatacaaatggaggtgttcctagaagtcatgatttgatcaagagtctatagtttcccatgaaaacaggctcagtattgccaccagaaatactgccttgctgaatttcagttccctcttccaaataatgacatggcttgagatctgccaactgaattcttagaagcaaattaattctgaaggttttccattgcatgttcatagaaatgaaaataccatgttttatttgacyttgaaatgtatgcctcctaaaactttaagaaaatttaagatatggaaatctttactctgtgcttaacctttagagcacattagaaaatgaaatatgataatgagagggactaagtaatatctgagaaagttatctcaaacatctataatgacacagttcaggccattaccactgttagaagccatgtattgggaactggcataaatgctgtttatatagaagcttttataaggttctgaattagaccattacctcaatgtacatatgaagggagtgggtattgaacagtgtattgcattt

SEQ ID NO: 65751 - DNA, 599 bp, Chicken  19866894333246_1
  misc_feature (1)..(118): n is any nucleotide
nnnnnnnnnnnnnnnnnnnnnnnnnnnnnnnnnnnnnnnnnnnnnnnnnnnnnnnnnnnnnnnnnnnnnnnnnnnnnnnnnnnnnnnnnnnnnnnnnnnnnnnnnnnnnnnnnnnnnnccagtttgtttgtctgttatagggagagagcatgctgtattcttttcctcagcctattgcatttgcacccaatgagatgcagcttagtgtttgtgctgaatgctttaatttggcaatcttaggatctgtagaaagaaatgaagactggggggaaaaaaaaaaggtattacagaggaattgtrttttataacttttaaaatcaagtttttgtcagtacttgtgtataatacagcagggaattatgttctttaattatgtacttcayaatgttgaattctgtgccatgggcctggatttttacaccagctaccttagtaggtttagagttgaccctaaacaaggcccagttttttgcacatagaagcttttttggagcaaacttctgtgggtaaagaatatagtgctgacttgacactaagtgytgtagtactgatgtaattagacagatggtctcctcttagagttagtgtagaaaacggag

SEQ ID NO: 65752 - DNA, 599 bp, Chicken  19866894333246_2
  misc_feature (1)..(35): n is any nucleotide
nnnnnnnnnnnnnnnnnnnnnnnnnnnnnnnnnnnccagtttgtttgtctgttatagggagagagcatgctgtattcttttcctcagcctattgcatttgcacccaatgagatgcagcttagtgtttgtgctgaatgctttaatttggcaatcttaggatctgtagaaagaaatgaagactggggggaaaaaaaaaaggtattacagaggaattgtrttttataacttttaaaatcaagtttttgtcagtacttgtgtataatacagcagggaattatgttctttaattatgtacttcayaatgttgaattctgtgccatgggcctggatttttacaccagctaccttagtaggtttagagttgaccctaaacaaggcccagttttttgcacatagaagcttttttggagcaaacttctgtgggtaaagaatatagtgctgacttgacactaagtgytgtagtactgatgtaattagacagatggtctcctcttagagttagtgtagaaaacggagtcagggaattcattcatactcagctattcttggcagaaagctaagagcaagcaatcacattagcatggccctagtaaaatatg

SEQ ID NO: 65753 - DNA, 600 bp, Chicken  19866894333246_3
gatctgtagaaagaaatgaagactggggggaaaaaaaaaaggtattacagaggaattgtrttttataacttttaaaatcaagtttttgtcagtacttgtgtataatacagcagggaattatgttctttaattatgtacttcayaatgttgaattctgtgccatgggcctggatttttacaccagctaccttagtaggtttagagttgaccctaaacaaggcccagttttttgcacatagaagcttttttggagcaaacttctgtgggtaaagaatatagtgctgacttgacactaagtgytgtagtactgatgtaattagacagatggtctcctcttagagttagtgtagaaaacggagtcagggaattcattcatactcagctattcttggcagaaagctaagagcaagcaatcacattagcatggccctagtaaaatatgtaactttgtttcccatgctattcctcatctatccttagtgtagggctaattactggggcttgggaggcctgaagataatgactgttataagcagtgtaccagtagctgcctgactgggtgcttacggctgaagttggaggggtctggaatagctgaat

SEQ ID NO: 65754 - DNA, 599 bp, Chicken  19866894333249_1
  misc_feature (1)..(74): n is any nucleotide
nnnnnnnnnnnnnnnnnnnnnnnnnnnnnnnnnnnnnnnnnnnnnnnnnnnnnnnnnnnnnnnnnnnnnnnnnnctgctcttgtggccttttcatcatgtttaattttaacttaggacattcccagcagaagctcagtcaagtatttctctagctggagagcatcatttcctgtaagagcccttgccatgtgcatacacagagctacactgagaatagatatgtgacagattcacattcagtctgcaatgtaactaaaactctgggagttaaaggcttcatgcacgcattcctttggcartcttcaggaatgagatgttaagatttgcagtattatgtcttttagatatttgtaaataatttatacttcccaggatgggttcactcttgattcatattcatgtagttctttcamtactatacagagtcttaaagaattttttttttttacttttaaagctgtcaccatctgaagccatacagycaattgagaaggctttgctgtagtagtttatcttatcattgtaaaaaggaagcaaatgtgaagcctgaggatacagaaacagtaaagttaaaacagtaagrgtcccaagtatatcc

SEQ ID NO: 65755 - DNA, 600 bp, Chicken  19866894333249_2
ggacattcccagcagaagctcagtcaagtatttctctagctggagagcatcatttcctgtaagagcccttgccatgtgcatacacagagctacactgagaatagatatgtgacagattcacattcagtctgcaatgtaactaaaactctgggagttaaaggcttcatgcacgcattcctttggcartcttcaggaatgagatgttaagatttgcagtattatgtcttttagatatttgtaaataatttatacttcccaggatgggttcactcttgattcatattcatgtagttctttcamtactatacagagtcttaaagaattttttttttttacttttaaagctgtcaccatctgaagccatacagycaattgagaaggctttgctgtagtagtttatcttatcattgtaaaaaggaagcaaatgtgaagcctgaggatacagaaacagtaaagttaaaacagtaagrgtcccaagtatatccgtgtttttcttttcatctcactgcttgtttaaacagttctgaggttggagtctgtgctaaggtgtctgctgtggatgaaacccacagcaaagaaggctgcacccctaatgattcc

SEQ ID NO: 65756 - DNA, 600 bp, Chicken  19866894333249_3
tgccatgtgcatacacagagctacactgagaatagatatgtgacagattcacattcagtctgcaatgtaactaaaactctgggagttaaaggcttcatgcacgcattcctttggcartcttcaggaatgagatgttaagatttgcagtattatgtcttttagatatttgtaaataatttatacttcccaggatgggttcactcttgattcatattcatgtagttctttcamtactatacagagtcttaaagaattttttttttttacttttaaagctgtcaccatctgaagccatacagycaattgagaaggctttgctgtagtagtttatcttatcattgtaaaaaggaagcaaatgtgaagcctgaggatacagaaacagtaaagttaaaacagtaagrgtcccaagtatatccgtgtttttcttttcatctcactgcttgtttaaacagttctgaggttggagtctgtgctaaggtgtctgctgtggatgaaacccacagcaaagaaggctgcacccctaatgattccttcctggcagtgtagctgatctcacctgcagactgcttaacctgtgagttactgtgtccttctcagcca

SEQ ID NO: 65757 - DNA, 600 bp, Chicken  19866894333249_4
cgcattcctttggcartcttcaggaatgagatgttaagatttgcagtattatgtcttttagatatttgtaaataatttatacttcccaggatgggttcactcttgattcatattcatgtagttctttcamtactatacagagtcttaaagaattttttttttttacttttaaagctgtcaccatctgaagccatacagycaattgagaaggctttgctgtagtagtttatcttatcattgtaaaaaggaagcaaatgtgaagcctgaggatacagaaacagtaaagttaaaacagtaagrgtcccaagtatatccgtgtttttcttttcatctcactgcttgtttaaacagttctgaggttggagtctgtgctaaggtgtctgctgtggatgaaacccacagcaaagaaggctgcacccctaatgattccttcctggcagtgtagctgatctcacctgcagactgcttaacctgtgagttactgtgtccttctcagccaggttctgtctggaatgagccagcttgctccagtcctccaggagaaacccagtgtacttcagcccacagccctgacacattttgcactttcccttggcagag

SEQ ID NO: 65758 - DNA, 600 bp, Chicken  19866894333251_1
aacagctttggatggacagatgatgaaggaagctgtgacatggcacaggccagcccccgccttcagagctgggcagcgcagtgctggcaggagccgtgtggctctcagcaatcagctcacaggaaataaacactgtggattatttgtaatgcgcttggaataaaaccatcctcatgcagaggcccagcacaaggggccaacctccataaaagtctcatgtaagctttgtttggagcatttaagtagggcctaagtgatgtatacactttatctagccctctttgtaaagggaacaacttygccccaccatcgagcaaagagaaaggtctgaaataaagagatgtctctatctcacaattaagcttcgtgcacgtttttccacttttttttcctaatttggggttctgaagatctcaaggatacagggcttaggttctaagctttcacactcttcgtgagcgctctttatgcagttacaggtgaaatctcatctccgaatttctgctcttccacatgaattacaacagttacaacccagctgctgccccagcacggccctgcatgtcaacacctcaacacagagacacagcaagaactggc

SEQ ID NO: 65759 - DNA, 600 bp, Chicken  19866894333256_1
ctttttgacccatgaaacacccttgggattgattacttgtaaagagtaaaaggaatgcactgagaagatgaaaagtgatgcattgtgactgggaacaaatcctaatatatataccttaatatacctacaaacatacatacatacatacatacatacatgtagaaatgaaattctgattcagcacatttgggtaccatgacaaaatattctgcacagagctattgcaattagccaaaatcaagttggcttctggagcaaagtagtgtacatacgtgaggtcctgtgtctaaacaaattaayatctctagaaacctatttattagttcagcttatagagtctaacaaacctaacagacctttccgaacccaagccagactacacataaccataggaaggcatcagatctgtgggtagtagactgaatgcctctgctctactaccacacaaaaaacccttatggactgtgctacttttaatatcagtagcactcctttaattttattaaatgcgaagaaattgtggaaagaagcaggggaatgaagttacagatgtctagaaagagatatctatattgaaagcaaactggtggaactgggggc

SEQ ID NO: 65760 - DNA, 600 bp, Chicken  19866894333260_1
aggggccccattgtattatgtccatatcccacagaatttcagtgtaagttgagcacctgactctctgaagtgttttcagatagctctataaatattaacattctttggctgaattatgaaagaattattttagaacatgataggggtgcctgtagtgggttaatctgaccaaaccactgtatgcatctacaataagtgaagcagaccacccagtagctagaaatacgtgtatccccaaagggagcatgagaatactaactcaaatggagatggtgacacggaggggaacaccactctctygtcagaatgtagttttacaagatgtgttccatttctcaaagttgatttctctgaacatattaaaacggaaaatgcttcttagcttttctgtgagtactctaaaccaatccgggccgagcagtccatgataaccacagagttgtagtccctaggaatgtatgcagacaagcgtcttcatgaaaagccatgagggaatagaggactcaagcatttctgtggtcattgatttcttggcttctctgcttagactgcaaggaagagtgcttattactgtaagccatactgctaacatgggaaatg

SEQ ID NO: 65761 - DNA, 600 bp, Chicken  19866894333263_1
aggtattaataacagcagaatgaaataataataaaaaagtgtcttttagcagagtataatttctgttttacaggaaataccaatgaagcagagtggcacgggaaagtattacggagcaggaagaagtgagagggaggtgaggatggagttgtgttaatccctgggtgctgtgagggagagaatgggaccccaggtgcctgagggtgggtaatgaggggcaaacaatgatgggagtaaatgggatgccttactggggacaggtgaggttcattatgtcctctgtttgtggtgccatgcagytcacagagctttcctttggagctgcatgcaacgtggtgcccttctccagccttcccctgtggatttgggtgagtttctttggctttatttcccatttatacagcagaattgttgttttcttggtaatctgaagtgtgtttctgatccatgtgcacacagcaactgttcgttgttgaccttgtttagaaacttgaggaccagagtagaagcatgtttcatgtggaactgaatatttgttgcctgtcccctggtgtctaggggctcttcctccagctggcacatggaagggtcctacttcaa

SEQ ID NO: 65762 - DNA, 600 bp, Chicken  19866894333268_1
attgctttcctgttatgttgttgtttcagaagttatccagacaaggaaaccattttgggatcccttaaatcagtgcttgcatctatctgaagctactgaaagtttcaatagcaatagaaaaacctgacaaggttagcaaggctcatggtttccactgcctgttgggtcacaagcagatataatgccaattgctttctgactctccctgcatcaatctgaaaacttccaggtctggggtttagcccacctgtcctggtaatggtacagctgtaaagttgtggttggagaggtggggagctmatttggaaagccctgctttacacagactacgcgttctgtatctgggagactggaaaagtacatggttgacttgacacacatcattgtgaaatatgtgagaattggaggagatctctaaacatcagctgacctatatatataggcatacgctgggcctgcatactagtctgtgataccatgctgcctattttccagtacttgcccaagtacaggagcctaacgtggaagaattcctcatgcagagaggcaggagagaaaaaccctcctttgtagaacaaagagtagggagagtaatggggt

SEQ ID NO: 65763 - DNA, 600 bp, Chicken  19866894333272_1
aggaacttcctctctaaagcagacaagacagaggaacaatttactgcggaaggccaagagaatgagatactgctgccctcaaaagatttactgtaatagcattcaggtacccaaccaaattgtgagtggcgctgtagaacacactgtaaaaaaccacttattgtttccagccaaaatagggataagcattagttccattctgtagaccagggcagggatagcagctgaggccagtgctcaaatgtgagataaggcttaaatacaaagtcctccttcatataagcatatactgacccatayatttcagaaaccaggcccctgaaatctgagccttaccttcttttgttgcttctgtctgaggaagtcaagaacctccttatgctctgtagcctctgcctgtgagtagaaacatgaataaatcctgccatcctgtgcaccaggacatgcaaatactttcttgtgggaagtaagaatacgttaccacaatataattaaaatccaatttaaattttaattcctctgagatagatgagaaagttctggctccaacaatttattactttaggacagcaccagaattgagttcagaacatacaacaa

SEQ ID NO: 65764 - DNA, 600 bp, Chicken  19866894333275_1
ggcttgtgctttgtgtattagtgattaaaactatttaagaaatataaccacttttctgcagactttgtaacacattgcttacgtcctagctcatcagatgggtctcacacccttactaaactgtttattatatgctcaatatttgggaaataaatggttactactagtctgaacttaccttcttatgattgttctctttgcttcaatttcaggaattcctactatattcattattacatggacagtgacacggattattttagaggacactgggtaagtctgctggagagagaaaacttmaagcgcacaactgtkccaatactggtcatgttttgtatgtagtggtattcatacaaaagtggtttgcttttctgaaggagacaaaatttcagtaaagggatagatgttttgaagctcttcagcatgctgcttatgcttcctgtttactttaaaatgcaaagtgcaggagtggttagagagaagttataactgatgctaccctttgagatctacatgtagagctgtctcatttgaaagtcaaaataatacttaaaatagcaatgggggtccttggattctgtgctgccatgcagtactagg

SEQ ID NO: 65765 - DNA, 600 bp, Chicken  19866894333275_2
tattagtgattaaaactatttaagaaatataaccacttttctgcagactttgtaacacattgcttacgtcctagctcatcagatgggtctcacacccttactaaactgtttattatatgctcaatatttgggaaataaatggttactactagtctgaacttaccttcttatgattgttctctttgcttcaatttcaggaattcctactatattcattattacatggacagtgacacggattattttagaggacactgggtaagtctgctggagagagaaaacttmaagcgcacaactgtkccaatactggtcatgttttgtatgtagtggtattcatacaaaagtggtttgcttttctgaaggagacaaaatttcagtaaagggatagatgttttgaagctcttcagcatgctgcttatgcttcctgtttactttaaaatgcaaagtgcaggagtggttagagagaagttataactgatgctaccctttgagatctacatgtagagctgtctcatttgaaagtcaaaataatacttaaaatagcaatgggggtccttggattctgtgctgccatgcagtactaggcatcctaatttcata

SEQ ID NO: 65766 - DNA, 600 bp, Chicken  19866894333275_3
tttgaaagtcaaaataatacttaaaatagcaatgggggtccttggattctgtgctgccatgcagtactaggcatcctaatttcatagaatcatagactcattaaggttggaaagactactgagatcatctagtccaaccatcaacccatcaccaccattctactaaaccatgtcactcggtgtgacatctgccctcttcttgaaaacctccagggacaatgactccaccacctccttgggcagcttgttccaatacttcactacttctgagaagaaatttttccaacctgaacctccccyggcagaacttaaagccattaccttttgtccagtcactagttatgcaggagaagaggctgactttcacctctctacaacctcctttcaggtagttgtagagataaggtttcttttgagcctccttttctccagaataaacaatctcagctgctctttaaaagacttgtgttccagacccctcaccagcttcgttgatcttctttggacacactccagagcctgaatgcctttcttgtagtgaaatgcccaaaactgaacacagtactcaagatgtggcgtcaccagtgctgagtacaaagg

SEQ ID NO: 65767 - DNA, 600 bp, Chicken  19866894333276_1
agtcccgacagtcttttaaagacagtgcagtagataccagcgccacagttgtgccccctaaagctctatttttaatgagcacgtaaacggactttatcttttttttcctgaagaactattcactttatcaacctgtggataaattcaccaacttaaaagagcataaaaggctgtcagaagtcatcatgctatgattgcttttcccaacaagcttcctaggaacataatttgagtggcaacatggcagcaaaatccaccacggcactgaaatgccttttgcatttccctctccaggacttygtgttcagaactaatttttatccagtctgcagatcaattaactttcagaaatgttttaacctgaatggttgggtgggacccggggacatcccccactctctctgtttaaacactttttcattgcaaggaagagtacttgaggaaaawatcaaaactgctggtcttaaatgcgtgagacagagcagctgaaattgaagctgtaccatttacatacactgaattattagtaaatattgctgtattactataaattactgaaagttgccttagttacacaattttgacagcaatacaggagct

SEQ ID NO: 65768 - DNA, 600 bp, Chicken  19866894333276_2
ccaacttaaaagagcataaaaggctgtcagaagtcatcatgctatgattgcttttcccaacaagcttcctaggaacataatttgagtggcaacatggcagcaaaatccaccacggcactgaaatgccttttgcatttccctctccaggacttygtgttcagaactaatttttatccagtctgcagatcaattaactttcagaaatgttttaacctgaatggttgggtgggacccggggacatcccccactctctctgtttaaacactttttcattgcaaggaagagtacttgaggaaaawatcaaaactgctggtcttaaatgcgtgagacagagcagctgaaattgaagctgtaccatttacatacactgaattattagtaaatattgctgtattactataaattactgaaagttgccttagttacacaattttgacagcaatacaggagctattcagtaatataatctatattacaactttgacttacattttcaacaaatttctaaaatactgatttacaatttgagggttcagtattttacygttgcaaataggtacctaacgacatgttgcattagctgtgttacactttcctga

SEQ ID NO: 65769 - DNA, 544 bp, Chicken  19866894333276_3
cactctctctgtttaaacactttttcattgcaaggaagagtacttgaggaaaawatcaaaactgctggtcttaaatgcgtgagacagagcagctgaaattgaagctgtaccatttacatacactgaattattagtaaatattgctgtattactataaattactgaaagttgccttagttacacaattttgacagcaatacaggagctattcagtaatataatctatattacaactttgacttacattttcaacaaatttctaaaatactgatttacaatttgagggttcagtattttacygttgcaaataggtacctaacgacatgttgcattagctgtgttacactttcctgagtaagagcagactgcatttggcttcttttaaccagatcacctgtaagtacatgtaactggcagaccaccttcatctcccttcaaggcaatgagagtaggcaacaattacagcagcagttgtgtctgaatgaatccagttaagcattaactgcttaacaaataaaacaaaacaaaaacatgaacacaataa

SEQ ID NO: 65770 - DNA, 599 bp, Chicken  19866894333284_1
  misc_feature (1)..(46): n is any nucleotide
nnnnnnnnnnnnnnnnnnnnnnnnnnnnnnnnnnnnnnnnnnnnnntgatttttgctttgctacacaaagatctttcgcagtgatgcaatgctactaaagaatgctgaggaaactggtaatgcgttggcatcaaagagtgtttgggcaattagctcataaaaggagacatcaatccaccagggtgaaataacggtgggttcatgttgctacatgccctgttctgcatttgatgacaaattattaagatctgatgagcaaacgttccctttaaatcatgtaaaggttaaatgattttacaygatgctcaggactgcccacagaaggccaaacactgctgcttctatctgggctgagcagaaaacaccatgctgtagaaacagaatcagggaatcaccattgggaagcacrctctcctctttgccaccaccctcttrgaacacgagaggtgaggggtggctgagcagggcttgctgtgactgcagggctgcatgcagccaggcayggacaaggccctctgctctctgggtttgttcccctctgttaggaccaaagcaggtctgtgctggatgragctggagcaaagaccacggaccccaac

SEQ ID NO: 65771 - DNA, 600 bp, Chicken  19866894333284_2
gaaactggtaatgcgttggcatcaaagagtgtttgggcaattagctcataaaaggagacatcaatccaccagggtgaaataacggtgggttcatgttgctacatgccctgttctgcatttgatgacaaattattaagatctgatgagcaaacgttccctttaaatcatgtaaaggttaaatgattttacaygatgctcaggactgcccacagaaggccaaacactgctgcttctatctgggctgagcagaaaacaccatgctgtagaaacagaatcagggaatcaccattgggaagcacrctctcctctttgccaccaccctcttrgaacacgagaggtgaggggtggctgagcagggcttgctgtgactgcagggctgcatgcagccaggcayggacaaggccctctgctctctgggtttgttcccctctgttaggaccaaagcaggtctgtgctggatgragctggagcaaagaccacggaccccaaccaggaagggaagaggtgtgctgccaggagatccctgatctcatcactgcagcagagtggcagcctgggttaatctcagctctcggagctttcctgagctgccccccagta

SEQ ID NO: 65772 - DNA, 595 bp, Chicken  19866894333284_3
gagtgtttgggcaattagctcataaaaggagacatcaatccaccagggtgaaataacggtgggttcatgttgctacatgccctgttctgcatttgatgacaaattattaagatctgatgagcaaacgttccctttaaatcatgtaaaggttaaatgattttacaygatgctcaggactgcccacagaaggccaaacactgctgcttctatctgggctgagcagaaaacaccatgctgtagaaacagaatcagggaatcaccattgggaagcacrctctcctctttgccaccaccctcttrgaacacgagaggtgaggggtggctgagcagggcttgctgtgactgcagggctgcatgcagccaggcayggacaaggccctctgctctctgggtttgttcccctctgttaggaccaaagcaggtctgtgctggatgragctggagcaaagaccacggaccccaaccaggaagggaagaggtgtgctgccaggagatccctgatctcatcactgcagcagagtggcagcctgggttaatctcagctctcggagctttcctgagctgccccccagtatttcctccccccatcccttca

SEQ ID NO: 65773 - DNA, 527 bp, Chicken  19866894333284_4
gttgctacatgccctgttctgcatttgatgacaaattattaagatctgatgagcaaacgttccctttaaatcatgtaaaggttaaatgattttacaygatgctcaggactgcccacagaaggccaaacactgctgcttctatctgggctgagcagaaaacaccatgctgtagaaacagaatcagggaatcaccattgggaagcacrctctcctctttgccaccaccctcttrgaacacgagaggtgaggggtggctgagcagggcttgctgtgactgcagggctgcatgcagccaggcayggacaaggccctctgctctctgggtttgttcccctctgttaggaccaaagcaggtctgtgctggatgragctggagcaaagaccacggaccccaaccaggaagggaagaggtgtgctgccaggagatccctgatctcatcactgcagcagagtggcagcctgggttaatctcagctctcggagctttcctgagctgccccccagtatttcctccccccatcccttca

SEQ ID NO: 65774 - DNA, 459 bp, Chicken  19866894333284_5
aatcatgtaaaggttaaatgattttacaygatgctcaggactgcccacagaaggccaaacactgctgcttctatctgggctgagcagaaaacaccatgctgtagaaacagaatcagggaatcaccattgggaagcacrctctcctctttgccaccaccctcttrgaacacgagaggtgaggggtggctgagcagggcttgctgtgactgcagggctgcatgcagccaggcayggacaaggccctctgctctctgggtttgttcccctctgttaggaccaaagcaggtctgtgctggatgragctggagcaaagaccacggaccccaaccaggaagggaagaggtgtgctgccaggagatccctgatctcatcactgcagcagagtggcagcctgggttaatctcagctctcggagctttcctgagctgccccccagtatttcctccccccatcccttca

SEQ ID NO: 65775 - DNA, 600 bp, Chicken  19866894333288_1
ttcctcttgcagcagcgcttggaaaccatctccatgaacccaccaacagatttcaggattatccccctcctacagtcagactctgtgggcagcccttgtcactgtaacgtgatctattctggcattatagtttccacagaacaaggagggaaatgtgttaacaagcaagtatcctcactcctgccttgacagatgaggccaaacagggccttgcacatgccacttcctgaacagcaaggaaaacacgtgtacattttttgagaacctgcctttttattttgttctctttgaggtttcaaygggtccctcctgaatagttgcctttttgccattaatacatgtcttgatgatcctttctgatgacatattggaatctgagcccagagctgaatctaagcaaatgccacttggwtaaagatgaagtttctgattcagccagcactgggttacctgcagagcagtggcatcactacagatgcttcacctgcttctactttagtttggtgttggtccttggaagcagtgaaactgcttctgataagttcttggcaataccagccaaagtatcattagtaccaatagccatataaaggaaaaagc

SEQ ID NO: 65776 - DNA, 600 bp, Chicken  19866894333288_2
tctattctggcattatagtttccacagaacaaggagggaaatgtgttaacaagcaagtatcctcactcctgccttgacagatgaggccaaacagggccttgcacatgccacttcctgaacagcaaggaaaacacgtgtacattttttgagaacctgcctttttattttgttctctttgaggtttcaaygggtccctcctgaatagttgcctttttgccattaatacatgtcttgatgatcctttctgatgacatattggaatctgagcccagagctgaatctaagcaaatgccacttggwtaaagatgaagtttctgattcagccagcactgggttacctgcagagcagtggcatcactacagatgcttcacctgcttctactttagtttggtgttggtccttggaagcagtgaaactgcttctgataagttcttggcaataccagccaaagtatcattagtaccaatagccatataaaggaaaaagctgactcactcaactgatgtagagggtctctaactatacaatactcctcaagaaatagccttcatctggaaaatattctcccttgagaggctagcccttaaatggagcccagg

SEQ ID NO: 65777 - DNA, 600 bp, Chicken  19866894333306_1
ctgtgaaataggaagaattccagaaatctctctactgttgattgggtgtaaggagatcaaggaaggctcaggactgagaattatttcctgggccctattttgggatatgaagttgtaaatagcacattttcattatgttattgcattcccagagctgcccagtagtcagccttggtcatgaaagggtttgtatcaactttatgaactgtcacaattgtatgaaatttttctgtgtgtgatgtacgcatgtatctacatacatacaattaaataatagtttctaagaatgtagttataacwaactgattttatggaaaaatcccgttatttgataatgtaccccttgttggagtgagcagcaaaaaagcttaagcattataaccttgaaactcttgtctaccatagcagtgttaatagtaggtggatggcagtgttttatttatgtaaagctatttccatgtgaattaaaaaaaagtttacaatgatttaaggcaagagaagaagaaagtggctgaccagatttgacctgacagtagccctttatattttcataattaataaagtaaaaaaaaaaaaaaaaagtatttgcattgattgtaa

SEQ ID NO: 65778 - DNA, 600 bp, Chicken  19866894333312_1
ggggttcttcatcacaggcatctttaaacttaaagctgaatgctttgctaaaagagcaaaattcgttctggcttgaaaaacagccagttgagagaagttttctaaatgtataacaagttacatgagcatagaggttccttcttattctcaaatatgtgaataagttcaacatcataatctctgatttaagtattgcacattataagcataatgagagacttcataggctttatccaagaagcatacatatacttgccacatacagatattcaaagtttgacgtttgttaaaaatagtggkttttttttttcataatctcttgcatgttttgtcttctggaatgtcctaagttatcagtaatgaaccagttactgtccaccagaaaaaaaaataaaaaaatcttcctgtgatccaccaaaaagctgctcttagcctttaggcctgaaacaaactgtccctactactcttcatggatgtattcttgaatgctgcatattgtgagcaaagtagaatcttcactgtcgttttgttaaaatagaataattctctggacagtttgttacatgaggcagatgccataatattgaaggattatgcaca

SEQ ID NO: 65779 - DNA, 599 bp, Chicken  19866894333316_1
  misc_feature (1)..(98): n is any nucleotide
nnnnnnnnnnnnnnnnnnnnnnnnnnnnnnnnnnnnnnnnnnnnnnnnnnnnnnnnnnnnnnnnnnnnnnnnnnnnnnnnnnnnnnnnnnnnnnnnnnttttggttgtgaaagtcatgagagacaccaacaacctatgagattttcctggaaatcctatcaacatgtcaaaagtgagtagaaaaactaggaagagtgtgcgattctgcaaccaggagttacttaaataggagttcaggtgccatcagtgtaggtatatttaagaagagaatcccaaggaatgtgtttcaaaaagtgaatracgttgcatgtttctgtccaacctttgcagacaaaaatggctctctttcacacattcatacttcaaagttttgactgaggttcctccaacctgctttccactgttcactttacaagcaggtacattgaagttctctgaatttcctctttgcggggcacattcagccctggctgcagatggctttttgaactctggacgccagacagaaaagcaaagggggaatttgaggaggcgtacagatacagtcactgtgtgaacacatcagctgaatgctgagagctgctaacaaagttgtgaaa

SEQ ID NO: 65780 - DNA, 600 bp, Chicken  19866894333316_2
tgcttgggaaggccaccccaggagctgatggtttaaggtagttgaagtgggattagcctccatgaaagactcaggaatactttttctcagtgaaagtttacaataatattttaaagactctcaaccaacacccatacttaagctttgaaaacagataatgcatttttaatgggattgcacatctgacaaggaatttgactaattcctctgatagcagacagcttcctccccataattcatctcaaaaggatcaaaaaccaaaacactccctgccatctctggaatggccccccctgcccrgtgcctggagaggctcagctgggctccatggtgtggtggcagggagcagggcaggtccacaaccccacagcccttctgccacaggaagggatggagtgaggatgaagaggccgaaggctttgagccgggggctgggctgctgactctgaacccaaggcctcacaggttaatttggaacgtggggctatctgtggccaccaacgtctttgaagttcctcaagtcaggtaatttctctgctgtggtgcactaacagttgtgaaacactgcaagctgcttgaatctgaggtgtttgagaagga

SEQ ID NO: 65781 - DNA, 477 bp, Chicken  19866894333323_1
tgtcctaagatgtaacccaagaaggtgtgtgtccaggggcccagaactgtgcagaggtaagtgtccctaatgttgcttttaggagcatctttatcataacccttatagtccatccctggaagcattcaagtccaacctgtatacagccctgctgcttgatctagttgttggcaagcctgtccgcagcaggaggttggaactcaatgatctttgaagtccattctgtgatatgcaccttttctcagtgctctcctctgtgtgtggctggaagtagtgcgtaggcaggagatgcccataggmagtttggctggtttgaacacagccgaaggaaagaggctgactgtagatacgtgaataaaagcaacagagttaaatataatcagtaaggtttgaccttccaaccccttccttgtgcccattattccatgttggacggacctctctgaaggccaagagctgtcccaggctgggctagca

SEQ ID NO: 65782 - DNA, 600 bp, Chicken  19866894333324_1
aggtagtacatttcaaaacataaactgctaaaaaagctgagcactatatatgacaaagattctgttaaacatgataacaggtctgaattataaatgagggctagtccaaaagtaatgcgtcctattttattacattggcccatgaaatcagagagatattgatggtatggcagtagaggctgaaccttcccagcaatattccattacatggtgctgccatgtgacagatggcagcagaggggcattctgttagaatgacatctggcatggaagtacatatgaagaagtgtttcatgaatycctccatgtggagaaaatggaacccmttgacattcattgatacttgctgaatgtttctggaggccaaacagtgaatatgagcagagtgaggcagtgggtgatgactttcagcagtggcaacagccatatgacagtcaggccatgttctggttggccatgaatatttttataaacatggcatgctggcattgctggttcatagaatgaaaaactaatggtggaggggtaggttgaaaaatagccagggggggaagatcccttggctctctttyaacaccatttaagaaaataaatggatat

SEQ ID NO: 65783 - DNA, 600 bp, Chicken  19866894333324_2
gctaaaaaagctgagcactatatatgacaaagattctgttaaacatgataacaggtctgaattataaatgagggctagtccaaaagtaatgcgtcctattttattacattggcccatgaaatcagagagatattgatggtatggcagtagaggctgaaccttcccagcaatattccattacatggtgctgccatgtgacagatggcagcagaggggcattctgttagaatgacatctggcatggaagtacatatgaagaagtgtttcatgaatycctccatgtggagaaaatggaacccmttgacattcattgatacttgctgaatgtttctggaggccaaacagtgaatatgagcagagtgaggcagtgggtgatgactttcagcagtggcaacagccatatgacagtcaggccatgttctggttggccatgaatatttttataaacatggcatgctggcattgctggttcatagaatgaaaaactaatggtggaggggtaggttgaaaaatagccagggggggaagatcccttggctctctttyaacaccatttaagaaaataaatggatatagtatttattgtacatatactcttgt

SEQ ID NO: 65784 - DNA, 600 bp, Chicken  19866894333324_3
gtacatatgaagaagtgtttcatgaatycctccatgtggagaaaatggaacccmttgacattcattgatacttgctgaatgtttctggaggccaaacagtgaatatgagcagagtgaggcagtgggtgatgactttcagcagtggcaacagccatatgacagtcaggccatgttctggttggccatgaatatttttataaacatggcatgctggcattgctggttcatagaatgaaaaactaatggtggaggggtaggttgaaaaatagccagggggggaagatcccttggctctctttyaacaccatttaagaaaataaatggatatagtatttattgtacatatactcttgttctgtaaatcacatttttaatcaaaaattgattttttgtgaatctgtgatggactgatctattcaaaaaaacttgctattttttacatagatttttaagaaaatgaggacatagcatcataataagaatccattacattttcttaaacgaaaaagggaagcaaatgcattttcttagcgctctcagagttggtcttctgaaaatgatatatgcttgatatggaaagtcttgttaatatttttgaga

SEQ ID NO: 65785 - DNA, 600 bp, Chicken  19866894333328_1
gggatgaccgtaaagccactgcgcccatttcccaaatgggtaaaaccaccgccccaacaacctgtccaaacccgcaccgtatcgttgtgtgcccactgcaggctggcatggggcacagccccgatggcttaccccatcattacctccctccctccctccctccaaaaaaacatttcataacacgacacgtgatggtggcaataacgaacgcccacacacttcaggtgctgtccccaaccacaacacaggtgcttgggcttggccatcccggcacactcccagtgcctgacccaggcaccraccccagagaaaggatatttcccagcagcacccaaggttgggccaatgcatagaaaccatgagagtcccttccagccttgtacttaaaccaccaaagcagtccaagaggagctccttgggatcacaatactgcagatagcgtctgtcccacctctgtgaacacaaacccacaacccttgggaatggttccacagcccattttctgctatccacctgttcccacagacagaaggcagaaagccccattttcccacagaaagcccaacattgtccatttctccccatcccaatctcaccctt

SEQ ID NO: 65786 - DNA, 564 bp, Chicken  19866894333330_1
tgctacttacctagatgcttaagactctgagtcttagtgttggagtaagcaaaatagagttgctgtcttagctgccttgcagggtgatctgaaaacatcgttttcatcttgcttttcttcaaacgttgatgtaatgctctatcctttcatcaagtatcttgtagccatttcggtgtggcagtctgggtttagactccgtttgttgtcagctgcttgcagtgtagtgggatgtgtgtttattggctttgggccacacgagggctgatccttcttcatatggtcccttgtacttgtcagcaygcagttaaatcgtgcgtgtgtcttatgtaaagagcaggcacrcacacagamygatcttcagctctcttctatttcacaaacagggaaacaatgagttagaattttcctaacccagattcccgttgttgtactgcttccttctgtgttctttgaagctgaattggtcagatgcaactattttttcctactttcaggaccatgttttgtgcaggaaagagaatgagaactgttcttctgcactagtccgttccattttgtgcttga

SEQ ID NO: 65787 - DNA, 522 bp, Chicken  19866894333330_2
gagtaagcaaaatagagttgctgtcttagctgccttgcagggtgatctgaaaacatcgttttcatcttgcttttcttcaaacgttgatgtaatgctctatcctttcatcaagtatcttgtagccatttcggtgtggcagtctgggtttagactccgtttgttgtcagctgcttgcagtgtagtgggatgtgtgtttattggctttgggccacacgagggctgatccttcttcatatggtcccttgtacttgtcagcaygcagttaaatcgtgcgtgtgtcttatgtaaagagcaggcacrcacacagamygatcttcagctctcttctatttcacaaacagggaaacaatgagttagaattttcctaacccagattcccgttgttgtactgcttccttctgtgttctttgaagctgaattggtcagatgcaactattttttcctactttcaggaccatgttttgtgcaggaaagagaatgagaactgttcttctgcactagtccgttccattttgtgcttga

SEQ ID NO: 65788 - DNA, 513 bp, Chicken  19866894333330_3
aaatagagttgctgtcttagctgccttgcagggtgatctgaaaacatcgttttcatcttgcttttcttcaaacgttgatgtaatgctctatcctttcatcaagtatcttgtagccatttcggtgtggcagtctgggtttagactccgtttgttgtcagctgcttgcagtgtagtgggatgtgtgtttattggctttgggccacacgagggctgatccttcttcatatggtcccttgtacttgtcagcaygcagttaaatcgtgcgtgtgtcttatgtaaagagcaggcacrcacacagamygatcttcagctctcttctatttcacaaacagggaaacaatgagttagaattttcctaacccagattcccgttgttgtactgcttccttctgtgttctttgaagctgaattggtcagatgcaactattttttcctactttcaggaccatgttttgtgcaggaaagagaatgagaactgttcttctgcactagtccgttccattttgtgcttga

SEQ ID NO: 65789 - DNA, 512 bp, Chicken  19866894333330_4
aatagagttgctgtcttagctgccttgcagggtgatctgaaaacatcgttttcatcttgcttttcttcaaacgttgatgtaatgctctatcctttcatcaagtatcttgtagccatttcggtgtggcagtctgggtttagactccgtttgttgtcagctgcttgcagtgtagtgggatgtgtgtttattggctttgggccacacgagggctgatccttcttcatatggtcccttgtacttgtcagcaygcagttaaatcgtgcgtgtgtcttatgtaaagagcaggcacrcacacagamygatcttcagctctcttctatttcacaaacagggaaacaatgagttagaattttcctaacccagattcccgttgttgtactgcttccttctgtgttctttgaagctgaattggtcagatgcaactattttttcctactttcaggaccatgttttgtgcaggaaagagaatgagaactgttcttctgcactagtccgttccattttgtgcttga

SEQ ID NO: 65790 - DNA, 599 bp, Chicken  19866894333332_1
  misc_feature (1)..(37): n is any nucleotide
nnnnnnnnnnnnnnnnnnnnnnnnnnnnnnnnnnnnnatgcagtttgaggcaccagttatttcttctctcccttgtttattgcctcagtaacccatgaaggaaaggtgaaaggccacccatggaaatactgaatattaaaaaggttaaagtatacgattataagtgcattaaaagtttatagttctgccactgagtatgctggggatataaatgatgttgtcttgttctcatgacaacagagagaaagcaggacaaagaaatctcttcttgtagcaacgactaatgggaatcaagcatcrcaaatttaactctttctgtttataatctgcaggttggatatttcctgagatatatcaaatgtacagttgaggagagaggcttaaatagccctttagtgacacttcaggctatcgatcatctcatgtatattgttcaaatttttaatgttactggatatctgaatgtcagattacctacctggtgtggttaaagaggctacctatctttctgatacaacagataatgcattcccatttgtctttctgaccattttatttttaagcgtggcacagacaagctgcttgaggtactgagttca

SEQ ID NO: 65791 - DNA, 599 bp, Chicken  19866894333337_1
  misc_feature (1)..(33): n is any nucleotide
nnnnnnnnnnnnnnnnnnnnnnnnnnnnnnnnnacttaagattacgctcttccatcaagatcttcttcactaagaactaatatctagtacaaggatttcactttaggaccatcctagactgtgtgagcattctaataagtcttgataaccagggcaggaacttttgcagttccttgtacttttgtaaatcaatgtgtataagttcggagcataaatctattctatatttgtttttctttgtaaatacattccaaacattttactttgctaagtgtaatttatgagtaagtgacaaacatmattcttatggctctagagtagtgatctgcagtgcttggcatcctgaagcaattctatagggagtttgagctacgtggagcagtkaaatcaaggcactgacatgacagagatattttgcagtgactagcattggccagggcttgctgtcaagcagcagggcaatggagatgcatgtgtattctcaggatctcccatccattccacattgcacccaggaacagggaatggtggactgacaaaaggaggatctaaactaccctctcttcagaaaaaagctgttatgactaagtttcctccat

SEQ ID NO: 65792 - DNA, 600 bp, Chicken  19866894333337_2
tagtacaaggatttcactttaggaccatcctagactgtgtgagcattctaataagtcttgataaccagggcaggaacttttgcagttccttgtacttttgtaaatcaatgtgtataagttcggagcataaatctattctatatttgtttttctttgtaaatacattccaaacattttactttgctaagtgtaatttatgagtaagtgacaaacatmattcttatggctctagagtagtgatctgcagtgcttggcatcctgaagcaattctatagggagtttgagctacgtggagcagtkaaatcaaggcactgacatgacagagatattttgcagtgactagcattggccagggcttgctgtcaagcagcagggcaatggagatgcatgtgtattctcaggatctcccatccattccacattgcacccaggaacagggaatggtggactgacaaaaggaggatctaaactaccctctcttcagaaaaaagctgttatgactaagtttcctccatcagatcacgagggcatagaatgctggaagcagagcctcagctcccaattgttagacagcaacttcaggaatctaatcataaaaaa

SEQ ID NO: 65793 - DNA, 600 bp, Chicken  19866894333343_1
ctctcatttgtgctagaccagaggaactgaacttgtataaggccaagtttgtgcctcctcatctttgatcaattctgaggagagctatgcttttaattccaggagcatgtattacaaataagatcccacgtaaactttacaaaggcaaaagtaaaagacattcaaatatttcagtattaactttgtgctatatttaaatctgatttgtctttcaatcagacaacgtctgttcattctcctatgttatgaagtttagctttactgtacatacttgtattttaatttctgaagaaatcctcrtgttgttcttattcataattttagatagggtcattgcaacatgaaatgaaagtgggtttttttgttgttgttgttgttgaaaataatttacacgtctactttcaactcttgtttaaagcaaacttattagcttgagattcactgatggaaaatatcaattaccacctccaacaaaaagacaaccacaaccaaaatgaaaaccaaaagtactgggaaaaattaaagaaaaaaagaaaagaaaagaaacaccccagaaacccagagatgcttattaaaagctagctagtccttcttgtatgc

SEQ ID NO: 65794 - DNA, 550 bp, Chicken  19866894333346_1
gtgggttggaggtggggagaggccgctctgagggtacactgagggtccccgagccctctggcacaggggcagggctgggagccacagcaccgtagccgtgtcttcatctgcttgatacagcaatgtggccacatcgacagctctacaaccagggcaacaatggcctgagtccatttacaaaatagaagagagggtgaatgctttcatagtgttctaaaatgccttaaaatccctccagtccacagaacaaagtgtttcataccttctcttctggaaacctttcggctaatatttgagcartaargaaaacacagcagctgttagcgtaatttcccccttgaggcagattgtcctcaggtagaacaaaacccaattaacgtaccgccaaggtcagttaaattagacaacgcagaccgtcctaacgcagagctttcctccagcggctgccaccagcgccgtgtgccagcccagcagaagcaccagagcagcggggcctgtctgtgtgagctgctgtgggtatcggggacaggcggctgccgtctgccttctg

SEQ ID NO: 65795 - DNA, 546 bp, Chicken  19866894333346_2
gttggaggtggggagaggccgctctgagggtacactgagggtccccgagccctctggcacaggggcagggctgggagccacagcaccgtagccgtgtcttcatctgcttgatacagcaatgtggccacatcgacagctctacaaccagggcaacaatggcctgagtccatttacaaaatagaagagagggtgaatgctttcatagtgttctaaaatgccttaaaatccctccagtccacagaacaaagtgtttcataccttctcttctggaaacctttcggctaatatttgagcartaargaaaacacagcagctgttagcgtaatttcccccttgaggcagattgtcctcaggtagaacaaaacccaattaacgtaccgccaaggtcagttaaattagacaacgcagaccgtcctaacgcagagctttcctccagcggctgccaccagcgccgtgtgccagcccagcagaagcaccagagcagcggggcctgtctgtgtgagctgctgtgggtatcggggacaggcggctgccgtctgccttctg

SEQ ID NO: 65796 - DNA, 600 bp, Chicken  19866894333357_1
aaaagtcttacctcttttatggctaaaaatatcgctcctaacataaccatcacctgtcctgataactgcagccatcccacaccacgtgtcagagctaaaggataaggtggagcctgcaagacaaggccaacatgaaggactgagttccatctctgatgggtaaaaggcaaagtaagtggaagcttcatgtatgtagctggctgggtaatcaatttaactgtctgtctttgtattatgtagcttccgggttactttcacaaggaacttctactactcttccttctagataagaaaacctgmtatgggagagcctggtctcactatagtctgatattctgatacatgtggggacacttattcattttttttattcaccagcattttaaaaataaaccakaaatacaattgcattttaaagcagtaaaacgtgttaaggtgaagttactgcactcacttcattttcattaggcctgtggtaggaaaccaacgtcagcgttacgttgtacagaaaataaaaacaacacgacataaaaagcatgtgtcgagcaaatctcttccatttcattcgcaggagtgaattgaggggctctaatgtcagca

SEQ ID NO: 65797 - DNA, 600 bp, Chicken  19866894333357_2
aaggataaggtggagcctgcaagacaaggccaacatgaaggactgagttccatctctgatgggtaaaaggcaaagtaagtggaagcttcatgtatgtagctggctgggtaatcaatttaactgtctgtctttgtattatgtagcttccgggttactttcacaaggaacttctactactcttccttctagataagaaaacctgmtatgggagagcctggtctcactatagtctgatattctgatacatgtggggacacttattcattttttttattcaccagcattttaaaaataaaccakaaatacaattgcattttaaagcagtaaaacgtgttaaggtgaagttactgcactcacttcattttcattaggcctgtggtaggaaaccaacgtcagcgttacgttgtacagaaaataaaaacaacacgacataaaaagcatgtgtcgagcaaatctcttccatttcattcgcaggagtgaattgaggggctctaatgtcagcatttcatggcgattctgtagaaagaaaaaaaatctattaaggtttgaacttcccgcttctatgaaaactgagataatgtgccttttattaataggcaa

SEQ ID NO: 65798 - DNA, 600 bp, Chicken  19866894333359_1
agtttcggcactgatgcttgaaataaagtatatagttattgtaagtgaattagcaccaaatgtgtaggacagactgatgtgagtgaagtttagaactatttgtaaaattgttttctttcactctgaagggaaaaataacaactgactctactgttctatttgtggctgacttgtcttaagatacagtagtctacacatggagtgtaagaattagatgaaagagaggaaagcatacaagtgatgaaggaaccagcgcatttctgtgtattgtcagtttgtttaacccagcaaaaccaagtrcaggcagagaagaaagttgttcttaagttctgcctaaggcatcagttaactttagactaggattatctggagaaacaagaaggagtagtagaggaatggatccttgagaatttgttgtttcaaggagacaaatttatgtgagtaggctgaagtaacgtttgctttaatgtagtaagcaggaattgaccccatcaattgtaattcagttcttccttatacatgtacactcatttgcagcagcagagaagtgctatttagatgtacttgccttcttgttagtgcagcagttacttcactgtg

SEQ ID NO: 65799 - DNA, 600 bp, Chicken  19866894333363_1
aagatcaatagaagccaatgaaagaccaattaataaccatcagacacgttaaaagaaattatcgtcagtcacaactgactgaagacacacacagtaaatttctctagggtactgtacagatgagaacactcttcaatgttgctgttcaacaccttttgggtgcttatgacccaaagactggcagcacggcgagatgagggcagcagtctgatatacagaagtatgtttcaagaccctgatgacgaggaggaagaaaatacatccagaaagtgggtgattctgacagtaagaaagcagggkttcacactgcctcatcaaacaaacactggcccacagcagaaagctgcagtgaatactgttaatgagatgtagaatgcctggagtattgatttctgatctctactgccaagtttatttttatacaagactgtttaaaattaaacacataaaccatctggaaagcacacaacttcttccctgctccaaagtatgtgttttgaacactgtgctacagttaggtccccattgcttgttttctttccagttctgcttttgcataaagacagcaccaaragaagcagagaacattgtcattctggc

SEQ ID NO: 65800 - DNA, 600 bp, Chicken  19866894333363_2
gtgattctgacagtaagaaagcagggkttcacactgcctcatcaaacaaacactggcccacagcagaaagctgcagtgaatactgttaatgagatgtagaatgcctggagtattgatttctgatctctactgccaagtttatttttatacaagactgtttaaaattaaacacataaaccatctggaaagcacacaacttcttccctgctccaaagtatgtgttttgaacactgtgctacagttaggtccccattgcttgttttctttccagttctgcttttgcataaagacagcaccaaragaagcagagaacattgtcattctggctcatgctcaccttggtgtttaaaacagtattctagaaattcagggatgtcagttggcatcctgtcaccaatgcaaacatgtaatccaaatctcttacctcttgtgaatcctctaaccagaaacyaattatttgaaaggcaaccataatattttctccattccagagcaaaataatcgtgggaaaaaaagtaatccatgcaggtacttagatgtaagcagtgaatcacaagcagatggatgtagccatctgcagtcccgattcagccatgacag

SEQ ID NO: 65801 - DNA, 600 bp, Chicken  19866894333363_3
agactgtttaaaattaaacacataaaccatctggaaagcacacaacttcttccctgctccaaagtatgtgttttgaacactgtgctacagttaggtccccattgcttgttttctttccagttctgcttttgcataaagacagcaccaaragaagcagagaacattgtcattctggctcatgctcaccttggtgtttaaaacagtattctagaaattcagggatgtcagttggcatcctgtcaccaatgcaaacatgtaatccaaatctcttacctcttgtgaatcctctaaccagaaacyaattatttgaaaggcaaccataatattttctccattccagagcaaaataatcgtgggaaaaaaagtaatccatgcaggtacttagatgtaagcagtgaatcacaagcagatggatgtagccatctgcagtcccgattcagccatgacagtgctggaaaaggacatgactgcatacaggttctcagggttaacgttcttgctagccctgggctgctctcctctcagaataacctggttttcagggtatcagttttgaactgtccaactcatccagtatgcagcaacataaagaattctgtt

SEQ ID NO: 65802 - DNA, 600 bp, Chicken  19866894333365_1
gccttcttgtctgctctgtaagtagtacttaatagttaaaaatatgaaatgtattaaaacgtgggactataatcaaataactactatcacttgaccagctttcccatcgtggactcttccctaggactaccaaacacatattccatggaagaatggagaaagacctactggagaacaaccagcaaccaggtctggtcctccccgtttactggctatatcattgttcactcctctcgtaaactagaaatgaaaatgggtggggaaatctgcaacgcataagctaaggattcagttctgggmtaaggacagcactgatgtatcagctgcaggacaaagcagtatatctcaccatcactttctatcagaatgatggggctggcacagatttgagatggtcgttcccacatgtcagtcctaagcagaaagctaaaccttcaccaaatggagcccagaacaatctgtcctcaacacttccaactgggaagctgtaacagttccccacctaacagagcagggttcctcccaacacacgtaccatgcccagtgccaccacacacagagccagtcaatacaaggagcctgtacctggaggccgattcc

SEQ ID NO: 65803 - DNA, 600 bp, Chicken  19866894333372_1
tcctccaggatgccagttcccacataagtaagctgcagcgtgccttggctgaatctcaacaggttagcaatctcctccacatgagctcttgctgcagtccaaataacagcagcattaacatggtagtactgctcatctgcagctggattttggtggctgggaagtgtggttgtgaacatgatagttggcctgtgcaatggcatgataagcaatgtgctcttcatacttcgctgtaggacacatttctatgtggcttagcatgaaatagttgcctatttctgtaggattctttatggctcrtcgaggtcatgacaggatttgactttttcatgcatccaaacagatgggaggaagaagtcattttagagcaagctgtaggaggtctagaaacaagtgaacacragtgtgactttcactcagaactagtttatcatctgtctgtatttgttgaaaggaggacagtgtaggaaaaggtggtatatagaatagtttcctatgaatgtaatctttactctctgtgtaaataaccatagaatttttgtgggttaatagttctagtttcttttactacaggatcggagtacatacygaagggggaaa

SEQ ID NO: 65804 - DNA, 600 bp, Chicken  19866894333372_2
ataacagcagcattaacatggtagtactgctcatctgcagctggattttggtggctgggaagtgtggttgtgaacatgatagttggcctgtgcaatggcatgataagcaatgtgctcttcatacttcgctgtaggacacatttctatgtggcttagcatgaaatagttgcctatttctgtaggattctttatggctcrtcgaggtcatgacaggatttgactttttcatgcatccaaacagatgggaggaagaagtcattttagagcaagctgtaggaggtctagaaacaagtgaacacragtgtgactttcactcagaactagtttatcatctgtctgtatttgttgaaaggaggacagtgtaggaaaaggtggtatatagaatagtttcctatgaatgtaatctttactctctgtgtaaataaccatagaatttttgtgggttaatagttctagtttcttttactacaggatcggagtacatacygaagggggaaagaacttgtggatagctgtcatggcagtgcatttaatcagtgtgaactctgattgggagtttctgtcccagatatgtgagcaatagaagtaatatgagacagt

SEQ ID NO: 65805 - DNA, 455 bp, Chicken  19866894333372_3
tttatggctcrtcgaggtcatgacaggatttgactttttcatgcatccaaacagatgggaggaagaagtcattttagagcaagctgtaggaggtctagaaacaagtgaacacragtgtgactttcactcagaactagtttatcatctgtctgtatttgttgaaaggaggacagtgtaggaaaaggtggtatatagaatagtttcctatgaatgtaatctttactctctgtgtaaataaccatagaatttttgtgggttaatagttctagtttcttttactacaggatcggagtacatacygaagggggaaagaacttgtggatagctgtcatggcagtgcatttaatcagtgtgaactctgattgggagtttctgtcccagatatgtgagcaatagaagtaatatgagacagtggcacttgtttgttctcataaacaagtttctgccttatttgt

SEQ ID NO: 65806 - DNA, 600 bp, Chicken  19866894333375_1
cgggagtgctccatggcagtgggagactgaaaggccactctcagcatcccgccagctccctgccaagagtgggttattccctgctgtactaaagctttgttcaatccctcaaaatcctgccaagcaagtggacttgtgctgcctactagattgtgcctcaagaagttcacactggtatacaaggcacattttttttcactcttcattcactcccaacagaacctctttatttgttgtaaggaattccttcccttccttggtgtttatgctttgtgaatatttataggctgttatcatgtmcatctccctccccagttgtcactcagccaggctgcatgtgctctgctcttttaattcttgcttcgtaactcaatctctcccaccccctaatcattttctgttgttctactctcagctcccgccagttcagttgctcattttgcttggggggggaatgctatatttatgttaatattatgtggtgggtggtcctctctgtgcttatggtccaygtgagtgatttagatgtttaaaatgaggttggcattttacagccaaaccattgcctgattaccagttccactcttcaaagcactctgg

SEQ ID NO: 65807 - DNA, 600 bp, Chicken  19866894333375_2
ccaacagaacctctttatttgttgtaaggaattccttcccttccttggtgtttatgctttgtgaatatttataggctgttatcatgtmcatctccctccccagttgtcactcagccaggctgcatgtgctctgctcttttaattcttgcttcgtaactcaatctctcccaccccctaatcattttctgttgttctactctcagctcccgccagttcagttgctcattttgcttggggggggaatgctatatttatgttaatattatgtggtgggtggtcctctctgtgcttatggtccaygtgagtgatttagatgtttaaaatgaggttggcattttacagccaaaccattgcctgattaccagttccactcttcaaagcactctgggagaaaatatgcttagccatcactattaaaagcagccacaatagccactggtaaagtgtctgtgcaggggttggagggtattgacaaaactccatggatgtgccatagattcaaaattatggtatgccattactttcaaaaccatgcactgtattctctaatgagtttccgtctcgtctaacttaaggaagatagatgtcctatttcccatt

SEQ ID NO: 65808 - DNA, 599 bp, Chicken  19866894333376_1
  misc_feature (1)..(58): n is any nucleotide
nnnnnnnnnnnnnnnnnnnnnnnnnnnnnnnnnnnnnnnnnnnnnnnnnnnnnnnnnnggcagggaataaagagaagcttccttgtgacagcttgttctatcacagcaataggtagaaattaattgaaagaaaggaaatcaagaagtttgatcatctcagtggccgtctcaaacccacaaaaccaaaaagttatcgtcatcgtttgctggttggtcattcttctgtataaaacaaaacgcaaacccacagtatttttaaccagcccttacagttagtttccttctgacagaactgccttygctggctgcaggggagagtgtaatgctgaccatcaacagaacaggaacrggaagaacagagcggragcagtyggtcaaaataacactcartatagtttaaattaaagaaaaataacgacaattgtttgaaaccgatagatcagaaaaatgtcccctttccattttcagcaattgctagaaatggcaataagcaactcactatgcacgaagagtataatcttagctcagccaaaatccacaggaacgtcactactggcaaaagcagaaccagaagacactaagcatagcatgggccacac

SEQ ID NO: 65809 - DNA, 599 bp, Chicken  19866894333376_2
  misc_feature (1)..(9): n is any nucleotide
nnnnnnnnnggcagggaataaagagaagcttccttgtgacagcttgttctatcacagcaataggtagaaattaattgaaagaaaggaaatcaagaagtttgatcatctcagtggccgtctcaaacccacaaaaccaaaaagttatcgtcatcgtttgctggttggtcattcttctgtataaaacaaaacgcaaacccacagtatttttaaccagcccttacagttagtttccttctgacagaactgccttygctggctgcaggggagagtgtaatgctgaccatcaacagaacaggaacrggaagaacagagcggragcagtyggtcaaaataacactcartatagtttaaattaaagaaaaataacgacaattgtttgaaaccgatagatcagaaaaatgtcccctttccattttcagcaattgctagaaatggcaataagcaactcactatgcacgaagagtataatcttagctcagccaaaatccacaggaacgtcactactggcaaaagcagaaccagaagacactaagcatagcatgggccacacgaacagggggaatacttygccaattacagaaccattgacctcaaaggac

SEQ ID NO: 65810 - DNA, 600 bp, Chicken  19866894333376_3
aataaagagaagcttccttgtgacagcttgttctatcacagcaataggtagaaattaattgaaagaaaggaaatcaagaagtttgatcatctcagtggccgtctcaaacccacaaaaccaaaaagttatcgtcatcgtttgctggttggtcattcttctgtataaaacaaaacgcaaacccacagtatttttaaccagcccttacagttagtttccttctgacagaactgccttygctggctgcaggggagagtgtaatgctgaccatcaacagaacaggaacrggaagaacagagcggragcagtyggtcaaaataacactcartatagtttaaattaaagaaaaataacgacaattgtttgaaaccgatagatcagaaaaatgtcccctttccattttcagcaattgctagaaatggcaataagcaactcactatgcacgaagagtataatcttagctcagccaaaatccacaggaacgtcactactggcaaaagcagaaccagaagacactaagcatagcatgggccacacgaacagggggaatacttygccaattacagaaccattgacctcaaaggacacagtctataggccact

SEQ ID NO: 65811 - DNA, 600 bp, Chicken  19866894333376_4
agaagcttccttgtgacagcttgttctatcacagcaataggtagaaattaattgaaagaaaggaaatcaagaagtttgatcatctcagtggccgtctcaaacccacaaaaccaaaaagttatcgtcatcgtttgctggttggtcattcttctgtataaaacaaaacgcaaacccacagtatttttaaccagcccttacagttagtttccttctgacagaactgccttygctggctgcaggggagagtgtaatgctgaccatcaacagaacaggaacrggaagaacagagcggragcagtyggtcaaaataacactcartatagtttaaattaaagaaaaataacgacaattgtttgaaaccgatagatcagaaaaatgtcccctttccattttcagcaattgctagaaatggcaataagcaactcactatgcacgaagagtataatcttagctcagccaaaatccacaggaacgtcactactggcaaaagcagaaccagaagacactaagcatagcatgggccacacgaacagggggaatacttygccaattacagaaccattgacctcaaaggacacagtctataggccactgccttta

SEQ ID NO: 65812 - DNA, 600 bp, Chicken  19866894333376_5
gcttgttctatcacagcaataggtagaaattaattgaaagaaaggaaatcaagaagtttgatcatctcagtggccgtctcaaacccacaaaaccaaaaagttatcgtcatcgtttgctggttggtcattcttctgtataaaacaaaacgcaaacccacagtatttttaaccagcccttacagttagtttccttctgacagaactgccttygctggctgcaggggagagtgtaatgctgaccatcaacagaacaggaacrggaagaacagagcggragcagtyggtcaaaataacactcartatagtttaaattaaagaaaaataacgacaattgtttgaaaccgatagatcagaaaaatgtcccctttccattttcagcaattgctagaaatggcaataagcaactcactatgcacgaagagtataatcttagctcagccaaaatccacaggaacgtcactactggcaaaagcagaaccagaagacactaagcatagcatgggccacacgaacagggggaatacttygccaattacagaaccattgacctcaaaggacacagtctataggccactgcctttaaggaaaccttccaatgta

SEQ ID NO: 65813 - DNA, 600 bp, Chicken  19866894333376_6
gtgtaatgctgaccatcaacagaacaggaacrggaagaacagagcggragcagtyggtcaaaataacactcartatagtttaaattaaagaaaaataacgacaattgtttgaaaccgatagatcagaaaaatgtcccctttccattttcagcaattgctagaaatggcaataagcaactcactatgcacgaagagtataatcttagctcagccaaaatccacaggaacgtcactactggcaaaagcagaaccagaagacactaagcatagcatgggccacacgaacagggggaatacttygccaattacagaaccattgacctcaaaggacacagtctataggccactgcctttaaggaaaccttccaatgtacttctgtttacttctgatccagccccaaaggggctccatcttctcttttgcagacagctgaaagaggtctgctccatgcagatcatatcacttgcacagatcacagtggctgcattaataagcattcgagagcaacaaaaatattttttctagagtatggtggacctttgaaagtctttccatttaagtgctctactcccaaatcctcctgaatacatttggtagaa

SEQ ID NO: 65814 - DNA, 572 bp, Chicken  19866894333376_7
agtgtgaagatctgggtttgaacacctgcctctttggagccttttcaaagccttccttcaatttattagtggataattcctgccagagcttgaaatgctctctcctggcagactcagctttctggcccgcacaccactgaggtgcagcacagactggagcccgatccagttctgcaccgtgggttcagagccttgtgaatataaatgagcaaaccctgcctcagagccgtgtgcacatttctgctctgcaaactggctgctctgggggcacagggagcctgcagcaaatacacaagagayggcggtgctaaaattagtttgcattgtaacaaatcactttagtcctttcttgtggaaaattgctgtatgcttagcatgtttggagaaggaattttcaagcttttgattgatggacccttaaaaacgttccagtgagagtgtggaacattcccatctgcagactttgcacacatacttgcttttcctgaacccctttgaagcaatcgagaaaaccaagaatgtccacagactgcaggtcaggagcgacgactaaaagcaaagaaaggcattca

SEQ ID NO: 65815 - DNA, 600 bp, Chicken  19866894333378_1
aaatgaaaaacaaacgaaaaaatacactaagccatggtctttctccagtgctaggtttatttactatgtacagactctcactgttttgttttttacaacattagcaatattgccgatactagatagatacacactgcctactgatgcagcacactttgtcctacacccttcttagagaccagctggttgttagaggagagctggcgtccgtgttaacccagcagtagctgcataatgcccacttaccagcatcttgtttaaaaaagaaaaaagaaaaaagaaaaaaaaagagaaaaggaraaaaaaaaagaaaaaagacaacaaataataataaaaacttaaaaaaaaaaaataaacagcatttctttgacacagcttgtgtgtcatacactggtgtattctgattcatgtgacttaagattacgtgatgggagctagtgcatgcattatgtcttaaccccttaagtgccttgagacttacagcgtacatccagtgaaaggcactcatgattctgtgggggtggtcttgtcctgttgtgtttatcttaatgggttcagattttaaacggcccttggtgcttggagtatgttactgcaagg

SEQ ID NO: 65816 - DNA, 600 bp, Chicken  19866894333378_2
tctccagtgctaggtttatttactatgtacagactctcactgttttgttttttacaacattagcaatattgccgatactagatagatacacactgcctactgatgcagcacactttgtcctacacccttcttagagaccagctggttgttagaggagagctggcgtccgtgttaacccagcagtagctgcataatgcccacttaccagcatcttgtttaaaaaagaaaaaagaaaaaagaaaaaaaaagagaaaaggaraaaaaaaaagaaaaaagacaacaaataataataaaaacttraaaaaaaaaaataaacagcatttctttgacacagcttgtgtgtcatacactggtgtattctgattcatgtgacttaagattacgtgatgggagctagtgcatgcattatgtcttaaccccttaagtgccttgagacttacagcgtacatccagtgaaaggcactcatgattctgtgggggtggtcttgtcctgttgtgtttatcttaatgggttcagattttaaacggcccttggtgcttggagtatgttactgcaaggggtcatggagattccattccctctttccttatacaattacc

SEQ ID NO: 65817 - DNA, 567 bp, Chicken  19866894333385_1
tgtaaggagggtagaattcctcagcccatcctctggacagatggtaatggtgacaggctggtgtaactggtcctgttggcttctgtatgcacagtgcaaggtcgcagccttcactctcaaagctattttgccaatgaacttccagcatcactgctggcacaacagagtctctgctggaagggtgtagctggccaggagacctcccagcaaaatggatgcagcttgcatttgatgccctaggcacagagccatgggtacaactggccccaacagctgctgacaaacacagtcaattttctyrtctcttttttaagggaccctggagggaaccaggacacacagagggtaacacagagtgaatccagcacaccgagggcacaagcccacatctcctcctagcaagaatctcctccgtaccagcagcccagcccacgggagcgtgacacatagtaggacactgaggcccaggaaaagcaaaatatcccaaaaccctgtactcaccatgcagcacctctgcaccatgcctgagcacagccatgtaggcatgggatggagctgtgagcgctg

SEQ ID NO: 65818 - DNA, 566 bp, Chicken  19866894333385_2
gtaaggagggtagaattcctcagcccatcctctggacagatggtaatggtgacaggctggtgtaactggtcctgttggcttctgtatgcacagtgcaaggtcgcagccttcactctcaaagctattttgccaatgaacttccagcatcactgctggcacaacagagtctctgctggaagggtgtagctggccaggagacctcccagcaaaatggatgcagcttgcatttgatgccctaggcacagagccatgggtacaactggccccaacagctgctgacaaacacagtcaattttctyrtctcttttttaagggaccctggagggaaccaggacacacagagggtaacacagagtgaatccagcacaccgagggcacaagcccacatctcctcctagcaagaatctcctccgtaccagcagcccagcccacgggagcgtgacacatagtaggacactgaggcccaggaaaagcaaaatatcccaaaaccctgtactcaccatgcagcacctctgcaccatgcctgagcacagccatgtaggcatgggatggagctgtgagcgctg

SEQ ID NO: 65819 - DNA, 599 bp, Chicken  19866894333389_1
  misc_feature (1)..(177): n is any nucleotide
nnnnnnnnnnnnnnnnnnnnnnnnnnnnnnnnnnnnnnnnnnnnnnnnnnnnnnnnnnnnnnnnnnnnnnnnnnnnnnnnnnnnnnnnnnnnnnnnnnnnnnnnnnnnnnnnnnnnnnnnnnnnnnnnnnnnnnnnnnnnnnnnnnnnnnnnnnnnnnnnnnnnnnnnnnnnnnnnntatgaggaacagtgtaaatatgaacattcttcattttcccgtattaggaaaaaaagaaactttttactcaaggaagcagagtacaattttcttcttagttaagacaacctggcaggaatctgytgggggcagaataaacgttccctgctctgcaaatgctcagtgattttggatacagatccaattttgttaaaaatgcagttggccttggagtgcatgggaaaggaagaagagtcaagaattatctacagcattaaactcttacacacatgcgtgcacaaaaatgcacaagcgtgccacttgcagcacagagataggaagccatgtggcatccctggtttctcttgctctccctgcctactgcagaagattggtgtccttcactgactctctcrcagaagcagagcgccgtgttaacacaa

SEQ ID NO: 65820 - DNA, 600 bp, Chicken  19866894333389_2
tagttaagacaacctggcaggaatctgytgggggcagaataaacgttccctgctctgcaaatgctcagtgattttggatacagatccaattttgttaaaaatgcagttggccttggagtgcatgggaaaggaagaagagtcaagaattatctacagcattaaactcttacacacatgcgtgcacaaaaatgcacaagcgtgccacttgcagcacagagataggaagccatgtggcatccctggtttctcttgctctccctgcctactgcagaagattggtgtccttcactgactctctcrcagaagcagagcgccgtgttaacacaaatggcacagagcactctggcatccaaacaagatgggaggctgagccattttgccttcagcagctgaaagcattctgtaagcgtttcacatataattaaaccttcttttcccatcaggtgatctgacctcagcatataactatgcaggccaggacagaaggtggtaaggtggrtcaaataatggaatagtgggcagaaasctcctatwtgtaaartggcattgccttgtccagagggggmaacactggctcttctcaggatccttgtttcgtgc

SEQ ID NO: 65821 - DNA, 600 bp, Chicken  19866894333389_3
tgccacttgcagcacagagataggaagccatgtggcatccctggtttctcttgctctccctgcctactgcagaagattggtgtccttcactgactctctcrcagaagcagagcgccgtgttaacacaaatggcacagagcactctggcatccaaacaagatgggaggctgagccattttgccttcagcagctgaaagcattctgtaagcgtttcacatataattaaaccttcttttcccatcaggtgatctgacctcagcatataactatgcaggccaggacagaaggtggtaaggtggrtcaaataatggaatagtgggcagaaasctcctatwtgtaaartggcattgccttgtccagagggggmaacactggctcttctcaggatccttgtttcgtgcactgtgcatcccatgcttgtgttcataaatgtttccatgcgatcagccaccatctgcagacctatccagccgtgcccctggctgccagtcatccccgtgtttctcacagagatcacaccaaggacacacgcacgcagtcggtgtacttagagaagtgcactctccctcagccacctactatttcgctggagcctgtggt

SEQ ID NO: 65822 - DNA, 600 bp, Chicken  19866894333389_4
ccatgtggcatccctggtttctcttgctctccctgcctactgcagaagattggtgtccttcactgactctctcrcagaagcagagcgccgtgttaacacaaatggcacagagcactctggcatccaaacaagatgggaggctgagccattttgccttcagcagctgaaagcattctgtaagcgtttcacatataattaaaccttcttttcccatcaggtgatctgacctcagcatataactatgcaggccaggacagaaggtggtaaggtggrtcaaataatggaatagtgggcagaaasctcctatwtgtaaartggcattgccttgtccagagggggmaacactggctcttctcaggatccttgtttcgtgcactgtgcatcccatgcttgtgttcataaatgtttccatgcgatcagccaccatctgcagacctatccagccgtgcccctggctgccagtcatccccgtgtttctcacagagatcacaccaaggacacacgcacgcagtcggtgtacttagagaagtgcactctccctcagccacctactatttcgctggagcctgtggtttggcatcagcaaccacagcacagaca

SEQ ID NO: 65823 - DNA, 600 bp, Chicken  19866894333389_5
catccctggtttctcttgctctccctgcctactgcagaagattggtgtccttcactgactctctcrcagaagcagagcgccgtgttaacacaaatggcacagagcactctggcatccaaacaagatgggaggctgagccattttgccttcagcagctgaaagcattctgtaagcgtttcacatataattaaaccttcttttcccatcaggtgatctgacctcagcatataactatgcaggccaggacagaaggtggtaaggtggrtcaaataatggaatagtgggcagaaasctcctatwtgtaaartggcattgccttgtccagagggggmaacactggctcttctcaggatccttgtttcgtgcactgtgcatcccatgcttgtgttcataaatgtttccatgcgatcagccaccatctgcagacctatccagccgtgcccctggctgccagtcatccccgtgtttctcacagagatcacaccaaggacacacgcacgcagtcggtgtacttagagaagtgcactctccctcagccacctactatttcgctggagcctgtggtttggcatcagcaaccacagcacagacatcgtacta

SEQ ID NO: 65824 - DNA, 600 bp, Chicken  19866894333389_6
ggtttctcttgctctccctgcctactgcagaagattggtgtccttcactgactctctcrcagaagcagagcgccgtgttaacacaaatggcacagagcactctggcatccaaacaagatgggaggctgagccattttgccttcagcagctgaaagcattctgtaagcgtttcacatataattaaaccttcttttcccatcaggtgatctgacctcagcatataactatgcaggccaggacagaaggtggtaaggtggrtcaaataatggaatagtgggcagaaasctcctatwtgtaaartggcattgccttgtccagagggggmaacactggctcttctcaggatccttgtttcgtgcactgtgcatcccatgcttgtgttcataaatgtttccatgcgatcagccaccatctgcagacctatccagccgtgcccctggctgccagtcatccccgtgtttctcacagagatcacaccaaggacacacgcacgcagtcggtgtacttagagaagtgcactctccctcagccacctactatttcgctggagcctgtggtttggcatcagcaaccacagcacagacatcgtactatcacagc

SEQ ID NO: 65825 - DNA, 600 bp, Chicken  19866894333389_7
tgcagaagattggtgtccttcactgactctctcrcagaagcagagcgccgtgttaacacaaatggcacagagcactctggcatccaaacaagatgggaggctgagccattttgccttcagcagctgaaagcattctgtaagcgtttcacatataattaaaccttcttttcccatcaggtgatctgacctcagcatataactatgcaggccaggacagaaggtggtaaggtggrtcaaataatggaatagtgggcagaaasctcctatwtgtaaartggcattgccttgtccagagggggmaacactggctcttctcaggatccttgtttcgtgcactgtgcatcccatgcttgtgttcataaatgtttccatgcgatcagccaccatctgcagacctatccagccgtgcccctggctgccagtcatccccgtgtttctcacagagatcacaccaaggacacacgcacgcagtcggtgtacttagagaagtgcactctccctcagccacctactatttcgctggagcctgtggtttggcatcagcaaccacagcacagacatcgtactatcacagcattaaagctcgtctaatcagcatga

SEQ ID NO: 65826 - DNA, 600 bp, Chicken  19866894333393_1
cgtcatggggagagttaaatagtaataatttcgtagtggtctttaagacaacctgccacggaattatattctgttaattacaggctgaagttttaaatgcaaatcagatttaaaaggctcttgttccagacagtagtggccattttaggaaaaatgagctacggagggcacagcctcttgttgcaggagcctcccgttagaggcacgttttgaaggttacataaacgtcggcttggctttgctgccttctcatcctagcgcttccgctgtcattgtgtgaccttgggagattattttgcytgtctgtggcaaccctgtgcgtttgtctcaccggggctgatcggtctgtggtttggagactttggtgtttcttgtcgtacctcgcttgtccttgtgtgaaaggagagacccttgcgtgtgggatccacagctgtaagcaaccygcttttggccaggctggctccagcccgtgaaggaaggcttgcctctgggattttatccctttccccggtgagagtctgtgttggctttttcagctttctgtgtgcactggtttyctttgcctctttcgccctaataaatttcatcgctcgtcccccc

SEQ ID NO: 65827 - DNA, 600 bp, Chicken  19866894333393_2
tttaggaaaaatgagctacggagggcacagcctcttgttgcaggagcctcccgttagaggcacgttttgaaggttacataaacgtcggcttggctttgctgccttctcatcctagcgcttccgctgtcattgtgtgaccttgggagattattttgcytgtctgtggcaaccctgtgcgtttgtctcaccggggctgatcggtctgtggtttggagactttggtgtttcttgtcgtacctcgcttgtccttgtgtgaaaggagagacccttgcgtgtgggatccacagctgtaagcaaccygcttttggccaggctggctccagcccgtgaaggaaggcttgcctctgggattttatccctttccccggtgagagtctgtgttggctttttcagctttctgtgtgcactggtttyctttgcctctttcgccctaataaatttcatcgctcgtcccccctgtatcaagcacaatcgccgcagatctttaatattcccagcgagtacacccagggtaccgtctggataccaaatgctcctttccagctctgtgcctgggatgtgcgtttcagcagccacgagagggtgctcggagcagtcctc

SEQ ID NO: 65828 - DNA, 600 bp, Chicken  19866894333393_3
gcgcttccgctgtcattgtgtgaccttgggagattattttgcytgtctgtggcaaccctgtgcgtttgtctcaccggggctgatcggtctgtggtttggagactttggtgtttcttgtcgtacctcgcttgtccttgtgtgaaaggagagacccttgcgtgtgggatccacagctgtaagcaaccygcttttggccaggctggctccagcccgtgaaggaaggcttgcctctgggattttatccctttccccggtgagagtctgtgttggctttttcagctttctgtgtgcactggtttyctttgcctctttcgccctaataaatttcatcgctcgtcccccctgtatcaagcacaatcgccgcagatctttaatattcccagcgagtacacccagggtaccgtctggataccaaatgctcctttccagctctgtgcctgggatgtgcgtttcagcagccacgagagggtgctcggagcagtcctccctttgttcctctcctgtggccgggagcatcgctgaagtcctgccgaggcaaaccttgttgtgacctcgcgcgtgtttatccctcctcccaccttgttcagcaaggagaaatat

SEQ ID NO: 65829 - DNA, 600 bp, Chicken  19866894333395_1
gaaggtgctaccccagtggtgaataacacttgtgctgtctcactgtcctttcccatctgcatgctcagaacacctggcaccacgtaccagccactctctacgttatggtgcagggaccctttaaaatcaggggaaaacgtcatgggaaatactttgctatttttgctgtttggggccctttgcacttctaatttgctgccttctctgtttttcctcagttgaagatgcttttattttaaaagtcattttttttaggtaaactatttcgctcaaaattctgctacacaacatcagaaatgracatgttaaaaagtagttttcacttaaagggtaatccataattctcataatcctcacctgaacttaatgttttcctgtcgtctaatggacagtaattgagaggaacccatcatctaaattatactctagtgcagagaatcacttagaaaaatggtgctataaactggaatctctgtgataaaaatcaatccctggaagttggttagttttaaggaaagatattacctagctggtaggtttaaatgtagctttagtgtgtttatattaatacgcacaaggagtttaagcctataatttttc

SEQ ID NO: 65830 - DNA, 600 bp, Chicken  19866894333395_2
aattctcataatcctcacctgaacttaatgttttcctgtcgtctaatggacagtaattgagaggaacccatcatctaaattatactctagtgcagagaatcacttagaaaaatggtgctataaactggaatctctgtgataaaaatcaatccctggaagttggttagttttaaggaaagatattacctagctggtaggtttaaatgtagctttagtgtgtttatattaatacgcacaaggagtttaagcctataatttttctcatatgcaggaaaatgatggccctcattctacttctayagtttattatatttgatctgttttgatcttttttccattttcatggaagtcagtatctttttcattggcttaactgggtaacatatgaaatatcgtagggatttccttacagtgttaattaccaaacataacattttctgtgaagggtttcaagaaggattcaggagatcctttcttactcacggtagctccataatttttaggagacagaggtgtagatgcccatgaaactgcttctcaaaatccagtcgctgaacatctcttttctagataccaggtgggttccttgaagctatcgtt

SEQ ID NO: 65831 - DNA, 599 bp, Chicken  19866894333398_1
  misc_feature (1)..(228): n is any nucleotide
nnnnnnnnnnnnnnnnnnnnnnnnnnnnnnnnnnnnnnnnnnnnnnnnnnnnnnnnnnnnnnnnnnnnnnnnnnnnnnnnnnnnnnnnnnnnnnnnnnnnnnnnnnnnnnnnnnnnnnnnnnnnnnnnnnnnnnnnnnnnnnnnnnnnnnnnnnnnnnnnnnnnnnnnnnnnnnnnnnnnnnnnnnnnnnnnnnnnnnnnnnnnnnnnnnnnnnnnnnnnnnnnnnnnatgtttggcacagtctcactcagcatgagcgctggctctgagccagtctggaagccgctgctcaaggtcccygaagtttatgagtaggtcggagtcatttccagctgtcggttggttgttggcctgtgtaaaagtgaggtggtacctcagctgagctcccaggagacacattagtaggaagaatagcaagaggtctctttcttggcagtgtaccagatcagagctcaacaacaatggtgaggcaaagtggagaacttgctgtgctgttgctcatgctgtgccaacccttcctcatagcagcagcctcgctcaaagagatgtgctggccttctgctttgggaggcagaggcagcgttccttgcrttccgtaa

SEQ ID NO: 65832 - DNA, 600 bp, Chicken  19866894333398_2
aaggtcccygaagtttatgagtaggtcggagtcatttccagctgtcggttggttgttggcctgtgtaaaagtgaggtggtacctcagctgagctcccaggagacacattagtaggaagaatagcaagaggtctctttcttggcagtgtaccagatcagagctcaacaacaatggtgaggcaaagtggagaacttgctgtgctgttgctcatgctgtgccaacccttcctcatagcagcagcctcgctcaaagagatgtgctggccttctgctttgggaggcagaggcagcgttccttgcrttccgtaagtcacggttgtgcatttacagtcattgcacttgcatttgtgatgataataaaactgaaacccaggctgctgttggctgagctgtctgggtttgttctggagacacactgaaagcaggactgtgatagacacatactacgttttaacacctaataccttttgtaagtgtaaacgcacaaggtaatatttcaacatgtagttatttgctttacatgcacacagtcaaaaccctcagtaaagcacttttattcagtgatttgcaggattattacaggaattgttccacccatttc

SEQ ID NO: 65833 - DNA, 600 bp, Chicken  19866894333399_1
gatctggggaactacaggcctgttagcctgacctcagtgccggggaagattatggagcagattgtcttgagggagatcaggcagcatgtgcgggacaaccgggggatcaggcctagccagcatgggttcacgaagggcaggtcctgcttgaccaacctgatctccttcgatgatctagtgacctgtctggtggataagggaaagactgttgatgtggtctacctagacatcagcaaagcctttgacactgtctcccacagtattctcctccagaagctggcagtccatggcttggacagrtacactcttgtctgggtaaggaactggctggagggctgggcccagagagtggtggtgaatggagttaaatccagctggcgagcagtcacgagtggtgtctcccagggtccggtgctggggcctgtcctctttaatatctttattgatgacttggatgagggcattgagtgcaccctcagtaagtttgcagatgacaccaagttggcttgaaatgttcatctacctgagggtagcgaggccttacagagggatctggataggctggatagctgggctgaagccaatgggatgggattcaac

SEQ ID NO: 65834 - DNA, 600 bp, Chicken  19866894333400_1
cagcagtctgcacattcttccaccgcccaagagcactttattcaaattcatcatcatagccaggttcccaataagcaagtgcattagcagagcagataaaagccgaggtgcctttccttaagatagttaataactagaaatatgtaattagacaacttggcattgtttccatcagtagacttgatacagcaaaggccttgagcagttttaatttctccgggttacacccaggagttcaaatggagatcaaactccttttcttaaagggacaaaggctaaccaccctcctgctttgctacktttttaatgactaggttgcacagtttaaaatcatcttcaaatgtgtggctgcagggcctgctggcagtctgagatgttgaaggctgccctctctttgtgctgttctatggcagcatagacagtatgtagctttaatggcttcacatgactgcatctgggagatgaagatttatttctgagatgcacagaattccatgtaacaaatgatgagaaacacacaagaaaaagaacaacatttttattattattctttagaaactaaccrtagccttgggacttctactcaaaatgatactgcag

SEQ ID NO: 65835 - DNA, 600 bp, Chicken  19866894333400_2
gggacaaaggctaaccaccctcctgctttgctacktttttaatgactaggttgcacagtttaaaatcatcttcaaatgtgtggctgcagggcctgctggcagtctgagatgttgaaggctgccctctctttgtgctgttctatggcagcatagacagtatgtagctttaatggcttcacatgactgcatctgggagatgaagatttatttctgagatgcacagaattccatgtaacaaatgatgagaaacacacaagaaaaagaacaacatttttattattattctttagaaactaaccrtagccttgggacttctactcaaaatgatactgcagttggttcaatgagaacttccacccagtatgcaataacagggaagaacgatgtgtttgaagaggctggaaaagacatccatcccattgagtcatgctgacccgtgactgtactgcaatttccagccaccctgccttaaaggaattatttttttttaagtcacagagaagtgtgcttgccatcagcaaccaaacatccacagggtaacaacagctgatttccatgaagaaagggaaaatttgaaaagataagtactaccaatgggta

SEQ ID NO: 65836 - DNA, 600 bp, Chicken  19866894333401_1
tggagttgagaaatgcgggattttatggtaatgggaaaaacaaaatgctgaagcttttccaacatttccatgcacctgatctgatgcttctgtgcattgctgaaatctcatttaccttaagtgtttcacaacctcaacccgcatttggcaattttaaccttgttctaacagaaagagaaaaaaaaaataagcattcagatttattggctgtttacaaagcacagacaaccacgaagttgaagcattatttctgtcttaaagcaaaaagggttttgtcgctttaaagaaagtattccaccrcgctccaaaataacctgtgtgtaatggataatataggattactttttgacagcgtgaatatcctgttgctattgactgcagtgctacagtatcctgacacagtagtatacagctattgtgagataaagacctcgttgaaaaacaaactgactgcagtactgcaaacagaaaaggaactgtcccgtaatataaaaattaaattctttaagagaacaatgactggaacaaagtgtcatttctagaagcagcattaaagaataaaggctttggctgaaactaagggaacgttgcaaggtattc

SEQ ID NO: 65837 - DNA, 600 bp, Chicken  19866894333415_1
taagcacaacagagtaattgttcagactcttactttcctcctccgatttttattaatcctgtccttggttatttcaagctagaaacaagaaaaaaaaactttttgacccatcacttcccaaacgtgcaccacagacaagaaattcttactaaaactgtacatgagttaacatacacatttaaaatcatttgtactgttactttttgtgactatactgaaaaatgaaaagatttaaatagctattattattattttaaatcaactcagacatttctgctggactgcccaggatgaagcaayggtgtgctgaaattgaccctcactttcactcttttaactggttgarattctcaaccaaatatgggaaagaaaagagaaaagcttttccttgtcccagctggctgatgcctctgtgaaaaatggagtggatcaaaacaaaactacatcttcaatcccttcttgctttgaactttcagtctccaaacaagctcagtcccagattggtactcttctggacttactttctgtgtgtatgcatcagagacaagctgggtaaaaatataaatgaatagacaaattgtgaaagctttggcacagatt

SEQ ID NO: 65838 - DNA, 600 bp, Chicken  19866894333415_2
tttttattaatcctgtccttggttatttcaagctagaaacaagaaaaaaaaactttttgacccatcacttcccaaacgtgcaccacagacaagaaattcttactaaaactgtacatgagttaacatacacatttaaaatcatttgtactgttactttttgtgactatactgaaaaatgaaaagatttaaatagctattattattattttaaatcaactcagacatttctgctggactgcccaggatgaagcaayggtgtgctgaaattgaccctcactttcactcttttaactggttgarattctcaaccaaatatgggaaagaaaagagaaaagcttttccttgtcccagctggctgatgcctctgtgaaaaatggagtggatcaaaacaaaactacatcttcaatcccttcttgctttgaactttcagtctccaaacaagctcagtcccagattggtactcttctggacttactttctgtgtgtatgcatcagagacaagctgggtaaaaatataaatgaatagacaaattgtgaaagctttggcacagattccatattaatgattcaatgtccaaactcgcacatcattaagacttt

SEQ ID NO: 65839 - DNA, 600 bp, Chicken  19866894333418_1
tacactgaaattcccataacttaagaaaaaaagctgctatgattactaagatgttgctaatatgagctcacactaatgggctgtgcccactattaatgtcattgcaaatagtttacatcaggaatctgtatttccaatttaaatgttaatggactgagtcttttccatttacagtgtaagaaaagaataaagctactaaagtcactgaggttatgtaaaactgctagctagactactcttggctcaatctccaaacttgtaatatggaacttgtcaaacactcacataccttacctctaygtcctgccaatacaaagaaaataatccctagtgccatatgtacattctgccctggatagcacagaacaaagtaataggtttttcatgaatgaagctgataaatatcacaggtgacttctgcaaataatgcatcacctataggcaaaaaacaaagtccgctccagtttagcatgtgaaatatgacctgatcctaacagaaaagtgctgtaccactgctcatctctactgtagcttctaaagcggtatctctttctctgagatgctgatattgagaaagaacagtgacatacaagtgatatt

SEQ ID NO: 65840 - DNA, 600 bp, Chicken  19866894333422_1
attggaattactcacaacctacttgtacccagtgaaccattgcaaacagctaaataaacttacaaactggccaaatgcttaaaaacagactagaagtgcaagcaagatgagtcgcttttgctcaggtttattcctacattctattcttcaaacattcaagactgcaaaaaaaaagctgcctattcatctagaatcttcatttatacgttttccttattccgcatctaacagcaacttgacaatattcaatagaatggaaagctctgacccaaactaatcctggaaagaagatgatttacrtttgaaaagccattttacaattgtcgtgtgaaaatagtgccatttaattgcaaaggcagatgctggatttttaaattaagatatacttccataacttatgcaacttctaacgccagaaatctgatagatatggtaaattaaacactgttagagaattacataatcaaagaaaggtaacaacaagttgtccagcttttagaattaaatactgaggcatcagttctggagtaagttacttagctaagctatcatgctcaatggtggcaaaaaggcagaacacaggcagcaggagagaggatg

SEQ ID NO: 65841 - DNA, 542 bp, Chicken  19866894333426_1
gattctatgatcttatgagaatgttctggtggaccaaaaggtatacatcttgaacacacttatttactccatagggaatgctaacatttcgtgacagtgaaaatcatagagcaaataaagttcaagaaggaaagtgttcacattgtaataaggtgttgttcaggatatactactttatattttagagtcccttgctagacactgaagaaaagttctttacagctacctgtgctgtgggttatatagggaacattagttcggaggaacaaagtaaatttaaagacagcgcagacacagtgygatgtaaatacagtggcagcaaatagatacagacaaagcaaaacataggggcaaagctgaacaggaagaaataagagtcatagaaacttgatgaagcaggtaacgcagccacactgaggtgtaactacagcctttcagacttgaaagcagccaaaattcccacagtgtgagcacagctgtgtcttccagaaatcctccaagctccttcttgaacaacatgagccacccacaggttgtgtgcc

SEQ ID NO: 65842 - DNA, 600 bp, Chicken  19866894333427_1
tcagacatccacgacggcacagaaaaaaacaggttcattttcagttcggttcatcatggccaagtcagacagagaagtacaagtagatggatgaattagttcccatatctgctctcttccttgctagcttacttcagcagtacagtgtaaaagagagagggtgttcagctgaagatgcctaggcctgcttctgctcatcatgaccatggctgaattaggctgctcggaacagttcaagagtgaagctcttgtgagtatccacaactggaaagaactacctacagtttgtaagaccagagrgtctgacacctccactctgtccacagagggtcacagtccaatgctcagaccccatccttgcctcacttaccttttggtcctcctctttggtccaaggacccttaaccaagtctggattcaacaccctcagccaccggtactgacactgctggtcactgcggttctggggaaaggaatcagagcaggcatgcatcagactggaggctccaaaactctccatagcaacacagcagtcctcacacacatagtctgccccatggaaaaactacagatacacagagaatgcatactacagctata

SEQ ID NO: 65843 - DNA, 489 bp, Chicken  19866894333427_2
accccatccttgcctcacttaccttttggtcctcctctttggtccaaggacccttaaccaagtctggattcaacaccctcagccaccggtactgacactgctggtcactgcggttctggggaaaggaatcagagcaggcatgcatcagactggaggctccaaaactctccatagcaacacagcagtcctcacacacatagtctgccccatggaaaaactacagatacacagagaatgcatactacagctatagtacagggtactgggtatagaatacaagggcaggaacctcaatgtctygctccagctcccaacaaacacacccataaactcctctaagcaagaaggatgtatcgccctgccctagaggagcactaaactttttcaacagtagcagccacagaacaaagtcccaccatacaaggtgttacatagagacagccagtgccctgagcacaagaaacagcatgcaaacactacaattcccaa

SEQ ID NO: 65844 - DNA, 600 bp, Chicken  19866894333429_1
agctatttatcctcctgtccctgctccctcgccaccttgttattaggtgtctgttttggggctggtgaagtaatcagtgttccctgtctcgtgtcattgagccgctgctgtctgggggctggcctgttgtcacctgctctctttcaaacctaatgcacccatcaatcaccaccacctgggagcagggaggaagggaccacaggggccctttctgccatgccaccactccagcactgtcacttgtccctgctccactgggctgcgtgccaccagccttgggagccagcacagggctcagcrtgcagacaggctgtgaaaacttggacaacacagcacatctcctttgtgatggaagggctggaaatggggccagcacctggcactgctgtaggagatggtgggacccctggagcccagcacagcttgaggacatggggcttccagtcacacacctggatgagccccgtggtgagtactgagagcaatgcagcccagtactcygtggatggcagacatctgtttttcactgatctgaatctcagcacatgcattcctctctctgagtggtgtccgtttggcctccacactgtgagcccacag

SEQ ID NO: 65845 - DNA, 600 bp, Chicken  19866894333429_2
ggggccctttctgccatgccaccactccagcactgtcacttgtccctgctccactgggctgcgtgccaccagccttgggagccagcacagggctcagcrtgcagacaggctgtgaaaacttggacaacacagcacatctcctttgtgatggaagggctggaaatggggccagcacctggcactgctgtaggagatggtgggacccctggagcccagcacagcttgaggacatggggcttccagtcacacacctggatgagccccgtggtgagtactgagagcaatgcagcccagtactcygtggatggcagacatctgtttttcactgatctgaatctcagcacatgcattcctctctctgagtggtgtccgtttggcctccacactgtgagcccacagattttgggggacagaggcagcagcaaggggctcagtgacagcctgctcctcctctgcattacgccagccttcccatgccacctgcatgcgaatgaagggaaaataggacatcaattactctggccagaaacggaaatgggatttcagatgggctgggagggccctgggtgctggttggacacacctctaatcgccgctgag

SEQ ID NO: 65846 - DNA, 600 bp, Chicken  19866894333429_3
cctccacactgtgagcccacagattttgggggacagaggcagcagcaaggggctcagtgacagcctgctcctcctctgcattacgccagccttcccatgccacctgcatgcgaatgaagggaaaataggacatcaattactctggccagaaacggaaatgggatttcagatgggctgggagggccctgggtgctggttggacacacctctaatcgccgctgagcacaggagagcaaaatgctaattgaaagggagcaaagttacagctctgctctgagctgctggctgggaggggagcartgtggcagaggctgggagctgagctgggttcctggctctcatgggatgtcccagcatgcaaaaggggcagcgacacccctggaggggtgatggggtgttgagtgtgggatgtgacatcacagccttgacatggctgggtctgaaaatattgtttaggacgtagaacaaatatctttaaaacctccccttggcaaggttcaagtgtttttgaagtggtcagagcattttgttttgattttgccatttcagctaacaggaaaaatgataaaatggaaatgaaattcctgggccttgtagtat

SEQ ID NO: 65847 - DNA, 599 bp, Chicken  19866894333432_1
  misc_feature (1)..(216): n is any nucleotide
nnnnnnnnnnnnnnnnnnnnnnnnnnnnnnnnnnnnnnnnnnnnnnnnnnnnnnnnnnnnnnnnnnnnnnnnnnnnnnnnnnnnnnnnnnnnnnnnnnnnnnnnnnnnnnnnnnnnnnnnnnnnnnnnnnnnnnnnnnnnnnnnnnnnnnnnnnnnnnnnnnnnnnnnnnnnnnnnnnnnnnnnnnnnnnnnnnnnnnnnnnnnnnnnnnnnnnnnataagtaaagataagtaaaaagttacctaaaaactatttcaatatgaaaaactcacccagctgtagagctgaggctggctacaraargaagccaaaacacagcttcatgagcagaaagtcatacgtcactaacttaatatccttctatgacaactttatccacccttatgaatggagggaaagcagcgaacaggattttttttattataagaaatagcttttgatactgggtctcacagtatccttctggacaaaatgcacggtacacagctagacaagtacacaatacaatgaatgaacaactggccaacaggttgtgctcaaagtgttgtagtaaataaggtaccatcaggctggctgccagtcactagtgaagctccttg

SEQ ID NO: 65848 - DNA, 599 bp, Chicken  19866894333432_2
  misc_feature (1)..(213): n is any nucleotide
nnnnnnnnnnnnnnnnnnnnnnnnnnnnnnnnnnnnnnnnnnnnnnnnnnnnnnnnnnnnnnnnnnnnnnnnnnnnnnnnnnnnnnnnnnnnnnnnnnnnnnnnnnnnnnnnnnnnnnnnnnnnnnnnnnnnnnnnnnnnnnnnnnnnnnnnnnnnnnnnnnnnnnnnnnnnnnnnnnnnnnnnnnnnnnnnnnnnnnnnnnnnnnnnnnnnnataagtaaagataagtaaaaagttacctaaaaactatttcaatatgaaaaactcacccagctgtagagctgaggctggctacaraargaagccaaaacacagcttcatgagcagaaagtcatacgtcactaacttaatatccttctatgacaactttatccacccttatgaatggagggaaagcagcgaacaggattttttttattataagaaatagcttttgatactgggtctcacagtatccttctggacaaaatgcacggtacacagctagacaagtacacaatacaatgaatgaacaactggccaacaggttgtgctcaaagtgttgtagtaaataaggtaccatcaggctggctgccagtcactagtgaagctccttgagc

SEQ ID NO: 65849 - DNA, 588 bp, Chicken  19866894333441_1
gtttctcatttggtagagctgccagcaggagtattcatttaatccaatactgaggtatattggcttgctggcctagaggtacaggaagcaaattctacagattccagagccttgcctggtatggcatcaattctttcatgactttcaattagtatgtctgaacaaacactgctgcagactgtagtacacctgcatctcatagaaaccaagactaagaattttttgctgctttggttacttaatggtacgtttaataaataaattagtatgctatatgaatacaattaccatctgaaatcycatttcaggtaataaaacagttttaacaatattagactgtattttcatttatcagtaaatgtaggtcctgatctttaaaaactaacagtgaatgttaatccttttactgtagatcagtgaacagcttaggcagacaaaaaacattctctgagaacagccaaaaagagatacttaagttacagaaataaaactcttactgttgaaactttctatccaatgtcttactgattagctgtcactaatacttagcctgtaacagctatgaactgcagaattagcaacaccaca

SEQ ID NO: 65850 - DNA, 600 bp, Chicken  19866894333444_1
agctcagatatgtatcaatttccttcccactgtaatactatgccaaaacattacaatgctggagactacagaaattagatacctgtagaagaataattcccatatagagtaatcaagaagattgtcactgcagggtgctacagatgttgtgtccgtccaaaattatgggaagagttgtgaatctccaacaggaagtcacagcacaatggatgtgacatcagtttcacaagcacaaagggatgctgttcctggcagtacattgtggtggggacctgtctcatggagatgagactggcactsgtggccgtaacraagccagacagaataaaatctagctttgagaatcagcctttttatgcaataaaacaaatgtgcttacttgagtagttaaagaaggtattaattctatcagtgactacaaatctatgtggatgtaggtacctatgtagctcactaaaggctgtttatctggatatcagtggaactcagtaacacataagtttattaagatatatagactgcaattgttatagaaaaaaagtttttaggctctaaaggaaagaaaaaaaaaaaaagaaaatgtcactgttctttgtgctt

SEQ ID NO: 65851 - DNA, 600 bp, Chicken  19866894333444_2
tatcaatttccttcccactgtaatactatgccaaaacattacaatgctggagactacagaaattagatacctgtagaagaataattcccatatagagtaatcaagaagattgtcactgcagggtgctacagatgttgtgtccgtccaaaattatgggaagagttgtgaatctccaacaggaagtcacagcacaatggatgtgacatcagtttcacaagcacaaagggatgctgttcctggcagtacattgtggtggggacctgtctcatggagatgagactggcactsgtggccgtaacraagccagacagaataaaatctagctttgagaatcagcctttttatgcaataaaacaaatgtgcttacttgagtagttaaagaaggtattaattctatcagtgactacaaatctatgtggatgtaggtacctatgtagctcactaaaggctgtttatctggatatcagtggaactcagtaacacataagtttattaagatatatagactgcaattgttatagaaaaaaagtttttaggctctaaaggaaagaaaaaaaaaaaaagaaaatgtcactgttctttgtgctttgatttattact

SEQ ID NO: 65852 - DNA, 600 bp, Chicken  19866894333450_1
tagaatttcttatacattactacactaaactagacttacactaggtagctccaaaagtaacatctcctttttattcccatggaaacgacaacagatacaaagagcatagtaacaaatgttcagctacaaaacattatttttcaacatagtcactatcattagctatgaattctcaccagcgatgaacaagagcctgtatgccacatgcataaaaaactgcaccagcgaaggtgacccactgatgctgtcaccattgctgaaacacaccacacatgacctcactgtactcacattcactgytgggtctccataaacattcagtaagcatcaatgaaygtcaatgggtgcaatattttcccacatgaaggaattcaatggcacacctttgtttcatacatacttccatgtcagacgccattctgtcagagtgcctctctgctgccatctgtcacacagccacaacacatcatgggatattggtgggaaggttcaacctgtactgcaataccataaacatccatctctgatgtcatgggctaacatcataaaataggaggcactgcttttggaacaggccttgtataatacaaaagcaaatct

SEQ ID NO: 65853 - DNA, 600 bp, Chicken  19866894333450_2
tacactaggtagctccaaaagtaacatctcctttttattcccatggaaacgacaacagatacaaagagcatagtaacaaatgttcagctacaaaacattatttttcaacatagtcactatcattagctatgaattctcaccagcgatgaacaagagcctgtatgccacatgcataaaaaactgcaccagcgaaggtgacccactgatgctgtcaccattgctgaaacacaccacacatgacctcactgtactcacattcactgytgggtctccataaacattcagtaagcatcaatgaaygtcaatgggtgcaatattttcccacatgaaggaattcaatggcacacctttgtttcatacatacttccatgtcagacgccattctgtcagagtgcctctctgctgccatctgtcacacagccacaacacatcatgggatattggtgggaaggttcaacctgtactgcaataccataaacatccatctctgatgtcatgggctaacatcataaaataggaggcactgcttttggaacaggccttgtataatacaaaagcaaatctttgtgatgagctgtaatcacacttattggtatgatc

SEQ ID NO: 65854 - DNA, 469 bp, Chicken  19866894333450_3
gtactgcaataccataaacatccatctctgatgtcatgggctaacatcataaaataggaggcactgcttttggaacaggccttgtataatacaaaagcaaatctttgtgatgagctgtaatcacacttattggtatgatcggttgcatttgatctggagtcacccagaacctcagtcagtgctatcactggctaatgcgcacatcatcaatttagtttgggattgtagtaatttaggaactctacattttagaatttccatttctgttctgactgcttgaataattccaagtcacagatytaaaaaaccaccaccaaaaccccacaaatataaataaatcaagctatttttttttttttcctttaaagtgtgtataaagtacacttatctcctgggaagaatttgaaagcagatatggattaaaaaaaatgacaaacccaaaacaaaaccaactgtgagtgattagtta

SEQ ID NO: 65855 - DNA, 600 bp, Chicken  19866894333451_1
gacctgaggctactggtggatgagaagttggatatgaaccagcaatgtgctgttgcagcccagaaagtcaactgtatctggggctacatcataagaagcatggccagcaggttgagggaggtgatcctgcccctctactctgttctagtgaggcctcacctggagtactacatccagatgtggagtcttcagtacaagagagaaatagacctgctggagcatgtccacaggaggaccacaaaaatgatctatggaatggaacacctctcctatgaggacagactgaaagaactggagctkttcagccgggagaagtctgtgaggtgacctaatagaggcctttcagtatctaaagggaaactacagaaaagaaggggacagactctttagcagggtctgtggtgactgagcaagggtaaatggtttcaagctcaaagagagtagatttaggttagatataaggaaaaacatcttttaaagcgagggtggtgaggcactggaacaggttgcctagtgttgcaagacaatagaacaacaccctcaatccacatttacccattatttcatctttaagttacttccttataacgtgaaatgtga

SEQ ID NO: 65856 - DNA, 599 bp, Chicken  19866894333455_1
  misc_feature (1)..(33): n is any nucleotide
nnnnnnnnnnnnnnnnnnnnnnnnnnnnnnnnntaacactccgctttacatgtgcaggattggcgtcttccaaagttatataaatatttacagaataatgtctttatcttaaaaaaaaagaagaagaagaaaagaagaaaagaagtgtatatgactgattttacatagagaatatactgattttaatcacatctggatataaatgcaaaatcaggaattaaaaatacatctgctgagcatcactttactgaatttcttggcagtaattcactgttactatattttctttacatgagattwattgatgttcctctttacagcctgccattttccagataccttttttccatacaggcttcctgctagttgcagaatagggctaagtgaacattaactgtagaatattaattgatgatttcattgtgtctctacatagcaaaggacaggactaatatagaagggctgaatcatctgcatttctgagaaagctaggaaaccaattaataactaattattaataactcacaactttgagtttctcaaacacatgcatactatcatacaaaatatcacccctaaattagtttctgttctcttct

SEQ ID NO: 65857 - DNA, 530 bp, Chicken  19866894333455_2
attagtttctgttctcttctccagttgtgttcagagacaaaaagtgcagttccccattttttccactttatgacctgaatttgtctatattgttatgacagtgaatttgactatgctgttatttcggattccctgcaatgtgcttttccaggtccaagtccttttgaagaaacaatttttgataaataaaaatcaccattttaactatgatgtgattaacttcattaagatttacctatgatatctgattttaaaagacctatcaatgtctttggatggacgtcaatgctagattgagamtgaagtgttgttagaaatatacaaataattgttgaagtytttgtgtcattatccattagatatccaaactagtccataataagaaaaatagaattcttttttctttcttgtaagcagacctgttctaagtaaacacattagcttttccaatcttggtgattctatgattctatgattctaagtcatctgaccttgcaaaacaaatgtttaggtctagatttctggacagg

SEQ ID NO: 65858 - DNA, 491 bp, Chicken  19866894333455_3
aaaagtgcagttccccattttttccactttatgacctgaatttgtctatattgttatgacagtgaatttgactatgctgttatttcggattccctgcaatgtgcttttccaggtccaagtccttttgaagaaacaatttttgataaataaaaatcaccattttaactatgatgtgattaacttcattaagatttacctatgatatctgattttaaaagacctatcaatgtctttggatggacgtcaatgctagattgagamtgaagtgttgttagaaatatacaaataattgttgaagtytttgtgtcattatccattagatatccaaactagtccataataagaaaaatagaattcttttttctttcttgtaagcagacctgttctaagtaaacacattagcttttccaatcttggtgattctatgattctatgattctaagtcatctgaccttgcaaaacaaatgtttaggtctagatttctggacagg

SEQ ID NO: 65859 - DNA, 600 bp, Chicken  19866894333457_1
cgctggggctaacacaggaggctagcatcacagttgcagaaggcaacagtagaagtaaaggctttcttttgtttctaagtcaattcatcacctctttaatttttgatcccagtaaagttcgaaattatctctctcatgagcctggctctcttccacttgtaccatgaatttaccaacatttctaataaactttgcaggcaagcttcttgctattatagaacatttcagaattcatgtgttcattatcagtccatagaggatacttgtactttgcgctgtacaactgccagggagacacarcctgcttatttgcagtactccaaggaatgcaattatgacctaggcatttgttgaagtattcccatacctcgcttgtttgaaaataacttcccaaagaatgatctcttaccaggctcttgtcttcaaattaaccttaatgtaattaaagtcaagatgaaatgcaaataaaaatacataccttctatatctaaaatgaaaaaagcaattttgtgttctttatttaaacaaagacaacaacaaatttgatctttttacttcaaatttactatgaaagaactctctcttctctctgaaatgatc

SEQ ID NO: 65860 - DNA, 600 bp, Chicken  19866894333463_1
gcgttacaaaattaattgtgctttgaggtaaggattaggtagaagtaggcagagctgatgagtggtggtttgtgtggtagttgtgtgatgaggtttgggttttttggtttgggtttgacaccataccagcagaattcagctggcagtgggattaaaattgctgagccatctcaggacgggaggaggcttttgtgcttttctagttagatgcagttcaaacacaatatctacctatactacagccatccagacagaaggatctatcctgatctgatctcatgccagcagagatctatgagraattcatctcctgatgaaattgtttgatcagtgaacatttttattagtgatgtgtaatacatgattaacaaagtatttctagawcacaggagttgtggcttgtagragatgagctaaagatgaatggtatagtagggaactggagttctgttgttcaagtatgagtcgagcagtgcagcagtgcaagaaacaagagaaccgtgtgctaactgtgctttctgtcatgttctcagcrgcactgtgttgggatctgtagttcagcctcataatgtgaaatttcttctgtttgtaggcatgaaa

SEQ ID NO: 65861 - DNA, 600 bp, Chicken  19866894333463_2
gtgatgaggtttgggttttttggtttgggtttgacaccataccagcagaattcagctggcagtgggattaaaattgctgagccatctcaggacgggaggaggcttttgtgcttttctagttagatgcagttcaaacacaatatctacctatactacagccatccagacagaaggatctatcctgatctgatctcatgccagcagagatctatgagraattcatctcctgatgaaattgtttgatcagtgaacatttttattagtgatgtgtaatacatgattaacaaagtatttctagawcacaggagttgtggcttgtagragatgagctaaagatgaatggtatagtagggaactggagttctgttgttcaagtatgagtcgagcagtgcagcagtgcaagaaacaagagaaccgtgtgctaactgtgctttctgtcatgttctcagcrgcactgtgttgggatctgtagttcagcctcataatgtgaaatttcttctgtttgtaggcatgaaagtccactgtttgacttcattgagagctgtctgcggaataagcacgaaatggttatttatgaagctgcttctgcaatcatccatt

SEQ ID NO: 65862 - DNA, 600 bp, Chicken  19866894333463_3
gtttgggtttgacaccataccagcagaattcagctggcagtgggattaaaattgctgagccatctcaggacgggaggaggcttttgtgcttttctagttagatgcagttcaaacacaatatctacctatactacagccatccagacagaaggatctatcctgatctgatctcatgccagcagagatctatgagraattcatctcctgatgaaattgtttgatcagtgaacatttttattagtgatgtgtaatacatgattaacaaagtatttctagawcacaggagttgtggcttgtagragatgagctaaagatgaatggtatagtagggaactggagttctgttgttcaagtatgagtcgagcagtgcagcagtgcaagaaacaagagaaccgtgtgctaactgtgctttctgtcatgttctcagcrgcactgtgttgggatctgtagttcagcctcataatgtgaaatttcttctgtttgtaggcatgaaagtccactgtttgacttcattgagagctgtctgcggaataagcacgaaatggttatttatgaagctgcttctgcaatcatccatttgccaaactgcacagcaaggga

SEQ ID NO: 65863 - DNA, 600 bp, Chicken  19866894333463_4
actacagccatccagacagaaggatctatcctgatctgatctcatgccagcagagatctatgagraattcatctcctgatgaaattgtttgatcagtgaacatttttattagtgatgtgtaatacatgattaacaaagtatttctagawcacaggagttgtggcttgtagragatgagctaaagatgaatggtatagtagggaactggagttctgttgttcaagtatgagtcgagcagtgcagcagtgcaagaaacaagagaaccgtgtgctaactgtgctttctgtcatgttctcagcrgcactgtgttgggatctgtagttcagcctcataatgtgaaatttcttctgtttgtaggcatgaaagtccactgtttgacttcattgagagctgtctgcggaataagcacgaaatggttatttatgaagctgcttctgcaatcatccatttgccaaactgcacagcaagggagctggcacctgctgtttcaggttggttcaagagtcctttttaccactttcttagctgatagaaagggtggaaaaacacattggagatacaagtacagcttaaccgaagcactggagtcaaaatataaat

SEQ ID NO: 65864 - DNA, 600 bp, Chicken  19866894333472_1
acgagtgggcacgtgacaaaggttggatggacttttaaaaaagaactggatgcccacagatgcaccgtgaagttttcccacgacgtaaacattcatttctgtgccagtttttggtttctgctgcatactacaaaagcaacctaattgcagttataaatactgagtagcaaatcctcttaccagaaagaagctgcagcttccaaatctgccactccgctcacaccgttcggttccaagccatctatccagagcaacataacctacttggccaacagttctttgctgtgggaatgacacctmgcaggcaccagatgagcacggggccacacggagctctgctcggtgaggatcactggggcaggctgagygtgccttgcagagctgatggttgacagagtgccagggccagggatgcgctgcctggctggcaaaacccatcctctttgatgatgcagaaatcatttcacttgttggagcagtgaatgttactgattattaattggaagagggtctccaggggccgcgtgtgtgtgggactactgagtgctttgcaattccagcatgaaatgagttacgctgtggcattaaaatgagagcagc

SEQ ID NO: 65865 - DNA, 600 bp, Chicken  19866894333472_2
gaagttttcccacgacgtaaacattcatttctgtgccagtttttggtttctgctgcatactacaaaagcaacctaattgcagttataaatactgagtagcaaatcctcttaccagaaagaagctgcagcttccaaatctgccactccgctcacaccgttcggttccaagccatctatccagagcaacataacctacttggccaacagttctttgctgtgggaatgacacctmgcaggcaccagatgagcacggggccacacggagctctgctcggtgaggatcactggggcaggctgagygtgccttgcagagctgatggttgacagagtgccagggccagggatgcgctgcctggctggcaaaacccatcctctttgatgatgcagaaatcatttcacttgttggagcagtgaatgttactgattattaattggaagagggtctccaggggccgcgtgtgtgtgggactactgagtgctttgcaattccagcatgaaatgagttacgctgtggcattaaaatgagagcagctctcgctagcatctgtagcaagtaattgaattgttactgtgtggcaccagtcccttcccttgtactcg

SEQ ID NO: 65866 - DNA, 600 bp, Chicken  19866894333476_1
tggagatgcaggcaacacagattccatgtgctgggggcatacagcagaagtgcctgagaacaggagggctgacacagccaccagcacggcctgcagagcaccacaaacccagtgtggggccttagggtgctcctggctccagcatgaccaggggccagctgggaacacagggctctgctggagctagggacaaggctgccatggagccattgcctcccttcacttcatggaaacctcagaacagcatctgctggcactgtgtgagctgagggcagcccagctctgaacatcaggcagctkccaggcrgtcccagcacctcaagtcctggcccagcactcctccttggctggaattggtgcccaggaaccttttgtgctttgtaaatcctcaggaaagccacaatggcaccaaagctcctgcctcatccccgtccccatcccactgcaggtctcctgcacacatactccagggtcaagagatgctccatcatggccccctgctctgctcccccccagctctctccttttctttgctctggtaccactgagcattccggccattaagtgctcaacaaatgccatatattaaaaaaaaaaaca

SEQ ID NO: 65867 - DNA, 600 bp, Chicken  19866894333476_2
gcaggcaacacagattccatgtgctgggggcatacagcagaagtgcctgagaacaggagggctgacacagccaccagcacggcctgcagagcaccacaaacccagtgtggggccttagggtgctcctggctccagcatgaccaggggccagctgggaacacagggctctgctggagctagggacaaggctgccatggagccattgcctcccttcacttcatggaaacctcagaacagcatctgctggcactgtgtgagctgagggcagcccagctctgaacatcaggcagctkccaggcrgtcccagcacctcaagtcctggcccagcactcctccttggctggaattggtgcccaggaaccttttgtgctttgtaaatcctcaggaaagccacaatggcaccaaagctcctgcctcatccccgtccccatcccactgcaggtctcctgcacacatactccagggtcaagagatgctccatcatggccccctgctctgctcccccccagctctctccttttctttgctctggtaccactgagcattccggccattaagtgctcaacaaatgccatatattaaaaaaaaaaacagaaaaaa

SEQ ID NO: 65868 - DNA, 600 bp, Chicken  19866894333479_1
acagcatctgttctcatcactccagcttaatccttttcaagagagcatcattttggtttaggtgcttgcatgctgctttctggggcagatttaaccccatgccatgtggacatctgagagggggttgcagcagctgcgtcctggaggggctgaggggacactgctgtcactgctgggccctgtgggaggcatcggtctgtgctctgatctccaggagcacctcaggaatgaagatgtttgggggcttggcctgctgggcctgtgctgcctgtctgggtggaaatagggcctgcgaggtgrtttatcttacagacagcctgctgtaaggaattgacaaaatggggtgtttggccaggttaaagtaaaacgggaacagagggcttcagatgaaagatgaagcttgttggtaaggcctcactgggccagaacatgggttgagtgaccccaaagcatgcagaaagcaaggaaaaacacaaggcctcctgagcagtggtgacctgggaacttcatagcagaaattgtcatgaaatacagcaagcatttgcaataatgtgtctgggctggagatctgctgcagtgcttgtacatcttccattttgc

SEQ ID NO: 65869 - DNA, 600 bp, Chicken  19866894333479_2
gtgtgttcctgtgtgagattcccacaggagacatttggtggtgtaggaaactggagtataaagcaggctgggagctcagcagagttgcacctaaacgagctgcagtacaagtagtagctaaagcactgagttgagacatcaggcttgtcatgttagcccttaattccgtacaaacccaaatagtaagtccccatacatttatttcttaagaacgcatgcatgtatgtatgactgagtcaaggttcccatgtgcctcttctgcttttctctgagctaagcacagctcacccagggctgccycttgctcacgctccgtctgcttgctttttgggcacttcctcctgcaagctctccccagcagttgaaatgagggtgctgggaaatttaatgctgtttcctattcctgtagggagtaaaactgcatttttttttgtacttgttacttctctgtccttgttgtcgtggctgtcctcgctttgggaaggagcttggcccaggggagaggtcttccaggacgccctgcatgaagacaggcagtgcctgyggcttcagctctgacaacagagcctgagggtgattagttctgtgggaaagattgac

SEQ ID NO: 65870 - DNA, 600 bp, Chicken  19866894333479_3
cccatgtgcctcttctgcttttctctgagctaagcacagctcacccagggctgccycttgctcacgctccgtctgcttgctttttgggcacttcctcctgcaagctctccccagcagttgaaatgagggtgctgggaaatttaatgctgtttcctattcctgtagggagtaaaactgcatttttttttgtacttgttacttctctgtccttgttgtcgtggctgtcctcgctttgggaaggagcttggcccaggggagaggtcttccaggacgccctgcatgaagacaggcagtgcctgyggcttcagctctgacaacagagcctgagggtgattagttctgtgggaaagattgacaatcttttacaaaatacttgaagagaagaacagcattgtaaaaccccttttctccatcgaaggaaaaaggcttcaaagaagggcatctctggcttctggaggggacaactgagatgggctggcagcctggccttcatgctggtgttgaatacactgctattttctcaaagctggacaaaggctgccatggaagcaggggctggaggcaaagtcagagggtaaactgttccctagaggaggtgta

SEQ ID NO: 65871 - DNA, 599 bp, Chicken  19866894333483_1
  misc_feature (1)..(147): n is any nucleotide
nnnnnnnnnnnnnnnnnnnnnnnnnnnnnnnnnnnnnnnnnnnnnnnnnnnnnnnnnnnnnnnnnnnnnnnnnnnnnnnnnnnnnnnnnnnnnnnnnnnnnnnnnnnnnnnnnnnnnnnnnnnnnnnnnnnnnnnnnnnnnnnnnnnatttgcttggatatgtactgtgaagaaatctggtatctaaacctgagaatgaaatgtaaacccaagagatctgtggtgctcatccttgtttcctgggatacttttttgtcattacccagtctcatatgatttttaccacttggtttgaaatcrtacgtaaatgacgtgtaaaatttgagctcacttaattagaactagtttatcaggattcaaacattacaaaaacaagcaaattaaaagctcaagaatttgttaacatcctttcctggtgaaatagtgcaagaacatattatgtgatagacacactaaatacagttgtattcaacaacacccgattcgtgctttcataattgaatattcagaagatagaggctctcgagaaagcttcttgtcaaagtactataattattgattaattttaacaacctcaacactccattatagtgcttttt

SEQ ID NO: 65872 - DNA, 555 bp, Chicken  19866894333483_2
aaacattacaaaaacaagcaaattaaaagctcaagaatttgttaacatcctttcctggtgaaatagtgcaagaacatattatgtgatagacacactaaatacagttgtattcaacaacacccgattcgtgctttcataattgaatattcagaagatagaggctctcgagaaagcttcttgtcaaagtactataattattgattaattttaacaacctcaacactccattatagtgctttttatttacaaattttcccccagattattgcttttgacagatgcttaccttcttcaatctcytgtaacttctgctgcagaaattacttccatcttgaaatatatttgcaagttgatgtcttaggaggttgagccacttccaaatacctgaaaggctcagtgttttaatgctgctttaaaattgataatccattttgtcctgtttggaaagtttcttcaaattaatattctttatgaaattgagggagaaagaagaaatacttttaaacttaggtcaataaagagaaatgaaaactgaactacctttttcattcccaa

SEQ ID NO: 65873 - DNA, 600 bp, Chicken  19866894333486_1
cccaggcggaagcggggagggggaagaggacaaagctctgggtgccatcgccaggcggggacactttggactccacatgttgaaggcagtcctgctctccagaggagatgtggggcaatgcgtgggaatggcaccggtgccaacaagctctggcagtgaggtctttgttcactcatggtgtttactgaactgatggctcctgtgtccagcacgctgatctaggaggtggcaaagagccagatgctccacactgggacttgcaggatgtgttttggagttactagaagttttgtaaaacaygaattaatttccttagctctctttttccatctccttcacttctctcttatgtatcttgcgtaatttttatgataaacttatattttctgctactttatgttttagactgctccagctaatggtaattatacagaatagttatcatcttataagaaagtgatgaatgaaaagctttaatatgtttggtcataatcccatagcagtctctaccactgttaattccatgtctattcacacacaaaatcatcccaatgccctgctacacttctgcaagcaaaatctcatcctcctgtgatcctt

SEQ ID NO: 65874 - DNA, 600 bp, Chicken  19866894333489_1
taattagggaactgtaaacttctttgcatttaacattagtggtggtttaaaacagcaaatttcatgaacctgcagcaaatgttgatgcctgatcgagacctgtaactcagtgcctccaagtgctatagtttctagcactataactttgatatagtccacttggcatctattatacaggtccacaggcaccttagtgcagcggattcagccatcactagtcagggctttggatggagcctgaactgcctcctgaatgatcagctcaaaactgggaccaaccataagagcaaaacatgagtytccctgtctgtctcctgccagatgctaacttgttaygggcaacagaggagggaggttgaaatccgtgcttgtgtttttcccctgaagaaagaagctgactagcacagatgtttcaaaagtcagaaggcagataaagtcatcttatgaagtccttatgaggctgtgtagaggtaactgaggctttgtggaggtgcttggatttttggtgtgccaaatatatgcctgcattttcatagctgttactgatttccaatctgatcgtccagcttttcatttcacccacgttatatgtaaaaagtg

SEQ ID NO: 65875 - DNA, 600 bp, Chicken  19866894333489_2
tagtggtggtttaaaacagcaaatttcatgaacctgcagcaaatgttgatgcctgatcgagacctgtaactcagtgcctccaagtgctatagtttctagcactataactttgatatagtccacttggcatctattatacaggtccacaggcaccttagtgcagcggattcagccatcactagtcagggctttggatggagcctgaactgcctcctgaatgatcagctcaaaactgggaccaaccataagagcaaaacatgagtytccctgtctgtctcctgccagatgctaacttgttaygggcaacagaggagggaggttgaaatccgtgcttgtgtttttcccctgaagaaagaagctgactagcacagatgtttcaaaagtcagaaggcagataaagtcatcttatgaagtccttatgaggctgtgtagaggtaactgaggctttgtggaggtgcttggatttttggtgtgccaaatatatgcctgcattttcatagctgttactgatttccaatctgatcgtccagcttttcatttcacccacgttatatgtaaaaagtgacctgatctgtttctgttttggcactgtcaaagaaa

SEQ ID NO: 65876 - DNA, 600 bp, Chicken  19866894333489_3
tccagcttttcatttcacccacgttatatgtaaaaagtgacctgatctgtttctgttttggcactgtcaaagaaatactacgctcttgtgtttaagttcatgcatattttaggtatataaagtctagaataatattccctagtcttaaactcctattgttataaactgacgtttaaagttgttgtcattacttcagcatttttattaatagcgaagcactgcagagacatacaaactctgttttcatttaccatttttagtacttcatgattgtatttcatgatgcctttaaaataaagragtgtaaatgctggtcctgcacacacagatgattcaaggtatctacagttcgctttaaaactgctcgaaacaactggcagaaaaataacaacttcatctgtaacagtaaaacaaaagcgtaatgtgcttcatttctagttccttgcagtgcctgaacgtcctaaaggatgagagctggttgttgtactgcaagagggcaaccagtctggagaggctgcaattatgctgttgtgtgcctgctttttaaatataggctcccagacacagatcttgaacgagacccgctattatatctctatt

SEQ ID NO: 65877 - DNA, 599 bp, Chicken  19866894333491_1
  misc_feature (1)..(199): n is any nucleotide
nnnnnnnnnnnnnnnnnnnnnnnnnnnnnnnnnnnnnnnnnnnnnnnnnnnnnnnnnnnnnnnnnnnnnnnnnnnnnnnnnnnnnnnnnnnnnnnnnnnnnnnnnnnnnnnnnnnnnnnnnnnnnnnnnnnnnnnnnnnnnnnnnnnnnnnnnnnnnnnnnnnnnnnnnnnnnnnnnnnnnnnnnnnnnnnnnnnnnnnaatagtaagctttacattaatacgtctattgtatccaaaaagcaacagtaggtggcagaataatttcactggaagtcagtttcttggtatgctgaacttcytttcaatgaacttcaagagaaaaagagatgtatctatatgagctacgaccaattgcttttctagatggttggcctaacagaattgaccagacagttscaaaacatgtactgcaagcattagtcggattctaatgactgtttgctttccagttctgcagaacacttaaatgcttgtgaagaatattgcagaagaacttgtacgtgatgccttgctgctgcagaacatgcgtgtgtattagtcaccagctgaagcatagcaaacagtatttttagaggaggtgtaaataatacaaacatat

SEQ ID NO: 65878 - DNA, 599 bp, Chicken  19866894333491_2
  misc_feature (1)..(102): n is any nucleotide
nnnnnnnnnnnnnnnnnnnnnnnnnnnnnnnnnnnnnnnnnnnnnnnnnnnnnnnnnnnnnnnnnnnnnnnnnnnnnnnnnnnnnnnnnnnnnnnnnnnnnnaatagtaagctttacattaatacgtctattgtatccaaaaagcaacagtaggtggcagaataatttcactggaagtcagtttcttggtatgctgaacttcytttcaatgaacttcaagagaaaaagagatgtatctatatgagctacgaccaattgcttttctagatggttggcctaacagaattgaccagacagttscaaaacatgtactgcaagcattagtcggattctaatgactgtttgctttccagttctgcagaacacttaaatgcttgtgaagaatattgcagaagaacttgtacgtgatgccttgctgctgcagaacatgcgtgtgtattagtcaccagctgaagcatagcaaacagtatttttagaggaggtgtaaataatacaaacatataatcctttccttttagagaaaagcacttacgtaaacatawtgctatgaaatgtattgctctaccgaacagctctgctgtcgcctctgatgaagcaaa

SEQ ID NO: 65879 - DNA, 600 bp, Chicken  19866894333491_3
gagctacgaccaattgcttttctagatggttggcctaacagaattgaccagacagttscaaaacatgtactgcaagcattagtcggattctaatgactgtttgctttccagttctgcagaacacttaaatgcttgtgaagaatattgcagaagaacttgtacgtgatgccttgctgctgcagaacatgcgtgtgtattagtcaccagctgaagcatagcaaacagtatttttagaggaggtgtaaataatacaaacatataatcctttccttttagagaaaagcacttacgtaaacatawtgctatgaaatgtattgctctaccgaacagctctgctgtcgcctctgatgaagcaaataagctccctgggaaattggtagcaaatcatgactgaggttcttcaacaaagagtaaagcatctatggaagatgtctccggcaggaagatagggagagggtggttgcagcttgcattggttgtgtcatgaactgcttaccaactctggctttctcctttatgtctgcctgggagtagctgtagcattcagaatcatgagcacctccaaacaattcagtttaaaggaaattgaacaaatagacc

SEQ ID NO: 65880 - DNA, 600 bp, Chicken  19866894333492_1
ttagtagcatggagtgaattcataaatgaataaccagctgtgtgagaggaaaaaaaaaatcatagaatcattaaggttggaaaagacctctaaagatcatctagtccaaccatcaaacccatcaccaccatgcctactaaaccatgtccctcatcgtgacatttgttaaggaagatgttattctggaagaaaagagtaaccaaaacagctcatctacagggtctattgtgaccttttcacctgacctatagcgtagctacatattaactatacttcttccctgcctttaagacaggaacmgaagaaaatgaataccacataaacaagcctaatgcttaaaaaaatgtaaatctatggagaaagtaattaaaatatgtttcaaatccatgaaaaaaaaacccaacaaatattaattgttaacaaatcatagtctgaaactgcaagtgggacacataaaagccaatgtcatgtaaaaccaaatgacattccttctgaagaaatgcctgcaatagtctcttaggatacagatgtcacactgtgaggtgtgctcccaaacaaacacaagaaggaycagtaagctatttctcactgtatttgttg

SEQ ID NO: 65881 - DNA, 600 bp, Chicken  19866894333492_2
acttcttccctgcctttaagacaggaacmgaagaaaatgaataccacataaacaagcctaatgcttaaaaaaatgtaaatctatggagaaagtaattaaaatatgtttcaaatccatgaaaaaaaaacccaacaaatattaattgttaacaaatcatagtctgaaactgcaagtgggacacataaaagccaatgtcatgtaaaaccaaatgacattccttctgaagaaatgcctgcaatagtctcttaggatacagatgtcacactgtgaggtgtgctcccaaacaaacacaagaaggaycagtaagctatttctcactgtatttgttgggatatcatccrtttatyttaaattcaagggcaagaggaaatctttgtgtctctgataaaagaccgatgaagaatatgcaacaacaaagtccggttgcaaggctcttcaactctacagctgctttgtaatgatgatttcttggactggattgttacatttataaagggagtacacaaaaatagattgttgaagttacagtaccgaaagagtgctgaggaaatcctgaagcattcaaggtcttatttttcaacttcrcattttctgtagagg

SEQ ID NO: 65882 - DNA, 600 bp, Chicken  19866894333492_3
taccacataaacaagcctaatgcttaaaaaaatgtaaatctatggagaaagtaattaaaatatgtttcaaatccatgaaaaaaaaacccaacaaatattaattgttaacaaatcatagtctgaaactgcaagtgggacacataaaagccaatgtcatgtaaaaccaaatgacattccttctgaagaaatgcctgcaatagtctcttaggatacagatgtcacactgtgaggtgtgctcccaaacaaacacaagaaggaycagtaagctatttctcactgtatttgttgggatatcatccrtttatyttaaattcaagggcaagaggaaatctttgtgtctctgataaaagaccgatgaagaatatgcaacaacaaagtccggttgcaaggctcttcaactctacagctgctttgtaatgatgatttcttggactggattgttacatttataaagggagtacacaaaaatagattgttgaagttacagtaccgaaagagtgctgaggaaatcctgaagcattcaaggtcttatttttcaacttcrcattttctgtagaggctgcaaaatcttaggaattattccactgcattacaaccagt

SEQ ID NO: 65883 - DNA, 600 bp, Chicken  19866894333492_4
ataaacaagcctaatgcttaaaaaaatgtaaatctatggagaaagtaattaaaatatgtttcaaatccatgaaaaaaaaacccaacaaatattaattgttaacaaatcatagtctgaaactgcaagtgggacacataaaagccaatgtcatgtaaaaccaaatgacattccttctgaagaaatgcctgcaatagtctcttaggatacagatgtcacactgtgaggtgtgctcccaaacaaacacaagaaggaycagtaagctatttctcactgtatttgttgggatatcatccrtttatyttaaattcaagggcaagaggaaatctttgtgtctctgataaaagaccgatgaagaatatgcaacaacaaagtccggttgcaaggctcttcaactctacagctgctttgtaatgatgatttcttggactggattgttacatttataaagggagtacacaaaaatagattgttgaagttacagtaccgaaagagtgctgaggaaatcctgaagcattcaaggtcttatttttcaacttcrcattttctgtagaggctgcaaaatcttaggaattattccactgcattacaaccagtcctggg

SEQ ID NO: 65884 - DNA, 476 bp, Chicken  19866894333492_5
aaacacaagaaggaycagtaagctatttctcactgtatttgttgggatatcatccrtttatyttaaattcaagggcaagaggaaatctttgtgtctctgataaaagaccgatgaagaatatgcaacaacaaagtccggttgcaaggctcttcaactctacagctgctttgtaatgatgatttcttggactggattgttacatttataaagggagtacacaaaaatagattgttgaagttacagtaccgaaagagtgctgaggaaatcctgaagcattcaaggtcttatttttcaacttcrcattttctgtagaggctgcaaaatcttaggaattattccactgcattacaaccagtcctgggcccttcaagtacctaagtactcctttttggaattcctcttaaaattcactgacaataaaaatcaaacattcttaccctttcggtttttgggctttttctccttatcagacacat

SEQ ID NO: 65885 - DNA, 600 bp, Chicken  19866894333496_1
catgtttagaggattaatcacgggcagccagacatcatgtttgagtgtgctggcttatctttgggtagcaggaggagacagatcagctccccaggaaacaggccaagaaggcagcaaagtcaccttctccaacgtctgtccttctcaaaggcagagaaaccaaaagggctgacgtcaaccgcatgcgcacaagtctgcgttaatgcagttattacaagttcaaacaaaaaggggaaataagtgtttttgtttcatctgtacaatatacacatatggacacgctcatacaggacaccaccrggatggttggatagggactgctgtagtccctgagccttccctgctgtcagtactgctccgagcccatgcaatgtggttttgttgcatgggactgaagcactaggcactgtggttcaccttttctcacaggacaaagggaccaacccccccaaaaaccaaaataaaatagtagtaaaaaaaaataaacaaaaaaaacttcacaacaacaggaaaaaaaaaacaacactctttccccacaaacctctccactcccacatgcaggcatgttgtttcctacccaggggagaggaggaagccata

SEQ ID NO: 65886 - DNA, 600 bp, Chicken  19866894333502_1
aatgaaggatttgtgcgcgcaacgctttgcaaagctcagtgctctgagggccagttataaagtcagagatggatgaaacagggaaaggcagcacagctccgagagccccgtgctatcaccggggtcagagcacggagcaaaggcaaacactgctggagtgagggatgcaaacaaggacgaggtgccaagtgacctccagcagtttacacagcccaactgtaggactcaggaagcagggcagggttccagggagctgcgtgccaggagctgtgaggctccgttagctccctgccagcagasaccgagcacagctccatggaggaaggcagcwcagtacctaaccatcctgctgaactgactggcgctctgcatcacacgcggattcgggctgtatctgtgctgtgatcaaaggggtggctgcaacatggctraggcatcagtgtcactgacttgcccagataatgcagcggaaaagcgacagagacacagatttcagtgcgggttgcatgtgcactcrggctgctacggatgaccttgccctgacaccatctttcaggcagcccgtatgcctaatcagagccgcagcagacagtttgactg

SEQ ID NO: 65887 - DNA, 600 bp, Chicken  19866894333502_2
aagctcagtgctctgagggccagttataaagtcagagatggatgaaacagggaaaggcagcacagctccgagagccccgtgctatcaccggggtcagagcacggagcaaaggcaaacactgctggagtgagggatgcaaacaaggacgaggtgccaagtgacctccagcagtttacacagcccaactgtaggactcaggaagcagggcagggttccagggagctgcgtgccaggagctgtgaggctccgttagctccctgccagcagasaccgagcacagctccatggaggaaggcagcwcagtacctaaccatcctgctgaactgactggcgctctgcatcacacgcggattcgggctgtatctgtgctgtgatcaaaggggtggctgcaacatggctraggcatcagtgtcactgacttgcccagataatgcagcggaaaagcgacagagacacagatttcagtgcgggttgcatgtgcactcrggctgctacggatgaccttgccctgacaccatctttcaggcagcccgtatgcctaatcagagccgcagcagacagtttgactgttgcattacagcactgagcctcccagaggga

SEQ ID NO: 65888 - DNA, 600 bp, Chicken  19866894333502_3
acggagcaaaggcaaacactgctggagtgagggatgcaaacaaggacgaggtgccaagtgacctccagcagtttacacagcccaactgtaggactcaggaagcagggcagggttccagggagctgcgtgccaggagctgtgaggctccgttagctccctgccagcagasaccgagcacagctccatggaggaaggcagcwcagtacctaaccatcctgctgaactgactggcgctctgcatcacacgcggattcgggctgtatctgtgctgtgatcaaaggggtggctgcaacatggctraggcatcagtgtcactgacttgcccagataatgcagcggaaaagcgacagagacacagatttcagtgcgggttgcatgtgcactcrggctgctacggatgaccttgccctgacaccatctttcaggcagcccgtatgcctaatcagagccgcagcagacagtttgactgttgcattacagcactgagcctcccagagggataacctcaaarctgtgcgttcctcccccacatggtacaaaccccgtgtgctcagctctgatatgattttgaaaagcccacaggtgtgaaagctttttctg

SEQ ID NO: 65889 - DNA, 592 bp, Chicken  19866894333502_4
tgtaggactcaggaagcagggcagggttccagggagctgcgtgccaggagctgtgaggctccgttagctccctgccagcagasaccgagcacagctccatggaggaaggcagcwcagtacctaaccatcctgctgaactgactggcgctctgcatcacacgcggattcgggctgtatctgtgctgtgatcaaaggggtggctgcaacatggctraggcatcagtgtcactgacttgcccagataatgcagcggaaaagcgacagagacacagatttcagtgcgggttgcatgtgcactcrggctgctacggatgaccttgccctgacaccatctttcaggcagcccgtatgcctaatcagagccgcagcagacagtttgactgttgcattacagcactgagcctcccagagggataacctcaaarctgtgcgttcctcccccacatggtacaaaccccgtgtgctcagctctgatatgattttgaaaagcccacaggtgtgaaagctttttctgtggtgcacacacacagctttggaagtcccagccaaggggctccaacagcaccgttccacacaaaaatgactttcagat

SEQ ID NO: 65890 - DNA, 467 bp, Chicken  19866894333502_5
catcctgctgaactgactggcgctctgcatcacacgcggattcgggctgtatctgtgctgtgatcaaaggggtggctgcaacatggctraggcatcagtgtcactgacttgcccagataatgcagcggaaaagcgacagagacacagatttcagtgcgggttgcatgtgcactcrggctgctacggatgaccttgccctgacaccatctttcaggcagcccgtatgcctaatcagagccgcagcagacagtttgactgttgcattacagcactgagcctcccagagggataacctcaaarctgtgcgttcctcccccacatggtacaaaccccgtgtgctcagctctgatatgattttgaaaagcccacaggtgtgaaagctttttctgtggtgcacacacacagctttggaagtcccagccaaggggctccaacagcaccgttccacacaaaaatgactttcagat

SEQ ID NO: 65891 - DNA, 600 bp, Chicken  19866894333503_1
tcttaaagagggtaatgtcatagaagtgctcacaaggacgaaagctttctgctgcaaggaacatgtatagtgtcaattaagcttttctaagggataaaatgaaggcagagttggcagtaaaatggacctaccgcacagtatctggagcattgctttaggaagatgaatgtcccatagcgatcagtacagagtagttctgagagctcctcagagccacgactgagcctccttgcattgactatagtgaagtttgcacgtatccctgaagttatgacacattcttataggttgaccgcctcytctaatgacttttcaggagaaggcrgcgatcactttgttcttgttcgtagtctagcttttataaakggaaaataagaaatttcagggggcttttcagggactcttttcacctctcctcttagaatcacaactttcatccacacacacccagatatccrtttgggcccatcaacacactgagaccacaatgttgcattcagcaaaaatcactgccactgacttaagaggtcccctctgtatcagacccattgcttctgttggggcagcacactgcacacactaacagcagcatcatggctg

SEQ ID NO: 65892 - DNA, 600 bp, Chicken  19866894333503_2
gtgctcacaaggacgaaagctttctgctgcaaggaacatgtatagtgtcaattaagcttttctaagggataaaatgaaggcagagttggcagtaaaatggacctaccgcacagtatctggagcattgctttaggaagatgaatgtcccatagcgatcagtacagagtagttctgagagctcctcagagccacgactgagcctccttgcattgactatagtgaagtttgcacgtatccctgaagttatgacacattcttataggttgaccgcctcytctaatgacttttcaggagaaggcrgcgatcactttgttcttgttcgtagtctagcttttataaakggaaaataagaaatttcagggggcttttcagggactcttttcacctctcctcttagaatcacaactttcatccacacacacccagatatccrtttgggcccatcaacacactgagaccacaatgttgcattcagcaaaaatcactgccactgacttaagaggtcccctctgtatcagacccattgcttctgttggggcagcacactgcacacactaacagcagcatcatggctgtattttatctgagagaaaatcctgt

SEQ ID NO: 65893 - DNA, 600 bp, Chicken  19866894333503_3
atagtgtcaattaagcttttctaagggataaaatgaaggcagagttggcagtaaaatggacctaccgcacagtatctggagcattgctttaggaagatgaatgtcccatagcgatcagtacagagtagttctgagagctcctcagagccacgactgagcctccttgcattgactatagtgaagtttgcacgtatccctgaagttatgacacattcttataggttgaccgcctcytctaatgacttttcaggagaaggcrgcgatcactttgttcttgttcgtagtctagcttttataaakggaaaataagaaatttcagggggcttttcagggactcttttcacctctcctcttagaatcacaactttcatccacacacacccagatatccrtttgggcccatcaacacactgagaccacaatgttgcattcagcaaaaatcactgccactgacttaagaggtcccctctgtatcagacccattgcttctgttggggcagcacactgcacacactaacagcagcatcatggctgtattttatctgagagaaaatcctgtctcagacacgtgggtaatagctcagcctacagttaagcctc

SEQ ID NO: 65894 - DNA, 600 bp, Chicken  19866894333503_4
gaagatgaatgtcccatagcgatcagtacagagtagttctgagagctcctcagagccacgactgagcctccttgcattgactatagtgaagtttgcacgtatccctgaagttatgacacattcttataggttgaccgcctcytctaatgacttttcaggagaaggcrgcgatcactttgttcttgttcgtagtctagcttttataaakggaaaataagaaatttcagggggcttttcagggactcttttcacctctcctcttagaatcacaactttcatccacacacacccagatatccrtttgggcccatcaacacactgagaccacaatgttgcattcagcaaaaatcactgccactgacttaagaggtcccctctgtatcagacccattgcttctgttggggcagcacactgcacacactaacagcagcatcatggctgtattttatctgagagaaaatcctgtctcagacacgtgggtaatagctcagcctacagttaagcctcccaccagatttagccattgcctaatgagtttccagtttaagcaaacaagacataaagaataggaaagataactctattcatgctatcagaca

SEQ ID NO: 65895 - DNA, 600 bp, Chicken  19866894333506_1
ctactctgtgttggggaggcctcacctggggtactgcatgcagatgtggaatccacagtactagagaggggtgacctgttagagcacatccagagcagggccacgaaaatgatccaaggaatggagcacctctcctatggggacagactgagagagctggggctgttcagcctggagtagagaaggctctgtggtgaccagatagtggcctttcagtactcaaaggggagctacaggaaagaaggggacagattctttagcagggtctgtggcgatatagcaaggggaaatgagttgcawactcaaggaggttagatttaggttggctataaagaaacaatcttttatagcttgggtggtgaggcagtggaacaggttgcccagagatgtggtggatgccccatccctggagactttcarggtgaggctggatcacatccctggcaacctgatctagctgtggatgtacctgttcattgcaggggagttggactagatgacttttagaggtccmttacaactctaaggattctgtgattctaaattaccrttaggtcttactagtatgtatggaatttagtggatgtaggggaaaattgt

SEQ ID NO: 65896 - DNA, 600 bp, Chicken  19866894333506_2
atggagcacctctcctatggggacagactgagagagctggggctgttcagcctggagtagagaaggctctgtggtgaccagatagtggcctttcagtactcaaaggggagctacaggaaagaaggggacagattctttagcagggtctgtggcgatatagcaaggggaaatgagttgcawactcaaggaggttagatttaggttggctataaagaaacaatcttttatagcttgggtggtgaggcagtggaacaggttgcccagagatgtggtggatgccccatccctggagactttcarggtgaggctggatcacatccctggcaacctgatctagctgtggatgtacctgttcattgcaggggagttggactagatgacttttagaggtccmttacaactctaaggattctgtgattctaaattaccrttaggtcttactagtatgtatggaatttagtggatgtaggggaaaattgtgwtktttttttttttccttgcttatacttctgcttccttttgtttttagaacatgaatgaagcctcttccttgcttagtgccacgtgtaatacatttatcacaacacttgaagaatgcgt

SEQ ID NO: 65897 - DNA, 590 bp, Chicken  19866894333506_3
agtactcaaaggggagctacaggaaagaaggggacagattctttagcagggtctgtggcgatatagcaaggggaaatgagttgcawactcaaggaggttagatttaggttggctataaagaaacaatcttttatagcttgggtggtgaggcagtggaacaggttgcccagagatgtggtggatgccccatccctggagactttcarggtgaggctggatcacatccctggcaacctgatctagctgtggatgtacctgttcattgcaggggagttggactagatgacttttagaggtccmttacaactctaaggattctgtgattctaaattaccrttaggtcttactagtatgtatggaatttagtggatgtaggggaaaattgtgwtktttttttttttccttgcttatacttctgcttccttttgtttttagaacatgaatgaagcctcttccttgcttagtgccacgtgtaatacatttatcacaacacttgaagaatgcgtgaagattgctaatgccaagtttaagccagaaatgttccagctgcctcacccccgatcccttagtttctcctgtgtcaccatcac

SEQ ID NO: 65898 - DNA, 554 bp, Chicken  19866894333506_4
gattctttagcagggtctgtggcgatatagcaaggggaaatgagttgcawactcaaggaggttagatttaggttggctataaagaaacaatcttttatagcttgggtggtgaggcagtggaacaggttgcccagagatgtggtggatgccccatccctggagactttcarggtgaggctggatcacatccctggcaacctgatctagctgtggatgtacctgttcattgcaggggagttggactagatgacttttagaggtccmttacaactctaaggattctgtgattctaaattaccrttaggtcttactagtatgtatggaatttagtggatgtaggggaaaattgtgwtktttttttttttccttgcttatacttctgcttccttttgtttttagaacatgaatgaagcctcttccttgcttagtgccacgtgtaatacatttatcacaacacttgaagaatgcgtgaagattgctaatgccaagtttaagccagaaatgttccagctgcctcacccccgatcccttagtttctcctgtgtcaccatcac

SEQ ID NO: 65899 - DNA, 502 bp, Chicken  19866894333506_5
tcaaggaggttagatttaggttggctataaagaaacaatcttttatagcttgggtggtgaggcagtggaacaggttgcccagagatgtggtggatgccccatccctggagactttcarggtgaggctggatcacatccctggcaacctgatctagctgtggatgtacctgttcattgcaggggagttggactagatgacttttagaggtccmttacaactctaaggattctgtgattctaaattaccrttaggtcttactagtatgtatggaatttagtggatgtaggggaaaattgtgwtktttttttttttccttgcttatacttctgcttccttttgtttttagaacatgaatgaagcctcttccttgcttagtgccacgtgtaatacatttatcacaacacttgaagaatgcgtgaagattgctaatgccaagtttaagccagaaatgttccagctgcctcacccccgatcccttagtttctcctgtgtcaccatcac

SEQ ID NO: 65900 - DNA, 500 bp, Chicken  19866894333506_6
aaggaggttagatttaggttggctataaagaaacaatcttttatagcttgggtggtgaggcagtggaacaggttgcccagagatgtggtggatgccccatccctggagactttcarggtgaggctggatcacatccctggcaacctgatctagctgtggatgtacctgttcattgcaggggagttggactagatgacttttagaggtccmttacaactctaaggattctgtgattctaaattaccrttaggtcttactagtatgtatggaatttagtggatgtaggggaaaattgtgwtktttttttttttccttgcttatacttctgcttccttttgtttttagaacatgaatgaagcctcttccttgcttagtgccacgtgtaatacatttatcacaacacttgaagaatgcgtgaagattgctaatgccaagtttaagccagaaatgttccagctgcctcacccccgatcccttagtttctcctgtgtcaccatcac

SEQ ID NO: 65901 - DNA, 600 bp, Chicken  19866894333507_1
aagcagtgggtccttcaatgcccctgttagcatcctgtccctctagtatagctacaccattccacaccttatcaacggaaggcttgcttccctcatcccacttcagacctagcttaaactccccctaatgagccctgctagcttttccccaatttccatcctttctactaagaactagtggtaatttccatttctcattttacttaatcatacacggacttctaatgaggtcacttaagcaactaaatgcaagagcacactcatttctttctagcatcagattttttttagggtacgcakccaaaaatcctgaaatgctataatgtgatagaaagtacagcaataatagtggagtggcacaatcctaggctgcagcaaatgagaacaagtccaaatgcagcaaccgtgggcacagatataaaggaagaacaactgcttacctttggaatgcctcaagtaggaaggcagggatctccagcgacatacccttgcctctaatgccaacccttaaaagaggtctgggaaagggcggatccttggtggagccaggattttgcattgcatgcacctgagctccccttcgggtggccctgccctccc

SEQ ID NO: 65902 - DNA, 599 bp, Chicken  19866894333541_1
  misc_feature (1)..(189): n is any nucleotide
nnnnnnnnnnnnnnnnnnnnnnnnnnnnnnnnnnnnnnnnnnnnnnnnnnnnnnnnnnnnnnnnnnnnnnnnnnnnnnnnnnnnnnnnnnnnnnnnnnnnnnnnnnnnnnnnnnnnnnnnnnnnnnnnnnnnnnnnnnnnnnnnnnnnnnnnnnnnnnnnnnnnnnnnnnnnnnnnnnnnnnnnnnnnnattacagcagtgaatgtaaattgccatttgtgactgacctgttccacagtaacaccaagtctgcctggctgaggtactattgctgaatgaagaagaaaggatgcttgcagrcactgcaccgaacacagtttgcagacacaactccactgactgtaaattcactcttcagctcttgaggctacatgttcaactacaggagagaaattatgtctaggtacaaacagtgctcctctggaatggtgccatatggagaatcaagaacaccacattaaatcacctccaaaggcaaggggctgacaggggtaggatttatttttcacctcactgctcttataaagccactataggtatagctttttcttcagaaatattgcaggcctgacagcagagacaataaatcctgtttccat

SEQ ID NO: 65903 - DNA, 599 bp, Chicken  19866894333543_1
  misc_feature (1)..(189): n is any nucleotide
nnnnnnnnnnnnnnnnnnnnnnnnnnnnnnnnnnnnnnnnnnnnnnnnnnnnnnnnnnnnnnnnnnnnnnnnnnnnnnnnnnnnnnnnnnnnnnnnnnnnnnnnnnnnnnnnnnnnnnnnnnnnnnnnnnnnnnnnnnnnnnnnnnnnnnnnnnnnnnnnnnnnnnnnnnnnnnnnnnnnnnnnnnnnnctaaggtcaggaacactgctgaactgctgctctagaaccttccctgctgccaagacttctgattcctctgctggccaagctgtttctcagtcagtagagccatggaaatcyttctgccagctgcagaagtctacrsatctgttacactctctggtcccccccatgaagcttagcaagcccttttctcagggagcaggtagagcacagctgtgtttgggtgctcaacttcgtgcacgtgtgacagccacatgtatgtgtttggcactcaacttctaaaagcatcagttgctcaaaaacttccctcagattctatgattatttcagatttattctgaaataatagatctcaacctagtatgatgtagtaattgtaatttgggatgtttgacagtgatctgatagtagggtac

SEQ ID NO: 65904 - DNA, 599 bp, Chicken  19866894333543_2
  misc_feature (1)..(165): n is any nucleotide
nnnnnnnnnnnnnnnnnnnnnnnnnnnnnnnnnnnnnnnnnnnnnnnnnnnnnnnnnnnnnnnnnnnnnnnnnnnnnnnnnnnnnnnnnnnnnnnnnnnnnnnnnnnnnnnnnnnnnnnnnnnnnnnnnnnnnnnnnnnnnnnnnnnnnnnnnnnnnnnnnnnnnctaaggtcaggaacactgctgaactgctgctctagaaccttccctgctgccaagacttctgattcctctgctggccaagctgtttctcagtcagtagagccatggaaatcyttctgccagctgcagaagtctacrsatctgttacactctctggtcccccccatgaagcttagcaagcccttttctcagggagcaggtagagcacagctgtgtttgggtgctcaacttcgtgcacgtgtgacagccacatgtatgtgtttggcactcaacttctaaaagcatcagttgctcaaaaacttccctcagattctatgattatttcagatttattctgaaataatagatctcaacctagtatgatgtagtaattgtaatttgggatgtttgacagtgatctgatagtagggtacgtcgtggctttaaggttaccttcc

SEQ ID NO: 65905 - DNA, 599 bp, Chicken  19866894333543_3
  misc_feature (1)..(164): n is any nucleotide
nnnnnnnnnnnnnnnnnnnnnnnnnnnnnnnnnnnnnnnnnnnnnnnnnnnnnnnnnnnnnnnnnnnnnnnnnnnnnnnnnnnnnnnnnnnnnnnnnnnnnnnnnnnnnnnnnnnnnnnnnnnnnnnnnnnnnnnnnnnnnnnnnnnnnnnnnnnnnnnnnnnnctaaggtcaggaacactgctgaactgctgctctagaaccttccctgctgccaagacttctgattcctctgctggccaagctgtttctcagtcagtagagccatggaaatcyttctgccagctgcagaagtctacrsatctgttacactctctggtcccccccatgaagcttagcaagcccttttctcagggagcaggtagagcacagctgtgtttgggtgctcaacttcgtgcacgtgtgacagccacatgtatgtgtttggcactcaacttctaaaagcatcagttgctcaaaaacttccctcagattctatgattatttcagatttattctgaaataatagatctcaacctagtatgatgtagtaattgtaatttgggatgtttgacagtgatctgatagtagggtacgtcgtggctttaaggttaccttcct

SEQ ID NO: 65906 - DNA, 600 bp, Chicken  19866894333543_4
agcccttttctcagggagcaggtagagcacagctgtgtttgggtgctcaacttcgtgcacgtgtgacagccacatgtatgtgtttggcactcaacttctaaaagcatcagttgctcaaaaacttccctcagattctatgattatttcagatttattctgaaataatagatctcaacctagtatgatgtagtaattgtaatttgggatgtttgacagtgatctgatagtagggtacgtcgtggctttaaggttaccttcctgtaaaaaatacagaaacaaaatatgctaaatttgtggtgyctgggaaggagatgtgtgttttgtggacttgtgcggagagatgtcaactgaatctgataccatctcaatgacaaatctgtctgagggatcctgaaagcttttctagctgtctgctactcagtgtggtcattcctatgagttcctatttcaatcagcaagctgagtgtccattaacaataycacgccagagataaagacttcagaactctccctttctagcaggtccctgagatgagaactgagaagaatggaaggttggaagaatgcagtgagagatgatggagtggctaggaagcacta

SEQ ID NO: 65907 - DNA, 600 bp, Chicken  19866894333543_5
tatgatgtagtaattgtaatttgggatgtttgacagtgatctgatagtagggtacgtcgtggctttaaggttaccttcctgtaaaaaatacagaaacaaaatatgctaaatttgtggtgyctgggaaggagatgtgtgttttgtggacttgtgcggagagatgtcaactgaatctgataccatctcaatgacaaatctgtctgagggatcctgaaagcttttctagctgtctgctactcagtgtggtcattcctatgagttcctatttcaatcagcaagctgagtgtccattaacaataycacgccagagataaagacttcagaactctccctttctagcaggtccctgagatgagaactgagaagaatggaaggttggaagaatgcagtgagagatgatggagtggctaggaagcactatttgctttgagaggcagcagttggtgctgatggaatgacccatgttggtgatcagagtgcgtgttcagagaatgtgggctttttttgttcttgtctcattccagacttaaactctcatgatatccgagatgtcttgaacatcctttcgtgaaataccctcaagcactgaattgctgcagc

SEQ ID NO: 65908 - DNA, 600 bp, Chicken  19866894333544_1
aaggacaacgggtgagcagaggttgccaccctaccgtggcagtgggagcctttgatgcctgcaagaggcagagccccggcgccggctccttcagcaccatgacaaatgtcagcatcccctggtatatcagcagccaggaaaatatgcgatttaatttagtgctgatagtcctgctatttattatgttttctcccatctcttccactatcctgcacaattttattagggagaaaaatgacaggcaatgttattgcttttattataaatgcatttgctctcgcattcagcttgttggtttgktttttttttccccctctctggtttgatgttacccttttctcctygctctcatgctggtaatgcctgcctcagcagtcctgggatgttgggagatgcattagcgagccttcaggagatgcgttgttgtggaaaccaccagggggatgaaagccctgcaatgggaaaccgctcatttagggcacggggacgtgatggggttctgtctcctctcccaggtgccgcgttcgtgtcatcgataccttcgggacggagccagcctacaaccacgaggaatacgccacgctgcgcggcttccgcacc

SEQ ID NO: 65909 - DNA, 600 bp, Chicken  19866894333544_2
ggagcctttgatgcctgcaagaggcagagccccggcgccggctccttcagcaccatgacaaatgtcagcatcccctggtatatcagcagccaggaaaatatgcgatttaatttagtgctgatagtcctgctatttattatgttttctcccatctcttccactatcctgcacaattttattagggagaaaaatgacaggcaatgttattgcttttattataaatgcatttgctctcgcattcagcttgttggtttgktttttttttccccctctctggtttgatgttacccttttctcctygctctcatgctggtaatgcctgcctcagcagtcctgggatgttgggagatgcattagcgagccttcaggagatgcgttgttgtggaaaccaccagggggatgaaagccctgcaatgggaaaccgctcatttagggcacggggacgtgatggggttctgtctcctctcccaggtgccgcgttcgtgtcatcgataccttcgggacggagccagcctacaaccacgaggaatacgccacgctgcgcggcttccgcaccaactggggctactggaacctgcacccctcccagttcatgaccat

SEQ ID NO: 65910 - DNA, 600 bp, Chicken  19866894333544_3
tcctgggatgttgggagatgcattagcgagccttcaggagatgcgttgttgtggaaaccaccagggggatgaaagccctgcaatgggaaaccgctcatttagggcacggggacgtgatggggttctgtctcctctcccaggtgccgcgttcgtgtcatcgataccttcgggacggagccagcctacaaccacgaggaatacgccacgctgcgcggcttccgcaccaactggggctactggaacctgcacccctcccagttcatgaccatgttccgtaagcacggccatagggacgcagcrgggccattactgkgggctcaggcgctttgctggcgtttcacaccgcctctcctccaagctctggagccgcggtcccagctgtgtccatctgttcttggtgtccgcagcgcacaccccggacaattccttcatgggcttcgtgtcggaggagctcaaccagaccgagaggcagcgcatcaaatccaacaaagtgggcagcatggcggtggtgtacgggaaggaggccagcatctggaaggtgggtgactgcgggcgccggagctcccagcatgtcctggtcccatacatagagggcgtctc

SEQ ID NO: 65911 - DNA, 600 bp, Chicken  19866894333544_4
ggagatgcattagcgagccttcaggagatgcgttgttgtggaaaccaccagggggatgaaagccctgcaatgggaaaccgctcatttagggcacggggacgtgatggggttctgtctcctctcccaggtgccgcgttcgtgtcatcgataccttcgggacggagccagcctacaaccacgaggaatacgccacgctgcgcggcttccgcaccaactggggctactggaacctgcacccctcccagttcatgaccatgttccgtaagcacggccatagggacgcagcrgggccattactgkgggctcaggcgctttgctggcgtttcacaccgcctctcctccaagctctggagccgcggtcccagctgtgtccatctgttcttggtgtccgcagcgcacaccccggacaattccttcatgggcttcgtgtcggaggagctcaaccagaccgagaggcagcgcatcaaatccaacaaagtgggcagcatggcggtggtgtacgggaaggaggccagcatctggaaggtgggtgactgcgggcgccggagctcccagcatgtcctggtcccatacatagagggcgtctctcattctcatcca

SEQ ID NO: 65912 - DNA, 599 bp, Chicken  19866894333552_1
  misc_feature (1)..(11): n is any nucleotide
nnnnnnnnnnnctctgcgcgatcaatttgggagtggaaaaaaaaatcagcacttccctgggaagcgagagggctgagcaggcagaaagagccgggattgatccctccccgaagagaaagggatgaaaaatagccctaaaaatagatgtgcaaatgtcaccgctgtgaaatcctaaagcgaaggcgaaaggccccacaggggccgggatgatcctaagggagacatcgctgctgagggatggagcacacagagcagagcgctgcgctatggggcagcagcccccggtgtcccacagctgartatggagtgccaccaaccccaggtgtcccatacctgactatggagaaaccgccaaccccaaacgtcctatagctagctatggggggcatcgtttgtctggcaccmccagatgtcctatagcttgytatggagcgccaccaaccccagatgtcccacagctggctatggggggcatcatttgtctgctacccccagatatctcagagctgaatgtggagagaccaccaaccccagatgtcccagagctgcctatgggtgccaccaaccccaggtgtcccagaaccagctgtggagagacc

SEQ ID NO: 65913 - DNA, 600 bp, Chicken  19866894333552_2
ccccgaagagaaagggatgaaaaatagccctaaaaatagatgtgcaaatgtcaccgctgtgaaatcctaaagcgaaggcgaaaggccccacaggggccgggatgatcctaagggagacatcgctgctgagggatggagcacacagagcagagcgctgcgctatggggcagcagcccccggtgtcccacagctgartatggagtgccaccaaccccaggtgtcccatacctgactatggagaaaccgccaaccccaaacgtcctatagctagctatggggggcatcgtttgtctggcaccmccagatgtcctatagcttgytatggagcgccaccaaccccagatgtcccacagctggctatggggggcatcatttgtctgctacccccagatatctcagagctgaatgtggagagaccaccaaccccagatgtcccagagctgcctatgggtgccaccaaccccaggtgtcccagaaccagctgtggagagaccaccgaccccaaacaccctacagctagctatggggggccaccatctgtctgccgcccccagatgtcccatagcttgctacggggtgccaccaaccccaggtgtccca

SEQ ID NO: 65914 - DNA, 587 bp, Chicken  19866894333552_3
aaaatagccctaaaaatagatgtgcaaatgtcaccgctgtgaaatcctaaagcgaaggcgaaaggccccacaggggccgggatgatcctaagggagacatcgctgctgagggatggagcacacagagcagagcgctgcgctatggggcagcagcccccggtgtcccacagctgartatggagtgccaccaaccccaggtgtcccatacctgactatggagaaaccgccaaccccaaacgtcctatagctagctatggggggcatcgtttgtctggcaccmccagatgtcctatagcttgytatggagcgccaccaaccccagatgtcccacagctggctatggggggcatcatttgtctgctacccccagatatctcagagctgaatgtggagagaccaccaaccccagatgtcccagagctgcctatgggtgccaccaaccccaggtgtcccagaaccagctgtggagagaccaccgaccccaaacaccctacagctagctatggggggccaccatctgtctgccgcccccagatgtcccatagcttgctacggggtgccaccaaccccaggtgtcccagaaccag

SEQ ID NO: 65915 - DNA, 600 bp, Chicken  19866894333556_1
gcatggaactaagcagagtaacagttggcaggtatgtgcaattaaaaggctagatgctaccagcagaattgcacaaggagcataaatctctctcttcctgaacagaagcacttgctgggattgctctatcatcacactaatctgcacaaagctagtagtagttgaacatcctttgaggcctctataaaattaaccactggacaactgctttgtcagtaacttagagaactgtttagcctagtgccccaaaagggacaaattcctgaagtccctcattagagaggcgtttatatacactaygatgtactcagagtggaagtcacataactgagctttttaaagtctraaaatagaatttcagtagttcacaaagaagtctctattcatgctgataaagactgcatactaaatactcaaggagtaacaataatatgaagtattaactttagcatcagaaacagtttctttctttaactgaaaagagttaaatttctacaaaataactacaattaaagckactgaagcaggctatttcatttccaaactatttcctgtataatacaacaatatatcagcactgacttatatctagacatgaac

SEQ ID NO: 65916 - DNA, 600 bp, Chicken  19866894333556_2
aggctagatgctaccagcagaattgcacaaggagcataaatctctctcttcctgaacagaagcacttgctgggattgctctatcatcacactaatctgcacaaagctagtagtagttgaacatcctttgaggcctctataaaattaaccactggacaactgctttgtcagtaacttagagaactgtttagcctagtgccccaaaagggacaaattcctgaagtccctcattagagaggcgtttatatacactaygatgtactcagagtggaagtcacataactgagctttttaaagtctraaaatagaatttcagtagttcacaaagaagtctctattcatgctgataaagactgcatactaaatactcaaggagtaacaataatatgaagtattaactttagcatcagaaacagtttctttctttaactgaaaagagttaaatttctacaaaataactacaattaaagckactgaagcaggctatttcatttccaaactatttcctgtataatacaacaatatatcagcactgacttatatctagacatgaacagaaaagattcatcaactccttcctgttatgggtctgtcttatgac

SEQ ID NO: 65917 - DNA, 600 bp, Chicken  19866894333556_3
aacttagagaactgtttagcctagtgccccaaaagggacaaattcctgaagtccctcattagagaggcgtttatatacactaygatgtactcagagtggaagtcacataactgagctttttaaagtctraaaatagaatttcagtagttcacaaagaagtctctattcatgctgataaagactgcatactaaatactcaaggagtaacaataatatgaagtattaactttagcatcagaaacagtttctttctttaactgaaaagagttaaatttctacaaaataactacaattaaagckactgaagcaggctatttcatttccaaactatttcctgtataatacaacaatatatcagcactgacttatatctagacatgaacagaaaagattcatcaactccttcctgttatgggtctgtcttatgacttgtttggtttatctattctggttgggaagctatttcagaatcccagtgtctgctgactaagtaactccttctggatttaagaggatacttgtagagaaaggcaccaacatacggcagcaccagccaacatagcactatttatacggttaacactggaagcaatttaagca

SEQ ID NO: 65918 - DNA, 600 bp, Chicken  19866894333558_1
tctacgataggatcatagaatcaccaaggttggaaaagacctccaaagatgagccagtccaaccgtcccctgtatgacaatccctgaagcacagtgtcttgttctaatgcctttcggtgtgaatcatccttttctagcgctgttggcaccttgcagcaattcattaagcctattatccctcatcctaaccactgtgatcacatagaacagacacaaccccatctcatgacactcatcccttctctgtactaaccagtacttctctttttactacagactgttttctagccctcaaatctytactttgggatctctgcccagttatcccattacctttcttgaggtgtgttgccccagactggacagaagacttcagcagaagctgtaacagacccaactggagggagaggactcacaaactgatctcagtggtgtcagcaagatgaatttcctcctgagctttccttctccaccctgagttgtcccaagttcttgctctcaatgctggcagacgtctgtttgttttggtacctgagttatctgtgctgtctcagcttccctrcaagtcaaaaagaaaagcttccatatccactttacctc

SEQ ID NO: 65919 - DNA, 523 bp, Chicken  19866894333558_2
tctttttactacagactgttttctagccctcaaatctytactttgggatctctgcccagttatcccattacctttcttgaggtgtgttgccccagactggacagaagacttcagcagaagctgtaacagacccaactggagggagaggactcacaaactgatctcagtggtgtcagcaagatgaatttcctcctgagctttccttctccaccctgagttgtcccaagttcttgctctcaatgctggcagacgtctgtttgttttggtacctgagttatctgtgctgtctcagcttccctrcaagtcaaaaagaaaagcttccatatccactttacctcctatttagctatttttggacaaggggcacatgcagagtaagtggaaaacactcaatgtgtttggaagccaatttatagctcagcaaaagaaaagaaagggacaagggtattttataaaatagtggagggcactactgcactttttcagtttaaacctaaacctttcttttggaattgcttagggg

SEQ ID NO: 65920 - DNA, 600 bp, Chicken  19866894333564_1
ttatctgcagagcaactttctgttttcttttctctcttcatttccataaacaatatgcacaattctcggagccattcagtcagcaaataaaggcagagggctaagtaaatttgcttcacaccaattatttttgtgaggtcaccaagttaagcattaaagaatactgctgcggatgagcactcgggaacagtatgactgtggtatgaactgcacaaagcactcagtgcccggcagaacacgacatttattgggaagctttgttccaggagctaacagaacaataatccttttcttttaacmactccgcattactcatttccccacgtaacccagctgcactgtaagccacttttgtaagtcacaccataggagagaaagcgaaagatgtgtgatttcagggggaaaaaaaaggattgctcagttccatcgcgggatgttttgtttctgtgcacagcgtgagggtgagcagtcgtcaaattattgtgctgtgtttttatgcaaataaaattacagaaggagagaacatttttaaacaatcagaagccaaatgaggagccaagaatccagctgctgcaaatttgcatggctgtattgtcacac

SEQ ID NO: 65921 - DNA, 599 bp, Chicken  19866894333567_1
  misc_feature (1)..(188): n is any nucleotide
nnnnnnnnnnnnnnnnnnnnnnnnnnnnnnnnnnnnnnnnnnnnnnnnnnnnnnnnnnnnnnnnnnnnnnnnnnnnnnnnnnnnnnnnnnnnnnnnnnnnnnnnnnnnnnnnnnnnnnnnnnnnnnnnnnnnnnnnnnnnnnnnnnnnnnnnnnnnnnnnnnnnnnnnnnnnnnnnnnnnnnnnnnnncttcttcctcttgctccggatgctgaggagctgctcccgcagcagggccgtgttcaggttcagccagcaggaagccttccctgcgttgcggggacagcgtggggctcctggsgtccccatggcaccaacgcaggtccccgtggcaccccacgccacccccctgcccgtgggcacccaccagatgtgatcctgcgggacacagcagcctcctcaaacctcgtgcagctcagctgctcatccaggtcctccaggagctgcggatgggcgacagccatcagggacacgcatgtcatataccctgggcagccccatagcgttggggacacagagaccccaacccatggcagtgggaccacgtaggggacagctcacccggggcttcaccagcagcttcccggtgacggtgaacat

SEQ ID NO: 65922 - DNA, 599 bp, Chicken  19866894333567_2
  misc_feature (1)..(138): n is any nucleotide
nnnnnnnnnnnnnnnnnnnnnnnnnnnnnnnnnnnnnnnnnnnnnnnnnnnnnnnnnnnnnnnnnnnnnnnnnnnnnnnnnnnnnnnnnnnnnnnnnnnnnnnnnnnnnnnnnnnnnnnnnnnnnnnnnnnnnnnnnncttcttcctcttgctccggatgctgaggagctgctcccgcagcagggccgtgttcaggttcagccagcaggaagccttccctgcgttgcggggacagcgtggggctcctggsgtccccatggcaccaacgcaggtccccgtggcaccccacgccaccccccsgcccgtgggcacccaccagatgtgatcctgcgggacacagcagcctcctcaaacctcgtgcagctcagctgctcatccaggtcctccaggagctgcggatgggcgacagccatcagggacacgcatgtcatataccctgggcagccccatagcgttggggacacagagaccccaacccatggcagtgggaccacgtaggggacagctcacccggggcttcaccagcagcttcccggtgacggtgaacatggtggagaggccaaacggggtgcacactgcgggggagagcaggggggtga

SEQ ID NO: 65923 - DNA, 600 bp, Chicken  19866894333569_1
gcagtgtgcccaaatcacaaccaagatcagggctggagaatcacaagcaaagccttagtcccccagcattaacgaggcttttgccaccttgtttgggagttggtgcaccagctgcaaataccctttgctttgcatgcctgggaaataaagcccctggttcagggcccagctgcaggcatggccaggtgatgtgagtcactgggatgaggagctgtatccactggcagctcgggggctgagtcaaggaggtgagggtctgcctctgtggtcagcagcaggcagcagaggtgtgtggtgagrataatctatttgtgatgaagaaagtgctgtgttactgtcaagcttgtgttctgatgagcagagattcctttctttttccccatgctcatagctccttgtccaaaaggcrtcgtgcttacagcccagtggtgaagcaatgctggaaaacgtgagagaagtggggcttgctatttctctgagctgcagacaggagactgaatgcaggggtgagtgggggcagacttaacatttgcctttacaggttacaggtgctacttcccactgtggagatgctgtcctgttgagtgtgtactgaaaaat

SEQ ID NO: 65924 - DNA, 600 bp, Chicken  19866894333569_2
agctgcaaataccctttgctttgcatgcctgggaaataaagcccctggttcagggcccagctgcaggcatggccaggtgatgtgagtcactgggatgaggagctgtatccactggcagctcgggggctgagtcaaggaggtgagggtctgcctctgtggtcagcagcaggcagcagaggtgtgtggtgagrataatctatttgtgatgaagaaagtgctgtgttactgtcaagcttgtgttctgatgagcagagattcctttctttttccccatgctcatagctccttgtccaaaaggcrtcgtgcttacagcccagtggtgaagcaatgctggaaaacgtgagagaagtggggcttgctatttctctgagctgcagacaggagactgaatgcaggggtgagtgggggcagacttaacatttgcctttacaggttacaggtgctacttcccactgtggagatgctgtcctgttgagtgtgtactgaaaaataaaatcaagagggaaaagaaaattcaacactgtattgtgctatattgttgtaggtctgtccctgcaagttgtaagggaactgttacagtactctcggtctttctcttgt

SEQ ID NO: 65925 - DNA, 600 bp, Chicken  19866894333573_1
ttaagagactaattcatacactgctagaaacaaattcagatagatagcatctgaaatatccccttttaatgaagatgtgtgattattattcaagctaaaaagcaaaaagattaattttaaaagcatcacttgattataacaagttgaaaataaagtgttgtgataaaggaataaagatgctaagtcatttttttgagcatgcctttgttctgcagatagagctttgtgtcttcaaatatatgactgtaatgcaacaaggcacatttctgaatgggtagtaattttccactgcaggatacrgtcatgctgagatttagtgttaaaaaaaaagaaagaaagaaagaaaaaaatgatcgcaaaggtatttaatgtttcaaaactgcccccttttcctcaatccttgatacagataaattgtcatatttgttaaaacccagcccaaatgatgtacagtcaatacaataaacaatcccatctccagtagagacgagcaaaagaatttctcagataaagaagcaacctttttgttgtttctgcaaaagagtgaaaaaatcacttggctcctctttgtgacttttacttaacagaacacaaagctgc

SEQ ID NO: 65926 - DNA, 599 bp, Chicken  19866894333574_1
  misc_feature (1)..(126): n is any nucleotide
nnnnnnnnnnnnnnnnnnnnnnnnnnnnnnnnnnnnnnnnnnnnnnnnnnnnnnnnnnnnnnnnnnnnnnnnnnnnnnnnnnnnnnnnnnnnnnnnnnnnnnnnnnnnnnnnnnnnnnnnnnnnnnaaatcattcgtttgttccaaagcatatggaattatttctccaccagctgcctataaacatgcaaagacaggaggtattgaagaagcaaggtgttggggatgccagcctctgggcaaactatccaggatttggccaatgatttaaagatagcatcacagtgtccatgaaattgcrgtggtttaaattcttaaagacagtatcctgggcttggctttttactgttcattttacaattctgtttataacttatatgacacaatcaaatggaaaactcatgagatagtagctaacaatgacctcagtgttggttctcaaggtgaagttgtcataaaaaggaacatgcggatatgccgcccaggtgaagatgctccctccacatctgcctttcagttcacacaccagcattttagcccaaatccactttcattgggcaggagagacactcaagcatggtgacacctgraattgcagct

SEQ ID NO: 65927 - DNA, 570 bp, Chicken  19866894333574_2
atgaaattgcrgtggtttaaattcttaaagacagtatcctgggcttggctttttactgttcattttacaattctgtttataacttatatgacacaatcaaatggaaaactcatgagatagtagctaacaatgacctcagtgttggttctcaaggtgaagttgtcataaaaaggaacatgcggatatgccgcccaggtgaagatgctccctccacatctgcctttcagttcacacaccagcattttagcccaaatccactttcattgggcaggagagacactcaagcatggtgacacctgraattgcagctacaaggtttgtcagagaccaagtgtcagtggtccacatttcacagtgcccctttcgtgtagctgaatggcrttgtstccttttcacaggtttaggttggatatcaggacaaacttctttacagaaagggttgttaagcactggaataggctccccagggaggtgattgagtcaccatccctggatgtgtttaaaaactgtttggatgtggtacccagggacatatttagcagagggttgttagagttagggtagtatagt

SEQ ID NO: 65928 - DNA, 489 bp, Chicken  19866894333574_3
acttatatgacacaatcaaatggaaaactcatgagatagtagctaacaatgacctcagtgttggttctcaaggtgaagttgtcataaaaaggaacatgcggatatgccgcccaggtgaagatgctccctccacatctgcctttcagttcacacaccagcattttagcccaaatccactttcattgggcaggagagacactcaagcatggtgacacctgraattgcagctacaaggtttgtcagagaccaagtgtcagtggtccacatttcacagtgcccctttcgtgtagctgaatggcrttgtstccttttcacaggtttaggttggatatcaggacaaacttctttacagaaagggttgttaagcactggaataggctccccagggaggtgattgagtcaccatccctggatgtgtttaaaaactgtttggatgtggtacccagggacatatttagcagagggttgttagagttagggtagtatagt

SEQ ID NO: 65929 - DNA, 484 bp, Chicken  19866894333574_4
tatgacacaatcaaatggaaaactcatgagatagtagctaacaatgacctcagtgttggttctcaaggtgaagttgtcataaaaaggaacatgcggatatgccgcccaggtgaagatgctccctccacatctgcctttcagttcacacaccagcattttagcccaaatccactttcattgggcaggagagacactcaagcatggtgacacctgraattgcagctacaaggtttgtcagagaccaagtgtcagtggtccacatttcacagtgcccctttcgtgtagctgaatggcrttgtstccttttcacaggtttaggttggatatcaggacaaacttctttacagaaagggttgttaagcactggaataggctccccagggaggtgattgagtcaccatccctggatgtgtttaaaaactgtttggatgtggtacccagggacatatttagcagagggttgttagagttagggtagtatagt

SEQ ID NO: 65930 - DNA, 600 bp, Chicken  19866894333575_1
acataacaaatgaataaaacaaagtgtgcagaaactgtcaaatctaatgctgttagaaattatatacaaagcgttcctttgaattgggattaatattcagtgtggagcctgaggctgtgtttaagaaggactgcgttcagaacctgtccatgaagtgcttcctggccatgtccacggatgccacttgccctagggactcttgctgctgtgcctggcacccagagtgccttgtgttattactcctgtgcttttccattccagtgggtgcatgaacaatgtccatcagctccaatcctgctraaatttatctgcactgagtggcagtgccgctgaggctgcagtggctgtatcctatgtatctgttaatgcatttgaggcaaggttgccctcaaagtttctagtttcctatggaaaccagcttgtgtgatcacactgtgtgtgcctgcctgttcactgttctctaactcctcttccttctccccagcttcctctgcttttactaatgcgatggctgttgttctggccccttcctgcagacgtcactgagatttcagatacacctagagaacaacaggccttataagaccagactgctgaggg

SEQ ID NO: 65931 - DNA, 600 bp, Chicken  19866894333580_1
ctcattatccctgagttcagcaatctaaaattaagaatgtagtccaggttagtaatttagggtcttgcagtggttgatagagagatatagcacttctggagagtttcatctcatactaaaatgggtttttgaagtagatagaattaatcattatctggcagtggctatcattttttctgtttcttatagaagcttaagcagtgccttaggtgcgtggtcctaaacctagcttctaggcaggctacttcagctgaagttcccttcactagcaatgccagcctctaagtaccatgtgagaargacctactgatatcaacctgatggcatgtagatcagggcaaagctgcaggtctcacagcatggattcctccaaagctctcatgtgccacatggacagccaacatctctgctgcctgctcaagtcccaggatgaaaacccatgatttcattaagaaagtccttccctttcgaaggttcacccacatggctctgctctggcctaaattttccccctggtgcctggactactaccaggcagtgtgacccaggagtgtcgcagccatgtagtgtgtcccaacttgcgcctacctagagtttgct

SEQ ID NO: 65932 - DNA, 599 bp, Chicken  19866894333585_1
  misc_feature (1)..(50): n is any nucleotide
nnnnnnnnnnnnnnnnnnnnnnnnnnnnnnnnnnnnnnnnnnnnnnnnnncatgtgcctcaccaccctatgagtaaagaaagtaaagagtttctgaagatatttcccattctagctctatgcatggacttgctaggcatgactgatctagcatgaaaacaaacaaaccaaaaatcagaatgaggagaggcatcaagaaaatcaccttttttttttgatggccttggaagttaagtaaatgctaatttgtgtgcaatgttctttgtccagaggcaatcccagtttgccaattattaatatygcttttgattagttcagcaaatctcaaagggtatatgctgaattaataatgagctttaggcattagcaggatgtgtgaagatgttgctgaacagtggatgagtaatccgatagagtatatttgtagaaaagcagtataaattagaaaaaygttaaaatgccctatattttaatgacttggataatttggggcacttgtatttgaagatcatgcatttttctaasatggtgaaaagatgtacatttaaaactgctaaaaaaagccccaggtagctaggttatctttttacttttgcattt

SEQ ID NO: 65933 - DNA, 600 bp, Chicken  19866894333585_2
catgaaaacaaacaaaccaaaaatcagaatgaggagaggcatcaagaaaatcaccttttttttttgatggccttggaagttaagtaaatgctaatttgtgtgcaatgttctttgtccagaggcaatcccagtttgccaattattaatatygcttttgattagttcagcaaatctcaaagggtatatgctgaattaataatgagctttaggcattagcaggatgtgtgaagatgttgctgaacagtggatgagtaatccgatagagtatatttgtagaaaagcagtataaattagaaaaaygttaaaatgccctatattttaatgacttggataatttggggcacttgtatttgaagatcatgcatttttctaasatggtgaaaagatgtacatttaaaactgctaaaaaaagccccaggtagctaggttatctttttacttttgcatttaaatgatctattgacactaacattgtaagcaaacacaatgactaatattttccactggtgccaatttatcaatacatgtgttttttttcttctcagtaacctataccagtttattgcattgtttcatgtgggacagtgtatcacacctata

SEQ ID NO: 65934 - DNA, 600 bp, Chicken  19866894333585_3
ggaagttaagtaaatgctaatttgtgtgcaatgttctttgtccagaggcaatcccagtttgccaattattaatatygcttttgattagttcagcaaatctcaaagggtatatgctgaattaataatgagctttaggcattagcaggatgtgtgaagatgttgctgaacagtggatgagtaatccgatagagtatatttgtagaaaagcagtataaattagaaaaaygttaaaatgccctatattttaatgacttggataatttggggcacttgtatttgaagatcatgcatttttctaasatggtgaaaagatgtacatttaaaactgctaaaaaaagccccaggtagctaggttatctttttacttttgcatttaaatgatctattgacactaacattgtaagcaaacacaatgactaatattttccactggtgccaatttatcaatacatgtgttttttttcttctcagtaacctataccagtttattgcattgtttcatgtgggacagtgtatcacacctatagaggatggcagttctccaccacaggaaatgtttggggttaaactgcaagaataattaaattgtataatcaaaca

SEQ ID NO: 65935 - DNA, 600 bp, Chicken  19866894333606_1
actacgttatcacacatccttttgtgccatattgttctggagtctacattttaagaagttgaagcacataagagccatcaagcaagagccactggacaagctgtggcttaacattcatcctgcagggtgaaggttaggaatggtctgcctattctagcacgtcgaacaagctcaagaagcaacctaagctaaaatactgacagagtaaacaaaaatttgatcatacaaggctctttagattagcagtcaaagcttaatgaagccctacatctagacaaatcgtagttagaaaactgtccygattcctaagcagcaagagctgttagccattttaaacacaacttaatggcatgctctattactttgaaaattcaaatggtgtatttgaacaaaaatattctagcttaatcataggttttaggcttgtactttgaattaatcccaggcatgcctgtgaagatgacagtatttgctcagagaaacccctattcaccttaaattctacacatctgtttgctactctgaagggtttcagatagtagcccagccccttcatcaacctatgtaaattatctccacctgcattattttcagttgatc

SEQ ID NO: 65936 - DNA, 600 bp, Chicken  19866894333617_1
atttgaattaataactccgtagcagcttatctggtatatggagaatcaattttcataaaacaggcaaaatggcaattatttgatcagacagattaaagttagatttgtttaagacaagaactggagctgcagctcatactgatacgtgtctcatcagtagttcagtaacaaatattttataccttcctgtttcctctgacttttgaggaccttatcagctgtagctgtttgcacatttttgtgtgtttagctgtttcagttttactttcaggaacaagatatcatagtagttccatgaaycaagggaaattgttttcctggaaaaaaacaacaaccaaccaaccaagagaactgaatactgtatcacaaaacggtttaaccaaattatgttgtttggggtttttttttttaaggtactagtaaatccagatcttctatgcaactatatcattttctgaatattcagactcatttgattcatggggaaataaaatgactgtatggaaaagcaaagtgcaaataattcactatgaatttcacatttccacatctgagttagtcactgatgatttttttctcatccaatcaaatgaattttaa

SEQ ID NO: 65937 - DNA, 600 bp, Chicken  19866894333621_1
acagtgcaaaacgaacaaacagccaagcataagctgacacctaggagttcaagagatgaaaagtaccaagaaattgccaagggtttctcagctctaagctctcaacaggatatccacacgtagctgtaagcactggttttcagatgtggagagacagaagagactccagtcatgcaaagtgaccaagggagtcagccctttgaggaaagactggattagctggggggcgtaggcaggttagggaagagagagctgggaagagtcttggtaaccctctgtaaatatgtataaaaagaaaawaaataaattaaaaaaagaagagccacaaagcagaaaagacttagctggtctggcctggaggagagcagaactctgcctgctctgagtcacctctccattagcatttccaaagactgagcagtcctcaccayacttsaaaaagaactcaaggctacatgakgatgatgtactccaaaaagaacttcaccayacagaattataaatctccaaggttggaaaagaccttgaagaccatccagaccaactgctcacctatcaccagtacttcccactaaaccatgtccctcagtacaacatcta

SEQ ID NO: 65938 - DNA, 600 bp, Chicken  19866894333621_2
actggttttcagatgtggagagacagaagagactccagtcatgcaaagtgaccaagggagtcagccctttgaggaaagactggattagctggggggcgtaggcaggttagggaagagagagctgggaagagtcttggtaaccctctgtaaatatgtataaaaagaaaawaaataaattaaaaaaagaagagccacaaagcagaaaagacttagctggtctggcctggaggagagcagaactctgcctgctctgagtcacctctccattagcatttccaaagactgagcagtcctcaccayacttsaaaaagaactcaaggctacatgakgatgatgtactccaaaaagaacttcaccayacagaattataaatctccaaggttggaaaagaccttgaagaccatccagaccaactgctcacctatcaccagtacttcccactaaaccatgtccctcagtacaacatctacatgtttctggaacatctgaggatggcctttgcctggctggccaaaataacataccagatgctcagaaagaagcatccagaggaatggaagagttgctccttttgcttactgtgctgcaggtcagtaagaa

SEQ ID NO: 65939 - DNA, 600 bp, Chicken  19866894333621_3
ttttcagatgtggagagacagaagagactccagtcatgcaaagtgaccaagggagtcagccctttgaggaaagactggattagctggggggcgtaggcaggttagggaagagagagctgggaagagtcttggtaaccctctgtaaatatgtataaaaagaaaawaaataaattaaaaaaagaagagccacaaagcagaaaagacttagctggtctggcctggaggagagcagaactctgcctgctctgagtcacctctccattagcatttccaaagactgagcagtcctcaccayacttsaaaaagaactcaaggctacatgakgatgatgtactccaaaaagaacttcaccayacagaattataaatctccaaggttggaaaagaccttgaagaccatccagaccaactgctcacctatcaccagtacttcccactaaaccatgtccctcagtacaacatctacatgtttctggaacatctgaggatggcctttgcctggctggccaaaataacataccagatgctcagaaagaagcatccagaggaatggaagagttgctccttttgcttactgtgctgcaggtcagtaagaaaagcc

SEQ ID NO: 65940 - DNA, 600 bp, Chicken  19866894333621_4
agactccagtcatgcaaagtgaccaagggagtcagccctttgaggaaagactggattagctggggggcgtaggcaggttagggaagagagagctgggaagagtcttggtaaccctctgtaaatatgtataaaaagaaaawaaataaattaaaaaaagaagagccacaaagcagaaaagacttagctggtctggcctggaggagagcagaactctgcctgctctgagtcacctctccattagcatttccaaagactgagcagtcctcaccayacttsaaaaagaactcaaggctacatgakgatgatgtactccaaaaagaacttcaccayacagaattataaatctccaaggttggaaaagaccttgaagaccatccagaccaactgctcacctatcaccagtacttcccactaaaccatgtccctcagtacaacatctacatgtttctggaacatctgaggatggcctttgcctggctggccaaaataacataccagatgctcagaaagaagcatccagaggaatggaagagttgctccttttgcttactgtgctgcaggtcagtaagaaaagccactggcccatttctcaacatcagc

SEQ ID NO: 65941 - DNA, 600 bp, Chicken  19866894333621_5
gtcagccctttgaggaaagactggattagctggggggcgtaggcaggttagggaagagagagctgggaagagtcttggtaaccctctgtaaatatgtataaaaagaaaawaaataaattaaaaaaagaagagccacaaagcagaaaagacttagctggtctggcctggaggagagcagaactctgcctgctctgagtcacctctccattagcatttccaaagactgagcagtcctcaccayacttsaaaaagaactcaaggctacatgakgatgatgtactccaaaaagaacttcaccayacagaattataaatctccaaggttggaaaagaccttgaagaccatccagaccaactgctcacctatcaccagtacttcccactaaaccatgtccctcagtacaacatctacatgtttctggaacatctgaggatggcctttgcctggctggccaaaataacataccagatgctcagaaagaagcatccagaggaatggaagagttgctccttttgcttactgtgctgcaggtcagtaagaaaagccactggcccatttctcaacatcagcagtggccaaacctgacctcatccacacaga

SEQ ID NO: 65942 - DNA, 600 bp, Chicken  19866894333621_6
gcttactgtgctgcaggtcagtaagaaaagccactggcccatttctcaacatcagcagtggccaaacctgacctcatccacacagaatgacagaactgcagggcttggaagggacatctagagatcatagtctgatccccctgctaaagcgggttccctacagcaggtgacacagctgggcatccactcactggcttatttattggaaagaaattcagcagtaggagtgccttgaccaagcactgtcaggcagcacatgtagctctgggatgcaaaggtccctgagagaggcagacctcmtagaaggctccagctgcttttactgtgcttggtcgacttactcctttatcttttgttgtgcactgaaaaatgtctccgttagacatctactaagctcacgtcagtgctaattctcccccaggtggcttgctagtcacagcaagataactaaagcaacactcattactttgtgaacaagataaaaagaaatgcagctaaattgtacaaagcagtcactattcgaaatgctttccaagtgcttaagacagaagaaacacctaacctcgacttggaaaggttgtgagcactgttccacagtac

SEQ ID NO: 65943 - DNA, 599 bp, Chicken  19866894333622_1
  misc_feature (1)..(7): n is any nucleotide
nnnnnnnaatggatgtggtaaaaaaaggaaatgaaaattctgatccatattcattgtctggctgtcagcgagggagaaataaaagttgcactttacattttgctttgcttcagaaagctgatctgaagttccacagaggaaaaaaaaatgtaatcaaagctgatgaagaagcaaaagaaaatcaaagataattaatagaaacaaagcaagcaccagacacggtgtctaatattaacaaaatacagaacgtgctcaactgcacccagcagtggctctgggcactgacagcattgtaatggrcggatttatgggtggatttctctctcagagcccctagcaccagcctggctgtcaccactgcagtcctgaccaccacaagaccccatccccgcagcagcggggttgagccccaggcacrtacagcattttctgatgacttttttccaaaattttcctcttccccagactgaataaccccagttccctcagctactccccgtaacgcctgtgctccagacccctcacagctttgttgcccttctctggacatgctcagggcctccagctctttcttgtagtgaggggcccaaaactgaacg

SEQ ID NO: 65944 - DNA, 600 bp, Chicken  19866894333622_2
tgatctgaagttccacagaggaaaaaaaaatgtaatcaaagctgatgaagaagcaaaagaaaatcaaagataattaatagaaacaaagcaagcaccagacacggtgtctaatattaacaaaatacagaacgtgctcaactgcacccagcagtggctctgggcactgacagcattgtaatggrcggatttatgggtggatttctctctcagagcccctagcaccagcctggctgtcaccactgcagtcctgaccaccacaagaccccatccccgcagcagcggggttgagccccaggcacrtacagcattttctgatgacttttttccaaaattttcctcttccccagactgaataaccccagttccctcagctactccccgtaacgcctgtgctccagacccctcacagctttgttgcccttctctggacatgctcagggcctccagctctttcttgtagtgaggggcccaaaactgaacgcagcactcaagatgcggcctcaccagtgcggaatacagagggacgatcacctcctgctcctgctggctgcactacagctgatacaagccaggatggcaccggctttcttagcctcctgg

SEQ ID NO: 65945 - DNA, 599 bp, Chicken  19866894333626_1
  misc_feature (1)..(227): n is any nucleotide
nnnnnnnnnnnnnnnnnnnnnnnnnnnnnnnnnnnnnnnnnnnnnnnnnnnnnnnnnnnnnnnnnnnnnnnnnnnnnnnnnnnnnnnnnnnnnnnnnnnnnnnnnnnnnnnnnnnnnnnnnnnnnnnnnnnnnnnnnnnnnnnnnnnnnnnnnnnnnnnnnnnnnnnnnnnnnnnnnnnnnnnnnnnnnnnnnnnnnnnnnnnnnnnnnnnnnnnnnnnnnnnnnnnatatgcgtggttgttggcatttaactgataaattcaatatttattgcagccttcttctttgtgcgtatttttkgggggtgtttaatagttggcaatttgctgacagagggctttagtcctttgctaatatctcagaagtgctggagggggaacctgcccagtggcacacaggggaacctacattttgagaggaaatttggcagctgctgaaatagtggaggttgatcacactgcaatatgatactctcagactgcagagcagcagacagtgccaactgagccacaccaacgcagaattcaggccaaatgaaagtctgaaatggagactgtgactggatggagctgctcctatttgaccctaggatgggagtt

SEQ ID NO: 65946 - DNA, 599 bp, Chicken  19866894333631_1
  misc_feature (1)..(181): n is any nucleotide
nnnnnnnnnnnnnnnnnnnnnnnnnnnnnnnnnnnnnnnnnnnnnnnnnnnnnnnnnnnnnnnnnnnnnnnnnnnnnnnnnnnnnnnnnnnnnnnnnnnnnnnnnnnnnnnnnnnnnnnnnnnnnnnnnnnnnnnnnnnnnnnnnnnnnnnnnnnnnnnnnnnnnnnnnnnnnnnnnnnnncgttgtgcttcgctgctctttcagtgacagtgaggagaaggagagcaccaaggacgacaacgtcgcccacctcaacttccagctgaagtacgaggccgacctgctgttcaccaggtgcrgggcagggggacacagagcgggggctctgcatcattgcttgctgccacgcttgaaaaatcagcagtgagaagcaaggagggagctgtgttgtgttgcaattattagtgggagggggaaacagctttctggaggcaatgatgttcctagcaggtgtctgcagccagtgctggggctgtaaagctgcacctgggctggcagctgtgtggcttccattcacctctccaagcagaggagtgtgcatggagagctttgggcatctgctagagcagagcgtgtcctctgtccaaagcaaggaggg

SEQ ID NO: 65947 - DNA, 600 bp, Chicken  19866894333632_1
tagttgaacagtcatctagacagcctacctaatgaatcaagactaaaaggcactcgtgacaataattcactctatcttgagaaaacagctattatcatctggaagaataaccctctgtaaggctttgtttttcattgctgagcaagcacactgcacagctgagataaatactgtttctaagcaaaacagaaatctgcagagagtatggaatggataattcatattttctagattttcagtagtgatatctaagtcatgtatgtgcccagtgcatcagttattttgcctttcaagagctckcctatctgcagattgctggctggacagacagtcctctgataccaaccatgctgctagcaggactgagagccactcagcacaaagctctggctcaagaagtctctaaacctaggactgctgaaaatctagagaacgtgccaaagcaatattacttcaagcttaccatacccttatatattttcccctttgttatttccaatggaccactctcaaaggcagcgtacaggactaaagagacttttggtttgacctagtactgcattctcatgtaggctgtgtaagcaccaccaaattcactgc

SEQ ID NO: 65948 - DNA, 600 bp, Chicken  19866894333635_1
atctgtttgtgaatactattccaaagaggttaattccatatatgtcacatccccacatttacatgaatagcacaattccaagctgaacagttccagctctcagcctctccttctgtgtcagatgttccagccccataatcacgtttgtggcctttgctggccttacagcagtatgtccatgtggctcttttgtcttgggagcacagcactggatactgcatttcagatgttttctgccactgctaagtagaagtaaaggctcttgaatagagagaaggcccttgagctccctaagccacrttaccattacagaaacatcagctagtsagatttcttagtgctgtcctcagccattcaagccaaatagtcaacaactgtgtgatgtacatgcaatcaataagtaaatggctgattcaagtcagtcactcacaaatgccttcctwaaaggcattcctccttatgaggaatgtatgtatctgaatataaacgtatatgtatgggagggataaaggagtgagagtttatgtgtgtgcatacacattcttgtatacgggagagaaagaacgcagcctaatcaaatcctgcagactttggacaagc

SEQ ID NO: 65949 - DNA, 600 bp, Chicken  19866894333635_2
ggttaattccatatatgtcacatccccacatttacatgaatagcacaattccaagctgaacagttccagctctcagcctctccttctgtgtcagatgttccagccccataatcacgtttgtggcctttgctggccttacagcagtatgtccatgtggctcttttgtcttgggagcacagcactggatactgcatttcagatgttttctgccactgctaagtagaagtaaaggctcttgaatagagagaaggcccttgagctccctaagccacrttaccattacagaaacatcagctagtsagatttcttagtgctgtcctcagccattcaagccaaatagtcaacaactgtgtgatgtacatgcaatcaataagtaaatggctgattcaagtcagtcactcacaaatgccttcctwaaaggcattcctccttatgaggaatgtatgtatctgaatataaacgtatatgtatgggagggataaaggagtgagagtttatgtgtgtgcatacacattcttgtatacgggagagaaagaacgcagcctaatcaaatcctgcagactttggacaagctctgtctctgaagactcagataaagag

SEQ ID NO: 65950 - DNA, 600 bp, Chicken  19866894333635_3
tttgtggcctttgctggccttacagcagtatgtccatgtggctcttttgtcttgggagcacagcactggatactgcatttcagatgttttctgccactgctaagtagaagtaaaggctcttgaatagagagaaggcccttgagctccctaagccacrttaccattacagaaacatcagctagtsagatttcttagtgctgtcctcagccattcaagccaaatagtcaacaactgtgtgatgtacatgcaatcaataagtaaatggctgattcaagtcagtcactcacaaatgccttcctwaaaggcattcctccttatgaggaatgtatgtatctgaatataaacgtatatgtatgggagggataaaggagtgagagtttatgtgtgtgcatacacattcttgtatacgggagagaaagaacgcagcctaatcaaatcctgcagactttggacaagctctgtctctgaagactcagataaagagcaccatatgtttgatatgaaagcaaacttgactaccagcacaagccattactcttggcaggctctgaagctactgggaattatgaatcttgatttgcagtcagggaaaatattcaa

SEQ ID NO: 65951 - DNA, 599 bp, Chicken  19866894333637_1
  misc_feature (1)..(135): n is any nucleotide
nnnnnnnnnnnnnnnnnnnnnnnnnnnnnnnnnnnnnnnnnnnnnnnnnnnnnnnnnnnnnnnnnnnnnnnnnnnnnnnnnnnnnnnnnnnnnnnnnnnnnnnnnnnnnnnnnnnnnnnnnnnnnnnnnnnnnnnctctgcttccctctttgtaaagcattattatttctttgctagagttaatgagttaattacttgtaaattgctgtcagattcccagaaatgagaccctcaatgtgtttattgctgttattgctacggatgagatctcaatcatagcaagacaatacaagatgagcrtttcacacagtgtggctaagtgtctgtttacagtaaaacaaagaagggacttctgtgcccaagcctagaaaacatcatttgcaagagttctgagtcagctttaaaatctgattatgtgataaaattggctagcatgtctaaacactgtgcagtatgtaaacactacccactatcacttgtgattatgtttctctgaaaagcttatcagcttgcaggcatccactgctccgtggcagtatgtctgtgggagaggcaaagtgtgtctttttttaaggtagtgtacttgggttatgttttgc

SEQ ID NO: 65952 - DNA, 600 bp, Chicken  19866894333639_1
ctctagataacaatttcctatgtttcttccctgagtaaagagaagtcactgtacccacacaccatgcctgctagcatgattttagtttttaagtagatggcagggctttgtctgtaaaaccacacagtttatacacaacagccacaagtcagcagtaatacatatgtaaggtgaataaacacaatagctgcactgttctacaattccttgtgattgccattttaagatttgaaagagaagcaaatgcaagccatcagcttgcctggcttttgcaattgaactgacacagtacagatactytgaatgagtaactgttattatcagtgggatggaagtacagaccttggaaggtgagttggtttctgaggaagagggaagagcctcagcaagagagatgagcaaactgcaatacaggcaaaacagcatgactaaggggatattttatagagatggtggagggaaatatgatcacctccataatgcaatcaggtactttggtatctttttacttggtagccttcgctgcattttttcccaacactatgagagagatattgagaagaaagaaaaggaaaagaggaatagatatggagcagagct

SEQ ID NO: 65953 - DNA, 600 bp, Chicken  19866894333642_1
gaaatactccgtccgcagctaggccaccatgcctcatcaaaatgggttgggaaggagacaaggagttggcttacatgaagatgtccagtacgtgactggacttggtgctctgatgggcagagccctatgagtgctttagtttgtggttcttacatgtttttttctttcttcttccccacctgtgcagttctacatgacaaccaagctgactcacactgacctcaagccagaaaacatcttgtttgtcaactctgacttcgatactctgtacaacgagaaaaaggtgagctatgcctgaamagaagtgactaaaccaggaacagcctgcctcttccttcctgcagaaatcagatcttccctgttctgtacatgtccygcagagtctgttcagcaagaacaggttggaagtcaggcctctttctcccatgtcttttaagagccttaaggctctgcttcggtggcttcagtccayggcagcagttcagcagctttctgtaacaatgacatgagatgtaaatagctcagagcttcgtagttgtcatcattctggctaagagtgcagattgggcagttccatagacggagggctccttggaaagc

SEQ ID NO: 65954 - DNA, 600 bp, Chicken  19866894333642_2
gaagatgtccagtacgtgactggacttggtgctctgatgggcagagccctatgagtgctttagtttgtggttcttacatgtttttttctttcttcttccccacctgtgcagttctacatgacaaccaagctgactcacactgacctcaagccagaaaacatcttgtttgtcaactctgacttcgatactctgtacaacgagaaaaaggtgagctatgcctgaamagaagtgactaaaccaggaacagcctgcctcttccttcctgcagaaatcagatcttccctgttctgtacatgtccygcagagtctgttcagcaagaacaggttggaagtcaggcctctttctcccatgtcttttaagagccttaaggctctgcttcggtggcttcagtccayggcagcagttcagcagctttctgtaacaatgacatgagatgtaaatagctcagagcttcgtagttgtcatcattctggctaagagtgcagattgggcagttccatagacggagggctccttggaaagcccacctcaatcctcaaccagctattaggagcactgaggacttgtttgcttgcagagctgtgaggagaaatccatcc

SEQ ID NO: 65955 - DNA, 600 bp, Chicken  19866894333642_3
tccccacctgtgcagttctacatgacaaccaagctgactcacactgacctcaagccagaaaacatcttgtttgtcaactctgacttcgatactctgtacaacgagaaaaaggtgagctatgcctgaamagaagtgactaaaccaggaacagcctgcctcttccttcctgcagaaatcagatcttccctgttctgtacatgtccygcagagtctgttcagcaagaacaggttggaagtcaggcctctttctcccatgtcttttaagagccttaaggctctgcttcggtggcttcagtccayggcagcagttcagcagctttctgtaacaatgacatgagatgtaaatagctcagagcttcgtagttgtcatcattctggctaagagtgcagattgggcagttccatagacggagggctccttggaaagcccacctcaatcctcaaccagctattaggagcactgaggacttgtttgcttgcagagctgtgaggagaaatccatccggaacacgagcatccgcgtggcagacttcggaagtgccacctttgatcatgagcaccacaccactatcgtggctacccggcactaccgtcccccag

SEQ ID NO: 65956 - DNA, 600 bp, Chicken  19866894333646_1
agcaaggctgcattcaataatggctgatgtgattattcttgtgtacacgtatagagcaatcctttatccttaactatggcaaaatccataagatgctattgggaagacagggtacagtttcaaaatcattcaagtttaatgtctcattgtatctacattgaaagggaacttaaatttacttcaaaacctttcacaagcactagtagtgtagagagcattgttgcttgcatctaactagttgtgatgcctgctttcctagctgatggagagaataaagagctccaaaaagtatctcatcastatatggtatgtacttttcttagagaagcattaatcaccctcctactagtaactctggggaggtctgcatacctggtgtgaagtagattattgtatttttgcattgttaaattttgaagttttaatgtatagcagcggagttgaggaagaacaggagggtggactgagggactggactacctgttttascaagtaggttggcatgagaaagttctttggtgtctggattttagttcaagttgtaactrctcagtatgcactcagtgtcttactcagagagatttctattacattgtacaa

SEQ ID NO: 65957 - DNA, 600 bp, Chicken  19866894333646_2
ttcacaagcactagtagtgtagagagcattgttgcttgcatctaactagttgtgatgcctgctttcctagctgatggagagaataaagagctccaaaaagtatctcatcastatatggtatgtacttttcttagagaagcattaatcaccctcctactagtaactctggggaggtctgcatacctggtgtgaagtagattattgtatttttgcattgttaaattttgaagttttaatgtatagcagcggagttgaggaagaacaggagggtggactgagggactggactacctgttttascaagtaggttggcatgagaaagttctttggtgtctggattttagttcaagttgtaactrctcagtatgcactcagtgtcttactcagagagatttctattacattgtacaattatatgtatgtatataaacataaatatttttatacrtacatttataattatacatataaatccttttcattaagtgttaagtaaaaggaaggtaggaaggtgcatagatctgcatatactaacctcaccttaacgcatatgcatataatgtacatttttaggtatgtaaagattaaaaaaaaaacctt

SEQ ID NO: 65958 - DNA, 600 bp, Chicken  19866894333646_3
tgctttcctagctgatggagagaataaagagctccaaaaagtatctcatcastatatggtatgtacttttcttagagaagcattaatcaccctcctactagtaactctggggaggtctgcatacctggtgtgaagtagattattgtatttttgcattgttaaattttgaagttttaatgtatagcagcggagttgaggaagaacaggagggtggactgagggactggactacctgttttascaagtaggttggcatgagaaagttctttggtgtctggattttagttcaagttgtaactrctcagtatgcactcagtgtcttactcagagagatttctattacattgtacaattatatgtatgtatataaacataaatatttttatacrtacatttataattatacatataaatccttttcattaagtgttaagtaaaaggaaggtaggaaggtgcatagatctgcatatactaacctcaccttaacgcatatgcatataatgtacatttttaggtatgtaaagattaaaaaaaaaaccttttaaattacagtcttaattcaatttcaagaatataacatatttttcagtgtcaggttaa

SEQ ID NO: 65959 - DNA, 600 bp, Chicken  19866894333646_4
ccctcctactagtaactctggggaggtctgcatacctggtgtgaagtagattattgtatttttgcattgttaaattttgaagttttaatgtatagcagcggagttgaggaagaacaggagggtggactgagggactggactacctgttttascaagtaggttggcatgagaaagttctttggtgtctggattttagttcaagttgtaactrctcagtatgcactcagtgtcttactcagagagatttctattacattgtacaattatatgtatgtatataaacataaatatttttatacrtacatttataattatacatataaatccttttcattaagtgttaagtaaaaggaaggtaggaaggtgcatagatctgcatatactaacctcaccttaacgcatatgcatataatgtacatttttaggtatgtaaagattaaaaaaaaaaccttttaaattacagtcttaattcaatttcaagaatataacatatttttcagtgtcaggttaaacaaagccctagtgattttcttccttattttgcattagactgctcatcttcttaatctttaacaggctactagaatttatttgatcctg

SEQ ID NO: 65960 - DNA, 420 bp, Chicken  19866894333646_5
actaacctcaccttaacgcatatgcatataatgtacatttttaggtatgtaaagattaaaaaaaaaaccttttaaattacagtcttaattcaatttcaagaatataacatatttttcagtgtcaggttaaacaaagccctagtgattttcttccttattttgcattagactgctcatcttcttaatctttaacaggctactagaatttatttgatcctgtttcctgaagcttattcaaggacaccacatgcttcctctctgttacagaaagtatgtggataaaatacaaagccatacaaygaaaaaattataaattccttgtgttctattggcaatcaagcctccagaataatgattagtcttgtttcttctattgcagacaaaaggttcttcaagcatcactccatctggcactcagaa

SEQ ID NO: 65961 - DNA, 600 bp, Chicken  19866894333647_1
ggaaatttttttttcatctttaaaagaaaaagaaatgtaaagtctgggtcttagtcagcactaagattgaatgtatggattaaggacaagaagcagttctacttcatagagcgaatcttgttcaaatctatttcaaattaaattactggttgattcttccattaaaagtccaaaagcactattaggtgcagtgtctataattaatggaaagtaatctgtagatatctaatcacacttctattttaaaaacatgcaaaactaatttcacaaaactaaatgcaaaataacaattgaaatatrtgtcctttagcctctagatgaatttaaataaaaacgtgtattggatctgcacattaataaagcccgttaagctcagtagaatactttatattcatctgtgcttcatcaaccaggttcatgacctctacagaactgcagcagctccctctgttctgaaaaccacatgggggaagatggtaaatattattttgtgattagaaaatgttactggaattgtcatagagaaatattttatgtggagagtgtggttcaggaattaaaacatacactgygggaaaaaatgcagcacgggyaaactat

SEQ ID NO: 65962 - DNA, 600 bp, Chicken  19866894333647_2
ctaaatgcaaaataacaattgaaatatrtgtcctttagcctctagatgaatttaaataaaaacgtgtattggatctgcacattaataaagcccgttaagctcagtagaatactttatattcatctgtgcttcatcaaccaggttcatgacctctacagaactgcagcagctccctctgttctgaaaaccacatgggggaagatggtaaatattattttgtgattagaaaatgttactggaattgtcatagagaaatattttatgtggagagtgtggttcaggaattaaaacatacactgygggaaaaaatgcagcacgggyaaactattcctagtgacaggcaggtaaaatctgagaaacatctatgacattggaaatattgtgtgacacagatatcactgagttcatgcagctatttaagcacctgcataacttaaaccatgtgatgattcgtttttctagataagataacttggatactttaaattaagcagacaattaaatgtctcactcaattggtatcagagaagaatttagctgagtgttttctctccctgtcaaacaaacacatatctaaataaccaaatgtgttaaatctat

SEQ ID NO: 65963 - DNA, 600 bp, Chicken  19866894333647_3
aaatatrtgtcctttagcctctagatgaatttaaataaaaacgtgtattggatctgcacattaataaagcccgttaagctcagtagaatactttatattcatctgtgcttcatcaaccaggttcatgacctctacagaactgcagcagctccctctgttctgaaaaccacatgggggaagatggtaaatattattttgtgattagaaaatgttactggaattgtcatagagaaatattttatgtggagagtgtggttcaggaattaaaacatacactgygggaaaaaatgcagcacgggyaaactattcctagtgacaggcaggtaaaatctgagaaacatctatgacattggaaatattgtgtgacacagatatcactgagttcatgcagctatttaagcacctgcataacttaaaccatgtgatgattcgtttttctagataagataacttggatactttaaattaagcagacaattaaatgtctcactcaattggtatcagagaagaatttagctgagtgttttctctccctgtcaaacaaacacatatctaaataaccaaatgtgttaaatctatgcatcaaaaacatttgataag

SEQ ID NO: 65964 - DNA, 600 bp, Chicken  19866894333656_1
tcaattatccctgctacttaattatttaaaaggctcagtagtgaaaccttttaatgagtcctacatacatctttcacaaagttcatatttaagaagaactttaatatatcatctcttcctaaacatgacctttaagtaagtatatgctgcttgctggcatttactgtttcctaagtacctggatctatcacagtaccactcctttgcttaagacacagtaattttaattactgagatcatcttatgaaatacaaaaccctgtccctgtcagggagaaatataactagtccctctcgtaaycctgacctatgatgatccctactcctctaggtttatyaaatattttattgacagcgggtagcatcattgctaggtgtattccttccctacaatttatggcataattttatatttccctgcaaatgggagacaaaagtacctttgtgtcaatgagcttttcagatccttttcagctgttctactcactgtgtgacaatcagtacatcatgctcttcactttccttaagatgcccagagaataagttcaactgttcacatctgaatggtcctatcactgctacgaatgggtaactgtaaaaa

SEQ ID NO: 65965 - DNA, 600 bp, Chicken  19866894333656_2
gtagtgaaaccttttaatgagtcctacatacatctttcacaaagttcatatttaagaagaactttaatatatcatctcttcctaaacatgacctttaagtaagtatatgctgcttgctggcatttactgtttcctaagtacctggatctatcacagtaccactcctttgcttaagacacagtaattttaattactgagatcatcttatgaaatacaaaaccctgtccctgtcagggagaaatataactagtccctctcgtaaycctgacctatgatgatccctactcctctaggtttatyaaatattttattgacagcgggtagcatcattgctaggtgtattccttccctacaatttatggcataattttatatttccctgcaaatgggagacaaaagtacctttgtgtcaatgagcttttcagatccttttcagctgttctactcactgtgtgacaatcagtacatcatgctcttcactttccttaagatgcccagagaataagttcaactgttcacatctgaatggtcctatcactgctacgaatgggtaactgtaaaaagtttcttgccttaaaaatgttttctcacaactcttga

SEQ ID NO: 65966 - DNA, 563 bp, Chicken  19866894333658_1
aatgcgttaaggttgtcctcaaaaagtgtgtcacaactggatatatcacattaacaatgtggagctgactgaattgcagagctgtttatcagtggtgctcagaaacagccaaggagcttaaggcttagtgccttaaagctgaggtgcataaggaacagaagttgaggtcatttttaataacgatttttttccccttactctggcaaaggctcagtgacagcttttgcctatgctgaaggtttccatctagaaaggtgcttaatattttgaattgtgtattaatacgtagccttctatatkctgcctggtcaaacatatgtgtagctttgtaggtcattttaaataggaaaaccagctttcctttggctttccttacacctggacattatgggcaagtttggtgacctggcataaattgaaagaacaaaacacttcccaggttttcagcaagaaaccattttttttttttcttccctttgccagctagcaatgcaacttctttctagctctgtgtggctgtatatggtcccctttatagcttttcaatagctttgctgtgttgg

SEQ ID NO: 65967 - DNA, 600 bp, Chicken  19866894333660_1
acctcaccgagactcaaccaatcttttttgtttatggcttctatttcctgtatatccttctcattgattgcatttcccagatcttgccacatttagatggacaacaaaaagaggaagaaacaagaggaatccactgcattatacattttgcatgtaacgcataagttgaggttaaccagagcatgagaatggctctctaggaacttagacttctttttacctggaggtgactgagtagaacccaaattaccccaagtttgtcccatgatttgtatggaaatctgacacagctgagaaaawcacgaccaagatcattgcatccagcagcaaaaaacatttaacctttttcttggttatatgacactgagagaagtggtttggtttgggcaccagaactaaggaaagttctgttcctcattctgtgcaaaatcactgtgtactcttgtgcaaggaacattatactgcacttccagaaaagccagaccctggtatttattttccatttattacaataaatggaaatgttggctacccatcattytgaagatcatgactctgtacgtccatttaccttccttaaagtaacttctgttttgttag

SEQ ID NO: 65968 - DNA, 580 bp, Chicken  19866894333660_2
ccaaattaccccaagtttgtcccatgatttgtatggaaatctgacacagctgagaaaawcacgaccaagatcattgcatccagcagcaaaaaacatttaacctttttcttggttatatgacactgagagaagtggtttggtttgggcaccagaactaaggaaagttctgttcctcattctgtgcaaaatcactgtgtactcttgtgcaaggaacattatactgcacttccagaaaagccagaccctggtatttattttccatttattacaataaatggaaatgttggctacccatcattytgaagatcatgactctgtacgtccatttaccttccttaaagtaacttctgttttgttagcatgcaaaaatatattcttgagattatgtgaatttctcaattctcacagaattggtcaatctacattgatgtttttgtagagtcagtgtagttgcatgttaagattttttttaattaatgtaaatcctctgtgttctccaggatcataacatgaattagaagacaaataagcctcagtgacagtagaaggaagagagcagcagtggcacatcaaaaggaca

SEQ ID NO: 65969 - DNA, 600 bp, Chicken  19866894333664_1
ctaattaagcatgatgacaaaatatgaggacttctatgtaattatggcaacgacaccacctgcttctaattaagctgccaaaacatttggtctaaaatggtgcaatgaataaagaaaaaaaaaatctgatattttggcaatgcaacaacaggctggctttcctcacgtaattagttttaacaaagtattgttaatctgttttctgattaatagactatttaatcttatagcactgtgacaagactctgagctgcctctggtttaaatttccaccaaaagagctaacatttctagcacttytaaggatatacttatgtgagaaatgttawagtttcttattattttcattattcttcatgagagccccaaaggttacattctttgaattcactgaactttaaaggcttttattaaactggaagccacaggagaagctgattttttttcctcttcctagttccttgtatggagaagtcactggtatgagtaactggggggagggatgccyagaaaccttacaagctctgcacattctagagtggctggttggttggcataaagtgtcagctctatgggctgctgcratgccctggggtgttc

SEQ ID NO: 65970 - DNA, 600 bp, Chicken  19866894333664_2
acttctatgtaattatggcaacgacaccacctgcttctaattaagctgccaaaacatttggtctaaaatggtgcaatgaataaagaaaaaaaaaatctgatattttggcaatgcaacaacaggctggctttcctcacgtaattagttttaacaaagtattgttaatctgttttctgattaatagactatttaatcttatagcactgtgacaagactctgagctgcctctggtttaaatttccaccaaaagagctaacatttctagcacttytaaggatatacttatgtgagaaatgttawagtttcttattattttcattattcttcatgagagccccaaaggttacattctttgaattcactgaactttaaaggcttttattaaactggaagccacaggagaagctgattttttttcctcttcctagttccttgtatggagaagtcactggtatgagtaactggggggagggatgccyagaaaccttacaagctctgcacattctagagtggctggttggttggcataaagtgtcagctctatgggctgctgcratgccctggggtgttcagtggctgatggtgtcccctagaaaatgc

SEQ ID NO: 65971 - DNA, 600 bp, Chicken  19866894333664_3
aatagactatttaatcttatagcactgtgacaagactctgagctgcctctggtttaaatttccaccaaaagagctaacatttctagcacttytaaggatatacttatgtgagaaatgttawagtttcttattattttcattattcttcatgagagccccaaaggttacattctttgaattcactgaactttaaaggcttttattaaactggaagccacaggagaagctgattttttttcctcttcctagttccttgtatggagaagtcactggtatgagtaactggggggagggatgccyagaaaccttacaagctctgcacattctagagtggctggttggttggcataaagtgtcagctctatgggctgctgcratgccctggggtgttcagtggctgatggtgtcccctagaaaatgcttcttgggttggaattagtgacaatgaggagaggaatataatgcgtaacaacagcaaagcagcccaaacgctttttcaggacttatgtggccgtttgggtttcagagctgttaatgtaacctggcatgttaaatcagacatgatcaacactgtaaaagagccaagcataccaacagtac

SEQ ID NO: 65972 - DNA, 600 bp, Chicken  19866894333664_4
acatttctagcacttytaaggatatacttatgtgagaaatgttawagtttcttattattttcattattcttcatgagagccccaaaggttacattctttgaattcactgaactttaaaggcttttattaaactggaagccacaggagaagctgattttttttcctcttcctagttccttgtatggagaagtcactggtatgagtaactggggggagggatgccyagaaaccttacaagctctgcacattctagagtggctggttggttggcataaagtgtcagctctatgggctgctgcratgccctggggtgttcagtggctgatggtgtcccctagaaaatgcttcttgggttggaattagtgacaatgaggagaggaatataatgcgtaacaacagcaaagcagcccaaacgctttttcaggacttatgtggccgtttgggtttcagagctgttaatgtaacctggcatgttaaatcagacatgatcaacactgtaaaagagccaagcataccaacagtacagatgggtggcagataatgaaagaagccgcgactgagcagtgtagaactgctgatcaaaccacgttgatgtatagg

SEQ ID NO: 65973 - DNA, 600 bp, Chicken  19866894333664_5
atgttaaatcagacatgatcaacactgtaaaagagccaagcataccaacagtacagatgggtggcagataatgaaagaagccgcgactgagcagtgtagaactgctgatcaaaccacgttgatgtataggacttacatttccaaaaatcatcatttgcataccaggatgaaagcaggtagctgtgtagtcactgtaggtgctaattctttaagaacaagttgttagccactttcttgtgtcttggcctggctgccttagattttctttgggcatgagttttccactgccttgtgccctcrtggtgagtccgtaaatgggtgtgaatagtttctgccagccgcggtgctttgtgtctgtcctcttgctctgccaaggctctctcccatagcactgtctgggctggattatatactcccactccaactgaaaagtcttgtctagcttcaaaactcagatgagtttcaagaaagtccaagaaattggcagcactcagctcttattaaaggtggctgttcaattcaaataatatatttcaattttctcagcctgaagtggtgataatggcagtgctcttctatctagtatattgctgggtggtg

SEQ ID NO: 65974 - DNA, 599 bp, Chicken  19866894333670_1
  misc_feature (1)..(163): n is any nucleotide
nnnnnnnnnnnnnnnnnnnnnnnnnnnnnnnnnnnnnnnnnnnnnnnnnnnnnnnnnnnnnnnnnnnnnnnnnnnnnnnnnnnnnnnnnnnnnnnnnnnnnnnnnnnnnnnnnnnnnnnnnnnnnnnnnnnnnnnnnnnnnnnnnnnnnnnnnnnnnnnnnnnactgttgaatttgctgaggatagctgttacagcccattttgattagtcccataaaaccagggaaaaaaaaaaaaaagaaagaaagaaagaaaaaaggataaagatctacctgttggcacatgaatttgttcaatcaytcataacccaactgttcttttcctgtggatctttcataactggaagtttttggtgtctgacaaaagatacatatacaccatgtatttcatattgctcatgagtccacaggctgagacagcccaggtgtctaaacatctcaagagataactcataaaaagtattaggagtatctagtacttttaccagtacttttttttagtacccactacttyttaggacctgctgtttcactttataagccatcttgtacataatawagccccgagcttttcagtgaaccttacttatacctaaagtg

SEQ ID NO: 65975 - DNA, 600 bp, Chicken  19866894333670_2
ataaaaccagggaaaaaaaaaaaaaagaaagaaagaaagaaaaaaggataaagatctacctgttggcacatgaatttgttcaatcaytcataacccaactgttcttttcctgtggatctttcataactggaagtttttggtgtctgacaaaagatacatatacaccatgtatttcatattgctcatgagtccacaggctgagacagcccaggtgtctaaacatctcaagagataactcataaaaagtattaggagtatctagtacttttaccagtacttttttttagtacccactacttyttaggacctgctgtttcactttataagccatcttgtacataatawagccccgagcttttcagtgaaccttacttatacctaaagtgtatatataagtatatatatacttaaagacttttatgtgctaagtaactgagaactaaactgaaatctatatagaaaaatggaatrtgttttatagattatctatctgtggtctctgcctttctctcagtgctttatgaattctgatgttgtttatttaatcctcaccaaattgctacttctgtagactaagtcagatgtccagtattactatta

SEQ ID NO: 65976 - DNA, 600 bp, Chicken  19866894333670_3
ggataaagatctacctgttggcacatgaatttgttcaatcaytcataacccaactgttcttttcctgtggatctttcataactggaagtttttggtgtctgacaaaagatacatatacaccatgtatttcatattgctcatgagtccacaggctgagacagcccaggtgtctaaacatctcaagagataactcataaaaagtattaggagtatctagtacttttaccagtacttttttttagtacccactacttyttaggacctgctgtttcactttataagccatcttgtacataatawagccccgagcttttcagtgaaccttacttatacctaaagtgtatatataagtatatatatacttaaagacttttatgtgctaagtaactgagaactaaactgaaatctatatagaaaaatggaatrtgttttatagattatctatctgtggtctctgcctttctctcagtgctttatgaattctgatgttgtttatttaatcctcaccaaattgctacttctgtagactaagtcagatgtccagtattactattagtcttgtctcaaggacgagtcttgcttgcacttcatattggtaag

SEQ ID NO: 65977 - DNA, 600 bp, Chicken  19866894333670_4
tttcatattgctcatgagtccacaggctgagacagcccaggtgtctaaacatctcaagagataactcataaaaagtattaggagtatctagtacttttaccagtacttttttttagtacccactacttyttaggacctgctgtttcactttataagccatcttgtacataatawagccccgagcttttcagtgaaccttacttatacctaaagtgtatatataagtatatatatacttaaagacttttatgtgctaagtaactgagaactaaactgaaatctatatagaaaaatggaatrtgttttatagattatctatctgtggtctctgcctttctctcagtgctttatgaattctgatgttgtttatttaatcctcaccaaattgctacttctgtagactaagtcagatgtccagtattactattagtcttgtctcaaggacgagtcttgcttgcacttcatattggtaaggtaacaagcttgcaacaaatattcacattgcctaaagaatttgataaatttttcaagtgtgtatgtaagtacaaaatgaaataatattactgcaacattgatttcatatttttttctattaatttt

SEQ ID NO: 65978 - DNA, 600 bp, Chicken  19866894333672_1
tgggaattaattttaattgaaataataataataatcaatctgctgtagataggaaatgtaaacttttgcaggctattgtgaaaaatggtgatgttccatgtatcagaaacatctggagcagatgtttctgtaattatgacgcacttgatgattatgctgtgttcaatggcctttgctggtaccccttgaagctggtaatattacaagcttgtgctggtgcactgaactggaagagaggagattctttctagggcaagacctgtcctctctgttttcccaagtgctttctgtcaattgaarttttttcttttggttaatcattatcttctgtgtttgtatcaagtagtagttttgtgccatgaaatatctcaagtctgctgatgcagaaagtcaagcaaacattagcacactattttccgaatccgtattataggaaaaataacatttgatgcaaatgagattatagagaacgtcttgcagagtttagtataggtattctctgaagttgtgcatgactttgtatctttctatttaagagatcttatcattgaaggcaaaaatgtatggaagagtttagagatctgagctgatcgtgtcaag

SEQ ID NO: 65979 - DNA, 600 bp, Chicken  19866894333678_1
gaaaagcaagccagatgacttcaggtcacaagcttcaagtatgaacagcttttcttttggtatttgtgtcctgttaaatcagcttgtgattaaaacaaacaaacaaaaaacaaacaaaaaaacctgcaataaagaagcaacagagtgtaataaaatcctcaaccctttaagaaggaagatgtttttaaaaacttaagatttttttctaaagtacataaatatgccacactgcaaaatctgccatacctctatgttccatgtttattattataaaattagtaccacccttttgtacgataytgacaagattggaaaaatatttaaaatgcttatgagacaaggatctagaaaacaaagagctaaaaaggaagcatgatgctctcctctacaaaacacaagaacaaaacaggatgcttataagtttaaagggttatctacwatatgtgaaatagaaaagctaaactsacttaattcagcaagatcattaatttttttgtcacatctactaaaataatgtaggggtgggttctgctttttttcttctttttaatttacagatcaaaattgcgtagtttaaataacacatgcagcagaaggagt

SEQ ID NO: 65980 - DNA, 600 bp, Chicken  19866894333678_2
acagagtgtaataaaatcctcaaccctttaagaaggaagatgtttttaaaaacttaagatttttttctaaagtacataaatatgccacactgcaaaatctgccatacctctatgttccatgtttattattataaaattagtaccacccttttgtacgataytgacaagattggaaaaatatttaaaatgcttatgagacaaggatctagaaaacaaagagctaaaaaggaagcatgatgctctcctctacaaaacacaagaacaaaacaggatgcttataagtttaaagggttatctacwatatgtgaaatagaaaagctaaactsacttaattcagcaagatcattaatttttttgtcacatctactaaaataatgtaggggtgggttctgctttttttcttctttttaatttacagatcaaaattgcgtagtttaaataacacatgcagcagaaggagttctcatctgaccagatacaatcaactctcaagtcatcctctacagggattatccatatagcaggttgaagagatgtcaaaaacccagaaacacctgggcaaaggcagttctgactatattcactcagctgcagaagaaa

SEQ ID NO: 65981 - DNA, 600 bp, Chicken  19866894333678_3
tttaagaaggaagatgtttttaaaaacttaagatttttttctaaagtacataaatatgccacactgcaaaatctgccatacctctatgttccatgtttattattataaaattagtaccacccttttgtacgataytgacaagattggaaaaatatttaaaatgcttatgagacaaggatctagaaaacaaagagctaaaaaggaagcatgatgctctcctctacaaaacacaagaacaaaacaggatgcttataagtttaaagggttatctacwatatgtgaaatagaaaagctaaactsacttaattcagcaagatcattaatttttttgtcacatctactaaaataatgtaggggtgggttctgctttttttcttctttttaatttacagatcaaaattgcgtagtttaaataacacatgcagcagaaggagttctcatctgaccagatacaatcaactctcaagtcatcctctacagggattatccatatagcaggttgaagagatgtcaaaaacccagaaacacctgggcaaaggcagttctgactatattcactcagctgcagaagaaatttcagtcactcttctcacagttcag

SEQ ID NO: 65982 - DNA, 600 bp, Chicken  19866894333678_4
tacgataytgacaagattggaaaaatatttaaaatgcttatgagacaaggatctagaaaacaaagagctaaaaaggaagcatgatgctctcctctacaaaacacaagaacaaaacaggatgcttataagtttaaagggttatctacwatatgtgaaatagaaaagctaaactsacttaattcagcaagatcattaatttttttgtcacatctactaaaataatgtaggggtgggttctgctttttttcttctttttaatttacagatcaaaattgcgtagtttaaataacacatgcagcsgaaggagttctcatctgaccagatacaatcaactctcaagtcatcctctacagggattatccatatagcaggttgaagagatgtcaaaaacccagaaacacctgggcaaaggcagttctgactatattcactcagctgcagaagaaatttcagtcactcttctcacagttcagtagctgattacccaaaacctgaactaataaatcctactagatctaaaataccaattttctatcttttttgctccttttgttgcacttgttgaagtcaaagtactaaacagaaaagtgaaaaagccat

SEQ ID NO: 65983 - DNA, 600 bp, Chicken  19866894333678_5
acgataytgacaagattggaaaaatatttaaaatgcttatgagacaaggatctagaaaacaaagagctaaaaaggaagcatgatgctctcctctacaaaacacaagaacaaaacaggatgcttataagtttaaagggttatctacwatatgtgaaatagaaaagctaaactsacttaattcagcaagatcattaatttttttgtcacatctactaaaataatgtaggggtgggttctgctttttttcttctttttaatttacagatcaaaattgcgtagtttaaataacacatgcagcasaaggagttctcatctgaccagatacaatcaactctcaagtcatcctctacagggattatccatatagcaggttgaagagatgtcaaaaacccagaaacacctgggcaaaggcagttctgactatattcactcagctgcagaagaaatttcagtcactcttctcacagttcagtagctgattacccaaaacctgaactaataaatcctactagatctaaaataccaattttctatcttttttgctccttttgttgcacttgttgaagtcaaagtactaaacagaaaagtgaaaaagccatt

SEQ ID NO: 65984 - DNA, 600 bp, Chicken  19866894333678_6
cgataytgacaagattggaaaaatatttaaaatgcttatgagacaaggatctagaaaacaaagagctaaaaaggaagcatgatgctctcctctacaaaacacaagaacaaaacaggatgcttataagtttaaagggttatctacwatatgtgaaatagaaaagctaaactsacttaattcagcaagatcattaatttttttgtcacatctactaaaataatgtaggggtgggttctgctttttttcttctttttaatttacagatcaaaattgcgtagtttaaataacacatgcagcagsaggagttctcatctgaccagatacaatcaactctcaagtcatcctctacagggattatccatatagcaggttgaagagatgtcaaaaacccagaaacacctgggcaaaggcagttctgactatattcactcagctgcagaagaaatttcagtcactcttctcacagttcagtagctgattacccaaaacctgaactaataaatcctactagatctaaaataccaattttctatcttttttgctccttttgttgcacttgttgaagtcaaagtactaaacagaaaagtgaaaaagccattg

SEQ ID NO: 65985 - DNA, 600 bp, Chicken  19866894333685_1
ttagcaaatgaatccttaggagtaaatgggtttcagtcaactgagtaatagtcatggagttctggagtattcctaatgacactactggaaaaagtaatggcatatgttgtatgtaggatttaaactactgtgatatacctggtggtaatgagctatagcttttttttttcctaggagtggaaaatatttgggtattaaggctatgtacaaagtaggtgaagtatgatttatttagccttcagcttcagtgtctgacttggttttgctttgcaaaactaaggctttgttgttgtgcttacsattcagatttttactggaattagtgaaaatacttttttccttttgtttagtttcatctcttctgaataaatgaagaaagcgactatgaaagcacatcatcttccttcttttgccatcaatgaggagaagtttataaccaggtaaatttttaaaaacagaattttaaaatgcagttactttgctttactcatcactctgtattcactaaaggtgtcctgtagcagcagcaggtcctacagcttgctttctatgaagcattggtagaacaaagaggtcttttatttggatttcaaaaattaa

SEQ ID NO: 65986 - DNA, 599 bp, Chicken  19866894333690_1
  misc_feature (1)..(24): n is any nucleotide
nnnnnnnnnnnnnnnnnnnnnnnnttaaatatacacctgtcctgtaagcaggaccatcatgcaggacagatgtccagagtgtgcactgaagaattccacagaattgaattgttgaatgtcaaatgcaacaaaattgagatagtcagggggaagacaacagtgtatttttttcctcctcatccagtctatcggatgtatcaggtaaaaaaaacaagtgggatcaaacacttgcagatatatacaaaacttaaaaaaaaaaattgaaattaaatgaatgccaactgtttgaggagaacaacrtgcataytaagcaagcacagtgttttgcaagtatgatctgtttggtctgccagttatttactgtcctyaatttgagtgatgtggagacacattacttttccaaaagattttttgaaacataaaggccaaatctatcttagtgagttctacagaaaaagacacatgggtagttgagaatgaaaagatagattatagaagactttttgacagaagtyaagaataaatggttgtaaaagtcatgaataccctaagtagagatacttcaaattaacctcagcaaaaatgtcagagattataca

SEQ ID NO: 65987 - DNA, 599 bp, Chicken  19866894333690_2
  misc_feature (1)..(17): n is any nucleotide
nnnnnnnnnnnnnnnnnttaaatatacacctgtcctgtaagcaggaccatcatgcaggacagatgtccagagtgtgcactgaagaattccacagaattgaattgttgaatgtcaaatgcaacaaaattgagatagtcagggggaagacaacagtgtatttttttcctcctcatccagtctatcggatgtatcaggtaaaaaaaacaagtgggatcaaacacttgcagatatatacaaaacttaaaaaaaaaaattgaaattaaatgaatgccaactgtttgaggagaacaacrtgcataytaagcaagcacagtgttttgcaagtatgatctgtttggtctgccagttatttactgtcctyaatttgagtgatgtggagacacattacttttccaaaagattttttgaaacataaaggccaaatctatcttagtgagttctacagaaaaagacacatgggtagttgagaatgaaaagatagattatagaagactttttgacagaagtyaagaataaatggttgtaaaagtcatgaataccctaagtagagatacttcaaattaacctcagcaaaaatgtcagagattatacaagaaaaa

SEQ ID NO: 65988 - DNA, 600 bp, Chicken  19866894333690_3
gatgtccagagtgtgcactgaagaattccacagaattgaattgttgaatgtcaaatgcaacaaaattgagatagtcagggggaagacaacagtgtatttttttcctcctcatccagtctatcggatgtatcaggtaaaaaaaacaagtgggatcaaacacttgcagatatatacaaaacttaaaaaaaaaaattgaaattaaatgaatgccaactgtttgaggagaacaacrtgcataytaagcaagcacagtgttttgcaagtatgatctgtttggtctgccagttatttactgtcctyaatttgagtgatgtggagacacattacttttccaaaagattttttgaaacataaaggccaaatctatcttagtgagttctacagaaaaagacacatgggtagttgagaatgaaaagatagattatagaagactttttgacagaagtyaagaataaatggttgtaaaagtcatgaataccctaagtagagatacttcaaattaacctcagcaaaaatgtcagagattatacaagaaaaaacctcttgtaaaatgggaacatcaatttcctaytataaaaggtttctttggattgcaactgt

SEQ ID NO: 65989 - DNA, 600 bp, Chicken  19866894333690_4
tgggatcaaacacttgcagatatatacaaaacttaaaaaaaaaaattgaaattaaatgaatgccaactgtttgaggagaacaacrtgcataytaagcaagcacagtgttttgcaagtatgatctgtttggtctgccagttatttactgtcctyaatttgagtgatgtggagacacattacttttccaaaagattttttgaaacataaaggccaaatctatcttagtgagttctacagaaaaagacacatgggtagttgagaatgaaaagatagattatagaagactttttgacagaagtyaagaataaatggttgtaaaagtcatgaataccctaagtagagatacttcaaattaacctcagcaaaaatgtcagagattatacaagaaaaaacctcttgtaaaatgggaacatcaatttcctaytataaaaggtttctttggattgcaactgtaggaatctcagaatttggcttttgaactagggtacatattgtgggaaacagttgctaagttttggatatgatttttattatattcttaatagagrcaagtgtctttctgaggttaaaatttgtctgaaawactactttgtcttcaat

SEQ ID NO: 65990 - DNA, 600 bp, Chicken  19866894333690_5
gtttggtctgccagttatttactgtcctyaatttgagtgatgtggagacacattacttttccaaaagattttttgaaacataaaggccaaatctatcttagtgagttctacagaaaaagacacatgggtagttgagaatgaaaagatagattatagaagactttttgacagaagtyaagaataaatggttgtaaaagtcatgaataccctaagtagagatacttcaaattaacctcagcaaaaatgtcagagattatacaagaaaaaacctcttgtaaaatgggaacatcaatttcctaytataaaaggtttctttggattgcaactgtaggaatctcagaatttggcttttgaactagggtacatattgtgggaaacagttgctaagttttggatatgatttttattatattcttaatagagrcaagtgtctttctgaggttaaaatttgtctgaaawactactttgtcttcaatcagtttaaatagttacwttctatatgtgtccttaaggactgcgacacaactcacaaagcatcactaggtaaatgcagagatgggtatctacaaaatacaatagtatgaaatcactagacatgac

SEQ ID NO: 65991 - DNA, 600 bp, Chicken  19866894333690_6
tgggtagttgagaatgaaaagatagattatagaagactttttgacagaagtyaagaataaatggttgtaaaagtcatgaataccctaagtagagatacttcaaattaacctcagcaaaaatgtcagagattatacaagaaaaaacctcttgtaaaatgggaacatcaatttcctaytataaaaggtttctttggattgcaactgtaggaatctcagaatttggcttttgaactagggtacatattgtgggaaacagttgctaagttttggatatgatttttattatattcttaatagagrcaagtgtctttctgaggttaaaatttgtctgaaawactactttgtcttcaatcagtttaaatagttacwttctatatgtgtccttaaggactgcgacacaactcacaaagcatcactaggtaaatgcagagatgggtatctacaaaatacaatagtatgaaatcactagacatgactgaaatatttttgttgaattataaattctttcatcaatgacattctactacagttatattgactagaactgtattggctacaactgacaagtgacaagtgatattttttgtcatctttgggaag

SEQ ID NO: 65992 - DNA, 600 bp, Chicken  19866894333690_7
actttttgacagaagtyaagaataaatggttgtaaaagtcatgaataccctaagtagagatacttcaaattaacctcagcaaaaatgtcagagattatacaagaaaaaacctcttgtaaaatgggaacatcaatttcctaytataaaaggtttctttggattgcaactgtaggaatctcagaatttggcttttgaactagggtacatattgtgggaaacagttgctaagttttggatatgatttttattatattcttaatagagrcaagtgtctttctgaggttaaaatttgtctgaaawactactttgtcttcaatcagtttaaatagttacwttctatatgtgtccttaaggactgcgacacaactcacaaagcatcactaggtaaatgcagagatgggtatctacaaaatacaatagtatgaaatcactagacatgactgaaatatttttgttgaattataaattctttcatcaatgacattctactacagttatattgactagaactgtattggctacaactgacaagtgacaagtgatattttttgtcatctttgggaagcagtattttaaaactggattaacttaatttcagat

SEQ ID NO: 65993 - DNA, 600 bp, Chicken  19866894333690_8
aaagtcatgaataccctaagtagagatacttcaaattaacctcagcaaaaatgtcagagattatacaagaaaaaacctcttgtaaaatgggaacatcaatttcctaytataaaaggtttctttggattgcaactgtaggaatctcagaatttggcttttgaactagggtacatattgtgggaaacagttgctaagttttggatatgatttttattatattcttaatagagrcaagtgtctttctgaggttaaaatttgtctgaaawactactttgtcttcaatcagtttaaatagttacwttctatatgtgtccttaaggactgcgacacaactcacaaagcatcactaggtaaatgcagagatgggtatctacaaaatacaatagtatgaaatcactagacatgactgaaatatttttgttgaattataaattctttcatcaatgacattctactacagttatattgactagaactgtattggctacaactgacaagtgacaagtgatattttttgtcatctttgggaagcagtattttaaaactggattaacttaatttcagattagactgaaacctgaagaactggggttctggata

SEQ ID NO: 65994 - DNA, 600 bp, Chicken  19866894333707_1
ccaaatgaattaattaaattgaattaaactgccctgtggacactgttaaataaatcactgtggctgccagtgcttattccattttgatgagtaaaagcatctatgtgggagtttaatttagtttaaccaatccactttaaaggttaataaggattagctttcctgggtgtcctcatctgtatcagcatgcagcctcctggatgccagccctcacttcagcagtgctgggacactgctgtagtgactcccttgctgtgggaatgctcttatgctgctcagatccttcccactcctttccakcagggacaaagtctagacccagttatgtctaaccactgctaaacacaggtggtgtcagggtgttttcatacaaacaaggakgagtggcaaaggccatgcagcctgcctgtgctggagcatgatcagggttccctgggcaccccaacaggagcagagggtgtgctgcagagaaattccagaaatgagtttcagtaagccatgagacatcatggaagaatgaaagggagtttcaaaacagcctcactttaaataaaaaacatactttggcaacactacttgaaatgaaagctgacgtgtttg

SEQ ID NO: 65995 - DNA, 600 bp, Chicken  19866894333707_2
ttttgatgagtaaaagcatctatgtgggagtttaatttagtttaaccaatccactttaaaggttaataaggattagctttcctgggtgtcctcatctgtatcagcatgcagcctcctggatgccagccctcacttcagcagtgctgggacactgctgtagtgactcccttgctgtgggaatgctcttatgctgctcagatccttcccactcctttccakcagggacaaagtctagacccagttatgtctaaccactgctaaacacaggtggtgtcagggtgttttcatacaaacaaggakgagtggcaaaggccatgcagcctgcctgtgctggagcatgatcagggttccctgggcaccccaacaggagcagagggtgtgctgcagagaaattccagaaatgagtttcagtaagccatgagacatcatggaagaatgaaagggagtttcaaaacagcctcactttaaataaaaaacatactttggcaacactacttgaaatgaaagctgacgtgtttgaccatcatattgacatgttcatcaaaccactcgacagactgcaaatatccatgtagactcagtgccagacatcagcaccag

SEQ ID NO: 65996 - DNA, 600 bp, Chicken  19866894333723_1
taacaaactaagcctaattggaacagaacaacagtcaatccactgaactttgtgaatcctgaaaactcacactgcacaaaatcagttaccaaatgaaacaacagtgcattgcaacctactcctacagacagacaaaggatgggagagagtcatcacagtctacctttagttttaatatctcttcatagtctacgtttaactcaaacttgataaaggttcccaggcttcaaaacagagaccaaaattgtggcattatgtcatgtaacagcattacgcaagtcttgatccctaatcatgttwtggtttgtgcagaaatctgtgcagaaatctatatgaagaaatttatcaggacccttaatctctgggggaaaaccaaaagtgtccaarctaccttgcttccttactctgtcattagtgacaggccattcccagcttcagttccagaaatcctccagagcttgggacatgtcctccatgttcccacctaccccactggtccttaactcatgccatattcagaactgatctgaacatcacagggagcagttttacaaagatttatccaaggaaaaagtgtacacacatgagaactgtgttagg

SEQ ID NO: 65997 - DNA, 600 bp, Chicken  19866894333723_2
accaaatgaaacaacagtgcattgcaacctactcctacagacagacaaaggatgggagagagtcatcacagtctacctttagttttaatatctcttcatagtctacgtttaactcaaacttgataaaggttcccaggcttcaaaacagagaccaaaattgtggcattatgtcatgtaacagcattacgcaagtcttgatccctaatcatgttwtggtttgtgcagaaatctgtgcagaaatctatatgaagaaatttatcaggacccttaatctctgggggaaaaccaaaagtgtccaarctaccttgcttccttactctgtcattagtgacaggccattcccagcttcagttccagaaatcctccagagcttgggacatgtcctccatgttcccacctaccccactggtccttaactcatgccatattcagaactgatctgaacatcacagggagcagttttacaaagatttatccaaggaaaaagtgtacacacatgagaactgtgttaggataaaagaaggaacacgccatcttcgtgtacagttaaaggattccacctagactacaagaaatgaacacagaattcctgaaaaatgg

SEQ ID NO: 65998 - DNA, 600 bp, Chicken  19866894333723_3
ctgtcattagtgacaggccattcccagcttcagttccagaaatcctccagagcttgggacatgtcctccatgttcccacctaccccactggtccttaactcatgccatattcagaactgatctgaacatcacagggagcagttttacaaagatttatccaaggaaaaagtgtacacacatgagaactgtgttaggataaaagaaggaacacgccatcttcgtgtacagttaaaggattccacctagactacaagaaatgaacacagaattcctgaaaaatggaagacaaaaaaagaaggrgaaagctgaaaacaccatagactgtaacaaaattaaccttgtgcatgaaagaatgggacaaagctcatgttagagaatattgggcatgaaagctatcaggaaaagtgtcatgaagttggcagagttaaatagaaaaatgaccggacttagctttgcattgcagatgtcagcaaggtcaaaagaagatttcccattacaggattaagtttatcacacgatgagatgtaagacgcagatgcaaatttaacatgcttgtaagccaacagagagatcaagaactttaacgtctatcccacaaac

SEQ ID NO: 65999 - DNA, 600 bp, Chicken  19866894333734_1
gtgcctccaaaagttaaagcacagtaatgagggcattgtcccagtgcaccttgaatagtgataggcacagatcattgatcacccctctgcttcccctcctcacatagctgcaaagagcagtgagattacctctgagcctcttcttctccagactggttgacccaagtgtccccagcctctcctcataggacaactgccaaccttgttaccagctttggtacctcctctctagccactctcttcccagtctgtacctggggtaggcatttctccatcccaattgcagcacctggcaccctyctttgttgaactgcatgctgttgcctatggcacaggtctccaatctatctagatccttttatgaggcctcttgtttctccagggagtcaacaatacctcccagtttagtactgttaactattataaatcctaaattcatctaggatgcactgtacctcttcatctggttcattgattaaaatgtgggacaaatgtggccacctgccagatatagttccattcactactactctttgagccaatgttaaagggctgatctttaaaaaaaaaagtcttcagatgtacagctaaggtttcaac

SEQ ID NO: 66000 - DNA, 599 bp, Chicken  19866894333751_1
  misc_feature (1)..(56): n is any nucleotide
nnnnnnnnnnnnnnnnnnnnnnnnnnnnnnnnnnnnnnnnnnnnnnnnnnnnnnnntaatgtttctgtgcttttcattgcttcatacacgaggatactgatgcactggcatactgcatttcaaagtggagctcctaatggcagaatagatgtagcacgtattcttttgtggatttactgtcccagctttaccttcactggtgaagaccaaatgtgaaataaacccactaattatttggtaatgttatgcttttgtttttctttgaatacacataattgtgcactgaaaacaaaacctacwtgtaattttcttgggcttttgtaatttgttattgacttttatagattattcagtaaactcaaattgctttttgtcttaattgagtctcgtctgcattctgcactggtcaattttcagcctaccgtctaaattgctttgttgtgccccagtaagactgacgagttgataaggtggtgaataacatttattttatgcctcatattcccctcagcttgcataggaaaaatgattttataatyaatgtattttgtagttgatgctaatggacgccagtttttcaaagttaaatataatgggga

SEQ ID NO: 66001 - DNA, 600 bp, Chicken  19866894333751_2
aatgttatgcttttgtttttctttgaatacacataattgtgcactgaaaacaaaacctacwtgtaattttcttgggcttttgtaatttgttattgacttttatagattattcagtaaactcaaattgctttttgtcttaattgagtctcgtctgcattctgcactggtcaattttcagcctaccgtctaaattgctttgttgtgccccagtaagactgacgagttgataaggtggtgaataacatttattttatgcctcatattcccctcagcttgcataggaaaaatgattttataatyaatgtattttgtagttgatgctaatggacgccagtttttcaaagttaaatataatggggagaatggtttttggtcacaaccttcttccaaatgcttacttttttatccatcacctatttcacagggaacttgttggaaatcacctcttgggattgtaatgcctttctcaagtttgaaaagagcgttgcagtttacagatgggggtgagtttttttggctcagaaatcggaggttgcaggtgttcagtggtaccatttgcagatcacttaatgaacaagtgttcagatgcatcaccagctc

SEQ ID NO: 66002 - DNA, 600 bp, Chicken  19866894333754_1
ttatggatcccaactggtgctagagatgcaatgtatcagggtatcccttggtgtgcaagggacatggggctcaggggtgcctcttccatcagctccacctgtgcaccgagctggaagggcagcaggagtccccaggactgttactgcagcttctgtactccagcaaccttgtgcaatcccacttttactaacagatttcctttcctccttctcctgcacagacagagaagctaagagaaagcacaggtcccatcacctttcctgagagcactggatttaaacgaggtgcaaagtttcacygccagctgctgctccttggccaccatcatcccttctgactgaccayagtgcacagctacagcatcacatggccacgctaacagtaagatccaaagggagtgactgagttacactcaaactccccagcacatgaacctactacactcaacacagggcttgccagagcaaagcactgcaacttttgttatcacaaacactgctctgaaatgatgggagcggtttcactttgtcagcctccagaagcataggaaatttcgcataaattctggtatccacattgaaatttgaattcggagacag

SEQ ID NO: 66003 - DNA, 600 bp, Chicken  19866894333754_2
cttggtgtgcaagggacatggggctcaggggtgcctcttccatcagctccacctgtgcaccgagctggaagggcagcaggagtccccaggactgttactgcagcttctgtactccagcaaccttgtgcaatcccacttttactaacagatttcctttcctccttctcctgcacagacagagaagctaagagaaagcacaggtcccatcacctttcctgagagcactggatttaaacgaggtgcaaagtttcacygccagctgctgctccttggccaccatcatcccttctgactgaccayagtgcacagctacagcatcacatggccacgctaacagtaagatccaaagggagtgactgagttacactcaaactccccagcacatgaacctactacactcaacacagggcttgccagagcaaagcactgcaacttttgttatcacaaacactgctctgaaatgatgggagcggtttcactttgtcagcctccagaagcataggaaatttcgcataaattctggtatccacattgaaatttgaattcggagacagcagtacgaggaaaacattttctgaaatgaacatgaataataccccc

SEQ ID NO: 66004 - DNA, 600 bp, Chicken  19866894333757_1
atacgctcagataagagtagtggtgttttttaaatgtctccaagtacattttttccatgcaatagttttatatccttactttaaattagagaatgtgcccatctagtagtacaagaaaatagagaacaaacgatcgtaagttgaagctaaaataaaaaagtcttatttctcttatttacttccaaataaactatttatcatactattatcactagtgtacctgttttatggtaaagagagtgctcatgctcgcatatcctttgctaaataaccacccaataagaagcatgaaagaagtcragacataaggaaaaatacattgatcattctatcctcaaactgtatgtatttaatgcatcaatgacgtatttagacatgacaaaataaaactgtatcatgcctgaagtagagcagacaaraacttttagttttaatataacacatttaatacacacatacagtaaatggaccgagcttgtgagctatcacagaatcatagaacagcttgggttggaagggacctccaggatcaccaagctccaacactcctgccacaggcagggccgccaacctccacatttaatactagaccaggctatc

SEQ ID NO: 66005 - DNA, 600 bp, Chicken  19866894333757_2
tagagaacaaacgatcgtaagttgaagctaaaataaaaaagtcttatttctcttatttacttccaaataaactatttatcatactattatcactagtgtacctgttttatggtaaagagagtgctcatgctcgcatatcctttgctaaataaccacccaataagaagcatgaaagaagtcragacataaggaaaaatacattgatcattctatcctcaaactgtatgtatttaatgcatcaatgacgtatttagacatgacaaaataaaactgtatcatgcctgaagtagagcagacaaraacttttagttttaatataacacatttaatacacacatacagtaaatggaccgagcttgtgagctatcacagaatcatagaacagcttgggttggaagggacctccaggatcaccaagctccaacactcctgccacaggcagggccgccaacctccacatttaatactagaccaggctatctctacagtatacccgagcctttttcaaaccttttacttcagatttttcagatttaaatagctggcctctcattgttctccttactattccaaactcctagtgatgcaatcacccaaagt

SEQ ID NO: 66006 - DNA, 600 bp, Chicken  19866894333758_1
gtgcggttgctttcgttccgctgcgtcccgaggtgcaattaatcctacatgtcttctctcctaccctgcaatgcaggcgtaggctaaagatgaaccaagtttgcgtagaagctgtgtgcttttcagctgcaaggagcactctcataaatgttaataaagatctgtttgcagtgataaccagagctctgcatcaaggcagctgaaaccaaccatccttctgcagagctgggctttggtggcgtgagtagggacagcatcactcaggctggtgacgcactggaacaggttgcccaaggaggytgtggatgccccatccctggaggcattcaaggccaggctggatgtggctctgggcagcctggtctggtggttggcgaccctgcacatagcagggggttgaaactcaatgatcattgtggtccttttcaacccaggccatgctatggttctgtgattctatgaacatgcagtgtcttacagctggtgctttctgcttggttttctcctccttctgtcaaaggttgctaccaaaagtattgaaagagagctcatctgcccagcatgcaacgagctgttcacccacccgctgatccttccttg

SEQ ID NO: 66007 - DNA, 599 bp, Chicken  19866894333760_1
  misc_feature (1)..(54): n is any nucleotide
nnnnnnnnnnnnnnnnnnnnnnnnnnnnnnnnnnnnnnnnnnnnnnnnnnnnnncaggttgggaaacgttttctacagtggccatcagtttcactgtctctctcctcttctcagtccttgacgtggtgaatttaaattaaaggcagcgtggtctgttagacaaagcacggtctgttggacaaagctggcatctgagggcactgtgtgggtgacctgtgagagccacgcgtctcccagtgaggacacacagtgggtggctgtgatgctggacatcagctgtgccacagataaggatggcaytgttgcaggtatctgactggttgttctacgggcacgatgggacaaactgggcaagttgtagccagatgggatatccagccaaaggcacagctcaatgttggctctaaggtctgtgctttaaccggatctgtggatagaagggctgcccaaagattttgcttatgcttcagcttcactccagtcctggctctggctctgacccccactctaccaygctttgctcctgggtttgctacgcacagacatggtgccttggttgggagctgctggtcggyggaaacttcctgtaggccaacttt

SEQ ID NO: 66008 - DNA, 600 bp, Chicken  19866894333760_2
tgtgagagccacgcgtctcccagtgaggacacacagtgggtggctgtgatgctggacatcagctgtgccacagataaggatggcaytgttgcaggtatctgactggttgttctacgggcacgatgggacaaactgggcaagttgtagccagatgggatatccagccaaaggcacagctcaatgttggctctaaggtctgtgctttaaccggatctgtggatagaagggctgcccaaagattttgcttatgcttcagcttcactccagtcctggctctggctctgacccccactctaccaygctttgctcctgggtttgctacgcacagacatggtgccttggttgggagctgctggtcggyggaaacttcctgtaggccaactttatgagtggctcagcagtgcagagatcccaaccaatgtccctttgaaacagaggtctttaatagttacttttggtcaagcacctacccgagagcctggatgctccccatatcttccagtttagttctccttggggtggaggcaagaggggaggccacaagcaaccttatgtcccagtgagactcccaggagctcttggagcacagacagggttttc

SEQ ID NO: 66009 - DNA, 549 bp, Chicken  19866894333760_3
gctgtgccacagataaggatggcaytgttgcaggtatctgactggttgttctacgggcacgatgggacaaactgggcaagttgtagccagatgggatatccagccaaaggcacagctcaatgttggctctaaggtctgtgctttaaccggatctgtggatagaagggctgcccaaagattttgcttatgcttcagcttcactccagtcctggctctggctctgacccccactctaccaygctttgctcctgggtttgctacgcacagacatggtgccttggttgggagctgctggtcggyggaaacttcctgtaggccaactttatgagtggctcagcagtgcagagatcccaaccaatgtccctttgaaacagaggtctttaatagttacttttggtcaagcacctacccgagagcctggatgctccccatatcttccagtttagttctccttggggtggaggcaagaggggaggccacaagcaaccttatgtcccagtgagactcccaggagctcttggagcacagacagggttttctgcagagctt

SEQ ID NO: 66010 - DNA, 600 bp, Chicken  19866894333764_1
tcatgattggactcagcaattgacaaccttgctttgtatagataatgcattttactattccttttttcttctaatgagatgttaaagtgttctggagcattacttgatgtcaattacagcatgtctttggggaaatatgcctgccagtgggtagagtagggcacattacttcacttctgcatgtttaatgtgagtaaatgatttttctgtagtagagtcacggactgagatttcatcttgtagtctttttttaatcataataatgctgctaataggactaatttttccttttatgtttgragtttctgagcaagggaggcaatcttcagatatctgcatttgggttgttcttaaaagtttacaaatttacatagcactggcactttattactgattacaaaactcttgtaaagaaagagaaggtaggttgcatacaaaaaaaaaaaaagctggtttacttctatgtaaatccttctgtacttccagtgttggatcaattcgatactcttcctgatctcttgggacagcagtatcaaggggcttaatgattccctagaacatggctgatgaaaaagctgaaatttagtttgttgttattaa

SEQ ID NO: 66011 - DNA, 600 bp, Chicken  19866894333765_1
ggttcctgcttccgaatttctgactctgttaggcaaagcttctatgtacgcatggtaacaaacttcctggacagttctgtagttcggatattgggtgatgaagcactgtttgtctctttataactggaattcaagagctgcaactttaaatccagggacagagtagtaggggatacttagtggcttggcttcttaagctttaattacatatagcttttaggtatggcacaagatgtagataaaatcaaaagaattaaggtgtcctaaacagttagtaaaaactcttgatctcagaacagrtgaggtgcagtgaatcacatgctcttgttgcaaaatgtggtattgaggaatgaacatgtgtaggaaagaagggctttgtttcttaagctttgtctgtaggtactgttctgggactaggtgttcctgctgcagtggctgcatgggttggtgatccctgtaacagcaccgtgaaggcgacccaagggagtgtgccaggaagcagtgcaggaggcgttggacagcatggtgtgatgccccaggatcctgtgcacgttgtgagcagcgtgttcccatcgttcctgcagtggtttgtcagcagca

SEQ ID NO: 66012 - DNA, 599 bp, Chicken  19866894333769_1
  misc_feature (1)..(56): n is any nucleotide
nnnnnnnnnnnnnnnnnnnnnnnnnnnnnnnnnnnnnnnnnnnnnnnnnnnnnnnnaagatgagaaagaagaattcccccaaataccttcagataatcgatgtgctgtagtgtcctgcacattttgcagtgatagcctgtgatcatcactttgcaatagtccagctaaaggacataaatatacaaagacagggaattcttctctggccacaaatgacagaaaaaacagctgcattgtcatttaggatgatcaggatttcagtgatatttctgggtcacagattgaatcaactgactaaarccaagaaaactatttgctttggccacgaagtaatcaaattacttttgaccacccactcacctaatttctgtcatgttatttttttttgttttggatctgtgattctttgttcataatttgatctgctcaatagatgagccattctggctgaagtactgtagtagtaaaagaaaggtggaagggagatatcagtttaattcatttacttgaaattctactggttctctcagaggagaatattagagaataaaacaatattaaaaaatatttttttccacatctaaaatactagtttcaag

SEQ ID NO: 66013 - DNA, 600 bp, Chicken  19866894333769_2
tgctaaaacaggtcccctacaataggttgcacagataggcatctatttgggtcttgaatatctccataggagacactacaacttcactgggcaacctgttccagtgttccatcatgcatactgaaaagaagttcttctacatgtttgtatggaacttcccatgtacaagttttagaccattgctccttgtcctgtcacttcaaaccactgagaagagttcggcctcatacatctgtttctcacctctgtttaggtatttataaacgtttatcagatactgtctcggttttctttttcccrgactgaacagacccaagttactcaggcttccttcatttaggagataatcctatacaacctgaacctcccctggtgcaacttttggccattccttctcatcctatcatgaaatatagctcttccatatttacaagtaggatgtttatctaatgrtatcaaactgtggtatagtcagctgtcttcagtgctgagtcatctgtcaagagcaaggaacacttgctctctgagagagagattggcaatttcagttcagagatcccgccatggaactttatttcacaagtcaagaagggcatacta

SEQ ID NO: 66014 - DNA, 600 bp, Chicken  19866894333769_3
acttcccatgtacaagttttagaccattgctccttgtcctgtcacttcaaaccactgagaagagttcggcctcatacatctgtttctcacctctgtttaggtatttataaacgtttatcagatactgtctcggttttctttttcccrgactgaacagacccaagttactcaggcttccttcatttaggagataatcctatacaacctgaacctcccctggtgcaacttttggccattccttctcatcctatcatgaaatatagctcttccatatttacaagtaggatgtttatctaatgrtatcaaactgtggtatagtcagctgtcttcagtgctgagtcatctgtcaagagcaaggaacacttgctctctgagagagagattggcaatttcagttcagagatcccgccatggaactttatttcacaagtcaagaagggcatactatgtaagtaatttctgagctaaaagttgccctgagagttaggatcttcaaaagtaaattaaagaacaaactgagcaaatgagctgctaattaataggtaccatgctgcctgagaagtaaacatacatatatggcattttttacaaatgtgccct

SEQ ID NO: 66015 - DNA, 599 bp, Chicken  19866894333771_1
  misc_feature (1)..(55): n is any nucleotide
nnnnnnnnnnnnnnnnnnnnnnnnnnnnnnnnnnnnnnnnnnnnnnnnnnnnnnnttggtggctttctgccccccctcttgtaaagtaggtgccttgtaagatttcagatgaaggatgctgctccagtttctggccactacactgggctctgccaatgggaccaggtcccatggggtcatggaatcacagggtggtttgaattggaagggacccttgaatgccatctggtcccactccctgctatgaacagagacatcctccttgccaccccatccagagttgcaatagaaaccctcctkcctgctggagcagaaggggattgggagcttctgccactcctgccctgcctgggacygcagcaagaatccattactgagcagcgcttgtacttctgcggtgttgcacacacagccagggcracttcttcctcttgatgtgcctgtccccaaatctgggcttgctgtgttattttttttttccttccagcatcatctgactgcactgcttatgtcagcacagcagtgagcctcagtagatggcaggatggaacctggggactgaygtcctggcatggggacagctccagcagtatggcatg

SEQ ID NO: 66016 - DNA, 600 bp, Chicken  19866894333771_2
tggtggctttctgccccccctcttgtaaagtaggtgccttgtaagatttcagatgaaggatgctgctccagtttctggccactacactgggctctgccaatgggaccaggtcccatggggtcatggaatcacagggtggtttgaattggaagggacccttgaatgccatctggtcccactccctgctatgaacagagacatcctccttgccaccccatccagagttgcaatagaaaccctcctkcctgctggagcagaaggggattgggagcttctgccactcctgccctgcctgggacygcagcaagaatccattactgagcagcgcttgtacttctgcggtgttgcacacacagccagggcracttcttcctcttgatgtgcctgtccccaaatctgggcttgctgtgttattttttttttccttccagcatcatctgactgcactgcttatgtcagcacagcagtgagcctcagtagatggcaggatggaacctggggactgaygtcctggcatggggacagctccagcagtatggcatgaacagaggtgggatgccacgggyagacagacacacactcagacaaagaaatacatat

SEQ ID NO: 66017 - DNA, 600 bp, Chicken  19866894333771_3
gctccagtttctggccactacactgggctctgccaatgggaccaggtcccatggggtcatggaatcacagggtggtttgaattggaagggacccttgaatgccatctggtcccactccctgctatgaacagagacatcctccttgccaccccatccagagttgcaatagaaaccctcctkcctgctggagcagaaggggattgggagcttctgccactcctgccctgcctgggacygcagcaagaatccattactgagcagcgcttgtacttctgcggtgttgcacacacagccagggcracttcttcctcttgatgtgcctgtccccaaatctgggcttgctgtgttattttttttttccttccagcatcatctgactgcactgcttatgtcagcacagcagtgagcctcagtagatggcaggatggaacctggggactgaygtcctggcatggggacagctccagcagtatggcatgaacagaggtgggatgccacgggyagacagacacacactcagacaaagaaatacatattcagcattcagcatggaagtaattattccattaaagatgcatgaatcaagcttcctcggccaga

SEQ ID NO: 66018 - DNA, 600 bp, Chicken  19866894333771_4
tgccaccccatccagagttgcaatagaaaccctcctkcctgctggagcagaaggggattgggagcttctgccactcctgccctgcctgggacygcagcaagaatccattactgagcagcgcttgtacttctgcggtgttgcacacacagccagggcracttcttcctcttgatgtgcctgtccccaaatctgggcttgctgtgttattttttttttccttccagcatcatctgactgcactgcttatgtcagcacagcagtgagcctcagtagatggcaggatggaacctggggactgaygtcctggcatggggacagctccagcagtatggcatgaacagaggtgggatgccacgggyagacagacacacactcagacaaagaaatacatattcagcattcagcatggaagtaattattccattaaagatgcatgaatcaagcttcctcggccagaaccatgtcacatctgtaagcaaacaagagcaaaaggcattttctgctggtggagggagcagatgtgactctgaatactcatgggaagcaaagtttttcagaaggaaaggaaaggcaacacagtcccttttctgaccataacct

SEQ ID NO: 66019 - DNA, 600 bp, Chicken  19866894333771_5
gggagcttctgccactcctgccctgcctgggacygcagcaagaatccattactgagcagcgcttgtacttctgcggtgttgcacacacagccagggcracttcttcctcttgatgtgcctgtccccaaatctgggcttgctgtgttattttttttttccttccagcatcatctgactgcactgcttatgtcagcacagcagtgagcctcagtagatggcaggatggaacctggggactgaygtcctggcatggggacagctccagcagtatggcatgaacagaggtgggatgccacgggyagacagacacacactcagacaaagaaatacatattcagcattcagcatggaagtaattattccattaaagatgcatgaatcaagcttcctcggccagaaccatgtcacatctgtaagcaaacaagagcaaaaggcattttctgctggtggagggagcagatgtgactctgaatactcatgggaagcaaagtttttcagaaggaaaggaaaggcaacacagtcccttttctgaccataacctgacttgaatttgtcgctctggttttgtgcaattgccactgcagaagccatgctgcagca

SEQ ID NO: 66020 - DNA, 600 bp, Chicken  19866894333774_1
ctttgtagtagtttcaaaattgttccatccaaaatccatactttgccacagaattcacttctgcattgcctgttcacatactgttcagctctacagagcttttcttaacagaagactcttctatcacatagctgatgctttctacaagatttctgcccacttttttttttttttttaactctcttcatttagtagatgcaatatgattccatgtcagtcaggatatagaatactcagtatctatgtaaacttttagaattagtggacaagacatatgaggagcagctgaagttgcttcascctagagaaagctgcagtgagacccgatggtggccttcagcaccctcatgatgggaccagaggggcaggggctaatctcttctctttggtgatcagcagcaggacctgagggaagggcatgaagctacatcagggacaattcagactggatgttaggatcattgtgggtcccttccaactcaatatattgtgtaattgtgtaatgtattagaatggggaaccaatgtatgtcaatacaaaaaccaagctctgtactctaaatgtaacatagttgttagtgactgactgcatacagagctg

SEQ ID NO: 66021 - DNA, 599 bp, Chicken  19866894333779_1
  misc_feature (1)..(50): n is any nucleotide
nnnnnnnnnnnnnnnnnnnnnnnnnnnnnnnnnnnnnnnnnnnnnnnnnnagctagcaaaaaaacctcagccaactgccacttgttgcctgcccacagaaaagcaggaagctgacgagcagagcagggaggagcccagatgccaaaaaaacttctctatagattggacctttgcctaaaagacagaaggaggaacacccagtgtctgcactggcacaagctgcgtatcagaaaactgaaattcagcccatgccaagttacactttgaaaagttaaatgcacctaggccagcaaaaacaaratttgataggagttgagagtatttaaaaaaaaaaaaaagtaaaaacaatggttttccatgaaggtcaccttagaaatataaactaaaagagaagggaggaaggtaagaaagatttttcatgccaagaatccaattgaaacaattactaatacagttgttgagctgtataaagagaatgtccagaaccaacaacaacatgcagtacctatcaaaggagccacatttgtactgcctttgaaagtacactttaagtagcagctctgctgaacatagcaactacattgccactgagatatgcc

SEQ ID NO: 66022 - DNA, 599 bp, Chicken  19866894333780_1
  misc_feature (1)..(47): n is any nucleotide
nnnnnnnnnnnnnnnnnnnnnnnnnnnnnnnnnnnnnnnnnnnnnnncgctgactctcagtgagggctcagcgttgtgacgatgttcgtttccgagcagtcggtcggtgttttgggaagggagaggaggaggagctcagagggcttcagcagtgctgcagggtgggtcagctcttactgcccaacagctgcactcctgtcctcatacagagctgagaacggccccacatgtatggtgctgcgcccgctggccggcagtccctcgcagaccaagttgacgtggcttcttagcatcgacctraaggtaagtcctgcactgaactgcttcagagtaaaggcaggggttgtgcccgaggcagacgtgctgatgggttgcgtgctcctctgcagggctggctgccaaagaccatcatcaaccaggtcctgtcccagacccaggtggacttcgccaagcacctccggcagcgcatggcgcgggcagcgggctgctgagtgcacagactgctgttgagtgctttggtcagggctaacagtagggatcttgttgttaggtaagtcagatacaattcaactccggcctgtgctaacaagaaaggcctt

SEQ ID NO: 66023 - DNA, 485 bp, Chicken  19866894333781_1
atattaaggatccatctatagtttagaaaaggtaataaatgatagattgaaggcatagatggcttcagtagtggctggtgtgtattacagaggttatttgctcatcagttgaaggtattgtagatggctgcaagccaagtttacacacaacctgtgcaatgagtggactccataataattgattaactgtgtattaacatgcaaattaactcttcatcagctcttcatgaaatatatatgaatggcaaccaaatagcaagcatgaccgtaaaaggaaacactaaatttcctaatgaaaaytggtatatatcctcttatttttgtttaaacgtgtttaaaaatgttatttgcaagggtgcccctgacaccagaaaccaaaatctattttagaagtgacatcttgcagtgtttgcctcatttcccatcaagactaggcctctaaatcacttgcacagtcttgaatatgtggttgcacttctcttttt

SEQ ID NO: 66024 - DNA, 600 bp, Chicken  19866894333782_1
aattttttctttctctagccagaaacatgtacgtaagggaattgctccatgggactgaagtaagggtgactgggacgaaattctacttggccttttttgaaggccaagtaatcatcacccttgaatgctcccatgaacttgtattggtccagttatccttcacttggtctacatccagaggtaactctcctccttgagccctggcactaagtgcagtggtctgggttaccttgtaatgtacttgcagaaacattttttgtcctgtgccccttattggtcttcgctctagttgaacttgarttttcctgacaccatcccttcacatctggtcagcttttctaagttcctcctttatagcctgttcctgcttgcatcrtcagtatatagtctgtctgcaatggaacttcgccatgagttctctgctttgttcgaatttgtaggtgtgtggtgtagctacagaccaacattctttctctcttgcataatgagattattattgcatagaagtcttcctttatttcaacggaacacatacaacagttcttcctccaacacttctgcattccttgtagcataatcagccatctaaagaggtatctc

SEQ ID NO: 66025 - DNA, 600 bp, Chicken  19866894333782_2
gaaattctacttggccttttttgaaggccaagtaatcatcacccttgaatgctcccatgaacttgtattggtccagttatccttcacttggtctacatccagaggtaactctcctccttgagccctggcactaagtgcagtggtctgggttaccttgtaatgtacttgcagaaacattttttgtcctgtgccccttattggtcttcgctctagttgaacttgarttttcctgacaccatcccttcacatctggtcagcttttctaagttcctcctttatagcctgttcctgcttgcatcrtcagtatatagtctgtctgcaatggaacttcgccatgagttctctgctttgttcgaatttgtaggtgtgtggtgtagctacagaccaacattctttctctcttgcataatgagattattattgcatagaagtcttcctttatttcaacggaacacatacaacagttcttcctccaacacttctgcattccttgtagcataatcagccatctaaagaggtatctcccacattgctgggtacaactgggcatatcatttaccttcacgatctgtgagaagattgtyaacctcttctacatag

SEQ ID NO: 66026 - DNA, 600 bp, Chicken  19866894333782_3
gttcctgcttgcatcrtcagtatatagtctgtctgcaatggaacttcgccatgagttctctgctttgttcgaatttgtaggtgtgtggtgtagctacagaccaacattctttctctcttgcataatgagattattattgcatagaagtcttcctttatttcaacggaacacatacaacagttcttcctccaacacttctgcattccttgtagcataatcagccatctaaagaggtatctcccacattgctgggtacaactgggcatatcatttaccttcacgatctgtgagaagattgtyaacctcttctacatagtagaattctgaaaaaagtgatagaatatacttcacaactatacactgttttaaaatggtgcaccctagtacccsaaaatacaagcattcctactaaagaacatatgcatgcaaacactagaattaccagaaaagaagagaaacaaaaccttgctgctagtgctgttccctgaaaggaggaacaatatgagccatttaacaccaaattagctagtagaagaacctagtagttaattccttagatagcaaacagaaggagggatgtggcaattattcaatagactc

SEQ ID NO: 66027 - DNA, 600 bp, Chicken  19866894333782_4
tagctacagaccaacattctttctctcttgcataatgagattattattgcatagaagtcttcctttatttcaacggaacacatacaacagttcttcctccaacacttctgcattccttgtagcataatcagccatctaaagaggtatctcccacattgctgggtacaactgggcatatcatttaccttcacgatctgtgagaagattgtyaacctcttctacatagtagaattctgaaaaaagtgatagaatatacttcacaactatacactgttttaaaatggtgcaccctagtacccsaaaatacaagcattcctactaaagaacatatgcatgcaaacactagaattaccagaaaagaagagaaacaaaaccttgctgctagtgctgttccctgaaaggaggaacaatatgagccatttaacaccaaattagctagtagaagaacctagtagttaattccttagatagcaaacagaaggagggatgtggcaattattcaatagactcatatttaaatggatctgaaaagcattactaatgtttgaactatttttttttttttttcatttcttgggtaaagaaattctgtgtaagaaa

SEQ ID NO: 66028 - DNA, 599 bp, Chicken  19866894333787_1
  misc_feature (1)..(81): n is any nucleotide
nnnnnnnnnnnnnnnnnnnnnnnnnnnnnnnnnnnnnnnnnnnnnnnnnnnnnnnnnnnnnnnnnnnnnnnnnnnnnnnnntaaacaggttagtatgacactcctcatatgaatggataactcatcttaagacaaagtcaaaagccataatgcaactattgctcaacttacatgtttagctggtgccagtatcagagaatgaaaacatggtttaatatattacaatatccaactactggcttggtgaccacttacaggtcaaagattcagtctagttctccctacagtttaacagaacaygcattttggactaggaacagaattgttttccttagtctgccaagtgacattcaacaaatcattttgctgtgccaccattccctgcaaattaaatacagcataacacttgtgactcttagcaaagtatctccaaaagaaactaagtaaagttctagaaattattcaagagttacctgattatagtcatgtgaatgaactatctagtatgttaatattattaccctaattatttttgtrttaacacatacatacttaacctaatttcttaatttattgaataatttttttttttkataata

SEQ ID NO: 66029 - DNA, 600 bp, Chicken  19866894333787_2
ggcttggtgaccacttacaggtcaaagattcagtctagttctccctacagtttaacagaacaygcattttggactaggaacagaattgttttccttagtctgccaagtgacattcaacaaatcattttgctgtgccaccattccctgcaaattaaatacagcataacacttgtgactcttagcaaagtatctccaaaagaaactaagtaaagttctagaaattattcaagagttacctgattatagtcatgtgaatgaactatctagtatgttaatattattaccctaattatttttgtrttaacacatacatacttaacctaatttcttaatttattgaataatttttttttttkataatacaccagctgtctttctggtaaattttacaactctggcatgatatacagtgggggagatagtccaccattatcttttctgtatttcttgattcaatcttcgttaaactagtttccctcacacagaagaaagagttccaacagaagaatacggatgcagttagaacaggccatttaagatgccaaccatttcccccacatctgctagaagacccagtgttgctaaattggaacaggcatg

SEQ ID NO: 66030 - DNA, 600 bp, Chicken  19866894333787_3
agaacaygcattttggactaggaacagaattgttttccttagtctgccaagtgacattcaacaaatcattttgctgtgccaccattccctgcaaattaaatacagcataacacttgtgactcttagcaaagtatctccaaaagaaactaagtaaagttctagaaattattcaagagttacctgattatagtcatgtgaatgaactatctagtatgttaatattattaccctaattatttttgtrttaacacatacatacttaacctaatttcttaatttattgaataatttttttttttkataatacaccagctgtctttctggtaaattttacaactctggcatgatatacagtgggggagatagtccaccattatcttttctgtatttcttgattcaatcttcgttaaactagtttccctcacacagaagaaagagttccaacagaagaatacggatgcagttagaacaggccatttaagatgccaaccatttcccccacatctgctagaagacccagtgttgctaaattggaacaggcatgcacttttcaactactgcagtgtacaatccatcaggtctgagcaaattcacctttac

SEQ ID NO: 66031 - DNA, 600 bp, Chicken  19866894333790_1
ctcagggatgatcttgcacgttttgagcctttgtgtcctgcactaagctaatggtgtcagttctgtaccagtgacattgtcactgtagtgtggtggccctgtggtgagggagctgcgtctgaagtgtgccaagccccaggaggatctctgaacctgtcctttctcagacttcatggctcagtctcctggctctggcactgcttctcactttatttccttctccttggaaaatagagtacaagggagagtcaagatctgcctctgcttggtagctctcgtcctcctttggtgtgccatgtwgtttgccttcctgttccaacaggagcctcccttctaccttattgtaagatgctctgagatcttcccrtccagggaaggcacttgctgaaggtgcagatgtttttttctttcagctgtccgtggcttattcctgctgttctttgctaatggttgttaggggtaagttgtgcaggggagtcatatggcaacagatgttgttcgtactgtatgctgagtcctgcaggaggtgctggaggagaggtacgctcacatgtgtgcagacagccaagcaaacaccttctggccaacttggaaacactt

SEQ ID NO: 66032 - DNA, 600 bp, Chicken  19866894333790_2
ccagtgacattgtcactgtagtgtggtggccctgtggtgagggagctgcgtctgaagtgtgccaagccccaggaggatctctgaacctgtcctttctcagacttcatggctcagtctcctggctctggcactgcttctcactttatttccttctccttggaaaatagagtacaagggagagtcaagatctgcctctgcttggtagctctcgtcctcctttggtgtgccatgtwgtttgccttcctgttccaacaggagcctcccttctaccttattgtaagatgctctgagatcttcccrtccagggaaggcacttgctgaaggtgcagatgtttttttctttcagctgtccgtggcttattcctgctgttctttgctaatggttgttaggggtaagttgtgcaggggagtcatatggcaacagatgttgttcgtactgtatgctgagtcctgcaggaggtgctggaggagaggtacgctcacatgtgtgcagacagccaagcaaacaccttctggccaacttggaaacactttgcaaggatgaaaccacattgcccacttctcccagcaagcaaagaacaattcccagattgtgagaat

SEQ ID NO: 66033 - DNA, 600 bp, Chicken  19866894333796_1
tgtgcgggttcacactgattattacaccaagtatgataaatacttgaaaaaggagatagaggaaattccagacatcagaaaaatagtaccagaactgaaaagcaaagttttggcagatgtaaccattatctttagtggactctacccaacaaacttccccattgaaaaaacacgggaacactatcatgctacagcacttggagctaaaattgttaagaatctagtactgagtgctgatgatcctgacaaagcaacacatctcattgcagcaaggacaggtaggttaaaaaaagtcatctrtaagttttttttcaactcgttcatttctgtgggctgyttttgtatcagggatcaggatttaawttaaagaattgatcttaaattakgagtttggttagacattctttaacgccttttattgctgctttttgatcatgagatttgtttaaagggagacgctctaaattacctcttatatagcatttcatgttggcttggttaagagttgatgataccaggtttttggctgttatgtatgttgagtaaaagctttatgaacttttctctgttacaaatactagtgattttgctctaatgctg

SEQ ID NO: 66034 - DNA, 600 bp, Chicken  19866894333796_2
aaatacttgaaaaaggagatagaggaaattccagacatcagaaaaatagtaccagaactgaaaagcaaagttttggcagatgtaaccattatctttagtggactctacccaacaaacttccccattgaaaaaacacgggaacactatcatgctacagcacttggagctaaaattgttaagaatctagtactgagtgctgatgatcctgacaaagcaacacatctcattgcagcaaggacaggtaggttaaaaaaagtcatctrtaagttttttttcaactcgttcatttctgtgggctgyttttgtatcagggatcaggatttaawttaaagaattgatcttaaattakgagtttggttagacattctttaacgccttttattgctgctttttgatcatgagatttgtttaaagggagacgctctaaattacctcttatatagcatttcatgttggcttggttaagagttgatgataccaggtttttggctgttatgtatgttgagtaaaagctttatgaacttttctctgttacaaatactagtgattttgctctaatgctgtagtgatgacttccttctctgttcctcaggtttaacc

SEQ ID NO: 66035 - DNA, 600 bp, Chicken  19866894333796_3
aattccagacatcagaaaaatagtaccagaactgaaaagcaaagttttggcagatgtaaccattatctttagtggactctacccaacaaacttccccattgaaaaaacacgggaacactatcatgctacagcacttggagctaaaattgttaagaatctagtactgagtgctgatgatcctgacaaagcaacacatctcattgcagcaaggacaggtaggttaaaaaaagtcatctrtaagttttttttcaactcgttcatttctgtgggctgyttttgtatcagggatcaggatttaawttaaagaattgatcttaaattakgagtttggttagacattctttaacgccttttattgctgctttttgatcatgagatttgtttaaagggagacgctctaaattacctcttatatagcatttcatgttggcttggttaagagttgatgataccaggtttttggctgttatgtatgttgagtaaaagctttatgaacttttctctgttacaaatactagtgattttgctctaatgctgtagtgatgacttccttctctgttcctcaggtttaacctaaaatagctacgtttcatttagtat

SEQ ID NO: 66036 - DNA, 600 bp, Chicken  19866894333796_4
taccagaactgaaaagcaaagttttggcagatgtaaccattatctttagtggactctacccaacaaacttccccattgaaaaaacacgggaacactatcatgctacagcacttggagctaaaattgttaagaatctagtactgagtgctgatgatcctgacaaagcaacacatctcattgcagcaaggacaggtaggttaaaaaaagtcatctrtaagttttttttcaactcgttcatttctgtgggctgyttttgtatcagggatcaggatttaawttaaagaattgatcttaaattakgagtttggttagacattctttaacgccttttattgctgctttttgatcatgagatttgtttaaagggagacgctctaaattacctcttatatagcatttcatgttggcttggttaagagttgatgataccaggtttttggctgttatgtatgttgagtaaaagctttatgaacttttctctgttacaaatactagtgattttgctctaatgctgtagtgatgacttccttctctgttcctcaggtttaacctaaaatagctacgtttcatttagtatggaataaaagttatcttaagagg

SEQ ID NO: 66037 - DNA, 600 bp, Chicken  19866894333802_1
tgccaagaccaggcttagcagttgaacaggctgcgaaaccaaatgtgaactccagtgcagctcagtcacacccttcttgcaggcaaacactctgccaagagatctgaaagatgcttaccagtcagtgacatgaacagaaggcacatgccaggcagtgcacatcatgcctctcagcttcttcacagtcattaacacattgctgtggatcccctaccactctgttctcattggggcacatttctcaaaaattcagtttgggaaatgctgacattaccaggagaaccaacaggattgtaacawttctccattaacacagcccagctacatgaagggaaagcatctctactctgaraagtatttctgaatcctctcaccactgcagctcctgctgaccctgtctccagatgctgtcaggctgtgtgtgccagcagcaaaagctccattcctgacttcagagggtacttccatctgtgatagctgggttggaatttacatcacccagctgtggtacttatctaaggcacctgttttaagagcagtctgttgtcactataaatttcttagttatctctaagagacaagtcatttcttatctgaatc

SEQ ID NO: 66038 - DNA, 600 bp, Chicken  19866894333802_2
cagtgcagctcagtcacacccttcttgcaggcaaacactctgccaagagatctgaaagatgcttaccagtcagtgacatgaacagaaggcacatgccaggcagtgcacatcatgcctctcagcttcttcacagtcattaacacattgctgtggatcccctaccactctgttctcattggggcacatttctcaaaaattcagtttgggaaatgctgacattaccaggagaaccaacaggattgtaacawttctccattaacacagcccagctacatgaagggaaagcatctctactctgaraagtatttctgaatcctctcaccactgcagctcctgctgaccctgtctccagatgctgtcaggctgtgtgtgccagcagcaaaagctccattcctgacttcagagggtacttccatctgtgatagctgggttggaatttacatcacccagctgtggtacttatctaaggcacctgttttaagagcagtctgttgtcactataaatttcttagttatctctaagagacaagtcatttcttatctgaatctcttatttatccatggttgactctgaacatctgataaacttaactagtagct

SEQ ID NO: 66039 - DNA, 600 bp, Chicken  19866894333815_1
ccaaaactgctgtcatctcagccgaaaatccagaaaacaaactgtgtattattcaaaataataatataattctatactggtgctttaatatgcaaatcctgaacctctaaaggaagtcagctggttccttattgcggtaaatcagttcaccgcccacactgacttcttcccaacctcaattcactcgtttttactcttaaatagaaacaaattaatgaatctatactgtgagcttggctgccttgtttataattcctcagcatgaatgcaccggtgaggcagggtaatgtattctgagcmgaactgatgtgattgatctattgaatggagtgaggtgcactgattatatgtttgcataatgtttcttgatgtgaaactttcaggtttgcactgggaactgtaaattagagccagctaagtgctaccatgcatggtttcttcataaggactgctagggagcacggygttcaaggttatttaactacgcattggatttcctactgcaagtgatgggagcagtcattcagatccaccagatggctctgagaatttcagctctgctggcttggattagaacattctgcaagggacatggccagt

SEQ ID NO: 66040 - DNA, 600 bp, Chicken  19866894333815_2
cttcccaacctcaattcactcgtttttactcttaaatagaaacaaattaatgaatctatactgtgagcttggctgccttgtttataattcctcagcatgaatgcaccggtgaggcagggtaatgtattctgagcmgaactgatgtgattgatctattgaatggagtgaggtgcactgattatatgtttgcataatgtttcttgatgtgaaactttcaggtttgcactgggaactgtaaattagagccagctaagtgctaccatgcatggtttcttcataaggactgctagggagcacggygttcaaggttatttaactacgcattggatttcctactgcaagtgatgggagcagtcattcagatccaccagatggctctgagaatttcagctctgctggcttggattagaacattctgcaagggacatggccagtgggcacggtggcgatgggttgatggctgggcccratgatcttaaaggtcttttccaacctgaatgattctacgaatggaaagggatgggatgctatggtcccataacctcctgctcatgaccttttgcaaatgtgaagataaaatattaatacccctgcagtgga

SEQ ID NO: 66041 - DNA, 600 bp, Chicken  19866894333815_3
gtgcactgattatatgtttgcataatgtttcttgatgtgaaactttcaggtttgcactgggaactgtaaattagagccagctaagtgctaccatgcatggtttcttcataaggactgctagggagcacggygttcaaggttatttaactacgcattggatttcctactgcaagtgatgggagcagtcattcagatccaccagatggctctgagaatttcagctctgctggcttggattagaacattctgcaagggacatggccagtgggcacggtggcgatgggttgatggctgggcccratgatcttaaaggtcttttccaacctgaatgattctacgaatggaaagggatgggatgctatggtcccataacctcctgctcatgaccttttgcaaatgtgaagataaaatattaatacccctgcagtggagtgataacgagtggtggcagtgaagtcctgttgaattgctgttttctcttcctaagggtaagaggtaccccaagggaccactcctgcatcatgcagtgcatgcttggtttgccttagctacacacrgtgcctggggtgcagggggacaaaaggtggtacaacttgatct

SEQ ID NO: 66042 - DNA, 600 bp, Chicken  19866894333815_4
atggccagtgggcacggtggcgatgggttgatggctgggcccratgatcttaaaggtcttttccaacctgaatgattctacgaatggaaagggatgggatgctatggtcccataacctcctgctcatgaccttttgcaaatgtgaagataaaatattaatacccctgcagtggagtgataacgagtggtggcagtgaagtcctgttgaattgctgttttctcttcctaagggtaagaggtaccccaagggaccactcctgcatcatgcagtgcatgcttggtttgccttagctacacacrgtgcctggggtgcagggggacaaaaggtggtacaacttgatctctactcacatttatgggacaaaaggacatcaaaagagtctgcccatctcgttgcttcttctgttgacagtcttctggaagaaaggaagaggcagattacagacaacccatggctgtttgacgagcacaccgaggaaggctggaattcttctcrccaaactttggaggtctacaatgtagaggtctccaagtgagcaagtccccctggttccccgcaaagtcagtggggagatgccaagggactctcatgggtctcct

SEQ ID NO: 66043 - DNA, 487 bp, Chicken  19866894333815_5
aagtcctgttgaattgctgttttctcttcctaagggtaagaggtaccccaagggaccactcctgcatcatgcagtgcatgcttggtttgccttagctacacacrgtgcctggggtgcagggggacaaaaggtggtacaacttgatctctactcacatttatgggacaaaaggacatcaaaagagtctgcccatctcgttgcttcttctgttgacagtcttctggaagaaaggaagaggcagattacagacaacccatggctgtttgacgagcacaccgaggaaggctggaattcttctcrccaaactttggaggtctacaatgtagaggtctccaagtgagcaagtccccctggttccccgcaaagtcagtggggagatgccaagggactctcatgggtctcctcacctcgtcctcaggtaggcaggtaaaacaagccagatgaatcacacccaaagagggaccaatttttccttatcgcctctaag

SEQ ID NO: 66044 - DNA, 600 bp, Chicken  19866894333831_1
attcagtaagtttattaaaagctattgatccgacactgtcctgtgtccagggcccacctggttatccagttcagattcatacttctttttacattattgcagccttctggaataagggagcataaatttctctgtcggatttaatggtgagagcattgtcagtgtctcgctgatgtgccatttagaagagcaaggggaaaaacatcagaattattctatcaacttcacttttcccattaagagggaagagtatagggcagattccccacaaatgtcatcgcttacatctgcttatactgyagagtgtcctacctgaaacctctcacaaagtttttgtccattagctcattttttatcagggccattttatattatcttgggctctgtactgagcaacaaactacgaaagccaagaagcagagcaaagggcaggtggcagagaggctgatgcggaaggaggtgactcatttggcatttcatcctgatcagattagtacatttaatttagacgttggaatctgacgacttctgacacttctcatggcagacagaggaaaggtggatggaggagaaaacgctgtgccactcggagggagcagg

SEQ ID NO: 66045 - DNA, 600 bp, Chicken  19866894333831_2
cggaaggaggtgactcatttggcatttcatcctgatcagattagtacatttaatttagacgttggaatctgacgacttctgacacttctcatggcagacagaggaaaggtggatggaggagaaaacgctgtgccactcggagggagcagggcggaaaagatttgttgccaattcttttgtatcactacactggcaaacacaaaataattgcttgtatagtcatttggatgtggctaaggagcaggttatacagggttcagtgcgtgtcctctctggcagagaggaacgggcctgggaacrcatctgcagagattgcataactctgtcttcatagcagacagcgatctgagtatgtgagtccttggtggcctcagttcctcctgttacacagcgagagccgggtcctcaggtgttggtggcctaaccaggtgtgtggtcgtgtgcctgcaggtcctgctataaatcatagctgaatgagagtcaggtagtttctgtataaggcagaaaatgattctgtatggtgaagcctcaaattcgttgccccagagctactgaccacagtgtgaaacggaccaagagaggggttttttatcccacaca

SEQ ID NO: 66046 - DNA, 600 bp, Chicken  19866894333832_1
gagaataggtggtatatttgacaagacttaaatatgaattgctgctgtgctgcctgaaatatctgataacgggcacaattctaagcagcgctttgctgcggtgcctctacttgtttttgctgagaagttttctgctctctagtttgtttatcattattatatctcgtcttgcctgatgtattcaatggatcgtaaatgcaactttcgttctgcagttagcggtgttgtggatgttaataaattgccctccagtcatgctgcattttctttctgcagagtgagccttctcttttgcacacrgaaacagttattatatattccgttttgcagtgtgaactcgtggaaggtgaatcttcaagcacctcactaatgagcttagacttgccttacatcgtgtgttgcacaaacaggccagaataaagctattttctttgattacgtccttcctttctggatagcagtgctactaaagtactgcccctataatacccctgtaattccgttctgttatgtttactttaccagcttaatagtcctccttttgtaaatgctgtgctaagtcattgaacgcattttgattctgtaaaacagctcttcgta

SEQ ID NO: 66047 - DNA, 600 bp, Chicken  19866894333836_1
atctcacacaactacactacccctgggagaaggatgttgagtggggaagagaagtaggtggtaacagctgctgaagagcgactcacgttatcacaacctctgcaacaagttggacccagttctcttgtgatactacgcagatacagggtataatgccctgatgcaccagtgcaaaatgaatgtaaagcagcacctcggtgtgtctggaccaccctttgcacagagatgagttttacactctctctccacgcctgtgagtggctatgccaaaggggtgccagccccgtgttactgcacccytctccatggtgtggttgtagtgacagggcccaatacctgctctctgtcaaaagctttccagcttgcatttatttgaatttccatctcccggccaatctgccgcccagtgcctcattgcgcagaggggacaatgtgcagtctgtttgtgaaatggggctttggaggcctaaaacaaattgtcctcagggcccagcacagtgacagccattctctgcccgcagacagccccatgaggacagtatctctccagagcagcagttggtggtgaatgagcttttgaccttttcaacttattgtatt

SEQ ID NO: 66048 - DNA, 600 bp, Chicken  19866894333837_1
tgatgaatctcctaaaattaatgaagtacttctgcatttctttattcagacaaaaagatgactgtatgctttcagttttaattacccaatctctctgatcagccatttatccattaatctgtttctcttttcaacaaatcactcatctttaacgtattatatatttgccactggatttccaaatcttaagatctggatccatgagctctttatacatatttatatttacatacatatatgtatgcatggtttctttttgtaatttttatcattactctaagatattatgatatcttatayagatrttataatatatatagatatatattaattattaattataaattaatagataatattaaaatattactgcatatagaattgtaactgctacttctatgcaaacaacataactgttatttcagagggtggtgatgcactggaacaggttgtccagagaagttgtggatgtctcatttctggaggtgttcaaggccaggttggatgrggccctgagtagcctgatctggtgtgggcaatgagctcatggcagcagcagttgcaaaataattaatatatttagaatattggtgcttggaa

SEQ ID NO: 66049 - DNA, 600 bp, Chicken  19866894333837_2
aatctcctaaaattaatgaagtacttctgcatttctttattcagacaaaaagatgactgtatgctttcagttttaattacccaatctctctgatcagccatttatccattaatctgtttctcttttcaacaaatcactcatctttaacgtattatatatttgccactggatttccaaatcttaagatctggatccatgagctctttatacatatttatatttacatacatatatgtatgcatggtttctttttgtaatttttatcattactctaagatattatgatatcttatayagatrttataatatatatagatatatattaattattaattataaattaatagataatattaaaatattactgcatatagaattgtaactgctacttctatgcaaacaacataactgttatttcagagggtggtgatgcactggaacaggttgtccagagaagttgtggatgtctcatttctggaggtgttcaaggccaggttggatgrggccctgagtagcctgatctggtgtgggcaatgagctcatggcagcagcagttgcaaaataattaatatatttagaatattggtgcttggaaacctc

SEQ ID NO: 66050 - DNA, 503 bp, Chicken  19866894333837_3
tttatacatatttatatttacatacatatatgtatgcatggtttctttttgtaatttttatcattactctaagatattatgatatcttatayagatrttataatatatatagatatatattaattattaattataaattaatagataatattaaaatattactgcatatagaattgtaactgctacttctatgcaaacaacataactgttatttcagagggtggtgatgcactggaacaggttgtccagagaagttgtggatgtctcatttctggaggtgttcaaggccaggttggatgrggccctgagtagcctgatctggtgtgggcaatgagctcatggcagcagcagttgcaaaataattaatatatttagaatattggtgcttggaaacctctgacattataatcccactctctaaaagcagacctcaaacatgtactccttacatcaaagatctcaaatccagcgatgtccaggacacccaatggaagtactgcctg

SEQ ID NO: 66051 - DNA, 600 bp, Chicken  19866894333843_1
ggtaaaagagaaaacacttaaaaaagataactaaaaaatcttggatgaaatactggtattgagatttgcattaagaatggctattggaaaaaatacttaagcacttcaaacaatttttcacaggtttgattcactgggtacaaatgcttagttagtttaagcagattccttcaatatccttttgggaagaggatatccttttctcattgcctgaaaatttgtatattattgctggaaagaatcgtaaaatctgaatgcacactgaatatgattaataagcttcaggcataccacttatgyaggttgataatgctgaacttttctctctgttcccgtgctacagagcagcagcttttcagttcttttagatttttcagccacactacttcagccccaagggaacaagatgtcaaatccttgttctattctagcagaggagaagcaggaggtgtttcagctgaagtggctgggaaccaattctacttcaaacaaagtcagatgatagggtaaaggttaggactttgctgttagcacacctgctaacatatgatgtcatatgaatttattttattgcagcttaggctggtgaaagctgtggag

SEQ ID NO: 66052 - DNA, 599 bp, Chicken  19866894333846_1
  misc_feature (1)..(26): n is any nucleotide
nnnnnnnnnnnnnnnnnnnnnnnnnnaaggcttttggtctagggaggataaagtctcatttggatcttaaggggtatttaagtgcagaaggactcagcctcaataaattctctgttaatcagcagtgaatttagatcctaacaatccctcatccacatcatcatgacggaggattttaggtcagtttgtcagtgaactgacttgctttcagtagtacatcaacacttacatatgtaaagctgtttgtattaatatgcttgtcaattattcatttgaaaagatggtgcagaatgagaagamttgttaaaacatgtttctagttaattaaaaaaaaaatcacaaacccatcaaaaaactaacagcactccagctgtggtggatctctcaatggtggcctaggaatgacaagcagatgctatgaagtgggcttgctgcacagcatttgaataagaactcagtacacagatattgcactaccatgctgttttgtgaaatgtaggaaaaaaaagtcaaatgggtaccatgcttctaaaagccaggcattgaacagaaacaatacgaaacagttgcacacagttactacacattcaaattgtaat

SEQ ID NO: 66053 - DNA, 599 bp, Chicken  19866894333855_1
  misc_feature (1)..(95): n is any nucleotide
nnnnnnnnnnnnnnnnnnnnnnnnnnnnnnnnnnnnnnnnnnnnnnnnnnnnnnnnnnnnnnnnnnnnnnnnnnnnnnnnnnnnnnnnnnnnnnnttctctctttatgaaagctggtgatgaaagtgcactcaatagatctcttaccattacccagcctgtttcctgtgatcttcgtaaaagagttagggagaattcctagctgagaaatgaatcttagggttaatgcagtctatcttatctcagatcccagtgggagaataggctttctgtatttcagctgcaggttatcccttcgttstgcaggcaagatggatggggagacagagatgcgtgtttaaaaagtgactggggtaggtttttggaagacaaggwaaaaatttactttcagttgggcacatsagcagaaccgtttaggtataataaatgggacatttttagaaatgaccactttttattcaaagcaatattttctgggaagtatggaatacacattattgaaagtgataaaaacttgttgtcagggcctgaatgtaaaaccaggttccgcctcatcccycagtcattacatctgttagctatctcctgattaaataaaag

SEQ ID NO: 66054 - DNA, 599 bp, Chicken  19866894333855_2
  misc_feature (1)..(21): n is any nucleotide
nnnnnnnnnnnnnnnnnnnnnttctctctttatgaaagctggtgatgaaagtgcactcaatagatctcttaccattacccagcctgtttcctgtgatcttcgtaaaagagttagggagaattcctagctgagaaatgaatcttagggttaatgcagtctatcttatctcagatcccagtgggagaataggctttctgtatttcagctgcaggttatcccttcgttstgcaggcaagatggatggggagacagagatgcgtgtttaaaaagtgactggggtaggtttttggaagacaaggwaaaaatttactttcagttgggcacatsagcagaaccgtttaggtataataaatgggacatttttagaaatgaccactttttattcaaagcaatattttctgggaagtatggaatacacattattgaaagtgataaaaacttgttgtcagggcctgaatgtaaaaccaggttccgcctcatcccycagtcattacatctgttagctatctcctgattaaataaaagctcttttggatttagtaactttgctctggatattgtggcatcactgtgcatgttatggttttaataaatttcat

SEQ ID NO: 66055 - DNA, 600 bp, Chicken  19866894333855_3
ctttatgaaagctggtgatgaaagtgcactcaatagatctcttaccattacccagcctgtttcctgtgatcttcgtaaaagagttagggagaattcctagctgagaaatgaatcttagggttaatgcagtctatcttatctcagatcccagtgggagaataggctttctgtatttcagctgcaggttatcccttcgttstgcaggcaagatggatggggagacagagatgcgtgtttaaaaagtgactggggtaggtttttggaagacaaggwaaaaatttactttcagttgggcacatsagcagaaccgtttaggtataataaatgggacatttttagaaatgaccactttttattcaaagcaatattttctgggaagtatggaatacacattattgaaagtgataaaaacttgttgtcagggcctgaatgtaaaaccaggttccgcctcatcccycagtcattacatctgttagctatctcctgattaaataaaagctcttttggatttagtaactttgctctggatattgtggcatcactgtgcatgttatggttttaataaatttcatttatagaactaaacagaaaagcaatcac

SEQ ID NO: 66056 - DNA, 530 bp, Chicken  19866894333855_4
aataggctttctgtatttcagctgcaggttatcccttcgttstgcaggcaagatggatggggagacagagatgcgtgtttaaaaagtgactggggtaggtttttggaagacaaggwaaaaatttactttcagttgggcacatsagcagaaccgtttaggtataataaatgggacatttttagaaatgaccactttttattcaaagcaatattttctgggaagtatggaatacacattattgaaagtgataaaaacttgttgtcagggcctgaatgtaaaaccaggttccgcctcatcccycagtcattacatctgttagctatctcctgattaaataaaagctcttttggatttagtaactttgctctggatattgtggcatcactgtgcatgttatggttttaataaatttcatttatagaactaaacagaaaagcaatcactggcagagaggactggctgcaatatgttaactctttggaaaacccactgtcagccagcacatgttgaacctcatatcacctacagca

SEQ ID NO: 66057 - DNA, 600 bp, Chicken  19866894333859_1
atgcatatcaccacatttgagacagcaagatttacactaaatacgtaaagaaccgtaatgctgaatgcagacagaacgctggaaactcatcgcagggcttttgctaactcactttcagaagaaagctttcaaatggatgctgtacacattactgtgggctttggttccaggctggtagcttatgcatgctgatgcaagtggcaggaaacacacaaaccacccaagttcagaccagtatcttcacacagctcctaaaacaccaggctttaaacttgcaagtgttattagccttgagctacygctacagctgaaatgagctgcaggcagtacactcctacaaacgtcttcttctcagtgtacttcatcttttgtatgcacctgacaaaaatactctttcagatctgtcaaacttaagcactgtgaaaagactgtaaaaaacaccagccttttggaggtaaaattgctgcaccagaacacaaacatcacttacaagaactgaaatttctaagttcccaaaggaagtgttctactttccatatccatggctttccataactgcttccagatgtatgcttcgatgctgtcagtccagcaaacatc

SEQ ID NO: 66058 - DNA, 465 bp, Chicken  19866894333866_1
aaacagtagaattagttgaacaaaatgtcagattacaccaagacctgaccttgtaagcctaacagcaaacagaacagtgacaacaagaaatttctaccttgtagtacacgttgcaatacatctgaccactttgaagagaggatagatctttctaatattttaagaaaataagataattacagcagaaaaaattagaaacttatctgacctaaaatggaaaattcgttaaggggctactgatggtcaacaaatcaaggttctgtaagaaatcagaacaactaaagctaaaacgtccttctygttcaagggcaaattgaacataggaattagaataagcaggaatttgagacagtatgcagaatttaaggatctccttgccagcaactgcactaaagcagctcaaaacaaattatcttgttaaaaaaaagaaaatggagataagaattattattaataaactaacat

SEQ ID NO: 66059 - DNA, 600 bp, Chicken  19866894333867_1
ttagtccatgttttctattccctgattttttcttatccacttgcagccattttggcaaatattctttagaaactaagattttcatcttttttttgcacgctaagcagctctaatatttgtgcagcatgacataatttctttccagtttgacagttgacttgtacttcatacatcaaaaagaaataagtatatcaaatacagcaaaaacaaaatatggtatcataacatggtgaatgtgtatcttatgctgttggtatatgtatggcaaaaggccctttgggcagattcttgacttagtgyatacatttagtacacagatgcagaggtttttggtggtttttactgaagacataatggctgattgtcatttattttaaaatacatagtttgcaccagatcttctttttcaggtcagattgcaaaaaattccctttggatttctgaactttctgggtaggattattctatcttcatctaggcagttgtatctttaacaatggatactaatttatttatttccttaattattttttggttccttgataatctcctctgcttttcggggcctgaccattgttrctgtcttagatccctgtaatg

SEQ ID NO: 66060 - DNA, 556 bp, Chicken  19866894333867_2
ggcagattcttgacttagtgyatacatttagtacacagatgcagaggtttttggtggtttttactgaagacataatggctgattgtcatttattttaaaatacatagtttgcaccagatcttctttttcaggtcagattgcaaaaaattccctttggatttctgaactttctgggtaggattattctatcttcatctaggcagttgtatctttaacaatggatactaatttatttatttccttaattattttttggttccttgataatctcctctgcttttcggggcctgaccattgttrctgtcttagatccctgtaatgagccctagagatgtctgttgcataaaataattgcctaccttagaagaatgttccacaacattaacaagcctgaagcttacctccttacatactccctggcccaagtaagttctgtgatagtcaaccttattttagaacctgaatcagttcttcgtcttcaagaacactgtatttcagtaagaatgaaatgaattaaacagtagttcctttttgaccctcagtattatactgtcca

SEQ ID NO: 66061 - DNA, 599 bp, Chicken  19866894333885_1
  misc_feature (1)..(134): n is any nucleotide
nnnnnnnnnnnnnnnnnnnnnnnnnnnnnnnnnnnnnnnnnnnnnnnnnnnnnnnnnnnnnnnnnnnnnnnnnnnnnnnnnnnnnnnnnnnnnnnnnnnnnnnnnnnnnnnnnnnnnnnnnnnnnnnnnnnnnntgtcctgctctctgctctcaaacctgatcactcacctcctttttggactgaggtcccaggtttgctacctgtgttcctaggggagccttcctgggtgtgccacctgctgtaggaatctcgtgtgggatgtctgtccatgaggggaaaatgcacccaggcacttcckcccacacgaaagggtatggagacttccatggaaacagagcaaggagttacaataggaaaaaacacacaaatagtcttccatgaaggctggggcgggcctaatctacctcagacatccaaagccccaggccaccgtctagtggccacttcctctagcctcttgctgacacaaatgtgctgatgagagacatccatgcaaattgctgtctgcacgctgtgctgagcactgccattgagctgtctgccaaccccagcccccagattccaggtgtctgaagtcagccaggactgggatgtcca

SEQ ID NO: 66062 - DNA, 600 bp, Chicken  19866894333885_2
atatcccgcactctcactgtgatcctcacagggtcctccctctgagagtttgatgagggggaggtgttccccagaagcctccatctttccaagtttctgtagacgacagtggcagtgggcctgaaggcaactctgctgctctggggagccagcacctcacggggactacggaagagacaaggaaggattccttattggagagtgtagtgacagcacaagaggcaatggctttaaactcaaacagaggagattaaagtgagatgtcaggaagaaattaattactcagagggcggtgaggcrctgccacagctgcccagagaagctgtggtgccccatccctggaggcgctcaaggccaggttggatggggcyctgggcagctgagctggtggggggcagctctgcccatggcacggggtagggctgggtgggttttgagggcccttccaacccaagccattctgtgattctatgataggtatcagccagaaaatcctgcttggtccttgcaagaagccttccaggtgtctgggagaagcgtagcatttaggtgtgctctaatcattcccctggtaagcatgatttgctctctggcctgaga

SEQ ID NO: 66063 - DNA, 600 bp, Chicken  19866894333885_3
cagaagcctccatctttccaagtttctgtagacgacagtggcagtgggcctgaaggcaactctgctgctctggggagccagcacctcacggggactacggaagagacaaggaaggattccttattggagagtgtagtgacagcacaagaggcaatggctttaaactcaaacagaggagattaaagtgagatgtcaggaagaaattaattactcagagggcggtgaggcrctgccacagctgcccagagaagctgtggtgccccatccctggaggcgctcaaggccaggttggatggggcyctgggcagctgagctggtggggggcagctctgcccatggcacggggtagggctgggtgggttttgagggcccttccaacccaagccattctgtgattctatgataggtatcagccagaaaatcctgcttggtccttgcaagaagccttccaggtgtctgggagaagcgtagcatttaggtgtgctctaatcattcccctggtaagcatgatttgctctctggcctgagagcaaaggctaatagaaagcagagtgctcctgtgaagcccagcaggtaattgaagaactcgggcttagatct

SEQ ID NO: 66064 - DNA, 600 bp, Chicken  19866894333889_1
ctgtcagttgttcagaatggcaaaaaaccctaattttcaagaagttggtcacctgcccacaggctacatccattgtagaccttcagagagctttactggtgagtacaccaatatatttttctgagaaacttaagaatttagttatatgctgttttaaccacgttgcatcaagtgcattaatattgatttcacatgagctttaataaatcctactatattgttctttgtatgtagctaaacttatttctgctgtcctgtcagaggaatctctctcttggcagatgagagagagaacacaaygatgcttgggrtctggaaggcacagtagtgtgtaactgtccatatgtttgaagtaaaaacatgtttgttactaatgatgtcattgaaaggcatggtaaatagaattaacatccagttttcttttaattctttccccaaagaagggttggagatgaccttaaaagttctggaaattccatttatttagcttttcatattctgatcatatgagttcataccgtgtggattatgttattattgggtattggataagtagggctagttagttccttggacatgcagaggtagttattaatatga

SEQ ID NO: 66065 - DNA, 600 bp, Chicken  19866894333889_2
tcagaatggcaaaaaaccctaattttcaagaagttggtcacctgcccacaggctacatccattgtagaccttcagagagctttactggtgagtacaccaatatatttttctgagaaacttaagaatttagttatatgctgttttaaccacgttgcatcaagtgcattaatattgatttcacatgagctttaataaatcctactatattgttctttgtatgtagctaaacttatttctgctgtcctgtcagaggaatctctctcttggcagatgagagagagaacacaaygatgcttgggrtctggaaggcacagtagtgtgtaactgtccatatgtttgaagtaaaaacatgtttgttactaatgatgtcattgaaaggcatggtaaatagaattaacatccagttttcttttaattctttccccaaagaagggttggagatgaccttaaaagttctggaaattccatttatttagcttttcatattctgatcatatgagttcataccgtgtggattatgttattattgggtattggataagtagggctagttagttccttggacatgcagaggtagttattaatatgataagttaatta

SEQ ID NO: 66066 - DNA, 600 bp, Chicken  19866894333889_3
gatcatatgagttcataccgtgtggattatgttattattgggtattggataagtagggctagttagttccttggacatgcagaggtagttattaatatgataagttaattaatatgatatcaagattttaattaaagttagaatttactactttttttaactattatatgcattgtggaggtctcatacagattaattccaataataccgtgagtattatactcgtttagtgagcttttgaatcagacaacactgtgagttgttcatatataagtcagtatgatgtaaaatgttgtggtkttgtgggtacctttcttagttctgtagcattgtgacttatgtatgagacttagtttctctaaataccacaatggcatgttaatgaaattgggaaagttgaggacatgtgagaactgattaatcagtgacgttccaaaatgcaggacactttctgcttagggattatcttgattaaaacattttcttcctggtgtttgaatctgtgtttttgtttgggtttgtgtgtttgtcaagttagggaggcattaatataaatacagcatcttcttccwttttctttctaaaggcccttttaacact

SEQ ID NO: 66067 - DNA, 600 bp, Chicken  19866894333889_4
agtcagtatgatgtaaaatgttgtggtkttgtgggtacctttcttagttctgtagcattgtgacttatgtatgagacttagtttctctaaataccacaatggcatgttaatgaaattgggaaagttgaggacatgtgagaactgattaatcagtgacgttccaaaatgcaggacactttctgcttagggattatcttgattaaaacattttcttcctggtgtttgaatctgtgtttttgtttgggtttgtgtgtttgtcaagttagggaggcattaatataaatacagcatcttcttccwttttctttctaaaggcccttttaacacttgttttctggtgcctcataatgtagggtagcttgattctctgggtgacattatggaaaaaagcagaacatcaaaggctggaaatgttatatcaaagtaaaaggatgaaaagaatagagaattaatggtagaaggatacttttttttcctcagaagtattacttgacttctgcttcagtgttgaattacatttttcatgacattgatgttagagagtaaattaattatatttgcaactaaattctaaatatcacatctatcaatagcacatca

SEQ ID NO: 66068 - DNA, 600 bp, Chicken  19866894333894_1
cctctgtagctctccatgtcaacctgtgccaccctggcgctgtgtctgtgcgcgctgcacccacgggatgggtgaaccctgctgggtgcccttcctgcagtgctctgacccggtgcagagctcaggaggagcagtttgttttcctggaggctgaggggtactcattcacagcagcagagctcatttttgttctctgctgatggagtcccctctgtgcgctccatcatcagtgcatggggtcaccacagaaagactcatggagtcgctcctcaccaaacacacaaggctttgccatcactytctcttggaaaagagcacttccttgcactcttgcagcagggttgcctgcagggctgcctgcycgtggccrtagggctgcctgcgactcggcacgggtgggctatgggatccagccacagctctgccttcagygcttggaaaatgcagctctccccattcacccttcccccaccgacccacagagggtcygcatygggtgcagtgtcccatccagtgatggtcccccctgggagtttgataaggtgcrcacggtttccctcgggcacattggttgggccccccagatccctccccgcggcg

SEQ ID NO: 66069 - DNA, 600 bp, Chicken  19866894333894_2
acgggatgggtgaaccctgctgggtgcccttcctgcagtgctctgacccggtgcagagctcaggaggagcagtttgttttcctggaggctgaggggtactcattcacagcagcagagctcatttttgttctctgctgatggagtcccctctgtgcgctccatcatcagtgcatggggtcaccacagaaagactcatggagtcgctcctcaccaaacacacaaggctttgccatcactytctcttggaaaagagcacttccttgcactcttgcagcagggttgcctgcagggctgcctgcycgtggccrtagggctgcctgcgactcggcacgggtgggctatgggatccagccacagctctgccttcagygcttggaaaatgcagctctccccattcacccttcccccaccgacccacagagggtcygcatygggtgcagtgtcccatccagtgatggtcccccctgggagtttgataaggtgcrcacggtttccctcgggcacattggttgggccccccagatccctccccgcggcgcagcaggttttgtttccataaggaaaacgtatggctaacctgctggcgtccttcttgttaca

SEQ ID NO: 66070 - DNA, 600 bp, Chicken  19866894333894_3
ggtgaaccctgctgggtgcccttcctgcagtgctctgacccggtgcagagctcaggaggagcagtttgttttcctggaggctgaggggtactcattcacagcagcagagctcatttttgttctctgctgatggagtcccctctgtgcgctccatcatcagtgcatggggtcaccacagaaagactcatggagtcgctcctcaccaaacacacaaggctttgccatcactytctcttggaaaagagcacttccttgcactcttgcagcagggttgcctgcagggctgcctgcycgtggccrtagggctgcctgcgactcggcacgggtgggctatgggatccagccacagctctgccttcagygcttggaaaatgcagctctccccattcacccttcccccaccgacccacagagggtcygcatygggtgcagtgtcccatccagtgatggtcccccctgggagtttgataaggtgcrcacggtttccctcgggcacattggttgggccccccagatccctccccgcggcgcagcaggttttgtttccataaggaaaacgtatggctaacctgctggcgtccttcttgttacagatgttct

SEQ ID NO: 66071 - DNA, 600 bp, Chicken  19866894333894_4
agtttgttttcctggaggctgaggggtactcattcacagcagcagagctcatttttgttctctgctgatggagtcccctctgtgcgctccatcatcagtgcatggggtcaccacagaaagactcatggagtcgctcctcaccaaacacacaaggctttgccatcactytctcttggaaaagagcacttccttgcactcttgcagcagggttgcctgcagggctgcctgcycgtggccrtagggctgcctgcgactcggcacgggtgggctatgggatccagccacagctctgccttcagygcttggaaaatgcagctctccccattcacccttcccccaccgacccacagagggtcygcatygggtgcagtgtcccatccagtgatggtcccccctgggagtttgataaggtgcrcacggtttccctcgggcacattggttgggccccccagatccctccccgcggcgcagcaggttttgtttccataaggaaaacgtatggctaacctgctggcgtccttcttgttacagatgttctcgaacaatgatgaagctgtgatcaacaagaagcttcccaaagagctgctgctgcggtaagac

SEQ ID NO: 66072 - DNA, 600 bp, Chicken  19866894333894_5
ttctctgctgatggagtcccctctgtgcgctccatcatcagtgcatggggtcaccacagaaagactcatggagtcgctcctcaccaaacacacaaggctttgccatcactytctcttggaaaagagcacttccttgcactcttgcagcagggttgcctgcagggctgcctgcycgtggccrtagggctgcctgcgactcggcacgggtgggctatgggatccagccacagctctgccttcagygcttggaaaatgcagctctccccattcacccttcccccaccgacccacagagggtcygcatygggtgcagtgtcccatccagtgatggtcccccctgggagtttgataaggtgcrcacggtttccctcgggcacattggttgggccccccagatccctccccgcggcgcagcaggttttgtttccataaggaaaacgtatggctaacctgctggcgtccttcttgttacagatgttctcgaacaatgatgaagctgtgatcaacaagaagcttcccaaagagctgctgctgcggtaagacccttccgcccccccggatcagcgctgtcactgtgatgcaccatccaggctcaggtcc

SEQ ID NO: 66073 - DNA, 600 bp, Chicken  19866894333894_6
tgctgatggagtcccctctgtgcgctccatcatcagtgcatggggtcaccacagaaagactcatggagtcgctcctcaccaaacacacaaggctttgccatcactytctcttggaaaagagcacttccttgcactcttgcagcagggttgcctgcagggctgcctgcycgtggccrtagggctgcctgcgactcggcacgggtgggctatgggatccagccacagctctgccttcagygcttggaaaatgcagctctccccattcacccttcccccaccgacccacagagggtcygcatygggtgcagtgtcccatccagtgatggtcccccctgggagtttgataaggtgcrcacggtttccctcgggcacattggttgggccccccagatccctccccgcggcgcagcaggttttgtttccataaggaaaacgtatggctaacctgctggcgtccttcttgttacagatgttctcgaacaatgatgaagctgtgatcaacaagaagcttcccaaagagctgctgctgcggtaagacccttccgcccccccggatcagcgctgtcactgtgatgcaccatccaggctcaggtcctggca

SEQ ID NO: 66074 - DNA, 600 bp, Chicken  19866894333894_7
gaaagactcatggagtcgctcctcaccaaacacacaaggctttgccatcactytctcttggaaaagagcacttccttgcactcttgcagcagggttgcctgcagggctgcctgcycgtggccrtagggctgcctgcgactcggcacgggtgggctatgggatccagccacagctctgccttcagygcttggaaaatgcagctctccccattcacccttcccccaccgacccacagagggtcygcatygggtgcagtgtcccatccagtgatggtcccccctgggagtttgataaggtgcrcacggtttccctcgggcacattggttgggccccccagatccctccccgcggcgcagcaggttttgtttccataaggaaaacgtatggctaacctgctggcgtccttcttgttacagatgttctcgaacaatgatgaagctgtgatcaacaagaagcttcccaaagagctgctgctgcggtaagacccttccgcccccccggatcagcgctgtcactgtgatgcaccatccaggctcaggtcctggcagagctgcaagcaaggagaagcagagcgagcrcggtgtgctccagcactctgtg

SEQ ID NO: 66075 - DNA, 600 bp, Chicken  19866894333894_8
cctgggagtttgataaggtgcrcacggtttccctcgggcacattggttgggccccccagatccctccccgcggcgcagcaggttttgtttccataaggaaaacgtatggctaacctgctggcgtccttcttgttacagatgttctcgaacaatgatgaagctgtgatcaacaagaagcttcccaaagagctgctgctgcggtaagacccttccgcccccccggatcagcgctgtcactgtgatgcaccatccaggctcaggtcctggcagagctgcaagcaaggagaagcagagcgagcrcggtgtgctccagcactctgtgctgagtgttgatttgctgggcgcctgtattgtggatgggagagctgtagggctgaacrggttccttcatggaagtggatggagggtgtggggcagcggtggcagggcagtgtggcactctgcacccagcaggcagggaggggacagggatggggggcagtggttgggatggggacagaggagcagcagcgctgtgggggtgggtttggtgtcccgatggcagtgctgtgccacacgtggcacctgggcaataggaggagatggagtttataaacgtga

SEQ ID NO: 66076 - DNA, 529 bp, Chicken  19866894333894_9
ggttttgtttccataaggaaaacgtatggctaacctgctggcgtccttcttgttacagatgttctcgaacaatgatgaagctgtgatcaacaagaagcttcccaaagagctgctgctgcggtaagacccttccgcccccccggatcagcgctgtcactgtgatgcaccatccaggctcaggtcctggcagagctgcaagcaaggagaagcagagcgagcrcggtgtgctccagcactctgtgctgagtgttgatttgctgggcgcctgtattgtggatgggagagctgtagggctgaacrggttccttcatggaagtggatggagggtgtggggcagcggtggcagggcagtgtggcactctgcacccagcaggcagggaggggacagggatggggggcagtggttgggatggggacagaggagcagcagcgctgtgggggtgggtttggtgtcccgatggcagtgctgtgccacacgtggcacctgggcaataggaggagatggagtttataaacgtgaaggttcaca

SEQ ID NO: 66077 - DNA, 599 bp, Chicken  19866894333897_1
  misc_feature (1)..(15): n is any nucleotide
nnnnnnnnnnnnnnntcagccctcaaacatccaggcaagccagttctgaagcaaaagtcaggtgcttcatggggttcctccagattctcaagtcaaagtcaagttcctctgggactaaataacaataaagggtgagtcgatataattccctctgcacaagcaccactggggtccctttcctccacctaattgcctgctttcacaaggtatacaggaacttattacttcagagccactgtgcctccgaggaataccactgcaacctgccagcaggatcagagcacgcagagagcaggacargaaccacgctcaccarcacacgacatggttrtgtgagtgccgtttccttagtcgggataaaaacccagacagggctgcaggggaacagccaaccagccatacatcacagggaagtgctggcacattaaacccagaacgttacccacgacacttgaacaggctctgccctgctctccgggggctgctctgtatacagcaaagctcctgaccttccaacatctgttcggtttttatacaaaagcaagtcagggccctgtaatgcagaacatctttgttgacatttcagtccctgggagagc

SEQ ID NO: 66078 - DNA, 600 bp, Chicken  19866894333897_2
cagccctcaaacatccaggcaagccagttctgaagcaaaagtcaggtgcttcatggggttcctccagattctcaagtcaaagtcaagttcctctgggactaaataacaataaagggtgagtcgatataattccctctgcacaagcaccactggggtccctttcctccacctaattgcctgctttcacaaggtatacaggaacttattacttcagagccactgtgcctccgaggaataccactgcaacctgccagcaggatcagagcacgcagagagcaggacargaaccacgctcaccarcacacgacatggttrtgtgagtgccgtttccttagtcgggataaaaacccagacagggctgcaggggaacagccaaccagccatacatcacagggaagtgctggcacattaaacccagaacgttacccacgacacttgaacaggctctgccctgctctccgggggctgctctgtatacagcaaagctcctgaccttccaacatctgttcggtttttatacaaaagcaagtcagggccctgtaatgcagaacatctttgttgacatttcagtccctgggagagcagcactcctttggcttt

SEQ ID NO: 66079 - DNA, 600 bp, Chicken  19866894333897_3
caggcaagccagttctgaagcaaaagtcaggtgcttcatggggttcctccagattctcaagtcaaagtcaagttcctctgggactaaataacaataaagggtgagtcgatataattccctctgcacaagcaccactggggtccctttcctccacctaattgcctgctttcacaaggtatacaggaacttattacttcagagccactgtgcctccgaggaataccactgcaacctgccagcaggatcagagcacgcagagagcaggacargaaccacgctcaccarcacacgacatggttrtgtgagtgccgtttccttagtcgggataaaaacccagacagggctgcaggggaacagccaaccagccatacatcacagggaagtgctggcacattaaacccagaacgttacccacgacacttgaacaggctctgccctgctctccgggggctgctctgtatacagcaaagctcctgaccttccaacatctgttcggtttttatacaaaagcaagtcagggccctgtaatgcagaacatctttgttgacatttcagtccctgggagagcagcactcctttggctttgcatcagccaccttt

SEQ ID NO: 66080 - DNA, 600 bp, Chicken  19866894333897_4
catctcccaatcagcacaaatttgacactgcattaaacaaggaacttgagatctcaagttcatgccatagctttgtgtgcacgcaatcctcacaacagcacaagctggaacagaatatgaggttctcatttaatagcttctaaagtgcttattcttcttgaacaaaacagtaccctcaggtgcaggagacttttggtaaagactatagagtggggaatttatgggaacattacacctggtccgtcctcagcaacagacctggttctgctccagagaggtcagtttggagcctatccaaayrctgtaagcttggctttgcagggcactgcggtggtcactggcacagcacaagctctccatgcaaactcctctagtgcaccccagtcctctcaccgtgtctttatcatagcagctcctgctgcacacagctgggaagaatcccatctgaatcactgcatccaatgcatttttcagcggctgtgcacttctaacaagacttgagaagaatttttcagcctcaggatactctgaaatgcacttaggcttggtaagagatgatgcatgactgttatcacaggaagtcaaatggtactgccagaa

SEQ ID NO: 66081 - DNA, 600 bp, Chicken  19866894333897_5
atctcccaatcagcacaaatttgacactgcattaaacaaggaacttgagatctcaagttcatgccatagctttgtgtgcacgcaatcctcacaacagcacaagctggaacagaatatgaggttctcatttaatagcttctaaagtgcttattcttcttgaacaaaacagtaccctcaggtgcaggagacttttggtaaagactatagagtggggaatttatgggaacattacacctggtccgtcctcagcaacagacctggttctgctccagagaggtcagtttggagcctatccaaayrctgtaagcttggctttgcagggcactgcggtggtcactggcacagcacaagctctccatgcaaactcctctagtgcaccccagtcctctcaccgtgtctttatcatagcagctcctgctgcacacagctgggaagaatcccatctgaatcactgcatccaatgcatttttcagcggctgtgcacttctaacaagacttgagaagaatttttcagcctcaggatactctgaaatgcacttaggcttggtaagagatgatgcatgactgttatcacaggaagtcaaatggtactgccagaaa

SEQ ID NO: 66082 - DNA, 600 bp, Chicken  19866894333901_1
agatgcagatatgttgttttccagaattggtgcagattttatgttgatcatagggtctgtaaagtttaaattggtatagaaatgttctgaaagttcttgatacagtggagttaattccttcgtaatgaaacagccaataaatcatgcagtgggtgtgaaggaaaggatattttctgtcttctgtatcttctccttcatttccaggttacaatttgatcatcttttgtctgtatttcaggttgttttttttctactgatctgcttgtgcatgtgcaaaatttttcttcagaaatatttcckagcctgttagttaatttttcattcctttttggctactgcagtttgcatgatatgaatgttgtcaatcctgaattattttatttttagtttaactgatctatgcatacagtaaagtttctatatacatctgtatttttaacttacaaaactcacaccttggtttctgcctgtccgtgtataagtgtgtaatacattcatgggttttcagcatctgaaacacaaaatatctataagggcattgctaagaagcttatgaatttaggctttcaaaggaggcatgtatagaagattttggtgcaa

SEQ ID NO: 66083 - DNA, 599 bp, Chicken  19866894333903_1
  misc_feature (1)..(104): n is any nucleotide
nnnnnnnnnnnnnnnnnnnnnnnnnnnnnnnnnnnnnnnnnnnnnnnnnnnnnnnnnnnnnnnnnnnnnnnnnnnnnnnnnnnnnnnnnnnnnnnnnnnnnnnnacaacttaagaacagtacaacccacacccaaaaatgctgctcccttgactgctaacccttgataagggtgaggaggggtggacccaggcttcacaccttctcgtcactcaagtgcttgcacctgaactccttgggttagccacatcttctcagctggtgctcaaccattggttcaggctgtgacctggcaattccyatgcattgcctgaaatgcctcagaccctcycctcttctctggcagtktgggggctgctagggagccatgtccatgtatgtggcatggtccattttcggcatgtggcactgacctgctctctgggagatgcctgcagcttggccagctggcccatcaaacaggacagaacgttactrctcttgctgtgcagcccttccctcactcaggacaataactggcatctcctagccaggtcctgattttcactactttatagggatgacatatttttgatatctctcacattttgtgaagtgtga

SEQ ID NO: 66084 - DNA, 599 bp, Chicken  19866894333903_2
  misc_feature (1)..(74): n is any nucleotide
nnnnnnnnnnnnnnnnnnnnnnnnnnnnnnnnnnnnnnnnnnnnnnnnnnnnnnnnnnnnnnnnnnnnnnnnnnacaacttaagaacagtacaacccacacccaaaaatgctgctcccttgactgctaacccttgataagggtgaggaggggtggacccaggcttcacaccttctcgtcactcaagtgcttgcacctgaactccttgggttagccacatcttctcagctggtgctcaaccattggttcaggctgtgacctggcaattccyatgcattgcctgaaatgcctcagaccctcycctcttctctggcagtktgggggctgctagggagccatgtccatgtatgtggcatggtccattttcggcatgtggcactgacctgctctctgggagatgcctgcagcttggccagctggcccatcaaacaggacagaacgttactrctcttgctgtgcagcccttccctcactcaggacaataactggcatctcctagccaggtcctgattttcactactttatagggatgacatatttttgatatctctcacattttgtgaagtgtgactggaagtgaccagtgaattcagaaattgt

SEQ ID NO: 66085 - DNA, 599 bp, Chicken  19866894333903_3
  misc_feature (1)..(57): n is any nucleotide
nnnnnnnnnnnnnnnnnnnnnnnnnnnnnnnnnnnnnnnnnnnnnnnnnnnnnnnnnacaacttaagaacagtacaacccacacccaaaaatgctgctcccttgactgctaacccttgataagggtgaggaggggtggacccaggcttcacaccttctcgtcactcaagtgcttgcacctgaactccttgggttagccacatcttctcagctggtgctcaaccattggttcaggctgtgacctggcaattccyatgcattgcctgaaatgcctcagaccctcycctcttctctggcagtktgggggctgctagggagccatgtccatgtatgtggcatggtccattttcggcatgtggcactgacctgctctctgggagatgcctgcagcttggccagctggcccatcaaacaggacagaacgttactrctcttgctgtgcagcccttccctcactcaggacaataactggcatctcctagccaggtcctgattttcactactttatagggatgacatatttttgatatctctcacattttgtgaagtgtgactggaagtgaccagtgaattcagaaattgtagggcagaaattgcaga

SEQ ID NO: 66086 - DNA, 600 bp, Chicken  19866894333903_4
gaggggtggacccaggcttcacaccttctcgtcactcaagtgcttgcacctgaactccttgggttagccacatcttctcagctggtgctcaaccattggttcaggctgtgacctggcaattccyatgcattgcctgaaatgcctcagaccctcycctcttctctggcagtktgggggctgctagggagccatgtccatgtatgtggcatggtccattttcggcatgtggcactgacctgctctctgggagatgcctgcagcttggccagctggcccatcaaacaggacagaacgttactrctcttgctgtgcagcccttccctcactcaggacaataactggcatctcctagccaggtcctgattttcactactttatagggatgacatatttttgatatctctcacattttgtgaagtgtgactggaagtgaccagtgaattcagaaattgtagggcagaaattgcagagagaacagtatatgtaatgtgacaattgtgcaccacaactggctgcaaaaatgcatgccttcaggaatctgctacctgaacacattggctttctgtgcacaactttcccaaggaagcagatatgagggaa

SEQ ID NO: 66087 - DNA, 600 bp, Chicken  19866894333908_1
catagctgagattcagctggcgacttgtagccacaaagaattcttggctggaagggccactgccagctttgtgccttttatcataaatctggtggtagctggcttgctttggcagccccactttctggagcatagttttggggtgagacgctcagctttcagtttaaacccaggatgcacatttgcagccctgacagttgcagggagaagctgtggggtgtgtcctgcatgtgcacccacggctcaaaaggcagacacaaaataccctgtgctttggttaagaagacattcaaatgtatrtatmaagattaagttgtagtttttgagtaattggtgctgccagtcctttgaaaagatgctgttgtgccaggcytttttgttatggagaagctgcccatcatgttgagatccaggtmtgcagatatgtaagagtcctgggccaggtggcaatttcttccctttgctcccaggaggtgctgagcaggcacagatgtaccaaccacctttcccttgccttgcatatcactgctcacaggcaaccttaatgccagrgctttaaatctaaatacgtacaagacatttttatagcctttttctgtt

SEQ ID NO: 66088 - DNA, 600 bp, Chicken  19866894333908_2
gctgagattcagctggcgacttgtagccacaaagaattcttggctggaagggccactgccagctttgtgccttttatcataaatctggtggtagctggcttgctttggcagccccactttctggagcatagttttggggtgagacgctcagctttcagtttaaacccaggatgcacatttgcagccctgacagttgcagggagaagctgtggggtgtgtcctgcatgtgcacccacggctcaaaaggcagacacaaaataccctgtgctttggttaagaagacattcaaatgtatrtatmaagattaagttgtagtttttgagtaattggtgctgccagtcctttgaaaagatgctgttgtgccaggcytttttgttatggagaagctgcccatcatgttgagatccaggtmtgcagatatgtaagagtcctgggccaggtggcaatttcttccctttgctcccaggaggtgctgagcaggcacagatgtaccaaccacctttcccttgccttgcatatcactgctcacaggcaaccttaatgccagrgctttaaatctaaatacgtacaagacatttttatagcctttttctgtttyga

SEQ ID NO: 66089 - DNA, 600 bp, Chicken  19866894333908_3
ccttttatcataaatctggtggtagctggcttgctttggcagccccactttctggagcatagttttggggtgagacgctcagctttcagtttaaacccaggatgcacatttgcagccctgacagttgcagggagaagctgtggggtgtgtcctgcatgtgcacccacggctcaaaaggcagacacaaaataccctgtgctttggttaagaagacattcaaatgtatrtatmaagattaagttgtagtttttgagtaattggtgctgccagtcctttgaaaagatgctgttgtgccaggcytttttgttatggagaagctgcccatcatgttgagatccaggtmtgcagatatgtaagagtcctgggccaggtggcaatttcttccctttgctcccaggaggtgctgagcaggcacagatgtaccaaccacctttcccttgccttgcatatcactgctcacaggcaaccttaatgccagrgctttaaatctaaatacgtacaagacatttttatagcctttttctgtttygatgaggagttgcctgaaaaagagacgttgttttctgatcagccctactgctgaaaaccactgtgcctctg

SEQ ID NO: 66090 - DNA, 600 bp, Chicken  19866894333908_4
cccactttctggagcatagttttggggtgagacgctcagctttcagtttaaacccaggatgcacatttgcagccctgacagttgcagggagaagctgtggggtgtgtcctgcatgtgcacccacggctcaaaaggcagacacaaaataccctgtgctttggttaagaagacattcaaatgtatrtatmaagattaagttgtagtttttgagtaattggtgctgccagtcctttgaaaagatgctgttgtgccaggcytttttgttatggagaagctgcccatcatgttgagatccaggtmtgcagatatgtaagagtcctgggccaggtggcaatttcttccctttgctcccaggaggtgctgagcaggcacagatgtaccaaccacctttcccttgccttgcatatcactgctcacaggcaaccttaatgccagrgctttaaatctaaatacgtacaagacatttttatagcctttttctgtttygatgaggagttgcctgaaaaagagacgttgttttctgatcagccctactgctgaaaaccactgtgcctctgagcttttcccttccagcagataacatgaagacatatcttaggg

SEQ ID NO: 66091 - DNA, 600 bp, Chicken  19866894333908_5
agacacaaaataccctgtgctttggttaagaagacattcaaatgtatrtatmaagattaagttgtagtttttgagtaattggtgctgccagtcctttgaaaagatgctgttgtgccaggcytttttgttatggagaagctgcccatcatgttgagatccaggtmtgcagatatgtaagagtcctgggccaggtggcaatttcttccctttgctcccaggaggtgctgagcaggcacagatgtaccaaccacctttcccttgccttgcatatcactgctcacaggcaaccttaatgccagrgctttaaatctaaatacgtacaagacatttttatagcctttttctgtttygatgaggagttgcctgaaaaagagacgttgttttctgatcagccctactgctgaaaaccactgtgcctctgagcttttcccttccagcagataacatgaagacatatcttaggggccttggcttcacccttccaggcttggtgtagctccagcagaggcaaagattttatggcccagaaatcacagtttttaattctccttttctgcttccctttgctgtgtgcagacatcatcacagtggtcagtcctc

SEQ ID NO: 66092 - DNA, 600 bp, Chicken  19866894333908_6
tmaagattaagttgtagtttttgagtaattggtgctgccagtcctttgaaaagatgctgttgtgccaggcytttttgttatggagaagctgcccatcatgttgagatccaggtmtgcagatatgtaagagtcctgggccaggtggcaatttcttccctttgctcccaggaggtgctgagcaggcacagatgtaccaaccacctttcccttgccttgcatatcactgctcacaggcaaccttaatgccagrgctttaaatctaaatacgtacaagacatttttatagcctttttctgtttygatgaggagttgcctgaaaaagagacgttgttttctgatcagccctactgctgaaaaccactgtgcctctgagcttttcccttccagcagataacatgaagacatatcttaggggccttggcttcacccttccaggcttggtgtagctccagcagaggcaaagattttatggcccagaaatcacagtttttaattctccttttctgcttccctttgctgtgtgcagacatcatcacagtggtcagtcctccctttctgtttcccccttgctgccttgtgatgtttacatggcgcgtagcg

SEQ ID NO: 66093 - DNA, 599 bp, Chicken  19866894333916_1
  misc_feature (1)..(9): n is any nucleotide
nnnnnnnnntctcctgtgtgaggaaaggctgagcaacctgggtccgttcagcctggggatgagaagactgaggggggcgacaggacaaggagcaacgagccctgcaatgctgtgactgtgtgacaccgggtctctctcagcacggaaccgaacctcagcaagggcactgactcaggaaagcacagccctatgggtagaccgggggagggctggaggcgggcgtcgagcagacgctatcacgtcggggcggtccctgccgtgcctctgcccgagccctcccctcttctgtccctcccttcyccttctcctccgccctcagccgcagtggggccgggagcggtgcggagcggtgcggcggggcaggtaagggaatgggggtcggtgggggtacggggccgggttggttcaccccatccgtcgctcsgagcttaagggcgcagctctcgcgtccgttctggtccagccgcgtttggtgctttcgctttgggttgaggctgagctttgtttcaatggtaatagagcctcaaaaacaagcaccggaatcctgcacgggraggggaagccttgttttcctaacggatggagagaaaacctcgttt

SEQ ID NO: 66094 - DNA, 600 bp, Chicken  19866894333916_2
accgggtctctctcagcacggaaccgaacctcagcaagggcactgactcaggaaagcacagccctatgggtagaccgggggagggctggaggcgggcgtcgagcagacgctatcacgtcggggcggtccctgccgtgcctctgcccgagccctcccctcttctgtccctcccttcyccttctcctccgccctcagccgcagtggggccgggagcggtgcggagcggtgcggcggggcaggtaagggaatgggggtcggtgggggtacggggccgggttggttcaccccatccgtcgctcsgagcttaagggcgcagctctcgcgtccgttctggtccagccgcgtttggtgctttcgctttgggttgaggctgagctttgtttcaatggtaatagagcctcaaaaacaagcaccggaatcctgcacgggraggggaagccttgttttcctaacggatggagagaaaacctcgttttccgagcgctggctgaaaggaaaccagctggcaccaaggggatggagttggcggccgctggggccgtcccgtgatgctcatccctccctcctacccctccccgtggtgttcaccacccccgccct

SEQ ID NO: 66095 - DNA, 474 bp, Chicken  19866894333916_3
tgccgtgcctctgcccgagccctcccctcttctgtccctcccttcyccttctcctccgccctcagccgcagtggggccgggagcggtgcggagcggtgcggcggggcaggtaagggaatgggggtcggtgggggtacggggccgggttggttcaccccatccgtcgctcsgagcttaagggcgcagctctcgcgtccgttctggtccagccgcgtttggtgctttcgctttgggttgaggctgagctttgtttcaatggtaatagagcctcaaaaacaagcaccggaatcctgcacgggraggggaagccttgttttcctaacggatggagagaaaacctcgttttccgagcgctggctgaaaggaaaccagctggcaccaaggggatggagttggcggccgctggggccgtcccgtgatgctcatccctccctcctacccctccccgtggtgttcaccacccccgccctccac

SEQ ID NO: 66096 - DNA, 599 bp, Chicken  19866894333919_1
  misc_feature (1)..(24): n is any nucleotide
nnnnnnnnnnnnnnnnnnnnnnnngcacccacttcatttagtaagggacccacttcttccctcatcttccttttacggttgacatactttaaaaaagcctttcctgttatccttcaccttcttttcaagttttaattccaagagggccttagccttcctcactgcatccctacaggccctgacaacattcctatatttttcctaaggtggacagttcctttttccatatttaatggatctttttctttccttttactttatccatgagttccttgctcatccacacaggactcttgctayctttccctgatttctttctcttagagatgcaccagtcttgagcttggaagaagtgatgtttgtgcaccaaycagctctcatggtcccccttaccttctaacactctagcccatgggatacctccaagtaggtctttgaagaagtcaaagttggctctcctgaagtccagggcacartgaggatgggctgacagttggacttagtgatcttagaagtatttgtcaacctattattctatcaattaaataaaaaagaaaaacaatgaagtcccctagggagctttggaggagcaatgggaa

SEQ ID NO: 66097 - DNA, 600 bp, Chicken  19866894333919_2
tttacggttgacatactttaaaaaagcctttcctgttatccttcaccttcttttcaagttttaattccaagagggccttagccttcctcactgcatccctacaggccctgacaacattcctatatttttcctaaggtggacagttcctttttccatatttaatggatctttttctttccttttactttatccatgagttccttgctcatccacacaggactcttgctayctttccctgatttctttctcttagagatgcaccagtcttgagcttggaagaagtgatgtttgtgcaccaaycagctctcatggtcccccttaccttctaacactctagcccatgggatacctccaagtaggtctttgaagaagtcaaagttggctctcctgaagtccagggcacartgaggatgggctgacagttggacttagtgatcttagaagtatttgtcaacctattattctatcaattaaataaaaaagaaaaacaatgaagtcccctagggagctttggaggagcaatgggaaatgaagccacatgagatactatgtacttactgtagcaagatggctgtaagaagatcagagaaaggtgtgaat

SEQ ID NO: 66098 - DNA, 600 bp, Chicken  19866894333919_3
ccctgacaacattcctatatttttcctaaggtggacagttcctttttccatatttaatggatctttttctttccttttactttatccatgagttccttgctcatccacacaggactcttgctayctttccctgatttctttctcttagagatgcaccagtcttgagcttggaagaagtgatgtttgtgcaccaaycagctctcatggtcccccttaccttctaacactctagcccatgggatacctccaagtaggtctttgaagaagtcaaagttggctctcctgaagtccagggcacartgaggatgggctgacagttggacttagtgatcttagaagtatttgtcaacctattattctatcaattaaataaaaaagaaaaacaatgaagtcccctagggagctttggaggagcaatgggaaatgaagccacatgagatactatgtacttactgtagcaagatggctgtaagaagatcagagaaaggtgtgaatagtggttagtgatggtctttactgcaagtaacaggaagtcaaaacagcagtgcaaagagacatgaagaaaagaaaacagagctgtgcagaaagctacagtaagag

SEQ ID NO: 66099 - DNA, 600 bp, Chicken  19866894333931_1
tgtttcctttccgatcgtttccccgtgtccgtctctgccctcccttcccatgcaactggaaggtccctccccgcgcaacagagcatctttgttggaagtgtttgtcgggctgcacgccctgcagtgctccgtaactcccagcatccacgcgtttcgggtcgccgatgctttttcaatcggagaaaaccaaaaggcagctccgactgggaggagtcccacaaaggtcagtgatgcggagcccttggcttcgacgcagccacaaaggtacggtgtgagtggggatgctgctggccgccccgygttctgtgcagttctgtccgttcctcggtgggatttctgtctgcatcgctctctcgttcgattgactcttaggcacatgcatgtcagttctcgtctgtgatctgtttatttaaaaccggagtcgcttcagaatgatgaggttccgaactggagactttcacagggagctgttgctaaatgctaccttctcagttttttttaactacacgtgtatataagagatcttgtttattagacttgtaagtagacatttaaaatggccttaatttaaaacaacaacaacaaaaaaccaacaaaaaa

SEQ ID NO: 66100 - DNA, 600 bp, Chicken  19866894333937_1
cctgacagatagagcacttaactgtttaaggttatttcttttcacatttggtttccactctgtttgctagaccacccttgatgtttaccttggagcttgcccatcgcttttagatcctgctgcagctcctcatgcaccagcactcccagctccatggaataacagtgacatggattaagcttacactgcactcaggtgtccccaaatatccgattgcacaaaatcaaagtcacagcacagaacaaaattgccaacaactgacaaagaactcattggggttcacaccaacaacaggtccgrraactcggcttagtaaagtttggttaccagactttactatgaaagattgaataaattaatagaaaagctggaccttgtgagatcatgttgtatttatttttataacatccaatgtatcgaagttaaatattccaaagatggtgtaattgtgcaccacaccccatggatctctcttttttccagctttgagtaggactcgagtgattatttgatgagaaagacacacaaaarcattttgatatgtcagcattttgaacgtgggcgaatgacagatggaggacaaggcaagcccaggtccca

SEQ ID NO: 66101 - DNA, 600 bp, Chicken  19866894333937_2
ctgacagatagagcacttaactgtttaaggttatttcttttcacatttggtttccactctgtttgctagaccacccttgatgtttaccttggagcttgcccatcgcttttagatcctgctgcagctcctcatgcaccagcactcccagctccatggaataacagtgacatggattaagcttacactgcactcaggtgtccccaaatatccgattgcacaaaatcaaagtcacagcacagaacaaaattgccaacaactgacaaagaactcattggggttcacaccaacaacaggtccgrraactcggcttagtaaagtttggttaccagactttactatgaaagattgaataaattaatagaaaagctggaccttgtgagatcatgttgtatttatttttataacatccaatgtatcgaagttaaatattccaaagatggtgtaattgtgcaccacaccccatggatctctcttttttccagctttgagtaggactcgagtgattatttgatgagaaagacacacaaaarcattttgatatgtcagcattttgaacgtgggcgaatgacagatggaggacaaggcaagcccaggtcccaa

SEQ ID NO: 66102 - DNA, 575 bp, Chicken  19866894333937_3
acagcacagaacaaaattgccaacaactgacaaagaactcattggggttcacaccaacaacaggtccgrraactcggcttagtaaagtttggttaccagactttactatgaaagattgaataaattaatagaaaagctggaccttgtgagatcatgttgtatttatttttataacatccaatgtatcgaagttaaatattccaaagatggtgtaattgtgcaccacaccccatggatctctcttttttccagctttgagtaggactcgagtgattatttgatgagaaagacacacaaaarcattttgatatgtcagcattttgaacgtgggcgaatgacagatggaggacaaggcaagcccaggtcccaaatgctttgagtgacccaaaagaagaggtaggggccccactctcccttctgacaccctttccagcactggcacactgctatatacaccaccacagtgaggatgtaggaaaagcagcagggaaaagtgtaatgtccagtgacagtggaagatggtgatgtaaagccagcacgggattaaggcgtgtgtgcaaaacctgttttaggac

SEQ ID NO: 66103 - DNA, 600 bp, Chicken  19866894333940_1
gcagaacataatattaattaaaaggcagcatacatttgatttaagtatcaaataaaaataggatggtatcagcaaagaaataaatcctgaatatggttcatcatataaacagtgggtaaaatcagagtgtagctgtgagccagtaccagcaacacgcactctcttctctgatgcagatgtcatcatccagctgtgtcattgcctgaatgcagaggttgaatacttgcccaacacgagcagcttcacttaccctcacatccctgttaggtcctgccaacctgctcagaaggtgaagagccyggggagccttgctgtgggggccctggacttggtggtgtaatgagtaatacaaaatactcaccgctacacatgtgtatacatcccctgtagttgaactccagcaagtttgcatctgggtgttttcataaaggaagatgcatttgtcttccccatttgtggttctctgtgaaaacaaacttcaatgtttattttttccaagacacctaagcaataggtggggttctgtgggagaaagccaaaacaaataataatggctggggaggggggcagaagtcatggatctgctgccacttttgttca

SEQ ID NO: 66104 - DNA, 600 bp, Chicken  19866894333946_1
gcaaggaaatttcgggaattaaccatttagaaggcatcgataaatgaaaacacacctgcagtccagcagcacatagaggcataagttgcttttctggtaatgcatctctaagacactgtgaatccaaaagactcattgccaagcgctaatttttgtcccaatcccatctaacctacaaacacctaaatactgaaaagatgacaccaagcatgggctaacccatatcccagtcaggttgcccagaaatcagtgcaccgggggatatttctccatcctctaaacagtttgctttgcagcagmacttgcagagcctctcttcaaaggctatttcacaccttcattgctctcgctctgaaggcatttttcttcccactccagtatttggaaaaaattgacagctacaaaaatgtaataaaccaaccagtcggattatatatatattacagtttgaaaaagatgaaaggctatattgttaagagagataatttcagcagcttccacaacatagcctgtgcatacacagaagaaagggaactgaagcagcttatattttgtcttgtaaattccctaaaataacccagcttctgatcctcagctcac

SEQ ID NO: 66105 - DNA, 600 bp, Chicken  19866894333966_1
cagcacatcagttcagctttccaggtactctcctgctctcttacttcacttgcagagtgatgttatcacatcctttccccttttgaataccaagaggaggagaacacatccaccaaagcagagacacactggccagcctgcaatgatgtcggtctgcaaaatctggaagccagcagcctgctctgcttaaggcctcacactttattcattctcctttgctctgagctttgggattgcagatccagccagctttgtcttacagctggacacggaaaagggtcatttcacaatcctgtggarctgctccaggtttgctggcctccggtacatatcccactgtgtatttctgacatcccctttccatgtgaactgttctcccatgtgtgatactgccagcattactgctccagactgcagcgtgctatcatgcagaagctgttgcttcaactgagtttagtctggtgtatgcttttcttgctggtgattttctagatgataagcgtctacatgaatccctgcccccatgtttcaaaaggcctagggatggagggcaattattatcatcctcttgtgcttcctgaataggagaacttgcaggaa

SEQ ID NO: 66106 - DNA, 600 bp, Chicken  19866894333995_1
cagtagccaatggctttactttctacatttgaattcttgaaaagttcacaatgcagaaaaacaccttgaaacatttcttgtctccctcttcccacatgagaccctaaccacaatgatttaagaattaaacgagcgtcatttaccatctagggatggactaacaccagcactccactcctgcattcaacctggaaagacgcgttaatgcaaagcaaacaagaaaggagcagaccttaaaccaccatcccagctcagcatccctacaggaggaggtcatgcacagacatgagccctgcatgyccgctcagcaccagggcagcatgtggggaatttggtaattgtatcgtgtgatgattttgcagttgataagcagcagccttctgcctgcagtgctgctagcttggcttctttatgaaaacaacatttgttttcaaagaagaaaaggatacttgcggctgataagtgttatttgatcatttttgtgaaatttgatttgttttatactgtatgctctccgaactactgtgtaaagtcacacttaaagcaaaartgatataaatcataagcaaactcataaaatcctcaccccttaaaagtact

SEQ ID NO: 66107 - DNA, 496 bp, Chicken  19866894333995_2
ctcagcatccctacaggaggaggtcatgcacagacatgagccctgcatgyccgctcagcaccagggcagcatgtggggaatttggtaattgtatcgtgtgatgattttgcagttgataagcagcagccttctgcctgcagtgctgctagcttggcttctttatgaaaacaacatttgttttcaaagaagaaaaggatacttgcggctgataagtgttatttgatcatttttgtgaaatttgatttgttttatactgtatgctctccgaactactgtgtaaagtcacacttaaagcaaaartgatataaatcataagcaaactcataaaatcctcaccccttaaaagtactgcatgagtattatttaaccacgatgcatgcaaattaaatgcaaattaaatagcaatgggtgcggcacatatgcaaatttctaaacccagtccccatttccccattatgaaatgcctacagctataacttcctgactttatgagctg

SEQ ID NO: 66108 - DNA, 600 bp, Chicken  19866894333996_1
agatttgatttatgaattctcactaatacgtttgtagaaagttgcaaaaagaaaaaagaaatcttaaaggctgtagccagtaaagtaaatttactgaaggactccagtaaggtgattgtgaaatacctgcttttgtccatggatccatcctaatgatctgcccctcctcttctgcaaaccattccattttcaagttactgctttctctacttgttccttttctgtgtgtttctgtctggggaccacttctccctccctcctgccccatgaacagaaccattcacgactttgctctttccstcccatttagcttcattctccacccacagggaggcagagtctctccactgagctcaaacggattcacactgcyggagttcctcagcccaaggataccccagagggactgctggaggcttccagagggatgtcacctgctcctgctgccakcgatcacatccaatagagataactcagaacctyggaarctgagaagagcaagaggctcctggccaccatccttgagccccacctcagactttggagtatttyctacaagggaggcaacttgcccccctttctgccacaggagaaataaat

SEQ ID NO: 66109 - DNA, 600 bp, Chicken  19866894333996_2
tagccagtaaagtaaatttactgaaggactccagtaaggtgattgtgaaatacctgcttttgtccatggatccatcctaatgatctgcccctcctcttctgcaaaccattccattttcaagttactgctttctctacttgttccttttctgtgtgtttctgtctggggaccacttctccctccctcctgccccatgaacagaaccattcacgactttgctctttccstcccatttagcttcattctccacccacagggaggcagagtctctccactgagctcaaacggattcacactgcyggagttcctcagcccaaggataccccagagggactgctggaggcttccagagggatgtcacctgctcctgctgccakcgatcacatccaatagagataactcagaacctyggaarctgagaagagcaagaggctcctggccaccatccttgagccccacctcagactttggagtatttyctacaagggaggcaacttgcccccctttctgccacaggagaaataaatatgagatcctttcttacaaaactgtttaacctacactgtaagctaytctaggatgaatcaggattgttcgttt

SEQ ID NO: 66110 - DNA, 600 bp, Chicken  19866894333996_3
taatgatctgcccctcctcttctgcaaaccattccattttcaagttactgctttctctacttgttccttttctgtgtgtttctgtctggggaccacttctccctccctcctgccccatgaacagaaccattcacgactttgctctttccstcccatttagcttcattctccacccacagggaggcagagtctctccactgagctcaaacggattcacactgcyggagttcctcagcccaaggataccccagagggactgctggaggcttccagagggatgtcacctgctcctgctgccakcgatcacatccaatagagataactcagaacctyggaarctgagaagagcaagaggctcctggccaccatccttgagccccacctcagactttggagtatttyctacaagggaggcaacttgcccccctttctgccacaggagaaataaatatgagatcctttcttacaaaactgtttaacctacactgtaagctaytctaggatgaatcaggattgttcgtttgttttcaaagactatagtgagccaaacaggaccataaaaatagcttggccaaggtcagtgaggctggtagtgcctca

SEQ ID NO: 66111 - DNA, 600 bp, Chicken  19866894333996_4
ccattttcaagttactgctttctctacttgttccttttctgtgtgtttctgtctggggaccacttctccctccctcctgccccatgaacagaaccattcacgactttgctctttccstcccatttagcttcattctccacccacagggaggcagagtctctccactgagctcaaacggattcacactgcyggagttcctcagcccaaggataccccagagggactgctggaggcttccagagggatgtcacctgctcctgctgccakcgatcacatccaatagagataactcagaacctyggaarctgagaagagcaagaggctcctggccaccatccttgagccccacctcagactttggagtatttyctacaagggaggcaacttgcccccctttctgccacaggagaaataaatatgagatcctttcttacaaaactgtttaacctacactgtaagctaytctaggatgaatcaggattgttcgtttgttttcaaagactatagtgagccaaacaggaccataaaaatagcttggccaaggtcagtgaggctggtagtgcctcaccgtcagaggcaagtcaagaacttttcagcctt

SEQ ID NO: 66112 - DNA, 600 bp, Chicken  19866894333996_5
ttcaagttactgctttctctacttgttccttttctgtgtgtttctgtctggggaccacttctccctccctcctgccccatgaacagaaccattcacgactttgctctttccstcccatttagcttcattctccacccacagggaggcagagtctctccactgagctcaaacggattcacactgcyggagttcctcagcccaaggataccccagagggactgctggaggcttccagagggatgtcacctgctcctgctgccakcgatcacatccaatagagataactcagaacctyggaarctgagaagagcaagaggctcctggccaccatccttgagccccacctcagactttggagtatttyctacaagggaggcaacttgcccccctttctgccacaggagaaataaatatgagatcctttcttacaaaactgtttaacctacactgtaagctaytctaggatgaatcaggattgttcgtttgttttcaaagactatagtgagccaaacaggaccataaaaatagcttggccaaggtcagtgaggctggtagtgcctcaccgtcagaggcaagtcaagaacttttcagccttaacac

SEQ ID NO: 66113 - DNA, 600 bp, Chicken  19866894333996_6
ctccctcctgccccatgaacagaaccattcacgactttgctctttccstcccatttagcttcattctccacccacagggaggcagagtctctccactgagctcaaacggattcacactgcyggagttcctcagcccaaggataccccagagggactgctggaggcttccagagggatgtcacctgctcctgctgccakcgatcacatccaatagagataactcagaacctyggaarctgagaagagcaagaggctcctggccaccatccttgagccccacctcagactttggagtatttyctacaagggaggcaacttgcccccctttctgccacaggagaaataaatatgagatcctttcttacaaaactgtttaacctacactgtaagctaytctaggatgaatcaggattgttcgtttgttttcaaagactatagtgagccaaacaggaccataaaaatagcttggccaaggtcagtgaggctggtagtgcctcaccgtcagaggcaagtcaagaacttttcagccttaacacatccaaatacttcctatttttaacaacctgcaacagaatgaagtcacactataagctattcctc

SEQ ID NO: 66114 - DNA, 542 bp, Chicken  19866894333996_7
actgagctcaaacggattcacactgcyggagttcctcagcccaaggataccccagagggactgctggaggcttccagagggatgtcacctgctcctgctgccakcgatcacatccaatagagataactcagaacctyggaarctgagaagagcaagaggctcctggccaccatccttgagccccacctcagactttggagtatttyctacaagggaggcaacttgcccccctttctgccacaggagaaataaatatgagatcctttcttacaaaactgtttaacctacactgtaagctaytctaggatgaatcaggattgttcgtttgttttcaaagactatagtgagccaaacaggaccataaaaatagcttggccaaggtcagtgaggctggtagtgcctcaccgtcagaggcaagtcaagaacttttcagccttaacacatccaaatacttcctatttttaacaacctgcaacagaatgaagtcacactataagctattcctcaatcctagaaagacaagagctacgattagaaaaatg

SEQ ID NO: 66115 - DNA, 600 bp, Chicken  19866894334008_1
ggaaacacgcacgtcgttatctgcaggaacatagtcagcccaccatgctctttgcctggctgccttatttatcttgataaatgccagctaagatcaggacttagtgccattagatgtgtctaaaacatgaagctgtcattaccatgtcagcaccaaggactgtttccaaccgtgataatggtggggccacgttttgaacaaagacagatttcagtctgcaatggcctaccacaccagctgtttcccattacagcacagagaccttttgctcatgattttgagctacgccaccattatatwtttttttttaaattggaaaccagaaatatcctccccatctatgactcatattggatctagcaaatggttacctcatggctgggggctggcggagttgagcctgcaacagttgagaaatctgctcgatacagagcatgaagaacactccatcaagtaaggaactccagagtgtgtccagcaccaccagcagacctgcagccagctccacatgcacgcagtgtaacacaagaatgcatattctccacgccatctttttgacattggtctttcactgctcatgctagctctgagggaagtaat

SEQ ID NO: 66116 - DNA, 600 bp, Chicken  19866894334010_1
taattgctgtgcatcgggcagactgaagacaacacatctccacactgagctccctccacgacagcaggactgatttcttgcaggtccagccaacgtggatccctggcacttcccctctcatttcctccaactcaggcaattagcttgcaacaaatctgattttctggctaactgaaagcggtgatgtgaggggaaatatctcccagtgtcatcagctcaactctgactgagacagcccgcttgcacaccctgctaagagaacaagctgcctcaccttaagactcgtgttttcccacaagwaaaaaaatataaagtaaaagcaagttgggcagaaacacagccctgcagagctcactgcaggcagtgccaagcagaaggtgggatgctcgatttgttaatagccttctcccctgcacagagccaagccgcccaacgaagccattccacaggatgcatcgagactgcttcctcctctgagtcctgagctggaaaagcagaaccctttgcttcttcctcctacgtgcayaagtgtcagttttagctcaccacaacaggcacaagacatgcctgctgccggcatcgctgctggctcccggcgcg

SEQ ID NO: 66117 - DNA, 597 bp, Chicken  19866894334010_2
ctgagacagcccgcttgcacaccctgctaagagaacaagctgcctcaccttaagactcgtgttttcccacaagaaaaaaaatataaagtaaaagcaagttgggcagaaacacagccctgcagagctcactgcaggcagtgccaagcagaaggtgggatgctcgatttgttaatagccttctcccctgcacagagccaagccgcccaacgaagccattccacaggatgcatcgagactgcttcctcctctgagtcctgagctggaaaagcagaaccctttgcttcttcctcctacgtgcayaagtgtcagttttagctcaccacaacaggcacaagacatgcctgctgccggcatcgctgctggctcccggcgcgtcgctcacgtctcggcccttcctcctcctcctcctcctcaggtctgcaccagggacccgagcacgccgcaggaaggagagaggctgggaatcctgctttaaaaccctgcggtaaaaccccacggtggggtggagctgggcagggacctataaataggtgcaggataaccctgctaagtcctgggtgatctccaagactgtctggtctaagtggggctgcttgg

SEQ ID NO: 66118 - DNA, 600 bp, Chicken  19866894334014_1
ccttagagagccggcttactctgattgcttttggttttcaaaaacaagaagttgacattttctgcaggaagtgcagcattttctgattagctctaatagccacctttgggagatgctgcaatttatcccagcatttgaaggagctgagtgccattaattgctattcacgggggtattaaaggcactcggtaccttgtgaagatgggaactagaaatcaggctgcaggccgggattgagcaaaacacttcagcaggcactgaaggctgagctgcacacagaccgctgtgcctgcagacccrgagctgtgcacgatgcaccccacggcctccactgagcgcccactggcaaaatccagaggcagcgctcctcttgctytgaaatgaggtatcccacacacacaccttacctgctgccagagctctccaggttttttcccctgttatcacttcactttcttcatatttctcacaactatcccctccaaagtaagtacatctcagcctggtattaaaacagatattttgttaccccagtaaatcagatcttgatgatgccaaagctgcaataatatgtaattcttgtcaaaagagtcacttatt

SEQ ID NO: 66119 - DNA, 600 bp, Chicken  19866894334014_2
cattttctgattagctctaatagccacctttgggagatgctgcaatttatcccagcatttgaaggagctgagtgccattaattgctattcacgggggtattaaaggcactcggtaccttgtgaagatgggaactagaaatcaggctgcaggccgggattgagcaaaacacttcagcaggcactgaaggctgagctgcacacagaccgctgtgcctgcagacccrgagctgtgcacgatgcaccccacggcctccactgagcgcccactggcaaaatccagaggcagcgctcctcttgctytgaaatgaggtatcccacacacacaccttacctgctgccagagctctccaggttttttcccctgttatcacttcactttcttcatatttctcacaactatcccctccaaagtaagtacatctcagcctggtattaaaacagatattttgttaccccagtaaatcagatcttgatgatgccaaagctgcaataatatgtaattcttgtcaaaagagtcacttattttgtttcctatcctcagagacatactctccaagtttgtttctgatggaaacaaatgaaggcaatgatttgtcttga

SEQ ID NO: 66120 - DNA, 600 bp, Chicken  19866894334016_1
attaatgcaatgccagatcaaggttattatatcagtgataagaatcttataaaaagccaaaggcagacaatagtatttgcatttaatgaaacagtgatttttataatgtagctaactaagggaaagaaagatcttttgccaataaaaatctcatcaggtgacggcttcgacagagaatctcagtatccttgtcacccagagctgtcgtaaacaaactactgatgagacaataataataattaacatagtgttaatggaacatagatgctcacagctatttttgagctacagtgtgctgartgaatgccagaaagtgcatgtggcataacatcagaacatgcttctttttccattttctatggttgctgttggattttttcttattctcagtagcaaagccttgctgtagtctgatagtattcatttttgtcctcaaagaaaccatacattaaatcataatatttagaaattcgtagtggatcagaawctcaagtattgtcctttcagaaggtgtctgtttcttgaagctggtccaccaagtcaaaatgttcgccttcattcagcagatatactatagatcattattactgatcagtccta

SEQ ID NO: 66121 - DNA, 439 bp, Chicken  19866894334016_2
cttgtcacccagagctgtcgtaaacaaactactgatgagacaataataataattaacatagtgttaatggaacatagatgctcacagctatttttgagctacagtgtgctgartgaatgccagaaagtgcatgtggcataacatcagaacatgcttctttttccattttctatggttgctgttggattttttcttattctcagtagcaaagccttgctgtagtctgatagtattcatttttgtcctcaaagaaaccatacattaaatcataatatttagaaattcgtagtggatcagaawctcaagtattgtcctttcagaaggtgtctgtttcttgaagctggtccaccaagtcaaaatgttcgccttcattcagcagatatactatagatcattattactgatcagtcctatatacaaaataatcattttacgaata

SEQ ID NO: 66122 - DNA, 600 bp, Chicken  19866894334018_1
cctgctagagtccatccctttccttcttatagcttccatttagatactgaaaagcagtatctaggtatctatctagtatatatccccagagccttctccaggtggaactgccccagcctttcagcctgtcctcataggggaggtgtttccatcccttggatcatttcattcccctggacacgctccaacaggtccatgtttctcctgtactgaggactgcacatctggatgcagtactccaggtgaggtctcaccacagcagaggggcagactcacctccctctccctgctggccatgcytcttttgatgcagcccaggatacagctggctttctgggctgcaagggcacatcgctgactcgtgtccaacttgccatctaccagtatccctaagtccttttcagcaaagctgctatattcttacatcccccagcctgtactaccagtgggggttgccatgacccaaggtgcaagaccttgcacttggatttgttgaacgtcctgaggttcacctgggcccactgctcaagcctgtctgggtctctctgaacggcatcccccttcctcggtgtagcagacacttaagctgtcgactatact

SEQ ID NO: 66123 - DNA, 600 bp, Chicken  19866894334020_1
caatttgaaagacgcagcagaaaagtattaagacagtatactgttttcttctcttccatgcttttgcagggatttgatgtcctctgagtgaatcacatagaatcatagaatggcctgggttgaaaaggaacacaatgaccatcgaatttcaacccccctgctatatgcagggtcaccaaccaccagatcaggctgcccagagccacatccagcctggccttgaatgcctccagggacgaggcatccacaacctccttgggcaacctgttccagtgtatcaccaccctctgtgtgaaaaamttcctcctaatatctaacctaagcctcccctgtctcagtttaagaccattcctccttgtcctatcactattcaccctcgtaaacaactgttccccctcctgtttatacactcccttcaagtattggaaggccacaatgaggtctccctgcagccttctcttctccaagcaaacatgaatttcaggttccaaaatttgtattccttttgacaataaaaggaaacaagaagatttgcagaaaaaatctactttttacagatgacccaaagccataacacaaatcctaatgcttaaattatga

SEQ ID NO: 66124 - DNA, 600 bp, Chicken  19866894334025_1
tatctcattttggaccttgatctttgcagttttttcttttatctgtgtaggctcttctttcactcacttgtatcaattctacctgacttacagtttctatgtgatttgatgcaaagatcacagaaggatcaatcattttagccacctatcttcattcagtttattctgtctgccatgctgagattgtttcctcctccttaaagaacacttgacttgctaggtattagctattagttctcagaatttcttaaactttgcttcattcaagtctgttgtccttaattgtctggacagttctgyttatctgtcattttgtgtatgctttcacccaacctcaatttcacaggcaacgtaacatccactgctatttttccctatgcgtctctcctttagaagctgtacttgttcatagtggagtgaattagttcactgtgtcttttgcagtgattaaatcattttaagtcttcctccttgttattcactatattctattagtgtttggacatcaaaactcacttctcatagcttcattatgaatgaatatactccctaaattataagtccttcccagtataaccttatgaagtatttgttctttgt

SEQ ID NO: 66125 - DNA, 599 bp, Chicken  19866894334029_1
  misc_feature (1)..(123): n is any nucleotide
nnnnnnnnnnnnnnnnnnnnnnnnnnnnnnnnnnnnnnnnnnnnnnnnnnnnnnnnnnnnnnnnnnnnnnnnnnnnnnnnnnnnnnnnnnnnnnnnnnnnnnnnnnnnnnnnnnnnnnnnnnnaactgggtgctgccggtattaaatgcttaacagtcagttggcaatacatgcttattacgtcattccttccactggaggaagtaactacgtgaagggctgttgctgtgatgagcaattcgttttcatgccaagcacctttattttcttctcctcccttccatgaagtacaggtgcagmgctttatttgggaagcacagaaagatgaggtgtctgaaagcttgaagaacctttcatttttaggcttgcatgagagcatgctcataagaaacagatcatttctaattcttgaactaatttcacatcccctttttctctctttactgcttccttgtagctcagatttagttcactttaaataaagcaaacaaagttactctgtgttacagctatcaggtttaaatataaggttaaraaataagagtgggtaataagagtggcccagggtgggtagggagccctaacctaaatgcagatcr

SEQ ID NO: 66126 - DNA, 600 bp, Chicken  19866894334029_2
caattcgttttcatgccaagcacctttattttcttctcctcccttccatgaagtacaggtgcagmgctttatttgggaagcacagaaagatgaggtgtctgaaagcttgaagaacctttcatttttaggcttgcatgagagcatgctcataagaaacagatcatttctaattcttgaactaatttcacatcccctttttctctctttactgcttccttgtagctcagatttagttcactttaaataaagcaaacaaagttactctgtgttacagctatcaggtttaaatataaggttaaraaataagagtgggtaataagagtggcccagggtgggtagggagccctaacctaaatgcagatcrgtatctcagaagggccagactcccagscattcattgtgtctgacccagagcaccccacagagagggttggtaaatcttcactgcagagcacgttttcaaggggctgtgctgtgatgatcaccgtgtgccttggtgctgagatcaccttgagatgtgtagaagcctgcatggagcttcccccaagagtcctgccattgtctgccacccagaagctgtctgggggggagtcagcatcc

SEQ ID NO: 66127 - DNA, 600 bp, Chicken  19866894334029_3
mgctttatttgggaagcacagaaagatgaggtgtctgaaagcttgaagaacctttcatttttaggcttgcatgagagcatgctcataagaaacagatcatttctaattcttgaactaatttcacatcccctttttctctctttactgcttccttgtagctcagatttagttcactttaaataaagcaaacaaagttactctgtgttacagctatcaggtttaaatataaggttaaraaataagagtgggtaataagagtggcccagggtgggtagggagccctaacctaaatgcagatcrgtatctcagaagggccagactcccagscattcattgtgtctgacccagagcaccccacagagagggttggtaaatcttcactgcagagcacgttttcaaggggctgtgctgtgatgatcaccgtgtgccttggtgctgagatcaccttgagatgtgtagaagcctgcatggagcttcccccaagagtcctgccattgtctgccacccagaagctgtctgggggggagtcagcatccctggaggtgctcgaggtgttggactgagtgagggctatggtttagtgaggggatattggtggtc

SEQ ID NO: 66128 - DNA, 600 bp, Chicken  19866894334029_4
gaggtgtctgaaagcttgaagaacctttcatttttaggcttgcatgagagcatgctcataagaaacagatcatttctaattcttgaactaatttcacatcccctttttctctctttactgcttccttgtagctcagatttagttcactttaaataaagcaaacaaagttactctgtgttacagctatcaggtttaaatataaggttaaraaataagagtgggtaataagagtggcccagggtgggtagggagccctaacctaaatgcagatcrgtatctcagaagggccagactcccagscattcattgtgtctgacccagagcaccccacagagagggttggtaaatcttcactgcagagcacgttttcaaggggctgtgctgtgatgatcaccgtgtgccttggtgctgagatcaccttgagatgtgtagaagcctgcatggagcttcccccaagagtcctgccattgtctgccacccagaagctgtctgggggggagtcagcatccctggaggtgctcgaggtgttggactgagtgagggctatggtttagtgaggggatattggtggtcggtggatggttggactgggtgatctta

SEQ ID NO: 66129 - DNA, 600 bp, Chicken  19866894334029_5
tgcatggagcttcccccaagagtcctgccattgtctgccacccagaagctgtctgggggggagtcagcatccctggaggtgctcgaggtgttggactgagtgagggctatggtttagtgaggggatattggtggtcggtggatggttggactgggtgatcttagaggtcttttccatccttcgtgatgctgtgtggctgtagctcccagcctgcacaaacctccagatagatgccagcagttgggtctggtctccaagcagtatcaatgctcaaaaagaaccaaaaggaacaagaaaagkagagctcagagacggttgcttgtcagactcctgttttaacaaggcactgattttaatcaaagccagttcaatcttttgaagccttcaccaccagcatgatgagaagaagggatctcagtgcttttcattcttgttttgccctgcgttgccgaccctccgagaggtggaaacaaacagccgctaatgaccggagtctcctgtgcctgaatagttaacaggtttgtcatacttggtaggaactgcatcctaatttttattcctaacaagatttcagcactaattttggttctgacagatgtg

SEQ ID NO: 66130 - DNA, 599 bp, Chicken  19866894334030_1
taagatgcgtgtaaagtactctgaatctgtgatccaatgaagcaatacaacctactgatagtgggaaaactagaaaaaattttctctcttctcccatacttcctatcaagaataactaaggagctatcccggatcagatcacagatctatgtagctttatatcttgtttctgatgtttgattctgtaaccaatcactaagaaaatgaattcttatttctgaccatttttctctgttacttctctatcacttaggaatattatgtcaaacattctccgcaggtttatcatttaacacacamaaatccattgtgtttcccatctttaacattctttactgtagacaagaggtgaaaggttctagttccattctttcatctataattagaattgctattataagttgtcactgtgctcaatccctgacaacacgattagatgacaggtgcttttactctaggcctcacaatgctaccagaagaaaaactaaactatgttagctttatgtcagggttagaaaacccttaattgttctgtactagggcacatttaaaaaaagggacactggacacttttaaaggcaacatgaaatcagtgtgat

SEQ ID NO: 66131 - DNA, 600 bp, Chicken  19866894334033_1
tgaaggactcactggaggcggcactgacctgtaccctaaaaaaaaagtgaaaatagactttttagaattggtgatgagagttttttgtttttcaagtcctttgacatctgcttgcatgaaacatctgctgcgtcatatgtaagaagagaaggccaagagtaataaagcatttcattaatgtttaatagcatagtgattagcaattcagcaaatgtctatgcccatgggagattggaacttatttgattaatagattaattgcaacctgttccggttgtaattgcaggtgtaactttctaygggtgttgcagactcaccagcactgatgttataggcatgcttacacttcctgtttcctagctgaaaagctgaaaatcaaaataccagacaaatccatatagtgtttttctgaaaggaaaatgacttttgctgtcagagtttttcaacagagatcctctgtgctacctctgaaaaagaatggctattatctctgaaagcacagggctgccttctagaaagtactttttctttcaattattatctttcctgcactttcttatttcagtgttgtaatggacttgaaccgtctctctgaatttc

SEQ ID NO: 66132 - DNA, 600 bp, Chicken  19866894334042_1
gatgaggttccaataagagtactgccacaactggttcactgagttgttaattgagagatttttgtagagagcagtccagcatccactggtttgcatgagtagcttccactcgctaatctgttaaatctgttgaggaggacatttttgatcccctttaatatatactctgtcagatttggctaacctgctgttgcagaggaaaagaaagtagatacatatcacacaatagcattgactttaataaatcaacgtgtttccccgtttaccttaaaccgtgtatgtactgcgggcaaggagccrctgtgtgtttaatgtgaataacagagatattctctccagtcatttaccagtgacttcagtggatttattcctggggtgaatttggctattcctgttttgtgtaggtaaatcttcaggcagtgctaattaaaagaatgtcaactgattttaccattccattatgctggactttgtaaaggttatttatatcactctacatcaggccccagtgagagaatatttctggtggcagttcatctattaaaatagctgcaagataatgtaagcactagaactaaaaataaaactttgtttctcaac

SEQ ID NO: 66133 - DNA, 448 bp, Chicken  19866894334042_2
taaatcttcaggcagtgctaattaaaagaatgtcaactgattttaccattccattatgctggactttgtaaaggttatttatatcactctacatcaggccccagtgagagaatatttctggtggcagttcatctattaaaatagctgcaagataatgtaagcactagaactaaaaataaaactttgtttctcaacagaacaagtgacagcagcatgcatattttcaaattttagcattttaatgtttgctgaatagaaattgcattgctttcattatgttttaagcattgctatgctacyggtggattaactgctgttaagtagaagccgtatgtaaatgtaccaatatctgcaaagacttctcagcacagaaggtagtggtttcctacactctgattatctggcttgaaagcagatgacatagggaaagttttcagatgtgtgttcg

SEQ ID NO: 66134 - DNA, 600 bp, Chicken  19866894334043_1
aggatgagcagtgtaggccacaccacaaagaaagggaaagctaaaggaaaagggaagaatttgcgctggaactgaatttaatttcttcaagacctgacgcagagatgctaggatgctatggagaagtgagcatcagtcactgtgaaattctgacctcattttatctaccatccaggttggcatttggtctgaacaacaggtccccaagcaacagatgtgacaggctttgttaatgatgatatcagctccttgggatggccccaatcataggatgctgccgactcatctgccagagcattrtttacgctctgctgggcctcctgtggacattttgaaggctccacttaacaggttggtggcatttcagtagaagagcaaaggaaaatggggacctgcctgtgtttgtgaaactctacactgtctgtagcaacttctttaaaatgggcaccctaccagttcccatttttatttgagtaacaacagacctaatgcagtcgtttgttgttgattcctaattagcgaacctgtgaccagttcactgctgtttgtagcaaagcactgaatcaattacaaggttctcacatgcacaaagccctttct

SEQ ID NO: 66135 - DNA, 600 bp, Chicken  19866894334047_1
tgggactacatagcaatagacatagaagctgacagcttggcaagtttacttaaagtatccttcaatcagaaaaaatatatatatgtgattttttttttgaaattatttgcaccaaaaatttgactatgaaccaacatgtgtttctgggactgatggatatactcagactagtagcccaagttaaaatgatggtactgaaagagactgatgcaggctgctgaaagagtactgatggatccatttcatttacatgtgtagatacagcacaaatgacgaatggaataggctaggtagatctaygaatacagaatagtggtgccagactcatacccgtcagcattccactatttaagtcacttaagtcccagcagcactttggctacatgttttttaatggaacctctcaggagctgaaaaggatcctatgtccaagttcctcaaatggaagtggtcagaatatctgaaggagcacacattcagaagaataacaaatttgaacccatctcataggagcaggtatttatttatttttcctatgaaatgaaaactctaagcagatgataagagtcatgctggccaccatcacacagtgcactgaat

SEQ ID NO: 66136 - DNA, 600 bp, Chicken  19866894334054_1
cacctatccctaatgggaggcacacagaaacacatcctgaagaagtcaagcagaagcaaacgcagcagaggagtcggagagcagcagcacatcctgcagctgccccgtctgtctgccgtggccagcagctctgaggcaatgccagagactgcagccagcagcagagtctgtgttttactccgcactgtgctcaagttccattcctgacctccaagcaatgctcttcctcgtgcatgaagcaaggcagcaggccttgctgctctgccacgcgcactgctggctgctgcacatcatcaccayggcccactgcatgtgcttacaggagcccagatgctggaaaaataattgactggggggaggtcgggtttgggccggtgagcagtgagctctgatgcctccgggcccctcctgtcacatcccagatagcactgcttttcctcacattttggaactgcaaattacaatcaaatctgtgcaaaatagaatgccagaaagatgaaaatgccatgtttaaaattgatgtatggaataaagtacggtaaatatttttaattggttttmtgaattatgtctgtttcacgcctgctgtgcactgcctgc

SEQ ID NO: 66137 - DNA, 600 bp, Chicken  19866894334054_2
ctgccacgcgcactgctggctgctgcacatcatcaccayggcccactgcatgtgcttacaggagcccagatgctggaaaaataattgactggggggaggtcgggtttgggccggtgagcagtgagctctgatgcctccgggcccctcctgtcacatcccagatagcactgcttttcctcacattttggaactgcaaattacaatcaaatctgtgcaaaatagaatgccagaaagatgaaaatgccatgtttaaaattgatgtatggaataaagtacggtaaatatttttaattggttttmtgaattatgtctgtttcacgcctgctgtgcactgcctgcatttgggaatcagcagtttgtcaccgcaatgggctcccagctcccactgaacacacactaacaagaaccaggagcgagagcacgataaatactgcagaataaatgggaatgcttttcactgcacagccaatatatttcccttcaaaatgagtctctctcctccttggcttgacaacaaaatgtgattgtctttggcctaactggaaaataacctcagaaaacactgattgctccacaaagtcatgtgtcaaatttataaga

SEQ ID NO: 66138 - DNA, 600 bp, Chicken  19866894334054_3
tcagaaaacactgattgctccacaaagtcatgtgtcaaatttataagacatttcacctcaaaaaatgtagaacacgtggggacattccagagcaatcaaggagagagagatgtttgctctgctggccagggctgtctgcaggcctcactcacagcccttttctccttgtatcaacctgaagcagcactcagcgccctggcagtcactttgctgcagacaggcaggcggccactgaagttttgagatttgcatcacaggaagttcaaagccccaccttaaagcacagctcaactgcatttytgccacaatgaaaatatcttctaaggatgggaaatcagtttctttcccaactccatttttaaacagcaggtcagaaagaaaacctacctccttcactctgtaagaattttctcatctcygcaccttctgataagtgcaattccaaggcrcacacacagtgccaaataaggaggtaatggtgcaagactgttccttcccatgacaaaacagccactgcctacaggaagagaggaatgcagaagggacagttgagcagcccctcgctctccagcacaaacgaagccgttccgcctcgtgcag

SEQ ID NO: 66139 - DNA, 491 bp, Chicken  19866894334054_4
tgctggccagggctgtctgcaggcctcactcacagcccttttctccttgtatcaacctgaagcagcactcagcgccctggcagtcactttgctgcagacaggcaggcggccactgaagttttgagatttgcatcacaggaagttcaaagccccaccttaaagcacagctcaactgcatttytgccacaatgaaaatatcttctaaggatgggaaatcagtttctttcccaactccatttttaaacagcaggtcagaaagaaaacctacctccttcactctgtaagaattttctcatctcygcaccttctgataagtgcaattccaaggcrcacacacagtgccaaataaggaggtaatggtgcaagactgttccttcccatgacaaaacagccactgcctacaggaagagaggaatgcagaagggacagttgagcagcccctcgctctccagcacaaacgaagccgttccgcctcgtgcagagcaggcaca

SEQ ID NO: 66140 - DNA, 461 bp, Chicken  19866894334054_5
cacagcccttttctccttgtatcaacctgaagcagcactcagcgccctggcagtcactttgctgcagacaggcaggcggccactgaagttttgagatttgcatcacaggaagttcaaagccccaccttaaagcacagctcaactgcatttytgccacaatgaaaatatcttctaaggatgggaaatcagtttctttcccaactccatttttaaacagcaggtcagaaagaaaacctacctccttcactctgtaagaattttctcatctcygcaccttctgataagtgcaattccaaggcrcacacacagtgccaaataaggaggtaatggtgcaagactgttccttcccatgacaaaacagccactgcctacaggaagagaggaatgcagaagggacagttgagcagcccctcgctctccagcacaaacgaagccgttccgcctcgtgcagagcaggcaca

SEQ ID NO: 66141 - DNA, 600 bp, Chicken  19866894334060_1
ccttggtgaaggcgaaaggctctggttggcgattggagtaattaaaagttgtgctctgtccacgtgggccgagcagaaccgttccccaaactttattccttcgtaatgaagttccccgaatgccccggctttttgctcaggccagggctgccgtctgcaaaagagagccctcccgctctgctccccccgcgggcgatgggcacagccgtgggttggcttcggggctcccggctgagcgccgcggggtcacctcttcaggcgaacacgatgaaaaaaaaaaaccctgtttgagttcttctycaaatgacggctgaaggcatttccatttgtcgccggcgagcagcgaaacagcccgaatgttttgaaaacaggatgctcgggctccgcggtatgaaagaaaaacggaaagagaaacagccgagataggaagaaagcgaggaggctcagcgtgcggccggcgcagcgcggcgcaaacagcgaccgatctgctgacctccgcgccgccgggccctggccccgagccacgccggccccgcgacgtcaccgagcgcgatagtaggcacggcacagctgttgcaagtgtgactcgaatttcctgtc

SEQ ID NO: 66142 - DNA, 600 bp, Chicken  19866894334062_1
cccatctcattccactccaaaaaaatcagctttaagcaatttattagtgtgccacctaggcttcatccatctttattttaacaaattgctgcggcaaatcccttaatccaggcccaaaagaggtaaggctggcatttcaaaatcacatgcaacccagagacgattgactggtctaatctgcttaccctccccgagaactcaacagccattccacatgccagggcagaagcagcacttgggtcaagcattctgaaatgagtcaagggcacctgatgtggttacctcggggaaatgagaccytgtatttctagttcatccttagactgaaaacttatgtgctccactgctgtatgcaaggcaatgacattttctgcttctttttggcaaaagctgactttggccagccaggatacctgggagataccacagaatgaygtacgacagagagacaaatttccctctccttacatccatgtagccatttctgtactgagcttctccacttaggtagacctcacagtgctctgcaatgcctacagagcatcaaaaatagtaaaatttgcctgaaaaaataatggcgtggtacagagaaacctttct

SEQ ID NO: 66143 - DNA, 600 bp, Chicken  19866894334062_2
ttcaaaatcacatgcaacccagagacgattgactggtctaatctgcttaccctccccgagaactcaacagccattccacatgccagggcagaagcagcacttgggtcaagcattctgaaatgagtcaagggcacctgatgtggttacctcggggaaatgagaccytgtatttctagttcatccttagactgaaaacttatgtgctccactgctgtatgcaaggcaatgacattttctgcttctttttggcaaaagctgactttggccagccaggatacctgggagataccacagaatgaygtacgacagagagacaaatttccctctccttacatccatgtagccatttctgtactgagcttctccacttaggtagacctcacagtgctctgcaatgcctacagagcatcaaaaatagtaaaatttgcctgaaaaaataatggcgtggtacagagaaacctttctgaatgaaaacagaagacattacaaagtgatagcaacattattacctgaacaccaatgggactgtgctttctgtgcttttagcttgcacaacattatccttagggataaaaatagcaaacagcatcagcttctttc

SEQ ID NO: 66144 - DNA, 600 bp, Chicken  19866894334067_1
gcaatctgcagcctctctggttgcattgcaggtgagagatgagcaataataaaggaacataacagtatagaacctattgggattttgcaaagagatcaagtaaataactttcatcagaagctttagaaggaaaacactccccactaagcttcatctcatcagatttcaggcttgaataaaatgttcacggtgaaaccaaagctttcccaaagctcatctggatttgcagttttgctacaaagtcataactcagccaagattgattgaaagccccagtgtatttgagaacccctggacccrgtatcaaaggaccctgagctgatggatgagtttgtgtctaaattttagtgaaactgagttacatatggtttgaagtgttcaaagatggtagtgaaattatttgatatttacttgcacatcattgttctaaatatatttatacagccataaggccctgaaggcagatagtgctggtaatgcaggggcttctttgtattttcctgttgaagatattaatttttatctatactgcagtgtctcagagtaacagggcaggattctactgcttcaggcactgcaaaaacaccactgtgagcccca

SEQ ID NO: 66145 - DNA, 448 bp, Chicken  19866894334075_1
actggtaatcctttcaaaaaatccgcctgaaaaagacacagaaggcaaagaaagaaggaggtgaggaaaggaagagtgatattccagctgctgtttgctttgtgctgactcacaaaggagttgctggctcattaagataaatgactgcaggattcggaagcaagtcgccagagctctcagatactgaaacaaaaacccaaggctggttttgtaaaggaagcaaatccccagcttctccatttggctccttgtatgcacagagctcaagaactcgcctattaagctgctaaccaaagctcygcaggcacgcaggccataaagcagcacctctcctgtcggctgggttcggagggaaggcagcacagcccggagcaatccaccagcactaaccacgacaggagaaactacaccaaaactgaaagccccggctgtgactccacagcaacca

SEQ ID NO: 66146 - DNA, 599 bp, Chicken  19866894334077_1
  misc_feature (1)..(136): n is any nucleotide
nnnnnnnnnnnnnnnnnnnnnnnnnnnnnnnnnnnnnnnnnnnnnnnnnnnnnnnnnnnnnnnnnnnnnnnnnnnnnnnnnnnnnnnnnnnnnnnnnnnnnnnnnnnnnnnnnnnnnnnnnnnnnnnnnnnnnnnnaatcattaagattggaaaagaccactgacataatcttggccaatggtaaaaccatttttaccatgcccaccaaccatgactctcagcgccccatccactctgctcttgaacatttccaggtacagtgactgcactacctccttaagcagcccattccaatgcaycaycactctttctgagaagaaatttttcctaatatccaatctgaaccttctctggtgcaacttaaagctgttacatgaaagacattcaccacgtcttagggagtcttttgctccatttttgctccacatggcagattcagaggtgcaagtaactttttctaacctccatgaatgctaggttctagatgtggtactttgaaatacctctagaaggttttatatgaaatacctctagaaggaccattttatactaaatttaaatgtaaaagaattatattcccatttctkcagtgcctggg

SEQ ID NO: 66147 - DNA, 599 bp, Chicken  19866894334077_2
  misc_feature (1)..(133): n is any nucleotide
nnnnnnnnnnnnnnnnnnnnnnnnnnnnnnnnnnnnnnnnnnnnnnnnnnnnnnnnnnnnnnnnnnnnnnnnnnnnnnnnnnnnnnnnnnnnnnnnnnnnnnnnnnnnnnnnnnnnnnnnnnnnnnnnnnnnnaatcattaagattggaaaagaccactgacataatcttggccaatggtaaaaccatttttaccatgcccaccaaccatgactctcagcgccccatccactctgctcttgaacatttccaggtacagtgactgcactacctccttaagcagcccattccaatgcaycaycactctttctgagaagaaatttttcctaatatccaatctgaaccttctctggtgcaacttaaagctgttacatgaaagacattcaccacgtcttagggagtcttttgctccatttttgctccacatggcagattcagaggtgcaagtaactttttctaacctccatgaatgctaggttctagatgtggtactttgaaatacctctagaaggttttatatgaaatacctctagaaggaccattttatactaaatttaaatgtaaaagaattatattcccatttctkcagtgcctgggaaa

SEQ ID NO: 66148 - DNA, 600 bp, Chicken  19866894334077_3
attccaatgcaycaycactctttctgagaagaaatttttcctaatatccaatctgaaccttctctggtgcaacttaaagctgttacatgaaagacattcaccacgtcttagggagtcttttgctccatttttgctccacatggcagattcagaggtgcaagtaactttttctaacctccatgaatgctaggttctagatgtggtactttgaaatacctctagaaggttttatatgaaatacctctagaaggaccattttatactaaatttaaatgtaaaagaattatattcccatttctkcagtgcctgggaaattgtccaaataaaacctagggttgtactatccacattttgcaaacatttctcaatgtactatatttttttccacaattattgtcgccaaataattcatgactgagttagcaacagtgacttattcagaaaaaaattaagattttgacatgtctaagttttcaagcaggagagagtgaaggaragcattctgtcaaatgctttttcttcctgcagagacatccatttcatcagcctatggctgaaatggcattgacattgtaaaaaccaaattttgcacctttgttc

SEQ ID NO: 66149 - DNA, 600 bp, Chicken  19866894334077_4
gatgtggtactttgaaatacctctagaaggttttatatgaaatacctctagaaggaccattttatactaaatttaaatgtaaaagaattatattcccatttctkcagtgcctgggaaattgtccaaataaaacctagggttgtactatccacattttgcaaacatttctcaatgtactatatttttttccacaattattgtcgccaaataattcatgactgagttagcaacagtgacttattcagaaaaaaattaagattttgacatgtctaagttttcaagcaggagagagtgaaggaragcattctgtcaaatgctttttcttcctgcagagacatccatttcatcagcctatggctgaaatggcattgacattgtaaaaaccaaattttgcacctttgttcacctttaagtaggtgagccaataaagaaagaaatatacacgtcccttgtaagtcatatgaaactgttcagctataaaacactagcattcctctcccctagccctgtacataatcccttctctttagtgtgaagcttggatcatttctaattcttttttcatctcagttcctttccctctaatgtgccacccaagca

SEQ ID NO: 66150 - DNA, 600 bp, Chicken  19866894334077_5
atggttgactggatcaccttctgtgtgcataacctacccatgagatgtatccagttagacatcaaaacacactgtcactacatctttgctttagagtgatcatgtacataatctttttgtgacccattcttccactcaaaaggaatagattagtaccatactcagtaaaaagcatgaataggaatttgcaaggtatgaagaagtcactttcacatgaacatcattcctgcaatcatttctactccagtggaggaataggatgatgttctcccctgatgccaaggtaaatagtatggctgytatggcaagggtgaaacagtggggaagttgacttgttatttcttctgcaaaagcctttagaactttctgaaaaaggactcagtatttggtgaagcattaaggacttctttgagaaatatgctttgcttcagaagaagttactcagaatgtggttcaaaatgtgtttttctaactaaagagaaacgtctggtgcatatgaaaaaaatacagaaaactgtgaaagatatctttgttaaatgtcagtgttgtgtgtctgttatttttctgtcttgcaagctaataaacttaagaccagttgct

SEQ ID NO: 66151 - DNA, 600 bp, Chicken  19866894334077_6
ttggtgaagcattaaggacttctttgagaaatatgctttgcttcagaagaagttactcagaatgtggttcaaaatgtgtttttctaactaaagagaaacgtctggtgcatatgaaaaaaatacagaaaactgtgaaagatatctttgttaaatgtcagtgttgtgtgtctgttatttttctgtcttgcaagctaataaacttaagaccagttgctttacagacagggtagttattagctcttggtagaaaataatgtaccatggggaatctacagtatgagaaaaatgctcttaaatatytggggccatctaagccacccagggtaagctttctggcagcagaggtgttattgttgccacagccctgccacaggatgttattctcttaagtaaaatgcagttttcctattaaagaatttgtcttaagcccagcagcaagtagccatgatttcattctcatactcagcatggaagagatggttttgaggaccatgcagtagtggcaaaggagcagaattgtaatttgtggtctaaataaaccaggtggactgcaaaagaaagtcacgtaattctgactgtggtcagaaaaactggaataat

SEQ ID NO: 66152 - DNA, 600 bp, Chicken  19866894334085_1
aatttgtacagcataatttacaaagtcagctcttctatcagtgatgattctttgcaataagaaagtttcctgctcagacatgagtgaggatcactcacagtgctttggtcattgtgaagaagagaaaaccaaagaccgcacaggcggtatcatatgactctttgctgttcttccctagaagtgcttttttgggtctgtcccggtcccttctcagccatccctgtctgaaacttgtcaggctgcgtttctgttattgctgcttaaagctgaaattaattgccaaatgctgtattttcccayagmagcacataaattggggaagtcataaaggctatgctatgcaacagctacgaacacagactgcctgaacgcaaacaactttaaactggagaaaagcttctgcagagtgaaggctgccaaactggtttgcagtcagcagagattgttatcctgctccctgtgctctttctcccagccccatactgtagtctttaacccctcaggccccaggtgaataactcctgcctccatataaataaatcagtgcccaggtgacagcatcactgatagagcaagcacaacagggcataaaaggttatc

SEQ ID NO: 66153 - DNA, 600 bp, Chicken  19866894334085_2
ttgtacagcataatttacaaagtcagctcttctatcagtgatgattctttgcaataagaaagtttcctgctcagacatgagtgaggatcactcacagtgctttggtcattgtgaagaagagaaaaccaaagaccgcacaggcggtatcatatgactctttgctgttcttccctagaagtgcttttttgggtctgtcccggtcccttctcagccatccctgtctgaaacttgtcaggctgcgtttctgttattgctgcttaaagctgaaattaattgccaaatgctgtattttcccayagmagcacataaattggggaagtcataaaggctatgctatgcaacagctacgaacacagactgcctgaacgcaaacaactttaaactggagaaaagcttctgcagagtgaaggctgccaaactggtttgcagtcagcagagattgttatcctgctccctgtgctctttctcccagccccatactgtagtctttaacccctcaggccccaggtgaataactcctgcctccatataaataaatcagtgcccaggtgacagcatcactgatagagcaagcacaacagggcataaaaggttatccac

SEQ ID NO: 66154 - DNA, 599 bp, Chicken  19866894334088_1
  misc_feature (1)..(69): n is any nucleotide
nnnnnnnnnnnnnnnnnnnnnnnnnnnnnnnnnnnnnnnnnnnnnnnnnnnnnnnnnnnnnnnnnnnnncttaccactgttcacctttcctttaggaagtcaggagaactggcctcttgttctgaaccttcgttgcagtacttagcaaaaagcacacagcccagcacattttttccctgcactatagctccaggtggaagctttactaacagcacattccaacagagcaaggcccctcgttgattcctacagaaaaacactatataggacctcctgcataaaagacaatacattataaaytcagcatccttggaccattaagaccaatatctaatctaatttagttcctttttctctctcttgtcagataattattttttgacctccttttctgtactgttccaagccctattcctaagctgagaaatgattctactccaggctaagccagtcactaccacaagatcacgtggaactctggctccagggggatgtttatgttctcgctccccccctgagccccagaacaaacaatctaatcggtctgaaattgcaaaaatagaagcgttggtatttaaatggtgaacaattggatttgg

SEQ ID NO: 66155 - DNA, 600 bp, Chicken  19866894334092_1
ttccagatgatgctttcagaaatgttaactgaaattgccatttctccactgaagatgtaatcaaactctacaagtgttcaattaaacaaatgtttttttctcaaaactatgcttttttttttttttttttttttaatcaggataaattatagaaagtatgacaaaaatgaatagtatcacaacaggatcccagatatcccaatatgggtatctgcaactattgcctgcctttgaaaaccacatacagaggccatatgataaggagtgatattccagtggcaagtctggaacacaagcacktctgacactgcaatcttggtagaaaccaytaaactatctttcccacacaagtcagaaactaacattactttgtgctccatattagtcctcatcagtttccatcaatctagttctaatttgtttttccctaattaggtagtatttcatcaaacatcacctggatcttgcatagcattcttcttccaaaccagaagtctgcactgcagaacatccccactaaatacagcgtacccccagaaactgcttatcaggataaaaactcacyggctgccctcttagtcctcgaggtccctgtggtcc

SEQ ID NO: 66156 - DNA, 600 bp, Chicken  19866894334092_2
tgaaattgccatttctccactgaagatgtaatcaaactctacaagtgttcaattaaacaaatgtttttttctcaaaactatgcttttttttttttttttttttttaatcaggataaattatagaaagtatgacaaaaatgaatagtatcacaacaggatcccagatatcccaatatgggtatctgcaactattgcctgcctttgaaaaccacatacagaggccatatgataaggagtgatattccagtggcaagtctggaacacaagcacktctgacactgcaatcttggtagaaaccaytaaactatctttcccacacaagtcagaaactaacattactttgtgctccatattagtcctcatcagtttccatcaatctagttctaatttgtttttccctaattaggtagtatttcatcaaacatcacctggatcttgcatagcattcttcttccaaaccagaagtctgcactgcagaacatccccactaaatacagcgtacccccagaaactgcttatcaggataaaaactcacyggctgccctcttagtcctcgaggtccctgtggtcctatggggccaggtgtcaccctaaagtgaa

SEQ ID NO: 66157 - DNA, 552 bp, Chicken  19866894334092_3
tgatattccagtggcaagtctggaacacaagcacktctgacactgcaatcttggtagaaaccaytaaactatctttcccacacaagtcagaaactaacattactttgtgctccatattagtcctcatcagtttccatcaatctagttctaatttgtttttccctaattaggtagtatttcatcaaacatcacctggatcttgcatagcattcttcttccaaaccagaagtctgcactgcagaacatccccactaaatacagcgtacccccagaaactgcttatcaggataaaaactcacyggctgccctcttagtcctcgaggtccctgtggtcctatggggccaggtgtcaccctaaagtgaagaaaagtattttggtgagtaggaaagatccgatagggaggcaaacaagtcatcattttaaactgcttctattaaattaaactgttcatgtattaaggaaaaacaagaaaagcttcactgcccccttccagttatgtatgactagcctcttgaattttcaacatttatcacccagtgcagtctgatcac

SEQ ID NO: 66158 - DNA, 600 bp, Chicken  19866894334104_1
aaagatcatagttcccatctttctcccctcatttctctcttctttccacctaaaaacatacaggagtccatagctttgaatcccacggattgggaattggcaagtttgataaacaattccaagttttaagggaatctgaagggaaaggggggaggggaaggagttggccagaagagaggcagaaatgtcaggaatttggtagaggaaatgatgctgagttggatattctcagcaaatattcttccttccttgagataatccctacaagaacgggcttaggagggtgctcagctcacaaamcccacggtgatgcacactactatacgtgcataagaaaatgaacccagatcatcacttgagctaggctacaactggggagaattatggagactaatcaggtaaaaatccgacattaggagcaaccatatggagaagagctccttaaccaatgcaacaaaggagcatgacaaaacaccccaattttaacattcctaccaccacctgtcatttcatgctgcagtttgcaaagragaaacctygcctctcgttgctcaaacagcatgaagaaagagatggaagctaagattcacagggcatcgc

SEQ ID NO: 66159 - DNA, 600 bp, Chicken  19866894334104_2
agcaaatattcttccttccttgagataatccctacaagaacgggcttaggagggtgctcagctcacaaamcccacggtgatgcacactactatacgtgcataagaaaatgaacccagatcatcacttgagctaggctacaactggggagaattatggagactaatcaggtaaaaatccgacattaggagcaaccatatggagaagagctccttaaccaatgcaacaaaggagcatgacaaaacaccccaattttaacattcctaccaccacctgtcatttcatgctgcagtttgcaaagragaaacctygcctctcgttgctcaaacagcatgaagaaagagatggaagctaagattcacagggcatcgctgcccactcccactggctctgctccattgctaacagcatgttccagacgtgcatgcagctgagatgaaagcagaaaaggattattttttggtatgaaggatctgcaaagggaattttttgcacaaaatcctcccgacgctttacaacccacatcccagcctgctttacaacagcatcctgaaacagttatgcccttattacggcatttcagtgcattaaaaatacattgg

SEQ ID NO: 66160 - DNA, 600 bp, Chicken  19866894334104_3
tcttccttccttgagataatccctacaagaacgggcttaggagggtgctcagctcacaaamcccacggtgatgcacactactatacgtgcataagaaaatgaacccagatcatcacttgagctaggctacaactggggagaattatggagactaatcaggtaaaaatccgacattaggagcaaccatatggagaagagctccttaaccaatgcaacaaaggagcatgacaaaacaccccaattttaacattcctaccaccacctgtcatttcatgctgcagtttgcaaagragaaacctygcctctcgttgctcaaacagcatgaagaaagagatggaagctaagattcacagggcatcgctgcccactcccactggctctgctccattgctaacagcatgttccagacgtgcatgcagctgagatgaaagcagaaaaggattattttttggtatgaaggatctgcaaagggaattttttgcacaaaatcctcccgacgctttacaacccacatcccagcctgctttacaacagcatcctgaaacagttatgcccttattacggcatttcagtgcattaaaaatacattgggcaaagcaa

SEQ ID NO: 66161 - DNA, 599 bp, Chicken  19866894334108_1
  misc_feature (1)..(173): n is any nucleotide
nnnnnnnnnnnnnnnnnnnnnnnnnnnnnnnnnnnnnnnnnnnnnnnnnnnnnnnnnnnnnnnnnnnnnnnnnnnnnnnnnnnnnnnnnnnnnnnnnnnnnnnnnnnnnnnnnnnnnnnnnnnnnnnnnnnnnnnnnnnnnnnnnnnnnnnnnnnnnnnnnnnnnnnnnnnnnatgagcacactaagcatcccactctgattcagagcctttgtgtccactagttcagtaacaactggcttttgtgtcatgataggttagcacagaagagatttctcaatgtgtgtgtgtgttatcctcrtagttctcagcttgtggtcagcaggatagttaaacgtggcatccattttatggagaagctggtagaaaagttgtctagattaaagctggctgaaataagagtgtcgcagttaaatggaacaaaactcagtgctaggcttttaaaaagagaacagttttttttatttgtattactctacaagttggttttccctactgtaatcaaggtcatgtgcatccagttgctgtggccragatagattgcatgcgacactgaagtcttctctgtgtctcttgggttcctttgacctacaataaact

SEQ ID NO: 66162 - DNA, 600 bp, Chicken  19866894334108_2
aactggcttttgtgtcatgataggttagcacagaagagatttctcaatgtgtgtgtgtgttatcctcrtagttctcagcttgtggtcagcaggatagttaaacgtggcatccattttatggagaagctggtagaaaagttgtctagattaaagctggctgaaataagagtgtcgcagttaaatggaacaaaactcagtgctaggcttttaaaaagagaacagttttttttatttgtattactctacaagttggttttccctactgtaatcaaggtcatgtgcatccagttgctgtggccragatagattgcatgcgacactgaagtcttctctgtgtctcttgggttcctttgacctacaataaactgagtctggacaggtcttccaaagtactcataaattaayagttacccttgtatcagaaacttatttccatccctataaaaccctataaaacaatgcttgttgtttccatctcgccttggatatctttagggctgtcatttccattgggatgatgctatgtgtgatgtcctgtatccttgctgcccttcagttatcagaccacaggtctaataggtcatcagtgctgggacctta

SEQ ID NO: 66163 - DNA, 588 bp, Chicken  19866894334108_3
ggcatccattttatggagaagctggtagaaaagttgtctagattaaagctggctgaaataagagtgtcgcagttaaatggaacaaaactcagtgctaggcttttaaaaagagaacagttttttttatttgtattactctacaagttggttttccctactgtaatcaaggtcatgtgcatccagttgctgtggccragatagattgcatgcgacactgaagtcttctctgtgtctcttgggttcctttgacctacaataaactgagtctggacaggtcttccaaagtactcataaattaayagttacccttgtatcagaaacttatttccatccctataaaaccctataaaacaatgcttgttgtttccatctcgccttggatatctttagggctgtcatttccattgggatgatgctatgtgtgatgtcctgtatccttgctgcccttcagttatcagaccacaggtctaataggtcatcagtgctgggaccttaagactgctttctgcccaggtataagtagcaccttcccagtttgccagtttgcctgctgttagttatctccttggtttatcaacataccattct

SEQ ID NO: 66164 - DNA, 600 bp, Chicken  19866894334109_1
gtccatagatttctttaaagattcttcactggactctgagcttgccagcaccttcatcacacacactgctccacagagacacagtgccacaactgcacagggcaggttccctttgtctgtggaagcacaaccctgtcattactgaggacagcagggagaagaacacaagcgagtgcagaacaggcattcaaagtcaggtaccaagccccagccctggcccctgctggctttcctgtgccagaaaagggtaacaaaaccagatgtggaaacatgggaaataacaaattattgcaagcctayataagcaagaaaacgttagctaggaacatcaccatcaggttgtaacaagccatcttggcactggccagtatccatgtcygcctgacgccacccctcacattactttatatcccatcagggtaccgtgctcacacctgccacgtctctgcctccccctgctagcccctggtccatgtggtagagcactttctatccagtaaaagcctgatcacacgctagacgttcatttaagtcactacttacgcgacaaaatggccctttttggacgctgtagaaaccaacctgagcttataaaaccct

SEQ ID NO: 66165 - DNA, 600 bp, Chicken  19866894334109_2
cacagtgccacaactgcacagggcaggttccctttgtctgtggaagcacaaccctgtcattactgaggacagcagggagaagaacacaagcgagtgcagaacaggcattcaaagtcaggtaccaagccccagccctggcccctgctggctttcctgtgccagaaaagggtaacaaaaccagatgtggaaacatgggaaataacaaattattgcaagcctayataagcaagaaaacgttagctaggaacatcaccatcaggttgtaacaagccatcttggcactggccagtatccatgtcygcctgacgccacccctcacattactttatatcccatcagggtaccgtgctcacacctgccacgtctctgcctccccctgctagcccctggtccatgtggtagagcactttctatccagtaaaagcctgatcacacgctagacgttcatttaagtcactacttacgcgacaaaatggccctttttggacgctgtagaaaccaacctgagcttataaaacccttygccgagagcagggttttattctgtgcctcctaaggaaggataaaggggaagtaacacaaaagcacagagtaacggct

SEQ ID NO: 66166 - DNA, 600 bp, Chicken  19866894334109_3
aagcaagaaaacgttagctaggaacatcaccatcaggttgtaacaagccatcttggcactggccagtatccatgtcygcctgacgccacccctcacattactttatatcccatcagggtaccgtgctcacacctgccacgtctctgcctccccctgctagcccctggtccatgtggtagagcactttctatccagtaaaagcctgatcacacgctagacgttcatttaagtcactacttacgcgacaaaatggccctttttggacgctgtagaaaccaacctgagcttataaaacccttygccgagagcagggttttattctgtgcctcctaaggaaggataaaggggaagtaacacaaaagcacagagtaacggctgctcagtgcaaatgcccatcgcttgtatgcaaacacagaggcacggcaaacagaagcacaagcagctgggctccaaacacggttactcagtatgactgaaaacaacaggaaaatcgttaatttaaagagaaccaagaatgaagggctcaatgacagcacaccactggaggccgcaggaaagggaacagtacttattgagcagtaaaattacatgaaattgacg

SEQ ID NO: 66167 - DNA, 599 bp, Chicken  19866894334112_1
  misc_feature (1)..(225): n is any nucleotide
nnnnnnnnnnnnnnnnnnnnnnnnnnnnnnnnnnnnnnnnnnnnnnnnnnnnnnnnnnnnnnnnnnnnnnnnnnnnnnnnnnnnnnnnnnnnnnnnnnnnnnnnnnnnnnnnnnnnnnnnnnnnnnnnnnnnnnnnnnnnnnnnnnnnnnnnnnnnnnnnnnnnnnnnnnnnnnnnnnnnnnnnnnnnnnnnnnnnnnnnnnnnnnnnnnnnnnnnnnnnnnnnnccattccagtcccaccgggttccttctttggtgcagtggctgtttggccatgggcttgctctctgtacagctcargctgtacacagaagcatgtrcattaagtctacgttttctttcctccatttccactcttattacttgctggtcatgctttctgtttccttcatttcactgctcttgtcaaaaaccstgcacatctctttgacactgagagatctggaatggcaccggatgtatcccagaacagaaaccttgtgaagcaaaaaaygcatgggggaaagtttataccagcttgtgtacctcaaagcccaggcagtatggctggggactctgcaaggaaagccatgattggatgagaggaagagcttttctgt

SEQ ID NO: 66168 - DNA, 599 bp, Chicken  19866894334112_2
  misc_feature (1)..(205): n is any nucleotide
nnnnnnnnnnnnnnnnnnnnnnnnnnnnnnnnnnnnnnnnnnnnnnnnnnnnnnnnnnnnnnnnnnnnnnnnnnnnnnnnnnnnnnnnnnnnnnnnnnnnnnnnnnnnnnnnnnnnnnnnnnnnnnnnnnnnnnnnnnnnnnnnnnnnnnnnnnnnnnnnnnnnnnnnnnnnnnnnnnnnnnnnnnnnnnnnnnnnnnnnnnnnnccattccagtcccaccgggttccttctttggtgcagtggctgtttggccatgggcttgctctctgtacagctcargctgtacacagaagcatgtrcattaagtctacgttttctttcctccatttccactcttattacttgctggtcatgctttctgtttccttcatttcactgctcttgtcaaaaaccstgcacatctctttgacactgagagatctggaatggcaccggatgtatcccagaacagaaaccttgtgaagcaaaaaaygcatgggggaaagtttataccagcttgtgtacctcaaagcccaggcagtatggctggggactctgcaaggaaagccatgattggatgagaggaagagcttttctgtaaccagagtggtcaaatcct

SEQ ID NO: 66169 - DNA, 599 bp, Chicken  19866894334112_3
  misc_feature (1)..(110): n is any nucleotide
nnnnnnnnnnnnnnnnnnnnnnnnnnnnnnnnnnnnnnnnnnnnnnnnnnnnnnnnnnnnnnnnnnnnnnnnnnnnnnnnnnnnnnnnnnnnnnnnnnnnnnnnnnnnnnccattccagtcccaccgggttccttctttggtgcagtggctgtttggccatgggcttgctctctgtacagctcargctgtacacagaagcatgtrcattaagtctacgttttctttcctccatttccactcttattacttgctggtcatgctttctgtttccttcatttcactgctcttgtcaaaaaccstgcacatctctttgacactgagagatctggaatggcaccggatgtatcccagaacagaaaccttgtgaagcaaaaaaygcatgggggaaagtttataccagcttgtgtacctcaaagcccaggcagtatggctggggactctgcaaggaaagccatgattggatgagaggaagagcttttctgtaaccagagtggtcaaatcctgggttrcccaaagagactgcaggacctcctgccttagatgtgttcagaattcaaatggacacagtactgagcaccccgacctgggttctttgggc

SEQ ID NO: 66170 - DNA, 599 bp, Chicken  19866894334112_4
  misc_feature (1)..(32): n is any nucleotide
nnnnnnnnnnnnnnnnnnnnnnnnnnnnnnnnccattccagtcccaccgggttccttctttggtgcagtggctgtttggccatgggcttgctctctgtacagctcargctgtacacagaagcatgtrcattaagtctacgttttctttcctccatttccactcttattacttgctggtcatgctttctgtttccttcatttcactgctcttgtcaaaaaccstgcacatctctttgacactgagagatctggaatggcaccggatgtatcccagaacagaaaccttgtgaagcaaaaaaygcatgggggaaagtttataccagcttgtgtacctcaaagcccaggcagtatggctggggactctgcaaggaaagccatgattggatgagaggaagagcttttctgtaaccagagtggtcaaatcctgggttrcccaaagagactgcaggacctcctgccttagatgtgttcagaattcaaatggacacagtactgagcaccccgacctgggttctttgggcaggggcatggaatagagatgtccagaggctccttccagcccagccttactctgactgtatgagctgacatctctctgc

SEQ ID NO: 66171 - DNA, 600 bp, Chicken  19866894334112_5
agtctacgttttctttcctccatttccactcttattacttgctggtcatgctttctgtttccttcatttcactgctcttgtcaaaaaccstgcacatctctttgacactgagagatctggaatggcaccggatgtatcccagaacagaaaccttgtgaagcaaaaaaygcatgggggaaagtttataccagcttgtgtacctcaaagcccaggcagtatggctggggactctgcaaggaaagccatgattggatgagaggaagagcttttctgtaaccagagtggtcaaatcctgggttrcccaaagagactgcaggacctcctgccttagatgtgttcagaattcaaatggacacagtactgagcaccccgacctgggttctttgggcaggggcatggaatagagatgtccagaggctccttccagcccagccttactctgactgtatgagctgacatctctctgcagtccggtggctctggtcaagagggattaatccagatcttgtctgcttttccataaggaatagttttcaagatcattttgtcacttcccatgattttccccagtggagcaaatagttcggcaaggaactgtga

SEQ ID NO: 66172 - DNA, 599 bp, Chicken  19866894334126_1
  misc_feature (1)..(4): n is any nucleotide
nnnngcatgggaagtcgattgtctgccgatgtcgcaggatgcggagaatcccatccaggtacacctggtccttactgaagcagcctagaaaagagagagggcctgggaaacaccaggagatgactccagggtaaaccctaccttcccaaatgtgttggggctgacaggatgaaaagactcaaaggatgagcagagccagtactggggtcccatgccagggagaagcctgggcagcagagtgcagcgaggctccattccccagcccttaggaaaaagggacaggcactggagtctctcacyattttcaccgtgatttgtgattgcttttttttaaatgctagaatctaaacgcatcctcaaaaggcttatcttttttctccttcggctgcttgagatattgtgcaaggaatggctaagatccatcagactgggatgactccacggggctccccaggatgcctcatccatccttgcctgatggacagcagccagagaggtgatggggctgcttgggtgttgaaaaatataccataaagggacgtgtaaatctatacgaaagcagagctagggatgaggaggatgagagggcagcagagcca

SEQ ID NO: 66173 - DNA, 600 bp, Chicken  19866894334126_2
cttgagatattgtgcaaggaatggctaagatccatcagactgggatgactccacggggctccccaggatgcctcatccatccttgcctgatggacagcagccagagaggtgatggggctgcttgggtgttgaaaaatataccataaagggacgtgtaaatctatacgaaagcagagctagggatgaggaggatgagagggcagcagagccactgcttggaaggactctctggctggcgatggcaaagccacccagccccagaatgcatccactgaaatagaaaaatcccttccaaaacaytgaagactttgtctccccgaagccgtacctggctgtgaggtgtcagtctggccccgcttggcccgcacgcagtattcccaccggatgccagcatcctggacgtactgctccaggtcctggaagagcgcggagaaggagaggcggctggcccgctcaatggtgtagtagagcaaggctgcacgccagaggaagggctgcttgcggaagaggacactgtgcaggctggccaaaccttcctctgtggggttggcaggcttcaggctgtactgcttgcggccctccgagctgtgccagggctgg

SEQ ID NO: 66174 - DNA, 536 bp, Chicken  19866894334130_1
cctccctactgatgagaagtatgagtgttccttcatgcttgcataacctctgtcatcaaagcacttttactggcttttattctatcgcttcatctatttctgatgtttgccttctctctttctctgtagtgaaagtatggcttgtagctaatgtcccttaaatcccagaggtatacgatgactaatgatagaaaagaaaattcttacatttcttaaatccctgacccagcatttctctgagaacagaggcaaaagaaggcagcagggtcggcaggcttgtgatcaccacatggttagagrgtaaggaagcacaaatactgtttttgtggtgttggctgctgaccacagttgtactagtttgagaaatcatagccagagttttaaataagcttttgtttttcaaaaaagtcaatggttgttaaaggagttgaaattggaaatcgactaagccattgacttctacagaacaaaacgtattatgaaaaagtctctgaaaaatagaagactgtttttaggacaagggaaaattgtaaaaa

SEQ ID NO: 66175 - DNA, 599 bp, Chicken  19866894334131_1
  misc_feature (1)..(11): n is any nucleotide
nnnnnnnnnnncctgacagtacctagctacaagtggcattaaatccagttagagcaaaaggaggggagaggggagaaaagtcactttcttggaaagattgataatatcttaatagataaaccaagttaaaaaaaaaatagataatatcttaaataggtaaaccacaaagttagaggtaagggttaagtgctatatatttacacactagaaaactaggtatagtttggattcctgttctgctcattaaccaggtctaacagagcagcttggtagcgataatctagccatgccaatacagtrtccctgtagatgggatataatttcaacagtgaagttgaatcaaataactcagttgagttacttgttaactttcttaactgctgagtatgcttttgaggatctagttgctgcatgttgcattaactgttcctctaagattaggggtgtgtatatatagtgtgcatatatatctatctcctagttgctaatgacattagtctctgcattggggaaaaaaaaaatacaagcckaagtttattgctgtaactagcacgttagctactctgcaattaagtaatcacagagcaacccaaaacctg

SEQ ID NO: 66176 - DNA, 600 bp, Chicken  19866894334131_2
cctgttctgctcattaaccaggtctaacagagcagcttggtagcgataatctagccatgccaatacagtrtccctgtagatgggatataatttcaacagtgaagttgaatcaaataactcagttgagttacttgttaactttcttaactgctgagtatgcttttgaggatctagttgctgcatgttgcattaactgttcctctaagattaggggtgtgtatatatagtgtgcatatatatctatctcctagttgctaatgacattagtctctgcattggggaaaaaaaaaatacaagcckaagtttattgctgtaactagcacgttagctactctgcaattaagtaatcacagagcaacccaaaacctggttggaaaagtttcacaaagtatcagaagtatcttgattagcttgcaagcctccctaaagcagcacttatcctgttataccaaaatagcagaactttgattgtactcatgttggacttagggggtctgttagcagaaatgagaactcagcactgcattaaacacttggctgatctggagataacaccatgtcatgctgagtgacaggatcctaatcaaaacactttctatt

SEQ ID NO: 66177 - DNA, 600 bp, Chicken  19866894334133_1
agctgcaccttcctgtcccctttatttttcctttttggcatgctaaagatcttttgtataacttgttagctgaagtgtgtggatatgcttcatctgcagccccgctaccagatgctgaagaggcagcaggagtggaaagctgccttcaggctctcccctctgacagacatctgctggagaaaagcagtgtgcagctgtgcctcttctctgagaccactcccatgtaaaatcctacaggggccggtcctgtctcttttcctttccatcatgtgcagaagagctgtaggaaaggtcaggagragcccagggctttgataccatcaatctgttgatggcaaccagctcgcatgttcagctgatgcaatcagtgccatgacacagatgtcacaaaacttacaagagataagcccaaagattaaaatcagttggctggagctgaactaaggaagaaagacgtggtgctggaaggaaagaggagaccttgatgcagttaaggcagtgagggaatcctgctttcacattgggcaaatgctatgtgatttgaggtccyggtgtaaaccactggattgcccctggattcagtttggcttgcaaagtgct

SEQ ID NO: 66178 - DNA, 600 bp, Chicken  19866894334133_2
ctcttttcctttccatcatgtgcagaagagctgtaggaaaggtcaggagragcccagggctttgataccatcaatctgttgatggcaaccagctcgcatgttcagctgatgcaatcagtgccatgacacagatgtcacaaaacttacaagagataagcccaaagattaaaatcagttggctggagctgaactaaggaagaaagacgtggtgctggaaggaaagaggagaccttgatgcagttaaggcagtgagggaatcctgctttcacattgggcaaatgctatgtgatttgaggtccyggtgtaaaccactggattgcccctggattcagtttggcttgcaaagtgctcatgtcttttcttgcctgttcggctgtcattttttgtggtaaaggtgactcattttacctttactgtgaggctgctagagacttgctctggttaaaaaagagaacaaagaataaaccttgtcaaataaagcagaaacatatagaaaatatgggaggtgtgattcgatgcagacatactgtcagtccattttacatttaattcttggtaaaacaggcatttgaatatagacaggcaagtaaggattagcag

SEQ ID NO: 66179 - DNA, 600 bp, Chicken  19866894334150_1
cttcggcatactttcttcccccaagtggacccacatcttgcctttattcattatatatcccaaacaaattcatgaacagaaggatctctctaacttggctttagtagcagagccacacagcaattgaaaagaaattcagtggtttctacctagttgtgctttgagttcttgaggttaaagtaaatctgaaactcaaagtgaaactgtagtctgattgagatgggaaaaaacacctttgcttatatcccatcctgggatgagatacctctctgtaattcagaggccaccacagccctttcrgagttcayggcatgttagaaggaagactaattcacatctatacaaacgtgaatacagttccctatagaacaaagtatgaaaatggcactggcacagarcaagctaacgagagctaaagagatcaagatcatatatacatacaaaaraccctcaagctattacaatctaaaaaaacacaactgatttaatagcaaaatagtactccaaggagctcagtacctaaagctgcccatcagtttaggcctacttcattatgatgtcttcaagccttaaacttcgttgagggtacagaatgtcttt

SEQ ID NO: 66180 - DNA, 600 bp, Chicken  19866894334150_2
tactttcttcccccaagtggacccacatcttgcctttattcattatatatcccaaacaaattcatgaacagaaggatctctctaacttggctttagtagcagagccacacagcaattgaaaagaaattcagtggtttctacctagttgtgctttgagttcttgaggttaaagtaaatctgaaactcaaagtgaaactgtagtctgattgagatgggaaaaaacacctttgcttatatcccatcctgggatgagatacctctctgtaattcagaggccaccacagccctttcrgagttcayggcatgttagaaggaagactaattcacatctatacaaacgtgaatacagttccctatagaacaaagtatgaaaatggcactggcacagarcaagctaacgagagctaaagagatcaagatcatatatacatacaaaaraccctcaagctattacaatctaaaaaaacacaactgatttaatagcaaaatagtactccaaggagctcagtacctaaagctgcccatcagtttaggcctacttcattatgatgtcttcaagccttaaacttcgttgagggtacagaatgtcttttaatgagc

SEQ ID NO: 66181 - DNA, 600 bp, Chicken  19866894334150_3
ctttagtagcagagccacacagcaattgaaaagaaattcagtggtttctacctagttgtgctttgagttcttgaggttaaagtaaatctgaaactcaaagtgaaactgtagtctgattgagatgggaaaaaacacctttgcttatatcccatcctgggatgagatacctctctgtaattcagaggccaccacagccctttcrgagttcayggcatgttagaaggaagactaattcacatctatacaaacgtgaatacagttccctatagaacaaagtatgaaaatggcactggcacagarcaagctaacgagagctaaagagatcaagatcatatatacatacaaaaraccctcaagctattacaatctaaaaaaacacaactgatttaatagcaaaatagtactccaaggagctcagtacctaaagctgcccatcagtttaggcctacttcattatgatgtcttcaagccttaaacttcgttgagggtacagaatgtcttttaatgagcacagctacgctggaacaagccccagcacaagaacattttacaccagaaaaaaagacacacaaataattatttccttccactgtttggaat

SEQ ID NO: 66182 - DNA, 600 bp, Chicken  19866894334150_4
tacctagttgtgctttgagttcttgaggttaaagtaaatctgaaactcaaagtgaaactgtagtctgattgagatgggaaaaaacacctttgcttatatcccatcctgggatgagatacctctctgtaattcagaggccaccacagccctttcrgagttcayggcatgttagaaggaagactaattcacatctatacaaacgtgaatacagttccctatagaacaaagtatgaaaatggcactggcacagarcaagctaacgagagctaaagagatcaagatcatatatacatacaaaaraccctcaagctattacaatctaaaaaaacacaactgatttaatagcaaaatagtactccaaggagctcagtacctaaagctgcccatcagtttaggcctacttcattatgatgtcttcaagccttaaacttcgttgagggtacagaatgtcttttaatgagcacagctacgctggaacaagccccagcacaagaacattttacaccagaaaaaaagacacacaaataattatttccttccactgtttggaatagcatttagcagatgcaccagttagggcacccctcctggagcaaagca

SEQ ID NO: 66183 - DNA, 580 bp, Chicken  19866894334151_1
taatctctacttattgtagtctaagtattgtagtctattgcacatcgtgacaggaggggtaaccacggggttaacttgagtttccccagcacagcgacaatgcttgcgcacatccacagttgtggttaatctttagaatgatgagacgtaatgcgaagcttttcagcaatgaaccctcattgtgaggaaatgctgagaacctccttgcaccaactggaccacctccacccagtagcagcacgccactctgcctcggggctttacagctaacaaaggatctcacaggacctcacctgtggsggagagctttaaaaaacaacgcttctgtgatayccaggcagatatagaaagctctrtagcagaaaggaagaccactcagttcaacagaaattgccacatgcaggtcacccacatcagaacgctacaaggaatcttgtacgtcaagctctacatctaaaaagcagttacataaaaagaaaaaattcctcaacagtactaattttttttccttcttgccacccatctaaaagattaatcagatcaatcatggcacatttctttacagaattctgtgacttaa

SEQ ID NO: 66184 - DNA, 547 bp, Chicken  19866894334151_2
tctattgcacatcgtgacaggaggggtaaccacggggttaacttgagtttccccagcacagcgacaatgcttgcgcacatccacagttgtggttaatctttagaatgatgagacgtaatgcgaagcttttcagcaatgaaccctcattgtgaggaaatgctgagaacctccttgcaccaactggaccacctccacccagtagcagcacgccactctgcctcggggctttacagctaacaaaggatctcacaggacctcacctgtggsggagagctttaaaaaacaacgcttctgtgatayccaggcagatatagaaagctctrtagcagaaaggaagaccactcagttcaacagaaattgccacatgcaggtcacccacatcagaacgctacaaggaatcttgtacgtcaagctctacatctaaaaagcagttacataaaaagaaaaaattcctcaacagtactaattttttttccttcttgccacccatctaaaagattaatcagatcaatcatggcacatttctttacagaattctgtgacttaa

SEQ ID NO: 66185 - DNA, 524 bp, Chicken  19866894334151_3
gggtaaccacggggttaacttgagtttccccagcacagcgacaatgcttgcgcacatccacagttgtggttaatctttagaatgatgagacgtaatgcgaagcttttcagcaatgaaccctcattgtgaggaaatgctgagaacctccttgcaccaactggaccacctccacccagtagcagcacgccactctgcctcggggctttacagctaacaaaggatctcacaggacctcacctgtggsggagagctttaaaaaacaacgcttctgtgatayccaggcagatatagaaagctctrtagcagaaaggaagaccactcagttcaacagaaattgccacatgcaggtcacccacatcagaacgctacaaggaatcttgtacgtcaagctctacatctaaaaagcagttacataaaaagaaaaaattcctcaacagtactaattttttttccttcttgccacccatctaaaagattaatcagatcaatcatggcacatttctttacagaattctgtgacttaa

SEQ ID NO: 66186 - DNA, 600 bp, Chicken  19866894334157_1
attgcctttccttcccccctgcatttccagggagggacatggagaacgaaatcccaagtctgagtttgttgaaatttgtgttgcagatggtgtcggtggaaattcaagccagaagtttatcccaaacgttttgaagccaggctgataattcacagtaggtatttcaggtgcaggacaacttgaattgcatgtgctgagcacattgttctctattttttctcttctttgactgaatatttaaaaaatgcttcgcacaccaggagcgataacactgctagataagagaccggattttgaaawtcaattggcttagagattcttkcagtgttcctttgtttctttcccctttgcttctgcaggggatgcagatgttggatgagtgattgcacaggagccaaagaatcagacagactgtctgtggagctgtgatgacaaacagtgtgtgcagacctggaggtgaggcagcacttactgggactggtgtgagctgcgtgccaaggacagagtacttggagccattctggtaaagtacttattgtgattgcactgaactattgtgggtgtggaatctgtccttcataaaagaaatgagaaggacta

SEQ ID NO: 66187 - DNA, 600 bp, Chicken  19866894334157_2
atttccagggagggacatggagaacgaaatcccaagtctgagtttgttgaaatttgtgttgcagatggtgtcggtggaaattcaagccagaagtttatcccaaacgttttgaagccaggctgataattcacagtaggtatttcaggtgcaggacaacttgaattgcatgtgctgagcacattgttctctattttttctcttctttgactgaatatttaaaaaatgcttcgcacaccaggagcgataacactgctagataagagaccggattttgaaawtcaattggcttagagattcttkcagtgttcctttgtttctttcccctttgcttctgcaggggatgcagatgttggatgagtgattgcacaggagccaaagaatcagacagactgtctgtggagctgtgatgacaaacagtgtgtgcagacctggaggtgaggcagcacttactgggactggtgtgagctgcgtgccaaggacagagtacttggagccattctggtaaagtacttattgtgattgcactgaactattgtgggtgtggaatctgtccttcataaaagaaatgagaaggactataaaaattttattgacacaagc

SEQ ID NO: 66188 - DNA, 599 bp, Chicken  19866894334158_1
  misc_feature (1)..(47): n is any nucleotide
nnnnnnnnnnnnnnnnnnnnnnnnnnnnnnnnnnnnnnnnnnnnnnngacttgtgaggaaagtgaaatgtttaaggataagaagtctttgacttcagtgaatgctttggagtgcgttggaaagtttgcagccatagttgcctcagatttttttttgtcttcttctctattatttcctttttttaattttattttaggagggcttggttgtttgtttgtctgcttgttgcatgtgattggaattgcttccttgcctcctgccgagtaggaagctctcctggagtgcgctgccaaagcccarctccagacaaaccttctgytgcatcccagccccgtgggctggacctgagccttctggggtcatcttcatgccctgctgctgccctggggtttggtaatgctgcacagagcagagacagccctgcaggcgcagcacgggtttgtcatgccttggaacggatgtagggagatctcagggaaggtgttgttgttctcagtgctgctttgaaatgccttggcaaggcattcccctgtcgtttgcaagcacgtcaaaatccaggatgggatctcagagctttggggataggtcgagtgggtgca

SEQ ID NO: 66189 - DNA, 599 bp, Chicken  19866894334158_2
  misc_feature (1)..(28): n is any nucleotide
nnnnnnnnnnnnnnnnnnnnnnnnnnnngacttgtgaggaaagtgaaatgtttaaggataagaagtctttgacttcagtgaatgctttggagtgcgttggaaagtttgcagccatagttgcctcagatttttttttgtcttcttctctattatttcctttttttaattttattttaggagggcttggttgtttgtttgtctgcttgttgcatgtgattggaattgcttccttgcctcctgccgagtaggaagctctcctggagtgcgctgccaaagcccarctccagacaaaccttctgytgcatcccagccccgtgggctggacctgagccttctggggtcatcttcatgccctgctgctgccctggggtttggtaatgctgcacagagcagagacagccctgcaggcgcagcacgggtttgtcatgccttggaacggatgtagggagatctcagggaaggtgttgttgttctcagtgctgctttgaaatgccttggcaaggcattcccctgtcgtttgcaagcacgtcaaaatccaggatgggatctcagagctttggggataggtcgagtgggtgcagagctcccagctgttcctt

SEQ ID NO: 66190 - DNA, 586 bp, Chicken  19866894334159_1
gtgcttctcccttaaatagctcacagcagtatttgaggcaaacgagctacaatgaagaggaaaaagccaacttcttggcacatgggagttgttacagtcatacatacctttaacaatgagggctattcagctatctgacttgcagtgtgaaaagcataatttgtccagataaattgctccccgtgacatcttggcaggtaattctgctaggcgtatcaagcacaacagctgcccactgctaagtataaatgcttgcaagccccctctgacacagttacatcctaagcaccaatccaaaaytttctcrgtaaagaggatgatttattacaaaattctgccctatgaaggagagccgccagttataagaaaccatcaaaaaggagaatgccacgacaaccttctacagccaaccctgctgccctgcatgtgtatgtacgagccagagcacaggcccaggcagtccccacggtgctctgaaggtaacatccatattctgtcttcaggccgaggcaggcagcttgctaccatgcctgaataaaaagaagaaaggtaaagatgggagaggagaaaccctgccctgcttggg

SEQ ID NO: 66191 - DNA, 579 bp, Chicken  19866894334159_2
tcccttaaatagctcacagcagtatttgaggcaaacgagctacaatgaagaggaaaaagccaacttcttggcacatgggagttgttacagtcatacatacctttaacaatgagggctattcagctatctgacttgcagtgtgaaaagcataatttgtccagataaattgctccccgtgacatcttggcaggtaattctgctaggcgtatcaagcacaacagctgcccactgctaagtataaatgcttgcaagccccctctgacacagttacatcctaagcaccaatccaaaaytttctcrgtaaagaggatgatttattacaaaattctgccctatgaaggagagccgccagttataagaaaccatcaaaaaggagaatgccacgacaaccttctacagccaaccctgctgccctgcatgtgtatgtacgagccagagcacaggcccaggcagtccccacggtgctctgaaggtaacatccatattctgtcttcaggccgaggcaggcagcttgctaccatgcctgaataaaaagaagaaaggtaaagatgggagaggagaaaccctgccctgcttggg

SEQ ID NO: 66192 - DNA, 600 bp, Chicken  19866894334161_1
tatgtgtttattggtgacgcgcgtacatcctggtgcaagggggatcattccacctaacttgaacaccgtccgaagaaatcgtgctgtagatataggtcaaactaatacataatcaatagttgacaggaatttgcatacatattcactacattcccgagagcccattagcgtacagtccctccccccacttgcgcgtgtgtggtaggtcgtgatgatgaaggctcgtagccttcctcgtgaaggctcttagtcttcctcgctgcaaacttctgaccccgaagggggggcatcccctggacyggtttcagcttgcacttcagacatctaatcacctccctgccaaatgtttttgagctgttctccggtccttatctttatggccttcrttctccttgttattccggacctagcacctgtgaaagtgcttgaaatcccttgttttctaatamtctctacataaactatctctatttgccccttatgtctaccttgtaaagctgctttctcttttcttgctatgaagcccttctttctatactgcgaggacctgattttgcccttcagaggaaaagcatgggaagtacgaagacttctctgaat

SEQ ID NO: 66193 - DNA, 600 bp, Chicken  19866894334161_2
tagatataggtcaaactaatacataatcaatagttgacaggaatttgcatacatattcactacattcccgagagcccattagcgtacagtccctccccccacttgcgcgtgtgtggtaggtcgtgatgatgaaggctcgtagccttcctcgtgaaggctcttagtcttcctcgctgcaaacttctgaccccgaagggggggcatcccctggacyggtttcagcttgcacttcagacatctaatcacctccctgccaaatgtttttgagctgttctccggtccttatctttatggccttcrttctccttgttattccggacctagcacctgtgaaagtgcttgaaatcccttgttttctaatamtctctacataaactatctctatttgccccttatgtctaccttgtaaagctgctttctcttttcttgctatgaagcccttctttctatactgcgaggacctgattttgcccttcagaggaaaagcatgggaagtacgaagacttctctgaatgtaatgcctcttatttatcatgttagcccacggcatcagaggtggatactggtaatattggtggtatggcagtagaggttaaacct

SEQ ID NO: 66194 - DNA, 600 bp, Chicken  19866894334161_3
attcccgagagcccattagcgtacagtccctccccccacttgcgcgtgtgtggtaggtcgtgatgatgaaggctcgtagccttcctcgtgaaggctcttagtcttcctcgctgcaaacttctgaccccgaagggggggcatcccctggacyggtttcagcttgcacttcagacatctaatcacctccctgccaaatgtttttgagctgttctccggtccttatctttatggccttcrttctccttgttattccggacctagcacctgtgaaagtgcttgaaatcccttgttttctaatamtctctacataaactatctctatttgccccttatgtctaccttgtaaagctgctttctcttttcttgctatgaagcccttctttctatactgcgaggacctgattttgcccttcagaggaaaagcatgggaagtacgaagacttctctgaatgtaatgcctcttatttatcatgttagcccacggcatcagaggtggatactggtaatattggtggtatggcagtagaggttaaaccttctcaccagtattccactacattttgttgccgtgtgacagatggcagcagaggggcagtctga

SEQ ID NO: 66195 - DNA, 599 bp, Chicken  19866894334165_1
  misc_feature (1)..(41): n is any nucleotide
nnnnnnnnnnnnnnnnnnnnnnnnnnnnnnnnnnnnnnnnnacacttggaacattacatccagctctggggcccccagtgaggagagacaaggagctactggagagtccagagaatggccagaaaaaatgatgaagggactgtagcatctctcctttgaggagagcctgcgggacctggctgggactaagcgcagcagagagaaagctcagagaggatcttattaatggtatccatacttcatgggagaaggtgcaaaggtgtagccaggctccttccagttgcacccagtgccaggaaragagacaataagcacaaactggatcactagagagtccgtctgaatgttcagaagcatttacttactgtgtgggtgactgagcactggcacaaagaagttgcccaaagaaatggagatctctatccttgaaaatactaaaaaamcacctgaacatgattctgggcaagcaactatagatggccttgtttcagctgaaccagatgaactcaagaggagtttctctaacctcagcaattctgaatgcgattctgtgaaactacaaatctcataattgccagatacagaggcaaatcagatct

SEQ ID NO: 66196 - DNA, 600 bp, Chicken  19866894334165_2
agcatctctcctttgaggagagcctgcgggacctggctgggactaagcgcagcagagagaaagctcagagaggatcttattaatggtatccatacttcatgggagaaggtgcaaaggtgtagccaggctccttccagttgcacccagtgccaggaaragagacaataagcacaaactggatcactagagagtccgtctgaatgttcagaagcatttacttactgtgtgggtgactgagcactggcacaaagaagttgcccaaagaaatggagatctctatccttgaaaatactaaaaaamcacctgaacatgattctgggcaagcaactatagatggccttgtttcagctgaaccagatgaactcaagaggagtttctctaacctcagcaattctgaatgcgattctgtgaaactacaaatctcataattgccagatacagaggcaaatcagatcttatttcatattgtttgcaaggtttttgattcttgccttcctttttggagtgttatatatggctgttttgatattttgtctgtgacatcagtggaggttgttacagtgtctttaatgttctaaaatttcctgttctttcaaaaaa

SEQ ID NO: 66197 - DNA, 599 bp, Chicken  19866894334166_1
  misc_feature (1)..(141): n is any nucleotide
nnnnnnnnnnnnnnnnnnnnnnnnnnnnnnnnnnnnnnnnnnnnnnnnnnnnnnnnnnnnnnnnnnnnnnnnnnnnnnnnnnnnnnnnnnnnnnnnnnnnnnnnnnnnnnnnnnnnnnnnnnnnnnnnnnnnnnnnnnnnnaagtgaagtaaaagaagtgcttcatatgtgaatgtagagttgagtataccctggccaagaagttcactatcaagaattccattggcccagctgcagcagggctggacacctggatccacatcctaccacgttatattgcaacctggaaatcattaattyggaattttattctatccctcaggataccttccttctgttgtttcatcgtggctgatttcttcagccattttatatctcgtctataaaatataatggttgtttaccacagagtgtctgaggctccttctgatgctcaggtaaaagacacctgccatatatattcagaaaagacataaattgytctatcatttgtaacataaaaaaatcttcatctattaaaatcgcagygtgactgacaaggaacatgcagaaaggccaagagaattctttttctgctcttctaggcagacaataatctg

SEQ ID NO: 66198 - DNA, 600 bp, Chicken  19866894334166_2
tgagtataccctggccaagaagttcactatcaagaattccattggcccagctgcagcagggctggacacctggatccacatcctaccacgttatattgcaacctggaaatcattaattyggaattttattctatccctcaggataccttccttctgttgtttcatcgtggctgatttcttcagccattttatatctcgtctataaaatataatggttgtttaccacagagtgtctgaggctccttctgatgctcaggtaaaagacacctgccatatatattcagaaaagacataaattgytctatcatttgtaacataaaaaaatcttcatctattaaaatcgcagygtgactgacaaggaacatgcagaaaggccaagagaattctttttctgctcttctaggcagacaataatctgacatcttttttgttacatcttgacttagaatgtaagatagaaaaccatgcctctgtgcttacaacagtaacaaacttacaatactgatgttatataaataaccagaagtaatatgttagcactgctcaaaggagaattaggtggacttaaaatggaaaggggaaaactaacctgcatttggc

SEQ ID NO: 66199 - DNA, 600 bp, Chicken  19866894334166_3
cagctgcagcagggctggacacctggatccacatcctaccacgttatattgcaacctggaaatcattaattyggaattttattctatccctcaggataccttccttctgttgtttcatcgtggctgatttcttcagccattttatatctcgtctataaaatataatggttgtttaccacagagtgtctgaggctccttctgatgctcaggtaaaagacacctgccatatatattcagaaaagacataaattgytctatcatttgtaacataaaaaaatcttcatctattaaaatcgcagygtgactgacaaggaacatgcagaaaggccaagagaattctttttctgctcttctaggcagacaataatctgacatcttttttgttacatcttgacttagaatgtaagatagaaaaccatgcctctgtgcttacaacagtaacaaacttacaatactgatgttatataaataaccagaagtaatatgttagcactgctcaaaggagaattaggtggacttaaaatggaaaggggaaaactaacctgcatttggctgctttttgagtaaatattatttsaaatgagattaagatcttcttta

SEQ ID NO: 66200 - DNA, 422 bp, Chicken  19866894334166_4
tcttcatctattaaaatcgcagygtgactgacaaggaacatgcagaaaggccaagagaattctttttctgctcttctaggcagacaataatctgacatcttttttgttacatcttgacttagaatgtaagatagaaaaccatgcctctgtgcttacaacagtaacaaacttacaatactgatgttatataaataaccagaagtaatatgttagcactgctcaaaggagaattaggtggacttaaaatggaaaggggaaaactaacctgcatttggctgctttttgagtaaatattatttsaaatgagattaagatcttctttacttttctgcaggcgccttatgccatgccccattacccccagctctcactcaccatgtatcctggtgcacacatacacttcccagtgatgctgtcgcaat

SEQ ID NO: 66201 - DNA, 600 bp, Chicken  19866894334174_1
tcaaggccaggctggatgtggctctgggcagcctggtctgctggttggcgaccctgcacatagcaggggggttgaaactggatgagcactgtggtcctttgcaacccaggccattctatatgactctgtgataaactgctgcctcccctgtgccatgaaccttctgcccatgggggttacagacggaaagggaagtcaggctctgtggagcaccttccacttcaaggaagcaacgggaagccttgctgatagcccaaattcatgtacgtcccagcaatcagtatggcacgggtgatgccygaaacaccagctgtagatctggcatgcttaatttcttcccttggcggcacagttaaccactgggagtagatttaataacttgctacttgtagtggtcacaaaggaacaaatcagcaacttgtctccaaagggacaacatacgcacayggcgacagctgaaagcattatttatagcatagtggcacaagactactgagtttactcatgactgtactaattagtcagcaattataatgatgtaagagcatctggaatccagactagcacatttcagtattttccatccatcctatcctcatc

SEQ ID NO: 66202 - DNA, 600 bp, Chicken  19866894334174_2
ctgtgccatgaaccttctgcccatgggggttacagacggaaagggaagtcaggctctgtggagcaccttccacttcaaggaagcaacgggaagccttgctgatagcccaaattcatgtacgtcccagcaatcagtatggcacgggtgatgccygaaacaccagctgtagatctggcatgcttaatttcttcccttggcggcacagttaaccactgggagtagatttaataacttgctacttgtagtggtcacaaaggaacaaatcagcaacttgtctccaaagggacaacatacgcacayggcgacagctgaaagcattatttatagcatagtggcacaagactactgagtttactcatgactgtactaattagtcagcaattataatgatgtaagagcatctggaatccagactagcacatttcagtattttccatccatcctatcctcatcaaagaaagatgagcgttgaaaagacaagtacccacagacgtgctacggagggcacggaattccatcactgcgcagcacttatggtaccagtgctcagaaccaaccgagttggattaacgagtaattaattactcaagagcctgtttc

SEQ ID NO: 66203 - DNA, 600 bp, Chicken  19866894334176_1
tcagacagccttcctgtctcaaatgctaagctgttcagaagtatgttgagaggaaaaaatccacttagaatatcaacattatttttgaccactgctcataaagtatggatgaattcctcatttccatctctatctgttcatggactaaataatgtaaaataacataaagctactcttctaaatacattctccaagtattaatatttagagaaaatcactaaccttgaaacatcagaacattcccatgcatagctcaagaaagcgtgtttatgagttggtagtagacacaactaatgcgamtagcattacttttcagtttataaacaaagaaaacaatctgaagagaactgaagctatcttgtaggtcctcaaaaaaagtatgggaagatgcgtgatgtgttattacactacaaatacaaaccaccgtgaagtaaaagcttggcaatttctgccacacagagagcacaaagcccttggcattgatttgcacaaatacagggctggctcagaagcctcatgcacaaattgcccaaggaggctgtggatgccccatccctggaggcattcaaggccaggctggatgtggctctgggcagcctg

SEQ ID NO: 66204 - DNA, 600 bp, Chicken  19866894334187_1
cacacaatataaacacagtttgtatttacatcgtgaggcaagtcttgaacaaccgatctgttctcatgcggataacacctttaaaactggttaaaatatttggagaagagctgaagaaatgaaagaaagctgagctttatatagttccctaagttaaagacgagctcagtaacgatactgactaacaaaggcattgtcaaatgcagtgaatcagtttttctgaactcagttaaattttgctgttaatttgtctggagtcaataaattcagttttatgcatagagaaccatcagcatttgkcactacaaatatttcaagggtaggagtttgtttgtttgaaataatagaaatatatctctcaagcatattagtatttgttacaacaatctgaggaaatgcagatttctatgtttgctgagctgagtcagctgaagtcacttgcgtaaaatccaacatcagagatgctcagctaaggatcacatttttgcaggagtgaataacaaggacttttggttttctttgcctcagaattaatttattattatctgtgccaaacatgactgcttgttcttctgaccacactgctcctgggcgatgcta

SEQ ID NO: 66205 - DNA, 600 bp, Chicken  19866894334191_1
gtgaatctagcttcttttgccttagtgttgtgcatttgtaattagcatttgaaagatctactgaaaccttctgagtatactgagagtgaaagaaagatatcacaagcaaaaatcccaaagaagtctccctacttggggaaaatgagtgtaattggatctgaagggaaatgctgctgctctacctgagtatcatcatgaatgccaaagatgaacaaaaagatgaaagaaaagagggtaagatatgtctggataaaatattcttgaaagggttctctgaccataaatgaaagattccaactrcttgattggtaaaatatgtattccctgagtgactatactgtattctttttgaaatactgaacaggtacctcttycctttggttctactcattgaaaacatttgtggaatgtgtttgcagaaatccaggaactgcattaaaaggaactactatggcagtggacaagcctgaatgagatttaatatcatttcacagaatgagttcaggtatcccatctacattgaagaacattctaatcatctccattctttcgtattttgagattaacatgaacataagaaaaatcttcatagagttgaat

SEQ ID NO: 66206 - DNA, 600 bp, Chicken  19866894334191_2
gtatactgagagtgaaagaaagatatcacaagcaaaaatcccaaagaagtctccctacttggggaaaatgagtgtaattggatctgaagggaaatgctgctgctctacctgagtatcatcatgaatgccaaagatgaacaaaaagatgaaagaaaagagggtaagatatgtctggataaaatattcttgaaagggttctctgaccataaatgaaagattccaactrcttgattggtaaaatatgtattccctgagtgactatactgtattctttttgaaatactgaacaggtacctcttycctttggttctactcattgaaaacatttgtggaatgtgtttgcagaaatccaggaactgcattaaaaggaactactatggcagtggacaagcctgaatgagatttaatatcatttcacagaatgagttcaggtatcccatctacattgaagaacattctaatcatctccattctttcgtattttgagattaacatgaacataagaaaaatcttcatagagttgaatcactaacatgcccctataacaataagtaaattagaccactagtaacaagatgtgtactcccagacttcagctgc

SEQ ID NO: 66207 - DNA, 600 bp, Chicken  19866894334194_1
agaaatgaaggagtatgtgtggccccgagataggtgaggtgagaaactcatgtgcttgtttaaagctaacaggtatcagtgagcacccagttttacaatgacagtgtcacacagaggtgctgtgaatcctttttctcctcctgattgatcactttatcatctggatggccctgaaaagtttagctctaggcaagaacagaagaggaagcgtatctttggcatcttctactctctttttgttaaagggttttagagtctgttttcttctctgactgttgccccatgtcctacctctctgarcccaaacagcaatgttgcattcattacagaatcatagaatgacttggattagaagggaccccagggatcatcctgcatcaggaagggttgccaaccctagatcaagcactagatcagttcacccagggcaccatccaacctggccttgaacacctccagggatgggacatccaccacctctctgggcagctgtgcttgggcctcactgccctctcagtgataaacttcccccacatctaatctaaatctaaatctcccctccgttagtttacatccattccctcttgtcctatcactatc

SEQ ID NO: 66208 - DNA, 600 bp, Chicken  19866894334197_1
tcaggtgctgactgaaaccttcactgattttgtcatacagtaatgaagttcttcttcaaagtggcgttttagcctttgaacacagcatgaacgtgtactgttgcagtgagaaatctaactttttggcttttgaagtatgtacggccagtttgtaggcttcagataattagatttgagaactgtcctggaatgtgtaggaccttcactttgtaggaaaagaaagaattcctcctttggcttgttgtttattgctgctaaacatcttaggaagtctcagcttgtgctctccttttactttgkccccaaagtctacgagaatcatcrtttcttacacaagaatttctcctagcagtaatggttttgcattccccatagcaagtctacattgcaaaatgcgcttactttagtgaagttctcacttgcagaagtggagttcctgttttgtttatttttagatcattgggcaatctctttaagaaaaaaacacccacactaaaacaaacaaaaaagaaaggacagctgctctaaagcctaagttgagtttctttttccccagataagtggcctaaattcagtgttctctcacttatttgcccattg

SEQ ID NO: 66209 - DNA, 600 bp, Chicken  19866894334197_2
tgattttgtcatacagtaatgaagttcttcttcaaagtggcgttttagcctttgaacacagcatgaacgtgtactgttgcagtgagaaatctaactttttggcttttgaagtatgtacggccagtttgtaggcttcagataattagatttgagaactgtcctggaatgtgtaggaccttcactttgtaggaaaagaaagaattcctcctttggcttgttgtttattgctgctaaacatcttaggaagtctcagcttgtgctctccttttactttgkccccaaagtctacgagaatcatcrtttcttacacaagaatttctcctagcagtaatggttttgcattccccatagcaagtctacattgcaaaatgcgcttactttagtgaagttctcacttgcagaagtggagttcctgttttgtttatttttagatcattgggcaatctctttaagaaaaaaacacccacactaaaacaaacaaaaaagaaaggacagctgctctaaagcctaagttgagtttctttttccccagataagtggcctaaattcagtgttctctcacttatttgcccattgggcaatttctctatcatcatctgc

SEQ ID NO: 66210 - DNA, 600 bp, Chicken  19866894334197_3
tctacattgcaaaatgcgcttactttagtgaagttctcacttgcagaagtggagttcctgttttgtttatttttagatcattgggcaatctctttaagaaaaaaacacccacactaaaacaaacaaaaaagaaaggacagctgctctaaagcctaagttgagtttctttttccccagataagtggcctaaattcagtgttctctcacttatttgcccattgggcaatttctctatcatcatctgcaagttctttgtttggtgcagaacgctcagttgaaagccttgggggctattgacargagttagcatctgaactttttccttagataaatagctggattgtttaaaaattatttttgaaattggcattcaagatttggaatgaatccctctaacttcagcaagttagtgtgctgggaatgctcagcttcttcagggacgtcttgaagtatttgcttatacaccactaaaaggtacagaaaagcctcactacaaagatatgcatgtttaccattctctgatgagacttgagatctttgctcccaaagaaaagcagctctctttaccaaataaaaggaagaacaatatttaataacaaa

SEQ ID NO: 66211 - DNA, 600 bp, Chicken  19866894334197_4
aggtacagaaaagcctcactacaaagatatgcatgtttaccattctctgatgagacttgagatctttgctcccaaagaaaagcagctctctttaccaaataaaaggaagaacaatatttaataacaaaggcacatgtacttgggagcaaagggccttttttccccactgtaattgcacagagcaatgctcagttattcctaaattagtaacccagttcttatgaagtcttaagtgccttgattacgcagtctgaatttctggtctgtgccaagatgtgttttagtgctccaaagaagctwaaactctcctaatastggtttcacaatagtttttgtggagagtcccactatgctcagcgccacaccatgtgctgagtggttgggtgatactattacaatttagtgtacagggtgtatgcaagtgtttctacagagaggcctttgtggcctcttcctaaaagagtctagtcaagaggttgagtcaaattgccccaaggcactcctcctcgagagtgagagagaacaggagttagagaggatcaagttaaaaggtgggaagaggtccaacctctattgaagtgtctggtcttaccagagtca

SEQ ID NO: 66212 - DNA, 600 bp, Chicken  19866894334197_5
tcactacaaagatatgcatgtttaccattctctgatgagacttgagatctttgctcccaaagaaaagcagctctctttaccaaataaaaggaagaacaatatttaataacaaaggcacatgtacttgggagcaaagggccttttttccccactgtaattgcacagagcaatgctcagttattcctaaattagtaacccagttcttatgaagtcttaagtgccttgattacgcagtctgaatttctggtctgtgccaagatgtgttttagtgctccaaagaagctwaaactctcctaatastggtttcacaatagtttttgtggagagtcccactatgctcagcgccacaccatgtgctgagtggttgggtgatactattacaatttagtgtacagggtgtatgcaagtgtttctacagagaggcctttgtggcctcttcctaaaagagtctagtcaagaggttgagtcaaattgccccaaggcactcctcctcgagagtgagagagaacaggagttagagaggatcaagttaaaaggtgggaagaggtccaacctctattgaagtgtctggtcttaccagagtcatctctcttccagttc

SEQ ID NO: 66213 - DNA, 600 bp, Chicken  19866894334201_1
tgttagaaggctggtggtgaaatatgtttgcgtgcacgttagagaaaaacaaaaaacaaacgcaccacgaattcatgatcgattccacgatcccagagccctcctaggcacgagggaagaagggttcagcaggagctgaggggttaagtgaggactggctgtccgtccttctgaatgacagccgtggcttacatcaggttaaatcagtctgtgctccgcagactgaggcaaagcagaatggattaaaaactgttttccacatctagccttgagactccttgcagctgtagttctaaatcrccgtgtggggggactgcactcatctcagcagcaagatggggtgtgagaggcatcttcttccaggacagtcctggcagtcagcattggctgaagttttccttattagcacgtctgtatccacaagttccacaagttgattttaggctgggtttgcctgctgtccttttcccctggtacaggctggggagcagcgaggcctgctgggccgcacgggagccacctcacgctccgccaggctggctggcacagggcttcttgttcagccaaggttatctggctgctgaccttgtagcagagctc

SEQ ID NO: 66214 - DNA, 600 bp, Chicken  19866894334214_1
caattgaaagacagcctttcctcagaagttcggagagttcgaaaataaaagcatcattcagcaacatactcaatatttgcaaggggtgcaaaatcactgtattgattggacagtaaacaggatgactgacgcttttcaatttagagtcatgaaatttcaactctcaagtctcccaatgtcagaaagccacctgctagttaccttacaaagttcaactgcgacaacagggaatctttaaagtctttacttttacctcagtattagcttttcaccacgtagaattagtatgctgcagcagtrctaagacaaagcaggatttaactgttccacaaatgcaagcacagaggttaaaaataatcgttattcactcacaaaagcattcagcagacaccatgcagacgtacagcaagaggatcagtgctctcaaactacaactgcattaacaattgcttgtatttgctgaggcagaaactccagctattcttttatgtgagccaaataaaagctgaagaaaattaaacttgaaagcgtgcatatatgtgtgcgtatgtctgtgtaatcaacgcaagaacgatggcaaacatcatttaacggggagca

SEQ ID NO: 66215 - DNA, 600 bp, Chicken  19866894334216_1
taaaatcccatttgctgtcaccaaccatctctctattctttgtgtgccttagcatagtttccaggaagatctgctccatgatgttccccaacacagaggtgagactgactggtgtattgttctctaagtcttcctttttgacttttttaaagatgaggaatatgtttccctgttagcagttgctggaaacttcattagactgccatgagttctcagatacaatggatagtggcatagaaacttatgcatatatgtccatgccataaaaatattgaacttcatcttggggatgaaacttayattttattgcacaataagcttcctagggtgccatgtggcagcttgaggttaacaatccatttccacattctttgtgtctctaaaggagactggagacaagtcttcaggattgtctttggaaagcagaagtgaacaaccacatacaaaatagcaatagctaaggagaaacatgttgtgcatggattaatggggtgtgaaattacattatgcatagaaatatcacccactggtgggcctgagggatttcagactgtggagttggtgtgagtggaaaaagtgttatctgcaagaacctgagca

SEQ ID NO: 66216 - DNA, 600 bp, Chicken  19866894334216_2
tgtggcagcttgaggttaacaatccatttccacattctttgtgtctctaaaggagactggagacaagtcttcaggattgtctttggaaagcagaagtgaacaaccacatacaaaatagcaatagctaaggagaaacatgttgtgcatggattaatggggtgtgaaattacattatgcatagaaatatcacccactggtgggcctgagggatttcagactgtggagttggtgtgagtggaaaaagtgttatctgcaagaacctgagcacacaggttttgagaaaatggaaaacagtaggtwattgccagactgcctttcatatgaacaaaattaaatcctcacctgaattataaacrtttttttattcctgcagcaatcatggactgggaggtttgggtctgaaattctcagcatgtattcccatgggatatgaactgaaccacgatattcatgttgaaggagaactaggttttttctcccctgtaggcagaggatgtcgtaaggcacctttctgactcatgagcaggcttttaattttgcccacatagcagagcattcatctcacatcatatgggaagtaaattgaagcaagtttgtctt

SEQ ID NO: 66217 - DNA, 600 bp, Chicken  19866894334216_3
ctggagacaagtcttcaggattgtctttggaaagcagaagtgaacaaccacatacaaaatagcaatagctaaggagaaacatgttgtgcatggattaatggggtgtgaaattacattatgcatagaaatatcacccactggtgggcctgagggatttcagactgtggagttggtgtgagtggaaaaagtgttatctgcaagaacctgagcacacaggttttgagaaaatggaaaacagtaggtwattgccagactgcctttcatatgaacaaaattaaatcctcacctgaattataaacrtttttttattcctgcagcaatcatggactgggaggtttgggtctgaaattctcagcatgtattcccatgggatatgaactgaaccacgatattcatgttgaaggagaactaggttttttctcccctgtaggcagaggatgtcgtaaggcacctttctgactcatgagcaggcttttaattttgcccacatagcagagcattcatctcacatcatatgggaagtaaattgaagcaagtttgtcttagagtacattctgtttatttttttatgctaaaatattctttaaagttattatttaa

SEQ ID NO: 66218 - DNA, 599 bp, Chicken  19866894334232_1
  misc_feature (1)..(67): n is any nucleotide
nnnnnnnnnnnnnnnnnnnnnnnnnnnnnnnnnnnnnnnnnnnnnnnnnnnnnnnnnnnnnnnnnnnctttccctaaggatatgaagataactgtccacaagcttggaaaagcagacaaaagcctgtagtcaatagttaataattgcatttaaattcaaagtattttagttttgcttattaaaactctctactcaaccagtgtcagttctggctagcactagtgaactgaacatgtgctttaggaggatggtggcctcatgataacaggccatgcagataagaaggcaatacataaaggkttgtcactttgatggtttggtttctctaattccagtcctagaaggatttttcaagtctagatataggctgtgcaaacatctaatgtacaatttattttagytgagaagtctactttttaagttagattccatacaaattagtgacttttgactttgatgactaaacattcataccaagagcaaacaatcagtcagtgcagtattcaagttccttcatcagtgactgcagcagtcattatcacaccagtcaggagtctcctgcttttagccatcagctatatctggtytagcccagcacc

SEQ ID NO: 66219 - DNA, 600 bp, Chicken  19866894334232_2
gcttggaaaagcagacaaaagcctgtagtcaatagttaataattgcatttaaattcaaagtattttagttttgcttattaaaactctctactcaaccagtgtcagttctggctagcactagtgaactgaacatgtgctttaggaggatggtggcctcatgataacaggccatgcagataagaaggcaatacataaaggkttgtcactttgatggtttggtttctctaattccagtcctagaaggatttttcaagtctagatataggctgtgcaaacatctaatgtacaatttattttagytgagaagtctactttttaagttagattccatacaaattagtgacttttgactttgatgactaaacattcataccaagagcaaacaatcagtcagtgcagtattcaagttccttcatcagtgactgcagcagtcattatcacaccagtcaggagtctcctgcttttagccatcagctatatctggtytagcccagcaccatttttgcctctaacacaagattgtgtgccactgacagacactttaaaaaggcagtcatacactaccgagtcttctcatgcatgtcttttcatagagccttt

SEQ ID NO: 66220 - DNA, 600 bp, Chicken  19866894334232_3
aatacataaaggkttgtcactttgatggtttggtttctctaattccagtcctagaaggatttttcaagtctagatataggctgtgcaaacatctaatgtacaatttattttagytgagaagtctactttttaagttagattccatacaaattagtgacttttgactttgatgactaaacattcataccaagagcaaacaatcagtcagtgcagtattcaagttccttcatcagtgactgcagcagtcattatcacaccagtcaggagtctcctgcttttagccatcagctatatctggtytagcccagcaccatttttgcctctaacacaagattgtgtgccactgacagacactttaaaaaggcagtcatacactaccgagtcttctcatgcatgtcttttcatagagcctttgtcttcactaagaagtgaaattgtcatctgatttttctgaaatctaatacctatgttaattatgcagccaacgagcctcaagggattatgtgggaagccaatggcatgtmctttatcatcataaatattgtattacttcaaatacactttggaaattccatgctcagcatttctttaacgatattc

SEQ ID NO: 66221 - DNA, 600 bp, Chicken  19866894334232_4
cttcatcagtgactgcagcagtcattatcacaccagtcaggagtctcctgcttttagccatcagctatatctggtytagcccagcaccatttttgcctctaacacaagattgtgtgccactgacagacactttaaaaaggcagtcatacactaccgagtcttctcatgcatgtcttttcatagagcctttgtcttcactaagaagtgaaattgtcatctgatttttctgaaatctaatacctatgttaattatgcagccaacgagcctcaagggattatgtgggaagccaatggcatgtmctttatcatcataaatattgtattacttcaaatacactttggaaattccatgctcagcatttctttaacgatattcaaaatttcaggacagaatagactcatcatctggtattagaacaagttctactgcttatgtattatttttcatttactgtaatatcaatcttcccttatattttaacaatccagtaaaagatattattacactgttaaattttcaatttaaatgctttagataaataaataaataaatacataaataaaacagttgcaagttgcaaagcttttaccacaaaagaa

SEQ ID NO: 66222 - DNA, 600 bp, Chicken  19866894334234_1
tcctatgtgttcctatgggatcctatggggtcctacggggtcctatggagtcctatggggttcaataggactctatgggttcctatgggatcatatggcgtcctatggaactcaataggatcttatggggtcctatggggtcctatggaactcaataggatcttatgggatcctatgggttcctatgggttcctatggcgtcctatggaactcaataggatcttatgggatcctatggggtcctatggcgtcctatgggactcaataggatcttatgggatcctatggggtcctatgggrtcctatgggttcttttggggtcctatggggttcctacgggttcccgtgcgcccctccgtggccgcgttcccgaagcgaaagccgcgtgttatttttgggtgggaaagccccgattcgctcctttttttttatttattatttttgttgtttttcgtgtctttttcttctccgttttgcagctgcggcctccaggtgtccccggccgtggtatttttgggtcgaaaaagccgctttttggctcacttggaaacctttcgggcgtctccaagcggagcgttggcgggaaatggtgtttttttt

SEQ ID NO: 66223 - DNA, 600 bp, Chicken  19866894334235_1
tatgagctaccaattaaaaatgctgacattcttcaagacaaactctcagtaggagaaccctagaaaaaaaatctcaggaagggagggtccctccagcagtgcatattcctcgaaagcctcctgccaacaatgggtcaattcttgacaagggacctctcccagcaattgtaattccttcaggaagaacctctagtgactatgtgaactttccaaaggggaacatgctcagtgaggcgaggtggaaaaaggaagagggaaaccctcccccctttgcaacagagacaataattctttaaaaaygcactgactctgtatctatacttgaggctacaatttacacagatctctagtcttctcatctggacttattctgtacaaacaaattaaaacaattcaaagacaaacactgaataaggcatcaagccaggcatttgtgctacttttaaacaaaaggaatgaagcctttagataaatagataaataaggagctaagtagaaagacagagatagacagatgatttagacaggcagacaaagatctttgcagagggaattctttcctctttgtagcatgatcatttagcatgatcttttcttgac

SEQ ID NO: 66224 - DNA, 600 bp, Chicken  19866894334249_1
agaggtgtttctttccgtggatcatttttttggcccttctctggacaggcaccaacatgtccatgtctctcctgtactgaggactccacatctggatgcagtactcctggtgaggcctcaccagtgcagagaagagaggcaggatcacctccctcgacctgctggccacacttcttttaatgcaacccaggatatggttggctctccggactgtgagggcacatatctgtctcatgtccagcttgccatccaccattaccccaggtctttttattttttttatgttattggtggtaggcrgacagtcaaactagatggtcttagaggtcttttccaaccctgctgattctatgattccatacagcttcagttttcaggagtatgctagctccctataaataggaaggaaagtcctgatttgagtcagatgcccagttgcagtgttctgaatcactctgcaattaaaatgtttaaatttagctgtgagatctggttgcttatcacttatcttttgctctgagtctgatgatgtttaggtaatcataaacgtctgtaaactgtgcagatgccaaatctaaatgttaaacagctccctcttcc

SEQ ID NO: 66225 - DNA, 600 bp, Chicken  19866894334253_1
tgaaatgtaagccaaacactgacttcctatcattagacctatagtggctcctacaggttcagtagtagcctcttttctagatgatttttctagtataaagacacacagtgtagtcaggggttttaatatagcactgccaactctttacctcagtacacacttcgttaattctgcaacacaggaagcagtgagtagggtgcttcagcagcatccttaaaacgtatctgtgcctactttagtaaatgatgcacatggagcatcagttatggaacagaaatctcaggctggcactgtctgggycgcacttgggctgagttagtcccgactccgtgcatttctagacgagaactgtctagcctactgaggragtaattggcaaggcaatacaaaaccttgtgctttttactatgacttactttgtaattagctggagtgatctctgctttgtgctgtgaagtgggcacttctttgttttgacactaatttatttacatggatggaaatgagtaaacccaggctacttggagctgaaactgctgtcttcctaactaggtgatgctctttgctcatcttggtggttgggcagtttagcttggttct

SEQ ID NO: 66226 - DNA, 600 bp, Chicken  19866894334253_2
gcctcttttctagatgatttttctagtataaagacacacagtgtagtcaggggttttaatatagcactgccaactctttacctcagtacacacttcgttaattctgcaacacaggaagcagtgagtagggtgcttcagcagcatccttaaaacgtatctgtgcctactttagtaaatgatgcacatggagcatcagttatggaacagaaatctcaggctggcactgtctgggycgcacttgggctgagttagtcccgactccgtgcatttctagacgagaactgtctagcctactgaggragtaattggcaaggcaatacaaaaccttgtgctttttactatgacttactttgtaattagctggagtgatctctgctttgtgctgtgaagtgggcacttctttgttttgacactaatttatttacatggatggaaatgagtaaacccaggctacttggagctgaaactgctgtcttcctaactaggtgatgctctttgctcatcttggtggttgggcagtttagcttggttctttcgatttttgtctttctaactgcatttggaaagcagtgttgaagtgtctgtgttgacatgcttgtc

SEQ ID NO: 66227 - DNA, 600 bp, Chicken  19866894334258_1
taaggttgtgtgtttgtctttttttttcccctttaggtaaaatgtgttgagctcagtcctcatacagactaccagttgaaggctacagtgcaaatggaaaatctgcaagaagcaattagtgctgtcaacagtcttcacagatacaaaattggcagtaaaaggatccaggtctcattagcaacaggagctgctaataaatcactctctctccttaggtaatgaacgttcctttaattgccattgtgtctttttagtaattaagagatttaaaatactgaataaaagaactataggaaaacmgagtaaaaatctgtctaattacctagtgaatgtgctaagtacaacaaggctggcagttttcagttgagcatttttacactgcttacacttggagaccacactttttcttagtagggtgcttatgctggacttcaattactattttcatagtattgtatgcctcagtgtactttttgtggctgaatgagagtataaatctcgtatttcttttctctgtaagatgcatatgtgcatcttcttccttaaagagatgattcgttttaaatccagttgctatttcagatctgttttctttgtgga

SEQ ID NO: 66228 - DNA, 600 bp, Chicken  19866894334262_1
gaagcctgaagtgggctgcttgtagggaaagcaagtaataacttgaggagaaaagcatcttggtatgttgttctgtgattccaggagactatttttatagaaacagactataatcaattcaagaattctcttaagtctccacaaacaagaaactgagaatgctttggaaagtgaaaagttgggaaaactggtccagattagtggggatttggtgaactttgctggaaaacacagaagtttgagggttttttgttgttgttgtttgtttgttttggtagtgtttgttgttgttgtttgttyttggttttagaactgtggccttttttattcttgcttcaggcttccctggattacagcagcaaagtgatggagaataagataacatgcataggcttttcataatgcaggatatagaattctgttaaccgttgtagagcctgtgtgataaaagtgtgatatgtgtgatgcagtggcttggaaataatatattgtatttacacattataagtaatcttgtctggctgaagtattttgatgtgactgcatttatacagaagaggcctcaggcacaacatcactcatttcaaggaaaagttcaaa

SEQ ID NO: 66229 - DNA, 600 bp, Chicken  19866894334266_1
cccttctgcttcgggtagcactgcagtttgtttctgagtcaggccatctggccaaggagtcagcattgtcatctgtgttcaggcatatgagtggttattaaatcagagcagattcagaatttccaactccaaattggtttatagagtcacctgatgagaaatttactcatgtatgaatattcctttgctggaaggtcccattggatgaagtatctctgaagatgattgcttcaacaaactcagctcctccagggctttctatatctgcatccataccatcccaggtctgtggttgtcccrgagaaaggtcctggattgttttgttcggatgtatgcactctgcatcagatcagctcagagccaaaggcaaagagaaaaccttcatcgctgccttaggcagttgttgctctcttttattatttcctgcttcttagaagtatgcaacaaaaaaaggaatcacttcctgctgtagacctatacggaagttcacagcccaatttctccttacatttcaaaacaaattacaatcacttcctcttctagagagccattagaacaagcagctagattcctgtccagaacgatggcttcattgcaaac

SEQ ID NO: 66230 - DNA, 571 bp, Chicken  19866894334266_2
ccaaaggcaaagagaaaaccttcatcgctgccttaggcagttgttgctctcttttattatttcctgcttcttagaagtatgcaacaaaaaaaggaatcacttcctgctgtagacctatacggaagttcacagcccaatttctccttacatttcaaaacaaattacaatcacttcctcttctagagagccattagaacaagcagctagattcctgtccagaacgatggcttcattgcaaacttgtctaaaaacaatttccttcatccagtctcacctttcaaaggaattttcccagtcagyttaagagacatttgttccagtaacaattgtggaataactgtttgccataacaaagtccaaacccatcatcagtttccactcacatccaggattctgtcaaaatgcaaagccagcttttcccattttttttcccatacaacacattctttgtttctctctttgaaatcatccatggagtttagttttgaagctccctttctcgaatcagtagcagttcatcaggatgccgtgcccactgctgctacaggttttccagctcctgttaggcgtt

SEQ ID NO: 66231 - DNA, 599 bp, Chicken  19866894334279_1
  misc_feature (1)..(128): n is any nucleotide
nnnnnnnnnnnnnnnnnnnnnnnnnnnnnnnnnnnnnnnnnnnnnnnnnnnnnnnnnnnnnnnnnnnnnnnnnnnnnnnnnnnnnnnnnnnnnnnnnnnnnnnnnnnnnnnnnnnnnnnnnnnnnnnnctcaataggatgaaagagcaatcgcttgctgagccgtgactctcacgactgatgagagttgaccatggaaggcatacacagagcttcagttcaagctcatgaggtagtcacttggcttacagatcattactcaaagctcaggccaaggtgtcatggttttggctgggatagwgttaattttctttatagaggtacacatgatactgtgttttatatttttgataatgatactgatgataatacactgatgttttagttgttgctgagtaatgcttacactaagacaaagaattttccacttctctgctgctctaccagagaggagccatgggtgaataagtagctggggaagaggacaggacaactgatccaaactggccagagggatatttcatacaatggtgtggtcatcaataaagcaataaaagccgggataaagaaggaaaaggggatgggtggggcatttgaagt

SEQ ID NO: 66232 - DNA, 600 bp, Chicken  19866894334287_1
acatgtttggctttccacatcgtaagctggttcagctgaggtcacggcaagccaacattttcaaaagcaatgaggggttttcgtactgcaagtctcatacagaacagagtggccctgttcagagtgcacaacatcagtaacctgttctggaggctccagggcctccttttagctgtgctgcatgcgtgaggtaggtgcagccatttggcaggggatgcaagagctacacttgtgtccattctgtgacagatgcgtggtttctatggtgctcacttttctcctttgctattttgaagtatraaaagaggatattgtaatttttaatggttttttttttcttcttttcagagatgggaggcaatacaatgaagtcagtaatattgtaacagggaataatttgagaaacaataaaatactctgaagctgctgctggaagagaaggcagttaaattaggataattgatcttattcttgtaactcattaagggtgaaatttacctctctgcagcatcatcacaagacctgggcagcacttacattccacttaaacttaatttgagtttaagtggtgcacggggtttttgctgatcttcacatggg

SEQ ID NO: 66233 - DNA, 600 bp, Chicken  19866894334288_1
ttaaaaataaaacatagataaatagtattaaaaacccataaaaacctgattattaaccttcatgaaagtttgtaatgccttcttaattctcacctctccagtcaggtaagtgccagaaatttaaggcaccacagttttattagaaaacctccaatattcctccctcagcggttaacagcagcgttaaccacaacatacatattaaaaataaagtggaaaaaaaacacagcacttccatattgcttttccgataaatattttagcttgagacaaaccaggactcctattcatctttgttawtcckcacttatctttgccatctgccctgtgacagaatcaygcgcacatgatcaaaatcttaaatttcttcttgtttctggaaatccctttgctgcaacaataacactgcaggctctggaagaaaccattgccactgttccttcagagagaacagaggaggactgaagtttgctatttacaaccgtttaatgtaaatgcttgcccgcttgctcagagattaatctactgcactactgtgttgaataccctccacgccattttctaacactgccgcacaacctttgcatgtgctgcatgaca

SEQ ID NO: 66234 - DNA, 600 bp, Chicken  19866894334288_2
aaataaaacatagataaatagtattaaaaacccataaaaacctgattattaaccttcatgaaagtttgtaatgccttcttaattctcacctctccagtcaggtaagtgccagaaatttaaggcaccacagttttattagaaaacctccaatattcctccctcagcggttaacagcagcgttaaccacaacatacatattaaaaataaagtggaaaaaaaacacagcacttccatattgcttttccgataaatattttagcttgagacaaaccaggactcctattcatctttgttawtcckcacttatctttgccatctgccctgtgacagaatcaygcgcacatgatcaaaatcttaaatttcttcttgtttctggaaatccctttgctgcaacaataacactgcaggctctggaagaaaccattgccactgttccttcagagagaacagaggaggactgaagtttgctatttacaaccgtttaatgtaaatgcttgcccgcttgctcagagattaatctactgcactactgtgttgaataccctccacgccattttctaacactgccgcacaacctttgcatgtgctgcatgacagctt

SEQ ID NO: 66235 - DNA, 600 bp, Chicken  19866894334288_3
aaaacctgattattaaccttcatgaaagtttgtaatgccttcttaattctcacctctccagtcaggtaagtgccagaaatttaaggcaccacagttttattagaaaacctccaatattcctccctcagcggttaacagcagcgttaaccacaacatacatattaaaaataaagtggaaaaaaaacacagcacttccatattgcttttccgataaatattttagcttgagacaaaccaggactcctattcatctttgttawtcckcacttatctttgccatctgccctgtgacagaatcaygcgcacatgatcaaaatcttaaatttcttcttgtttctggaaatccctttgctgcaacaataacactgcaggctctggaagaaaccattgccactgttccttcagagagaacagaggaggactgaagtttgctatttacaaccgtttaatgtaaatgcttgcccgcttgctcagagattaatctactgcactactgtgttgaataccctccacgccattttctaacactgccgcacaacctttgcatgtgctgcatgacagcttacactctgcagccacagccctgccaaagatatcagg

SEQ ID NO: 66236 - DNA, 564 bp, Chicken  19866894334288_4
caataacactgcaggctctggaagaaaccattgccactgttccttcagagagaacagaggaggactgaagtttgctatttacaaccgtttaatgtaaatgcttgcccgcttgctcagagattaatctactgcactactgtgttgaataccctccacgccattttctaacactgccgcacaacctttgcatgtgctgcatgacagcttacactctgcagccacagccctgccaaagatatcaggaactagagcttcttcatatctctcctggacaaggcagagggctccctgaagttcacrctcagtctccctgtgatatgcagccttcatctgccccagccacctcagtcagaaaggtgtcacctagttttctccatcaatcctataaatcacttggtagttcaagtgaaaagacctacaagagttcaaattatcagtatggtacggtgaaggagctctatttcaaactgcagctgacaggagataacagcagtaccacaactatatcaacaggtgaacaagaaaaataggccttgtggttcttgtcagggttgaaggaagctt

SEQ ID NO: 66237 - DNA, 599 bp, Chicken  19866894334292_1
  misc_feature (1)..(94): n is any nucleotide
nnnnnnnnnnnnnnnnnnnnnnnnnnnnnnnnnnnnnnnnnnnnnnnnnnnnnnnnnnnnnnnnnnnnnnnnnnnnnnnnnnnnnnnnnnnnnnctttttctccttgggctggggctctcatatcctacctgcctggaagcgaaggtgcacgcgttctcagggggggacgacagaggtgcctgagtgcagacagtgtttcccaggaactgtacctggctccaaattagaggagagctaaggaaagagttgagcgcatgtggggtggggggcagagatttttacagagaataactgacgaygcatcaccatggacaggagccttaagggcaaaacacagtgcttgtcagttcacgtttgtctggtctcggaaaagaggcattttcaggctctgcatcatgatagctataacaagctgagttgagagacttcagtacatgcccggctatgagtatggacactgatgagaaagcttatgtgtgcctactcgcattcatttcatacaagtagacacttagctcattcaaaactacagctggcatgataagcctttgagagtatgaaatacatatgagggtgttcagtttccagtcagggttat

SEQ ID NO: 66238 - DNA, 396 bp, Chicken  19866894334297_1
gttgtttggtttttttcctccccatccttttatcattattgcaaagttatttacgtgacagtgtttgttattttacctgaagtaacaatcaaatctgattcaaagggaagatgcacaataaagacgggaaaaggtcagcttgctgaataacattaaagacatttgtcagagtcaaggaggactcgatctgctgttatcaacccacttcagacttaattctgcagagggtgggggagaaaaggtctgtgtcaattcctgctttggctttttggatcaattctcccagtggaaagcaatgtrcggcaagaggaagccagcaacgacagcagtaggatggagccctggaagcagtgcctgggcacggggctccatcctactgctggagggccttcccag

SEQ ID NO: 66239 - DNA, 600 bp, Chicken  19866894334307_1
gtaacttcatccacatcttcagattttcactgaccactagaattattcaattatgcacttattgtgaaaatatacatacatttaccatacaggagtacaagagcaacaattggcctttggtttaggtgcagtgcacagatcttagctgctttgttatttaggaaatattacaggatcaaacaactccagactactataaatgccccatacgtatatgagctgtttgagaatcagtttttgttataatttaaaaaagaattaaataaacaatatgaacactgcatatggtcatctttttaygactgagagaggaaggcggaaatataggctagtgacagtggaagaaaaaaaggctaacttcacagacttccagtctgacctttttgctgtgttaatttcaaccccctcctctgctttsctgtgagatgttaatactgcaacaggtgtcaaaaggtcgcctggatacctgttgaagaagataagagctagacatactatggggctccatatagctgcaggagcttgaaggaaaaaaaaaaaaagatgagagaagaaaaaatgaactacatgtcttaagatatctaaaagttgttcaccact

SEQ ID NO: 66240 - DNA, 600 bp, Chicken  19866894334307_2
ggtttaggtgcagtgcacagatcttagctgctttgttatttaggaaatattacaggatcaaacaactccagactactataaatgccccatacgtatatgagctgtttgagaatcagtttttgttataatttaaaaaagaattaaataaacaatatgaacactgcatatggtcatctttttaygactgagagaggaaggcggaaatataggctagtgacagtggaagaaaaaaaggctaacttcacagacttccagtctgacctttttgctgtgttaatttcaaccccctcctctgctttsctgtgagatgttaatactgcaacaggtgtcaaaaggtcgcctggatacctgttgaagaagataagagctagacatactatggggctccatatagctgcaggagcttgaaggaaaaaaaaaaaaagatgagagaagaaaaaatgaactacatgtcttaagatatctaaaagttgttcaccactgagttgtatataagtacagacttctttcctcagggaaggaaatgttgaatgagagaggaatgaggtatagctttaatcagctatttcatgctaacagtatctaatctgaggtgagcat

SEQ ID NO: 66241 - DNA, 433 bp, Chicken  19866894334308_1
caggaaatgtatactgggaagaaagttgatataaagttgatatatgctagagttgcagaattcaagaaacacctctgatgaggcacctatctggagcacagtactttaattccagcaaattcacactttttagatgttttaagaatgaaatagcaatataggacagttgtgaaatttgaagatgtaatttggaaaacaactgaatttttaactgcttcttcaagctgtttttaagaagcaactaaattatttgtactaaaccactgtaacttcagtggctaactgtatctcaagacgttmatttttggcggttgagtaagttacatggtccttgctttcagttagattgttaacgttcaccttgaattattgcacagttattctgcttctaaaaacatttcctttcttcggggtaggaagaatgtctccgaat

SEQ ID NO: 66242 - DNA, 600 bp, Chicken  19866894334310_1
gcaggttggctggggaggcagattcccactccacatatgatgctattcatccaggtcacttctacttaggtgtctagatatgaataacataacataacataacataacataacataacataacataaaatggctagctttagccatgcccttcaaaaaacttagtttatagaaaattccttgatatttccaatacgtgtattcagtaatagtaacctaaattcaagcatgcccttcccaggtaacacaccatgggtgcaagtggacctacttatgaggtgagtgcatgtcctataccctwgatgtgataggacctacactgcagatcatcactcacagatttgggttgtctctcttcctacaagtcagggakgatgtgattcaacaggtgaatgcaggataaggagaataagggcagggatgtgaagctgcccactgagatatctagactcttgttgaggaacctgaaagaaagtagcttgatttaaaaataaacacacaaaaagcaagacccttccagaaggcctgcttaaggcataccacttaggaacaagagatgaaaggaagagctaaatcagccttttagccgttcacaacatgt

SEQ ID NO: 66243 - DNA, 600 bp, Chicken  19866894334310_2
tctagatatgaataacataacataacataacataacataacataacataacataaaatggctagctttagccatgcccttcaaaaaacttagtttatagaaaattccttgatatttccaatacgtgtattcagtaatagtaacctaaattcaagcatgcccttcccaggtaacacaccatgggtgcaagtggacctacttatgaggtgagtgcatgtcctataccctwgatgtgataggacctacactgcagatcatcactcacagatttgggttgtctctcttcctacaagtcagggakgatgtgattcaacaggtgaatgcaggataaggagaataagggcagggatgtgaagctgcccactgagatatctagactcttgttgaggaacctgaaagaaagtagcttgatttaaaaataaacacacaaaaagcaagacccttccagaaggcctgcttaaggcataccacttaggaacaagagatgaaaggaagagctaaatcagccttttagccgttcacaacatgtgttataggggaaggaaaaagccttaattgtcactgtgagcaaacagctacaccagggcctgaacacgttagg

SEQ ID NO: 66244 - DNA, 600 bp, Chicken  19866894334315_1
gaacggttctgtctgtaccagtgaagagcactgcctaagcacaaagcaagtctgcagagtgaaacaactgattgtgaagaatccagcatccatcaaaatcagcacttcaaaaaggttttctgactagcctcagtcagattccatagactcagtgctagcaagcagctagggtgcaactcctttttcaaccaaaaaataataaaaaaaaacagttttcatgcattctaaatctgcactgcacaatgaatgaaagtgaatgcattccttattcaggttaaaatactactgtcaagaacagtytgcctattgtgtcycggcctaggtagatagttagtcctgtctttaggtagatactcmgaagaaaccttatttttatatgcaccctatgttgtatctattttatatagtctactaatctaggggattgttaaggtttacaaattcaaagcacggattagctcttacacaacaatactgagataccacagttagtactagtaggaatcaggaatcacagtcctgagatgcagaaggaaatcagcaggtgttctactgcatggcattagagatagaaatgaaaattttggtgtggcaaccgat

SEQ ID NO: 66245 - DNA, 600 bp, Chicken  19866894334315_2
gtaccagtgaagagcactgcctaagcacaaagcaagtctgcagagtgaaacaactgattgtgaagaatccagcatccatcaaaatcagcacttcaaaaaggttttctgactagcctcagtcagattccatagactcagtgctagcaagcagctagggtgcaactcctttttcaaccaaaaaataataaaaaaaaacagttttcatgcattctaaatctgcactgcacaatgaatgaaagtgaatgcattccttattcaggttaaaatactactgtcaagaacagtytgcctattgtgtcycggcctaggtagatagttagtcctgtctttaggtagatactcmgaagaaaccttatttttatatgcaccctatgttgtatctattttatatagtctactaatctaggggattgttaaggtttacaaattcaaagcacggattagctcttacacaacaatactgagataccacagttagtactagtaggaatcaggaatcacagtcctgagatgcagaaggaaatcagcaggtgttctactgcatggcattagagatagaaatgaaaattttggtgtggcaaccgatacatctacaccaaa

SEQ ID NO: 66246 - DNA, 600 bp, Chicken  19866894334315_3
agtgaaacaactgattgtgaagaatccagcatccatcaaaatcagcacttcaaaaaggttttctgactagcctcagtcagattccatagactcagtgctagcaagcagctagggtgcaactcctttttcaaccaaaaaataataaaaaaaaacagttttcatgcattctaaatctgcactgcacaatgaatgaaagtgaatgcattccttattcaggttaaaatactactgtcaagaacagtytgcctattgtgtcycggcctaggtagatagttagtcctgtctttaggtagatactcmgaagaaaccttatttttatatgcaccctatgttgtatctattttatatagtctactaatctaggggattgttaaggtttacaaattcaaagcacggattagctcttacacaacaatactgagataccacagttagtactagtaggaatcaggaatcacagtcctgagatgcagaaggaaatcagcaggtgttctactgcatggcattagagatagaaatgaaaattttggtgtggcaaccgatacatctacaccaaactgagtcaggtagcctcctacaatgtcatcactggctggatag

SEQ ID NO: 66247 - DNA, 600 bp, Chicken  19866894334315_4
ttatatgcaccctatgttgtatctattttatatagtctactaatctaggggattgttaaggtttacaaattcaaagcacggattagctcttacacaacaatactgagataccacagttagtactagtaggaatcaggaatcacagtcctgagatgcagaaggaaatcagcaggtgttctactgcatggcattagagatagaaatgaaaattttggtgtggcaaccgatacatctacaccaaactgagtcaggtagcctcctacaatgtcatcactggctggatagatcatggggagagcmgtggatgctgtgtgccttgatttcagcaaggcatttgacactgtctcccacaacatccttgtaatgaagcttagaaagtacaagacagatgtgtggacagtgaggtgaaatgaggactggctgactggcagagctcagagagttgtgatcagtggcatagagtgtagttgaagatctgtaactactggtgctcccctggggttgctgggtccaagtcttgttcaacatcatcaatgacctggttagacagagtctacatctggtgatgatacaaaactgggaggagtggctggcacacca

SEQ ID NO: 66248 - DNA, 600 bp, Chicken  19866894334316_1
gatgcacatctaagccatcaaccactgagctacccgctgagttatgacttagaaagatacagatctttgcctgaaaatgcaagcagcaaacctgagcatgaaaacataaatggcaacaattggaagcagcagaagggtcttactgatgtccttgctgaaggttctggagctttatttctgaagacaaaattggagctgctgttatctgtggttaatgagactaaacacgttgctaattcttgcttctgccttgctcagtatcatcacctctgtgttaattttgataccatttattagtgrgaagacccaagaagggaagcatcaggcctagatggcagcacttttctgttgggttgttcctcctgtcacgtcctgctccagcrgagctgtgtgccctgctaaccctgctgctgctgtcctgctgtgcagcagcttgcaggtggctttggtggtggttggcactgcaaataacaccgacggtgtttcctcttttccctgattcccagggaagttgtgggtagtagagtgcaatggttattactgccagagtaattcggcatgttgtgtggttagatggttcttctcatatatatagcctta

SEQ ID NO: 66249 - DNA, 600 bp, Chicken  19866894334316_2
cagcaaacctgagcatgaaaacataaatggcaacaattggaagcagcagaagggtcttactgatgtccttgctgaaggttctggagctttatttctgaagacaaaattggagctgctgttatctgtggttaatgagactaaacacgttgctaattcttgcttctgccttgctcagtatcatcacctctgtgttaattttgataccatttattagtgrgaagacccaagaagggaagcatcaggcctagatggcagcacttttctgttgggttgttcctcctgtcacgtcctgctccagcrgagctgtgtgccctgctaaccctgctgctgctgtcctgctgtgcagcagcttgcaggtggctttggtggtggttggcactgcaaataacaccgacggtgtttcctcttttccctgattcccagggaagttgtgggtagtagagtgcaatggttattactgccagagtaattcggcatgttgtgtggttagatggttcttctcatatatatagccttatacctttttagaaagtaaaaacaacaacagagtatgattggtgtatgtgtgttagggatgattacagctgctattgctggcag

SEQ ID NO: 66250 - DNA, 599 bp, Chicken  19866894334320_1
  misc_feature (1)..(156): n is any nucleotide
nnnnnnnnnnnnnnnnnnnnnnnnnnnnnnnnnnnnnnnnnnnnnnnnnnnnnnnnnnnnnnnnnnnnnnnnnnnnnnnnnnnnnnnnnnnnnnnnnnnnnnnnnnnnnnnnnnnnnnnnnnnnnnnnnnnnnnnnnnnnnnnnnnnnnnnnnnnntagtttactttttaaaagtcattgcaagcctagcacaaacagtatctgtggcaagaggatatggataatttgcaattttttggcaagatgttttctggtgtcctaggtgtttcatggccttgcaatgaggacatgaattcaagrggtagccactccctcacttccatttcacrtcttagaataattcttaaattgttccttttccttctgtgtctcagttgcgtatctgattgtaatttctttccttttccttctgtacttgtaattatcttctcatttcacttccatggattttccctctttcagattatttaattcttctgtttactcaatatgatactccttgctgtcatccagaccctactgacatttcctcatgccagtttctgtactgaggagatgtctaaaaagtgrtgttggtttgtgctatgctggcactgacc

SEQ ID NO: 66251 - DNA, 599 bp, Chicken  19866894334320_2
  misc_feature (1)..(127): n is any nucleotide
nnnnnnnnnnnnnnnnnnnnnnnnnnnnnnnnnnnnnnnnnnnnnnnnnnnnnnnnnnnnnnnnnnnnnnnnnnnnnnnnnnnnnnnnnnnnnnnnnnnnnnnnnnnnnnnnnnnnnnnnnnnnnnntagtttactttttaaaagtcattgcaagcctagcacaaacagtatctgtggcaagaggatatggataatttgcaattttttggcaagatgttttctggtgtcctaggtgtttcatggccttgcaatgaggacatgaattcaagrggtagccactccctcacttccatttcacrtcttagaataattcttaaattgttccttttccttctgtgtctcagttgcgtatctgattgtaatttctttccttttccttctgtacttgtaattatcttctcatttcacttccatggattttccctctttcagattatttaattcttctgtttactcaatatgatactccttgctgtcatccagaccctactgacatttcctcatgccagtttctgtactgaggagatgtctaaaaagtgrtgttggtttgtgctatgctggcactgaccagagaaaacacaaagaaaccctcagcttc

SEQ ID NO: 66252 - DNA, 600 bp, Chicken  19866894334320_3
tggccttgcaatgaggacatgaattcaagrggtagccactccctcacttccatttcacrtcttagaataattcttaaattgttccttttccttctgtgtctcagttgcgtatctgattgtaatttctttccttttccttctgtacttgtaattatcttctcatttcacttccatggattttccctctttcagattatttaattcttctgtttactcaatatgatactccttgctgtcatccagaccctactgacatttcctcatgccagtttctgtactgaggagatgtctaaaaagtgrtgttggtttgtgctatgctggcactgaccagagaaaacacaaagaaaccctcagcttctggggggttctatgtatctacaaacagaaaatgtattgatgactgtggaggcattttgctcctgatccatgttgcagttctggcagaaacctcaaatgcagacacacatacttcagcaaaacatcaatttttgttgtgtcacttgtacatttttctagaatggaaaaacaatctgagatgcttcatatctttcattaataaaatgtcattttcaagcaattgcatccataaaattttggctt

SEQ ID NO: 66253 - DNA, 600 bp, Chicken  19866894334320_4
cttttctttctttggagggatatttagtttgtcaacgacttctgccagaagtgttacttctgttagagccctaatcagattaagttggatccacactttgcatgttctcccaagctaattcccgtgatcactgtgctttaaaacctttattagaggcttttgttaaaaatgcatcactttaccgtcgttattcatctgacaagaggagtggattcaaatgtactcttctttcaaagctgtgtttgtcactgaccttgggtgttggatcaagaagagaattagtttctaaactgtgcgcamtgccaggaacactggagagagttctgactgacttccttctaagaggtgatttgaaagcctcatcatctgatgcattacattcatcggagccaaaaatacttgagtgttgttgaaagacatgaagtttcaaaactggctattgtctctctggcaaggagtygtcaggataaaatgaaggaggcatcactgtgcatcaggaaatcatgggatctcagtttgaaagaggagattataccttgaggtgcataaacttccttctttgattcgtaagcaaaatggaagcagagtgacyagtgatga

SEQ ID NO: 66254 - DNA, 600 bp, Chicken  19866894334320_5
tgttaaaaatgcatcactttaccgtcgttattcatctgacaagaggagtggattcaaatgtactcttctttcaaagctgtgtttgtcactgaccttgggtgttggatcaagaagagaattagtttctaaactgtgcgcamtgccaggaacactggagagagttctgactgacttccttctaagaggtgatttgaaagcctcatcatctgatgcattacattcatcggagccaaaaatacttgagtgttgttgaaagacatgaagtttcaaaactggctattgtctctctggcaaggagtygtcaggataaaatgaaggaggcatcactgtgcatcaggaaatcatgggatctcagtttgaaagaggagattataccttgaggtgcataaacttccttctttgattcgtaagcaaaatggaagcagagtgacyagtgatgatacccgttttttcaggcaattaaggcaaaggcattttaacatggctggctggagatgaaactcagcaactcatccttaaactatcaactgaaattaatttagatacgagttaaagaggtgtgtctgggaaaaaccaaaactttgaagaacatagaaaaaa

SEQ ID NO: 66255 - DNA, 600 bp, Chicken  19866894334320_6
gtgcgcamtgccaggaacactggagagagttctgactgacttccttctaagaggtgatttgaaagcctcatcatctgatgcattacattcatcggagccaaaaatacttgagtgttgttgaaagacatgaagtttcaaaactggctattgtctctctggcaaggagtygtcaggataaaatgaaggaggcatcactgtgcatcaggaaatcatgggatctcagtttgaaagaggagattataccttgaggtgcataaacttccttctttgattcgtaagcaaaatggaagcagagtgacyagtgatgatacccgttttttcaggcaattaaggcaaaggcattttaacatggctggctggagatgaaactcagcaactcatccttaaactatcaactgaaattaatttagatacgagttaaagaggtgtgtctgggaaaaaccaaaactttgaagaacatagaaaaaaaaaaaggcttttgtctgtgttaccaccaaggaatgtgatcttagttttataaaagaggcctatggaagagtatgtttagttgtcagtgttgctgaaaaagaaaatgaatatgaagaataaattggaaataga

SEQ ID NO: 66256 - DNA, 599 bp, Chicken  19866894334329_1
  misc_feature (1)..(37): n is any nucleotide
nnnnnnnnnnnnnnnnnnnnnnnnnnnnnnnnnnnnnccccatcttattctgcattgtacagacagattctataggggctaggttatctgctgatttccacgaggctgcaacagccttgctgctggagctcactcttttggtgtttaacagcagttaatacattaagaacatggggataaataaatagtaagagatcaccaacacacacagaccttttgttagagcagcagaccttcagcccagctggacacactgctctacaagatgcctggatgatcacagatcatttatgtaggttstaagtagtacacttttgaagtgtatggtctatgattcctttctatttaccagcaaaggtaggatgtagttagagggcatcaacatgcaccaagatgcagtcctttactttgtgtccaagacatctagaacacaacaggtcactcttcaaaccccagggatgacttcaaatcatcagtccttttcccatctcagacccaaagacactatacacagctgtgtgcgatggcaaccccagctctggtacatgcattaggcaagactcagctctaataggaatcatgcaatacggtaaggaatc

SEQ ID NO: 66257 - DNA, 517 bp, Chicken  19866894334329_2
gatgtagttagagggcatcaacatgcaccaagatgcagtcctttactttgtgtccaagacatctagaacacaacaggtcactcttcaaaccccagggatgacttcaaatcatcagtccttttcccatctcagacccaaagacactatacacagctgtgtgcgatggcaaccccagctctggtacatgcattaggcaagactcagctctaataggaatcatgcaatacggtaaggaatctttgattaatcccttcaaagtacagacttcttggggaatgtatttatctagcttactcttcmtaacagtcacaacttccttaaacaactttgccactgctttacgattactcagcttccaacctaaaactccattcctataaattcagattgttatttcttgtcctgttcgtagacagataatcattaacttctaaacttttctgtagtgttttatgcattttcttaaaaatctgtcttctcacctctagacttctattctctaggctataaattcatt

SEQ ID NO: 66258 - DNA, 600 bp, Chicken  19866894334332_1
gaagagaaatcaaatgtttcctaactgccaagaagctgaagacaccaacctgacgctgttgagtacagacttttcttttgtgggtggttttgtaactgggcgcttggtgctcacaaccttcaccggatgctgttctttgcctgccttgttgtatttgctcttgtcaaatttcggcttgggcacaccgtatttccttagaatcttccaacacagaaaatgaataattaatcaatgcttttgagtcacatgaaagatcccaaagagagttttcaaagcactacctgagtaagctggtcctcyagcaccttctttggaggacggacatttgtgaagaagacatgaagaaggtttccaggagtctgagaatttatctgctctttactaagatagatatcagcaaccttrattggttttgttggagtcaggctcagcatttgctcagaatggacacagcttttaaatatttctgttaggacctcccgagcaccaggaaccaatttctcacctaagacaaaaaaagaaaaaagaaatgtgatagagaataaaataccatgataactcttcagagcttgaaacgtgtaataaatgttgcattcagat

SEQ ID NO: 66259 - DNA, 600 bp, Chicken  19866894334332_2
ggtgctcacaaccttcaccggatgctgttctttgcctgccttgttgtatttgctcttgtcaaatttcggcttgggcacaccgtatttccttagaatcttccaacacagaaaatgaataattaatcaatgcttttgagtcacatgaaagatcccaaagagagttttcaaagcactacctgagtaagctggtcctcyagcaccttctttggaggacggacatttgtgaagaagacatgaagaaggtttccaggagtctgagaatttatctgctctttactaagatagatatcagcaaccttrattggttttgttggagtcaggctcagcatttgctcagaatggacacagcttttaaatatttctgttaggacctcccgagcaccaggaaccaatttctcacctaagacaaaaaaagaaaaaagaaatgtgatagagaataaaataccatgataactcttcagagcttgaaacgtgtaataaatgttgcattcagataaaatattctatcacagaccaattacaccaatagaagaaatagcttagaaaagttcaactagcagatctgacccctctgaactctaacatcccatttttaacgga

SEQ ID NO: 66260 - DNA, 600 bp, Chicken  19866894334333_1
agccagtcctgactaggtgaaaaaattccagcccaaaaactaaccttggaactatgctatagtggatgtattacaaaactgtggaataactcagttgaaagggccaagaggtcatcgagtccaatgtcctactcaaagtgtggctaacttcaaaatattaaccactgttaatattgatttttatagtttaatacagtaacttttcaatgtattatatgtttacttttttgagaaactcataattaaagggatttagcgtgcaaaatttaaataaatatatttattatacctgaggaaaartaaccatgcttttaagatacactatttttattgtgaaagaatattagggacttcgtgtgaaatcctgtttctgataggtttattgtaaaattcatattgttatctgtttaggacgaaaagttggccattaaaatttaactatttgtatgattcaatataatttaaaatgaattcagagtgatttaagtgatgaaattgatttttttttcatctgttttaggaagccaaaatatacttcagaataacgtgtaatgttatttttgagctctcggaattaaattgtaatgtagctagtttcct

SEQ ID NO: 66261 - DNA, 599 bp, Chicken  19866894334339_1
  misc_feature (1)..(181): n is any nucleotide
nnnnnnnnnnnnnnnnnnnnnnnnnnnnnnnnnnnnnnnnnnnnnnnnnnnnnnnnnnnnnnnnnnnnnnnnnnnnnnnnnnnnnnnnnnnnnnnnnnnnnnnnnnnnnnnnnnnnnnnnnnnnnnnnnnnnnnnnnnnnnnnnnnnnnnnnnnnnnnnnnnnnnnnnnnnnnnnnnnnnnccccggagatgtaaaaatagaacttttatttcccgttccgtctgtgcggtccggaggggcacagaggggagaggagcagtgccgaccccggggcacagaacagcggacagcgcccgggrgggcagcaccggtcccgcacggcaccggcccgggggtgccaccatccccccccagccccactcgcagcggccccgcatcgccccgggtggcggccggcgcccaacaccgggcacgaggggtgtgcggccccgaggggtggatttacaaaaagccccgtgggcgaagagaatatcaaaaccggtatcaaaatccgtgcagagcggccgggagcgacgcgaacccgggccggcaccgcgtgctggaggcgtctccggggtcgaggggtcccggtgcctccgtccccccgcggctcagcggg

SEQ ID NO: 66262 - DNA, 599 bp, Chicken  19866894334340_1
  misc_feature (1)..(109): n is any nucleotide
nnnnnnnnnnnnnnnnnnnnnnnnnnnnnnnnnnnnnnnnnnnnnnnnnnnnnnnnnnnnnnnnnnnnnnnnnnnnnnnnnnnnnnnnnnnnnnnnnnnnnnnnnnnnntagagtgatgcagctgagcagctcactccatgcaatggggtgatagagaattctgccattaaaaaatatggcaaatttgcccaagcaaaatcttcttacttaaaagcatgctaagaaagactgtctggaaaactcaggttattctaaagggtagggttttctaagtttattatatatatatatgcacatawgtaggcgtcggcaatcaggctttgcaaacattctctaatatggttttggaagacccaacaagggctgttgggtcttcattgatgggctatggsctctggttgcctatttctttctcctgttggctaaattctgcccccatcacccccagtaaataataactgtaggataagatttcatgacaatcttctggaagtcaggaaacaagttgggttttttttttttcccagtccaaatgcattctaaacagtgggttgctcttttatgctaactatgtctgggagagaatggaactacttgc

SEQ ID NO: 66263 - DNA, 599 bp, Chicken  19866894334340_2
  misc_feature (1)..(16): n is any nucleotide
nnnnnnnnnnnnnnnntagagtgatgcagctgagcagctcactccatgcaatggggtgatagagaattctgccattaaaaaatatggcaaatttgcccaagcaaaatcttcttacttaaaagcatgctaagaaagactgtctggaaaactcaggttattctaaagggtagggttttctaagtttattatatatatatatgcacatawgtaggcgtcggcaatcaggctttgcaaacattctctaatatggttttggaagacccaacaagggctgttgggtcttcattgatgggctatggsctctggttgcctatttctttctcctgttggctaaattctgcccccatcacccccagtaaataataactgtaggataagatttcatgacaatcttctggaagtcaggaaacaagttgggttttttttttttcccagtccaaatgcattctaaacagtgggttgctcttttatgctaactatgtctgggagagaatggaactacttgctgagagagaggcataaatagctttgatatcaaaggcattgaaaagctttatttacactcactctgtgtgaataccagcttccatatggccaaa

SEQ ID NO: 66264 - DNA, 600 bp, Chicken  19866894334340_3
ccatggattacagctctgtggggggaaggtgaataggttatcatgagcttcttgtacaaattgcagtcctccagcaaataacacagttctcagctgcttctgtcttaataggtccatccgaatcactttatcattcaaatctgttgtgacctgaagtaatgtggacctgctctgaactgagggaataaaagtggaaagaaaagggagcagaggagattgtgttctcttcaagatcattataacaagtgcgttttctctccagtggagattaatagaggggactattagatacagaaacarcaagcagaggaaaaacacttcatagcccttgtgtacaacccttcccaatgctgctgcaatactaaagagggagggagacaggaatgctgcagactgcttatgagggaccaagcaatggcttctactactctctcagctgaagaacctttgctgaagcagaggtgcaccactggatcgtatgcatggcaagagcttttctgctagagctgtaacagtgctaaatacactgggaacaggattgaatacactgagaaaacttccttatggatcaggaagtacatggagcaactctattgtaaa

SEQ ID NO: 66265 - DNA, 600 bp, Chicken  19866894334340_4
tgtacaacccttcccaatgctgctgcaatactaaagagggagggagacaggaatgctgcagactgcttatgagggaccaagcaatggcttctactactctctcagctgaagaacctttgctgaagcagaggtgcaccactggatcgtatgcatggcaagagcttttctgctagagctgtaacagtgctaaatacactgggaacaggattgaatacactgagaaaacttccttatggatcaggaagtacatggagcaactctattgtaaagcagatctttttgccaactgctaattggttmctggggggaagcaaaaaaagcacccatcaaaagctgccagccctggcccagacagcttgtccaagacactgggagagcttggtatgcttcacaatgggcacaggataggggaaaaggtggaaaaggagaaggcaggagcttgrttttgctgcaagaataagaatagaatcataggatcatagaatcattaagggttgggaaagaccacaaagacaccaagtccaaccccaacccatcctaccgttcccactgactgtgtccctcaatgccacatctccatggttcttgaacatctcaaga

SEQ ID NO: 66266 - DNA, 476 bp, Chicken  19866894334340_5
tcgtatgcatggcaagagcttttctgctagagctgtaacagtgctaaatacactgggaacaggattgaatacactgagaaaacttccttatggatcaggaagtacatggagcaactctattgtaaagcagatctttttgccaactgctaattggttmctggggggaagcaaaaaaagcacccatcaaaagctgccagccctggcccagacagcttgtccaagacactgggagagcttggtatgcttcacaatgggcacaggataggggaaaaggtggaaaaggagaaggcaggagcttgrttttgctgcaagaataagaatagaatcataggatcatagaatcattaagggttgggaaagaccacaaagacaccaagtccaaccccaacccatcctaccgttcccactgactgtgtccctcaatgccacatctccatggttcttgaacatctcaagaggtggtgactctaccacct

SEQ ID NO: 66267 - DNA, 600 bp, Chicken  19866894334341_1
acctcactgtcagttatccccagcacatttccttcatgctcctccctgagtgtttctatgggatactacttgtatcccaggtagctgagataaatatatgagaacaaccagaaacctgaatagcaggaaattaaatttcaattcctaccccccacagttaactgtcagaaggcccatcacaaagttcagactgcaaattttagataagctattcttcctgtgataaatatgagagaataaagcttgttccgggtaaactggtccaagtctcaccgcagccaaacaatctgctcaaacaamaaaatccagcttaagtcttatgaaagtaaatttggaggaaggagtgggggaggtgaatgataggaagaaggagcttctgtgagacgcgtatgccctcacgtgtgacccaaagaggaaaaaacaagcaactgaattctttacagtattaatgacaaaacttgtttctcttagacaagaccaatgggaacgcagaggctccaaatattttgcagcgggaaagatttagatggcttctgctcagtgtgctagagaaaaattccatcagaaaattctgccagcatattcctgcacatgtatttc

SEQ ID NO: 66268 - DNA, 600 bp, Chicken  19866894334343_1
ttctaccttgaaaagcgggacctttatctccatctgaaaaagttactgtctgtttatgagattagaaacgaagcatactctatacaaggcatactgatacatacaacattttattggtgtggacagataggaatttctaggttttaggaaatgcctggagtccttcctttcccacaaaccatcacactacgtattttgttcccctctagtaagcagacaaactgaagcagaaaactgccacaatgctaagggatgtactttaattcttctcattctccatgtgtgtgaaatgctacacayggctcaaataagtatatatgtattattcacagcactttgttaatgaagcttaacccactacttagagcagtttcaactctgttctgacaattcagacagatatatattttttgaatgcttggagattcattcctaaattgcacttgtattttccacaaaaaacagtcacattgaacaatactgttatgcagtttttaaatagcaaccccaacaggtttaatatagaaccttttctttaccaaaaataaagatgtacaaatccatatgatcaattaaagtatgatctacagcaaaggagga

SEQ ID NO: 66269 - DNA, 600 bp, Chicken  19866894334346_1
cgttgtgcagtacagatgtaggaaaacatacacttctctttgatttacatacttgaacattgcttttgttatcaccctgagctacagcagaactatctgttgcttctgcagtttgagggcaaggatgctttacagagaaggaagagctattcggattcttggtcacatttccacagagaactggtaaaacggatgccttagttagcttggtttcagagtcatgctcagacacattttctacaggaaaagagaaattaaacctttaaataaatttcacttttctttcattcatagtggaawgmattttgtgtcaccttttaaatttatatgctggagtaatctcctgtgcttatttgtttgcttattgatcagcaattcagatgttgtcatttacaaaagtaagatttckgttaacgtaccatgtggctagagcagaatattaaacaggccaatagcgaaattgcactacttagtgtgttacattaattaccacattactatatctgtgttcacaagcagtagaaaggcatttatttgacagctggaaggtgcccataatttgtaagaagctgccaataaactctaatcagtttaggcctc

SEQ ID NO: 66270 - DNA, 600 bp, Chicken  19866894334346_2
ttgtgcagtacagatgtaggaaaacatacacttctctttgatttacatacttgaacattgcttttgttatcaccctgagctacagcagaactatctgttgcttctgcagtttgagggcaaggatgctttacagagaaggaagagctattcggattcttggtcacatttccacagagaactggtaaaacggatgccttagttagcttggtttcagagtcatgctcagacacattttctacaggaaaagagaaattaaacctttaaataaatttcacttttctttcattcatagtggaawgmattttgtgtcaccttttaaatttatatgctggagtaatctcctgtgcttatttgtttgcttattgatcagcaattcagatgttgtcatttacaaaagtaagatttckgttaacgtaccatgtggctagagcagaatattaaacaggccaatagcgaaattgcactacttagtgtgttacattaattaccacattactatatctgtgttcacaagcagtagaaaggcatttatttgacagctggaaggtgcccataatttgtaagaagctgccaataaactctaatcagtttaggcctcta

SEQ ID NO: 66271 - DNA, 600 bp, Chicken  19866894334346_3
agtttgagggcaaggatgctttacagagaaggaagagctattcggattcttggtcacatttccacagagaactggtaaaacggatgccttagttagcttggtttcagagtcatgctcagacacattttctacaggaaaagagaaattaaacctttaaataaatttcacttttctttcattcatagtggaawgmattttgtgtcaccttttaaatttatatgctggagtaatctcctgtgcttatttgtttgcttattgatcagcaattcagatgttgtcatttacaaaagtaagatttckgttaacgtaccatgtggctagagcagaatattaaacaggccaatagcgaaattgcactacttagtgtgttacattaattaccacattactatatctgtgttcacaagcagtagaaaggcatttatttgacagctggaaggtgcccataatttgtaagaagctgccaataaactctaatcagtttaggcctctatgaaccagaaacctgtattctagcataaaaaagtaaaactatcatattaattttctactctgaagtaaactaatcattaatttgctgaattcattctccaacattct

SEQ ID NO: 66272 - DNA, 600 bp, Chicken  19866894334356_1
tgtgatttttatgggctgccaactgcacaaagccagtttggcatcctccccaacgaatccgttcgaatggctttaccgtttgtatttcaggcttagctgtgtgtcactttggcagaattaaagtggaaggggggggaatgaactccagaactcctattgcacagcagctctctccagactgagaggaattgcagtactgtgggcaaatggaggcagcagaagtgtgcagctgtaaatagaacttctgtggagcaggagataatattaataataaatagttgagtgttatgcaagagggckttttttttttttcctgttgtggaaaacttcccaggggaaatattctgggtttattggcaagatgtttgaatactttcaattaagtggatgagggagtgatggagcatcgtcctctgtggagggccgtgggatgcggtgctgtgtgctggccccatggctgagcagccggctctgtggtcctgcctggggtgatggggtttacgttgactccacgtaggtcagtgcaaaagtgcagtgcttggcgttcagtgggtttgtggcagatggagtgcttgggatgctcgggggctcgttcatctg

SEQ ID NO: 66273 - DNA, 600 bp, Chicken  19866894334356_2; identical to SEQ ID NO: 66272

SEQ ID NO: 66274 - DNA, 600 bp, Chicken  19866894334356_3
ttttttttcctgttgtggaaaacttcccaggggaaatattctgggtttattggcaagatgtttgaatactttcaattaagtggatgagggagtgatggagcatcgtcctctgtggagggccgtgggatgcggtgctgtgtgctggccccatggctgagcagccggctctgtggtcctgcctggggtgatggggtttacgttgactccacgtaggtcagtgcaaaagtgcagtgcttggcgttcagtgggtttgtggcagatggagtgcttgggatgctcgggggctcgttcatctggagygagaaatgaacagggagagactaaataaatgggggaaaataatgctaggtaggcaaacaaagaaattcctcggtagcaaacagtaggttttttttgaggctaatgctctgtaaatrcggctttggagctgcctgagctgtgaagtcactgggacagcacctggggagggtcagcccaggctccggctggggtgagtgggcttaacccatgtcgggaagctgtggagcagcctgctgggaggtgggtgtttacagctgggggccaagagagctctgaaacgcccagcagtgagcaccctgg

SEQ ID NO: 66275 - DNA, 600 bp, Chicken  19866894334356_4
ggagtgatggagcatcgtcctctgtggagggccgtgggatgcggtgctgtgtgctggccccatggctgagcagccggctctgtggtcctgcctggggtgatggggtttacgttgactccacgtaggtcagtgcaaaagtgcagtgcttggcgttcagtgggtttgtggcagatggagtgcttgggatgctcgggggctcgttcatctggagygagaaatgaacagggagagactaaataaatgggggaaaataatgctaggtaggcaaacaaagaaattcctcggtagcaaacagtaggytttttttgaggctaatgctctgtaaatrcggctttggagctgcctgagctgtgaagtcactgggacagcacctggggagggtcagcccaggctccggctggggtgagtgggcttaacccatgtcgggaagctgtggagcagcctgctgggaggtgggtgtttacagctgggggccaagagagctctgaaacgcccagcagtgagcaccctggttgctgctggggctctgaaggatatattgcaaccacgctgtttaggaagggtttgtgcaaatcggcttggcaccctcctaaagccagg

SEQ ID NO: 66276 - DNA, 600 bp, Chicken  19866894334356_5
gggccgtgggatgcggtgctgtgtgctggccccatggctgagcagccggctctgtggtcctgcctggggtgatggggtttacgttgactccacgtaggtcagtgcaaaagtgcagtgcttggcgttcagtgggtttgtggcagatggagtgcttgggatgctcgggggctcgttcatctggagygagaaatgaacagggagagactaaataaatgggggaaaataatgctaggtaggcaaacaaagaaattcctcggtagcaaacagtaggttttttttgaggctaatgctctgtaaatrcggctttggagctgcctgagctgtgaagtcactgggacagcacctggggagggtcagcccaggctccggctggggtgagtgggcttaacccatgtcgggaagctgtggagcagcctgctgggaggtgggtgtttacagctgggggccaagagagctctgaaacgcccagcagtgagcaccctggttgctgctggggctctgaaggatatattgcaaccacgctgtttaggaagggtttgtgcaaatcggcttggcaccctcctaaagccaggtgtggaagtgcatccgagctgggagagc

SEQ ID NO: 66277 - DNA, 599 bp, Chicken  19866894334369_1
  misc_feature (1)..(133): n is any nucleotide
nnnnnnnnnnnnnnnnnnnnnnnnnnnnnnnnnnnnnnnnnnnnnnnnnnnnnnnnnnnnnnnnnnnnnnnnnnnnnnnnnnnnnnnnnnnnnnnnnnnnnnnnnnnnnnnnnnnnnnnnnnnnnnnnnnnnnttcctttggccctggcatgggggttaaaccttggcttggccagttgtgcctctgtacagcactgccctggtgtgttggtgccaggagcacagtgcttggaaggctgccttccctgccttgaagccactttttggatcaaagatttattgccatgagaggtaacggtytgttgtgcttgaggcataaagcacagctcttccacgttcccaactgctcgttcaaatattggctctgtatgggaggagaggggtgtgagcagaaaaaacgatgtgcagtgcacattaaaaagaaaaggaatcacttctctgaaccatcagttttgaatgttaatgtgatgtagtggttaatgagcttttataactaacatactaataacttagagtaacactgactgcttcccagcaggaacaggaagcttcccattaaagttatcaaaatggatgataacttcacagcaatttatgct

SEQ ID NO: 66278 - DNA, 600 bp, Chicken  19866894334370_1
cttgtggctggggccacatggttcgtgctggactgtgtttttgtgaatggaggcagaactcccagttctgactgcttgtcttgaggaattgcttcggagatcagctgtctcattcactggcagaaagaatgactcatacatcttctgccttgtttggctccaggtcattgttacagtggatagagctggttttaattaaatattaactccttttgtcctggatgcttgttcatggggactttttatttttgtttacttgcagagaaagcaaggtaacaggctctaatttaaaactttttwttattgctgtttttgaacttctttcccgctgcaaagtgtgccacagttyagatttttaaaggctttttaaaactctgaaaactgcaagcatgtcttaagtatttttgtgctgtaaacgtttgcttttcacaaactgactttaactgagtaggtagtgaagctgtaaaatctaaactgataatgtcctcgagattatcattaacatttttgtacacttcccaaatgctcttgagacattatagccttaataagaggaaaaacaaaacttttggtaataatctagagagggctggatagctt

SEQ ID NO: 66279 - DNA, 600 bp, Chicken  19866894334370_2
gaggcagaactcccagttctgactgcttgtcttgaggaattgcttcggagatcagctgtctcattcactggcagaaagaatgactcatacatcttctgccttgtttggctccaggtcattgttacagtggatagagctggttttaattaaatattaactccttttgtcctggatgcttgttcatggggactttttatttttgtttacttgcagagaaagcaaggtaacaggctctaatttaaaactttttwttattgctgtttttgaacttctttcccgctgcaaagtgtgccacagttyagatttttaaaggctttttaaaactctgaaaactgcaagcatgtcttaagtatttttgtgctgtaaacgtttgcttttcacaaactgactttaactgagtaggtagtgaagctgtaaaatctaaactgataatgtcctcgagattatcattaacatttttgtacacttcccaaatgctcttgagacattatagccttaataagaggaaaaacaaaacttttggtaataatctagagagggctggatagcttgctgcagatgttgtctgctccaggagtatgagactttctggctatgaat

SEQ ID NO: 66280 - DNA, 600 bp, Chicken  19866894334386_1
tcccaattccctcaaccactccccaacagacttgtgcaccagacccttcacagttttgctgcccttctgtggacactctccagggcctccatgtctttcttgtagtgagggacccaaaactgagcatagtactcaggtgtggtctcaccagacttagtacaggggagcaatcacctccctgttcctacttgtatcagtgactgggataacttcaattatcctgcaaatcattacatttacaacttcatttttaatagatttattcattgagtcctgagttttgagtgttcaagtgttctrtacagattttatgtatgtacatgtatgtcttttatgttcagagctgataaaaccttaaatcatttaaggacagtatttgcattctaccccctcaactcttatgtttgatacatttcacatttgaacttgcttccattctggcaagaaatagaatgtgtgccttgaaatagttttctagtgttttccatgctctttacttttctgacaccactattatatagtaactatttttaagaaaagaaattggatgcttctctgttgtttattttctcagctgcatcaattataaaaatctttggt

SEQ ID NO: 66281 - DNA, 600 bp, Chicken  19866894334405_1
acatgtcatatcaaatgaagtagtcccattcagttcagtaggcaagcactgaacaggaaacaaatcacaagaaatactagaggaacaataaaggtaaccattccagcaaacttcagaatagatggtttcagtgaagtatctccttgctttacactacattcaaaggcattggaaagagagagcaacaaaagtcagaaatctatatataggcccatacaaatcctattagaattaactggaaacctgtaaagtattaattttgtaagaaggaattatgaatatagtaaagaaaattaacaractaattaaaataacaaacagacaatattctcattgtgtgtcacaactaggaataacctttagtccaggccccagatttcactacttttgctcctctgtagttgtctacagacagtagtctacacacatcctttactctgtagttaaaagttgcatttttgctctcttcccatatgatacaaaataataataataaaaaaaatgctttgaatagccagcaatgaatgtaattattcacagaagtaaacttttactatattagacaatgagcagagaatcaaggagcagagaactaagtct

SEQ ID NO: 66282 - DNA, 599 bp, Chicken  19866894334407_1
  misc_feature (1)..(220): n is any nucleotide
nnnnnnnnnnnnnnnnnnnnnnnnnnnnnnnnnnnnnnnnnnnnnnnnnnnnnnnnnnnnnnnnnnnnnnnnnnnnnnnnnnnnnnnnnnnnnnnnnnnnnnnnnnnnnnnnnnnnnnnnnnnnnnnnnnnnnnnnnnnnnnnnnnnnnnnnnnnnnnnnnnnnnnnnnnnnnnnnnnnnnnnnnnnnnnnnnnnnnnnnnnnnnnnnnnnnnnnnnnnntgctgctcctcattatggtagaaaactttgctcaagttattggattactgaatgcaaaggactgtagtgaggagccacgrtgtggatgtgaattgtggtctctggaaatgaaagcagtatttattacagaggtaattacgatggctacaatcactcctgtaygtgggacrcttcacatacattctgagggagatgtggtttttgatgtttatggcaccaatgaaagaagcagcttttccctcttcacrttttaaaaactgcagccttctctgtgctgctgccacactcacgtggttacatacacctttaagtgaagggctttctactgtctatggttaaatcaagctggatttgaaaatgttaatgctgagaactgctt

SEQ ID NO: 66283 - DNA, 599 bp, Chicken  19866894334407_2
  misc_feature (1)..(138): n is any nucleotide
nnnnnnnnnnnnnnnnnnnnnnnnnnnnnnnnnnnnnnnnnnnnnnnnnnnnnnnnnnnnnnnnnnnnnnnnnnnnnnnnnnnnnnnnnnnnnnnnnnnnnnnnnnnnnnnnnnnnnnnnnnnnnnnnnnnnnnnnnntgctgctcctcattatggtagaaaactttgctcaagttattggattactgaatgcaaaggactgtagtgaggagccacgrtgtggatgtgaattgtggtctctggaaatgaaagcagtatttattacagaggtaattacgatggctacaatcactcctgtaygtgggacrcttcacatacattctgagggagatgtggtttttgatgtttatggcaccaatgaaagaagcagcttttccctcttcacrttttaaaaactgcagccttctctgtgctgctgccacactcacgtggttacatacacctttaagtgaagggctttctactgtctatggttaaatcaagctggatttgaaaatgttaatgctgagaactgctttcataaagatatgtccgaatgaactgctggctaaaaatctgccgatgctgtaagttttgagaagttgatttcattacctgcc

SEQ ID NO: 66284 - DNA, 599 bp, Chicken  19866894334407_3
  misc_feature (1)..(130): n is any nucleotide
nnnnnnnnnnnnnnnnnnnnnnnnnnnnnnnnnnnnnnnnnnnnnnnnnnnnnnnnnnnnnnnnnnnnnnnnnnnnnnnnnnnnnnnnnnnnnnnnnnnnnnnnnnnnnnnnnnnnnnnnnnnnnnnnnntgctgctcctcattatggtagaaaactttgctcaagttattggattactgaatgcaaaggactgtagtgaggagccacgrtgtggatgtgaattgtggtctctggaaatgaaagcagtatttattacagaggtaattacgatggctacaatcactcctgtaygtgggacrcttcacatacattctgagggagatgtggtttttgatgtttatggcaccaatgaaagaagcagcttttccctcttcacrttttaaaaactgcagccttctctgtgctgctgccacactcacgtggttacatacacctttaagtgaagggctttctactgtctatggttaaatcaagctggatttgaaaatgttaatgctgagaactgctttcataaagatatgtccgaatgaactgctggctaaaaatctgccgatgctgtaagttttgagaagttgatttcattacctgccttccttta

SEQ ID NO: 66285 - DNA, 599 bp, Chicken  19866894334407_4
  misc_feature (1)..(52): n is any nucleotide
nnnnnnnnnnnnnnnnnnnnnnnnnnnnnnnnnnnnnnnnnnnnnnnnnnnntgctgctcctcattatggtagaaaactttgctcaagttattggattactgaatgcaaaggactgtagtgaggagccacgrtgtggatgtgaattgtggtctctggaaatgaaagcagtatttattacagaggtaattacgatggctacaatcactcctgtaygtgggacrcttcacatacattctgagggagatgtggtttttgatgtttatggcaccaatgaaagaagcagcttttccctcttcacrttttaaaaactgcagccttctctgtgctgctgccacactcacgtggttacatacacctttaagtgaagggctttctactgtctatggttaaatcaagctggatttgaaaatgttaatgctgagaactgctttcataaagatatgtccgaatgaactgctggctaaaaatctgccgatgctgtaagttttgagaagttgatttcattacctgccttcctttaaaatgggttttaaataacctaatggctttaatttcctccatagtgaagtagcagttatgattttttggaagtgaagta

SEQ ID NO: 66286 - DNA, 600 bp, Chicken  19866894334408_1
agcatgtctgctattcaagtgtagcatttcatatctgtttcattgtctttaaatgcatcttataaactatattttgatagtttcatgtgtagggagtggagcatatttttcttcagttataaagtagcatttagagcatccgctgctgctttttttttttagccaaaataatcaaacagaagaaaaatattatttctgacagaaagtcacagtgaagccaagagattaatttgagtaattgctccatttagacataccaacactgctgcataccagagtactttaaaatgatagaaatawatgtaattttaaaatctgtaaatatgagcatttggttcaagtaggaaacatcctgcacacatatttctaggatggytgaataggacagaatcattgattgtaaattctagcacggtagcttcgtctccaaatagaaaattgtcaaaacctcttattactgtaaccagaaaggaaaatcactataacacagacaaagatccttaagcaagatgaccaatagaaaaaggggaagatctgtccatcttaatgcacaaaccattctcacatgattttattcggaaccctgccaggtccccccag

SEQ ID NO: 66287 - DNA, 600 bp, Chicken  19866894334408_2
atagtttcatgtgtagggagtggagcatatttttcttcagttataaagtagcatttagagcatccgctgctgctttttttttttagccaaaataatcaaacagaagaaaaatattatttctgacagaaagtcacagtgaagccaagagattaatttgagtaattgctccatttagacataccaacactgctgcataccagagtactttaaaatgatagaaatawatgtaattttaaaatctgtaaatatgagcatttggttcaagtaggaaacatcctgcacacatatttctaggatggytgaataggacagaatcattgattgtaaattctagcacggtagcttcgtctccaaatagaaaattgtcaaaacctcttattactgtaaccagaaaggaaaatcactataacacagacaaagatccttaagcaagatgaccaatagaaaaaggggaagatctgtccatcttaatgcacaaaccattctcacatgattttattcggaaccctgccaggtccccccagcgcatccctttctacgtacacactggtacctaacggaacactgctcaatgaaattgtcaatgagaccaagactcct

SEQ ID NO: 66288 - DNA, 600 bp, Chicken  19866894334409_1
tattttgcttggagaagataaggctccagggagacctcattgtggccttccagtacttaaagggagggagacccgctttttacacaactgaatagtgatgggacaagggagaatggattaaaactaaaggaagggagatttagattagatgttaggaataaattctttactcaggcacaggttgcacagagaagctgtgggtgctccatccctggaggcattcaaggccaggttggatgaggccctgggcatcctgctgtaattggtggcagccctgcccatggcagtggggtaagaackgaacaggctctaagatccctttcagcccaaacmattcagtgattctatgattctatgattagattatacatgcacagataactatgtacaatgtctaacagttacacatgaatacataaggcttttgtatgtagtcttaagaattgccttttatgtttctttaatatacccacaaatgtttttactataaatatttatgagtaacttctaaaaaacagtgtatagagaagcactggacataaattttacacacgtacactggggacttgtcacacaaattgagcaattccaatgcaatac

SEQ ID NO: 66289 - DNA, 600 bp, Chicken  19866894334409_2
acctcattgtggccttccagtacttaaagggagggagacccgctttttacacaactgaatagtgatgggacaagggagaatggattaaaactaaaggaagggagatttagattagatgttaggaataaattctttactcaggcacaggttgcacagagaagctgtgggtgctccatccctggaggcattcaaggccaggttggatgaggccctgggcatcctgctgtaattggtggcagccctgcccatggcagtggggtaagaackgaacaggctctaagatccctttcagcccaaacmattcagtgattctatgattctatgattagattatacatgcacagataactatgtacaatgtctaacagttacacatgaatacataaggcttttgtatgtagtcttaagaattgccttttatgtttctttaatatacccacaaatgtttttactataaatatttatgagtaacttctaaaaaacagtgtatagagaagcactggacataaattttacacacgtacactggggacttgtcacacaaattgagcaattccaatgcaataccattaattgaagacttgcaagaacaatgcagca

SEQ ID NO: 66290 - DNA, 600 bp, Chicken  19866894334413_1
tgattaccacatctttctaccagaggtgacagtgaaatccctccttaagatttttctttagcaattaatagagacattggcatggtaaaataagaaaaatcaatatggaaataaagtttcagatggaaaaagcccaacgttatttcaatactttcaatagtactggaatcataacaggaggcaaaatggacaacaatgtcactgttgccatggtcaggtctgtacatttgcaccattcatatacaagaaatgcttatatgctcagtaagactgagcagtaagactgagagtaagactggstccatatattcagctagataacctatccatcactattaaaagaaaaaaagaggagagattgcaaggtggaggctcatgtttcaacctgtagagtattacagagataaaagcactcttctagctttattcaacttactaaaaaaacacagccaaagaatgttgtctcactcatgcacaaatgaattcctcagttgttgtgtcagaccagtgcattggaacagacacttcaggccctgttgcttccaaaacagaatgaccctttaagcaaccccaaggctatgcagtcagagtcaacaaaat

SEQ ID NO: 66291 - DNA, 600 bp, Chicken  19866894334435_1
gcaagtgtttactgatgcagattaggccaacaattaagtagtaaagtatcactgatccttaggtggaagcttaaagttacacaaaggggcacaatctgccaatgccctttggcttcctagtggcttttttttggttcctctggggcactgtgactttgggcagtctgtctattttctcatctgaaagttaggaaaatatttacaagagagagaaagtgctataaataccagagctcaaaaataacaacagataaaaccagaattcagccctgaacacctaagctcatttctctcctagcryatccgtgtgcctgctgctctccttgtctggcaggatgagggcctgcaggctgctgagcgtgtgggcagcagtgctgacagccccctcacccggagctcggctcctttgcaataggttcactggctgcctgatgccaagcatggaaaccacatccagctgttgagtgcatcaacggatggtaagatcctggtgtggagggaggagcgagatgggcggctggccgtggctgaagggtttgccctggtggctcagcagatccctcgcagcgctcggctgaagaaggtgagttcatgagtttg

SEQ ID NO: 66292 - DNA, 600 bp, Chicken  19866894334435_2
caagtgtttactgatgcagattaggccaacaattaagtagtaaagtatcactgatccttaggtggaagcttaaagttacacaaaggggcacaatctgccaatgccctttggcttcctagtggcttttttttggttcctctggggcactgtgactttgggcagtctgtctattttctcatctgaaagttaggaaaatatttacaagagagagaaagtgctataaataccagagctcaaaaataacaacagataaaaccagaattcagccctgaacacctaagctcatttctctcctagcryatccgtgtgcctgctgctctccttgtctggcaggatgagggcctgcaggctgctgagcgtgtgggcagcagtgctgacagccccctcacccggagctcggctcctttgcaataggttcactggctgcctgatgccaagcatggaaaccacatccagctgttgagtgcatcaacggatggtaagatcctggtgtggagggaggagcgagatgggcggctggccgtggctgaagggtttgccctggtggctcagcagatccctcgcagcgctcggctgaagaaggtgagttcatgagtttgt

SEQ ID NO: 66293 - DNA, 600 bp, Chicken  19866894334447_1
cgaatcaatgtaagttttgaaccatgtaagttgacaaatgtgttgacagaggtgtaaggaccctcaggaaacattcaaaacatattgcatgtctccagtaaagatcaggaaagaagtatacaaaggatagcaaatccaatgccactttgctgccttgtgtctttttctctctacaggttgcatgaagcattacttctgcagttgaatgctacggatgaactcatgctagagcatgcataatagcaagcccactttatggctataatcaagtaagacaaggaaacagaaggctatgaaaakaagatgggtatatggcagaactgcagtgtaagratttaattcataccagcaacagaaaaaaatagcactaatggattagttacatgagactttggcgaacaaaaaagacaggacctcttgcatgggagattatcacttctgcttttctgaagctaagaaattttgggaatttcttgctcctcaccccactggaagagcacatctcttgggaagggctgattctgaagccctcaaatctttgtgcaatcacaaaggagactctrtagagggctactcaatctcttttctattacattttta

SEQ ID NO: 66294 - DNA, 600 bp, Chicken  19866894334447_2
acaaatgtgttgacagaggtgtaaggaccctcaggaaacattcaaaacatattgcatgtctccagtaaagatcaggaaagaagtatacaaaggatagcaaatccaatgccactttgctgccttgtgtctttttctctctacaggttgcatgaagcattacttctgcagttgaatgctacggatgaactcatgctagagcatgcataatagcaagcccactttatggctataatcaagtaagacaaggaaacagaaggctatgaaaakaagatgggtatatggcagaactgcagtgtaagratttaattcataccagcaacagaaaaaaatagcactaatggattagttacatgagactttggcgaacaaaaaagacaggacctcttgcatgggagattatcacttctgcttttctgaagctaagaaattttgggaatttcttgctcctcaccccactggaagagcacatctcttgggaagggctgattctgaagccctcaaatctttgtgcaatcacaaaggagactctrtagagggctactcaatctcttttctattacatttttaatttacacatttcccagaattctcttttataag

SEQ ID NO: 66295 - DNA, 529 bp, Chicken  19866894334447_3
aatcaagtaagacaaggaaacagaaggctatgaaaakaagatgggtatatggcagaactgcagtgtaagratttaattcataccagcaacagaaaaaaatagcactaatggattagttacatgagactttggcgaacaaaaaagacaggacctcttgcatgggagattatcacttctgcttttctgaagctaagaaattttgggaatttcttgctcctcaccccactggaagagcacatctcttgggaagggctgattctgaagccctcaaatctttgtgcaatcacaaaggagactctrtagagggctactcaatctcttttctattacatttttaatttacacatttcccagaattctcttttataagatgctaatattggagggatttaatattggagacagtcttgtgcaccgtaaggagaacccataggttcagatgacaaggatctctccagttgtatgcgtgcgcacacagtgatggctgcagcctcgctcacacagtaaagtctaagttagccaaggacca

SEQ ID NO: 66296 - DNA, 462 bp, Chicken  19866894334449_1
ggagggctgagctgctctgcctccatccctgcttttcaagatgtgttgtatttctttcccttagttttctctttgcctttcagtcacatcctatctttctttatgtagaaccaccttcactttcaggtacctcgggctttttcatgctgcagctctttctgaactccgagcgacagagaaacaattatttgaaacacaggcaatggcagacacctctccagctttcttccagtcttgctaaataggttctcttcctgtcctgaccctgcagacactcacacaatgccagcagccttctcraaagagtcacgatcctgtataaaaccatctgtgtctccttcaaacgggatgaagctggaggcattttcttaccagaattaaggagatcagagttggcaataatacatctttcctcagcaaaaatagttacagaagataaaatatcaataataacataaggcg

SEQ ID NO: 66297 - DNA, 600 bp, Chicken  19866894334457_1
actctcagtgtatcttacactttcaaagctggtgctaagatttccagtgctccaggcaaatcatcaaaaatctgttctcaccacaggcacccagacaaaaatagtcatggggtcgttttgctgctcctcctgtttgctgccctggagatacaacagttcttgcagtttcagaagtgatttgattctaggctgtgtttaaacataggttttttttggttgatgaaaggaggagttagaatggaaatgaagatagtcggaaaagtgtgcagtggaaacctagcaacacaatgcctcaataakttggagatgagcaccttgaggagttcgttrtatattctgttgtaagtttaggccacttttgcttttctcacccctgtgaacagccctggcaagttgctttcatgtaaacatttgttctgccttacagaatacagctgcggctttactttccactgcctgagtaaagggctggctgcccatccactgaggtaggatatttctgctctgctgtgttcagttgcttgctaggccaggatgcatgtgaaacatgcatgcagatacacgcagattaaagtttagataactctgcatgaaaaaaac

SEQ ID NO: 66298 - DNA, 600 bp, Chicken  19866894334457_2
ggtgctaagatttccagtgctccaggcaaatcatcaaaaatctgttctcaccacaggcacccagacaaaaatagtcatggggtcgttttgctgctcctcctgtttgctgccctggagatacaacagttcttgcagtttcagaagtgatttgattctaggctgtgtttaaacataggttttttttggttgatgaaaggaggagttagaatggaaatgaagatagtcggaaaagtgtgcagtggaaacctagcaacacaatgcctcaataakttggagatgagcaccttgaggagttcgttrtatattctgttgtaagtttaggccacttttgcttttctcacccctgtgaacagccctggcaagttgctttcatgtaaacatttgttctgccttacagaatacagctgcggctttactttccactgcctgagtaaagggctggctgcccatccactgaggtaggatatttctgctctgctgtgttcagttgcttgctaggccaggatgcatgtgaaacatgcatgcagatacacgcagattaaagtttagataactctgcatgaaaaaaacatcctgtttttttgccatgctcagacacat

SEQ ID NO: 66299 - DNA, 600 bp, Chicken  19866894334457_3
ggccacttttgcttttctcacccctgtgaacagccctggcaagttgctttcatgtaaacatttgttctgccttacagaatacagctgcggctttactttccactgcctgagtaaagggctggctgcccatccactgaggtaggatatttctgctctgctgtgttcagttgcttgctaggccaggatgcatgtgaaacatgcatgcagatacacgcagattaaagtttagataactctgcatgaaaaaaacatcctgtttttttgccatgctcagacacatcacactaggattttaaagcwccctgaagtcaagcagtttccaactctagctgactcccttgagtataaaaaatcatgtctttaaaatgattaactgtatcagctgtcagtgacaaatgcagagaggaaaggaggtagactgatttatagtgatactgttgtctcttccagtatcagaactaagatgatgagtgaggtgatcgtttggctgatttcttagctgccaacaattttaaatatagtgctaagtacagtatggagctgggccctgagttttattaagcagaacagtagagacatgctatatgctgactgtgtaac

SEQ ID NO: 66300 - DNA, 600 bp, Chicken  19866894334464_1
gaactacgggatatctcacactgtttccaaaacaaggggacggaacaaatcgttactagcaagaactggctggaacaagctgtgacagtctatgaacttcccatctgaaaaaataactcattacaaaacaaaaaacaacccgccctcccatcattaccccaaggagtacagtgcttttcctagaaggaaacatgaatactcccagagatgggcttcacaaacttgatctcatgaaccaacaggtcctgaacaactccaaatagcaggcttcgttccatgtcaggtgaaaaatggagtttsttttttccttcagatcaactacatcttccacgttacttctaacaacacacaacactgagtcaaaacatttcttctctagtacttctggtcagtacttaaagaggaacggagcagaaaaggcagagcagaatgcagcacgtcattccctgtcactaacagcattgtttacatatccacaagaactcactccacatgaattcccagctcagctctctacacttaagaagactggcaccactgaaggctttacagtgaaaaggtacggtccaacattgtgcattacaagttgattcagtgcca

SEQ ID NO: 66301 - DNA, 600 bp, Chicken  19866894334466_1
tatcctttttttaagttattttttaagagtttcatagagaagtgattggataaattggattaggaacaattcattcttgctccagccaacaggcttatcataagagaaggttttgacatcaaaatgttaattctctgaattgacctgatcccttccatttgatagttcttatctgtatccattcgtgttatttgatctgtccatcaactttttgatcctcagatttccagaactgcagaggagaacattgtctctgcatctcacatctcctagagcttgcattaaatgaagatgtaaacrccaaatctggttatgcacagaccttagggaagtattttttaatctagacagtaaactggcacttggtttctgacaccaaaactagagctctgctacacagttcatttgttaccaccaaaccaattagagtaagattttcaaatacctcagccatgaagtttgcactgaaattctgtatttttgtgcttcctaaatgctaatgttcgtggaagataaaaagttcctcactttaatttcttggtgtccgaggcatgtttctgcccatttttcctaaaccatatgcttctctttttcacactt

SEQ ID NO: 66302 - DNA, 600 bp, Chicken  19866894334471_1
agagtggaggctgaggtggagagaaaaaagctcagtgcagctgaacctccagcagaggtggtttcactggtggcaccgcaccaaacccaggcttcctagccctgctgccttcctacacagggactgggcatttgaggtgcatctgccttcccaccctcagcctgccgccaggaaccctctgcacagaagaaatatgatagttctgtgtaagttctgctcctgagctagggatctttctgccattacagccatctccggagagatgtggaaagcccacctctccaggctgcagaacagacrtgaagctaagcaacgtaagtatgcaaacaccatttttttcctacaagcttctttaaccaacggccaggcccaaattcttcgaaagcaccttcccattgctttcagtggggtccaccacagctccgagatgtcagcactgtgctcctcagagctgggggaacagattcacgctctccttcaccctgggaggagcctatcccagaggcatgagccttaccccggggagcagaagccacagtggccagcaccaccacgtgagccaactgtgccagcactgtctgctgggagcctgcagcccta

SEQ ID NO: 66303 - DNA, 600 bp, Chicken  19866894334486_1
gtactattccatcatctcacaagagagttctcactggcacacatgtgtcagatccagaacatgctgtgcttcccactgccagtcatgcaaaaaggtgttggagaaaacaaagtcacattaaagccatgaccaaagcagcagagctcagacaggggatccacttgagaaaataaatgtatctgtgcagctcaaacctcccgtgaattttgtttggtaagcaagactcacaagcattaattatgcctggtgttaaagccttatctgaaaatatccttgatctgacatgctatgaccaattaygcccaccaaagacaccatcaagggcttaacaggyatgaaatatttccaacatatgatattttatgaaaaagaatggctacaacatacgattagagcctggaatcccactagacatgactagcagctgtattttaacagctttctgttcaaactacacagaactgaaatgaaaatctcgcaatacttcttcaggcctatcctaaggatttagtctgtactactttcttttcagaaatagacagatgaaggcaaaataaaactataattttcttgtatgtgcacaagaaacaaaaggaaaat

SEQ ID NO: 66304 - DNA, 600 bp, Chicken  19866894334486_2
tggcacacatgtgtcagatccagaacatgctgtgcttcccactgccagtcatgcaaaaaggtgttggagaaaacaaagtcacattaaagccatgaccaaagcagcagagctcagacaggggatccacttgagaaaataaatgtatctgtgcagctcaaacctcccgtgaattttgtttggtaagcaagactcacaagcattaattatgcctggtgttaaagccttatctgaaaatatccttgatctgacatgctatgaccaattaygcccaccaaagacaccatcaagggcttaacaggyatgaaatatttccaacatatgatattttatgaaaaagaatggctacaacatacgattagagcctggaatcccactagacatgactagcagctgtattttaacagctttctgttcaaactacacagaactgaaatgaaaatctcgcaatacttcttcaggcctatcctaaggatttagtctgtactactttcttttcagaaatagacagatgaaggcaaaataaaactataattttcttgtatgtgcacaagaaacaaaaggaaaattttcataaagaatttacttacttatctacatgct

SEQ ID NO: 66305 - DNA, 600 bp, Chicken  19866894334487_1
ctgcgggcaaacaattgaacatgattgagttatggcaagttaacaagttgttgcttggcagctgagctgccatagcttagcatgtgctctttgtttgcgtgctcccagcatgaggtaaaacacgttttcttaagtcaattttgtaaaatattagaaaaaggagttgtacctaaggaagattccccagtgcgaagaacatttgtttggtcagcttttgagacagagttgaaccatatcttgctgagctactataactttgttgttctcaacaagtgatatactgttaagtatttatgggamccctgtcacataactatctgcatgtsttaattttttatgtatttgtcttcacaatatcctgtaaagctaggagatgctgctatattctcatttgacagaataacaggagtgcttawgtaagttaawkttttacttytggttatacagtcaacactgtaactagttatttatactgtaatctagaaacaacgtttcagattgggaaaccacttctactaaataagttaaactcataattgtttcctttacataatggtcttgtgccttatttctttttacaacatgcttatgttaagtatc

SEQ ID NO: 66306 - DNA, 600 bp, Chicken  19866894334487_2
gagttatggcaagttaacaagttgttgcttggcagctgagctgccatagcttagcatgtgctctttgtttgcgtgctcccagcatgaggtaaaacacgttttcttaagtcaattttgtaaaatattagaaaaaggagttgtacctaaggaagattccccagtgcgaagaacatttgtttggtcagcttttgagacagagttgaaccatatcttgctgagctactataactttgttgttctcaacaagtgatatactgttaagtatttatgggamccctgtcacataactatctgcatgtsttaattttttatgtatttgtcttcacaatatcctgtaaagctaggagatgctgctatattctcatttgacagaataacaggagtgcttawgtaagttaawkttttacttytggttatacagtcaacactgtaactagttatttatactgtaatctagaaacaacgtttcagattgggaaaccacttctactaaataagttaaactcataattgtttcctttacataatggtcttgtgccttatttctttttacaacatgcttatgttaagtatcgatcattatwatatctacatatttat

SEQ ID NO: 66307 - DNA, 600 bp, Chicken  19866894334487_3
aaaacacgttttcttaagtcaattttgtaaaatattagaaaaaggagttgtacctaaggaagattccccagtgcgaagaacatttgtttggtcagcttttgagacagagttgaaccatatcttgctgagctactataactttgttgttctcaacaagtgatatactgttaagtatttatgggamccctgtcacataactatctgcatgtsttaattttttatgtatttgtcttcacaatatcctgtaaagctaggagatgctgctatattctcatttgacagaataacaggagtgcttawgtaagttaawkttttacttytggttatacagtcaacactgtaactagttatttatactgtaatctagaaacaacgtttcagattgggaaaccacttctactaaataagttaaactcataattgtttcctttacataatggtcttgtgccttatttctttttacaacatgcttatgttaagtatcgatcattatwatatctacatatttatttttttcttattgtrctgtaagaatttatggcacatgcatggatggagaaactgaaaagagaatagtgtccaaactgctgctatgtgcaa

SEQ ID NO: 66308 - DNA, 600 bp, Chicken  19866894334487_4
ttcttaagtcaattttgtaaaatattagaaaaaggagttgtacctaaggaagattccccagtgcgaagaacatttgtttggtcagcttttgagacagagttgaaccatatcttgctgagctactataactttgttgttctcaacaagtgatatactgttaagtatttatgggamccctgtcacataactatctgcatgtsttaattttttatgtatttgtcttcacaatatcctgtaaagctaggagatgctgctatattctcatttgacagaataacaggagtgcttawgtaagttaawkttttacttytggttatacagtcaacactgtaactagttatttatactgtaatctagaaacaacgtttcagattgggaaaccacttctactaaataagttaaactcataattgtttcctttacataatggtcttgtgccttatttctttttacaacatgcttatgttaagtatcgatcattatwatatctacatatttatttttttcttattgtrctgtaagaatttatggcacatgcatggatggagaaactgaaaagagaatagtgtccaaactgctgctatgtgcaaattctttagt

SEQ ID NO: 66309 - DNA, 600 bp, Chicken  19866894334487_5
tcttaagtcaattttgtaaaatattagaaaaaggagttgtacctaaggaagattccccagtgcgaagaacatttgtttggtcagcttttgagacagagttgaaccatatcttgctgagctactataactttgttgttctcaacaagtgatatactgttaagtatttatgggamccctgtcacataactatctgcatgtsttaattttttatgtatttgtcttcacaatatcctgtaaagctaggagatgctgctatattctcatttgacagaataacaggagtgcttawgtaagttaawkttttacttytggttatacagtcaacactgtaactagttatttatactgtaatctagaaacaacgtttcagattgggaaaccacttctactaaataagttaaactcataattgtttcctttacataatggtcttgtgccttatttctttttacaacatgcttatgttaagtatcgatcattatwatatctacatatttatttttttcttattgtrctgtaagaatttatggcacatgcatggatggagaaactgaaaagagaatagtgtccaaactgctgctatgtgcaaattctttagtt

SEQ ID NO: 66310 - DNA, 600 bp, Chicken  19866894334487_6
aattttgtaaaatattagaaaaaggagttgtacctaaggaagattccccagtgcgaagaacatttgtttggtcagcttttgagacagagttgaaccatatcttgctgagctactataactttgttgttctcaacaagtgatatactgttaagtatttatgggamccctgtcacataactatctgcatgtsttaattttttatgtatttgtcttcacaatatcctgtaaagctaggagatgctgctatattctcatttgacagaataacaggagtgcttawgtaagttaawkttttacttytggttatacagtcaacactgtaactagttatttatactgtaatctagaaacaacgtttcagattgggaaaccacttctactaaataagttaaactcataattgtttcctttacataatggtcttgtgccttatttctttttacaacatgcttatgttaagtatcgatcattatwatatctacatatttatttttttcttattgtrctgtaagaatttatggcacatgcatggatggagaaactgaaaagagaatagtgtccaaactgctgctatgtgcaaattctttagttgatcttgac

SEQ ID NO: 66311 - DNA, 483 bp, Chicken  19866894334487_7
taactatctgcatgtsttaattttttatgtatttgtcttcacaatatcctgtaaagctaggagatgctgctatattctcatttgacagaataacaggagtgcttawgtaagttaawkttttacttytggttatacagtcaacactgtaactagttatttatactgtaatctagaaacaacgtttcagattgggaaaccacttctactaaataagttaaactcataattgtttcctttacataatggtcttgtgccttatttctttttacaacatgcttatgttaagtatcgatcattatwatatctacatatttatttttttcttattgtrctgtaagaatttatggcacatgcatggatggagaaactgaaaagagaatagtgtccaaactgctgctatgtgcaaattctttagttgatcttgacgactccatgttggctctcccactcaagtgctcgcgcagtgattgttaaaaggaaaaa

SEQ ID NO: 66312 - DNA, 452 bp, Chicken  19866894334487_8
tttgtcttcacaatatcctgtaaagctaggagatgctgctatattctcatttgacagaataacaggagtgcttawgtaagttaawkttttacttytggttatacagtcaacactgtaactagttatttatactgtaatctagaaacaacgtttcagattgggaaaccacttctactaaataagttaaactcataattgtttcctttacataatggtcttgtgccttatttctttttacaacatgcttatgttaagtatcgatcattatwatatctacatatttatttttttcttattgtrctgtaagaatttatggcacatgcatggatggagaaactgaaaagagaatagtgtccaaactgctgctatgtgcaaattctttagttgatcttgacgactccatgttggctctcccactcaagtgctcgcgcagtgattgttaaaaggaaaaa

SEQ ID NO: 66313 - DNA, 600 bp, Chicken  19866894334489_1
ccagttccaaattaccaaaaaaaaaaagagggatagccacaatccaattaaagaaagaaagatttacttacctatcccaaggatcagggctcaccaaacactctaaaaagaggaacctccaggtggcagccggcccttaaatgaggctgagggaggaggtgggacccgttcacacgtgtgaattgctttctcctgtgctcccagggctgcctgtgtcccatcaccaggtgctcaatcattgcttcaggccatgacttagcaattcccatacactctcaaatgcagacgttgctctggccyrggaaacaagtaggscatcaactgcagatgtctgagagagcatttgggggcgtatcaagtttcttcccattgtttctgttttccctgggcatctatttttgtcgctggtgtggagagagcacagggctggagagatctttgccctgagcagtgcagctgccctgtgccaactcctgggctgcccggctgctcgggatcgtgggttgaagcatcttgttccgtgtggtctgcattctgtggttagtttaacggagccgatggagtgccagaggttgaggaggagcagtgggtgccgccatg

SEQ ID NO: 66314 - DNA, 600 bp, Chicken  19866894334489_2
cagttccaaattaccaaaaaaaaaaagagggatagccacaatccaattaaagaaagaaagatttacttacctatcccaaggatcagggctcaccaaacactctaaaaagaggaacctccaggtggcagccggcccttaaatgaggctgagggaggaggtgggacccgttcacacgtgtgaattgctttctcctgtgctcccagggctgcctgtgtcccatcaccaggtgctcaatcattgcttcaggccatgacttagcaattcccatacactctcaaatgcagacgttgctctggccyrggaaacaagtaggscatcaactgcagatgtctgagagagcatttgggggcgtatcaagtttcttcccattgtttctgttttccctgggcatctatttttgtcgctggtgtggagagagcacagggctggagagatctttgccctgagcagtgcagctgccctgtgccaactcctgggctgcccggctgctcgggatcgtgggttgaagcatcttgttccgtgtggtctgcattctgtggttagtttaacggagccgatggagtgccagaggttgaggaggagcagtgggtgccgccatgg

SEQ ID NO: 66315 - DNA, 600 bp, Chicken  19866894334489_3
caaaaaaaaaaagagggatagccacaatccaattaaagaaagaaagatttacttacctatcccaaggatcagggctcaccaaacactctaaaaagaggaacctccaggtggcagccggcccttaaatgaggctgagggaggaggtgggacccgttcacacgtgtgaattgctttctcctgtgctcccagggctgcctgtgtcccatcaccaggtgctcaatcattgcttcaggccatgacttagcaattcccatacactctcaaatgcagacgttgctctggccyrggaaacaagtaggscatcaactgcagatgtctgagagagcatttgggggcgtatcaagtttcttcccattgtttctgttttccctgggcatctatttttgtcgctggtgtggagagagcacagggctggagagatctttgccctgagcagtgcagctgccctgtgccaactcctgggctgcccggctgctcgggatcgtgggttgaagcatcttgttccgtgtggtctgcattctgtggttagtttaacggagccgatggagtgccagaggttgaggaggagcagtgggtgccgccatggaaggtcaccctgag

SEQ ID NO: 66316 - DNA, 600 bp, Chicken  19866894334497_1
ttttttttttaatttgaggatataatccatacatgtgaaaaatcttagaaacatataaaatactagtaatgattccagccattagatggttaaaatgctctacaaataagtccgacatcaaatagaaattcactcagttgggagatgtgctgtggaaattaatcttctctcttaatgaaataaaatgaggctttgtaaactttcagcagtaaggtataaggtcagtcaatactatgccctttcagccacagtgacagtgaaggaaagcctctgccataattggagttaaataagggtagrctggagtggagtgagcatgctaaaggtgtacagaacagaagtaaactgcagaggtaaactatttagcctttaacactaaaaaaaaaaaaaaaaaaaawaccaaaaaacaacaacaacaaaaaaaaccaaaaccagttaaaattgatgaactgtcttcatgatatagcacataattaatcttcagactttagtgttctggaattatcaaggtgaaaagcttcaaaaaatcttccaagacataattgattatagagatattttcctcattctctactacgggaatcttctcacttgctgttg

SEQ ID NO: 66317 - DNA, 600 bp, Chicken  19866894334497_2
tctacaaataagtccgacatcaaatagaaattcactcagttgggagatgtgctgtggaaattaatcttctctcttaatgaaataaaatgaggctttgtaaactttcagcagtaaggtataaggtcagtcaatactatgccctttcagccacagtgacagtgaaggaaagcctctgccataattggagttaaataagggtagrctggagtggagtgagcatgctaaaggtgtacagaacagaagtaaactgcagaggtaaactatttagcctttaacactaaaaaaaaaaaaaaaaaaaawaccaaaaaacaacaacaacaaaaaaaaccaaaaccagttaaaattgatgaactgtcttcatgatatagcacataattaatcttcagactttagtgttctggaattatcaaggtgaaaagcttcaaaaaatcttccaagacataattgattatagagatattttcctcattctctactacgggaatcttctcacttgctgttgtgtgttgtgcttaggtttttcaatctcatttttccaatgcttctctttggagttgtggttcttttgacaaatgctgagactgagaaaaattcaagttt

SEQ ID NO: 66318 - DNA, 599 bp, Chicken  19866894334501_1
  misc_feature (1)..(121): n is any nucleotide
nnnnnnnnnnnnnnnnnnnnnnnnnnnnnnnnnnnnnnnnnnnnnnnnnnnnnnnnnnnnnnnnnnnnnnnnnnnnnnnnnnnnnnnnnnnnnnnnnnnnnnnnnnnnnnnnnnnnnnnnnctgcttgctaatgaggagattgcctgctccaatggctcagctcgctgcatgtgagggagcagggctcgaactcttccaaaatcctcatcggggctgagatcacgtaaggcttgcttaagtacattggtggcttttcattatccctgctgagatcgaagtgacccaggtccagagcagtycatgttctgcactgtgaacaaacaagttgcatttttctagctrtaagcaattccttttggaaaactgatttttcttagtgccatttctttaatgcagtttcctgcttttcattatactagctastgagtgtccaaccttttggcttgcctgggctgcagygagtgaagrgggattgccttgggccacgtataatgtgggttgctctgaaartaatgcctcctatttatttccatggaaactacaacagatacaatgagcacagtaacactggtagtgcaaattcccagctacaaaacat

SEQ ID NO: 66319 - DNA, 599 bp, Chicken  19866894334501_2
  misc_feature (1)..(78): n is any nucleotide
nnnnnnnnnnnnnnnnnnnnnnnnnnnnnnnnnnnnnnnnnnnnnnnnnnnnnnnnnnnnnnnnnnnnnnnnnnnnnnctgcttgctaatgaggagattgcctgctccaatggctcagctcgctgcatgtgagggagcagggctcgaactcttccaaaatcctcatcggggctgagatcacgtaaggcttgcttaagtacattggtggcttttcattatccctgctgagatcgaagtgacccaggtccagagcagtycatgttctgcactgtgaacaaacaagttgcatttttctagctrtaagcaattccttttggaaaactgatttttcttagtgccatttctttaatgcagtttcctgcttttcattatactagctastgagtgtccaaccttttggcttgcctgggctgcagygagtgaagrgggattgccttgggccacgtataatgtgggttgctctgaaartaatgcctcctatttatttccatggaaactacaacagatacaatgagcacagtaacactggtagtgcaaattcccagctacaaaacatctattttcaatagagtcaccaccattagctatgctaatgaaca

SEQ ID NO: 66320 - DNA, 600 bp, Chicken  19866894334501_3
cttgctaatgaggagattgcctgctccaatggctcagctcgctgcatgtgagggagcagggctcgaactcttccaaaatcctcatcggggctgagatcacgtaaggcttgcttaagtacattggtggcttttcattatccctgctgagatcgaagtgacccaggtccagagcagtycatgttctgcactgtgaacaaacaagttgcatttttctagctrtaagcaattccttttggaaaactgatttttcttagtgccatttctttaatgcagtttcctgcttttcattatactagctastgagtgtccaaccttttggcttgcctgggctgcagygagtgaagrgggattgccttgggccacgtataatgtgggttgctctgaaartaatgcctcctatttatttccatggaaactacaacagatacaatgagcacagtaacactggtagtgcaaattcccagctacaaaacatctattttcaatagagtcaccaccattagctatgctaatgaacagaagcttgaatgccacactggtaaagagctgcatcagtggaggtgacccactgctgctgtcaccacagctgaaacgcaccgc

SEQ ID NO: 66321 - DNA, 600 bp, Chicken  19866894334501_4
gctcgctgcatgtgagggagcagggctcgaactcttccaaaatcctcatcggggctgagatcacgtaaggcttgcttaagtacattggtggcttttcattatccctgctgagatcgaagtgacccaggtccagagcagtycatgttctgcactgtgaacaaacaagttgcatttttctagctrtaagcaattccttttggaaaactgatttttcttagtgccatttctttaatgcagtttcctgcttttcattatactagctastgagtgtccaaccttttggcttgcctgggctgcagygagtgaagrgggattgccttgggccacgtataatgtgggttgctctgaaartaatgcctcctatttatttccatggaaactacaacagatacaatgagcacagtaacactggtagtgcaaattcccagctacaaaacatctattttcaatagagtcaccaccattagctatgctaatgaacagaagcttgaatgccacactggtaaagagctgcatcagtggaggtgacccactgctgctgtcaccacagctgaaacgcaccgccctcaytgtgtcagcatccactgcttggcctccatc

SEQ ID NO: 66322 - DNA, 600 bp, Chicken  19866894334501_5
atgtgagggagcagggctcgaactcttccaaaatcctcatcggggctgagatcacgtaaggcttgcttaagtacattggtggcttttcattatccctgctgagatcgaagtgacccaggtccagagcagtycatgttctgcactgtgaacaaacaagttgcatttttctagctrtaagcaattccttttggaaaactgatttttcttagtgccatttctttaatgcagtttcctgcttttcattatactagctastgagtgtccaaccttttggcttgcctgggctgcagygagtgaagrgggattgccttgggccacgtataatgtgggttgctctgaaartaatgcctcctatttatttccatggaaactacaacagatacaatgagcacagtaacactggtagtgcaaattcccagctacaaaacatctattttcaatagagtcaccaccattagctatgctaatgaacagaagcttgaatgccacactggtaaagagctgcatcagtggaggtgacccactgctgctgtcaccacagctgaaacgcaccgccctcaytgtgtcagcatccactgcttggcctccatcaacatccag

SEQ ID NO: 66323 - DNA, 600 bp, Chicken  19866894334501_6
gggctgagatcacgtaaggcttgcttaagtacattggtggcttttcattatccctgctgagatcgaagtgacccaggtccagagcagtycatgttctgcactgtgaacaaacaagttgcatttttctagctrtaagcaattccttttggaaaactgatttttcttagtgccatttctttaatgcagtttcctgcttttcattatactagctastgagtgtccaaccttttggcttgcctgggctgcagygagtgaagrgggattgccttgggccacgtataatgtgggttgctctgaaartaatgcctcctatttatttccatggaaactacaacagatacaatgagcacagtaacactggtagtgcaaattcccagctacaaaacatctattttcaatagagtcaccaccattagctatgctaatgaacagaagcttgaatgccacactggtaaagagctgcatcagtggaggtgacccactgctgctgtcaccacagctgaaacgcaccgccctcaytgtgtcagcatccactgcttggcctccatcaacatccagcgagcatcaatgaatgccagtgggtgtcattgtttcctcatg

SEQ ID NO: 66324 - DNA, 600 bp, Chicken  19866894334501_7
tccaaccttttggcttgcctgggctgcagygagtgaagrgggattgccttgggccacgtataatgtgggttgctctgaaartaatgcctcctatttatttccatggaaactacaacagatacaatgagcacagtaacactggtagtgcaaattcccagctacaaaacatctattttcaatagagtcaccaccattagctatgctaatgaacagaagcttgaatgccacactggtaaagagctgcatcagtggaggtgacccactgctgctgtcaccacagctgaaacgcaccgccctcaytgtgtcagcatccactgcttggcctccatcaacatccagcgagcatcaatgaatgccagtgggtgtcattgtttcctcatggaggaattcagttacacacctttgctccatacgcacttccatgtcagatgccattctgtcagactgtcctgctgccatctgtcacacagcaacaacatgtaacgggatattggtgggaaggatccgacgtctactgctgtagaggatctagaaatctagtaaagaggggttggtagcacacgtggggtgccattagggatgctgcagacgtgtgggtct

SEQ ID NO: 66325 - DNA, 600 bp, Chicken  19866894334515_1
gtctggataagagaaagctccaaagggaccttatagcagccttccagtacctgtagggggcctacaggaaagctggggaggaactttttaggagggcaggtagtaacaggacaaggggaaatggttttaaactggaagagggtacatttagactagacagtaggaagaaagtcttcactgtggggatggtgagacactggaacaggttgcccagtgaggctgtggatgttccttccctggaagcattcaagaccaggctggatggggctttgagcagcctggtctagaggaaggtatccmtgcctatagcagagggatggaactagattatcttaatggtcccttctaacccaaaccatcctatgattctatatcatgtagaaatccaaataatgcgggggtaatcctttgctcaactttgatgaagtaacagtttgcaaattaacagaagacacacacacacacacacacacacaattactgctaactaacctcttccatcagaagcatcactcagcttcctgctagcttgccgacttgtaggattcagcatagtgacatagccacaaaaatgctgcaagtctactttgtttctcaata

SEQ ID NO: 66326 - DNA, 600 bp, Chicken  19866894334516_1
cattgccaggcacaaggaagtggaattagaattattctgtggagaaagcaaaaatatattaaccacagctataacgtataaaaacgtatacattagctgtctaatatttttaggtactgggacactgaggattgtttgcacatattttgaagagaggaaagttgcgtgatgactgtacttccaagtcaaaattacgaagttaatctggatagcattcttgcaaaatatacaaacataacattattgcattcatgaaccatgttgtatcacccattatttctgtcattttagaaaagatasaggagaatatctgtttggacactgaaaaataagaactacatagccaaaggttagcagaaatgggacaaggaacgatgaatttatatgataaatgactcttagagaagaaataaatcagaaatacatacacatgttgagattcaaggttccaaacaaaggacaaaacagcatttaatacaatagaaaacaaaaatctgaaatgcagaaacagatctgctttctcctttcaatcatattgagcttctgaaattaactttcataaggtactattcatgaccaacgcttgagaggaacatctgt

SEQ ID NO: 66327 - DNA, 600 bp, Chicken  19866894334518_1
tgcatcttttcatataggaaaggagtgatacttctcaattctctggaacctggacaaatcatcaactctgtctgctatatcatgccactgactaagctgagggcttgatcttccagggtcaggacacagaagaatacagtctttatcttgcagcatgataacatcagggccccatatcaatttaaggactgtggaacatattgtccatgctggctggactgtccaaccacactaactgtatagtctggatttggtgtcttctgatttccatctgtccaggccaatgaaaggtaaacttcrtgggcaacattttcctagcaatgatgacaccactgcagctgagaaacagtgggtcacctcctctggtgcagatttttataagcacaacatacaggctcttgttcatcactggtgaaaatacagagctaatggtggtcactattctgaaaaatagtattctgtagctgataatttgctctattaaatagtgttattgtgctttttgtatctgttatggtttccatagaaacaaataggaggcattacttttggagtgatctatgcagttctttgttttgttcttttaattacttactatga

SEQ ID NO: 66328 - DNA, 599 bp, Chicken  19866894334523_1
  misc_feature (1)..(36): n is any nucleotide
nnnnnnnnnnnnnnnnnnnnnnnnnnnnnnnnnnnncatcaccagtgcacatctgggctgttggctgctgtgtttgtgttcctagatctcatgttctcactgtcagctctaagcttgcgttgaacctcaagcaggtcagaccttgttggtctgtgataaggcacagtgtttgtgcacgacagcacagcttttatattgcgcaggctcctaaagatacttgttctaacgatgggataaaacaacggctgcctccctgaatcacttcatgtgctgaagacagagggatgcgagtgagggccrttcccagggtgggtgccgggagcacagtgtgagagcgtgcaatgctgtgcagaagcacagcttaaggtcagactcagctctaaagcttccccagaatcccaaatcctctttttatatgagttttagcaaacacaaacaattaaagaatttcatcttctcctactatggtggaaaagcctgaatgcttctctaaactttattaaaaagctccagcgtgttccctgggtgagggtcctgcttggcttctgagagcccatatctttgtgtttggtgcgaatgaatcggtcactgatgccagt

SEQ ID NO: 66329 - DNA, 600 bp, Chicken  19866894334525_1
aaccggtgggactcttgattagaaacatatatatccagtaggttaatttcataggcagcctgatctgatggttggcagttctgcccatggctggagagttggaaatgcatgatctttaaggtctcatccaatctaagccattctgtgattccattctatgacaattatgggaagctgaggttcagagagggatttttctccatgtggtgacagaaggctctgtatggttggtaccaggcaaaaactgtttctaagacattaagttcaatgcatttccaaaacactgaaatattcgcatcraatgtctctcccacctactccttatcattgttttaaagctttctgttaaaagatcacacgattgttgtagtgccatggacatttttgcacttgctattaacttagcctcattcagcaaaaacttttgtctttgcctacttgttagccattcattttcgcaattaaaatcaccatgacaactgataatgatatcagaatgaaaggattacagcttaattacatggaggaagtggagagcagagaaagctttgaattccagcagacccagcctgagccctgttcactgctgcattgctccac

SEQ ID NO: 66330 - DNA, 600 bp, Chicken  19866894334534_1
caatagtatttataacggactttggaagcatcactcccacttccagaccatctcatggctgctccacgtttccagtgcccttctttgacatggtgagacacggtatgatttattgtgaaatagttttttgtagacaacaaaacaagcctaacattataatctgctttataccttagcacagtcttgtacatggacgaaattgtctcagccttactggaaaaaggtcaccatcagctgtctcttgcctctacgtgaccattgggtgggtttccgtcaccaaaaaggtttgatggtgagagsgagagctcaccctccacattctcccactagtggaacatcattatatactatcagaaggacaggactgagcctgatcaaggtggcctcatctttggtcaacacwagaaatcctcccttaccttgcagtactcatcaataggtatcaggcgcttgactgcgacatcacggatgtgactccggcggaaaaggatcttccctgaaatgggagagacagaagaaaagagcaggtcagtgcagtgcttggggacactcccttttgagtcgctccatcaggaccttttcctcatgcatctcacaaaa

SEQ ID NO: 66331 - DNA, 600 bp, Chicken  19866894334534_2
tatgatttattgtgaaatagttttttgtagacaacaaaacaagcctaacattataatctgctttataccttagcacagtcttgtacatggacgaaattgtctcagccttactggaaaaaggtcaccatcagctgtctcttgcctctacgtgaccattgggtgggtttccgtcaccaaaaaggtttgatggtgagagsgagagctcaccctccacattctcccactagtggaacatcattatatactatcagaaggacaggactgagcctgatcaaggtggcctcatctttggtcaacacwagaaatcctcccttaccttgcagtactcatcaataggtatcaggcgcttgactgcgacatcacggatgtgactccggcggaaaaggatcttccctgaaatgggagagacagaagaaaagagcaggtcagtgcagtgcttggggacactcccttttgagtcgctccatcaggaccttttcctcatgcatctcacaaaaaacaccgtacctacagcacgttccctcctgtgcattaaatcccatgttagaacaaaatatacttaaaatggcaagcacgtttaagcagagagaagagcaacca

SEQ ID NO: 66332 - DNA, 600 bp, Chicken  19866894334554_1
ataatgcattgtgccatgacatctcattgtgatgagaaaatattatgaagcaggcagctcaacttttaagtttcacctgcaggacaaactaaacttggtacaacttccccttccgcatcaagttgcaggacacagtcacccaaactcctttgggcaaaagtctaagttggcgatgctcccgaaaccagagcactgcaactaatgcgtgtattttcaacccatgctcagagggttagagacttggactttagtttgcattcctagactttttctttcctaacccaacttttctgtgtggastgtgacaagaaattaatgcctggaggacatgytgagacttcttggtagaatatgatagttaaaagtccagaaataatctctttttaggatttgtgtaaatatgaattcatattcttttaacttctgtgacaggtaacttcagcttwtttttttttttttactattttcctagagtcaaaagaaccaaaaaagattaaatagacctattcttgaatcaccaaaagatacaacagggagttggtcacgttgatattctgtcatatggtattgaacaatggccttttgctgtttcatggcact

SEQ ID NO: 66333 - DNA, 600 bp, Chicken  19866894334554_2
tgagaaaatattatgaagcaggcagctcaacttttaagtttcacctgcaggacaaactaaacttggtacaacttccccttccgcatcaagttgcaggacacagtcacccaaactcctttgggcaaaagtctaagttggcgatgctcccgaaaccagagcactgcaactaatgcgtgtattttcaacccatgctcagagggttagagacttggactttagtttgcattcctagactttttctttcctaacccaacttttctgtgtggastgtgacaagaaattaatgcctggaggacatgytgagacttcttggtagaatatgatagttaaaagtccagaaataatctctttttaggatttgtgtaaatatgaattcatattcttttaacttctgtgacaggtaacttcagcttwtttttttttttttactattttcctagagtcaaaagaaccaaaaaagattaaatagacctattcttgaatcaccaaaagatacaacagggagttggtcacgttgatattctgtcatatggtattgaacaatggccttttgctgtttcatggcactagaagagggtagctatgataaataaaaccaca

SEQ ID NO: 66334 - DNA, 600 bp, Chicken  19866894334554_3
cctttgggcaaaagtctaagttggcgatgctcccgaaaccagagcactgcaactaatgcgtgtattttcaacccatgctcagagggttagagacttggactttagtttgcattcctagactttttctttcctaacccaacttttctgtgtggastgtgacaagaaattaatgcctggaggacatgytgagacttcttggtagaatatgatagttaaaagtccagaaataatctctttttaggatttgtgtaaatatgaattcatattcttttaacttctgtgacaggtaacttcagcttwtttttttttttttactattttcctagagtcaaaagaaccaaaaaagattaaatagacctattcttgaatcaccaaaagatacaacagggagttggtcacgttgatattctgtcatatggtattgaacaatggccttttgctgtttcatggcactagaagagggtagctatgataaataaaaccacaacagtccagcctgtttggtatacttgttggcgattcagcagcatcctccctttggattatttccttcagagaaactcagtgcatgaaagtacgatggtgttacattgattcttc

SEQ ID NO: 66335 - DNA, 600 bp, Chicken  19866894334554_4
ttcagagaaactcagtgcatgaaagtacgatggtgttacattgattcttctggtgaataaaatggagttttattctctgacgctttcagaatgtaagcaaagccaaattcagttatttattgatcatcaaagtctgctgaagtcaatagaaatctgtaaactttgaatgagaaccccagatcattcctcattgcaacttgtgttgcatgaagaactcctttattgcttaagctgatgatgcttttttccctctttggtaagatctctatgttaggggtatagtcttcaaccagtgcagarctcatggagtatttgagctatgcctgtgtaaagccttctgtggggrtgctcatttggtgaagttggcagacttggagaacagtgttaaaagatgatacttgataataaaaataaaactgtgcatgctttttcaaacttgaccagttccagacagtaaaatttggatagtcattgaccatgaattctggtcagcttcactttggaaaagtacagaaatgcaactcatgtgctaaagcaagaaagctttgaatgagtggtggtgcaaaatttcatctgtaaacaacatgggctaattttgcc

SEQ ID NO: 66336 - DNA, 600 bp, Chicken  19866894334554_5
cttctggtgaataaaatggagttttattctctgacgctttcagaatgtaagcaaagccaaattcagttatttattgatcatcaaagtctgctgaagtcaatagaaatctgtaaactttgaatgagaaccccagatcattcctcattgcaacttgtgttgcatgaagaactcctttattgcttaagctgatgatgcttttttccctctttggtaagatctctatgttaggggtatagtcttcaaccagtgcagarctcatggagtatttgagctatgcctgtgtaaagccttctgtggggrtgctcatttggtgaagttggcagacttggagaacagtgttaaaagatgatacttgataataaaaataaaactgtgcatgctttttcaaacttgaccagttccagacagtaaaatttggatagtcattgaccatgaattctggtcagcttcactttggaaaagtacagaaatgcaactcatgtgctaaagcaagaaagctttgaatgagtggtggtgcaaaatttcatctgtaaacaacatgggctaattttgccttgacaggactcaacaaaaatgagttgtggttaaaaggatttgatg

SEQ ID NO: 66337 - DNA, 600 bp, Chicken  19866894334554_6
tttttcaaacttgaccagttccagacagtaaaatttggatagtcattgaccatgaattctggtcagcttcactttggaaaagtacagaaatgcaactcatgtgctaaagcaagaaagctttgaatgagtggtggtgcaaaatttcatctgtaaacaacatgggctaattttgccttgacaggactcaacaaaaatgagttgtggttaaaaggatttgatgtcccaatgggtacagacagctaacagtttggggtttgcaaggtttcctttagtgtggttatgcttagactgtgtatcatygggcagcttcaggttttcaaatgacactctttttgctaacactcatttctcagattctataatattttcctttctgtctgtgtattagttaaacacctctgcaattcagctaccaaagtggacctttctccacaatgatttcaggagagggaaacactcatcctgtagtaaatcacaacatctcatttttattttccttgagttttccctctgttttgtctctatttgtgcggcacagaatgtcccagctgtgtatgctgagacttgtcttttcctttgctcgatatctgcttgtagcta

SEQ ID NO: 66338 - DNA, 600 bp, Chicken  19866894334563_1
ccaagccctgcagcgattcatggcccccttgttaatgagaaattttgacctctggtttgtaagttaaacttgtaatcccagctaatgaagtaaatcaatcccaacttcagtctgttgttcccatttttctttgcacagtgtgtctgggagttggtatccaggtctacaaatacgatttgggggaaaaaaattattcaacagctttgtaacttctgttttgcgattcacttaaatatctctaaagcagacagattattttaaccttgtctgtgtgcttgtaaaatgtcctattagtgtggrtgttttagacacgtgaaaataataggccttagttaccattttaaaaggsaagacgggtttacaaccgccccctaatactcagttcatgaacacatttacactttggatgagtagatctgtttgaaattatttaggaaccatattttaattcttgttttatatttctggggatacatgaggatagttctgtgttagaaaaaggtttcccactgctttgagagaaaacagattcgctagcagtaraaatgaatgcaaagctaagatgctaattttcataatggtggatcatcctttgaaata

SEQ ID NO: 66339 - DNA, 600 bp, Chicken  19866894334563_2
ctctggtttgtaagttaaacttgtaatcccagctaatgaagtaaatcaatcccaacttcagtctgttgttcccatttttctttgcacagtgtgtctgggagttggtatccaggtctacaaatacgatttgggggaaaaaaattattcaacagctttgtaacttctgttttgcgattcacttaaatatctctaaagcagacagattattttaaccttgtctgtgtgcttgtaaaatgtcctattagtgtggrtgttttagacacgtgaaaataataggccttagttaccattttaaaaggsaagacgggtttacaaccgccccctaatactcagttcatgaacacatttacactttggatgagtagatctgtttgaaattatttaggaaccatattttaattcttgttttatatttctggggatacatgaggatagttctgtgttagaaaaaggtttcccactgctttgagagaaaacagattcgctagcagtaraaatgaatgcaaagctaagatgctaattttcataatggtggatcatcctttgaaatacatactgccatgtcttgtaagccatagagtgacaaaaaacctagccatt

SEQ ID NO: 66340 - DNA, 600 bp, Chicken  19866894334563_3
gcagacagattattttaaccttgtctgtgtgcttgtaaaatgtcctattagtgtggrtgttttagacacgtgaaaataataggccttagttaccattttaaaaggsaagacgggtttacaaccgccccctaatactcagttcatgaacacatttacactttggatgagtagatctgtttgaaattatttaggaaccatattttaattcttgttttatatttctggggatacatgaggatagttctgtgttagaaaaaggtttcccactgctttgagagaaaacagattcgctagcagtaraaatgaatgcaaagctaagatgctaattttcataatggtggatcatcctttgaaatacatactgccatgtcttgtaagccatagagtgacaaaaaacctagccatttatccagcccaaaagccctggtaaagcctctgagttgatgtcatgtcataccacattactaaagaatctgtaagagatcagcagatggtaaaaagagaggtgaagccttcatgaaaaaaataaggagatgccggatttctaatgtgatccctgaaaataaaacatcatcagccagaggaagaaaaatgcttgta

SEQ ID NO: 66341 - DNA, 513 bp, Chicken  19866894334563_4
catgtcttgtaagccatagagtgacaaaaaacctagccatttatccagcccaaaagccctggtaaagcctctgagttgatgtcatgtcataccacattactaaagaatctgtaagagatcagcagatggtaaaaagagaggtgaagccttcatgaaaaaaataaggagatgccggatttctaatgtgatccctgaaaataaaacatcatcagccagaggaagaaaaatgcttgtagctgcttccctttccttttgtatcagtaattggtatctttgtagcccctcctaaatgataggacyctttttkgttttaatcattttctctataaaagagagttgttatgttagtttatagctcatttgtgctacaaatgctgctttacaggagctgaagcttcacgacaaaatgtttttttctaactcaagggggtacgtgagctcccctttaactgcaggggctgtgctgcatctcggcccttgacttgcagcagtcagcacatagtgggcgcaaag

SEQ ID NO: 66342 - DNA, 506 bp, Chicken  19866894334563_5
tgtaagccatagagtgacaaaaaacctagccatttatccagcccaaaagccctggtaaagcctctgagttgatgtcatgtcataccacattactaaagaatctgtaagagatcagcagatggtaaaaagagaggtgaagccttcatgaaaaaaataaggagatgccggatttctaatgtgatccctgaaaataaaacatcatcagccagaggaagaaaaatgcttgtagctgcttccctttccttttgtatcagtaattggtatctttgtagcccctcctaaatgataggacyctttttkgttttaatcattttctctataaaagagagttgttatgttagtttatagctcatttgtgctacaaatgctgctttacaggagctgaagcttcacgacaaaatgtttttttctaactcaagggggtacgtgagctcccctttaactgcaggggctgtgctgcatctcggcccttgacttgcagcagtcagcacatagtgggcgcaaag

SEQ ID NO: 66343 - DNA, 600 bp, Chicken  19866894334567_1
tgttttttaggcttgcagttttgtgaaactggtttgagttttcaggagtaagttttgctgtacttagatatatgaaatacataacttgcttcctcatctttgcatttggaaagtctcttatttttatgggaaatttgtgttttcacaaattattctgttgccagaatctcaggcaccataagtattagacattggaggaaatccctgatgtgtaatctcttttctcagtccttttgctagtataaatagtgcctctaccatctcattttcatatggaagtttagtcttaagtttagtctytaagtttagtcacttaaggaaaaatcaagcattgtttttatttaaatacactcactcattcaagaataactgaaatacttaagggaggacctaagaaaaacttaagcaagtaatataataccattgcatgttgaaatgcttcatcaatgtagcatatcatacatttgccaaagtaagacatgggaaaagattatgtgtatgcagtgaatgaattaccactttcagaggtgagattaaaactgatcatttggtcattaataaacatcagaagtgaaaatgacttgaatgttccatattttt

SEQ ID NO: 66344 - DNA, 599 bp, Chicken  19866894334580_1
  misc_feature (1)..(19): n is any nucleotide
nnnnnnnnnnnnnnnnnnncagtagttcagctgctgacaatccactgctgtggcacagcttcccagtttcatctgatgctccctcagtgttaactcagaagaaagttgcacttcaggccactcacaataaactgctaccaagaatggctgtgtctccctaaacttacagacaaaacttacaaagcaagaagggctttgagattggttgctattcaagcaaataaaagtttagcaagtaaggtctggtatccagggatagtaatattctgtttgcagtgctgctctgaagattgctttggygagaaaagtgtaggaacaaaaatgatgcattacaaaaggcwgaaatctcactgaaagctgagtcctaggcctaccccacccctctcccaaagactgaaacacagtgatttttcacattctcagaagtgacataacaaataggaactccaaaatgtctcaacatccttaccattgttgtcactggtgacaccagtgccatgagcctctgtgcgtttgtataacagtactagctataaatttccagcttgcttgttaatatacgtaagcatgaaatcagcacagctatactgatttaaaac

SEQ ID NO: 66345 - DNA, 600 bp, Chicken  19866894334580_2
ccactgctgtggcacagcttcccagtttcatctgatgctccctcagtgttaactcagaagaaagttgcacttcaggccactcacaataaactgctaccaagaatggctgtgtctccctaaacttacagacaaaacttacaaagcaagaagggctttgagattggttgctattcaagcaaataaaagtttagcaagtaaggtctggtatccagggatagtaatattctgtttgcagtgctgctctgaagattgctttggygagaaaagtgtaggaacaaaaatgatgcattacaaaaggcwgaaatctcactgaaagctgagtcctaggcctaccccacccctctcccaaagactgaaacacagtgatttttcacattctcagaagtgacataacaaataggaactccaaaatgtctcaacatccttaccattgttgtcactggtgacaccagtgccatgagcctctgtgcgtttgtataacagtactagctataaatttccagcttgcttgttaatatacgtaagcatgaaatcagcacagctatactgatttaaaacagatgaagaactgacctttagtttggacacaaaatcatgtaa

SEQ ID NO: 66346 - DNA, 600 bp, Chicken  19866894334585_1
gagggtacctccttttcatttgcattatctgacctgatcacctaacagcatgtcgatgacaacatctgtgaactatagtttgtttgtgaacgactgggtcacatcaagtctagagatggttaaattgtaaaacaaattttctttgcacttggcatttgtattgatttagtgaaaccaatgacatcacaaatggttaggtctcaagaaaaagagaaagacaagaaagccttcaactgaatttggtcatccaaatttatggcctaactgagctagggcctaactctgaggctatgcatgtakcctgcagtacttcttgagcagaakaaatcwtttttctttttccaactcccaagaacatcagctgcatttgtgttcttagtgactgtagggctcctcatttttatctccycaagcatagcttgtggaattctgttttccaccgtgaggggaaatggaggtcatcttgtatagaaaacrtgatggacagtgtccatgctgagtgaactgrcagcacgtaggacagccactctcaagcatgctgtatttaagctgtgttaagaatgggagctgagagaaaggataagcaatgaaagagtgtaa

SEQ ID NO: 66347 - DNA, 600 bp, Chicken  19866894334585_2
ttatctgacctgatcacctaacagcatgtcgatgacaacatctgtgaactatagtttgtttgtgaacgactgggtcacatcaagtctagagatggttaaattgtaaaacaaattttctttgcacttggcatttgtattgatttagtgaaaccaatgacatcacaaatggttaggtctcaagaaaaagagaaagacaagaaagccttcaactgaatttggtcatccaaatttatggcctaactgagctagggcctaactctgaggctatgcatgtakcctgcagtacttcttgagcagaakaaatcwtttttctttttccaactcccaagaacatcagctgcatttgtgttcttagtgactgtagggctcctcatttttatctccycaagcatagcttgtggaattctgttttccaccgtgaggggaaatggaggtcatcttgtatagaaaacrtgatggacagtgtccatgctgagtgaactgrcagcacgtaggacagccactctcaagcatgctgtatttaagctgtgttaagaatgggagctgagagaaaggataagcaatgaaagagtgtaatgttaaaagcaagcatccatgctc

SEQ ID NO: 66348 - DNA, 600 bp, Chicken  19866894334585_3
gacctgatcacctaacagcatgtcgatgacaacatctgtgaactatagtttgtttgtgaacgactgggtcacatcaagtctagagatggttaaattgtaaaacaaattttctttgcacttggcatttgtattgatttagtgaaaccaatgacatcacaaatggttaggtctcaagaaaaagagaaagacaagaaagccttcaactgaatttggtcatccaaatttatggcctaactgagctagggcctaactctgaggctatgcatgtakcctgcagtacttcttgagcagaakaaatcwtttttctttttccaactcccaagaacatcagctgcatttgtgttcttagtgactgtagggctcctcatttttatctccycaagcatagcttgtggaattctgttttccaccgtgaggggaaatggaggtcatcttgtatagaaaacrtgatggacagtgtccatgctgagtgaactgrcagcacgtaggacagccactctcaagcatgctgtatttaagctgtgttaagaatgggagctgagagaaaggataagcaatgaaagagtgtaatgttaaaagcaagcatccatgctcctcacg

SEQ ID NO: 66349 - DNA, 600 bp, Chicken  19866894334585_4
gatcacctaacagcatgtcgatgacaacatctgtgaactatagtttgtttgtgaacgactgggtcacatcaagtctagagatggttaaattgtaaaacaaattttctttgcacttggcatttgtattgatttagtgaaaccaatgacatcacaaatggttaggtctcaagaaaaagagaaagacaagaaagccttcaactgaatttggtcatccaaatttatggcctaactgagctagggcctaactctgaggctatgcatgtakcctgcagtacttcttgagcagaakaaatcwttttwctttttccaactcccaagaacatcagctgcatttgtgttcttagtgactgtagggctcctcatttttatctccycaagcatagcttgtggaattctgttttccaccgtgaggggaaatggaggtcatcttgtatagaaaacrtgatggacagtgtccatgctgagtgaactgrcagcacgtaggacagccactctcaagcatgctgtatttaagctgtgttaagaatgggagctgagagaaaggataagcaatgaaagagtgtaatgttaaaagcaagcatccatgctcctcacggtgta

SEQ ID NO: 66350 - DNA, 600 bp, Chicken  19866894334585_5
atcacctaacagcatgtcgatgacaacatctgtgaactatagtttgtttgtgaacgactgggtcacatcaagtctagagatggttaaattgtaaaacaaattttctttgcacttggcatttgtattgatttagtgaaaccaatgacatcacaaatggttaggtctcaagaaaaagagaaagacaagaaagccttcaactgaatttggtcatccaaatttatggcctaactgagctagggcctaactctgaggctatgcatgtakcctgcagtacttcttgagcagaakaaatcwtttttwtttttccaactcccaagaacatcagctgcatttgtgttcttagtgactgtagggctcctcatttttatctccycaagcatagcttgtggaattctgttttccaccgtgaggggaaatggaggtcatcttgtatagaaaacrtgatggacagtgtccatgctgagtgaactgrcagcacgtaggacagccactctcaagcatgctgtatttaagctgtgttaagaatgggagctgagagaaaggataagcaatgaaagagtgtaatgttaaaagcaagcatccatgctcctcacggtgtac

SEQ ID NO: 66351 - DNA, 600 bp, Chicken  19866894334585_6
ctagagatggttaaattgtaaaacaaattttctttgcacttggcatttgtattgatttagtgaaaccaatgacatcacaaatggttaggtctcaagaaaaagagaaagacaagaaagccttcaactgaatttggtcatccaaatttatggcctaactgagctagggcctaactctgaggctatgcatgtakcctgcagtacttcttgagcagaakaaatcwtttttctttttccaactcccaagaacatcagctgcatttgtgttcttagtgactgtagggctcctcatttttatctccycaagcatagcttgtggaattctgttttccaccgtgaggggaaatggaggtcatcttgtatagaaaacrtgatggacagtgtccatgctgagtgaactgrcagcacgtaggacagccactctcaagcatgctgtatttaagctgtgttaagaatgggagctgagagaaaggataagcaatgaaagagtgtaatgttaaaagcaagcatccatgctcctcacggtgtaccctttcttataaacaacatgaggaaaaatactggtcaaatctggaactccttcatcatcagccctccacaaga

SEQ ID NO: 66352 - DNA, 600 bp, Chicken  19866894334585_7
atgacatcacaaatggttaggtctcaagaaaaagagaaagacaagaaagccttcaactgaatttggtcatccaaatttatggcctaactgagctagggcctaactctgaggctatgcatgtakcctgcagtacttcttgagcagaakaaatcwtttttctttttccaactcccaagaacatcagctgcatttgtgttcttagtgactgtagggctcctcatttttatctccycaagcatagcttgtggaattctgttttccaccgtgaggggaaatggaggtcatcttgtatagaaaacrtgatggacagtgtccatgctgagtgaactgrcagcacgtaggacagccactctcaagcatgctgtatttaagctgtgttaagaatgggagctgagagaaaggataagcaatgaaagagtgtaatgttaaaagcaagcatccatgctcctcacggtgtaccctttcttataaacaacatgaggaaaaatactggtcaaatctggaactccttcatcatcagccctccacaagaaaaagaaaaaatacccacccctaaagtttaacagctaattagtcagaatttttgcctagaaattactt

SEQ ID NO: 66353 - DNA, 600 bp, Chicken  19866894334585_8
aagagaaagacaagaaagccttcaactgaatttggtcatccaaatttatggcctaactgagctagggcctaactctgaggctatgcatgtakcctgcagtacttcttgagcagaakaaatcwtttttctttttccaactcccaagaacatcagctgcatttgtgttcttagtgactgtagggctcctcatttttatctccycaagcatagcttgtggaattctgttttccaccgtgaggggaaatggaggtcatcttgtatagaaaacrtgatggacagtgtccatgctgagtgaactgrcagcacgtaggacagccactctcaagcatgctgtatttaagctgtgttaagaatgggagctgagagaaaggataagcaatgaaagagtgtaatgttaaaagcaagcatccatgctcctcacggtgtaccctttcttataaacaacatgaggaaaaatactggtcaaatctggaactccttcatcatcagccctccacaagaaaaagaaaaaatacccacccctaaagtttaacagctaattagtcagaatttttgcctagaaattactttctgtcctagatcggagtatccattatttat

SEQ ID NO: 66354 - DNA, 441 bp, Chicken  19866894334586_1
atttgcttagaagcccagttgagttatttgctttggccactgcatggactgtggccttgcagtatattggctaaaaaactgtttggctagaataacaatgtcattaatgtaaaaaaaaaatatggctgggtatggactgatgagatattttctttctgaaatgtgatctggattttcaatgcaacattttttaaactaataaactttagtttcttagacagtccaaatgtatttattatttcttattgccaaataaaatgttttcacataacaaaattgttctatgaagatgtacttcaytaagggcaacctaagacatgacttcataaacataagggtgttttcttctctgtgaaattatacctgaagttatcaggactgttcttcccggctttctaaaatagatatttcacagcaaactgagagcccaattcataagaa

SEQ ID NO: 66355 - DNA, 600 bp, Chicken  19866894334588_1
agtccccacattctgggattttgacatttgagcagatatcccagtaaccagcaactagaagtctggactttgtgcaacagcacatgttgcatttgccactgctaatggggtgaggaaggggaggtagaaaaacccctcctctgaacctcaaaaaaaaagcctcctgaattctgttttggcagctcggaaaaagagtatgtagcagctctgaaatggcacaaattcaaaggatatattaagaagtggaataaaggcctgaagctttccaacaaaatgagttatagcagttcaacgtgagtyctggggtgttattctactcaacataaaacttcattccatctaattttaaactactcagtcactgagtttccgctcaattaaataagataattggacattatattatttttatctaaggtatcttactttaaaattgcatagcttagtgttaagaaaggagattttccagtctcttttatccattgatagcctccagaatatgggcctctcacattcctgcacaggattttgagacaaaggagaagcccttgactgagggacagcacagccatctttgtgatcagcttagaatttctattg

SEQ ID NO: 66356 - DNA, 600 bp, Chicken  19866894334589_1
ctgcccagcgctctctgggatggggcgagagagcagtgagggaacgggatcccgggtgtcctctctgctactggttctgattggtgtgaagagtgtttatgttggaatcgctggcagaacagtccttgcgagcggggcggcaggtgctgggaggtggtggctgcaggtgagcggtatgggctggggaaggtctgggtagagcttcagatgagagcaggtggatctgtctgcagagagcatattggtgtgatagggagggaggagtctgaggggctgggacgggtttgcagggagtgggtsggttccaggcgtccccccatgggtaaagactgttctaaattgttcgctatcaggcccgagttatcaccgctcctgtatttttccatcattttcctgccttcttaaccactacaataggagataaataggtaactttatgggagaaactgttattaaggctcattatctaaatttgtacttgccaatttcgtagctgaaagtcatgaaaataaacaaaatacccttgaaagtgaagaacagacattgagctcctggcagagaaaaactcaaaccattttagaaagtagggggcagaaatct

SEQ ID NO: 66357 - DNA, 600 bp, Chicken  19866894334589_2
ttagaaagtagggggcagaaatctcaggcttgaggtttgggtctgctctattcaagagcatgaaagagagatcaaactcattacaaatgttgatttcaaatatagtcaaagtgctatttaaagcatgtacgtggcatagggaagggaaaggacagttggacctcacagaatacacggtgatgtttgttctgctgttctgctcatgtatcacatagcaggagatacttcaaggtaataggaagagtgaaatgtcagtaatatatatagccagtacgtccagccatgtggttaattaatgcyatttgcctccatgtgcctggcgcattgagtaaatacaaacagatacacattcaatacatacattctgctgaaagtcctagaatggtttgggtgggaagggacctttcgaggccatctagtccggttactctgcaatgaagagaagtcattgctggggtaagcatgaaaagagccctgcgatattctgcatcagaacggctggacttggagctcacacagctggctgtcagagctggagcagtgggaaaatgagctatttaacaagtaattatgcagagtcatttatttatttattacaca

SEQ ID NO: 66358 - DNA, 600 bp, Chicken  19866894334592_1
ttcttacctagggaatttatggttctttaaaattgctacctctgagtattcctactccttgtcttccttcctgtctttttttttttttttcttttgagtcttctcttaaggtctttgggggttttatgaaagaatggaggctgtacaaaaagtgaggccaaattttcagttttctgaggtgatatatatgggaagcagtagacagcaccttactgtcaggttgttaatgctcttatgtactaagagtcctttctcaaaattgtattgaattatgcagttatgcaggattactctcaaaaygcagccagaatgactaaaaaatgatygtttttatcccagcagtcatgcatgattaattgggtacagatagtatggtgacaccttaaaatataaggcatatataaatgctaagcagtatttttacactgatgttatccagaaagttggctgataggagacacataaaatgttttttttaatgcatttctgtatgtgcagctttaggtaaaaaaagtcactttgtaagtatacctaacaaacagttttaagaactttataatggatgctcccagtacccagtttcaggtttaaagtgatctg

SEQ ID NO: 66359 - DNA, 600 bp, Chicken  19866894334592_2
ttaaaattgctacctctgagtattcctactccttgtcttccttcctgtctttttttttttttttcttttgagtcttctcttaaggtctttgggggttttatgaaagaatggaggctgtacaaaaagtgaggccaaattttcagttttctgaggtgatatatatgggaagcagtagacagcaccttactgtcaggttgttaatgctcttatgtactaagagtcctttctcaaaattgtattgaattatgcagttatgcaggattactctcaaaaygcagccagaatgactaaaaaatgatygtttttatcccagcagtcatgcatgattaattgggtacagatagtatggtgacaccttaaaatataaggcatatataaatgctaagcagtatttttacactgatgttatccagaaagttggctgataggagacacataaaatgttttttttaatgcatttctgtatgtgcagctttaggtaaaaaaagtcactttgtaagtatacctaacaaacagttttaagaactttataatggatgctcccagtacccagtttcaggtttaaagtgatctgatttttagatatctgtctatgattat

SEQ ID NO: 66360 - DNA, 600 bp, Chicken  19866894334595_1
ccttcaaaaccatttatctccagtgtagagataaggatgtgatgtgggaccatgtcaaaggccttgcacaagtccacgtagatgacttcagttacccttcctttgttcactaatatcgtcactctatcatggaaggccacaagagtggtcaggtatgatctgcccctgatgaagccatgttggttatctcagatcagctcttcatcttgtgtgtgccttaacatctcttccaagacaatctgttctatgatcttcccatgtattaaaatagcagacaattctggtcatcaaaagtaaatkatgagtattaggagcagtaggaagaagaagaaaaaaacacaactatgcagagaacttcatcagtagaaaggcagaggttccagggttgcacttttgcaaaagtattttgcatttgaccacccctgaaaagtacaaattttgaaagaagtggttagaccttcctttcctccttgaaaataatacttggagcagaaatatagaatgtggtgaaaccttgcttttgaagctgtgatcacggaaagtaaagcaactggaaaagtttgagaaaacttcaccaagtttcagaaaaaaattctcaag

SEQ ID NO: 66361 - DNA, 600 bp, Chicken  19866894334596_1
ctatgtcctagtctacagtgactcatactcaaagttgggatgaaaaacaggccatacactatcctgagttaacatagttaacaaaagtgaaaggacagcgacactgtcctgcagtcacacatgaaaaaggagcagcaggacaaagaaactaagctgaatcctaaccatgggagtccagaaatagtatttctagctcagtttgtctaggcagaaaggttttattcatttttatttatttttaaagcattttagggactaaattttaaaagaaactaatccaaacggtctctggatgcaacrcaaaaaggtactggtgtgcaaggagttacgttagtgtaactcctgggttaatgtgcattgactgacactgagaaacgtgtaggtgatctatactggttggaaaatctggtatcattctatatatatatattattttttttaatgggaaatttggaagagtttaagtcttctgtggaatgaattgcaatacttcccactgtagcagaggattatttggcagctgttttgctaggaaaaatgcagacaagttacagatttatattggggggaaaaaaaacacacacacacacactgagaagt

SEQ ID NO: 66362 - DNA, 599 bp, Chicken  19866894334598_1
  misc_feature (1)..(23): n is any nucleotide
nnnnnnnnnnnnnnnnnnnnnnncagaccagcaaacagcctgccccaaccaggcctgatctagaacacaccaactgatcccctctgtgaggatttattgcaaagcaccgaaagaagctgggttggatactgatttaaaaataaattaaataaaaataaagacatctctagacgatctacagggaccactaacaggaagcaaaaagggattagaaacagattcagtagtgcctggggagcacaagaggggaaccgcagccttaagagcagagcagcctacattcatcagctgcagctacayctggatcycaaacagcagagaggcctgcacacagctccttctccttccaacacataacctaccgaatgatgatccgtatgcatgtgagacacaaacacagctactatgttacacaacacttggtcaacttgctctccatagtggcgacagagctgtccaaacgttccttccccacagtccaagagcagggatcgggtagagctggcaagacaagttgacaaagacagccactggatgagctctgaacagggtctattcagggaagggggtcttttgggttggagggcagagagctatca

SEQ ID NO: 66363 - DNA, 599 bp, Chicken  19866894334598_2
  misc_feature (1)..(15): n is any nucleotide
nnnnnnnnnnnnnnncagaccagcaaacagcctgccccaaccaggcctgatctagaacacaccaactgatcccctctgtgaggatttattgcaaagcaccgaaagaagctgggttggatactgatttaaaaataaattaaataaaaataaagacatctctagacgatctacagggaccactaacaggaagcaaaaagggattagaaacagattcagtagtgcctggggagcacaagaggggaaccgcagccttaagagcagagcagcctacattcatcagctgcagctacayctggatcycaaacagcagagaggcctgcacacagctccttctccttccaacacataacctaccgaatgatgatccgtatgcatgtgagacacaaacacagctactatgttacacaacacttggtcaacttgctctccatagtggcgacagagctgtccaaacgttccttccccacagtccaagagcagggatcgggtagagctggcaagacaagttgacaaagacagccactggatgagctctgaacagggtctattcagggaagggggtcttttgggttggagggcagagagctatcagtgctcca

SEQ ID NO: 66364 - DNA, 600 bp, Chicken  19866894334599_1
tattgctcaccttactgtagattttgagaagacacggggaatatctgaagtagcttagactagtttaatctgtgaaatactagtgggatgcagtgatatttcaagagtccctacctattcacccagccctgactttgtttttcttgccagcagatgagcgaaacagggaaggcaggggcaaggtgagctgcccacagccccttggacagcacccacttgtccatccttacagtgaacacggcagaagagcacacaggcagaaaaaagtctccaaaaagcagcagcattagcgatgtcttrcacactgaagtaggtctcagagtgggcaaagcagcagctggaggaggtaatgaccgggtcccaccattccccttgtctgtccagatgctttggcacaagctgggagtcagctggtggctctggcatcctggtgggtaaggccacacacgcctgtgccaccagcctgctcgctcctcctccctcaggagcaacgaggagggacagcacatggcattatcacagcatgtttaacagaggccttgcacaccgttgccaagcaggatctctgctgaatcagtacagattttactctatggactg

SEQ ID NO: 66365 - DNA, 599 bp, Chicken  19866894334600_1
  misc_feature (1)..(94): n is any nucleotide
nnnnnnnnnnnnnnnnnnnnnnnnnnnnnnnnnnnnnnnnnnnnnnnnnnnnnnnnnnnnnnnnnnnnnnnnnnnnnnnnnnnnnnnnnnnnnntacggtccgtagtgaaggatctgatggcagaaacctcgagtccgttgtggtgagggatctgatggcagaaaccctctcaagtctgtcatggtgaaggatctgatggcagaaaaccccctagtccatcgtttcttggaccctcttttatcctcctttttttcctgcctacgtgacatccctgggtgcttgagcaagagtcatgtgcrtgcctcctgagatggccatcttcctcaagataagtccacacaraagaccstttccctgcccttatcagcggttatctctctctcgttgcccctggccttgtccatctgtgctctttaaaggatttcacaacccttagccaggacctgtymatcagtgtcctccagacagaagatttctctacctttgcccaggacttgcctggacttgttcctcagcaaactttgagtcaatcatataaaagaataatctcttacaggagcatatcaacgggagggagaacagctgtttgcaagggtgg

SEQ ID NO: 66366 - DNA, 599 bp, Chicken  19866894334600_2
  misc_feature (1)..(51): n is any nucleotide
nnnnnnnnnnnnnnnnnnnnnnnnnnnnnnnnnnnnnnnnnnnnnnnnnnntacggtccgtagtgaaggatctgatggcagaaacctcgagtccgttgtggtgagggatctgatggcagaaaccctctcaagtctgtcatggtgaaggatctgatggcagaaaaccccctagtccatcgtttcttggaccctcttttatcctcctttttttcctgcctacgtgacatccctgggtgcttgagcaagagtcatgtgcrtgcctcctgagatggccatcttcctcaagataagtccacacaraagaccstttccctgcccttatcagcggttatctctctctcgttgcccctggccttgtccatctgtgctctttaaaggatttcacaacccttagccaggacctgtymatcagtgtcctccagacagaagatttctctacctttgcccaggacttgcctggacttgttcctcagcaaactttgagtcaatcatataaaagaataatctcttacaggagcatatcaacgggagggagaacagctgtttgcaagggtggatagtgataggacaagggggaatggttttaaactaagacagga

SEQ ID NO: 66367 - DNA, 599 bp, Chicken  19866894334600_3
  misc_feature (1)..(44): n is any nucleotide
nnnnnnnnnnnnnnnnnnnnnnnnnnnnnnnnnnnnnnnnnnnntacggtccgtagtgaaggatctgatggcagaaacctcgagtccgttgtggtgagggatctgatggcagaaaccctctcaagtctgtcatggtgaaggatctgatggcagaaaaccccctagtccatcgtttcttggaccctcttttatcctcctttttttcctgcctacgtgacatccctgggtgcttgagcaagagtcatgtgcrtgcctcctgagatggccatcttcctcaagataagtccacacaraagaccstttccctgcccttatcagcggttatctctctctcgttgcccctggccttgtccatctgtgctctttaaaggatttcacaacccttagccaggacctgtymatcagtgtcctccagacagaagatttctctacctttgcccaggacttgcctggacttgttcctcagcaaactttgagtcaatcatataaaagaataatctcttacaggagcatatcaacgggagggagaacagctgtttgcaagggtggatagtgataggacaagggggaatggttttaaactaagacaggagaggttt

SEQ ID NO: 66368 - DNA, 600 bp, Chicken  19866894334600_4
gatctgatggcagaaaccctctcaagtctgtcatggtgaaggatctgatggcagaaaaccccctagtccatcgtttcttggaccctcttttatcctcctttttttcctgcctacgtgacatccctgggtgcttgagcaagagtcatgtgcrtgcctcctgagatggccatcttcctcaagataagtccacacaraagaccstttccctgcccttatcagcggttatctctctctcgttgcccctggccttgtccatctgtgctctttaaaggatttcacaacccttagccaggacctgtymatcagtgtcctccagacagaagatttctctacctttgcccaggacttgcctggacttgttcctcagcaaactttgagtcaatcatataaaagaataatctcttacaggagcatatcaacgggagggagaacagctgtttgcaagggtggatagtgataggacaagggggaatggttttaaactaagacaggagaggtttaggttagatagtgggaggaagtttttcgctcagagggtggtgacacactggaacaggttgcccaaggaggttgtggatgccccatccctggaggcattca

SEQ ID NO: 66369 - DNA, 600 bp, Chicken  19866894334600_5
atctgatggcagaaaccctctcaagtctgtcatggtgaaggatctgatggcagaaaaccccctagtccatcgtttcttggaccctcttttatcctcctttttttcctgcctacgtgacatccctgggtgcttgagcaagagtcatgtgcrtgcctcctgagatggccatcttcctcaagataagtccacacaraagaccstttccctgcccttatcagcggttatctctctctcgttgcccctggccttgtccatctgtgctctttaaaggatttcacaacccttagccaggacctgtymatcagtgtcctccagacagaagatttctctacctttgcccaggacttgcctggacttgttcctcagcaaactttgagtcaatcatataaaagaataatctcttacaggagcatatcaacgggagggagaacagctgtttgcaagggtggatagtgataggacaagggggaatggttttaaactaagacaggagaggtttaggttagatagtgggaggaagtttttcgctcagagggtggtgacacactggaacaggttgcccaaggaggttgtggatgccccatccctggaggcattcaa

SEQ ID NO: 66370 - DNA, 600 bp, Chicken  19866894334601_1
ggttggatggaaccctgggcagcctgatctagtattaaatgtggaagttgttggccctgcagcagcagtggggatttggagcttgatgatccttgaggtgccttctaaaccaagccattctatgattctatgacttccattgagcatctctttctgaactagaacagatctctcagctcctactgacaggaatcctttagtcttccaggcagaagaagttggcagtcatttatttcaaattcattctctccagcagcactgaataagattaagggaagcttaatttctcagcaaagcagrgatgaaatactgacactatttcaaagcaccaagcctgctctcagaagaaggtccaggtatacttcacaccttccacccaaggccactctattggccaatctaaaaacagattatgtgttaggaatatttgctttgataggtgttcaatggagggagaaaatcagggcagctgtataaaaatccttgactcttgcattgaaaattacccagcaatttgcatctagtcatgccagaaaagcatctgtgatttgtttctgtattaaaatcagagctacacaaacacactctgaaaccatctac

SEQ ID NO: 66371 - DNA, 475 bp, Chicken  19866894334607_1
ccccagtctttgagtttgtgcaatttccatttccctctttcacttcaaagcacagcaccggtgtgcaggctgcaaatgaaccagaacacatcaatgtcacaggctgagagatcctacacaaaataaaatctttcacttcaaatgatccctaaacactgttctgtaaaacattccttaccaaaatgctccctatcttgcctttcacgtctcaaataacccttcttgcattaaccaccttggaaagaagctggggagttgcactgcattcagaaaccccacattccagcaaaatgcaaaacraaaattaaattaaaatgtttccctcacattcctggttagcaatggagcctttcatctgctcccttctccttacccaaggctgccaatactcttgtgctaaaagacagtgctcaggtatctctgcatcacagacaacgcgtgagttaagacttcaggaaactttaaataaagtgtg

SEQ ID NO: 66372 - DNA, 506 bp, Chicken  19866894334611_1
cagcatgcatgcttgcttatgtctgggagacacttcacacaccttgtgcctcactcctccacccccaactgagaaacaacccctttgtgaggaaaaagcagttttatcaggtttgcccaatacgtggagaaattcaggaaatgaaaataacatgttctctgtttgatattagaattccttctgtggcgtttaaatgcatttgtcgttgttgtatttgtgcatggtacaagtgacaacactgcttaatacagtgagcaataagaattaggtattacccactttcacactaaacctgccacrtgcaacgattccccggggccatggaatgtgttttggtttggttttatcccatgtgttttactgtgtgagatactgatcgcaggtattttattggctaatctgtagctgaaactaaaggggaacggtaaacaatctcacacaacagaatcccgtttaatttggttttgttggttagcctgaaccctggcctgctactggttttcctt

SEQ ID NO: 66373 - DNA, 600 bp, Chicken  19866894334613_1
atatgttcggtgccaaaaggcagataaggggttaagagattttccttgctttatctctcacatgctcttatctgcccaacagaccataataaatcagtggacctcttcttccatctggctcactccaaattccttgcttccacatgatttgggaaagttttcctgacctttcacgacttctgtgatattgcacagaacatagggttggaagaagtgcgtgagggaaatttagcagacataaaacatgcctgcaactaggtgaagccttcagtggggcatcactcccaggatctcccttgrgatttgctacctgtgctctttcttgcccaaggtggcaatgtacaggttaggcccacagtggatccactgcacaaagggtggtgaaacaccacagggcataaacactgccttgtgcgctcccaaagcccattgaacatcgctatgcaattatcaagaagcatgaaagagctgtgtaaaagatatctgacacactggtcagcttcagcaatgaagcggatgaaagtcccatccctggacacattcaatgtcagtccggatggggccccgagcaacctgatctggctgtacgtgtccctgttc

SEQ ID NO: 66374 - DNA, 600 bp, Chicken  19866894334616_1
ggcgtgcaggtctgaatgtcggccctcggagggaggaatgctgaggttgtggcaggcaggatcctggtgctgcatccatttacggatcctcaggaattcagtccagcaggcgctctccctgagatttatggtgttctggcgatggctgcggtaggaagaaaggcacaggcaggggaggaaggctgtgggcctttatgcagctatgtagaagaacaggctgagtggtgagtgagggctgcaaagggcagaggggagagcacggctgtctgggtggaatacagcatcgggaggagagaaggyggcttctgggaagtggttgttacatccaggagtgaaccagcatcagaaggatccctccaccttgcagatcctgcagggtggttgggaagtataaaaccccaaatggctcaaaatttatttgctagaggttaaggagaggcagaaaggagcaaactcagctggtgaaggagaagctgcgatgctttcagcaggtcctggcagcttggcaggcctatggaacggcctcaccgtggctgcacgtgtcctgcgtgtttcatctaaggttgcagtctccaggtctgaagggagaaggacatggca

SEQ ID NO: 66375 - DNA, 600 bp, Chicken  19866894334616_2
cagcatcagaaggatccctccaccttgcagatcctgcagggtggttgggaagtataaaaccccaaatggctcaaaatttatttgctagaggttaaggagaggcagaaaggagcaaactcagctggtgaaggagaagctgcgatgctttcagcaggtcctggcagcttggcaggcctatggaacggcctcaccgtggctgcacgtgtcctgcgtgtttcatctaaggttgcagtctccaggtctgaagggagaaggacatggcagtgctgtgtcagagttgaaaggtgcatcagatagcasatgctcgggatctgacagtggctgtcctgcctgcaaagcaaacagcagcaaacagccgccgtcctggcagggctgcagatcacctcttcktggtgctgctggcattgagcccgagggcgcctggaaggttttgtcagcgggrtaagacttagcagtacacacttcagaagtgcagaggtccttttggaatgggcttcacttccagctgtatgagggcagttgttgaatttggaggcaggttggtttcttcatcagcagaactcagctctggcttctttggccaaatatataaggaggtta

SEQ ID NO: 66376 - DNA, 600 bp, Chicken  19866894334616_3
gttaaggagaggcagaaaggagcaaactcagctggtgaaggagaagctgcgatgctttcagcaggtcctggcagcttggcaggcctatggaacggcctcaccgtggctgcacgtgtcctgcgtgtttcatctaaggttgcagtctccaggtctgaagggagaaggacatggcagtgctgtgtcagagttgaaaggtgcatcagatagcasatgctcgggatctgacagtggctgtcctgcctgcaaagcaaacagcagcaaacagccgccgtcctggcagggctgcagatcacctcttcktggtgctgctggcattgagcccgagggcgcctggaaggttttgtcagcgggrtaagacttagcagtacacacttcagaagtgcagaggtccttttggaatgggcttcacttccagctgtatgagggcagttgttgaatttggaggcaggttggtttcttcatcagcagaactcagctctggcttctttggccaaatatataaggaggttaaaatgcagcctctggaggcgttcagagtcacaggagcactgatagcagagggatgtgtgctgagcttccttgcttccagtcctgtgttca

SEQ ID NO: 66377 - DNA, 600 bp, Chicken  19866894334616_4
tgctttcagcaggtcctggcagcttggcaggcctatggaacggcctcaccgtggctgcacgtgtcctgcgtgtttcatctaaggttgcagtctccaggtctgaagggagaaggacatggcagtgctgtgtcagagttgaaaggtgcatcagatagcasatgctcgggatctgacagtggctgtcctgcctgcaaagcaaacagcagcaaacagccgccgtcctggcagggctgcagatcacctcttcktggtgctgctggcattgagcccgagggcgcctggaaggttttgtcagcgggrtaagacttagcagtacacacttcagaagtgcagaggtccttttggaatgggcttcacttccagctgtatgagggcagttgttgaatttggaggcaggttggtttcttcatcagcagaactcagctctggcttctttggccaaatatataaggaggttaaaatgcagcctctggaggcgttcagagtcacaggagcactgatagcagagggatgtgtgctgagcttccttgcttccagtcctgtgttcagacccagttcctccctcattatccatgatggagctgtgctgcagctcacctg

SEQ ID NO: 66378 - DNA, 599 bp, Chicken  19866894334623_1
  misc_feature (1)..(34): n is any nucleotide
nnnnnnnnnnnnnnnnnnnnnnnnnnnnnnnnnngtttttatatttaaaatagtgtggaaggtgtcccccagcatcacagactcaactaaaactgtttactgctagcagtttaaaggaaaaaaaagagagagagagaaagcacaactttccgtcaatttattacttagaatatttgcaacggtaccataaaaatacatgtcattattccactaaatacctgctcatgctgtaacagggagcactaaaattttacagccttattcaaaatacagcttcagtagtctctcttcaaaatccartcaccayctgagacgactaccaaagacacagtaaaagtgttctttaaaatttaccaaaccttctaacagatcagcatgaagttgctttccaaaatactgaactacactgctaaaatatgtgctttgaaagaaactatggaaatttctaatttccatgggactgtccaggcaaagaaatgcttatttcactgtgtgtaggtttttaagcacagttactttctctttaacacaccacacaaccctcatatacttgtgatggatctccagttctgtttggagtgacactgttcatgtgcaag

SEQ ID NO: 66379 - DNA, 599 bp, Chicken  19866894334623_2
  misc_feature (1)..(27): n is any nucleotide
nnnnnnnnnnnnnnnnnnnnnnnnnnngtttttatatttaaaatagtgtggaaggtgtcccccagcatcacagactcaactaaaactgtttactgctagcagtttaaaggaaaaaaaagagagagagagaaagcacaactttccgtcaatttattacttagaatatttgcaacggtaccataaaaatacatgtcattattccactaaatacctgctcatgctgtaacagggagcactaaaattttacagccttattcaaaatacagcttcagtagtctctcttcaaaatccartcaccayctgagacgactaccaaagacacagtaaaagtgttctttaaaatttaccaaaccttctaacagatcagcatgaagttgctttccaaaatactgaactacactgctaaaatatgtgctttgaaagaaactatggaaatttctaatttccatgggactgtccaggcaaagaaatgcttatttcactgtgtgtaggtttttaagcacagttactttctctttaacacaccacacaaccctcatatacttgtgatggatctccagttctgtttggagtgacactgttcatgtgcaagcacatct

SEQ ID NO: 66380 - DNA, 568 bp, Chicken  19866894334623_3
gttctttaaaatttaccaaaccttctaacagatcagcatgaagttgctttccaaaatactgaactacactgctaaaatatgtgctttgaaagaaactatggaaatttctaatttccatgggactgtccaggcaaagaaatgcttatttcactgtgtgtaggtttttaagcacagttactttctctttaacacaccacacaaccctcatatacttgtgatggatctccagttctgtttggagtgacactgttcatgtgcaagcacatctaactcttcatccctctgcaagagcctactcasatgcttccatatgcaaggtcagaggcctaaacttggtcttgcaactccttttccagttccaaagctgcctggctgccttgragcatgggraagccaaagccaatactgtttctgcctgttcacaccaacagarctgtagtctcatccctgtggaaaatatattcatcaaaaaagttctatgtaaagcagagcttgagtcattgagttacttattttccctgggatagttggtattcagaactattatatccagtgtccactaaaaata

SEQ ID NO: 66381 - DNA, 487 bp, Chicken  19866894334623_4
tgctttgaaagaaactatggaaatttctaatttccatgggactgtccaggcaaagaaatgcttatttcactgtgtgtaggtttttaagcacagttactttctctttaacacaccacacaaccctcatatacttgtgatggatctccagttctgtttggagtgacactgttcatgtgcaagcacatctaactcttcatccctctgcaagagcctactcasatgcttccatatgcaaggtcagaggcctaaacttggtcttgcaactccttttccagttccaaagctgcctggctgccttgragcatgggraagccaaagccaatactgtttctgcctgttcacaccaacagarctgtagtctcatccctgtggaaaatatattcatcaaaaaagttctatgtaaagcagagcttgagtcattgagttacttattttccctgggatagttggtattcagaactattatatccagtgtccactaaaaata

SEQ ID NO: 66382 - DNA, 478 bp, Chicken  19866894334623_5
agaaactatggaaatttctaatttccatgggactgtccaggcaaagaaatgcttatttcactgtgtgtaggtttttaagcacagttactttctctttaacacaccacacaaccctcatatacttgtgatggatctccagttctgtttggagtgacactgttcatgtgcaagcacatctaactcttcatccctctgcaagagcctactcasatgcttccatatgcaaggtcagaggcctaaacttggtcttgcaactccttttccagttccaaagctgcctggctgccttgragcatgggraagccaaagccaatactgtttctgcctgttcacaccaacagarctgtagtctcatccctgtggaaaatatattcatcaaaaaagttctatgtaaagcagagcttgagtcattgagttacttattttccctgggatagttggtattcagaactattatatccagtgtccactaaaaata

SEQ ID NO: 66383 - DNA, 435 bp, Chicken  19866894334623_6
aagaaatgcttatttcactgtgtgtaggtttttaagcacagttactttctctttaacacaccacacaaccctcatatacttgtgatggatctccagttctgtttggagtgacactgttcatgtgcaagcacatctaactcttcatccctctgcaagagcctactcasatgcttccatatgcaaggtcagaggcctaaacttggtcttgcaactccttttccagttccaaagctgcctggctgccttgragcatgggraagccaaagccaatactgtttctgcctgttcacaccaacagarctgtagtctcatccctgtggaaaatatattcatcaaaaaagttctatgtaaagcagagcttgagtcattgagttacttattttccctgggatagttggtattcagaactattatatccagtgtccactaaaaata

SEQ ID NO: 66384 - DNA, 599 bp, Chicken  19866894334633_1
  misc_feature (1)..(91): n is any nucleotide
nnnnnnnnnnnnnnnnnnnnnnnnnnnnnnnnnnnnnnnnnnnnnnnnnnnnnnnnnnnnnnnnnnnnnnnnnnnnnnnnnnnnnnnnnnntcaaaatgagtcaatatatcattaaatccttcttgtgtgcctgcttgcaattttcatacaacataaggacttttttttccctggtgtttcaagtccaaaagtaatcattatagtaattactgctgtgattctcttaggaatgctatagaatttccttttcctcatttcctctgtattctctttaagaatgtaaggacctttatatgcaycacagaacatctcctaaggttgcgagtaacaaatacctgtggaaagagagcragttctgaggaatacttcttacaggatattctgtttatttctcacayttggcaatttaaagatggtctgtgatggaaactgtatatgctctctcacaattaatggttcttgatggatctgtctttcatgtgtttccgtctcttttgacagacacatgctcaatataataacaacttcatagagaccaagtaaaggagatgctaccgcatgtattggtaaggtagtccagtagttaattatcaccact

SEQ ID NO: 66385 - DNA, 599 bp, Chicken  19866894334633_2
  misc_feature (1)..(39): n is any nucleotide
nnnnnnnnnnnnnnnnnnnnnnnnnnnnnnnnnnnnnnntcaaaatgagtcaatatatcattaaatccttcttgtgtgcctgcttgcaattttcatacaacataaggacttttttttccctggtgtttcaagtccaaaagtaatcattatagtaattactgctgtgattctcttaggaatgctatagaatttccttttcctcatttcctctgtattctctttaagaatgtaaggacctttatatgcaycacagaacatctcctaaggttgcgagtaacaaatacctgtggaaagagagcragttctgaggaatacttcttacaggatattctgtttatttctcacayttggcaatttaaagatggtctgtgatggaaactgtatatgctctctcacaattaatggttcttgatggatctgtctttcatgtgtttccgtctcttttgacagacacatgctcaatataataacaacttcatagagaccaagtaaaggagatgctaccgcatgtattggtaaggtagtccagtagttaattatcaccactgttaacatgtgcaccttacttttacttcaattttatccaaattgacagcttc

SEQ ID NO: 66386 - DNA, 600 bp, Chicken  19866894334633_3
agtcaatatatcattaaatccttcttgtgtgcctgcttgcaattttcatacaacataaggacttttttttccctggtgtttcaagtccaaaagtaatcattatagtaattactgctgtgattctcttaggaatgctatagaatttccttttcctcatttcctctgtattctctttaagaatgtaaggacctttatatgcaycacagaacatctcctaaggttgcgagtaacaaatacctgtggaaagagagcragttctgaggaatacttcttacaggatattctgtttatttctcacayttggcaatttaaagatggtctgtgatggaaactgtatatgctctctcacaattaatggttcttgatggatctgtctttcatgtgtttccgtctcttttgacagacacatgctcaatataataacaacttcatagagaccaagtaaaggagatgctaccgcatgtattggtaaggtagtccagtagttaattatcaccactgttaacatgtgcaccttacttttacttcaattttatccaaattgacagcttcatctgttggcttttcctctacaaggtcaaagagcttccagctgagttt

SEQ ID NO: 66387 - DNA, 407 bp, Chicken  19866894334633_4
tcttgatggatctgtctttcatgtgtttccgtctcttttgacagacacatgctcaatataataacaacttcatagagaccaagtaaaggagatgctaccgcatgtattggtaaggtagtccagtagttaattatcaccactgttaacatgtgcaccttacttttacttcaattttatccaaattgacagcttcatctgttggcttttcctctacaaggtcaaagagcttccagctgagtttcttcccacactggtgtccagatatattcattatgtacttttatatttgcacaaacaggwgctgggaactcagctttacagcccaggctatttttttaattcatttgttttgtgtttggtgcgtgtgtgtgtggtggtggttgggttgtttgctttgctagtttttg

SEQ ID NO: 66388 - DNA, 600 bp, Chicken  19866894334636_1
tctagctattcctcccattttcatttcagtgtgttttacttttcttttgcttgaacaagtttataattaacataaatcaaaataagcctgattttaattgcgctagcattatcagcactttgcactaatttatatacccttttatttcctcttttaagctctttctaggtcagactcaggcttggggctgtgctttagtgtacactgagcgaaggatatggcggctgaacagaaagggcttagatcccaaagcctcagggcttactaccaccagatgcctgagctgaaagctctcttttsgagtgcagtttttctggaagaaaacctgaggagctgcagctgcgccttctctacctatgcctggtacttacagcacctcgtggctaaggggacccgtggtcaactcctcagctcctgatggacacgtagcctgcagtctagcatgggctgggagaggtaatggactggtggagactgttccacccacatgggaataattagcattgcaaggactgtgaggccgcaggccactgcccaggtcgtgcagaatggaaagaagaaatgtgtctaaaccccaggctggctgctaatggcatacct

SEQ ID NO: 66389 - DNA, 600 bp, Chicken  19866894334636_2
tagattttgctaggtttgctaggccttactcagcatcactaggctttgctaggcctctctaggtctcagtaggccgctctaggctttgccaggcctcactaggcttccctaggcctcgctaggcctcactaggatgcatcactgcgcagacaattctcagctaggccatgaagcctgacccaagtttaattttatacttcacctctgtttaaacacaacacaggctgctctgtgccacccagtgctggtgcaaggaatgagtggatctgccatgatgctgctgcctgaaggccttccctyaggggctctgtgatgggcaccacctgggcagcagtttcacatgtgacactgtttttgttttcaattcatgttggacaaggctttttgcttctgttgtaccgctcccaacattttctgctctttcatttttaatattgaacctgtactttgtagaaaggaaatcggtcaaaactttattctccccactagcaaatcgttggctcatgacttctgttacatccaactatcaaagcaatgaaagccctcacatcacattgaatttgggctgcctcttgtcacaggcaagtgtgtggcacctcc

SEQ ID NO: 66390 - DNA, 600 bp, Chicken  19866894334645_1
ttttaatatattttgaaagcaaataatttgttagataatgggggccttgctgtggatatttcctgtttttctctattaaaattttctctgctgctggctgtaaattgaaattgtcaatagctttgtttaacctattgtgcactggctttttcaagatgcagctgaaaaacaaaatattccagggtacccttattttattttgagaagtatttgctggtaaaacattactaaacactgaaaatgagtaagcagaagccttggagtcccccatactctttttcttttgcttgcagatgaaakaaataagcacagtttaaaattaagctcaagatattcacatacagacaagaaaagtgaaagaacattaagaggagaagggaaagaatgtaatcctgtgtgatgtggtaagatgtaggtatggcgtcgaggaggattttgtcaagcagaaaattgacaaaacctgctattaattattgtgctgatggtatcagtagcattaccataatcaaaaagtgaggcgtgagcataattcacaagactctaggtagcttgggggttaaatcacttattctcaaaggagaatttaagcaaaaaaataat

SEQ ID NO: 66391 - DNA, 599 bp, Chicken  19866894334646_1
  misc_feature (1)..(55): n is any nucleotide
nnnnnnnnnnnnnnnnnnnnnnnnnnnnnnnnnnnnnnnnnnnnnnnnnnnnnnnaacttggattttggtgtctgcatttcactcgttcttcctcgaagtagcttgtgttttttaaaactctgtgggtgtgatgggggggaatttggagcagcgtggagtcgggcacaggaaggagatagtcctgaggtttatgtaaagaaaatacttccaagagagtgatggaggggaattttggggcaaatcaagccacgtgtgagtcatttggaaggctggctttgttggtggagcttagttattcwtggatctgggaaagcagtgctctttgaggtgaggtggtttctgtctgctcctgtgctggtaggaacaggatgcctgcctaatggcttggtgcctcatggcctcaggtggaagagtaggcagatagaattttatagctatcctgagtatgctgctgtgcaagtggcctcaagcctgctctggaactacttcacctggtaaattacygctgctgggcagtgaggtatccatctgtggaatgcctccatcttagtacaagcaactgctcgagcatatgctccaagccctgtcatgtcatccc

SEQ ID NO: 66392 - DNA, 600 bp, Chicken  19866894334646_2
cttccaagagagtgatggaggggaattttggggcaaatcaagccacgtgtgagtcatttggaaggctggctttgttggtggagcttagttattcwtggatctgggaaagcagtgctctttgaggtgaggtggtttctgtctgctcctgtgctggtaggaacaggatgcctgcctaatggcttggtgcctcatggcctcaggtggaagagtaggcagatagaattttatagctatcctgagtatgctgctgtgcaagtggcctcaagcctgctctggaactacttcacctggtaaattacygctgctgggcagtgaggtatccatctgtggaatgcctccatcttagtacaagcaactgctcgagcatatgctccaagccctgtcatgtcatcccagattcctcctggcctctcactctgatgtgtttgttctcatcagttgcccccatgttatcagttcctggtgctgagcagggttcagctgtggtgtggaggaagtgaactgcagctcccgtttggcctggcttttctgtcctgagtggaaacactcccaagggaacaaaggagcatgggggcaaggggccaagtgtgctctttctgt

SEQ ID NO: 66393 - DNA, 600 bp, Chicken  19866894334647_1
gcatcttcgatacaggtattaatgtaagagtaacactgttcttcccagagtcttagccatcctcctaaccaaggaagaaaacaagggatgctgtcaaacacctaactcacagtttttcttggcactgggatcctgtacgagcaactggcatcctcaactcaataggtcacagcaaccgcagactctggcaagctctggctacagacacaagacggagttgtactgcacagcagcttctgaagtcttcaaaaaatgacacaatcagatgcacaaattgaccatcggctgtattacaaaccrgcaagtgccttcaccatagatgaaatcacccatgttaaccatacattttattttctatcgggaacagagtgtaagggggagaaaaacatgcacctgaagtgaagaaatgaaagacattttaaattcaagagtgcaaggacattttttcccttgcaagtattttcagatagcctgagagtaagaattctggcttgcaaagtaaacaataccgcctgaagtaggcttcaggagacattgtgatcttaaaaatgaagatagcaagaagtatttgatgaccgggaaaaaatgcggaacaagtcc

SEQ ID NO: 66394 - DNA, 564 bp, Chicken  19866894334666_1
ccattccaactgcaggagagccagtgagcaggtacaagaggctcaggggcttagcagggttaacccacaacacactaaaaaaccctatgcatcattaaatagatgctcaagtatcatgtgcaccctacttacaggagcttgtttgcaaattcaaagtactgagacatgggcagtgaattgaatcaacatttagaaagaaataaaatcaacagaaaggaaggggaaaaacattaaagagtgcttattatttcattttatagcttaaagttaactgaacataggccagaccaaagtgagcayggcaaaaagcatgaccaagaaaaaggctgacaagctgagaaaccaggaaataaactgttataaaacgatgcatcagtcagtggcttaggcaatattgcttctatgtgataggagaaaagctgcatttaatttgtggatgagatgatgaataagcagacacactgatgaaaaaaaaaaggcagtattttggcacagatatccatatcaagtaggctgcctgcctaaaaatctttagttctcatgggaaacagcctcagagtcaag

SEQ ID NO: 66395 - DNA, 599 bp, Chicken  19866894334667_1
  misc_feature (1)..(184): n is any nucleotide
nnnnnnnnnnnnnnnnnnnnnnnnnnnnnnnnnnnnnnnnnnnnnnnnnnnnnnnnnnnnnnnnnnnnnnnnnnnnnnnnnnnnnnnnnnnnnnnnnnnnnnnnnnnnnnnnnnnnnnnnnnnnnnnnnnnnnnnnnnnnnnnnnnnnnnnnnnnnnnnnnnnnnnnnnnnnnnnnnnnnnnnnacgtgtcatctatgtccgcttaatgttttgctcccagtcttttagatttttcacttttttcttatagcttttattgttgttcaatgttagttattgtacacatctacccagtaacwtttacttcagtttgtaaactaactggaagcaaagcactgtcaaatactatctcacaaatgacaaaatagaatgacttcatattgagaaatgatagtttctttcgaagaaagcatgagaagggaaatagagactgtgcttgtgctgttatttgctgagagctccgtgaataaatgtgtgcctatgtgaagagtgggatggatgggttgcaaaagccactggtttgacaggcaggacctcaggagctgtgtactgagtactctgagtgcatagaatgcctcctctctcctgctccttgttt

SEQ ID NO: 66396 - DNA, 600 bp, Chicken  19866894334679_1
gtgatattgccaaccactctgcagcaaattgaacacagctggactcagacagtatcaccctggtgggaacactacaaatcattcagggtttggaggaaagcagaatcccagcagcccaagagcaaggctgcacggagcgaggctgcaggtcctcccactgctcaaccctgcccccaaatcagctgtatgaacacagctgtgtgcaggacaagggcagggcaggaggcgctgtgctggggacaccaggcaggaacgctcagcctgtgccccactgcaggaagggctgcagaaatctgcaaracagggaagaaatctgtggggttctactggggaggacactgcaatataaccataaaccccatattgcaggagttcatccgctcatcagcacctgagggatgctgcagttcctctccaaccccattcagcacacggggtgcccatcctctggctgcaaccattctgcaccaccccacagccacaccactgctctcaataacgaaaaaaggtgaaaaactagactgctgagaagcaatagaacaacatgctgcgttcggtttgccttctttgttttgcaacattggggattgacactcagga

SEQ ID NO: 66397 - DNA, 600 bp, Chicken  19866894334683_1
gttctttacagttcccacatactgtaagggccagctagcttaccctcctgtttctgtagactcagttgtagaaaataagaaccttctccagcccatagtatattttgtacatttatttgagtgttacgtatatgttgtagcaatggggaatgcatagataagtagtggagatgcggcaacttcttgtcagctctatttcccctcatgctgtatttgtccttcaaggactactgtatgtgaagcaatgaccatcaggtcctttctagacattatatttatttctccttctgatatctgttrctttttgctctatttgtgaacaccctgcaatctgtccttcccatggtcagtttcttaatttccctacacacaaataaaataagagactagcatcagtaagacgataagaacaagaacaaaccatatgcgttagaatgcagttatgcatactcaaattagcatgttgaatttttttctgctgtcttgtgaaaaaatcagtatattattgcaaacgtgagtcagtaaacattctaaagtggtgattagcatgggtagtcgtttttcaaagtagcaagcaaaagctttttgatgctttaaaca

SEQ ID NO: 66398 - DNA, 600 bp, Chicken  19866894334685_1
ttacttctgagagcctcccagtttccccttttttcctgaatgttttctgaacacagctgattctgaaagaagacatggcattgtataagctggtttcagatctttgcacgtcattgtgaatgatcagcactgcgtaacagccctgctgaactggcacaaaacaggcctcagagacacagaggcaaggcaagggatgggacatcttgtcccagaacttcacccatatccaccctgccatcagaaagctcttcctgtcaccttatgcatttcctataaaggaagatcaaattatttccatcsgtatctctttcatatggcggaacaaggcaaccagaggccagagaagggcactgagctgcaacttcacaagctgacagcaggttcaacagacacttgtggaaaagaggtattagtacaacaggctccaaagtcatgatttcasatggctctctgacaaaatgagccaaaaaggaagtatttttcttgccaagaaaggtgaaaatgttccttccagccccactgcttttcaaatagaggagaacaacaaaacaccaacaaaaccactcagtttacctgaaaacaagatgtgagaaatggaca

SEQ ID NO: 66399 - DNA, 600 bp, Chicken  19866894334685_2
ctgctgaactggcacaaaacaggcctcagagacacagaggcaaggcaagggatgggacatcttgtcccagaacttcacccatatccaccctgccatcagaaagctcttcctgtcaccttatgcatttcctataaaggaagatcaaattatttccatcsgtatctctttcatatggcggaacaaggcaaccagaggccagagaagggcactgagctgcaacttcacaagctgacagcaggttcaacagacacttgtggaaaagaggtattagtacaacaggctccaaagtcatgatttcasatggctctctgacaaaatgagccaaaaaggaagtatttttcttgccaagaaaggtgaaaatgttccttccagccccactgcttttcaaatagaggagaacaacaaaacaccaacaaaaccactcagtttacctgaaaacaagatgtgagaaatggacacctagacaaagaggctggggaggaagtaacagacatatagaatgaggtgggaaatggtgtgaaagacaatgaagtgacaagacaacgggaaaatgatggagagctggcaaagggacgggatggaaggagtccagcaaggatg

SEQ ID NO: 66400 - DNA, 599 bp, Chicken  19866894334710_1
  misc_feature (1)..(70): n is any nucleotide
nnnnnnnnnnnnnnnnnnnnnnnnnnnnnnnnnnnnnnnnnnnnnnnnnnnnnnnnnnnnnnnnnnnnnnatgattacagtgtctgcctcccttactttgttggaggatcagagttctctacttcaaaaagacacacatgagaatcaggtgcttttatattcactatttagtaaaaataggctcttttaaaaaaaggaattactttgttcttatgacttctgcaatttggaaaaataatttgaatttagcatgaccagagggcaatatgttgtcttataatttcagtaatactattgttytgaattgcattatggagatatggcagtaattattcatcaagatctctctgataattatcttatgaaatttaattgctcttcagtaatataaaagtaagacagtgttttatgtttatttttgacttcttttatttattttcgtttttgaaaggwgagctgtagttaaaactaggtgaaagtccatttgattgctgcctttttttttttctttgaagttatctgatgaagaaattatttttatttttaaaaagtgtactaggaataaccatactgtgactgaacggagctttgtgcaattt

SEQ ID NO: 66401 - DNA, 600 bp, Chicken  19866894334710_2
tttatattcactatttagtaaaaataggctcttttaaaaaaaggaattactttgttcttatgacttctgcaatttggaaaaataatttgaatttagcatgaccagagggcaatatgttgtcttataatttcagtaatactattgttytgaattgcattatggagatatggcagtaattattcatcaagatctctctgataattatcttatgaaatttaattgctcttcagtaatataaaagtaagacagtgttttatgtttatttttgacttcttttatttattttcgtttttgaaaggwgagctgtagttaaaactaggtgaaagtccatttgattgctgcctttttttttttctttgaagttatctgatgaagaaattatttttatttttaaaaagtgtactaggaataaccatactgtgactgaacggagctttgtgcaatttgtcattactgcataaatgagggccttgtatctaacacgtgttgaggtcagatactcacctggtataaattggtgtagttcagtacacactggatgtgtatctggcttattttcttcctttgtaattggtagttgtgtaaaagactcctacatca

SEQ ID NO: 66402 - DNA, 600 bp, Chicken  19866894334716_1
ttatgttaagtcaagctactgtctacaaaattccagaagtactttctgcagtgctacttttggtgcatacatgccataaagtgccagaatcactgagcatggctgaggtccgtggtcagctgggtgaaaaaaaatcattacactaacaagtcataacttcttaaatttgctggcaagcaacattaccaagcatgtaaatgaaaacttaaagaactacaacttcatctcttaatggctgaagagatacagcagagttaactcctatgagatctttgctgagcagttaagtttggctttaaytttcccttccaaaagaaacagtgctagagaagcagcatccctatatggtatataggaagatgatttaagctgccaaaaaattattattcattgcactgtttcttaaaagcctcrcagcatttgaacgtgcattcctttattcacccctatatttcttaatttttaaagcaatccaaaaggttatgctccatatgttaaagttctctttctctctgtgggcccataaaactgaatggaaataggcagtgtctactgcagtattctcttttgcctaagtcttccatgcacctacaaaaacaa

SEQ ID NO: 66403 - DNA, 600 bp, Chicken  19866894334716_2
gtcagctgggtgaaaaaaaatcattacactaacaagtcataacttcttaaatttgctggcaagcaacattaccaagcatgtaaatgaaaacttaaagaactacaacttcatctcttaatggctgaagagatacagcagagttaactcctatgagatctttgctgagcagttaagtttggctttaaytttcccttccaaaagaaacagtgctagagaagcagcatccctatatggtatataggaagatgatttaagctgccaaaaaattattattcattgcactgtttcttaaaagcctcrcagcatttgaacgtgcattcctttattcacccctatatttcttaatttttaaagcaatccaaaaggttatgctccatatgttaaagttctctttctctctgtgggcccataaaactgaatggaaataggcagtgtctactgcagtattctcttttgcctaagtcttccatgcacctacaaaaacaaatctaagagcggtgctgtttgagctttttatcattattttctgcagctggccaaatctcacaagtgtaattccattcatcaaaaacagcttctcctggaaaatctttgacacat

SEQ ID NO: 66404 - DNA, 599 bp, Chicken  19866894334718_1
  misc_feature (1)..(7): n is any nucleotide
nnnnnnnaaaagttatcaaagtcaatagcatgtccagtctcatgaagtcactggacattgacagtgctcttggttgcttttcattaaagaaaccatatccttgagtgcataattgtttgcccactgtcctaagattttgctctctgttctcttacctctgtttagtcctttgtaaaagacagatgttccatataaagctcctgattttcattacttttttttatattcacaaatcagacttccatatgaagaacttctgcagtacccatgagccagatttctagagttgggatgcaagtrtttacgtgttgctcaagtgcttaatcagggaagggtcagtatcctacagaacaaagaaaaatattataatggtaaaatagttgcactgttttataattagaaaataatyccatgatttgaaaaaaaaaaaaaccaaaaaacaaaaaccataattttactaaagtaaatatacaagtatatgctgttttacttgattattataaagggatttataatttcatgtttaatgttttcaatgctaaaggattctatatgtagtaggtgtgaaatgcacaaaattttactgtgggatttgtttg

SEQ ID NO: 66405 - DNA, 600 bp, Chicken  19866894334718_2
taattgtttgcccactgtcctaagattttgctctctgttctcttacctctgtttagtcctttgtaaaagacagatgttccatataaagctcctgattttcattacttttttttatattcacaaatcagacttccatatgaagaacttctgcagtacccatgagccagatttctagagttgggatgcaagtrtttacgtgttgctcaagtgcttaatcagggaagggtcagtatcctacagaacaaagaaaaatattataatggtaaaatagttgcactgttttataattagaaaataatyccatgatttgaaaaaaaaaaaaaccaaaaaacaaaaaccataattttactaaagtaaatatacaagtatatgctgttttacttgattattataaagggatttataatttcatgtttaatgttttcaatgctaaaggattctatatgtagtaggtgtgaaatgcacaaaattttactgtgggatttgtttgagttgtaattatcacgagccaaatcctgattttggatacacatctgggactgatactaactttggccccatgtattactttctcccctgttaatactctgttaatactta

SEQ ID NO: 66406 - DNA, 600 bp, Chicken  19866894334725_1
gttaggcagctgaaattcagcccatctaatacagcatggtacaaggtatcagcaccagaatgtactcctctgtgctattatggctacaagataaatgaacaaagcatctgtaacactgagggaggaggccaaggctaagaacaagacactactctacaggcttcctgctctatcttatcagcttcctgagcacactgcacagaggcgatagcctgaagaataggcgctagcaataccacctcctctcttgtgttgtgtcaagctccacactcctctcaacaatccatgcctgtccttggwaaagcctcgtgatacctcttccaaattaattattggccaacacaagttaacaaccaacgttagagtcacatacagtcagcagcacacaccatttcttctggagacacaaatagcgatatacaactagcaatcaaaagacatgcaggacagaggagctcaggcacacagatgtgttactggtctgtcataaccaattaatggttcaagacaatgaatagagcagttggaaggaggctgctccttcaccctgagatcataggatcattaaggttggaaaagaccactaagatcacccagtcc

SEQ ID NO: 66407 - DNA, 600 bp, Chicken  19866894334726_1
aatcctatgtgcattccagattcattgtccatcaaggttcttccaaatgtaggagaattacataattagcttaaaaataagcaggtttatcctctcataaggagctagtttaagtaattacaaagcaggaacactgggatctatatcacagtaactaaaaactgcatttgccttctacagatcttccttctacagatcttaaaagtgtagcatgcaacaaaacagtgcaggtaggaataagggcacagcaacagtcactcttcccttttcagtaaggtttctactacatgtctctttaawcatcatcctattttgatgcagcttcatgggaataacagaaaaacccttactgctcctattttcagatagttattaaaaataaccacgagtgtctgatcagaaactttcttacacgcatatgaactatgtataattagcattcaagagctgagcacatgctatgaacagagcttatttaactctgaatcaaaccacttgagttaagcccactttcacaaaaactggcactcctttaatgaattcatttggtcctgaaaagcctgctcaattcacgggcaaacccaaaaccctggccttcaa

SEQ ID NO: 66408 - DNA, 600 bp, Chicken  19866894334729_1
caaaagcagctgggagagactgagactacgtgagataaatatccctgcagccacgcagatcagtgcagatggagggcaagaggtgctccaggcatggagcagaagttccctgcagcccaggagaggcccatggagaagcaggctgtctccctgggcaccacacagagcagatctccacatgcagctgtgggggagcccacagtgcagcaatggatgtggactgaagaaggcaacagcccgtggagagtccctacaggagccgccccgggcaagaactgcagcctctggagaggggcattygayggagcaggaaagctgggaaagtttctacctgtgtgaacctgtgctggagcagtgcttgaagagctacaggctgtgggaagcccacgcgtgatcagtttgggatggcatcctgtggaagggatcccatcctggagcaagggcagagagtgacagggrcagagaaggagcagcagagaggaagcattatatgctgactgcagcctgcattccctttatcctttaccacttgggggaaagaggtaggaaagaagatgggttttagtttgtttttagttcttcactgctctattctgttag

SEQ ID NO: 66409 - DNA, 600 bp, Chicken  19866894334729_2
aagcagctgggagagactgagactacgtgagataaatatccctgcagccacgcagatcagtgcagatggagggcaagaggtgctccaggcatggagcagaagttccctgcagcccaggagaggcccatggagaagcaggctgtctccctgggcaccacacagagcagatctccacatgcagctgtgggggagcccacagtgcagcaatggatgtggactgaagaaggcaacagcccgtggagagtccctacaggagccgccccgggcaagaactgcagcctctggagaggggcattygayggagcaggaaagctgggaaagtttctacctgtgtgaacctgtgctggagcagtgcttgaagagctacaggctgtgggaagcccacgcgtgatcagtttgggatggcatcctgtggaagggatcccatcctggagcaagggcagagagtgacagggrcagagaaggagcagcagagaggaagcattatatgctgactgcagcctgcattccctttatcctttaccacttgggggaaagaggtaggaaagaagatgggttttagtttgtttttagttcttcactgctctattctgttagcaa

SEQ ID NO: 66410 - DNA, 536 bp, Chicken  19866894334729_3
acacagagcagatctccacatgcagctgtgggggagcccacagtgcagcaatggatgtggactgaagaaggcaacagcccgtggagagtccctacaggagccgccccgggcaagaactgcagcctctggagaggggcattygayggagcaggaaagctgggaaagtttctacctgtgtgaacctgtgctggagcagtgcttgaagagctacaggctgtgggaagcccacgcgtgatcagtttgggatggcatcctgtggaagggatcccatcctggagcaagggcagagagtgacagggrcagagaaggagcagcagagaggaagcattatatgctgactgcagcctgcattccctttatcctttaccacttgggggaaagaggtaggaaagaagatgggttttagtttgtttttagttcttcactgctctattctgttagcaataggcaataaattatgttattctcgctgttttgtgcatgatggtaattagtgagctatctccttgtccttatctcagtttttttcatatttt

SEQ ID NO: 66411 - DNA, 600 bp, Chicken  19866894334730_1
actaatactgttttgacattaaaaatactgtacaaagaatgatcatgatatttgatgtgtaatttagctttggttattcttctacaaggatttctttagcccctggaggttcataatgcttcaggaaatgtgtcttttcattttattaagaaaatatactgatgaatgctctgatggaataatatgtgccttgtgtcttgttagcctcaggatgtcttgaagaaaatatctatctcaacgggcacattcctgggtggcaaagataattaacaactgaatacataaatcaactaataaacrcactactgtaaggaacagctttatttcttatgttgttttgttattgttgtttgtctgtgtgcatgtgtgatttttataagtacttggaatttcagcttcaggtgtgatatagaagaaaactctctcttatatacatttttaatggggcaatggtctcaatccagacgttaatctatgtctttaagtattgctttggcaatcctacccagaaagattatttaataaatgtaatactattcaattagtaatctttcaggtctatataaccacctcacagtcatcactgacatctttctctga

SEQ ID NO: 66412 - DNA, 600 bp, Chicken  19866894334734_1
gaaaaacagattatacgatgcggtgcctgcaataacaggatattgaactcaacgaccaagaggtgccttccagtttcattgtcctaaagacttttttgattcacgtttcttaagaattacctggctgatgatagaaaaagtaaagaaattcagcgtgaatatactgcttttgctgttccaccaagagcaaaggaggaggaactcagaggaaaggcaggtatggggaaatggcagtgctgggatgtgcgagatgtgagattgttgctaatttcttgtttcatcaagtcagttaacgttctsatctctgataagtttataggagacatgcatcctaaacaaggtgtaaataactgaaattaaataactaaataacttaattccttcgatatctctgatttctacaggaatgattctacaacatactatgtagaagactttctctcctctcagtttttctgcctaaattctgtgatgcttgtaccaaaagttgtctcttactgtatttagatagtgtgtctacctctgttagaggaagccaaatgtgtaaagcaatagcagccaagtggctacagttcttaataggagctctgataacaatcg

SEQ ID NO: 66413 - DNA, 600 bp, Chicken  19866894334743_1
gcagcttgaaagtgtcaggtttgtattttgtgcagagcaccttccacagcaggtggtcatgcttggcattggaaagtgtaccttctgacagtcctcttcccttgctttgctgtaggatgccttgaagctgcagagaggatgctgggatgactgcattcactctgctccttcagtcaggatacccccagagtccatccatctcttcagtctcagggtttgcctccttgcctccttacgttcccgaatgtaccatcaaaggggggaaattgtacttcccagtgcctctcagcacagctgtgytgtttgcagtgaagccasagcgctcctgtgctggcagaggaaatgggccagataattcaaggaggaactaaggtggaagagacccagaatagctaccaacaaagtcatgggacctcgtggtcagattccctgttgttccctaatgaagtatcaggttctcagtgctattgttaggcttcctgcatgcattcaaccagtccttgttaaaccaacgctgcttttgtctgtttggaacaaggaaggacatccctgaggtttcttytaaaataatgacaattaaaaaaatccctgcagtggaag

SEQ ID NO: 66414 - DNA, 600 bp, Chicken  19866894334743_2
gtttgtattttgtgcagagcaccttccacagcaggtggtcatgcttggcattggaaagtgtaccttctgacagtcctcttcccttgctttgctgtaggatgccttgaagctgcagagaggatgctgggatgactgcattcactctgctccttcagtcaggatacccccagagtccatccatctcttcagtctcagggtttgcctccttgcctccttacgttcccgaatgtaccatcaaaggggggaaattgtacttcccagtgcctctcagcacagctgtgytgtttgcagtgaagccasagcgctcctgtgctggcagaggaaatgggccagataattcaaggaggaactaaggtggaagagacccagaatagctaccaacaaagtcatgggacctcgtggtcagattccctgttgttccctaatgaagtatcaggttctcagtgctattgttaggcttcctgcatgcattcaaccagtccttgttaaaccaacgctgcttttgtctgtttggaacaaggaaggacatccctgaggtttcttytaaaataatgacaattaaaaaaatccctgcagtggaagaatccctccagggttctg

SEQ ID NO: 66415 - DNA, 474 bp, Chicken  19866894334743_3
gaaattgtacttcccagtgcctctcagcacagctgtgytgtttgcagtgaagccasagcgctcctgtgctggcagaggaaatgggccagataattcaaggaggaactaaggtggaagagacccagaatagctaccaacaaagtcatgggacctcgtggtcagattccctgttgttccctaatgaagtatcaggttctcagtgctattgttaggcttcctgcatgcattcaaccagtccttgttaaaccaacgctgcttttgtctgtttggaacaaggaaggacatccctgaggtttcttytaaaataatgacaattaaaaaaatccctgcagtggaagaatccctccagggttctgtttgctcagcacacacaagtttagttgtcaaatggccatgtgtcatagaatccatagaatcaccaaggctggaaaagacctccaagatcaatcatccagtccagccatccacctcttc

SEQ ID NO: 66416 - DNA, 599 bp, Chicken  19866894334752_1
  misc_feature (1)..(58): n is any nucleotide
nnnnnnnnnnnnnnnnnnnnnnnnnnnnnnnnnnnnnnnnnnnnnnnnnnnnnnnnnnttgcagataatggtactactgtgggttctgattgtatagtttttactgaagactgcttagaagtacgaatttcttcgaagaaatattcttgggaactccaaattctttaccaatgtgaatttcacacaaaatgtatcccccttaaaaaaaagaaaaatgtctaatcttttgcattttctctcagtttcctattgtttccactgttacagtctcttaaaagactgcttttttggacattttaratgagatctctcactcacaagaaaactgcttttaactccacttatgttacttaactaggaaatgccattraacatctttgctggcatgtttaactttaaaatatctaaaagtcttacaaacatgaattaaagacataggagctccatactaagttttacctatactgttaaaagactaacaagcttagggaagagatgtacycccagtggacttcacaggtgtaaatggagcgtgttaaagttatatttctttggaagacagattatgatcttccttgcaagaagaaggctgctccaca

SEQ ID NO: 66417 - DNA, 600 bp, Chicken  19866894334752_2
gtactactgtgggttctgattgtatagtttttactgaagactgcttagaagtacgaatttcttcgaagaaatattcttgggaactccaaattctttaccaatgtgaatttcacacaaaatgtatcccccttaaaaaaaagaaaaatgtctaatcttttgcattttctctcagtttcctattgtttccactgttacagtctcttaaaagactgcttttttggacattttaratgagatctctcactcacaagaaaactgcttttaactccacttatgttacttaactaggaaatgccattraacatctttgctggcatgtttaactttaaaatatctaaaagtcttacaaacatgaattaaagacataggagctccatactaagttttacctatactgttaaaagactaacaagcttagggaagagatgtacycccagtggacttcacaggtgtaaatggagcgtgttaaagttatatttctttggaagacagattatgatcttccttgcaagaagaaggctgctccacagaaatattaaccccaccttttcatggcaaatggagtatagaagtccaaaatgtgagttcatttgctgaagc

SEQ ID NO: 66418 - DNA, 571 bp, Chicken  19866894334752_3
aaaaaaagaaaaatgtctaatcttttgcattttctctcagtttcctattgtttccactgttacagtctcttaaaagactgcttttttggacattttaratgagatctctcactcacaagaaaactgcttttaactccacttatgttacttaactaggaaatgccattraacatctttgctggcatgtttaactttaaaatatctaaaagtcttacaaacatgaattaaagacataggagctccatactaagttttacctatactgttaaaagactaacaagcttagggaagagatgtacycccagtggacttcacaggtgtaaatggagcgtgttaaagttatatttctttggaagacagattatgatcttccttgcaagaagaaggctgctccacagaaatattaaccccaccttttcatggcaaatggagtatagaagtccaaaatgtgagttcatttgctgaagcagtataacttgcttcagcggttgcaaggctgggattggacagatatccatagcctttccagaaggataccccacaggtttctgtgcagttttaaggcaaaggt

SEQ ID NO: 66419 - DNA, 600 bp, Chicken  19866894334753_1
tttgagcttgccatacgagtgggaaaaaagctctgctctgagatacaaatggaacaaattttctggagaaggtatgaacgttgtcccatccaaagctgctcctgcagtcagcctgaccgagccacgcttcaatgtgagcacactgcaaaatagaggggcactgaagatcttgtctcttcctcctctaggaaattgcaaacttccatttctttaatctaatcatttgcaggagggaatattttctctagaaaaaccaatataagagggctgaaaggtcggatgggataatatgtaatccayggtgataagggctgtttacagaattattaatcaaacacaaaagggaacagatagtaacattttttattaaatattacagtggatcaaaaagtacaaaatatcttttgcctgctatgtgattgggaaactattggcacataatacagtatcaaaagcattaataagtacaatttggaaaacatacaaaaattgagtgtttatagttggctcagctttatttctggtagtgtttaaactaacacaaaggttactcaataaccttttaaatgggaaactatataatattactgggccattttt

SEQ ID NO: 66420 - DNA, 600 bp, Chicken  19866894334753_2
gtataaacagctagtagagtatgctgccattattagaacatatttaaaactatgggtccgggggaggagagcgagaggaggaagagaacaagtgaagtatcgaccacatttacagcaaacaccaccgttaagtgctcacgtaacagttctcacgctgcgggcctcgcatcagggcaggaattcctgtttctcactaaaatcgtgacgactgggtgagcgctgcacaggaggacagcgtgggaaggagcatcctggcagccctgggagcacagcagcacaggaggcacagccctcccggcycgctgccaccacgtgctgccaagccagcttgtcctgagctgcgacaggcgactttccaggcactggcacaccagggaaacggctcacgcagccaggctgacttgcaaaacgttctcactcgctcacctacacccttgctgggagtgcgctgcactgacagccaggtgctactgtggatccacttgggtgaaggcaggcccagcccgcagccagaaggcacgcgtgagccgcggcggctgggccgttacctcatcatctcacaacctttagcatccctaatgaatgttggacatagtgcgt

SEQ ID NO: 66421 - DNA, 600 bp, Chicken  19866894334762_1
gcaaggaacttgcttcgcaagtgacattcttcaacataacacatcacctggggagagtcagtcccaggagaagctggagaacatgtgcatttttcctaaactcacccaggactcctagaaaactgctgtgtggagctcaggtgttgctgtgaatggtagggtgtcagggaatagaggctgcagcagggcaagttgctccatgccgctagagcctctgtgagctgccttcagtagatctggggtttacagctagtgaaggctctgggatgttgctgtctgaatatgtcaggagatgtctgmctcacctgtctgtcccctctaactctatcactctaaaacacatgcagttctctgatagaatgctgttgagaacagagaagaaaagatatataggatgttctgctactgggcttgttgcctgatggttttcttagcagagcacgttttagtgctcagaggttgtaatctccctagatttactgtgtaccactcttagagtgcttcttgcaacataacccctgatggcagctgttggcacatttcattacatctcagcatttgttcaatttttaattttgggggactgctcttagaaatgct

SEQ ID NO: 66422 - DNA, 477 bp, Chicken  19866894334762_2
gatttactgtgtaccactcttagagtgcttcttgcaacataacccctgatggcagctgttggcacatttcattacatctcagcatttgttcaatttttaattttgggggactgctcttagaaatgcttgtgattgttaataataagctttgatcactgatacttcactttaaacaataggatgcttgtttttctgaaacaagaatgaggcactgaatgaggtcaccctgccaataacacttcttacttattgatcatcttaccattgcgtttatcagagcctgataggtcaatgagaagsatttgattgtgatgtagatcacagcaagyctcagttggcaattttttttcagtgggaaggcacatgggagttactagcatatacacctaataatacatccacctatattctcagtttatagttggatgtgcttatcgagttaagtcatttgttgtatatgtctgctctgtccactat

SEQ ID NO: 66423 - DNA, 448 bp, Chicken  19866894334762_3
tcttgcaacataacccctgatggcagctgttggcacatttcattacatctcagcatttgttcaatttttaattttgggggactgctcttagaaatgcttgtgattgttaataataagctttgatcactgatacttcactttaaacaataggatgcttgtttttctgaaacaagaatgaggcactgaatgaggtcaccctgccaataacacttcttacttattgatcatcttaccattgcgtttatcagagcctgataggtcaatgagaagsatttgattgtgatgtagatcacagcaagyctcagttggcaattttttttcagtgggaaggcacatgggagttactagcatatacacctaataatacatccacctatattctcagtttatagttggatgtgcttatcgagttaagtcatttgttgtatatgtctgctctgtccactat

SEQ ID NO: 66424 - DNA, 600 bp, Chicken  19866894334766_1
gctgggagagcagcaccagcaattgtaaaactttaccactcacctcatgtaacttttgttttacactcgattaacttttattaccaactccaaagaataaagcggagaattagaaacagccattttggggaaaggaaaaaaaagaagtacattatgagattaaggggctgcattcctagagatgctgagaacagccacagcctcaaacacacacacacacaccaacccatggctaagagaagcagccttacctcctgcacttggccacgaagccccaggatggcatccaagagatgcacygacagcgcccggctcagcactcggtgccgaagacgacccaaccgcccatcgtcaccgagggaggtgctttcaatacacacccaagccaactctttcctaggaagacacgtgggcaaagaggaagccgcagctttctgtttcccttaactcctgacgctttatttcccaaacttctctcagccctttgctggggtcgctgctctcattggggacgcccaacgcgtggctccagcgcggccgcgctcccccttgggacggctgcgtatgggggggacatatttagggcccgaacggcttgac

SEQ ID NO: 66425 - DNA, 600 bp, Chicken  19866894334767_1
ttccctcccaacacaaactactctgaatatggcacattcctgagagttttattttttatgccacaccggtggatgtcccatggggacctgcaggtaatcctttaccactgacatccatcacagcccaggtctccagaagtccgacacgtaagaaattgcttgatttccacttgcaagaacatccaagactgaaatttgcaaacaaggtatcattactcagtgtcagctgcttatcattcccatgtgaacaaagtttatcagtcagtcaggaaacagactcatctctgctccctgtccatyaggtagaccgcggcacacaaaaagaaacattatggtagctttgaatgcttttgagatgttctgcagagtgagacattttcagaaaaaaaaaaaaaaatacatgacaggcatctattgggaatgaatggatacgaaataattcttttcctatacatttgctatgaaaacgcacaatcagtttgctcaactgctattgaatgtcagctacacagaacagagctaagtggggctttaccagaattttgatgctactttccttttcgtatcttctggatgagtattggcaaagtactttttttt

SEQ ID NO: 66426 - DNA, 599 bp, Chicken  19866894334776_1
  misc_feature (1)..(145): n is any nucleotide
nnnnnnnnnnnnnnnnnnnnnnnnnnnnnnnnnnnnnnnnnnnnnnnnnnnnnnnnnnnnnnnnnnnnnnnnnnnnnnnnnnnnnnnnnnnnnnnnnnnnnnnnnnnnnnnnnnnnnnnnnnnnnnnnnnnnnnnnnnnnnnnnncctcaccaactggcagttttgctgctcacccaggtcgtttatttgaagaactggcttaagctctgttggcaagagagctcttccacgccaagtacatcacagaatccttttaaaataaagaaattaataaataaaggattgatcccattcagcayccctggacatctcagttactgygacagcccttctccggccttcaaagatctcattcactggcatccattcaacaacaccgccatcgttgaacgataatgtttcgtgtgcaacttcagggctcccctttgctctcctttccattggttcccttattattacttttcacattaatttcatagcccagcgtacatgaatcccagcccttatccccagtacacaagtggatgtgtatgggcagacctctgcaacaagctgccctccctccaactcatstctgactgctgcaaggatctcactg

SEQ ID NO: 66427 - DNA, 599 bp, Chicken  19866894334776_2
  misc_feature (1)..(123): n is any nucleotide
nnnnnnnnnnnnnnnnnnnnnnnnnnnnnnnnnnnnnnnnnnnnnnnnnnnnnnnnnnnnnnnnnnnnnnnnnnnnnnnnnnnnnnnnnnnnnnnnnnnnnnnnnnnnnnnnnnnnnnnnnnncctcaccaactggcagttttgctgctcacccaggtcgtttatttgaagaactggcttaagctctgttggcaagagagctcttccacgccaagtacatcacagaatccttttaaaataaagaaattaataaataaaggattgatcccattcagcayccctggacatctcagttactgygacagcccttctccggccttcaaagatctcattcactggcatccattcaacaacaccgccatcgttgaacgataatgtttcgtgtgcaacttcagggctcccctttgctctcctttccattggttcccttattattacttttcacattaatttcatagcccagcgtacatgaatcccagcccttatccccagtacacaagtggatgtgtatgggcagacctctgcaacaagctgccctccctccaactcatstctgactgctgcaaggatctcactgctgctcaaaatgagttcgttct

SEQ ID NO: 66428 - DNA, 507 bp, Chicken  19866894334776_3
aataaaggattgatcccattcagcayccctggacatctcagttactgygacagcccttctccggccttcaaagatctcattcactggcatccattcaacaacaccgccatcgttgaacgataatgtttcgtgtgcaacttcagggctcccctttgctctcctttccattggttcccttattattacttttcacattaatttcatagcccagcgtacatgaatcccagcccttatccccagtacacaagtggatgtgtatgggcagacctctgcaacaagctgccctccctccaactcatstctgactgctgcaaggatctcactgctgctcaaaatgagttcgttctccaaatttgtggccatgacctgttgtcacccaccagaaaacactgagctttgcccagtggaagctgtgatttgtgtttgcacagctcctcagcaagcaatgatgaaacacaggggtgtaacacacacaagtcctgcctggagaaccaccccacacttaaa

SEQ ID NO: 66429 - DNA, 505 bp, Chicken  19866894334778_1
atgaatgtctcatgcagctgttgtgtatgattaaagacttccaagtgcatagctaaagacccgaacattttttaagaagtccctggcaccacaaattcctccccagaatcagatgacgatagaagaggtttgaaaagtgtaaacaatatctagacttaagatttcattatccaaactgcagttccaaacttctgtgtattcattaatgtgatgtagttgttagtgcttagtcatccaatgttcaaattaagcattttttgtcacagcacaagcttgtggtctgagaacatgatcccacgraaatgaagcatgactgagatgctggcagacagattattggctgatgttgtgcagaaggaagtctccaaactaagaacactcaatcaatagagacagtctgtacagggctgggagactgcaagcttctgagccacagctggtgggtggcagttagagtctaaaagctacagctaaggatttctttgcttggaccatggattttaat

SEQ ID NO: 66430 - DNA, 428 bp, Chicken  19866894334779_1
tctaacatattgttcccttgtaaggagaacactttccacctcattggtttaacaaatgtacttgaaacactttaatgttatctttttgttgaaaaatgaagtgagaccttatgctagctgtcttggttaatttaatttgttatattttgctacttttcattctcctcctttctaccatattgagagtactccagcaataaaccttccaaatacaaactcttaattgaatataaaaaaaataatcaagttggcatttctttgagtcactgttcctactactttggattgataaaataataktgtttcgaagtacatcagctccaaaaagaaagctagtggaatttactaaatgcttgctcaagcaacagcattgatatgtatcttttacaccatgtctagattaggaaaatggatgtcatttaaaatat

SEQ ID NO: 66431 - DNA, 600 bp, Chicken  19866894334783_1
taattagactccaccaggaataatttttgaaaaagctgctttatagctgcagaaaactacattaatggatgcttaaacgctgtaatccttctcatgcacctaaaataagaagcatatcaggtgatccccggtgaaacaagaataagtttatatattctgtcatgtatactgcttacgtatacaaaatgtatggtgaaaaaaattccgtggaaacgcagttagaaattgataattgttgctggacttttttggccaaatatctatccaacctccagcttccagtggcctacagtcagtacygagagatgaaaaaaggagatgacagaatggcagaacacctcctgtactccaaagttgagtgtttcagygagccagatgtgatgtcttgagattttatatagcttgaaaggcaaatttcatctctaactggatagcttccaagacatgatggcaaatatctccctgcttattttttctccaaactaggactagcagactcaatttttgggagcagttgccttccaggcataatctttctgtgagagattggtgaaaacacaggttttagctcttacagatgaattttgcttggtgttgcag

SEQ ID NO: 66432 - DNA, 600 bp, Chicken  19866894334783_2
atgcttaaacgctgtaatccttctcatgcacctaaaataagaagcatatcaggtgatccccggtgaaacaagaataagtttatatattctgtcatgtatactgcttacgtatacaaaatgtatggtgaaaaaaattccgtggaaacgcagttagaaattgataattgttgctggacttttttggccaaatatctatccaacctccagcttccagtggcctacagtcagtacygagagatgaaaaaaggagatgacagaatggcagaacacctcctgtactccaaagttgagtgtttcagygagccagatgtgatgtcttgagattttatatagcttgaaaggcaaatttcatctctaactggatagcttccaagacatgatggcaaatatctccctgcttattttttctccaaactaggactagcagactcaatttttgggagcagttgccttccaggcataatctttctgtgagagattggtgaaaacacaggttttagctcttacagatgaattttgcttggtgttgcagcaccctgacaattagggaaagagcacagaagaaacaatctcaactatatgtagaaaagtagttcaagt

SEQ ID NO: 66433 - DNA, 600 bp, Chicken  19866894334787_1
gctgccactacttacttggtaacagcatgactcaagccataaaaggaagctctgcttggctgatactgggccatgttaagaatttcccggattctctttggagtaggagaaggcaagagtcccagggtatacgtgaccaggtctaccacaagtggatttacgtttccagttctcagtatctgaaggactgcactgtaacactctggagtcccacactgaatcagggcctgaatcgtgatggaactgaaaggaaaagcgatggctttaattaatgattttcttgtttgcagttattcctgmatgcttcgtgtttgaaagaaacatttgacacattcacctgggtctgttaatatacatgtgtggttacgtatggccagaagtaaaacacacaattgctaatcaggaagaagctgcttaattttacaaattatgataatacacgactagataataacaagatgaaaaatattaacagtactacaatttcacagacatatctagtttttccatgacctcaagattttccatacctttcagtattataatgcattgaatcacaccgaagctctcatctctctagagactgagggcattaactca

SEQ ID NO: 66434 - DNA, 600 bp, Chicken  19866894334787_2
tgtgcacttacatggctctaaaaatctcactttcaaaactgtgttattggaatttggaattacgctgtccttgagcaaaactagataaaagatatttggccataataacatgttcactggattgcatcaggcatatacacttggcttggtggtggggagtaaaaccttatactgttatactcaactcagtttaatttatagtttagtttcttcattaaaatgggaagatttgatcaggtaatgatcaagcaatattagtacttcatagctgtctggaactttcagacctatttaaattcytaaactgttttcatttatttaatattcaagttattaccatctgagcacttctgatggaaaaataataaattcatagttcttactctcttatttccctctctagattattaatacgaaacctatctttctgaagggcaatcttgacatctatttaaactacattttaagagaatgtgcagcgaatcrtcaactttagaattattttgctatggcattgacacacgctggacgtgctggaacataccttgaagtttccatcatctttggtacaagagagccaagagtgctgttgtgcaaact

SEQ ID NO: 66435 - DNA, 600 bp, Chicken  19866894334787_3
cagtttaatttatagtttagtttcttcattaaaatgggaagatttgatcaggtaatgatcaagcaatattagtacttcatagctgtctggaactttcagacctatttaaattcytaaactgttttcatttatttaatattcaagttattaccatctgagcacttctgatggaaaaataataaattcatagttcttactctcttatttccctctctagattattaatacgaaacctatctttctgaagggcaatcttgacatctatttaaactacattttaagagaatgtgcagcgaatcrtcaactttagaattattttgctatggcattgacacacgctggacgtgctggaacataccttgaagtttccatcatctttggtacaagagagccaagagtgctgttgtgcaaacttctaagtccagaaacaaatttgtaaaagagttttgctctctgctggttctgctgggaggcagtaagtttctgcagctcctgaagaattttcaaaacagcatcaccctgcctggaaaatttagcatctgtgctttccagtgcaagtcctttctcttccagttcatctagaaattaaaccaatgacac

SEQ ID NO: 66436 - DNA, 600 bp, Chicken  19866894334794_1
gttaaccaagggaagcagcagcttgagaaaggtcagcagctgacagtgggtgctgagtgcagccgtactgctgccctgacctcagtccacaaaggcaccaatttgttccattttttaaagcagttcattgctttgaatgcactaattacgtttgcttttaaaaggaggaggtctgatttctagagtgggtattgagcatttgttcttcctatctggctgttatgagacacgatgtttgatacagcctgtggagagcagatacactgggaaggaaatagtggggaaactcaggggctctgygtgctcagctatatgtgacgagrtgtgggtcaccaaaacttgtgaccaaccacgtcagaaagatgtggagcagaaataagagtgaggctagaaaactcagcactctctgtatgtcttggctctacatttcctatatatttctacaggagagygttaggaagaaataaatgagggtttgctactcccatggaaatatcatactgtttcccagcactagcctgaagcacaaccaattgccctgcagctctccccaggtggccggagttgctgaagccaaggatgacttgttaacttttctat

SEQ ID NO: 66437 - DNA, 600 bp, Chicken  19866894334794_2
tgagaaaggtcagcagctgacagtgggtgctgagtgcagccgtactgctgccctgacctcagtccacaaaggcaccaatttgttccattttttaaagcagttcattgctttgaatgcactaattacgtttgcttttaaaaggaggaggtctgatttctagagtgggtattgagcatttgttcttcctatctggctgttatgagacacgatgtttgatacagcctgtggagagcagatacactgggaaggaaatagtggggaaactcaggggctctgygtgctcagctatatgtgacgagrtgtgggtcaccaaaacttgtgaccaaccacgtcagaaagatgtggagcagaaataagagtgaggctagaaaactcagcactctctgtatgtcttggctctacatttcctatatatttctacaggagagygttaggaagaaataaatgagggtttgctactcccatggaaatatcatactgtttcccagcactagcctgaagcacaaccaattgccctgcagctctccccaggtggccggagttgctgaagccaaggatgacttgttaacttttctattcttcctatggtcttacatgctt

SEQ ID NO: 66438 - DNA, 600 bp, Chicken  19866894334794_3
tgcttttaaaaggaggaggtctgatttctagagtgggtattgagcatttgttcttcctatctggctgttatgagacacgatgtttgatacagcctgtggagagcagatacactgggaaggaaatagtggggaaactcaggggctctgygtgctcagctatatgtgacgagrtgtgggtcaccaaaacttgtgaccaaccacgtcagaaagatgtggagcagaaataagagtgaggctagaaaactcagcactctctgtatgtcttggctctacatttcctatatatttctacaggagagygttaggaagaaataaatgagggtttgctactcccatggaaatatcatactgtttcccagcactagcctgaagcacaaccaattgccctgcagctctccccaggtggccggagttgctgaagccaaggatgacttgttaacttttctattcttcctatggtcttacatgcttgaggcacacgaggctgaggtctgcagcacggtctgggggctctttgagtgtccaagtcttgggcacctccaacagcttttcttagcagagcatcatgaaccaaattaatcctggactctaggtggtcta

SEQ ID NO: 66439 - DNA, 600 bp, Chicken  19866894334794_4
tcccagcactagcctgaagcacaaccaattgccctgcagctctccccaggtggccggagttgctgaagccaaggatgacttgttaacttttctattcttcctatggtcttacatgcttgaggcacacgaggctgaggtctgcagcacggtctgggggctctttgagtgtccaagtcttgggcacctccaacagcttttcttagcagagcatcatgaaccaaattaatcctggactctaggtggtctaaggcaccacatgctatcaggccatttgaagtcccattgaaattcatgaaaagrctcccacagacttcagtgtgggcagcacatcaaaccacgtagcgcagcaaagccatcgtgcctctggtccttggtttccaaatccctccgttgtgctgtttctgttgaaggattaaaaatgccttctcgccggcgagcgaagctgaataagaactggatgtgaaaacaaaaccactatgtaaacaatgatgctaacatgctgaagtgaaaatcaaagccatgctcatcatctgggcagtcagagccaggtgggaacaatgttattttggaggtgtctcatcagagcagtggcaggaataa

SEQ ID NO: 66440 - DNA, 599 bp, Chicken  19866894334797_1
  misc_feature (1)..(174): n is any nucleotide
nnnnnnnnnnnnnnnnnnnnnnnnnnnnnnnnnnnnnnnnnnnnnnnnnnnnnnnnnnnnnnnnnnnnnnnnnnnnnnnnnnnnnnnnnnnnnnnnnnnnnnnnnnnnnnnnnnnnnnnnnnnnnnnnnnnnnnnnnnnnnnnnnnnnnnnnnnnnnnnnnnnnnnnnnnnnnnctggtatttgctttaaaacttatttttctttacattgactaacttaagaatgaaaaggtttgcctcagcaaacttctggcagcttcttgatttaaacctttctccgagctcgtgaactttctctcygatgcttaaacctcagggrtgtatttgtatgatggagactgggcgaagacatccaggagaatatataaccacyrcagctaatgacacrgtgtgttctccctccttccccagctgatcgactggatcctttggacaggctggatgtggctctgggcagcctgggctgctggttggtgaccctgcacatagcaggggtttgagattagatgatcactgtggtccttttcaccccaggccattctatgattctatgactgctcctctgtgttgaggtagtgyctttgaccaccagcacggtg

SEQ ID NO: 66441 - DNA, 599 bp, Chicken  19866894334797_2
  misc_feature (1)..(155): n is any nucleotide
nnnnnnnnnnnnnnnnnnnnnnnnnnnnnnnnnnnnnnnnnnnnnnnnnnnnnnnnnnnnnnnnnnnnnnnnnnnnnnnnnnnnnnnnnnnnnnnnnnnnnnnnnnnnnnnnnnnnnnnnnnnnnnnnnnnnnnnnnnnnnnnnnnnnnnnnnnnctggtatttgctttaaaacttatttttctttacattgactaacttaagaatgaaaaggtttgcctcagcaaacttctggcagcttcttgatttaaacctttctccgagctcgtgaactttctctcygatgcttaaacctcagggrtgtatttgtatgatggagactgggcgaagacatccaggagaatatataaccacyrcagctaatgacacrgtgtgttctccctccttccccagctgatcgactggatcctttggacaggctggatgtggctctgggcagcctgggctgctggttggtgaccctgcacatagcaggggtttgagattagatgatcactgtggtccttttcaccccaggccattctatgattctatgactgctcctctgtgttgaggtagtgyctttgaccaccagcacggtgccctagctttagagctgat

SEQ ID NO: 66442 - DNA, 599 bp, Chicken  19866894334797_3
  misc_feature (1)..(101): n is any nucleotide
nnnnnnnnnnnnnnnnnnnnnnnnnnnnnnnnnnnnnnnnnnnnnnnnnnnnnnnnnnnnnnnnnnnnnnnnnnnnnnnnnnnnnnnnnnnnnnnnnnnnnctggtatttgctttaaaacttatttttctttacattgactaacttaagaatgaaaaggtttgcctcagcaaacttctggcagcttcttgatttaaacctttctccgagctcgtgaactttctctcygatgcttaaacctcagggrtgtatttgtatgatggagactgggcgaagacatccaggagaatatataaccacyrcagctaatgacacrgtgtgttctccctccttccccagctgatcgactggatcctttggacaggctggatgtggctctgggcagcctgggctgctggttggtgaccctgcacatagcaggggtttgagattagatgatcactgtggtccttttcaccccaggccattctatgattctatgactgctcctctgtgttgaggtagtgyctttgaccaccagcacggtgccctagctttagagctgatgttaacactattgaaaacatatttcacctgtgccttagaactggtgaaggattg

SEQ ID NO: 66443 - DNA, 599 bp, Chicken  19866894334797_4
  misc_feature (1)..(100): n is any nucleotide
nnnnnnnnnnnnnnnnnnnnnnnnnnnnnnnnnnnnnnnnnnnnnnnnnnnnnnnnnnnnnnnnnnnnnnnnnnnnnnnnnnnnnnnnnnnnnnnnnnnnctggtatttgctttaaaacttatttttctttacattgactaacttaagaatgaaaaggtttgcctcagcaaacttctggcagcttcttgatttaaacctttctccgagctcgtgaactttctctcygatgcttaaacctcagggrtgtatttgtatgatggagactgggcgaagacatccaggagaatatataaccacyrcagctaatgacacrgtgtgttctccctccttccccagctgatcgactggatcctttggacaggctggatgtggctctgggcagcctgggctgctggttggtgaccctgcacatagcaggggtttgagattagatgatcactgtggtccttttcaccccaggccattctatgattctatgactgctcctctgtgttgaggtagtgyctttgaccaccagcacggtgccctagctttagagctgatgttaacactattgaaaacatatttcacctgtgccttagaactggtgaaggattgg

SEQ ID NO: 66444 - DNA, 599 bp, Chicken  19866894334797_5
  misc_feature (1)..(86): n is any nucleotide
nnnnnnnnnnnnnnnnnnnnnnnnnnnnnnnnnnnnnnnnnnnnnnnnnnnnnnnnnnnnnnnnnnnnnnnnnnnnnnnnnnnnnnctggtatttgctttaaaacttatttttctttacattgactaacttaagaatgaaaaggtttgcctcagcaaacttctggcagcttcttgatttaaacctttctccgagctcgtgaactttctctcygatgcttaaacctcagggrtgtatttgtatgatggagactgggcgaagacatccaggagaatatataaccacyrcagctaatgacacrgtgtgttctccctccttccccagctgatcgactggatcctttggacaggctggatgtggctctgggcagcctgggctgctggttggtgaccctgcacatagcaggggtttgagattagatgatcactgtggtccttttcaccccaggccattctatgattctatgactgctcctctgtgttgaggtagtgyctttgaccaccagcacggtgccctagctttagagctgatgttaacactattgaaaacatatttcacctgtgccttagaactggtgaaggattggtgtgacacaggcta

SEQ ID NO: 66445 - DNA, 600 bp, Chicken  19866894334797_6
gagctcgtgaactttctctcygatgcttaaacctcagggrtgtatttgtatgatggagactgggcgaagacatccaggagaatatataaccacyrcagctaatgacacrgtgtgttctccctccttccccagctgatcgactggatcctttggacaggctggatgtggctctgggcagcctgggctgctggttggtgaccctgcacatagcaggggtttgagattagatgatcactgtggtccttttcaccccaggccattctatgattctatgactgctcctctgtgttgaggtagtgyctttgaccaccagcacggtgccctagctttagagctgatgttaacactattgaaaacatatttcacctgtgccttagaactggtgaaggattggtgtgacacaggctaatgatttgggtcttttcaagtgctggccctgttgcctgttaattcttgttctctgcttttgtttttgcagctgaacctgcagacctcttgaaggtattagattttcacaatttacctgatggtatcacaagaacaacagggttttgcacaagcagaagatcttcaaaagaagcagacgttgcttacagagta

SEQ ID NO: 66446 - DNA, 484 bp, Chicken  19866894334797_7
tggtgtgacacaggctaatgatttgggtcttttcaagtgctggccctgttgcctgttaattcttgttctctgcttttgtttttgcagctgaacctgcagacctcttgaaggtattagattttcacaatttacctgatggtatcacaagaacaacagggttttgcacaagcagaagatcttcaaaagaagcagacgttgcttacagagtaacaaaagatgctcagctcagcgccccgacaaagcagctgtatcctggtaagtctgcagctttttgtgttagccgtatagaaatacctgatscttttctcagcatctccagccacatacagggcactgcacagttcctccctattctctatgtatgctcccttggtagagaatgagtgattctgctatttttgagggggcgggttgcaaacttacaaccgtcgaacgcagcagtacgttcttctgtcgttgcatttgcatgcagtgacaggtttca

SEQ ID NO: 66447 - DNA, 599 bp, Chicken  19866894334800_1
  misc_feature (1)..(76): n is any nucleotide
nnnnnnnnnnnnnnnnnnnnnnnnnnnnnnnnnnnnnnnnnnnnnnnnnnnnnnnnnnnnnnnnnnnnnnnnnnnnaaatcatagatgtgctttatagctgactcatactgatatcaaatgaattccatgacacattgaatgtggtactctttaatcacaggaaactgcaaggttctgcagctgcataaattagggacaattaactaaaaaaaaaaaaaattacacgcatgcatctcattatttttaatttgaagttttatttatgctggcactggtttctatcccatacaccagatgcyaggtaaaaaatggmaggattgaaatattagctctggagtcacggtagtgttctgcaaacaagcaggacaggaagaagtatgtgttttgatgctgacatcaaagaggggaaagggcagttttcccctggagatttgtccccactgtctcccagtgaatgcacaagcatgcagacgtaagccagcaggtgatgcttgtggtgcacatcataaaatcactctatctcccccacctttcctcactttgtgatcatctattccgatggcttctccacaccctgcagtacttctgctgggaacgg

SEQ ID NO: 66448 - DNA, 599 bp, Chicken  19866894334800_2
  misc_feature (1)..(62): n is any nucleotide
nnnnnnnnnnnnnnnnnnnnnnnnnnnnnnnnnnnnnnnnnnnnnnnnnnnnnnnnnnnnnnaaatcatagatgtgctttatagctgactcatactgatatcaaatgaattccatgacacattgaatgtggtactctttaatcacaggaaactgcaaggttctgcagctgcataaattagggacaattaactaaaaaaaaaaaaaattacacgcatgcatctcattatttttaatttgaagttttatttatgctggcactggtttctatcccatacaccagatgcyaggtaaaaaatggmaggattgaaatattagctctggagtcacggtagtgttctgcaaacaagcaggacaggaagaagtatgtgttttgatgctgacatcaaagaggggaaagggcagttttcccctggagatttgtccccactgtctcccagtgaatgcacaagcatgcagacgtaagccagcaggtgatgcttgtggtgcacatcataaaatcactctatctcccccacctttcctcactttgtgatcatctattccgatggcttctccacaccctgcagtacttctgctgggaacggctctgcagccatct

SEQ ID NO: 66449 - DNA, 600 bp, Chicken  19866894334801_1
gaaatgtgtatcaaatctgcaaaccctaagtattggtttcatccagtttgcaaaatttgtttcaatctgatcttcttctctattatatttgctgccatccagaacaataatttggcactctttaaatggtccattgcacttgatggcatgacttcatgatatcgaagaagcagacaaaactccagtgagcaaagcagctttgttatcatgacttaaactaattttgtttttgtctaaaaacgtatatatgtctgtacgtacaggcaaataagtacaatcctctgtttttctgacttgccmttttttttccccccctttaatataacttctactttgtgcaaatacttctcagaattgtctgtgagaagtcataggctgtaaaataatatatattgactccttctctggatagtcatatctagatatgatctgaaatgcagttgaggccatcttctaggttccagtttatcagyaggctcccggtacatgtggatccactttaacttttggacttacagatatacagagtgaagcacctgtttaagtaatttgctgaatcagggccacaacgrgctgcagcatcaaaaaaaatatgtaaat

SEQ ID NO: 66450 - DNA, 600 bp, Chicken  19866894334801_2
aaatgtgtatcaaatctgcaaaccctaagtattggtttcatccagtttgcaaaatttgtttcaatctgatcttcttctctattatatttgctgccatccagaacaataatttggcactctttaaatggtccattgcacttgatggcatgacttcatgatatcgaagaagcagacaaaactccagtgagcaaagcagctttgttatcatgacttaaactaattttgtttttgtctaaaaacgtatatatgtctgtacgtacaggcaaataagtacaatcctctgtttttctgacttgcctmtttttttccccccctttaatataacttctactttgtgcaaatacttctcagaattgtctgtgagaagtcataggctgtaaaataatatatattgactccttctctggatagtcatatctagatatgatctgaaatgcagttgaggccatcttctaggttccagtttatcagyaggctcccggtacatgtggatccactttaacttttggacttacagatatacagagtgaagcacctgtttaagtaatttgctgaatcagggccacaacgrgctgcagcatcaaaaaaaatatgtaaata

SEQ ID NO: 66451 - DNA, 600 bp, Chicken  19866894334801_3
acaaaactccagtgagcaaagcagctttgttatcatgacttaaactaattttgtttttgtctaaaaacgtatatatgtctgtacgtacaggcaaataagtacaatcctctgtttttctgacttgcctttttttttccccccctttaatataacttctactttgtgcaaatacttctcagaattgtctgtgagaagtcataggctgtaaaataatatatattgactccttctctggatagtcatatctagatatgatctgaaatgcagttgaggccatcttctaggttccagtttatcagyaggctcccggtacatgtggatccactttaacttttggacttacagatatacagagtgaagcacctgtttaagtaatttgctgaatcagggccacaacgrgctgcagcatcaaaaaaaatatgtaaatatgggtttatagcttgggaaaacaaacatgctgaatgcataactgaacaaagaatttattgagtgaaccttatctctctttgtgtctgcttttggaatagctgtgaccacatcctgcctttttcatatatatttatttgttatttgaatgcagtcagtgactacctttagcag

SEQ ID NO: 66452 - DNA, 600 bp, Chicken  19866894334801_4
tacaatcctctgtttttctgacttgcctttttttttccccccctttaatataacttctactttgtgcaaatacttctcagaattgtctgtgagaagtcataggctgtaaaataatatatattgactccttctctggatagtcatatctagatatgatctgaaatgcagttgaggccatcttctaggttccagtttatcagyaggctcccggtacatgtggatccactttaacttttggacttacagatatacagagtgaagcacctgtttaagtaatttgctgaatcagggccacaacgrgctgcagcatcaaaaaaaatatgtaaatatgggtttatagcttgggaaaacaaacatgctgaatgcataactgaacaaagaatttattgagtgaaccttatctctctttgtgtctgcttttggaatagctgtgaccacatcctgcctttttcatatatatttatttgttatttgaatgcagtcagtgactacctttagcagatttctttttattctctggtttgattatttagcattcgagatttattacttgatgggatacctattgaaaggactggaaagattcccgttggcttcaaa

SEQ ID NO: 66453 - DNA, 599 bp, Chicken  19866894334802_1
  misc_feature (1)..(62): n is any nucleotide
nnnnnnnnnnnnnnnnnnnnnnnnnnnnnnnnnnnnnnnnnnnnnnnnnnnnnnnnnnnnnntctttaatcttgtagctctctgataaaggcgtatgagaaatgagttgacagtgtcactgcaatttgcctgacagttgtaagaaattatcttccaaactgatgtatttatttggtagcacttttgaagaagccagcaactcaacaagaacagaaatcttgtcatcattagtcaaaggactgacatactagaaggaagaaaataaatacactgggcttttttatggttttcttgtctaamgagcaatagcrctttcttgctcagatagcgtctgagagattagttaagcagcagaaaagaggtgactttaacagagcagagaaaaactcagatgctagacatcttctgggcagatggaagaagagtttcaccactggacctccatcagagcctccttcttcccagtggccatcctctctggatgactaagggtcacggagccacattaccccctcagctctggagctgtcactctgaaatcacccaccaatgttccagtcactcataattataaataagctaagaaaagctgccaccat

SEQ ID NO: 66454 - DNA, 599 bp, Chicken  19866894334802_2
  misc_feature (1)..(51): n is any nucleotide
nnnnnnnnnnnnnnnnnnnnnnnnnnnnnnnnnnnnnnnnnnnnnnnnnnntctttaatcttgtagctctctgataaaggcgtatgagaaatgagttgacagtgtcactgcaatttgcctgacagttgtaagaaattatcttccaaactgatgtatttatttggtagcacttttgaagaagccagcaactcaacaagaacagaaatcttgtcatcattagtcaaaggactgacatactagaaggaagaaaataaatacactgggcttttttatggttttcttgtctaamgagcaatagcrctttcttgctcagatagcgtctgagagattagttaagcagcagaaaagaggtgactttaacagagcagagaaaaactcagatgctagacatcttctgggcagatggaagaagagtttcaccactggacctccatcagagcctccttcttcccagtggccatcctctctggatgactaagggtcacggagccacattaccccctcagctctggagctgtcactctgaaatcacccaccaatgttccagtcactcataattataaataagctaagaaaagctgccaccataccaagctgcc

SEQ ID NO: 66455 - DNA, 386 bp, Chicken  19866894334802_3
tcttctgggcagatggaagaagagtttcaccactggacctccatcagagcctccttcttcccagtggccatcctctctggatgactaagggtcacggagccacattaccccctcagctctggagctgtcactctgaaatcacccaccaatgttccagtcactcataattataaataagctaagaaaagctgccaccataccaagctgcccgtggctgcaggatagggaatctcttacagtgctaccgcaaggatagaaataaacaggccctgtggtcagggttctcatttatattctagrtttttaaagagaatatttaatttcattaacctctatctggcttcctcgttgcctagagaatcaccctgaggaaacaattaaggact

SEQ ID NO: 66456 - DNA, 600 bp, Chicken  19866894334806_1
gttcagatatgttaatttgaaactctgctcaataaacacttatgttccatgctggttaatccatccaaacatagttaagctcttatcaaggaatttccaaaggaattaagtaaatggaggaaatgttatgttactgtttaatttagcatcctagagaactcagctgtccttaacctggatcaataattcctcagagaaaatttgggttgcaaatagaatatctggtcagaaactacagtcttgtgagctgattttccttactagtgagtaaattcaataaacagatcagttaaacagatsctaccatgtttacttttcaccatgcagaaaaatgactgcgaagcatcctaggaaaacagagcacaatattctttttcaaaactattgcagtaatgcagtgcttttcaccttgacttcttatactaaattaacagtgcacagtaagctgaatattaaacaaatactgcacatttgctgtccttgatgcctctgcaatgcaattgattctctacatatgtcccatttcatcagatcatatccagtcgtgttttgtcaaactgcgtttatccattcagcctaaatccagtcacatgacacaca

SEQ ID NO: 66457 - DNA, 600 bp, Chicken  19866894334807_1
ctgtaatagaaatttggctgacttttccggacaaacctgaactaatgcgacttgtctaaagattcattattacatacaacacattcttattaattgttttcaggtatatacaattcatttaagccatgtttgaaggttgagcattctacaggggaatagtagaggagactacaatgtgttagctccattggatgaagtagcaataaaaaaaaaaaaattgctttaaatagttcctgtcaaattatttggtaaaagacctactttgaaattttatttaccaaatgaacttgttctttttgyagtagttatataaaaagaaaaaaaatgtataatatgaatagttaagaatataaaaatttgcctgtgaatttgggcatgttgatataggcttatttgaacatagagatgtaagttgtttacattttgtttttcctatcggattcatctttgttttctttcctatttcgtaatttaaaggctcactataaagggagagggttgttttttatgcttagctctatattgtcttgctctaattgttaaattttataaatgatttgcaaagtgatttcaattacttaatgattcaataactagctt

SEQ ID NO: 66458 - DNA, 586 bp, Chicken  19866894334807_2
ttgttaaattttataaatgatttgcaaagtgatttcaattacttaatgattcaataactagcttgagaattaatttattatcattaccttgagtgtaatttttgtataaattgactggaatgcttaaaagagaaactagttgattattaaaagagccacatgattttaaaaggtcatgtggaattattcaagctagaatccagtgtgaatcaacaagctttttgtttgtttgtttgtatcttagaagtttcagtggaaagaaccaggagggcagatagtgactggaatggaaaataactragcactgtgatgggagatcttgttatcttgttattcttacttgttctggaaagataacttattcaaaaaaatgattgttgtgggtatttcagttataaagtagttgttgcacagtgacagttgaaatgaactgtttccattttgccatttggtgaacagatctctttaagggtgggttggaaatgggaagaattaaagcacaaaaaaacaaacaaacaaaaaaaacaacaaaacaacaacaacaaaaaacccgctgggacagagatcaagcttgtaccctgagcct

SEQ ID NO: 66459 - DNA, 600 bp, Chicken  19866894334810_1
gcctctgtcctcagcacagacctggggagggaagcacaacacggtacggataaacgctgtgtgcagggctgaattcttcccatggagctcccagacacataaatcagcctcgttcctgttggaatgaatggcagaacattgctacaggcaatcttacatcgagcaggagacccggagctccccgcagagcatggagaggaaggtcaggcttcctccccccgacctgcatcctgcctgaggggtctcgtgctcccaacacagctgtgagctgctgaacgtgctgctccagagcagggctgyacccaggggacaaarcagcgcctggtgcacgaacgggggtatgggagatctctgcacgagatggaaatgtctgaagtgcaactgagcctccatcttattctgggatgggggaggagaaaacaacacagaacttttgcattgcatgtccccctgcaaagtgttcgtgcacggccttcctcacccaggggcagcttgggtgcagtgatgggggaagggccaggctctcagctccccttgctggatgctgggaagggctgcaagagaaagaacactgggagctggaaaaccttaggcttcatc

SEQ ID NO: 66460 - DNA, 600 bp, Chicken  19866894334810_2
acagacctggggagggaagcacaacacggtacggataaacgctgtgtgcagggctgaattcttcccatggagctcccagacacataaatcagcctcgttcctgttggaatgaatggcagaacattgctacaggcaatcttacatcgagcaggagacccggagctccccgcagagcatggagaggaaggtcaggcttcctccccccgacctgcatcctgcctgaggggtctcgtgctcccaacacagctgtgagctgctgaacgtgctgctccagagcagggctgyacccaggggacaaarcagcgcctggtgcacgaacgggggtatgggagatctctgcacgagatggaaatgtctgaagtgcaactgagcctccatcttattctgggatgggggaggagaaaacaacacagaacttttgcattgcatgtccccctgcaaagtgttcgtgcacggccttcctcacccaggggcagcttgggtgcagtgatgggggaagggccaggctctcagctccccttgctggatgctgggaagggctgcaagagaaagaacactgggagctggaaaaccttaggcttcatccaagccttggtcttt

SEQ ID NO: 66461 - DNA, 599 bp, Chicken  19866894334812_1
  misc_feature (1)..(13): n is any nucleotide
nnnnnnnnnnnnnggggaatgaggtctaaaatcacccactgtgttgggccatagagtcaacaggtcaatgtagtcagtacctacagcctctgtacagtcaccatgctggagactggggttttgtcatgatggatggaattaaaatatcttttgaaagctcaccttttggcccctagaatggtgtaaactttttttttttttaaactggaaaaaattatagatgatgttattaaaattgaggaaagttccttttggcatgcaatactctactggtggaagtctccctggtctttctatttytttcttcctggtaacctttctaaaggcctggattgtattttacgggaaatgtcagtggstggaaatgtcactgtcagagcctgttgtaagaagtagagcttttctccatttcattttccctcgcctyttgtcatgctgtatgcaggtgtgtggagtggctgcctgaagggagacagtcatttgggcactttgtggtggggagcagagagagagcaggccaaattcttttcagtttgctaagaataggaaagggccaagtcccagagcagtgaattttggactcagttgagggaatttgc

SEQ ID NO: 66462 - DNA, 600 bp, Chicken  19866894334812_2
acaggtcaatgtagtcagtacctacagcctctgtacagtcaccatgctggagactggggttttgtcatgatggatggaattaaaatatcttttgaaagctcaccttttggcccctagaatggtgtaaactttttttttttttaaactggaaaaaattatagatgatgttattaaaattgaggaaagttccttttggcatgcaatactctactggtggaagtctccctggtctttctatttytttcttcctggtaacctttctaaaggcctggattgtattttacgggaaatgtcagtggstggaaatgtcactgtcagagcctgttgtaagaagtagagcttttctccatttcattttccctcgcctyttgtcatgctgtatgcaggtgtgtggagtggctgcctgaagggagacagtcatttgggcactttgtggtggggagcagagagagagcaggccaaattcttttcagtttgctaagaataggaaagggccaagtcccagagcagtgaattttggactcagttgagggaatttgcttaaatccacacttcacaaagaattggtcaccagcactgcagtttacgtggtggaggaac

SEQ ID NO: 66463 - DNA, 600 bp, Chicken  19866894334812_3
gatggatggaattaaaatatcttttgaaagctcaccttttggcccctagaatggtgtaaactttttttttttttaaactggaaaaaattatagatgatgttattaaaattgaggaaagttccttttggcatgcaatactctactggtggaagtctccctggtctttctatttytttcttcctggtaacctttctaaaggcctggattgtattttacgggaaatgtcagtggstggaaatgtcactgtcagagcctgttgtaagaagtagagcttttctccatttcattttccctcgcctyttgtcatgctgtatgcaggtgtgtggagtggctgcctgaagggagacagtcatttgggcactttgtggtggggagcagagagagagcaggccaaattcttttcagtttgctaagaataggaaagggccaagtcccagagcagtgaattttggactcagttgagggaatttgcttaaatccacacttcacaaagaattggtcaccagcactgcagtttacgtggtggaggaactcggaggcagtggaagtcaaaggtatggatgtgcaggggaacaataagcatgaagmacatctgaacag

SEQ ID NO: 66464 - DNA, 350 bp, Chicken  19866894334812_4
ttccctcgcctyttgtcatgctgtatgcaggtgtgtggagtggctgcctgaagggagacagtcatttgggcactttgtggtggggagcagagagagagcaggccaaattcttttcagtttgctaagaataggaaagggccaagtcccagagcagtgaattttggactcagttgagggaatttgcttaaatccacacttcacaaagaattggtcaccagcactgcagtttacgtggtggaggaactcggaggcagtggaagtcaaaggtatggatgtgcaggggaacaataagcatgaagmacatctgaacagtagagacctgttctactctataactacaaatctctgtg

SEQ ID NO: 66465 - DNA, 599 bp, Chicken  19866894334819_1
  misc_feature (1)..(93): n is any nucleotide
nnnnnnnnnnnnnnnnnnnnnnnnnnnnnnnnnnnnnnnnnnnnnnnnnnnnnnnnnnnnnnnnnnnnnnnnnnnnnnnnnnnnnnnnnnnnntgccatccctcatctcagtagggtcacacctattttcaacaggcagttgttcagacccatggcatttgggcacagtcccaccaggttatcagcacgaagttaccaacaccaccgaggactctgctgagatctgcaaacccgttgtttccatgccctgcatttcaaggatccatttccagctctcttactactccaaacaaacactckgtgcatgtgtcttgtattaaaaaaaatccaagtcccttcccaaacgcaacttctgaaacagattttaaagcgttatgacagacaacagaagagtccctgcaatcacctgcattatagctttatctctgccgagacgtcggctttgacatgctaagactgcactttaaaagatcacctctttacaagaaccacctgtctaaagcgacagctttttcctttaacctcggaacatgtttttaaggttagcataccactaaaataaataaataaataggtggccccccctcctccctttccca

SEQ ID NO: 66466 - DNA, 495 bp, Chicken  19866894334819_2
atcacctgcattatagctttatctctgccgagacgtcggctttgacatgctaagactgcactttaaaagatcacctctttacaagaaccacctgtctaaagcgacagctttttcctttaacctcggaacatgtttttaaggttagcataccactaaaataaataaataaataggtggccccccctcctccctttcccactgattcttaacaaatccaggccaagacgtcccctccgtacaacaaaagcgttttgtgtgtttctcttttcaacccttgtgctttctaatttaagtcgcatygtgctttaccattttggttggtgctatgtcacagcagcagcatgctttatattgaagcgtatgttcgggtttggtgtattttcacctgcatcttgtccaaatcccacaatgatttagtgtcttggcactctgacagcaaggaatcaactcaagtaaaagaaaaaaaaatccttaaaaaaaaccatttaaaacata

SEQ ID NO: 66467 - DNA, 600 bp, Chicken  19866894334825_1
tgggatgttttcacatctcaccgtattctggtatttctaaagagtggtcctagcaaatctgggccaggagcattttggcttttgttttccaaattctacctgcagttctgctcgggaaagatgtttctccatctctctccttgggcgttgcgtagctctgagtgctgtgaagtgatcgcaagtgcaaagccaggtcacacctcactgaaggcagaactgaggaaagcacttacgtaaatgttctaatccatccctgttcagaaaagcacttatggttaatttggggctcgtacagaaatkacattattttcaacaggtcttctatgaacgtatttaagcccctgtgtcaaatggaaatgttttcctaatgaaggacctggctgccagtgttttttgtacatatgacctgtgaatgccttgggaattcgaggtgcttcataaatattaagaccccaaaggtttgtttgtagcagacgaaagccttaattctgcagatctgcgtgcctgtgcacagttttgcctatgtgaatctctccactgtgattcttcatagggtaaaactaaacctcctcactggcacatctgggcaaaatcagtccc

SEQ ID NO: 66468 - DNA, 600 bp, Chicken  19866894334829_1
gccacccgtgtacctacagcagtctgcctgacgtgacaggctgtatcttcatgatcagaccctgctatgactgtggagcctagccagccactgagctgctgatggaacagataatgggaccagcagtgctttggagtagaggatgggacacaagaagcttgttccctgggaactcccctcttcctatcactgctcccagggaggtgcaggttctccatgtgccaccaatcccacatggctgctgatcctggcaggcctcgagacagctgactgctgtctgcttggagtttgatgtcaggsaagggctggctggctggctgcaggccggtatcacctcactccgtgccacaccactgctactgaaaggtgcttaatgtcaaagctatgcaactcaggaggaaaaagatctttctggaacwttgcaggcagcaggtttggaggraaagcactcttggcccaaagacccacagctttaattgtctcctttcttatgctggcttgggagatggcacagttttcttccggaaggtgagtaaagccacttgcaggactgctgcaggagcttcccgtgcttcaatctaacccccgtgagttttagga

SEQ ID NO: 66469 - DNA, 600 bp, Chicken  19866894334829_2
ccagcagtgctttggagtagaggatgggacacaagaagcttgttccctgggaactcccctcttcctatcactgctcccagggaggtgcaggttctccatgtgccaccaatcccacatggctgctgatcctggcaggcctcgagacagctgactgctgtctgcttggagtttgatgtcaggsaagggctggctggctggctgcaggccggtatcacctcactccgtgccacaccactgctactgaaaggtgcttaatgtcaaagctatgcaactcaggaggaaaaagatctttctggaacwttgcaggcagcaggtttggaggraaagcactcttggcccaaagacccacagctttaattgtctcctttcttatgctggcttgggagatggcacagttttcttccggaaggtgagtaaagccacttgcaggactgctgcaggagcttcccgtgcttcaatctaacccccgtgagttttaggagctccctgaagcgaatgacagctactcgcagaaaacattccttgtatatcagtgcgtcccagaggcacagcaggaagacgattccctgaatcacccagcagcccagactggggacagag

SEQ ID NO: 66470 - DNA, 600 bp, Chicken  19866894334829_3
atgggacacaagaagcttgttccctgggaactcccctcttcctatcactgctcccagggaggtgcaggttctccatgtgccaccaatcccacatggctgctgatcctggcaggcctcgagacagctgactgctgtctgcttggagtttgatgtcaggsaagggctggctggctggctgcaggccggtatcacctcactccgtgccacaccactgctactgaaaggtgcttaatgtcaaagctatgcaactcaggaggaaaaagatctttctggaacwttgcaggcagcaggtttggaggraaagcactcttggcccaaagacccacagctttaattgtctcctttcttatgctggcttgggagatggcacagttttcttccggaaggtgagtaaagccacttgcaggactgctgcaggagcttcccgtgcttcaatctaacccccgtgagttttaggagctccctgaagcgaatgacagctactcgcagaaaacattccttgtatatcagtgcgtcccagaggcacagcaggaagacgattccctgaatcacccagcagcccagactggggacagagaccagctcctggaagtccgtcct

SEQ ID NO: 66471 - DNA, 566 bp, Chicken  19866894334831_1
agttcattattttccttctggtgtctcacagatgcagaggacacattattcctttcttcttttcaaagctttttcacacttacatattatgccttctattagctttctctaaataaccctattgctttcaatcattcctcctaagccatatttgcaatgtctcagatcacccttcttgccttcttctggattcttcccatttttttcacagcaataccattttccagtaaagactacatacacgatgacagaaagaacaattcatttcttacccaaaatactcttaagcaataataacaktcacgagtcaccttcagcttgtgaactgctgtagtctttagatacttcctcaataaatattaactgactgtcccaatccatagctcacacagtattttgctcaagtgtgctgaaagtatattttatccaagggaggaaaatgtagacatttttccaacctgcaaactgattctgaattctaacattcctgtaacttttctgtcttacagattcatttctgtaaacgggtctactggcacactcaatgatcaacttccttagcccca

SEQ ID NO: 66472 - DNA, 366 bp, Chicken  19866894334834_1
aaaactttgcacagctgattgaattcaagggcatcctaacatatgcacataaacaaatacatcacttgttttttaaaaaaggcatttagtaactaattatgtaggtttaattaaagaagatgtcacacaggtgtggtaaatctccctctgctggacaatcacgacatgactgtctggactctacaaaatgaccctcctggtgctcttttgcatttattgaattaaataggctgcaggtttcaaaagtcacttatctctctccttttctctttctgcttcttgttctcgtctaacaaaccytatgaaaaatgtctctctgaatactgtctatattttttttgaacttcttacgtttatattgaaatt

SEQ ID NO: 66473 - DNA, 600 bp, Chicken  19866894334837_1
ctgtcacagtgctccaggtttactcctttcaaaacatgaaaaagaattagtctttacaagttcatccaaaaagcgcagtagtgctggtcacttgcagcctctgagttgaagatgcacgttgttccttgcaggaaacctgttgatattttggggcatcaggaggggcaccaacaatgatcagctctatgcagcagtgtgcatgttgatgaacacttgttgctcaagtggggcttgttctgtcccagcaccccacaatcatggtcacacccagcctttgccaccgtaaacaaatagcatgaragttccgccaagctgactgggtacatggggaaaacagcargaaatcccagtagcagggagaataagcgtattcttgcctcttttgtgtaggagagaatcttctctgggaggagacacttgcaattatcttttaagatcattatgttacaatggaatttaggtttcagttaccagagatttaggcattgggaggatgttctcatcactgtctgagaggccctcagcacctacacttgcactgcagttcttcacccgtactggactggtgcatggtctcttccttttctgccctagaccttg

SEQ ID NO: 66474 - DNA, 600 bp, Chicken  19866894334837_2
aaagaattagtctttacaagttcatccaaaaagcgcagtagtgctggtcacttgcagcctctgagttgaagatgcacgttgttccttgcaggaaacctgttgatattttggggcatcaggaggggcaccaacaatgatcagctctatgcagcagtgtgcatgttgatgaacacttgttgctcaagtggggcttgttctgtcccagcaccccacaatcatggtcacacccagcctttgccaccgtaaacaaatagcatgaragttccgccaagctgactgggtacatggggaaaacagcargaaatcccagtagcagggagaataagcgtattcttgcctcttttgtgtaggagagaatcttctctgggaggagacacttgcaattatcttttaagatcattatgttacaatggaatttaggtttcagttaccagagatttaggcattgggaggatgttctcatcactgtctgagaggccctcagcacctacacttgcactgcagttcttcacccgtactggactggtgcatggtctcttccttttctgccctagaccttgtgttgctctctgaatgtggtaggacaattcctcttttccc

SEQ ID NO: 66475 - DNA, 600 bp, Chicken  19866894334839_1
ggtaatttccagtattggtgatgggaaaaacggtaggacaatgtttggtggaacaaatgaaactattcttccttcaacttctgatttacagagcctacctcttttttctttaaccacaaactaaaataagaccgagtgggaggcaaaaattcttctgaagtattaatctgacctacattaagaagaaaatgataggtgctagggggaaaggcagctgcctctggttgctctgagtttggtcagaatttttagtacaagaagtaatggtggaaaatcatgaaggatgcaactgcctatcasgatttataacatcttcttactaacttttctctacgctacaagtaggctgataactctttatttcatcagcagtaaagcaaaaaagtacattcgtccatgaggtaaacatctaacaacttgatttgaaaaccacaaragatttattaagggatgaactccgtaagctctttcattaataaagtatagcaaccaggaatatctttattggacaaaacccattccatgcctgttagtgtttctggacaagatgcaggattcagtatctcctgttagctgatttaaaacacaatggttgattga

SEQ ID NO: 66476 - DNA, 584 bp, Chicken  19866894334839_2
tgggaggcaaaaattcttctgaagtattaatctgacctacattaagaagaaaatgataggtgctagggggaaaggcagctgcctctggttgctctgagtttggtcagaatttttagtacaagaagtaatggtggaaaatcatgaaggatgcaactgcctatcasgatttataacatcttcttactaacttttctctacgctacaagtaggctgataactctttatttcatcagcagtaaagcaaaaaagtacattcgtccatgaggtaaacatctaacaacttgatttgaaaaccacaaragatttattaagggatgaactccgtaagctctttcattaataaagtatagcaaccaggaatatctttattggacaaaacccattccatgcctgttagtgtttctggacaagatgcaggattcagtatctcctgttagctgatttaaaacacaatggttgattgactgaatcaggataatgtcttgggataccaggtctctgaaaatacatcatatatttaataatgacaatatgtacttagcgctcgtgtgaactcccagcttaccttatgtatgatgcttccc

SEQ ID NO: 66477 - DNA, 600 bp, Chicken  19866894334841_1
agaaaataatgaaaacacattttgaaactccaatatattattaagtctgaaaaaaatattgtatcttgtagaataccagctttctactagcactgttaaagagttttgcagccatttgacttacggttgagatttattaatgattggagggtctaacactataaaataggtctgtttacagatatagccatatggaagaaatgtatgctgaaatataagaaaattgattttgagcttaaaaataactttcacagacaaatcctttgggtcagaaattatcacagaagtgaaattaggaayrgaagctgagacttagaagtagtaacttgcttgtgttatgctatctgataaatatacgtatatgtaatttgttaggtgtacttcacatatttttatttcttatattaggtttatgataattacagctgctttattctgcaactgtaattgcttgataagaaaggctttttctgtttatcagcttgctttatcagtttttcttttccccttagtaacagtagtagcagtattcaagactttctcctcagtaaaacaaacaaacaaaaaaacccacattttcactatgcacctcctgcaaat

SEQ ID NO: 66478 - DNA, 600 bp, Chicken  19866894334841_2
gaaaataatgaaaacacattttgaaactccaatatattattaagtctgaaaaaaatattgtatcttgtagaataccagctttctactagcactgttaaagagttttgcagccatttgacttacggttgagatttattaatgattggagggtctaacactataaaataggtctgtttacagatatagccatatggaagaaatgtatgctgaaatataagaaaattgattttgagcttaaaaataactttcacagacaaatcctttgggtcagaaattatcacagaagtgaaattaggaayrgaagctgagacttagaagtagtaacttgcttgtgttatgctatctgataaatatacgtatatgtaatttgttaggtgtacttcacatatttttatttcttatattaggtttatgataattacagctgctttattctgcaactgtaattgcttgataagaaaggctttttctgtttatcagcttgctttatcagtttttcttttccccttagtaacagtagtagcagtattcaagactttctcctcagtaaaacaaacaaacaaaaaaacccacattttcactatgcacctcctgcaaata

SEQ ID NO: 66479 - DNA, 600 bp, Chicken  19866894334842_1
ttaacggttaccaccattagctgacaatccccattttgtggtgtgacagcagtgcacagctatctgcaacacagcttgtctttcacatcgctgttgtcactgcagaaatgtaccacccactgcctctctgtgctcacatccactgtttggcctccatacacattcaacaagccttaatgaatgccaatgggtgcgattctttctgtatggaggaattcagtgacacaccattgcctcatttgcactgccatgtcagatagcattttgacagactgctcctttgctgccagctgtcacackgcaacaaaataaaatgaatattggcaggaaggtttaaactcccctgcaatgggttacttaaagctcactgtgttgctttccagccaactcgctgcccacaacaaccactgctccacccggtcagctgcatcccatccaacaccttgctcagtcttccaaaggtgtgtctgacatgacagaactgaaagctgagactggcgttatccatacagaccaaccttcatctgctgtgttttcctccttcttcccgtgtcccactctccaaccaagaagataaaggagaacaccacaccacctgca

SEQ ID NO: 66480 - DNA, 600 bp, Chicken  19866894334850_1
ggcaatattctaagccaaaaaaaggttaacagttgcagcaaattgttctcactttcacacatcttggcaaacaaaatcatacccttgcctttcaattgcttccagaacctcattcaataaaaaaagtcccccagaacaaagaaagttgagactttccaagtccagtgaaaccacaaaaatatttttgaagcgattagggaaaacacagccattgctttcaataatccaactgctctcctgctgacagacattagatggcactttggaattcagcggttagcagacgaagctgcagagcamctacttcagaggagagtgaagcagggaggtgaggcactgctggtgataaagatgagatattctgcaaaggcatcttggtgctcataggtgcatttccagcctgcccatgtgaaaatataaatggtacgtcattatgttttgaaagaacacatcgttttgttggaaagagtaaggtaactcctcctttagcagacaggatccgtctccgtgcctcagttccccttttacattttttaagtgactcctttgagaggtgcttttcaaactagatttgctgacatagatttaaacatttctcag

SEQ ID NO: 66481 - DNA, 600 bp, Chicken  19866894334852_1
tttcacagatgaaagtctgtgtgcgcgcatatatattgaaagatgatatagatttgtagaaacatctgtttcttttgaattgaccagcttctccctatttagacctgaactggatgcctgtgactctccagacaaatatccccagcttttccatgttatactggagatagaaatacagtctactgatagacaaacagagttaactcctccatgggagaacttcacaacaaaagacatcaatccaaccattctcttctcctctcatcaggagcatcaggacactcttgctttggcaggtgrgagctgcacaggtttactcacttgatttgcacacttacatgggtgtcaggctctgttttactttattttatttatttatttgtttgtttcggcgctctgtgctgcaggtaaaggtcccactgattcaccccaggataacatcaggaatgttggacagagtgcattcttctcatctctcagctggcaaggtacacagcattgcctctaagtcagattgcttagaatgagataaacagcttgtttctctctcccccctcccttgagcacggaggctgactgtagcatgccttgtgcactaga

SEQ ID NO: 66482 - DNA, 600 bp, Chicken  19866894334854_1
agcctttaataggctgaagccctctttttatcagttgcattcaagtgacctactgtcaagttcaaactgctgagctttttttttatttttaaatgtattttcttgttaaactttttgttagtttaaggttttttgcatggttaatgaggaatgcattgttttagttaaagctatacctccaacagaaatacaaacttgtttacagaaactattgcaagatgtactgtcgcaactacgaggcagtgcttcattatttccttgttgctgttcctctaaggtatgtatgtgcagattaaaagwtatttaattacaatcaacagcaataagaggtttaatgcaaaagaaatgcacacgcttaatatgaacagttggactagaccccctatcctaagcagatgcgtatactcttacaaggttacgtgagtacatggcaaaggttaaaggatgggttggactagaatagaatgtatgttggagccaaaatcactctgacattaaagtagttaaatttgctaaagcatgcctagtgcagtaagggaaaacctgttcagacttccaaactatttcattagttttcaagttcttacagcttgaggaagc

SEQ ID NO: 66483 - DNA, 600 bp, Chicken  19866894334855_1
aaacatataccagttagtgatacttaatctcttctttacatgctaggtttacacacatacagtttttgctaacatgggactaaaaaacagcagtattttaaagaaaattactgcataaatattctgcaatacacatcttgtctaggaaactaaagctgaaactcttactgaaacaattgtatcagtaagacctttgtctatgcaggcagccaaacctgtgctcagaactcaccatgtgttgacgagaggctcgttccatggaaacaggtggagtactaaaaagccccatcaaaatatgakaaatatattgagaaaatacgagaaaaatatactgyggaagtcactggctcggtcttgcagtctccctttaaattacaattgaagtattacccttctgaaagggatagtactgctataggcaatcagttgcaacttcagtgtgacacccagcatttatagtgaggaagtaaaggtagtcagaaacattaaaatgtaacaagtagcacagtttttctgtgctacataccagtttctagcacagcaattgtcactctcggtttcacaggcaatatcctttcactaatattatgttccagtttc

SEQ ID NO: 66484 - DNA, 600 bp, Chicken  19866894334855_2
ttacatgctaggtttacacacatacagtttttgctaacatgggactaaaaaacagcagtattttaaagaaaattactgcataaatattctgcaatacacatcttgtctaggaaactaaagctgaaactcttactgaaacaattgtatcagtaagacctttgtctatgcaggcagccaaacctgtgctcagaactcaccatgtgttgacgagaggctcgttccatggaaacaggtggagtactaaaaagccccatcaaaatatgakaaatatattgagaaaatacgagaaaaatatactgyggaagtcactggctcggtcttgcagtctccctttaaattacaattgaagtattacccttctgaaagggatagtactgctataggcaatcagttgcaacttcagtgtgacacccagcatttatagtgaggaagtaaaggtagtcagaaacattaaaatgtaacaagtagcacagtttttctgtgctacataccagtttctagcacagcaattgtcactctcggtttcacaggcaatatcctttcactaatattatgttccagtttcccacattacatgcctcagtttgacaaagtttgcta

SEQ ID NO: 66485 - DNA, 600 bp, Chicken  19866894334869_1
tgcactgaacacctatttgcacaacaaagccatgagatatgctgttccatggttttagctcatttgtactacaataatgcatataactccctgagcttgctccttttaatgtgtcaatacttactttcaccttctgccttggcataccatcatattttgttagtaggatcaaaaatattggcttattgagcctcggtatctgcaccaagtgtatatctcagttttccttgaagagcatacatatgtatgaacgtattaattgactgcatttttcaccttgaagaaaaatgagaatttatrgagctaactaagaataatagatcaaaacttttccattagcatactttatataaaatttttcacatttcccatcaactgctcatcagttcattgaaaacattatgagatataaaatgtttaatctgttaaaaatatacttctatatttgttggagatattttctaaaaccccacctatagaaacagcgcagtgatccccggratcttttacaaagtgatatactcattatgcagcacatacatattaatgtataatgaaatgggtcaactgtgggagatgcatcttatttaatctgcctca

SEQ ID NO: 66486 - DNA, 600 bp, Chicken  19866894334869_2
gcaccaagtgtatatctcagttttccttgaagagcatacatatgtatgaacgtattaattgactgcatttttcaccttgaagaaaaatgagaatttatrgagctaactaagaataatagatcaaaacttttccattagcatactttatataaaatttttcacatttcccatcaactgctcatcagttcattgaaaacattatgagatataaaatgtttaatctgttaaaaatatacttctatatttgttggagatattttctaaaaccccacctatagaaacagcgcagtgatccccggratcttttacaaagtgatatactcattatgcagcacatacatattaatgtataatgaaatgggtcaactgtgggagatgcatcttatttaatctgcctcatgctcagtaacaggtctagaaagtccatctctttgcaagtgacaagtcagaatgcataggtataggaaaatatttgcagcataaaaagcagatttttcctgtcagtgggtggcaggaacctcaatcttcaaagctaaatagtgcacctaaatatgatgagacacaatgcaaatagctgcaagtgtttgaaaaaaacttcct

SEQ ID NO: 66487 - DNA, 599 bp, Chicken  19866894334875_1
  misc_feature (1)..(7): n is any nucleotide
nnnnnnnttttcattaacttttataatattttcatcttttcatttttttatagcttcttttaccaggccttactttagtagcaggatgtatatttgttcacagtaaagtaaagtgcaccttcatccttcaacatttatacccctcatttcattttacttagggatagtcttaaaagtttaaagtcaatgttcacatgttaactattggaataatatactagtttgctctgtgatgtttaccagtgaatttgtaacttttaacatttatttcaatttcttttacaaccctgtctgtagttwaaagaaaagaatgaacatatctaatatggttttaaacatatctaaaaagtagrcatatgattctggagctgactgcaactcacttgtaagagcaatctgtaatatttttgcatgaaaaaaacaagctggttggctttcagttgctaccaaaatatatctgtatgtccatgtcattaaacaaaccttatacataagacaatacatagcaatccagtatttaactcttagctgctgaaaaaaatagtaataagatcaaataacagacattagaaacagacatattttaaacaatcatgaca

SEQ ID NO: 66488 - DNA, 600 bp, Chicken  19866894334875_2
cttcttttaccaggccttactttagtagcaggatgtatatttgttcacagtaaagtaaagtgcaccttcatccttcaacatttatacccctcatttcattttacttagggatagtcttaaaagtttaaagtcaatgttcacatgttaactattggaataatatactagtttgctctgtgatgtttaccagtgaatttgtaacttttaacatttatttcaatttcttttacaaccctgtctgtagttwaaagaaaagaatgaacatatctaatatggttttaaacatatctaaaaagtagrcatatgattctggagctgactgcaactcacttgtaagagcaatctgtaatatttttgcatgaaaaaaacaagctggttggctttcagttgctaccaaaatatatctgtatgtccatgtcattaaacaaaccttatacataagacaatacatagcaatccagtatttaactcttagctgctgaaaaaaatagtaataagatcaaataacagacattagaaacagacatattttaaacaatcatgacaatcatcaaatttttgtatttgctatcagagcaaatttaaaacgtaagaacttcc

SEQ ID NO: 66489 - DNA, 600 bp, Chicken  19866894334892_1
tctttaagtcatggagaaaagggaataaagcaatttcctctttgccacctgtcacaccagggtttttattaagaagggttgttattctttggtgcaaatctcaggagcctgttagcagctttctctgatttccagccaccagcaattcactgtggtacggctgctagaggtccagctcaccagcagctctcactgagcaagcagagacatctctgatgccatcaggcaatcgatcttccccctcatggccaccgaggtcccttctggttgctctgagctatcagtgatgagagcagacawcctttgagaactctggtgcaatttcgtaatgtattcagctggaaaaagaaaagggagcactgggacagccacaccaggccctgtcagcactgaaagtgacactgaaggacatctcaagaggaatggaaaggtttgtctcagttccatctgtcctttagcagctgctgacagaagggcagcacagttctccaagccgtgaaggaacaaagaggaaggatctggcaccacttagtcaagcacagaattcagggcagattatccaacctccaagtgccagctcttactgtcttcccagcgtcc

SEQ ID NO: 66490 - DNA, 600 bp, Chicken  19866894334895_1
gagtacagtacttctttaaataaggttttcatgagctctgcagacctcgctaaaatcagacgggctgcactgagcatcttggggcttaaccattccatgtgtggtagactgtccatgataaaggtatgtaagcaagcagagaaaaagtgagaaacataaaatcatctagcttggtgaagaccttcaagatcatcaagttcaaccatcaacctgagctatggagtccaccactaagctattctcctcggtgcaaagttcacatctctccaagggtggggactccaccacttccatggacakccaattccaatgcttgaccatcctctccatgaagaaactcttcataatacccaatcaaaacctcctgtggcataacttgaaaccacatattcacatcctatcacttgtcatatgagaagagaatgatttcctgcaacctcctttgaggtacttatagacagagatgaggtcttccatcagcctcctcttctgcagactaaataaccctaatactattggtaattcctcataaatctagttttcatcagccttgttgctcctcattgtaaacgcctaagtaaaaatccttctttttgtgaa

SEQ ID NO: 66491 - DNA, 600 bp, Chicken  19866894334898_1
ctggcggcgcagcagcgggcacggcgcctggcactgctgcgggagctggagatgagctggtacctgcgtggctgtgagctctcacatgagcacaccgtcgcctacaccaccggcatgccgcacaggtagggcagcccgcggcgcgacagcggcactgctcgtagcagtgatgggaactcacagcagcaatagccatgcagacatcggcaatgatagctgcagccataacaatattgataacaactgctatagccatagcaacacttatgtcaactgtgataagaatagaaggattttggytctgtgattctgacatttccaactgtggggggcttgttatccctggtctatggtgaactgaaatcactgaccttttcacagccttgtttcccagctcccaaatttctcacccaaacccacctgcgataatttgggcccgtttctggtagctgcagtttccaggtggctgtggttgcatctgagtggggctcagaagcggctgcagctgtgtgaggtggtgtgggtggcaggggaacatgaaaggaaagtggtataaaatcacgagaggtggagaaagcagcaattcagtgtgcagcaaag

SEQ ID NO: 66492 - DNA, 600 bp, Chicken  19866894334899_1
tactacggtattaaccagtaatttgaaaaggcaagaacttgctagaatagagactttggtttgcagtttaaaaagggggagaggaagtgctctctggctcagcggatgaagggcagcagtgagtgaatcgaagctgactattgaggggtgggagtgtggcatcagatcaactactgcacagtttttatgtggaatataatcaaaattgcttgtagtcatggagagaattagtcaagtagaactaacgcatactggaagaagtatgttttctattgctgtctcgagaggaaagtggtgttyagatggagtgaataggcctttgtttcaccggtaaatacagaaccaagcagatctaatatgaaactatagtcagcacacagactaatcttgctctgtgggtaaattacatgtgaatgctaatacaaatgtattcaagtggcagactcacacccttcataatcagcaatggccgggatgttaacattacctctttcaccacaattcaggtctttacttaatagatattttgattacatatcttctgctttaccactatatttggtgatcagctctctggtctgtttttccctcggccctggt

SEQ ID NO: 66493 - DNA, 600 bp, Chicken  19866894334901_1
ttagtggcccatggttcctggagaaacccgaggtggaaccatgtgcttggttttgtctatttaattatcaaaactgggatttttttatactggtatcactactgctactagtgatagggttttgttttgttgggtttgttttgttttgtttccttttagggtgtaattgattgtaaagtaaactagaattttgccaggaattaatttggccaagtgttctcagaagtgcagaacactaccggtgaaaaccacagactagtctggagagatgttgttcatggtcaggggaaagatatttcygcaaagcagacaaaggctgcatcaaactacttgcatggaatatcacactgagaaagaaaagcacctgttgcagagtagagactccgatttgtgagactgaataccttaggtactcttctcttgcctggctgagttgtgtgcrtgcactttgagcttgaattctctcacagtcaaatctgaaattcatttgtttcaagtggttacatgtacaaccaaggaagtgcccaggcatctcaagtgcttgaagaagctcgcaacagaaataaaacaaaccaacaaaaaaagctgtaaagactgata

SEQ ID NO: 66494 - DNA, 600 bp, Chicken  19866894334901_2
gttttgtttccttttagggtgtaattgattgtaaagtaaactagaattttgccaggaattaatttggccaagtgttctcagaagtgcagaacactaccggtgaaaaccacagactagtctggagagatgttgttcatggtcaggggaaagatatttcygcaaagcagacaaaggctgcatcaaactacttgcatggaatatcacactgagaaagaaaagcacctgttgcagagtagagactccgatttgtgagactgaataccttaggtactcttctcttgcctggctgagttgtgtgcrtgcactttgagcttgaattctctcacagtcaaatctgaaattcatttgtttcaagtggttacatgtacaaccaaggaagtgcccaggcatctcaagtgcttgaagaagctcgcaacagaaataaaacaaaccaacaaaaaaagctgtaaagactgataaagagattaactgaacaaactgaatatcttaccatatttgtatttcccattcaacccatactatagcaaacaataccttgtagctggcacttggaagaaaaatgcatagacaagaaatacggaagtgaaaccacaagactgt

SEQ ID NO: 66495 - DNA, 600 bp, Chicken  19866894334904_1
tagtagacacttttcattaagaaggaagagaagagcagctctgtaaagagatcacatcgtttgcataactatgttgtaaatcagcctctaacagtggtctttctgctgaaccatgataagccaaagcagcacctacatctggtaggaaaggaatcactgagataagatcaacctattgcaaagattcttctgcatactgccagtgtgccatcaaagctgagatgtgaccccctgtcttgatttgacttacccttacacaaggaaattggaatcatccagttgtgacacatggaagaattytctattgtatttctactcgtgctcctaccttcaggtactgctatgtgaaactgctgaagtgcaatgtttgctaggaaggagctgatatctctaagacttgagagaatcttcaaatacatattggacatagtgagtgagcttgtttccattttggagtacgatgggaagctctggtgacttgaaattttatgtaaatttttggtcatgaagaaaatcataaggcctctatatagtacttatccagtgtccaattctttctcaatgtaccttgctatctctcatatgcattattcaaatagt

SEQ ID NO: 66496 - DNA, 586 bp, Chicken  19866894334906_1
ataaaatcaccagttgccatccaagccatgctgactggcagcgctggatggggccattggagcttcggctgctgtgtgatctgcagttctttggcttttgtggagcgtggctctgtatcagctcctgatgctgcacaacaactcttaaacaactgagtcaccccttgtgttctgatctccatcctctgggtctgcatttgcacgtgtgctttgtaatctctgttggcaatattacaatttaagccagataggaagaagcataatgataattcctaaagtccagtaccattctgtaatggyttttggaattgtagaacttacatgagtaagtgaatactttttcctgttatttactgaagtaccaaaggctgcctgaaatttgtgcttgcaagaaaacattgctttatttgccagctgttgttttcaataatcaatataatatgctgcccaatcagttctgttcagtaaaatgtgaacaaaattcaagcatttctaaatgagaagatgtagttaagctgctttttttggcacaaccagctcctctaagaggtaggacttggcacctgatcgcataggtgggatggtg

SEQ ID NO: 66497 - DNA, 599 bp, Chicken  19866894334926_1
  misc_feature (1)..(229): n is any nucleotide
nnnnnnnnnnnnnnnnnnnnnnnnnnnnnnnnnnnnnnnnnnnnnnnnnnnnnnnnnnnnnnnnnnnnnnnnnnnnnnnnnnnnnnnnnnnnnnnnnnnnnnnnnnnnnnnnnnnnnnnnnnnnnnnnnnnnnnnnnnnnnnnnnnnnnnnnnnnnnnnnnnnnnnnnnnnnnnnnnnnnnnnnnnnnnnnnnnnnnnnnnnnnnnnnnnnnnnnnnnnnnnnnnnnnncagcttgaagcagtgatggagcacctggtgggaaggcagggctaacccagaggagctcagctgtgtgcaaygtactgagtaatggaagggctggagccaggatccaccccttcccagacctcatttaagggttggcagtggaggaaagggcatcttactggagatccctgcgtacytgaggccttcaaaggtaagcaaagtttcttctttagtttttgtgcctgtggctgctgtatttgggcttgtcttctattgttgtagccagagactttgccaccctgctattattgctgtgctgtccatcgcatcatagcattacagcagtatttgtggtctatgtggccctgtgccactgaataactaactgtgg

SEQ ID NO: 66498 - DNA, 599 bp, Chicken  19866894334926_2
  misc_feature (1)..(124): n is any nucleotide
nnnnnnnnnnnnnnnnnnnnnnnnnnnnnnnnnnnnnnnnnnnnnnnnnnnnnnnnnnnnnnnnnnnnnnnnnnnnnnnnnnnnnnnnnnnnnnnnnnnnnnnnnnnnnnnnnnnnnnnnnnnncagcttgaagcagtgatggagcacctggtgggaaggcagggctaacccagaggagctcagctgtgtgcaaygtactgagtaatggaagggctggagccaggatccaccccttcccagacctcatttaagggttggcagtggaggaaagggcatcttactggagatccctgcgtacytgaggccttcaaaggtaagcaaagtttcttctttagtttttgtgcctgtggctgctgtatttgggcttgtcttctattgttgtagccagagactttgccaccctgctattattgctgtgctgtccatcgcatcatagcattacagcagtatttgtggtctatgtggccctgtgccactgaataactaactgtggattattgcatgctgtagctactgaggatgtatcttggcaggatgggttaaagctggggctttgtaagtgaatctcgccctgctcctaagacggtgttttctctgt

SEQ ID NO: 66499 - DNA, 600 bp, Chicken  19866894334947_1
atgggtaagctaggatgagttatcttgtgtgttcactgaatatttcatgatgaaaggtggaatttttgccccagtgaagtaggagtttcaaaattaacttcagtggaagttccagaaaagcctttttgttctatatccttaatagtgtttttctaatataaaaaatatctactgtcataccagacagaaaatacaggatttagctgtccaaaagatcacttccaaaacatattttcagcaatcaggtgagctcaacactcacttgagactatttaattttttggtttacatcccatcttycacatttgaacatctgcctgcttgacgggccaaatcagaatgcaccaatgttcagaataccacaacttgggctttctagttgggacagctaaagatggttcaaaataaggtgatgaaagttttgggtttttttttgtgagtatgatcgtaggcattcctaggaagtcattagaaacatgttagtgataaatgtaaatcaacaaaaattgcacttaatggagtgaacattcatctctggcagaaacataagccatctgtttgtatagtattaatcttacctgtattctatcaagaaggtat

SEQ ID NO: 66500 - DNA, 599 bp, Chicken  19866894334958_1
  misc_feature (1)..(92): n is any nucleotide
nnnnnnnnnnnnnnnnnnnnnnnnnnnnnnnnnnnnnnnnnnnnnnnnnnnnnnnnnnnnnnnnnnnnnnnnnnnnnnnnnnnnnnnnnnnnagcacagggtaacaacattgatttctctaagaaacctttctcagtgagcacatagttcctttttccaagactaatactttaaagttagaaaaaataaaaacttggtcattcaaaatattttcccaccaaaaccatgtggaaagtgaccttaagatagtaaggaataaggctacatattgttgccagttgtgccagaatagaatgagtrtaaagtaggtgtaaaatgacatgtctagtttggtagcattttatatccactttgcatatattttgcactggcagagaaagacatatgaattgaaagccaagaatgaattgaggctagtatatctaaacaactttagttgaagcttagagaaaatttcatctgtagatcttagaagtctttttaaaaagtttaaatccctattccccaatcttttatgcactccacttgaaagacagattgatttgtattatgaagactatatgaaagcaatattgtaatttcttctctttcttatctga

SEQ ID NO: 66501 - DNA, 600 bp, Chicken  19866894334964_1
ttgtagagatacagtgatcacgttacgatggatttctcaagtaacaaccttcgtagcttgatcacggatatccctatgacttgagaaacagcagggttgaacttatgtcttttgtttcctctttttacgctcttttcctttcctgtcgactctgcatgtgttgtaatagaagggtgtggaagtttcttgtatctgctactaatttcagtcctttggtcatccaaaggagtcatatctaattaggactcttttaagattattgattgcatccttaaaaaaaatcaatccattttaacatayatatattcaggattcccctgttacagtccaatatcattcctcacaagcagcagcaacactgaattcttcttccttccctttttggatggcaaaaggacccyaaaattgaaggtcatgaaatcagaatcaaaattgtaagacatgatttcttgccgcagagtccaatttcaggctgttagaccayrcamacccaggtttttgattacaaatgttctggttttagctcagctgtatgaattcctggcagcagtttggtccaccagccaactgaactgttggcygtgtctagcagctgtctgg

SEQ ID NO: 66502 - DNA, 600 bp, Chicken  19866894334964_2
cttatgtcttttgtttcctctttttacgctcttttcctttcctgtcgactctgcatgtgttgtaatagaagggtgtggaagtttcttgtatctgctactaatttcagtcctttggtcatccaaaggagtcatatctaattaggactcttttaagattattgattgcatccttaaaaaaaatcaatccattttaacatayatatattcaggattcccctgttacagtccaatatcattcctcacaagcagcagcaacactgaattcttcttccttccctttttggatggcaaaaggacccyaaaattgaaggtcatgaaatcagaatcaaaattgtaagacatgatttcttgccgcagagtccaatttcaggctgttagaccayrcamacccaggtttttgattacaaatgttctggttttagctcagctgtatgaattcctggcagcagtttggtccaccagccaactgaactgttggcygtgtctagcagctgtctggttagacttgtgggaaggagaactgcaagcatcagcaaacacagcccatttagttaaatgaatatgcctgctgcatgctggtgggcaacagctggaagcagc

SEQ ID NO: 66503 - DNA, 600 bp, Chicken  19866894334964_3
tcttgtatctgctactaatttcagtcctttggtcatccaaaggagtcatatctaattaggactcttttaagattattgattgcatccttaaaaaaaatcaatccattttaacatayatatattcaggattcccctgttacagtccaatatcattcctcacaagcagcagcaacactgaattcttcttccttccctttttggatggcaaaaggacccyaaaattgaaggtcatgaaatcagaatcaaaattgtaagacatgatttcttgccgcagagtccaatttcaggctgttagaccayrcamacccaggtttttgattacaaatgttctggttttagctcagctgtatgaattcctggcagcagtttggtccaccagccaactgaactgttggcygtgtctagcagctgtctggttagacttgtgggaaggagaactgcaagcatcagcaaacacagcccatttagttaaatgaatatgcctgctgcatgctggtgggcaacagctggaagcagccgtgtggagatgcccctcttatagaaagaacacttgtatttgtgtatactgggaatttcattatatcacagtagcaggaaatg

SEQ ID NO: 66504 - DNA, 600 bp, Chicken  19866894334964_4
cttgtatctgctactaatttcagtcctttggtcatccaaaggagtcatatctaattaggactcttttaagattattgattgcatccttaaaaaaaatcaatccattttaacatayatatattcaggattcccctgttacagtccaatatcattcctcacaagcagcagcaacactgaattcttcttccttccctttttggatggcaaaaggacccyaaaattgaaggtcatgaaatcagaatcaaaattgtaagacatgatttcttgccgcagagtccaatttcaggctgttagaccayrcamacccaggtttttgattacaaatgttctggttttagctcagctgtatgaattcctggcagcagtttggtccaccagccaactgaactgttggcygtgtctagcagctgtctggttagacttgtgggaaggagaactgcaagcatcagcaaacacagcccatttagttaaatgaatatgcctgctgcatgctggtgggcaacagctggaagcagccgtgtggagatgcccctcttatagaaagaacacttgtatttgtgtatactgggaatttcattatatcacagtagcaggaaatgc

SEQ ID NO: 66505 - DNA, 600 bp, Chicken  19866894334964_5
gtatctgctactaatttcagtcctttggtcatccaaaggagtcatatctaattaggactcttttaagattattgattgcatccttaaaaaaaatcaatccattttaacatayatatattcaggattcccctgttacagtccaatatcattcctcacaagcagcagcaacactgaattcttcttccttccctttttggatggcaaaaggacccyaaaattgaaggtcatgaaatcagaatcaaaattgtaagacatgatttcttgccgcagagtccaatttcaggctgttagaccayrcamacccaggtttttgattacaaatgttctggttttagctcagctgtatgaattcctggcagcagtttggtccaccagccaactgaactgttggcygtgtctagcagctgtctggttagacttgtgggaaggagaactgcaagcatcagcaaacacagcccatttagttaaatgaatatgcctgctgcatgctggtgggcaacagctggaagcagccgtgtggagatgcccctcttatagaaagaacacttgtatttgtgtatactgggaatttcattatatcacagtagcaggaaatgcttc

SEQ ID NO: 66506 - DNA, 600 bp, Chicken  19866894334964_6
tcaatccattttaacatayatatattcaggattcccctgttacagtccaatatcattcctcacaagcagcagcaacactgaattcttcttccttccctttttggatggcaaaaggacccyaaaattgaaggtcatgaaatcagaatcaaaattgtaagacatgatttcttgccgcagagtccaatttcaggctgttagaccayrcamacccaggtttttgattacaaatgttctggttttagctcagctgtatgaattcctggcagcagtttggtccaccagccaactgaactgttggcygtgtctagcagctgtctggttagacttgtgggaaggagaactgcaagcatcagcaaacacagcccatttagttaaatgaatatgcctgctgcatgctggtgggcaacagctggaagcagccgtgtggagatgcccctcttatagaaagaacacttgtatttgtgtatactgggaatttcattatatcacagtagcaggaaatgcttccttgctttggacagcatcaaaaatgtgaaatgtaagtaaagagtttttaaaatgtttagactgaattctgttcctttgtagcaatgtggaccc

SEQ ID NO: 66507 - DNA, 600 bp, Chicken  19866894334964_7
ccatttagttaaatgaatatgcctgctgcatgctggtgggcaacagctggaagcagccgtgtggagatgcccctcttatagaaagaacacttgtatttgtgtatactgggaatttcattatatcacagtagcaggaaatgcttccttgctttggacagcatcaaaaatgtgaaatgtaagtaaagagtttttaaaatgtttagactgaattctgttcctttgtagcaatgtggaccccaaataacttttgaaatctggtaagtagtggaataatgccagtctttgtaacgagctcagaamtgaaatgaacagaagggataaatgagaagcataaccattttgaagaattgagtattttgtaggggaagtagtttaaattgctgcttggagctggctgagtgctaggaagtgttcagcctgtgggattcctgggctgctgaggaggcatctctcttgggtggcagcaaggagaggcagtgcagaggggaagggaattgggagcacagccgaggagtacgcttgtggaatgggctgaaggmtcacggtgtgcttaactgctgaacagctggggctctgctgagactgaggaatgtgaggata

SEQ ID NO: 66508 - DNA, 600 bp, Chicken  19866894334964_8
aataacttttgaaatctggtaagtagtggaataatgccagtctttgtaacgagctcagaamtgaaatgaacagaagggataaatgagaagcataaccattttgaagaattgagtattttgtaggggaagtagtttaaattgctgcttggagctggctgagtgctaggaagtgttcagcctgtgggattcctgggctgctgaggaggcatctctcttgggtggcagcaaggagaggcagtgcagaggggaagggaattgggagcacagccgaggagtacgcttgtggaatgggctgaaggmtcacggtgtgcttaactgctgaacagctggggctctgctgagactgaggaatgtgaggataaaaggggcacattgaacttctgtacctctgctttgcccccttcccacatgctccatgtgctggagagtttgctgcttcctggtcatgcattggcaggaagggctgaatctgtgtgttgagggagctttgcacagctgtagctttcaaagggagggagaacgtgatgatggcagtgttttctgtcttctgctcagttcatcctttgataagaatttgtcttcctcctttcataagacttt

SEQ ID NO: 66509 - DNA, 599 bp, Chicken  19866894334965_1
  misc_feature (1)..(7): n is any nucleotide
nnnnnnngagaggcagtgcagaggggaagggaattgggagcacagccgaaggagtacgcttgtggaatgggctgaaggctcacggtgtgcttaactgctgaacagctgggctctgctgagactgaggaatgtgaggataaaaggggcacattgaacttctgtacctctgctttgcccccttcccacatgctccatgtgctggagagtttgctgcttcctggtcatgcattggcaggaagggctgaatctgtgtgttgagggagctttgcacagctgtagctttcaaagggagggagaacrtgctcatggcagtgttttctgtcttctgctcagttcatcctttgataagaatttgtcttcctcctttcataagactttccgtgcttcggaaatctaatagggtaaactgactctgatgtggggtgagagaagcccatggaaaggatagtgctcccctggcagggtgtttgatgtcacacgaggmggggtggtaccctcagcttggcsccgtagcacttaaacaacttttcacattccttcttatgcatctctgttcatgcagtgctcctcacactgtgtgcaacccacggggaactgca

SEQ ID NO: 66510 - DNA, 600 bp, Chicken  19866894334965_2
acatgctccatgtgctggagagtttgctgcttcctggtcatgcattggcaggaagggctgaatctgtgtgttgagggagctttgcacagctgtagctttcaaagggagggagaacrtgctcatggcagtgttttctgtcttctgctcagttcatcctttgataagaatttgtcttcctcctttcataagactttccgtgcttcggaaatctaatagggtaaactgactctgatgtggggtgagagaagcccatggaaaggatagtgctcccctggcagggtgtttgatgtcacacgaggmggggtggtaccctcagcttggcsccgtagcacttaaacaacttttcacattccttcttatgcatctctgttcatgcagtgctcctcacactgtgtgcaacccacggggaactgcattcagcctttgccttgggaatttaactctgcaccaggcagtgaggagcactgagcagccccacttgtccctcctttctttacctccctgagcttgttctgccctgtctccccatggcaacttcccacatattctccatcctacctgtctgggaagaagcccacgtgcagcaaacagtgtctctgt

SEQ ID NO: 66511 - DNA, 600 bp, Chicken  19866894334965_3
ttgctgcttcctggtcatgcattggcaggaagggctgaatctgtgtgttgagggagctttgcacagctgtagctttcaaagggagggagaacrtgctcatggcagtgttttctgtcttctgctcagttcatcctttgataagaatttgtcttcctcctttcataagactttccgtgcttcggaaatctaatagggtaaactgactctgatgtggggtgagagaagcccatggaaaggatagtgctcccctggcagggtgtttgatgtcacacgaggmggggtggtaccctcagcttggcsccgtagcacttaaacaacttttcacattccttcttatgcatctctgttcatgcagtgctcctcacactgtgtgcaacccacggggaactgcattcagcctttgccttgggaatttaactctgcaccaggcagtgaggagcactgagcagccccacttgtccctcctttctttacctccctgagcttgttctgccctgtctccccatggcaacttcccacatattctccatcctacctgtctgggaagaagcccacgtgcagcaaacagtgtctctgtttcaactattttttaatttgagg

SEQ ID NO: 66512 - DNA, 600 bp, Chicken  19866894334967_1
ttaaacaacttttcacattccttcttatgcatctctgttcatgcagtgctcctcacactgtgtgcaacccacggggaactgcattcagcctttgccttgggaatggttaactctgcaccaggcagtgaggagcactgagcagccccacttgtccctcctttctttacctccctgagcttgttctgccctgtctccccatggcaacttcccacatattctccatcctacctgtctgggaagaatccatgtgcagcaaacggtgtctctgtttcaactattttttaatttgaggatgcttcrattgagcatttgatttgtgcagatttgatctagatcacatttctatgagaactgagaggtgggccaaccaaagctctacataggatacagctgggggctgccaccccagccttgagcttccaccatgtcagctgtctgctgtaacacatttctttgtatttccagttgacctgattagctacttgacccggtttgagtgggacatggccaaatatcccataaagcagccactgaagaatatatcagaagcattagcaaaggtaaactgtgctccaggttgtaagaagatctcagaatggg

SEQ ID NO: 66513 - DNA, 600 bp, Chicken  19866894334985_1
tagaaatggaactgatatctgcagcctcggcagtaatataatacctttactcatgtttgtatcattgcacggcattggcagttgcagttattttgtactgagaagaatacttaataatgttcaatttgtagattgtggctgttactgtgttctgtgatttacgactgatctcgtttttcagatccagctttctgtgcttcagagaaatattttgccagtggtgttattcagtgtttttaaatcccatttcaacattaatgcatttttaaggagtcacggtatagaacagaaatagaacamgtctctgaaaaccttttcatacactgcctagcatccattatcctctccctgctgcttaataaccagcgctgttgttcttgctttattttttgctaggtgtcaacatggatgagataccagttccccagtttgtaaaatctctctggtgtttcttgctcagcggataaaactggaaagtcaataagtagtgagaccactgttgaaacttcatrccctgccttccagctctgtaaactcacaaaacaagcctcgcatttcacccttcttccctggttttgctttaaactgcattgaatttca

SEQ ID NO: 66514 - DNA, 600 bp, Chicken  19866894334985_2
tgccagtggtgttattcagtgtttttaaatcccatttcaacattaatgcatttttaaggagtcacggtatagaacagaaatagaacamgtctctgaaaaccttttcatacactgcctagcatccattatcctctccctgctgcttaataaccagcgctgttgttcttgctttattttttgctaggtgtcaacatggatgagataccagttccccagtttgtaaaatctctctggtgtttcttgctcagcggataaaactggaaagtcaataagtagtgagaccactgttgaaacttcatrccctgccttccagctctgtaaactcacaaaacaagcctcgcatttcacccttcttccctggttttgctttaaactgcattgaatttcagcagcggccgcacaagaattcttcccatcccgcacgttccccatcaaaggatccaatgcgttacaacagaggcagatcgtgaaaagcacaaacaaacaatccctactgtacacccaggcaaactgattaaacaccagaggggaaaaaaaggtcttagacatcacgtttcctgagcttttcccctctcagtgcactacttacttgtaattacg

SEQ ID NO: 66515 - DNA, 600 bp, Chicken  19866894334988_1
tgtgccaatggacatagcgtgcgccccacgcaaacaggacgtaaacagatgagtacagacaaactggctgaaaaggtgaaaggtatgaagcaagaatgatcccacacctgggtctgacaggacattgctgattattcttttgagccagtagttgtatcactgtgggagtgaggcaaggaacatttttaggaaagatcaacagtatgtactggggtttagggaacaacagagtttttaggatgaccatttcttgcaattaaaacaaaggcaactcttaaagactatggatcatgtgactcyaggtattgtatatacttgtagcctctggactgggggagatagaatgcagggtatttaacacacttgtgattactgatgatcacagcaggaaagggaagaaagaaggtcaataggcagaattgcatggctgctagctgtctcacagctggagctacatggagcttcctatttacagctaagggaaatatcacatgttgctgctgttattatagattaaatgatttcatctggaaaagacagcagatagctgatataagtaaaatatgaactttggtattacagatatctcaaaaaatagct

SEQ ID NO: 66516 - DNA, 600 bp, Chicken  19866894334988_2
acataacattgaaatgtgtggaaagaacagtcttctggtagagcacgtgagcatatagcacaggaaacaagagcccaaacttctgatacacactaatgtaactgagtaactgtgtgattgtctgcttccatagatgacaagtacaatctgttgttttcatattttaaaacagctccttctgtatctgtctagctgttgcacttccaatgtgaagattccatacatttcttaaaaaaacaaaaccaacccaagctatgcctgtgaagcaagtagagaatatatttaataataaattcttcytggtagtgcagtgatgtcaaggcttcaagttactaatgctaagtcatgtagaatagttaacacatgatattctgtaattcagagtgaagttatttgcacatcaccatgtaattaagtcagcaagcagcagatgtctatttaaataaatttcattcatgctttcagtgaatgctgaacagatttttcatcagtgtttgaataacaattaaaacattaatttagattaatcactagactcgataatgcttttggggaattaatgcattatgtgtacttagacactagtatgaaaatgttagg

SEQ ID NO: 66517 - DNA, 599 bp, Chicken  19866894334991_1
  misc_feature (1)..(217): n is any nucleotide
nnnnnnnnnnnnnnnnnnnnnnnnnnnnnnnnnnnnnnnnnnnnnnnnnnnnnnnnnnnnnnnnnnnnnnnnnnnnnnnnnnnnnnnnnnnnnnnnnnnnnnnnnnnnnnnnnnnnnnnnnnnnnnnnnnnnnnnnnnnnnnnnnnnnnnnnnnnnnnnnnnnnnnnnnnnnnnnnnnnnnnnnnnnnnnnnnnnnnnnnnnnnnnnnnnnnnnnnnttgaggttagttggtcagtactgtttgctgcttgtgaggatggtgtctcttctgtctgctgaaataataggtttattcaaaaytgtgtttactttcctcccctagggccatttctttcctgttagaagggcaggatgatcaggccatctgtcacaagagcaggatctataagaaaaactgcagaaactgcagtttaactcatcttccttgataatgtcctggttgtggttcctactgtttcatattttatttctgacaaataacagagccttactaaagcagtggtttgcttcaattaacttcaagataaaaacacaaaaagtgataaggtgtcaggcataggccaggcagatttgttcagctgycttaaagcactrgacaa

SEQ ID NO: 66518 - DNA, 600 bp, Chicken  19866894334991_2
aataggtttattcaaaaytgtgtttactttcctcccctagggccatttctttcctgttagaagggcaggatgatcaggccatctgtcacaagagcaggatctataagaaaaactgcagaaactgcagtttaactcatcttccttgataatgtcctggttgtggttcctactgtttcatattttatttctgacaaataacagagccttactaaagcagtggtttgcttcaattaacttcaagataaaaacacaaaaagtgataaggtgtcaggcataggccaggcagatttgttcagctgycttaaagcactrgacaacactcaccctccccatagtttttttcaacagttgctttgtaataaaggaggacgaacaagagaggagtgcccacagaacttcccaccagggagcagcagatgtcgggcactgagctggtatcaagacctggaaagcctcccagccacctagagctgcctagagatgagaactgctttaaactcccattgctcgtctgcattggctacgcatgcacgcacccaaaccatcctgtctagggcaaagctactgatttttccaagcccaaatggcagcaggctttgg

SEQ ID NO: 66519 - DNA, 600 bp, Chicken  19866894334991_3
caaaaytgtgtttactttcctcccctagggccatttctttcctgttagaagggcaggatgatcaggccatctgtcacaagagcaggatctataagaaaaactgcagaaactgcagtttaactcatcttccttgataatgtcctggttgtggttcctactgtttcatattttatttctgacaaataacagagccttactaaagcagtggtttgcttcaattaacttcaagataaaaacacaaaaagtgataaggtgtcaggcataggccaggcagatttgttcagctgycttaaagcactrgacaacactcaccctccccatagtttttttcaacagttgctttgtaataaaggaggacgaacaagagaggagtgcccacagaacttcccaccagggagcagcagatgtcgggcactgagctggtatcaagacctggaaagcctcccagccacctagagctgcctagagatgagaactgctttaaactcccattgctcgtctgcattggctacgcatgcacgcacccaaaccatcctgtctagggcaaagctactgatttttccaagcccaaatggcagcaggctttggatctgtaaggga

SEQ ID NO: 66520 - DNA, 600 bp, Chicken  19866894334994_1
ttaattcgtatgctgatgtgtggcacttcaaggtcttagtgtatagagtaaggagcctcctgtacttgcaaaggagaaacttacagaagtcttaggttaggaatactggtggcaatgttatcttagaaaagatttctgattttcagcttaaatccaaaatgccaatagcatattgtagaaatctgagaacgtacaatggaccaaagtagacttaggttgtccctgacagctgcagaagactggtagcctgcagattggcaaaggaatgctgctggtggggttttgaggcagctccttcaytgggggtggtgggagggatgggmaggacagggagggactgagaaattcagctggttaaaatgcagtggattggataatactttttttggtatcagggtaggttgtaccgctgtactgataaagaccaattaaaaggatgggaaagcctcaagaagttcagatcaawrmagggcattgtaaggctttgagccctttgttttcagtcataggcgatcttcagttaagactaaatttcaatttacttcattccaatttattcaagaaggtcaagcctaacatatctggttaattaggggaaaa

SEQ ID NO: 66521 - DNA, 600 bp, Chicken  19866894334994_10
cacagtttatatcctatagatgattatgcatttttgtttatattttattacgattttctttttataaagagttaataatctactgcatacatcctagtggtgtttggaagtatttaagtctttagctccgcttcccacagctttctgccaacttcttaagggaaataaatcaggtatttattagtatggtgttttacatgctggtataatcagtttttaaaactgagggcaatcactgagttaggtgccttgattaattaaaaaaaaaaaccaccaaaaaaacaaccaccaacaaatacractcgcccttcagtgctgaaatggaaagggtagaattgttcaagggatagaaggggatcataaggataatttaactatgtatgtgtattgtttgcagcggttaaccctttgagaactaagctgaacaataacatgcacttgtggtaagcatctttaatgatgtaggttttaaaccagaatggtgttcgctgttcttagcatttactttttttctcccttcctcccactcgcagggatccagaaattagtttattacaaaacttgaaagacctcttagaaattgattttccatctcgtgct

SEQ ID NO: 66522 - DNA, 600 bp, Chicken  19866894334994_2
cacttcaaggtcttagtgtatagagtaaggagcctcctgtacttgcaaaggagaaacttacagaagtcttaggttaggaatactggtggcaatgttatcttagaaaagatttctgattttcagcttaaatccaaaatgccaatagcatattgtagaaatctgagaacgtacaatggaccaaagtagacttaggttgtccctgacagctgcagaagactggtagcctgcagattggcaaaggaatgctgctggtggggttttgaggcagctccttcaytgggggtggtgggagggatgggmaggacagggagggactgagaaattcagctggttaaaatgcagtggattggataatactttttttggtatcagggtaggttgtaccgctgtactgataaagaccaattaaaaggatgggaaagcctcaagaagttcagatcaawrmagggcattgtaaggctttgagccctttgttttcagtcataggcgatcttcagttaagactaaatttcaatttacttcattccaatttattcaagaaggtcaagcctaacatatctggttaattaggggaaaaaaaagaagttggatttcacttgt

SEQ ID NO: 66523 - DNA, 600 bp, Chicken  19866894334994_3
agcatattgtagaaatctgagaacgtacaatggaccaaagtagacttaggttgtccctgacagctgcagaagactggtagcctgcagattggcaaaggaatgctgctggtggggttttgaggcagctccttcaytgggggtggtgggagggatgggmaggacagggagggactgagaaattcagctggttaaaatgcagtggattggataatactttttttggtatcagggtaggttgtaccgctgtactgataaagaccaattaaaaggatgggaaagcctcaagaagttcagatcaawrmagggcattgtaaggctttgagccctttgttttcagtcataggcgatcttcagttaagactaaatttcaatttacttcattccaatttattcaagaaggtcaagcctaacatatctggttaattaggggaaaaaaaagaagttggatttcacttgtttgtgtttagaggagaatgtgctgcaaggtttttaacctggatccagaacattgttgagcaaatcctttggggttattagggtatcatataacagaaaatatttgctgtttgagaaatatgctgtggcttgctcagtgcagga

SEQ ID NO: 66524 - DNA, 600 bp, Chicken  19866894334994_4
gcatattgtagaaatctgagaacgtacaatggaccaaagtagacttaggttgtccctgacagctgcagaagactggtagcctgcagattggcaaaggaatgctgctggtggggttttgaggcagctccttcaytgggggtggtgggagggatgggmaggacagggagggactgagaaattcagctggttaaaatgcagtggattggataatactttttttggtatcagggtaggttgtaccgctgtactgataaagaccaattaaaaggatgggaaagcctcaagaagttcagatcaawrmagggcattgtaaggctttgagccctttgttttcagtcataggcgatcttcagttaagactaaatttcaatttacttcattccaatttattcaagaaggtcaagcctaacatatctggttaattaggggaaaaaaaagaagttggatttcacttgtttgtgtttagaggagaatgtgctgcaaggtttttaacctggatccagaacattgttgagcaaatcctttggggttattagggtatcatataacagaaaatatttgctgtttgagaaatatgctgtggcttgctcagtgcaggag

SEQ ID NO: 66525 - DNA, 600 bp, Chicken  19866894334994_5
catattgtagaaatctgagaacgtacaatggaccaaagtagacttaggttgtccctgacagctgcagaagactggtagcctgcagattggcaaaggaatgctgctggtggggttttgaggcagctccttcaytgggggtggtgggagggatgggmaggacagggagggactgagaaattcagctggttaaaatgcagtggattggataatactttttttggtatcagggtaggttgtaccgctgtactgataaagaccaattaaaaggatgggaaagcctcaagaagttcagatcaawrmagggcattgtaaggctttgagccctttgttttcagtcataggcgatcttcagttaagactaaatttcaatttacttcattccaatttattcaagaaggtcaagcctaacatatctggttaattaggggaaaaaaaagaagttggatttcacttgtttgtgtttagaggagaatgtgctgcaaggtttttaacctggatccagaacattgttgagcaaatcctttggggttattagggtatcatataacagaaaatatttgctgtttgagaaatatgctgtggcttgctcagtgcaggagt

SEQ ID NO: 66526 - DNA, 600 bp, Chicken  19866894334994_6
aatcctttggggttattagggtatcatataacagaaaatatttgctgtttgagaaatatgctgtggcttgctcagtgcaggagtgtgctgctgaggggttctacactgttgatacactgtttttgtcctttttgactttaaaagatgaagtggaattaacatttaaatctcttccgcttttaaaatttcactcagatttcaaattgattatgccataagctttaattcgattattcagaagtcaaagcattaaggttaagactattctcagagaaatgcaagatgtaactttttttagtwagttgctatttttaattacagtccattgaaattgcmtgttttgtaccaacttttcagttatctggagcaattaaaagcagtctgaattcattaatttrtaactgttttctatgttaatgtttctgttttcaagtagttggttgcaaagaaaagctttgattatgactttctccttgtagggaacaacgtttccgtgaacatagaggtagatcccaggcatccaaagatgctccctgagtgttacttccttggagcagatcatggtaaggcagcagacaggcaacatctgtttctcttcta

SEQ ID NO: 66527 - DNA, 600 bp, Chicken  19866894334994_7
aatatttgctgtttgagaaatatgctgtggcttgctcagtgcaggagtgtgctgctgaggggttctacactgttgatacactgtttttgtcctttttgactttaaaagatgaagtggaattaacatttaaatctcttccgcttttaaaatttcactcagatttcaaattgattatgccataagctttaattcgattattcagaagtcaaagcattaaggttaagactattctcagagaaatgcaagatgtaactttttttagtwagttgctatttttaattacagtccattgaaattgcmtgttttgtaccaacttttcagttatctggagcaattaaaagcagtctgaattcattaatttrtaactgttttctatgttaatgtttctgttttcaagtagttggttgcaaagaaaagctttgattatgactttctccttgtagggaacaacgtttccgtgaacatagaggtagatcccaggcatccaaagatgctccctgagtgttacttccttggagcagatcatggtaaggcagcagacaggcaacatctgtttctcttctagaacctgctctctggtgagcaggtaccacagtaagc

SEQ ID NO: 66528 - DNA, 600 bp, Chicken  19866894334994_8
ttctacactgttgatacactgtttttgtcctttttgactttaaaagatgaagtggaattaacatttaaatctcttccgcttttaaaatttcactcagatttcaaattgattatgccataagctttaattcgattattcagaagtcaaagcattaaggttaagactattctcagagaaatgcaagatgtaactttttttagtwagttgctatttttaattacagtccattgaaattgcmtgttttgtaccaacttttcagttatctggagcaattaaaagcagtctgaattcattaatttrtaactgttttctatgttaatgtttctgttttcaagtagttggttgcaaagaaaagctttgattatgactttctccttgtagggaacaacgtttccgtgaacatagaggtagatcccaggcatccaaagatgctccctgagtgttacttccttggagcagatcatggtaaggcagcagacaggcaacatctgtttctcttctagaacctgctctctggtgagcaggtaccacagtaagctacgtcaggctcctgggtaagcattaagtagrgccaggaactaggctgtgtgtgtgtacagg

SEQ ID NO: 66529 - DNA, 600 bp, Chicken  19866894334994_9
aattaaaagcagtctgaattcattaatttrtaactgttttctatgttaatgtttctgttttcaagtagttggttgcaaagaaaagctttgattatgactttctccttgtagggaacaacgtttccgtgaacatagaggtagatcccaggcatccaaagatgctccctgagtgttacttccttggagcagatcatggtaaggcagcagacaggcaacatctgtttctcttctagaacctgctctctggtgagcaggtaccacagtaagctacgtcaggctcctgggtaagcattaagtagrgccaggaactaggctgtgtgtgtgtacaggagagtttgacacagacactatcttttaacagcataaatctgcagcatgctgttttgctaagtgatactttttccttgtgctttcctgacacagtttatatcctatagatgattatgcatttttgtttatattttattacgattttctttttataaagagttaataatctactgcatacatcctagtggtgtttggaagtatttaagtctttagctccgcttcccacagctttctgccaacttcttaagggaaataaatcaggtatttatt

SEQ ID NO: 66530 - DNA, 600 bp, Chicken  19866894335010_1
ggtgagcacaactctcgggcatctggtgcatttcagcagctctcagaaaggcaattagatgctagcagaaacactggtgcgagtgtgtgcagcagtactctgcatgtaaagagagatgaaaagttatgacatgttgtaaatagaactgctatttagtttgaagagatccataatttacattcctcaaatcagagatcactcagatttcaaggctaaatgagtgaaacaggcctgaacttttcatgggatgaaatctaaactctacatttgaagagaggaatagggttctacagatatatwgcagcatgttttattatgcaacctttatagtatacttatttaacrgtgttttgaagaattctgatccaatattctgcattttctgacaaccatgcaatatggttttctttattcagaacatttactccacatatccacatacagcacttcacaaactatacagcagtgctagaaccaaacagccaatagccacatacgtactgaaccacaggcagagagctcagatgctaataagtccttgcttgtcaaagctctcattgaacatgacatatcacatgtggcacatcccaacactgctcc

SEQ ID NO: 66531 - DNA, 600 bp, Chicken  19866894335010_2
gaaaggcaattagatgctagcagaaacactggtgcgagtgtgtgcagcagtactctgcatgtaaagagagatgaaaagttatgacatgttgtaaatagaactgctatttagtttgaagagatccataatttacattcctcaaatcagagatcactcagatttcaaggctaaatgagtgaaacaggcctgaacttttcatgggatgaaatctaaactctacatttgaagagaggaatagggttctacagatatatwgcagcatgttttattatgcaacctttatagtatacttatttaacrgtgttttgaagaattctgatccaatattctgcattttctgacaaccatgcaatatggttttctttattcagaacatttactccacatatccacatacagcacttcacaaactatacagcagtgctagaaccaaacagccaatagccacatacgtactgaaccacaggcagagagctcagatgctaataagtccttgcttgtcaaagctctcattgaacatgacatatcacatgtggcacatcccaacactgctcctcccacttcatccattccttccataaacaatggcagtggcctaaa

SEQ ID NO: 66532 - DNA, 600 bp, Chicken  19866894335011_1
tgcccttgctggacctgtcagtgtaccaggtatcttcaggaatgggatatttcctctcctgaacaggactcttccctggtggagcgaccaatggttctttcgatgcatcactgtgatacattgctgggcctaagatcttttgaagctcttctttcagtggtgatgaagacagactactcctctggctgagataggtgacccatcatgccaccatttgtgcttgggccaccactgtcttaggaaggtggggcagatctttcacccatccctgccttggcagggtggtcttagctatgaccwcaactgtttgggttattggctctaccacctgtaacataggcagccaataactgttattcagtcatgctgtatctttcttctgctccatgctagacctgagaccagaacccaatgaaggtccaaacagagctctggcattgccacgggacaaaagccattctgagtgacatgaacattcagtttggctgggagggtagtgtcaaatatacccartgcctgggcttgtttaactgccagttttgcctgttcgaaagccttgtgttctgttctccccccagtcccatagttgcccctttttca

SEQ ID NO: 66533 - DNA, 600 bp, Chicken  19866894335011_2
tttgtgcttgggccaccactgtcttaggaaggtggggcagatctttcacccatccctgccttggcagggtggtcttagctatgaccwcaactgtttgggttattggctctaccacctgtaacataggcagccaataactgttattcagtcatgctgtatctttcttctgctccatgctagacctgagaccagaacccaatgaaggtccaaacagagctctggcattgccacgggacaaaagccattctgagtgacatgaacattcagtttggctgggagggtagtgtcaaatatacccartgcctgggcttgtttaactgccagttttgcctgttcgaaagccttgtgttctgttctccccccagtcccatagttgcccctttttcatgggtttgtataatagtctcagcagctgtgctaaatgaggtataaaggaacaccagtatcccaatgtacctaagaattcctgcatctgctttggtgttgcagggactacaaatgtatgaaccttatctattacagcactgggtagttctttggactttcctgaccaaaatacccccaggaatttcacagacaagcctggaccttgcacctcct

SEQ ID NO: 66534 - DNA, 600 bp, Chicken  19866894335018_1
ttaaacttgagccagaaaacggacgttttcacgatagtggcacacagacagagactttcttgagggaaataaaacttgttctcaatctctttgcaggtgacaaccccatctgctttgtgttttatatcccatgtgcttgtggcagttgcatcttcagaaagtaacatttaatgtaaaaatggtttcctaggtgtgagaagaagaaataggtcctccattaaataatgaactgactgatcataaagtgcacatttcaaacgttaaatgctcatgatttaatgccaaatggaaaatggaaaygcaaagaacatattaatttcagggattgggtagaggagacatgaacaaatccattgaagaaatgtaatattattgttctctaccttgcttgctttgtgctagacaggaattcattaacatcaactcaagcctatttctaatccccttgctaagccccaacccttgactcaggagaatttgtattgaagcagaaacatgtcaatcattttggccaattaagcataataataaacatgaaacaaggaaaaaaatgtgggcggtatcgccacggtaaagagagcagtgtctgcacattttgga

SEQ ID NO: 66535 - DNA, 599 bp, Chicken  19866894335027_1
  misc_feature (1)..(110): n is any nucleotide
nnnnnnnnnnnnnnnnnnnnnnnnnnnnnnnnnnnnnnnnnnnnnnnnnnnnnnnnnnnnnnnnnnnnnnnnnnnnnnnnnnnnnnnnnnnnnnnnnnnnnnnnnnnnnnctgtaatatttaatgcacattcactcattttcttccatgcatactagattagtttattaacagaatgttaaatctcagcaaagcaattactccatttcatattgctgttttgctccatcttgctgtggttgatcaatctctcacttctacactactacattagtagcactgcagatactgcttcattaaygaactatagaaggaaaactgatgtctaaatgggaaaacaccagacttcactgaatgctgggcatttgcctgaataaagtccattctaatgaatgttgctgaatggaaaggaaaaaatggttttttttttttacactgtaattgaaagttgtataaaatttggaggaaatcaagaaaaacaagaactccagaagtacttagggaacaatggcagtgtaatattgctctgatacagtgtgataactgtatggtattttcagaaggaaggaggtggagcaggayagtgtttgtataggacta

SEQ ID NO: 66536 - DNA, 600 bp, Chicken  19866894335027_2
taatgcacattcactcattttcttccatgcatactagattagtttattaacagaatgttaaatctcagcaaagcaattactccatttcatattgctgttttgctccatcttgctgtggttgatcaatctctcacttctacactactacattagtagcactgcagatactgcttcattaaygaactatagaaggaaaactgatgtctaaatgggaaaacaccagacttcactgaatgctgggcatttgcctgaataaagtccattctaatgaatgttgctgaatggaaaggaaaaaatggytttttttttttacactgtaattgaaagttgtataaaatttggaggaaatcaagaaaaacaagaactccagaagtacttagggaacaatggcagtgtaatattgctctgatacagtgtgataactgtatggtattttcagaaggaaggaggtggagcaggayagtgtttgtataggactatttctcttctttctgtattttgggtacacggacttaagaggctgagatgagattttcagagccagcagtgatctcccactgatgcattcagcagagaagatagggtgattatctttggaga

SEQ ID NO: 66537 - DNA, 600 bp, Chicken  19866894335027_3
aatgcacattcactcattttcttccatgcatactagattagtttattaacagaatgttaaatctcagcaaagcaattactccatttcatattgctgttttgctccatcttgctgtggttgatcaatctctcacttctacactactacattagtagcactgcagatactgcttcattaaygaactatagaaggaaaactgatgtctaaatgggaaaacaccagacttcactgaatgctgggcatttgcctgaataaagtccattctaatgaatgttgctgaatggaaaggaaaaaatggtyttttttttttacactgtaattgaaagttgtataaaatttggaggaaatcaagaaaaacaagaactccagaagtacttagggaacaatggcagtgtaatattgctctgatacagtgtgataactgtatggtattttcagaaggaaggaggtggagcaggayagtgtttgtataggactatttctcttctttctgtattttgggtacacggacttaagaggctgagatgagattttcagagccagcagtgatctcccactgatgcattcagcagagaagatagggtgattatctttggagaa

SEQ ID NO: 66538 - DNA, 600 bp, Chicken  19866894335027_4
cagatactgcttcattaaygaactatagaaggaaaactgatgtctaaatgggaaaacaccagacttcactgaatgctgggcatttgcctgaataaagtccattctaatgaatgttgctgaatggaaaggaaaaaatggttttttttttttacactgtaattgaaagttgtataaaatttggaggaaatcaagaaaaacaagaactccagaagtacttagggaacaatggcagtgtaatattgctctgatacagtgtgataactgtatggtattttcagaaggaaggaggtggagcaggayagtgtttgtataggactatttctcttctttctgtattttgggtacacggacttaagaggctgagatgagattttcagagccagcagtgatctcccactgatgcattcagcagagaagatagggtgattatctttggagaagaggattgaggccttatttggatattacaaattctgaatgagatagcttgacaaaatcctacgagatggcttaaggcagaattagtatcctggctgcgttaaggaacaaaatttagtgctaatcatgggccagatatttggtttggatttagactaaact

SEQ ID NO: 66539 - DNA, 600 bp, Chicken  19866894335028_1
taaatatacatgcatttgaatactgtttaaatgagaagatgtaaagctcccagaagaaggacagaggtgatacatttaaataagaaggtagctccaaattttgtgctgtgcagagaacaaatacttgaggctggcaaaggattatgcagttcacaaacgcaccaaaagaaatatcattaagtagtgatgtgagaaccatcttcccagctcatttcttgacataaacattattcttcagtgatacttaacgagttccaggagatttgggcagacatcctatggttacagtagagtgcacaragaagggtcaaagcaagagagtgcagcgcattccatgtacgctctgtgcataggatacgcacatggaaatgtgctctgtgagttcctaaataaaggtaccgggagcctcagcggatcccagaggaatgctgcaatcacagttctgctgctgcagcacagttgtctttcaatcaatgtcatcttaacacctgtttttgttccgtgttgccctgtacttcagttcaacatttttacactggaattcaaagttttaagtgatacaagtttacatttatcaatatattagtacagaatcaaagg

SEQ ID NO: 66540 - DNA, 599 bp, Chicken  19866894335041_1
  misc_feature (1)..(92): n is any nucleotide
nnnnnnnnnnnnnnnnnnnnnnnnnnnnnnnnnnnnnnnnnnnnnnnnnnnnnnnnnnnnnnnnnnnnnnnnnnnnnnnnnnnnnnnnnnnnatcctggcgcaccgcctgggccttatccccatccgggccgaccctcgactctttgagtacaggaatcaaggtgagggtctcgggtcaaacagcggtggtgagggtggagcctgtaatgaggagcctgggtcacaatgtaggatcgtgaagggacccctgaagaccatctggtccaactcctgcaacaaacagggactcctacggttaraacaggtgctcagagtcctgtctggccttgccttgaaagcccccaaggacatggcattcaccacatctctgggcaacctgttccagtgcctcaccaccctcacttccaccactctcactcagtaaaagactttttccttacatctaaagtaaatctaccatctttcagcttcagaccgttcccccttgtcctatcgcagcagaccttgctgtagagcctgtccctttctttcttacacgccctctttacgtastgaaaggctgcttccaggtctccctgcagctttctcttctctaggc

SEQ ID NO: 66541 - DNA, 600 bp, Chicken  19866894335041_2
gaccatctggtccaactcctgcaacaaacagggactcctacggttaraacaggtgctcagagtcctgtctggccttgccttgaaagcccccaaggacatggcattcaccacatctctgggcaacctgttccagtgcctcaccaccctcacttccaccactctcactcagtaaaagactttttccttacatctaaagtaaatctaccatctttcagcttcagaccgttcccccttgtcctatcgcagcagaccttgctgtagagcctgtccctttctttcttacacgccctctttacgtastgaaaggctgcttccaggtctccctgcagctttctcttctctaggctgaaacagccccagctctctcagcccatccttgcaggagagatgttccatcccttggatcatttttgtggccctcttctggatatgcttcaacagagcagaagtgcgattctgtaaagatcctgttttgccctttccaggagatgaagaggggacagaaattgatactctgcagttccagctgaaaataaaatgcagccgggaatcctcaggcagccaaggaatcatctgacccaaatgaactgtatttcaatc

SEQ ID NO: 66542 - DNA, 599 bp, Chicken  19866894335044_1
  misc_feature (1)..(10): n is any nucleotide
nnnnnnnnnnccttccctgcccctgcccctgccctttccacttccttcttccttcttccttcttccttcttccttcttccttcttccttcttccttcttccttctttcttccttcttccttcttccttcttccttcttccttcttccttcttccttcttccttcttccttcttccttcttccttcttccttcttcctcttctttcttcccttccatttccatgctctatgtatagtagtactctgtcagttatgcatctaccctgtggaattgctccataggctgcttacaagattgtcrtgcagcaacaaaatctttactaaagttgagcaagataatcctgcaagaccatgcagatgtctccctggattatctatttataaggttaatagactaacaggatccatttgtggtggataatggaagtttggttttstgaatccattcactgcaktttggtcgagattaacgtaagccagatactgaaaaacaaccagccagtgaattctgagggatcctaaattcagttaaatacaacccagcttcagaagtgaaatcagcatctctgtatgtgacctcagcccacaagactcaaagga

SEQ ID NO: 66543 - DNA, 600 bp, Chicken  19866894335044_2
ttccttcttccttcttccttcttccttcttccttcttccttcttccttcttccttcttcctcttctttcttcccttccatttccatgctctatgtatagtagtactctgtcagttatgcatctaccctgtggaattgctccataggctgcttacaagattgtcrtgcagcaacaaaatctttactaaagttgagcaagataatcctgcaagaccatgcagatgtctccctggattatctatttataaggttaatagactaacaggatccatttgtggtggataatggaagtttggttttstgaatccattcactgcaktttggtcgagattaacgtaagccagatactgaaaaacaaccagccagtgaattctgagggatcctaaattcagttaaatacaacccagcttcagaagtgaaatcagcatctctgtatgtgacctcagcccacaagactcaaaggactgcataaatgcgatactctttaattttctagctgtacttccaagacacacagygccatttctgctgtcacctccttaaaggttccacaccacttacaaacgttacatgtgtgttcagtaagtctcggtaggaaaag

SEQ ID NO: 66544 - DNA, 600 bp, Chicken  19866894335044_3
ttcttccttcttccttcttccttcttccttcttccttcttcctcttctttcttcccttccatttccatgctctatgtatagtagtactctgtcagttatgcatctaccctgtggaattgctccataggctgcttacaagattgtcrtgcagcaacaaaatctttactaaagttgagcaagataatcctgcaagaccatgcagatgtctccctggattatctatttataaggttaatagactaacaggatccatttgtggtggataatggaagtttggttttstgaatccattcactgcaktttggtcgagattaacgtaagccagatactgaaaaacaaccagccagtgaattctgagggatcctaaattcagttaaatacaacccagcttcagaagtgaaatcagcatctctgtatgtgacctcagcccacaagactcaaaggactgcataaatgcgatactctttaattttctagctgtacttccaagacacacagygccatttctgctgtcacctccttaaaggttccacaccacttacaaacgttacatgtgtgttcagtaagtctcggtaggaaaagatgaaatcttgatttcta

SEQ ID NO: 66545 - DNA, 600 bp, Chicken  19866894335044_4
cagatgtctccctggattatctatttataaggttaatagactaacaggatccatttgtggtggataatggaagtttggttttstgaatccattcactgcaktttggtcgagattaacgtaagccagatactgaaaaacaaccagccagtgaattctgagggatcctaaattcagttaaatacaacccagcttcagaagtgaaatcagcatctctgtatgtgacctcagcccacaagactcaaaggactgcataaatgcgatactctttaattttctagctgtacttccaagacacacagygccatttctgctgtcacctccttaaaggttccacaccacttacaaacgttacatgtgtgttcagtaagtctcggtaggaaaagatgaaatcttgatttctattatttctaagtggatttttttttcttcagaaatgttagtcagaaacatgtgattgaaaggacagagtaaggtaacaaatgctaatttcattgtatggtatattatacactggaagtgaaagacccaaatcacacgcttttcaatgtgacacgcaatatgattgctctcagatactggcctgctttatttccgtgattt

SEQ ID NO: 66546 - DNA, 599 bp, Chicken  19866894335056_1
  misc_feature (1)..(212): n is any nucleotide
nnnnnnnnnnnnnnnnnnnnnnnnnnnnnnnnnnnnnnnnnnnnnnnnnnnnnnnnnnnnnnnnnnnnnnnnnnnnnnnnnnnnnnnnnnnnnnnnnnnnnnnnnnnnnnnnnnnnnnnnnnnnnnnnnnnnnnnnnnnnnnnnnnnnnnnnnnnnnnnnnnnnnnnnnnnnnnnnnnnnnnnnnnnnnnnnnnnnnnnnnnnnnnnnnnnnccacagatttcctcacctttaccctccgttctgtcagaaagtgagctgtgcagggatttgctgtctaccagggtcagaacacaatggyctcccaaagaaagatttcattacagaacaagtttcatgcgtcaatgaaragctccctcttcacgttctactttaattataacttcacatgtattgacatggcagtatcttaaatgaaagaactaaccaaaaaaacaaaatgaacaatcaatacaataytaattgttggctttaactggctcaagttaatgaagtataataattaggaccagtatcagaatagatatttattttctattgaaagtccattttttttcaatagacatcaaatgtcaaaatagatctaggggtgaacttttt

SEQ ID NO: 66547 - DNA, 599 bp, Chicken  19866894335056_2
  misc_feature (1)..(163): n is any nucleotide
nnnnnnnnnnnnnnnnnnnnnnnnnnnnnnnnnnnnnnnnnnnnnnnnnnnnnnnnnnnnnnnnnnnnnnnnnnnnnnnnnnnnnnnnnnnnnnnnnnnnnnnnnnnnnnnnnnnnnnnnnnnnnnnnnnnnnnnnnnnnnnnnnnnnnnnnnnnnnnnnnnnccacagatttcctcacctttaccctccgttctgtcagaaagtgagctgtgcagggatttgctgtctaccagggtcagaacacaatggyctcccaaagaaagatttcattacagaacaagtttcatgcgtcaatgaaragctccctcttcacgttctactttaattataacttcacatgtattgacatggcagtatcttaaatgaaagaactaaccaaaaaaacaaaatgaacaatcaatacaataytaattgttggctttaactggctcaagttaatgaagtataataattaggaccagtatcagaatagatatttattttctattgaaagtccattttttttcaatagacatcaaatgtcaaaatagatctaggggtgaactttttacatttacttagaagtgtcactggktgccttgtgcttgtcactcacaga

SEQ ID NO: 66548 - DNA, 599 bp, Chicken  19866894335056_3
  misc_feature (1)..(54): n is any nucleotide
nnnnnnnnnnnnnnnnnnnnnnnnnnnnnnnnnnnnnnnnnnnnnnnnnnnnnnccacagatttcctcacctttaccctccgttctgtcagaaagtgagctgtgcagggatttgctgtctaccagggtcagaacacaatggyctcccaaagaaagatttcattacagaacaagtttcatgcgtcaatgaaragctccctcttcacgttctactttaattataacttcacatgtattgacatggcagtatcttaaatgaaagaactaaccaaaaaaacaaaatgaacaatcaatacaataytaattgttggctttaactggctcaagttaatgaagtataataattaggaccagtatcagaatagatatttattttctattgaaagtccattttttttcaatagacatcaaatgtcaaaatagatctaggggtgaactttttacatttacttagaagtgtcactggktgccttgtgcttgtcactcacagatcccaccgttgtctgtaaatgtagtttcattgacaaagcaccattattatccttcagtcagacctcttctctgcctttggagaagagaatatgagactttcataaagtt

SEQ ID NO: 66549 - DNA, 600 bp, Chicken  19866894335056_4
gaacaagtttcatgcgtcaatgaaragctccctcttcacgttctactttaattataacttcacatgtattgacatggcagtatcttaaatgaaagaactaaccaaaaaaacaaaatgaacaatcaatacaataytaattgttggctttaactggctcaagttaatgaagtataataattaggaccagtatcagaatagatatttattttctattgaaagtccattttttttcaatagacatcaaatgtcaaaatagatctaggggtgaactttttacatttacttagaagtgtcactggktgccttgtgcttgtcactcacagatcccaccgttgtctgtaaatgtagtttcattgacaaagcaccattattatccttcagtcagacctcttctctgcctttggagaagagaatatgagactttcataaagtttaaaaaagtaagtttcatgtkttcaaaattttccaaatagcttctgaataaattaggcacttctaaaaagcccactgatactgtcatactgaacacctgtacatattctaactttaaagcattacagaatacgtacagatgggctagcagtttccaaaaagagcagt

SEQ ID NO: 66550 - DNA, 600 bp, Chicken  19866894335056_5
ctcaagttaatgaagtataataattaggaccagtatcagaatagatatttattttctattgaaagtccattttttttcaatagacatcaaatgtcaaaatagatctaggggtgaactttttacatttacttagaagtgtcactggktgccttgtgcttgtcactcacagatcccaccgttgtctgtaaatgtagtttcattgacaaagcaccattattatccttcagtcagacctcttctctgcctttggagaagagaatatgagactttcataaagtttaaaaaagtaagtttcatgtkttcaaaattttccaaatagcttctgaataaattaggcacttctaaaaagcccactgatactgtcatactgaacacctgtacatattctaactttaaagcattacagaatacgtacagatgggctagcagtttccaaaaagagcagttaagtgctgaaataccaattatttcagttaagagactttccacaagcattaagctcacttgattccagggtagtaacataccacctcttcaactggtcattctgcatgggcattttattatcctgcaaaacaaacaactaaaaagatctgacaa

SEQ ID NO: 66551 - DNA, 600 bp, Chicken  19866894335056_6
actgtcatactgaacacctgtacatattctaactttaaagcattacagaatacgtacagatgggctagcagtttccaaaaagagcagttaagtgctgaaataccaattatttcagttaagagactttccacaagcattaagctcacttgattccagggtagtaacataccacctcttcaactggtcattctgcatgggcattttattatcctgcaaaacaaacaactaaaaagatctgacaaatgggatatttctgaagtcagcctggagaagagaaggctccaaggggaccttgcaacrgccttccagtatctgaagggggcctacaggaaggctgagaagggactttttatatgggcatgtagcgatgggacaagggtttaagctggaagagggtagatttagactagatattaggaagaaactctttactgtgagggtggtgaaacactgcaacaggttgtccagagagactgtggatgccctctccctggaagcactcaagcccaggctggatggggctttgagcagcctggtctagtgagaggtgtccctgctattggcaggttggaactggatgatcttaaaggtcccttccaa

SEQ ID NO: 66552 - DNA, 600 bp, Chicken  19866894335056_7
gctgagaagggactttttatatgggcatgtagcgatgggacaagggtttaagctggaagagggtagatttagactagatattaggaagaaactctttactgtgagggtggtgaaacactgcaacaggttgtccagagagactgtggatgccctctccctggaagcactcaagcccaggctggatggggctttgagcagcctggtctagtgagaggtgtccctgctattggcaggttggaactggatgatcttaaaggtcccttccaagtcaagccattctatgatatgattctatgatcrtgcctgtacccttttttactgacaattaaaataataaaaagttctaacatggaaaacaaacctgtttttgaccaaggacaaatccaagacttcaaaagtatgrcagaaactgtttgtsttattttgcctctgtatgcttcatgaaaagcaactgattttatatatactacatgattgtcttagctgaagattctggctgacttctggcccctgcatctgattaccttcactggttccagcagagtagttgcataatgttttttaatcatatttgatgtatttgtacttacagagaacatg

SEQ ID NO: 66553 - DNA, 600 bp, Chicken  19866894335056_8
agggtggtgaaacactgcaacaggttgtccagagagactgtggatgccctctccctggaagcactcaagcccaggctggatggggctttgagcagcctggtctagtgagaggtgtccctgctattggcaggttggaactggatgatcttaaaggtcccttccaagtcaagccattctatgatatgattctatgatcrtgcctgtacccttttttactgacaattaaaataataaaaagttctaacatggaaaacaaacctgtttttgaccaaggacaaatccaagacttcaaaagtatgrcagaaactgtttgtsttattttgcctctgtatgcttcatgaaaagcaactgattttatatatactacatgattgtcttagctgaagattctggctgacttctggcccctgcatctgattaccttcactggttccagcagagtagttgcataatgttttttaatcatatttgatgtatttgtacttacagagaacatgcagaattaggataggtggtcaacctgattgcagaaatacttaatcaaatgttcatggtcgctgatctccaaaggcacagcttccaaaggactgcaagtacctc

SEQ ID NO: 66554 - DNA, 600 bp, Chicken  19866894335056_9
tgcaacaggttgtccagagagactgtggatgccctctccctggaagcactcaagcccaggctggatggggctttgagcagcctggtctagtgagaggtgtccctgctattggcaggttggaactggatgatcttaaaggtcccttccaagtcaagccattctatgatatgattctatgatcrtgcctgtacccttttttactgacaattaaaataataaaaagttctaacatggaaaacaaacctgtttttgaccaaggacaaatccaagacttcaaaagtatgrcagaaactgtttgtsttattttgcctctgtatgcttcatgaaaagcaactgattttatatatactacatgattgtcttagctgaagattctggctgacttctggcccctgcatctgattaccttcactggttccagcagagtagttgcataatgttttttaatcatatttgatgtatttgtacttacagagaacatgcagaattaggataggtggtcaacctgattgcagaaatacttaatcaaatgttcatggtcgctgatctccaaaggcacagcttccaaaggactgcaagtacctctgtttttccaaagga

SEQ ID NO: 66555 - DNA, 600 bp, Chicken  19866894335071_1
accctcgcacgagcgcttcgaagagttttgtgttggttttggtgggctggttgccgtgatcggaaccccggcgtggcaaccccgtgcatcgtcccacccatctctaactgccctaactgctcctgtcttgtctagcccgagtatgagtttggcatcagggtttacagtgtaaaaagaaactgtgacaattggttgtccctccttgccgagtcagtgatgagctctctctcgttagttattttccaatgtagctgttctgctgtgctttgtttgaaataatgtttgtgtgtggatgtgttytctgaaacaaggaaaaatgtgaagtagaaacaaactgatcttcatcaggtgtttcagtttgcaccatgagttcaacccaaccagtcagtacagacggtgcctccagcctcctgtcctgcttcttagccatttagtctggtctttctagttatcktagtatcgtggtatctggtctatctaggtgggtgaaaaactgaacgtgagccagcagtgtgctcttgcagcttgtaaagcaaatggtgtcctgggctccatcgtgagaggggtggccagcagggacagggaggtgattgtccctct

SEQ ID NO: 66556 - DNA, 600 bp, Chicken  19866894335071_2
tcagggtttacagtgtaaaaagaaactgtgacaattggttgtccctccttgccgagtcagtgatgagctctctctcgttagttattttccaatgtagctgttctgctgtgctttgtttgaaataatgtttgtgtgtggatgtgttytctgaaacaaggaaaaatgtgaagtagaaacaaactgatcttcatcaggtgtttcagtttgcaccatgagttcaacccaaccagtcagtacagacggtgcctccagcctcctgtcctgcttcttagccatttagtctggtctttctagttatcktagtatcgtggtatctggtctatctaggtgggtgaaaaactgaacgtgagccagcagtgtgctcttgcagcttgtaaagcaaatggtgtcctgggctccatcgtgagaggggtggccagcagggacagggaggtgattgtccctctctgctctgccgttgttacccctcatgtggagtactgtgtccaggtctgcggcccccagtacaagaaggacagggagctgttggagagggtccgcatgagggccacacagctgatcagagggctggagcacgtctcctacraagacmggcttgat

SEQ ID NO: 66557 - DNA, 600 bp, Chicken  19866894335071_3
ctttctagttatcktagtatcgtggtatctggtctatctaggtgggtgaaaaactgaacgtgagccagcagtgtgctcttgcagcttgtaaagcaaatggtgtcctgggctccatcgtgagaggggtggccagcagggacagggaggtgattgtccctctctgctctgccgttgttacccctcatgtggagtactgtgtccaggtctgcggcccccagtacaagaaggacagggagctgttggagagggtccgcatgagggccacacagctgatcagagggctggagcacgtctcctacraagacmggcttgatgatccttgaggtcccttccaagccaagccattctgtgattcgtgccttactgttaacattttctcagcctttggccattttgcaaaatgctagatttgagtgcagatgcccagctttgagaagtgattctgcaagtagacttggaaagcgtttgaattcactggtaaatatgtgtcctttcctttcagatactgtagatgtttctcagtacagccacgtttttaacaagctgttaaatgcctgttttgagagcaagaacctcggggtcttgtcttctgctgtagac

SEQ ID NO: 66558 - DNA, 600 bp, Chicken  19866894335071_4
agttatcktagtatcgtggtatctggtctatctaggtgggtgaaaaactgaacgtgagccagcagtgtgctcttgcagcttgtaaagcaaatggtgtcctgggctccatcgtgagaggggtggccagcagggacagggaggtgattgtccctctctgctctgccgttgttacccctcatgtggagtactgtgtccaggtctgcggcccccagtacaagaaggacagggagctgttggagagggtccgcatgagggccacacagctgatcagagggctggagcacgtctcctacraagacmggcttgatgatccttgaggtcccttccaagccaagccattctgtgattcgtgccttactgttaacattttctcagcctttggccattttgcaaaatgctagatttgagtgcagatgcccagctttgagaagtgattctgcaagtagacttggaaagcgtttgaattcactggtaaatatgtgtcctttcctttcagatactgtagatgtttctcagtacagccacgtttttaacaagctgttaaatgcctgttttgagagcaagaacctcggggtcttgtcttctgctgtagacttcatg

SEQ ID NO: 66559 - DNA, 600 bp, Chicken  19866894335071_5
agtgattctgcaagtagacttggaaagcgtttgaattcactggtaaatatgtgtcctttcctttcagatactgtagatgtttctcagtacagccacgtttttaacaagctgttaaatgcctgttttgagagcaagaacctcggggtcttgtcttctgctgtagacttcatgctttccaagaatatagctgttgattttttcttacttagaggactaatcacaggtttgggaagaagttgtttgtggagtaaagctcgaacctactacaaaagtaagttgcttttcaaccatccttctctrgtcttctttgggtaacgttaacagctcagtatgttggggtgaagcgggtgagagtatacgttgtaagaggaaaacagcattttgtgtcaatgtygggaatttctttttatccagaatgtttcttgggaaatacacatcagtggataccacttggcacaaaataaatgtacttctgatgaaattaaatgaccaatttcagaatttcaaaatgtgaagcttgacgtgtttaaaatggtcatcatcttcacgtttccatctaggcagactagatctctctgtactcctgtttgaagctttaat

SEQ ID NO: 66560 - DNA, 600 bp, Chicken  19866894335071_6
acgtttttaacaagctgttaaatgcctgttttgagagcaagaacctcggggtcttgtcttctgctgtagacttcatgctttccaagaatatagctgttgattttttcttacttagaggactaatcacaggtttgggaagaagttgtttgtggagtaaagctcgaacctactacaaaagtaagttgcttttcaaccatccttctctrgtcttctttgggtaacgttaacagctcagtatgttggggtgaagcgggtgagagtatacgttgtaagaggaaaacagcattttgtgtcaatgtygggaatttctttttatccagaatgtttcttgggaaatacacatcagtggataccacttggcacaaaataaatgtacttctgatgaaattaaatgaccaatttcagaatttcaaaatgtgaagcttgacgtgtttaaaatggtcatcatcttcacgtttccatctaggcagactagatctctctgtactcctgtttgaagctttaattattgctaatcattgttaaaggcaacattttacagcagtgattgttgtgagtaaatacttctagttgtcttctcaaaccaggccatttcacaga

SEQ ID NO: 66561 - DNA, 600 bp, Chicken  19866894335074_1
tcataggagaggtgctccagttctatgagccattctggttctaaagggacctcaaatatacattaagcagagactttaaaaattaaatacatatgatgtcataaccacattttgtgtgctgcatatctgattcagagaagaatctttcatgttgggatgcagtgaattgttgtgaataatgttaactcttccttctggaagcagtttgtcactttaatgtgggaaacattttacaaaaatattttccaacactgtcctctctatgccagctgttggacgatactccctagagtaaagggraagccatattcaccatacttggtgtaatgtggtactggttggttttcttttttaattttttatttgttgtgttttgtttttcctggaaacagataattgaatcctcatttaaaatgactgtttggtttctgtaattgtagggagtgttttgctttggttgacttttgatgtgggtttttggtctcagtacagggccaatattctagatgtactgaagtgaatgtaaggctgtcattggcacaagggtttggtatttgctgctggcctgygtgtgtgctactgctattcttaatgtatcag

SEQ ID NO: 66562 - DNA, 353 bp, Chicken  19866894335074_2
ctgttggacgatactccctagagtaaagggraagccatattcaccatacttggtgtaatgtggtactggttggttttcttttttaattttttatttgttgtgttttgtttttcctggaaacagataattgaatcctcatttaaaatgactgtttggtttctgtaattgtagggagtgttttgctttggttgacttttgatgtgggtttttggtctcagtacagggccaatattctagatgtactgaagtgaatgtaaggctgtcattggcacaagggtttggtatttgctgctggcctgygtgtgtgctactgctattcttaatgtatcagcaagccttaatactcctaaatt

SEQ ID NO: 66563 - DNA, 599 bp, Chicken  19866894335075_1
  misc_feature (1)..(86): n is any nucleotide
nnnnnnnnnnnnnnnnnnnnnnnnnnnnnnnnnnnnnnnnnnnnnnnnnnnnnnnnnnnnnnnnnnnnnnnnnnnnnnnnnnnnnnaaaagaggctggctccttctgtcatatattgacagacataagaaagtagcttttgcattgagagggggattctgattaagcaattattttatcttccattttagctcttaccgaggcagtgcaaacattttaaaagatgttaatgtgtgcactaaatgagcaaataaatccattttaatgtgtagggtagttttattggattgacaagacactrtaaggttactcctgtgttctttattccaagtagaactcaactatttctcaaattctgagaaaaagaaaattttctctcacccataattatttagtaattctgcttcactgtctgtttcctggtttcatatcagcagtacaaaaacctacttattaatggcaagaccagctgcaaatgcaacttttctatgttatcaatgtcttgatatatccttctatcatctcactgacatctccagttaaagtccacctttttgtccttatctttaaacctatttaggttctgggaaaaagttttgc

SEQ ID NO: 66564 - DNA, 600 bp, Chicken  19866894335079_1
acacagaaggttccctctgaacaccaggcagcagtgacagagcactggcacaggctgaccagaggttgtggggtccccctccttggagaccttcagcagccacctggtcttgggtctgggcaccctcctctgactgtccctgctgtgcaggttgggccagattgacccagaaggcctttccaacctcaaccactctgtgattctgtgtgaatttgttaaaaaccttggcgctgatttgatatccagtaaaatcttcaaatattcacactgtggaagcatctttctttttgatccaaaagwgtaagttagtctcttagattttccaagcggcatctgaaaagagttaagtacccaacttgatgataaaagcatatgtgatgagcaggagagaataatcagtcaggaaacatctagaaggggggaaatcctaagatctgaaattcttatgtcttattctggtctgtgtcaatgagaaaccaggccttggaagaaacactccgtgctgaaaaggaagcaatagtagctactgtcttaaagccgtaatagttaattctatgaatttattcatgctccaggttgttattttcttcttattataag

SEQ ID NO: 66565 - DNA, 600 bp, Chicken  19866894335084_1
ttgggaacagattcaaaagcgttgcttctctggaaaccccctgtactgacttctttaaacagaggactgaacacagggagacaacactttgttaaatagaagtagcaattgtgttcagctttactacaaaatagctaacctaatgttattgtagctaagccactgttacctgcgtgtgtaactttagttattgtcaaggttaatacactgttacactatagatgtgacttggtttgtagaatattttatgggaaggtaaagatctgggtcttgacttaaaaaacggatctttgaactgcrctgatcaaatatttgctaatttgttagtggcctgttcctcaaggatgactaattctagggaatggggcaggagtaagaagtgctgaaagaactacagtttacctctataagtgtatattaaagatagtgagtctcttcagtaaaaataaagaggctttgagggagagcagtgaaaaaggtgatgtacgagtaggaagtgttaggctttctgtgttccttactgagtgttgagcacaggggcatccttaaacattggcttccgtgttctggagctgcaattaatggcttttgactagtttt

SEQ ID NO: 66566 - DNA, 600 bp, Chicken  19866894335087_1
gatgaggctctcaaaatgaacgatgtgaagagatgcatgtggatgtagttccttgtacagcgaaagtctcctgtaacaaagagaactcctaatgaagcaacattcctatgaaataacattcctatgcaaggcatgtcagttttttaatgctgagctgacaaattaaaacacaggtttttggtctctggaaggaagatttgtgcatttccaaaggacaccctaaagaaggccttgaaaagctaaagtcacatctgctccattcaggtactaaaaaaggcaaacgttgccaaaagaactagkwtttcatgccaatatgcttggtctaacatactggtcactgaataaggactaaagtgcaaattccaggttataaagacacattaagataagctctctgtcaggtcactgctgtaaacatgcagtgctttcccagaagtcaacacaacagtgcttagagcmaagttttagtctcgagtgaggagagcagcaggaggaaagggagcctgcctcagggacactgacgtcatggcaaaatctcagcatggaggtggtgcaaacttcagcctgcaaactatgttcagctacgttttggagaagaca

SEQ ID NO: 66567 - DNA, 600 bp, Chicken  19866894335087_2
atgaggctctcaaaatgaacgatgtgaagagatgcatgtggatgtagttccttgtacagcgaaagtctcctgtaacaaagagaactcctaatgaagcaacattcctatgaaataacattcctatgcaaggcatgtcagttttttaatgctgagctgacaaattaaaacacaggtttttggtctctggaaggaagatttgtgcatttccaaaggacaccctaaagaaggccttgaaaagctaaagtcacatctgctccattcaggtactaaaaaaggcaaacgttgccaaaagaactagkwtttcatgccaatatgcttggtctaacatactggtcactgaataaggactaaagtgcaaattccaggttataaagacacattaagataagctctctgtcaggtcactgctgtaaacatgcagtgctttcccagaagtcaacacaacagtgcttagagcmaagttttagtctcgagtgaggagagcagcaggaggaaagggagcctgcctcagggacactgacgtcatggcaaaatctcagcatggaggtggtgcaaacttcagcctgcaaactatgttcagctacgttttggagaagacag

SEQ ID NO: 66568 - DNA, 600 bp, Chicken  19866894335087_3
aaattaaaacacaggtttttggtctctggaaggaagatttgtgcatttccaaaggacaccctaaagaaggccttgaaaagctaaagtcacatctgctccattcaggtactaaaaaaggcaaacgttgccaaaagaactagkwtttcatgccaatatgcttggtctaacatactggtcactgaataaggactaaagtgcaaattccaggttataaagacacattaagataagctctctgtcaggtcactgctgtaaacatgcagtgctttcccagaagtcaacacaacagtgcttagagcmaagttttagtctcgagtgaggagagcagcaggaggaaagggagcctgcctcagggacactgacgtcatggcaaaatctcagcatggaggtggtgcaaacttcagcctgcaaactatgttcagctacgttttggagaagacaggagaayacaatatgaggaaaatctcttacatgttttgggaaacagagctcagctcattcctatcactgatttatgtgaaggtttgcagaaatacttacaatgtttaacttgctgtgaaagacaccagaagtgtctgtgtttgctgagatgaccagagg

SEQ ID NO: 66569 - DNA, 600 bp, Chicken  19866894335087_4
gccaatatgcttggtctaacatactggtcactgaataaggactaaagtgcaaattccaggttataaagacacattaagataagctctctgtcaggtcactgctgtaaacatgcagtgctttcccagaagtcaacacaacagtgcttagagcmaagttttagtctcgagtgaggagagcagcaggaggaaagggagcctgcctcagggacactgacgtcatggcaaaatctcagcatggaggtggtgcaaacttcagcctgcaaactatgttcagctacgttttggagaagacaggagaayacaatatgaggaaaatctcttacatgttttgggaaacagagctcagctcattcctatcactgatttatgtgaaggtttgcagaaatacttacaatgtttaacttgctgtgaaagacaccagaagtgtctgtgtttgctgagatgaccagaggtcctcatcaaacccaaccagtgatgcttctcctcaccttaaagaggccaggaccaccaaggctattgtcagcgtcaccagggaggtgcagtacccaatggtgtacattgtcttcagggtcatgaaataggaacgctgcaggggaacag

SEQ ID NO: 66570 - DNA, 600 bp, Chicken  19866894335093_1
gggatttttctacaagaagtctctttctgcaagttactgccaaagcagatttgctcactgtggaatccatttgacttcgctgtgcaagattttggacctttttaacaagtaagttttatatcagggcttcaacatgcatctaaaagcagagacaaaccccatcctcctcttattttaattgtatcttttgaataacatgctcaacaaacagtcccaaacatctagccaaaggtgctttgagtcagggaatacagacaaacacatttcttcctcggatgaaaagatgctttactttttatygggtttgttttattctagaatacctacatctttgctttatagatggcctttgtagagagctccagttacctgctgagatttgataagttttcattcattgctaagtggcaaaaaacagaccaacaggcatttattccatttgacaccagtcacaccagctgtttcacrgggagcaaccaagtgcatctttcttttacagtgtattttgctttggggcaaaagatagcaatgcataataatcacattttgagtaaaggctgggtaataaacttgtaccacgtgccaatactgtaaagaaag

SEQ ID NO: 66571 - DNA, 600 bp, Chicken  19866894335093_2
cttattttaattgtatcttttgaataacatgctcaacaaacagtcccaaacatctagccaaaggtgctttgagtcagggaatacagacaaacacatttcttcctcggatgaaaagatgctttactttttatygggtttgttttattctagaatacctacatctttgctttatagatggcctttgtagagagctccagttacctgctgagatttgataagttttcattcattgctaagtggcaaaaaacagaccaacaggcatttattccatttgacaccagtcacaccagctgtttcacrgggagcaaccaagtgcatctttcttttacagtgtattttgctttggggcaaaagatagcaatgcataataatcacattttgagtaaaggctgggtaataaacttgtaccacgtgccaatactgtaaagaaagaactcctagctctcaaatactgtatgcagggtgtggtaccctcagtgggaaacagtttagggatgaattctgccttctagtttactatgaccatgctgattacattggccattcaaaataaataaaatagacctcattgttttgccttcctgtgaagtgcttgtagaa

SEQ ID NO: 66572 - DNA, 600 bp, Chicken  19866894335109_1
aatgggtacttgacaaagaggtgtggtgtgtatttgcagaagcttcagactgaaagctgagcaggttggttttgcggtcaagtcagggtgcgtttcaatagtaaagctccaggtgtgcatttctgaggcagagaggacatatttcttaaatccattttcctacttgaaataaacctgcacttacagcttgaaggtctgccatatacaccttgcgtataacaggatgtatgtgggatttgaatgggatattatcaatgaatgcatgaagcagagacaaactttaagagattatgttgaagrgaaaggaagcggccctcaggagrgcaagaaagacaagacagcacaggagcagcctaacaaagtcacagggccagagacagctccagagctccaacacaattgttcttggaccctgtcatagctgtgttggcatgtggtccagtaactggtaacagggaataatgatcagagcagcagtaggttgtggttttgtagtgctcaccacaaggtttctctttcctgtcacaaagtatgtgtacttgtttttaaaaataacttcataacctctctgaaatactgtttttagtgatgctgattttg

SEQ ID NO: 66573 - DNA, 600 bp, Chicken  19866894335109_2
tggtgtgtatttgcagaagcttcagactgaaagctgagcaggttggttttgcggtcaagtcagggtgcgtttcaatagtaaagctccaggtgtgcatttctgaggcagagaggacatatttcttaaatccattttcctacttgaaataaacctgcacttacagcttgaaggtctgccatatacaccttgcgtataacaggatgtatgtgggatttgaatgggatattatcaatgaatgcatgaagcagagacaaactttaagagattatgttgaagrgaaaggaagcggccctcaggagrgcaagaaagacaagacagcacaggagcagcctaacaaagtcacagggccagagacagctccagagctccaacacaattgttcttggaccctgtcatagctgtgttggcatgtggtccagtaactggtaacagggaataatgatcagagcagcagtaggttgtggttttgtagtgctcaccacaaggtttctctttcctgtcacaaagtatgtgtacttgtttttaaaaataacttcataacctctctgaaatactgtttttagtgatgctgattttggagaaatcctgtcaaggaagtaa

SEQ ID NO: 66574 - DNA, 600 bp, Chicken  19866894335109_3
cctgtcatagctgtgttggcatgtggtccagtaactggtaacagggaataatgatcagagcagcagtaggttgtggttttgtagtgctcaccacaaggtttctctttcctgtcacaaagtatgtgtacttgtttttaaaaataacttcataacctctctgaaatactgtttttagtgatgctgattttggagaaatcctgtcaaggaagtaaagcaacttttaaaaatactcttttttcattatgctagatattatgaggagaaaatgagtccctaacagattgcttagaagagatgtawatgcatagatttgttcataggcaagtacagaaatccatactggcaagtgtaatattgtgacatctttttctagcataaatttatgaatgtgagtgagattgtgttgaatgacttgtgaggatttgagcacacagtaacagaaacaggtaaaatatcagctgcttttagcaataggtacgctttgttactccccactgtctgcaagaataggacaagtgttttaagaaagcagaggactttcagtcaaagttctgggtaaactcagcaccttgccttccaactgctcatggatttcagcct

SEQ ID NO: 66575 - DNA, 600 bp, Chicken  19866894335110_1
tcagccatgcttgttgtttcatatcacttccctgtgttctatgtgccttagcgtagcttccaggaggatctgtttcatgtttccccagcacagaagtgagactgacagttcagtagttcactgggcattcatttctaccattcttaaaaatgagtgtgacaatgcttttttttccagtccccacggtcttcacctgactgccacaacatttcaaatatcattgaaagcggatttgcaactgcatcagacaattctttcaggattctgggatgcatctcgttgggcctcatacacttatgkatgttcaggttcctcaggtggtcacaaacctgattttcaatgcagggacattgcttttcctacatcccactttcagaaccatctgcttgagggctgtgtttagagcagtcattagtgaaaactgaagcaaaaattatgttgagtacctgttccagggacctaagggcacctgaccaaagagtgatcttgggatgtaatgtattctgactgattaaagggatgtgatacttgtgggtacagctacaaatatcacagctgaccttgctagttgatcctgttttgcaagaacttgttttggaa

SEQ ID NO: 66576 - DNA, 599 bp, Chicken  19866894335120_1
  misc_feature (1)..(150): n is any nucleotide
nnnnnnnnnnnnnnnnnnnnnnnnnnnnnnnnnnnnnnnnnnnnnnnnnnnnnnnnnnnnnnnnnnnnnnnnnnnnnnnnnnnnnnnnnnnnnnnnnnnnnnnnnnnnnnnnnnnnnnnnnnnnnnnnnnnnnnnnnnnnnnnnnnnnnnaaatgcagtttcagctgcagtgcttgaacatttgccctgctattcagcatgttcatgttatccacgtaagggtggcacacacaccatactgtccctagtatatatggggttggctgtcttcctgcccaaattgatgtgtctttttttttwatgtttcctcattgtcattacttgcacttaaggcacaggccaaggcttgttcagtgctgcttctcttttccaaattatgtacaaagttagcagagaaattaccgaattccagtaagggactgagtgacaaatctgctggttaatcatttattgctggctgaacctgctgaatagcaaatatgctaagaaggggaaaggaaagagtatggcaagagattaactgtggacagtcaaaagtcaaccagaagggagcaaggatgaggctggaaggtcaagtggcaagcaggaaggctactgta

SEQ ID NO: 66577 - DNA, 600 bp, Chicken  19866894335120_2
ctaagaaggggaaaggaaagagtatggcaagagattaactgtggacagtcaaaagtcaaccagaagggagcaaggatgaggctggaaggtcaagtggcaagcaggaaggctactgtagggtaaacactgcctctcagaagcatagctgctatagcctggacacaaaccacagagcagagcagatgcactgcctcactcccagttcagtactctctgctccatgtctgcaggcactgcagtctgtataacaagctactccagatgaatttagctgcttatatgcctagaagagctttttcractgagtaagtttcttttacctttccaagccttgggtcttagctgtcccmagaacacgtgctcctcactaagaaagtgctgtcatgatccttacagccatcaaaacccacattttctcatgcaaaatgtctgttctcatcagtggctctgtcagtcctggggcaatgtggtagtaggaaaggggaatccactcaagtaaaatctacttagggagcagcaactgtggccactaccactaattatctatctaactactcactgggttgtaggcatggccacatgggcaatagtgtttatggg

SEQ ID NO: 66578 - DNA, 594 bp, Chicken  19866894335120_3
aaaagtcaaccagaagggagcaaggatgaggctggaaggtcaagtggcaagcaggaaggctactgtagggtaaacactgcctctcagaagcatagctgctatagcctggacacaaaccacagagcagagcagatgcactgcctcactcccagttcagtactctctgctccatgtctgcaggcactgcagtctgtataacaagctactccagatgaatttagctgcttatatgcctagaagagctttttcractgagtaagtttcttttacctttccaagccttgggtcttagctgtcccmagaacacgtgctcctcactaagaaagtgctgtcatgatccttacagccatcaaaacccacattttctcatgcaaaatgtctgttctcatcagtggctctgtcagtcctggggcaatgtggtagtaggaaaggggaatccactcaagtaaaatctacttagggagcagcaactgtggccactaccactaattatctatctaactactcactgggttgtaggcatggccacatgggcaatagtgtttatgggatgctgttactgtcagtgactgacaaactgcagccccgcagcag

SEQ ID NO: 66579 - DNA, 600 bp, Chicken  19866894335122_1
agtaggcaacatgcttgtgttcagtctttgtgatattaaatacctatgtgctgtgtttttgtgtaacagaaaaatgttataaatgataacctaagatgtttcttgacagaggaactgcttattgcttcaattttagtgacagatttaaaaaaaaataaataagctgtatgccccaatatcatagggaatatttacttagggaggtagcagtaagaaagtagctctgcataaccggctttaaaacacaaacctctgtagctgggagtgggttttgttagggcttataaatacaagttgttrccttccatgtgtgtcagtcactatttgggttgatgatatttgttgaatattatacagttatgggataaattgtatgtacgtatttatatacagatagatgcgggtaaaatttatgtatgcacaactaagctgtactgtcatgagaacaatgctttaaaaaaagtggttaaatctctttgattctcatcagtacttctgtgcatatgtcaccggagagagagagacatctctaccatgaagatcttcctaaaatactttaagaagcatataaaacagagataatggaaaaggggaaaatag

SEQ ID NO: 66580 - DNA, 600 bp, Chicken  19866894335125_1
gctaggctggttctgcatgctcgtgaaactgctctgtggtttcagggtgagattgatgtgcagcaatatcaaatgcagtaaagagcatgtatgttagatgttgtgatgttcgatctatgtgctgttatttcatgtcatagttaatgaggtgtcagcatgatttattaggtttgtacagctgtgttttcaaaaatttaccagagttccttctttgtcctgctctggaaggaggaaggagttctgcctggcactccaaggagcagcacacgttcagcccatccaggcatctcttcagtttgytgctctgctgtacagctgtgatgcctcaatctgtaacttctcagggctttccaaagaagcattctgtaaaggaaattcaactgatatttatcagttttcatgtgggccgcagargtctgaataataaaaatgagagatggcaggacgcattactgagacttaaaaagactgaagagygatgaggctttctgacctgcctgcttgcatcggtttcttctctttttttaagaggaaaaaggttcytcactgctttcaggttttgtttaacttcagttctgcagaaggttatgcgtttttttc

SEQ ID NO: 66581 - DNA, 600 bp, Chicken  19866894335125_2
ctatgtgctgttatttcatgtcatagttaatgaggtgtcagcatgatttattaggtttgtacagctgtgttttcaaaaatttaccagagttccttctttgtcctgctctggaaggaggaaggagttctgcctggcactccaaggagcagcacacgttcagcccatccaggcatctcttcagtttgytgctctgctgtacagctgtgatgcctcaatctgtaacttctcagggctttccaaagaagcattctgtaaaggaaattcaactgatatttatcagttttcatgtgggccgcagargtctgaataataaaaatgagagatggcaggacgcattactgagacttaaaaagactgaagagygatgaggctttctgacctgcctgcttgcatcggtttcttctctttttttaagaggaaaaaggttcytcactgctttcaggttttgtttaacttcagttctgcagaaggttatgcgtttttttcctctaatatttataacctacgaccgcttcagtgcaggcgtctcagagagcctctcttaagcaggatagcatccggaggcaggaacatattcccaactgggagacactgttggat

SEQ ID NO: 66582 - DNA, 600 bp, Chicken  19866894335125_3
gctgtgttttcaaaaatttaccagagttccttctttgtcctgctctggaaggaggaaggagttctgcctggcactccaaggagcagcacacgttcagcccatccaggcatctcttcagtttgytgctctgctgtacagctgtgatgcctcaatctgtaacttctcagggctttccaaagaagcattctgtaaaggaaattcaactgatatttatcagttttcatgtgggccgcagargtctgaataataaaaatgagagatggcaggacgcattactgagacttaaaaagactgaagagygatgaggctttctgacctgcctgcttgcatcggtttcttctctttttttaagaggaaaaaggttcytcactgctttcaggttttgtttaacttcagttctgcagaaggttatgcgtttttttcctctaatatttataacctacgaccgcttcagtgcaggcgtctcagagagcctctcttaagcaggatagcatccggaggcaggaacatattcccaactgggagacactgttggataagaacaaccaatgctaagagtacatgtcacytattttgctccgtccgcctctgttgcacact

SEQ ID NO: 66583 - DNA, 600 bp, Chicken  19866894335125_4
cctggcactccaaggagcagcacacgttcagcccatccaggcatctcttcagtttgytgctctgctgtacagctgtgatgcctcaatctgtaacttctcagggctttccaaagaagcattctgtaaaggaaattcaactgatatttatcagttttcatgtgggccgcagargtctgaataataaaaatgagagatggcaggacgcattactgagacttaaaaagactgaagagygatgaggctttctgacctgcctgcttgcatcggtttcttctctttttttaagaggaaaaaggttcytcactgctttcaggttttgtttaacttcagttctgcagaaggttatgcgtttttttcctctaatatttataacctacgaccgcttcagtgcaggcgtctcagagagcctctcttaagcaggatagcatccggaggcaggaacatattcccaactgggagacactgttggataagaacaaccaatgctaagagtacatgtcacytattttgctccgtccgcctctgttgcacacttgtagtctcatgtagagtccttccctgctgccccacagaacgctgctgaagcaatgtgtgctgtgc

SEQ ID NO: 66584 - DNA, 600 bp, Chicken  19866894335125_5
gcattactgagacttaaaaagactgaagagygatgaggctttctgacctgcctgcttgcatcggtttcttctctttttttaagaggaaaaaggttcytcactgctttcaggttttgtttaacttcagttctgcagaaggttatgcgtttttttcctctaatatttataacctacgaccgcttcagtgcaggcgtctcagagagcctctcttaagcaggatagcatccggaggcaggaacatattcccaactgggagacactgttggataagaacaaccaatgctaagagtacatgtcacytattttgctccgtccgcctctgttgcacacttgtagtctcatgtagagtccttccctgctgccccacagaacgctgctgaagcaatgtgtgctgtgcaggcctgcagcaccataacagcataggcaaaatgtatgtgaggggtctttgatggctgtgctttagtggctatctccttaatggttggggaagaagtgctacaaactagcaatattctgctatgtttttcgtgctttactcaaaatttactaaaataagagctggttaattcacaccattacaaaacatgcacacaaagaaag

SEQ ID NO: 66585 - DNA, 600 bp, Chicken  19866894335132_1
ttcaccatgactttggctggtgagcccctgtcctgctagctgcaccattccctctgatttcctggggagcaaggggccctcactggggtctgaaatgtttaggtcagtagctgtggcttcaagcaacaagcttttggcttctagctcctgcatgcactttcaccgtaagtgagcagtttcttcagctatgactacacatgtctattggtatagcagctataggtcaaacagaaagaaaatggaaaccctggcactcagcctcacttggctctcttctttttttgctaaagagtgtcccarcagttcatactgtcactgtaacagytggtgccaaagtcctttcaggaggaacacaggcaaaccaccctgcaacacagtggtcagtgatccaatatgcagtactacagcgtgagtcacattgttttttgaaccaccctccgtagtgaaactgatgtgcccaagtccacaaataaatttaggtatgccttcaaaacctacgcttgcaatagaactgtgaattcataccagtgcatgaaatacaacagagagacaccacgtgctcctgttccacacttaaaaggcaaagataactgcaggagt

SEQ ID NO: 66586 - DNA, 600 bp, Chicken  19866894335132_2
ccctgtcctgctagctgcaccattccctctgatttcctggggagcaaggggccctcactggggtctgaaatgtttaggtcagtagctgtggcttcaagcaacaagcttttggcttctagctcctgcatgcactttcaccgtaagtgagcagtttcttcagctatgactacacatgtctattggtatagcagctataggtcaaacagaaagaaaatggaaaccctggcactcagcctcacttggctctcttctttttttgctaaagagtgtcccarcagttcatactgtcactgtaacagytggtgccaaagtcctttcaggaggaacacaggcaaaccaccctgcaacacagtggtcagtgatccaatatgcagtactacagcgtgagtcacattgttttttgaaccaccctccgtagtgaaactgatgtgcccaagtccacaaataaatttaggtatgccttcaaaacctacgcttgcaatagaactgtgaattcataccagtgcatgaaatacaacagagagacaccacgtgctcctgttccacacttaaaaggcaaagataactgcaggagtgttcagagcaggcatgtccagactg

SEQ ID NO: 66587 - DNA, 600 bp, Chicken  19866894335137_1
gttggatttgagtgcagtgtaactccacgtgcaagaaagttgttcaggaatctgatggattgtgtgggtgtgtgctgtggtcctaaaagcaagtaatgaggagtagttttcatgttgagttttaattagaagatccttgtttgttatagtggtaggaaaggaagcaaacacccgctgtttctgttttgtatggtgatttgctaccttttcttccaggatttcttatttaagaagagtcaccaacatctacagcttacatgggattttactttgctattttaactagcaaaggtgataagrtaatrtatttctataggaaagatgtcaaagtaatgaaatatatctgtaattaaaatattaatcagaattcaagttttctaggcttattcctcccttcatgtcaagtaacaatcagaaaattgtgtgagctgtttttaacttttttgttactatgttgtaaatgtgagaaacaggatgaaaagttgaataaattgctttgtgaagtaaaatacaacatacagacatgtcaaagataaatgtatatgcagtattctggattaggcaacagataatggtgatcacagaatgactttggttgga

SEQ ID NO: 66588 - DNA, 600 bp, Chicken  19866894335137_2
atttgagtgcagtgtaactccacgtgcaagaaagttgttcaggaatctgatggattgtgtgggtgtgtgctgtggtcctaaaagcaagtaatgaggagtagttttcatgttgagttttaattagaagatccttgtttgttatagtggtaggaaaggaagcaaacacccgctgtttctgttttgtatggtgatttgctaccttttcttccaggatttcttatttaagaagagtcaccaacatctacagcttacatgggattttactttgctattttaactagcaaaggtgataagrtaatrtatttctataggaaagatgtcaaagtaatgaaatatatctgtaattaaaatattaatcagaattcaagttttctaggcttattcctcccttcatgtcaagtaacaatcagaaaattgtgtgagctgtttttaacttttttgttactatgttgtaaatgtgagaaacaggatgaaaagttgaataaattgctttgtgaagtaaaatacaacatacagacatgtcaaagataaatgtatatgcagtattctggattaggcaacagataatggtgatcacagaatgactttggttggaaggca

SEQ ID NO: 66589 - DNA, 600 bp, Chicken  19866894335141_1
aaaatgtatttaactgcttcactgttttggattttctatgccacacaccaaagctaaatttcatattcaggcaataaaaccttttccttgtgcatgtatcttccagcggctcaatatgttcctaacgtgctggacaggtattttgctcatgagacagattacagacttacatggtcaggagcaaaaaaattaagttacaaaaaaagagtctgctaaagatgcaaccagtaatacagtgctattaacagcttcaaccaggctgtaacagctgtaagtttactatatatattacagtcctastaacaagtactatacagttatcagaagtggtcctggggctagtcagatttgcatataattgttacgtgaaagtacaacctactgtcatttgttactacattcatacagcagttttggcctggagaattattttatattcattcrcttaagtcttagcagagggactatgaaactgtctgatactgattgcgaggaagttgttgcctactgagaaactcaggcaaatgacaaccatatatatatgccaagcaagrgaaacagcatacaactgtgcagaggtcaggtggaggaggttcacat

SEQ ID NO: 66590 - DNA, 600 bp, Chicken  19866894335141_2
gctcatgagacagattacagacttacatggtcaggagcaaaaaaattaagttacaaaaaaagagtctgctaaagatgcaaccagtaatacagtgctattaacagcttcaaccaggctgtaacagctgtaagtttactatatatattacagtcctastaacaagtactatacagttatcagaagtggtcctggggctagtcagatttgcatataattgttacgtgaaagtacaacctactgtcatttgttactacattcatacagcagttttggcctggagaattattttatattcattcrcttaagtcttagcagagggactatgaaactgtctgatactgattgcgaggaagttgttgcctactgagaaactcaggcaaatgacaaccatatatatatgccaagcaagrgaaacagcatacaactgtgcagaggtcaggtggaggaggttcacatggatgacaatttaattactctgcaaaatcattaagctctggagatatgccattagaagttctggcacatgcaagtgctaaagggataattaaaatatgcctggggaggtttcattccaacttattattacagcacattggaagt

SEQ ID NO: 66591 - DNA, 600 bp, Chicken  19866894335141_3
ccaggctgtaacagctgtaagtttactatatatattacagtcctastaacaagtactatacagttatcagaagtggtcctggggctagtcagatttgcatataattgttacgtgaaagtacaacctactgtcatttgttactacattcatacagcagttttggcctggagaattattttatattcattcrcttaagtcttagcagagggactatgaaactgtctgatactgattgcgaggaagttgttgcctactgagaaactcaggcaaatgacaaccatatatatatgccaagcaagrgaaacagcatacaactgtgcagaggtcaggtggaggaggttcacatggatgacaatttaattactctgcaaaatcattaagctctggagatatgccattagaagttctggcacatgcaagtgctaaagggataattaaaatatgcctggggaggtttcattccaacttattattacagcacattggaagttactatattttttcatgtaagtttattatgcctcccacctgcagaagaatctttccatctgtcactttgcgcctttgccagcacaacccaagtgcatgagctatgacttc

SEQ ID NO: 66592 - DNA, 600 bp, Chicken  19866894335144_1
ctgctagtggaagggattgattggggtaaaaatgcccttgtattcaacttgtcatgaatattacggtataaattatcatgcctcgtcagacacccatcaggacttgtgtaattagggaagaatagtagtttcatcagaagcaatatatcacaacaagaaaggtataatcaaaccccataatatgtatccttgctgtaaatgtcattgatttggatgatgatacttctacatacttttctttttgtcaagcattgttcagcattagcagctggtgccacaagatcacggaagaacatgcaygtccaggtagtgacagcttttgtttcaagctttccagatcacaaatctccaaatcttctattgactgactgcagtgtgaagttgcaagttgaacgtgctgactgtctatttttgccatrctgagaacagctcayggggctcagaagtggtgcacttaactgacagtaacaggaactttatttttctgcacctgaaagttctgcagtcattcttgattattccaggtctgcatttccatccaatgacttgatactcattttgccatctgaaatacttagcattcaggtgtgaaaaattgag

SEQ ID NO: 66593 - DNA, 600 bp, Chicken  19866894335144_2
gaatagtagtttcatcagaagcaatatatcacaacaagaaaggtataatcaaaccccataatatgtatccttgctgtaaatgtcattgatttggatgatgatacttctacatacttttctttttgtcaagcattgttcagcattagcagctggtgccacaagatcacggaagaacatgcaygtccaggtagtgacagcttttgtttcaagctttccagatcacaaatctccaaatcttctattgactgactgcagtgtgaagttgcaagttgaacgtgctgactgtctatttttgccatrctgagaacagctcayggggctcagaagtggtgcacttaactgacagtaacaggaactttatttttctgcacctgaaagttctgcagtcattcttgattattccaggtctgcatttccatccaatgacttgatactcattttgccatctgaaatacttagcattcaggtgtgaaaaattgagatgacaaagcaaaaatttctatgtggaagaacagattttgtaagaggaatcaaaaatgcaatttctgcagaattggatcaatgtgctggaacagtgggaacattgcttataaacttccc

SEQ ID NO: 66594 - DNA, 600 bp, Chicken  19866894335144_3
cagaagcaatatatcacaacaagaaaggtataatcaaaccccataatatgtatccttgctgtaaatgtcattgatttggatgatgatacttctacatacttttctttttgtcaagcattgttcagcattagcagctggtgccacaagatcacggaagaacatgcaygtccaggtagtgacagcttttgtttcaagctttccagatcacaaatctccaaatcttctattgactgactgcagtgtgaagttgcaagttgaacgtgctgactgtctatttttgccatrctgagaacagctcayggggctcagaagtggtgcacttaactgacagtaacaggaactttatttttctgcacctgaaagttctgcagtcattcttgattattccaggtctgcatttccatccaatgacttgatactcattttgccatctgaaatacttagcattcaggtgtgaaaaattgagatgacaaagcaaaaatttctatgtggaagaacagattttgtaagaggaatcaaaaatgcaatttctgcagaattggatcaatgtgctggaacagtgggaacattgcttataaacttcccccactaccttagcat

SEQ ID NO: 66595 - DNA, 453 bp, Chicken  19866894335149_1
atgtgcattcgacaaagggcaggcagctctgacagcaaatctgggggttggcatggcttccttgaacacaggctctcccccgagcttctataagatgggcacctctgcaagggacggcatctttcagagggatcatcccctctggcaccatgctgagcccccgaagcttctgcctggcctgaaagccaccactcagatgtcagcaggctgcttgcctccatcctacccccaagtcccatgttagaggaagcctgttgcccatcccaagacaaccacacaccatggccaccgcagaacagsgatgcggatggagaggagttcctccggtctcgtgttttttgcgaggggaggggctgggtggccagatcgtcgcacagtcggacgattgtgtggtaggtggggaggagagggaacaaaagctcagtgctgaaagcatagcgtgacccacagtcg

SEQ ID NO: 66596 - DNA, 600 bp, Chicken  19866894335150_1
agccttagatttttcacaaagtgcagataattgttgaacatccgccagtcccttatgtctgatagtggaatttttttttttatgatccattttctggtcttctcctttgcaagagaccatggctcagttcttgcagttacctcgagttaaatctagggcctggaaaattgtaatttttaggtattggtagtagtgtattgatccaaggaataatattacagagaattttacatttgcacagcaagtaaatctttctgagtgctgattgagatacaaacaactttataagcaatgctgtcratgcagttcttcctattccagccaactcaatcttttgacttgcacatcatagagaaactggagaatattgtacaggaatatttgatcactatgcacacaagatgcattatgttcttgttctgaaaaaaatgtgctccatttttctctggtttttgccccagatgggagctctccagtctttcttgtgtcctaattcaaggcaaatgttcctcagggaaaacacaactgaacctccagcatcttctctcccttgcatgaaaaagggtttcacttggaatgaactccccaaaatattgcagc

SEQ ID NO: 66597 - DNA, 600 bp, Chicken  19866894335160_1
atttatctttgtttgtagaaatacgtttatttctaaatcttaaatgacttgtgaaaacagacaaacttttccagcagactttacaagatataccagaatttctcctctacggtatctccataattttatgtttgtattcttatccattattttattcttatttttctacttaagctacaaaaggagaataatcattcccattctattcaattgctactgttgttcagaaaaatacatgaatatttaattgttttggcattttaaaagtaacctcaaggatttctattaccaaatgtaaawtttcacattctttctgttttatctgttcagaatctctgactgctgaatggttttatttttacagaggctgtgtggataacttagcctactcagtctagtacaaaaaggctaaacacacctaataaataggtaaagtaattgccctaaaaattaaaatacagcaattttcacaccagctgtattcttaacacatgatactaggctacaccaagcaactgactactctggagcacattacagaacagaaagaagagatttggaaaattctttctgagtttagagttgtataaccaggaactt

SEQ ID NO: 66598 - DNA, 600 bp, Chicken  19866894335161_1
acaatcaaacccctaatctttaacatgagataaggtatgcattttaggaaagattaatgcttctgagaatagaagatagatgaaatacgtgagaaagagggaaagaaacaggaatgaggggaggagaaccctttcaggatgcactgtgcttattggatgcatccctctccagggagccagggatacccacttctctgctgctccactttggcagcccagatttttcacatggttttagccccctgtaagctatgtgctgtatggatgcactgctaggtttatacacacacaagtatcacrtaattggtttcaatctcactcagattcacaaattcacggtcacaaacacaaaccagcacagcagatacatcaaatacacattataaggcagttcaatgcttataggtgcaatagttacctctcactgttacatagtaacaacagtattccacctgcagatcagtagactggctcaccacattaaactggtggcatctctaaattcatcaaatataacgtttctggtctgtacaaaatctctgcggtcaaatacacttaatttccaagtgcaagatctcaggaaagggaagaaatctttac

SEQ ID NO: 66599 - DNA, 600 bp, Chicken  19866894335189_1
atttagaacttggggagtgcactttccaattcagggtttaaaggttcactatctgttgtgtaaaactaaaccaaaaccaattaaatggaaaacccacagtagactgcatgcatagttttcaggcattttaaagcagttattaaaaataaatttaaaaaaatcactgaaatgatttttgaaggtaggtctataaacaaacttctatgtgtatatgttcttgtattggaaaggctgtctatgcatatattcccttgggcagatcatcacaataacaacaattgttgactctagtataagtarataagaagaactgtgttggttataaataatcgttctttgtgtgttatgccacaacaattttcagtagctctttttgcatgtagagttttaattaagagataactgtcactgcaggttgactacagaaggctgcagtatccagcagagagataaatgccaaygccaagtcatacaggttgggtagcatacgggggagtccagaattaaaaataaataaacaggtttacaattaaaacttgcttatttctgacttactgtgttatatgaagagatgaaaagataaaaaaaaaaaaaaaaaaa

SEQ ID NO: 66600 - DNA, 600 bp, Chicken  19866894335189_2
cactgaaatgatttttgaaggtaggtctataaacaaacttctatgtgtatatgttcttgtattggaaaggctgtctatgcatatattcccttgggcagatcatcacaataacaacaattgttgactctagtataagtarataagaagaactgtgttggttataaataatcgttctttgtgtgttatgccacaacaattttcagtagctctttttgcatgtagagttttaattaagagataactgtcactgcaggttgactacagaaggctgcagtatccagcagagagataaatgccaaygccaagtcatacaggttgggtagcatacgggggagtccagaattaaaaataaataaacaggtttacaattaaaacttgcttatttctgacttactgtgttatatgaagagatgaaaagataaaaaaaaaaaaaaaaaaaaatctgactacttagggttgtgtgtaccaggagatttttttgttattttgcacataatgcattggaaattggatctttgggatgctattagtaaacttgttagggatggtataggtgccctatttaagagtgtgttatggctttcagctcactgggaagtc

SEQ ID NO: 66601 - DNA, 600 bp, Chicken  19866894335193_1
aaattttgttcttataaactgaacattttcttctgagaactaacagtaagcttcagcctattcgaccgtgtatttagaggcatgtttttgagttaagaaatatgtttttcttattcccaagataacagaccatatttcagactagagtggctttgtgtccatttagaagtaaagctcctgagggaaaataaggaggaagaaactccatttgggatcaaaatggtgaaactttacaaaagacccaattattccagggaccgtgtgcttttatcaaaagggtactatctccaagcatagccrtataggttaggtaccaaggtaatctctttactgagtggaggcatcacacaaagcagaagtaatattatagcagagaatgcagtccccaaaattttacgatgatagtcaaactgtcaaagatgacttgaagtaaagcatccataggattaagaagggtaatctgattgactgaactctgtcccatgctggcactgactgcgacttgacatttgagtatgaacgtttgagattaagactatctccaagtttttctccctctgcatagctgctcagatcataaaggaatgggctcgctgcaaa

SEQ ID NO: 66602 - DNA, 599 bp, Chicken  19866894335197_1
  misc_feature (1)..(129): n is any nucleotide
nnnnnnnnnnnnnnnnnnnnnnnnnnnnnnnnnnnnnnnnnnnnnnnnnnnnnnnnnnnnnnnnnnnnnnnnnnnnnnnnnnnnnnnnnnnnnnnnnnnnnnnnnnnnnnnnnnnnnnnnnnnnnnnnntccctgctgtccgtgacctgcagcagaaccggctgagtagcacggagcaggatgacacccctatagagtcctagtgcataacagccatcatcatgttgctgtacttggtggcctgcttcttgaaatgcaggagtcgatcagattagtgggcatctcgtgcctccaagaaasaggtcacaaatgcctgaacgttttctgttaaattagtattctggaatttatttcagaagctgacctgatttctgcaggttctgagcgctgagatgctttaacttgggtgcctgaatatagatacgcaaacttcagtttaattttctgagttttatcatgcaggagtcaacctctcttttctgaggtattgttccatgggaacagaaatccctctaaggaaggaccccagcctcagctcttcccttcctccttcaataatttttttttttgcaagatctctaccccattctctgattctc

SEQ ID NO: 66603 - DNA, 600 bp, Chicken  19866894335201_1
gctgaggaatgctgctcggtatgaggcagtgtgtgagggcagggagaggcattcctcaggcttgctgggatccagctctgtctagacttcataatgcagtggtgcgcaccgcccggccttgaactgctgccatggcatctctcagtgcttcctattaatggaactgaggagcctgtgctctgccagagcctcagccacgctaatgagacccggttcctgacgagtctggcaactggtcccactaaagcagtgaatgtgcagcaggtgggagcagagctcgtctcctgatccacatcctgmtgatggcaagaagcctcccctggtgtccgggtacctctgggctgagggagatgccggagggatgctcctgcaaagggaacctgcagagctgcactctgcagagctgagctcccaacaggtatcatttckccctcactcacatataactgcgacctcttgtttccatgctggtggctttgggtacctgggaggatgctktgtgggtcccagcagtggggtcagcctggggtgaattccaactttggattaaccagcttttcagacctgctgaagtttttggtttatggtatttttggctcc

SEQ ID NO: 66604 - DNA, 600 bp, Chicken  19866894335201_2
ccatggcatctctcagtgcttcctattaatggaactgaggagcctgtgctctgccagagcctcagccacgctaatgagacccggttcctgacgagtctggcaactggtcccactaaagcagtgaatgtgcagcaggtgggagcagagctcgtctcctgatccacatcctgmtgatggcaagaagcctcccctggtgtccgggtacctctgggctgagggagatgccggagggatgctcctgcaaagggaacctgcagagctgcactctgcagagctgagctcccaacaggtatcatttckccctcactcacatataactgcgacctcttgtttccatgctggtggctttgggtacctgggaggatgctktgtgggtcccagcagtggggtcagcctggggtgaattccaactttggattaaccagcttttcagacctgctgaagtttttggtttatggtatttttggctcccaggctgacatgtcataaatgtgttaggcaccaggactgacatgctgggacctgtgcagaattcctattgcccatagggaaggactattcctgcttttacaggttctgctctgcctgccttatagagrc

SEQ ID NO: 66605 - DNA, 600 bp, Chicken  19866894335201_3
gctaatgagacccggttcctgacgagtctggcaactggtcccactaaagcagtgaatgtgcagcaggtgggagcagagctcgtctcctgatccacatcctgmtgatggcaagaagcctcccctggtgtccgggtacctctgggctgagggagatgccggagggatgctcctgcaaagggaacctgcagagctgcactctgcagagctgagctcccaacaggtatcatttckccctcactcacatataactgcgacctcttgtttccatgctggtggctttgggtacctgggaggatgctktgtgggtcccagcagtggggtcagcctggggtgaattccaactttggattaaccagcttttcagacctgctgaagtttttggtttatggtatttttggctcccaggctgacatgtcataaatgtgttaggcaccaggactgacatgctgggacctgtgcagaattcctattgcccatagggaaggactattcctgcttttacaggttctgctctgcctgccttatagagrctggaggacatgcacaggcaggctgttagggctctgcatccagggtgagactcgcagcctgcacacctct

SEQ ID NO: 66606 - DNA, 600 bp, Chicken  19866894335201_4
kccctcactcacatataactgcgacctcttgtttccatgctggtggctttgggtacctgggaggatgctktgtgggtcccagcagtggggtcagcctggggtgaattccaactttggattaaccagcttttcagacctgctgaagtttttggtttatggtatttttggctcccaggctgacatgtcataaatgtgttaggcaccaggactgacatgctgggacctgtgcagaattcctattgcccatagggaaggactattcctgcttttacaggttctgctctgcctgccttatagagrctggaggacatgcacaggcaggctgttagggctctgcatccagggtgagactcgcagcctgcacacctcttaatttacatgcagggggatgggcacagagagcttctgtgctgaagcctgtaacaaatgctgagaaaacctgcaaagtccactcctgcttcctgctctaaatcccctacagcagccactgacattcagagccaaacgctttccagccaatggaaagattccctttgactttaatggtctttgcataagtacctaattccttcctgttcacagactctcttggatctggtt

SEQ ID NO: 66607 - DNA, 600 bp, Chicken  19866894335203_1
tcattacttaatgtgcattttaggttattatattgatgcatgaggaattcttttcagagtattttgcattcagagttgacttaataaacaaagagaatgcagcctgatgtgacagaaatcaatgaactgtccatataaaatctgtgccattgtgatcagaagaagtatttatccatgaacaaaggtgtcaagtgcagtgtttagataccagtcggattaaacaaatcttcagaacaagatgcctgattttgcttgaaatcaatttggtctttttgagaatcccactgtgtgtatgtttaygagttcaaagatgtagagagcacttgaaaatactctccaaaattctttggatctcctcccatycaggttttattcttaaatcataatayaaaaagcgaactctgctattctttcagctcccggttgrcttttccattttgaatgaattaatttaatttctgcagaatatattctccctacatctggtagttaaatgaagccatgtgcaactatgtgagctgtctgttccacatggtgggagctggaacttacttttggaaagaggaaatcaccagcactttctccctagcagaaacagca

SEQ ID NO: 66608 - DNA, 600 bp, Chicken  19866894335203_2
ttgcattcagagttgacttaataaacaaagagaatgcagcctgatgtgacagaaatcaatgaactgtccatataaaatctgtgccattgtgatcagaagaagtatttatccatgaacaaaggtgtcaagtgcagtgtttagataccagtcggattaaacaaatcttcagaacaagatgcctgattttgcttgaaatcaatttggtctttttgagaatcccactgtgtgtatgtttaygagttcaaagatgtagagagcacttgaaaatactctccaaaattctttggatctcctcccatycaggttttattcttaaatcataatayaaaaagcgaactctgctattctttcagctcccggttgrcttttccattttgaatgaattaatttaatttctgcagaatatattctccctacatctggtagttaaatgaagccatgtgcaactatgtgagctgtctgttccacatggtgggagctggaacttacttttggaaagaggaaatcaccagcactttctccctagcagaaacagcagccaaacagttgacagtgataggtgaayccctagcagaataggcctagctctgtgctgacatg

SEQ ID NO: 66609 - DNA, 600 bp, Chicken  19866894335203_3
aaagagaatgcagcctgatgtgacagaaatcaatgaactgtccatataaaatctgtgccattgtgatcagaagaagtatttatccatgaacaaaggtgtcaagtgcagtgtttagataccagtcggattaaacaaatcttcagaacaagatgcctgattttgcttgaaatcaatttggtctttttgagaatcccactgtgtgtatgtttaygagttcaaagatgtagagagcacttgaaaatactctccaaaattctttggatctcctcccatycaggttttattcttaaatcataatayaaaaagcgaactctgctattctttcagctcccggttgrcttttccattttgaatgaattaatttaatttctgcagaatatattctccctacatctggtagttaaatgaagccatgtgcaactatgtgagctgtctgttccacatggtgggagctggaacttacttttggaaagaggaaatcaccagcactttctccctagcagaaacagcagccaaacagttgacagtgataggtgaayccctagcagaataggcctagctctgtgctgacatgcatccttccatgtgctggcatgtcag

SEQ ID NO: 66610 - DNA, 600 bp, Chicken  19866894335203_4
tgtccatataaaatctgtgccattgtgatcagaagaagtatttatccatgaacaaaggtgtcaagtgcagtgtttagataccagtcggattaaacaaatcttcagaacaagatgcctgattttgcttgaaatcaatttggtctttttgagaatcccactgtgtgtatgtttaygagttcaaagatgtagagagcacttgaaaatactctccaaaattctttggatctcctcccatycaggttttattcttaaatcataatayaaaaagcgaactctgctattctttcagctcccggttgrcttttccattttgaatgaattaatttaatttctgcagaatatattctccctacatctggtagttaaatgaagccatgtgcaactatgtgagctgtctgttccacatggtgggagctggaacttacttttggaaagaggaaatcaccagcactttctccctagcagaaacagcagccaaacagttgacagtgataggtgaayccctagcagaataggcctagctctgtgctgacatgcatccttccatgtgctggcatgtcagcacgattgtaaaagtaaccgtgtgaagggtgcctcaag

SEQ ID NO: 66611 - DNA, 582 bp, Chicken  19866894335203_5
aatactctccaaaattctttggatctcctcccatycaggttttattcttaaatcataatayaaaaagcgaactctgctattctttcagctcccggttgrcttttccattttgaatgaattaatttaatttctgcagaatatattctccctacatctggtagttaaatgaagccatgtgcaactatgtgagctgtctgttccacatggtgggagctggaacttacttttggaaagaggaaatcaccagcactttctccctagcagaaacagcagccaaacagttgacagtgataggtgaayccctagcagaataggcctagctctgtgctgacatgcatccttccatgtgctggcatgtcagcacgattgtaaaagtaaccgtgtgaagggtgcctcaagaggctgtggtgctcagggcctccttacagcccagaatgtgctcggcctccagactgaccactaagccccattggtactgttttgtccctcatgagagagttgtgaggccagggaataaaagctgaagtgcctatctttgtgagtgcttgcaggcagctttgctatttgactctatgagccata

SEQ ID NO: 66612 - DNA, 599 bp, Chicken  19866894335217_1
  misc_feature (1)..(3): n is any nucleotide
nnntgatttataagtaaaatacacctcagagctctagagagagccaccagcagtgaagcaatgactaaaggctataaataagaccacaggctcagcatgcttgagaaacaaggaatagtggagatcaatagctacctgaagactactaaatttgatgcctcagctgttgatggccctggcacaggaccgactgcactgttaccacatccactggttctgcttggcccgtgccaactaaaactcttccagataattcctggccacagtttggcagccaaaacatcccaggaactgttcccracaggctatttgcatgaaaacattctgtttcagggaccaagagtttacaaatgtgagtgtgggctgttccgtgcctactggccccagagcccaaamcattcccaggcrcrttgaatcagctgctaccttctgagtgactgcaaggctttccctcaacttattcagatgtgactctgttctcatcaatgtgtgcttctttcacccattaaggtttcataactaaggatcagttacatcacatgtgaattctaggaggaaaactcatgctgatacaatcaagccacatcagcttgcacctg

SEQ ID NO: 66613 - DNA, 600 bp, Chicken  19866894335217_2
atgcttgagaaacaaggaatagtggagatcaatagctacctgaagactactaaatttgatgcctcagctgttgatggccctggcacaggaccgactgcactgttaccacatccactggttctgcttggcccgtgccaactaaaactcttccagataattcctggccacagtttggcagccaaaacatcccaggaactgttcccracaggctatttgcatgaaaacattctgtttcagggaccaagagtttacaaatgtgagtgtgggctgttccgtgcctactggccccagagcccaaamcattcccaggcrcrttgaatcagctgctaccttctgagtgactgcaaggctttccctcaacttattcagatgtgactctgttctcatcaatgtgtgcttctttcacccattaaggtttcataactaaggatcagttacatcacatgtgaattctaggaggaaaactcatgctgatacaatcaagccacatcagcttgcacctgtgtgcatttatgaacatgaaagcttctccacagataatttttaatgcaagcttgtacagcatctggcttggattttgtttcatcataagcatgaata

SEQ ID NO: 66614 - DNA, 600 bp, Chicken  19866894335217_3
caaggaatagtggagatcaatagctacctgaagactactaaatttgatgcctcagctgttgatggccctggcacaggaccgactgcactgttaccacatccactggttctgcttggcccgtgccaactaaaactcttccagataattcctggccacagtttggcagccaaaacatcccaggaactgttcccracaggctatttgcatgaaaacattctgtttcagggaccaagagtttacaaatgtgagtgtgggctgttccgtgcctactggccccagagcccaaamcattcccaggcrcrttgaatcagctgctaccttctgagtgactgcaaggctttccctcaacttattcagatgtgactctgttctcatcaatgtgtgcttctttcacccattaaggtttcataactaaggatcagttacatcacatgtgaattctaggaggaaaactcatgctgatacaatcaagccacatcagcttgcacctgtgtgcatttatgaacatgaaagcttctccacagataatttttaatgcaagcttgtacagcatctggcttggattttgtttcatcataagcatgaataagcaccggtcat

SEQ ID NO: 66615 - DNA, 600 bp, Chicken  19866894335217_4
aggaatagtggagatcaatagctacctgaagactactaaatttgatgcctcagctgttgatggccctggcacaggaccgactgcactgttaccacatccactggttctgcttggcccgtgccaactaaaactcttccagataattcctggccacagtttggcagccaaaacatcccaggaactgttcccracaggctatttgcatgaaaacattctgtttcagggaccaagagtttacaaatgtgagtgtgggctgttccgtgcctactggccccagagcccaaamcattcccaggcrcrttgaatcagctgctaccttctgagtgactgcaaggctttccctcaacttattcagatgtgactctgttctcatcaatgtgtgcttctttcacccattaaggtttcataactaaggatcagttacatcacatgtgaattctaggaggaaaactcatgctgatacaatcaagccacatcagcttgcacctgtgtgcatttatgaacatgaaagcttctccacagataatttttaatgcaagcttgtacagcatctggcttggattttgtttcatcataagcatgaataagcaccggtcatgt

SEQ ID NO: 66616 - DNA, 600 bp, Chicken  19866894335218_1
ccagaagttggggtgcatcagttggcaaccacaggagtgagcagcgaggaccaggagttgagtgaaaaagaactggaagtattagggtaggtgactcggtaaaacaatgacaaaaccaagaaatacaaatatttccaattcttgctccttgcttgggttgccttattgtagaaaaacaggagtttaagagtgaaggctttgggcctgagatgagagctggtctccaagagaagacacaaccagggaccttcgattgccagccctgatgctacagcagatggcaccccaggaaagaccccmaaattccytcacaaggactgctccatctatcagcagggtgagcagaagccaaatcttgggctcacagggagggaaccggcaccgcacaccccagctgtgctggggacatggctgctgcagatggcctggcatgaataactggggcaaaggcagcagcaccacaggggccctctccagatggcacacagcatctccagggagaaggagctgccaaggctggattgagtggattttacattgctcagccatagcggctgcggacaggatgcttgtcattgcgggaatggtaggcgcaggcat

SEQ ID NO: 66617 - DNA, 600 bp, Chicken  19866894335218_2
tggggtgcatcagttggcaaccacaggagtgagcagcgaggaccaggagttgagtgaaaaagaactggaagtattagggtaggtgactcggtaaaacaatgacaaaaccaagaaatacaaatatttccaattcttgctccttgcttgggttgccttattgtagaaaaacaggagtttaagagtgaaggctttgggcctgagatgagagctggtctccaagagaagacacaaccagggaccttcgattgccagccctgatgctacagcagatggcaccccaggaaagaccccmaaattccytcacaaggactgctccatctatcagcagggtgagcagaagccaaatcttgggctcacagggagggaaccggcaccgcacaccccagctgtgctggggacatggctgctgcagatggcctggcatgaataactggggcaaaggcagcagcaccacaggggccctctccagatggcacacagcatctccagggagaaggagctgccaaggctggattgagtggattttacattgctcagccatagcggctgcggacaggatgcttgtcattgcgggaatggtaggcgcaggcataccacaaa

SEQ ID NO: 66618 - DNA, 599 bp, Chicken  19866894335221_1
  misc_feature (1)..(43): n is any nucleotide
nnnnnnnnnnnnnnnnnnnnnnnnnnnnnnnnnnnnnnnnnnnctttgcctggtgcacgtattacaccgggggctcccaacccaagagctgaagaagctcgtatgtctctacttgtacgagaagcaggacccacacgtggagttgcatttgatgctactcccctcttttcccgtgggtcctccagctggtttctttgggacggggttgttttggcagggggccgcattgctcttgtgtcggctcccagcttttgaatatgcctttgggcactgggctgccaggtccaggacacaggaccrgccaggtcctgtgtttcagcacctgtttggttcgggagagcggttccagaaagcggcgttgaagggaagagtgagagtagccgcttgcatgcgcggtgtccccatctttaattaggttagctgctttcatggcaagtgctgtcatacggagccgaaaaatcaataccatatggcaccgcactcagatagcaaacttggagattaattaaaggagaaggaactctgtcaggtctcgtagcgcagcgcctacgattaggcatggctgaactggtttggaaatgcaaaggaggactgggtga

SEQ ID NO: 66619 - DNA, 600 bp, Chicken  19866894335221_2
aaaggagaaggaactctgtcaggtctcgtagcgcagcgcctacgattaggcatggctgaactggtttggaaatgcaaaggaggactgggtgacaccttcaccctgatctgagccgggctcttctccatttggaggcagaatgaagggagatctgcctttccctgcccccagcagagacgctggagatagcagaatcgccatttcatgcgttttactagatttcactatgcctagattggcacccggagagagagagggtggctggtggtggggtggattgaagtggctgggggagaaagkaggcaaggaggtggagaagggcaaaaagcaaccttcaagccacccgtgagcgggcagctctgagcaggacctcctgcagccagcctcaggcgcttctccgtcactcctccacctcctgcaccggtgctttccaaggcaaaccagcttttccaaggttcggttcaaaacttccaacaagtttcattgtcctcaaatcaagaacttaacgggaccaaaaatttctctctcaaatgtgaaagattcccgagaagccggtgaaatgctcttctttaattattatttctataagaccaaaaaaaa

SEQ ID NO: 66620 - DNA, 600 bp, Chicken  19866894335226_1
agtatgggaaatcctgtggtggagtagtggacacacctgtactctaattgggatggcaagttgcactggagcaaaagaattatagagtcatagaatggcctggattgaaaaggaccacactgaccattgagtttcaacccccctgctatgtgcagggtcgccatccaccagaccaggctgcccagagccacatccagcctggccttgaatgcctccagggatgggtcatccacaacctccttgggcaacctgttcagtgtgtcaccaccctctgtgtgaaaaacctcctcctaatatctrtattcctatatctataaaagaaaaggagaagcaatatgaagaacatgaaagctaacagaaaaacatgtttttttcagactttcatgtttgtattaagtgacaacttttaatcagtaaaaaggaaagtttctaaggaagcttgtttttctcacaggtaatcaaagctttacagctagcagatgaaacgctgggaatgctaatggaggggcttaaacagagaaacctacacaactgtgtaaacctcattgttttagctgatcatggtaacgtatatcattttgtttctcagtgtaaacttca

SEQ ID NO: 66621 - DNA, 600 bp, Chicken  19866894335226_2
acttttaatcagtaaaaaggaaagtttctaaggaagcttgtttttctcacaggtaatcaaagctttacagctagcagatgaaacgctgggaatgctaatggaggggcttaaacagagaaacctacacaactgtgtaaacctcattgttttagctgatcatggtaacgtatatcattttgtttctcagtgtaaacttcactgagtcattgttttctttcactgtataagtcaattttataattcactttaccatgtctagaaaagtaactgtttctgtattctttagggatggatatgacmtactgcagccaattagaatacatgactaactacttcaatcagattaatttctacatatatgctgggcctgcagctcgcattcgagcaagcatcgttccgcagaactattatacttgtaagtgtggaccaatcctgggattgcacaagcagtatgacaggaaataaagaaacataaagcagactttcttggcgtaagttgcagtctaagtcagacaggaacaaggtattctgagtagtccaaaggagtgaataatgttgtttttttacatgacttaatcttcttataattgttgaatcact

SEQ ID NO: 66622 - DNA, 600 bp, Chicken  19866894335232_1
cagagctaaaattgtaatgttttgatatatcagccagcaaaaacacaggtgacagagatttctgtcaaccacctgtttggactgctactcagcttctaaaaacaaggcttggcatccatttgctgtgtttgtatacagacctcttgctggcttaaaagcacgctacatctggtgccttctagtgcagaagtgaaagctgttccttgataaggttgttgacacacagcctggactttcctttccaaactgaactcacgaatgagcgagtcagccttaaatccttcaaagcacatttggatrcttatgagcaggattttgatgaggcataagacctcttcagctccctgccagagcccattccctccccaacaaaaaaaagccaaacaaaaaacccaacatttggcaccctacagtcagtccaacttgggctgaaggattgcctcccactgtctctgacatcagcacagctgtgcttgagctgcagggagctgcaaggacaaagactctgactctttttcatggagacagaagaaaagtcccaactcattattaatattctgtgttagaaatagcctatggtttagatggtttgctgtttgc

SEQ ID NO: 66623 - DNA, 542 bp, Chicken  19866894335235_1
tgcagacagaacctgcccaggaacgagcagtgcttcaggtacccgctggtctgctagcagaaagcaaagggctcttggaggacctccacctaacccgtacttcagctacatgcaaacctgatgtgagagggcacacaacacacacctcgccccggctgcggggcagagccatacagggcagtgagagaaggtgcaacttcattcaagatccagaaaacacttaatttcacctatatgggagaaggacggttcccttgatgctggtgttgcttgaagactgagccacgtgcttgggtgaaygtggttaaacaaataactcagagccttccccaagaccagaatgggaccactggtatctgaaaggtgatgttacagcggctgttccacgtccccgtttgcaccaggagaaggaagttctcagaatcacctcatgagactttcagatccactgcagaaccttggacgagtccaagaaagctgctgagctttggatgcctctacacctggagacgccggctgcaagcaggaggcagccaagccag

SEQ ID NO: 66624 - DNA, 599 bp, Chicken  19866894335238_1
  misc_feature (1)..(43): n is any nucleotide
nnnnnnnnnnnnnnnnnnnnnnnnnnnnnnnnnnnnnnnnnnntatttttcttcttaacaacaccctttccttgggcatttatttctaaaaccacagtattagatccttgcgaacaaaagcccttagtttctctgcatttcgtatttgatgtccagcctggcccttctgccctatcacattcctgaggatttgaatctcctgtttcccagaagcagcagggtctggctctgcagccttccctgtggtgtgaggagcgagtcatcctcccgtctgcaccacaagtgcactgaagcacagcrtttgcaatgcttaaagcaaaggtctcacagagcagaccacaggactaacttaaattcattgtctgtttgtagacctggcctacagtcaagatacaacgcytgttccctttggagctctgaagatctccacccatacagccaaccacccgcagtaagagggacatggtgttaatcagtgcccactgcccagcttccctgcaaatgtggctgtacgtggtttgacctcacagrtaayatctcagcacagctgcagcatcaccacactttgttgctgtcagctctgttagtctccagtccca

SEQ ID NO: 66625 - DNA, 600 bp, Chicken  19866894335238_2
tagatccttgcgaacaaaagcccttagtttctctgcatttcgtatttgatgtccagcctggcccttctgccctatcacattcctgaggatttgaatctcctgtttcccagaagcagcagggtctggctctgcagccttccctgtggtgtgaggagcgagtcatcctcccgtctgcaccacaagtgcactgaagcacagcrtttgcaatgcttaaagcaaaggtctcacagagcagaccacaggactaacttaaattcattgtctgtttgtagacctggcctacagtcaagatacaacgcytgttccctttggagctctgaagatctccacccatacagccaaccacccgcagtaagagggacatggtgttaatcagtgcccactgcccagcttccctgcaaatgtggctgtacgtggtttgacctcacagrtaayatctcagcacagctgcagcatcaccacactttgttgctgtcagctctgttagtctccagtcccacgagtactgctgagcacgtttctgtcatgtttctctgcttttccattcccatctccctgtgatccatttcaaagctggcaaatccttcagaagtcatccta

SEQ ID NO: 66626 - DNA, 600 bp, Chicken  19866894335238_3
cagccttccctgtggtgtgaggagcgagtcatcctcccgtctgcaccacaagtgcactgaagcacagcrtttgcaatgcttaaagcaaaggtctcacagagcagaccacaggactaacttaaattcattgtctgtttgtagacctggcctacagtcaagatacaacgcytgttccctttggagctctgaagatctccacccatacagccaaccacccgcagtaagagggacatggtgttaatcagtgcccactgcccagcttccctgcaaatgtggctgtacgtggtttgacctcacagrtaayatctcagcacagctgcagcatcaccacactttgttgctgtcagctctgttagtctccagtcccacgagtactgctgagcacgtttctgtcatgtttctctgcttttccattcccatctccctgtgatccatttcaaagctggcaaatccttcagaagtcatcctattcagagcagtggattccctgcagaaatcagaggcagcagataaagcagagttaagctatagtccataccttgcaaagccacagtgcactcaggctttaaaatgatgcggtttgatgtgagatgtagctga

SEQ ID NO: 66627 - DNA, 600 bp, Chicken  19866894335238_4
cttccctgtggtgtgaggagcgagtcatcctcccgtctgcaccacaagtgcactgaagcacagcrtttgcaatgcttaaagcaaaggtctcacagagcagaccacaggactaacttaaattcattgtctgtttgtagacctggcctacagtcaagatacaacgcytgttccctttggagctctgaagatctccacccatacagccaaccacccgcagtaagagggacatggtgttaatcagtgcccactgcccagcttccctgcaaatgtggctgtacgtggtttgacctcacagrtaayatctcagcacagctgcagcatcaccacactttgttgctgtcagctctgttagtctccagtcccacgagtactgctgagcacgtttctgtcatgtttctctgcttttccattcccatctccctgtgatccatttcaaagctggcaaatccttcagaagtcatcctattcagagcagtggattccctgcagaaatcagaggcagcagataaagcagagttaagctatagtccataccttgcaaagccacagtgcactcaggctttaaaatgatgcggtttgatgtgagatgtagctgagagg

SEQ ID NO: 66628 - DNA, 599 bp, Chicken  19866894335240_1
  misc_feature (1)..(47): n is any nucleotide
nnnnnnnnnnnnnnnnnnnnnnnnnnnnnnnnnnnnnnnnnnnnnnntaaccactagaactgcaaggccaaattcatttcatacaagtcagagaggcaaactgagaccgtaatgaatttttgccactgtcaaccacaactagattcaaaccagatgctagtagctgagaggctctttagcttgttatagaccttctaagccacccagtctccagtctttgcctgtcctgactgaagattatcaaaaaggaaatctgtagcttaaggaaattcttcctggttcagtaaagtctggcgggtractgtattctgccttgctttgtcttgaccccaattactaaacactgataagcatcgggaagtaagtggttgtattatttaacaaatgaaaggtcaaaagcgctgctattcagcaaggtcagaggttaccatcactgttattaaacagtttgaaagcagttctcccatcagttgccatcccaggttcaaacaagcagctcaacagtcgggcagccaggagggaagaaaataggcaccaggcatcattcagcttggctcaggtcaggcagctttgcactgataacctccctcattgaggga

SEQ ID NO: 66629 - DNA, 599 bp, Chicken  19866894335246_1
  misc_feature (1)..(80): n is any nucleotide
nnnnnnnnnnnnnnnnnnnnnnnnnnnnnnnnnnnnnnnnnnnnnnnnnnnnnnnnnnnnnnnnnnnnnnnnnnnnnnnnaaaaactgcgtttgtttggtcacagcaaaagttagaagtatcttagcccaaaacgaatcatattcaatattaacatctactgagctgcagcaggagtatggtgaagtaatttggtttagttcagagtagaaaatcttcaggattgaagtttttattgcttctactgttaatactgcagaaaatttttcatcgtaaccaaccacaaactattcaaacagawcrgattactctaacgtactgcagctaacaatcttgcatttggaaagagatggaatggataacccaacaaaacttttttcatctctggtttccgtgtttattttgacacccagtggaagtttattcagaatttttgcaagctagaggaatctaggacctgttaaagcaatatgccagttagctatgacattctgagtttgagaaatgtatggaagcaaatgctcttgcccattgtgccccacaacatgtaaggcaatgaactattatttctagaaatgggaaaagcacaatattgtttca

SEQ ID NO: 66630 - DNA, 599 bp, Chicken  19866894335246_2
  misc_feature (1)..(78): n is any nucleotide
nnnnnnnnnnnnnnnnnnnnnnnnnnnnnnnnnnnnnnnnnnnnnnnnnnnnnnnnnnnnnnnnnnnnnnnnnnnnnnaaaaactgcgtttgtttggtcacagcaaaagttagaagtatcttagcccaaaacgaatcatattcaatattaacatctactgagctgcagcaggagtatggtgaagtaatttggtttagttcagagtagaaaatcttcaggattgaagtttttattgcttctactgttaatactgcagaaaatttttcatcgtaaccaaccacaaactattcaaacagawcrgattactctaacgtactgcagctaacaatcttgcatttggaaagagatggaatggataacccaacaaaacttttttcatctctggtttccgtgtttattttgacacccagtggaagtttattcagaatttttgcaagctagaggaatctaggacctgttaaagcaatatgccagttagctatgacattctgagtttgagaaatgtatggaagcaaatgctcttgcccattgtgccccacaacatgtaaggcaatgaactattatttctagaaatgggaaaagcacaatattgtttcact

SEQ ID NO: 66631 - DNA, 585 bp, Chicken  19866894335246_3
tatgccagttagctatgacattctgagtttgagaaatgtatggaagcaaatgctcttgcccattgtgccccacaacatgtaaggcaatgaactattatttctagaaatgggaaaagcacaatattgtttcacttctcatctaagtttctgttcttaaattacgtaagaagctgcactaccactaatatttttttttactaatagtttaattttgcagatgcaagagaacagaggataatttaataaatgtacaagaaggtcattgtatcaagactctataaaatctaacttgaagaaatyttttttgtctttttttttctgaccagaacactactttttgttttgtgttgatgactaacgctttcaaagttagcagatactcctttatttggtaaaatctatttgtacatagaaagagaaaaaggtgtaatgaaaacagcagggggttcttctttccattttttatatttggtctcaatcccagctcctaactctacatccactctatgtgatggagagaatgaataggagtattaatgtaaatgggcattaatgccttttatttcctcacaaaattaagtgtaa

SEQ ID NO: 66632 - DNA, 454 bp, Chicken  19866894335249_1
gggttcctccactcttccacgcctccattcttcgtgaccccaacccttggtggccccatatttggggttcctcccacagtgggtcaccccaaccttcggtgccccccaccctcggtgtgcgccccccccaaagacacccacctcctggctgaggacctgcagtgggtcggtggtcccgggccgcagatggcggtgcagcagagcgtcccgtgtcaaaatggcgccggcccgcagcacgaaggacaggaacaggttggcgtggatgtagttacgggtgcaccgcaggcgcctgtgggggcrgagggacccccgggcagcacccatgggtgccccgcagcacccatgggtgctccgatggtgatcgagcccataggtgccccactgcgcctataggtgatcgcratgccatacctgaagagcaggaggaggaggagggtcagggcagcacccatgg

SEQ ID NO: 66633 - DNA, 352 bp, Chicken  19866894335249_2
cccccaccctcggtgtgcgccccccccaaagacacccacctcctggctgaggacctgcagtgggtcggtggtcccgggccgcagatggcggtgcagcagagcgtcccgtgtcaaaatggcgccggcccgcagcacgaaggacaggaacaggttggcgtggatgtagttacgggtgcaccgcaggcgcctgtgggggcrgagggacccccgggcagcacccatgggtgccccgcagcacccatgggtgctccgatggtgatcgagcccataggtgccccactgcgcctataggtgatcgcratgccatacctgaagagcaggaggaggaggagggtcagggcagcacccatgg

SEQ ID NO: 66634 - DNA, 600 bp, Chicken  19866894335251_1
tatctccatagaatgagactccacagcctctctgggcaacctgttccagtgctccatcacccctacgtgaagaaggtaggggtttgccctgaaggttacctgaaaggtttagggtttgcctttaaaaagtagacgcctatctttactgttcaccttctgcagtagaatagctggctggctgtatgccctccttgtcaagcagataagcatcacatggcaattgcccccctttattgtgcttatcattttctttgtaatgatattctgcagtattgacctcttactctcacagttgtagcmttcaaagagaggattctaaacatagctcttgtatagagctttacatcttcaaagacctgataaaaattaattatctttctaattctgagataatgtgaagacctgcatattgaacatatgacaactatgaccttttctcttgattcgcagagtgcctcagatagttctgaatattgatcttgcaccaacaattctggatattgcaggacttgacacacctccagatatggatggcaaatctgtcctaaagcttctagacttggaaagaccaggaaataggtgagtctcaggcttgagttt

SEQ ID NO: 66635 - DNA, 600 bp, Chicken  19866894335257_1
atgcagcctgttcaggggagagggttgccaaacagatgtgtgatggatggctgctctgcaatcagattacacatacatacaaagccttcctactattcttgtcacccatgttgtcagtctgaggaaaaatgtttcagtgtagtactttgatggagagcctacccagggatctgctaaaattgctacccaggaaggtagctaaaagtcagaacacatctttgtgaaagtaatacatgtatgttaaaggaagatctatgtggtttgagggtccttggagacaaatttcctataaggcttacmatttttgtctgtttgtttgtttatttgccttccttcttctgtaaccttctcctgtcttccactccccagttgtctttatattcaaaattggtgaagctgatatttatgtttccatgaaaatcttggagggtacatttctttccctactgctgtccatagtcagaatcttgcattgtctgcagactttgaagctgacctaaatcccaggatctcaatactttaactctttgactaaatgagaagtgatttttaaatgaaatttcagagtccttaagtgatgctgtaaagttttatgatgtt

SEQ ID NO: 66636 - DNA, 460 bp, Chicken  19866894335263_1
ttgaggccagtagaatgaagttcaacaagacgaagtgccaggtcctgcacttctgccacaataactcctctgtcaacccataccaaaaagtagcttaaattatgaggacacaagtacaagaatcacggaagattacaaaattattaaatttcagttggaccaaatttataagtcaaaatcgatttttaggaggtctggctacacaactgctgctattgttaaacactgagttctattatgattttgttgcaagccttcatttaaagtgccatagtcttttaataaagaaaaatatagctkcttttcatcacctcagtagatttggtttgttatctcatcctaatgtatgcctgaagttctttctctttattctacctttcttttttgtatggacatacaggtagaaaacaaccccagtgcaaaatgacatagttagtccctttgttgttcaaaaaactag

SEQ ID NO: 66637 - DNA, 600 bp, Chicken  19866894335268_1
aatggcataatgggggactggaagtactggaaacggcaatataggggattaggagagactgggaatgtattcagaagccctggggggagggatgtgggcaccgggagggcctgggagcaactgggagtggtattatgtggaaatgggaggggctgggaatgggattacaggcactgggagggactggggggtattgggaatggcgttaagggacgctggggttactgggagcactggggttactgggagcactactaatagggttgctgtcagcacggggcccacctccatcaggaagaygcccgcctcccttgcagctgctgccatctccttggcctcgcgggcgctgatgcccaatggcttctccaccagcacagccttgcgtgcccgcaggaacaggagggtggccggcaggtgctgcgggttcaccgtgcccacgtagaccacgtctggggcagggggacggggagacaccagtggggacaaggagaacccgttagggagaatgagaccccggtggggatggggagaactcactggggacagggagacccactggagacaatgagatagcgatggggaaagagaccccatttgggc

SEQ ID NO: 66638 - DNA, 600 bp, Chicken  19866894335275_1
cagctgtatctcagttaggttcaaagtgtgcttttgtttagggtaagctatgcatgcttcagagacctgactctttcccaaagagcttccatttgcaaaactggactagaagtttcccaacacttacactgaaaacagtagaacagcatttccacttgctggccctgatcagaaataggaaacacaatatgaagaaaactgaactgctactgcttgtaaaaaaaaaaaaaaaaaaaagaacattttttggaaacgtggagttatgggcatagtctcccaatgtactggtcttagtcaaayccaagtgcctaggatccatttaggaaacattcakttaagtctgtccttgtgcaagaggttatgcacagaagggtctctgtgacaacctctgcaggatgtgctatggtgagcttatggatagttgactccttttgctgctatgtccatccaggttttggacactcaaacacaaactgggcagccacaaaataagcagctcctcacctagacattctgcatttctggaggtaaatggtaacagcaatgataacaagctgactgtatccctgagatggcatagaaattgatcttccttctagg

SEQ ID NO: 66639 - DNA, 600 bp, Chicken  19866894335275_2
tgtttagggtaagctatgcatgcttcagagacctgactctttcccaaagagcttccatttgcaaaactggactagaagtttcccaacacttacactgaaaacagtagaacagcatttccacttgctggccctgatcagaaataggaaacacaatatgaagaaaactgaactgctactgcttgtaaaaaaaaaaaaaaaaaaaagaacattttttggaaacgtggagttatgggcatagtctcccaatgtactggtcttagtcaaayccaagtgcctaggatccatttaggaaacattcakttaagtctgtccttgtgcaagaggttatgcacagaagggtctctgtgacaacctctgcaggatgtgctatggtgagcttatggatagttgactccttttgctgctatgtccatccaggttttggacactcaaacacaaactgggcagccacaaaataagcagctcctcacctagacattctgcatttctggaggtaaatggtaacagcaatgataacaagctgactgtatccctgagatggcatagaaattgatcttccttctagggacctgcttttggagatcatcctgaccagccttt

SEQ ID NO: 66640 - DNA, 600 bp, Chicken  19866894335278_1
gtgagactgtacatttaatgacaaaaacaaggcaaaaaagtaaataaaaaagaagaaacttggtcaggcagaagaagtcctccggggagcatttcggcttttaccaggtggcctcctctgcacgtttcaattcctgagggataaaccggtggaaacagactcagagccatacgcgtatccgggctgaatgtggttcctcctgtcatttgttcttattgtctggagcaagaggaaatatcagcaaatcaattgcaaagtcgtcagtaattttggaaggtgaagaggtctggtagcttaagygaagctctgagcatgagagctggcctggaggggacagcagcaggtaacctcccagcaccgctgtccttcctcaatcaacgcctgcagccgttacctgcaagacgtgacctcgttgcagcagacattgagtttacagatgcaacaaaggaaaacccagtgtcaagtggaatattgtcagtgttcaatagatagatcatgttaatagagttgcacatttctgcctcagtttacctgcaagaacaycaggctgaaaactcctccttccagcaaccactccctcagtattgacattgactgaca

SEQ ID NO: 66641 - DNA, 600 bp, Chicken  19866894335278_2
aatcaattgcaaagtcgtcagtaattttggaaggtgaagaggtctggtagcttaagygaagctctgagcatgagagctggcctggaggggacagcagcaggtaacctcccagcaccgctgtccttcctcaatcaacgcctgcagccgttacctgcaagacgtgacctcgttgcagcagacattgagtttacagatgcaacaaaggaaaacccagtgtcaagtggaatattgtcagtgttcaatagatagatcatgttaatagagttgcacatttctgcctcagtttacctgcaagaacaycaggctgaaaactcctccttccagcaaccactccctcagtattgacattgactgacaactgcctgatgagataaatattttcatccctggcctttaactcgggtgtctaacagagccctagagaagtcagtaaaaaattatgtctgtgggcactgtggcatcctctgttctgcaggtaatacaaacctatcacctctgcgtcttgaactagtccagaatgccactcacattgaagggcagaattggtcatggaatcattaaggttggaaaagacctctaagatcaccaagcccaacccaa

SEQ ID NO: 66642 - DNA, 362 bp, Chicken  19866894335279_1
agttcgtttgataaatctcatcagctattctagaaacagcaaacgctctctgaaacccaactcctcttcaatcttatccagcaaacaacttctcattcttggggaaaaacgcatcaaagtgatggagcggcccctttaaaagggagattaatgaaactgatacaatcccaccaacacctcggtcaaacctccctcctgcatttcagatgtaactttaaaaggccccactgatggatggctgctgtaatcagaaaacatgagcgcactgtgaaaacccaacagaggagctcaatttgccaraagagcagaaagcaggcagggaaacgcgcagcccttccagcacaaggcacgccgtatctcag

SEQ ID NO: 66643 - DNA, 600 bp, Chicken  19866894335281_1
aaggcctccaggatgagtcctggcatccacagtgcagtaaatctgagcttgtattgagcaaattgaaatatattaaggaaaaaatcagtagtcatgggcaatacatatgaagtaagaaggagatgccaactcagcttcttctgcagaaggaaaacatacctcacaaatccattactattctttgaagagttagtaaacttacagttaagatgatcttgctacagtacaataagtgtctgtttaccgaatggcattaccttgacagaccttctctaattccttggctcctattctcacacraagtcatttctgagtgcttgccttcaatttataagaatgcctggagtctgatctactgtgtatttgctcacactcctctctcagatcatcatttttctctgcttatctaatcagttacataactacttcccctcttcaatttaatctaaatgtagtcgtcatatattctacctgcccttcttcaaaaaaccctctagtccttaatcaatttaatcatttccttcatacaccctaaaataccctcaaaatgatcttatttttctttccttattgatagcatgtacatttcttactgtcagc

SEQ ID NO: 66644 - DNA, 599 bp, Chicken  19866894335289_1
  misc_feature (1)..(165): n is any nucleotide
nnnnnnnnnnnnnnnnnnnnnnnnnnnnnnnnnnnnnnnnnnnnnnnnnnnnnnnnnnnnnnnnnnnnnnnnnnnnnnnnnnnnnnnnnnnnnnnnnnnnnnnnnnnnnnnnnnnnnnnnnnnnnnnnnnnnnnnnnnnnnnnnnnnnnnnnnnnnnnnnnnnnntgcaccaaatgcaaatctatatgaactaatacaacttgttccaaagtcagaacgcatcatgctgcattcagcagaagccttctaaaggccctactgcttgagagcagctttactgtgaatgttgtatgctagaaratggtgagaaaaaattcctgctaaaactgacagtatctaatcatcttgctcacagctatgaacagctcagttacttgagtttttcatctaaataggtttaatatattttgcaagcatgctgtctgtgttttttctccctgctttctcaaaggctgagttcatttgtcatgaagccagggacatccatgaagggaatatcagatgtttgtggcatttgtaatattgccttcaggccaatgcattccaaaataggttggactccgtccacctgtttttacaatgcttgttgagcacaggta

SEQ ID NO: 66645 - DNA, 599 bp, Chicken  19866894335292_1
  misc_feature (1)..(14): n is any nucleotide
nnnnnnnnnnnnnncctgtgtaagtggcatgagtggtagtgagaaagacaagtttgtgccttaaaacttctgtataatggctgatattgcagaacggcagtgatagtcactcgtcttttgtccttaccagtattgtggattcacagtgttgttaacttaaatacttctgttaattattttgtttaaaagcagataactgaagtgtaaaaaatgcttgaggtttttttgttgttgttgctgtttatttgtttgtttgtttttttccagtagacaagcaaaatagaatgccctgatactcakctgaatgatagcaagggaytgtggtgaaataaattaaaggaatttttattattgttaagcagaagagatgtagcagtttgtacatgacagctatttaatagcctcacttttaggtgcacatgtagacaggctgyacaggcatcagacctgatcaacagaattaccttctattttgttccttatgaagaacaaaggattattaaataatgaaataaagacaaaatgaccggtacaatgtgttaattgtctatggtatgtgtggccaagattctttttatttcctagcttcttaagatttt

SEQ ID NO: 66646 - DNA, 600 bp, Chicken  19866894335292_2
gtaagtggcatgagtggtagtgagaaagacaagtttgtgccttaaaacttctgtataatggctgatattgcagaacggcagtgatagtcactcgtcttttgtccttaccagtattgtggattcacagtgttgttaacttaaatacttctgttaattattttgtttaaaagcagataactgaagtgtaaaaaatgcttgaggtttttttgttgttgttgctgtttatttgtttgtttgtttttttccagtagacaagcaaaatagaatgccctgatactcakctgaatgatagcaagggaytgtggtgaaataaattaaaggaatttttattattgttaagcagaagagatgtagcagtttgtacatgacagctatttaatagcctcacttttaggtgcacatgtagacaggctgyacaggcatcagacctgatcaacagaattaccttctattttgttccttatgaagaacaaaggattattaaataatgaaataaagacaaaatgaccggtacaatgtgttaattgtctatggtatgtgtggccaagattctttttatttcctagcttcttaagattttgcaaatttgtggatttgcat

SEQ ID NO: 66647 - DNA, 549 bp, Chicken  19866894335292_3
gtggattcacagtgttgttaacttaaatacttctgttaattattttgtttaaaagcagataactgaagtgtaaaaaatgcttgaggtttttttgttgttgttgctgtttatttgtttgtttgtttttttccagtagacaagcaaaatagaatgccctgatactcakctgaatgatagcaagggaytgtggtgaaataaattaaaggaatttttattattgttaagcagaagagatgtagcagtttgtacatgacagctatttaatagcctcacttttaggtgcacatgtagacaggctgyacaggcatcagacctgatcaacagaattaccttctattttgttccttatgaagaacaaaggattattaaataatgaaataaagacaaaatgaccggtacaatgtgttaattgtctatggtatgtgtggccaagattctttttatttcctagcttcttaagattttgcaaatttgtggatttgcataaactttatttctaagcttctcggttataatacgctcaatttgcaactgatgagttgggaaaaa

SEQ ID NO: 66648 - DNA, 600 bp, Chicken  19866894335297_1
gaagcagaatgattcccaagaaatacatatatttgctggatcagaaagccaaattcacgttgcagaatgtaaagatagctgtagcatgccatttctttctcccttgctccctgggtaatttatcagtcagaaaaatggcaaagctaatggaaaaaagaattgcacgagtattctgctacagtttcatggaagagcaagtctcctgtttcatttacagggtagcctccactgggaagaagagtagcatccagtaaaactgcagtatttccacattagcacagtgactgtgtaaaattaaayagaaaaacgccagtgccctaatatgcctctgttgtggagttctaccagcctctaccttcagggcaaatactgcactttcagttattaccaaatttacaggaatcatagattygtttgagttggtagggacccttaaaggtcctctagtctaacccccctgcaatgaaaaggaacacctacagctccaccaggtgctcaaagcctggttcatcctgatcttgaatgtctccagggatagggyttccactacctctctgggcaacctgtgccagtgcctcaccacccttattgtaaaaagct

SEQ ID NO: 66649 - DNA, 600 bp, Chicken  19866894335297_2
gggtaatttatcagtcagaaaaatggcaaagctaatggaaaaaagaattgcacgagtattctgctacagtttcatggaagagcaagtctcctgtttcatttacagggtagcctccactgggaagaagagtagcatccagtaaaactgcagtatttccacattagcacagtgactgtgtaaaattaaayagaaaaacgccagtgccctaatatgcctctgttgtggagttctaccagcctctaccttcagggcaaatactgcactttcagttattaccaaatttacaggaatcatagattygtttgagttggtagggacccttaaaggtcctctagtctaacccccctgcaatgaaaaggaacacctacagctccaccaggtgctcaaagcctggttcatcctgatcttgaatgtctccagggatagggyttccactacctctctgggcaacctgtgccagtgcctcaccacccttattgtaaaaagcttcatccttatacccagtgtaaatcttcccttttttagttcaaaaaccacttcccctcatcctatcacaacagaccctgctgaagaatctgttcccttctttcttacagcccc

SEQ ID NO: 66650 - DNA, 600 bp, Chicken  19866894335297_3
tagcatccagtaaaactgcagtatttccacattagcacagtgactgtgtaaaattaaayagaaaaacgccagtgccctaatatgcctctgttgtggagttctaccagcctctaccttcagggcaaatactgcactttcagttattaccaaatttacaggaatcatagattygtttgagttggtagggacccttaaaggtcctctagtctaacccccctgcaatgaaaaggaacacctacagctccaccaggtgctcaaagcctggttcatcctgatcttgaatgtctccagggatagggyttccactacctctctgggcaacctgtgccagtgcctcaccacccttattgtaaaaagcttcatccttatacccagtgtaaatcttcccttttttagttcaaaaaccacttcccctcatcctatcacaacagaccctgctgaagaatctgttcccttctttcttacagccccctttagataccgttctctttgaaacaaaaggaattctttagtagtactgggcaagtgaggatggtaaacatccatctgaatactctcagtcatcagatgtaaaagaaaagggagaaaatcaagcaacca

SEQ ID NO: 66651 - DNA, 600 bp, Chicken  19866894335297_4
tcttcccttttttagttcaaaaaccacttcccctcatcctatcacaacagaccctgctgaagaatctgttcccttctttcttacagccccctttagataccgttctctttgaaacaaaaggaattctttagtagtactgggcaagtgaggatggtaaacatccatctgaatactctcagtcatcagatgtaaaagaaaagggagaaaatcaagcaaccaagaggtgtcacatgtgaaagcagagaaaaaacctagctcttcaccagcacggcccacttggataacagcttcttttagatyagtagccagaaatgggagccttaaatagcaagggaattagagagaaatcaaacatcagattttgaggtaaagaaaggctgtgataaaacaggcatactcaacctgaagttaactctattacccaggcttaggctaaatgtgcagcccctcatcacagctggtacgccaacaataatctaaaacaaatttctgaacagccagcagctttcctcatttcagacagaccaatcagcagagcaacagcagtatttgaaattatttattcattcactaagataaattctgccacctcttagaagt

SEQ ID NO: 66652 - DNA, 600 bp, Chicken  19866894335311_1
agcacaaaagtcaaagcaaaggttcactgcactcatacaacccaaacttcccacccacccttgtattttggcctatgcctcaacccccgagctgaaaatgctgcttcagggatgtgataagacttgaaatggggacagatggtagggattccttagctcctggtttgaagtctgctgtgctgagaagcagctgctgagcccacgtagagcacaagtcccaacgtgatctcagtgcatggccgagctgagaaaagggaaccaagaggaaggttttggaaaggagtaagggaaggctggaaycttgtgcccygccacctctttaaatctgattaccaatgttggtgcttcaatcagttcaccacataccagagcacctctccacagtttgctgcacccatggtccycactcttgaagtggggataggactctccagtttgattctttctgttttactcttcttttgatgactctgtatgtgaaaacagtatgaacagatcaaatttcaggccacagtgcctcagcaggtgcttatccatcatggtggctaaagttaagagagtgatgagcaattcaggacattcattaatctgctttcttgc

SEQ ID NO: 66653 - DNA, 600 bp, Chicken  19866894335311_2
tcaaagcaaaggttcactgcactcatacaacccaaacttcccacccacccttgtattttggcctatgcctcaacccccgagctgaaaatgctgcttcagggatgtgataagacttgaaatggggacagatggtagggattccttagctcctggtttgaagtctgctgtgctgagaagcagctgctgagcccacgtagagcacaagtcccaacgtgatctcagtgcatggccgagctgagaaaagggaaccaagaggaaggttttggaaaggagtaagggaaggctggaaycttgtgcccygccacctctttaaatctgattaccaatgttggtgcttcaatcagttcaccacataccagagcacctctccacagtttgctgcacccatggtccycactcttgaagtggggataggactctccagtttgattctttctgttttactcttcttttgatgactctgtatgtgaaaacagtatgaacagatcaaatttcaggccacagtgcctcagcaggtgcttatccatcatggtggctaaagttaagagagtgatgagcaattcaggacattcattaatctgctttcttgccatagctccc

SEQ ID NO: 66654 - DNA, 600 bp, Chicken  19866894335311_3
ttcagggatgtgataagacttgaaatggggacagatggtagggattccttagctcctggtttgaagtctgctgtgctgagaagcagctgctgagcccacgtagagcacaagtcccaacgtgatctcagtgcatggccgagctgagaaaagggaaccaagaggaaggttttggaaaggagtaagggaaggctggaaycttgtgcccygccacctctttaaatctgattaccaatgttggtgcttcaatcagttcaccacataccagagcacctctccacagtttgctgcacccatggtccycactcttgaagtggggataggactctccagtttgattctttctgttttactcttcttttgatgactctgtatgtgaaaacagtatgaacagatcaaatttcaggccacagtgcctcagcaggtgcttatccatcatggtggctaaagttaagagagtgatgagcaattcaggacattcattaatctgctttcttgccatagctccctataaaggaaagctgctatgatactaaggttccatcctgtagctagacggcttgaatatggcttttcatcaacactgtctggaagacatcgtcc

SEQ ID NO: 66655 - DNA, 600 bp, Chicken  19866894335316_1
ctgcctacccgtgcgaaagcgaagctgtgagcttacctaaaccagacgcgataacgttccgatttttacgggacgtttagccatttggatttgattaaattctcaccacgctgcggtaatcaagagcgctccgagggagccgaggagctggctaaccgaggccggcaggcaaagaggcggggagcgatgtgggattcccctggcagacgcagcctggctgcggcccttccccaagccgcgcggagcgcaccttctccctcaagccaagaagagggcggctgcagcctagcggcggcagarggaacgrgcagggctggcggagctcagtccggtttgagagcggcacctccgaacgccgcggctacgtgaaacggcgtgcaaaagcacgacgccctcgttacgccggcttaaggcagttcctaaatttgtgaaagggtaactcgatcctgacagactgcgcgcttgacgaagtaccgcgtgtctgcgccgctccgtgtcaggcggggtaacgtcctacccctacggctggcaccgggacgccagataaacccaaagccttcccaaatgccctaccgtgtgcagcagccaattcgtcagata

SEQ ID NO: 66656 - DNA, 600 bp, Chicken  19866894335316_2
cccgtgcgaaagcgaagctgtgagcttacctaaaccagacgcgataacgttccgatttttacgggacgtttagccatttggatttgattaaattctcaccacgctgcggtaatcaagagcgctccgagggagccgaggagctggctaaccgaggccggcaggcaaagaggcggggagcgatgtgggattcccctggcagacgcagcctggctgcggcccttccccaagccgcgcggagcgcaccttctccctcaagccaagaagagggcggctgcagcctagcggcggcagarggaacgrgcagggctggcggagctcagtccggtttgagagcggcacctccgaacgccgcggctacgtgaaacggcgtgcaaaagcacgacgccctcgttacgccggcttaaggcagttcctaaatttgtgaaagggtaactcgatcctgacagactgcgcgcttgacgaagtaccgcgtgtctgcgccgctccgtgtcaggcggggtaacgtcctacccctacggctggcaccgggacgccagataaacccaaagccttcccaaatgccctaccgtgtgcagcagccaattcgtcagatatatgatc

SEQ ID NO: 66657 - DNA, 600 bp, Chicken  19866894335324_1
ttatacaatccaggaagtcctccttactgttggtgctgtacctgtaggttaatggtcgatggggggaagggtgatcccaccgctgcttctggctatgcggagaacaatggctcgagatggctgctctttgacagggctactcctcaaccaaccaaggcaattccatgcttcagtgtagaatgcgtccactccagagctgagtacctcgccaaaaatgaagcattactgacaaatgttgtcacttaacaaggaaataaaataaaataaaataaaataaaataaaataaaataaaataaaawgtgaagtaaaatactttttaaatatttccacataatcaattttcctagctcagtattatagtggaggaaaggttactcaactaagagtggggtgagagagcataatatactataaaacatatttttataatcccttaagacactgttttaactaggcagctatttctagaatggtacactgtattaggttatgtaatggttctgaagatctcagaaaagtactgatgatatgtcaatgactgatagctctttagcaataatacctacatttcacttgtgtctaaattttgctagatcaat

SEQ ID NO: 66658 - DNA, 600 bp, Chicken  19866894335328_1
ctttcatctctttgtggcagaggtgctccagctgatgcatcgggactttggtgactcttctgtcatgagagtggtgagaccaggctgtaagggagcaacctgtagctgcaggaaaggcttggtagcctccagactgcttgttttatgtggctataagacaggagagaaaggacagtggtggtgtgtggccacatgacctgttctttgggtgcaggggaacccacactggattcccatgagcaggatagaaccggcccaaaaaggggctggggcttgcaaggctcaaggagctggaccagraggtatccggttcttcaaccaagtgatattttgtgagtggtatgtgggaaatccctgctctctctccatttaaaccagaactgataggacagtgctcagagctctgcactggagagtatggggctggtgaaacagattgcatcaaaaaccaagcaaccaaccaaccagccagccagccaaccaaccaaccagtcaaccaaccaaccagtcaaccaaccaaccaaccaaccaaccagtcaaccaaccaaccaaccaaccaaccaaccaaccaaccaaccaaacagctaatgcgtgcatgac

SEQ ID NO: 66659 - DNA, 576 bp, Chicken  19866894335332_1
agaagtcacaacagaacacatgaagacataagtctcatctgttctgagatgaaacatgcagtattatctatttttacgaacatctgcatccacctaccccttttttaaatgagtcacgtaggcactctgtagagctgcttccaggaagtaggacagttcaaactcagagtatgtcatgttgctgccctttatactccttgaatgtgtgttgtttaaggtctgtgaggaaagaaatcagcaggattacacacaactctttgaactagccacttcctcaaaagataccaaaaattaaatgtyagcttctgtcatcagattcctcttcaggttacttgaaaacckaccttcattagctattccaaaaacgttccaaagacaactttaaaataaactatacagtgacttctgtgaaatattctgtgtgcaatgtgagctttgaaacatcaacatctgctactttccactcttaataaaacagaaggctacgtatcagtactgagggtttcagaagtactactctgaccaatgtagtcagcacctgaatagaaatagaaccacagtgtttaagtgaggata

SEQ ID NO: 66660 - DNA, 534 bp, Chicken  19866894335332_2
tctgagatgaaacatgcagtattatctatttttacgaacatctgcatccacctaccccttttttaaatgagtcacgtaggcactctgtagagctgcttccaggaagtaggacagttcaaactcagagtatgtcatgttgctgccctttatactccttgaatgtgtgttgtttaaggtctgtgaggaaagaaatcagcaggattacacacaactctttgaactagccacttcctcaaaagataccaaaaattaaatgtyagcttctgtcatcagattcctcttcaggttacttgaaaacckaccttcattagctattccaaaaacgttccaaagacaactttaaaataaactatacagtgacttctgtgaaatattctgtgtgcaatgtgagctttgaaacatcaacatctgctactttccactcttaataaaacagaaggctacgtatcagtactgagggtttcagaagtactactctgaccaatgtagtcagcacctgaatagaaatagaaccacagtgtttaagtgaggata

SEQ ID NO: 66661 - DNA, 600 bp, Chicken  19866894335334_1
tctttttatttttagcagcagtgttttctaaaaggagctgttgttgacaagaaaagccactcatatttgaatacgaaacacttccagcactttaagtgtgaggggaaaggtaagcaattctatccaaagcatttgggagtcacaatcaatcaggaagggaccgtgaaggatttctggataggaaatatttatttacttctccaaaacaattgccctgtgcagacccagagtatttgtttgcgtggctgcagctcataggtgcagcagtcacggaccagcacccagctgtataaagcagtrcacaaatgcagatcagaaagacaggctcaaatctaagaaaagagatcacagatgkatgcagacaggtagctggaggaatataagaaaacaaggtgagattacartgtttgagttcttatggcaaagcaaaacaaaaaaaatatactgaaaggtaaaaggataacatttatttgtatgtttttaaagctgctgctccttcctccagctccagtcctgccacgacgtccaaatgaaataaattctgttaataacacctgagcagcagaagcagccaagggtagaagtctaggtaaagacaaa

SEQ ID NO: 66662 - DNA, 600 bp, Chicken  19866894335334_2
gccactcatatttgaatacgaaacacttccagcactttaagtgtgaggggaaaggtaagcaattctatccaaagcatttgggagtcacaatcaatcaggaagggaccgtgaaggatttctggataggaaatatttatttacttctccaaaacaattgccctgtgcagacccagagtatttgtttgcgtggctgcagctcataggtgcagcagtcacggaccagcacccagctgtataaagcagtrcacaaatgcagatcagaaagacaggctcaaatctaagaaaagagatcacagatgkatgcagacaggtagctggaggaatataagaaaacaaggtgagattacartgtttgagttcttatggcaaagcaaaacaaaaaaaatatactgaaaggtaaaaggataacatttatttgtatgtttttaaagctgctgctccttcctccagctccagtcctgccacgacgtccaaatgaaataaattctgttaataacacctgagcagcagaagcagccaagggtagaagtctaggtaaagacaaatgcttaaagtttactaagtacttaaaaaccacgaggagcaggccttaaaatggga

SEQ ID NO: 66663 - DNA, 600 bp, Chicken  19866894335334_3
gaaaggtaagcaattctatccaaagcatttgggagtcacaatcaatcaggaagggaccgtgaaggatttctggataggaaatatttatttacttctccaaaacaattgccctgtgcagacccagagtatttgtttgcgtggctgcagctcataggtgcagcagtcacggaccagcacccagctgtataaagcagtrcacaaatgcagatcagaaagacaggctcaaatctaagaaaagagatcacagatgkatgcagacaggtagctggaggaatataagaaaacaaggtgagattacartgtttgagttcttatggcaaagcaaaacaaaaaaaatatactgaaaggtaaaaggataacatttatttgtatgtttttaaagctgctgctccttcctccagctccagtcctgccacgacgtccaaatgaaataaattctgttaataacacctgagcagcagaagcagccaagggtagaagtctaggtaaagacaaatgcttaaagtttactaagtacttaaaaaccacgaggagcaggccttaaaatgggaagtgtcaggcaagcccttaataacaggtaatactaccagccccacctat

SEQ ID NO: 66664 - DNA, 600 bp, Chicken  19866894335339_1
ctttgcataaactttgtagctgtgagggatagcatgctgttcagtggctgttgtcattatgaaaaagaaacaatccatactgattaacaaaaaactgtaaaaggatggagtagtatgttacagcttagttgctggcttgacacagagaaagctaattaagtttaaattttaaaatgtatagaatagtaatttcatcttggtgtatttgaggttgtacttgcagctaggaattacaacaaggaatgttattttccaacactgaatgttgataaacacaatgaggaatttatgaatgtgttytgtatttttaaaaagatgtccagaattgggtatgctgataatgttacagcaaggaaatacacatcagtaattgcagttataatccactttccttcctgcttttcttccaaaattcctcaaaaattgagcgtgtcgaaagtggtttaaactggacgtggtatttttaatactttttgactggccataacaattatttctactagtggaaaaaaattaaataagagaagaaaatacaatttttcagttccagagtgccaagaaatgcgttgtttatagtaaaaggctgatcttgtgtgcagt

SEQ ID NO: 66665 - DNA, 600 bp, Chicken  19866894335339_2
agtggtttaaactggacgtggtatttttaatactttttgactggccataacaattatttctactagtggaaaaaaattaaataagagaagaaaatacaatttttcagttccagagtgccaagaaatgcgttgtttatagtaaaaggctgatcttgtgtgcagtagtgaaaactgggctgctgagttcttgcttgtaaaaactcacttgcaatttttttccctctgcatattgcatattgaattgtaaagtaggtgtctgtagcatcagcattttaaaggctgatagctgtccagatcctrtctccgtcatgccaagaattttctttcctttttatcactgtttagcacataatttcccgtcttttcctctgtctgagagaaggagagtcaagtccctttctcctttcactcttgataaaacttctgattgtgttattctcattaaatcctcacagaaacacgrgatttaggatctgcagtacaataaaagcaaaaggcaagaatagaaacaatggaatcagatctgtgttctttccccttatctcagtagtgtttttagtagtctagcgtgtagctgtgcacaaggctgccttaactatc

SEQ ID NO: 66666 - DNA, 488 bp, Chicken  19866894335339_3
agtgaaaactgggctgctgagttcttgcttgtaaaaactcacttgcaatttttttccctctgcatattgcatattgaattgtaaagtaggtgtctgtagcatcagcattttaaaggctgatagctgtccagatcctrtctccgtcatgccaagaattttctttcctttttatcactgtttagcacataatttcccgtcttttcctctgtctgagagaaggagagtcaagtccctttctcctttcactcttgataaaacttctgattgtgttattctcattaaatcctcacagaaacacgrgatttaggatctgcagtacaataaaagcaaaaggcaagaatagaaacaatggaatcagatctgtgttctttccccttatctcagtagtgtttttagtagtctagcgtgtagctgtgcacaaggctgccttaactatctgtacacaaggacctcttctaatttgtgtctctctgtatcaccacatcagt

SEQ ID NO: 66667 - DNA, 528 bp, Chicken  19866894335340_1
cactgcttcattgcttctgaggaatttattcccagatccttctgcatcaatcagcagttgtcactctgccctcttcttgagaaacagggatagaaggctgccatacagtgcatttaaaatatttgaaccatttccttcagtcggggaatatctgatttctcttgttttagccaagaagctgtgggaacgtgagtcatcttgtaatcaaaataatgcaacttgatacaagatgtttaatgctgattctgctggcataggattgctgttgctgtacagagtgaggtcgtgcagatcagccaygcttgattgtgccagagggacactgagcattagctgtaagatggctgctctttggtctggccattactgcctatgctctgggaactgtacaggtgatcccaaaggtgttaggtgttagcttagtgattgttgtgtgtttaaatcactgtattcccacaggagtatgtttcagacatctcagtgctcaaaatgctgtctgtaaagccttgacagagcccttccttggcg

SEQ ID NO: 66668 - DNA, 600 bp, Chicken  19866894335344_1
aaggtaaattagatctaattaagctctgagagaagtgctaaacttaaaggactaaaacatgtcaccttatttaaccctcagtgaaagctgctctgttctatagataagcattattctgaagcaacactcatatgttgttgcagttcttccctgttaagagttggaaagaaatctaaagcaatgactaaatctcatgaaataaggtagatgacagacaagtaagcaacagccttgcaatgcagtctagaagttcctaaagtgcagctgaaaaactcttactgtggcagaatttactgagawtgaggaagagatggaggtgcagtttataagagattcgtgattagataattwatttgaaattccttctaactgatatgtgaatggaaagcaaaaggaacaaaaacttatccccccacctcttgctcaagtacttcagcaaaagcagtaagttaggcacctacatccaattatataaagtaaattttaagaatctagtgtgcgctcagggaggagcatggaaggggaaaaaaataaccagatcttaaccatatctggggactgttggcacaagttacctagaacacggtgctaatgataatt

SEQ ID NO: 66669 - DNA, 600 bp, Chicken  19866894335344_2
ctaaaacatgtcaccttatttaaccctcagtgaaagctgctctgttctatagataagcattattctgaagcaacactcatatgttgttgcagttcttccctgttaagagttggaaagaaatctaaagcaatgactaaatctcatgaaataaggtagatgacagacaagtaagcaacagccttgcaatgcagtctagaagttcctaaagtgcagctgaaaaactcttactgtggcagaatttactgagawtgaggaagagatggaggtgcagtttataagagattcgtgattagataattwatttgaaattccttctaactgatatgtgaatggaaagcaaaaggaacaaaaacttatccccccacctcttgctcaagtacttcagcaaaagcagtaagttaggcacctacatccaattatataaagtaaattttaagaatctagtgtgcgctcagggaggagcatggaaggggaaaaaaataaccagatcttaaccatatctggggactgttggcacaagttacctagaacacggtgctaatgataattgccattacatccaagcagttactaagaaggaagacatttttttaaagtaaa

SEQ ID NO: 66670 - DNA, 600 bp, Chicken  19866894335349_1
tcaaaaggacataaacaagggtaagggatttttcacagtgcaaagtagtctcattgctgcctttttgctaaagctaattcaaaagaaaactgtgttttcacattgagaacaaacaattccattctctgagacatattgttatggccacacactttttttcttagttacttattgtagaaagacggacatgaataagaaatgcaattctcaaggaaaaaaatgtcaccgcagctcagcaatgtgtacttttatcatagttttgtgtgttgcaaagacttggaaaattagttctcacagtgkttgatagctggtgaaggaatcagctctcactctggcccatttaccagattgtggctgaaagcccacacgtacccttttcagacagatttcacattgttgttcaatgcatatcctgattttccaaagtaaatgttaaaaattttctcagtacaccacgcaacaacttcaaaatttatttatttgtcaatggaaatctttatatacgtagctcagaattaaattctctctgcaaagtcagtcaaaaatggcagaaactactcacttatacgacctggatataaatatagattttatttttca

SEQ ID NO: 66671 - DNA, 583 bp, Chicken  19866894335349_2
tatacgtagctcagaattaaattctctctgcaaagtcagtcaaaaatggcagaaactactcacttatacgacctggatataaatatagattttatttttcattgcaggaaatgtcctaccatttctaacgatgctgacaatttttcaatgcttgtgtgggtttgtaccgcctgtttttctctgtattagaagggtctctggcaacccgacaaaatgtggtgcttagttgtgcaacagccaaaagtcaggcactggttgaagggacagaattcacagtcataggcatcgatattccttatrcactaaacaatgcagttaggctccagtgatgggatttaaaacaaccagcatggtgaaaggggaagaattaagtcaggtgacagcataaggcatttctccatccatctttaattacacctttaactattcttctacatctcagcaattttagtttgctcttactttttgcatttttttcctgattcccatgttctctttttccctaactctttttctttcatacattcagtgctgaataacactctgaggaggcttcactatgcagctgtaaagtcacataaag

SEQ ID NO: 66672 - DNA, 600 bp, Chicken  19866894335353_1
tggctgggggttctccaagggttctccaaggtcacttactgttgaagctgttggaaaataggtaacaaagatggagacttggagaaagccacaaattcggtgttattccacaaatgtagactaggtaagaacaccagaccatcattttctttcttaatacctccacaaggtatccagtggtgctccggagaaaaattaggatgctgatttaatacaggtaaacaaactaattcaagaaacacaaaaagcttcctatgaagtttcttttgtgtagaattaaacttcagacagaactattamaaggttgataatggttaaatagaatttcagccattagcgcaaaaattcctaagaagaactacaggaaatcttgcaagttttagagatgttatggacagtggcaatctaacatttgaaacagaaatcaaacgctgggaattracgcatctcttggcatcactgcatttatttgagatgagctgcagtgaaaaagtagtagtagaaagacttcaggtcctctaaatcctcatgtcttttggctgttgatccttttctatccctggtcaaatgtaacaaaatgatcagatgcacagacttctc

SEQ ID NO: 66673 - DNA, 600 bp, Chicken  19866894335353_2
tcattttctttcttaatacctccacaaggtatccagtggtgctccggagaaaaattaggatgctgatttaatacaggtaaacaaactaattcaagaaacacaaaaagcttcctatgaagtttcttttgtgtagaattaaacttcagacagaactattamaaggttgataatggttaaatagaatttcagccattagcgcaaaaattcctaagaagaactacaggaaatcttgcaagttttagagatgttatggacagtggcaatctaacatttgaaacagaaatcaaacgctgggaattracgcatctcttggcatcactgcatttatttgagatgagctgcagtgaaaaagtagtagtagaaagacttcaggtcctctaaatcctcatgtcttttggctgttgatccttttctatccctggtcaaatgtaacaaaatgatcagatgcacagacttctcaaccaatcctaatattacaaggaccatttatcatttgtgtcgagctccaaccaggtgctgacagctggcgattcataactccctaccaaaaggaagtctctgcggtgagctgtgatggcgaggagatgctcttatctcccc

SEQ ID NO: 66674 - DNA, 600 bp, Chicken  19866894335358_1
gtgcttgccttttttgcatatttttattcaggtcattgatatgcacaattcttggttataaaatcttgccttctcatacagatctttttactttagtgaagccatgttgcatttttaacactgtttgtgctgcccaaaagcttcggataccttgtccctttcaagtaacagcatccctacagttccactgtagtaggaactataaaaatgcagacactggcacaatgaaggtattaatattcataattcattattaattcattcttaatattaattcattaattaatattcagtggtctraagtgaacaataatgtttcccaagactactgcttaaaaaagatggaagagaaaactagcaaataaaataccaaaattccaatgtgaagtgtttaaaaacctggtcgcttcccctgttcccatgtctcgggaagaggagggaggtgtgagatgagccatgacgttttaattctgctttccgtgcagacattctcctgtcgatgaattgatatttattctgcttttctctcgctccctcccccgctgtcttgcagcaaatgtgtgtgacaatgaactcctgcactgccagaatggagggaca

SEQ ID NO: 66675 - DNA, 600 bp, Chicken  19866894335366_1
tgttgtgcttttaattttaaactcgctgtcttactttcttcgttcatctcctttcccaggtcttctttaagctctcatctcttccattccactcctttgtattaggtttttcttcagtccttccagttctccagctataaagaaaaatccttcacactttcaaatgctttttctctccctgtcctcattgaggctatctctgaatctctagttttttcatcagaacatatggcaaatcaactctttcttcactattgcctcagtgtgctttttttttttgcctttttgtgtcaagatgtrcagttgctgattgctaacctgcttcagttttgttttcttctctttgtgggtctcaggctggggatacatattctgtggagaaagtggtgtgatggatggtgggatgagctggttgtcatgtttgtatcacacttgtccagacccctgccaatgagcagttttgttgtgtcagaattgtgttcttcttttccatgtagctatcctctttgctttcctggtttattcggggatccttgctatcctgatcatctgtcgccttgttatgaagtaagtgaacagtatggtaacacctcatatgtg

SEQ ID NO: 66676 - DNA, 600 bp, Chicken  19866894335369_1
tgaaggagtgatcagctcactttaccagcatatggattaaaggtgggaaaacaagtaggagcagactggaggaggaagaaacactaagtagagtcttcctaatgccagcagcatgctttcatgtccacagcaacttgctgcctgcttacttccattagcagtagctaccacacaacagcacactctctaagagacggttcctttgcacacctcactgctgttaagcttttgttcgtatcaacactactgtgctatgttaaatcaagatctcatgttcctatataggttaatttaattcaktcttattcartaaggttcacaaactattccacataacaataaattctcataatgaataaaataaaaaggttaataataaaatcatatgattttatcaacccccagtaaaacttttttaattgaatattcttaaggagtgcgtgcctctgtttgcacttcctcagattaattcattctccataagcagctgagctttgttacggctcttaataatccacagaaaagaaacaaaattactgtgcccatattcaattgcatttgcatcctttcagcagtggaataaatgctattaagcaccca

SEQ ID NO: 66677 - DNA, 600 bp, Chicken  19866894335369_2
atcagctcactttaccagcatatggattaaaggtgggaaaacaagtaggagcagactggaggaggaagaaacactaagtagagtcttcctaatgccagcagcatgctttcatgtccacagcaacttgctgcctgcttacttccattagcagtagctaccacacaacagcacactctctaagagacggttcctttgcacacctcactgctgttaagcttttgttcgtatcaacactactgtgctatgttaaatcaagatctcatgttcctatataggttaatttaattcaktcttattcartaaggttcacaaactattccacataacaataaattctcataatgaataaaataaaaaggttaataataaaatcatatgattttatcaacccccagtaaaacttttttaattgaatattcttaaggagtgcgtgcctctgtttgcacttcctcagattaattcattctccataagcagctgagctttgttacggctcttaataatccacagaaaagaaacaaaattactgtgcccatattcaattgcatttgcatcctttcagcagtggaataaatgctattaagcacccatgatagtttg

SEQ ID NO: 66678 - DNA, 600 bp, Chicken  19866894335372_1
tccatatatttattgataactatcactgtaaatacagctgaatgtcatctcagaaaaacagaataactcaagacttgtttcacaaaactgcgtttttctttcctaattaagattcttattactcagaaacacatgggcttacgtcagagcacatacaggccagagtgatattcccaattgtgtctgctggaaactcaacaaattgctttccacgttaccactttttttttttttttcatcatcttattccatcttacttaaactgtgatctcttatatgcagtgactcccactgctccasaaggttcgtagagcagcagcacaataaggtctaaacccaatgtgagaacttcagcaagctaaatatgttttagaagcacttcaaataacccatcttagagaagtccaacatttaaaaaagataaagatgaatatttataagtacagaaagctccttaggagaccagatagacacattatgtttgttcatttcaaagggcccagagaaagctgatctgattcacagtttcaaattgtwagctcttgcagctactcgttagtccagctttgtactggaaagtcagaactctctggtagaagt

SEQ ID NO: 66679 - DNA, 600 bp, Chicken  19866894335372_2
atcatcttattccatcttacttaaactgtgatctcttatatgcagtgactcccactgctccasaaggttcgtagagcagcagcacaataaggtctaaacccaatgtgagaacttcagcaagctaaatatgttttagaagcacttcaaataacccatcttagagaagtccaacatttaaaaaagataaagatgaatatttataagtacagaaagctccttaggagaccagatagacacattatgtttgttcatttcaaagggcccagagaaagctgatctgattcacagtttcaaattgtwagctcttgcagctactcgttagtccagctttgtactggaaagtcagaactctctggtagaagtatgtgcattagcccagaagaaaaacactggaccattttcagaagttggatgagaattactgaagtacacaaagccttctagaaacaaaacaaaatcttagaactttaccacaatgaagagatcatagcagttttgtatattatacttcagarcttgatataaaatatacttkgctttttaaaygtttcaggcactgtaaaaatgcacacccaatattttgttgctatgaccttctca

SEQ ID NO: 66680 - DNA, 600 bp, Chicken  19866894335372_3
ccttaggagaccagatagacacattatgtttgttcatttcaaagggcccagagaaagctgatctgattcacagtttcaaattgtwagctcttgcagctactcgttagtccagctttgtactggaaagtcagaactctctggtagaagtatgtgcattagcccagaagaaaaacactggaccattttcagaagttggatgagaattactgaagtacacaaagccttctagaaacaaaacaaaatcttagaactttaccacaatgaagagatcatagcagttttgtatattatacttcagarcttgatataaaatatacttkgctttttaaaygtttcaggcactgtaaaaatgcacacccaatattttgttgctatgaccttctcagctatccatcaatacatgtatcctcacaaagacagaaaatgacacattgaagagtacttttgtaattcccagctttcagccaagggtgaaaacccttatgcctttattgtttgcacagacctaaatagcatgaaatcatatgctgagaaaaattattacaagtatatgttatacatcagctgctagcatgactgttttagttactggactaccta

SEQ ID NO: 66681 - DNA, 600 bp, Chicken  19866894335372_4
acattatgtttgttcatttcaaagggcccagagaaagctgatctgattcacagtttcaaattgtwagctcttgcagctactcgttagtccagctttgtactggaaagtcagaactctctggtagaagtatgtgcattagcccagaagaaaaacactggaccattttcagaagttggatgagaattactgaagtacacaaagccttctagaaacaaaacaaaatcttagaactttaccacaatgaagagatcatagcagttttgtatattatacttcagarcttgatataaaatatacttkgctttttaaaygtttcaggcactgtaaaaatgcacacccaatattttgttgctatgaccttctcagctatccatcaatacatgtatcctcacaaagacagaaaatgacacattgaagagtacttttgtaattcccagctttcagccaagggtgaaaacccttatgcctttattgtttgcacagacctaaatagcatgaaatcatatgctgagaaaaattattacaagtatatgttatacatcagctgctagcatgactgttttagttactggactacctagtagcactgggtggagctgt

SEQ ID NO: 66682 - DNA, 600 bp, Chicken  19866894335372_5
gttcatttcaaagggcccagagaaagctgatctgattcacagtttcaaattgtwagctcttgcagctactcgttagtccagctttgtactggaaagtcagaactctctggtagaagtatgtgcattagcccagaagaaaaacactggaccattttcagaagttggatgagaattactgaagtacacaaagccttctagaaacaaaacaaaatcttagaactttaccacaatgaagagatcatagcagttttgtatattatacttcagarcttgatataaaatatacttkgctttttaaaygtttcaggcactgtaaaaatgcacacccaatattttgttgctatgaccttctcagctatccatcaatacatgtatcctcacaaagacagaaaatgacacattgaagagtacttttgtaattcccagctttcagccaagggtgaaaacccttatgcctttattgtttgcacagacctaaatagcatgaaatcatatgctgagaaaaattattacaagtatatgttatacatcagctgctagcatgactgttttagttactggactacctagtagcactgggtggagctgtttagaggtgct

SEQ ID NO: 66683 - DNA, 600 bp, Chicken  19866894335373_1
gatcatatgctcgttcctcatgtgattgagcatgtcatccaggaggatctgttccatgatcttcccaggcacagaggtgagactcaccggcatctagttccctgggtcctccttgctccctttcttgtaaatgggagtgacataacccttcctccagtcgtctgggacctcgcctgacagccacgacttctcaaatatgatggagagcagctcggcaaccacctcagccagctactcagatctgcaatggcaaactgttgccatctgctctctgacttgtctctgtgatggacaggttcraagtgatctcgagaggtcatccaatccaacttctcattcaaagcacctccaactaaagcaagttgctcagctaggttttgcatagctccaaggatgtaggctctgcatctactgaaaacatgtaccacatcactgtcttcatggtgaaaatatttttcctgcagaatttccagtgttgcagcttgtctccattgactcttcctaatatcatacacttcctagaaaagtctgtgtctcttctctatatcccctctaatatctctcctcatatactcatgctccagcctgtgtgaccgtggt

SEQ ID NO: 66684 - DNA, 600 bp, Chicken  19866894335374_1
attccattagaaacatgagctttaaaacatttcagattaattcttatagcattgttatatgttattttgatttatgtaattacagtaattttcggatgtgaaaataataattcttttcttccctcctagattctaaatagaatttctgaacctttgccattacaataatacttatacagggatgctttctgcattgatttgctcaacacaccttgttcatagcaacaccaaatagcatttgaatattcttgaagcatgtataattggttaaattgattttctcacctcaactgaaacttyaggatttccagaacagcaaactcctgccaattcatactgaaactttcctgtctcctcctctaaaatttccaacaaacatgatttctcaattttccagagaacttcacagggagaaaagtatctcattagtattgtatcatgttgttaagttgcagatctggaacatttagattgcattatagaattaactataatatcaaaaaggagaaactatactgataaacaaatctatgtaactactgaatttcttctggagcatttacattagagaatttgatttctgagaggatgtgtttattg

SEQ ID NO: 66685 - DNA, 600 bp, Chicken  19866894335374_2
catttagattgcattatagaattaactataatatcaaaaaggagaaactatactgataaacaaatctatgtaactactgaatttcttctggagcatttacattagagaatttgatttctgagaggatgtgtttattgtactatgtggtaaaatgtatggatacacaatggcagatgggaagttgtacaggtttatgtgagaatgtggacaaaatcatgccacaaataatgcagaaccacactgtgcatttgtgaactgggagggataagcactgatcagcaactttgttctacagtttamtgatgattgttctaatactatcaccacttccagagttttggactgtttccatgtcatctgagtttctgaaaaaccataaaaaaatgataaattgcttagaatatcttaatgaagaaaatgcaaaggttgcaaagctaagaactccagtcaagaaactaacagccaagattgcttgcacaatcttaagtgttgccctttatgaatatatattacagttcttagctgcagattatttcttaatgtactgtacacttttctctctactgtgtattttagtcttcttcagtgttaacgtactat

SEQ ID NO: 66686 - DNA, 600 bp, Chicken  19866894335375_1
cttacacccatcatatcaggccactgagttggtcaggacttgtccttggtgaagccatgctaggtgtgtctcaaattatgtccctgtcttacatctgccttagcgcagcttccaaaatgtcacagaagaactatactgtccatagcgcaatgaagcttaatgtgggtgagtataaaaaataacagcaagatcaatggttgaattgtcaggataatatattttaagagttatgatataagccataaaatacattactttgtatcccagatttggatatatcccttatttttaaagaaaatrcaaggataaaattaacacatattgctatgctcatttccatttgtttctttataaaccaggctscacttgaaacactagtctcctgattcacttctgttttaggytggtgtattcttttacaataagcaatctcacagtagtgaaaaagagtagtagatgaggtatttttagtggtgtccaatttacttacttctggatgagagttcacaaaagagatgagctcaagtacgcgccatcagtgtcattcctatcagacttctattgtgtgttggacttttgctttgaagcctgcttaggaag

SEQ ID NO: 66687 - DNA, 600 bp, Chicken  19866894335375_2
gtgtgtctcaaattatgtccctgtcttacatctgccttagcgcagcttccaaaatgtcacagaagaactatactgtccatagcgcaatgaagcttaatgtgggtgagtataaaaaataacagcaagatcaatggttgaattgtcaggataatatattttaagagttatgatataagccataaaatacattactttgtatcccagatttggatatatcccttatttttaaagaaaatrcaaggataaaattaacacatattgctatgctcatttccatttgtttctttataaaccaggctscacttgaaacactagtctcctgattcacttctgttttaggytggtgtattcttttacaataagcaatctcacagtagtgaaaaagagtagtagatgaggtatttttagtggtgtccaatttacttacttctggatgagagttcacaaaagagatgagctcaagtacgcgccatcagtgtcattcctatcagacttctattgtgtgttggacttttgctttgaagcctgcttaggaagagagaagttgagagcaggcgagtgaagagggagcagaaatgaaaaacaaacaaaaccaaaata

SEQ ID NO: 66688 - DNA, 600 bp, Chicken  19866894335375_3
gcagcttccaaaatgtcacagaagaactatactgtccatagcgcaatgaagcttaatgtgggtgagtataaaaaataacagcaagatcaatggttgaattgtcaggataatatattttaagagttatgatataagccataaaatacattactttgtatcccagatttggatatatcccttatttttaaagaaaatrcaaggataaaattaacacatattgctatgctcatttccatttgtttctttataaaccaggctscacttgaaacactagtctcctgattcacttctgttttaggytggtgtattcttttacaataagcaatctcacagtagtgaaaaagagtagtagatgaggtatttttagtggtgtccaatttacttacttctggatgagagttcacaaaagagatgagctcaagtacgcgccatcagtgtcattcctatcagacttctattgtgtgttggacttttgctttgaagcctgcttaggaagagagaagttgagagcaggcgagtgaagagggagcagaaatgaaaaacaaacaaaaccaaaataaaccaaactgaaaccagactaaaccaaaacaaaccaatcaa

SEQ ID NO: 66689 - DNA, 600 bp, Chicken  19866894335383_1
aactactggagccacagaatgcattttaagaagcgcattacgacagttgcctctggttccttcactctcccccacacaaagggggattcacatgtattcctcccaaagctgcaggcagtgagatgttgttgtgacagtaagcatgcccacagcaaaggtctgtttaaaaacagttcattagcagcaattctcacacaaaaatagaggtttctctgtctatcacaaatggatcacttgaaagctctattcaacccacacagacaggacaagaaacagtagtttccaagtcttatacatatyaaattaaaaaggaattaaaaacrtttatttgactttgttctgatacagcatcagagagctccatattagaagtttctcaagagcagcaccttttatcattcaagttaagtaatgctgctyagtttgtacccaaagaacccatttctcctcttactttatacagcgattctccacttctttccctccagaagtgactataattattctataaaaatagagaacatatggaacgctttcctccaagcaatagaacagagctccataaaagcaatgaacattaacagtttattagaggtggtt

SEQ ID NO: 66690 - DNA, 600 bp, Chicken  19866894335383_2
ttttaagaagcgcattacgacagttgcctctggttccttcactctcccccacacaaagggggattcacatgtattcctcccaaagctgcaggcagtgagatgttgttgtgacagtaagcatgcccacagcaaaggtctgtttaaaaacagttcattagcagcaattctcacacaaaaatagaggtttctctgtctatcacaaatggatcacttgaaagctctattcaacccacacagacaggacaagaaacagtagtttccaagtcttatacatatgaaattaaaaaggaattaaaaacrtttatttgactttgttctgatacagcatcagagagctccatattagaagtttctcaagagcagcaccttttatcattcaagttaagtaatgctgctyagtttgtacccaaagaacccatttctcctcttactttatacagcgattctccacttctttccctccagaagtgactataattattctataaaaatagagaacatatggaacgctttcctccaagcaatagaacagagctccataaaagcaatgaacattaacagtttattagaggtggtttcccttccccaccatctagtcag

SEQ ID NO: 66691 - DNA, 600 bp, Chicken  19866894335383_3
agatgttgttgtgacagtaagcatgcccacagcaaaggtctgtttaaaaacagttcattagcagcaattctcacacaaaaatagaggtttctctgtctatcacaaatggatcacttgaaagctctattcaacccacacagacaggacaagaaacagtagtttccaagtcttatacatatgaaattaaaaaggaattaaaaacrtttatttgactttgttctgatacagcatcagagagctccatattagaagtttctcaagagcagcaccttttatcattcaagttaagtaatgctgctyagtttgtacccaaagaacccatttctcctcttactttatacagcgattctccacttctttccctccagaagtgactataattattctataaaaatagagaacatatggaacgctttcctccaagcaatagaacagagctccataaaagcaatgaacattaacagtttattagaggtggtttcccttccccaccatctagtcagagtggctgcaaaatgctaccaaagccatactgtgtgagggtacaaaacagctgtgaaaggatttgcctgcattacatgggctttattgttaattagc

SEQ ID NO: 66692 - DNA, 600 bp, Chicken  19866894335390_1
tacatcaagtatctgcttaatccaagttgtatctgtaatgtgaagagtcaatgactggagatgacacgaagaaaaaaacaaaaataatggaatattttatggggcagtgtagactagagatgcaaattagaggaacatgtttgcttataaatttagttaaatcccattatagttgagtatccaagaaatatgctggaaatttgaaaaggtgattcactttgtattttatcaaaaggtgttatgagatacactcaacagctataaatttctgttcactgaaggaaattaatggaaaaaatktaaaaatatcctgaactttgggtgctggtaatactgacttatatcacagactactgtgatacctgttacacttaaaaaaaaaaacctataatgatcggaggtacaccctgccttctgtttctggtgtaacacagcatatacagatacaaacaaatcagggatgaaaaaatgaagatctcaaatgaaaaatttttacggactatgtcggctatgttaaaatctagcatagataaacatttcttctgccaaatatgccatgatttcagtcagttaaatattaaacttaaccttcatttgtgc

SEQ ID NO: 66693 - DNA, 600 bp, Chicken  19866894335390_2
ataatggaatattttatggggcagtgtagactagagatgcaaattagaggaacatgtttgcttataaatttagttaaatcccattatagttgagtatccaagaaatatgctggaaatttgaaaaggtgattcactttgtattttatcaaaaggtgttatgagatacactcaacagctataaatttctgttcactgaaggaaattaatggaaaaaatktaaaaatatcctgaactttgggtgctggtaatactgacttatatcacagactactgtgatacctgttacacttaaaaaaaaakacctataatgatcggaggtacaccctgccttctgtttctggtgtaacacagcatatacagatacaaacaaatcagggatgaaaaaatgaagatctcaaatgaaaaatttttacggactatgtcggctatgttaaaatctagcatagataaacatttcttctgccaaatatgccatgatttcagtcagttaaatattaaacttaaccttcatttgtgccatattatttcatcgaagatgtcattcaaactacttatgcaggaaacaaaaccccaaaatggaatctcaagaatcttactccc

SEQ ID NO: 66694 - DNA, 600 bp, Chicken  19866894335390_3; identical to SEQ ID NO: 66693

SEQ ID NO: 66695 - DNA, 599 bp, Chicken  19866894335391_1
  misc_feature (1)..(132): n is any nucleotide
nnnnnnnnnnnnnnnnnnnnnnnnnnnnnnnnnnnnnnnnnnnnnnnnnnnnnnnnnnnnnnnnnnnnnnnnnnnnnnnnnnnnnnnnnnnnnnnnnnnnnnnnnnnnnnnnnnnnnnnnnnnnnnnnnnnnatttgagtaaaccccgcccaccatctcaccacgcccaatcagcgaccacgcccctttaggtgtggggtttgattgacgtgtacccttaatgatggacgggcaggagggaatggggacgcagagttgtggaagctaaaattcacgcggcttggatgctccagagagcgsagtagraacagatctggtagttgggaatggtttcctttcctctttgggttacttcaaggtaaattgaggccatgtgctgtcccaggttaactcctaagtactgcctttataaacacaggcakwggagctttaaaagacarcaggcagccatgaaaacggctgattctggattyccccacagtgctcagaagatgtgagcgccctgaagccctccctccacctctccaacagggctgtaagtgcccgccagctgagcacgctcagcattcccatgcactggaacctgaagtgcaaagtgg

SEQ ID NO: 66696 - DNA, 599 bp, Chicken  19866894335391_2
  misc_feature (1)..(126): n is any nucleotide
nnnnnnnnnnnnnnnnnnnnnnnnnnnnnnnnnnnnnnnnnnnnnnnnnnnnnnnnnnnnnnnnnnnnnnnnnnnnnnnnnnnnnnnnnnnnnnnnnnnnnnnnnnnnnnnnnnnnnnnnnnnnnnatttgagtaaaccccgcccaccatctcaccacgcccaatcagcgaccacgcccctttaggtgtggggtttgattgacgtgtacccttaatgatggacgggcaggagggaatggggacgcagagttgtggaagctaaaattcacgcggcttggatgctccagagagcgsagtagraacagatctggtagttgggaatggtttcctttcctctttgggttacttcaaggtaaattgaggccatgtgctgtcccaggttaactcctaagtactgcctttataaacacaggcakwggagctttaaaagacarcaggcagccatgaaaacggctgattctggattyccccacagtgctcagaagatgtgagcgccctgaagccctccctccacctctccaacagggctgtaagtgcccgccagctgagcacgctcagcattcccatgcactggaacctgaagtgcaaagtggggctga

SEQ ID NO: 66697 - DNA, 599 bp, Chicken  19866894335391_3
  misc_feature (1)..(10): n is any nucleotide
nnnnnnnnnnatttgagtaaaccccgcccaccatctcaccacgcccaatcagcgaccacgcccctttaggtgtggggtttgattgacgtgtacccttaatgatggacgggcaggagggaatggggacgcagagttgtggaagctaaaattcacgcggcttggatgctccagagagcgsagtagraacagatctggtagttgggaatggtttcctttcctctttgggttacttcaaggtaaattgaggccatgtgctgtcccaggttaactcctaagtactgcctttataaacacaggcakwggagctttaaaagacarcaggcagccatgaaaacggctgattctggattyccccacagtgctcagaagatgtgagcgccctgaagccctccctccacctctccaacagggctgtaagtgcccgccagctgagcacgctcagcattcccatgcactggaacctgaagtgcaaagtggggctgagtccttcagcatccttcctttcctcacccagcagctgcaaggagagcaaaccagttctgttcccacacggggttcattttagcttgcccaycgggctgtgttccgtaaccaactct

SEQ ID NO: 66698 - DNA, 599 bp, Chicken  19866894335391_4
  misc_feature (1)..(9): n is any nucleotide
nnnnnnnnnatttgagtaaaccccgcccaccatctcaccacgcccaatcagcgaccacgcccctttaggtgtggggtttgattgacgtgtacccttaatgatggacgggcaggagggaatggggacgcagagttgtggaagctaaaattcacgcggcttggatgctccagagagcgsagtagraacagatctggtagttgggaatggtttcctttcctctttgggttacttcaaggtaaattgaggccatgtgctgtcccaggttaactcctaagtactgcctttataaacacaggcakwggagctttaaaagacarcaggcagccatgaaaacggctgattctggattyccccacagtgctcagaagatgtgagcgccctgaagccctccctccacctctccaacagggctgtaagtgcccgccagctgagcacgctcagcattcccatgcactggaacctgaagtgcaaagtggggctgagtccttcagcatccttcctttcctcacccagcagctgcaaggagagcaaaccagttctgttcccacacggggttcattttagcttgcccaycgggctgtgttccgtaaccaactctt

SEQ ID NO: 66699 - DNA, 600 bp, Chicken  19866894335391_5
aaaccccgcccaccatctcaccacgcccaatcagcgaccacgcccctttaggtgtggggtttgattgacgtgtacccttaatgatggacgggcaggagggaatggggacgcagagttgtggaagctaaaattcacgcggcttggatgctccagagagcgsagtagraacagatctggtagttgggaatggtttcctttcctctttgggttacttcaaggtaaattgaggccatgtgctgtcccaggttaactcctaagtactgcctttataaacacaggcakwggagctttaaaagacarcaggcagccatgaaaacggctgattctggattyccccacagtgctcagaagatgtgagcgccctgaagccctccctccacctctccaacagggctgtaagtgcccgccagctgagcacgctcagcattcccatgcactggaacctgaagtgcaaagtggggctgagtccttcagcatccttcctttcctcacccagcagctgcaaggagagcaaaccagttctgttcccacacggggttcattttagcttgcccaycgggctgtgttccgtaaccaactcttcccatgtgcataaactga

SEQ ID NO: 66700 - DNA, 600 bp, Chicken  19866894335391_6
gcgaccacgcccctttaggtgtggggtttgattgacgtgtacccttaatgatggacgggcaggagggaatggggacgcagagttgtggaagctaaaattcacgcggcttggatgctccagagagcgsagtagraacagatctggtagttgggaatggtttcctttcctctttgggttacttcaaggtaaattgaggccatgtgctgtcccaggttaactcctaagtactgcctttataaacacaggcakwggagctttaaaagacarcaggcagccatgaaaacggctgattctggattyccccacagtgctcagaagatgtgagcgccctgaagccctccctccacctctccaacagggctgtaagtgcccgccagctgagcacgctcagcattcccatgcactggaacctgaagtgcaaagtggggctgagtccttcagcatccttcctttcctcacccagcagctgcaaggagagcaaaccagttctgttcccacacggggttcattttagcttgcccaycgggctgtgttccgtaaccaactcttcccatgtgcataaactgaagtggcgataaagggtgtaaacacctcacgcca

SEQ ID NO: 66701 - DNA, 600 bp, Chicken  19866894335391_7
agtactgcctttataaacacaggcakwggagctttaaaagacarcaggcagccatgaaaacggctgattctggattyccccacagtgctcagaagatgtgagcgccctgaagccctccctccacctctccaacagggctgtaagtgcccgccagctgagcacgctcagcattcccatgcactggaacctgaagtgcaaagtggggctgagtccttcagcatccttcctttcctcacccagcagctgcaaggagagcaaaccagttctgttcccacacggggttcattttagcttgcccaycgggctgtgttccgtaaccaactcttcccatgtgcataaactgaagtggcgataaagggtgtaaacacctcacgccaaacctttgaggaacagccccatatttcccagcccatgcccatataaaacactgccagccttcatgacctcgcaaatgatgcgtcccacgtgtttacttggctcagattgcttttagcaaagcatccccaagtgatgcttctgctaaacgagcacttagtggccaagagcatggagaaggacccaggaaaatcatagcatcatagagctggaagggaccattaa

SEQ ID NO: 66702 - DNA, 529 bp, Chicken  19866894335397_1
tcagttgctgattacatgggctttccttgtctgctgggtgtctcctattcctggctctcatcaacagaggcctttggctgtgtgagggcatgccaggttcacagagagaaatgtaattttggaaacaatgactttccaccatgggaaatctactgactggatcaagaacaaaataaacctaaggcttctctttaccttccaaagatgcttctgctaagaaataaagcgaaaatagccataggttgtctgctatgagcagcccctgggccctgtggtagcaccccatgggcacagcctgcycctgtggatttgtatgtttcctctatgggtgatgaccctatgtaaatgtttacctgtgagaagagagttagcattaccagatttatgtaatgcaatccatagccacacaacagaagtgacagtttcttacggctgctatcacagcaatgcagcgtggcagtgaatccagccacctgcctcacttcagagacattctgagcattggtgaactgggagggaaataatctgg

SEQ ID NO: 66703 - DNA, 600 bp, Chicken  19866894335413_1
gcttgtcagggcatctgctgaaaacagctgttcttttacctgtgatatttaccaaacagctggaggagaagccgtacatgaaagttttttggagtagaggattgtccccacatgctgatgaacgtggttccgtaaagaggacaagagcagctgcactggtattccatcagctgagagcaagcaaatgatcctaaatcacctcagtcccttgtccttaagggccatcaggcctcactatgtcttcagcttctcaaagttcaaaaaagggacagctatcacaaccagcctctaaataagatratgttmatttttttttttttttttttttttactaaattttctgtgtgggaaaatacagacagcataatcatggcttttgagattccttagtatgctcagtgctcattaacagacatcttttaattgagagaaaagaaacattaagaactgggatagaaggtaagacgaatatggggaaggaaaagtcagacaaatggagtttgctattgcttcagtgttattctttcctgccatgtcactcccagtgattgcatgcaagataattaagtgcctttaaggaataaccataccaattaaaaa

SEQ ID NO: 66704 - DNA, 600 bp, Chicken  19866894335413_2
cagggcatctgctgaaaacagctgttcttttacctgtgatatttaccaaacagctggaggagaagccgtacatgaaagttttttggagtagaggattgtccccacatgctgatgaacgtggttccgtaaagaggacaagagcagctgcactggtattccatcagctgagagcaagcaaatgatcctaaatcacctcagtcccttgtccttaagggccatcaggcctcactatgtcttcagcttctcaaagttcaaaaaagggacagctatcacaaccagcctctaaataagatratgttmatttttttttttttttttttttttactaaattttctgtgtgggaaaatacagacagcataatcatggcttttgagattccttagtatgctcagtgctcattaacagacatcttttaattgagagaaaagaaacattaagaactgggatagaaggtaagacgaatatggggaaggaaaagtcagacaaatggagtttgctattgcttcagtgttattctttcctgccatgtcactcccagtgattgcatgcaagataattaagtgcctttaaggaataaccataccaattaaaaaccatat

SEQ ID NO: 66705 - DNA, 600 bp, Chicken  19866894335414_1
ccacatttttaaatgcgagtggcaatcatctcactctgatgcaaaatacagaccaccagctgctcttggttgatgctgcccttcagttcctagaagaaccctggaacacactgccttgcaagatgcccactccagtggctggcaacagcttgtttctgtgccccactctgagcaccacgctgctgcttggtttacatttggttttatgcttttactggtaggctggccttcagcaggaggatctcccctccatgcatctgcaaaacacaggctgcaaagtggatgttgcagggcacctgrargttttggcttagtctcagtctgaagaatctagagctgaccaccttgtatgtccacactccagttacaagaagttgggctttaatcacatggatgacccttatgtgcacgtggtcaaacttgtggtagggagcccctcattgcgcaacctttcggaaacattcctgtagcctgctagagaagagcagaattattcactgcacatatgtaatagtatataagttgtatgtagcagtgattattcactgctttctgccttagcatctgcatctattcaaaatgaggcaggatggttaaaac

SEQ ID NO: 66706 - DNA, 600 bp, Chicken  19866894335414_2
acatttttaaatgcgagtggcaatcatctcactctgatgcaaaatacagaccaccagctgctcttggttgatgctgcccttcagttcctagaagaaccctggaacacactgccttgcaagatgcccactccagtggctggcaacagcttgtttctgtgccccactctgagcaccacgctgctgcttggtttacatttggttttatgcttttactggtaggctggccttcagcaggaggatctcccctccatgcatctgcaaaacacaggctgcaaagtggatgttgcagggcacctgrargttttggcttagtctcagtctgaagaatctagagctgaccaccttgtatgtccacactccagttacaagaagttgggctttaatcacatggatgacccttatgtgcacgtggtcaaacttgtggtagggagcccctcattgcgcaacctttcggaaacattcctgtagcctgctagagaagagcagaattattcactgcacatatgtaatagtatataagttgtatgtagcagtgattattcactgctttctgccttagcatctgcatctattcaaaatgaggcaggatggttaaaacct

SEQ ID NO: 66707 - DNA, 600 bp, Chicken  19866894335415_1
cagaccttagagctcagcatttttctaactcatcctgggatagctggtattgcagaagctgcagctgtttaggtcaggagatcatattaattatacctgaccaaagcattttaagccttccaaaaacatttaatataatagcactagcattttcctcccagtgatctccactgtaaggacactgagctggctcaaatataagatgcttatctgccctaagtgtaagtcatttgatataaatagcccagatatgtttctagaccctgagaggaagagtgtgagagagtcagtcccattatytcgtctttttttttattttcacattttttcttaaaatcacctttcaaatttaaaaacatttctttcatttctatggtctgattttttgggtgatccctcatggagccaggaattgaactcrgtgatccttatgtgtcctttccaactcaggatgttcggtaattttatgtttctatgacttaattgcagcagacccacaatgtctcagtctaatcgacatctacatgtggattctaatcagaaagttctctctctgctcatttccagtgagcacttatgctccactgggagttgtcaggg

SEQ ID NO: 66708 - DNA, 600 bp, Chicken  19866894335415_2
aaaaacatttaatataatagcactagcattttcctcccagtgatctccactgtaaggacactgagctggctcaaatataagatgcttatctgccctaagtgtaagtcatttgatataaatagcccagatatgtttctagaccctgagaggaagagtgtgagagagtcagtcccattatytcgtctttttttttattttcacattttttcttaaaatcacctttcaaatttaaaaacatttctttcatttctatggtctgattttttgggtgatccctcatggagccaggaattgaactcrgtgatccttatgtgtcctttccaactcaggatgttcggtaattttatgtttctatgacttaattgcagcagacccacaatgtctcagtctaatcgacatctacatgtggattctaatcagaaagttctctctctgctcatttccagtgagcacttatgctccactgggagttgtcagggtgatgaaagctgtacaagtcagaaagaaaatatgcttcctaccccaaggattttatgaaactccaacatatgcatctccagtccttaaagagaaacacttctgtggagtgaccaactcctt

SEQ ID NO: 66709 - DNA, 599 bp, Chicken  19866894335416_1
  misc_feature (1)..(154): n is any nucleotide
nnnnnnnnnnnnnnnnnnnnnnnnnnnnnnnnnnnnnnnnnnnnnnnnnnnnnnnnnnnnnnnnnnnnnnnnnnnnnnnnnnnnnnnnnnnnnnnnnnnnnnnnnnnnnnnnnnnnnnnnnnnnnnnnnnnnnnnnnnnnnnnnnnnnnnnnnncagcactcccctgcaagccccgcactctttcatacagtcatctaaatttttccttctttgatttgctcacagcacgcagagcaccaacacactggtttacccatcctgctgcctccttgggatgatgcttggatctcaactgcagygctctgtgttcccaccaacacctccagccaagcaccatgagcaaccttcatccccttcgacatcacctgycctctgtgtgaaagcaaaccacagcttccactccaggactctgcccagcacagagcagcaccctcaactcaccttctgcagcttgtactcctcctccacctgcccacagtggttcaggtggcygagccatgctgacacatcgaggcgccggtaygtgttctcctccgggtgcgtctctgatgaaggcagcttgggccgacggatggaaaactgcatgcatgtcttctca

SEQ ID NO: 66710 - DNA, 599 bp, Chicken  19866894335416_2
  misc_feature (1)..(84): n is any nucleotide
nnnnnnnnnnnnnnnnnnnnnnnnnnnnnnnnnnnnnnnnnnnnnnnnnnnnnnnnnnnnnnnnnnnnnnnnnnnnnnnnnnnncagcactcccctgcaagccccgcactctttcatacagtcatctaaatttttccttctttgatttgctcacagcacgcagagcaccaacacactggtttacccatcctgctgcctccttgggatgatgcttggatctcaactgcagygctctgtgttcccaccaacacctccagccaagcaccatgagcaaccttcatccccttcgacatcacctgycctctgtgtgaaagcaaaccacagcttccactccaggactctgcccagcacagagcagcaccctcaactcaccttctgcagcttgtactcctcctccacctgcccacagtggttcaggtggcygagccatgctgacacatcgaggcgccggtaygtgttctcctccgggtgcgtctctgatgaaggcagcttgggccgacggatggaaaactgcatgcatgtcttctcatcagtgagctgctgagcaaggggagcaaaccaaaccaaaacaagacaaaaatgaaggcgggaggcagaga

SEQ ID NO: 66711 - DNA, 600 bp, Chicken  19866894335416_3
atctaaatttttccttctttgatttgctcacagcacgcagagcaccaacacactggtttacccatcctgctgcctccttgggatgatgcttggatctcaactgcagygctctgtgttcccaccaacacctccagccaagcaccatgagcaaccttcatccccttcgacatcacctgycctctgtgtgaaagcaaaccacagcttccactccaggactctgcccagcacagagcagcaccctcaactcaccttctgcagcttgtactcctcctccacctgcccacagtggttcaggtggcygagccatgctgacacatcgaggcgccggtaygtgttctcctccgggtgcgtctctgatgaaggcagcttgggccgacggatggaaaactgcatgcatgtcttctcatcagtgagctgctgagcaaggggagcaaaccaaaccaaaacaagacaaaaatgaaggcgggaggcagagatagcagcgcagcgtgcagtgttcrgagcagcaaaacctttccctgtggttctcgtaggattaartgccgaggcacagcccttagcaaggttgttttcttaattccaaccattacaatagcacga

SEQ ID NO: 66712 - DNA, 600 bp, Chicken  19866894335416_4
agcacgcagagcaccaacacactggtttacccatcctgctgcctccttgggatgatgcttggatctcaactgcagygctctgtgttcccaccaacacctccagccaagcaccatgagcaaccttcatccccttcgacatcacctgycctctgtgtgaaagcaaaccacagcttccactccaggactctgcccagcacagagcagcaccctcaactcaccttctgcagcttgtactcctcctccacctgcccacagtggttcaggtggcygagccatgctgacacatcgaggcgccggtaygtgttctcctccgggtgcgtctctgatgaaggcagcttgggccgacggatggaaaactgcatgcatgtcttctcatcagtgagctgctgagcaaggggagcaaaccaaaccaaaacaagacaaaaatgaaggcgggaggcagagatagcagcgcagcgtgcagtgttcrgagcagcaaaacctttccctgtggttctcgtaggattaartgccgaggcacagcccttagcaaggttgttttcttaattccaaccattacaatagcacgagtgattagaataattaaaaatcagagtgcca

SEQ ID NO: 66713 - DNA, 600 bp, Chicken  19866894335416_5
gcttccactccaggactctgcccagcacagagcagcaccctcaactcaccttctgcagcttgtactcctcctccacctgcccacagtggttcaggtggcygagccatgctgacacatcgaggcgccggtaygtgttctcctccgggtgcgtctctgatgaaggcagcttgggccgacggatggaaaactgcatgcatgtcttctcatcagtgagctgctgagcaaggggagcaaaccaaaccaaaacaagacaaaaatgaaggcgggaggcagagatagcagcgcagcgtgcagtgttcrgagcagcaaaacctttccctgtggttctcgtaggattaartgccgaggcacagcccttagcaaggttgttttcttaattccaaccattacaatagcacgagtgattagaataattaaaaatcagagtgccacaaaacagcttcatctttaaaaaaacccacagtttcctattcctccccccatcttatccctgacctgaaagtgaattaatgctgcttacagcaaaacttcaccctgccaggaatgcctgcaataaattacatatgattggccatatacaaagggattgctgttaggcaa

SEQ ID NO: 66714 - DNA, 600 bp, Chicken  19866894335416_6
tcaactcaccttctgcagcttgtactcctcctccacctgcccacagtggttcaggtggcygagccatgctgacacatcgaggcgccggtaygtgttctcctccgggtgcgtctctgatgaaggcagcttgggccgacggatggaaaactgcatgcatgtcttctcatcagtgagctgctgagcaaggggagcaaaccaaaccaaaacaagacaaaaatgaaggcgggaggcagagatagcagcgcagcgtgcagtgttcrgagcagcaaaacctttccctgtggttctcgtaggattaartgccgaggcacagcccttagcaaggttgttttcttaattccaaccattacaatagcacgagtgattagaataattaaaaatcagagtgccacaaaacagcttcatctttaaaaaaacccacagtttcctattcctccccccatcttatccctgacctgaaagtgaattaatgctgcttacagcaaaacttcaccctgccaggaatgcctgcaataaattacatatgattggccatatacaaagggattgctgttaggcaagcggagaacggcactgccaggctctctaagggcactcctg

SEQ ID NO: 66715 - DNA, 599 bp, Chicken  19866894335424_1
  misc_feature (1)..(27): n is any nucleotide
nnnnnnnnnnnnnnnnnnnnnnnnnnnttctgaaaaaaaagaaaaaaattgatcttaattttttgggtagcgtgaaataaacaaaatttatgacaaagcgtttttttcttgcatatgtaactgtgaaatgacattttgtttttgaagaaagggaaggaaaggctttccactgtttaaataaaataaaaatcaagtggagaaaaggtatttctcatcagcattcctcaagtgtacctctcaaagcaggaccaaagaagaattagcatgaagagccctcctggtacaccaaatttagatgtytgattgacactgtctccatgctgaccggaatgaagatgcctatcaggcaggtggatgtgctgttggccactgatctacaagctgcccctccacaccacagggagtggtttctgtgatgtcccacacaagagaactcttcagcttctagatgctgaacaatgagtccatcatttgggcagtttgtttctgttagggcaacctgcagctggagataggcagcagctgagtccaaaccccagccatttctcttctgttgygctgctgctgctgaagtggagacagtccagcatcaacacttg

SEQ ID NO: 66716 - DNA, 600 bp, Chicken  19866894335424_2
aattagcatgaagagccctcctggtacaccaaatttagatgtytgattgacactgtctccatgctgaccggaatgaagatgcctatcaggcaggtggatgtgctgttggccactgatctacaagctgcccctccacaccacagggagtggtttctgtgatgtcccacacaagagaactcttcagcttctagatgctgaacaatgagtccatcatttgggcagtttgtttctgttagggcaacctgcagctggagataggcagcagctgagtccaaaccccagccatttctcttctgttgygctgctgctgctgaagtggagacagtccagcatcaacacttggcaactggaacatggcttcctactttatctctccttcatatgcctttgtcccaccattcatccatcactcataacatgtcaaataacacagctaatatctgtgcttgctagaacagtttatctcaaagacactcaacacagcttcttaggtataaggatctctgcataccacctaaaacacattattcagcttagtcaactgaggacaccagtaaacaaaggcaattcccacaagcatttcataaaaaggaaaaaact

SEQ ID NO: 66717 - DNA, 599 bp, Chicken  19866894335430_1
  misc_feature (1)..(34): n is any nucleotide
nnnnnnnnnnnnnnnnnnnnnnnnnnnnnnnnnnggcagcccgaggcccagggacagctggtggctgtgctgggaggggcagcctcaacatgttcttcaggcccagcgggtggcacggctctgccctcagtcatgctgtaggtacagaaggttatcagaagtgttgatggatatttttaggctgaatgaggagtaataggggttgaaggggccagaaaaattttgcacttatcgcattttgagctccgtgctgctaaggaagcgaagatcctcatcgagaaactattaattccttgtttmatggagtgaagaacagagttaagcattttttttccttcttatcagaagaaacatatacttggttttggaggcgaatttgtcacactcggtacctgcaacctccacagcttccttctctgttctcctttgggctcttacttgggtctctgacacatcatcttcatgtaaacctcagctcctttgcatgctctaaaatgaaagatttgtctaacctgccttaaaaaaaaaaaccaacaaaaaacaaagaggttagctgaaccctgttcaggaagtttgttttgttattgtagggttgcttg

SEQ ID NO: 66718 - DNA, 600 bp, Chicken  19866894335430_2
atcagaagaaacatatacttggttttggaggcgaatttgtcacactcggtacctgcaacctccacagcttccttctctgttctcctttgggctcttacttgggtctctgacacatcatcttcatgtaaacctcagctcctttgcatgctctaaaatgaaagatttgtctaacctgccttaaaaaaaaaaaccaacaaaaaacaaagaggttagctgaaccctgttcaggaagtttgttttgttattgtagggttgcttgtcagaggtagactgggagcactggtttctaagcctgttctrtttcttccccccttasgaggtaaagtcttctctrtagtgaagcatctggggaagatacrggaagggcaaacttgaggtctggaagtacctcaaggcctcttgtgctctacctgagtgctcacctgtaaaaagtctgtggattatgagactaaaaaatggaagagggtgtatacgatgagacattcttccttcatttcttcctcctgccaccaccttccttcattttctgacaccatagcaaccttctgatgatacttctaatcagagggtattgtctccagcaatgatgtttgctttctc

SEQ ID NO: 66719 - DNA, 600 bp, Chicken  19866894335430_3
gaaacatatacttggttttggaggcgaatttgtcacactcggtacctgcaacctccacagcttccttctctgttctcctttgggctcttacttgggtctctgacacatcatcttcatgtaaacctcagctcctttgcatgctctaaaatgaaagatttgtctaacctgccttaaaaaaaaaaaccaacaaaaaacaaagaggttagctgaaccctgttcaggaagtttgttttgttattgtagggttgcttgtcagaggtagactgggagcactggtttctaagcctgttctrtttcttrcccccttasgaggtaaagtcttctctrtagtgaagcatctggggaagatacrggaagggcaaacttgaggtctggaagtacctcaaggcctcttgtgctctacctgagtgctcacctgtaaaaagtctgtggattatgagactaaaaaatggaagagggtgtatacgatgagacattcttccttcatttcttcctcctgccaccaccttccttcattttctgacaccatagcaaccttctgatgatacttctaatcagagggtattgtctccagcaatgatgtttgctttctcctaaccc

SEQ ID NO: 66720 - DNA, 600 bp, Chicken  19866894335430_4
acttggttttggaggcgaatttgtcacactcggtacctgcaacctccacagcttccttctctgttctcctttgggctcttacttgggtctctgacacatcatcttcatgtaaacctcagctcctttgcatgctctaaaatgaaagatttgtctaacctgccttaaaaaaaaaaaccaacaaaaaacaaagaggttagctgaaccctgttcaggaagtttgttttgttattgtagggttgcttgtcagaggtagactgggagcactggtttctaagcctgttctrtttcttccccccttasgaggtaaagtcttctctrtagtgaagcatctggggaagatacrggaagggcaaacttgaggtctggaagtacctcaaggcctcttgtgctctacctgagtgctcacctgtaaaaagtctgtggattatgagactaaaaaatggaagagggtgtatacgatgagacattcttccttcatttcttcctcctgccaccaccttccttcattttctgacaccatagcaaccttctgatgatacttctaatcagagggtattgtctccagcaatgatgtttgctttctcctaaccctgtgagtgt

SEQ ID NO: 66721 - DNA, 600 bp, Chicken  19866894335430_5
atttgtcacactcggtacctgcaacctccacagcttccttctctgttctcctttgggctcttacttgggtctctgacacatcatcttcatgtaaacctcagctcctttgcatgctctaaaatgaaagatttgtctaacctgccttaaaaaaaaaaaccaacaaaaaacaaagaggttagctgaaccctgttcaggaagtttgttttgttattgtagggttgcttgtcagaggtagactgggagcactggtttctaagcctgttctrtttcttccccccttasgaggtaaagtcttctctrtagtgaagcatctggggaagatacrggaagggcaaacttgaggtctggaagtacctcaaggcctcttgtgctctacctgagtgctcacctgtaaaaagtctgtggattatgagactaaaaaatggaagagggtgtatacgatgagacattcttccttcatttcttcctcctgccaccaccttccttcattttctgacaccatagcaaccttctgatgatacttctaatcagagggtattgtctccagcaatgatgtttgctttctcctaaccctgtgagtgtgtaccaacctgataggtt

SEQ ID NO: 66722 - DNA, 589 bp, Chicken  19866894335430_6
ctccacagcttccttctctgttctcctttgggctcttacttgggtctctgacacatcatcttcatgtaaacctcagctcctttgcatgctctaaaatgaaagatttgtctaacctgccttaaaaaaaaaaaccaacaaaaaacaaagaggttagctgaaccctgttcaggaagtttgttttgttattgtagggttgcttgtcagaggtagactgggagcactggtttctaagcctgttctrtttcttccccccttasgaggtaaagtcttctctrtagtgaagcatctggggaagatacrggaagggcaaacttgaggtctggaagtacctcaaggcctcttgtgctctacctgagtgctcacctgtaaaaagtctgtggattatgagactaaaaaatggaagagggtgtatacgatgagacattcttccttcatttcttcctcctgccaccaccttccttcattttctgacaccatagcaaccttctgatgatacttctaatcagagggtattgtctccagcaatgatgtttgctttctcctaaccctgtgagtgtgtaccaacctgataggtttattcatagggtta

SEQ ID NO: 66723 - DNA, 600 bp, Chicken  19866894335435_1
cactcactccaaattctgctccctccctgagtgacgagctggccctgatggacacacggccctctaccccgaatgatggaggatgggagactgcatggagattgtgcagatgccacccaaaactggggctgaacacaccggggaggggagagcagcctacaaatggagcaggggggctgctgaggacaggcgctggggctggtggcacattgaaggaggctctgagaaaggggcagggagtcctggatccattctgccccacacagagggaccccaggaaggagcagcagccccgaagcrgagcagacagctttgttttaccaggcagagtgccctggagcagagggaggaggaggaggagaaactctcccgcaactgccaagatcctgccacacaagcagcagtcaggagggccacggctcctctgcccctcggagcaagagaaagtgagagctgtgcctgcctcatttggtctcaatccctgctttcttccagcaggagcagcctgccagggttgctcaggggcagccctgggcagagctgtgccctcctcactgctgtgtcagggcaggagaccagcatcctgctggctcctcggga

SEQ ID NO: 66724 - DNA, 600 bp, Chicken  19866894335439_1
gttgtggggagctgctaaataaaggccctacaggccagccagctgccttggactttccccttgcgtgttgtttcagtgataggttttgggtgtttgccatcacagcttcttaaaggtgtgtgtttgtagcccggcgtgtgcagcttggccatccctccttgcaaggctctgcagagtaacctgaactcctttttcctcttccagcaaaaatactttgattctggtgactacaacatggccaaggcgaagatgaagaacaaacagctgccgactgcggggccggacaagaacctggtgacmggagaccacatccccaagcctcaggacctcccgcagaggaaatcctcacttgttgccagcaagttggccgggtagcccacactcacgggctgtggtttttttccccctattttctttttttcttttggttaattggattgaacttcactgtaccatagagctgggagcaccagaatccacatagttatatgagtacttatagcaaacacacaacacaaccaagaagaacgtgagatgttggtagcccaggccatgcaggcagacctttggtggatttggttgcacatttgctttttgtaa

SEQ ID NO: 66725 - DNA, 600 bp, Chicken  19866894335450_1
tatcagtaatcatataatctccaataggataagtataaagggttattaatgcggtaatttattattagcaagtagaggagcagtagagcaataaacttagccttgctgctgcaatgactttgtatgccagtacactctggttttcatggcatttgtgtatcagtttcttacactgattgctggctgctgctggattctgtctaatgttatacaaaaaatggacttagcaccttttaaagatctcagtgtccatcagtcagttatgtggcggataattttcttcctttatttatttatttwttttgtccatcattttgacagcttgcagcaggtctgactcttatctcatcaggattcctgtctgtgagaatgatctttaaataccttcagttcaaggacactgtagactctttcaaataatatagggtaccaaaacagtgaaatttaatgagatagaacaccaaattgattgtctcagaagagtacctgtgagagtagttaagatgatgtgtaaatcactttttcctaacagtttgtaccatcatcatgtgatatttctacagaatgacatgaatgtacttggtatccaaaaaccaaaaa

SEQ ID NO: 66726 - DNA, 511 bp, Chicken  19866894335450_2
gcagcaggtctgactcttatctcatcaggattcctgtctgtgagaatgatctttaaataccttcagttcaaggacactgtagactctttcaaataatatagggtaccaaaacagtgaaatttaatgagatagaacaccaaattgattgtctcagaagagtacctgtgagagtagttaagatgatgtgtaaatcactttttcctaacagtttgtaccatcatcatgtgatatttctacagaatgacatgaatgtacttggtatccaaaaaccaaaaaatttgcacctttgatttaactagmagtcaacagccaataaaggccatgcactgttgattgagaggacacagcttgtgtggttttgaacaatttgaaaaatattaatgcactaattttatgacgtcttttggtttatttttccatcacaggtgataatactccatggaactggagtattaaccctttaattacccgggctgtacatgatgttatgatgtggaataccaatagcaaa

SEQ ID NO: 66727 - DNA, 600 bp, Chicken  19866894335451_1
gcatgaagcaatctggcccaagtgttctgaaagaattggttcacattgaaagtaagggtaatcatttggcattacaaatgtgtaaacaaatatatatttattttggagttaaaaaaaaaaaatgaaaaagaagcctactgttgtccagattaggcatgttggtatagaatcaaaatggatattaaagatagactatgttgcaaatgagcaagactttcacgattacctagtttattcatgctcacagcagttggtttaattatggctacccccatactgtttcaacattattctcatagrgaaacatttaaaatcatactgtctttaccactttccatgacatttgagagtctgaaaactcagaaattctagcccagtggtcactctacatgcatagaaagccaaggaaaacaaagcatgtgccagcaagtctaccgtaagttttattatatccccttctgtgtctactaatgttggcaaggctgagtttacaaggtcagtaatttattgtctgcctccaagcatgaagtgtgaaaataatgatattttagcaaggctttttcttacaagttatatatataaaacattactctctggtga

SEQ ID NO: 66728 - DNA, 600 bp, Chicken  19866894335452_1
ccccctggctcccaaaaatgggaagggaaaagggaaaggggtaggggaatgggagctgagctcagagagggagaaagaatggaacagcgacaacgatctaaggaggaaaacttattttactaactgtgatattggaatgcaagataacacaatataatataatctaattgaaattaaggataataaatcaaataaaataagaatgtttccgaaaccgaaaggcctacttgatgaagacgtatggcttggaagcacacccactcctctgcctggctgccatagagggtatgagcctgatcycatgacttagatcccatgatttccgtgatgtatcttccttctctgaccatgaggtcctctggcacatgtagctcttcttctcttttgagaagcagatatttggaaggttgtcaatccacagaactggagtattaaccctttaattaccagggctgtacatgatgttatgatgtggaataccaatagcaaaattacaaaactatgacaaacatgaagggaaaaaagtccacgcaaatctgcatctcctagaccaaaatttcagattatgtaacaaaaagtattatttaattcttcacaggt

SEQ ID NO: 66729 - DNA, 600 bp, Chicken  19866894335457_1
gatagtagaaggcatgccaaagcattataagatgaatctcagcactgggactgtgaaacttatttgcaagactcagaaaaccacgtagtagtagtttgctcttgtttttgaggcttattccagcaacaccattgtaaggctcaagtagctgagtgatgttcaataattagggggaattccctgggtaatacttgtaaagaccttcgctttaggtaggactcttgccactcatttatttcttagtttccattctcgagaacactgttagaatcatagaattcatagaaccattaaggttgraaaagaactctaagatcaccaagtccagcctcaacccatccccaccatgcccactgaccatgtctctcagtgccacatccacacggttctgggacacctccagggacagtgactccactacatccctgggcagcctgttccrttgcatgaccactcttctggaaaataaatgtttcctaatatccaacctgaacctctcctgctgcaacttaaggctattatctctcatcctatcactgttacctgggagaagaggctgactgccaccttgctacaacctcctgtcacagagtctgttat

SEQ ID NO: 66730 - DNA, 600 bp, Chicken  19866894335457_2
aagtagctgagtgatgttcaataattagggggaattccctgggtaatacttgtaaagaccttcgctttaggtaggactcttgccactcatttatttcttagtttccattctcgagaacactgttagaatcatagaattcatagaaccattaaggttgraaaagaactctaagatcaccaagtccagcctcaacccatccccaccatgcccactgaccatgtctctcagtgccacatccacacggttctgggacacctccagggacagtgactccactacatccctgggcagcctgttccrttgcatgaccactcttctggaaaataaatgtttcctaatatccaacctgaacctctcctgctgcaacttaaggctattatctctcatcctatcactgttacctgggagaagaggctgactgccaccttgctacaacctcctgtcacagagtctgttatggagagcttcatgtgacctttataactcatgttcctaccactttgtttcctgaggaactgtaattttcagtggtgaaagcacttcttcagagcagccctcctatgcagagctttctcccttatttagtcactgagggtacat

SEQ ID NO: 66731 - DNA, 600 bp, Chicken  19866894335460_1
aggaacacatccaaatcaacgtcatttctcacctggatttttgtttctgactagcattcaggaatagcagtcatagtgtgtttctaggtgagagagatgctgatgatggtgcttcgtgaggcttctattagtgctaaactcagagaggatcacgtgagcaaagtggtgaaggggtgcgtgtgaatggctcagctgcccaaagctggagcctcacactgctgccaccaaatgtgatctattgatatctccttagagccagcctcacttctgtttcggtgtgcagtgatgccaacttctgaygttacaacatcatccttcagtatggagatgaatttattatcatcacaaacagcaaggctttaattgcacccaggcataacactgacttccttgcctcagccctgtcccatgaaggccttccgatctgatcagatatccattgtcccttccagatcccctgccttccccttcttgctttttaaaacacatttctaggtctcttaaatcctaagtgtgtgtcatgaagcagtggcttaatccactgcagcagttccccatgagctgcagtttctgagctgtgctcctaggtcctgtggcatg

SEQ ID NO: 66732 - DNA, 599 bp, Chicken  19866894335470_1
  misc_feature (1)..(28): n is any nucleotide
nnnnnnnnnnnnnnnnnnnnnnnnnnnngacggctgggcacttaggcaatgaggaattaggcttcttcaaacccagcagtgtacttcctaagcaattctctttgtggttattttattaagttatttcatccttgctggacaacacagtacttacactaggtaatgcaactatcattttgtgaacagtacacagctcgtttcaagattgtattacagtgaaaaaaatcgactcaacctttcatatcaagggaagagatcatgaagatgctgtgctgagaagaatagaaaacaaaatcagcycaacattaattttcaaggtttccatgccaacacaaatcaaatgcattttgcatccagaattcacagcaaaagctgactgttattcttcagagatgatgtgtatcagaagctgtgttaaagacaggcccacagacctcttcttacacaattcagttttgatgctttaacacatgggaactcccacttgtcagagaacaggaaatatagccaaataatgtacgaagaaggaaatcctctctgttgaataaatgtagtgtacaaaaaagaaacatagcaatgacttttctgttctttttaaa

SEQ ID NO: 66733 - DNA, 600 bp, Chicken  19866894335477_1
cttttaacagagaacaaaaatggacttctgaaaaataacagctttaagcaaagaactaaatggaggaaaagttctgaaattaaggggcaaatttatggagaagtgtttaccgttaaatactccctgtagtttgtattctgcacaactcccatcttcaaaaaatacacgatcaagaatctttgttttactttaagaagctagcatatttactttaagaagctagaaactggctgctctcacagttctcaggtactaacaggtcctacttcccctttctcagtcatgttatttgcaccaaayagcaacaaggcttagaaaagtgagaagttctgcttatcaagcagtcaatctttatgcatgctttgtacctagaagatcacaagtcctcaagaatagcacacagctgaaaggttttaattcaaacacccatttgcaaaaacccccgttatcaaaagatgatgcagccctgagttcagagaaaataagataaagaatttggcttctctctgcatcaagatatctaacagcatgaaacctgtttgtgagggttaagaaccgcccaatacttaaacacctaagatggcaactgctctgagatga

SEQ ID NO: 66734 - DNA, 600 bp, Chicken  19866894335491_1
gggaagaccctgttttgatccctgcttgtgacagcaatggggctgacctgctgccttgtccttgttggctgcacgctaagatccaaggagaagctagtaaaggggtacctaacactcagtattaatgcatttgtttccaaataactgtggatatctgcatcctgccagcattggttggtacactcagaacagcatgccttttctgagctgcagcagtagaggcttgttctatggacgagattcagcgtttcccgtggggatggtccacttgggggcatgtttgcccaaagccatgtgagsccttggaataattactacatattatggagatcacctttatggtgaagtaggtgctgagaggtgatgttcgaggttgagcggagttgagatgcctgattaattgctatagttaaataagtttacctctctctgtagagagaggaggggatgctggttgcaggagatgtgcaagtgcagcatcacaaactccttgaagagctccaagacgctggagcttgcttgatgttggcaagtccttctggaagtgaatctctcccaaatttctatggttattaggcctggattgttcaagaaattgca

SEQ ID NO: 66735 - DNA, 600 bp, Chicken  19866894335491_2
tttagagagatgcaaatcagctgatttgtgcatctgcagctaatgacctttgcactgaagtcataccaggagcagtgcaattaccattagctctgctgctgacctgaatgcagatcccttgttggtggcgtgagcccagtgttgtgcctactctttttcaggcaaggaagagcccctgtatgtgattagcgctgtgctgacccaggaggtcagccagtactgccctgggctgcctctgtgcccctagggtgaatactcagagaaacatgctggtgcgattgctcctggacatagctcaartgagctgtgcttgttgaaagcactggttggtgatgggaggtgttggtgggtggacctggggtgcgagcagtttatccagctgaactggagggagatgagacagctggaggcaggtagaggcacagctgggctgggaggactgagggtcacatctgcatatgggaggatgctgcttctttctcctcccctcagtaagcaaacaagctcccagagctgctggttgttccaatgacttgcacctgggatgagtctctgctgttggatccactcgtttttgtgcaaggcagaaaggagccagcg

SEQ ID NO: 66736 - DNA, 599 bp, Chicken  19866894335501_1
  misc_feature (1)..(48): n is any nucleotide
nnnnnnnnnnnnnnnnnnnnnnnnnnnnnnnnnnnnnnnnnnnnnnnnaatgtggagtttggtgttacggtgtgttctggtatatgaggaacaatctagtacttgctgttcagagaaggaagaaaccagtgtttgtcatgcacctgcaggctttataagcatcagtgcccagtgctggcctgaggtcctgggtgggctgaaaggtctaagtttagagatggagctcagccatgctgcatgaactatctcaccgcagctctccctctatggggaggagatgggcagggtttgttctccccrtggatgtgcagagcaggtggcagtcagctctgtctctgctccgtgctgggtctgtgttcccatggacagcagcaggtgggatggctgtgacccctgtgaactgcggccccagggctcacgcaaaggtctttgagggaaagctgagggaagaaacaacactgatattttttttatccttgcaccagcgcggggatttggattggcagggttagttatgaagccaatattatgagtttaactatgagtgaaataacacaacttctgtgggaagcagagtaaaagaggcaattatgcagtag

SEQ ID NO: 66737 - DNA, 600 bp, Chicken  19866894335501_2
tatgaagccaatattatgagtttaactatgagtgaaataacacaacttctgtgggaagcagagtaaaagaggcaattatgcagtagcttaataacagcactctggctgggtagctgaaaatatacagttgacagtaattagatttttttttcattcttcctgttaaatagctacaaaaattacaatataaattcatctgattcactcttacacgctgttttcatcatcaggtccatacccatttggccttcagactatttttgttttgtaattttctcctgtctggtattctagaggcayggcacttaatgttcttaatgctggacacacaaagcaagatgaaaaaggcaggtgaggggagcaggcaggaaccccatcagaaaagcagggaatgtctggatggacagcaaggactttccaagtgggctctccccgactcgctgtcctctttctaagcactcacctcttcttttccatgtatagacaacatttagttttctcttatgccacacaacctcgcattaccttagcaactgtgtgctttccagcttgcagggtagaacttgatgagccagcaagtgcatggcacttggtttgctt

SEQ ID NO: 66738 - DNA, 600 bp, Chicken  19866894335502_1
tcacctcagcagtgtgcttgtcagcagtgagcaacctgttgaacagacctcttcctctgcttcatcctctgtgggttcaggaacaagcaagtgtgatcaggaggaggtttgcctgacagattcactcccaggcagctgcaaaaacaacaggctggtctctccacacagctgctggtagggctgggtctaccccacagtgcatatctacacacacaggcgcatgtatgtatatctcatgtaagtatgtacaaagctttacagatatatatagttattgaggaaatctgtgaatatatcacycagagaccacccaaattttaataccactcaagaaagctggaatgaatataagtggatgattggacaggatgatcttgtaggtcttttccaaccttgatgattctatgattctatgatcagctctactgaagccagtgggatraatgagttgaattaatgtcccaatttaatcaagttaacaagkatgtttatacgaactacagctttttgaagtagttaatgtttaagtctgtgaaacattgctgtttttgtgacgtaatatttattttctagctggtaagaactactactagatagttc

SEQ ID NO: 66739 - DNA, 600 bp, Chicken  19866894335502_2
aacaacaggctggtctctccacacagctgctggtagggctgggtctaccccacagtgcatatctacacacacaggcgcatgtatgtatatctcatgtaagtatgtacaaagctttacagatatatatagttattgaggaaatctgtgaatatatcacycagagaccacccaaattttaataccactcaagaaagctggaatgaatataagtggatgattggacaggatgatcttgtaggtcttttccaaccttgatgattctatgattctatgatcagctctactgaagccagtgggatraatgagttgaattaatgtcccaatttaatcaagttaacaagkatgtttatacgaactacagctttttgaagtagttaatgtttaagtctgtgaaacattgctgtttttgtgacgtaatatttattttctagctggtaagaactactactagatagttcagtaacaagaacagtgttttggaaaataagtttatacttttatactaaagtatactttagtactttaactaaagttaagtactgtactgctagaagacagaatatagaatgaatactgagatcctctctctaaattttacag

SEQ ID NO: 66740 - DNA, 600 bp, Chicken  19866894335502_3
gtctaccccacagtgcatatctacacacacaggcgcatgtatgtatatctcatgtaagtatgtacaaagctttacagatatatatagttattgaggaaatctgtgaatatatcacycagagaccacccaaattttaataccactcaagaaagctggaatgaatataagtggatgattggacaggatgatcttgtaggtcttttccaaccttgatgattctatgattctatgatcagctctactgaagccagtgggatraatgagttgaattaatgtcccaatttaatcaagttaacaagkatgtttatacgaactacagctttttgaagtagttaatgtttaagtctgtgaaacattgctgtttttgtgacgtaatatttattttctagctggtaagaactactactagatagttcagtaacaagaacagtgttttggaaaataagtttatacttttatactaaagtatactttagtactttaactaaagttaagtactgtactgctagaagacagaatatagaatgaatactgagatcctctctctaaattttacagtatcacacgctgaaggggtggacaaactgtgggagtcctaaa

SEQ ID NO: 66741 - DNA, 600 bp, Chicken  19866894335506_1
tagatacaagcatattataacaacatacataatgtttaatagtttagcacatgcaaataagcagagcaaatcaaattattaatgacaaacatcttttacacaaatttagcttttttatggtatccagccatttgtttgttcttccaactggctggcaaatgctttgagttaacaaatttagatggattacttcctcataatttattgcctgcattagtttaattgttcaacagagagaactctaatcaagaggtctaattggtgaacctactgccaatgtaggcaatatctgtttctttwtttgctctcttgttaagagacagtaaaaatgtgttatgaacaggataacataatagcattctgaggttcacgttactcttagtggaaaagtttccagttgtgaaatatgatagccactatatgtgggcacaaactataaagaagaggtgaggcaaatatctacttttctttctgtttattataactcttgaccagctgtcacaagacttttgtactgagccctctgacatttctgggcttgcttttgcaagacttcatcagcagttaaagggatttctctcctttcctcttgaggctgca

SEQ ID NO: 66742 - DNA, 600 bp, Chicken  19866894335508_1
gagagttacaggatcctaagaatcctaaatgaatcttaataataataatgggcttcaaaggagatggagaagagcagccacgtatcaatgatggaggttataacaggaaggcttcttgcagaagatatcataattgacagcacagtaattggaactgcacaatggtttattgataggacagcttctgggtaagtgatgtggattttttgttataattagattgtgttttgcagcagaggtagcccaggctttaaaactacctcagtgcctttgggtcagtgctttttggcctcgtgttcygtgtgtctgtgtcagcatagcagatggggcaggtgggagatatgatgctggctgctcagcatttcctagcaagctttactcagggtggcatttttcaggaaagattcaacatcaaactgaaaaaatcctggaaaaatttggctgaaagctattcaaaagagtttaaaaatgtaaacattgagtatgggaggtaacagggacagggaaggagcgctgtccaaattacagctccagagccacagattctctgttcttacacagaaaacacacctacattcacatgactttatatgcctgtat

SEQ ID NO: 66743 - DNA, 599 bp, Chicken  19866894335509_1
  misc_feature (1)..(57): n is any nucleotide
nnnnnnnnnnnnnnnnnnnnnnnnnnnnnnnnnnnnnnnnnnnnnnnnnnnnnnnnnttttagggctgtgcatgtgcaaggctggaggtgaagggcaggattttgcttcaagcttctggcagtaatcaaggagcctggctgaatgtgaacttaaaatcttctgagtcaaaatgcaacatttatttgcctacatgcagcaaagctggaggtacttacagttcttgactcattccagagtgtgtgcctcatccaagctttccctttgtatttaagggttttacacaatgtgttttccccacycatagagaaagagttagaaaagaaaaatctattgattttaatgatttcagkatcctccacttacaaagtaagaaactgtcttcagtgagaagaaattgtcttatggccacaaaawtgcatcataaccaaaaccataaaaaggatctatttaaatgtccctgtcaagttttttattccccattagagacatctcagtggattcttttatctgaatgctgtgtgcaaatcattgtttgagccctccatagcaacttgttttttctgctgcaccttagaggggagaaccttctttccctatg

SEQ ID NO: 66744 - DNA, 599 bp, Chicken  19866894335509_2
  misc_feature (1)..(6): n is any nucleotide
nnnnnnttttagggctgtgcatgtgcaaggctggaggtgaagggcaggattttgcttcaagcttctggcagtaatcaaggagcctggctgaatgtgaacttaaaatcttctgagtcaaaatgcaacatttatttgcctacatgcagcaaagctggaggtacttacagttcttgactcattccagagtgtgtgcctcatccaagctttccctttgtatttaagggttttacacaatgtgttttccccacycatagagaaagagttagaaaagaaaaatctattgattttaatgatttcagkatcctccacttacaaagtaagaaactgtcttcagtgagaagaaattgtcttatggccacaaaawtgcatcataaccaaaaccataaaaaggatctatttaaatgtccctgtcaagttttttattccccattagagacatctcagtggattcttttatctgaatgctgtgtgcaaatcattgtttgagccctccatagcaacttgttttttctgctgcaccttagaggggagaaccttctttccctatggacctcctcaaagcacactgccagcactggaagacatttcaactctgtttt

SEQ ID NO: 66745 - DNA, 600 bp, Chicken  19866894335509_3
ctggcagtaatcaaggagcctggctgaatgtgaacttaaaatcttctgagtcaaaatgcaacatttatttgcctacatgcagcaaagctggaggtacttacagttcttgactcattccagagtgtgtgcctcatccaagctttccctttgtatttaagggttttacacaatgtgttttccccacycatagagaaagagttagaaaagaaaaatctattgattttaatgatttcagkatcctccacttacaaagtaagaaactgtcttcagtgagaagaaattgtcttatggccacaaaawtgcatcataaccaaaaccataaaaaggatctatttaaatgtccctgtcaagttttttattccccattagagacatctcagtggattcttttatctgaatgctgtgtgcaaatcattgtttgagccctccatagcaacttgttttttctgctgcaccttagaggggagaaccttctttccctatggacctcctcaaagcacactgccagcactggaagacatttcaactctgttttctctggttaaccaatcagtcatggtgcattaccacartggtagttgttacaaactgtttctgctg

SEQ ID NO: 66746 - DNA, 600 bp, Chicken  19866894335509_4
aaaatgcaacatttatttgcctacatgcagcaaagctggaggtacttacagttcttgactcattccagagtgtgtgcctcatccaagctttccctttgtatttaagggttttacacaatgtgttttccccacycatagagaaagagttagaaaagaaaaatctattgattttaatgatttcagkatcctccacttacaaagtaagaaactgtcttcagtgagaagaaattgtcttatggccacaaaawtgcatcataaccaaaaccataaaaaggatctatttaaatgtccctgtcaagwtttttattccccattagagacatctcagtggattcttttatctgaatgctgtgtgcaaatcattgtttgagccctccatagcaacttgttttttctgctgcaccttagaggggagaaccttctttccctatggacctcctcaaagcacactgccagcactggaagacatttcaactctgttttctctggttaaccaatcagtcatggtgcattaccacartggtagttgttacaaactgtttctgctgttcatgggcttcctgtgcagaagatgggagaaatcttgactgatttcctata

SEQ ID NO: 66747 - DNA, 600 bp, Chicken  19866894335509_5
agaagaaattgtcttatggccacaaaawtgcatcataaccaaaaccataaaaaggatctatttaaatgtccctgtcaagttttttattccccattagagacatctcagtggattcttttatctgaatgctgtgtgcaaatcattgtttgagccctccatagcaacttgttttttctgctgcaccttagaggggagaaccttctttccctatggacctcctcaaagcacactgccagcactggaagacatttcaactctgttttctctggttaaccaatcagtcatggtgcattaccacartggtagttgttacaaactgtttctgctgttcatgggcttcctgtgcagaagatgggagaaatcttgactgatttcctataaacttctaccagcattctgttgtcagtggggtctgtccatgcagtgactgcactaagcaatgctacaggacatcagatttaagatgaccaatgctactggtcatcttaaaagtggtggtggtcacagcaaaatgtcttctatatagaaaaaatcatagaatcatagaacaatagaatgtcctgggttgaaaagaaccacaatgattatctagtttcaacc

SEQ ID NO: 66748 - DNA, 417 bp, Chicken  19866894335512_1
agcccacgtttaacacactgctataacattaactcaatcagacacactacaggaaagctcattaagttctggagccagtaacaataaaccattagcattttctgcttagggctaaaagaagcatggagatgagagacctcatattcagagtgaacttgtgaggaaaacaagaaggatcatgttaggttaaggtaaggacatgccacaactcggaatacagtcaacttttgtaattacattacaataggttgttgaaaggtatgaaactgcattctttattttgaagtatgtcatatgtcraagttaggaaaagtctgtataccaaccacaccgacagtctttggttctgtcactgggaacatcttttcagcaccggtgaggccacatctgtagtgccgtgtccatttctggactccc

SEQ ID NO: 66749 - DNA, 600 bp, Chicken  19866894335517_1
atggtgacagaacaatccaaaagaaagtatccagaaaagctttcaaagtcacagttatacagctgtaaccatattatgtttatgttagtagcttctactcagtcttatattgaaatcacatttggctctcactacactctttctcatgagaatttagacatcacagtttgatttgttcgctatctcagcaaagaaaggcaaagtacggctggaaatgatagtgcaacatcactgactaggatctctcaaagctttaatgtgatgcccagaagaatttgcttctgggaacatcaggcaaakaaacaaaaaaccataaatgattaaagcacatttcctctttggaaagttattatataaacatggaagttctttatccaacagatgtgtaaactttacgtctttttagtcatcgtatctgcttatctaaagactatgatttattatcttcccatggaactttgcaatgggggatataaaaaggtacaaaagaagttcatcctgacttgcatatgattaaagtaattgttaactgagggacaattttgaaatatgcagtgcatacacatattgtatcttaagtgcttatgcagtcctagggaa

SEQ ID NO: 66750 - DNA, 599 bp, Chicken  19866894335524_1
  misc_feature (1)..(202): n is any nucleotide
nnnnnnnnnnnnnnnnnnnnnnnnnnnnnnnnnnnnnnnnnnnnnnnnnnnnnnnnnnnnnnnnnnnnnnnnnnnnnnnnnnnnnnnnnnnnnnnnnnnnnnnnnnnnnnnnnnnnnnnnnnnnnnnnnnnnnnnnnnnnnnnnnnnnnnnnnnnnnnnnnnnnnnnnnnnnnnnnnnnnnnnnnnnnnnnnnnnnnnnnnngtggtggcaagagattccttgctccttttcttaatgcagacttcatcatcaccctagctgtgtgttggtgactaatttttttccctaagctaaaaggmaaaacygagagtattagagggtgaagtactaacctgctttacaatactgcaaattttttgctattgatcttgtgctggtgaaggtagttttttgtccttgttatatagttttccaatttctctytcttttgcagcacttacctcccagctgtgctcaattttatatcagtcctggaggaaacttgtcaaacagattctgcactttgcttccctaaattcacatccagctttccaaagtatttttctgtttgcttcatgattttgtcctttctgtaactttctgagaagcagtggaaagg

SEQ ID NO: 66751 - DNA, 599 bp, Chicken  19866894335524_2
  misc_feature (1)..(196): n is any nucleotide
nnnnnnnnnnnnnnnnnnnnnnnnnnnnnnnnnnnnnnnnnnnnnnnnnnnnnnnnnnnnnnnnnnnnnnnnnnnnnnnnnnnnnnnnnnnnnnnnnnnnnnnnnnnnnnnnnnnnnnnnnnnnnnnnnnnnnnnnnnnnnnnnnnnnnnnnnnnnnnnnnnnnnnnnnnnnnnnnnnnnnnnnnnnnnnnnnnnngtggtggcaagagattccttgctccttttcttaatgcagacttcatcatcaccctagctgtgtgttggtgactaatttttttccctaagctaaaaggmaaaacygagagtattagagggtgaagtactaacctgctttacaatactgcaaattttttgctattgatcttgtgctggtgaaggtagttttttgtccttgttatatagttttccaatttctctytcttttgcagcacttacctcccagctgtgctcaattttatatcagtcctggaggaaacttgtcaaacagattctgcactttgcttccctaaattcacatccagctttccaaagtatttttctgtttgcttcatgattttgtcctttctgtaactttctgagaagcagtggaaaggcaaact

SEQ ID NO: 66752 - DNA, 599 bp, Chicken  19866894335524_3
  misc_feature (1)..(78): n is any nucleotide
nnnnnnnnnnnnnnnnnnnnnnnnnnnnnnnnnnnnnnnnnnnnnnnnnnnnnnnnnnnnnnnnnnnnnnnnnnnnnngtggtggcaagagattccttgctccttttcttaatgcagacttcatcatcaccctagctgtgtgttggtgactaatttttttccctaagctaaaaggmaaaacygagagtattagagggtgaagtactaacctgctttacaatactgcaaattttttgctattgatcttgtgctggtgaaggtagttttttgtccttgttatatagttttccaatttctctytcttttgcagcacttacctcccagctgtgctcaattttatatcagtcctggaggaaacttgtcaaacagattctgcactttgcttccctaaattcacatccagctttccaaagtatttttctgtttgcttcatgattttgtcctttctgtaactttctgagaagcagtggaaaggcaaactatcattgcagaccatttgcctgtctggcaagggaaatggcatgatttaaatgtggctgagctaaagcaatattaaaacctccaggaaaattctaacatttgttcggatgtttttgttt

SEQ ID NO: 66753 - DNA, 599 bp, Chicken  19866894335532_1
  misc_feature (1)..(85): n is any nucleotide
nnnnnnnnnnnnnnnnnnnnnnnnnnnnnnnnnnnnnnnnnnnnnnnnnnnnnnnnnnnnnnnnnnnnnnnnnnnnnnnnnnnnncatttttttcttaacatgctgactgttgagaagtacaacaagtagctaaaatgttttttgtcattaaaaagagcaggtgtatgtacatacatggaaggaacggatctatcaaataacaatgcatctgtcaaaaccaaactatcctccagagctaatttttcagccctatcttacacattctacagcaattcatgacttccactgaagctttattygtgctgaacctgattgctcaacatttcacattttcacttcactacatttttgatgtttgatgtcctaaactgataaaacaaagcatgcaaagccacaagcaccttgtcaagagatgttttcagggcacactttgcacacagctcaccactgttgaggtcaatgatcaaaccgaaatcagaaacctccgtgtctctgagtgaccctttccagttgcaagtgcactggggtcacaacctgcgggttttatattcctctatgtgtttacatgtgtttaaattaggaattgtgctatattagg

SEQ ID NO: 66754 - DNA, 600 bp, Chicken  19866894335537_1
ctatatatttgagtaggagtgaatgttcatttagaaaaaaaatgaatttgtggggtagaaatttcctgattgatggtacttgaaaacaaatcactcctttttttttttttaaatcatggaaagtaggccgatgtgagagcatcaataggagtgctgtccatatgggaagaaattttccaaggggtcattctgagcttttctctcaaaagtttgttgtatatctgatctctcatgtatgtgatcagaaattcacaagtgtctgcagcatcttttgcaaggatcttgataaatatctagatrtatttcaacaaatgcaggaattttctgaaaatgtttaactgtcttttggctttgtacctatgttaaattcatggaatactttactagtggcaaaattcctctgcctccattctctatttctttttcttccctctgtgctaaatctgcctctcattgtggaagattcttggctgatgattggaagtgtgaggaatgactctcctataagcaagcagtaaaacacaaaaaatattgcttagcagaaggtccttttgaagtctggatgtggggagttgtactttgttagcaccttgaggcacg

SEQ ID NO: 66755 - DNA, 600 bp, Chicken  19866894335539_1
ttcaatcacccccctgcgctcctccagtcttgctgcctcatcccgagctgaatgtgctgagaggaagttggtctgtatgaaagaggaacacaatcacattgtgtatatttcatatcctctgatggaacaactttaagaagcaaaccctgctcttttcccaagccatcttttatacaaagattgagctgtcgatgattatcctttctttttttttttttttttaagcagaaatgacaacatcaaataagcagatataaaatctatgctacaacacacagaggcatattcaagcttcttttmaagattttgtagtaacagagacatttatatctcagcaagttccaaaacacgccaggggacagcactcatcctgttgaagtccatgtcactacgtcttcacattttctttagcttggacagaaacagtaatggatttgcctacacatattgcaaaccagagactttaatggtttcgggggcataggtttatcttttcattttagtagtgctttccactacccacatcactatcataaaagaaaaaaaaaattcttaatttctactgtttttgtcgttatacatctagcaactgcatatgta

SEQ ID NO: 66756 - DNA, 599 bp, Chicken  19866894335542_1
  misc_feature (1)..(160): n is any nucleotide
nnnnnnnnnnnnnnnnnnnnnnnnnnnnnnnnnnnnnnnnnnnnnnnnnnnnnnnnnnnnnnnnnnnnnnnnnnnnnnnnnnnnnnnnnnnnnnnnnnnnnnnnnnnnnnnnnnnnnnnnnnnnnnnnnnnnnnnnnnnnnnnnnnnnnnnnnnnnnnnntatcagatgaaatattattttaatgttattttataccacagaatgatagagatatgatgggtggactgttcaatggacaaagaactggttacgaaatcatactcagagagtggtggtcaatagctcgtctgaatggagawcagtgacaagtagtgtcccccagaggtcagtactgggactgatgctgtttaatatcttcatcagtgacaccaacagtgggatcaaatgcaccctcagcaagtttgcagatgacatcaagctgtgtagtgtggtcaacatatccgagggactggatgccattcagagagacctagacaggttcaaacagtggacccaggtaaacctcatgaggttcagccccaatgctggatcatggcaatacccactataggtaaaaaaaggatgaaggacagccctgctgaaaaggacttgggggtat

SEQ ID NO: 66757 - DNA, 600 bp, Chicken  19866894335543_1
gctataggaaagaagggcacagagactcttcatcagggtctgttgtgaaagaacaagggaaaatgatttcagactaaaagagaggagatttaaattggatataagaaagaagtttttttaccataagggtggtgaggcactggaacaggttacccttagagttggtggataccccatccctgcagatattcagagtcagatcggatagcactctgagcaacctgatctagctgtagatgtccctgttcattgcaggggagctgcactaggtggcctttaaggcttccttccacctcaaaygattatatgattctatgaatagccctaaaaagttgaaacatgacatccttttctccagtctttcatatatagttggatggattagataagagtaaaatcttcctatctcacctttcttgcctgtggctgactgaatttggtactatttcactgatgcaaagtatatattttatgtgggcagatgatggaaagcatgagatttacagtatttgtagtctgatagcacacaggcatccaaacatgcatcataaagcacggttgctcaaggcaagatcttgtaacacttgagctctttcagtt

SEQ ID NO: 66758 - DNA, 600 bp, Chicken  19866894335544_1
cctgtgggaagggtcatcgtctgagcttttcactcaagtcttcgctgagcctacctggcatgcagctcatttctatctttctgaaatctttctttaaaaagtcaattcaaaataaaacagctgtcgatggtgagaatatttcagggatatttgtgaaagaaatattgtggctcctcagatgcttgatttttgcctatagcctgcacataaaaactgcattggtgaaattagctgggccaaaaagagcaaacaaaataaagagatatattacaatatgtaaacaattacatgatgacattyggcttcaggttaatttctctgcctgctggaaaattgccatctgtaagcaaacatattgactaaattgtattcaattatatagaaaaaaagagctaaagaactaacattttagataatgacatcagctttattatggagttatgttaacttaaatggcaggtggagaagtaaaattcatcccctatgctaagctctactgcataaataattcattattttttttgatatattgattttctgtggattgcttgccaagaagatgctaacatcagcttatccraaataatacatggtattaga

SEQ ID NO: 66759 - DNA, 600 bp, Chicken  19866894335544_2
acaattacatgatgacattyggcttcaggttaatttctctgcctgctggaaaattgccatctgtaagcaaacatattgactaaattgtattcaattatatagaaaaaaagagctaaagaactaacattttagataatgacatcagctttattatggagttatgttaacttaaatggcaggtggagaagtaaaattcatcccctatgctaagctctactgcataaataattcattattttttttgatatattgattttctgtggattgcttgccaagaagatgctaacatcagcttatccraaataatacatggtattagaaggagaaaccaacatcaatattccagcactttgcaggccacaaccagcattaagtcataactcagatttgttgttacatgcttgccattcaggaaagccattttactcctcaggcaatgggcattaaatcccaaatatttatgtctaagccagtaggatgtttaaagtcattctttttctgtttatgctgggtctataagtgtgaagtggaagcagcccagccaccagcaggaaggatgctggtgccatgttgagtaggctgtgttaactgtgttttgtt

SEQ ID NO: 66760 - DNA, 517 bp, Chicken  19866894335548_1
  misc_feature (1)..(129): n is any nucleotide
nnnnnnnnnnnnnnnnnnnnnnnnnnnnnnnnnnnnnnnnnnnnnnnnnnnnnnnnnnnnnnnnnnnnnnnnnnnnnnnnnnnnnnnnnnnnnnnnnnnnnnnnnnnnnnnnnnnnnnnnnnnnnnnnncattagtaacccaattgcatgacaggacaggtccaatggcaactccgaattagtaataaaactgctaaccacctagaagacagatggccacaaaactgtatcttattactataagtcacttaattgccagttcataaggaagaatggtgatgacaccacagaacagctacratcttctgccatgtttttcagactgaaaaggtggtttgaatgaaaggcaatgttttccaaaggctgaagttatattatggattgtccttaaagcttctctgtgatatagtaaattaaaactgtgtacgttgagaactaaaaatattcttggttggttggattttaaggataggctgtgctgtgggaaatactgtagttttcaaagtggggattgatt

SEQ ID NO: 66761 - DNA, 600 bp, Chicken  19866894335554_1
ctaaatgaataccaacacagaccaaaatagtgggttctagggttgcctgatcattgttttctcgatgaaatatagatggtgcatccttctctcagttaaaagaatagtccagccatgcaggcaggtcactgcagctgcagtagagcccagactgtgcagatgggtacatcccttccagtctgaccagtaaaagcaggagaacttgctgcccagtttaaagctgggggggttgccgacctcctgccccacttctgagcagggagaactgagtcagaagcagagctgaggaagggctgaaaygagcagcctcagggctggcagggagagctgcctttcccacccagtgctggtcccagcacaccttcctgctctgcctgagcaaagtcccagccctgcacagccctcacacacrtcaagaaggatgcagtgggcgatgcttctggcaaacagactggctctggtttgccctgagcagccccagcttttccagttattgtttcatcttgaggtactatactcatcttctagaaatgtgatggctattagccagggctgcaacgcaaacgctgtaaatgttctgctgggactgcagcatatggt

SEQ ID NO: 66762 - DNA, 600 bp, Chicken  19866894335554_2
ccatgcaggcaggtcactgcagctgcagtagagcccagactgtgcagatgggtacatcccttccagtctgaccagtaaaagcaggagaacttgctgcccagtttaaagctgggggggttgccgacctcctgccccacttctgagcagggagaactgagtcagaagcagagctgaggaagggctgaaaygagcagcctcagggctggcagggagagctgcctttcccacccagtgctggtcccagcacaccttcctgctctgcctgagcaaagtcccagccctgcacagccctcacacacrtcaagaaggatgcagtgggcgatgcttctggcaaacagactggctctggtttgccctgagcagccccagcttttccagttattgtttcatcttgaggtactatactcatcttctagaaatgtgatggctattagccagggctgcaacgcaaacgctgtaaatgttctgctgggactgcagcatatggttagaaaggggcatttttaaggctcttcctgaagtaagatggaaattaaaacgatatttttgtcacagggccagaccctgagtaagcgtaatttggctctgatgacttcagag

SEQ ID NO: 66763 - DNA, 600 bp, Chicken  19866894335556_1
caaggtgcatttctataatgccctcaataatattctttgaattttggttagccctgaagaagtcaggcagttctgttctgtcctattccattccatttcctggactggcagactgtagatgcctggataagtaagaaataggttttatgggtctttttagttctaagatgtcatattgcttccttaacgcttgaataaaattcttatcttgcccttttcttttcttcctgtgcttataaacaatactgtcagtaggactttttaacatgattaaaatatataaacatagataatgtctgyggaaagggcttctttgtatactagatatgtgaagacgccattatgcattactgagatacataatatcttgctgcataaatgcttcacacagaacactttccaaataataagtaatgtaaatacagaaaattttataaaataaatatttctgtgaagagtaattttaaaatttctttgggtaatgtttgtcagtaagtgcagaataacatttttttaagcaagtgattgtatttatttcttttgaatcaaattttcttggcttttacacagattgcattgaatgccatataaagcacatcc

SEQ ID NO: 66764 - DNA, 600 bp, Chicken  19866894335561_1
taaagctcatagcctcagtaactaataatattttttcgtattagattattagagaaccagataagtctggtgtcgttttatttagaacccttaggaaatattctgctaaaacactttccattgaagaccggagatagtgtcaaagtcaatgtgctattaacccatttgtgcttagccccatagtgtatagtgtacagaaatgtagtctgagatgaagttgattgaagagctctggatttaattccttgtctcttgcagatttcccatgtgaccttgagcaaatcacttactcttttgatyctgtctggggagtggagggagcaggatcttcctgcctcacaggcagcctgtaagcgtgtcatactcagatactatggtggtgggggctgtggagatgtgcaaagcagacaggggtgttactgctccttctcagaagcagcttcagcagagagtagcatactcagactttccacagagctgtggtaacacgttttctgccctccccctatttgcattaaaatataatttttaccacattttttaaaatcaacaataggtggactaaattgctaccttgcactgctacctcccaggtgtgca

SEQ ID NO: 66765 - DNA, 600 bp, Chicken  19866894335561_2
aaagctcatagcctcagtaactaataatattttttcgtattagattattagagaaccagataagtctggtgtcgttttatttagaacccttaggaaatattctgctaaaacactttccattgaagaccggagatagtgtcaaagtcaatgtgctattaacccatttgtgcttagccccatagtgtatagtgtacagaaatgtagtctgagatgaagttgattgaagagctctggatttaattccttgtctcttgcagatttcccatgtgaccttgagcaaatcacttactcttttgattytgtctggggagtggagggagcaggatcttcctgcctcacaggcagcctgtaagcgtgtcatactcagatactatggtggtgggggctgtggagatgtgcaaagcagacaggggtgttactgctccttctcagaagcagcttcagcagagagtagcatactcagactttccacagagctgtggtaacacgttttctgccctccccctatttgcattaaaatataatttttaccacattttttaaaatcaacaataggtggactaaattgctaccttgcactgctacctcccaggtgtgcag

SEQ ID NO: 66766 - DNA, 600 bp, Chicken  19866894335566_1
caaggcaacgcatcagatgcaagttgaaatatttctagtttgaaatgcaaacacaccaagaggctgtttccttttgttagcaaggacaacagttttcaatttgttcccactgcacctgcagacagaaagttaaaacactgaaatccttgacagagggagcatggcttcctatcagtgcaagacagttggcctcttccctaccaggaaacaaaagggtaagagcagtctgtgtcagggagagttgctcctgcagaccccgtttaattttacaaaagaaagactctggagtgactgcttctytttgggaatctcatcctttcttaaacactctccactactgagttcttctgtacagcagtgcaatccttacctgcactttgcatgtttattctgtctctcaggagtgcatcaccaagtatttgtcgataaaatatcaagagatggatgtagcacatactgccaattaatgtttctggtaacaaactattgggaaaataaaaacacactaatgacatttttattcaaaatgttcctgcaaagcactgctctccaaaacataagaataatgacaggttcagagagatgcctgtatcagctcag

SEQ ID NO: 66767 - DNA, 600 bp, Chicken  19866894335578_1
accatgttgcataggaaaaacattttgaaaagattctgagaattcccctaaaaccacagtgcccatatgggctgccaatgtacggccaacttcacgttcagcctatggtcattctctaagtaaactcaaaggaatgatgttaagtacattacctgatgttcccagacccataacctcccagtaagcatgtgaatgtgtcctaataactgttgcacctgacgctgtgctttaaaatgatgtaaatatattgtaaggttcttatttagaaggcactaaaaactgaggtgaattttcttagargggcaacatacacaggtcctcggagcaagttctgaaacatttgaagtgtaaactcctgtattttaaatattcttctaggctctctgtgtaaatgcaaaatatggaaatggaaagaaatagctactttccaggcagtgagtcatctgatattaccatagatgtctaaatagaacatctaaatcatgcctgagaagtgtgtttttctctctacagactataaaaagagtctagacaactggctcagatgtaaatgtctgcattgtagatgatcagagtgaggtgaggtatatccacctctgg

SEQ ID NO: 66768 - DNA, 600 bp, Chicken  19866894335579_1
gagggagaaggttgagggtggagctgaaataatctgcaaataataaaagcttcttaaagcagacagacagacagacagaagtttttccagaggtgagttgagaggagacacgagctcctggtcctgaccaggggatgggatgtcagctggcacagccagcagttctcagaaggcagagaggtccccccatgccctcctccttccagctgcctccttccagcttccgccacatctctggttttcatttcttgttgacatccagttcccatcatgccaacaccatgagttgcctgtttgtgmtgtttatttaattgctgttcagttgatgtgccttgtttgctgtgtttggatctgtcttcttgctggtgggactaggagggatgggaaaaccacagtgatggagactggagcctcctggaggttgggaaaccctggcttcgtggggagggaagcaatgctgtattcatgacaccggatctggatagcccatacctgggagctgagrtgtggggccttttggccctaacgatggtagcagaatcatagaaccattaaggttggaaaagactactaagatcatctagtccatccatcaaccca

SEQ ID NO: 66769 - DNA, 600 bp, Chicken  19866894335579_2
gctgcctccttccagcttccgccacatctctggttttcatttcttgttgacatccagttcccatcatgccaacaccatgagttgcctgtttgtgmtgtttatttaattgctgttcagttgatgtgccttgtttgctgtgtttggatctgtcttcttgctggtgggactaggagggatgggaaaaccacagtgatggagactggagcctcctggaggttgggaaaccctggcttcgtggggagggaagcaatgctgtattcatgacaccggatctggatagcccatacctgggagctgagrtgtggggccttttggccctaacgatggtagcagaatcatagaaccattaaggttggaaaagactactaagatcatctagtccatccatcaacccattcaggtacctgtggtacactagcttcacatgtggggttaacaattggtgtgatggggctgcctctgcccagactgccttcagcactggggttggttcttgttttgttctgtgccctgatttttcctaaccccattcaatcacagccctgatctttcttcattctctctccctagcatgggttggctctttggccatgggcatga

SEQ ID NO: 66770 - DNA, 500 bp, Chicken  19866894335579_3
ggttggttcttgttttgttctgtgccctgatttttcctaaccccattcaatcacagccctgatctttcttcattctctctccctagcatgggttggctctttggccatgggcatgattttcttctgctctcccatcgtgagcatcttcactgaccgcatcggctgcaggaccacagcagccttgggagctgccatcgctttcatcgggctcctctccagctccttcaccaagtaaggatgcaagtttggggcagatggggggtgttcagcccggatgagagctctcctggcatcactacmgcccacatccctctccaagctgcagttttgtccttaacaagcatgagctttacccaagcatgggaattgctgcacatttccccaggcaggtgctctccaatgcgcgttttgatggcagctctacccaatgtgatgtgatagactttccaacccaatgcatttccatctcagtgggagcaaaaagaggttgcccccagtgt

SEQ ID NO: 66771 - DNA, 532 bp, Chicken  19866894335580_1
ggactgttgcctcgcctttgaggtctagatgatgcagccagacttggaaagggcgaatttccagaagagcattagctgggtaaatatcctccctggcaagtgtatgcttcttccataattcaatgactggtttctctgtgcagcctgacaaaaattgcatccctgttgtggaaactttacccaaatatgtaacctgcaaagaagagcaaagataggtgaaacacagacactagattccactgttgcttcctcctatctcagggaactttcttttgcctggaaaataaaagcaactccctrcccacacttcactataaccccatcacttaataaaaaaacttcaaactggttgccaggcatttgtttcttcaaatgatttcaccattcaaattctaacactaaaaatgttcagcccccaaatttcaagggattgcactctcttcaggtcacctgtaaaatgcccaggttggcagcccatgcccctgtgctcatgttagcaggatcagtctccaggcagctgggatgctaacca

SEQ ID NO: 66772 - DNA, 600 bp, Chicken  19866894335586_1
aaaataagataactcagtctcattcatgtttgtcttgaacaatctctcgtgcaaaaaagagctcaaaagttcagttcaaaagcagaaggaaacgtgacagtaagaaaaggcttagagggaaatcttacttggttgggcaaaaaaaaaaatctctacatcctagagacagggaatgggaagaggggaggctgaaaaatatactacagtatattatactgtatatactacagtatacaaatatactacagtacagagtgctacaaaaccttcagctgtcagccagcgtgacacaggcaaagrgcattcttgggtcagtgttggttttgttgctgggactgtgtggattattgcatatatcattttgtttccactgcaataaatgttacattataytaataatttaaatgtatgatgagcattcctgcctgacttcttcaggatgtacatgtctccaaatgcggacagagcccacatggatcatacccaggtacacacatacacaaataaaccatatataaagtctgctgaggttagagcgtcattcagccatgcttatggtgcttcatcacacagcagcatcttagcacaccagaggcttac

SEQ ID NO: 66773 - DNA, 600 bp, Chicken  19866894335586_2
gtgacagtaagaaaaggcttagagggaaatcttacttggttgggcaaaaaaaaaaatctctacatcctagagacagggaatgggaagaggggaggctgaaaaatatactacagtatattatactgtatatactacagtatacaaatatactacagtacagagtgctacaaaaccttcagctgtcagccagcgtgacacaggcaaagrgcattcttgggtcagtgttggttttgttgctgggactgtgtggattattgcatatatcattttgtttccactgcaataaatgttacattataytaataatttaaatgtatgatgagcattcctgcctgacttcttcaggatgtacatgtctccaaatgcggacagagcccacatggatcatacccaggtacacacatacacaaataaaccatatataaagtctgctgaggttagagcgtcattcagccatgcttatggtgcttcatcacacagcagcatcttagcacaccagaggcttacaaatgcataccaaaacaagagctctgcaccaaacacagtggaaaataaacaaatggtggatcacgagaaagcaagacattactgcctgacaaa

SEQ ID NO: 66774 - DNA, 600 bp, Chicken  19866894335586_3
ttaaatgtatgatgagcattcctgcctgacttcttcaggatgtacatgtctccaaatgcggacagagcccacatggatcatacccaggtacacacatacacaaataaaccatatataaagtctgctgaggttagagcgtcattcagccatgcttatggtgcttcatcacacagcagcatcttagcacaccagaggcttacaaatgcataccaaaacaagagctctgcaccaaacacagtggaaaataaacaaatggtggatcacgagaaagcaagacattactgcctgacaaaaagaagyggtctaagcacatacacactctggctgcggtcmattcttcttagtgtcacagcaaatgccgctttgaaaagtataatttaaagaaactaacagtaaagctctatacacttaacagaaagcttctctaattcatctcagaaaccacagcactttttatatacatttatatatgtaaatatatatatacacacacacacggcagaacagaacagctgtgtgcccaattccacctcttcatgtaaacaagtgaattagggtcatgatttgcaaaaggaggaagttctcgctccacattcagaa

SEQ ID NO: 66775 - DNA, 600 bp, Chicken  19866894335586_4
ttcaggatgtacatgtctccaaatgcggacagagcccacatggatcatacccaggtacacacatacacaaataaaccatatataaagtctgctgaggttagagcgtcattcagccatgcttatggtgcttcatcacacagcagcatcttagcacaccagaggcttacaaatgcataccaaaacaagagctctgcaccaaacacagtggaaaataaacaaatggtggatcacgagaaagcaagacattactgcctgacaaaaagaagyggtctaagcacatacacactctggctgcggtcmattcttcttagtgtcacagcaaatgccgctttgaaaagtataatttaaagaaactaacagtaaagctctatacacttaacagaaagcttctctaattcatctcagaaaccacagcactttttatatacatttatatatgtaaatatatatatacacacacacacggcagaacagaacagctgtgtgcccaattccacctcttcatgtaaacaagtgaattagggtcatgatttgcaaaaggaggaagttctcgctccacattcagaaggtaaataatgaatctgacctactgttctgacc

SEQ ID NO: 66776 - DNA, 465 bp, Chicken  19866894335589_1
gagacttttaccttaaacagttttcctccaaagtgtattcttctcatgtatttataaacaacaatcttttctgctctcagctactctcttgtaaaattaaatataccacatccttttattctcatctcacaatgatttttcatgcttcagtcaaccttaatacccatgcagagcctgacttgagtttgtttgtattaaactcttgcttcacaaattccacaaaaatacttctatcaaaatttctcccgggtcttgaaaaattgaattcttctctatgtttatttcagtagaactgcattrcccaccatcacagcayaatggcactccaattggacacacaagccattgtcaactccagctcacaggagacagttatacttcctagctgcacgacttccaaactgaagtcaccttccattcaacactacttcatgacaattggtactatcatatcatctcattctc

SEQ ID NO: 66777 - DNA, 449 bp, Chicken  19866894335589_2
acagttttcctccaaagtgtattcttctcatgtatttataaacaacaatcttttctgctctcagctactctcttgtaaaattaaatataccacatccttttattctcatctcacaatgatttttcatgcttcagtcaaccttaatacccatgcagagcctgacttgagtttgtttgtattaaactcttgcttcacaaattccacaaaaatacttctatcaaaatttctcccgggtcttgaaaaattgaattcttctctatgtttatttcagtagaactgcattrcccaccatcacagcayaatggcactccaattggacacacaagccattgtcaactccagctcacaggagacagttatacttcctagctgcacgacttccaaactgaagtcaccttccattcaacactacttcatgacaattggtactatcatatcatctcattctc

SEQ ID NO: 66778 - DNA, 600 bp, Chicken  19866894335591_1
gtgactaaattcaccaagagcagacacagaagtctttgctaatgatgcaaacagaaagtctattttagagtcatttatcattcactaatcttccttgcagttggtgttttccagtagataaaaccaagcaaattcgtatcagatcatttaagtccacacttgaatagaaaacaataaagtgattcacacagttccttcaacggtgactatatatttccactgaacaaatatgacttgttggtctaatggcattttagtcaagaaaatacaaatacatttcccccccccttttttttttcyttttttttttcctttcctggcaaaatttaactacagctctgacatatctggaaaggaaaagatgaaaaatagctttgatgtgacactagaaaataacgaagaagtgactcatacacgtagtccttctatttccattggatggacatttatgtcatgtttttatatttgcaggaaaaggaattattccaataatgtgaacaaaatcttccaattatttgcactgcacactgtaattgaaaagataattagctgccatcaaagatcattaaccatacaccatgtccacaagtgaagctcctg

SEQ ID NO: 66779 - DNA, 534 bp, Chicken  19866894335591_2
catttatgtcatgtttttatatttgcaggaaaaggaattattccaataatgtgaacaaaatcttccaattatttgcactgcacactgtaattgaaaagataattagctgccatcaaagatcattaaccatacaccatgtccacaagtgaagctcctgattaatgctggaaactggagaaagcaagtctgaaccactcttctatatgatagcagcctgaaatttcacagtatccacagtattttgcttttgtcactagattactctgtttacatgtagtagtaggagctgtttaattgggycctgttgcatatgcaacattaacagtagctaaacytgaaagcatctttctgactactggctagtttgctgggatgtatttgtattataatcaacgaggtgagtagggtgaattaaaaactatttgattcctaatattgataggcaaactcttccatggtgaattcactttaaaaggcctagccagtcctcatcactgcatgaattctggggcaggttaaatgcacagcatgaat

SEQ ID NO: 66780 - DNA, 499 bp, Chicken  19866894335591_3
aattattccaataatgtgaacaaaatcttccaattatttgcactgcacactgtaattgaaaagataattagctgccatcaaagatcattaaccatacaccatgtccacaagtgaagctcctgattaatgctggaaactggagaaagcaagtctgaaccactcttctatatgatagcagcctgaaatttcacagtatccacagtattttgcttttgtcactagattactctgtttacatgtagtagtaggagctgtttaattgggycctgttgcatatgcaacattaacagtagctaaacytgaaagcatctttctgactactggctagtttgctgggatgtatttgtattataatcaacgaggtgagtagggtgaattaaaaactatttgattcctaatattgataggcaaactcttccatggtgaattcactttaaaaggcctagccagtcctcatcactgcatgaattctggggcaggttaaatgcacagcatgaat

SEQ ID NO: 66781 - DNA, 600 bp, Chicken  19866894335605_1
acaaatgaaatgaaatcacttatttttcacacagtttgcagtctttaacactgtgaaaatcactgatgggcactccttgatgttaattaactttttttctctcccttgagagatgcaggaagaacccaaagggccttgaaaaccagggcaaggaagaggatgggaggatttggcactactgtgggagatcttgtgaagccacctaatggaggctgccatgggagagagacatcatgttttggtttcaccttcagctctaaagccttcagaaggaaacagcattgctgaaatgcatgaagwgggcaggagagggtggaataaatccatagtacaatgcacctgtaacagagttagggtcaagttgtctaaaaaagagcagctattggagcagcttcctcttctcatgtacratctgtagcatcttaaaggggttcccttctcagaaagagctggagcaatggaacttttctccaaagaggctgtagggtctcctccttggagctctccaattgcccttgggcgtggtgctgagcaccctattctgggtgtccctgctgcggcaggggatgtgcccaatggacccagagagtcctgcacacc

SEQ ID NO: 66782 - DNA, 548 bp, Chicken  19866894335605_2
agatgcaggaagaacccaaagggccttgaaaaccagggcaaggaagaggatgggaggatttggcactactgtgggagatcttgtgaagccacctaatggaggctgccatgggagagagacatcatgttttggtttcaccttcagctctaaagccttcagaaggaaacagcattgctgaaatgcatgaagwgggcaggagagggtggaataaatccatagtacaatgcacctgtaacagagttagggtcaagttgtctaaaaaagagcagctattggagcagcttcctcttctcatgtacratctgtagcatcttaaaggggttcccttctcagaaagagctggagcaatggaacttttctccaaagaggctgtagggtctcctccttggagctctccaattgcccttgggcgtggtgctgagcaccctattctgggtgtccctgctgcggcaggggatgtgcccaatggacccagagagtcctgcacacctcagccgcgctgtgacacagctacctgaaaactgaagtaaattcaggcaattaaggaa

SEQ ID NO: 66783 - DNA, 600 bp, Chicken  19866894335630_1
tccagcagatttgcttcctgccccagagggcttacagagccttaccaagtgtctgtgtgaaataaagatagatcgcctcttccacagatgcacggtaataatttaagacttataaagagtaagattttgtttgcttggctcccagtggcgttagtgagaaactctcatccctggcagtggaagaaatgaggcaaaggagtaaactgccttgcatgaggtgcagggttatgtacaggagcacgctgcacactctgctttctgcagcacacaaaaccacacgtgcatcctataaacccctgyaggtcctcatggaggctctggagttgtcttttcgtgggtttattctggtctttgatgttgttgctcaggaaacacacatttgtgagctgacgatgagcagcactagttgagtgggatctccttctattccttttctgctgaatattctccggctgaccaatggctatctgacttcccaagaagagggataaaaagcatgccagagttagctgagaaataccattgtccactgtgggtttataagcatgtgctgtgaaagaaaagggctctgaaatttcttggacacgagtttctggctta

SEQ ID NO: 66784 - DNA, 599 bp, Chicken  19866894335640_1
  misc_feature (1)..(32): n is any nucleotide
nnnnnnnnnnnnnnnnnnnnnnnnnnnnnnnntcgatgctgttcgacataaattcgtttggtttagttttagtgtaaaaggttggaaggaaaagatgttggcacagcgttctcactggcaaaaagccaaatcaagtgtggaagatccaaattggttataattagagacatagatcatcatctctcgtgctggcagtgcaagaactatgctcagtacttaagggcatgagccactattccttatggcatttttcttactctccataaataacgtcttgcaaaatgtcatggttaaacagawgtaattaagcaaatttctttggattatcggtcattctttgtaacctgtgctatgcaragcacygcttttgtgagtatttgtgctctttgttgtcacatgaaaaaaaatcactttttgcctgtatgcagcatcaataagacaaagtctgtgtagtctcacgcccaaccacgctccctcacgtcaactcagatgaagcatcacttcatccggaagaaacaaattgctgtcaggtctgtcacctttgggatacactgcagccttttttctttctactgcctcgtctctgaaatacctcacat

SEQ ID NO: 66785 - DNA, 600 bp, Chicken  19866894335640_2
ttggtttagttttagtgtaaaaggttggaaggaaaagatgttggcacagcgttctcactggcaaaaagccaaatcaagtgtggaagatccaaattggttataattagagacatagatcatcatctctcgtgctggcagtgcaagaactatgctcagtacttaagggcatgagccactattccttatggcatttttcttactctccataaataacgtcttgcaaaatgtcatggttaaacagawgtaattaagcaaatttctttggattatcggtcattctttgtaacctgtgctatgcaragcacygcttttgtgagtatttgtgctctttgttgtcacatgaaaaaaaatcactttttgcctgtatgcagcatcaataagacaaagtctgtgtagtctcacgcccaaccacgctccctcacgtcaactcagatgaagcatcacttcatccggaagaaacaaattgctgtcaggtctgtcacctttgggatacactgcagccttttttctttctactgcctcgtctctgaaatacctcacatctgaatgactctggttctgatgattaaccaacctgttttcagacacctataaaatgcc

SEQ ID NO: 66786 - DNA, 600 bp, Chicken  19866894335640_3
tagttttagtgtaaaaggttggaaggaaaagatgttggcacagcgttctcactggcaaaaagccaaatcaagtgtggaagatccaaattggttataattagagacatagatcatcatctctcgtgctggcagtgcaagaactatgctcagtacttaagggcatgagccactattccttatggcatttttcttactctccataaataacgtcttgcaaaatgtcatggttaaacagawgtaattaagcaaatttctttggattatcggtcattctttgtaacctgtgctatgcaragcacygcttttgtgagtatttgtgctctttgttgtcacatgaaaaaaaatcactttttgcctgtatgcagcatcaataagacaaagtctgtgtagtctcacgcccaaccacgctccctcacgtcaactcagatgaagcatcacttcatccggaagaaacaaattgctgtcaggtctgtcacctttgggatacactgcagccttttttctttctactgcctcgtctctgaaatacctcacatctgaatgactctggttctgatgattaaccaacctgttttcagacacctataaaatgcctttccc

SEQ ID NO: 66787 - DNA, 600 bp, Chicken  19866894335645_1
ggaatggctctaagctaaaagcagggagatttaggttagatgttaggcagaaattctttactcagagagcggtggggcccagagagctgcgagtgccccatccctgccggtgcacaaagccaggtgggatggggctctgggcagcctgagctggtggggggcagtcagtccatggcagggggttggacctagataatctttaaggtcccttccaacccaagccattctgttatttccataagcattatcctgcctattatcctcaccagagctgatcccatacggcacaccttacaaccycagtctcaaaaaccttagcttctcaatgtgagcttgccctgctgacccgatgctgatgctaaaccaaacaagcagctttgaagcaggtaccatgagagcaccctgtctggaccattgcactgtctcacccacatggcttttcccagcaaagggggctgtcagctcacattcctcatgcactggggcctcgctcaagccagttacattctgctgcgagacggcagcagcagccacgtctgagcacagggaagcgacatccgattcaattagcatcattaccaatgagctttttcatctcag

SEQ ID NO: 66788 - DNA, 599 bp, Chicken  19866894335649_1
  misc_feature (1)..(130): n is any nucleotide
nnnnnnnnnnnnnnnnnnnnnnnnnnnnnnnnnnnnnnnnnnnnnnnnnnnnnnnnnnnnnnnnnnnnnnnnnnnnnnnnnnnnnnnnnnnnnnnnnnnnnnnnnnnnnnnnnnnnnnnnnnnnnnnnnntgagactgcacctcgcacgcttctcccgcagctcctcaaatcctcagtgctgaaccaaccacgttcccaggagacacagtctggagacaaaaggcccagcacaaattttcctcttcaacatgtcattagcacataactggatttatccactgcatgtgaacatagctaamctagtcacaaggagaaatccagctctcagcataagttccactgaaatgaccaacggcttctgctggagttctacatgagcacaaagaaaacgtgaaatacagtacgtgggtcaatgaggtgaactttggagaccaaatctgtttgatacagagcacatttttctttagagctcacgtagaaccttyaattcacaacataccatttgccaagcatactgagtacctttagcagctcagctgtcatcatcttcctacaggatcttgacacgaacagttctgggctcatcatttacccacaa

SEQ ID NO: 66789 - DNA, 600 bp, Chicken  19866894335649_2
aaccacgttcccaggagacacagtctggagacaaaaggcccagcacaaattttcctcttcaacatgtcattagcacataactggatttatccactgcatgtgaacatagctaamctagtcacaaggagaaatccagctctcagcataagttccactgaaatgaccaacggcttctgctggagttctacatgagcacaaagaaaacgtgaaatacagtacgtgggtcaatgaggtgaactttggagaccaaatctgtttgatacagagcacatttttctttagagctcacgtagaaccttyaattcacaacataccatttgccaagcatactgagtacctttagcagctcagctgtcatcatcttcctacaggatcttgacacgaacagttctgggctcatcatttacccacaaacaacacacatcctgacagacggtaggaaattcattatatttgttaatccagaagagtgttacgggattcagcttcactcgatgtttattgaactcagaattatgaaatcaaaactcctattgagtcagctccgggaccgagaggagaattagaccccgtgccttcaaaacccaactttaatgttca

SEQ ID NO: 66790 - DNA, 600 bp, Chicken  19866894335649_3
tgacacgaacagttctgggctcatcatttacccacaaacaacacacatcctgacagacggtaggaaattcattatatttgttaatccagaagagtgttacgggattcagcttcactcgatgtttattgaactcagaattatgaaatcaaaactcctattgagtcagctccgggaccgagaggagaattagaccccgtgccttcaaaacccaactttaatgttcagttgcaatatcaccgaagcaaaaaaacctccctcacatcttacatcagcctttgtgtcagatttaatatttctggkgaggagggaaagaaacgccattttagtaaaatttatatatgtattttacaaataaaagcacgtttcattttaacatacatctaccagcagcagcaccgcttgtctgggcagacactggatcttttgayaaagttaaagccttggaatatgaagcagtaatgaaaaacacacatggaacaataaaatatttagaaaaatagaattaaaatcrgctttatcttatgtacactagaccaacaagttaaagatgtgaatacctcattaataactccatattagttaacacagcatgagaaaaga

SEQ ID NO: 66791 - DNA, 600 bp, Chicken  19866894335649_4
aactcagaattatgaaatcaaaactcctattgagtcagctccgggaccgagaggagaattagaccccgtgccttcaaaacccaactttaatgttcagttgcaatatcaccgaagcaaaaaaacctccctcacatcttacatcagcctttgtgtcagatttaatatttctggkgaggagggaaagaaacgccattttagtaaaatttatatatgtattttacaaataaaagcacgtttcattttaacatacatctaccagcagcagcaccgcttgtctgggcagacactggatcttttgayaaagttaaagccttggaatatgaagcagtaatgaaaaacacacatggaacaataaaatatttagaaaaatagaattaaaatcrgctttatcttatgtacactagaccaacaagttaaagatgtgaatacctcattaataactccatattagttaacacagcatgagaaaagaccgtacctttgctttccctgaaaaggaaaacattctactcatttttttttctgctctgcatgcatttcactttccaaaatgcaaccaggcgtgcattacacacagacttcatcctgctttgccgaagt

SEQ ID NO: 66792 - DNA, 600 bp, Chicken  19866894335649_5
actttaatgttcagttgcaatatcaccgaagcaaaaaaacctccctcacatcttacatcagcctttgtgtcagatttaatatttctggkgaggagggaaagaaacgccattttagtaaaatttatatatgtattttacaaataaaagcacgtttcattttaacatacatctaccagcagcagcaccgcttgtctgggcagacactggatcttttgayaaagttaaagccttggaatatgaagcagtaatgaaaaacacacatggaacaataaaatatttagaaaaatagaattaaaatcrgctttatcttatgtacactagaccaacaagttaaagatgtgaatacctcattaataactccatattagttaacacagcatgagaaaagaccgtacctttgctttccctgaaaaggaaaacattctactcatttttttttctgctctgcatgcatttcactttccaaaatgcaaccaggcgtgcattacacacagacttcatcctgctttgccgaagtacagctgccatgagcattctctagcgctatgcagaagccttatggagtgaaaggtgctggggacaagctgaatccgagcctaa

SEQ ID NO: 66793 - DNA, 600 bp, Chicken  19866894335659_1
aaatttcaagtctaaaagaagctcacccaaaaacagaatcagccaccaatcaacaatgaagcagatggtgggtttcttgccggcacgttattctaaaataataaacaaagggcttctctgccagtttacttaatgatgatgattactaaccaaaggaagatactggactggatggaccagctatctgttccgttgtagaagatagctactactgctgcatttcatatactaagcataagtaaaatctattctatcaaccttattacctagcccaggtattcacactacaacaccatataygttgtcaargactcgagcatcagaaagacagaggctgttcagtgcaggcaatcctgctctcagaagacactagataacactggtcttgtccaaaatttaactcttcaacaggaaaactgatatttgagccgctctgaaatcttctcatacctttgatatacattacaattcatattgtgaaagagattaaacatctaagtacagactggaagggatgttaaatttccaaattaagcaaagagttaaatatgaattttactttatgaaaatgacaaataagcagaccaataaatcacagag

SEQ ID NO: 66794 - DNA, 600 bp, Chicken  19866894335659_2
gtctaaaagaagctcacccaaaaacagaatcagccaccaatcaacaatgaagcagatggtgggtttcttgccggcacgttattctaaaataataaacaaagggcttctctgccagtttacttaatgatgatgattactaaccaaaggaagatactggactggatggaccagctatctgttccgttgtagaagatagctactactgctgcatttcatatactaagcataagtaaaatctattctatcaaccttattacctagcccaggtattcacactacaacaccatataygttgtcaargactcgagcatcagaaagacagaggctgttcagtgcaggcaatcctgctctcagaagacactagataacactggtcttgtccaaaatttaactcttcaacaggaaaactgatatttgagccgctctgaaatcttctcatacctttgatatacattacaattcatattgtgaaagagattaaacatctaagtacagactggaagggatgttaaatttccaaattaagcaaagagttaaatatgaattttactttatgaaaatgacaaataagcagaccaataaatcacagagaggctggat

SEQ ID NO: 66795 - DNA, 600 bp, Chicken  19866894335661_1
ttggtatttctagaaactacctaactctaaagactggctttattattcagtggcttaaataaaaatcagaactcaaaacgtcaacagaactgacagtcaatttttacactgtgacaatttttagttcaaattacaactaccctccttgcatttcctgcacaaacacgtggctaagcactctggtactcaaacctacgtattatatgcatcaacgaagtacatattagcttctaaacatcacaccaaaaaatactcaagttttacatctcagcattgtactgacagccaaaaaaaactacsatgttatttgaagtgttaccgatttcaaacctgcttcctactcctaaaacttaytaaaaaacaattatgcaattctggaacttgagcgaacagttgaaactcttacattaatagctgtatgtgtttttcatgtctgttaaatagaagccacactaaacagtcctagctactgtaagtgtaccttcccactaaaatactgtgctagttaacagttaaagtagttaagaatatcagaatgatttgttagctcttgagtgctcctcatccctgcttgaatctgcgtgattgagatttatttgc

SEQ ID NO: 66796 - DNA, 600 bp, Chicken  19866894335661_2
ttaaataaaaatcagaactcaaaacgtcaacagaactgacagtcaatttttacactgtgacaatttttagttcaaattacaactaccctccttgcatttcctgcacaaacacgtggctaagcactctggtactcaaacctacgtattatatgcatcaacgaagtacatattagcttctaaacatcacaccaaaaaatactcaagttttacatctcagcattgtactgacagccaaaaaaaactacsatgttatttgaagtgttaccgatttcaaacctgcttcctactcctaaaacttaytaaaaaacaattatgcaattctggaacttgagcgaacagttgaaactcttacattaatagctgtatgtgtttttcatgtctgttaaatagaagccacactaaacagtcctagctactgtaagtgtaccttcccactaaaatactgtgctagttaacagttaaagtagttaagaatatcagaatgatttgttagctcttgagtgctcctcatccctgcttgaatctgcgtgattgagatttatttgcacttttcttataccctatgtttaaactatcctctgcagtaatcatacattattc

SEQ ID NO: 66797 - DNA, 599 bp, Chicken  19866894335670_1
  misc_feature (1)..(90): n is any nucleotide
nnnnnnnnnnnnnnnnnnnnnnnnnnnnnnnnnnnnnnnnnnnnnnnnnnnnnnnnnnnnnnnnnnnnnnnnnnnnnnnnnnnnnnnnnntttggtagatagctgaaagacaatctaggagaaacactacagtgtaagctgtttgtgaaataataaaaatgtagttgtagcttcatatttagagtacagctttagtgtttgggttgctcagttggtcgaagcacaagtatggttttactgctgctttttttctttgttgttttgttccccttctagttaaaatgtgggcttcccagcctrtgtaccstgtgtcctagctgctctgcattccagttccaaaatgtgatccatgggtttatatattcgagtcagggaacagaagtaggatttyatcattgctttctccatttgcttaccctgaagcaaagagttaatggcgcactgatgcttccctcattcataaaggtctgtcaaaatgggatacgtcgctccaaagacatttggaaaaataaattatcaaagtcctacttacatcaagcttgggcataattactgcatcataaatgcttacaaagtattatgttggcttctttttttat

SEQ ID NO: 66798 - DNA, 599 bp, Chicken  19866894335670_2
  misc_feature (1)..(83): n is any nucleotide
nnnnnnnnnnnnnnnnnnnnnnnnnnnnnnnnnnnnnnnnnnnnnnnnnnnnnnnnnnnnnnnnnnnnnnnnnnnnnnnnnnntttggtagatagctgaaagacaatctaggagaaacactacagtgtaagctgtttgtgaaataataaaaatgtagttgtagcttcatatttagagtacagctttagtgtttgggttgctcagttggtcgaagcacaagtatggttttactgctgctttttttctttgttgttttgttccccttctagttaaaatgtgggcttcccagcctrtgtaccstgtgtcctagctgctctgcattccagttccaaaatgtgatccatgggtttatatattcgagtcagggaacagaagtaggatttyatcattgctttctccatttgcttaccctgaagcaaagagttaatggcgcactgatgcttccctcattcataaaggtctgtcaaaatgggatacgtcgctccaaagacatttggaaaaataaattatcaaagtcctacttacatcaagcttgggcataattactgcatcataaatgcttacaaagtattatgttggcttctttttttatctgatct

SEQ ID NO: 66799 - DNA, 600 bp, Chicken  19866894335670_3
ttggtagatagctgaaagacaatctaggagaaacactacagtgtaagctgtttgtgaaataataaaaatgtagttgtagcttcatatttagagtacagctttagtgtttgggttgctcagttggtcgaagcacaagtatggttttactgctgctttttttctttgttgttttgttccccttctagttaaaatgtgggcttcccagcctrtgtaccstgtgtcctagctgctctgcattccagttccaaaatgtgatccatgggtttatatattcgagtcagggaacagaagtaggatttyatcattgctttctccatttgcttaccctgaagcaaagagttaatggcgcactgatgcttccctcattcataaaggtctgtcaaaatgggatacgtcgctccaaagacatttggaaaaataaattatcaaagtcctacttacatcaagcttgggcataattactgcatcataaatgcttacaaagtattatgttggcttctttttttatctgatctcagttaactgttggaattaaaattattgtgctaactcagacagcagcacagttctggcagcagctgaacttgtttggagggcatc

SEQ ID NO: 66800 - DNA, 600 bp, Chicken  19866894335671_1
actgtacagtgtatatcacacatcttttgcaacagcattttaccttacgcctccatacagtagaaaaaaagtgctaatataatagctcataaagtacaagaaggaaattagagtattcaagtggtatattcttatctttctaacattgatttctcattatctaagctgtttatcttcactcatgagaactgtggttgaattattttgtgatatgatttttccccatactaccaagcacaggttattgcggtttctttttaacttcgcttagctgtgtctaaaaggaggcacgaaagaaakgcaataaataagaaagggtatgcatgagwaacaaaagyaagagaaagtctagctggtctgatgaattcaagttgcttcagtatatctgtaaacaaatacagtttctgtacccacagattctgttctgatagttatgctaaaatattacaagggctgcagtgccactatcatggactcatatttgttactgttacatatttattctttccatttctctatgttatatgttgtacctatttactagttcaagttgccaaggtaaggggcatccaagggatataatttggctaataaagtgta

SEQ ID NO: 66801 - DNA, 600 bp, Chicken  19866894335671_2
caacagcattttaccttacgcctccatacagtagaaaaaaagtgctaatataatagctcataaagtacaagaaggaaattagagtattcaagtggtatattcttatctttctaacattgatttctcattatctaagctgtttatcttcactcatgagaactgtggttgaattattttgtgatatgatttttccccatactaccaagcacaggttattgcggtttctttttaacttcgcttagctgtgtctaaaaggaggcacgaaagaaakgcaataaataagaaagggtatgcatgagwaacaaaagyaagagaaagtctagctggtctgatgaattcaagttgcttcagtatatctgtaaacaaatacagtttctgtacccacagattctgttctgatagttatgctaaaatattacaagggctgcagtgccactatcatggactcatatttgttactgttacatatttattctttccatttctctatgttatatgttgtacctatttactagttcaagttgccaaggtaaggggcatccaagggatataatttggctaataaagtgtatgtgtaagcttgggggctgtactgaaaag

SEQ ID NO: 66802 - DNA, 600 bp, Chicken  19866894335671_3
tttaccttacgcctccatacagtagaaaaaaagtgctaatataatagctcataaagtacaagaaggaaattagagtattcaagtggtatattcttatctttctaacattgatttctcattatctaagctgtttatcttcactcatgagaactgtggttgaattattttgtgatatgatttttccccatactaccaagcacaggttattgcggtttctttttaacttcgcttagctgtgtctaaaaggaggcacgaaagaaakgcaataaataagaaagggtatgcatgagwaacaaaagyaagagaaagtctagctggtctgatgaattcaagttgcttcagtatatctgtaaacaaatacagtttctgtacccacagattctgttctgatagttatgctaaaatattacaagggctgcagtgccactatcatggactcatatttgttactgttacatatttattctttccatttctctatgttatatgttgtacctatttactagttcaagttgccaaggtaaggggcatccaagggatataatttggctaataaagtgtatgtgtaagcttgggggctgtactgaaaagtgattttga

SEQ ID NO: 66803 - DNA, 600 bp, Chicken  19866894335671_4
gagaacggtcagttgggctgtttagtcatgtggtttcacccttacattttaggtaacattcaacttcaacttgcactgctgagggccagagagagagagatggggagagtgtgtaggtcacatggtgcactatttgccatagagcacaactaggctcctatgcatctgcaaagtaagcaggatgtgttaaatcaactgacagccagcaacagttcatctctgaatagccactgagataaatttcatagtggtgctgtcctgtcaagaacatgggatgtggatttgtggggtatttgttcytttttttttcttcttaggtctgcccttcagtttaatttcagtttggcatactgtctgctcacaggcttcccagaaattcattctatcactggagaatgaattatcacatacctaatgtgattaatgtgtatatgaaaataagctttcccataagtggaaaattataaaagtaagtttcccatggctatttgtgaacacagagaacacattcatcttattctggaaatacgtgtaaattcacattcaaataaatgttagtgtgtgtgccatcacattttacaaaagtggtatgaaaattac

SEQ ID NO: 66804 - DNA, 599 bp, Chicken  19866894335673_1
  misc_feature (1)..(17): n is any nucleotide
nnnnnnnnnnnnnnnnntgaaggtcatttatttttatggtgcaaatctatacctctgtgtatagttggtcctatgatgtcaaagataatcacattcataaaacagagcagcagacagagtagtagtatgtagcaataataaataggaatgtatttgaggtatttaaaacataaatgtaagaatgtactgcctgattctttctcaaacaagctagaattaaaaaaggctacttagttagattctcaaacaactcttttcagagtgtgatcaccttcacataaggcttatgcatcaaaaatstattatttttttccatttccacctactctgatatgaatctctatcattttttttcctaattgtaatcatcttcctgaaggtatctgatatcaggttctwaaatccctacatgtcttcttctatagcttagtctttctctcttggtccaaaaaggagccccagatgagaaatctggattccagagttccagtgtctttagtgagtctcagatagtgaacaaagagaaaaaaggaagaggtgcacaaatttatgacacgtcaaaatgtcagttgctttgatgaaagtatttaaaataggaa

SEQ ID NO: 66805 - DNA, 600 bp, Chicken  19866894335673_2
aaacagagcagcagacagagtagtagtatgtagcaataataaataggaatgtatttgaggtatttaaaacataaatgtaagaatgtactgcctgattctttctcaaacaagctagaattaaaaaaggctacttagttagattctcaaacaactcttttcagagtgtgatcaccttcacataaggcttatgcatcaaaaatstattatttttttccatttccacctactctgatatgaatctctatcattttttttcctaattgtaatcatcttcctgaaggtatctgatatcaggttctwaaatccctacatgtcttcttctatagcttagtctttctctcttggtccaaaaaggagccccagatgagaaatctggattccagagttccagtgtctttagtgagtctcagatagtgaacaaagagaaaaaaggaagaggtgcacaaatttatgacacgtcaaaatgtcagttgctttgatgaaagtatttaaaataggaattgatatttggagtgtatctctacaataaaagtgcagcatatgcccagctaaaagttgtagaaaacattgtcatctgtcagtttactttgttcttgctta

SEQ ID NO: 66806 - DNA, 390 bp, Chicken  19866894335676_1
agcaggatgcagctccctgagcagacattggctccactcatggggctcctcaccttcaaccctccccactcctgacccctgcagctgccccatcccagccctgctgagggccatgccatcccctccccagcttcagcaacaggggctagaaatactgctcctggaggttgccatggaaaagtcaatgtaaagctgtggcagagatgttgtttacattgccaaaccaggaagaaaaaaaaggaaaaaaaaactgaaaaagcatccaaggagagagcacaatgctccccccagcacagaccyccacagagccacattcatatccactgtgatgagaggggaggggggacggctccctgggcttcagcccctcagcagggatagagtgctgca

SEQ ID NO: 66807 - DNA, 487 bp, Chicken  19866894335677_1
tagtaaccaaagaaataggactctactagaatgagctgatgacctgcttatccataggcagactaggcacgaaacagaaattggagtaatttgtgatgtgggatatttagattttgattcagcatgtatcgttgcttgttcagtcagttgtggaatatcactctcatgtactggtaaaactaagccttcttctgtttaataaacaagaaaggcatcatatgacatcaatggagatgaattaaactttacttcttaaacctagtctgttctaaccaaagcataagaaacaataagatattsacmcttacctggtgtgtcatgtatcagcagctccaagtccttttggaaatattagcttgcactttgttacttctgccaaaatacatgtttagatgtactgtcattgttgaagattgcacacgccacttaagtatgagcaatccagaatttctttacttaactatgccctttaattatggggattaat

SEQ ID NO: 66808 - DNA, 484 bp, Chicken  19866894335677_2
taaccaaagaaataggactctactagaatgagctgatgacctgcttatccataggcagactaggcacgaaacagaaattggagtaatttgtgatgtgggatatttagattttgattcagcatgtatcgttgcttgttcagtcagttgtggaatatcactctcatgtactggtaaaactaagccttcttctgtttaataaacaagaaaggcatcatatgacatcaatggagatgaattaaactttacttcttaaacctagtctgttctaaccaaagcataagaaacaataagatattsacmcttacctggtgtgtcatgtatcagcagctccaagtccttttggaaatattagcttgcactttgttacttctgccaaaatacatgtttagatgtactgtcattgttgaagattgcacacgccacttaagtatgagcaatccagaatttctttacttaactatgccctttaattatggggattaat

SEQ ID NO: 66809 - DNA, 600 bp, Chicken  19866894335678_1
tccgggcggctccgagccgggccaggccatgagggcacagcctcgggcctccgcaggtgccctgggggcctccacggagccgcgggacggagggagggagggacgggagggcagcggggagccgtcgccgaggctgcaacgctccccttcattgccaatttagagatgattttttgttattattattgttttattttctccaagtccttgtcactcccgtcggggaacttctcgtttggttttcttttaatctccgaagccttgcagcgcgaactccggtgtcgatatccactttgcaarggctgctccggcagtttctcatctctcacccgctcctcgctaactttgcagacgtaaaattgtattaaccaaacagtcagcgctcacacaatgtcgggatgaaattgtaataacaaatgaaacgcaagcaaattgtgctgcatagtgttgccaagcaattgtttgttactgggggagagtcacagcatgggctgaaagagagacctaaagaggagtacggcaccgggcggaacaagctgttaggcgagaaatacagtaaacattgcactgattttcaatattattacccaaacacgattt

SEQ ID NO: 66810 - DNA, 600 bp, Chicken  19866894335678_2
cgctaactttgcagacgtaaaattgtattaaccaaacagtcagcgctcacacaatgtcgggatgaaattgtaataacaaatgaaacgcaagcaaattgtgctgcatagtgttgccaagcaattgtttgttactgggggagagtcacagcatgggctgaaagagagacctaaagaggagtacggcaccgggcggaacaagctgttaggcgagaaatacagtaaacattgcactgattttcaatattattacccaaacacgatttcatacaaagcaatcaccgtactcaagtctatggaaaygcgcttgttgagaaatcggccgttttttttattttgaggtattaaggaataattccggggatgtaaaacgcgccgcctgcgggrcgcgggggttccgcggccgagcagcaccgcgcagcttccgcggtcgctccgcggggccgcacgaccgcgttcggggcctcccggcggggkctgcggaggggcttcggccgctgttctcccaccggaccccggctgcgggggaagctgaggcggaccaaagggtcggctccggcaccgagagcctctcggagcttcgcagcaagccgaatacgcggc

SEQ ID NO: 66811 - DNA, 600 bp, Chicken  19866894335678_3
acgcaagcaaattgtgctgcatagtgttgccaagcaattgtttgttactgggggagagtcacagcatgggctgaaagagagacctaaagaggagtacggcaccgggcggaacaagctgttaggcgagaaatacagtaaacattgcactgattttcaatattattacccaaacacgatttcatacaaagcaatcaccgtactcaagtctatggaaaygcgcttgttgagaaatcggccgttttttttattttgaggtattaaggaataattccggggatgtaaaacgcgccgcctgcgggrcgcgggggttccgcggccgagcagcaccgcgcagcttccgcggtcgctccgcggggccgcacgaccgcgttcggggcctcccggcggggkctgcggaggggcttcggccgctgttctcccaccggaccccggctgcgggggaagctgaggcggaccaaagggtcggctccggcaccgagagcctctcggagcttcgcagcaagccgaatacgcggcaataccaaatacgcagcaacaccaaatacggcattcccgtgcgaatgccatcaccctgcagcgtttgccgggtttgtttcaaat

SEQ ID NO: 66812 - DNA, 600 bp, Chicken  19866894335678_4
ggagtacggcaccgggcggaacaagctgttaggcgagaaatacagtaaacattgcactgattttcaatattattacccaaacacgatttcatacaaagcaatcaccgtactcaagtctatggaaaygcgcttgttgagaaatcggccgttttttttattttgaggtattaaggaataattccggggatgtaaaacgcgccgcctgcgggrcgcgggggttccgcggccgagcagcaccgcgcagcttccgcggtcgctccgcggggccgcacgaccgcgttcggggcctcccggcggggkctgcggaggggcttcggccgctgttctcccaccggaccccggctgcgggggaagctgaggcggaccaaagggtcggctccggcaccgagagcctctcggagcttcgcagcaagccgaatacgcggcaataccaaatacgcagcaacaccaaatacggcattcccgtgcgaatgccatcaccctgcagcgtttgccgggtttgtttcaaattgattgcatcattacttcgggggaaaaaggagggtgtggggtgggggaacaaaaacaacaacaacaacaaaagtacaaagcgaaattacg

SEQ ID NO: 66813 - DNA, 600 bp, Chicken  19866894335689_1
tatatcagcattttcctttcataaattcataaatgattatgatctccaaatgccggtttctgggctatgattaaaagtagaccatttcactttaaaagctttcgggtattactggaggacctgggtttataatggaaactgaaaatgctgcgttagttatttagcatccccaagctgctcagaaaagcgagctcaaggctgtgagatgaaaatccgaccgctagatggcattttgttctcacagtaaagcacagaactcttcctgaaaagaacatgaagcagcggtgggcatctcgggarcacaaaacccctccgggcagaacaggagctcacagcgctgcccagcgcggggtgggatggcagaagcaaagcaaggagcaatgagctcatcttcttctcgccccaccttaactgcgggtcccccattgacggctcctgatggaaatgttgtcctcgtgctttaattgctgtaattaaacaacagcaaaaatcagaatccaccactgatgtgatgagggcacttggaggcttttaaagaggaagctgatcactgcagcgggtttgagaatgacactataagatagtctggctgattttctc

SEQ ID NO: 66814 - DNA, 600 bp, Chicken  19866894335705_1
ccctatcagtgcctgtaggtcaccaaagatcccccaaatgcagttgcttccccagcatgctgggtgtgagccctgggaggtggactcggctgggttttccttgggttcctggaattggaggcatggggggagatgtaagccccaaactaagactctttgcttcttttgttctcttcatctgaatgctgttcttccctaaagagacactgcactccaaatatcaggttctttcctccacacgcatgttattttggatgttaggatgcttaggtgcatttagagccagctgtaaatgtgacrtgtggcttgtaggcactgtgggctgcgtgacactgctctctagtggatggctctccatccagtgatgcaggagctgatggaaagggggtcagtgctcatccatggatgagaatgactttttctcgttatttctgtcatgagctttcagaatgtagtatatccccagagacattatataggcacagggcaacgtccatcttcagtaaccaaatgtaaaccagagattctcaacttatctcactgtggtgggaaggattcattgatctgggttcttctgatgatctttatgggtcccctcca

SEQ ID NO: 66815 - DNA, 507 bp, Chicken  19866894335713_1
cggttgcagagggaaggaggtttcacctctcccacactcctttatgcaaggggaaggtgggatgtaaatgctgcccgtgcaatttatagccaggacagaaataaatgtgtctgaaggctggatgtgttggatcctgtaggaaatgggaagtgaaaagcggaatgtcagagttggctccatgagtgctgctccagctttggatcagcctcccaagccctctctcgtggggccagaaaaggggatggttgggtatgagctgaacaaaaccatgagcacctgtgctgggagagcagcagctcygtgtcccagcaatgcgtgtgggcagagtgtgccatgccgtgccccctcctggcctcccagtttcaaaacccatctttgggaaacagcagcttgaccctaacactttgctctcgctcaggctcatttgaaaaatgaggtcttgccctgggagcagggggtttgcagaaaacaaatggattggagatgcacagagatgctctgtgccca

SEQ ID NO: 66816 - DNA, 599 bp, Chicken  19866894335718_1
  misc_feature (1)..(201): n is any nucleotide
nnnnnnnnnnnnnnnnnnnnnnnnnnnnnnnnnnnnnnnnnnnnnnnnnnnnnnnnnnnnnnnnnnnnnnnnnnnnnnnnnnnnnnnnnnnnnnnnnnnnnnnnnnnnnnnnnnnnnnnnnnnnnnnnnnnnnnnnnnnnnnnnnnnnnnnnnnnnnnnnnnnnnnnnnnnnnnnnnnnnnnnnnnnnnnnnnnnnnnnnnactggtctctttgtttttacaccacagtctctagaaagaggatgatttggagcaagcagcaactctcagtcttcctgaagagaagaaataactgcctcycctgaggattcctggtygttttctagctgtcaatcrtgcatgtgagaaggtgattctgctactatctgcatggcctgctttacctctttgcaactctttttaacccaaagactatgacgtatccattaaagttgccaggttctttagcttttgtactgcatgcaggttttgaaccttacaaagtaggagtgcatttgtgaatagaatgcaagaatttgactgcagaacgaccaacgggtcgtttgagatgtgaaaaatacatactcatagtttagttggggcaacaaatatccatgggg

SEQ ID NO: 66817 - DNA, 599 bp, Chicken  19866894335718_2
  misc_feature (1)..(184): n is any nucleotide
nnnnnnnnnnnnnnnnnnnnnnnnnnnnnnnnnnnnnnnnnnnnnnnnnnnnnnnnnnnnnnnnnnnnnnnnnnnnnnnnnnnnnnnnnnnnnnnnnnnnnnnnnnnnnnnnnnnnnnnnnnnnnnnnnnnnnnnnnnnnnnnnnnnnnnnnnnnnnnnnnnnnnnnnnnnnnnnnnnnnnnnnactggtctctttgtttttacaccacagtctctagaaagaggatgatttggagcaagcagcaactctcagtcttcctgaagagaagaaataactgcctcycctgaggattcctggtygttttctagctgtcaatcrtgcatgtgagaaggtgattctgctactatctgcatggcctgctttacctctttgcaactctttttaacccaaagactatgacgtatccattaaagttgccaggttctttagcttttgtactgcatgcaggttttgaaccttacaaagtaggagtgcatttgtgaatagaatgcaagaatttgactgcagaacgaccaacgggtcgtttgagatgtgaaaaatacatactcatagtttagttggggcaacaaatatccatgggggatctgcagctgccact

SEQ ID NO: 66818 - DNA, 599 bp, Chicken  19866894335718_3
  misc_feature (1)..(165): n is any nucleotide
nnnnnnnnnnnnnnnnnnnnnnnnnnnnnnnnnnnnnnnnnnnnnnnnnnnnnnnnnnnnnnnnnnnnnnnnnnnnnnnnnnnnnnnnnnnnnnnnnnnnnnnnnnnnnnnnnnnnnnnnnnnnnnnnnnnnnnnnnnnnnnnnnnnnnnnnnnnnnnnnnnnnnactggtctctttgtttttacaccacagtctctagaaagaggatgatttggagcaagcagcaactctcagtcttcctgaagagaagaaataactgcctcycctgaggattcctggtygttttctagctgtcaatcrtgcatgtgagaaggtgattctgctactatctgcatggcctgctttacctctttgcaactctttttaacccaaagactatgacgtatccattaaagttgccaggttctttagcttttgtactgcatgcaggttttgaaccttacaaagtaggagtgcatttgtgaatagaatgcaagaatttgactgcagaacgaccaacgggtcgtttgagatgtgaaaaatacatactcatagtttagttggggcaacaaatatccatgggggatctgcagctgccacttactctgagtggcaggaaa

SEQ ID NO: 66819 - DNA, 599 bp, Chicken  19866894335724_1
  misc_feature (1)..(33): n is any nucleotide
nnnnnnnnnnnnnnnnnnnnnnnnnnnnnnnnnatgctctgttagctatgctagacacaatactgtgttacaccacgatgcctctttgattatataaacagctgtgctaaaatcttgttctttcacagtccgtgcaagtaccatacaagatgactactcttgtttctagagctcagaactcacccaggtatttctcagcatagctttctttgcacaatgtaatttgctctgaaggccagattcaagccagctggtttggctgaacaagatgaagggagcacagagctgtatcattgtgcraaagctagcaggaacagtttgttgrgccatggtccactcagtgcaaagaccacatgctgtgggagacagaccctctgcatacctgctagttgacttccggtatcacctacagggcaatgggaccaacctcatgggaaggctgagtgaggaaagggatggagaaggatagcagggwtggagaatgtgagcaaggccagcactaatcattgcactttttcagtgacttctttaagatctctgactaaatcagagttggaaaatataccaggcatacaagtttctacctctcaaaactaata

SEQ ID NO: 66820 - DNA, 599 bp, Chicken  19866894335724_2
  misc_feature (1)..(8): n is any nucleotide
nnnnnnnnatgctctgttagctatgctagacacaatactgtgttacaccacgatgcctctttgattatataaacagctgtgctaaaatcttgttctttcacagtccgtgcaagtaccatacaagatgactactcttgtttctagagctcagaactcacccaggtatttctcagcatagctttctttgcacaatgtaatttgctctgaaggccagattcaagccagctggtttggctgaacaagatgaagggagcacagagctgtatcattgtgcraaagctagcaggaacagtttgttgrgccatggtccactcagtgcaaagaccacatgctgtgggagacagaccctctgcatacctgctagttgacttccggtatcacctacagggcaatgggaccaacctcatgggaaggctgagtgaggaaagggatggagaaggatagcagggwtggagaatgtgagcaaggccagcactaatcattgcactttttcagtgacttctttaagatctctgactaaatcagagttggaaaatataccaggcatacaagtttctacctctcaaaactaataacataaatactctaaaatctcttat

SEQ ID NO: 66821 - DNA, 576 bp, Chicken  19866894335724_3
gaactcacccaggtatttctcagcatagctttctttgcacaatgtaatttgctctgaaggccagattcaagccagctggtttggctgaacaagatgaagggagcacagagctgtatcattgtgcraaagctagcaggaacagtttgttgrgccatggtccactcagtgcaaagaccacatgctgtgggagacagaccctctgcatacctgctagttgacttccggtatcacctacagggcaatgggaccaacctcatgggaaggctgagtgaggaaagggatggagaaggatagcagggwtggagaatgtgagcaaggccagcactaatcattgcactttttcagtgacttctttaagatctctgactaaatcagagttggaaaatataccaggcatacaagtttctacctctcaaaactaataacataaatactctaaaatctcttatacaagagatgaatcgaccagtactaatactgggaggatgatatatagatgtaacatctagatagtatgaaacaagtaaccaaagtatacattctcatccattttgtttatgcataacatcccaccag

SEQ ID NO: 66822 - DNA, 600 bp, Chicken  19866894335732_1
aaaaggtgtaaaaaaatgcaatgtacatctaaatcttcttttcctctatgactaaaatgtgcctttatgaggcttattaggtatattttcattagacttaaagaaaataagtatctgacagattcagtaaaactacttgcatttaaaatatttacttcaaccctacacagaattagttgaactcaaagttatatgcaaagatgagatagttagacatggcactggtaccttcatgctgctcaccagtaacctctttccctagctgagtgtattatgctcacagtcctgtacaggctcccstgggcccaatgtagcatgcactgcccttgaatgggcttttcaggaataaaaatgtttttggcctagatgaaatatttgagagtacaacattgcgaaggcttttacctgcaatagacttttcacatctctacttttttctagcccttcttttcctactctgtgcagcagtgtgtatttggacttgcagtattattctacccttcttttgcctctccacatctctttgaatagaaagcattgtgtgatttcctattcaaaacttcttttcagtgttttccctattttgaattcattgtatat

SEQ ID NO: 66823 - DNA, 599 bp, Chicken  19866894335733_1
  misc_feature (1)..(178): n is any nucleotide
nnnnnnnnnnnnnnnnnnnnnnnnnnnnnnnnnnnnnnnnnnnnnnnnnnnnnnnnnnnnnnnnnnnnnnnnnnnnnnnnnnnnnnnnnnnnnnnnnnnnnnnnnnnnnnnnnnnnnnnnnnnnnnnnnnnnnnnnnnnnnnnnnnnnnnnnnnnnnnnnnnnnnnnnnnnnnnnnnnccagtgccatttacccagacaaaaaccagtcctgaaaaacaagacttgatcctcatccatatatgcaagggcattaactttacttgtaacgccaccatgaaaaaggtgcaggccttcattartatctaaacaaaatcctcaatgatactaaattctttccagcatatagtttccttttcccaacctgtctccctcattacaagttgaactttccatttggatgcttactgaaaatatgttacttgaatagtccaactgtatcaagtgacacacaagtggtaaataagtactgtcacactttcttcattatctcccattctgctacagtttatgacatcataagttgcagtaatactgttttaaagtagtctttcaaaagtgctcgtagtacataacaacaagtctaaaacagacaaatcta

SEQ ID NO: 66824 - DNA, 600 bp, Chicken  19866894335734_1
tgttcagactatttcaggtatggcccattctgtgattcttgactctagttagagattgaataaagattcaggcatgaaactaaaggtgtacttgaagctagtatttaaaattagtttaatattgtaacagtcaactttgcaaatacccaaactcttttttgatgtagatcttagaagatgaagaagaaatatttaaaatatatataatttttttaacattgaatcgtgtaggattttcagaagcatttagctatcctgcttcccattcaaagtcagtattacgtaatgatacaaaaaagwagtaaagcaagctagtactttcttggggtagtaataaactttaagtcctcatgcacactaagaattaatatctcatccttaagtaaaatgactgtaagtcactaataaactcttgtttttaaaaggtttatagtatgtttgtacagtggtcaggaggtgttgcagtttcaggactgatacttgaagtttaagcgttaggatttttaagttgcctttacagtgtctaatccaaccgacatacaagagagagtgcagaaagtattcacagtctagagtaaatctgcctgatattagcaggcc

SEQ ID NO: 66825 - DNA, 600 bp, Chicken  19866894335736_1
atttgtggtggtttgggtcacctatcagcagagtgtgatggatgtgtctcccagggtggatgctggagtggtgttggacatggggttgctcaccatgggctccaatctgcacccattaattgggataacacatctatccccaccactgcgacctcgagggcacagagactcagcttctctgcagacacagcctcaagttgtccccattgactgctctggagtaacactggctgtggggtaggataagtgatctcaccacaccatgatcttgggagcaaagtctacctcctactgggcttyrggatttctgcttctgacagaaaaccatcttccactcatctcayaccacctttcatacggctgattctccacgtggcatttgctctcccagtgttcactttttctcttaggaatgcaattacctttgagctatatactaacacaacaatattttgcaagccatgcctctataaaactctttcttcatttttgcagattgtgttcagtcatcctttgtttcactgtgaccacaactcttccttttaggacaattgcatcaggtctcctgcctcccaggctgggcatccttgcctttaatct

SEQ ID NO: 66826 - DNA, 600 bp, Chicken  19866894335736_2
tttgtggtggtttgggtcacctatcagcagagtgtgatggatgtgtctcccagggtggatgctggagtggtgttggacatggggttgctcaccatgggctccaatctgcacccattaattgggataacacatctatccccaccactgcgacctcgagggcacagagactcagcttctctgcagacacagcctcaagttgtccccattgactgctctggagtaacactggctgtggggtaggataagtgatctcaccacaccatgatcttgggagcaaagtctacctcctactgggcttyrggatttctgcttctgacagaaaaccatcttccactcatctcayaccacctttcatacggctgattctccacgtggcatttgctctcccagtgttcactttttctcttaggaatgcaattacctttgagctatatactaacacaacaatattttgcaagccatgcctctataaaactctttcttcatttttgcagattgtgttcagtcatcctttgtttcactgtgaccacaactcttccttttaggacaattgcatcaggtctcctgcctcccaggctgggcatccttgcctttaatctc

SEQ ID NO: 66827 - DNA, 600 bp, Chicken  19866894335736_3
tgtctcccagggtggatgctggagtggtgttggacatggggttgctcaccatgggctccaatctgcacccattaattgggataacacatctatccccaccactgcgacctcgagggcacagagactcagcttctctgcagacacagcctcaagttgtccccattgactgctctggagtaacactggctgtggggtaggataagtgatctcaccacaccatgatcttgggagcaaagtctacctcctactgggcttyrggatttctgcttctgacagaaaaccatcttccactcatctcayaccacctttcatacggctgattctccacgtggcatttgctctcccagtgttcactttttctcttaggaatgcaattacctttgagctatatactaacacaacaatattttgcaagccatgcctctataaaactctttcttcatttttgcagattgtgttcagtcatcctttgtttcactgtgaccacaactcttccttttaggacaattgcatcaggtctcctgcctcccaggctgggcatccttgcctttaatctccagggcatcctgctgtaaatcttccctagcctctgctgcagcc

SEQ ID NO: 66828 - DNA, 600 bp, Chicken  19866894335736_4
ctcttaggaatgcaattacctttgagctatatactaacacaacaatattttgcaagccatgcctctataaaactctttcttcatttttgcagattgtgttcagtcatcctttgtttcactgtgaccacaactcttccttttaggacaattgcatcaggtctcctgcctcccaggctgggcatccttgcctttaatctccagggcatcctgctgtaaatcttccctagcctctgctgcagccaaacaaagagatcaactccgcaaattggctgaaagagctctttgttctctctctgtcgwacggggctgcagtacaactttccagaccacgaggaacaacttcaagtttcactttttttttttctttgtcttttttagcattttgtaatttcagtgatttccagctagttgcagcaattacttgcagggcagaaagttttaaagcaacagaccattataatttctacgcaggaatagtaaaaggaattggcgagctcttgtgctaattttcgacaatcttggattactgggagatctgcaggaagctgaatgaatgcgtgagtgttcaaaaatgcctgtataacttagcagcttagcact

SEQ ID NO: 66829 - DNA, 600 bp, Chicken  19866894335744_1
ccatgcaaaccctgcacatccatgtcatttgctctaagctatcactgtcccctggaaatggttggacttgatgtggtcttttccaaccctaatgattctatgactttacgattctaggaggttctatgaaaggtgtttttaaccaagcagaaaacaaatccagagttggcttaaagggcatgggattaggaggcactgaggcagtccttcaaggaaccaggtccgcataggatgtaggtggtggggatggaacccattcccataggttgcatgcaagatgctctccccttgctggccccrtagggctggtgctgrctcccacaccaaccccaccctctgctcctcttccaggccctgaggaaaagacccggcttctccaagatcctacacatcaaggtggaaggaggctgctagaccttcagggaaccacaaagcacattccctctcctgccctgtggagccagaggccctgcacaaccaaacccaccaccgctgctcctccgttgccgttggagctcagagatgccggcccatgcacaaaaccccaaactcttgcaggccttagcgagcagccggcgctcgccccagggccggctcatg

SEQ ID NO: 66830 - DNA, 600 bp, Chicken  19866894335744_2
acatccatgtcatttgctctaagctatcactgtcccctggaaatggttggacttgatgtggtcttttccaaccctaatgattctatgactttacgattctaggaggttctatgaaaggtgtttttaaccaagcagaaaacaaatccagagttggcttaaagggcatgggattaggaggcactgaggcagtccttcaaggaaccaggtccgcataggatgtaggtggtggggatggaacccattcccataggttgcatgcaagatgctctccccttgctggccccrtagggctggtgctgrctcccacaccaaccccaccctctgctcctcttccaggccctgaggaaaagacccggcttctccaagatcctacacatcaaggtggaaggaggctgctagaccttcagggaaccacaaagcacattccctctcctgccctgtggagccagaggccctgcacaaccaaacccaccaccgctgctcctccgttgccgttggagctcagagatgccggcccatgcacaaaaccccaaactcttgcaggccttagcgagcagccggcgctcgccccagggccggctcatgaacgtgtcatgggca

SEQ ID NO: 66831 - DNA, 599 bp, Chicken  19866894335749_1
  misc_feature (1)..(38): n is any nucleotide
nnnnnnnnnnnnnnnnnnnnnnnnnnnnnnnnnnnnnnaatgggaaatgtagctgccttcacttgggagcagtttatagattactgaagtgctgtttgcactgtcttctctggaacagctgtggtgttcaatgccatatcaacaacccatcacttcccattcaccacatcaagactctgatttctaggccaatttctctaaaattctcctctcacatcccaatcagttttaatgcagattattttttccagaagatgtcttcttcccaatttaatctactcatatattaaccagatatasttcagaagtatgctcaggtttttattattagcattctcctatttaatgacaaattgtataatggttcacaactgtaatcgtaattccaaaattcaaatcaaactctctccttattttttccaaaacatcactgtgccgcagactgaagacaatcagtaataattctggaaaaaatattataaataattgacactttctatatctgatacatgccccttttcttctgtcactcttctctgcatcatttcaccacaaattttaatttatgctacttcaaatgagcaaagaactgttggatg

SEQ ID NO: 66832 - DNA, 600 bp, Chicken  19866894335755_1
agctggaagagctggctcaaagcactgtcatacatcatctgcaccagggactccaaaggggtgtgtgtgtgtgtgtgtgtatatatatgtcttactgacacaacactctttgtttaatttctgctctatggaatataggagatgatcaaatgggtaatgcgttactgcaagctgtatctcccatagtatttcaccacttgctagacaagacttgtgtaattgcacaaaagcaatcagctatcagtcctcttccctccctccctttgtctcagaagtcttatctgtgcctactagggaccycacagatgcgcttccatatgattttggaagtggctgttcttccccagtacagttaccatttttattcacatgagtctcctggctctctgagttttgggaaactaaatttagagaagagaacaacaactttatttgacctgaaaacttcagtgagcaaatgcaatacaagacaggaagattccccagatgctacttaaattttataattattgtttagcccatgcaaaactcagagctagagtagaaatattttgagggctaagagcagataatgggaaattaactgtctctgcttggaac

SEQ ID NO: 66833 - DNA, 600 bp, Chicken  19866894335759_1
gggcttagagcttccattaccgtgagtgtgaaataaaaccacttaaggggctaggcattatatgctttttctctccttcccttacatctctcttgttgtcccttgctaaaaccagcagatgaatggaaacactccagtgccattacataggaagagacgtcagctaatttggtgaggaaattcatcagtcagtgcttattgtaaactatattattcagacgtcaagcaaccaaattttatattgcaaccatatagcctctctttgaacatttattttacaaatttcattggcaatgtaarctttaaaagaaattctctcatataatctcccatcacaaggctgaaaatagcagctatagaaatttataaggatttcagtctctccgatgactggagctaacaaaacgcacagcacactaaatgaaatagttgtgtgctcagtgaaggctgcaagctctttgaacagcaaaccaactgggattcgatattataattctcaatcatataaaacaacatgatggacagctccgtcaagctcattaatactaaagcaactgctgataattgctccaggtttcaacctctaattaaagctaagtg

SEQ ID NO: 66834 - DNA, 599 bp, Chicken  19866894335763_1
  misc_feature (1)..(154): n is any nucleotide
nnnnnnnnnnnnnnnnnnnnnnnnnnnnnnnnnnnnnnnnnnnnnnnnnnnnnnnnnnnnnnnnnnnnnnnnnnnnnnnnnnnnnnnnnnnnnnnnnnnnnnnnnnnnnnnnnnnnnnnnnnnnnnnnnnnnnnnnnnnnnnnnnnnnnnnnnntgagaatttttctattaatttcagggagctgggatggaggatggagccctggacgaaacaggcttgatcttgtataatgaaagcagtagttactttgctggtgattcacagacaacagtgtctgaaacagattggagaacatctcytatctctacagaatatgtagagccttgaccatatgtatgaaaagataacctatgtctcagtgaactggatcagttgttggtttatctagagcccaggtcaacaatgaacacaccttgactccttgcacttccatgctctcacctgtgtagtaagttacacttgtgtggagcgttaggagtttgattttgttagaactgggaagcttaaggcagataacttgcgtgacagagcaggagtgcaattggcaaggagagggcagatacagaaaagagaaagtttgattttgcagacctactca

SEQ ID NO: 66835 - DNA, 600 bp, Chicken  19866894335767_1
aaaagttattaaatacaactcaatttggtaaccataaagaaatatcacattatacttacagacaaattaattacatttcagtcagaaacagcttattttaaaagactatgtacgttgatagattaagccttcatttttactttgacttgatgctgcttttcaatttcctgatttgaattcggcatatttgttgagaaagtactttcctgacaaattattaggctaaacttgaaaattgagagaaacaattttaggaacaagctttttttttttttttttttaaatgacagaggaattcarctgatgtcaaatcctactttcatgcaagaacaagaaggtacaaaagttaaagctatggattaacatttaaggaatgtttctctccaggatactgctcacatattccagactccttgtgtttataatgatagatgaggttagccctttatctaaagcaaatcatccagtgaaagatggtattgcatctatagtatctctttaaatgtctagatagcaaatgtcagaatcatttgatctggtttcatacaatgaactttcaagactttgaaagatagtttacactttgaaaaatcgattgca

SEQ ID NO: 66836 - DNA, 600 bp, Chicken  19866894335767_2
gtcagaatcatttgatctggtttcatacaatgaactttcaagactttgaaagatagtttacactttgaaaaatcgattgcaaacttctgtgttgatctcaaataatagaaagaggacattcacatgctttagggaaaaggaggtgcagtgcagtttgaacatataaaaccaaacaagcagtctaatattttctgaatgtgttttccacacaaatttaagacagacgtgggcaacttgcatcctgtttaacttctctcctcagtaacatgagatgtataatagtgcatgggacatttaacrccaaaagccatgcttctgcactggcacaatccacagagacagcattacaaaatcatttgaactattaaatctcctaagtaccaaataatgtaggcttgagtttttagtgtagcttcagaacttacacgtattcccagaattcctgaaaagcaacgctagtttcttagaaatggaaaagcaagtggaaaatttactaggaagcaatgataataaggaagggaaaatacttggaagaacctttctgaaacttttccatgtgttagattaagaaaatccaggacagcactgaaaaatccctgg

SEQ ID NO: 66837 - DNA, 447 bp, Chicken  19866894335780_1
gctgacgtacctctttggtatctcttctccgactcctcagcctgctttaacgcagtttcttccgctaccgtgatgtaggcgttgagaaactgggtgcttctgacgagagcgaggcacctctggcagagctctgtgggggtgatctgtccttcctttagcgccgctgagatctgaaagggcagcgccaactgtcagcggcacgaagctgctaccagactccaacccagcgcgtcccggcaataaaacgcgtccccggagggacacgatcgggccccgcgagccgcggtcaccttcagcccsctccgctgccgagcgcagcacccgcaccacacagcccagcccggggccgctcacctggcgcagagaagcgcgcagcatggcgacccactccccgccgcctcacaccgctacgaccgtcctcccgtcccgtcccagcgccgcaccgaa

SEQ ID NO: 66838 - DNA, 600 bp, Chicken  19866894335784_1
ccctgagaggtgggaaaacaaacccaacaccacccgatgtgaagcagagcctgggaagcgtgcgcccttgcaccacaatccagagcatctggcaatcaaaaacgccaatatctgatgtgaagtagaacctacagactgcataccccgtgcctctcactatccagagagtgtggaatacagaaaccccgactgaaaagtgaggcagagccaggagacggagcgctctctcactcaccccactcagagaaagcagaagctctaaagtctcccgtgatacagagcccagagactgcaccagamcctgcacccctcccctcctcggagggttgggaaagcaaaaaccccacgatgccatgtgatacagagcctacagcccacgcacatcacacctccctgaaaggtgggaaaacaaagccttcacccccccaaaatcacccatgaagcagagccagtgaagtagggctgtgagagcccccccagccccagggcacacgtacctctcggtggggctgggggggatggctgcctgcaccctccacggccgcctccatggaggatgggggcttcttgctcactgtggtaaggctgatggcagaggca

SEQ ID NO: 66839 - DNA, 600 bp, Chicken  19866894335789_1
tttctatcagcactgctcctgttcctatgggatgacggcactcctcccacccttgatgtttgggttctggttccgcactgcagtgagagcagccaggaacagcgcccgagcagctcctgcagcacagccacggccagaggatggatgtgctcacaccacagcagccgtataaggcaacgctcaaagcaacaccatcctacaaaaatacatctcttttccccttgcaggcccctagcattacggatccaatttaggagcaagagaatactgagtttcagaggttggctttccatgcacagrgttcaggaaaarcattttccccccatgaagggcaattgtaagtcaggtcgctgcagcactgttaaagtgcctgattttaagcacctgaaagcagtggtgatttggctccgtgtgtttacatttcagcatgtggacatcactgtggttacagaatctgagagatgggaccatcgtttcccaccccaaagcagtgctgttcctcgccgtcattttcttttaacagaaaatgaattctgtttaatacaggcaaatataaatattgctaggaagattaagcagcacacacacacacacaggtca

SEQ ID NO: 66840 - DNA, 600 bp, Chicken  19866894335789_2
ctgctcctgttcctatgggatgacggcactcctcccacccttgatgtttgggttctggttccgcactgcagtgagagcagccaggaacagcgcccgagcagctcctgcagcacagccacggccagaggatggatgtgctcacaccacagcagccgtataaggcaacgctcaaagcaacaccatcctacaaaaatacatctcttttccccttgcaggcccctagcattacggatccaatttaggagcaagagaatactgagtttcagaggttggctttccatgcacagrgttcaggaaaarcattttccccccatgaagggcaattgtaagtcaggtcgctgcagcactgttaaagtgcctgattttaagcacctgaaagcagtggtgatttggctccgtgtgtttacatttcagcatgtggacatcactgtggttacagaatctgagagatgggaccatcgtttcccaccccaaagcagtgctgttcctcgccgtcattttcttttaacagaaaatgaattctgtttaatacaggcaaatataaatattgctaggaagattaagcagcacacacacacacacaggtcaggtgtgtgcacg

SEQ ID NO: 66841 - DNA, 599 bp, Chicken  19866894335795_1
  misc_feature (1)..(2): n is any nucleotide
nntgtgttttggagaacagagctgaagttacccctagaaatgggagaaaatgaatgccctaatccaactcagattagttgaagcaggcagtttttcctgccttttttaagccctaatgagatttttgtttctaagaacagcatagcattatgtcaatgagggaagaacaaacacaaggttacaaagtcctaatgatttagaagtcttgtgttgcccaagacaccaaaatgctgtgatttacttgtaaaacatctccacagtacaacaaaatgaatagcttcaggaacaccgagggatctyccgaatgcctgaattactgaaaaacctgcaatttacccaagtacagcttttgtcattgcatttctccttagggagcattcacccgatgtccacaacagccataaagatacatttgggtctacaggtatgtgacaaggctgacaaaggaaaagtgtctcattgctgaagcctcatctgcagaagcactgcatcttcagagtcccacagagacactgcaagaccagtaaatcccttccagaccactttgttcagccatagcatcctcctcctttacaacaacacacgcacagctgcacgtg

SEQ ID NO: 66842 - DNA, 600 bp, Chicken  19866894335798_1
tgaagcttagttttgcaggcaggtgctgttatgtccatacaccacacccaagctcaggacacaaggaggaggctccacacatccagcttcaggcatatgtaatcagaccaagcagtatgaaaatagcgtcaaaagctcaagtcaacgtgaaacaaaagcttccagcggtgtgactggcatcactcacacagtgagacacaagtcctgaacatccagaaatgccttttataatggaactaattcctctctttacccctgcctgctccaggctctcatcattcgagttcacatccttaaaayggtgtctcccgaggcaggycttgggatgcaacacatcacccacctcaaagggaaacacgctcctcaccctttcaaaaagggtttgacttaattctaagcaaatcactgcgctgagtgcagctcacagcattgctcccgaggaatcgatagttgggatagatgtgtggcttccctggaagcgaagcttcacatgcagttttgtgtttgtcacgtacatattgtacacgtattggggtgtttctgagtcagtcattgagcaggggaacagtgagcaggaggaggaaatactgtatcagatcc

SEQ ID NO: 66843 - DNA, 600 bp, Chicken  19866894335798_2
caggtgctgttatgtccatacaccacacccaagctcaggacacaaggaggaggctccacacatccagcttcaggcatatgtaatcagaccaagcagtatgaaaatagcgtcaaaagctcaagtcaacgtgaaacaaaagcttccagcggtgtgactggcatcactcacacagtgagacacaagtcctgaacatccagaaatgccttttataatggaactaattcctctctttacccctgcctgctccaggctctcatcattcgagttcacatccttaaaayggtgtctcccgaggcaggycttgggatgcaacacatcacccacctcaaagggaaacacgctcctcaccctttcaaaaagggtttgacttaattctaagcaaatcactgcgctgagtgcagctcacagcattgctcccgaggaatcgatagttgggatagatgtgtggcttccctggaagcgaagcttcacatgcagttttgtgtttgtcacgtacatattgtacacgtattggggtgtttctgagtcagtcattgagcaggggaacagtgagcaggaggaggaaatactgtatcagatccatgtttgcatagtaagaac

SEQ ID NO: 66844 - DNA, 599 bp, Chicken  19866894335801_1
  misc_feature (1)..(69): n is any nucleotide
nnnnnnnnnnnnnnnnnnnnnnnnnnnnnnnnnnnnnnnnnnnnnnnnnnnnnnnnnnnnnnnnnnnnnaactgcatgactcactccgtggattcattttacaatctggtaaaaccggtaactgataacacctatcctttgtaagaactttttaggtgttttaatttgacaaatgaacatttacaaaaatgaataaataaaagattagactgatgaagtttaaaaacacaaaagatgactcaaaaatccattcactcaacattattttgagcagtatagctaatgtcagtgaagtgagcytagttctcctttccatcaggataaatgaggtgtaatttcaaagacaccattatccttaaacagtgtaaaataagtgaacaagaaatacagagccactatcttttactagtcagaggagtcaatttttaattgtgtaatctcgatcttgttaacatagcttcctatttagaaactttagtgccaaataagtagaaggtgctatattttttaactctgaatatgattaccctttcaaccatattctgcatttcatttttactataaaagttgttcgttgtccaatttcaagctgaaaaact

SEQ ID NO: 66845 - DNA, 600 bp, Chicken  19866894335802_1
gtcccccccgaatgatggggatctctgaaaccacccccttggaaagaaaaagcaccgacacagccgctgaattctggaagatttatttctggaaagatccatttactttcatgaagggttacaaatatttagtaatggttgtgtcaatacatgctacgcatggcatacatccttacagcccaggctgggcagttacattcctcttgaacataattttattaaatattaactcggaagtagatttacaagtgtacacactttccaagtgcctcccatagccatggatacctaaacaattcrgaaaacaagtattgtctcattcagttcaataagtcagctcatgtagaatgtaggaaactcctccagtcagctgggacaaccaaaggaaagcaactggggttgacagagaagtgtttgtgtttgcagtgtttagaatttggttacacttgggtgacatcattctgcttagtcaaaaataaatctcgcagaggttcaagttattattcatcaaagtaatttagcctagaatgcccggaccggagcagggatggggctcaggatggagctggagacttttgcccaaggctgctcctggggcca

SEQ ID NO: 66846 - DNA, 599 bp, Chicken  19866894335804_1
  misc_feature (1)..(7): n is any nucleotide
nnnnnnntgctttgaaacagggcataaaagaacacggaggaaaaaaaaccaattgttcctctgtgaaatttctctgggaaggcagccacgacgactaaaagcagcgcagccgatgccagtattgaagttctgctgtaggaagtacctacggattaatcaatcatgcagtgagcacattacctaagattggagcgagcgaatccccactgactagtgctgttccaaagactaccaggacactgtgaactggtttattgtcctatatgctcttagcaaatgtttttcttcttggttgcctcrgtgagttgatcactgggctcctctggcagcttttccagcggttctttgggaacattctcactgccactcaaccgtttgggatttacctttctccgtgcctgcagaactgtgccttattgcctatgggaccactctggggaggtacactgttagggagaggcttaatacacactggaacaggttgcccaaggaggctgtggatgccccatccctggaggcattcaaggccaggctggatgtggctctgggcagcctggtctggtggttggcaaccctgcacatagcagggggttggaact

SEQ ID NO: 66847 - DNA, 600 bp, Chicken  19866894335805_1
gaacttattatgttttagtttttaatctgtctgttttagagggagaagattcactttgcttgctgagtagtattgaatgcctctgttgttggttttttcctgcgctttaaagaaagaactgtaaacattgagcttaaggttagattgcaggtatcaatgaggggtgtgacttggtgctagacaaggagtagaagagtcattgttgattagagtgttgtagttattcttccctgtaacagttaaccccgccgacccgcgtgctgctggcagatcagctctgtgcagctctttgtccacaarctctccatctcatggattcacaccacaaacagtctgagaactttggtattggaacamaaactgtgggctaacaaagctgtctgtggccttgtagtacttcctacttgcgtgtgaagaactgtttattctgaatgtgatgttaaactgagtgttctctctttccaggtcacctcctctgcaggaaggatcacagtccctcgcctgagcgtcggagctgtgagcagcaggcccagcacacccaccttaggtaagcagcagctcagcagggtttcccatggtgattttgtgaaggaaaaggtc

SEQ ID NO: 66848 - DNA, 600 bp, Chicken  19866894335805_2
gcttgctgagtagtattgaatgcctctgttgttggttttttcctgcgctttaaagaaagaactgtaaacattgagcttaaggttagattgcaggtatcaatgaggggtgtgacttggtgctagacaaggagtagaagagtcattgttgattagagtgttgtagttattcttccctgtaacagttaaccccgccgacccgcgtgctgctggcagatcagctctgtgcagctctttgtccacaarctctccatctcatggattcacaccacaaacagtctgagaactttggtattggaacamaaactgtgggctaacaaagctgtctgtggccttgtagtacttcctacttgcgtgtgaagaactgtttattctgaatgtgatgttaaactgagtgttctctctttccaggtcacctcctctgcaggaaggatcacagtccctcgcctgagcgtcggagctgtgagcagcaggcccagcacacccaccttaggtaagcagcagctcagcagggtttcccatggtgattttgtgaaggaaaaggtcttgaagtgtttttaaagcacgcttagggtgctggtaatgtcgggtgcgacacacact

SEQ ID NO: 66849 - DNA, 600 bp, Chicken  19866894335806_1
ctgaaatgcattttttcagagatattaataatttgatatattaaaagttaatacatatagaacccagttcaatgtcatgtgacttcacaagaaaaacattgtatattgagcagactgtattagggaagcagtttacatggataaaatctttttgtgggagacctggtgtgattcatgtgaaccagaaaggagccatggcaggcaagcaatgtggcaaaacattgcttggctgaaatggcagtatgacgtatggactgtagagcaataagaagatggaaaatggaaatgatattttggaartggcagaagatgtcttaacttcatatcacaaaaagggaatctaagaataagtggaaaagatggcgtattagtttaagtctggaacataatagagttagtgggccacagctgtctactaggtcccattgcccatttctctaagtgcaattctccagtcagactcatagtgctggtctcatagttgccaacacttccttcttggtggaaagcaagtgataacatttggtagcatttcaggatttttcactgatgcagactgtgtgccatggtctcagcatgtgctttctttgcccttccagt

SEQ ID NO: 66850 - DNA, 600 bp, Chicken  19866894335806_2
atcacaaaaagggaatctaagaataagtggaaaagatggcgtattagtttaagtctggaacataatagagttagtgggccacagctgtctactaggtcccattgcccatttctctaagtgcaattctccagtcagactcatagtgctggtctcatagttgccaacacttccttcttggtggaaagcaagtgataacatttggtagcatttcaggatttttcactgatgcagactgtgtgccatggtctcagcatgtgctttctttgcccttccagttctctgctggggaaggttgaggayagcccagcctggggcttgtttgggtgctttaaggttattttcattgcttgtgaaatgattgaagtttttcataatccagagacttaattatgtagctctccatacaggaggactgaaagccgttccaatgtagtcttctttgtgttgcttgtgcacctacttatgtggaacaaaaacccttamatacttygtttttattgcttattcacttaatggcttctctactgaaattaaagtaatagacagtgtttgtgtgatacagatactggccttaagtgtattgaagtcagtgaattgatg

SEQ ID NO: 66851 - DNA, 563 bp, Chicken  19866894335806_3
agcaagtgataacatttggtagcatttcaggatttttcactgatgcagactgtgtgccatggtctcagcatgtgctttctttgcccttccagttctctgctggggaaggttgaggayagcccagcctggggcttgtttgggtgctttaaggttattttcattgcttgtgaaatgattgaagtttttcataatccagagacttaattatgtagctctccatacaggaggactgaaagccgttccaatgtagtcttctttgtgttgcttgtgcacctacttatgtggaacaaaaacccttamatacttygtttttattgcttattcacttaatggcttctctactgaaattaaagtaatagacagtgtttgtgtgatacagatactggccttaagtgtattgaagtcagtgaattgatgctatctaccaaatgttatattgccaaagacttgaatacttgttgccacagcaatcctgttcttgaattggaagcctagaagttgagaggttttgctttctaaataaagaagttgtgtccaaagatgtatgttgagaaaggtgtttc

SEQ ID NO: 66852 - DNA, 556 bp, Chicken  19866894335806_4
gataacatttggtagcatttcaggatttttcactgatgcagactgtgtgccatggtctcagcatgtgctttctttgcccttccagttctctgctggggaaggttgaggayagcccagcctggggcttgtttgggtgctttaaggttattttcattgcttgtgaaatgattgaagtttttcataatccagagacttaattatgtagctctccatacaggaggactgaaagccgttccaatgtagtcttctttgtgttgcttgtgcacctacttatgtggaacaaaaacccttamatacttygtttttattgcttattcacttaatggcttctctactgaaattaaagtaatagacagtgtttgtgtgatacagatactggccttaagtgtattgaagtcagtgaattgatgctatctaccaaatgttatattgccaaagacttgaatacttgttgccacagcaatcctgttcttgaattggaagcctagaagttgagaggttttgctttctaaataaagaagttgtgtccaaagatgtatgttgagaaaggtgtttc

SEQ ID NO: 66853 - DNA, 600 bp, Chicken  19866894335808_1
cagagcctgcttccttcagacatgttacagagcagtattcatcccaactaacaaaaggtgtaaattaagttgaataaaattggataaaattgaggaaatattcattctgcctgggagtgaccacatggatatttaatgcagtttaaataatgtatcctaaatgctttcctttaggcaatttgattactattcccgaccagccctctgtaataatcagatgttctctgctgcagcattaaccagacttgcagctcacagtctgctctgaagatctgaaaaaagattccactgaatccatcrggctttgcatcagatagccagcttgcaggactggctgaagtgagcctcagaaacatgggagtagcctgccccgctacagcatcgcagtataacataacacagagcattcacattatgtcactgcaaaggctcatctggtcctgctttctctctcccatacacatcattagaggatgttcaggcaggaacataaaaacaaaggagtgtgcttttgtgcgtgtattcatgcacgcatagaggggaggaggtacaaaagtaaaggagggtgatctgcctccacgtacctccaaaacatcaggg

SEQ ID NO: 66854 - DNA, 600 bp, Chicken  19866894335808_2
gcatcagatagccagcttgcaggactggctgaagtgagcctcagaaacatgggagtagcctgccccgctacagcatcgcagtataacataacacagagcattcacattatgtcactgcaaaggctcatctggtcctgctttctctctcccatacacatcattagaggatgttcaggcaggaacataaaaacaaaggagtgtgcttttgtgcgtgtattcatgcacgcatagaggggaggaggtacaaaagtaaaggagggtgatctgcctccacgtacctccaaaacatcaggggaatcscagggctacaggctatataatctggtgctcatgcttggtagccatgaatgggtgacatcttcatgaatttatttttctcctccttaaactttttatactaattaagctycatatgaaaagggcytttaaaaataaatattttaagtccatcacacttcagtcccagmtatctattgttctgcatgtcccccccttggctttctgtccctaggaacagtagtggattccatatctgaaataaccaagtaatagaacagaaattaagctttttgtcactgtcatttacttggggatggaagg

SEQ ID NO: 66855 - DNA, 600 bp, Chicken  19866894335808_3
tgtcactgcaaaggctcatctggtcctgctttctctctcccatacacatcattagaggatgttcaggcaggaacataaaaacaaaggagtgtgcttttgtgcgtgtattcatgcacgcatagaggggaggaggtacaaaagtaaaggagggtgatctgcctccacgtacctccaaaacatcaggggaatcscagggctacaggctatataatctggtgctcatgcttggtagccatgaatgggtgacatcttcatgaatttatttttctcctccttaaactttttatactaattaagctycatatgaaaagggcytttaaaaataaatattttaagtccatcacacttcagtcccagmtatctattgttctgcatgtcccccccttggctttctgtccctaggaacagtagtggattccatatctgaaataaccaagtaatagaacagaaattaagctttttgtcactgtcatttacttggggatggaaggggggaaggtatcgagatgtccacaattagttgcctgaagaaaagagagaaaactgaacaaattttcaggttgaggtatgtgcagtaggctgagtggaggcagaaaagtt

SEQ ID NO: 66856 - DNA, 600 bp, Chicken  19866894335808_4
tcatctggtcctgctttctctctcccatacacatcattagaggatgttcaggcaggaacataaaaacaaaggagtgtgcttttgtgcgtgtattcatgcacgcatagaggggaggaggtacaaaagtaaaggagggtgatctgcctccacgtacctccaaaacatcaggggaatcscagggctacaggctatataatctggtgctcatgcttggtagccatgaatgggtgacatcttcatgaatttatttttctcctccttaaactttttatactaattaagctycatatgaaaagggcytttaaaaataaatattttaagtccatcacacttcagtcccagmtatctattgttctgcatgtcccccccttggctttctgtccctaggaacagtagtggattccatatctgaaataaccaagtaatagaacagaaattaagctttttgtcactgtcatttacttggggatggaaggggggaaggtatcgagatgtccacaattagttgcctgaagaaaagagagaaaactgaacaaattttcaggttgaggtatgtgcagtaggctgagtggaggcagaaaagttgtgtttcagtgcaac

SEQ ID NO: 66857 - DNA, 600 bp, Chicken  19866894335808_5
atgttcaggcaggaacataaaaacaaaggagtgtgcttttgtgcgtgtattcatgcacgcatagaggggaggaggtacaaaagtaaaggagggtgatctgcctccacgtacctccaaaacatcaggggaatcscagggctacaggctatataatctggtgctcatgcttggtagccatgaatgggtgacatcttcatgaatttatttttctcctccttaaactttttatactaattaagctycatatgaaaagggcytttaaaaataaatattttaagtccatcacacttcagtcccagmtatctattgttctgcatgtcccccccttggctttctgtccctaggaacagtagtggattccatatctgaaataaccaagtaatagaacagaaattaagctttttgtcactgtcatttacttggggatggaaggggggaaggtatcgagatgtccacaattagttgcctgaagaaaagagagaaaactgaacaaattttcaggttgaggtatgtgcagtaggctgagtggaggcagaaaagttgtgtttcagtgcaacatttgatcattccactcaaactctttcaattgcattctcaatg

SEQ ID NO: 66858 - DNA, 600 bp, Chicken  19866894335817_1
ccatatgaggcatttggaaatgtatggtttgttatttctagttcttaaaagatacatcaatgaaaataatgttttatacttatcgtttaaccttagtggtaaatacataaagtgtgttatcatgactgtaggatacgtgttggttgttggtagacctagtaaagaaaggacatgaactgtaggtagtatgcagtattgtttccattactagccaaaacaactaacttatagtgcattacatacattcatatccacttcaatgaccttgttttgtattgtctagaggaaaaaacatatttytctctaagtgtagggcagggggatagatagatggatagacatgaaaaaaaaaacttgattgtttcatttaccaactgagacatctgaataataaaaagtagagaataaatacgcagtagaggatgcaaaactacattgctctcagtttgggtcactgtttacatatttatgattttaattttaaaaaattaaggaaagttgctgtaatgttctgtgtgtgtggtaggaaaatacttctaaaagaaataatataaaatgtttttaaaggactttgagatagaaaaaaaattcctttggctt

SEQ ID NO: 66859 - DNA, 599 bp, Chicken  19866894335827_1
  misc_feature (1)..(1): n is any nucleotide
natggttggctttctgggctggtagggcacatttctggctcatgttaatcttatcatccaccagtacccctgagtcctttttggcagggctgtactccatctttacatcctccagcttgtactgatagtgggtgtttaccacaactaaggtgcaagaccttgcacttggatttgttgaaccttatgaggttcacctggacccactgctagggcctgtctaggtctctctgagtggtatcccatagagcataatagaagggattttacctgctaagaaaacatgcaacacgcagttctatkaatttctatgaatatagttctaagaagctaattttgcttcttgcttaaaaatggctccataaaattcctgtgcagcarctgcacatgtagttggactttgcatgtgaatgcaaggaagtggctcatagcaaaaggaaaggcctgacactgactgccaggctctgagtgtccatggagacgcatgcaagccatctgtgtgcctactccattgtcaacttctagatgcccacgtgcattactgtctttttgacttgtttgtccatgctgtagacaaactgagagatcagtcttttagccag

SEQ ID NO: 66860 - DNA, 600 bp, Chicken  19866894335827_2
ttttggcagggctgtactccatctttacatcctccagcttgtactgatagtgggtgtttaccacaactaaggtgcaagaccttgcacttggatttgttgaaccttatgaggttcacctggacccactgctagggcctgtctaggtctctctgagtggtatcccatagagcataatagaagggattttacctgctaagaaaacatgcaacacgcagttctatkaatttctatgaatatagttctaagaagctaattttgcttcttgcttaaaaatggctccataaaattcctgtgcagcarctgcacatgtagttggactttgcatgtgaatgcaaggaagtggctcatagcaaaaggaaaggcctgacactgactgccaggctctgagtgtccatggagacgcatgcaagccatctgtgtgcctactccattgtcaacttctagatgcccacgtgcattactgtctttttgacttgtttgtccatgctgtagacaaactgagagatcagtcttttagccagtttttttctgatatccacmattaataaaagctgagcttctcaaatctctaaactaaaaaagaagaagatagaatcgtag

SEQ ID NO: 66861 - DNA, 399 bp, Chicken  19866894335827_3
tctaagaagctaattttgcttcttgcttaaaaatggctccataaaattcctgtgcagcarctgcacatgtagttggactttgcatgtgaatgcaaggaagtggctcatagcaaaaggaaaggcctgacactgactgccaggctctgagtgtccatggagacgcatgcaagccatctgtgtgcctactccattgtcaacttctagatgcccacgtgcattactgtctttttgacttgtttgtccatgctgtagacaaactgagagatcagtcttttagccagtttttttctgatatccacmattaataaaagctgagcttctcaaatctctaaactaaaaaagaagaagatagaatcgtagaatgattaaggttggaaaacacctctaaaatcgtctaat

SEQ ID NO: 66862 - DNA, 600 bp, Chicken  19866894335828_1
attttttcaaagtacaaaattagtctggcaaacttaaccattaattagtgaatttatataaacttaatctttacctttgcatcataatacatttaatagtcaaaatgacttatttatcctgaaccaaatacttttatctattttgctaatgactctttcaatattatctcaaaaatgtaaaattaattattaatagttgaatatatgatggattatttagagacttcataccccaaccatttttgactcacccagaatttattaataacttatggttatcatctccccccagattttttwgaacaaaacgtaaaacataaacacaaaaacataaaaaagaatgtcagcaaaacttgttaaaaatattctgttagttaacttagtctccatgaacaaatacccacttaacaaattacacttcctaattatcagcttcattatttgctgttactgaagtgatcaagatctgaattagtattatcagtctaattatctgttcagtcatattaatgaacatcacactgctgttaagcagaaaatgtcactcygagaatctctccagaaatggagagttmagcctttaaggaagcattaaatagg

SEQ ID NO: 66863 - DNA, 488 bp, Chicken  19866894335828_2
cacccagaatttattaataacttatggttatcatctccccccagattttttwgaacaaaacgtaaaacataaacacaaaaacataaaaaagaatgtcagcaaaacttgttaaaaatattctgttagttaacttagtctccatgaacaaatacccacttaacaaattacacttcctaattatcagcttcattatttgctgttactgaagtgatcaagatctgaattagtattatcagtctaattatctgttcagtcatattaatgaacatcacactgctgttaagcagaaaatgtcactcygagaatctctccagaaatggagagttmagcctttaaggaagcattaaataggttcactcaaaaaaaagcagtgtcagttaaaaaaaataattaaaataaaattagatcctagttgtactcgacagcttgaacaggaaatgagtggtggtttcattccttttggtgcttccagcttcagagctacatat

SEQ ID NO: 66864 - DNA, 461 bp, Chicken  19866894335828_3
ttatcatctccccccagattttttwgaacaaaacgtaaaacataaacacaaaaacataaaaaagaatgtcagcaaaacttgttaaaaatattctgttagttaacttagtctccatgaacaaatacccacttaacaaattacacttcctaattatcagcttcattatttgctgttactgaagtgatcaagatctgaattagtattatcagtctaattatctgttcagtcatattaatgaacatcacactgctgttaagcagaaaatgtcactcygagaatctctccagaaatggagagttmagcctttaaggaagcattaaataggttcactcaaaaaaaagcagtgtcagttaaaaaaaataattaaaataaaattagatcctagttgtactcgacagcttgaacaggaaatgagtggtggtttcattccttttggtgcttccagcttcagagctacatat

SEQ ID NO: 66865 - DNA, 600 bp, Chicken  19866894335829_1
tgagcctgatgcaccatgggctctgcccggtgccagagtgggaggccatgggcacaggctgaggctcaccctgagcaccaggcagcacttctgtgctgtgtggaaacgagcactggcacaggctgcccaggggctgtgggatctcctccttggacatcttaaggaagctgcctggataggagcttgagtcccttgctctgggcaccctgctgcagctggggttgggtcagatggaccacagggccctgccagcctcagcccttctgctattctgcgctgtgtgaatcgttcctccttcarcgccccatttggagttgaattctgttgctaaagccatccttgttttgcacagctgtagctcagacgttgtttgaattgagcagtgagaacttctgagggagattaacaagtttttcctgcctcagcacttttattggcaagaggaaacccccgttatcatytttccaactttctctacagctgtgagaaatggccatagcagtgctattggtgaatttaatgcacaggcccacatgtgtcagaacaggccttggagagggcagtacccaggcagcagcctgtatacacactgccttggta

SEQ ID NO: 66866 - DNA, 564 bp, Chicken  19866894335829_2
aggaagctgcctggataggagcttgagtcccttgctctgggcaccctgctgcagctggggttgggtcagatggaccacagggccctgccagcctcagcccttctgctattctgcgctgtgtgaatcgttcctccttcarcgccccatttggagttgaattctgttgctaaagccatccttgttttgcacagctgtagctcagacgttgtttgaattgagcagtgagaacttctgagggagattaacaagtttttcctgcctcagcacttttattggcaagaggaaacccccgttatcatytttccaactttctctacagctgtgagaaatggccatagcagtgctattggtgaatttaatgcacaggcccacatgtgtcagaacaggccttggagagggcagtacccaggcagcagcctgtatacacactgccttggtattactcagtccagagaacaacagttacctgaacagttttaaataggctctgcctgtttatttggattttattctctgcagcaaggctgagtctcaaattctacttaatcacctcttatgtcgttt

SEQ ID NO: 66867 - DNA, 600 bp, Chicken  19866894335834_1
atggagtcctcagggctgaacattttaaaacatctttaaatattaaatgcttgcttagactttcagatgtgctgaggaaatgaactcagacaccccgtaagatcccagtgtcttttcccccactagtaactatttaggtacttatatttacaagtaattagatgcaagaaagcagacttcagaacagacacattttcttttaaaatttcagttggctatagatagttagcttgtatgtcattctgctactgtgaaacagctcttctatacttgactgcattgaagtgggtaagacagagytctataaaatcaaagctaatatacagaagggatatatagtcaaagcacaacatattagtttagggaattgtgtgatgtggctcagattcagcaatactttggaaaacacagagtaagaaagagacggttacagtgaatttcatgattcattgaaagaatataagtacagtggcgacctttaagactggtgcaaatccagtggtctcatctaaaattcctgtgttgtttataggcagcagaatggtagcggtcctaaggattctcgtatttaattggatttaagaatatacaccataacat

SEQ ID NO: 66868 - DNA, 600 bp, Chicken  19866894335839_1
agtgattataaaaatcagatggcatattcaattccaaaactgaaaacatgactaatggtaagaaacacttgatattctgtgtgtacttatagtgccctcctccactcattgctcagtagaagaaatttgattttaataaggttagttacagcatttatgctttcttctgggatacataccacaactgcttgaatattgataacaaaaaggatttttgatttttgggtctctggtaccacccactgaaactcaaagttataagtcaaatccatactatgttgttatcaactacacattgamattcaggtctgggacttgcatttaaaaaattgaatgttattagaatctgagaatttgacacattggagtgtaatctataagaaataatatactgtaatagtcagtatagagggtgaaattccacacatctaccaaggctcagatcctttccccaatgcgttagcttgtacttttgtaaactctatcatctttatgcgctgtgagcaagtaatggtagattttatgaaagattatctgttcggccattatcaagtgtccatccaagggccatggtctccagygctgtcttttgtaagtgtc

SEQ ID NO: 66869 - DNA, 600 bp, Chicken  19866894335839_2
ttatcaactacacattgamattcaggtctgggacttgcatttaaaaaattgaatgttattagaatctgagaatttgacacattggagtgtaatctataagaaataatatactgtaatagtcagtatagagggtgaaattccacacatctaccaaggctcagatcctttccccaatgcgttagcttgtacttttgtaaactctatcatctttatgcgctgtgagcaagtaatggtagattttatgaaagattatctgttcggccattatcaagtgtccatccaagggccatggtctccagygctgtcttttgtaagtgtcaagttattaaacaagcagaaaattcttcagaaattccatttatgatgtaatatctggtgtcctaactggatctgaacccgcgtagatatgcagtttgacagttattgagtatataatgcttctggagctgagagattattaatagttagcaagtggcttataacagcagtctggttagatactgctggtagggaatcattgactctctctaaagaaaggttagtttctcaggtgacttgtgtagtctggcaggtctgcaaaagaaccagcgtacaataatt

SEQ ID NO: 66870 - DNA, 350 bp, Chicken  19866894335857_1
gagaacaacttgctcagctgaagaaatgtatctttgttgtagcaaataaaagacatctttcaacaagaaacactccagcacctgactggaagacccagttcctcttcagcatcctcacttcccagcgttacatcctaatctccatgcccagccaatccctttctcaccctgcaccctggcagattgatccccataacctggtttcacagtctctgtctaaacagtggtttcagtctgcctggaagggaagactcaagaaagataggtgtccaacgccggccgtgtctgaccacactacaraccaaactgggggaaatagccattgcaaagcccttctggccccatccctg

SEQ ID NO: 66871 - DNA, 599 bp, Chicken  19866894335860_1
  misc_feature (1)..(53): n is any nucleotide
nnnnnnnnnnnnnnnnnnnnnnnnnnnnnnnnnnnnnnnnnnnnnnnnnnnnngtcaaaaataaaagccaaccctgcccaatcataggcacccccttcagtaagtaatcaccagaaaaaaaaagaataataaatcaaagttctaatatctaatcaaaggtctgcttggatttgcagcagcctcagctgattcctaaagcaggcgtcccctttttcctttctcttgagccaatgctaaggtcagagtggaaaacctgagctgaaacagtaatgaaccccatctagagtggaactggaattyacttgtcagccccagccaggcacaatttcccctccctctttgctatgtttagtctccagtcctgaagggctgggctgtctctgggacagcgagggcagtttgtttccacagttctttttgcctgtcttttaggtgaggctgtcagccagagggtcagggtatatcaaaagagattgaatcatcagatttttttaaagcctcatatggaaaatactcgtgtttggaatgtttagctgggagagcaggtggcaaggggggacaacgacaccatgcgtgcataggagaagtgtctctcagct

SEQ ID NO: 66872 - DNA, 600 bp, Chicken  19866894335862_1
cagaagtattctggctagaattaattaaaaaagcaaatcctccctgagataagtacatgaagatacctcagtatagatgttactacgttgtcttaaaatgttttttcagtggcatggtttcagaagctcccagaaaacactgctatgccgcaaacttggagaaatccactgacacacttatgctgagatatccgtagaaacagaattctttagctttagagacccaaaatttagtggttgtttaccgtctcctacccctggcaaaagcagggctttattgaggttcccatgccataaagrtcagcaacattactgcctgaaggtacggagctatttgactactttcttcagcaactgatgacctatgttagatgcccaagacagaggatgcttacatggctcatagcttacaccttacgctttcgagctggtgaggattctgttgcagtaggcgcttgatggggatatgtgctgtacaggataggcctctccctaagcacagtgaaagggtgctgttgtgctcagacagactgtccttgctaacggagtaaacaagataagaaggcgaaggaatgaggagacaatagaagccaaataagg

SEQ ID NO: 66873 - DNA, 600 bp, Chicken  19866894335871_1
agaatggcctgggttgaaaaggaccataatgttcattgagtttcaacccccctgctgcgtgcagggtcgccaaccactagctgtagcactatttgagagagacacaaggaaacaaattgtgtttgtgtctacctaatttctaggtcatcttaattattttattgaatttggaactttatatgtttaaatgaacattaattacatttttctcttttaggggaacggccatttcagtgtacgctatgtgaaaaggcttttaaccagaagagtgctcttcaagttcacatgaaaaagcacacrggagaaaggccttataagtgcgattactgtgcaatgggttttacacagaaaagcaatatgaaacttcatatgaaacgggctcatggttacactggtatgtagcgcagtgagagcagtggcaagtacagaaggctgcatggtttactaggaaatctgaaaatgtttagcctgagtcactgaagaattagacatcaataagctgaagaagagttgttgagctaacagttgaacacaactcaaataacactttgaaacacatgggttactgcttatggctccaaggttgtggtggagccttgt

SEQ ID NO: 66874 - DNA, 599 bp, Chicken  19866894335882_1
  misc_feature (1)..(54): n is any nucleotide
nnnnnnnnnnnnnnnnnnnnnnnnnnnnnnnnnnnnnnnnnnnnnnnnnnnnnntgccccatccactgcaaaaattcagcatagaacagtcagagtgcctgagcacatctagatgatacccatgtacttactggctcagcagagccatcccgagccatgttctttaattctggtgcctgagatgcactcggtgagcactagggctcgcctccagagtgaaatttcaacccacaaagtgtgagctcagctttgcaaccattacagctcttccaagacattaacagccacagatatctctcwrtttaagcaagcaatacaaatcgtaaaggcaataacccgtcgctgcagtgaggtaaggggagaagcactgggaatggttagagaacatttaacagctctgctagaagtttggcttataaaaatgcccattaacaactacctgcacagtaaggacttgcagtaaaccttctggcactgctgcagggttcccagtataaatgtgtaagagcatttaagtccctatgggcaattccatcaacagattaaaggacctaatgtacagtttctcttgaaccgactttcctttaagaaatcgagct

SEQ ID NO: 66875 - DNA, 599 bp, Chicken  19866894335882_2
  misc_feature (1)..(53): n is any nucleotide
nnnnnnnnnnnnnnnnnnnnnnnnnnnnnnnnnnnnnnnnnnnnnnnnnnnnntgccccatccactgcaaaaattcagcatagaacagtcagagtgcctgagcacatctagatgatacccatgtacttactggctcagcagagccatcccgagccatgttctttaattctggtgcctgagatgcactcggtgagcactagggctcgcctccagagtgaaatttcaacccacaaagtgtgagctcagctttgcaaccattacagctcttccaagacattaacagccacagatatctctcwrtttaagcaagcaatacaaatcgtaaaggcaataacccgtcgctgcagtgaggtaaggggagaagcactgggaatggttagagaacatttaacagctctgctagaagtttggcttataaaaatgcccattaacaactacctgcacagtaaggacttgcagtaaaccttctggcactgctgcagggttcccagtataaatgtgtaagagcatttaagtccctatgggcaattccatcaacagattaaaggacctaatgtacagtttctcttgaaccgactttcctttaagaaatcgagctt

SEQ ID NO: 66876 - DNA, 600 bp, Chicken  19866894335886_1
atttaaagcattggatgtgctcttctatgccctttacagcactgggtgtcaccagctgtgtccttattcccttgcagggcccttgaggacggtggtgtattggccataggaatatcagccttgccggccatagaaatccagacattccttctttccaaagcatttgttttgtttctctgaagcccgtcttggtgtgtttggtcagatgctaaaacaaagtggagatggccatgctgggaggggtgacatttgtacctcgaggtggaaatgtcatatctaatggagctttgcagtgaaagrggggagcagtcagtacagtccttccacttgaatgcattctcctcctgattattacttaccatatttagactattacttaccttattcattacctttattgggaaaaatctgaaagtgtcccacaggaaaccttccagaactcacagtttctgttacaggaatatttatggcttaataacacagtactttaaaaattaactactaaaacaaccccagaggcagcagttaaaatatacttaaaacgtccttcaagaatctgcacacagtaatcacaaacagaagagttcaatttaaaagtag

SEQ ID NO: 66877 - DNA, 600 bp, Chicken  19866894335887_1
gagcggaaagccttcctgtctgtggggcagggcggcacggttggcttctcgaattagacgctaattggcgtgcttctgtaagaaaacctgtgctgcgggagcactggagcagcagagctctgaagcgttctcctctagaatgccagaatcatacaatggcccgggctggaagggacctcaagggtcacgaagctccaaccccccaccacaggcagggccaccaacctccacatgtaatagcagcccaggctgcccagggccccatccaacctggccttgaacacctccagggatggggcrtcagagcagagatgtgctgataatgcagagttgtggaatggtggggttggagggcacctttaaagatcatttggtgccaaccccaaacctgtgactgtgatcagaggattcaggtgtgacactgaagtgccaggaattcctccagcagtgccgcccagcaccgtgaggagctcagacaccatcagtgattcattgcttgctttaaagtctgcagcactcaaagcagaatcggttccctgctggctctgctgttgtttcggtaacacgcttatgacaggtgccatcacatctagtaactca

SEQ ID NO: 66878 - DNA, 600 bp, Chicken  19866894335888_1
ctttcagattctgcatctccctgtgagtagcagatgattaatgcacatgtttatacaaaaggacagcaataaggaccaagtacagtccaggtacaaatgactacctaccctaccatttatgtagaaaattcttaagaactgaaaacacataagctgtaaattcaattttgtagtgtacagggaaaaaaaaaatgttgaatagtcaggaatatttttaatactatgtaatgttgccatccacaagtatttaagtgcagagaacaatagaccccacaccacatatactccagcctccaaagrtgaatgtcagtggctctctgttcatattaatagtacaagctaaacattctaacacagaaaattctgtcatatcctttcagttgggytggcatcacttgcacagaatggtcatgaaatttcaaagcttataagatcagcactagttttactgctgtaatcaaagaaaatagaagtacagtaagtaattctaacagttttttcttgatagccctgtagttactgttgattctgacctttagttttgtaccacttgcagttagtacagtacttactgatctaaatgcctgcgtgaccacaatg

SEQ ID NO: 66879 - DNA, 600 bp, Chicken  19866894335888_2
ccaggtacaaatgactacctaccctaccatttatgtagaaaattcttaagaactgaaaacacataagctgtaaattcaattttgtagtgtacagggaaaaaaaaaatgttgaatagtcaggaatatttttaatactatgtaatgttgccatccacaagtatttaagtgcagagaacaatagaccccacaccacatatactccagcctccaaagrtgaatgtcagtggctctctgttcatattaatagtacaagctaaacattctaacacagaaaattctgtcatatcctttcagttgggytggcatcacttgcacagaatggtcatgaaatttcaaagcttataagatcagcactagttttactgctgtaatcaaagaaaatagaagtacagtaagtaattctaacagttttttcttgatagccctgtagttactgttgattctgacctttagttttgtaccacttgcagttagtacagtacttactgatctaaatgcctgcgtgaccacaatgagtgtttgtgttgtcttctgataatcactttttttatcatttggcttcctatcttcttttatgaatgcactgataattaacagtaa

SEQ ID NO: 66880 - DNA, 599 bp, Chicken  19866894335889_1
  misc_feature (1)..(19): n is any nucleotide
nnnnnnnnnnnnnnnnnnnttcgagctgaagtgggttattttctttgcttttccaattaatctcaagcagcccctgttttctgggggtaaggccacaattcagattctattcacactaattgcacacttgcttggtttggcctcctttgagcacagaaataaaagagaaaggagggggggggggggaagatagcttggtgggattagattgatttctgaaagtgggtagagcccagagccctttggcagcaccagtgccgtgggcaaagccagctgcagcatggactgcacctcgccgcmccacaggcttcctggcacatctgcagcacgctgctcgcaagaaccttgcacaaaaacagcctctgtgacccctcgccatgggtgccactcagtagagttgattagggatgtttttcacctagtttttttcatkggaaatcctggtttcttataacaaccttattttctctaccgaatgtggtgsagaaagccggttacactgagctgctgagataggggaaaaactgggactgcagttgaaataattgtggaaatgctgtgctatcctttcggacaaaaccctgcttttctggttcaga

SEQ ID NO: 66881 - DNA, 600 bp, Chicken  19866894335889_2
ggtttggcctcctttgagcacagaaataaaagagaaaggagggggggggggggaagatagcttggtgggattagattgatttctgaaagtgggtagagcccagagccctttggcagcaccagtgccgtgggcaaagccagctgcagcatggactgcacctcgccgcmccacaggcttcctggcacatctgcagcacgctgctcgcaagaaccttgcacaaaaacagcctctgtgacccctcgccatgggtgccactcagtagagttgattagggatgtttttcacctagtttttttcatkggaaatcctggtttcttataacaaccttattttctctaccgaatgtggtgsagaaagccggttacactgagctgctgagataggggaaaaactgggactgcagttgaaataattgtggaaatgctgtgctatcctttcggacaaaaccctgcttttctggttcagaacagcatttatataagtaaacagtggcaaaacaatttgaacrtgtgccaaatgcacaggcaaacttatttacaaacgtgttttgtgcaaaactgtgttagcttctgctttcccatagagytggtctgcaacact

SEQ ID NO: 66882 - DNA, 600 bp, Chicken  19866894335889_3
ggaagatagcttggtgggattagattgatttctgaaagtgggtagagcccagagccctttggcagcaccagtgccgtgggcaaagccagctgcagcatggactgcacctcgccgcmccacaggcttcctggcacatctgcagcacgctgctcgcaagaaccttgcacaaaaacagcctctgtgacccctcgccatgggtgccactcagtagagttgattagggatgtttttcacctagtttttttcatkggaaatcctggtttcttataacaaccttattttctctaccgaatgtggtgsagaaagccggttacactgagctgctgagataggggaaaaactgggactgcagttgaaataattgtggaaatgctgtgctatcctttcggacaaaaccctgcttttctggttcagaacagcatttatataagtaaacagtggcaaaacaatttgaacrtgtgccaaatgcacaggcaaacttatttacaaacgtgttttgtgcaaaactgtgttagcttctgctttcccatagagytggtctgcaacactgagagcctgagattctcttggaagagaaaatgaaatacagaagttagctcc

SEQ ID NO: 66883 - DNA, 600 bp, Chicken  19866894335889_4
aaccttgcacaaaaacagcctctgtgacccctcgccatgggtgccactcagtagagttgattagggatgtttttcacctagtttttttcatkggaaatcctggtttcttataacaaccttattttctctaccgaatgtggtgsagaaagccggttacactgagctgctgagataggggaaaaactgggactgcagttgaaataattgtggaaatgctgtgctatcctttcggacaaaaccctgcttttctggttcagaacagcatttatataagtaaacagtggcaaaacaatttgaacrtgtgccaaatgcacaggcaaacttatttacaaacgtgttttgtgcaaaactgtgttagcttctgctttcccatagagytggtctgcaacactgagagcctgagattctcttggaagagaaaatgaaatacagaagttagctccacagaaaatatggaatttcataatgaaaatgttggcaagttgcatttgaatagaggctcgaggctggattaaatataatgggtgtactaagagaatacggacaatggctttcgtgagcaattatgaatctatagtcctaaatagtggtactttggag

SEQ ID NO: 66884 - DNA, 600 bp, Chicken  19866894335889_5
tagtttttttcatkggaaatcctggtttcttataacaaccttattttctctaccgaatgtggtgsagaaagccggttacactgagctgctgagataggggaaaaactgggactgcagttgaaataattgtggaaatgctgtgctatcctttcggacaaaaccctgcttttctggttcagaacagcatttatataagtaaacagtggcaaaacaatttgaacrtgtgccaaatgcacaggcaaacttatttacaaacgtgttttgtgcaaaactgtgttagcttctgctttcccatagagytggtctgcaacactgagagcctgagattctcttggaagagaaaatgaaatacagaagttagctccacagaaaatatggaatttcataatgaaaatgttggcaagttgcatttgaatagaggctcgaggctggattaaatataatgggtgtactaagagaatacggacaatggctttcgtgagcaattatgaatctatagtcctaaatagtggtactttggagaaaaggagagaaatagagaaaattagtatctcttaaaatgtgaacataatacacagactaataacgcagactaattct

SEQ ID NO: 66885 - DNA, 599 bp, Chicken  19866894335909_1
  misc_feature (1)..(138): n is any nucleotide
nnnnnnnnnnnnnnnnnnnnnnnnnnnnnnnnnnnnnnnnnnnnnnnnnnnnnnnnnnnnnnnnnnnnnnnnnnnnnnnnnnnnnnnnnnnnnnnnnnnnnnnnnnnnnnnnnnnnnnnnnnnnnnnnnnnnnnnnnnccaaaatcagtgtcagcgcaagacaattttggttttgatcacaattgcttttcttgtaccagtgaaagtaccaatggaagcaccagcctaagtgcaagcatgggactgtatggactagaactagtactagagtggctggaaatagagaagaatgttgggggwaggagtagtcatatttcttctcttctatagctgcttgaagagcaacaggactaaaactatttctttagagcgactgtgaattgcagtccctccaattagagccacatctagccatggtaaatttgatcctctgtctcaaatgaaataattccctcaaacctacctgtgggattagttgcaaagccaatagcctcgaaactgccattgacacctcagagtagctggctccggtgactgccttaattcttggtacatagtcagaatagttacacttgaactctacaatatccttagaagta

SEQ ID NO: 66886 - DNA, 600 bp, Chicken  19866894335912_1
caatacaattaatgaggcacatgataacattatttgagcattaatttcttatcaacagatccactgcatcttgctgcacaacgattcatccaggtttgtttcctccacaacaggataaaccccggtgctggtacaggatatctggtgtttgtcttacagcactgctgtgcatcagctgcttgttttggacacaaaagaaaatgaatcccttctcaaaggtattttttcccagctgatttccaccgcattgttcagaggacacacaccaggcacctgcctcctcgcacggtacccccgggsctgaagccacaagggcaaagttgaatccctcttcttgcataagactgcagcaaccagggaatttcggggaaggagagcaataaaatgctatttatgttacgtaaacactctgaacaaagtggtgtggaagcaacccaaaaccctgacccaagctcagccacctcagcttcctggtcctgctgagaaaagccaggagcagagtcactgcaygggaagggttggctgctcctggtcactgccaagctgtgcagtcatctaacactggtaagaggtggaacactgctaatgaccactggatag

SEQ ID NO: 66887 - DNA, 600 bp, Chicken  19866894335912_2
tctcaaaggtattttttcccagctgatttccaccgcattgttcagaggacacacaccaggcacctgcctcctcgcacggtacccccgggsctgaagccacaagggcaaagttgaatccctcttcttgcataagactgcagcaaccagggaatttcggggaaggagagcaataaaatgctatttatgttacgtaaacactctgaacaaagtggtgtggaagcaacccaaaaccctgacccaagctcagccacctcagcttcctggtcctgctgagaaaagccaggagcagagtcactgcaygggaagggttggctgctcctggtcactgccaagctgtgcagtcatctaacactggtaagaggtggaacactgctaatgaccactggatagggaagtggcactagcaaaaagaaggtacagctgaggctttcctttttcagacattccctccagaaaytggcctcctgcagtgacaggatttctgccaccacctctgataaaagcaatgggtcagtgacagacagcagccaggagatgctcagcactgccargccccagcrtcactgagcactgccagaaacacagctatttaccaccctt

SEQ ID NO: 66888 - DNA, 600 bp, Chicken  19866894335912_3
ggaaggagagcaataaaatgctatttatgttacgtaaacactctgaacaaagtggtgtggaagcaacccaaaaccctgacccaagctcagccacctcagcttcctggtcctgctgagaaaagccaggagcagagtcactgcaygggaagggttggctgctcctggtcactgccaagctgtgcagtcatctaacactggtaagaggtggaacactgctaatgaccactggatagggaagtggcactagcaaaaagaaggtacagctgaggctttcctttttcagacattccctccagaaaytggcctcctgcagtgacaggatttctgccaccacctctgataaaagcaatgggtcagtgacagacagcagccaggagatgctcagcactgccargccccagcrtcactgagcactgccagaaacacagctatttaccaccctttccttrcttaaaatgggaaataccttgcattcctcagcatatttaactgccacaagaagtaaaagcgtggggctcaacagtgtactcgttacgcttctccgtgtcatgcaagaccacatgcaaaaccggcaaggaacttcagcagacgcagcccaga

SEQ ID NO: 66889 - DNA, 600 bp, Chicken  19866894335912_4
ctcagcttcctggtcctgctgagaaaagccaggagcagagtcactgcaygggaagggttggctgctcctggtcactgccaagctgtgcagtcatctaacactggtaagaggtggaacactgctaatgaccactggatagggaagtggcactagcaaaaagaaggtacagctgaggctttcctttttcagacattccctccagaaaytggcctcctgcagtgacaggatttctgccaccacctctgataaaagcaatgggtcagtgacagacagcagccaggagatgctcagcactgccargccccagcrtcactgagcactgccagaaacacagctatttaccaccctttccttrcttaaaatgggaaataccttgcattcctcagcatatttaactgccacaagaagtaaaagcgtggggctcaacagtgtactcgttacgcttctccgtgtcatgcaagaccacatgcaaaaccggcaaggaacttcagcagacgcagcccagattacacgttagccagtcaccatctgcttaaaaccacccgcacaaacacaccgagctcaattaatctcaagctgttaaggaaaacccactggagg

SEQ ID NO: 66890 - DNA, 600 bp, Chicken  19866894335912_5
ctggtcctgctgagaaaagccaggagcagagtcactgcaygggaagggttggctgctcctggtcactgccaagctgtgcagtcatctaacactggtaagaggtggaacactgctaatgaccactggatagggaagtggcactagcaaaaagaaggtacagctgaggctttcctttttcagacattccctccagaaaytggcctcctgcagtgacaggatttctgccaccacctctgataaaagcaatgggtcagtgacagacagcagccaggagatgctcagcactgccargccccagcrtcactgagcactgccagaaacacagctatttaccaccctttccttrcttaaaatgggaaataccttgcattcctcagcatatttaactgccacaagaagtaaaagcgtggggctcaacagtgtactcgttacgcttctccgtgtcatgcaagaccacatgcaaaaccggcaaggaacttcagcagacgcagcccagattacacgttagccagtcaccatctgcttaaaaccacccgcacaaacacaccgagctcaattaatctcaagctgttaaggaaaacccactggagggtgacctgg

SEQ ID NO: 66891 - DNA, 582 bp, Chicken  19866894335912_6
ggttggctgctcctggtcactgccaagctgtgcagtcatctaacactggtaagaggtggaacactgctaatgaccactggatagggaagtggcactagcaaaaagaaggtacagctgaggctttcctttttcagacattccctccagaaaytggcctcctgcagtgacaggatttctgccaccacctctgataaaagcaatgggtcagtgacagacagcagccaggagatgctcagcactgccargccccagcrtcactgagcactgccagaaacacagctatttaccaccctttccttrcttaaaatgggaaataccttgcattcctcagcatatttaactgccacaagaagtaaaagcgtggggctcaacagtgtactcgttacgcttctccgtgtcatgcaagaccacatgcaaaaccggcaaggaacttcagcagacgcagcccagattacacgttagccagtcaccatctgcttaaaaccacccgcacaaacacaccgagctcaattaatctcaagctgttaaggaaaacccactggagggtgacctggcgggtacagcgttcccacaaccatgccg

SEQ ID NO: 66892 - DNA, 600 bp, Chicken  19866894335914_1
aagaaaaacagagtgcaaaacggtccaaccatctggaagaggttccaggtcacacgtaaacatccagacaaggaaaatatcccactggcacttttggtgggggacctttcagactgatctagaagcatctcactacgattttaacatggcaaagtgaatacagttttgctgctagtggagtattttaacaaaatccatcagtatttggcaaggaaagtgaagataacactgtcaataaatgaaagtttccttttcctacatcaaaacaagtctttacaaggagctttcctcagcctcccrgctctttagaatcacataggctccaacagctgtgccctttgccaacacacaaacagcactcagttgtttgacagttaccgtctctcgtagagcagattggaaaccatgctcataaaggtctgcggtttgatctgcctcccttccttcagctcatagaggttcagcctgaacttcagcctctgggctctgcaagaagagaggaccatcagcattaaggcccaagcaggttccttttgctttcatcctcaccaggcctgagttgctcacagagataccagctgctcccaatgcgtgcctgag

SEQ ID NO: 66893 - DNA, 600 bp, Chicken  19866894335914_2
tctttagaatcacataggctccaacagctgtgccctttgccaacacacaaacagcactcagttgtttgacagttaccgtctctcgtagagcagattggaaaccatgctcataaaggtctgcggtttgatctgcctcccttccttcagctcatagaggttcagcctgaacttcagcctctgggctctgcaagaagagaggaccatcagcattaaggcccaagcaggttccttttgctttcatcctcaccaggcctgagttgctcacagagataccagctgctcccaatgcgtgcctgagasaagcaggtaccccaggtgcaattcccttttatatttgaagttattcattcctagcagcaatgaggtcttaaatcacatgctgtttcacttttaaaatgaagaatccactcttgtatggcaaacataagcagaagttttgtaaacacaagcaataaaagatcagggaaacattccaacacgtacatgtgaggtcagaagtgagcacagcgtgaaccaaacccgactctttcaactcgcctcagaacagtccaaaaaaccccagtgaagggaggccagaggagcgccggtatcacctgttac

SEQ ID NO: 66894 - DNA, 600 bp, Chicken  19866894335918_1
aactcatcaaattcagaggagtagatcccagtgggctttggattagtctagtagggtgaaattgtggacttcatgaagtttgctttacatgtgcagatatgcactagtaagattactcgatagatttctaattcagcttcttctgtgtaggagcaagttcttgagaatccgggccttgcacttgaaatttaagagaccattttagttgcacatattcatccattttcttactatgaaatttgagaatacatttatttgccagtttgattttatcatcattatggagggctcatgtttctratttcttctacaggctcttgaattgttaatgttaactcctactgaactcaacttcgttttctaatggagagacagcattctgaactgttaaagttcttcgggaatggaagtcataataacgtgtacagctcattacaaagggacgaaaaagcattaatgcagaagacagatggtaaataatagcacaaggtgtttatcttattatttcttagttatagttgaatggagttatagctatagaattatgcaattgatttaagttcttcagtgaagcaatagctgttctgtcatcttcagagc

SEQ ID NO: 66895 - DNA, 600 bp, Chicken  19866894335919_1
aacaatgaagttgtgcttgactcctgtggtctatcgcaggaactcactctacttcttagagataatggctctcatccgaggtaatgactgaagcacagttctgatggagggccatctcattgtcagcactgtggcaaaagcagtttttgttttctgctgttagcaacagatgcactcatttcttagcctgaagcagtgggcagccccactgacctgatgtgaaacgctgaagaagaggttagttacaaacaggccacttcttgttttcagctaacctttcagctgcccctgcacggcaakgcattccagcaattaaaacaaaatggaaaataagactattcctaaacaatacatttccaagctcctgagctctgttgtatgtcttttgttccttctggaacaaaattcttttttggggagaatggttctaagttgcttgcattagctgtgaggataatgtgtttaaaaataacgtcccaaaagagcatgctctttaaaaagagaaaaaaacaacaacaacatttgaccgtgaaagagcctggagagctgtgaaatcttggaattgcactacagtgtaatacagatgctgcagaagttcag

SEQ ID NO: 66896 - DNA, 600 bp, Chicken  19866894335921_1
ccagtgaaagattgtttaactgagtggagggttatactattcatcagcaagcactggggggtttgcttaatattgcttattttattcgctaaaagcatcattacaagtagcttttatttttctaagagctgtttgactttctgaatgatacctcaagtgttacttttatgtgtgaggttttaagaaaagccgatggatgttttagatttgcatttgaaacatgtttcaaaagtttcagaattgtgaaaatataagatgatgaccctttattggtctcagaaaggaaaggaattggctacrtttgcgataaagtcctctctcatttttagatcagctatctgtgcactgagttttcatttaaagctgaaacttccaacaaaaatcttatttaacaagcagaaataacgatgcaaaatgtctgttttcatccaaatcagtggcaataaaagtacaggagtcaaatgaggaaaataaaaaggtggctatttcatatcacaatattcaggcctgttccttttagtgctttccaaaaggttctatgtcctgggggaaaaagctttatgaattcattaatctgtaatatttattcttttagctttt

SEQ ID NO: 66897 - DNA, 600 bp, Chicken  19866894335923_1
aacgtgggtgttcctcagctcagcactgctgtaattagtccttgagttgtggcatacagggagagaatcaagagtggccattcatgggaaagagaaaagagaaatgtaatacaatatgaaaaaaaactttgtgcaacacactaactttcccttttctttcaaaatcaaatgtagccccattggagtgaagtaagcctaggttttctggggttttaatcagtttgatgttgcagcattagtcaaaatggtggcagcattaaagggaactgttcccagtaattagggaggataaatcttttwttattattattattttttaagtagctcaacaaataaaccatcctttgacatctgaatggcttttatttattttactattttctaatgttagtaggagttaaagcctggaaatttgaaaggaaggaggaaatgtgtctgatgcgttctcagtgtcaggcctcctgaggaaaatgcacctgttaagtgttaccacttaacagtgttgggggaataactgaaatcgaggtgacagctatcttaagcaatcattggaagagatagcaaaaatattgattattaaaggcaaacctggaattagag

SEQ ID NO: 66898 - DNA, 599 bp, Chicken  19866894335925_1
  misc_feature (1)..(71): n is any nucleotide
nnnnnnnnnnnnnnnnnnnnnnnnnnnnnnnnnnnnnnnnnnnnnnnnnnnnnnnnnnnnnnnnnnnnnnnatgtgtgcacatctgagataaactctgaagattaacccaaataattcaggcatacttgatcagaagatggagttcaggccccttcatcctcccccattaacaccatctggggctctatgcacaatcacagtcacataacaattcaatcatgcagcaacaattgtcactgcattttgccctaaggtatgttaaatatagtctcacgttaatcacaagtattgcactgagygtgccactaattactgcttaaggaaggaataatacctggaacatagaacaggacagccctttaactggccctrtgattgcagcccgttgattaatagactgaatgagaatagattaatttagctagcaaaaaagacttaatttagcctaaaggtaatgcgtgtcagatctgccatctttagattttatacttactgatgaatacatgattatttgagaatagttttgtatggaaatatgtagttctcatgatctgttattagtatttttattaaaacacaagcaatatgtacttctaga

SEQ ID NO: 66899 - DNA, 600 bp, Chicken  19866894335925_2
gtgtgcacatctgagataaactctgaagattaacccaaataattcaggcatacttgatcagaagatggagttcaggccccttcatcctcccccattaacaccatctggggctctatgcacaatcacagtcacataacaattcaatcatgcagcaacaattgtcactgcattttgccctaaggtatgttaaatatagtctcacgttaatcacaagtattgcactgagygtgccactaattactgcttaaggaaggaataatacctggaacatagaacaggacagccctttaactggccctrtgattgcagcccgttgattaatagactgaatgagaatagattaatttagctagcaaaaaagacttaatttagcctaaaggtaatgcgtgtcagatctgccatctttagattttatacttactgatgaatacatgattatttgagaatagttttgtatggaaatatgtagttctcatgatctgttattagtatttttattaaaacacaagcaatatgtacttctagatgtcaatctgagaacaatttaacacttcaggtttcctagaaagcctgrtattcacaacagctttcatatttctc

SEQ ID NO: 66900 - DNA, 600 bp, Chicken  19866894335925_3
acaggacagccctttaactggccctrtgattgcagcccgttgattaatagactgaatgagaatagattaatttagctagcaaaaaagacttaatttagcctaaaggtaatgcgtgtcagatctgccatctttagattttatacttactgatgaatacatgattatttgagaatagttttgtatggaaatatgtagttctcatgatctgttattagtatttttattaaaacacaagcaatatgtacttctagatgtcaatctgagaacaatttaacacttcaggtttcctagaaagcctgrtattcacaacagctttcatatttctccaatttgccttcaattttttagtcaactgccatttcagtgagttgcacatgcaataacacagaaggaaatctttttcagaaagttcttatttgttttgaagtttttttttgtgcattttgttggtatttttgtttgtttacaaaaccctttctcaatttgaaaacttgaggtaccggactgtgcaaggtgctcacttcacttccagaaagcatgaagataaattaggagtgaaagcagcaagcagaggaaaataactattgcaggtctcatcct

SEQ ID NO: 66901 - DNA, 599 bp, Chicken  19866894335926_1
  misc_feature (1)..(179): n is any nucleotide
nnnnnnnnnnnnnnnnnnnnnnnnnnnnnnnnnnnnnnnnnnnnnnnnnnnnnnnnnnnnnnnnnnnnnnnnnnnnnnnnnnnnnnnnnnnnnnnnnnnnnnnnnnnnnnnnnnnnnnnnnnnnnnnnnnnnnnnnnnnnnnnnnnnnnnnnnnnnnnnnnnnnnnnnnnnnnnnnnnntggaagtctgtcacagcaactggttaccatgctcacttctggtaaacaaacagagggaaacgtatctaaccagccttcttttggtgattccacagtgagtgatatacccacagctgccctrctatgctggactgacggaaatctcaaggctaggaacattttcctttcctctctatggaaaccaagcaaatagatgtccttctgtgggcaaacgtgccacttcccactgcattctccatctgcattttctgctgatggactgtatcagccccaacttctgtgctytggagcatttctacaatctcagccccacatccgcccatcacggatcttggatgcattggatggcagatcatgctttggtaacatattttgtggaatttaaatccaaatgtttgaagttctgtggaatcatttttc

SEQ ID NO: 66902 - DNA, 599 bp, Chicken  19866894335926_2
  misc_feature (1)..(15): n is any nucleotide
nnnnnnnnnnnnnnntggaagtctgtcacagcaactggttaccatgctcacttctggtaaacaaacagagggaaacgtatctaaccagccttcttttggtgattccacagtgagtgatatacccacagctgccctrctatgctggactgacggaaatctcaaggctaggaacattttcctttcctctctatggaaaccaagcaaatagatgtccttctgtgggcaaacgtgccacttcccactgcattctccatctgcattttctgctgatggactgtatcagccccaacttctgtgctytggagcatttctacaatctcagccccacatccgcccatcacggatcttggatgcattggatggcagatcatgctttggtaacatattttgtggaatttaaatccaaatgtttgaagttctgtggaatcatttttccaggatgttaaaaccaatctgtgggttttattgaaatcttctgctctcataatttctaaattaaataatagcaccgatagattgtttgctcactgttttctttatccagatttttttggcctcatgctgatgggtttgaagttgcagggggtaggagttatttt

SEQ ID NO: 66903 - DNA, 600 bp, Chicken  19866894335928_1
tggtgcttttggtgtggttgagaagagcggcctcagaaagcctcttcagtctgctgccctgagctggtcttaatcccactccttggagaaagatgtcctacagcttgtcctcagagaaatcacacagaacccatagaacagcttacgttggaggggaccttagcaatcatccagttccaagcccctgctgtgggctggttaccactcaccagctcaggctacccagggccccatccaacttggaattgagcacctgcagggatggggcacccacagctctctgggcagcctgtgccagcsctgtcccctcagtaaaatatctcttcctaacacctaatctgaatctcccctcttttagtttaaagctattcccccttgtcctattacttccatacagtgtaaaaagtcaatcccttttctgcttgtaagctcccttcaagtactggaagtctacagtgaggtttccccagggcattctcttctctaagctaaacaaactcagctctctcaacctttctccataggataagtgctcaagctctttgatcatcttcatggccctcctttgaatccacttcaacagctcaacatcctccctgt

SEQ ID NO: 66904 - DNA, 599 bp, Chicken  19866894335931_1
  misc_feature (1)..(119): n is any nucleotide
nnnnnnnnnnnnnnnnnnnnnnnnnnnnnnnnnnnnnnnnnnnnnnnnnnnnnnnnnnnnnnnnnnnnnnnnnnnnnnnnnnnnnnnnnnnnnnnnnnnnnnnnnnnnnnnnnnnnnnnatggtaaaaccctctgtgcagtcattagttacagttccattcaacttcactcctgatttcactgtctgtgaccctggagatttaagataactcaaatttcaaataaatgattcagcttcagacaaggtttgcaaaatatgtgcataaaggtattccttgaaaaaagaagaacaaaacatayggaaggtgaagaaattcttttagtagacagtattggctcagattcaggaaataacaaacaagcgtcacgtgtataaaaaccttcctaaaaacaggaaggtttaaaaatcaaggtcactggaarctctgatataagtccgggataactgcaaatagacaaggcagtacaaataactgagctgtaaggagctcttaaggtgatagcacaagggaaacgagcataaaatgatctagaattaaaaatcatgtagaatatgagtcagcaaagagatctgcctagggctgagattaataaaaggg

SEQ ID NO: 66905 - DNA, 600 bp, Chicken  19866894335931_2
taaaaccctctgtgcagtcattagttacagttccattcaacttcactcctgatttcactgtctgtgaccctggagatttaagataactcaaatttcaaataaatgattcagcttcagacaaggtttgcaaaatatgtgcataaaggtattccttgaaaaaagaagaacaaaacatayggaaggtgaagaaattcttttagtagacagtattggctcagattcaggaaataacaaacaagcgtcacgtgtataaaaaccttcctaaaaacaggaaggtttaaaaatcaaggtcactggaarctctgatataagtccgggataactgcaaatagacaaggcagtacaaataactgagctgtaaggagctcttaaggtgatagcacaagggaaacgagcataaaatgatctagaattaaaaatcatgtagaatatgagtcagcaaagagatctgcctagggctgagattaataaaagggtatttctccccttaagtaatgttttttaggctttttctttttttaaatttaaaattggactaagtcccaaggtacatgaatatgcataagaaatgcattttttaaagaaagaacaacagaactc

SEQ ID NO: 66906 - DNA, 600 bp, Chicken  19866894335933_1
ggggagctggggaggcaccgagcaccaggtgtgctcacactagggtgggtgccagcacctccacccatgtgaaggtttcagtttccccctcctcggctcagcacatcaccccagcgaggaggtcaagagctgagccaggagggctgagccctgagcaagcctgcctatggctcagcatgccctgtgtctgtcccctgctcagcagtgccccgtcaggcctgcatgctgctgggtggccagaagcaggaccccggttgctggcacagtcttgccagcctgcctgcattcccttttgcagtrcccacctcactgacacatctctctctgctcccttccaggtctcacacctagcagcgggtccctgcaggactccagctccggtaagtgcaatgtgtttcctccttgctgctagagcacccgtgttgagctggggggcaaggttcagccgtgggggccgggttgcattctccattgccaggctatgcagagggtccatcccagaaccttccagcacaatgcaagtgcattgcacgtgtgctggcacagttatctcccagtcatgtacaaactgtgcttttgttgttgcctttctgcagtctg

SEQ ID NO: 66907 - DNA, 462 bp, Chicken  19866894335943_1
aaacaaacgaagaaaaaaacccacgaactttcatctggctctcaatacaagcaatttttcatttcagtcttggcagtttgcacttaaaaacatctgtgtaatactgagctattacatgttaacatgcaagggatttaagcattcagaagtatagctcactggaaaagcatgtgtcagcacatacatatgctcaggctgagccctttatatgaaggaaaacatcagggaagctttagcctacagctccctagaagatcaacctttttaaccaaaggaatagagagctgtgtttgaagaaaytgtttaaagagaagttaaaggtttcggagacagggagccaagttgaatattgtgaacgatagggactcatctcaagaattgcccatgtgaaacattctcaaaagtaatatctatatatctgtattcagttgaaaataggccttcctcatttaattttaaaat

SEQ ID NO: 66908 - DNA, 447 bp, Chicken  19866894335955_1
gccttcctgaataaaagccttaactcttgctgggcttctacagccttgcaaaatcctccccgaaggcaggttttgtgccgcagacagaacaggctgcaagtgctgtggcagacttccttagcttggcttgaagctgcttgcatctgatccggcactgctcctgctttcagagagtttagaggaggagagagtgcgtggagtcacattcaggtttccctcatcctagcttttctcatatgcacatcctcattcccatagggagagaatccatcaggtgtcagcagatcacactaagaagawttcgcagctctgaagcttggcacttcatctgtgcagatcaggacaaacagacttgcacttttgcactatttttggccgtgcttaatcaattagaaatgagctcaggctctgaatgacggtgttcttatgatagtaactatccatttg

SEQ ID NO: 66909 - DNA, 599 bp, Chicken  19866894335963_1
  misc_feature (1)..(92): n is any nucleotide
nnnnnnnnnnnnnnnnnnnnnnnnnnnnnnnnnnnnnnnnnnnnnnnnnnnnnnnnnnnnnnnnnnnnnnnnnnnnnnnnnnnnnnnnnnnnagagtgccacatgagacctgcacccttcaacgaggcccagcccctggccgacccgccagatggcactgacgtcacacccatgcgtggcttgggtaggaggggacctcagagaccacccgtgcccaaccccctgccatgggctggttgccacccaccaaatcaggcagcccgaggctcactggacctggccttgagcacctccagggayggagcctaaagctccaggccttggggcctacctcgtggcctcctccagctgtgtgcaaactacagcctagcatctccaaacgggcactcaccgatgtactcaatcgcctccatgaaccaggagctgatgtcggctttgtggttgtcttccacagggatgcacttgtactggtagtgcccctcgaagtggttggggcagtcggatgagacgttcagcagggctgtgatgcccagtgcatccagcatgtcccgccgggccgcgtggtaggcgctgccaaggtagaggaagggaaggatttc

SEQ ID NO: 66910 - DNA, 600 bp, Chicken  19866894335966_1
ggcgaccctgcacatagcagggggttgaaacgagatggtcactgtggtccttttcaacccaggccattctgtgactctatgacaggactcctcatccctgggcagcccatcccagttccttaccacccttatgaagaaatgcttcctggcacccaccctaagcccagggagcctgggctgcttcctcacttctgggcgggtcatcactccctatctctgacagtgtgccttaatctaaatggaaaaccattttgcatatgtaacgaggaagattttctcttatttcagacagactcgggratgctcaggagaatagcaataaatgcagacggcagcctggctgtatgtgygcgcccttagtgacaatcagttcgttccttctgatttcctacaatgacattaaggagcgatttccacgcacagcatcaccagtgctcacaaccacagccacgctcygctgagccacccagatgggaactgagcgcaaatcatggcaaaactgggcaagtggcttggaaatgccaactgatgggggagatgggatggctgcgtatggagcagaggagctcaggggagacctcattgctccctgcagctctt

SEQ ID NO: 66911 - DNA, 600 bp, Chicken  19866894335966_2
ttttcaacccaggccattctgtgactctatgacaggactcctcatccctgggcagcccatcccagttccttaccacccttatgaagaaatgcttcctggcacccaccctaagcccagggagcctgggctgcttcctcacttctgggcgggtcatcactccctatctctgacagtgtgccttaatctaaatggaaaaccattttgcatatgtaacgaggaagattttctcttatttcagacagactcgggratgctcaggagaatagcaataaatgcagacggcagcctggctgtatgtgygcgcccttagtgacaatcagttcgttccttctgatttcctacaatgacattaaggagcgatttccacgcacagcatcaccagtgctcacaaccacagccacgctcygctgagccacccagatgggaactgagcgcaaatcatggcaaaactgggcaagtggcttggaaatgccaactgatgggggagatgggatggctgcgtatggagcagaggagctcaggggagacctcattgctccctgcagctcttgagaggaggttggggcaagggggggtctgtccctgctcccaggtgacagc

SEQ ID NO: 66912 - DNA, 600 bp, Chicken  19866894335966_3
cctaagcccagggagcctgggctgcttcctcacttctgggcgggtcatcactccctatctctgacagtgtgccttaatctaaatggaaaaccattttgcatatgtaacgaggaagattttctcttatttcagacagactcgggratgctcaggagaatagcaataaatgcagacggcagcctggctgtatgtgygcgcccttagtgacaatcagttcgttccttctgatttcctacaatgacattaaggagcgatttccacgcacagcatcaccagtgctcacaaccacagccacgctcygctgagccacccagatgggaactgagcgcaaatcatggcaaaactgggcaagtggcttggaaatgccaactgatgggggagatgggatggctgcgtatggagcagaggagctcaggggagacctcattgctccctgcagctcttgagaggaggttggggcaagggggggtctgtccctgctcccaggtgacagcaataggggcacagccagcaggccgccttcctgccgcgcaccgccccgcagtggcatcaatcaatccgaggcacaaacaaagcaattaaaaatcgatagctgagcag

SEQ ID NO: 66913 - DNA, 600 bp, Chicken  19866894335972_1
tctcccatgcctgttagtgccgtaccagcaaccagcacacacaaaggactcgaggggcggcaccgactgcagagtgccctctccaaaataactgcagatttattactgggaagcagctcagaggtaatgatgacacagacttcatgagcccgatcttcctttacaacgagcctgtcctataattcagaatatatactgcaacaggaaagagcaaagcacagtctcattttataaggaaagcaggatacaaacttggcaataacacagcgtaagtcagctgcgtttccttatgctcagagmatckattccttctgyaatcacaactgaggagcactgaggccacaggagccagacatcctctgagatggaaacttctgcaaccctgtattttcaccaaacatcactgctgataaacagaccaaatattacacccacagtgaagttcttctaggaaaaaacaacctgcattctgagtaacttgcactcaggacttcagcatttcrgaggagtaacaggtcaccttaagggatcttaccttgcaggatggggacccctcagccccactcaaagcaccgcagagggtccatcagggtggggacc

SEQ ID NO: 66914 - DNA, 600 bp, Chicken  19866894335972_2
ccatgcctgttagtgccgtaccagcaaccagcacacacaaaggactcgaggggcggcaccgactgcagagtgccctctccaaaataactgcagatttattactgggaagcagctcagaggtaatgatgacacagacttcatgagcccgatcttcctttacaacgagcctgtcctataattcagaatatatactgcaacaggaaagagcaaagcacagtctcattttataaggaaagcaggatacaaacttggcaataacacagcgtaagtcagctgcgtttccttatgctcagagmatckattccttctgyaatcacaactgaggagcactgaggccacaggagccagacatcctctgagatggaaacttctgcaaccctgtattttcaccaaacatcactgctgataaacagaccaaatattacacccacagtgaagttcttctaggaaaaaacaacctgcattctgagtaacttgcactcaggacttcagcatttcrgaggagtaacaggtcaccttaagggatcttaccttgcaggatggggacccctcagccccactcaaagcaccgcagagggtccatcagggtggggacctccc

SEQ ID NO: 66915 - DNA, 600 bp, Chicken  19866894335972_3
agtgccgtaccagcaaccagcacacacaaaggactcgaggggcggcaccgactgcagagtgccctctccaaaataactgcagatttattactgggaagcagctcagaggtaatgatgacacagacttcatgagcccgatcttcctttacaacgagcctgtcctataattcagaatatatactgcaacaggaaagagcaaagcacagtctcattttataaggaaagcaggatacaaacttggcaataacacagcgtaagtcagctgcgtttccttatgctcagagmatckattccttctgyaatcacaactgaggagcactgaggccacaggagccagacatcctctgagatggaaacttctgcaaccctgtattttcaccaaacatcactgctgataaacagaccaaatattacacccacagtgaagttcttctaggaaaaaacaacctgcattctgagtaacttgcactcaggacttcagcatttcrgaggagtaacaggtcaccttaagggatcttaccttgcaggatggggacccctcagccccactcaaagcaccgcagagggtccatcagggtggggacctcccccaacacgagt

SEQ ID NO: 66916 - DNA, 580 bp, Chicken  19866894335972_4
ggaaagagcaaagcacagtctcattttataaggaaagcaggatacaaacttggcaataacacagcgtaagtcagctgcgtttccttatgctcagagmatckattccttctgyaatcacaactgaggagcactgaggccacaggagccagacatcctctgagatggaaacttctgcaaccctgtattttcaccaaacatcactgctgataaacagaccaaatattacacccacagtgaagttcttctaggaaaaaacaacctgcattctgagtaacttgcactcaggacttcagcatttcrgaggagtaacaggtcaccttaagggatcttaccttgcaggatggggacccctcagccccactcaaagcaccgcagagggtccatcagggtggggacctcccccaacacgagtccccatgaacatcactaagggcagccatcctgttggtgcactttgggactgcaacaacaactgaaacaacttttgtgccctcaaaaaccacaatgaagacaccacagtgcccagctaccaaaagtgcccatcattctctgcacaaaggagaggaccagaaatttcagt

SEQ ID NO: 66917 - DNA, 600 bp, Chicken  19866894335973_1
gaacatcatgccctcttcactctgcctgcagttatctgtttcctctgacttggtctgcatggtgcaaggtacaatttgggtaaaacataagtatgctgactgcatccacacattaagccaggacaaagcttagctggggccgtatccaattctttggcaaatcaaggatgggaaaggacacatggatggcttgttcactaacccacactctccctgccagagagctgtgccagaagttatcaagaaagccgcaaaatgaaagcatgatatgctgtgttaattatgtgcacttggatatgktttttttaacaagcattctgccttttggtaaatactctttagcaactctgttgtcccatygcagtgcacttggctgtaaaaaccatctcctcgtccctgttaacactgtcggcaccattccttgccaggttcaggagggctggaaatagctggggtgtttggagggatgaggaggagccgagctcagtgacagcagtgagtattcagtgtctwttcaaagggggcaatgataacatcacccagtggttactcacaaaaggttttccccatctatagcaaagacaaaattcctttcggatc

SEQ ID NO: 66918 - DNA, 600 bp, Chicken  19866894335973_2
ggtgcaaggtacaatttgggtaaaacataagtatgctgactgcatccacacattaagccaggacaaagcttagctggggccgtatccaattctttggcaaatcaaggatgggaaaggacacatggatggcttgttcactaacccacactctccctgccagagagctgtgccagaagttatcaagaaagccgcaaaatgaaagcatgatatgctgtgttaattatgtgcacttggatatgktttttttaacaagcattctgccttttggtaaatactctttagcaactctgttgtcccatygcagtgcacttggctgtaaaaaccatctcctcgtccctgttaacactgtcggcaccattccttgccaggttcaggagggctggaaatagctggggtgtttggagggatgaggaggagccgagctcagtgacagcagtgagtattcagtgtctwttcaaagggggcaatgataacatcacccagtggttactcacaaaaggttttccccatctatagcaaagacaaaattcctttcggatccctccagcagagaggcatctcttggatgtgccaccagcatctgtcactgtccctgtacca

SEQ ID NO: 66919 - DNA, 600 bp, Chicken  19866894335973_3
ctgccagagagctgtgccagaagttatcaagaaagccgcaaaatgaaagcatgatatgctgtgttaattatgtgcacttggatatgktttttttaacaagcattctgccttttggtaaatactctttagcaactctgttgtcccatygcagtgcacttggctgtaaaaaccatctcctcgtccctgttaacactgtcggcaccattccttgccaggttcaggagggctggaaatagctggggtgtttggagggatgaggaggagccgagctcagtgacagcagtgagtattcagtgtctwttcaaagggggcaatgataacatcacccagtggttactcacaaaaggttttccccatctatagcaaagacaaaattcctttcggatccctccagcagagaggcatctcttggatgtgccaccagcatctgtcactgtccctgtaccarccgcacagtttgcaacacattcataaggagctctgaaaaactccttyccttgcatagtaagagtcatctctttgaataaatacacaaaccagttgactggaggcatgtaaatatttacagggcgtgctcaaggagggccagaaaccaatata

SEQ ID NO: 66920 - DNA, 600 bp, Chicken  19866894335973_4
cagtgcacttggctgtaaaaaccatctcctcgtccctgttaacactgtcggcaccattccttgccaggttcaggagggctggaaatagctggggtgtttggagggatgaggaggagccgagctcagtgacagcagtgagtattcagtgtctwttcaaagggggcaatgataacatcacccagtggttactcacaaaaggttttccccatctatagcaaagacaaaattcctttcggatccctccagcagagaggcatctcttggatgtgccaccagcatctgtcactgtccctgtaccarccgcacagtttgcaacacattcataaggagctctgaaaaactccttyccttgcatagtaagagtcatctctttgaataaatacacaaaccagttgactggaggcatgtaaatatttacagggcgtgctcaaggagggccagaaaccaatatatcacctgaaagaagaatacatgctcagcgaccataaagacctgagcttacatttgccccgagcaattacagttaagtaactgcaatacaagcacatatttaagcacttatgcaaggaaaaggggctgatgacctcgattatatttgca

SEQ ID NO: 66921 - DNA, 600 bp, Chicken  19866894335973_5
tcggcaccattccttgccaggttcaggagggctggaaatagctggggtgtttggagggatgaggaggagccgagctcagtgacagcagtgagtattcagtgtctwttcaaagggggcaatgataacatcacccagtggttactcacaaaaggttttccccatctatagcaaagacaaaattcctttcggatccctccagcagagaggcatctcttggatgtgccaccagcatctgtcactgtccctgtaccarccgcacagtttgcaacacattcataaggagctctgaaaaactccttyccttgcatagtaagagtcatctctttgaataaatacacaaaccagttgactggaggcatgtaaatatttacagggcgtgctcaaggagggccagaaaccaatatatcacctgaaagaagaatacatgctcagcgaccataaagacctgagcttacatttgccccgagcaattacagttaagtaactgcaatacaagcacatatttaagcacttatgcaaggaaaaggggctgatgacctcgattatatttgcattgtgtttcctgttgttagcacttcctaggcggaatgactgcaatac

SEQ ID NO: 66922 - DNA, 600 bp, Chicken  19866894335977_1
ggtggcacaggaagcacagttcaatggcaaatgctcccctggggttgtgtaacagacctgccagctcaaaaccaaacaccaagacatgaagacatgctccaaagagcaactacaaggcctgctggtgctactgtggtagcaccatgtgctgctgtggtatgggactgcctagttcagttcctcctcccttctgaagccacagaattgctccctctgcccttttgttctcctttgtttctccccacaaatgtccatcagggttctgttccagtcattactcattttttttctggaaagatygggaggtccatccatgcgcttgccttcagaaaagaaaaactagcttttctattattttcttatattaaacatatttttttccactttgcctaggtacttcaggcagctattagtcacaaaagcacaaagtattcccagaagcaactgaaatcaatggcatagcaccgaggcctctcttcctcccaccagccccagggtcagcagttcctccagcctgcagcaccacacacaaaccgcacctgcctggcctgctaatcacctcccggctgcgctcccaccccagctcaccctgagctttac

SEQ ID NO: 66923 - DNA, 599 bp, Chicken  19866894335981_1
  misc_feature (1)..(8): n is any nucleotide
nnnnnnnnatgtcttgttataatcatcaggctccagttcttgagggcaagcctgagtcttgtctgtttttgttcctcttggttctttgcctggtctttctggttctttttatcagattccatttttttctttattttctgtgctctttgtgctttacatcgcagaatttgtccaaagtgaaacacaaacacaatagtattcagtacaaattgatccagatgcacgattctgtactttcagaaataaaccagaacagatgtggttcttagcaaattccttgctaattctcaaggaaactgraaattccacatgcaaatgtgaacttcagactgtgtggagggctagggccaattttttgccactggataaatcagtcacctaatatgtagagtatttctgtaaagcagcatggaatgtgggaatctrtataagcatggcactctgtttyccttatgttaaaaaaagagaagagaatttaagttatcttcactgtacctgggagaaaggctttgttcagtgaagtctggcagttccatgtagcaagtcttaatatcttcctttacttgtatggaagaggataacaaggtttcttgatccca

SEQ ID NO: 66924 - DNA, 600 bp, Chicken  19866894335981_2
ttctttattttctgtgctctttgtgctttacatcgcagaatttgtccaaagtgaaacacaaacacaatagtattcagtacaaattgatccagatgcacgattctgtactttcagaaataaaccagaacagatgtggttcttagcaaattccttgctaattctcaaggaaactgraaattccacatgcaaatgtgaacttcagactgtgtggagggctagggccaattttttgccactggataaatcagtcacctaatatgtagagtatttctgtaaagcagcatggaatgtgggaatctrtataagcatggcactctgtttyccttatgttaaaaaaagagaagagaatttaagttatcttcactgtacctgggagaaaggctttgttcagtgaagtctggcagttccatgtagcaagtcttaatatcttcctttacttgtatggaagaggataacaaggtttcttgatcccaaactattccctcttgactttgtgacagcatgaaccacagaacaataatattaattttggttgcgtgcaaaaggaattgttttgatagataagcaatctgtcaggccatccaaattgcatttagagca

SEQ ID NO: 66925 - DNA, 600 bp, Chicken  19866894335981_3
gtgctttacatcgcagaatttgtccaaagtgaaacacaaacacaatagtattcagtacaaattgatccagatgcacgattctgtactttcagaaataaaccagaacagatgtggttcttagcaaattccttgctaattctcaaggaaactgraaattccacatgcaaatgtgaacttcagactgtgtggagggctagggccaattttttgccactggataaatcagtcacctaatatgtagagtatttctgtaaagcagcatggaatgtgggaatctrtataagcatggcactctgtttyccttatgttaaaaaaagagaagagaatttaagttatcttcactgtacctgggagaaaggctttgttcagtgaagtctggcagttccatgtagcaagtcttaatatcttcctttacttgtatggaagaggataacaaggtttcttgatcccaaactattccctcttgactttgtgacagcatgaaccacagaacaataatattaattttggttgcgtgcaaaaggaattgttttgatagataagcaatctgtcaggccatccaaattgcatttagagcagggaatgttagagaggactagc

SEQ ID NO: 66926 - DNA, 599 bp, Chicken  19866894335992_1
  misc_feature (1)..(118): n is any nucleotide
nnnnnnnnnnnnnnnnnnnnnnnnnnnnnnnnnnnnnnnnnnnnnnnnnnnnnnnnnnnnnnnnnnnnnnnnnnnnnnnnnnnnnnnnnnnnnnnnnnnnnnnnnnnnnnnnnnnnnnccttattgaaaaattggagggacataaacataactattggagtaacttctaatgaagtatgatttaagattagtagaagagatgctgggtaaagtaaggcttgtttaaaaacaaagtcattcaacaattggacacagtgttcatcccaatgaattcaggttaaatacttcttctaaatcccrgtgactaagcagaagttctgcctgagaatataaccctatattttaagagcattgctataaacatttgaactatgtttcacatacagaggaatgagggagtataattgctttctatctctataagcttgacttcacacttggtaatacccttagattttttcaatgttagttttttgctttcttatcctgccactttcttggccaaaaaatttactttgtgcattcagcagcagtcatgctgactctcataataccactgctggatggatttagtcaaaaatcttagtacagtacagctt

SEQ ID NO: 66927 - DNA, 600 bp, Chicken  19866894335993_1
caaaattagatctccatttctgcagtatgaataagagtactgagtacatactgttcggcgtgagtctggatatgtgaagagaaacaagatttgttcttcaaaaatgcttttctttatgtctctctttaaaatacccacaaatacacttgtaacaatgtgggcaatacaggccagtttacaaacagctctgcctttatccaagacagaaatttgtaatatctcctgaaggaaaagagaattccaagataacaatagaactactgtgttctcaaatgtacgtatctttctccttctttaatracaaccttccctgttttaacactttctattaaaatttaattgcagatattatacatcataatatatatgaatactccatccatgagctacagatgtagctttttctgtagcttgcctccacttacattagttttctgtgtttttctggtagatcccttatttctcttgttgcttttcatttttattctcagaagatgcaaatgtttttactcaggtattgcaatatgcatgaaatgataaacactcaacattatttctagtgtggtttgaggttctgctgtttttctttgaacaagtaga

SEQ ID NO: 66928 - DNA, 600 bp, Chicken  19866894335995_1
cgtaggcttggatccaccaaaatatagaaatatattgggtttatctggcaagattttactagtggggcctgcaggggtggcctttcacaaaaaagtcctgaagctgccacatgttggatagaatcagttccagttagatctaaaagagagcagcaactagccactgctgagctaatgagcaacactgcttgcaactctgcaattacatacttaagaaagagtaagaaatactgtacaggagctgaaagaatgaggaaactcaagagaaacatctctgcaaaccccagtgtctattaagaragaaggagaggaggtgctacaggtgctggagcagagattcatctgctgctcatggagaagaccacagtgaagaaagtgattcatctgcagcccatataggaccacactgaagcaattaacactgcaacattctgtggaggaatccacrtcacatcaagtgaatgtgccctaaaaaaaggcttcatgctatggattgcccacagaggaaaagattcttgtcaggaactgcagcttgtggagaggaacccctgctggagcaagttgtctgtaagaactgtaattcctgaggaattcatggtg

SEQ ID NO: 66929 - DNA, 600 bp, Chicken  19866894335995_2
gtaggcttggatccaccaaaatatagaaatatattgggtttatctggcaagattttactagtggggcctgcaggggtggcctttcacaaaaaagtcctgaagctgccacatgttggatagaatcagttccagttagatctaaaagagagcagcaactagccactgctgagctaatgagcaacactgcttgcaactctgcaattacatacttaagaaagagtaagaaatactgtacaggagctgaaagaatgaggaaactcaagagaaacatctctgcaaaccccagtgtctattaagaargaaggagaggaggtgctacaggtgctggagcagagattcatctgctgctcatggagaagaccacagtgaagaaagtgattcatctgcagcccatataggaccacactgaagcaattaacactgcaacattctgtggaggaatccacrtcacatcaagtgaatgtgccctaaaaaaaggcttcatgctatggattgcccacagaggaaaagattcttgtcaggaactgcagcttgtggagaggaacccctgctggagcaagttgtctgtaagaactgtaattcctgaggaattcatggtga

SEQ ID NO: 66930 - DNA, 600 bp, Chicken  19866894335995_3
taggcttggatccaccaaaatatagaaatatattgggtttatctggcaagattttactagtggggcctgcaggggtggcctttcacaaaaaagtcctgaagctgccacatgttggatagaatcagttccagttagatctaaaagagagcagcaactagccactgctgagctaatgagcaacactgcttgcaactctgcaattacatacttaagaaagagtaagaaatactgtacaggagctgaaagaatgaggaaactcaagagaaacatctctgcaaaccccagtgtctattaagaaaraaggagaggaggtgctacaggtgctggagcagagattcatctgctgctcatggagaagaccacagtgaagaaagtgattcatctgcagcccatataggaccacactgaagcaattaacactgcaacattctgtggaggaatccacrtcacatcaagtgaatgtgccctaaaaaaaggcttcatgctatggattgcccacagaggaaaagattcttgtcaggaactgcagcttgtggagaggaacccctgctggagcaagttgtctgtaagaactgtaattcctgaggaattcatggtgaa

SEQ ID NO: 66931 - DNA, 600 bp, Chicken  19866894335995_4
agcagcaactagccactgctgagctaatgagcaacactgcttgcaactctgcaattacatacttaagaaagagtaagaaatactgtacaggagctgaaagaatgaggaaactcaagagaaacatctctgcaaaccccagtgtctattaagaaagaaggagaggaggtgctacaggtgctggagcagagattcatctgctgctcatggagaagaccacagtgaagaaagtgattcatctgcagcccatataggaccacactgaagcaattaacactgcaacattctgtggaggaatccacrtcacatcaagtgaatgtgccctaaaaaaaggcttcatgctatggattgcccacagaggaaaagattcttgtcaggaactgcagcttgtggagaggaacccctgctggagcaagttgtctgtaagaactgtaattcctgaggaattcatggtgaagcagtccattcccaatgcccatggaaaggacccactttgcatcagtttatgaaaaatatatctcatgggagggatgttggagcaggtgaagtgtatgaggagaaaagagcagcagaggtaaagagttatgacctcaccagaacctc

SEQ ID NO: 66932 - DNA, 600 bp, Chicken  19866894335996_1
gcctcaagctttgggtttccaagtaagtttctgcataaacaaccagcacttaaatggatatttttaaatattcttctgcgttattgaaatgaagcagtgtttcagtatcatgggtgtatccattctaaatgtattttcttatgcagtattgaaatgcagcagcgttgcagtatcacaggtgtgcccattctgaccgttcttatccatttcataattgcaggctttcctgtgagcagcagcagcagtgctgccagtttctcctttaaggccaatcccagtgtcccacctggaaacgctgcrgctgttgggagctctgctgctgcctccaatcctcctacctttggtgtgacgtcctcgcccagcgttcccaatcctgttggctctggcaattcttcagccccatctgcagcttccttctcatttaaaacgtctggagcaaccggtggttgtggaacttctgggctttcaggctttggaagttctgctgctgcaaactcttcaagcaccgctccgctsccagtttctgcaactcccagtgcagcgacaggaacttcccagtcaggtgcaagcagtgcttcggctgcacagactgccggtgcc

SEQ ID NO: 66933 - DNA, 589 bp, Chicken  19866894335996_2
gcaggctttcctgtgagcagcagcagcagtgctgccagtttctcctttaaggccaatcccagtgtcccacctggaaacgctgcrgctgttgggagctctgctgctgcctccaatcctcctacctttggtgtgacgtcctcgcccagcgttcccaatcctgttggctctggcaattcttcagccccatctgcagcttccttctcatttaaaacgtctggagcaaccggtggttgtggaacttctgggctttcaggctttggaagttctgctgctgcaaactcttcaagcaccgctccgctsccagtttctgcaactcccagtgcagcgacaggaacttcccagtcaggtgcaagcagtgcttcggctgcacagactgccggtgcctctggacataacataacrtccgcgccttctgcagtcccaaatggtattgcatcagacaaattatatacaccgaggagtgaattaacagctgaagagttggagcagtttgaagccaaaaggttcacgctaggaaagatacctcttaaaccaccacccatagaccttttatatctttagatctcaagtttattctgaacttacatgt

SEQ ID NO: 66934 - DNA, 487 bp, Chicken  19866894335996_3
gctgcctccaatcctcctacctttggtgtgacgtcctcgcccagcgttcccaatcctgttggctctggcaattcttcagccccatctgcagcttccttctcatttaaaacgtctggagcaaccggtggttgtggaacttctgggctttcaggctttggaagttctgctgctgcaaactcttcaagcaccgctccgctsccagtttctgcaactcccagtgcagcgacaggaacttcccagtcaggtgcaagcagtgcttcggctgcacagactgccggtgcctctggacataacataacrtccgcgccttctgcagtcccaaatggtattgcatcagacaaattatatacaccgaggagtgaattaacagctgaagagttggagcagtttgaagccaaaaggttcacgctaggaaagatacctcttaaaccaccacccatagaccttttatatctttagatctcaagtttattctgaacttacatgt

SEQ ID NO: 66935 - DNA, 600 bp, Chicken  19866894336005_1
ccatctgggtgcaggtgccctgtgaggatgctctgtccccgttgggatttgcacctccaagctgccagtgcttgtttgtcatggtttgcttccctgggctgcaagagggttttatttgctttaaatcccaaacctaaagatgcgtattaatagcaccgcaatgtatagcctttgtggccagcacacgccaggggttacgtaaaacacagattaatgggaatcagtgaaataggggagcacatggagggaatgacttgggaggcaggaaggagggagctggcaaaattaaatgaacccccycagcgcggctaagctgccctgtcccaagcagatacacaggtttagaaaggctgcgggttgtccagaatcccttccccctcctactgctctgtgataggtggaagagaggttcccaaggacacgagggatgctacagcaactccaagctttgtagcaggtgcagggcaggagggaacaagggaaaacaacaggtttggggcactctgcccgtgggagcacaggatcgatgggaggatgcctgtggctgggaggaaggcagctgggctccaaccatcaatcacgtcccaccgggaagggctt

SEQ ID NO: 66936 - DNA, 600 bp, Chicken  19866894336015_1
taatttgttttttccagggtcaagatcaagtttgttgctaccttctcttttaccttcttccacatgactgaaggcagtgaatgaacttttgctgtgttttaggatttcatactaatgtttcacttctgtcagtatttttttctgaaaagaaaattatcttaatcactatgaaatagctaattctcaaatttgtaattattgctggcatgctttgtatttaccaaatatgagcaatttagttcacgtctttctattgtttagttaactcaaacagtagttgcagcaactatttttttaatraagaattctttttatcaaacttagtgaagaatattccgtcagtatactttaattttggtttgttttgaatgaaatgatacaattaatatatatatatatgtatatatgtaagtgaggcagtatttagtggcatgtggagcaaattctgttattatttggtatagcatgactaactttccttaactgtaagacttgtaataaacggtgatttatacattttgtctttcattcttcagtcatgcttatgtgcatcttaccatttttagttgacaatggaaattttcccacttctcctgttgc

SEQ ID NO: 66937 - DNA, 600 bp, Chicken  19866894336017_1
attaatatcagactgaatatttaggtgtctaaataaagatttagctgcttaatttccagtgcatgttttcaaacactttggccagcatttgtaaagtgagcctttgttttgctgcctaactgcactcttcaagccttataaatccactttgcggttgggaatggtatcttagtcttggcaaggcagcacattctcctgactcatctcaatgtgcagtggacttctgcagctgtttatgctgactggagagccctgcttatcctcctgatgcttcagacagctgttgtggagagaggccarttcctgcctctagaaggagttcctattcatcttgcaggtctgtttgtatggctatggcataaaagagccatgaatgagagataggaatgaccctcttaggaacagctcggtggaagatgctgtagtgaggtgatggcattgtttggtgctgcatcatgcagctttggaggcatactgaataaaagaagatacagtgcatgcctttttgttcagcatggcacaacagctactggctgcagtagagtacccaaccaggtagggtcaacagctccctgaggcttttgaaggctttccccaggt

SEQ ID NO: 66938 - DNA, 564 bp, Chicken  19866894336029_1
attatctggaaagttctcatatgtggagcagagttctgtcaaattcaggagtagcactggcctctgataatagctgcgtacttgaaccatgcaatgccataaaagtatggagttttggaagctgggctgaagcagtcatcctcagaagtgttcgtgttttgtgtaccctagtgttatagacattataaaaacaccctgtgaggcaataaaaccctgatctgatgctgaatgactatagagtacaattgtatttgtagataaaactgtattcaaagtcatcccatgccattaactgcttcygggtggtagatctctcttctgttttggcatgtaaaatgcattatttatatagcttttcaataagactctcagtgtagttattcagctttctggcatacaaccagcccgtcccagcttccattgatattcagcaatattagggcttagtgactgtctcccatcatgcagtttacgtcagactgcattctttgtggcactggaatctgtagggtgaagtaaaagcaatgaataacccatctttgagaaggatacagttatcatagt

SEQ ID NO: 66939 - DNA, 600 bp, Chicken  19866894336037_1
ttgacacagatctttcaaatgacaagctacattttcttaagagtacatatcgtaactaatacaactagatctattacatatctagtttcctagtattaatattctaatacacacaagactcacctaactcaatatcttctacagaagaagaattctgcaagtgagaaaaaaaaatgcctctcagtactttgcacaagagtctttaatatttttcaaacatatatttacatgcaaagaacgtaagccctctaaattaggtttagtacaactttgaagttatgaagtccagtggatttaagrgtgaaatactttttaagacaaagcatccctttgcagayggaaatacaattgctgtatcactaaaaatctgtacccatccaacaaaggaacagtgagactgatagttggtaaaataagagtccaagcagtatcttaaaggagccgttccggtgtttcctcattttatcccaaatccttctttacagctaaattgcctatttcatctgaaaaagtctcttcttcattggtgctactcagatacattagctataggaaggcaaatacacgttcaggtactaacgaaggtcaaattttgccaaa

SEQ ID NO: 66940 - DNA, 600 bp, Chicken  19866894336037_2
aagagtacatatcgtaactaatacaactagatctattacatatctagtttcctagtattaatattctaatacacacaagactcacctaactcaatatcttctacagaagaagaattctgcaagtgagaaaaaaaaatgcctctcagtactttgcacaagagtctttaatatttttcaaacatatatttacatgcaaagaacgtaagccctctaaattaggtttagtacaactttgaagttatgaagtccagtggatttaagrgtgaaatactttttaagacaaagcatccctttgcagayggaaatacaattgctgtatcactaaaaatctgtacccatccaacaaaggaacagtgagactgatagttggtaaaataagagtccaagcagtatcttaaaggagccgttccggtgtttcctcattttatcccaaatccttctttacagctaaattgcctatttcatctgaaaaagtctcttcttcattggtgctactcagatacattagctataggaaggcaaatacacgttcaggtactaacgaaggtcaaattttgccaaacaaataaatctaaagggtacttcaccacagcattcttc

SEQ ID NO: 66941 - DNA, 600 bp, Chicken  19866894336037_3
acattagctataggaaggcaaatacacgttcaggtactaacgaaggtcaaattttgccaaacaaataaatctaaagggtacttcaccacagcattcttcacttccattactctccataatataaaataaacaaatcacattaactacatccttgtctcaagatgttaaaagtaaatatattcactgcatcagatttgaagttttagctcatattcattctacagagataacttagatgataatctcatgtcctagtttgcaataagtatatagcagagctgaatacaaaaaacaacagamccccgaagtccaaaatgtcaactgcaaatcttcacttaatcactgtgaaatgattaaacagttattctctgtagtttaaagtcagcttatgcttaacaatgtgccaaacctcacctgagttgatatatcactggaaactgaatttgagggtggctgcaatgaaaagataccttcattagctacaaaattgatatcatgggaaaaactcatcatctttgttaaaactgtaacaatttgtgagttaaaaccaaatcttacctttgctcttacatatgctttccttatttttaatcctaattt

SEQ ID NO: 66942 - DNA, 600 bp, Chicken  19866894336041_1
agaagctgcctagaatgtcctcttacttcccctcttatctaccacgattagcttccctctgttgacgacatctaccaggaacatgctctgtgatccctgacacaagccagccggcatgtggggtttgctctgcagccctgatgtgctcttcagctcagccttcaaaccagagatttccttaccaacagccatgcagcgaaagcacaagggaccgctcagagactgctgactaacgcctgcaagctacttgtgatcctgaatagatacttcagcctctgacttcccacttcataaaagacraacattcacacactttcaaacacaaccacaggtttccagttttcccaacaagcactgtcagacatgcatcactaagctttatctagaatgcagaacattgaggtgaagtgttccttgcatgacctcatttgttttcacacatcttgtggtctgaaaggtcagttggggtttaatatttcacccaaactgaagaggctggcaggaagggcagaagctcacctcccccagcacagctgttaccaccagctcacagcagcatgcagccgtccccagcccgtcccagcgtgtcaccctgccctc

SEQ ID NO: 66943 - DNA, 600 bp, Chicken  19866894336046_1
actgaacttgatgagggaaagcctacgctatcggttctatgttacctggctttcacatggatgctggagcatccctactgcctttatctttttgtttcacctcacaggtctccctcaaacaaagtagctgtgcttgagtcctgttttgcctcacacagtattgcagagggcaatcagttagaaaagtagtttgcatattttgtctgagcaaggcctgctgaacccaacctttgcagtatctcatagctttcataaagcactgatcacagacagatttgcttttgaaaaagaacagaggtrgtacagaagcatggatactactggctcatgaatgggtcttgcactcatctcacatgttatttgaaaaatctacttccacctaagatcagtataaagtaaggaaagcatctcacctgtaactgaaatggccagttctccaacgaaggaaaatcttatgctagcattttgtgcacagtggcagcttgtgctggctgttcctaagggagccttgtttgtctgagattgtttccttccccatctctcatccatcacctcctccttttgagagctggaaactggccatctctatttagcaggctt

SEQ ID NO: 66944 - DNA, 599 bp, Chicken  19866894336047_1
  misc_feature (1)..(149): n is any nucleotide
nnnnnnnnnnnnnnnnnnnnnnnnnnnnnnnnnnnnnnnnnnnnnnnnnnnnnnnnnnnnnnnnnnnnnnnnnnnnnnnnnnnnnnnnnnnnnnnnnnnnnnnnnnnnnnnnnnnnnnnnnnnnnnnnnnnnnnnnnnnnnnnnnnnnnactgctacttaagagaaaacttggccggcatattgaacagttccagaacttagtgaagtatatgaagttgcgtaggaaatggagtaacttactggaactgcaaattatactccttcgattacactgatgtgaatagcatagctgagtaaargctagtggagtactgtgcatgctaccttggacaagatcagttgtaatttttgctgtttgctttagtttagtttaaaatagggtgaaaaaagttgtttatgtagtttataagctctttaatgtttttggggatccttttcttgtttgaggataacttgtaagaacttgaacagataaattagtacttgtggatttctttttctaacaattattattttgccgcatttcaagcagtaggaaattcactcagttggacaaaatcccttatgatgctgataatggatcaaatctgtagctggc

SEQ ID NO: 66945 - DNA, 600 bp, Chicken  19866894336048_1
aggcttttaaaataaaaataagggatacgtagggctgggttggaaacctgtagaagagagtatctaccagttcttctcttttggtagttgctgaggggaatgaatgacatctgcttgtatacagcaatgtcccagccctgtcattctctcgtaaaaatcagcacaaaaaagcaaatggttcatttattggactgaatcattgttatttatgcacaggaccaaaatagtttccttcatataaaaagccttcagcaagttcctcttggataggatttatttatgaagtctctctgggataawgtgggatgattcactgtttctgctacttgccaaaaatgactccagcagattaatagaatttaagctattgaagtgttgggtaacttgtaaaagtaactctgcttaaagtgttaagcaacagctacaagtccactwtagagcacaggtgtggggtggctgctgccctgtgctccccaggcctgtggcagcccctccacctggttgccatagtggggatggtgacgttcccaccccttcccattgagggaagagtgtacgagtttctgtaagtctgctggagcggagctgaacatgggctta

SEQ ID NO: 66946 - DNA, 600 bp, Chicken  19866894336048_2
ccctgtcattctctcgtaaaaatcagcacaaaaaagcaaatggttcatttattggactgaatcattgttatttatgcacaggaccaaaatagtttccttcatataaaaagccttcagcaagttcctcttggataggatttatttatgaagtctctctgggataawgtgggatgattcactgtttctgctacttgccaaaaatgactccagcagattaatagaatttaagctattgaagtgttgggtaacttgtaaaagtaactctgcttaaagtgttaagcaacagctacaagtccactwtagagcacaggtgtggggtggctgctgccctgtgctccccaggcctgtggcagcccctccacctggttgccatagtggggatggtgacgttcccaccccttcccattgagggaagagtgtacgagtttctgtaagtctgctggagcggagctgaacatgggcttatgagctaaaattatcttgattacttgactgtggagatcagtctcctgactttgccttcaccctgtgtctctgtgaagacaaacgcgtgattgtgtgtggaagatgagaaagaaagctgactgcttaattcagcat

SEQ ID NO: 66947 - DNA, 599 bp, Chicken  19866894336076_1
  misc_feature (1)..(98): n is any nucleotide
nnnnnnnnnnnnnnnnnnnnnnnnnnnnnnnnnnnnnnnnnnnnnnnnnnnnnnnnnnnnnnnnnnnnnnnnnnnnnnnnnnnnnnnnnnnnnnnnnncaaaaaagccaaatgcgcaataataaacacattctgataccgaatttgggctgttggacactgggaagggcagagacactttgggtggatttcacaagcatttagataatttataattggggcactggggttaatgtctctgggcgctgtcccaggcgccagggcttgccggctcccaccactgtcccaggcatggaggtcrcacagcccctggatttgccaggccagacaccaagtctgcacggatggacgttccagcacaacacaccagagcaccccggtgctgcagcaagttgggtttggggcagctgagaagcaagaagaagcaggtgggcactgacatccataggagcagaaggtcttagagctcatctgcagtgccagatgtgggasaaggggtccagccggctcccaggtgcccratgcagccgatccccagcccgagstgcatcacagctcatcagggtcctggtcccactcgtgggcagcagccrgtgactt

SEQ ID NO: 66948 - DNA, 600 bp, Chicken  19866894336076_2
acaagcatttagataatttataattggggcactggggttaatgtctctgggcgctgtcccaggcgccagggcttgccggctcccaccactgtcccaggcatggaggtcrcacagcccctggatttgccaggccagacaccaagtctgcacggatggacgttccagcacaacacaccagagcaccccggtgctgcagcaagttgggtttggggcagctgagaagcaagaagaagcaggtgggcactgacatccataggagcagaaggtcttagagctcatctgcagtgccagatgtgggasaaggggtccagccggctcccaggtgcccratgcagccgatccccagcccgagstgcatcacagctcatcagggtcctggtcccactcgtgggcagcagccrgtgacttcccatcccagcggcttgataggcactggggggctgaaggtggcacatggggtgtgcccaacaacctcccccatcccgccccgcactgctggcaaaaaaatcactccctctgagcgccccaagaggcttttttttgcgaactcttccagataaacccaacttatttagctgataatatataaacagtttatca

SEQ ID NO: 66949 - DNA, 600 bp, Chicken  19866894336076_3
cactggggttaatgtctctgggcgctgtcccaggcgccagggcttgccggctcccaccactgtcccaggcatggaggtcrcacagcccctggatttgccaggccagacaccaagtctgcacggatggacgttccagcacaacacaccagagcaccccggtgctgcagcaagttgggtttggggcagctgagaagcaagaagaagcaggtgggcactgacatccataggagcagaaggtcttagagctcatctgcagtgccagatgtgggasaaggggtccagccggctcccaggtgcccratgcagccgatccccagcccgagstgcatcacagctcatcagggtcctggtcccactcgtgggcagcagccrgtgacttcccatcccagcggcttgataggcactggggggctgaaggtggcacatggggtgtgcccaacaacctcccccatcccgccccgcactgctggcaaaaaaatcactccctctgagcgccccaagaggcttttttttgcgaactcttccagataaacccaacttatttagctgataatatataaacagtttatcagctttgcgcatttgcagtgcagcgggatg

SEQ ID NO: 66950 - DNA, 600 bp, Chicken  19866894336076_4
ctgtcccaggcgccagggcttgccggctcccaccactgtcccaggcatggaggtcrcacagcccctggatttgccaggccagacaccaagtctgcacggatggacgttccagcacaacacaccagagcaccccggtgctgcagcaagttgggtttggggcagctgagaagcaagaagaagcaggtgggcactgacatccataggagcagaaggtcttagagctcatctgcagtgccagatgtgggasaaggggtccagccggctcccaggtgcccratgcagccgatccccagcccgagstgcatcacagctcatcagggtcctggtcccactcgtgggcagcagccrgtgacttcccatcccagcggcttgataggcactggggggctgaaggtggcacatggggtgtgcccaacaacctcccccatcccgccccgcactgctggcaaaaaaatcactccctctgagcgccccaagaggcttttttttgcgaactcttccagataaacccaacttatttagctgataatatataaacagtttatcagctttgcgcatttgcagtgcagcgggatggatgttgttcttggaattctgttg

SEQ ID NO: 66951 - DNA, 576 bp, Chicken  19866894336076_5
ggaggtcrcacagcccctggatttgccaggccagacaccaagtctgcacggatggacgttccagcacaacacaccagagcaccccggtgctgcagcaagttgggtttggggcagctgagaagcaagaagaagcaggtgggcactgacatccataggagcagaaggtcttagagctcatctgcagtgccagatgtgggasaaggggtccagccggctcccaggtgcccratgcagccgatccccagcccgagstgcatcacagctcatcagggtcctggtcccactcgtgggcagcagccrgtgacttcccatcccagcggcttgataggcactggggggctgaaggtggcacatggggtgtgcccaacaacctcccccatcccgccccgcactgctggcaaaaaaatcactccctctgagcgccccaagaggcttttttttgcgaactcttccagataaacccaacttatttagctgataatatataaacagtttatcagctttgcgcatttgcagtgcagcgggatggatgttgttcttggaattctgttggtcataatatttagaagagggctc

SEQ ID NO: 66952 - DNA, 599 bp, Chicken  19866894336086_1
  misc_feature (1)..(20): n is any nucleotide
nnnnnnnnnnnnnnnnnnnntgtaagatggtctctcgtggcttttgtatccagtcccagctcacaagttatggactgggaactgacacagatctctctaagaggtatctgaggcaaagaagtgaggctgttacctgcgccgttcagtctgacttggtgcacgaacttgtcatgcggatcagctctggctcttctgaaatgagcaactggcaagcttttaatgcccatttcagtgagttttctttggatttggttgttctctgtcctcaatgtttgtggtcagcaacaccctcagtagaaytgatttccttaggtgtacctgcagtgacagcttcttgatggttgcttgactgtgatctcacactaaggcagcgtggcacagctgggtttgggctccyggtgcaaacctgaggatgctctgtggatagtctcgattattctgcaccctttttccaaagcactaaatggaatttcagattttagatatgtctagacatatacagtgcatgataaagttgataatacattaatcatttttaacaacaggtaatatgcataatttatggtgttacagtgctatcttttttgatatttatgatg

SEQ ID NO: 66953 - DNA, 600 bp, Chicken  19866894336086_2
taagaggtatctgaggcaaagaagtgaggctgttacctgcgccgttcagtctgacttggtgcacgaacttgtcatgcggatcagctctggctcttctgaaatgagcaactggcaagcttttaatgcccatttcagtgagttttctttggatttggttgttctctgtcctcaatgtttgtggtcagcaacaccctcagtagaaytgatttccttaggtgtacctgcagtgacagcttcttgatggttgcttgactgtgatctcacactaaggcagcgtggcacagctgggtttgggctccyggtgcaaacctgaggatgctctgtggatagtctcgattattctgcaccctttttccaaagcactaaatggaatttcagattttagatatgtctagacatatacagtgcatgataaagttgataatacattaatcatttttaacaacaggtaatatgcataatttatggtgttacagtgctatcttttttgatatttatgatggataatgctcagtttttgccctcatattactgctttaaattataccacaagaaaattaatgagaaagtagatttatgggtttcatttgtttgtcaatt

SEQ ID NO: 66954 - DNA, 600 bp, Chicken  19866894336087_1
ttccagcccaaccccaccgtgcccacctacatccctcagtgccacatctccaccattctgaacccatccagagatggtgaccccacagccctgccaccgagacgcagctgggacaaagtgaggaccctcagccccatgtcctgcgtggggaacctaccgcccggaggatcttcccttcacacagatcaactatcagagcctgcaagagagcacagagcaatgagctgagcaagcacagccaccaagatgtgcactgcactctcacccaccccatcgctgcttcccacccagcacaagcgyagggtcacagctgaacccagcactgcagccagacmcctcccacccctcctgcctgcaataaatacctcctccatgggctgctccagcacccgctccaggtgccgcctctggatgccaaccatgaagggtgtggggcagcagacrgtgtcgagcaggcactcggggaccacagggatgtaggtgtgagcccacgtgaaggggtagaggagagcagccacggcgtggatacactgtgagaggacactgcgagaggagctcaacctgtgctcctccaggggtctgggggggggattttgggga

SEQ ID NO: 66955 - DNA, 600 bp, Chicken  19866894336087_2
tcagtgccacatctccaccattctgaacccatccagagatggtgaccccacagccctgccaccgagacgcagctgggacaaagtgaggaccctcagccccatgtcctgcgtggggaacctaccgcccggaggatcttcccttcacacagatcaactatcagagcctgcaagagagcacagagcaatgagctgagcaagcacagccaccaagatgtgcactgcactctcacccaccccatcgctgcttcccacccagcacaagcgyagggtcacagctgaacccagcactgcagccagacmcctcccacccctcctgcctgcaataaatacctcctccatgggctgctccagcacccgctccaggtgccgcctctggatgccaaccatgaagggtgtggggcagcagacrgtgtcgagcaggcactcggggaccacagggatgtaggtgtgagcccacgtgaaggggtagaggagagcagccacggcgtggatacactgtgagaggacactgcgagaggagctcaacctgtgctcctccaggggtctgggggggggattttggggaacagaaacagctcgggactcacctcagctcctcag

SEQ ID NO: 66956 - DNA, 504 bp, Chicken  19866894336087_3
gtggggaacctaccgcccggaggatcttcccttcacacagatcaactatcagagcctgcaagagagcacagagcaatgagctgagcaagcacagccaccaagatgtgcactgcactctcacccaccccatcgctgcttcccacccagcacaagcgyagggtcacagctgaacccagcactgcagccagacmcctcccacccctcctgcctgcaataaatacctcctccatgggctgctccagcacccgctccaggtgccgcctctggatgccaaccatgaagggtgtggggcagcagacrgtgtcgagcaggcactcggggaccacagggatgtaggtgtgagcccacgtgaaggggtagaggagagcagccacggcgtggatacactgtgagaggacactgcgagaggagctcaacctgtgctcctccaggggtctgggggggggattttggggaacagaaacagctcgggactcacctcagctcctcagccaggaagatgag

SEQ ID NO: 66957 - DNA, 600 bp, Chicken  19866894336091_1
ggcctagggctccatccagcctggcttggaacagggatggggcatcccatggttcttctaaacaggagaactgaaagcacctcaccatgacagtgacagctgctaaagtcaggcagataactgctgaagcggatgtaacactcaagtagtacacaggaggtgtggaagccaaggctcccttcatgggtactaccagttatgtgatatgcctgacacatccctcagattcaacttcacattcagcagatgtcctggatcagctaaagctctgaaaactatggagattgagctcagtcctcmaactgtgagattctaggtgctgtgccccartccaagtgcaaaccccaaagcatscaggcagctgtggtgaccttacttgccagcctcrgggagatattcttccttatttttatctagtgtgggtgggaaaaggtttctttcatagcctgccatrctcccttccccagacagccagcagtgcctcacattttagccagcacctttcagtgaggagcaccgtttcaagcctgcctgtgcctcatgcgtgtagagccakctgtttttaacagagcataacaggcaggctcttccccctgccca

SEQ ID NO: 66958 - DNA, 600 bp, Chicken  19866894336091_2
acagggatggggcatcccatggttcttctaaacaggagaactgaaagcacctcaccatgacagtgacagctgctaaagtcaggcagataactgctgaagcggatgtaacactcaagtagtacacaggaggtgtggaagccaaggctcccttcatgggtactaccagttatgtgatatgcctgacacatccctcagattcaacttcacattcagcagatgtcctggatcagctaaagctctgaaaactatggagattgagctcagtcctcmaactgtgagattctaggtgctgtgccccartccaagtgcaaaccccaaagcatscaggcagctgtggtgaccttacttgccagcctcrgggagatattcttccttatttttatctagtgtgggtgggaaaaggtttctttcatagcctgccatrctcccttccccagacagccagcagtgcctcacattttagccagcacctttcagtgaggagcaccgtttcaagcctgcctgtgcctcatgcgtgtagagccakctgtttttaacagagcataacaggcaggctcttccccctgcccagtgttctgtacatgccgaatctggcccacg

SEQ ID NO: 66959 - DNA, 600 bp, Chicken  19866894336091_3
cttctaaacaggagaactgaaagcacctcaccatgacagtgacagctgctaaagtcaggcagataactgctgaagcggatgtaacactcaagtagtacacaggaggtgtggaagccaaggctcccttcatgggtactaccagttatgtgatatgcctgacacatccctcagattcaacttcacattcagcagatgtcctggatcagctaaagctctgaaaactatggagattgagctcagtcctcmaactgtgagattctaggtgctgtgccccartccaagtgcaaaccccaaagcatscaggcagctgtggtgaccttacttgccagcctcrgggagatattcttccttatttttatctagtgtgggtgggaaaaggtttctttcatagcctgccatrctcccttccccagacagccagcagtgcctcacattttagccagcacctttcagtgaggagcaccgtttcaagcctgcctgtgcctcatgcgtgtagagccakctgtttttaacagagcataacaggcaggctcttccccctgcccagtgttctgtacatgccgaatctggcccacgagaaagcttttgaactcagacaca

SEQ ID NO: 66960 - DNA, 600 bp, Chicken  19866894336091_4
gacagtgacagctgctaaagtcaggcagataactgctgaagcggatgtaacactcaagtagtacacaggaggtgtggaagccaaggctcccttcatgggtactaccagttatgtgatatgcctgacacatccctcagattcaacttcacattcagcagatgtcctggatcagctaaagctctgaaaactatggagattgagctcagtcctcmaactgtgagattctaggtgctgtgccccartccaagtgcaaaccccaaagcatscaggcagctgtggtgaccttacttgccagcctcrgggagatattcttccttatttttatctagtgtgggtgggaaaaggtttctttcatagcctgccatrctcccttccccagacagccagcagtgcctcacattttagccagcacctttcagtgaggagcaccgtttcaagcctgcctgtgcctcatgcgtgtagagccakctgtttttaacagagcataacaggcaggctcttccccctgcccagtgttctgtacatgccgaatctggcccacgagaaagcttttgaactcagacacagaagctgtcctcttccacagccactggcacttca

SEQ ID NO: 66961 - DNA, 600 bp, Chicken  19866894336091_5
aggaggtgtggaagccaaggctcccttcatgggtactaccagttatgtgatatgcctgacacatccctcagattcaacttcacattcagcagatgtcctggatcagctaaagctctgaaaactatggagattgagctcagtcctcmaactgtgagattctaggtgctgtgccccartccaagtgcaaaccccaaagcatscaggcagctgtggtgaccttacttgccagcctcrgggagatattcttccttatttttatctagtgtgggtgggaaaaggtttctttcatagcctgccatrctcccttccccagacagccagcagtgcctcacattttagccagcacctttcagtgaggagcaccgtttcaagcctgcctgtgcctcatgcgtgtagagccakctgtttttaacagagcataacaggcaggctcttccccctgcccagtgttctgtacatgccgaatctggcccacgagaaagcttttgaactcagacacagaagctgtcctcttccacagccactggcacttcagccttgcagcacgcagctgtatgccccatcggggggcccttcctcagtggccctgccagcatagtc

SEQ ID NO: 66962 - DNA, 600 bp, Chicken  19866894336091_6
tcagctaaagctctgaaaactatggagattgagctcagtcctcmaactgtgagattctaggtgctgtgccccartccaagtgcaaaccccaaagcatscaggcagctgtggtgaccttacttgccagcctcrgggagatattcttccttatttttatctagtgtgggtgggaaaaggtttctttcatagcctgccatrctcccttccccagacagccagcagtgcctcacattttagccagcacctttcagtgaggagcaccgtttcaagcctgcctgtgcctcatgcgtgtagagccakctgtttttaacagagcataacaggcaggctcttccccctgcccagtgttctgtacatgccgaatctggcccacgagaaagcttttgaactcagacacagaagctgtcctcttccacagccactggcacttcagccttgcagcacgcagctgtatgccccatcggggggcccttcctcagtggccctgccagcatagtcttgcctcagggctggctcagccatgcctcctgactgctcctcgctcatttccaaggcagaactcggggacttgctggcactgcaaagcattcgtcatcatcc

SEQ ID NO: 66963 - DNA, 600 bp, Chicken  19866894336102_1
ctcagcactcaggatcctgaatgctcagaacctagggagagcagaagccttaagaaaccctgccacaagcagtcctgaagcaggtagcaccctccaaaatgatgcagaaaaggacagcatttaccctatcttgcacacagagaaagtgattttccccaagccacagacagaaggaacatgaaaactgaggctgtgatctcagagaagatcctgactctcaatctcctgtttgcctcgttcgatcacaccttcccttgcatccacacctacacatgtataccatagacaaactgtctcttyttgcactggataacatttttaatccraaaatctcaacacgaacagcttgtcagtaataacagtgcacacctaagagtattagccagtagcaactgaactagggctgctcatgactgaaagcacggaggtactgcaatactttgaagaaaagcagatatattaatgaacttcaaaaacagaaagaatgttcctggcacttaccacccccgtatctaacacccattcctagcacagtaatggaacaaatgttgcaagcraaaacatgctcattctgtgaccagaagagctaatgaagctcat

SEQ ID NO: 66964 - DNA, 600 bp, Chicken  19866894336102_2
agaacctagggagagcagaagccttaagaaaccctgccacaagcagtcctgaagcaggtagcaccctccaaaatgatgcagaaaaggacagcatttaccctatcttgcacacagagaaagtgattttccccaagccacagacagaaggaacatgaaaactgaggctgtgatctcagagaagatcctgactctcaatctcctgtttgcctcgttcgatcacaccttcccttgcatccacacctacacatgtataccatagacaaactgtctcttyttgcactggataacatttttaatccraaaatctcaacacgaacagcttgtcagtaataacagtgcacacctaagagtattagccagtagcaactgaactagggctgctcatgactgaaagcacggaggtactgcaatactttgaagaaaagcagatatattaatgaacttcaaaaacagaaagaatgttcctggcacttaccacccccgtatctaacacccattcctagcacagtaatggaacaaatgttgcaagcraaaacatgctcattctgtgaccagaagagctaatgaagctcatttcctgtgaatctgtctcggggttga

SEQ ID NO: 66965 - DNA, 600 bp, Chicken  19866894336102_3
catccacacctacacatgtataccatagacaaactgtctcttyttgcactggataacatttttaatccraaaatctcaacacgaacagcttgtcagtaataacagtgcacacctaagagtattagccagtagcaactgaactagggctgctcatgactgaaagcacggaggtactgcaatactttgaagaaaagcagatatattaatgaacttcaaaaacagaaagaatgttcctggcacttaccacccccgtatctaacacccattcctagcacagtaatggaacaaatgttgcaagcraaaacatgctcattctgtgaccagaagagctaatgaagctcatttcctgtgaatctgtctcggggttgaatcttacagtttcttatataaagcatgtgccaaattatgctttcattcataggtttgaggcattcttgtgyggattgtgtggattttctgctgtataattaggagtggcccaatgctgcagctttgcctgaatgagaacggtagctgagtacccatctcagattcatagcactttactttcatgacatttgtagaaaatatagctttgagatttctatatcatggtaattt

SEQ ID NO: 66966 - DNA, 600 bp, Chicken  19866894336102_4
ctagggctgctcatgactgaaagcacggaggtactgcaatactttgaagaaaagcagatatattaatgaacttcaaaaacagaaagaatgttcctggcacttaccacccccgtatctaacacccattcctagcacagtaatggaacaaatgttgcaagcraaaacatgctcattctgtgaccagaagagctaatgaagctcatttcctgtgaatctgtctcggggttgaatcttacagtttcttatataaagcatgtgccaaattatgctttcattcataggtttgaggcattcttgtgyggattgtgtggattttctgctgtataattaggagtggcccaatgctgcagctttgcctgaatgagaacggtagctgagtacccatctcagattcatagcactttactttcatgacatttgtagaaaatatagctttgagatttctatatcatggtaatttgggttaagttgaatcagcaggcctgaaagcagtgagagactcagcagcatatgagaactgacaaatgtacacacacatactgcacaaagaactgcgcggttatgcagacagctcctaatcattaatgctggaaactgaga

SEQ ID NO: 66967 - DNA, 600 bp, Chicken  19866894336113_1
atggggatctgtctgtgcagccacccgttgccagcccagcactgatagctgtgctggaaattctgcattgcagtcttctctctcgctcccatttccctcatttcacccatttatcagaggtttataacccaacgcaaacacttgcctgcttccctttccctacaggcggagcccgggcaggtatcttctctatttatagtgagagcaatcttttaaagagattaagtgcaattgcaggttaatcgccgataaggttatgaggaaagtaaaaccaaataagcaggtttggggattagatcygggcctaaaagaaattgcaagataaatggaaagtccctttaagtggcatttaattataaagcttgaaataaaatggagcgtttcaatctcggaacccggaggtctcagccagcacaacacccttctaagtccacgaatcctttttctgcctatatgtttttttctgttgcatggatctgcttagagtcaaggctgcactcccgaccctgaatcccactcggtgtgagatggagctgagcaatgcctgctttgctctgctgggatggggcatctcagctgcagtcatttggaattaacacc

SEQ ID NO: 66968 - DNA, 600 bp, Chicken  19866894336117_1
ttccagtcactgtctgaggtctgtcattaatagcagatgtcttgacctcctgtgttccagcaaccaacaggttcattaaggagtgtcagtagtttacccaaggctgaactagcttgatgcacaaaggccacctgcccatacacaacagcaagctattgtgcaatatggccagctacaccttatacttgggttatctgcaccagaaattgttgctgggtgacaatttgttctgcagcagtagccccttatcagaaattactgactttggcagaaataactgtctggggaagcacaaaggargaagcttcatttgactcgttggggtacaatcataggaaaaaaatcttaagtgttgcagggctgggtgtttggtcctgagccacgtgcttaagcaagaygactactagtgccatgagcacttctgctgcctgaagggctgcagagcaaaaagcaacagagctaagcagagacactggggagggaaatggaaagaaagtatgggtgaaaagatcagaggtcttggcraagtgcaacacagcttgagttctccagtagatgtaaggacataactactagagagcaargaagggctatgaagat

SEQ ID NO: 66969 - DNA, 539 bp, Chicken  19866894336117_2
caaggctgaactagcttgatgcacaaaggccacctgcccatacacaacagcaagctattgtgcaatatggccagctacaccttatacttgggttatctgcaccagaaattgttgctgggtgacaatttgttctgcagcagtagccccttatcagaaattactgactttggcagaaataactgtctggggaagcacaaaggargaagcttcatttgactcgttggggtacaatcataggaaaaaaatcttaagtgttgcagggctgggtgtttggtcctgagccacgtgcttaagcaagaygactactagtgccatgagcacttctgctgcctgaagggctgcagagcaaaaagcaacagagctaagcagagacactggggagggaaatggaaagaaagtatgggtgaaaagatcagaggtcttggcraagtgcaacacagcttgagttctccagtagatgtaaggacataactactagagagcaargaagggctatgaagatggggaaagatctggagggcaagttgtgtgaggagcag

SEQ ID NO: 66970 - DNA, 412 bp, Chicken  19866894336117_3
tgttctgcagcagtagccccttatcagaaattactgactttggcagaaataactgtctggggaagcacaaaggargaagcttcatttgactcgttggggtacaatcataggaaaaaaatcttaagtgttgcagggctgggtgtttggtcctgagccacgtgcttaagcaagaygactactagtgccatgagcacttctgctgcctgaagggctgcagagcaaaaagcaacagagctaagcagagacactggggagggaaatggaaagaaagtatgggtgaaaagatcagaggtcttggcraagtgcaacacagcttgagttctccagtagatgtaaggacataactactagagagcaargaagggctatgaagatggggaaagatctggagggcaagttgtgtgaggagcag

SEQ ID NO: 66971 - DNA, 353 bp, Chicken  19866894336117_4
gggaagcacaaaggargaagcttcatttgactcgttggggtacaatcataggaaaaaaatcttaagtgttgcagggctgggtgtttggtcctgagccacgtgcttaagcaagaygactactagtgccatgagcacttctgctgcctgaagggctgcagagcaaaaagcaacagagctaagcagagacactggggagggaaatggaaagaaagtatgggtgaaaagatcagaggtcttggcraagtgcaacacagcttgagttctccagtagatgtaaggacataactactagagagcaargaagggctatgaagatggggaaagatctggagggcaagttgtgtgaggagcag

SEQ ID NO: 66972 - DNA, 599 bp, Chicken  19866894336119_1
  misc_feature (1)..(219): n is any nucleotide
nnnnnnnnnnnnnnnnnnnnnnnnnnnnnnnnnnnnnnnnnnnnnnnnnnnnnnnnnnnnnnnnnnnnnnnnnnnnnnnnnnnnnnnnnnnnnnnnnnnnnnnnnnnnnnnnnnnnnnnnnnnnnnnnnnnnnnnnnnnnnnnnnnnnnnnnnnnnnnnnnnnnnnnnnnnnnnnnnnnnnnnnnnnnnnnnnnnnnnnnnnnnnnnnnnnnnnnnnnncctcctgggaaggactgccatggaaataggggcttcaagagggtgttgacagcattaactcactcaagagggagcccagcrctttgctggatgtaatgactcaaatcacagcctttcccaatcaccttttcctaaccctwctccggaaaggatttaatttcttcagtgcagagacccaaccttctggaaagacctcatggcaacgtcctgctgttacaataatgctgaaaaccyacactgccaaatgccatcgctgtaccaaggtctgcttttgtgcgcatcaggccttggtttgygcccctgtctgttggcactgcttccrtctgcaattaatttgtgtaaactggaaaaaataaagataaattatctgtgctgccaca

SEQ ID NO: 66973 - DNA, 599 bp, Chicken  19866894336119_2
  misc_feature (1)..(160): n is any nucleotide
nnnnnnnnnnnnnnnnnnnnnnnnnnnnnnnnnnnnnnnnnnnnnnnnnnnnnnnnnnnnnnnnnnnnnnnnnnnnnnnnnnnnnnnnnnnnnnnnnnnnnnnnnnnnnnnnnnnnnnnnnnnnnnnnnnnnnnnnnnnnnnnnnnnnnnnnnnnnnnnncctcctgggaaggactgccatggaaataggggcttcaagagggtgttgacagcattaactcactcaagagggagcccagcrctttgctggatgtaatgactcaaatcacagcctttcccaatcaccttttcctaaccctwctccggaaaggatttaatttcttcagtgcagagacccaaccttctggaaagacctcatggcaacgtcctgctgttacaataatgctgaaaaccyacactgccaaatgccatcgctgtaccaaggtctgcttttgtgcgcatcaggccttggtttgygcccctgtctgttggcactgcttccrtctgcaattaatttgtgtaaactggaaaaaataaagataaattatctgtgctgccacagcttaatattgcaatgtggggaggaactgccacattttcacagtaaactgaggaatgtt

SEQ ID NO: 66974 - DNA, 599 bp, Chicken  19866894336119_3
  misc_feature (1)..(66): n is any nucleotide
nnnnnnnnnnnnnnnnnnnnnnnnnnnnnnnnnnnnnnnnnnnnnnnnnnnnnnnnnnnnnnnnnncctcctgggaaggactgccatggaaataggggcttcaagagggtgttgacagcattaactcactcaagagggagcccagcrctttgctggatgtaatgactcaaatcacagcctttcccaatcaccttttcctaaccctwctccggaaaggatttaatttcttcagtgcagagacccaaccttctggaaagacctcatggcaacgtcctgctgttacaataatgctgaaaaccyacactgccaaatgccatcgctgtaccaaggtctgcttttgtgcgcatcaggccttggtttgygcccctgtctgttggcactgcttccrtctgcaattaatttgtgtaaactggaaaaaataaagataaattatctgtgctgccacagcttaatattgcaatgtggggaggaactgccacattttcacagtaaactgaggaatgttccaaacttctgaagttcagacccccagagagattgttggattttaattgctaccttaatcaacatttattagtgctaaccaaagctcctcgtgg

SEQ ID NO: 66975 - DNA, 599 bp, Chicken  19866894336119_4
  misc_feature (1)..(4): n is any nucleotide
nnnncctcctgggaaggactgccatggaaataggggcttcaagagggtgttgacagcattaactcactcaagagggagcccagcrctttgctggatgtaatgactcaaatcacagcctttcccaatcaccttttcctaaccctwctccggaaaggatttaatttcttcagtgcagagacccaaccttctggaaagacctcatggcaacgtcctgctgttacaataatgctgaaaaccyacactgccaaatgccatcgctgtaccaaggtctgcttttgtgcgcatcaggccttggtttgygcccctgtctgttggcactgcttccrtctgcaattaatttgtgtaaactggaaaaaataaagataaattatctgtgctgccacagcttaatattgcaatgtggggaggaactgccacattttcacagtaaactgaggaatgttccaaacttctgaagttcagacccccagagagattgttggattttaattgctaccttaatcaacatttattagtgctaaccaaagctcctcgtggatttaaaattcaacccatttgtcaactactaattattttaagtagacaagctgttattttac

SEQ ID NO: 66976 - DNA, 600 bp, Chicken  19866894336119_5
gaaataggggcttcaagagggtgttgacagcattaactcactcaagagggagcccagcrctttgctggatgtaatgactcaaatcacagcctttcccaatcaccttttcctaaccctwctccggaaaggatttaatttcttcagtgcagagacccaaccttctggaaagacctcatggcaacgtcctgctgttacaataatgctgaaaaccyacactgccaaatgccatcgctgtaccaaggtctgcttttgtgcgcatcaggccttggtttgygcccctgtctgttggcactgcttccrtctgcaattaatttgtgtaaactggaaaaaataaagataaattatctgtgctgccacagcttaatattgcaatgtggggaggaactgccacattttcacagtaaactgaggaatgttccaaacttctgaagttcagacccccagagagattgttggattttaattgctaccttaatcaacatttattagtgctaaccaaagctcctcgtggatttaaaattcaacccatttgtcaactactaattattttaagtagacaagctgttattttaccagctatattaaatgtgacttttcagc

SEQ ID NO: 66977 - DNA, 599 bp, Chicken  19866894336120_1
  misc_feature (1)..(61): n is any nucleotide
nnnnnnnnnnnnnnnnnnnnnnnnnnnnnnnnnnnnnnnnnnnnnnnnnnnnnnnnnnnnnagacagaaatgaagacctttcattttgatgagcatgacctgaatttctgggatgcacttgaaagctcatagagtgactgtttagctttggtctgataaatgtatcccagaacagtctggaaaagagaattggaacagtggtgcttcctgcgtgagatcttggtgttgatacaggcacgaagatgaacagctgaatattttccatctgagaaggtgatgtctaatgatctatcattgctyctagtgccttttgtctatcaaaaatctgagcatccgttttcactggcagtttgttaccgtgtgcgccctttgccaattagattatattaccactaagctgtggtacgtamagcatcaatatttcactttaagtgtctgccacaagagtgcagtgttggtgtaataagctgagagcgtgagcttctggtagcctaattcttccatccaaatgtacacaaagtactgygagagaagttcacgtgcggtgcaacaaatatcctgggagttcagctggattaagggataaaaatggggctggt

SEQ ID NO: 66978 - DNA, 600 bp, Chicken  19866894336120_2
ggatgcacttgaaagctcatagagtgactgtttagctttggtctgataaatgtatcccagaacagtctggaaaagagaattggaacagtggtgcttcctgcgtgagatcttggtgttgatacaggcacgaagatgaacagctgaatattttccatctgagaaggtgatgtctaatgatctatcattgctyctagtgccttttgtctatcaaaaatctgagcatccgttttcactggcagtttgttaccgtgtgcgccctttgccaattagattatattaccactaagctgtggtacgtamagcatcaatatttcactttaagtgtctgccacaagagtgcagtgttggtgtaataagctgagagcgtgagcttctggtagcctaattcttccatccaaatgtacacaaagtactgygagagaagttcacgtgcggtgcaacaaatatcctgggagttcagctggattaagggataaaaatggggctggtgcttactttcaggtgccgagttataagttttagagacaattgaaatgactgcggaatctgtgtggaattgcaaggagcttatataaattcttccacactgcactgatgatc

SEQ ID NO: 66979 - DNA, 557 bp, Chicken  19866894336120_3
tgatacaggcacgaagatgaacagctgaatattttccatctgagaaggtgatgtctaatgatctatcattgctyctagtgccttttgtctatcaaaaatctgagcatccgttttcactggcagtttgttaccgtgtgcgccctttgccaattagattatattaccactaagctgtggtacgtamagcatcaatatttcactttaagtgtctgccacaagagtgcagtgttggtgtaataagctgagagcgtgagcttctggtagcctaattcttccatccaaatgtacacaaagtactgygagagaagttcacgtgcggtgcaacaaatatcctgggagttcagctggattaagggataaaaatggggctggtgcttactttcaggtgccgagttataagttttagagacaattgaaatgactgcggaatctgtgtggaattgcaaggagcttatataaattcttccacactgcactgatgatccaaatgtttgctccgatattcactggcacaagtcagtgaaatcagtgaattagtgaaatctccctgagagtat

SEQ ID NO: 66980 - DNA, 600 bp, Chicken  19866894336124_1
gtttttagggtgggagaccccctgaaaactttagaaagctcaatggggataaacaggaaaaatttaaaaagtatttagacttattcccaaatctctcagaaaaacaggcaggagcattcaatgtttctaacaagttcttgcttaaaatgagggagtcctgttaatggtaactaaacaaccagctcttccaacatgaagtaaaatactgaatgtgcgagaagaaaataaccatcataaaattaaaataggaactatgactataaagggatttaagagctgttatttccaaatcacagaatraacagcacaacakttgaytgaaacacctgtatgcacaaaacatcttcaaattaagaaaagagtacatcacctaccttgccaatctttacagtttctgaatgttcaaaggccagagccagctgttcccaagttggggccaaagccttgcagtgaccacaccaaggggcaaagaatttgatgaagtgattacctttgaagtcaaagacaaagaaaaagatttaactcttttggaattaatttggctgccattaaaggctaggtattaatctctgtctgcaaatttatcatggtatttcctgg

SEQ ID NO: 66981 - DNA, 600 bp, Chicken  19866894336124_2
gagaccccctgaaaactttagaaagctcaatggggataaacaggaaaaatttaaaaagtatttagacttattcccaaatctctcagaaaaacaggcaggagcattcaatgtttctaacaagttcttgcttaaaatgagggagtcctgttaatggtaactaaacaaccagctcttccaacatgaagtaaaatactgaatgtgcgagaagaaaataaccatcataaaattaaaataggaactatgactataaagggatttaagagctgttatttccaaatcacagaatraacagcacaacakttgaytgaaacacctgtatgcacaaaacatcttcaaattaagaaaagagtacatcacctaccttgccaatctttacagtttctgaatgttcaaaggccagagccagctgttcccaagttggggccaaagccttgcagtgaccacaccaaggggcaaagaatttgatgaagtgattacctttgaagtcaaagacaaagaaaaagatttaactcttttggaattaatttggctgccattaaaggctaggtattaatctctgtctgcaaatttatcatggtatttcctgggttaaagataggc

SEQ ID NO: 66982 - DNA, 600 bp, Chicken  19866894336124_3
cccctgaaaactttagaaagctcaatggggataaacaggaaaaatttaaaaagtatttagacttattcccaaatctctcagaaaaacaggcaggagcattcaatgtttctaacaagttcttgcttaaaatgagggagtcctgttaatggtaactaaacaaccagctcttccaacatgaagtaaaatactgaatgtgcgagaagaaaataaccatcataaaattaaaataggaactatgactataaagggatttaagagctgttatttccaaatcacagaatraacagcacaacakttgaytgaaacacctgtatgcacaaaacatcttcaaattaagaaaagagtacatcacctaccttgccaatctttacagtttctgaatgttcaaaggccagagccagctgttcccaagttggggccaaagccttgcagtgaccacaccaaggggcaaagaatttgatgaagtgattacctttgaagtcaaagacaaagaaaaagatttaactcttttggaattaatttggctgccattaaaggctaggtattaatctctgtctgcaaatttatcatggtatttcctgggttaaagataggcaacac

SEQ ID NO: 66983 - DNA, 600 bp, Chicken  19866894336124_4
ttgccaatctttacagtttctgaatgttcaaaggccagagccagctgttcccaagttggggccaaagccttgcagtgaccacaccaaggggcaaagaatttgatgaagtgattacctttgaagtcaaagacaaagaaaaagatttaactcttttggaattaatttggctgccattaaaggctaggtattaatctctgtctgcaaatttatcatggtatttcctgggttaaagataggcaacactgtgaataaaaagccagggcagaatatttcagcaattaggttttcaaagctgtatgyggtctctcagtgttgccaatttccctgaagatccaaacagctttacaacctcaagccaacaaatgaggtattagaactatggcacttttaacctaacagttttctaaaatacctaattctagaagtcaatcacttgtcctattacagagtagaaagaaccaaggcatatgtatttataacagcataaatcaaagtataaattggacttcaacttaaagatttctaggcaaacacaactgcattgtgtccctgagctaagtaattttcttcattatataactctatttctacctttcaaaa

SEQ ID NO: 66984 - DNA, 599 bp, Chicken  19866894336130_1
  misc_feature (1)..(26): n is any nucleotide
nnnnnnnnnnnnnnnnnnnnnnnnnnatccttgagccttctgctcatctttgttatttgtcatttcgactttcttcctcagaaactctaaaatttttacaaaactgaagtttttccatgtggatgttgattttgatgttgagagaagttcacttgtcacttcttaacctctgtactcagttgtgctctgaaatctatctagatgcactagatcctacctattagagtccaatcacagtaggatttgtttttaagcaagtgttatatgattcatctttcttaaacaagtttacagcacttyataaaccttgattattctttgcttgttaatattaattagatcattaagcatcctgtaccatcaatgattatcatgcttcgttagcattgttgtttcgaactgagtgccaataaagcgtttggtcacgatgaattgcaatatcggtatttttagaaacattcgaatttgctgccttatttactaaaaggaccaagactctgtctcaataagacacaactgaagttcaaattctttacagatttcagatgcttttcctgtgaaagatgagaccataagattcgagtcatgtttgtgtaata

SEQ ID NO: 66985 - DNA, 600 bp, Chicken  19866894336139_1
tgatgtaaaccagccatccttatttaagaaattagaatagtagactggggcattcacttatgtgccattcttaaaacacaggattcctaaattagtgaaatggtccgcaagaatttaagcagtgatacttacatattacataccttttatatagatacatttaaggcaacacgctcatttacagacttaatttcttcttgttttctctgcggtcaaagatcaggttgcgtgtttactgaattgcttcccatatcaatttcatcactcaagcaatgagttataagtagaatactggagaargtgcttacagccaagttagagtctcaaagttacttttagtaaacactcttgtctgcgttaattttaagtcagaagcaaaacagtctaagggtactgtggtggattcatgtgtatttcatttaataactgaggtcccgtgaaacaaatctgatgggcactgtagccagtacaaactagtacagtccacttcttcatttaggtaattttctactttatttttttgttaactagatttgtttaaaagtgtatgctaatctacaagcttgtcagtttaatgtcagaatgctattaaaatagtga

SEQ ID NO: 66986 - DNA, 600 bp, Chicken  19866894336140_1
acactatcacattgatgtgatattttacctccactttgcattgttatagtaatgattccaggttcagggccctggttaataaaatgtcatagccttttccactggagctgattttgtgatcttttagctctctactgttgtgggttgaagagagtgatgtacccaagactggtgcattctaaggcctcaaattgcctatcatctgcttaactagaaacatcaccttaaatttaaggaaatgatagaggaaagtgggtgacaggttaggtttggtaaagggactagataataaaaaaatcwgaaggtgaacaaatgatttgaaatataatacttagctgtatgttattggtatatgctgtaaattaattgctatgtagtacataatttcattaagtcatgtttgtccaacatatagatctctatgcatgctatgaaactaataaagggagggaaacacactgatttagatgtacagacacacaaaaagatcaggttgagtgcctttatacaaatacctaggaaaagttgtttggaatatttatgctaagctattagtcacctttccaaatattcatttagattctaggctcttagaggagg

SEQ ID NO: 66987 - DNA, 600 bp, Chicken  19866894336141_1
aaaagtatttagcacctagttttctaagagtacaatagccccaattattaataaaaaaatattttcattcaagatgagagtgaactctgtttatctcttttatcacaaaatgtaacacaacacaagggaactctctgcgagcagaaaatcgctacttttgtaaaatagattttcagatctggattgatgttccatgggaaattctcctgcagttcttgtgttaagtggcattctgcagaactgtaatttaagcttttcatcttttctttgcaaaaaatgataatgtcttgtgttggcatrtagtggatgaaagtgagaattgcgcaacatgcaaagataaaattatttctggagagtagagcagagcagataaaccattttactgcatcttttctgtgtttttggagagatcagttattgtactcaagttatacatttggatacactgaaagtgatgatatataggagtaattagcaacatcctacattataccaggtagcaaatgtcatcttgctcttgcatcgttgttttcagtagtgcttatttgagtttgattctttggacttcatatacaggagttatcacttttccttcgatat

SEQ ID NO: 66988 - DNA, 600 bp, Chicken  19866894336145_1
cttttgcctctttctttccattctcttcagactttgaaaagctctgggtgaactttctcttagctccaaattctgacatgtctgacatggcctcctcttcacatgcctccacgtgatgagatctgactcgactctgtgtagatgacccaggggattcagagtcaaaggatggttctggtgtttggctgaaaaaatgcagttctgggcttttttcaccagaacttgtctcactgaccctcgatcttgtgaacttatacatctttttgtcctcttttgccgaggcagaggaaaatcttgacrtggttctcagtgaatctccttttgactcataggaagaactgtcaagctcttctctttgggatctggagactctgtaactggatgtttcagaatccatctctcttactttggatgatctgctgtatttctctctgaaattctcactctgatcgtggtatgatgatggtttttctgctttcaggccactgagccacttggtaacatcagtctctacttccgacttcagtgcacctgtgtttgcagatagactggacagagtaaagattgtatcatttctgtctagatctgcttgcaatgggt

SEQ ID NO: 66989 - DNA, 599 bp, Chicken  19866894336147_1
  misc_feature (1)..(43): n is any nucleotide
nnnnnnnnnnnnnnnnnnnnnnnnnnnnnnnnnnnnnnnnnnnctgtttgggattctggcctcgctttcttcagaaccagaaatgacaaattgctatgtacatgtgtattttactaatccttctcaatatagccagctaattgggcgtagataaagcacgctgttgatcttgtttgaggtgtgagctgatgatttttctttggagtgaccaaaccccatccttgagaaatactgcagcagcgtttgttcagtagttaatttcatgcttgcatcatggccatattgcagcgtagtatcacrgaaataatgtggctaaacagtaagtttgcaagtatactaaaacacacagtccaatttcatcattgtctgatgaggatgtattatgctaaggcatccttactcaacactttacattgagaaatgttctagaaaatgaattcttcctgtttattattaaagccctctccttggcttaagttcatcagtaagaaatctataaaataaacacttttctgtttctatttatatattctataaccttttctccagaaaagtgtgataaaatatatgagcacagtaggtagtttyatggtgaacat

SEQ ID NO: 66990 - DNA, 600 bp, Chicken  19866894336147_2
cgtagtatcacrgaaataatgtggctaaacagtaagtttgcaagtatactaaaacacacagtccaatttcatcattgtctgatgaggatgtattatgctaaggcatccttactcaacactttacattgagaaatgttctagaaaatgaattcttcctgtttattattaaagccctctccttggcttaagttcatcagtaagaaatctataaaataaacacttttctgtttctatttatatattctataaccttttctccagaaaagtgtgataaaatatatgagcacagtaggtagtttyatggtgaacattactgaccccctgtaccttcctcatgtccttgcactgactttctgcattttgtgccacattttatcctgggcactgaggaggttgcctacagcaaacactcctcagagcaggagtggaaatgggtcatgggtctgtctacaataaagcagcctcctagagtcctgaaaaggctttctagaatcctagtgggtctatagagaaagtgaggattgagtggcatcagctgctccttacctgtgctctgtatgcagaccctggcagtgaggaggtgtgttcggtttgctttgg

SEQ ID NO: 66991 - DNA, 588 bp, Chicken  19866894336156_1
cggtagcggtctctagctagtctggcaaaaactgttgcttcttgctgcaaacgttatctcgccttcttaagttattccagctacagtgtcatctctttactttcttgcgtgcggcgaaggctcgtgctgtggcacttgtaattgtcaggcaaccggcggtcttgcagccggcaggaactcggcccattcatagtctttgcgtttgttccctcctactgaaacacatgtgaggatggttttaagctttgcctcttgagggcgtttaatggaaactgaaactccaggctgagagatgtgttktgagctgtggaaatactgagctgctccttctgcataactcccaaatggttgtgtttagcgatctctttatcctgttttattggagcttctttttctctggagtttttgttctccgtggtatattctactctaactgcttactggtaataactaacttcagaagtttgggtctgtctgtgggctatccagagatgggattgcgatgttatagctagaagctaggtatatggaagctatcttgtttatactgagaaactgtagcaactaatagtttgtctcaaactattc

SEQ ID NO: 66992 - DNA, 600 bp, Chicken  19866894336170_1
gtagatatgaatacttgggatttgaattcatgtgaaccatcatgcttcttgcttaagtgtttatatgacaaaaaggttctagtgtatgagcttgtatgtttcaaagaggcattatccagctacaagtaagactgtgaaaggccaaaccaataccttacatattactactactgtcactgaagctactactactttattttacagggaaagtgatccccagaaacaattgtgagcagtacttcagtccaaaaagctaaaacaagcaccactgcagacttttcttcctaagtttgtgttttrgatatccaaaactagcgtcagttccctgctcgatcacattaccgaatgtctggagtcttacctggttacagatcaatcaatgtctttcagattttctttgaactgcttttctgtcagtgtccagtaatcaaaatagatgaggaaaagtgtttgctgtaagttcatgatttgttacaattctggaattgtcaagatgggcaggaaagctcaggacagacatggcatcagaggggaaggacaatctcccatttcaagcgctgcgttcaggagattagatttcgattccttgctttgacacaa

SEQ ID NO: 66993 - DNA, 600 bp, Chicken  19866894336174_1
tatgttttgatgctatgtaaaaaagacaatagcactgaacttggaaaacaaatttagacatagagacttatctcagagtataaattggttttacaccattgaacatgttcatctgtctaaattaacatggtgctaaatgcaactttttatgataatacctagatcacatttgaaataaacattttaaatatctgtgccttgaattttctgtttgggaatgtgcagtttaatgttcacacttatatataggtagatataaacaatctgaccttcatctcacattgagagggaagataacasatgtgaattttttcagtgctacagccagtatccagggaactgcacatgaaaaaatcggaggtcttcactggtcacattggtagaaacaatctgaagaacagatttattatgcagtagttcataatagtataagatataaatacaatgtactgaggaagagttgggagctcaaatgtgttaaaagcaaaaactattagtgtgtgagtcactgagcttgtggctgatgtaaggtacatctacaatagaaaggggtcagggctgtaagtttgagcactggaccccctgaaggcctttaacaag

SEQ ID NO: 66994 - DNA, 600 bp, Chicken  19866894336178_1
agcttcttcacaagcatcaagaagggtccaaccaaggcttaaaatggttttgaaacttaaatagccaaataaacacacagacagatggtaaaaacccaagagacaacgtacagagctctatcatcactgcaagagagccaaactgaagagttttacaaacccattctttgtcccccccaaccccaaacatttccttcagagagagacctacgagttcacattagactcacgaaagggacgcagaggatctgaacggtcgttcctttgagacccactcactgaccccatctctgctccacrcctccctcccacagcaggccccgctttcagcacaggaccgcagctgctgccgagacctcaaccctgtgaggaggggccgggactgcatcctgcactgcgaccgccgccacaaaccccacccaggctgggctcacaccgctgcacgttgggtttgttctgagtaaagaccccctgaaaggtagtccaccagtggcagattaacgagcaacctgtgcttcatagcaaggagaagaacgttaccaacccccggatcccagccggccctgatggaagccacgcagcagcagcgcggcgctgagg

SEQ ID NO: 66995 - DNA, 599 bp, Chicken  19866894336181_1
  misc_feature (1)..(81): n is any nucleotide
nnnnnnnnnnnnnnnnnnnnnnnnnnnnnnnnnnnnnnnnnnnnnnnnnnnnnnnnnnnnnnnnnnnnnnnnnnnnnnnnnctcttttattagtttctacatgatctgccatgtgtggttgggttggagatcctgctctagcctgcagcctgttgccatggcttcagttacttttcagctctttggacctcagccatacacacgcatttgaggatggatcactttgaaaccaaaagtcttctatcaagagcacatctgagctctctttggtgcctcccatctaatgaaaccacggtcctygtgtgagctacgcccacagactgcatgaagcccaagcattaaatctgcaatcgatctgctttggcaaatcaagaacttggtatcacaagagtgaagttcaactctacagagcatgctctgtgggccccttgcaggacagaactcctctttgctgaacctggaaaaggcagaaagcttgccattggaactgagagcagaaaaggggtatttgcatggctcagctgctcttccatygtcccttagcaagtacacaggctctgtgtatatttagatcgtgtcactgctatgctacagatcgc

SEQ ID NO: 66996 - DNA, 539 bp, Chicken  19866894336181_2
agtcttctatcaagagcacatctgagctctctttggtgcctcccatctaatgaaaccacggtcctygtgtgagctacgcccacagactgcatgaagcccaagcattaaatctgcaatcgatctgctttggcaaatcaagaacttggtatcacaagagtgaagttcaactctacagagcatgctctgtgggccccttgcaggacagaactcctctttgctgaacctggaaaaggcagaaagcttgccattggaactgagagcagaaaaggggtatttgcatggctcagctgctcttccatygtcccttagcaagtacacaggctctgtgtatatttagatcgtgtcactgctatgctacagatcgctacatgcttctgtacagaggtgggaatgaaaagcaaaaccaccaaaaacagcacayagaagccactctgctcaaagcagcagcaggaaygcactggrtgctcactccaagaacttacccagaacaaagcagcacagcctgaagccagcccagcagcagaacctaacaaacacag

SEQ ID NO: 66997 - DNA, 418 bp, Chicken  19866894336181_3
ctgctttggcaaatcaagaacttggtatcacaagagtgaagttcaactctacagagcatgctctgtgggccccttgcaggacagaactcctctttgctgaacctggaaaaggcagaaagcttgccattggaactgagagcagaaaaggggtatttgcatggctcagctgctcttccatygtcccttagcaagtacacaggctctgtgtatatttagatcgtgtcactgctatgctacagatcgctacatgcttctgtacagaggtgggaatgaaaagcaaaaccaccaaaaacagcacayagaagccactctgctcaaagcagcagcaggaaygcactggrtgctcactccaagaacttacccagaacaaagcagcacagcctgaagccagcccagcagcagaacctaacaaacacag

SEQ ID NO: 66998 - DNA, 385 bp, Chicken  19866894336181_4
gagtgaagttcaactctacagagcatgctctgtgggccccttgcaggacagaactcctctttgctgaacctggaaaaggcagaaagcttgccattggaactgagagcagaaaaggggtatttgcatggctcagctgctcttccatygtcccttagcaagtacacaggctctgtgtatatttagatcgtgtcactgctatgctacagatcgctacatgcttctgtacagaggtgggaatgaaaagcaaaaccaccaaaaacagcacayagaagccactctgctcaaagcagcagcaggaaygcactggrtgctcactccaagaacttacccagaacaaagcagcacagcctgaagccagcccagcagcagaacctaacaaacacag

SEQ ID NO: 66999 - DNA, 377 bp, Chicken  19866894336181_5
ttcaactctacagagcatgctctgtgggccccttgcaggacagaactcctctttgctgaacctggaaaaggcagaaagcttgccattggaactgagagcagaaaaggggtatttgcatggctcagctgctcttccatygtcccttagcaagtacacaggctctgtgtatatttagatcgtgtcactgctatgctacagatcgctacatgcttctgtacagaggtgggaatgaaaagcaaaaccaccaaaaacagcacayagaagccactctgctcaaagcagcagcaggaaygcactggrtgctcactccaagaacttacccagaacaaagcagcacagcctgaagccagcccagcagcagaacctaacaaacacag

SEQ ID NO: 67000 - DNA, 600 bp, Chicken  19866894336185_1
tgcgagcagaaagcaggggggggctctgaccttcatcaaggggaaggatgtatggggtgccaagggcagtgcgggctcttccctgctccgggttctgccacctcccactggtgctctgggcacatccctgaccccactgagctctcatccttcttctcccatttgtctccatcagtgctgtgaagggtgggtcccacttggagcacatgaggggtggggtgccactgggctcccctgcccacaggtgcttcgttaatagaaatcttaatgattgctgctagagaggatgtgccatgagaygaaaaatgttcgtctgctcagaggcagttcaaatggcagtggagaagggaggccatgatttgtttcaaattggttatttcactgcagtggtgggaaagcatcaatttgagcgtctcttctcccttcttgtttctgtcagctgctccctggctgtaatgaattgggctcggctgtgatttttatgatgtgagcggtgcccagaataaaggctgaaccaagctggggctctgggcacccacctgagctgcatttggaacccccagccccttctccagctgtttgggggtggtgggagcrctg

SEQ ID NO: 67001 - DNA, 574 bp, Chicken  19866894336185_2
gaygaaaaatgttcgtctgctcagaggcagttcaaatggcagtggagaagggaggccatgatttgtttcaaattggttatttcactgcagtggtgggaaagcatcaatttgagcgtctcttctcccttcttgtttctgtcagctgctccctggctgtaatgaattgggctcggctgtgatttttatgatgtgagcggtgcccagaataaaggctgaaccaagctggggctctgggcacccacctgagctgcatttggaacccccagccccttctccagctgtttgggggtggtgggagcrctgcagccctgggctgggggtggtggggcactcggtgctgtcccccctctgccagctttgacacagcgcccgtctgggctgttcccgcacactgcagcgatgtcagctgggttcaccccaaggctcagtccctgccacatcgagtcaggcagcaggagctgtgatgagggaaggaggcggcatcctgtgaggctgcagaggttgggatgtgggtccctgtgtgggcagctcaggggctcccgttgcttcccggccccttgtgctgctctctggg

SEQ ID NO: 67002 - DNA, 600 bp, Chicken  19866894336188_1
tctcacaggctgagagcacgatggaaatgtaaaagggaatgttggaaataatggtcaaacattaatggaaacggtcgattgctgcattttgctatgtggagagcagattgctgaagaggctgagcaccagaaggcagcagggtggtggtagatgagctctcaaggcttgccctacctgcagaatgggtttcctcgcccagcgtggttctctgctgagcccccagcagactgccagccatctcctgcttggcccaatgtctttcagtgcgatagcagcaatgcagggcctggggacagcaygctatggagcccgtgggtgctggcagcacagggctgatggcaccaacctgcctcaaaaaggttaggaattgcaattttgagatatccgtgagaactttcttctgataaagctcagctgtctcattgcagtgagagccgtctgtcagagagggcatgctgggactgctgctgaggcagtgataccgtgggtatgggtggaggtttgctgtttaggattgccatggaagcggtgctcgctgatccctgctgcaatcactgtgtagctgtgtcaacaattgtttaaatacagggctaaactaa

SEQ ID NO: 67003 - DNA, 600 bp, Chicken  19866894336197_1
ttaattcccagagccattgggaagagaagccattcatttaagaaaacagcagttctttctttcctcaaagcagctcattttattagctgcttcattttttttttaggtgtgttcaagtataacagagtcagcatgaccctaatgtttcatgtgtgcaggaaagccctacaggagaaagacaggctgtggctgcttcgagagcaaagacgaaagaagaaactgcgcaaactgctgaagagaataaaaaacaatgacacatgcagtatgcctggcctgacctgcttcacccatgacaaccarcactggcaaactgcgcccctgtggacatgtaaggatacatctgggtgcagtatactggctaggatgagttaggattctggaagttactcatatcatcagttaagtagccaaaggcacatagttttcctcctactaaataatctgtgtttcagtgttggcattttccttacagcaggcaaaggagaaaaaacagcaacctaaaaacccaaactgtgtttgaatacytacagctattgcataaacgacagtasggagtacagttgtctcagcagctggaatgtttcctagccagtgaggaca

SEQ ID NO: 67004 - DNA, 600 bp, Chicken  19866894336197_2
aaactgctgaagagaataaaaaacaatgacacatgcagtatgcctggcctgacctgcttcacccatgacaaccarcactggcaaactgcgcccctgtggacatgtaaggatacatctgggtgcagtatactggctaggatgagttaggattctggaagttactcatatcatcagttaagtagccaaaggcacatagttttcctcctactaaataatctgtgtttcagtgttggcattttccttacagcaggcaaaggagaaaaaacagcaacctaaaaacccaaactgtgtttgaatacytacagctattgcataaacgacagtasggagtacagttgtctcagcagctggaatgtttcctagccagtgaggacagggaaaaacaactagccagacactgctcaaattagctgtattctgaaagctaggtatgcaaagaacaagaagctgatggtgaaaggcattctctgctttagaattcaagaatgacagagtaactgcctgtgagtaaagcagtgccatgaacaaaaaagtactaaaataagcagtgcctaaaactggcaacatgtagcttatgtctttgtgttttcatttgtagtg

SEQ ID NO: 67005 - DNA, 600 bp, Chicken  19866894336197_3
tgacacatgcagtatgcctggcctgacctgcttcacccatgacaaccarcactggcaaactgcgcccctgtggacatgtaaggatacatctgggtgcagtatactggctaggatgagttaggattctggaagttactcatatcatcagttaagtagccaaaggcacatagttttcctcctactaaataatctgtgtttcagtgttggcattttccttacagcaggcaaaggagaaaaaacagcaacctaaaaacccaaactgtgtttgaatacytacagctattgcataaacgacagtasggagtacagttgtctcagcagctggaatgtttcctagccagtgaggacagggaaaaacaactagccagacactgctcaaattagctgtattctgaaagctaggtatgcaaagaacaagaagctgatggtgaaaggcattctctgctttagaattcaagaatgacagagtaactgcctgtgagtaaagcagtgccatgaacaaaaaagtactaaaataagcagtgcctaaaactggcaacatgtagcttatgtctttgtgttttcatttgtagtgggtcctttctgtgcttgtaccagtgc

SEQ ID NO: 67006 - DNA, 599 bp, Chicken  19866894336198_1
  misc_feature (1)..(24): n is any nucleotide
nnnnnnnnnnnnnnnnnnnnnnnncaggtacattgcatgcacctgagctcatttgggttggccctgccttccaccaggtgctcaatcactgtttcaggctgtgtcttagcgtttctgctacactgtgttagctgctgttcacatactgctagtacaaattgcttcgtttgctattctgttcacagctctcacttcagactgcatccaaccacttgcatttcttaactcttccaaacaggtgggtggatgtgcttgtcctttgtgtgcaatgcatctgcccgttctctgcttttaaatgcrtctgcaatggaaggcacttggcttgctttaggcagtttcaatacttcatgagcctctgccttaagaaaaacaaaaaagcaggcaaagtctgaggatatggggagagctcttccgttgctgaagtgccagctgcaaagcacgaggagtagcagaactggtggctgcagagcagcttcatccattgccctcacactgactcgctgtcatggtcccatctcccaccctgacaagtgcccccctcccagtcctaactgggttttcagaagtgcccaagggaatgcttccactgctctgagtgg

SEQ ID NO: 67007 - DNA, 600 bp, Chicken  19866894336202_1
gaatgatagggaggttggaaaaggttcataactagtaattacttcaattggttcattagagggagtaaaaaaagcaaagagggataatttgatgtgtgagcagaggaacagtaagatgtgcctcatggtgacagtctggatttctggaaagttccatgactgttaccaccaactgtactgatctggtttgcttgagagaatcagtagtaccttcagtctgttacataggaagggctccatgtgtctttggctgaagaggagaccaagaacattgtttgtgctggctggggaatcctgtgrtgctttaggaagttaacctcgaattccaggctaacacttgtgaccactgtcaaccctcttgtcctgcacctcttgtcatttgttatagatgaggaatctatttatttattattttgctatgtgtgactctctaatcagtgagactcttacataggtctgcttcttctttctggttttgctgtccatatccacactctttaagagaaacataggcagggaaaagccccaagccaaaaaaaaamcaaaaaaaaaccttttttagaacccaacccaactttgctggaaagttggtttcagaag

SEQ ID NO: 67008 - DNA, 600 bp, Chicken  19866894336202_2
gtctttggctgaagaggagaccaagaacattgtttgtgctggctggggaatcctgtgrtgctttaggaagttaacctcgaattccaggctaacacttgtgaccactgtcaaccctcttgtcctgcacctcttgtcatttgttatagatgaggaatctatttatttattattttgctatgtgtgactctctaatcagtgagactcttacataggtctgcttcttctttctggttttgctgtccatatccacactctttaagagaaacataggcagggaaaagccccaagccaaaaaaaaamcaaaaaaaaaccttttttagaacccaacccaactttgctggaaagttggtttcagaagttgtggatttgttagacatgttcagattaatgcgctctgcagtgcagtgaatattaagggaactgtcaagaaggaaagtctgtgtacgggataaattagggctctccagggattaaaaagatgtaggatttttttttttttttttaagtagctagcctactattgaaaaataatgagtagtttccatagcaacctcactttcacattgtgcacacatactgtagcaacataaaaaaagaacg

SEQ ID NO: 67009 - DNA, 599 bp, Chicken  19866894336206_1
  misc_feature (1)..(1): n is any nucleotide
nttactccatgtttcctgagccaccagatcagtagtaatatctgcccatcccacatcaaattatagttcttttcctcggtcaaagaagggagcctgtattagccattcaattacactgcttggaatttttcaacagcacaatttccaaagtgacaacctgagttttttaaaaaaaattattagtggacttgttctttagtggattattggtaggtgtttggtatacaaaccaaaacatgaaacatatgtatttgtacacttatctgacatagcatgggattactgtaatatggaaaaaaratcaagataaagagaaagctgatggctctcacaactgacttaatgattgttgcaaatgaacttgatattaaaatcttgataggtatacctcacagagatcaactggatttgataacaatccttcacaagaacaaataattagttaattttattaagaatccagagaatcatttgttgcttgacagtaatgagagctgtgctcctacataatttatagaaattcacactttgctgttttcaggttaaaaagccatctttacaaatgaatttctctgtccttccatctacataaaaataac

SEQ ID NO: 67010 - DNA, 600 bp, Chicken  19866894336230_1
atgtgtttatgccaagtataggtataggctccaaattagttcctgaaacaaccctcacaacgagatccagttgtagcacttgatatgatttgatttggtattcaaatgagaaacaacttcatctttgctcccagaattttgtggataagataatttcttacctccattaacccatcagcctcctactatcttgccatacactacacacaggaggacaatgtttgggatagctaatacaaagacagacaagtgccttaggtaaagtcaccagaaacagcaactcttactggtcaaaacttragtaaactgaaggagagcagggcaggactcrtgraaaaagactgacctctgyctggaatgtcttgkattctggtcaatcctgtccaagggctacagagcttgtggaacattggaacccaatgggaaaggagagacacagagatcttctagatcttctttgcataccacactggagatacctgctgatttccagccctggaacctgaygttctccaccaatatggaggcttctggactaaggcaaaggaaaaataagtacctcaagtagggctaggtcatggttctgcactcaataccaca

SEQ ID NO: 67011 - DNA, 600 bp, Chicken  19866894336230_2
caaattagttcctgaaacaaccctcacaacgagatccagttgtagcacttgatatgatttgatttggtattcaaatgagaaacaacttcatctttgctcccagaattttgtggataagataatttcttacctccattaacccatcagcctcctactatcttgccatacactacacacaggaggacaatgtttgggatagctaatacaaagacagacaagtgccttaggtaaagtcaccagaaacagcaactcttactggtcaaaacttragtaaactgaaggagagcagggcaggactcrtgraaaaagactgacctctgyctggaatgtcttgkattctggtcaatcctgtccaagggctacagagcttgtggaacattggaacccaatgggaaaggagagacacagagatcttctagatcttctttgcataccacactggagatacctgctgatttccagccctggaacctgaygttctccaccaatatggaggcttctggactaaggcaaaggaaaaataagtacctcaagtagggctaggtcatggttctgcactcaataccacattcagcaatgggtgccctgatgtttgcagca

SEQ ID NO: 67012 - DNA, 600 bp, Chicken  19866894336230_3
attagttcctgaaacaaccctcacaacgagatccagttgtagcacttgatatgatttgatttggtattcaaatgagaaacaacttcatctttgctcccagaattttgtggataagataatttcttacctccattaacccatcagcctcctactatcttgccatacactacacacaggaggacaatgtttgggatagctaatacaaagacagacaagtgccttaggtaaagtcaccagaaacagcaactcttactggtcaaaacttragtaaactgaaggagagcagggcaggactcrtgraaaaagactgacctctgyctggaatgtcttgkattctggtcaatcctgtccaagggctacagagcttgtggaacattggaacccaatgggaaaggagagacacagagatcttctagatcttctttgcataccacactggagatacctgctgatttccagccctggaacctgaygttctccaccaatatggaggcttctggactaaggcaaaggaaaaataagtacctcaagtagggctaggtcatggttctgcactcaataccacattcagcaatgggtgccctgatgtttgcagcactg

SEQ ID NO: 67013 - DNA, 600 bp, Chicken  19866894336230_4
cctcacaacgagatccagttgtagcacttgatatgatttgatttggtattcaaatgagaaacaacttcatctttgctcccagaattttgtggataagataatttcttacctccattaacccatcagcctcctactatcttgccatacactacacacaggaggacaatgtttgggatagctaatacaaagacagacaagtgccttaggtaaagtcaccagaaacagcaactcttactggtcaaaacttragtaaactgaaggagagcagggcaggactcrtgraaaaagactgacctctgyctggaatgtcttgkattctggtcaatcctgtccaagggctacagagcttgtggaacattggaacccaatgggaaaggagagacacagagatcttctagatcttctttgcataccacactggagatacctgctgatttccagccctggaacctgaygttctccaccaatatggaggcttctggactaaggcaaaggaaaaataagtacctcaagtagggctaggtcatggttctgcactcaataccacattcagcaatgggtgccctgatgtttgcagcactgaaattgttgaaaacaaat

SEQ ID NO: 67014 - DNA, 600 bp, Chicken  19866894336230_5
ccagttgtagcacttgatatgatttgatttggtattcaaatgagaaacaacttcatctttgctcccagaattttgtggataagataatttcttacctccattaacccatcagcctcctactatcttgccatacactacacacaggaggacaatgtttgggatagctaatacaaagacagacaagtgccttaggtaaagtcaccagaaacagcaactcttactggtcaaaacttragtaaactgaaggagagcagggcaggactcrtgraaaaagactgacctctgyctggaatgtcttgkattctggtcaatcctgtccaagggctacagagcttgtggaacattggaacccaatgggaaaggagagacacagagatcttctagatcttctttgcataccacactggagatacctgctgatttccagccctggaacctgaygttctccaccaatatggaggcttctggactaaggcaaaggaaaaataagtacctcaagtagggctaggtcatggttctgcactcaataccacattcagcaatgggtgccctgatgtttgcagcactgaaattgttgaaaacaaatgaagcaaaggctct

SEQ ID NO: 67015 - DNA, 600 bp, Chicken  19866894336230_6
caggaggacaatgtttgggatagctaatacaaagacagacaagtgccttaggtaaagtcaccagaaacagcaactcttactggtcaaaacttragtaaactgaaggagagcagggcaggactcrtgraaaaagactgacctctgyctggaatgtcttgkattctggtcaatcctgtccaagggctacagagcttgtggaacattggaacccaatgggaaaggagagacacagagatcttctagatcttctttgcataccacactggagatacctgctgatttccagccctggaacctgaygttctccaccaatatggaggcttctggactaaggcaaaggaaaaataagtacctcaagtagggctaggtcatggttctgcactcaataccacattcagcaatgggtgccctgatgtttgcagcactgaaattgttgaaaacaaatgaagcaaaggctctgccccagagggtggtgggcatggaatgcgctgctcagggcactgggtacagatgatggctgtaggaagcctacagacagtcccacactgcgggcatgcattgtgtctcagaggtctgctgcttaatcattcttgccatagc

SEQ ID NO: 67016 - DNA, 600 bp, Chicken  19866894336234_1
taatgtacgtataaacaaatgagttgttggaaatgagtaaggaaaagaggccttattactcattgtccacttccaagcaacctgcaaacttttgttatcctacctaacagtgtgacatcaaacagcaaacaccttccccttggaatgacagctcccttgtgtttcactaagcagggataattggtcctggtgccctcagctgtttaaccttttcacagatatggtcctggccattcttattcacataagcctccctaggaaaactcctgactaacaaaaaatgatgtgaaaagaaatttkcaagacatttttgccatrcwatctgagtcctctcttgaaggtggatcctcgctgacaggtgttcatcagagatatctgggctactccagycaaaggaactatgaaccaaatatctacatctatggcttcatttatttttgttgcacgttgtacttattggtgccctaagtgttttttttcctctgtcccgtcagagtccatcatgagctttcattatcattgtcatacattgcaaggatctgcatctgaagcgccagtcagcagcagctctaaggactgattccatcaatgtggaataag

SEQ ID NO: 67017 - DNA, 600 bp, Chicken  19866894336234_2
atgagttgttggaaatgagtaaggaaaagaggccttattactcattgtccacttccaagcaacctgcaaacttttgttatcctacctaacagtgtgacatcaaacagcaaacaccttccccttggaatgacagctcccttgtgtttcactaagcagggataattggtcctggtgccctcagctgtttaaccttttcacagatatggtcctggccattcttattcacataagcctccctaggaaaactcctgactaacaaaaaatgatgtgaaaagaaatttkcaagacatttttgccatrcwatctgagtcctctcttgaaggtggatcctcgctgacaggtgttcatcagagatatctgggctactccagycaaaggaactatgaaccaaatatctacatctatggcttcatttatttttgttgcacgttgtacttattggtgccctaagtgttttttttcctctgtcccgtcagagtccatcatgagctttcattatcattgtcatacattgcaaggatctgcatctgaagcgccagtcagcagcagctctaaggactgattccatcaatgtggaataagaaattgccgtcctggaga

SEQ ID NO: 67018 - DNA, 600 bp, Chicken  19866894336234_3
gagttgttggaaatgagtaaggaaaagaggccttattactcattgtccacttccaagcaacctgcaaacttttgttatcctacctaacagtgtgacatcaaacagcaaacaccttccccttggaatgacagctcccttgtgtttcactaagcagggataattggtcctggtgccctcagctgtttaaccttttcacagatatggtcctggccattcttattcacataagcctccctaggaaaactcctgactaacaaaaaatgatgtgaaaagaaatttkcaagacatttttgccatrcwatctgagtcctctcttgaaggtggatcctcgctgacaggtgttcatcagagatatctgggctactccagycaaaggaactatgaaccaaatatctacatctatggcttcatttatttttgttgcacgttgtacttattggtgccctaagtgttttttttcctctgtcccgtcagagtccatcatgagctttcattatcattgtcatacattgcaaggatctgcatctgaagcgccagtcagcagcagctctaaggactgattccatcaatgtggaataagaaattgccgtcctggagaaa

SEQ ID NO: 67019 - DNA, 600 bp, Chicken  19866894336234_4
tttgttatcctacctaacagtgtgacatcaaacagcaaacaccttccccttggaatgacagctcccttgtgtttcactaagcagggataattggtcctggtgccctcagctgtttaaccttttcacagatatggtcctggccattcttattcacataagcctccctaggaaaactcctgactaacaaaaaatgatgtgaaaagaaatttkcaagacatttttgccatrcwatctgagtcctctcttgaaggtggatcctcgctgacaggtgttcatcagagatatctgggctactccagycaaaggaactatgaaccaaatatctacatctatggcttcatttatttttgttgcacgttgtacttattggtgccctaagtgttttttttcctctgtcccgtcagagtccatcatgagctttcattatcattgtcatacattgcaaggatctgcatctgaagcgccagtcagcagcagctctaaggactgattccatcaatgtggaataagaaattgccgtcctggagaaagtccatctgccagcttcactgtggactgtagccattctgaatttgttcctgttgtacatcatgtgtggaa

SEQ ID NO: 67020 - DNA, 599 bp, Chicken  19866894336236_1
  misc_feature (1)..(64): n is any nucleotide
nnnnnnnnnnnnnnnnnnnnnnnnnnnnnnnnnnnnnnnnnnnnnnnnnnnnnnnnnnnnnnnntgaagaaaaaagggaactgattttgcattctctcctcctaaagaactgatgcttttaaaatatcccctttaatgggaattgggggtggaagttctcaaacacattccctagcctggaaagaacactgacaatagataatactgcagcacctgcataaacactatgcttaactgcagactaattggaattagatcccagagcccaaacatagcagtgttagcattcatttcactctytcataaaaacargaattctgaacaatacgactaatttccaatatcaaggtgaagaagagctagctaaattacagctattttcttaaaactccacaggccaagtcttgtggatcactcagcaatctgcaagacctcttccaagcccagtgagggaatcagtaacttccaacatattccacttagactgctactctcttgtaaagcattttgagaatacactttgtggcccataaacacaccataaaagaaatcagtccagattcaaaggcagtcacagcacagaggtccaacaaaaggat

SEQ ID NO: 67021 - DNA, 599 bp, Chicken  19866894336236_2
  misc_feature (1)..(52): n is any nucleotide
nnnnnnnnnnnnnnnnnnnnnnnnnnnnnnnnnnnnnnnnnnnnnnnnnnnntgaagaaaaaagggaactgattttgcattctctcctcctaaagaactgatgcttttaaaatatcccctttaatgggaattgggggtggaagttctcaaacacattccctagcctggaaagaacactgacaatagataatactgcagcacctgcataaacactatgcttaactgcagactaattggaattagatcccagagcccaaacatagcagtgttagcattcatttcactctytcataaaaacargaattctgaacaatacgactaatttccaatatcaaggtgaagaagagctagctaaattacagctattttcttaaaactccacaggccaagtcttgtggatcactcagcaatctgcaagacctcttccaagcccagtgagggaatcagtaacttccaacatattccacttagactgctactctcttgtaaagcattttgagaatacactttgtggcccataaacacaccataaaagaaatcagtccagattcaaaggcagtcacagcacagaggtccaacaaaaggatgattctttcatg

SEQ ID NO: 67022 - DNA, 599 bp, Chicken  19866894336237_1
  misc_feature (1)..(7): n is any nucleotide
nnnnnnngctttcctttctgttcagttaacagttatgcaactaacatctccccttctaataagagccaaacagaaactctaatgaagctttttttgtccagatttaacttcaggatgaggaatgtctccagatgtccttcaattgctttggtcttttccttttgcaccttccaactgtgaacgatgactaacagactcacttgccctttttttgagtagtactcaacagttggaagtacttccttaaatgataaacatcttgtccataaatcatatttctaaggtctttgtcagtgtgcrtcacagacacagatacctgtcggcatcatcagaatgtttctactaaattatgcaaatttctgtctctgtttcagtatttatgcaatctctaatcagatcactgcgatcttttttactttatatgaagacttcagaataaacttgcataaagccaactagaccatgtccaacacttgacaaggcttgctgacttctcccctctgtctctttggtgtatgtcaggggtcttctaatgtgttttgtagattattttgcagtaaatgagaactgttattgtttgactatctttttggggaact

SEQ ID NO: 67023 - DNA, 600 bp, Chicken  19866894336237_2
ccatgtccaacacttgacaaggcttgctgacttctcccctctgtctctttggtgtatgtcaggggtcttctaatgtgttttgtagattattttgcagtaaatgagaactgttattgtttgactatctttttggggaactctttgggagtataccttttctgctgaacagtcctgcaagtacagaataaagagcaccttacaagaagttagtattttatgtaatttttgtgtgaggtgttgctgcaacgtgagattggaaagtgattaaaaaagcgtgtgaatcagcttcattgtctcttstatgctacataaatcttttacagatgttttaatcatttagatagaatgacttattctctgctaatgccaacgcgctttttgttacttgcttttctgccatctttcaaaagctagctgatgagacacgagattggataattgaatagcaaaacttgttattttccctttttgtaggaaagtgtagaaacgtctgttctgccagctacaagggaacttcctgtgtgctgtcacttagtgcacttttgcagtggtttttaggcagctaccactgctaagttgttgaggcagaccagatgttga

SEQ ID NO: 67024 - DNA, 600 bp, Chicken  19866894336242_1
aggctagaaagaagtaactgttatttattataattcaatttattctgctgtaacagtttgtgttcatctattctagaaataaaatacgtcgtgcagaatgaaacactcatatttcctagaaaggtctggcactctgaaattcctttttgttgggaaggaacttcttggaagtgatttacacttaaatttattaacttgtacagattgggtaaccaggagaatcccaagttttgaccacatataagacacaatgtaaaactaacctcctcttccctcaataaatgtggttactaaatggcytggcaaacctctgcttgagcagggcggacagaaagtaattcacygtggagagtcacgatctgaagataatgcaatataagatcaagatgaaaggcaggaagagattaagcacctttcagagggaaatactgcttttcatattgcaaatagggtgtatcaaagaaaacacaaatcaatcacataggagctttttcattcaaatgttaagtacagcttgaagaagagctcccacacatcctaatgcttgctgcaaatactgctcctcctgttcctgcagccctacggaaatacctgctgaca

SEQ ID NO: 67025 - DNA, 600 bp, Chicken  19866894336242_2
ctgctgtaacagtttgtgttcatctattctagaaataaaatacgtcgtgcagaatgaaacactcatatttcctagaaaggtctggcactctgaaattcctttttgttgggaaggaacttcttggaagtgatttacacttaaatttattaacttgtacagattgggtaaccaggagaatcccaagttttgaccacatataagacacaatgtaaaactaacctcctcttccctcaataaatgtggttactaaatggcytggcaaacctctgcttgagcagggcggacagaaagtaattcacygtggagagtcacgatctgaagataatgcaatataagatcaagatgaaaggcaggaagagattaagcacctttcagagggaaatactgcttttcatattgcaaatagggtgtatcaaagaaaacacaaatcaatcacataggagctttttcattcaaatgttaagtacagcttgaagaagagctcccacacatcctaatgcttgctgcaaatactgctcctcctgttcctgcagccctacggaaatacctgctgacactgaaaaggcacaatagctgatagagaacagtgactaaaatgag

SEQ ID NO: 67026 - DNA, 599 bp, Chicken  19866894336248_1
  misc_feature (1)..(175): n is any nucleotide
nnnnnnnnnnnnnnnnnnnnnnnnnnnnnnnnnnnnnnnnnnnnnnnnnnnnnnnnnnnnnnnnnnnnnnnnnnnnnnnnnnnnnnnnnnnnnnnnnnnnnnnnnnnnnnnnnnnnnnnnnnnnnnnnnnnnnnnnnnnnnnnnnnnnnnnnnnnnnnnnnnnnnnnnnnnnnnntcagatccaagcctaggagcctggcttcacattctcaatacaaagacatactgtctttgtatgccattgacagaccattgacacagacatacctcagaaatttctgttaattatctcctggaagstgctgtggtgtcaaaagcatccatcctgccccttttcytttttcataagtgatctttccatgctattgcagtacaagscacagtgtgtttaaccataggtaacttcacatttgaatcatatgctgcatcatggaaaatagtaagaaatgggaaaataaattaataatacagtcttataaattttatgagagcaaggagatctttcatcgtgtgcaccragagtgaaatccaaatttcttcagaaagaatctttgatgattaaaggcttgttggcagtagagccacagaggctaattacg

SEQ ID NO: 67027 - DNA, 599 bp, Chicken  19866894336248_2
  misc_feature (1)..(137): n is any nucleotide
nnnnnnnnnnnnnnnnnnnnnnnnnnnnnnnnnnnnnnnnnnnnnnnnnnnnnnnnnnnnnnnnnnnnnnnnnnnnnnnnnnnnnnnnnnnnnnnnnnnnnnnnnnnnnnnnnnnnnnnnnnnnnnnnnnnnnnnnntcagatccaagcctaggagcctggcttcacattctcaatacaaagacatactgtctttgtatgccattgacagaccattgacacagacatacctcagaaatttctgttaattatctcctggaagstgctgtggtgtcaaaagcatccatcctgccccttttcytttttcataagtgatctttccatgctattgcagtacaagscacagtgtgtttaaccataggtaacttcacatttgaatcatatgctgcatcatggaaaatagtaagaaatgggaaaataaattaataatacagtcttataaattttatgagagcaaggagatctttcatcgtgtgcaccragagtgaaatccaaatttcttcagaaagaatctttgatgattaaaggcttgttggcagtagagccacagaggctaattacgaattctgtgtgttgaactcactccacactgctcactca

SEQ ID NO: 67028 - DNA, 599 bp, Chicken  19866894336248_3
  misc_feature (1)..(97): n is any nucleotide
nnnnnnnnnnnnnnnnnnnnnnnnnnnnnnnnnnnnnnnnnnnnnnnnnnnnnnnnnnnnnnnnnnnnnnnnnnnnnnnnnnnnnnnnnnnnnnnnntcagatccaagcctaggagcctggcttcacattctcaatacaaagacatactgtctttgtatgccattgacagaccattgacacagacatacctcagaaatttctgttaattatctcctggaagstgctgtggtgtcaaaagcatccatcctgccccttttcytttttcataagtgatctttccatgctattgcagtacaagscacagtgtgtttaaccataggtaacttcacatttgaatcatatgctgcatcatggaaaatagtaagaaatgggaaaataaattaataatacagtcttataaattttatgagagcaaggagatctttcatcgtgtgcaccragagtgaaatccaaatttcttcagaaagaatctttgatgattaaaggcttgttggcagtagagccacagaggctaattacgaattctgtgtgttgaactcactccacactgctcactcasttaattggctggcattgtggaaagtctgtaacatcctag

SEQ ID NO: 67029 - DNA, 600 bp, Chicken  19866894336248_4
agacatactgtctttgtatgccattgacagaccattgacacagacatacctcagaaatttctgttaattatctcctggaagstgctgtggtgtcaaaagcatccatcctgccccttttcytttttcataagtgatctttccatgctattgcagtacaagscacagtgtgtttaaccataggtaacttcacatttgaatcatatgctgcatcatggaaaatagtaagaaatgggaaaataaattaataatacagtcttataaattttatgagagcaaggagatctttcatcgtgtgcaccragagtgaaatccaaatttcttcagaaagaatctttgatgattaaaggcttgttggcagtagagccacagaggctaattacgaattctgtgtgttgaactcactccacactgctcactcasttaattggctggcattgtggaaagtctgtaacatcctagatcaggaagcaaggtaggaaaagatttaaggcttgagattgactgtcttakaaatttataaatgtccagtcctgtcatacaagcagatgaacctatatcagtgcataatttgataccaggatttttttctgtttgtatatg

SEQ ID NO: 67030 - DNA, 600 bp, Chicken  19866894336248_5
tttttcataagtgatctttccatgctattgcagtacaagscacagtgtgtttaaccataggtaacttcacatttgaatcatatgctgcatcatggaaaatagtaagaaatgggaaaataaattaataatacagtcttataaattttatgagagcaaggagatctttcatcgtgtgcaccragagtgaaatccaaatttcttcagaaagaatctttgatgattaaaggcttgttggcagtagagccacagaggctaattacgaattctgtgtgttgaactcactccacactgctcactcasttaattggctggcattgtggaaagtctgtaacatcctagatcaggaagcaaggtaggaaaagatttaaggcttgagattgactgtcttakaaatttataaatgtccagtcctgtcatacaagcagatgaacctatatcagtgcataatttgataccaggatttttttctgtttgtatatgtatataaacagcatggaacaaacaccccaaaagacaccaaacattcagcagttctttaatactgaaagtcaatgagtgccatagatgggctgctggacatctgaaaacttatctatttca

SEQ ID NO: 67031 - DNA, 600 bp, Chicken  19866894336248_6
catggaaaatagtaagaaatgggaaaataaattaataatacagtcttataaattttatgagagcaaggagatctttcatcgtgtgcaccragagtgaaatccaaatttcttcagaaagaatctttgatgattaaaggcttgttggcagtagagccacagaggctaattacgaattctgtgtgttgaactcactccacactgctcactcasttaattggctggcattgtggaaagtctgtaacatcctagatcaggaagcaaggtaggaaaagatttaaggcttgagattgactgtcttakaaatttataaatgtccagtcctgtcatacaagcagatgaacctatatcagtgcataatttgataccaggatttttttctgtttgtatatgtatataaacagcatggaacaaacaccccaaaagacaccaaacattcagcagttctttaatactgaaagtcaatgagtgccatagatgggctgctggacatctgaaaacttatctatttcatccttcttgtcgccatgaaaagtgtttttatctataaagaacacaaaacaaccaagttgtcttccctatagacagatggattttgcagag

SEQ ID NO: 67032 - DNA, 599 bp, Chicken  19866894336250_1
  misc_feature (1)..(101): n is any nucleotide
nnnnnnnnnnnnnnnnnnnnnnnnnnnnnnnnnnnnnnnnnnnnnnnnnnnnnnnnnnnnnnnnnnnnnnnnnnnnnnnnnnnnnnnnnnnnnnnnnnnnntgactgataaatagtaagaaactggaatgtattatgacagataattgtgcttatagaaaaagaaatataaataatgttgataatgccttcaatatttgaattcagtagagagtatctacttgacctactgatggaggctgaccgcttcatgtctgagtgcatcctgctctggtttctgggtcctagatcactgaatccrtggatagcaaatcccccctttggtttgctgagacaatgataattattcctttcttaaggttctttagagagcacttaggcataggcttccttttacactgtwgaaatggggcactgrgtcccartgcccattaactatgacctttagagcagttcctaaaatccttccttggcacaaaacctttgtgagccatccataccaggtttctctgaacacagccatcatctggcagccagcagatgtagacagagtttgcatgggattctgaaatgttctttctcttgagagggtgagaaaca

SEQ ID NO: 67033 - DNA, 600 bp, Chicken  19866894336250_2
gactgataaatagtaagaaactggaatgtattatgacagataattgtgcttatagaaaaagaaatataaataatgttgataatgccttcaatatttgaattcagtagagagtatctacttgacctactgatggaggctgaccgcttcatgtctgagtgcatcctgctctggtttctgggtcctagatcactgaatccrtggatagcaaatcccccctttggtttgctgagacaatgataattattcctttcttaaggttctttagagagcacttaggcataggcttccttttacactgtwgaaatggggcactgrgtcccartgcccattaactatgacctttagagcagttcctaaaatccttccttggcacaaaacctttgtgagccatccataccaggtttctctgaacacagccatcatctggcagccagcagatgtagacagagtttgcatgggattctgaaatgttctttctcttgagagggtgagaaacagatcagaatgtatactaaaactgagaatccttgtaatgtttctttgtgtttcctctttccttttgaacttttgagaacagattgttcttctgcagttcatgct

SEQ ID NO: 67034 - DNA, 600 bp, Chicken  19866894336250_3
agaaactggaatgtattatgacagataattgtgcttatagaaaaagaaatataaataatgttgataatgccttcaatatttgaattcagtagagagtatctacttgacctactgatggaggctgaccgcttcatgtctgagtgcatcctgctctggtttctgggtcctagatcactgaatccrtggatagcaaatcccccctttggtttgctgagacaatgataattattcctttcttaaggttctttagagagcacttaggcataggcttccttttacactgtwgaaatggggcactgrgtcccartgcccattaactatgacctttagagcagttcctaaaatccttccttggcacaaaacctttgtgagccatccataccaggtttctctgaacacagccatcatctggcagccagcagatgtagacagagtttgcatgggattctgaaatgttctttctcttgagagggtgagaaacagatcagaatgtatactaaaactgagaatccttgtaatgtttctttgtgtttcctctttccttttgaacttttgagaacagattgttcttctgcagttcatgctttttctcctgattca

SEQ ID NO: 67035 - DNA, 600 bp, Chicken  19866894336250_4
ggaatgtattatgacagataattgtgcttatagaaaaagaaatataaataatgttgataatgccttcaatatttgaattcagtagagagtatctacttgacctactgatggaggctgaccgcttcatgtctgagtgcatcctgctctggtttctgggtcctagatcactgaatccrtggatagcaaatcccccctttggtttgctgagacaatgataattattcctttcttaaggttctttagagagcacttaggcataggcttccttttacactgtwgaaatggggcactgrgtcccartgcccattaactatgacctttagagcagttcctaaaatccttccttggcacaaaacctttgtgagccatccataccaggtttctctgaacacagccatcatctggcagccagcagatgtagacagagtttgcatgggattctgaaatgttctttctcttgagagggtgagaaacagatcagaatgtatactaaaactgagaatccttgtaatgtttctttgtgtttcctctttccttttgaacttttgagaacagattgttcttctgcagttcatgctttttctcctgattcacatgttc

SEQ ID NO: 67036 - DNA, 600 bp, Chicken  19866894336250_5
atgagtttcataggagaaaaatcagttcctatttcttttgatgtgctgctggagtttcggaaattttaatatattggagttgtggtatgtacacatacagaactgcggactgatggtttaaaaaaatcaatgcaaacaatattagacgaatatttttttcttagagtgttcctacatacttcagaatcttcaaagtattgataatgaatgtcagtatttcaaaacctgccagtgattttgggaatgctaaccctaccatctaaagaaacatgaaatgaaattttcaatccattaaaatgmatgataaaacaacagcaaataacaatactaactacaccttaatcagggatgacatttgattaaatgacatttggttattaatttttttgaagtgtccaaagtaaaaataagactagtactcattgttcaatgtttggagcatataaaatatcagtatgaaagacattcaacatgttctcagtagaacatattccaaaattatgaatgtaatcctcttatttcaaatttgccttcctctgagctggactgggtaccaatctgtgtcctcactttgtgttcttttgaggcattgagagcttt

SEQ ID NO: 67037 - DNA, 599 bp, Chicken  19866894336251_1
  misc_feature (1)..(25): n is any nucleotide
nnnnnnnnnnnnnnnnnnnnnnnnnttgcatctaaaaattattttatatatacagtttattacatcttttacacagcttttgaacaacaaaactatttcacatacatacgacttttgtcctctcagcacctgtcatttataaatatttgcttatttttgtaatatttcccaggtctttgtaattcctgacactaacatgcagtagctgtagcagtggctgtagcagtggcttcaccagaggaattgttgagacaatcttctcctccttggagccacaggtcgtgttacagcactgcggtyctatgatggctcctcttccaaatcctcgcccctctggatgatcayttttagaaaatcattctcagtatgaagtaatccaggagtgaagatgcactgcaactcttcctgcacccatcagtggtgcgttcctttgactctgtgacactgctttgtcctttgggaacatttcctgatgtgcttcgtgttttcacttttttatttattttacgtaaggtcaggggagaagtcatcaccatgataagaataatgaataagaataacacatttcatagtgactgaggaatatagaacgaccaggt

SEQ ID NO: 67038 - DNA, 600 bp, Chicken  19866894336251_2
atatatacagtttattacatcttttacacagcttttgaacaacaaaactatttcacatacatacgacttttgtcctctcagcacctgtcatttataaatatttgcttatttttgtaatatttcccaggtctttgtaattcctgacactaacatgcagtagctgtagcagtggctgtagcagtggcttcaccagaggaattgttgagacaatcttctcctccttggagccacaggtcgtgttacagcactgcggtyctatgatggctcctcttccaaatcctcgcccctctggatgatcayttttagaaaatcattctcagtatgaagtaatccaggagtgaagatgcactgcaactcttcctgcacccatcagtggtgcgttcctttgactctgtgacactgctttgtcctttgggaacatttcctgatgtgcttcgtgttttcacttttttatttattttacgtaaggtcaggggagaagtcatcaccatgataagaataatgaataagaataacacatttcatagtgactgaggaatatagaacgaccaggtcattcatccccagaaacaaaagtagttttttgggaacaggcagata

SEQ ID NO: 67039 - DNA, 599 bp, Chicken  19866894336254_1
  misc_feature (1)..(215): n is any nucleotide
nnnnnnnnnnnnnnnnnnnnnnnnnnnnnnnnnnnnnnnnnnnnnnnnnnnnnnnnnnnnnnnnnnnnnnnnnnnnnnnnnnnnnnnnnnnnnnnnnnnnnnnnnnnnnnnnnnnnnnnnnnnnnnnnnnnnnnnnnnnnnnnnnnnnnnnnnnnnnnnnnnnnnnnnnnnnnnnnnnnnnnnnnnnnnnnnnnnnnnnnnnnnnnnnnnnnnnnatgtattcctagaatgcagtctggctattaactaaagcaacaatcctgtgcaaatatttgcatgagattgtacattaaaactggytgtgctaatgtagaggtgaattttatctaggtgcacataattaggttacagtcttggattttttgtttatataaagcaaaggtgttgttacatccctttgaaatctctgtatgccagtaagctaagaggccacttagaatgtgattttttttttttttttccaggataatggcacacgttcattaaaaagatctagaatcaatttatgttcaagcagtactaggtgcattagaagaaggagtcccatctgaactaagatttgaggaaaggaccagatttctttatggaccacatatgta

SEQ ID NO: 67040 - DNA, 534 bp, Chicken  19866894336261_1
atagctagttgtgtcacactccctttactggcactggactacagaatattatgtgtatgtatattagtgattaaatttgttgttgtgaatgttttcatgtgggaattttcccattcaggtagtgagaaggatactataaaatatggatttgaatacattccgcatctcctcatttatttcctttgcatcgtgttggattggtagcaatatataaagccctttcagttccaaaagcaatacatcatcagttaaaaagcaggttatactctagtacatagtggaaaggatggtctgattaayccatttgagactgtttattttccttatttacccaggagacctattattttcataaaactatcatttttctcttgggtaagtaacacaggaggtgacagccagctgataaaagaagctccaaataagtagtaatggcttccttgatgctgacttgtcaatgttacttagtacaggaggaagaatgtgaagcagaatcgacttttatagcttgtatttaatgtcttttgcacagat

SEQ ID NO: 67041 - DNA, 594 bp, Chicken  19866894336264_1
caggctgcccacatttccctctgcgtgttgcagcgattcctttgctgctgaaggatttcttaatccacatggaacatcctccctgacatctaaacacttcctctggttttatcctcaagccagatgctgcagtgctgcctttgtgccggagaagcagaaaacaaaatccactgatccagaggttcccaaagcctttgtgtgggagccctgtggtggtcctacaccagcgctgggagcagtctgcctgccctgaggagccaagctgtgccagcctgcagccctgtgcccacctgctgggascactgggaggcgttggatggccctctgggactgctctgcacaaccccagcttgggaaaccacccctcttgtaagaggggatgtgtgtggtgtgcatcacggggacaagaagtccctcaaggtgatagcagctgcggtgctaaaaaaaagggaagacagagtcagaaagcccccacagaaactggagcacaaacctatctgactttggaggagatgagggtgaaggaaggcgggacttagggtgggaagccctgccataatgatcgccacagcccagaggtgctgtgtcagcaca

SEQ ID NO: 67042 - DNA, 600 bp, Chicken  19866894336268_1
ttattccagttttgttacagacttggggctcgggtccacgttttgctccataagagcacaagctgtgttacactgaggtgcactggtcctaggtgcccacacttgtctgaggcatgtacagctgtggacagccatgccagcatccatggagctgccacctgagcacagctgcttccgcttatacgtataaacatgcaacatgccaccatacttcatggctgtgctgaactgttctaatataggctatggcaacgccgcattgtgctcagcattactgcaggttgttctgttctgtaggcrtgattgttagctgtgtgattaccctataatatcactgtgttctgcactgcccagttgtgccaggcgtacattctgtrctatatattataataatgttgatataatgctgcagtaccrgtgcaaggcagtgtcggggcctcgtgtgctgcrctgccaggctgggtgatggtagcacagagtctccgcgcttgcattayggggacgtgcagaattaatcttatgtaatctgcactttgtggttggtttgcattagtgccgtgtgctctccgcggcttgattgtagggtattaatgtcaaaat

SEQ ID NO: 67043 - DNA, 600 bp, Chicken  19866894336268_2
gtgcactggtcctaggtgcccacacttgtctgaggcatgtacagctgtggacagccatgccagcatccatggagctgccacctgagcacagctgcttccgcttatacgtataaacatgcaacatgccaccatacttcatggctgtgctgaactgttctaatataggctatggcaacgccgcattgtgctcagcattactgcaggttgttctgttctgtaggcrtgattgttagctgtgtgattaccctataatatcactgtgttctgcactgcccagttgtgccaggcgtacattctgtrctatatattataataatgttgatataatgctgcagtaccrgtgcaaggcagtgtcggggcctcgtgtgctgcrctgccaggctgggtgatggtagcacagagtctccgcgcttgcattayggggacgtgcagaattaatcttatgtaatctgcactttgtggttggtttgcattagtgccgtgtgctctccgcggcttgattgtagggtattaatgtcaaaatcctccatgatctactgccgtgtggttgtggtgtagcctccgataaaatcatggcttggtttcttaataacgcagaat

SEQ ID NO: 67044 - DNA, 600 bp, Chicken  19866894336268_3
acagctgtggacagccatgccagcatccatggagctgccacctgagcacagctgcttccgcttatacgtataaacatgcaacatgccaccatacttcatggctgtgctgaactgttctaatataggctatggcaacgccgcattgtgctcagcattactgcaggttgttctgttctgtaggcrtgattgttagctgtgtgattaccctataatatcactgtgttctgcactgcccagttgtgccaggcgtacattctgtrctatatattataataatgttgatataatgctgcagtaccrgtgcaaggcagtgtcggggcctcgtgtgctgcrctgccaggctgggtgatggtagcacagagtctccgcgcttgcattayggggacgtgcagaattaatcttatgtaatctgcactttgtggttggtttgcattagtgccgtgtgctctccgcggcttgattgtagggtattaatgtcaaaatcctccatgatctactgccgtgtggttgtggtgtagcctccgataaaatcatggcttggtttcttaataacgcagaattttaagagacaacaaaatgtataggaattgttctatatta

SEQ ID NO: 67045 - DNA, 600 bp, Chicken  19866894336268_4
gctgccacctgagcacagctgcttccgcttatacgtataaacatgcaacatgccaccatacttcatggctgtgctgaactgttctaatataggctatggcaacgccgcattgtgctcagcattactgcaggttgttctgttctgtaggcrtgattgttagctgtgtgattaccctataatatcactgtgttctgcactgcccagttgtgccaggcgtacattctgtrctatatattataataatgttgatataatgctgcagtaccrgtgcaaggcagtgtcggggcctcgtgtgctgcrctgccaggctgggtgatggtagcacagagtctccgcgcttgcattayggggacgtgcagaattaatcttatgtaatctgcactttgtggttggtttgcattagtgccgtgtgctctccgcggcttgattgtagggtattaatgtcaaaatcctccatgatctactgccgtgtggttgtggtgtagcctccgataaaatcatggcttggtttcttaataacgcagaattttaagagacaacaaaatgtataggaattgttctatattaaaaatgcagcataattgtataattacagtattt

SEQ ID NO: 67046 - DNA, 600 bp, Chicken  19866894336268_5
acatgccaccatacttcatggctgtgctgaactgttctaatataggctatggcaacgccgcattgtgctcagcattactgcaggttgttctgttctgtaggcrtgattgttagctgtgtgattaccctataatatcactgtgttctgcactgcccagttgtgccaggcgtacattctgtrctatatattataataatgttgatataatgctgcagtaccrgtgcaaggcagtgtcggggcctcgtgtgctgcrctgccaggctgggtgatggtagcacagagtctccgcgcttgcattayggggacgtgcagaattaatcttatgtaatctgcactttgtggttggtttgcattagtgccgtgtgctctccgcggcttgattgtagggtattaatgtcaaaatcctccatgatctactgccgtgtggttgtggtgtagcctccgataaaatcatggcttggtttcttaataacgcagaattttaagagacaacaaaatgtataggaattgttctatattaaaaatgcagcataattgtataattacagtatttgcatcatgctaaacagattggctgggttatttcagattctttaaagt

SEQ ID NO: 67047 - DNA, 599 bp, Chicken  19866894336271_1
  misc_feature (1)..(60): n is any nucleotide
nnnnnnnnnnnnnnnnnnnnnnnnnnnnnnnnnnnnnnnnnnnnnnnnnnnnnnnnnnnnacttcgaggggaaaaaacaagtgtgcccccaaatgtatttcaaaattaatttaataggatgcagaaatacaacataaatctgggaaatctcagcagtcaactcagctttctacaaacagacagcgaaaggagaacaagaagccctcctgtttatcagcactgggagctgacccaggagtcctgtagggaaggcacaaccagagcccaggacatggtctcagtgatgcctcgttttgcccrggagttgtgctgggagacaccagctcgtcctctcagatacataggaatccttgggagagtggcagggatccttgtcaagagctgcaggatgtgttgggagtatgaaaaattactctgtttgttacccagtgacaggcttgcctgtgagagccactaatatgctttcacagagtctgggaggtgatgatcagaagtgtcacctgcatggatgctgaatttggggattaatgccagctactgaattacctgttcctgcaggtaaagcaaatgcactgagctaattgcagcatagtcttggt

SEQ ID NO: 67048 - DNA, 600 bp, Chicken  19866894336271_2
gcagccggctggcagggatgctgatgggagagaaccacgttccctgtgacaactgtcctgacagctgtaaaattggatatatctacagaggttaacatgagcaggtggaggagggatgggcaaggcatctgagccagcttttgctgatacttttctgtatgagaagcagaaaatgcgcgcagagagttatagcctggggggttcctttgagtcattcccggccagctcgatgtgctgggaggacctcaacctgctgacacagccacgtcctgcccagagctgctgtggctgccacgttcygtgctccctgacacatctcagggcctcctcttgcacagaagcaccagctgggtaacgaggggcaggatttgccaacagcactacrtgaagcaaagcattttccgctggcaattctgttccttatgcttrggctgcccttttatttccaaggggaagaagaatgtttaattcctgaggaaacgcggcagtctggtcttacatcaccgagcaggggaggctggtaattactccctgaacagagatgctctttgcagagatgctctacactgatttattttctcggcgcccgaggcatcggag

SEQ ID NO: 67049 - DNA, 600 bp, Chicken  19866894336271_3
cagaggttaacatgagcaggtggaggagggatgggcaaggcatctgagccagcttttgctgatacttttctgtatgagaagcagaaaatgcgcgcagagagttatagcctggggggttcctttgagtcattcccggccagctcgatgtgctgggaggacctcaacctgctgacacagccacgtcctgcccagagctgctgtggctgccacgttcygtgctccctgacacatctcagggcctcctcttgcacagaagcaccagctgggtaacgaggggcaggatttgccaacagcactacrtgaagcaaagcattttccgctggcaattctgttccttatgcttrggctgcccttttatttccaaggggaagaagaatgtttaattcctgaggaaacgcggcagtctggtcttacatcaccgagcaggggaggctggtaattactccctgaacagagatgctctttgcagagatgctctacactgatttattttctcggcgcccgaggcatcggagcttttcaatgatatcagcactggcaacatgtttatcccggagcttgtgrggctctgcgttcataactcacaggtatcagaccttc

SEQ ID NO: 67050 - DNA, 600 bp, Chicken  19866894336271_4
tgagccagcttttgctgatacttttctgtatgagaagcagaaaatgcgcgcagagagttatagcctggggggttcctttgagtcattcccggccagctcgatgtgctgggaggacctcaacctgctgacacagccacgtcctgcccagagctgctgtggctgccacgttcygtgctccctgacacatctcagggcctcctcttgcacagaagcaccagctgggtaacgaggggcaggatttgccaacagcactacrtgaagcaaagcattttccgctggcaattctgttccttatgcttrggctgcccttttatttccaaggggaagaagaatgtttaattcctgaggaaacgcggcagtctggtcttacatcaccgagcaggggaggctggtaattactccctgaacagagatgctctttgcagagatgctctacactgatttattttctcggcgcccgaggcatcggagcttttcaatgatatcagcactggcaacatgtttatcccggagcttgtgrggctctgcgttcataactcacaggtatcagaccttcctggtggcttcctgacatttccagccagcacagaatccacccag

SEQ ID NO: 67051 - DNA, 600 bp, Chicken  19866894336271_5
gggtaacgaggggcaggatttgccaacagcactacrtgaagcaaagcattttccgctggcaattctgttccttatgcttrggctgcccttttatttccaaggggaagaagaatgtttaattcctgaggaaacgcggcagtctggtcttacatcaccgagcaggggaggctggtaattactccctgaacagagatgctctttgcagagatgctctacactgatttattttctcggcgcccgaggcatcggagcttttcaatgatatcagcactggcaacatgtttatcccggagcttgtgrggctctgcgttcataactcacaggtatcagaccttcctggtggcttcctgacatttccagccagcacagaatccacccagcttaaaaaatgagcccagctgcaaacacttttctaacagtgacagtaaagtgctactattaaacagccagcagtgccatttgtcctaacctggtcccttgctctggtcttcagggcatttcggagcgattcctttccatcatgtcacttaagtagcaaaggggaatcttttataagctgagaaagggctgcggcggcagctgatgtgatttatgcttgat

SEQ ID NO: 67052 - DNA, 600 bp, Chicken  19866894336272_1
gcaggagttgtcgcgctcacaggctcttgtcctgatgggggatttcaaccacccgtatatctgctgggatagtggcatggtgggtggcagacaatacaggagattcctggagtctgttaaggacaacttcctggtccaggtaatagatggaccgacctgaggtgaagccttgctgcacctggtgctcactaatgaagaggaaggcattagagacattaagattggaggcagcctgggctgtagtgaccatgccttggtggagtttatgatcttgaagaatgtgggcctggcaaaaagcasagctaggaccctgtgctttaggagagcaaacttccagctgctcaaggaactgctgagtgggatcccctgggatactgtccttaagggcatgggtacagaacagagctggcagctctttaaggacacccttctgagagtgcaatggctctccatcccccagcagaagtcaagcaggggaggcaggcgaccmtcgtggctgtgcaaggacctgcagcttaaactgagagaaaatgggaaatgtatagaaggcggawgcagggttgtgtatcctgggaggaatacagggctgttgtccatgtg

SEQ ID NO: 67053 - DNA, 600 bp, Chicken  19866894336272_2
aatgaagaggaaggcattagagacattaagattggaggcagcctgggctgtagtgaccatgccttggtggagtttatgatcttgaagaatgtgggcctggcaaaaagcasagctaggaccctgtgctttaggagagcaaacttccagctgctcaaggaactgctgagtgggatcccctgggatactgtccttaagggcatgggtacagaacagagctggcagctctttaaggacacccttctgagagtgcaatggctctccatcccccagcagaagtcaagcaggggaggcaggcgaccmtcgtggctgtgcaaggacctgcagcttaaactgagagaaaatgggaaatgtatagaaggcggawgcagggttgtgtatcctgggaggaatacagggctgttgtccatgtgtgcagagatagcattaggaaagccaaggcacagacggagctgaacttggcaagggacgtgaaagacaagaaggggttctgtaaatacataggcaggagacgggccaaggagagtgttccccctctgatgaaaggcaatggggagctcgcttcctcatagaaaaaggtgaggtactcaatgagtgctttgc

SEQ ID NO: 67054 - DNA, 593 bp, Chicken  19866894336272_3
tggtggagtttatgatcttgaagaatgtgggcctggcaaaaagcasagctaggaccctgtgctttaggagagcaaacttccagctgctcaaggaactgctgagtgggatcccctgggatactgtccttaagggcatgggtacagaacagagctggcagctctttaaggacacccttctgagagtgcaatggctctccatcccccagcagaagtcaagcaggggaggcaggcgaccmtcgtggctgtgcaaggacctgcagcttaaactgagagaaaatgggaaatgtatagaaggcggawgcagggttgtgtatcctgggaggaatacagggctgttgtccatgtgtgcagagatagcattaggaaagccaaggcacagacggagctgaacttggcaagggacgtgaaagacaagaaggggttctgtaaatacataggcaggagacgggccaaggagagtgttccccctctgatgaaaggcaatggggagctcgcttcctcatagaaaaaggtgaggtactcaatgagtgctttgccttagtcttcacgggtggtcaggctttctgtgtctgccaggaccacgaacctctaag

SEQ ID NO: 67055 - DNA, 600 bp, Chicken  19866894336277_1
ggagaacggcgataacctgctcgtctgcgtgctcctggaaacctctcttgccactagctttagtacagagggctcggtgcaataaatagaggagaggcaggatgcggatagatcacattactgtggcaacacaaacccgctaataagattagaaagggagtcatcgtaattccggtgtggtcacattaaactaaaagcataattaatcatcgctaataataaaacattcactgcttctgctcaaaataatcccaagcgttattctggatccatatcccggggtaattttagtacgactcyatgggctgtggaagaaggcagactaatatttctgaaagctaaaatcctatatttaactacaaaagacacgcagtctgtcagagaggaatatgatttagtctgcagatccgttattgacctttgctcagattgctaacaagactggtaatgaaaatgaataatggtggggatatatttcactgcaacagatactgcaagcctgaagcgtgattcagattcagatgtctcctaaaatatcacagttcgagaaataatcatttaatacgtcatcacacaacatcccagaagctgtgctataat

SEQ ID NO: 67056 - DNA, 600 bp, Chicken  19866894336286_1
agggtgggcaggtcccagtaagccaaaaccaatgaggtattgtgggtctgggagatttttgcttgcagaaaggatgtattccttcaaaaagctcagatgagaacaaactcatgtttccaaacaagaacctgcttgacagaaccagggttgtgtctgacactgtcccccgctttggagcttcctaagagggatgtatggatctgaggcagtgctgaaaacacttataatcacaacactgtagagtggctattctggtggaaataaccaaatttattgcactaaaatccctttgtattacayaaagggcatgaacaatgagcaattaaaagagaggcagctcccatcagctgtcccttggamgggtaggttgatgcaargagaagggaagatggggaccagatgtggtgcttcacagaaggcattttgggatcaccaagcacatcgctgccacagccaagcactgcctgtccacattgactcttccatgcactgacacacctgggcctgagacccagacgagacctccaccccatctcaagggaagatgcatgggtgaccttccaaaggatttgggctgggctgcaatttcaggtagatcag

SEQ ID NO: 67057 - DNA, 600 bp, Chicken  19866894336286_2
gcttgcagaaaggatgtattccttcaaaaagctcagatgagaacaaactcatgtttccaaacaagaacctgcttgacagaaccagggttgtgtctgacactgtcccccgctttggagcttcctaagagggatgtatggatctgaggcagtgctgaaaacacttataatcacaacactgtagagtggctattctggtggaaataaccaaatttattgcactaaaatccctttgtattacayaaagggcatgaacaatgagcaattaaaagagaggcagctcccatcagctgtcccttggamgggtaggttgatgcaargagaagggaagatggggaccagatgtggtgcttcacagaaggcattttgggatcaccaagcacatcgctgccacagccaagcactgcctgtccacattgactcttccatgcactgacacacctgggcctgagacccagacgagacctccaccccatctcaagggaagatgcatgggtgaccttccaaaggatttgggctgggctgcaatttcaggtagatcagggttgccagatcagagcgaccacagttagtaatgggctaacaattaagaagtaattccca

SEQ ID NO: 67058 - DNA, 600 bp, Chicken  19866894336286_3
attccttcaaaaagctcagatgagaacaaactcatgtttccaaacaagaacctgcttgacagaaccagggttgtgtctgacactgtcccccgctttggagcttcctaagagggatgtatggatctgaggcagtgctgaaaacacttataatcacaacactgtagagtggctattctggtggaaataaccaaatttattgcactaaaatccctttgtattacayaaagggcatgaacaatgagcaattaaaagagaggcagctcccatcagctgtcccttggamgggtaggttgatgcaargagaagggaagatggggaccagatgtggtgcttcacagaaggcattttgggatcaccaagcacatcgctgccacagccaagcactgcctgtccacattgactcttccatgcactgacacacctgggcctgagacccagacgagacctccaccccatctcaagggaagatgcatgggtgaccttccaaaggatttgggctgggctgcaatttcaggtagatcagggttgccagatcagagcgaccacagttagtaatgggctaacaattaagaagtaattcccacagggtgtcacctccca

SEQ ID NO: 67059 - DNA, 600 bp, Chicken  19866894336287_1
agtactttaatgacagaggaatccttatgagtttctggcacttaatagaaagaagtggaaattgctgatgagcagagaggtgtgttttgcagtggctctgagtatggaaatggtaccagtgtgctgcgagaatctgaccagatttgagactgcccagataagaagagtcttcagcatcccaccaaactatgttatcgttagttcagaactctgggagctgtcaagtacctgttcaacttaatgccctccccccagtttttcctttcttttttttcttcttaaagaaaaaactcatcagcytctacagccagaatgcactaggctcttgggtgaacagctacatggtcatggttctgtagacttatttatcaagtgtctggagttawcagttaatcctggactatcataccaaagttctaaagttggtacatgagttacagccttttttctttgctgtttggtaaagaggcttggatatggtctcctcaggctgatagaagcaccttgctgctatgagcatgccctggaacttgaaagcaagatgacacacagggtcaggttatattgtttagcttgccaatttgcatgtggccttaattt

SEQ ID NO: 67060 - DNA, 600 bp, Chicken  19866894336287_2
ttgcagtggctctgagtatggaaatggtaccagtgtgctgcgagaatctgaccagatttgagactgcccagataagaagagtcttcagcatcccaccaaactatgttatcgttagttcagaactctgggagctgtcaagtacctgttcaacttaatgccctccccccagtttttcctttcttttttttcttcttaaagaaaaaactcatcagcytctacagccagaatgcactaggctcttgggtgaacagctacatggtcatggttctgtagacttatttatcaagtgtctggagttawcagttaatcctggactatcataccaaagttctaaagttggtacatgagttacagccttttttctttgctgtttggtaaagaggcttggatatggtctcctcaggctgatagaagcaccttgctgctatgagcatgccctggaacttgaaagcaagatgacacacagggtcaggttatattgtttagcttgccaatttgcatgtggccttaatttcttgtcttttaaatggtgttatgtgaaatacagtgtgtctggacaggaaagttaacagaaagcagcaaatgcctaaaaatgcatag

SEQ ID NO: 67061 - DNA, 600 bp, Chicken  19866894336288_1
cctacatggctctctcacagctctgccaacatgtgcctctccagcctgaagtgcttctgtgctgcctcaggctgtttcatctgctcttccacttatctgggttttatattgtcagccaaaaaagttcaagggttaccaagacaggcagaaagagaaaaaaaaagttagcccactctcatttttcaaaatttgatataagtcattgtaaaagctttatagcttctgcaggtgtgaagggctgtgaataccatctattaattctaagtccatctcactgaggcaaatgtccttatttcttcmtttagggatggcgtggtgasaactgggggctcacggagatgtctctggcagctgtacaagcagctgcaccagagcaatgggaatactatgatttgtctggaagaggttgggaaaactgatgccagccctygaaaagaggatctctactttgtgcgtactaggagttggccatctacaactatagctagctacactgatacagcaaaagcaggcaagtatggatgcagcttaagtaagctccttaaattaaattaataagtaagctcctttaattaaacaatagagcattttttgttggtg

SEQ ID NO: 67062 - DNA, 600 bp, Chicken  19866894336288_2
ctctgccaacatgtgcctctccagcctgaagtgcttctgtgctgcctcaggctgtttcatctgctcttccacttatctgggttttatattgtcagccaaaaaagttcaagggttaccaagacaggcagaaagagaaaaaaaaagttagcccactctcatttttcaaaatttgatataagtcattgtaaaagctttatagcttctgcaggtgtgaagggctgtgaataccatctattaattctaagtccatctcactgaggcaaatgtccttatttcttcmtttagggatggcgtggtgasaactgggggctcacggagatgtctctggcagctgtacaagcagctgcaccagagcaatgggaatactatgatttgtctggaagaggttgggaaaactgatgccagccctygaaaagaggatctctactttgtgcgtactaggagttggccatctacaactatagctagctacactgatacagcaaaagcaggcaagtatggatgcagcttaagtaagctccttaaattaaattaataagtaagctcctttaattaaacaatagagcattttttgttggtggcataattatgtgtcagagg

SEQ ID NO: 67063 - DNA, 600 bp, Chicken  19866894336288_3
ggttaccaagacaggcagaaagagaaaaaaaaagttagcccactctcatttttcaaaatttgatataagtcattgtaaaagctttatagcttctgcaggtgtgaagggctgtgaataccatctattaattctaagtccatctcactgaggcaaatgtccttatttcttcmtttagggatggcgtggtgasaactgggggctcacggagatgtctctggcagctgtacaagcagctgcaccagagcaatgggaatactatgatttgtctggaagaggttgggaaaactgatgccagccctygaaaagaggatctctactttgtgcgtactaggagttggccatctacaactatagctagctacactgatacagcaaaagcaggcaagtatggatgcagcttaagtaagctccttaaattaaattaataagtaagctcctttaattaaacaatagagcattttttgttggtggcataattatgtgtcagaggaactatggatttgacatgctcacttgaaagttgggtcttactaagacctgcttactaagacctgcaaggatataatcatataagcacataaaccttttcttattcttagc

SEQ ID NO: 67064 - DNA, 600 bp, Chicken  19866894336302_1
tattactctttttctatagctaataaatactgaggaaaattaaaatattcagctccattaatcattcattataaatcaatttctgtcaccttgtcctaattgttgttgtctttctttgcatgcccttcaaattgtcaatgtctttgttaatgcaatgtccagacctctaggcaatgttccacatgaatagcattagattatctgtacacaaacccttcttaccttcctgagctgtgaaatgaacatgcatcttgaaattaatatagcctgatttatttatttgctactcagttgtgttaycaacttttttacttttgtcttcagactgtcaaattaataaaactccctttcacaacttatctgggttaaatttcatctgagcattgcactctctccagatgatttccagctctgaaatactatttgtgggaagactgctgggtagctccttagaatctgtgttggtgccctgttatttgcagtttgttaaaaaatctccatttaacattctacagccccttttcaatctatttatcagtattcaaacccaaacctctacaaattaatctgaaggtgagattttgcaggagatctgaaagc

SEQ ID NO: 67065 - DNA, 600 bp, Chicken  19866894336304_1
aaaaaaagaaaaaaaaagaaaaaaaagaataaagcagatagaaagagagttcagagatgggtgatgagaataattaggggcatggaaaacctcggaaatgaaacaaaatggaacagaattggactgtttacctaagagatgaggtgaaatgaataaaaaagaaaatgatcaaaagtaaaagaaataaggagcaggatagaaaagatagaggaggtacttttatccctcctctctttaccataatgcaagaacaaaaagacatttcacaaaatttatacaaatggaggtacagtttcacamaattaacatatgaaaagcctgaccacatgacatagtgaatccagagggactcagtgaaggttgagacacctctttggatttaaaaatactcaaaaacatttagaagacagcaatttcagagggccgatgacctttctgcttcaggacttcggctatttttttggtaatactgggagcaaaatctagtcttctttcctcaggaccagagtaatttaaacatgtgtgaagcaagattccttgtaccttttcttttagggctgcccctgtttggtggcaaggtgataggcaaggtgaagccca

SEQ ID NO: 67066 - DNA, 600 bp, Chicken  19866894336304_2
ggtgataggcaaggtgaagcccaacaaagagaggcacatcagctcagcctctcctgccaggagcacacacacggttggaagccctttcagaaattgtcacggtagtactcaagaggacagttgagttcttgcttcttcactacctgagtaatagtaactgagaagaacaaagacttcatatcagaatagggagttccattacaatgcttaaagaattagaaggagaactagtgcacggatatatttttacaagaaaatctgcatgagaccgattactggagcaatcattgaatagggttktctaaaaatgtgggctctagtccacagcaaataaagttgttcatctactttctgctctcatcagattttttatccttctcttttttttttttttcaaagagagttatacccactctaccaaacccctcacagaatgagctaatatgcttaggcaaaagaagataagaatataaggaagaattccaaaaaacttggagagaaagagtggtggttaggacactcagagaaaggcgaaggactgtatcaggttctcctccagtgcaggttaccaacactaagcaacaactcttgggtagattc

SEQ ID NO: 67067 - DNA, 600 bp, Chicken  19866894336317_1
tttgcagctagcattgctagaagctgtaacagtaattgttatgctgaaatgttccatgaacaaatagccaaatattgaaaagataaaacataaattgcttgattaccagggttaaaaaaaggaaagaaaagtaaaaagtgagactatccatgatacttctgcagatcttgaagaggttttggaggattaggttgactattccacactgtaaatctctgaggaccaggataagtggtccacagggacaggtatctcctaatgagtttctgggtaagctgcagagacagagtactgtttcaytgtaggattgggacagataggcataattcattactagatgctgtcagacacacagtgagtgctaggatgcatattctatatgtggaagtgatttcagctgcttattgaactgatgtctgggtctctgcagaaagggctgtgataaaagttaagaaaggttatgatgcttaggattaagtttttgaaccaagaagtaaaatgcactttcttggtttgtcaggatccatcaataacagcagctgagtgtgggctgaatggttcctaattagctggggccagaaaaggatgtcattgttatgg

SEQ ID NO: 67068 - DNA, 580 bp, Chicken  19866894336322_1
gccctcttatttctgagcagtcattacaaatgccctgaagtttaagtgaatgcatttgtggtggttgctgtgcgatggctgttctgctctgtaaatagactataaattatggatggggaatttatgaattaatctatagtagatatctcgtgctcataaatattgtatgataccttgcagcctctttataacgtgctgctggagatctttaggtgcagggtttgtgctcgtatcggaagcagttttgatttctgcagtgatgtttcagttcatctttcaggactgcactttgcagcacayggagcaaaattgtcccatgttgcctcagtgcagtgagggatgtgcctcccttcttgctgttgggaagggaggtaagtcaggagtttcgtacccgtggggctattttttctttaacctaggtcctctgaataatacatgtcttccccaggtagctaattacagggtgagattaatgtggtggcagatttcagccacccctgcagatctcagtaagtggctattaaagcactgtactgtcagctgagtgcagtgctgaaatgttctgtttgctcaaaataag

SEQ ID NO: 67069 - DNA, 600 bp, Chicken  19866894336338_1
tggtattaatttccacctttgagatgagtctcagtgtgatattcctgaactgtgtatacctccatcatatggagatataggttaatataggtaaatgtgcagatgaggacaaacaagtaataattacttgagtaagaagaatgcgtaatggaagtgatagagcactagacttttttttttccaaggacttacaatgccaatgtcttacatgttctaaaaggtttacaataatctaagtgaaaccatcagcattgtttttgtatgcagttcctcatattaatggtaattgcagctgcatcwtttttaaatctttttttaagggaaaataaaactgtttgtctgattatttttaaggtgacaaaggagaagtggcaacgtttgaaaatgccagtggtgttgtaatgagatttcacgtgaacattcgatcgagcaaccacaagtagtctgtgaattattctgggaagttttaaaaagtgggatatatgacattatttaagtatttataaatgtcacctcatctgttataagggaatctaatagactgttttgcagacatttcagctctaaaaagcaattgcttctctaatctatttctataaa

SEQ ID NO: 67070 - DNA, 600 bp, Chicken  19866894336339_1
aatttttcagcttgtagagtgtcttgaagttagcatgctaagagagtaaaatgtatgctttgtacgctcttctttcctacagaggagtcttctgacagccacctgatgccaactacattttcaaatgtcccatcttctccttgcagataattagaagcatctgcttcattctcaaagtgcacacttgcatgcttatagctgaaaactgtgattgcatcgtatgttaacatctctccatcttcccagcttcaacatttcctagctctggtcatgtactagagtaaggagtttgttgcttamgtggtctttccttgatttatgtcaacttgaagaaattgttcaactgctgtaattttcaagtcaattctttctctgcttgccacctgtgaaataaaaataatgtgcttttcaaagtagactcagtagctggtggtcagtaataggttcctctgccatccctgaaatcttacaagcattacagcttggcttacacagcagcagcagttctggggtacagaagaacctgagtttcttcaaagccaatgagtctagtgagcaattcagtgtaccctgaggcagactaggagctgattcattccc

SEQ ID NO: 67071 - DNA, 600 bp, Chicken  19866894336339_2
ttgaagaaattgttcaactgctgtaattttcaagtcaattctttctctgcttgccacctgtgaaataaaaataatgtgcttttcaaagtagactcagtagctggtggtcagtaataggttcctctgccatccctgaaatcttacaagcattacagcttggcttacacagcagcagcagttctggggtacagaagaacctgagtttcttcaaagccaatgagtctagtgagcaattcagtgtaccctgaggcagactaggagctgattcattccctccactgactctgaagagacctcagrtgcctgtctctgtgacagtaacatctagtagatagctataactggctgtctgcattgcaaattgcactcctccctgaatcccctgatatcatttccatgaaagggaaattgtatggattgactgcttggggagatacagtgggaacggggtgacactaggggatttctaaatattcttcccattcctgggcacttttctatgaaacaaagatgaaaacaccttttctatgctcctcttataattcataatcgtttctacaccttcccattctctttaaaccattatcactttgaagctac

SEQ ID NO: 67072 - DNA, 543 bp, Chicken  19866894336340_1
tggtcaatagacatgtttgttatgcctgtttcattatctgaatagaggtcagacatcctctcaggcttatgatacaccaaaatgtatccaccagccagaactaatccacaatatgaattatttaatgaaaagtacaagtgagagtaggaaaaaaatgatgtgacttttcaccctttattgtatattgctcctccctgttctcagtacagctcaaaagaggttgcaggaactgtgatttgcatagcttggtcttgtttgtacatgttgttaaaccactcttcatgctggttcagttacacycaatacagacacatataataaatgcaggattttatgaggcactttaggaagtgcagagccatgtatactggggcttgtgcatagataacagaacagctcagatcacagtgaattgctcattcccttcctatttatagcttttgaggattaaggaagattgatcatccggtctcacctttgtgtcacagaggtcagagaacttcagccagggattcctgcagatgataagcagaatgggttttc

SEQ ID NO: 67073 - DNA, 600 bp, Chicken  19866894336343_1
ctaaaattctgaggatggagggctgagagaaaatgagagaaaagctacggattgatgagcagcaggagagtaatgtgcaattttgttttttacgcactttgcaactctaatactttttcagtattttgtaataataaccctgcaaagcagaacagcccagtggtagggggaccatacagggtgggaatcagccacaactcaggcatcaacattaacaaccactggagacactttcatcaggtcttagagtccccatctgtgcccagcacggcaggaaaatgggaaggatgatatttgtcrtttattccaaggacttttctagagttttggtgggaagcgcagtattactatgggtgaatcagtcaggtgcaagctcagaaaacccagagaggccttctgcagctcagctacactaagagatttctgtgagatcccattctattactttcttgaaagactttactgacagaggcttcataacttcttttgttgctgatttggtaaaatagttctcatccgaatgaaacaccctgaattattcaatagctaaacccatcatgtttgctgtgatttaatggaaacattcacaccttccatata

SEQ ID NO: 67074 - DNA, 599 bp, Chicken  19866894336357_1
  misc_feature (1)..(119): n is any nucleotide
nnnnnnnnnnnnnnnnnnnnnnnnnnnnnnnnnnnnnnnnnnnnnnnnnnnnnnnnnnnnnnnnnnnnnnnnnnnnnnnnnnnnnnnnnnnnnnnnnnnnnnnnnnnnnnnnnnnnnnncctatgaggagaggctgagtacacttatgttgtttcatctgcagaagaggaggctcagaggtgaactcacagctccatgtaccctcctgagaagtaaacagatgtataagctaccatttctgcatttcacagaatattcgtagggtgaggctgtcagctcagccacattttctgaggttgygaaatggtggaaacaaaatgcaggcaccgaagaccccaatcatgtctgcaaatgaaaaacattagacatgtcattaatctaaattagtctaggatgcacatctcacagcaagaggaaaaaggagccaattttttccctgcttattcaaataaagttaaaaggtgctttgttcactgcctgaataacaaaaaatattttgaagtcacgatgttttctcccccctctccctcccctccaaaagaaaagccatcatgagcattggctccagctggaagctgatgctaaataatttcacgctg

SEQ ID NO: 67075 - DNA, 600 bp, Chicken  19866894336357_2
aaaaatattttgaagtcacgatgttttctcccccctctccctcccctccaaaagaaaagccatcatgagcattggctccagctggaagctgatgctaaataatttcacgctgaaaataagataaggcacagaaaggtgacaggaaaggtgagtcatggaacagcacatggagagttgtgcagattgtatattaccatgaaatctttaaatcacagctggatatcattctgacagcctcgccacagctgaaacagaatttcctactccgtgcagaaattactgggtgtcatttgggggtcygtattatacaagagcagagttggaggcaacagcagaccctttgagctgaaatctaattttgtgactctgctgaaagyaggcacggatgccactgccaacaggaacatcaggtctccaggtccaattcatcaactctctttgagcagatgatactctgagcaccgttttcccctctgggtaatggaagacatgatgggagaaaaagaaacctaccaacaagggctgttttcagcacagtgtgtgctgtgtgttatggtggatgtctgccttcattcacactatacacggagtttttgtctc

SEQ ID NO: 67076 - DNA, 600 bp, Chicken  19866894336357_3
ccagctggaagctgatgctaaataatttcacgctgaaaataagataaggcacagaaaggtgacaggaaaggtgagtcatggaacagcacatggagagttgtgcagattgtatattaccatgaaatctttaaatcacagctggatatcattctgacagcctcgccacagctgaaacagaatttcctactccgtgcagaaattactgggtgtcatttgggggtcygtattatacaagagcagagttggaggcaacagcagaccctttgagctgaaatctaattttgtgactctgctgaaagyaggcacggatgccactgccaacaggaacatcaggtctccaggtccaattcatcaactctctttgagcagatgatactctgagcaccgttttcccctctgggtaatggaagacatgatgggagaaaaagaaacctaccaacaagggctgttttcagcacagtgtgtgctgtgtgttatggtggatgtctgccttcattcacactatacacggagtttttgtctctgcctttccctctaagcaaagggaaaaggaaacccataaaacttccactgccaactttgttagcagaaaaaaaggca

SEQ ID NO: 67077 - DNA, 600 bp, Chicken  19866894336362_1
agtgaaatgtttaatttattttaatttggactgatagttttcaaactcctgcataaagttgcaaaaattaccatgatcatcagcagtcttctcctacctcttttcaatgctgctttcttatgattctcatactcttgcagtcaaacagcttgtgtctttcagaatatatatagatagattattatagaatccagcagtgattctgtgatcagctcttattctatgccacatgtgccacagaggggagttcaggtttattagctggcctataaaatctaacatgttaacactgagcagacwgaactaggttattctctgccaaatttagccagtcctttagccattaacatggtcagaattcttataatcgtttttccacaatgcctgtattcaaacaacagatggatttctaatattgagcctgggaagcttcagtcaagaagagagatcctgtctgaaaatatcgtcccaaccttctcagtactgctgccttaaaatagaatcattaaatatgcccagtattcacctacataagaaacactttcaactattaaataatggaagtggggcacctattacacattgactttctctgcttga

SEQ ID NO: 67078 - DNA, 600 bp, Chicken  19866894336362_2
tcttcctcgatgcatgttggagccaatacccatatttttatgtataacagaatgctgtttgctgatcacattaagaagagctgacaagttttgaagggtcactgtttaggagtgccacgatgaacaggtcatacatgctatgattcccagagagctgatttacttttctcattcaatgttatattgctcctaatatcaaagggcagtaataacacttgtaaagctggaacagcctattaggcttagcgtccatacacatctcacagtaaaaaaaaacaatttatatcgttgttgaaagcraacatgtaaaaagccttttccatgccttcctttgctrtttatcttgccatgaacttcttgttcatagtgttcagatgaccaacccagtgggacacttaacctgtgtcaggagcaactttcttaaacctagattttccaaaggaaatagtttatttaactcaatctgtagtaaggagagatatgttgccctccaaagatgtttctaaatgctaacaaaagcagtgcagcacctcatttgcaagctgtttgaaagcaacccatgagaaattactaaagcaatcgactgcttcagcctaggag

SEQ ID NO: 67079 - DNA, 600 bp, Chicken  19866894336362_3
ttatgtataacagaatgctgtttgctgatcacattaagaagagctgacaagttttgaagggtcactgtttaggagtgccacgatgaacaggtcatacatgctatgattcccagagagctgatttacttttctcattcaatgttatattgctcctaatatcaaagggcagtaataacacttgtaaagctggaacagcctattaggcttagcgtccatacacatctcacagtaaaaaaaaacaatttatatcgttgttgaaagcraacatgtaaaaagccttttccatgccttcctttgctrtttatcttgccatgaacttcttgttcatagtgttcagatgaccaacccagtgggacacttaacctgtgtcaggagcaactttcttaaacctagattttccaaaggaaatagtttatttaactcaatctgtagtaaggagagatatgttgccctccaaagatgtttctaaatgctaacaaaagcagtgcagcacctcatttgcaagctgtttgaaagcaacccatgagaaattactaaagcaatcgactgcttcagcctaggagatctttgctgccattggcttcttttttcwatgcattc

SEQ ID NO: 67080 - DNA, 600 bp, Chicken  19866894336362_4
ctttgctrtttatcttgccatgaacttcttgttcatagtgttcagatgaccaacccagtgggacacttaacctgtgtcaggagcaactttcttaaacctagattttccaaaggaaatagtttatttaactcaatctgtagtaaggagagatatgttgccctccaaagatgtttctaaatgctaacaaaagcagtgcagcacctcatttgcaagctgtttgaaagcaacccatgagaaattactaaagcaatcgactgcttcagcctaggagatctttgctgccattggcttcttttttcwatgcattcttcagcttctcataaccttgttgaaaacactggaaatgacctacctggagcagaaggcatcttttttttatatattaaaataacttggtccccgcttaatccgtcagtccactttcttggtctactctatttcaaataatttttgtcccatcagcaagtctttgtggagatggatttctttagaaggatatgttgggagaagtcattatgtataccaagcgatagcagtctcagggataatagtaacctacacagccatcaggcaaccattgttcatgcaataggtgtacat

SEQ ID NO: 67081 - DNA, 600 bp, Chicken  19866894336362_5
aaataatttttgtcccatcagcaagtctttgtggagatggatttctttagaaggatatgttgggagaagtcattatgtataccaagcgatagcagtctcagggataatagtaacctacacagccatcaggcaaccattgttcatgcaataggtgtacatattttttaatgcttactgttacttttgtatttgaagtgaattgcttaggaagaaaacctaagttctgcttcaaaattatgatctgattagtctaaatctgcaatcattaattaaaacattcaagtatggtgattccatttyrtcttaatgtaaatacctaaataggaaaaggcaaatgccagcactgaatataaaaacaagcacagaggaaaaatcgtagatgcctctgtccataaaaagtataaataattgtcattattgttatataaaactcatttatctcatttgatttcagagtgtcatgaacatgatgcatgttataagtattccatattccttaatgaaagtgaatccactgtcatggatacaaaaagtatgtcaatacaaaggtaaggaacaagaatatatgaaagtacatttgaaggtcaaaatctaaagaac

SEQ ID NO: 67082 - DNA, 600 bp, Chicken  19866894336362_6
aataatttttgtcccatcagcaagtctttgtggagatggatttctttagaaggatatgttgggagaagtcattatgtataccaagcgatagcagtctcagggataatagtaacctacacagccatcaggcaaccattgttcatgcaataggtgtacatattttttaatgcttactgttacttttgtatttgaagtgaattgcttaggaagaaaacctaagttctgcttcaaaattatgatctgattagtctaaatctgcaatcattaattaaaacattcaagtatggtgattccatttyrtcttaatgtaaatacctaaataggaaaaggcaaatgccagcactgaatataaaaacaagcacagaggaaaaatcgtagatgcctctgtccataaaaagtataaataattgtcattattgttatataaaactcatttatctcatttgatttcagagtgtcatgaacatgatgcatgttataagtattccatattccttaatgaaagtgaatccactgtcatggatacaaaaagtatgtcaatacaaaggtaaggaacaagaatatatgaaagtacatttgaaggtcaaaatctaaagaaca

SEQ ID NO: 67083 - DNA, 600 bp, Chicken  19866894336362_7
ataaaactcatttatctcatttgatttcagagtgtcatgaacatgatgcatgttataagtattccatattccttaatgaaagtgaatccactgtcatggatacaaaaagtatgtcaatacaaaggtaaggaacaagaatatatgaaagtacatttgaaggtcaaaatctaaagaacaaattgtttttacaactgtagagctttcacatggtgcattagaaatcttcccattcctgttgcagcaaaagttgcctgtgtaaaatccagagacatgcactgggcattggtggcacatcgagaycagagagacatcaacctttcctcactgcgaatgctcatagtggctgatggtgccaacccatgtaagtgatgcttctgcagtccatcaaagaacagggaatgtttttcatcttgcatctaaagtttcaatcttcaatcaccgtagctaaaatatttaacaaagtataaggtttgtctactgcaaactgtttgatatttactgaaacagtacttaattttgaatttttttaaatatatttttctttagctaatcctgaagcaaacttgatattccgcataacgtaagttgcagcaaatccag

SEQ ID NO: 67084 - DNA, 599 bp, Chicken  19866894336363_1
  misc_feature (1)..(86): n is any nucleotide
nnnnnnnnnnnnnnnnnnnnnnnnnnnnnnnnnnnnnnnnnnnnnnnnnnnnnnnnnnnnnnnnnnnnnnnnnnnnnnnnnnnnnncccacttcagggtcacatcaagcttataacccttccaagccatgtcaaatgaattaattactttggatggcattattcgtgcagcaaacaattacgtgcctgacatataaatacttttgctgaaccctcacccaagactaatcgagaaccaaatggaagttcctcactcacctcattcaatcagacaagaaagcaaactaaacaaaatcagagraaaatatactgagctcgcacatagctccctcaccagctcattcaaatcatagatatttgctaggaaacggtgcaaaaccayacttrcagattgatatacctgcttttgctctagaaaaatgaaggtgggaatgaaagtctgtcctgagctgggrgagaactcctagcctttgctgcagcctaactaatctctccccaccaagtacttgaactttgcatttacaccatcaagttatcttggcacaaattctcaccagttttcataagctrcaggatttgaggggttaatgaccaaagctg

SEQ ID NO: 67085 - DNA, 599 bp, Chicken  19866894336363_2
  misc_feature (1)..(5): n is any nucleotide
nnnnncccacttcagggtcacatcaagcttataacccttccaagccatgtcaaatgaattaattactttggatggcattattcgtgcagcaaacaattacgtgcctgacatataaatacttttgctgaaccctcacccaagactaatcgagaaccaaatggaagttcctcactcacctcattcaatcagacaagaaagcaaactaaacaaaatcagagraaaatatactgagctcgcacatagctccctcaccagctcattcaaatcatagatatttgctaggaaacggtgcaaaaccayacttrcagattgatatacctgcttttgctctagaaaaatgaaggtgggaatgaaagtctgtcctgagctgggrgagaactcctagcctttgctgcagcctaactaatctctccccaccaagtacttgaactttgcatttacaccatcaagttatcttggcacaaattctcaccagttttcataagctrcaggatttgaggggttaatgaccaaagctgcttatcgggcaactcctttcccaggccaaacttccctcagtaaatgctgtgagcacctcacgtctgcactgtctttgaaac

SEQ ID NO: 67086 - DNA, 600 bp, Chicken  19866894336363_3
cccacttcagggtcacatcaagcttataacccttccaagccatgtcaaatgaattaattactttggatggcattattcgtgcagcaaacaattacgtgcctgacatataaatacttttgctgaaccctcacccaagactaatcgagaaccaaatggaagttcctcactcacctcattcaatcagacaagaaagcaaactaaacaaaatcagagraaaatatactgagctcgcacatagctccctcaccagctcattcaaatcatagatatttgctaggaaacggtgcaaaaccayacttrcagattgatatacctgcttttgctctagaaaaatgaaggtgggaatgaaagtctgtcctgagctgggrgagaactcctagcctttgctgcagcctaactaatctctccccaccaagtacttgaactttgcatttacaccatcaagttatcttggcacaaattctcaccagttttcataagctrcaggatttgaggggttaatgaccaaagctgcttatcgggcaactcctttcccaggccaaacttccctcagtaaatgctgtgagcacctcacgtctgcactgtctttgaaacacccat

SEQ ID NO: 67087 - DNA, 600 bp, Chicken  19866894336363_4
ggcattattcgtgcagcaaacaattacgtgcctgacatataaatacttttgctgaaccctcacccaagactaatcgagaaccaaatggaagttcctcactcacctcattcaatcagacaagaaagcaaactaaacaaaatcagagraaaatatactgagctcgcacatagctccctcaccagctcattcaaatcatagatatttgctaggaaacggtgcaaaaccayacttrcagattgatatacctgcttttgctctagaaaaatgaaggtgggaatgaaagtctgtcctgagctgggrgagaactcctagcctttgctgcagcctaactaatctctccccaccaagtacttgaactttgcatttacaccatcaagttatcttggcacaaattctcaccagttttcataagctrcaggatttgaggggttaatgaccaaagctgcttatcgggcaactcctttcccaggccaaacttccctcagtaaatgctgtgagcacctcacgtctgcactgtctttgaaacacccatctctcttytgcaacaaaggcactccagacatagtgagctttgcactgtgttataactttcgtattacc

SEQ ID NO: 67088 - DNA, 600 bp, Chicken  19866894336363_5
gacaagaaagcaaactaaacaaaatcagagraaaatatactgagctcgcacatagctccctcaccagctcattcaaatcatagatatttgctaggaaacggtgcaaaaccayacttrcagattgatatacctgcttttgctctagaaaaatgaaggtgggaatgaaagtctgtcctgagctgggrgagaactcctagcctttgctgcagcctaactaatctctccccaccaagtacttgaactttgcatttacaccatcaagttatcttggcacaaattctcaccagttttcataagctrcaggatttgaggggttaatgaccaaagctgcttatcgggcaactcctttcccaggccaaacttccctcagtaaatgctgtgagcacctcacgtctgcactgtctttgaaacacccatctctcttytgcaacaaaggcactccagacatagtgagctttgcactgtgttataactttcgtattaccctttgcacagccattttacttcagctgcatgctgtgtatcattcattgcaagtttacttcattctctggattcatggctgatgctctctggaccataaaatttcagctgcaaaac

SEQ ID NO: 67089 - DNA, 600 bp, Chicken  19866894336363_6
tatacctgcttttgctctagaaaaatgaaggtgggaatgaaagtctgtcctgagctgggrgagaactcctagcctttgctgcagcctaactaatctctccccaccaagtacttgaactttgcatttacaccatcaagttatcttggcacaaattctcaccagttttcataagctrcaggatttgaggggttaatgaccaaagctgcttatcgggcaactcctttcccaggccaaacttccctcagtaaatgctgtgagcacctcacgtctgcactgtctttgaaacacccatctctcttytgcaacaaaggcactccagacatagtgagctttgcactgtgttataactttcgtattaccctttgcacagccattttacttcagctgcatgctgtgtatcattcattgcaagtttacttcattctctggattcatggctgatgctctctggaccataaaatttcagctgcaaaaccagaacatctcattatttctgaaatatcgagcttgtatcttcttgataaataattcctactagtataatgtatcagactaaaacatattttctgaggccagtgaggttaaagcggcaatctcacc

SEQ ID NO: 67090 - DNA, 477 bp, Chicken  19866894336369_1
tttgtgatgtacacaaaatggtggttggcagcctttacactttctataaatgcacaaaccatttcctcttcatagcattcactaagggaggttatgtattgctcagaatagaaggctgagtatttcctgatatttttaaaaattgttttgaacaaatagagtagaaatagttagtggtttttttttttttttaatgtgaagaaaatttatttctttcatatccaaaaattatttactgtaatttcacagatattagacattaagaatgtaagtgttcaccaaaaaaagagaaattatatwtttaggaacaaggtattttatgactgtttgaaagtttatggagatgaaataacattttatatggattcagataggatgaggatcatataatttctggtgatataatatacattctgtgtccaatgtcatgctttattctgtgtgtctaaaactaacgataagtttgataggttcatt

SEQ ID NO: 67091 - DNA, 599 bp, Chicken  19866894336373_1
  misc_feature (1)..(113): n is any nucleotide
nnnnnnnnnnnnnnnnnnnnnnnnnnnnnnnnnnnnnnnnnnnnnnnnnnnnnnnnnnnnnnnnnnnnnnnnnnnnnnnnnnnnnnnnnnnnnnnnnnnnnnnnnnnnnnnnnctgagtccaacagcagtgacaagagtaaagcctagagatttccttttaagaccaagtctttggtgtaaaatggggacagagaataagaaatgtatcaaacactgtgaataagaagccattaatttaacaataaataaaaatgaccatttgaatattcattaaaatcagtcagtactttacagaagtmtgaaagagcaactctagacacatctccagatatcataggatcatagratggtctgggttgaaaaggaccacagtaatcatccagtttcaacccccctgctatgtgcagggttgccaaacactagaccaggctgcccagagccacatccagcctggccttgaatgtctccagggatgrggcatccacagcctccttgggcaacctgttccagtgcgtcaccaccctgtgaatgaaaaactgcctcctaatatataatctaaacctcccctgtctcagtttaaaaccattcccccttgtcc

SEQ ID NO: 67092 - DNA, 599 bp, Chicken  19866894336373_2
  misc_feature (1)..(66): n is any nucleotide
nnnnnnnnnnnnnnnnnnnnnnnnnnnnnnnnnnnnnnnnnnnnnnnnnnnnnnnnnnnnnnnnnnctgagtccaacagcagtgacaagagtaaagcctagagatttccttttaagaccaagtctttggtgtaaaatggggacagagaataagaaatgtatcaaacactgtgaataagaagccattaatttaacaataaataaaaatgaccatttgaatattcattaaaatcagtcagtactttacagaagtmtgaaagagcaactctagacacatctccagatatcataggatcatagratggtctgggttgaaaaggaccacagtaatcatccagtttcaacccccctgctatgtgcagggttgccaaacactagaccaggctgcccagagccacatccagcctggccttgaatgtctccagggatgrggcatccacagcctccttgggcaacctgttccagtgcgtcaccaccctgtgaatgaaaaactgcctcctaatatataatctaaacctcccctgtctcagtttaaaaccattcccccttgtcctatcactatccacccttgtaaacagccattgcccctcctttttatat

SEQ ID NO: 67093 - DNA, 575 bp, Chicken  19866894336373_3
gtaaaatggggacagagaataagaaatgtatcaaacactgtgaataagaagccattaatttaacaataaataaaaatgaccatttgaatattcattaaaatcagtcagtactttacagaagtmtgaaagagcaactctagacacatctccagatatcataggatcatagratggtctgggttgaaaaggaccacagtaatcatccagtttcaacccccctgctatgtgcagggttgccaaacactagaccaggctgcccagagccacatccagcctggccttgaatgtctccagggatgrggcatccacagcctccttgggcaacctgttccagtgcgtcaccaccctgtgaatgaaaaactgcctcctaatatataatctaaacctcccctgtctcagtttaaaaccattcccccttgtcctatcactatccacccttgtaaacagccattgcccctcctttttatatgctcccttcaaatagtggaaggccacaatgaggtctccccagagacctcttctcttctcttctcttctcttctcttctcttctcttctcttctcttctcttctctt

SEQ ID NO: 67094 - DNA, 599 bp, Chicken  19866894336379_1
  misc_feature (1)..(197): n is any nucleotide
nnnnnnnnnnnnnnnnnnnnnnnnnnnnnnnnnnnnnnnnnnnnnnnnnnnnnnnnnnnnnnnnnnnnnnnnnnnnnnnnnnnnnnnnnnnnnnnnnnnnnnnnnnnnnnnnnnnnnnnnnnnnnnnnnnnnnnnnnnnnnnnnnnnnnnnnnnnnnnnnnnnnnnnnnnnnnnnnnnnnnnnnnnnnnnnnnnnnnaacttctagcaaggccacagttcaccaggtctctccaacagcaatctcaatcagagagactgtaaaaacacagtaccttattattgtggaggataaggagagyggtaagtcaccttttcctcttttcctcacagatgcaaacaatgctagaagcatcagtcagtcagaccacatgttggttccacaactgccaccaataaaatcttgcagctaaatcccctgatattaacttgctgatatgagcagctccaggtattcaaatggagccgtgtgtgcaggatgtgttaataccctccccccaaaaaaccatagcatgttgaatcagcaagttttgatctctactacagctggatttttatgtgctaattagttttgcaaattcaaggtttgcacattttgtca

SEQ ID NO: 67095 - DNA, 600 bp, Chicken  19866894336380_1
atggaagtggctttttgctaagaccagggtaacttgttcgaatagtttttgttttccaaagaggtgttacttcatgtaagtgtgggaagttttattccttttcttactttgaagtgttgccaaagtgtaggtgtcattcagtcaaagattttagagaagtatcaaaattttcacttgttcttctcctctgactgttcatgaggtcttataaacaattctgtacagggaaaatagaaggtgacaaaaaattctgtacaggactgtctccttacttttaatctatcttagtcttaccagaaytgggagctactgctattgcccattgggatgggcattatagatgtcagtgtttcttgtttgtatacatcttctctagaagtgtttggaagtgaaacatatgttgaacaggtactgtaatgagtgatgacgcttcataaagatattaaattcccttcttcctcattgataaatttttcatgttgtgatgacttttgataaggttcatataacctcctgtggttacttttattgttgtaggttctacaattactgctgaaatccaaggagtaattgatgcttgtgtcaagctgactgggatgc

SEQ ID NO: 67096 - DNA, 413 bp, Chicken  19866894336383_1
aaggtaagtatttattttgcaaaataatctggctaaattttcttggtgtgtatccatattagccaagagaaagaaaactcttctagcaggtcaaatgccaaacaaatacagacatgctttggaaagacaaaaaaaagaaaaaaaaaagaaaaaaagtattttgcacaacaggtaaattcatgacattttactgggtgtgtaagactgaaagaatgtcagccaaatgtctaaatacagtgcaacatctgcttcctctgacctgccaaaatctttcctactatcatgctaaaagaaacctastacttagtacttaacaattttaatcagtgatgaaattaaaagtatgggattatcagaactaaaactagacaatattaaacctctttaagaaagacttacacgtattatagata

SEQ ID NO: 67097 - DNA, 599 bp, Chicken  19866894336386_1
  misc_feature (1)..(24): n is any nucleotide
nnnnnnnnnnnnnnnnnnnnnnnnaaaagtgctgggtagaattgaaaattgtttaattattttaatatttatgagtttgtcttgtagcttaacagctatggtagtaatagatcatatacgtatcaatctctatctgtatataataccttctgtagcatttgggcttgctaaaatctggagatggggactagctgctggtactagaatgataggaaagaacagaaaaataaactaatctatactttcctgtggaatgcttttacatattttctgtttcgaggacacattctgacattcagwtgactccttggcgggtttctgttagtgaaggctctggcccagactctgtggctgctcccctgcaccagcaagagctgcagtttttctgcaactcagcaggaggaccgtacagaaatgtgagatgtgagggaacatgctggacacacctgtgatggttggaatcgaaccaagcatatagcaatttattgtggataaatattgatcaatagaagtcaatgtccattgggttgatggggaaatgtcagtaaaaggaagaaacatcaatagggtgtgcttgcaggtttaatttaggttttatt

SEQ ID NO: 67098 - DNA, 599 bp, Chicken  19866894336388_1
  misc_feature (1)..(41): n is any nucleotide
nnnnnnnnnnnnnnnnnnnnnnnnnnnnnnnnnnnnnnnnnccatctgggcatggtcctgggcaccctgcggtgggtgtcgctgctagagcaagagtcagaccagctggaccctgagggcccttccatcctcaacccttctgggattctgtgatctgtatggatggaaaaattgctcacggttgagagattcccatttgctttcaaaggatcagaccagcgcctgggagaccaaggtcaaggtccatgtgtcttctccatgtgaatggctcagaggatgacattgggtcataccaagatktcccatttgatgtgtggagagggaattctgggctgtgattccccagccttgatatgtgtgagaactgccagtgggttctctttcaagctttcttgtgccagggagctccctgaccccgtgccttgcactttgggctggttcctggaatgctggctttggggacagcacagggacgcagctaccacaggaaccgtgcaggggaaagaaggcttaactaactgagatgagccctgctgggattgcaggggtcatgctggggttcgatttgtgaaactgacttcagactgcagccagctttt

SEQ ID NO: 67099 - DNA, 599 bp, Chicken  19866894336389_1
  misc_feature (1)..(108): n is any nucleotide
nnnnnnnnnnnnnnnnnnnnnnnnnnnnnnnnnnnnnnnnnnnnnnnnnnnnnnnnnnnnnnnnnnnnnnnnnnnnnnnnnnnnnnnnnnnnnnnnnnnnnnnnnnnnattgcttttccctcctgggatcccagatcttcgtttttgtgtaagagaaagcaaacccctctaagcatttccttcactgccacactcacaaaagaagcccttgcagatgtttaaaaacccgagccataatggatctgtcttttctcctcgcccatcagagctgcagtgctgtcgctgcaggggcacacaccmtcaccgggtacacgaggtcaggtggggccgcatccccagcgctgctgggaccttggagcatggctgtggagctkcacggagcttcagcacacagccggctcactgggcaggcctcgggatgggacagggcagttatttggcctctcagactaaaatccagataagatatttcttctgtgtatggaaaaaagtctccacaagtcacagaatcatagaatggcctgggttgaaaaggaccgcaatgatcatctagtttcaamccccctgccacgggcagggctatcctgggggtgtttccc

SEQ ID NO: 67100 - DNA, 599 bp, Chicken  19866894336389_2
  misc_feature (1)..(34): n is any nucleotide
nnnnnnnnnnnnnnnnnnnnnnnnnnnnnnnnnnattgcttttccctcctgggatcccagatcttcgtttttgtgtaagagaaagcaaacccctctaagcatttccttcactgccacactcacaaaagaagcccttgcagatgtttaaaaacccgagccataatggatctgtcttttctcctcgcccatcagagctgcagtgctgtcgctgcaggggcacacaccmtcaccgggtacacgaggtcaggtggggccgcatccccagcgctgctgggaccttggagcatggctgtggagctkcacggagcttcagcacacagccggctcactgggcaggcctcgggatgggacagggcagttatttggcctctcagactaaaatccagataagatatttcttctgtgtatggaaaaaagtctccacaagtcacagaatcatagaatggcctgggttgaaaaggaccgcaatgatcatctagtttcaamccccctgccacgggcagggctatcctgggggtgtttcccaggcagaaatctggcaaataaagcagggctatgctgagaaatccaggaaggatagctcagctcatcttgtgcct

SEQ ID NO: 67101 - DNA, 600 bp, Chicken  19866894336389_3
catcagagctgcagtgctgtcgctgcaggggcacacaccmtcaccgggtacacgaggtcaggtggggccgcatccccagcgctgctgggaccttggagcatggctgtggagctkcacggagcttcagcacacagccggctcactgggcaggcctcgggatgggacagggcagttatttggcctctcagactaaaatccagataagatatttcttctgtgtatggaaaaaagtctccacaagtcacagaatcatagaatggcctgggttgaaaaggaccgcaatgatcatctagtttcaamccccctgccacgggcagggctatcctgggggtgtttcccaggcagaaatctggcaaataaagcagggctatgctgagaaatccaggaaggatagctcagctcatcttgtgcctactggaaaactgaatgaaatgctccgcatgcgtatcatgtcctgagggctgaacgcttgtgaaacgttgttaaaattagaagggaaaagagcagcatatttagagagttgccactctgttatctcataaaaacctggtagccctcctcattttgtaaccaggccaatatgttttaagagaatggagg

SEQ ID NO: 67102 - DNA, 599 bp, Chicken  19866894336405_1
  misc_feature (1)..(27): n is any nucleotide
nnnnnnnnnnnnnnnnnnnnnnnnnnnacttttacaaaagtcttaatttttgaagactaaacttacctgttgatgaaacaagtactatgttagtgtatcctacgtcagtggggacatggggaaactggaacaggatgcccagaatcatagaatggctcaggctgggagagaccttaaggatcatcaacctccaatccccctgccacaggcagggccaacagcctccacatttaataccagaccaggctgcgcagggccctatccagcctgactgcaaacacctccggggatggatggggyatccacagcctctctgggcaaacccagagaagttgtggagtgtctttctttgtagatagtcaagacccatctggatgcctatacatttaacctgctttagcaagttagatttgctgacatctggaggtcccttaagcacctacaattctgaaattgtgtgaacctgatcaacctcagattagtaccctacatccattccaggaatcagcttctaacgcacaatgataagacacttattagagcttaccacagtagtcacttgacaggacagcatttttgaacctgctagtaggatactt

SEQ ID NO: 67103 - DNA, 600 bp, Chicken  19866894336405_2
gcagcttaactggctttgtcttcataaccagtccctgatttcagaggcacacaacctacatgtgcaagtgagtccagaaatgaattgacacatttccttacttgagacagatgcatttaatgactttgagctctgtttgctagtgtgacagcagatgataagttattttcaattgattaggctaaaccataatgaatatcttgagaaactagccccattgccttagtttcagctgggatagaattgtttgggttcttttttcagagtgtcttgtatgatattatgttttggttctagggraaaaaaaaaataaacccaatgttgataacacagtgatatttatagttgctggctaagcagtgttgtatagaggaaaggccatttgcagcaaagagcccaaggagctgggaggaagcagaattaggacagttgacttaaactggccaatgaaatatttcataccatatgacatcaagaagaatgagttctgaagggagtaaggagttcatctcccctgctcaaggggctagctgggcatcgaacagagagttgtgggcaattactcgtatatgatttgttatatacttttatatatagtca

SEQ ID NO: 67104 - DNA, 600 bp, Chicken  19866894336408_1
acccaattctacagccaggcagatgacttctataggctttccaattcacaaacttggacaagttgagttatgtggagagagatttgttgtacttagaatcttggcaagcaggatttcaaagagaaatgcaaatgttcattttcaagccagcagtcatgtcagttgcctacaagaacaccacttcatggaagtagcactgtgaaaaagctgctatacactgcagcttgtggtcttcttcagacttctggtgaacttttcaagaggtttgtttaccatcaaatgaagaatttgtgtaaaagrcttgcaagcttgtctccwtagaaagaagaagccctcgcaaagttttccctttcaattcagatgatctttccaagggtttgcattcagcaaagtagagaaattcagtgtttcrtggtatactgctgtatattttcagagtcctgtctcactgtacgtagcagaagtcaaagtacaaaatgcaatcttcttttctcagawtttcaagtttccttccagccaccaaaaataaagaagatagtaccagcaaaaatgcatttggtgagtgccatcttctgattaaaatgcattacttctagctcc

SEQ ID NO: 67105 - DNA, 592 bp, Chicken  19866894336408_2
gcagatgacttctataggctttccaattcacaaacttggacaagttgagttatgtggagagagatttgttgtacttagaatcttggcaagcaggatttcaaagagaaatgcaaatgttcattttcaagccagcagtcatgtcagttgcctacaagaacaccacttcatggaagtagcactgtgaaaaagctgctatacactgcagcttgtggtcttcttcagacttctggtgaacttttcaagaggtttgtttaccatcaaatgaagaatttgtgtaaaagrcttgcaagcttgtctccwtagaaagaagaagccctcgcaaagttttccctttcaattcagatgatctttccaagggtttgcattcagcaaagtagagaaattcagtgtttcrtggtatactgctgtatattttcagagtcctgtctcactgtacgtagcagaagtcaaagtacaaaatgcaatcttcttttctcagawtttcaagtttccttccagccaccaaaaataaagaagatagtaccagcaaaaatgcatttggtgagtgccatcttctgattaaaatgcattacttctagctcctgtccaaagg

SEQ ID NO: 67106 - DNA, 498 bp, Chicken  19866894336408_3
atttcaaagagaaatgcaaatgttcattttcaagccagcagtcatgtcagttgcctacaagaacaccacttcatggaagtagcactgtgaaaaagctgctatacactgcagcttgtggtcttcttcagacttctggtgaacttttcaagaggtttgtttaccatcaaatgaagaatttgtgtaaaagrcttgcaagcttgtctccwtagaaagaagaagccctcgcaaagttttccctttcaattcagatgatctttccaagggtttgcattcagcaaagtagagaaattcagtgtttcrtggtatactgctgtatattttcagagtcctgtctcactgtacgtagcagaagtcaaagtacaaaatgcaatcttcttttctcagawtttcaagtttccttccagccaccaaaaataaagaagatagtaccagcaaaaatgcatttggtgagtgccatcttctgattaaaatgcattacttctagctcctgtccaaagg

SEQ ID NO: 67107 - DNA, 412 bp, Chicken  19866894336408_4
gtgaaaaagctgctatacactgcagcttgtggtcttcttcagacttctggtgaacttttcaagaggtttgtttaccatcaaatgaagaatttgtgtaaaagrcttgcaagcttgtctccwtagaaagaagaagccctcgcaaagttttccctttcaattcagatgatctttccaagggtttgcattcagcaaagtagagaaattcagtgtttcrtggtatactgctgtatattttcagagtcctgtctcactgtacgtagcagaagtcaaagtacaaaatgcaatcttcttttctcagawtttcaagtttccttccagccaccaaaaataaagaagatagtaccagcaaaaatgcatttggtgagtgccatcttctgattaaaatgcattacttctagctcctgtccaaagg

SEQ ID NO: 67108 - DNA, 533 bp, Chicken  19866894336412_1
cttgtggctcctttgattaaaaaaaattagaagtgcataaagtattaactactgtggaaaagggcaaatcatggtggtttatttttttttttttaacttcctaacaaggtctcttatctctgtacatgtaacaagcaccaaggctttcatctgcctagtaagctacatatttagatcagcagctctggacatatttttgttggatgacagcctcgaggtgcacaagccccaaggtgggcaccccaaggcatctgcaccaccccatgggatatgggcacagagaaggtcaggctctgtggracccstccagcctccctggtccagggaggcctgcaccaatggctcccaactacaggcttcatggccaggatagatggccccaaggctacagaccacaggcggtaattttggcagcccgaagtatttttttgaggattgattggtacatggcagaaataaatgtgaaatcaccatcccagctgatttttttgtgctttcagtgcaagcgcactgaacagggagaaaggagagag

SEQ ID NO: 67109 - DNA, 528 bp, Chicken  19866894336412_2
ggctcctttgattaaaaaaaattagaagtgcataaagtattaactactgtggaaaagggcaaatcatggtggtttatttttttttttttaacttcctaacaaggtctcttatctctgtacatgtaacaagcaccaaggctttcatctgcctagtaagctacatatttagatcagcagctctggacatatttttgttggatgacagcctcgaggtgcacaagccccaaggtgggcaccccaaggcatctgcaccaccccatgggatatgggcacagagaaggtcaggctctgtggracccstccagcctccctggtccagggaggcctgcaccaatggctcccaactacaggcttcatggccaggatagatggccccaaggctacagaccacaggcggtaattttggcagcccgaagtatttttttgaggattgattggtacatggcagaaataaatgtgaaatcaccatcccagctgatttttttgtgctttcagtgcaagcgcactgaacagggagaaaggagagag

SEQ ID NO: 67110 - DNA, 600 bp, Chicken  19866894336413_1
caaagaaatctggaatgatagaagaaatacaggttataaaaaagagctgagttttcaaggcaagaataaacacacgttaagctccacacactgtcaagaaaactatagaactgttaggaaaactatggacctttcattgctctagctcctcaggatacctattactccatactactataacagattaataaataaatttaaaaaaattacgtaaaaataagtttcaagttcagccagagaaaaatgccagtaatgacacgcaattgagaagaaacttttcttaaggaactatgaattacrgagtgttcatacaaccagaagcaggaagaaatcaagcaaaaacccttccaagtagctgagataaygaagccttgcttgcatcactgctgtctgataaaacacaagcttaaaacacagcctcctttacaaattagtgacttttyataaggtcttattgccaagcaggtttttggtattgaacagggaacagccctttctcttagagctgttttcttctcctttggccccatcatccattttcactgctggcagcaactccgtgttttttgtgcctctctctacctgcctgccaaataaact

SEQ ID NO: 67111 - DNA, 600 bp, Chicken  19866894336413_2
ataaacacacgttaagctccacacactgtcaagaaaactatagaactgttaggaaaactatggacctttcattgctctagctcctcaggatacctattactccatactactataacagattaataaataaatttaaaaaaattacgtaaaaataagtttcaagttcagccagagaaaaatgccagtaatgacacgcaattgagaagaaacttttcttaaggaactatgaattacrgagtgttcatacaaccagaagcaggaagaaatcaagcaaaaacccttccaagtagctgagataaygaagccttgcttgcatcactgctgtctgataaaacacaagcttaaaacacagcctcctttacaaattagtgacttttyataaggtcttattgccaagcaggtttttggtattgaacagggaacagccctttctcttagagctgttttcttctcctttggccccatcatccattttcactgctggcagcaactccgtgttttttgtgcctctctctacctgcctgccaaataaactaaaactgtccaaaggagtcaagaattaccaaagtgcagggaaagagaggatgaatgcaaagtcac

SEQ ID NO: 67112 - DNA, 600 bp, Chicken  19866894336413_3
agctcctcaggatacctattactccatactactataacagattaataaataaatttaaaaaaattacgtaaaaataagtttcaagttcagccagagaaaaatgccagtaatgacacgcaattgagaagaaacttttcttaaggaactatgaattacrgagtgttcatacaaccagaagcaggaagaaatcaagcaaaaacccttccaagtagctgagataaygaagccttgcttgcatcactgctgtctgataaaacacaagcttaaaacacagcctcctttacaaattagtgacttttyataaggtcttattgccaagcaggtttttggtattgaacagggaacagccctttctcttagagctgttttcttctcctttggccccatcatccattttcactgctggcagcaactccgtgttttttgtgcctctctctacctgcctgccaaataaactaaaactgtccaaaggagtcaagaattaccaaagtgcagggaaagagaggatgaatgcaaagtcacacagatttcatttgaatgtctctgagggaaacagctgccaaacctctgcagttcctccttattcatttcatcttctcc

SEQ ID NO: 67113 - DNA, 600 bp, Chicken  19866894336420_1
ctaactttccaagtggcagtgggagccagcaggagccggagcccatgttcagcacttccctggcttgccaactgcgggaggaaacgcatttggtggtcctgtgactcctttctgggagccctgctggtgtatacagacaaggtgacacttaatgaacagaatatgacagcagtgctagaataaattgcacctcatgatacagagcagcccaatgcaagcttcagatcccactgtgaataactagttgtggcttattggattttaatagagttttgccaaaagaaaacagcctttctttcyttttttttttttwatacaaagcacatgattttcctgtgaaagaatgtttacagactagagctcattgcctcatcactcaatgtatccttgatattttcatttatgtggtttcttgttcaacacatgtttgaatcagatgacttccactcgtttatctgcattaatctactgggagcacttttaagagtgaaatgtcagtcaggtgcatgccagacatgcaataagcactttttattccctctgcttcccagctcaattccctggaattccccctctgctgctttctcattcttcatgtcc

SEQ ID NO: 67114 - DNA, 600 bp, Chicken  19866894336420_2
taactttccaagtggcagtgggagccagcaggagccggagcccatgttcagcacttccctggcttgccaactgcgggaggaaacgcatttggtggtcctgtgactcctttctgggagccctgctggtgtatacagacaaggtgacacttaatgaacagaatatgacagcagtgctagaataaattgcacctcatgatacagagcagcccaatgcaagcttcagatcccactgtgaataactagttgtggcttattggattttaatagagttttgccaaaagaaaacagcctttctttctytttttttttttwatacaaagcacatgattttcctgtgaaagaatgtttacagactagagctcattgcctcatcactcaatgtatccttgatattttcatttatgtggtttcttgttcaacacatgtttgaatcagatgacttccactcgtttatctgcattaatctactgggagcacttttaagagtgaaatgtcagtcaggtgcatgccagacatgcaataagcactttttattccctctgcttcccagctcaattccctggaattccccctctgctgctttctcattcttcatgtccc

SEQ ID NO: 67115 - DNA, 600 bp, Chicken  19866894336420_3
aactttccaagtggcagtgggagccagcaggagccggagcccatgttcagcacttccctggcttgccaactgcgggaggaaacgcatttggtggtcctgtgactcctttctgggagccctgctggtgtatacagacaaggtgacacttaatgaacagaatatgacagcagtgctagaataaattgcacctcatgatacagagcagcccaatgcaagcttcagatcccactgtgaataactagttgtggcttattggattttaatagagttttgccaaaagaaaacagcctttctttcttyttttttttttwatacaaagcacatgattttcctgtgaaagaatgtttacagactagagctcattgcctcatcactcaatgtatccttgatattttcatttatgtggtttcttgttcaacacatgtttgaatcagatgacttccactcgtttatctgcattaatctactgggagcacttttaagagtgaaatgtcagtcaggtgcatgccagacatgcaataagcactttttattccctctgcttcccagctcaattccctggaattccccctctgctgctttctcattcttcatgtcccc

SEQ ID NO: 67116 - DNA, 600 bp, Chicken  19866894336420_4
tggcagtgggagccagcaggagccggagcccatgttcagcacttccctggcttgccaactgcgggaggaaacgcatttggtggtcctgtgactcctttctgggagccctgctggtgtatacagacaaggtgacacttaatgaacagaatatgacagcagtgctagaataaattgcacctcatgatacagagcagcccaatgcaagcttcagatcccactgtgaataactagttgtggcttattggattttaatagagttttgccaaaagaaaacagcctttctttctttttttttttttwatacaaagcacatgattttcctgtgaaagaatgtttacagactagagctcattgcctcatcactcaatgtatccttgatattttcatttatgtggtttcttgttcaacacatgtttgaatcagatgacttccactcgtttatctgcattaatctactgggagcacttttaagagtgaaatgtcagtcaggtgcatgccagacatgcaataagcactttttattccctctgcttcccagctcaattccctggaattccccctctgctgctttctcattcttcatgtcccctttccagcaaa

SEQ ID NO: 67117 - DNA, 572 bp, Chicken  19866894336438_1
ccaatacatgtacttcctgctcagccacttttaagaacttggggtttggttctgttgaactactgggatttagaatggttttgctttgttaatgtgtttccaagaaaggtggattgattcccccttcagaggcctttagcttaacaaactgagattagttaagctaaaggtttcatttaaccaggtctctgcttaaaaaaaggagagagaaaggaagaaaaaagaagctattgtttcttctaagtttctacatttttaagtttatttggtcttccccagtagttctgcacttaaaattawaaggggtatctcttttagaaactgaaaaaaaaattatttctccattcgtatcaatgtatggaaatataagttaactgatgctatattttaagagggttaatatgtagaaagtgggttatccgatggtgagaagtatcagctaagattatgggcacgtgaacttgagcagagacctaccgtacatgccatctgtgagacacggccattgcacgtcttggtgattcagtaggaaaccaaagtttggtaattagattctaaaaatgtacttgatg

SEQ ID NO: 67118 - DNA, 600 bp, Chicken  19866894336439_1
ttttgcctgccttatacagttcaaatacagatctgatcaagaggttaaaggtacaaagtttcaagagttgcacatgtctaagataagtacatagtacagcgaagttacatctcctctgcagataggtagggagtagtcacctacacgtatatatgcagttcaaagcagcggaaagagtgcaatgtaacttagggcaggaaatctcctccttggctcgatgtttctgaagtggccataagctaacacttcctaacatcgggatctgtatttacatgtagaatttcagcacctatcagtcayaggggaaatctgagcccgtcccacctttcacgtctttttggagcacaggctcgggaaaaacagaagagttcacaatgtaactcaatttttaggattactcttggaagtagagcatctaaaacattttaagctgtggcatagaacaccgttccccagcacatacaaggaatgaggaatggcagtgtgatgcaccccagtgcaacttggtgccccaagctgttgctcaccctgcaccctactgcaccacgcagggctggctgatgcctgcctcacgggcaccaaagggcacacctgcagcac

SEQ ID NO: 67119 - DNA, 600 bp, Chicken  19866894336443_1
ggtctcttagaaagtatttcttcttccactaggaaacaaaaatgcgtgccagtactaaaagttttactaaacaatgaaaagctttcctccatttacctgtgaaagctgctatttccaactaatgctacagaaaggtatttctgacagcctaattttttgagctgcatcatctgttcttgtatgccaaaagaaaaagccgaacagttacagtcagatgacatttcatgaaggactgaaggcaacagcaaaaactttaactagcttatcaacgctttgataagcacaattttatcagctcamtagaacgacaacattcgaaaaataaaagtggttcagtttcaaaaatatgcagtgagcaaaaccacggccccacaggaagttcttagggttcattccacacccagccacctcactctttcctaagtgtctttcaagaaaaagatgtgctttgcagcacgctccaaaggtaaataaatttgagctattttggagtatgaggcaacaaactcaaaagcttcccatgtctgcctctgctgtgccacagccaggtttaaatacattcactgcattcagttgtggcagtgaaacacagcaaagtgg

SEQ ID NO: 67120 - DNA, 600 bp, Chicken  19866894336451_1
gtcagatagacttacctgtgttttgtatcctccatgttttcgtaaactgggtgtcaggaggaatggactctccttcacctatggtgacatcttcaacaaaggacatggagggtacgttgatgtttggactctcaaaatcataataggctccaatggcggcttgtagattcctagaaagcaaaaagcagcttataatcttaagcacaagggggtcaggttctgacaattaagtatagatattatccagattatattagctctgctgcttgcatttttctaaagcttccatcactatcacayatggattttccaagctaacagaattcaatatacagcattttactttctgtggacactgctttgggccacatttctggtctgattctcattttctttgaaaacttggaacttaagagtctgtaaggcctttgagccattagctctctcttgagacccgacaacaagctgaaaagacagtgaggttaagcgttgtgcacagcgtgtaaacagagctgtttccttactggccttcyttccttggctaatttcaagactcaaattctccgttttattttrgtgtgaaaggttcaaaacaccaca

SEQ ID NO: 67121 - DNA, 600 bp, Chicken  19866894336451_2
tagatattatccagattatattagctctgctgcttgcatttttctaaagcttccatcactatcacayatggattttccaagctaacagaattcaatatacagcattttactttctgtggacactgctttgggccacatttctggtctgattctcattttctttgaaaacttggaacttaagagtctgtaaggcctttgagccattagctctctcttgagacccgacaacaagctgaaaagacagtgaggttaagcgttgtgcacagcgtgtaaacagagctgtttccttactggccttcyttccttggctaatttcaagactcaaattctccgttttattttrgtgtgaaaggttcaaaacaccacagaatgaacacactttgataattctgaaggcaaaagagaatcagcagctayrgataacaactcaggctttgctgcttttgaaacatacggtcataagagctatgagcactctaagactattaatcattaagtgtctctggatagccatggctcaaaggaacttacaaaccactgagacaagcactcttggtgaataaaaacaaatgacagtggaagtctgtgatgcgttacaga

SEQ ID NO: 67122 - DNA, 600 bp, Chicken  19866894336451_3
ctaaagcttccatcactatcacayatggattttccaagctaacagaattcaatatacagcattttactttctgtggacactgctttgggccacatttctggtctgattctcattttctttgaaaacttggaacttaagagtctgtaaggcctttgagccattagctctctcttgagacccgacaacaagctgaaaagacagtgaggttaagcgttgtgcacagcgtgtaaacagagctgtttccttactggccttcyttccttggctaatttcaagactcaaattctccgttttattttrgtgtgaaaggttcaaaacaccacagaatgaacacactttgataattctgaaggcaaaagagaatcagcagctayrgataacaactcaggctttgctgcttttgaaacatacggtcataagagctatgagcactctaagactattaatcattaagtgtctctggatagccatggctcaaaggaacttacaaaccactgagacaagcactcttggtgaataaaaacaaatgacagtggaagtctgtgatgcgttacagacactcagaaagccacaaatgctattgattcatggtcacggggg

SEQ ID NO: 67123 - DNA, 558 bp, Chicken  19866894336451_4
ggacactgctttgggccacatttctggtctgattctcattttctttgaaaacttggaacttaagagtctgtaaggcctttgagccattagctctctcttgagacccgacaacaagctgaaaagacagtgaggttaagcgttgtgcacagcgtgtaaacagagctgtttccttactggccttcyttccttggctaatttcaagactcaaattctccgttttattttrgtgtgaaaggttcaaaacaccacagaatgaacacactttgataattctgaaggcaaaagagaatcagcagctayrgataacaactcaggctttgctgcttttgaaacatacggtcataagagctatgagcactctaagactattaatcattaagtgtctctggatagccatggctcaaaggaacttacaaaccactgagacaagcactcttggtgaataaaaacaaatgacagtggaagtctgtgatgcgttacagacactcagaaagccacaaatgctattgattcatggtcacgggggtagctgaaactcaaatgataattaatctgaaa

SEQ ID NO: 67124 - DNA, 557 bp, Chicken  19866894336451_5
gacactgctttgggccacatttctggtctgattctcattttctttgaaaacttggaacttaagagtctgtaaggcctttgagccattagctctctcttgagacccgacaacaagctgaaaagacagtgaggttaagcgttgtgcacagcgtgtaaacagagctgtttccttactggccttcyttccttggctaatttcaagactcaaattctccgttttattttrgtgtgaaaggttcaaaacaccacagaatgaacacactttgataattctgaaggcaaaagagaatcagcagctayrgataacaactcaggctttgctgcttttgaaacatacggtcataagagctatgagcactctaagactattaatcattaagtgtctctggatagccatggctcaaaggaacttacaaaccactgagacaagcactcttggtgaataaaaacaaatgacagtggaagtctgtgatgcgttacagacactcagaaagccacaaatgctattgattcatggtcacgggggtagctgaaactcaaatgataattaatctgaaa

SEQ ID NO: 67125 - DNA, 600 bp, Chicken  19866894336452_1
ggggaaagagagaaggctctgggaattataggctgtcagtcttacttcggtgcttggcagaatcatgtaaagaattctctgcaaagattatttccacaaagacaatgcagttattgaccacaaccactacggattcatgagggaaaaaacctgtttaatgaatttttttttttttttttttttttggtgagaaagttactcaaaccccttgaccaagtgaagccagttgatgcaactttttggatttcagcacagcattcaatattgtttttcacagtacccttctggatgatagcaagytggcaatgagtcagcagatagccaaaggggccagctgcattctggggtgcatcaggcacaattttgctagtcatccaagagtaaagattgtcccactctgctctgctctggtgtggcctcacctaaaatactatttggagttctgggcatcatagtacaaaaaggacataaaattatttgttgagcattggaacagtggtcataacaccaagcctgctggagttcaagaagcagttagacagcggtctcagaaatacagtttgaattttgggcagttctgtgtggagccagaagataggc

SEQ ID NO: 67126 - DNA, 600 bp, Chicken  19866894336459_1
gcgacgaacagctcgtcttgctgttgtattttgtatccacagatcaatacatgggagtagagccccctacttttatttgcatttagggaaacagaggcgtagtgaaataacataaattttcagcatcccccaggagacaaacagcaaaaatcagagcacacaaccaaatcttttgagtcctgcaccgatccatctctgctgattagctagtcagaaagccttcttattttccagatgccttctaatgtcttcatatctgaattatttatttgtggcaaagatttgaatttaaatagacaygctatggcatttagctacacaatttattcccaaatgtggattgcaatttgttaaatgaatatggatagttgtaatggatgaacagctaaatagttgaattatgcaaccctaatgacatacttttttcctttttttcccatatatattttaacacagttattcaaaactccattatggagcactttttaccgtgtaagtttaaaattttcattgctgctggtctgcccatgcccagtacatggcttgcaatgaatgaaattacaagtaataccagcaaagctggatgggtattgtkttcaa

SEQ ID NO: 67127 - DNA, 600 bp, Chicken  19866894336459_2
gacaygctatggcatttagctacacaatttattcccaaatgtggattgcaatttgttaaatgaatatggatagttgtaatggatgaacagctaaatagttgaattatgcaaccctaatgacatacttttttcctttttttcccatatatattttaacacagttattcaaaactccattatggagcactttttaccgtgtaagtttaaaattttcattgctgctggtctgcccatgcccagtacatggcttgcaatgaatgaaattacaagtaataccagcaaagctggatgggtattgtkttcaagttcaaatgtccatgtctgttctgtaccgcctagcaccttaacaccctcagcaatgcaggcgtcctccctcactggaggtgtgcccattccccttgctgggcctggcagcagagggacaggacagggcagcagtcaagcagctgtctggatttaatccccaacttcaccttgggcttctctgagatcatttaaacctttgaactctttaaagtgaggataacagcactttgcttgccagaggcagtgaagataaagccagcagcaacttgggaccacttgatgactctggccatg

SEQ ID NO: 67128 - DNA, 600 bp, Chicken  19866894336461_1
ggtcattccggagagctgaagctcacggcagcttagcaggcagaagcgagaagtttgcttgttactcagggagggaaaatcagaggcacggggcactgtgggcaattgcatggataaagagcatggatagggattaaagtcaaagtgtggggcagcccaggagcagcacggtgtgatggcagcccatggcagcagatggcagtggctctgtgctgcctgcaggcagccctgagcagtgcttagcatggcaagtgtcaaagcctggggctctgggactcaaaatgaactcctatttctgcygastggcaggtgggtagatttgcatagagtggcatatcttgtgggctctgagactgagctgagtggatgagagaggggagctggttggtgtgctgcagagcccaccctgtgctgcattttgggtgctgtgaccatgagtttggccctatgggagatacccagcatggcaccgacaccagggaaggctgcgggggctgagggctgccctgcatgggtgcagtgcctgccaggggtgggcctggaaggaaggaagaactcatctgtagagcagcgggatgggagcccgccccragccacacc

SEQ ID NO: 67129 - DNA, 600 bp, Chicken  19866894336461_2
cattccggagagctgaagctcacggcagcttagcaggcagaagcgagaagtttgcttgttactcagggagggaaaatcagaggcacggggcactgtgggcaattgcatggataaagagcatggatagggattaaagtcaaagtgtggggcagcccaggagcagcacggtgtgatggcagcccatggcagcagatggcagtggctctgtgctgcctgcaggcagccctgagcagtgcttagcatggcaagtgtcaaagcctggggctctgggactcaaaatgaactcctatttctgcygastggcaggtgggtagatttgcatagagtggcatatcttgtgggctctgagactgagctgagtggatgagagaggggagctggttggtgtgctgcagagcccaccctgtgctgcattttgggtgctgtgaccatgagtttggccctatgggagatacccagcatggcaccgacaccagggaaggctgcgggggctgagggctgccctgcatgggtgcagtgcctgccaggggtgggcctggaaggaaggaagaactcatctgtagagcagcgggatgggagcccgccccragccacaccagt

SEQ ID NO: 67130 - DNA, 600 bp, Chicken  19866894336461_3
atttctgcygastggcaggtgggtagatttgcatagagtggcatatcttgtgggctctgagactgagctgagtggatgagagaggggagctggttggtgtgctgcagagcccaccctgtgctgcattttgggtgctgtgaccatgagtttggccctatgggagatacccagcatggcaccgacaccagggaaggctgcgggggctgagggctgccctgcatgggtgcagtgcctgccaggggtgggcctggaaggaaggaagaactcatctgtagagcagcgggatgggagcccgccccragccacaccagtgggaactttgtgttaattgccatgcagactgctctaattacaggctggagaggagctgcatcggacctgttcttccttatcagtttattgctgcgatgttctcctggacgctgggatgaatcagagcattgcgttgcctttcgtgctggctggaatacatttcctggagaatgtgaagggtgtttcagtgctattaatgagtaattaacctggatgctctgggttagaggctgcttggcattcactgctcatgggaaaactcagcacgaggaagttgggaggtggccg

SEQ ID NO: 67131 - DNA, 600 bp, Chicken  19866894336467_1
caaaccctctgaaataaaagaaaatccaggctatactttattgtattgtatattgcagtggctgctaataccatctttgcagacctcaactcagagcagctacataatccataacttgccctgtaatgacagtgaattaataaagtgtgataaagctcctgacctttgaagtactctgagaggtggataaagaagtcatttttcatgcctacgtattcttagtagccgcactagttgtgactacaaaactcattctaccgtaacattctgtggatggatacctggaaaactttacattayggggatgctggaggggacaatctagacccaaagcttgatgtttatgtatgcctgcttaactcctacttgctatatgacccagcttccttgctgcatagaactcccaaattcttgaattcctgctgtaatcatgcaagtgtctgaagtggtggttcactcgatgcagggcagacacatgagatgttgggtcttggctaggcggtgccttcagttgtgttgtgttatcctggtgggaaatgccagaggcactagtcaaatgtttatctaccgctgagtataaaatgcttctagcaggcatgc

SEQ ID NO: 67132 - DNA, 472 bp, Chicken  19866894336468_1
ttgtggtgatacagtaaaagtaaataatgtatgaaaagaacagagacctttgaagaaaagaactgcacgttaatggagagcagttcagccccagcaagaaatctgtcaggctacctgaattttgtttgttttgctttttttcttcctcatctctcagtttcaagataactctctagtaaaaaatacctttactgcagttgtactggtgctatgcagatgacaaggaaagagaaatcactcaaattgcctcaatgtatttgataggtctggggacagatgagtactaactcaggaggtgayctattgggtaatgaatatgatgacccaagctcatgtttcagaaggagtcatttccctcaggaccagagagtttctttgtgcattaggtctyaatagcagaatgatttaaaaaatcattccttgtgtccttgttgaggttgtgacctgcttcctcttgctcttccgatgctat

SEQ ID NO: 67133 - DNA, 381 bp, Chicken  19866894336468_2
ttgtggtgatacagtaaaagtaaataatgtatgaaaagaacagagacctttgaagaaaagaactgcacgttaatggagagcagttcagccccagcaagaaatctgtcaggctacctgaattttgtttgttttgctttttttcttcctcatctctcagtttcaagataactctctagtaaaaaatacctttactgcagttgtactggtgctatgcagatgacaaggaaagagaaatcactcaaattgcctcaatgtatttgataggtctggggacagatgagtactaactcaggaggtgayaatagcagaatgatttaaaaaatcattccttgtgtccttgttgaggttgtgacctgcttcctcttgctcttccgatgctat

SEQ ID NO: 67134 - DNA, 600 bp, Chicken  19866894336475_1
atccggtttccttttccgttttaaattcaggacataaagcccgacctaattttttacaggaacatttgccaggctccttgaagccatacttgggaacagagaataattagcaattaaaaaaggatgatgaatacgtactgtaattttgctctcttctgtaataaagatagagtttgtatgtcccttagtatttaaagattggttttaaactgcagaatgcttctttgtatttggaaataaagccatatgtgttgattacactgcttagaggctttacattgaaaaaggggctgtattgtygtgtgtgaaagtcaggacagcactgttaggtgctctcaaaaagaaggctartgaggagcttgaaggcagtgattttcctattagctgacttgccaagcagatgattcttcagctttcctccagcttagatctgaaggtggaaaagagatcctttgtacattcaagatttgttgtcgctttatttgtgcaacagcagaagtgcatctcagggttactgcttagttccagtgagagccatttaccacttgcccacatgaacctttccctgcggtttcagcttggaagccatatacttcctca

SEQ ID NO: 67135 - DNA, 600 bp, Chicken  19866894336475_2
ttttacaggaacatttgccaggctccttgaagccatacttgggaacagagaataattagcaattaaaaaaggatgatgaatacgtactgtaattttgctctcttctgtaataaagatagagtttgtatgtcccttagtatttaaagattggttttaaactgcagaatgcttctttgtatttggaaataaagccatatgtgttgattacactgcttagaggctttacattgaaaaaggggctgtattgtygtgtgtgaaagtcaggacagcactgttaggtgctctcaaaaagaaggctartgaggagcttgaaggcagtgattttcctattagctgacttgccaagcagatgattcttcagctttcctccagcttagatctgaaggtggaaaagagatcctttgtacattcaagatttgttgtcgctttatttgtgcaacagcagaagtgcatctcagggttactgcttagttccagtgagagccatttaccacttgcccacatgaacctttccctgcggtttcagcttggaagccatatacttcctcaatcacgctccagaattgttgcctagtgtggctcagtgctattaaaagatgg

SEQ ID NO: 67136 - DNA, 600 bp, Chicken  19866894336478_1
aaatcctgaggaaggcacgtaagatgtaacgccttttcccctcttatttcccttggactgtctttcccctctttcgtattgcagcagcacctattgtttgtcagacgaccggttaaggcttagggtggaacaggcttatgatatagtcagaacttttgtaatttgaactcctatgtaacttctctgcttaccacaggggagataaatcctcttacccacctgtcaggtaggctcaacagagcagctggaaataagaaaacaagctgtgcatgaccacccggtccctgctgaccattccgkgtgtaactgggagcatgctttgctttctcctgtgttggagatattgcctggagctttacctgtggggtctccctagacactctggtgctgagaagtccactctgctcagcaaagtcatctgaggtgacaaaagcagtttgagcaattgacagagcttaaagttacagatgaaaagggaacttttcatcaaaggctccaactttttctataatattgctgcccccaggcttgctctgctgatgactctctgttggcctgtgctccttggggtcataggaaaactgttttgtctgttgaaga

SEQ ID NO: 67137 - DNA, 600 bp, Chicken  19866894336483_1
tgcagagagagtagggttaaacacacataggagatcctcctgttgagtcatgagattcagagtgtaccccatttgtttctaaactccttgaaccatggaaggaaggagtccaggtgtggctggatccacttcttgtcccagacttagacaataatttatgtctaaaggatcaaatgcacacaatcaaagatgtaatcttagcaaagccaacaagcttaaaacaaactatgagccactaatcaagtatctgcattgacaaggtgtcttgaaaaagtataagggatctatgcacaggcatarcctcatgaagcatccytacttgatgggagatcctgttatgcagcctccctccacgcaggagaggttgaggggctttgggctactcactatttacagatgatgatatgctcatagccatacttagctttcaggcacactctctattggccctcagctattgcaccaagtgtctgctatcatttctttcagcccccagtttgagataggtttgtggtcattaatttgtattagtgagagtggaggaagttggggaaagaagggagagagcagggagcacactgtcacaggtcacaacatgca

SEQ ID NO: 67138 - DNA, 600 bp, Chicken  19866894336483_2
ttaaacacacataggagatcctcctgttgagtcatgagattcagagtgtaccccatttgtttctaaactccttgaaccatggaaggaaggagtccaggtgtggctggatccacttcttgtcccagacttagacaataatttatgtctaaaggatcaaatgcacacaatcaaagatgtaatcttagcaaagccaacaagcttaaaacaaactatgagccactaatcaagtatctgcattgacaaggtgtcttgaaaaagtataagggatctatgcacaggcatarcctcatgaagcatccytacttgatgggagatcctgttatgcagcctccctccacgcaggagaggttgaggggctttgggctactcactatttacagatgatgatatgctcatagccatacttagctttcaggcacactctctattggccctcagctattgcaccaagtgtctgctatcatttctttcagcccccagtttgagataggtttgtggtcattaatttgtattagtgagagtggaggaagttggggaaagaagggagagagcagggagcacactgtcacaggtcacaacatgcagtttggcaacttcaaa

SEQ ID NO: 67139 - DNA, 599 bp, Chicken  19866894336495_1
  misc_feature (1)..(168): n is any nucleotide
nnnnnnnnnnnnnnnnnnnnnnnnnnnnnnnnnnnnnnnnnnnnnnnnnnnnnnnnnnnnnnnnnnnnnnnnnnnnnnnnnnnnnnnnnnnnnnnnnnnnnnnnnnnnnnnnnnnnnnnnnnnnnnnnnnnnnnnnnnnnnnnnnnnnnnnnnnnnnnnnnnnnnnnnatacaagaattaggggatctggaggagaacagaacatagactggctgatcagcaaaacgatggatgctgatggagtatctcagtggaaatgaagtgctgcaagggcagctggtcagcaaagtgctgatgggmtgatgctgggaacggggtggtttggctgtgagcagagtgctctgggaagcaactcagactgggtttcggtttggaacctgttttccatttttgtctggcagtgtcagaatatctcgactcagcaggttgaggacaggacttctccagcacaggtttgggaggaaatgacactttgctgcagtgtgccgttgcatcatgttgtctgaggcagaatgggaaagtcaaaaatcaaggaaagtcggaagtggagcaaaaatgcttcagtttgcccaaaagaagcttttttttttttttttttt

SEQ ID NO: 67140 - DNA, 600 bp, Chicken  19866894336500_1
catcagggaacatggggagcaatttgtgctgggcaggaggggcgggagttgttcccacattgttccacacagtctccaagtgccactcattgctctccttatttgctgacagagcctgaaatgattccctaatgcatttcctgggtgatttgttgctcaggcacagatgcaactggaggtgcccagtccataggtgagcagttgctgtgtgcatgacggcaggatgcttcgctggctttgcagggcacagagagcacccctgaggtgcaggcatctgatgttggggatggcctttctgcrgggtgggaatccaaggatcttccagcctggttccacctttcattcttatgaagacagctacaaatctcattacctccagtggtgcgttgccaacttcagcygtgccagcgctgcccttccctctgactttgtttgcgtcaatagagcagaattgttgcgcatctctgccggcacaaccaaagggaaaattggtgcatctcgtcagtctggctcaactcgagagtttcagggattgtgttctggatcttttttagcaatcttgaaaagagggagagaaatctgtaattaaatcaatacata

SEQ ID NO: 67141 - DNA, 600 bp, Chicken  19866894336500_2
tttgctgacagagcctgaaatgattccctaatgcatttcctgggtgatttgttgctcaggcacagatgcaactggaggtgcccagtccataggtgagcagttgctgtgtgcatgacggcaggatgcttcgctggctttgcagggcacagagagcacccctgaggtgcaggcatctgatgttggggatggcctttctgcrgggtgggaatccaaggatcttccagcctggttccacctttcattcttatgaagacagctacaaatctcattacctccagtggtgcgttgccaacttcagcygtgccagcgctgcccttccctctgactttgtttgcgtcaatagagcagaattgttgcgcatctctgccggcacaaccaaagggaaaattggtgcatctcgtcagtctggctcaactcgagagtttcagggattgtgttctggatcttttttagcaatcttgaaaagagggagagaaatctgtaattaaatcaatacatatgtaaacgagcatctgccacagaaccggtttaacttctttgtgttcaacatgtatttctgtcggtgcgttatttgtgacatattctttgtatataagcatg

SEQ ID NO: 67142 - DNA, 600 bp, Chicken  19866894336500_3
aagagggagagaaatctgtaattaaatcaatacatatgtaaacgagcatctgccacagaaccggtttaacttctttgtgttcaacatgtatttctgtcggtgcgttatttgtgacatattctttgtatataagcatgttattaaattggaatttggcatgatttaagcaattaaatgagtcaaactgtacagtttcccttgtccatgcatgtgaacaacttttttaagctgttttgttggctcttgatgtgcattctcaagactgctctcaattgacagctactttcatggttatttagmagtaggtttgggtaaatcgtgcagctgataagctgtcagcactcaggttttcactggggttgatgtgaatctaaaagcccttctctcagggctgtgattgagtttggtccattgctgtgtgtccccaggagcccttcctctgaaacctcggccaacgcaacggtgtcattgactccactctgtgtctttggtggctctaacacaagtggctctgtttcaatcatctggcacacagtaaaactcccgggagcagacaggcattacggcatgaaagaggatgttgttctttcccatgtagga

SEQ ID NO: 67143 - DNA, 600 bp, Chicken  19866894336505_1
ttatctcttgactatatattgcactacccttatgaaacataccatatgtagttatatttgatcacaaagagaaaggaactttattctaagaagactgttattaaccttgcagaagtcagtgaaaaagatgcttattgatctcagtagtgttgggttcagaatgaagaagtaacagcaggcaaacaaacaagaatgtaaatacttagctctaagtattatgacaaactgtctagaatagtgaatgaagatgctgaagattaatctgattaatttgcttggtaaattagtcaaggcttgttytgttcttgtgaggcatgctggcactacaacttttcmctaatgtgtctccttcacagaatagtttaaatygtattcaaaatcacatctctatgtcagctgctctttctgacttcattggtgcaaaaataaaatgagcatttaactcaatgtctccatgagtatatagagcaggattgccaaaaaggacttgtgggtactggtggatgggaagctggacatgtgccagcagtgtaccctcatagcccagaaggccaactgtatcctgggaagcaccaaaagaagtgtggtcagcggggcaag

SEQ ID NO: 67144 - DNA, 600 bp, Chicken  19866894336505_2
acataccatatgtagttatatttgatcacaaagagaaaggaactttattctaagaagactgttattaaccttgcagaagtcagtgaaaaagatgcttattgatctcagtagtgttgggttcagaatgaagaagtaacagcaggcaaacaaacaagaatgtaaatacttagctctaagtattatgacaaactgtctagaatagtgaatgaagatgctgaagattaatctgattaatttgcttggtaaattagtcaaggcttgttytgttcttgtgaggcatgctggcactacaacttttcmctaatgtgtctccttcacagaatagtttaaatygtattcaaaatcacatctctatgtcagctgctctttctgacttcattggtgcaaaaataaaatgagcatttaactcaatgtctccatgagtatatagagcaggattgccaaaaaggacttgtgggtactggtggatgggaagctggacatgtgccagcagtgtaccctcatagcccagaaggccaactgtatcctgggaagcaccaaaagaagtgtggtcagcggggcaagggaggtgatcctgcccctcttctctgtgctggtgag

SEQ ID NO: 67145 - DNA, 600 bp, Chicken  19866894336505_3
agaaaggaactttattctaagaagactgttattaaccttgcagaagtcagtgaaaaagatgcttattgatctcagtagtgttgggttcagaatgaagaagtaacagcaggcaaacaaacaagaatgtaaatacttagctctaagtattatgacaaactgtctagaatagtgaatgaagatgctgaagattaatctgattaatttgcttggtaaattagtcaaggcttgttytgttcttgtgaggcatgctggcactacaacttttcmctaatgtgtctccttcacagaatagtttaaatygtattcaaaatcacatctctatgtcagctgctctttctgacttcattggtgcaaaaataaaatgagcatttaactcaatgtctccatgagtatatagagcaggattgccaaaaaggacttgtgggtactggtggatgggaagctggacatgtgccagcagtgtaccctcatagcccagaaggccaactgtatcctgggaagcaccaaaagaagtgtggtcagcggggcaagggaggtgatcctgcccctcttctctgtgctggtgaggtcccacctagaggtgtccaaatgtggagcctt

SEQ ID NO: 67146 - DNA, 599 bp, Chicken  19866894336515_1
  misc_feature (1)..(154): n is any nucleotide
nnnnnnnnnnnnnnnnnnnnnnnnnnnnnnnnnnnnnnnnnnnnnnnnnnnnnnnnnnnnnnnnnnnnnnnnnnnnnnnnnnnnnnnnnnnnnnnnnnnnnnnnnnnnnnnnnnnnnnnnnnnnnnnnnnnnnnnnnnnnnnnnnnnnnnnnnnactctcatggcacagtggcacagcagtggcattgtcacggcacagtgacgccttggcacaaaggaaccacggcacagtgatgtgattgtggcacagcaatggcgctgttgtggcatggtgacaccacggcaccacaatgggacacrgcacaatgatatgaccgtggcacagtgatacaaccgtggcacartgacaccacrgcacaaagtgtgacaacggcatcacggcagtgtgacaccaaagtgggacatggcatagcaatggcattatcacggcacagtgatatgaccatggcaccatggcactgtcacatggcacagcaatggcacagtgatacaaccgtggcgctacggcaccgcattgccaccctcatggcacagtgatatgaccacggccccatggcacagcaatggcactaccatacgagcacagcacagcaacggca

SEQ ID NO: 67147 - DNA, 599 bp, Chicken  19866894336515_2
  misc_feature (1)..(110): n is any nucleotide
nnnnnnnnnnnnnnnnnnnnnnnnnnnnnnnnnnnnnnnnnnnnnnnnnnnnnnnnnnnnnnnnnnnnnnnnnnnnnnnnnnnnnnnnnnnnnnnnnnnnnnnnnnnnnnactctcatggcacagtggcacagcagtggcattgtcacggcacagtgacgccttggcacaaaggaaccacggcacagtgatgtgattgtggcacagcaatggcgctgttgtggcatggtgacaccacggcaccacaatgggacacrgcacaatgatatgaccgtggcacagtgatacaaccgtggcacartgacaccacrgcacaaagtgtgacaacggcatcacggcagtgtgacaccaaagtgggacatggcatagcaatggcattatcacggcacagtgatatgaccatggcaccatggcactgtcacatggcacagcaatggcacagtgatacaaccgtggcgctacggcaccgcattgccaccctcatggcacagtgatatgaccacggccccatggcacagcaatggcactaccatacgagcacagcacagcaacggcaccgccacagcacaaagcacagcgccgccatcgtggcaccaccgc

SEQ ID NO: 67148 - DNA, 599 bp, Chicken  19866894336515_3
  misc_feature (1)..(100): n is any nucleotide
nnnnnnnnnnnnnnnnnnnnnnnnnnnnnnnnnnnnnnnnnnnnnnnnnnnnnnnnnnnnnnnnnnnnnnnnnnnnnnnnnnnnnnnnnnnnnnnnnnnnactctcatggcacagtggcacagcagtggcattgtcacggcacagtgacgccttggcacaaaggaaccacggcacagtgatgtgattgtggcacagcaatggcgctgttgtggcatggtgacaccacggcaccacaatgggacacrgcacaatgatatgaccgtggcacagtgatacaaccgtggcacartgacaccacrgcacaaagtgtgacaacggcatcacggcagtgtgacaccaaagtgggacatggcatagcaatggcattatcacggcacagtgatatgaccatggcaccatggcactgtcacatggcacagcaatggcacagtgatacaaccgtggcgctacggcaccgcattgccaccctcatggcacagtgatatgaccacggccccatggcacagcaatggcactaccatacgagcacagcacagcaacggcaccgccacagcacaaagcacagcgccgccatcgtggcaccaccgcagtgacacca

SEQ ID NO: 67149 - DNA, 455 bp, Chicken  19866894336515_4
ggcacagtgatatgaccatggcaccatggcactgtcacatggcacagcaatggcacagtgatacaaccgtggcgctacggcaccgcattgccaccctcatggcacagtgatatgaccacggccccatggcacagcaatggcactaccatacgagcacagcacagcaacggcaccgccacagcacaaagcacagcgccgccatcgtggcaccaccgcagtgacaccacagtgctccacagcatagcgatggcactgcaatgaccccatcaccgcccagcgatgcaacagcagcagcagcasgggatgcaacgacggcaccgccgcagcacaacagcagtgcaacagcacagcgtggggccgctcctggcacacatccccacaccccgtgactcagagcagcccacgtcaccccgcgctcaccgtgaccagcaggcagtgcagatcacggggctcag

SEQ ID NO: 67150 - DNA, 599 bp, Chicken  19866894336532_1
  misc_feature (1)..(114): n is any nucleotide
nnnnnnnnnnnnnnnnnnnnnnnnnnnnnnnnnnnnnnnnnnnnnnnnnnnnnnnnnnnnnnnnnnnnnnnnnnnnnnnnnnnnnnnnnnnnnnnnnnnnnnnnnnnnnnnnnntaattgtgctgctagcagtctgaaaactaacaagttgaaacatttcaatctgaaattaatctctatttttgcagagatattatatcatgaattagtagcagaggagtaggataaagctgaatttacagctttgtaagaaagagcatttgaaagaaaggatgcaaacagaaaattcaagaaacaagrgaggtgtgcagtaataattttgaagacaggamgtctgtgtatgggatagtaaggtgagaaaaatcaactgaaaagaaaaaaaattgacccagagcttgcagatctcagttccctgattccctgatcagaatcttgcttcccaagattagtgacacttaatgtgagatggcagctagtcttctcttttgactgctgggtgatcatgagcaatgtgttccttggagtacagaaaagcaatgtgtagcctgttagttatggccaatgaatgttatgaaacccaatctgccactcactctaat

SEQ ID NO: 67151 - DNA, 599 bp, Chicken  19866894336532_2
  misc_feature (1)..(82): n is any nucleotide
nnnnnnnnnnnnnnnnnnnnnnnnnnnnnnnnnnnnnnnnnnnnnnnnnnnnnnnnnnnnnnnnnnnnnnnnnnnnnnnnnntaattgtgctgctagcagtctgaaaactaacaagttgaaacatttcaatctgaaattaatctctatttttgcagagatattatatcatgaattagtagcagaggagtaggataaagctgaatttacagctttgtaagaaagagcatttgaaagaaaggatgcaaacagaaaattcaagaaacaagrgaggtgtgcagtaataattttgaagacaggamgtctgtgtatgggatagtaaggtgagaaaaatcaactgaaaagaaaaaaaattgacccagagcttgcagatctcagttccctgattccctgatcagaatcttgcttcccaagattagtgacacttaatgtgagatggcagctagtcttctcttttgactgctgggtgatcatgagcaatgtgttccttggagtacagaaaagcaatgtgtagcctgttagttatggccaatgaatgttatgaaacccaatctgccactcactctaatatagtatgagtgccataattttgaaggaaaaa

SEQ ID NO: 67152 - DNA, 599 bp, Chicken  19866894336536_1
  misc_feature (1)..(136): n is any nucleotide
nnnnnnnnnnnnnnnnnnnnnnnnnnnnnnnnnnnnnnnnnnnnnnnnnnnnnnnnnnnnnnnnnnnnnnnnnnnnnnnnnnnnnnnnnnnnnnnnnnnnnnnnnnnnnnnnnnnnnnnnnnnnnnnnnnnnnnnncctaggaaggtgggccgcaagacacctgaaatattggtactaggagaatctagaagtttctcatcagaagagaggaggagctgacagcgaaagagcagcagcttcttaaactgcctaccagctgttactgtttagcctattttagcttgctttgtagacatacrtgaaaaataaaatttgtcgtgttaacactgcttgggagctgagctgaccgcagaagtttgccctcaaatgatcttctaaggcaaaatgagatccttaagatcttaagcatcattaaaaacttcccagaaaagctgcaattaatcagttaactcttgttgctcatttcactgtgcacaggtaactacaacaaaaaggctgaaaataagagcacctttacaaagaaaaaaattctgatatgagtaagttgccctgcattactgtcatttacttacggaggctgataaataactattgaagt

SEQ ID NO: 67153 - DNA, 600 bp, Chicken  19866894336540_1
ctcatgcattgaaaatgactgaaagcaacatttagttctcattaaacatctaaagatccctgttctgcaaatttactattaaaagaggaaaaatacagaacaaataagggaaaagagccaatacactgataaccacaagttaccaaaaatatattctagacttccaggaaaaatggtgcaagttcacaagttaagggcatttacatacaagttttacccgtttccttgcattaaatagatatattttactatttccctaaaacagtaaatgctcaaaaatctttttgctgaaatacaaaygatccataaggtaaaytctaccccttaactcaaattaaaaaagagcgttctaaattatcmagtgacaaagcagaaggaaaactagcactaaaaattaggaagcaatgatttgccatgaattacgcaattaaagctaattataatttcaacctattataagcaatattactacacaagattttatactttcaacattatgcttgagcttaatgttgtttttctgaactggctatcttccattaccacctgttttttgttcattacttaaaacaggaaaagtcactttcctgcttcctctac

SEQ ID NO: 67154 - DNA, 600 bp, Chicken  19866894336540_2
gactgaaagcaacatttagttctcattaaacatctaaagatccctgttctgcaaatttactattaaaagaggaaaaatacagaacaaataagggaaaagagccaatacactgataaccacaagttaccaaaaatatattctagacttccaggaaaaatggtgcaagttcacaagttaagggcatttacatacaagttttacccgtttccttgcattaaatagatatattttactatttccctaaaacagtaaatgctcaaaaatctttttgctgaaatacaaaygatccataaggtaaaytctaccccttaactcaaattaaaaaagagcgttctaaattatcmagtgacaaagcagaaggaaaactagcactaaaaattaggaagcaatgatttgccatgaattacgcaattaaagctaattataatttcaacctattataagcaatattactacacaagattttatactttcaacattatgcttgagcttaatgttgtttttctgaactggctatcttccattaccacctgttttttgttcattacttaaaacaggaaaagtcactttcctgcttcctctactcccaagcaaattctc

SEQ ID NO: 67155 - DNA, 600 bp, Chicken  19866894336540_3
tgttctgcaaatttactattaaaagaggaaaaatacagaacaaataagggaaaagagccaatacactgataaccacaagttaccaaaaatatattctagacttccaggaaaaatggtgcaagttcacaagttaagggcatttacatacaagttttacccgtttccttgcattaaatagatatattttactatttccctaaaacagtaaatgctcaaaaatctttttgctgaaatacaaaygatccataaggtaaaytctaccccttaactcaaattaaaaaagagcgttctaaattatcmagtgacaaagcagaaggaaaactagcactaaaaattaggaagcaatgatttgccatgaattacgcaattaaagctaattataatttcaacctattataagcaatattactacacaagattttatactttcaacattatgcttgagcttaatgttgtttttctgaactggctatcttccattaccacctgttttttgttcattacttaaaacaggaaaagtcactttcctgcttcctctactcccaagcaaattctcaactgtgaattaacaagtactcacttgtgcctgcatacacacac

SEQ ID NO: 67156 - DNA, 600 bp, Chicken  19866894336542_1
acaaaagcagctcgggaaagcaacttaatctggacactcaccttctaaaggactggatttaactgttaggagtcctagcatagatagatatatattttctcagtatctgggcccagaatgattatctaagaatttggcatcaggagttatcactctcttttatctttatatcttttatgataacttgaatataatctcagtttaatgactgagaatatgtagcccctctcatcttaaattaattcatcagattaatgcaccttaccttggtaaaatgcctgctccactgaagtatgtackaggcttcctgctgaggttaccctactctgtacaggggaatgcaagattgacagactgggaggtgaaacagtaagaagtaacctcttcctgcagccctaattttagcatactcttctggacacacagatacaatgggtaactgctggataaaagtctgaagtaattccaataatcttagtttaaaatctggctttttattgttctatatgagttaccaaactgttgttatacagagccttggtccgtacatactcttctgtcctacttctttttgcgttcctcattttacagtagcctggc

SEQ ID NO: 67157 - DNA, 600 bp, Chicken  19866894336549_1
ctacctcgaacaaagacataaccactgtactcttcatagtattctcccatcaccacacgcagagtgtaaagaccttcatcttccttgtttgcatgagtcagtgttaatgaagctctctccccagaccagtgcatctggacccatttggacggtgtaataagaacacctagaaattagagaattttgtaatgagaattagctgagtgcattgagaatgctgtgtgtagcttgaaatagattggaaatacacaagagaccatccctactgttcaattttctatcctcaaagacagtcatagrtgaaaggcaactttgctctcagagtttaactttagaatgtaacagcttygttggctactgcacaacagccttgtgtaattacttgacagatgtaataaataggaaaagctacagaggctatrttgatgggtcacagagaagttagagctgataaaatgtttttagtatttaagcttaagaatgaaaaaaaaggaaaaaatacattttcacagcccttcctccgttttctaatggtaatttcacttcaaaatgctaaatttggaaaagctttgaattaaaaaagagaaaacgctcctgttt

SEQ ID NO: 67158 - DNA, 600 bp, Chicken  19866894336549_2
tcaccacacgcagagtgtaaagaccttcatcttccttgtttgcatgagtcagtgttaatgaagctctctccccagaccagtgcatctggacccatttggacggtgtaataagaacacctagaaattagagaattttgtaatgagaattagctgagtgcattgagaatgctgtgtgtagcttgaaatagattggaaatacacaagagaccatccctactgttcaattttctatcctcaaagacagtcatagrtgaaaggcaactttgctctcagagtttaactttagaatgtaacagcttygttggctactgcacaacagccttgtgtaattacttgacagatgtaataaataggaaaagctacagaggctatrttgatgggtcacagagaagttagagctgataaaatgtttttagtatttaagcttaagaatgaaaaaaaaggaaaaaatacattttcacagcccttcctccgttttctaatggtaatttcacttcaaaatgctaaatttggaaaagctttgaattaaaaaagagaaaacgctcctgtttatgaaaccaagaaaatatttgttaaatcatgacattcacacrtgctgaa

SEQ ID NO: 67159 - DNA, 585 bp, Chicken  19866894336549_3
agaccagtgcatctggacccatttggacggtgtaataagaacacctagaaattagagaattttgtaatgagaattagctgagtgcattgagaatgctgtgtgtagcttgaaatagattggaaatacacaagagaccatccctactgttcaattttctatcctcaaagacagtcatagrtgaaaggcaactttgctctcagagtttaactttagaatgtaacagcttygttggctactgcacaacagccttgtgtaattacttgacagatgtaataaataggaaaagctacagaggctatrttgatgggtcacagagaagttagagctgataaaatgtttttagtatttaagcttaagaatgaaaaaaaaggaaaaaatacattttcacagcccttcctccgttttctaatggtaatttcacttcaaaatgctaaatttggaaaagctttgaattaaaaaagagaaaacgctcctgtttatgaaaccaagaaaatatttgttaaatcatgacattcacacrtgctgaaattataaagttctacactgaacaaatttatgttcttgtcaaacgttctcaccattgcg

SEQ ID NO: 67160 - DNA, 365 bp, Chicken  19866894336549_4
cagcttygttggctactgcacaacagccttgtgtaattacttgacagatgtaataaataggaaaagctacagaggctatrttgatgggtcacagagaagttagagctgataaaatgtttttagtatttaagcttaagaatgaaaaaaaaggaaaaaatacattttcacagcccttcctccgttttctaatggtaatttcacttcaaaatgctaaatttggaaaagctttgaattaaaaaagagaaaacgctcctgtttatgaaaccaagaaaatatttgttaaatcatgacattcacacrtgctgaaattataaagttctacactgaacaaatttatgttcttgtcaaacgttctcaccattgcg

SEQ ID NO: 67161 - DNA, 600 bp, Chicken  19866894336554_1
cgctgaaaaggcagtaagataaatattcgttcccaggcgtatgtctttctacccagtatctccaaactgcaggaatgcagcctctgtggcactgcctttcatctcacatctctcctccctggatccacagtttttcctaccaagaaatcatttctcagcaagctccacaggctgggtgcagctatactggctacatcttgtttgccagaggaatgtgaaatccaaatcagtcctggaaccatacaacaaatctctgtactgctcacacaggcagcctgcactcagaattcagatacctayccaccctccttgcagcaagcagtgctatggcccttatagcatagctgtcttcagggragtttgggaggaattagcccttgtgttaactagaggatgcaagaaggacgatgaggtgtccatgctgtagactaaatgctgtattaggcacacagaagttctcaggctactggaaatcatagacaaagagtgcacttccacgttgcccagctcagcagaacaagtgtttctactaaatcccacttaaatattaatgtattcartgatcaggaagcaagcaggggaagggaagttgaaagggct

SEQ ID NO: 67162 - DNA, 600 bp, Chicken  19866894336554_2
atctccaaactgcaggaatgcagcctctgtggcactgcctttcatctcacatctctcctccctggatccacagtttttcctaccaagaaatcatttctcagcaagctccacaggctgggtgcagctatactggctacatcttgtttgccagaggaatgtgaaatccaaatcagtcctggaaccatacaacaaatctctgtactgctcacacaggcagcctgcactcagaattcagatacctayccaccctccttgcagcaagcagtgctatggcccttatagcatagctgtcttcagggragtttgggaggaattagcccttgtgttaactagaggatgcaagaaggacgatgaggtgtccatgctgtagactaaatgctgtattaggcacacagaagttctcaggctactggaaatcatagacaaagagtgcacttccacgttgcccagctcagcagaacaagtgtttctactaaatcccacttaaatattaatgtattcartgatcaggaagcaagcaggggaagggaagttgaaagggctctttgtgtgcaggaggcactcaggtggctccagctgctgccatctccgaggcatccc

SEQ ID NO: 67163 - DNA, 600 bp, Chicken  19866894336554_3
gctcacacaggcagcctgcactcagaattcagatacctayccaccctccttgcagcaagcagtgctatggcccttatagcatagctgtcttcagggragtttgggaggaattagcccttgtgttaactagaggatgcaagaaggacgatgaggtgtccatgctgtagactaaatgctgtattaggcacacagaagttctcaggctactggaaatcatagacaaagagtgcacttccacgttgcccagctcagcagaacaagtgtttctactaaatcccacttaaatattaatgtattcartgatcaggaagcaagcaggggaagggaagttgaaagggctctttgtgtgcaggaggcactcaggtggctccagctgctgccatctccgaggcatcccccagctgctctggggctgagcgttgtggatctcagagcttttcaccccacttctcaggtttctgagtgccctcactgcatcacgtcagtgcctggtactagcagagctacagctagggttagggttgctaaggtggaagacaagcctccctgtcagacatacctacctttgtgtccttttccttttgccctcggtctctctgc

SEQ ID NO: 67164 - DNA, 600 bp, Chicken  19866894336555_1
cattaaatatctggacagaagagattcagtttgataacgtagcgacacatattcacacttttgtggagtttcattttgactctgaaatcttcccggagtttctttgaaactctttggtccgttcctattaaaaatgtttgggctttaaaaagaaatgttgctaaaacctttcaattggacagcttggccactgcttggtgtgcaacttacctcatcaatggtgttaaaagttatgctggcatgctactacttacaagacctcgactttataaaagcgtaatcctcaacgacacgtagcartgagtattaatcggcaaaactaatttactgtcaactaaaacattagtatttctccacttttcttccatactagcgagtcgggggggagtcaggagaatgggtgagaaaaacaacaacatgagaaacaagcaaatccattaattcagcctgatagattttagaagagattccagtttttgcagacaacattcaatggaacaaatgttagtctcataagtgaaagcatgcttcaattttaccaccatccagagggtctagttaaatgcaatctacttcagatttcaggggattgttattatt

SEQ ID NO: 67165 - DNA, 600 bp, Chicken  19866894336561_1
ttagaaactaacacctgtgtatctttcacagagaggaacatctgctgtagagtaattgcttgtaaagatagtgttaccgtctgacaaagctcatgatactgaagtgttcccagcttgttggaagaagtaagattgaagtacactataacacggagagcagtccagacagtatttaactatgaaagtaaaatttccatcatatcacagtattttaataactgtaaacataacactaacttttttttgttttgtaatgatagtgcatgagaagtctggtagtagataagcaacagccaacawtttttttttaggttgtttttgttactgtctccatttctgatgcagttcttaacaattttaatccactttcctttctgctacttaaagcagtatggtaaatttgaagactcgggctttagctagagatagtgcaaattttaaaaagtgtatttttaaaaattggtaagctgattactgtcactttacaacactatgtctgcagcataactaaagttgcctgtacgtaagggctgtgctacagcactgtgcaaccttggtggaatcagaactatgagcgtactcagcacctgaaaaagtatt

SEQ ID NO: 67166 - DNA, 600 bp, Chicken  19866894336564_1
ttcaagctgcagaggcatacttagaagacccattaaaactgaaggtgtgcagaatggctttgaaaatctcagagtggccttttgccagctttttctgagtcacaccttgaaaccagcttacagtatcttttcattgacaacagtgcacattgaaaggacaaatctacacaaagggctatagatagtagcattgaaattagaatgttacagaaaagcctctgtcagcacagttcttaaaataacagcgccaaatgaccttcctctgcacttaaaaatacatgttacctattttaagctagrtatctttattttcttctaattgtgccgcatgtaatgatgagttttaccacaaggagacacaagaaggcatttgaggttatgcaccctctgacatgaggttatyactttcaggagcctggaattttctagctacaatctcagtgtggacatgtaaaatattctcatccataacgcgtttctaacaaggttatcagaaacaaacacaaccccaagtggtgtctgggacttcactgagataatcatagaatctagaatcaccaaggcccaaaactgaacatagtacttgaagtgcatcctcac

SEQ ID NO: 67167 - DNA, 600 bp, Chicken  19866894336564_2
accttgaaaccagcttacagtatcttttcattgacaacagtgcacattgaaaggacaaatctacacaaagggctatagatagtagcattgaaattagaatgttacagaaaagcctctgtcagcacagttcttaaaataacagcgccaaatgaccttcctctgcacttaaaaatacatgttacctattttaagctagrtatctttattttcttctaattgtgccgcatgtaatgatgagttttaccacaaggagacacaagaaggcatttgaggttatgcaccctctgacatgaggttatyactttcaggagcctggaattttctagctacaatctcagtgtggacatgtaaaatattctcatccataacgcgtttctaacaaggttatcagaaacaaacacaaccccaagtggtgtctgggacttcactgagataatcatagaatctagaatcaccaaggcccaaaactgaacatagtacttgaagtgcatcctcaccagtgctgagtacagaataacaatcacttccttgctgttcccagcaatgctatttctgataaaagctaggatgccataggccttcttggccacctgggcatgc

SEQ ID NO: 67168 - DNA, 599 bp, Chicken  19866894336566_1
  misc_feature (1)..(178): n is any nucleotide
nnnnnnnnnnnnnnnnnnnnnnnnnnnnnnnnnnnnnnnnnnnnnnnnnnnnnnnnnnnnnnnnnnnnnnnnnnnnnnnnnnnnnnnnnnnnnnnnnnnnnnnnnnnnnnnnnnnnnnnnnnnnnnnnnnnnnnnnnnnnnnnnnnnnnnnnnnnnnnnnnnnnnnnnnnnnnnnnnnggaggaggttcccccttcgcagggggattcccaaagctgcgagcagggcttgtagcccacccatctgcagcttgtcatcgctgggagctgcagcccagggctggccagcgggtcccgtcccsctcggggtccactcggctgattggggtgtgtstgtttaaccccctgtttgcagacccgctgtccccactgctggccctcctgctgtttgagcactgcgctttgtccttccagagtttccttcctgaagaaggcggtggaccaaaagaaccgtgccctggccagcctcaaccaggtgatgaacgtgagtgcagccctgctgtccggccaagagggccagaagcccattgcttgcaccgtcactgccaactggagctgcctcctgctccgtgataccgtcaccatctcctgcctgctggag

SEQ ID NO: 67169 - DNA, 599 bp, Chicken  19866894336566_2
  misc_feature (1)..(146): n is any nucleotide
nnnnnnnnnnnnnnnnnnnnnnnnnnnnnnnnnnnnnnnnnnnnnnnnnnnnnnnnnnnnnnnnnnnnnnnnnnnnnnnnnnnnnnnnnnnnnnnnnnnnnnnnnnnnnnnnnnnnnnnnnnnnnnnnnnnnnnnnnnnnnnnnnnggaggaggttcccccttcgcagggggattcccaaagctgcgagcagggcttgtagcccacccatctgcagcttgtcatcgctgggagctgcagcccagggctggccagcgggtcccgtcccsctcggggtccactcggctgattggggtgtgtstgtttaaccccctgtttgcagacccgctgtccccactgctggccctcctgctgtttgagcactgcgctttgtccttccagagtttccttcctgaagaaggcggtggaccaaaagaaccgtgccctggccagcctcaaccaggtgatgaacgtgagtgcagccctgctgtccggccaagagggccagaagcccattgcttgcaccgtcactgccaactggagctgcctcctgctccgtgataccgtcaccatctcctgcctgctggagaactgcagcgagtacagcctggagcagggctg

SEQ ID NO: 67170 - DNA, 600 bp, Chicken  19866894336568_1
ggtgttaagtggtgccttaaacgatgggaaaagcatgatgtcccgcagcgtttttaagacagctttctccatgggggggtattcccgcatatgggaaatgacctatgtgcaacatgtggcagtgctgtgagtgaaaacgaagtggggagctcagggcacgtggggtgaagcctcacctgctgccagtgcttcaggaggcagctcacaggttgcacagctgtggtagcaatgcttccctcggcctcagggaaaatccaacacaggggaagagatctccctgccaggagctcttggcaggaygagatgtggggctctgggggttggctttcccatattcgtgactctgagccagacctcaatgcttttgccacccaatggggagtgactggatttctagctgtaggtcaaaagcatgactgttaatttcagaaatgtttcatgcttctttacctgaagacttacaggtcttcattgtccttctacatgttgtgtttgtttggcctctacaaatgataaacttatcagggaaagctctctttctttttgtgtgtctgctgaacacccgcacagtgagatctcatcttaattaacagcaattcc

SEQ ID NO: 67171 - DNA, 560 bp, Chicken  19866894336573_1
actttctcaacagtagttctgcattgtattgagttaattagagcttttcattacaagagatgctatggggaacacacaaggcatagcaggtgtaagtcctttgacttaagctgtaattgctgcactgctttgagtaatcgctttggtgtctcaggagtcctgtatttgtcttacactgtatgaattccaatgggctgctggttgtctgtaaaaatctaaagggaataaaataaaaagcagatgtcagccttatgttctggtggctagcactatatattagatatgagcaggtttaaattwagcatacttagatattaattgttctgaaaatacattgtccaaaaatagatgttacttaagaatgattggggttttttttaagtcgaagatcataatttatatcttcatayttctatatctaaagagttgtgatatactgttagtaaaattaatgctgattttagtctaaactgctgtcttatagtaatctttgcataaactaagcatttttctgcattataacatcactaattagacattaaaaataagtaccccctgcc

SEQ ID NO: 67172 - DNA, 450 bp, Chicken  19866894336573_2
ctgtaattgctgcactgctttgagtaatcgctttggtgtctcaggagtcctgtatttgtcttacactgtatgaattccaatgggctgctggttgtctgtaaaaatctaaagggaataaaataaaaagcagatgtcagccttatgttctggtggctagcactatatattagatatgagcaggtttaaattwagcatacttagatattaattgttctgaaaatacattgtccaaaaatagatgttacttaagaatgattggggttttttttaagtcgaagatcataatttatatcttcatayttctatatctaaagagttgtgatatactgttagtaaaattaatgctgattttagtctaaactgctgtcttatagtaatctttgcataaactaagcatttttctgcattataacatcactaattagacattaaaaataagtaccccctgcc

SEQ ID NO: 67173 - DNA, 600 bp, Chicken  19866894336574_1
agtcctcatcaggatttcaaagaggaaaaaactgggaggcccttttactttttagtgcattaacaaatgcattcttgaaattaatgatcgaagaaactaagaacattaagactaaagaaacctcatcagctgatatttcctaaagatgagttcagccggtcttggtgcatttctcattgctttcatcaacaaaagctaatgcaagcttttttcactagtgaaaactcttatggtttggaaaatttcctccctgacagatctttgtgcccacagaggtcctgggagaccaggaccacagakagcatataggaaaagctgtggacagagggaactgctctgcctagctggatacacatcccttattccagcttactccctcacacttgcagcctcccttttctcattaacatttagctcctttcagagtctcttcaggtcaacaattccagcaaagcatgcaggtatgccctgcagcttttcctttctctgcattaagaaaaaccacagtaggaacagagcagtacatgggacagccagccaaaaagcaatagatttgcaggggtgggctttacatctagtcttcccagttccactggcagt

SEQ ID NO: 67174 - DNA, 599 bp, Chicken  19866894336584_1
  misc_feature (1)..(87): n is any nucleotide
nnnnnnnnnnnnnnnnnnnnnnnnnnnnnnnnnnnnnnnnnnnnnnnnnnnnnnnnnnnnnnnnnnnnnnnnnnnnnnnnnnnnnnntccccaggtgggagggagtgaatcactacttgggggctggtggggatgtgaaggactgctggaagctgcttgggagcacaggagtggggagaggggacagagtgctttgggtgccaatagcagtgtggcaaagggggttggatggagctctgaccactcccaaagacctctgctttcatgctgataatggtggttttctcctcaaaaaacaayttgctgctgactctgagctctttttctccagtgctcttcccatgaaggtcaacacagtgcccacagcctaagtgagggctttagatgtcaccagcccaatgcattcaaatgctcagtggcactcagggacatggttcagtgtgcatgggggtggcagcaggttgatggttggagctgatgatctcagtggtccttcccaaccttaacaaccctatgctgtgcaaatgccatactgcatgagactgggcagctcyagagwtgcataagaagtggttgagcttccagggcttgcatttctg

SEQ ID NO: 67175 - DNA, 600 bp, Chicken  19866894336584_2
ctctgctttcatgctgataatggtggttttctcctcaaaaaacaayttgctgctgactctgagctctttttctccagtgctcttcccatgaaggtcaacacagtgcccacagcctaagtgagggctttagatgtcaccagcccaatgcattcaaatgctcagtggcactcagggacatggttcagtgtgcatgggggtggcagcaggttgatggttggagctgatgatctcagtggtccttcccaaccttaacaaccctatgctgtgcaaatgccatactgcatgagactgggcagctcyagagwtgcataagaagtggttgagcttccagggcttgcatttctgtgttaaatgctcagacccgtgatgcttctgccccagctctctggcctgatgctgatgtttccagctgagtgtttctgcagcctccccagaaacgtggttctctgccatctggtgtgtgttaacctttgcactccttagcaaaacattaggctttgctggtcatatgataaggtgtatccagtgaaaaaaagagaaatggcaagctaggtttttcacattacatcgatgaaaattgttgcttctacagcacagcag

SEQ ID NO: 67176 - DNA, 600 bp, Chicken  19866894336584_3
ctttcatgctgataatggtggttttctcctcaaaaaacaayttgctgctgactctgagctctttttctccagtgctcttcccatgaaggtcaacacagtgcccacagcctaagtgagggctttagatgtcaccagcccaatgcattcaaatgctcagtggcactcagggacatggttcagtgtgcatgggggtggcagcaggttgatggttggagctgatgatctcagtggtccttcccaaccttaacaaccctatgctgtgcaaatgccatactgcatgagactgggcagctcyagagwtgcataagaagtggttgagcttccagggcttgcatttctgtgttaaatgctcagacccgtgatgcttctgccccagctctctggcctgatgctgatgtttccagctgagtgtttctgcagcctccccagaaacgtggttctctgccatctggtgtgtgttaacctttgcactccttagcaaaacattaggctttgctggtcatatgataaggtgtatccagtgaaaaaaagagaaatggcaagctaggtttttcacattacatcgatgaaaattgttgcttctacagcacagcagcacct

SEQ ID NO: 67177 - DNA, 599 bp, Chicken  19866894336592_1
  misc_feature (1)..(141): n is any nucleotide
nnnnnnnnnnnnnnnnnnnnnnnnnnnnnnnnnnnnnnnnnnnnnnnnnnnnnnnnnnnnnnnnnnnnnnnnnnnnnnnnnnnnnnnnnnnnnnnnnnnnnnnnnnnnnnnnnnnnnnnnnnnnnnnnnnnnnnnnnnnnnccatgagagcaagcgaggcgtgattgcttcctattcccacttaaaattaaaagggaatttgtttagctttaatttccattaaaaatataaatatcattatttctcttctctagcgggggagattgctttctggcagcccagggatgcgtaaaagagatytgactagatttagactaggtctaaggaagaaattctttactgtgagggtggtgagacactggaacaggttgcccagtgaggatgtggatgccccctccctggagactttcaaggccaggctggatggagctttgagcaacctggtctagagggaggcatccctgcctatagcaggggggttggaactagaygatcttagaggtcccttccaacccaaagcattctatgattctatgatccacctgcatgcagccacgccctgcacacaaggactgggagcagggccagtgaaggggact

SEQ ID NO: 67178 - DNA, 600 bp, Chicken  19866894336592_2
aagggaatttgtttagctttaatttccattaaaaatataaatatcattatttctcttctctagcgggggagattgctttctggcagcccagggatgcgtaaaagagatytgactagatttagactaggtctaaggaagaaattctttactgtgagggtggtgagacactggaacaggttgcccagtgaggatgtggatgccccctccctggagactttcaaggccaggctggatggagctttgagcaacctggtctagagggaggcatccctgcctatagcaggggggttggaactagaygatcttagaggtcccttccaacccaaagcattctatgattctatgatccacctgcatgcagccacgccctgcacacaaggactgggagcagggccagtgaaggggacttagtggcagcagattggggcccagaaggaaggcaaggtcctggcatgggggaaaaggagcaaaaggatcagttcctcccttaattccctacagatctctgggaaagccttgtgagcaataccctacaaggctgtgagagggcaacctcctcttctagggyacgaatgaaaaacagccaagctgccactccct

SEQ ID NO: 67179 - DNA, 425 bp, Chicken  19866894336592_3
ccctgcctatagcaggggggttggaactagaygatcttagaggtcccttccaacccaaagcattctatgattctatgatccacctgcatgcagccacgccctgcacacaaggactgggagcagggccagtgaaggggacttagtggcagcagattggggcccagaaggaaggcaaggtcctggcatgggggaaaaggagcaaaaggatcagttcctcccttaattccctacagatctctgggaaagccttgtgagcaataccctacaaggctgtgagagggcaacctcctcttctagggyacgaatgaaaaacagccaagctgccactccctgccagaaatgtagttggatgcaggcaagaggaattgcaacatccagatctttcaaaacatcagcaccctgggagagcactgcacataaataca

SEQ ID NO: 67180 - DNA, 600 bp, Chicken  19866894336598_1
ggaagccaggctcctgctcaaagaaggaattagatgaggttattcagtcttgttcttccaggggtgatgccatagcatgcttttagtttgcagcatcagtgtgtcatggttagagggaatgcttctttgagagagcctcttctgaaataagtaagtagtttaaaagggggaaaatataagtatttgaaaaggagatcggtttttcatacacactataagaaatcagaaaccactgatagtgaaatatgtctattgaatagttctttttttcaactaataatctattcctatggtaatcartatttccagtgtgtggaagatgtttttagttgttgattcccattctgtgtggtattttgggtctaactgatttttttccactttttttcattctggttatttaatattgctttgatggatgaatattagtaaacttgatgaagaattatatatgcgttggtagtaaatgaccagtaattcattgatttgtttttgtactgcagaccaaaatctacaacaacggggcaacccagtgccaatggagtacagtcagaaggtctagattatgacagattgaagcaggtatgcatacagaaagaa

SEQ ID NO: 67181 - DNA, 599 bp, Chicken  19866894336606_1
  misc_feature (1)..(222): n is any nucleotide
nnnnnnnnnnnnnnnnnnnnnnnnnnnnnnnnnnnnnnnnnnnnnnnnnnnnnnnnnnnnnnnnnnnnnnnnnnnnnnnnnnnnnnnnnnnnnnnnnnnnnnnnnnnnnnnnnnnnnnnnnnnnnnnnnnnnnnnnnnnnnnnnnnnnnnnnnnnnnnnnnnnnnnnnnnnnnnnnnnnnnnnnnnnnnnnnnnnnnnnnnnnnnnnnnnnnnnnnnnnnnnggcccccgaaatgaagacgtcgggagggaccaccccgaaaccaactgtgtggggtgggggcctcgaaggaaacacgtygggtgggaacccccgtgtgaacgcgtcgccgggagccccacatccccacggccggaggggtcgggccgggctgtgccctcagcacgggctgtgcgcagaagatgcgcattttgggaccctttctcatacgtcctcccctttatttatttattttaactgtcattattattttccccaaggcctctatttctacgtgtttggttattgcttttctttcttcttcttcttcttctttttattaattttctcctctcgtccccgacccgcccgtgaagccggggctgctcagtgcgaaacga

SEQ ID NO: 67182 - DNA, 600 bp, Chicken  19866894336607_1
ggaggcaatccacggcatctgagcactgcgtaggtgacaatgtttgggtccaaggatgggattgcatctgtgtgcccgattctggactgctggggagggtcagcctcacctcgggtcgttgtctggcactcatagggtgcatcttggtgctcttgctgagaacacagtctgagactgaggactgaaacaaatgtcctcaaggctagcagagatctgggtgcatttccatcccttgtgaaatgcctgtttgtgcacgtgtgcaagcacacattgctgtgacaaggagaggaggtctgtctrtgtgctgggcagactgcagaasgagcagagctyggcattttccaagcgtgcctctcgccccagccggagcagacaaacaagggagaggtcacagctattcgtgagacgttgccaccctcccactccgctcaggaagcatctccaagagaaaaggctttctgcaaaaccagcgtttttattaaaaccagccttgaatgctggggaggcagccagaggcagcaggcggaggctgcggggctcttggttctcgctgcagcctggatccagcagagcactggtttgcttggcagggatcctgca

SEQ ID NO: 67183 - DNA, 600 bp, Chicken  19866894336607_2
gcactgcgtaggtgacaatgtttgggtccaaggatgggattgcatctgtgtgcccgattctggactgctggggagggtcagcctcacctcgggtcgttgtctggcactcatagggtgcatcttggtgctcttgctgagaacacagtctgagactgaggactgaaacaaatgtcctcaaggctagcagagatctgggtgcatttccatcccttgtgaaatgcctgtttgtgcacgtgtgcaagcacacattgctgtgacaaggagaggaggtctgtctrtgtgctgggcagactgcagaasgagcagagctyggcattttccaagcgtgcctctcgccccagccggagcagacaaacaagggagaggtcacagctattcgtgagacgttgccaccctcccactccgctcaggaagcatctccaagagaaaaggctttctgcaaaaccagcgtttttattaaaaccagccttgaatgctggggaggcagccagaggcagcaggcggaggctgcggggctcttggttctcgctgcagcctggatccagcagagcactggtttgcttggcagggatcctgcacagaccggggtgctgctggtgg

SEQ ID NO: 67184 - DNA, 600 bp, Chicken  19866894336607_3
gtgacaatgtttgggtccaaggatgggattgcatctgtgtgcccgattctggactgctggggagggtcagcctcacctcgggtcgttgtctggcactcatagggtgcatcttggtgctcttgctgagaacacagtctgagactgaggactgaaacaaatgtcctcaaggctagcagagatctgggtgcatttccatcccttgtgaaatgcctgtttgtgcacgtgtgcaagcacacattgctgtgacaaggagaggaggtctgtctrtgtgctgggcagactgcagaasgagcagagctyggcattttccaagcgtgcctctcgccccagccggagcagacaaacaagggagaggtcacagctattcgtgagacgttgccaccctcccactccgctcaggaagcatctccaagagaaaaggctttctgcaaaaccagcgtttttattaaaaccagccttgaatgctggggaggcagccagaggcagcaggcggaggctgcggggctcttggttctcgctgcagcctggatccagcagagcactggtttgcttggcagggatcctgcacagaccggggtgctgctggtgggaccagagctc

SEQ ID NO: 67185 - DNA, 539 bp, Chicken  19866894336607_4
ggctcttggttctcgctgcagcctggatccagcagagcactggtttgcttggcagggatcctgcacagaccggggtgctgctggtgggaccagagctctctgacaggcagcttgtgtccatttacagcctgaatttcccctccatcctttcattccttccgcccccaggtcctccctttaagtgttctcttcctctccagcaaatgcagaagagaggagtcaccaaggggctttatggaggaggagagccaagctgctgagtaagctggagagttttgctggtagatcaggcgttttttycttttcttttctttttaatctttggagccaaagcaagggaataataaaaacatctgacaagtgcacgtcatttaagaaccatttcctcccagcatcaagcaaagagagacggcacttgagggccaagaggcagcagacccactcagtaagaggcaatgcctggggctgggccagcaagctctgattgccaccagctgcaggtagagggtcctgggggcttcaccacggcgtctgccttg

SEQ ID NO: 67186 - DNA, 538 bp, Chicken  19866894336607_5
gctcttggttctcgctgcagcctggatccagcagagcactggtttgcttggcagggatcctgcacagaccggggtgctgctggtgggaccagagctctctgacaggcagcttgtgtccatttacagcctgaatttcccctccatcctttcattccttccgcccccaggtcctccctttaagtgttctcttcctctccagcaaatgcagaagagaggagtcaccaaggggctttatggaggaggagagccaagctgctgagtaagctggagagttttgctggtagatcaggcgtttttttyttttcttttctttttaatctttggagccaaagcaagggaataataaaaacatctgacaagtgcacgtcatttaagaaccatttcctcccagcatcaagcaaagagagacggcacttgagggccaagaggcagcagacccactcagtaagaggcaatgcctggggctgggccagcaagctctgattgccaccagctgcaggtagagggtcctgggggcttcaccacggcgtctgccttg

SEQ ID NO: 67187 - DNA, 600 bp, Chicken  19866894336610_1
aaagaaatcaggaaacattcgaaattatctcttgccttattacatttgaaatttaaatggggacctcctcaatccccccatactgtttgcatgcagtttttgttcacagctgaaaaactttataataatcaaacaaaattatgtatttcattcataacaaaggaaaaatataaatttcattaaccattataccctgaagtgtatttcattcactacaaatcatctgcaatttgcaaattcatatatttcttgctcctaccagtctaagtattaacatcagggcaatatagatagatttaragacctccaataaggctttttttttttcaatatttcacaaaatctaatttaaaaattgcaatggcatcataatattgtagtaaatataatcaattctaactccttttgaaaaatctatgcatctgccaaataatacagtatttcttctattctgaacaatggcatccagtgcttcccaattggctaaaattatgtatattaagtacaactaagctaattgtaattgttgtgctataggcagaagggttattaactttgcaacgtaagagcttggggtttcaaaaaaaatgtattatcaat

SEQ ID NO: 67188 - DNA, 600 bp, Chicken  19866894336612_1
attacagatagtatgctattataggttctctataaaacaacactgtcacttcagcaaaagcaagcagactggggcagaatcaggaattaccatatttacttccaccaaatgccagtttgaatgtgtgaaagagatctatcacagtgaaagtaggaagactttgtctttgaaggtcacaagcagagaaaaggaagcacaaacctaaaagtcacaccacaccatgagcacatacaagtattgttatgcatatctcctggtttgttcattctgtgtcaggaaggaacagtcataaaattttcrtcaatttgctctattaaaataactcaatgagacagcctgagtagaaagttggattgttttatctcaaagatacgtaaaggcataactgactcttggaacccaattgcaaattatttttgttgtttggtttcgttttctatcagtacaataatctttttaaggagaaggcaatttttgagaggcttggtaccaagacatggcaagacaaattttgttttctaacagagtctgtagtagggaaatctctgcacaggtagtggtgactgcagcctttgaacatatatacgtaggtaggtaggt

SEQ ID NO: 67189 - DNA, 600 bp, Chicken  19866894336620_1
ctggagcacctctcttgtggtgagaaggtgagagaactgggagaaaaagaggttcatctcatcagtgtccgtaaatatctgaaaacagggtgcagagaagacagagcacagagaagacagagccaggctctgtacgttggcaggacaagaggcaatgggcacgaactgaaacacgggaggttgcctctgaacgacaggaaatacttatttaccaggacagtgaccaagcactggcacagcctgcccagacagattgcacagtttcctctttggagatcctcaaatgctgcctggacatgsgcctgggttccctcctctgggtgtccctgatggagcagaggttgggcaggacagacccggggtcccttccagcctcaaccattccrggattctcctaacactcgtataacaaaaaactgtaagaacagcagttacaaaggatggaggaatttgatccatgcagccttctgtttttgatttttccaaagtcatcagttcaacaacacagcaaccctgatgcattctatcttttccattaaggctctttctatactggacattacttcctaacaaatccaattccaccttcccttatatcct

SEQ ID NO: 67190 - DNA, 600 bp, Chicken  19866894336620_2
agggtgcagagaagacagagcacagagaagacagagccaggctctgtacgttggcaggacaagaggcaatgggcacgaactgaaacacgggaggttgcctctgaacgacaggaaatacttatttaccaggacagtgaccaagcactggcacagcctgcccagacagattgcacagtttcctctttggagatcctcaaatgctgcctggacatgsgcctgggttccctcctctgggtgtccctgatggagcagaggttgggcaggacagacccggggtcccttccagcctcaaccattccrggattctcctaacactcgtataacaaaaaactgtaagaacagcagttacaaaggatggaggaatttgatccatgcagccttctgtttttgatttttccaaagtcatcagttcaacaacacagcaaccctgatgcattctatcttttccattaaggctctttctatactggacattacttcctaacaaatccaattccaccttcccttatatcctctttttttttccaccccctcttagcctaaacactctcttctcctttctcttcccccactcgtgtgtggtacaggtatactgacaac

SEQ ID NO: 67191 - DNA, 600 bp, Chicken  19866894336623_1
agtttggtttcagatcagaatatggctcttaaggggagcagtctggtgacagtttggcactgctgaatcacaactcaagcctagccttgaattagcaatgagatagcaaagcagcaagggcagctcagacagcgagccaacctcagagagactggggcctaggaagtgtttcctgaaggcattaaaatcaatcctttgcaatcaaagaagtccagatagtcgtgttaggcaaaaaggagttgctttagtgactatgttggtgctgggggggtgaagacagggcccctattgacaaagatrgggagctaaagttggatcttgagtgacttaaaattccagccacaaaacagagttttgctttctttctttctctctctctgtttctccttctctctttctgggtaggagctcaaatatgttcctaccctgggggatctgccgcacaagaatgtgactgagctgttttttctcccccctcctgctgtaggtgaagcaaaactgaagggtggtttgattctccctcaaggaacaacattcttcagttatgaaatcgtcccagccttctctccctcgctgcgcccagttactgaaagcctgcag

SEQ ID NO: 67192 - DNA, 600 bp, Chicken  19866894336623_2
ctctctctctgtttctccttctctctttctgggtaggagctcaaatatgttcctaccctgggggatctgccgcacaagaatgtgactgagctgttttttctcccccctcctgctgtaggtgaagcaaaactgaagggtggtttgattctccctcaaggaacaacattcttcagttatgaaatcgtcccagccttctctccctcgctgcgcccagttactgaaagcctgcagactcgagcaaggacggacccttcatgctgacatagctgtgagataaggcttgtgggatcagggcccctktggtcagcaaggaggtgaagatctctcctgcttgcattcctacaggacaacatcaggcatctcacccaagatgttccacgtgtccttgagttgggcttgttcagcttggagaagagaaagctccggggaaacctcattgtgcccttccagtattgaagggagcttataagcaggagggggagcaacttctttacatggcctgatgatgacaggacaaggggaaatggctttgaactaaaagaggggagattcaggtcagatgttaggaagaaattctttactcagaaggtggtgaggccc

SEQ ID NO: 67193 - DNA, 600 bp, Chicken  19866894336631_1
aataacaccacttagtaatcaaatattaatggttttctacatttttattatgctattatattaaattgtttccatacatgggcagaacggatgacttctttactgcaaaggaaatgacattatatcaagcatttggccatttagtaacagtttcatagccctctcttccctcctaatttcttaaactgaaaaggaaaccacagaaaagtgagaaaaataagaggagagaaaatggacacatggtgtcaaggagtgttatatgacccagtgacacaactatcagagttcataaggcaaaakgatacctggtgatggtgtttgagttgctttgctgacctgttgtttgttcaaaagtttcttaactcctcctaatgagtgtaatgagtgacagtttttatttcaaaagccagcctaagattcatggccttttaattgtttagaattgttttatgtaaaatcccattcataggcagctctaccacagagagagcctcttcagtatccagctgagggatcaaatcattaattgatcccagctgcaggatcagttaacaatttactaaacatcacaggaactcctgggggaaattccttctgtgt

SEQ ID NO: 67194 - DNA, 600 bp, Chicken  19866894336634_1
gtggaaacaaatatctttcagctttctttctcacagccctatggagcttctgtctatgtgggcttgttccaggtgtgataatgtgtggaatttcttttaataaagccaaatggtttttgctgagcactgatggattgcagcagctgttttgtgataccatagccctgaaattgctgaaggatattaagtggcaaatattcttgttgcagggtgaaagagctgagtcctcataatggaggtggtgaaacacagaatcaaatggagattgagaatgaggaaacagaaatgagcggaggaaaygtaggtcttcratgcagtgtatgtctgtgcagtgggctgaaaagatctccaagctggaaacaacttgctgttcttacatgagctgttttcttgcagctgtccaaggatgaggaggaagatctctctccccacctgtttagtttccgtgaagctatgattcaaattggtgaacgggaggagaaggttgtagaacagcttcgagaactgagacaggtaaagaggcaagcccrgctcaagatgccttctacatrttgacaacagcttgccttgcctgaacccagtgctagtgggtaggccatg

SEQ ID NO: 67195 - DNA, 600 bp, Chicken  19866894336634_2
tatctttcagctttctttctcacagccctatggagcttctgtctatgtgggcttgttccaggtgtgataatgtgtggaatttcttttaataaagccaaatggtttttgctgagcactgatggattgcagcagctgttttgtgataccatagccctgaaattgctgaaggatattaagtggcaaatattcttgttgcagggtgaaagagctgagtcctcataatggaggtggtgaaacacagaatcaaatggagattgagaatgaggaaacagaaatgagcggaggaaaygtaggtcttcratgcagtgtatgtctgtgcagtgggctgaaaagatctccaagctggaaacaacttgctgttcttacatgagctgttttcttgcagctgtccaaggatgaggaggaagatctctctccccacctgtttagtttccgtgaagctatgattcaaattggtgaacgggaggagaaggttgtagaacagcttcgagaactgagacaggtaaagaggcaagcccrgctcaagatgccttctacatrttgacaacagcttgccttgcctgaacccagtgctagtgggtaggccatggrctgtaatta

SEQ ID NO: 67196 - DNA, 600 bp, Chicken  19866894336634_3
taatggaggtggtgaaacacagaatcaaatggagattgagaatgaggaaacagaaatgagcggaggaaaygtaggtcttcratgcagtgtatgtctgtgcagtgggctgaaaagatctccaagctggaaacaacttgctgttcttacatgagctgttttcttgcagctgtccaaggatgaggaggaagatctctctccccacctgtttagtttccgtgaagctatgattcaaattggtgaacgggaggagaaggttgtagaacagcttcgagaactgagacaggtaaagaggcaagcccrgctcaagatgccttctacatrttgacaacagcttgccttgcctgaacccagtgctagtgggtaggccatggrctgtaattaaatggtattatgtttcccttactgccagctttttttcctgtggtttcctgcycaacaggttaaactggggaattctggtgcttgcggccagccagtgcctgtctcctccacctatcaacctccatctgctgctaatgagcatagactgataaagctgtctgtagaagctcagctctgttgatttggtgtgccagatgtattgaaacttcaatttctaga

SEQ ID NO: 67197 - DNA, 600 bp, Chicken  19866894336634_4
gaatcaaatggagattgagaatgaggaaacagaaatgagcggaggaaaygtaggtcttcratgcagtgtatgtctgtgcagtgggctgaaaagatctccaagctggaaacaacttgctgttcttacatgagctgttttcttgcagctgtccaaggatgaggaggaagatctctctccccacctgtttagtttccgtgaagctatgattcaaattggtgaacgggaggagaaggttgtagaacagcttcgagaactgagacaggtaaagaggcaagcccrgctcaagatgccttctacatrttgacaacagcttgccttgcctgaacccagtgctagtgggtaggccatggrctgtaattaaatggtattatgtttcccttactgccagctttttttcctgtggtttcctgcycaacaggttaaactggggaattctggtgcttgcggccagccagtgcctgtctcctccacctatcaacctccatctgctgctaatgagcatagactgataaagctgtctgtagaagctcagctctgttgatttggtgtgccagatgtattgaaacttcaatttctagaaagtcagtttcttactatgtt

SEQ ID NO: 67198 - DNA, 600 bp, Chicken  19866894336634_5
aggtcttcratgcagtgtatgtctgtgcagtgggctgaaaagatctccaagctggaaacaacttgctgttcttacatgagctgttttcttgcagctgtccaaggatgaggaggaagatctctctccccacctgtttagtttccgtgaagctatgattcaaattggtgaacgggaggagaaggttgtagaacagcttcgagaactgagacaggtaaagaggcaagcccrgctcaagatgccttctacatrttgacaacagcttgccttgcctgaacccagtgctagtgggtaggccatggrctgtaattaaatggtattatgtttcccttactgccagctttttttcctgtggtttcctgcycaacaggttaaactggggaattctggtgcttgcggccagccagtgcctgtctcctccacctatcaacctccatctgctgctaatgagcatagactgataaagctgtctgtagaagctcagctctgttgatttggtgtgccagatgtattgaaacttcaatttctagaaagtcagtttcttactatgttcattcttgtaaatacagaaaatgacaactgaacttgactacctcctgggaa

SEQ ID NO: 67199 - DNA, 600 bp, Chicken  19866894336634_6
cttgctgttcttacatgagctgttttcttgcagctgtccaaggatgaggaggaagatctctctccccacctgtttagtttccgtgaagctatgattcaaattggtgaacgggaggagaaggttgtagaacagcttcgagaactgagacaggtaaagaggcaagcccrgctcaagatgccttctacatrttgacaacagcttgccttgcctgaacccagtgctagtgggtaggccatggrctgtaattaaatggtattatgtttcccttactgccagctttttttcctgtggtttcctgcycaacaggttaaactggggaattctggtgcttgcggccagccagtgcctgtctcctccacctatcaacctccatctgctgctaatgagcatagactgataaagctgtctgtagaagctcagctctgttgatttggtgtgccagatgtattgaaacttcaatttctagaaagtcagtttcttactatgttcattcttgtaaatacagaaaatgacaactgaacttgactacctcctgggaatcgcagaacaaccagactacgaccttgagatgtttgtgagcagagctaagtacttcataga

SEQ ID NO: 67200 - DNA, 411 bp, Chicken  19866894336652_1
cggttctcgtgtctgttttttttgggggggggggtacgttggggggtgcagtgggatggatggggcgcggtgggaccggacctacagagcctcccattggctattgacagagagggggcgtggcctccttcccctcccccccttcccttcctaccattggccagtgacagtgagggggcgtgaccgggatttgccctccgtcttccattggccagcgatctggaaggggcgggccttggcccttctctccaccttccaccgattggccaatgacagggaagggggcggaacagctcttcrcaatccggaagcagcaacatggcgcggcgcggggtgagcggcgcggcagccggaggggcggaagggaagggcgggtgacctttgaccccagaggggtcgcgacctttgacc

SEQ ID NO: 67201 - DNA, 600 bp, Chicken  19866894336656_1
tggagtggagaatttggaaattttaatgtggggcaaagctctggacccagtatgggatcagtctaattgttgtagtttgacttctgcctatcatccttaaaacagcagaattgtaccttctctttttgacagctttactaaagtcatcctctgaaggaagaagcaatgccttgagtggccacattaatgttgatgattttgccactccagcagaggcaagccttacactaacagtactttttgcatctgctttttgcaagtaaaattaaaagtgaagcttgatcctagcaccatgaataytaccaagtttgagcctgactatttctttgcttcaccgcaataatgaaaattttagctttatgctttgcaacatcagtaaaatacactagaaggttgatgcagcctctacgtaggtaatggaaaggatttttttcattgatattaattttgcagtagcttataataagatgtctctcaatgctgtggtcactggatacgttaaagcttgtttattacacagaaaactgcagtaaatcatagtcaagtagctatcactggcagtaagtgtctcgctccaatttataggagggagaggaggtt

SEQ ID NO: 67202 - DNA, 599 bp, Chicken  19866894336661_1
  misc_feature (1)..(102): n is any nucleotide
nnnnnnnnnnnnnnnnnnnnnnnnnnnnnnnnnnnnnnnnnnnnnnnnnnnnnnnnnnnnnnnnnnnnnnnnnnnnnnnnnnnnnnnnnnnnnnnnnnnnnnccttgttggatttttctatgacactcatcacaggaggaactgggaatttcacatattgcaaatgtcacttttttttgactttatcttcacaacacactgccaacatcaaaaggcagtgctgccctccttttacactcagggaagcagatgctgggacaagggcccactcgttgaaaggatgcccagagaagctgtgcrtgccccatccctagaggatggatgtggccctgggcagcctggtcttgtcagaggtgcccccacccatggaaggagttgaactggatttactttaaggtcccttccaacctagactaacccatgataagagatctctccaccactccttctcctctgcttgccttgctggggcacagctggcaatgaaacaccaacaacagcagtaactgacactgaggccttgccagttgggcaccaaaggcctgggccgcctccctctgcccctggaaccatccctggggctgctttgcacctctcca

SEQ ID NO: 67203 - DNA, 599 bp, Chicken  19866894336665_1
  misc_feature (1)..(91): n is any nucleotide
nnnnnnnnnnnnnnnnnnnnnnnnnnnnnnnnnnnnnnnnnnnnnnnnnnnnnnnnnnnnnnnnnnnnnnnnnnnnnnnnnnnnnnnnnnntgggtttggaggatgtgagaaaggaaactgaagcgcttctcaaggtcacgttacagctgagaaggcactgcagcgtttgtttctgtgtcattgccagaggcagcgcctggttctcctgagtgcaaaactctaagacagacctttgtctgttacacagagaatattctttgtttcaacttagctttcaaaaggtcagaagggatggtccragagcaggagatgtgtggtggctgagatggtaaggcagagcttggcgctgggygcgtgcgctgccatgaggagctgcgaggagctgggcaagctgctgagtcagcgctcctggcagtcctgcrgcgttccacggctgtcagttgtgacggctgagttttcctgaggctgtctgtcgcagggactgacttggggtgtgcaggtctttactgttgttaggcatcatggacagtggttatcgccaagtgactaaaagacatgcagccagaagctggtaggtgtccaggtctggagagaggca

SEQ ID NO: 67204 - DNA, 599 bp, Chicken  19866894336665_2
  misc_feature (1)..(38): n is any nucleotide
nnnnnnnnnnnnnnnnnnnnnnnnnnnnnnnnnnnnnntgggtttggaggatgtgagaaaggaaactgaagcgcttctcaaggtcacgttacagctgagaaggcactgcagcgtttgtttctgtgtcattgccagaggcagcgcctggttctcctgagtgcaaaactctaagacagacctttgtctgttacacagagaatattctttgtttcaacttagctttcaaaaggtcagaagggatggtccragagcaggagatgtgtggtggctgagatggtaaggcagagcttggcgctgggygcgtgcgctgccatgaggagctgcgaggagctgggcaagctgctgagtcagcgctcctggcagtcctgcrgcgttccacggctgtcagttgtgacggctgagttttcctgaggctgtctgtcgcagggactgacttggggtgtgcaggtctttactgttgttaggcatcatggacagtggttatcgccaagtgactaaaagacatgcagccagaagctggtaggtgtccaggtctggagagaggcagtgttattccttgagctcggctgctgctttagaaaggcactgccagctgatgt

SEQ ID NO: 67205 - DNA, 600 bp, Chicken  19866894336665_3
gcgcttctcaaggtcacgttacagctgagaaggcactgcagcgtttgtttctgtgtcattgccagaggcagcgcctggttctcctgagtgcaaaactctaagacagacctttgtctgttacacagagaatattctttgtttcaacttagctttcaaaaggtcagaagggatggtccragagcaggagatgtgtggtggctgagatggtaaggcagagcttggcgctgggygcgtgcgctgccatgaggagctgcgaggagctgggcaagctgctgagtcagcgctcctggcagtcctgcrgcgttccacggctgtcagttgtgacggctgagttttcctgaggctgtctgtcgcagggactgacttggggtgtgcaggtctttactgttgttaggcatcatggacagtggttatcgccaagtgactaaaagacatgcagccagaagctggtaggtgtccaggtctggagagaggcagtgttattccttgagctcggctgctgctttagaaaggcactgccagctgatgttgtgaagtccggcgaggctgaagctttatgctccgttctgagctgtgtgctccatgctcagttcccacttc

SEQ ID NO: 67206 - DNA, 600 bp, Chicken  19866894336669_1
tggaattggctgacagtttatagcaatggttctgagtgaatggcccttcatctccagtggcaaatttaagataatgctggtgtatcataggcatttcattttttatcaccatcaacattttagaccaatattctattatcttaaatgtctttatggtgccaagctgaactggacaaggaatgaatctgatgaagaatttggtgactttgaagaagaggtgaaaggaaaaagcaagttttttagtattattagaagcttacagaagaggaaagaatgtgaaactttcaactagttgacttrggactggacagaaaatatttcattttgttttgaatcacttttgatctttctaagctcctttacaaaagctgtgtgtcaattaagagagtagaaaaactgctttaatttttcagtatgtaaaaacttgatggcaattttgaagcaaatcatttcttctgattctttgcaaatcataccagtgcatgtttttctcctgtttcagacagtcttacttatttgagttgtccaagccagtagtttcttctgatttggaccaaagcctgtgatccaaaaaaatattatgtttgtttgtacatttac

SEQ ID NO: 67207 - DNA, 600 bp, Chicken  19866894336670_1
agaggggctagagggcaggctccatcctgctctccttggccacttttgttttcagcgttgtcactattcatgtggatgtgtacccgatggaaaccacagcttttggattcattgctgcgatttgttcttaatgattgcctttctttggccatgtctttataaaaaagatggaggcaattgaaatctgttccattttaagttggtcctgggcttctagaagaccataaaggaaggatgcttgttgggatgatattcagtatttccatcttcagtgcattacttcctaacaccgaccttackcgcatttcccattcagaaacagtggcttacacttttttggctctgagcttggatactagtgctcctggtgtctggcaatgtaaaatgagcgaaaaaaggaatcaatttgcctctgtaraataatgggcagaacttgcatgtcacttgtctccattgtatctggtttgcagataacaagaagcattagactgtcattcgtcactgttcatgagctcttgaacactgtggtacccccagttgctctaaatggtgaattttctttctagttgttgctggatgctggagcaaaagtagaaggtt

SEQ ID NO: 67208 - DNA, 600 bp, Chicken  19866894336670_2
gatttgttcttaatgattgcctttctttggccatgtctttataaaaaagatggaggcaattgaaatctgttccattttaagttggtcctgggcttctagaagaccataaaggaaggatgcttgttgggatgatattcagtatttccatcttcagtgcattacttcctaacaccgaccttackcgcatttcccattcagaaacagtggcttacacttttttggctctgagcttggatactagtgctcctggtgtctggcaatgtaaaatgagcgaaaaaaggaatcaatttgcctctgtaraataatgggcagaacttgcatgtcacttgtctccattgtatctggtttgcagataacaagaagcattagactgtcattcgtcactgttcatgagctcttgaacactgtggtacccccagttgctctaaatggtgaattttctttctagttgttgctggatgctggagcaaaagtagaaggttccttggagcatggagaggaaaactactctgaaactcctttrcagttggcagcagctgccggtaaggactttctcctccctctgttataaattcttcagttgagatctgtgatttagat

SEQ ID NO: 67209 - DNA, 600 bp, Chicken  19866894336670_3
tctgagcttggatactagtgctcctggtgtctggcaatgtaaaatgagcgaaaaaaggaatcaatttgcctctgtaraataatgggcagaacttgcatgtcacttgtctccattgtatctggtttgcagataacaagaagcattagactgtcattcgtcactgttcatgagctcttgaacactgtggtacccccagttgctctaaatggtgaattttctttctagttgttgctggatgctggagcaaaagtagaaggttccttggagcatggagaggaaaactactctgaaactcctttrcagttggcagcagctgccggtaaggactttctcctccctctgttataaattcttcagttgagatctgtgatttagatgagcaaacagtggattttaaaggaagtaaawgtgcctctcttgacttgcaggaaatttcgaactggtcagtttgctgttggaacgaggagctgaccccatgataggaacaatgtacaggaatggcatttccatgactccacaaggtgacatgaactctttcagtcaggctgctgcgcatggacacaggtagagtgggaacaagtccagtggcatccttcacgt

SEQ ID NO: 67210 - DNA, 600 bp, Chicken  19866894336670_4
tccattgtatctggtttgcagataacaagaagcattagactgtcattcgtcactgttcatgagctcttgaacactgtggtacccccagttgctctaaatggtgaattttctttctagttgttgctggatgctggagcaaaagtagaaggttccttggagcatggagaggaaaactactctgaaactcctttrcagttggcagcagctgccggtaaggactttctcctccctctgttataaattcttcagttgagatctgtgatttagatgagcaaacagtggattttaaaggaagtaaawgtgcctctcttgacttgcaggaaatttcgaactggtcagtttgctgttggaacgaggagctgaccccatgataggaacaatgtacaggaatggcatttccatgactccacaaggtgacatgaactctttcagtcaggctgctgcgcatggacacaggtagagtgggaacaagtccagtggcatccttcacgtggttgtttttttcctgggaatctggtttgagcagatgggtgaaagttctgcatgaaaaattaaacaagccaccaactgagcagagatgtaaggctttttgctagcatg

SEQ ID NO: 67211 - DNA, 599 bp, Chicken  19866894336682_1
  misc_feature (1)..(59): n is any nucleotide
nnnnnnnnnnnnnnnnnnnnnnnnnnnnnnnnnnnnnnnnnnnnnnnnnnnnnnnnnnnctatcacaggttcctttgctgtcagtggaagaaagtgcattctcaggatgcagtgcctgttgactcatcctacagtaagcacttaaacatggatcatatgaagaagttcccatttctttctgttgatgaggggaaaaatggagtggtagcacagataacttgtatttcacttgtattatacctatctacagcatacaaacatcaaaatggagaagtactccttagaaaggtgaatgccaartaaacttcatggtgcacaatgaaaaatttgcttttatcactggccctaagtaatctcagtaaaatcaagattaactaaattaatctaattaatctactagtagcagtattactactgtgcctacctaatttggtcaagaacccattattgtacaaagagtmtgaagagttgaaatattgtcagtttgaatgaggaaatcacagcggggtctggaagtgcttccagagggaaagggatctctcaagcttgttgagtccaatcttgccccatcagatcaaggacagctctgaaattatatc

SEQ ID NO: 67212 - DNA, 600 bp, Chicken  19866894336682_2
gaagttcccatttctttctgttgatgaggggaaaaatggagtggtagcacagataacttgtatttcacttgtattatacctatctacagcatacaaacatcaaaatggagaagtactccttagaaaggtgaatgccaartaaacttcatggtgcacaatgaaaaatttgcttttatcactggccctaagtaatctcagtaaaatcaagattaactaaattaatctaattaatctactagtagcagtattactactgtgcctacctaatttggtcaagaacccattattgtacaaagagtmtgaagagttgaaatattgtcagtttgaatgaggaaatcacagcggggtctggaagtgcttccagagggaaagggatctctcaagcttgttgagtccaatcttgccccatcagatcaaggacagctctgaaattatatcagtttgctcatagccttgctcaattcagcactgagtatctttaagaatggaaatgaaactcaaatattttcaaaagcttactgaagcattcaaaaataacatgataggcatgactgtggaatcagcaagcaggcttgaaaatgacttctcttccaagtctga

SEQ ID NO: 67213 - DNA, 600 bp, Chicken  19866894336683_1
caacaccttgcacatggagttcttagttgtgtgtggcccagtacagtcaattctctcaccagcttcatttaccaagtctcagaggaggctcttgccacacaaaagaacttgcctttcaagaaaccagtgagcaaggtctgtcttaggcactgggtctctttggcccaagacattcattccgtgccaggaaccagccattctcaatttgttactgttgctgccagtaacacttcaagcattaatcactcatctcccctactcatcagacaaaaatacaaaccaaaggatctcacctgtcaracaggctacagtagctcttacctgaatctcctcagtttcatccaccaagaggaaactcacaactttctcagccatcttcctyctcctggtctcctcatccatctcctcctcttcctgctcctgggctttgccagcatggtacacagtgacagggtgcttcctcctgttccccccggcatgcgttctcttctgacactccacgcagaggttgattttgcacacctggcacctcaccgctgctatctgtcttgatcccgtcatactggcgtgcatgatgttcccattggcacctttgcagga

SEQ ID NO: 67214 - DNA, 600 bp, Chicken  19866894336683_2
aggaggctcttgccacacaaaagaacttgcctttcaagaaaccagtgagcaaggtctgtcttaggcactgggtctctttggcccaagacattcattccgtgccaggaaccagccattctcaatttgttactgttgctgccagtaacacttcaagcattaatcactcatctcccctactcatcagacaaaaatacaaaccaaaggatctcacctgtcaracaggctacagtagctcttacctgaatctcctcagtttcatccaccaagaggaaactcacaactttctcagccatcttcctyctcctggtctcctcatccatctcctcctcttcctgctcctgggctttgccagcatggtacacagtgacagggtgcttcctcctgttccccccggcatgcgttctcttctgacactccacgcagaggttgattttgcacacctggcacctcaccgctgctatctgtcttgatcccgtcatactggcgtgcatgatgttcccattggcacctttgcaggagtcacagtaagggacgtggccaggccttatgcgggtccgttcatggttccgcagcctttccggctggtgcagctcctcttca

SEQ ID NO: 67215 - DNA, 600 bp, Chicken  19866894336683_3
ctcctcttcctgctcctgggctttgccagcatggtacacagtgacagggtgcttcctcctgttccccccggcatgcgttctcttctgacactccacgcagaggttgattttgcacacctggcacctcaccgctgctatctgtcttgatcccgtcatactggcgtgcatgatgttcccattggcacctttgcaggagtcacagtaagggacgtggccaggccttatgcgggtccgttcatggttccgcagcctttccggctggtgcagctcctcttcacagcgctggcactgcaggctcckgcactcatcgcactcaaagaccgcttcatctgtcccactgcaaacgtagctctcctggcagaggagggccgtgttctggcccttctctgcagtctgtgtgtgggcactcatcttcagatttctttacagcagagattttccctcctggctgtgctttaagtaacgatactgtgaaaagtcagttgcaaattcagtatttttcacaggggagagaaacacaacaggaattctgtccgtacttaattctaagtaactaagagacctttctgtaagattcatacatcaactcgcctccctggg

SEQ ID NO: 67216 - DNA, 600 bp, Chicken  19866894336687_1
tgaccactatgacttcaaatacaattgagagaggcttgatgactacatcagtgaattccctcaggactctgggatgcatctcattgggacccatagactctcaggtggttgtgaagttgatcttcccttacagtgggagggacattgctcccccagtccccacattctgacttatccacttgaggggtctatgaagagtagccaccagtgaacacaactttttagttgttcagtacctcaaccttccccttgtccattgttaccagcctgcctatattgctaacagtgctttgccttctygggccttctttttctggttgatgtactagcagaaagagcacaaaaactgaggcttccggtggaaaatatttcaagaacaggtgacgaaccatgctaaagcagattttgtgcttaaattcrtaatggaaatgattatagacgaagccacgaatatgctggatcatctatctttctctgagattgccagatgtttaaagtcacttgaaccacaacataatacaaagaccgtatctgttattttgactggtgcttttaaaaaatgtgctgtgttcccttgtgttgttccatcttactctctct

SEQ ID NO: 67217 - DNA, 600 bp, Chicken  19866894336687_2
tcttcccttacagtgggagggacattgctcccccagtccccacattctgacttatccacttgaggggtctatgaagagtagccaccagtgaacacaactttttagttgttcagtacctcaaccttccccttgtccattgttaccagcctgcctatattgctaacagtgctttgccttctygggccttctttttctggttgatgtactagcagaaagagcacaaaaactgaggcttccggtggaaaatatttcaagaacaggtgacgaaccatgctaaagcagattttgtgcttaaattcrtaatggaaatgattatagacgaagccacgaatatgctggatcatctatctttctctgagattgccagatgtttaaagtcacttgaaccacaacataatacaaagaccgtatctgttattttgactggtgcttttaaaaaatgtgctgtgttcccttgtgttgttccatcttactctctctccctttttcctcctccctgacctgggtgatcagcttacggcttgccttcaggctgtggttgcccaggtacacccatcctctgaggaggtatcaccaaatgtcctgccaaaggctgtgctt

SEQ ID NO: 67218 - DNA, 599 bp, Chicken  19866894336691_1
  misc_feature (1)..(115): n is any nucleotide
nnnnnnnnnnnnnnnnnnnnnnnnnnnnnnnnnnnnnnnnnnnnnnnnnnnnnnnnnnnnnnnnnnnnnnnnnnnnnnnnnnnnnnnnnnnnnnnnnnnnnnnnnnnnnnnnnnntcctgctttaatacaagcttaaaaagcactttattattcttcctgaattccagaaggatgtattggaagaaaaaaactagaaaaggggtgtgtttggggtgatgtaggacactaactgtccaggactgagccctgatgagcttattggaattctagtcctaatcacatatttaaattttccacaratcatgggcagtactctttaagttcatcattctacaacctgcagcctttccctaytcaactatattgcatttgctataattcatctagctttgggagtacggttttcaaagtctgaaaactttgatgcagtgtactccatagttttcaatttaatctcttttaattcagcttctgaaagccagccgggatgctggcagagtgtctagccatgaaatgctggtaagtcagtttctggactggagaagtaatgaggtattttcaggttcatccaccattgttcccatgatggccaaactcc

SEQ ID NO: 67219 - DNA, 599 bp, Chicken  19866894336691_2
  misc_feature (1)..(60): n is any nucleotide
nnnnnnnnnnnnnnnnnnnnnnnnnnnnnnnnnnnnnnnnnnnnnnnnnnnnnnnnnnnntcctgctttaatacaagcttaaaaagcactttattattcttcctgaattccagaaggatgtattggaagaaaaaaactagaaaaggggtgtgtttggggtgatgtaggacactaactgtccaggactgagccctgatgagcttattggaattctagtcctaatcacatatttaaattttccacaratcatgggcagtactctttaagttcatcattctacaacctgcagcctttccctaytcaactatattgcatttgctataattcatctagctttgggagtacggttttcaaagtctgaaaactttgatgcagtgtactccatagttttcaatttaatctcttttaattcagcttctgaaagccagccgggatgctggcagagtgtctagccatgaaatgctggtaagtcagtttctggactggagaagtaatgaggtattttcaggttcatccaccattgttcccatgatggccaaactccaaggaaaagtgcctgaagccagatccacatgggatattaagctcctaaaacctat

SEQ ID NO: 67220 - DNA, 599 bp, Chicken  19866894336693_1
  misc_feature (1)..(174): n is any nucleotide
nnnnnnnnnnnnnnnnnnnnnnnnnnnnnnnnnnnnnnnnnnnnnnnnnnnnnnnnnnnnnnnnnnnnnnnnnnnnnnnnnnnnnnnnnnnnnnnnnnnnnnnnnnnnnnnnnnnnnnnnnnnnnnnnnnnnnnnnnnnnnnnnnnnnnnnnnnnnnnnnnnnnnnnnnnnnnnatactttcttgtgggattaccgcacagcttgagtggtttatcattcagtcttcatcttttattaatacattgtatatgttatatatgacctgaaaccctcgccaacactctgttccctaaacccayggaattaattaactgcttccatgttcagctttgactgctttaacacccctggaattccactcatcgcatcagatgttagcactattccattttctgttcttatccactccccgtrttccttcacagccatccacagctgatgtctatgcatcaggagcacagtggagacttccctgctcttgagacatccagacatccctccgactccagggaacastgtgcagctgcagggctccacactgacacatctactaacaggattaggactttaagcagaaaaaacatacgccgtttgcaat

SEQ ID NO: 67221 - DNA, 599 bp, Chicken  19866894336693_2
  misc_feature (1)..(59): n is any nucleotide
nnnnnnnnnnnnnnnnnnnnnnnnnnnnnnnnnnnnnnnnnnnnnnnnnnnnnnnnnnnatactttcttgtgggattaccgcacagcttgagtggtttatcattcagtcttcatcttttattaatacattgtatatgttatatatgacctgaaaccctcgccaacactctgttccctaaacccayggaattaattaactgcttccatgttcagctttgactgctttaacacccctggaattccactcatcgcatcagatgttagcactattccattttctgttcttatccactccccgtrttccttcacagccatccacagctgatgtctatgcatcaggagcacagtggagacttccctgctcttgagacatccagacatccctccgactccagggaacastgtgcagctgcagggctccacactgacacatctactaacaggattaggactttaagcagaaaaaacatacgccgtttgcaataaagctggagagctaccaacagctgtaattagggatgcctatgcatttccattctaagcccctgttttcatttgctcctaactttccaaaactttcacctatatggctgaacttt

SEQ ID NO: 67222 - DNA, 600 bp, Chicken  19866894336693_3
ttcagtcttcatcttttattaatacattgtatatgttatatatgacctgaaaccctcgccaacactctgttccctaaacccayggaattaattaactgcttccatgttcagctttgactgctttaacacccctggaattccactcatcgcatcagatgttagcactattccattttctgttcttatccactccccgtrttccttcacagccatccacagctgatgtctatgcatcaggagcacagtggagacttccctgctcttgagacatccagacatccctccgactccagggaacastgtgcagctgcagggctccacactgacacatctactaacaggattaggactttaagcagaaaaaacatacgccgtttgcaataaagctggagagctaccaacagctgtaattagggatgcctatgcatttccattctaagcccctgttttcatttgctcctaactttccaaaactttcacctatatggctgaacttttacagccccattccctgccaaattgtggctttttttttcagttgttgaaagtttgaggaaaaagcagtgtccatttttttttttttttttttttttaaaccag

SEQ ID NO: 67223 - DNA, 600 bp, Chicken  19866894336700_1
agaggtgtgtggggtgctgtaggtgtgctggctgtgccacgtcgccgtggggtagagccggtgctgcagtgagccctcgtaggacgtcgggtagtgcctggggtcagagggctgcacagaggtggctaccacggggctggggaaagcagggatgatgaaggggttgatggagagagacggcactggtggggctgcctggtttttcaggtgctccaaagggttgctgaagttcaccgggaagcgaagcatcgctcccttgtaaacatctggggtttgaggcactggggtgagcggagcggygtaaccgggtccgggaatgatggctttgggtttggccaatccttggtggcccctgggcgagccagcgcccttgtccctgccctcagtttcgtggagaaagggggaaacaacctgcagcttcctgctggggcccaaagcctcctcgtcccggctccgtttggctgtgggtggtgtggggctctgtggcagtggggcgaagccggccctggggggcacccagcaagctttgatggcggcgaaggcggctggctgcgggctctccctgctccacgctttgctccgcaggtcttggggctgttc

SEQ ID NO: 67224 - DNA, 584 bp, Chicken  19866894336710_1
cggctgttggtagtcttcactgctgggacactttggttgctggaaggagtttgtatcactcttcaagaataagtcctctctgaatatatgagctgtgaggtaccggagatggaaccaagttgtgcatgcatttgtacacagcactgtattcttacgagtggcaaccaagagcagctctctgcaggatggacaagagtgagaaaatgcaccatgatctctttgctctgtatttccccagactggtatttatctagtggcactgtgatgtgctccttggcgtggcgcaggaagggttctggrtccatgagtctgcaaggtccactggccttgtattggatgtccaattggatgtcctagtgttgatgtccagcagttcaagtagtgatatacttttatttgctgctctgagcctcaaatttacctgacattaacttctggatgctaaaactgggtgtgggaatgacaacagtttcttatatttttctccacttctctaaatwtaaatgcttgctattcatggcaagcataatgaataaatgttctaaggtctgctttaccatgtcttgattctcatctgctctatt

SEQ ID NO: 67225 - DNA, 384 bp, Chicken  19866894336710_2
aaaatgcaccatgatctctttgctctgtatttccccagactggtatttatctagtggcactgtgatgtgctccttggcgtggcgcaggaagggttctggrtccatgagtctgcaaggtccactggccttgtattggatgtccaattggatgtcctagtgttgatgtccagcagttcaagtagtgatatacttttatttgctgctctgagcctcaaatttacctgacattaacttctggatgctaaaactgggtgtgggaatgacaacagtttcttatatttttctccacttctctaaatwtaaatgcttgctattcatggcaagcataatgaataaatgttctaaggtctgctttaccatgtcttgattctcatctgctctatt

SEQ ID NO: 67226 - DNA, 600 bp, Chicken  19866894336711_1
atgagtagtgaatggaaattacctgatgatagtattttaatgttattattttcttttttaatgccttaagcttgtcagttacctaatagctgtttggtattatccttttaagccctctcactggaaaacacaggatactgaagtatgaatttcctgagagctactgattacctacaaaacatactgtttgagataggaatgtccctttgattcatgtatcagtcactagcatctctgtggagcaggagcatgtttttcaatcttatgatgcacagaaagtcagtgtagttttgcaatacyctggcagtaccctgggcttcaactcacaactaacaaaagcctaattgatattatttcattcctaatgagttttatttcagttagcaagaagaatgaagagaagaaagtgtacagacatggaacagggctacaagtcagggaatgaatggctagaaaagcccacaatctttcagattttctttgattattatatctgtgactgcatcaaaaacaaacttgacattctgggtgtctgtggcacaggtcaggtgacaatatatctccttatcttctttccttatgttcaagtctaggaattgt

SEQ ID NO: 67227 - DNA, 600 bp, Chicken  19866894336711_2
tggaacagggctacaagtcagggaatgaatggctagaaaagcccacaatctttcagattttctttgattattatatctgtgactgcatcaaaaacaaacttgacattctgggtgtctgtggcacaggtcaggtgacaatatatctccttatcttctttccttatgttcaagtctaggaattgtttcttgatataattcccagcatcttcaaatgtatttagtcctagtgaagacagagaagacacatatcaacttttttgtttgtttttgtgatgtaggaatgaggcattaggtatgagragtttgtatctatactgcccatccaaatttaaattgcaattcctaaccaaaaatcctcatttcttaagtgaaatgctcacaagtgagtaggacaccattaaggactttagaaagagagcagaaagtgagacaaacaggataagaaaggagggaccataaattctggggagagttagatacataatttgctgctgtttggcagtacattgttagagcaactgcaggtttaaacatgggtactggaactcagtgtaggtccagagaagaatgagacatctagaagcaggctgtagtataggg

SEQ ID NO: 67228 - DNA, 600 bp, Chicken  19866894336712_1
gtacattaaaacatttgcaaaacgtagctgtgttctactatattacacctaagaaggtgcttgttagaagctgtgcactgaaatcttttgcaaattctcccattttctaggacaacagatctgtcggcttgctttctctgtacagcatagctacatagagcatcactggcttcagtttcttcctctttaacttttatcttgcagcctcctgccctctctcacactgtttcccagttatcaagccagagcagggggtctcctggctttccagaatttgattagtgtcattgttatgaatcrttcagtttgtttcataccagttaaaatgatgcaagtagcaatttgcaaaatctgatttaggatttaacatcacttaaaaaaaaaattaattagtgccactgatgagaggtctcaactttctactttcatgctgatgaatttagtgccagtgaaaagcgagatagaaacaattcagccaagtctgtatttctgtgacacagagcccacattcccttttagacacccgatgctccagcgcatatactccttcctcttatgtttaaatctgtctgtcttattgtgtgcatatttccttctgga

SEQ ID NO: 67229 - DNA, 600 bp, Chicken  19866894336722_1
tgatgaaaaaaaggttgtattggattgtgttttattttattttattttaattctgtcaagtagccaatggtacaccagtggtaaggtgtaatttttattcaaattagtgacaggtgtaattacagttgtcagatgggattttctgtgcacccctggttgctgtaaataatgcagcattatatataagctttaggcttagttgttgacatctaggtctgtgaactgtgaacactgagtatggtgacattagcacactgcggagtgttgagggacatgcctgaaatggagtatgactctacycaactttttaggtgctgaaatgcaaatatttatttcccaagactttttctgacatcaagggcaagtaaaagtccacaaggcattggtttctggaaaccaaaagattgttcttgtggttatgtaggaggttttaaataagtcatgaccttcccaatgtttatttgcatttccagtctatatttcaagcatagtaactaagtcttgttaatttgctattgtagacagccacaagagcagcagtcatgttgatagtgaccacctcatagagagtcactgtataaatgagcattagtgtgtgtt

SEQ ID NO: 67230 - DNA, 600 bp, Chicken  19866894336726_1
gcattatcgaggcctataacaaccatagtgatgatgacatgcggtattgtgtagcaactaatgtcatacaatgcatatttttgtttattctcacccagaatcaagtctctttgaggtatacaacagacatcctccatccttctgctttacccatcacatgcccctaggtcctttagcaaaagcaatcccacaaatcctgcctttgcctgaggcatgaatgatccagattatcttgctcagcacgttctttatgtgcaccattgggaccctttctatggtacacagcaggtttcattgtaygggaccagccccattggtagatccctgagcgttgactaactcagtgccttttgtgaaatgtgtgtcccaatgtttgaatggcctagcaccaattgctctcgaagaagtctttaataggccgatgtattgcctgatttttccagatgctgtgtatgataggggatgtgatatacctgctccatgccatgttctttggcccagatgattatgagattatttcagaaatgagtcccartgtctgactcagttcttcctggggtgtcatgttaccacaaagcttgcttttcagggcccaggaca

SEQ ID NO: 67231 - DNA, 600 bp, Chicken  19866894336726_2
ctcagcacgttctttatgtgcaccattgggaccctttctatggtacacagcaggtttcattgtaygggaccagccccattggtagatccctgagcgttgactaactcagtgccttttgtgaaatgtgtgtcccaatgtttgaatggcctagcaccaattgctctcgaagaagtctttaataggccgatgtattgcctgatttttccagatgctgtgtatgataggggatgtgatatacctgctccatgccatgttctttggcccagatgattatgagattatttcagaaatgagtcccartgtctgactcagttcttcctggggtgtcatgttaccacaaagcttgcttttcagggcccaggacagctctttgagtagtagcatggtgcacaggatctgtttccagccatccggtggttgcttcctaatcttgtcacacatctcatagctcactcartgttaggagtcagacaggagtctcctcccattttagtgatggcctcggtccacgtttgtcttatcttatgagcttctctccttgttaaatgttctggcttttatagactttttttttttttcttgcttataggagacaacagt

SEQ ID NO: 67232 - DNA, 600 bp, Chicken  19866894336726_3
ttgctctcgaagaagtctttaataggccgatgtattgcctgatttttccagatgctgtgtatgataggggatgtgatatacctgctccatgccatgttctttggcccagatgattatgagattatttcagaaatgagtcccartgtctgactcagttcttcctggggtgtcatgttaccacaaagcttgcttttcagggcccaggacagctctttgagtagtagcatggtgcacaggatctgtttccagccatccggtggttgcttcctaatcttgtcacacatctcatagctcactcartgttaggagtcagacaggagtctcctcccattttagtgatggcctcggtccacgtttgtcttatcttatgagcttctctccttgttaaatgttctggcttttatagactttttttttttttcttgcttataggagacaacagttacgggcactggttggttctgtggctgaactgtgggacttattatagtaattggagtgaccacaagtctagttgtgagagtcatggcaactgcagggtccgttagaagagttacagtacccacaggtccatcacaaggattggagacactgtaggac

SEQ ID NO: 67233 - DNA, 600 bp, Chicken  19866894336727_1
ttgtccctccatacctctgctggtccatcactaaaatgcttttctgaggacagggctctcttctgactgcgatttcttgcttcctgcagcccttccctaaggcaatagacacattcctgtcagctgcataaataacttctaccttgtgacactgaaaacactggggaactgtttaaaagcgtcctgtctcgtacagatacacacagaagcagcaattactgtaacaagaggaataataatgacaagaaaaagcacagggtggagaaagtctgtgaagaaagtgtgggcgaaggcattttytcaggttccttgcacgaaatattcccaagcaacagacactgtgaagtgggagaaatccagaacttctacaacattttgtctgaacaccctcacaaagagaaaggagtgggcttcaagacaggtatcaggattttgccaataataaaacatacctttagttttaaatgtgtttcttaacccatggcgtttctttggctctatccgaagggttgaaaactgagtgcgtttttctctgcttgtaatacatttcctgtgggttgttaccacctatctgtctggcaggaactacccagttgccac

SEQ ID NO: 67234 - DNA, 572 bp, Chicken  19866894336727_2
aaaagaatccaactggcatatctactatgaggagaatgagcaacatttccttgaagaatttactcaaagtaggcgtgtgtattatgtgccaagaaaagaaggaaatctgatgctagcatcagttgatgaacattagcatatattctttatatggtacacgctaaaggcaatgctggcgaaaatatgcagaaaaaaaaaacatgaacaaaatcattgttttaaggtctttctgcctcaatttagggaaagaaaatggcaagttcttcaatggaaaggattttttttttttccccacaaagwatggaaatacttcaagagatgggggttttcttgtgagtgtctaaacaaaacatttgtattgatttcaaaatctgtatgtttcagcgtgtccaacacagccaaaatattttgcttagagaaggcaggcatgtgttactattttcaacgcgtttcatgtaaaaaaaatgtcaataatgaagcgttcactttgttgatccagttctcactgagtcattaagggcagggaacagaagagacagaaggatatgagacatctttgaacgcagcatata

SEQ ID NO: 67235 - DNA, 600 bp, Chicken  19866894336734_1
tatcagagcctctctatcccatcgttactttgctttactttgatgcccttgaaatcaaaatatcgcactgtgatttcattagttttcaggaaggatatcagcaatctttctcaagtgcgtgtatgcgtcaggtgaggggctgagggtggtggaggttacctgagatgagtattaatgactaacagctttaagctcagaccaggaatgagcacatctaaatctagattgagagacttaattaaaccttaataaacttccttcaatgcatggacaaaactctcccttgttttgtgaagcctrtaatactcaaaaacatatcaccctaacacacttacgagtgtrttattctccctttgcttcagcttgaattggtattcatggagcaggagtgtacagtgcccagctccctctgcactcatttcattgcccagaccatcaagatttaagcacactatcagcagtgttttggtgttttgragtcctgaaacaaacaatgtctttgcaggacctggctgcagactgctcattcaaggagagcatcctgctttgtggactggaatgagaagtctccccagctctgatccagaatttgaggaccca

SEQ ID NO: 67236 - DNA, 600 bp, Chicken  19866894336734_2
atgcccttgaaatcaaaatatcgcactgtgatttcattagttttcaggaaggatatcagcaatctttctcaagtgcgtgtatgcgtcaggtgaggggctgagggtggtggaggttacctgagatgagtattaatgactaacagctttaagctcagaccaggaatgagcacatctaaatctagattgagagacttaattaaaccttaataaacttccttcaatgcatggacaaaactctcccttgttttgtgaagcctrtaatactcaaaaacatatcaccctaacacacttacgagtgtrttattctccctttgcttcagcttgaattggtattcatggagcaggagtgtacagtgcccagctccctctgcactcatttcattgcccagaccatcaagatttaagcacactatcagcagtgttttggtgttttgragtcctgaaacaaacaatgtctttgcaggacctggctgcagactgctcattcaaggagagcatcctgctttgtggactggaatgagaagtctccccagctctgatccagaatttgaggacccagaggatggagmctgctgccatgcattgcaagcccagcccagc

SEQ ID NO: 67237 - DNA, 600 bp, Chicken  19866894336734_3
actaacagctttaagctcagaccaggaatgagcacatctaaatctagattgagagacttaattaaaccttaataaacttccttcaatgcatggacaaaactctcccttgttttgtgaagcctrtaatactcaaaaacatatcaccctaacacacttacgagtgtrttattctccctttgcttcagcttgaattggtattcatggagcaggagtgtacagtgcccagctccctctgcactcatttcattgcccagaccatcaagatttaagcacactatcagcagtgttttggtgttttgragtcctgaaacaaacaatgtctttgcaggacctggctgcagactgctcattcaaggagagcatcctgctttgtggactggaatgagaagtctccccagctctgatccagaatttgaggacccagaggatggagmctgctgccatgcattgcaagcccagcccagccaggtatatgttccccagtgttttgtacccataccttttgtaatcagtgataacaaaggacttagcactcttgaggaggcaagttaggagcaattgtactttccagcaaagcaaactctggaagactggattctc

SEQ ID NO: 67238 - DNA, 576 bp, Chicken  19866894336734_4
aacatatcaccctaacacacttacgagtgtrttattctccctttgcttcagcttgaattggtattcatggagcaggagtgtacagtgcccagctccctctgcactcatttcattgcccagaccatcaagatttaagcacactatcagcagtgttttggtgttttgragtcctgaaacaaacaatgtctttgcaggacctggctgcagactgctcattcaaggagagcatcctgctttgtggactggaatgagaagtctccccagctctgatccagaatttgaggacccagaggatggagmctgctgccatgcattgcaagcccagcccagccaggtatatgttccccagtgttttgtacccataccttttgtaatcagtgataacaaaggacttagcactcttgaggaggcaagttaggagcaattgtactttccagcaaagcaaactctggaagactggattctccttttgcttctgcccggtctctttgctgagttaaactggacttagtctgaaggtgttcaagaaatgcatagatgtggtacttagagacatatttagtgggtaatattggg

SEQ ID NO: 67239 - DNA, 599 bp, Chicken  19866894336738_1
  misc_feature (1)..(182): n is any nucleotide
nnnnnnnnnnnnnnnnnnnnnnnnnnnnnnnnnnnnnnnnnnnnnnnnnnnnnnnnnnnnnnnnnnnnnnnnnnnnnnnnnnnnnnnnnnnnnnnnnnnnnnnnnnnnnnnnnnnnnnnnnnnnnnnnnnnnnnnnnnnnnnnnnnnnnnnnnnnnnnnnnnnnnnnnnnnnnnnnnnnnnntaccgtctcggccagccctgctctcaagagactgcaaattagaatgaaagtgtttgatttgttttaacactattgcatggaattcccaagaaagaacagctctggctggatggtgagmacaggcagcgggagtgacgaagactgccggtaggtttcagcctctagtaggagcagggagctgacacaggactgaggaatcacaaacctatctacgtgcccataaaacccagcrctgggctgactcctccaccaaataacagacaccatttcttttgatgagccagtaaaagttcttggagraaaaaaaaaatactgagatgacctttggaagcacttaaatgaaagctggataacggctaatagccactgttaatttgtcaagtgcagatcgcatcaaatctaatttcttcctttaat

SEQ ID NO: 67240 - DNA, 599 bp, Chicken  19866894336738_2
  misc_feature (1)..(68): n is any nucleotide
nnnnnnnnnnnnnnnnnnnnnnnnnnnnnnnnnnnnnnnnnnnnnnnnnnnnnnnnnnnnnnnnnnnntaccgtctcggccagccctgctctcaagagactgcaaattagaatgaaagtgtttgatttgttttaacactattgcatggaattcccaagaaagaacagctctggctggatggtgagmacaggcagcgggagtgacgaagactgccggtaggtttcagcctctagtaggagcagggagctgacacaggactgaggaatcacaaacctatctacgtgcccataaaacccagcrctgggctgactcctccaccaaataacagacaccatttcttttgatgagccagtaaaagttcttggagraaaaaaaaaatactgagatgacctttggaagcacttaaatgaaagctggataacggctaatagccactgttaatttgtcaagtgcagatcgcatcaaatctaatttcttcctttaataggataacaaccctgtggataggagagcaggaaatgtcatctatcctgrtgyagaagggcttccagcacagtcttccagaacagctttttgaggcagagagaagcatcacctga

SEQ ID NO: 67241 - DNA, 600 bp, Chicken  19866894336738_3
taccgtctcggccagccctgctctcaagagactgcaaattagaatgaaagtgtttgatttgttttaacactattgcatggaattcccaagaaagaacagctctggctggatggtgagmacaggcagcgggagtgacgaagactgccggtaggtttcagcctctagtaggagcagggagctgacacaggactgaggaatcacaaacctatctacgtgcccataaaacccagcrctgggctgactcctccaccaaataacagacaccatttcttttgatgagccagtaaaagttcttggagraaaaaaaaaatactgagatgacctttggaagcacttaaatgaaagctggataacggctaatagccactgttaatttgtcaagtgcagatcgcatcaaatctaatttcttcctttaataggataacaaccctgtggataggagagcaggaaatgtcatctatcctgrtgyagaagggcttccagcacagtcttccagaacagctttttgaggcagagagaagcatcacctgaataaagctgaagtgagtgtctacagctgccacgggatggatcgcttctgcgaagttctggggccttcag

SEQ ID NO: 67242 - DNA, 600 bp, Chicken  19866894336738_4
aggagcagggagctgacacaggactgaggaatcacaaacctatctacgtgcccataaaacccagcrctgggctgactcctccaccaaataacagacaccatttcttttgatgagccagtaaaagttcttggagraaaaaaaaaatactgagatgacctttggaagcacttaaatgaaagctggataacggctaatagccactgttaatttgtcaagtgcagatcgcatcaaatctaatttcttcctttaataggataacaaccctgtggataggagagcaggaaatgtcatctatcctgrtgyagaagggcttccagcacagtcttccagaacagctttttgaggcagagagaagcatcacctgaataaagctgaagtgagtgtctacagctgccacgggatggatcgcttctgcgaagttctggggccttcagccctggcagctggatgtaaatctgtcagagcggtatgagcacagatagtgccttttgaagtaggagaatggtctcaattaagtgacaatctcttcctttttctggcttcacaattccttgccagctcgatgctgagggccacccctgtcccagtacatgggaccca

SEQ ID NO: 67243 - DNA, 600 bp, Chicken  19866894336738_5
agcagggagctgacacaggactgaggaatcacaaacctatctacgtgcccataaaacccagcrctgggctgactcctccaccaaataacagacaccatttcttttgatgagccagtaaaagttcttggagraaaaaaaaaatactgagatgacctttggaagcacttaaatgaaagctggataacggctaatagccactgttaatttgtcaagtgcagatcgcatcaaatctaatttcttcctttaataggataacaaccctgtggataggagagcaggaaatgtcatctatcctgrtgyagaagggcttccagcacagtcttccagaacagctttttgaggcagagagaagcatcacctgaataaagctgaagtgagtgtctacagctgccacgggatggatcgcttctgcgaagttctggggccttcagccctggcagctggatgtaaatctgtcagagcggtatgagcacagatagtgccttttgaagtaggagaatggtctcaattaagtgacaatctcttcctttttctggcttcacaattccttgccagctcgatgctgagggccacccctgtcccagtacatgggacccacct

SEQ ID NO: 67244 - DNA, 600 bp, Chicken  19866894336740_1
gtgtttcactgagctcaaatttgaggccatacttgcagatggtattaggaagttcgtgctttcatttgttgctgcctggaagatttcccattggtgctgtgggaccaggccagtaaagaataagaggaatcattctaataaggtcgtgctgttgtagacctctcatacagaagagtttctctagttatttgaatagcttcattaactacaatgcaagtgccgtgggtgagagcatggtgtaaataatggatatgaagaaagccgctgtaatctaatccattaaagtattgcatactctaytgtagtccattaaagagaaataaggttagattttgattcctactaattagagggaaggtttgatttttctctccttcacttcagtgcatgaagaatgaagtatatatatgtagaatgctamgtcacagtctcarttttaagtactgagttttaacatgtattctgaaagggcctttttaataatgttcaggaagctgataagacacacaaaagtctaggttggctaatggagatctgctggtaagactgtggttgttttcttttcctttggtcatcacataaatctggtgaaacttaaga

SEQ ID NO: 67245 - DNA, 600 bp, Chicken  19866894336740_2
aagaggaatcattctaataaggtcgtgctgttgtagacctctcatacagaagagtttctctagttatttgaatagcttcattaactacaatgcaagtgccgtgggtgagagcatggtgtaaataatggatatgaagaaagccgctgtaatctaatccattaaagtattgcatactctaytgtagtccattaaagagaaataaggttagattttgattcctactaattagagggaaggtttgatttttctctccttcacttcagtgcatgaagaatgaagtatatatatgtagaatgctamgtcacagtctcarttttaagtactgagttttaacatgtattctgaaagggcctttttaataatgttcaggaagctgataagacacacaaaagtctaggttggctaatggagatctgctggtaagactgtggttgttttcttttcctttggtcatcacataaatctggtgaaacttaagaaacttaagcttatcgctgaaaatgaaatgtcagcaattgggattgtataatgtcaattcactttcagaaatcagaatgatatcggagtttcttaatgaagtgtactaacacagaacttgaa

SEQ ID NO: 67246 - DNA, 589 bp, Chicken  19866894336740_3
ctaataaggtcgtgctgttgtagacctctcatacagaagagtttctctagttatttgaatagcttcattaactacaatgcaagtgccgtgggtgagagcatggtgtaaataatggatatgaagaaagccgctgtaatctaatccattaaagtattgcatactctaytgtagtccattaaagagaaataaggttagattttgattcctactaattagagggaaggtttgatttttctctccttcacttcagtgcatgaagaatgaagtatatatatgtagaatgctamgtcacagtctcarttttaagtactgagttttaacatgtattctgaaagggcctttttaataatgttcaggaagctgataagacacacaaaagtctaggttggctaatggagatctgctggtaagactgtggttgttttcttttcctttggtcatcacataaatctggtgaaacttaagaaacttaagcttatcgctgaaaatgaaatgtcagcaattgggattgtataatgtcaattcactttcagaaatcagaatgatatcggagtttcttaatgaagtgtactaacacagaacttgaata

SEQ ID NO: 67247 - DNA, 600 bp, Chicken  19866894336741_1
tttgagacaagaatgtcagaacacttttgcccaaaagaggagctaagacagagacaaccaaagaaagaggccgaaagaagaaaagaagaactgagaaagacagtgaactctgaagttcagatgtacacagttctttaaatccagaagaactggacttgttcccaaaacatccaagagctttagcccacccttgtaccaatttacagctgaaaggtttagttcaggaccaaactcgcaacagtgaagcagagaggacagggagctgcagaaggaaggcctgcaacgtaacaggctccacayccccgaatcaggcctcaagtacaacacaacaaaaacaggacagagacaaagatcttaatctgatgggagaggtggtggcacagcaatagcttgaaggaattacctctgagcttccctcagccaactgcttttcagttccaactacttgcacagactcacatggatgagacaacgcactgattgctacttcgaaaagtattagtaaatgagataccagatatgattgcatgtcctcctctacattccataaaaggcatcaaaaactttctgatctgaaaatgttcctcagtaattattttg

SEQ ID NO: 67248 - DNA, 600 bp, Chicken  19866894336744_1
aattagcagaatacatattatatacaatgaacacaatagcaaaaataataataataaatgagatcaggtattactaaggtgggtaaacaacatttttaattgccttttctgccttatttttgaagacaattttcaaatccaacatttggtgctattattgaagtaagatctcaaatgaatgcacatcctaatgtcaatgttgaatacaataactgcagaaataccgtcacaaataagctcaattaacacttaaaatgtgagctaataaatattctgaattgaatgcctgttttattccamgtacaatcactgccacttcctggtgaatgtgcctataaatttattgaccttatgaagctccagcaaatcttttatattattgtaatattatattattagtcattgttccaagtttagctttccattagctttccattgtctgattccagataataaaaatactattactgtgaagaaaaaaaataactgtcttcctactctgcgcagaggaagaaatcaacaaggatgcattttatttaacatttagtaaaaaatttccttattttcagagatgataggaaagacttcaatgggttttgc

SEQ ID NO: 67249 - DNA, 600 bp, Chicken  19866894336744_2
ccacttcctggtgaatgtgcctataaatttattgaccttatgaagctccagcaaatcttttatattattgtaatattatattattagtcattgttccaagtttagctttccattagctttccattgtctgattccagataataaaaatactattactgtgaagaaaaaaaataactgtcttcctactctgcgcagaggaagaaatcaacaaggatgcattttatttaacatttagtaaaaaatttccttattttcagagatgataggaaagacttcaatgggttttgctgtgttatatawttaaatagaaatatttttcttacattaggaagatctttatgacatttttgataattttctcttcytttaattactattccattcttgcaattgtattttaatagaatcctctagtaaatagaatgaatttagttgctattcttttaattattgcaagcaagttttatcactttggtattaaggagttattttgcttaaacatgacacacaaaacaaaactttgtcttcagcaaatgctcccatgtttttaccatatcagaacatcaaatatttcttatagttaccctgatgacttgtttc

SEQ ID NO: 67250 - DNA, 600 bp, Chicken  19866894336744_3
tattgtaatattatattattagtcattgttccaagtttagctttccattagctttccattgtctgattccagataataaaaatactattactgtgaagaaaaaaaataactgtcttcctactctgcgcagaggaagaaatcaacaaggatgcattttatttaacatttagtaaaaaatttccttattttcagagatgataggaaagacttcaatgggttttgctgtgttatatawttaaatagaaatatttttcttacattaggaagatctttatgacatttttgataattttctcttcytttaattactattccattcttgcaattgtattttaatagaatcctctagtaaatagaatgaatttagttgctattcttttaattattgcaagcaagttttatcactttggtattaaggagttattttgcttaaacatgacacacaaaacaaaactttgtcttcagcaaatgctcccatgtttttaccatatcagaacatcaaatatttcttatagttaccctgatgacttgtttcagaatagagctagtaacgtgatgtgctgaattttttttcattacagaaattcctttccagacctg

SEQ ID NO: 67251 - DNA, 600 bp, Chicken  19866894336749_1
atatatccatacatatgtttaaataatacagctacaagctaactgtgccagaagaacatccctttcccagtatccaggtgagtaagaagtgacaccagcattttaaaatccactctgtttattgaaaacctctcttctcatttggattatactgaaaccaagaataacaaaaggaagccaagtcttggaaaatcagatttctataacgcagaggtgaagtcctgtgaaacatgaaataggatgctggtatgtttagcaggaagcacttgcctgttgtttgctgagctttaatactcagcrtgaggaagatgactgcaagttctcttccagaaaatatggtagttctcccatacatcagaaaacttacagtaaaaactagaagaataagtaaaaaagaaatctgaacgtggcaccattaccaacaaatcacctttcatcttcatgaagtgaaggaattatttacttaaacattcccaggaaggaccagtggaatcaaaagatggaactggcataaatgtcaatctttattcaatctcccagcacagtacacgccttgggtgcttcaaatgaatattaaaaaaccgaaaactgaacaaaaaa

SEQ ID NO: 67252 - DNA, 599 bp, Chicken  19866894336751_1
  misc_feature (1)..(59): n is any nucleotide
nnnnnnnnnnnnnnnnnnnnnnnnnnnnnnnnnnnnnnnnnnnnnnnnnnnnnnnnnnncccaccacagtactgcacaactgaacctggagatctggatcggtggccatcaaaaagtctgctggaaagagactgtatcctctcataaacgtgcaaggtgattatcagtgtgcatctgctcagaagctgttcacccctgtaaatcacgagaaaggtaataacacaagtatttgcaaatagagatgaacctatcaaagagctacatggaaatggtcaagataaccatttcatctgaactgascactttcctgttcactgaagaggcagaaatactttttcagtccattcttcactgcataaaagttattttgattttctgtcaaatgcatcaaaatatttgagcctcgactttaattcaagtgtgatttaatcaattcagttattcttttaactgcatttgagtgaatcagcatttctgaaacccaasaaaggggtttattgacttcataggtgctgttccagctcgtatttaagttagccataggagtaatgctatttctctccgaggttatcagactgataaagtggcatccaatgcaa

SEQ ID NO: 67253 - DNA, 600 bp, Chicken  19866894336751_2
tgttcacccctgtaaatcacgagaaaggtaataacacaagtatttgcaaatagagatgaacctatcaaagagctacatggaaatggtcaagataaccatttcatctgaactgascactttcctgttcactgaagaggcagaaatactttttcagtccattcttcactgcataaaagttattttgattttctgtcaaatgcatcaaaatatttgagcctcgactttaattcaagtgtgatttaatcaattcagttattcttttaactgcatttgagtgaatcagcatttctgaaacccaasaaaggggtttattgacttcataggtgctgttccagctcgtatttaagttagccataggagtaatgctatttctctccgaggttatcagactgataaagtggcatccaatgcaattttattattttagtagcatgaaatgcaagcaaactggaacctaccaaaaacaacaacaacaacaaaacacctatcacctttttcacccatttttaaatgatgaaactattaattaggttgacaacaacaatgccaaccatgcaactgtggcactggatccacctgagcatggtttggtagctgaga

SEQ ID NO: 67254 - DNA, 600 bp, Chicken  19866894336754_1
ggagaatgacatttacatgacactgacactgagcaggatgacttcctgtggagggaaatactttcttttgatggaatggcagtttttataatggagcccacttgctggttgtagctattgccagcacattgcttatagttacttcatcattagtatggctttttattttccctcaagaatttattcaatttttaagtttatgtaaaatgagaagataagagtggcagtacttttagcctgtagattcttcagcaaactgtcctgcttacagaggctattagaacaataacgtaaaatctytgtttcattctacctgccagtacatgaggaacaagtgctgtttaaatacactgtgcttttctcataactgagtctctggcctttaagttgtatatagtttttacccctgtcagtgtaagttttcatacagraaatctttcaggcatgtaattatgagtatgtactagactaaatcacagacctaagcctaatttttctgaattttacataaactacaaatgttactgtttgcaaaagctgttctcaaataatgaattttgcaccctcttaccacttttcagaatcagatttgtatactga

SEQ ID NO: 67255 - DNA, 600 bp, Chicken  19866894336754_2
cttatagttacttcatcattagtatggctttttattttccctcaagaatttattcaatttttaagtttatgtaaaatgagaagataagagtggcagtacttttagcctgtagattcttcagcaaactgtcctgcttacagaggctattagaacaataacgtaaaatctytgtttcattctacctgccagtacatgaggaacaagtgctgtttaaatacactgtgcttttctcataactgagtctctggcctttaagttgtatatagtttttacccctgtcagtgtaagttttcatacagraaatctttcaggcatgtaattatgagtatgtactagactaaatcacagacctaagcctaatttttctgaattttacataaactacaaatgttactgtttgcaaaagctgttctcaaataatgaattttgcaccctcttaccacttttcagaatcagatttgtatactgatctttcaggtcaaatcaattaatattaatataaattagctgctgtaaaactatgtcattggattttcatattacatatcttacatcttctttcttttcttttctcctcattttcttttgatcttattttat

SEQ ID NO: 67256 - DNA, 599 bp, Chicken  19866894336757_1
  misc_feature (1)..(65): n is any nucleotide
nnnnnnnnnnnnnnnnnnnnnnnnnnnnnnnnnnnnnnnnnnnnnnnnnnnnnnnnnnnnnnnnnaaaaaaaaaaagaaaaaaagaaaaagaaaattagttactagaggtctcctcagtgtctcttgttgtttatgagggtgttgcctgactttcagaaatttgttccaagttcatgatggtgttttgaatcccctttgggaaactaaagccaaaaaaaaaaaaaaaggaaaagaaaaggaaagaaaacccaaaaaacccccagcaacagctagtctagtgtttagtgctatcttacacygctgttttttgtcatttgaggattgaaaaggattttcttcttttttggcatctgtacatatggcacacactgcttaagtcaaaagctgtgagtatatatagcaaaattagcagaactgagtccaagctaaaatatgaaaaaaaaataaaatcaaatattgatgaaaggagcccttaattttcccagaaagtttatctggagcactgccatgctcccttaatcctcgtgcccagagtagcagcagggatggaaattgttattcatcactgagactgggaatggtgaaacctcccctggtc

SEQ ID NO: 67257 - DNA, 600 bp, Chicken  19866894336772_1
cagagccacaggaactattaaggaacgggaaaatccagaacaaactgtggtagcaatattcgggtgggtgggggaagtttcaaactccttgctttggaaaatgtgttgaggaagtaagtctacatctgagctggcactctagctgtttcctcctcctcctcctcagagcagcaagcctcctcttacgtacctggtagttctaggtaagtcgtgccagagatagcattcaaacaaaatccttcctttcattgtaaagattctcactggattccctcagcattttctgcatgttacctctamattcatttctgaaagcttagaatctgaaaaagggaagggaagatctgtcttccctaagctatttctttatgtctggcatacatattctcctatctttgcragcagaacaaaactacacagattacaaattcctgtgacacatctcttggatgcctttagtcatccagatttccctggttaagccccagttaacagataactccaccaagtgtggagggagaaggaaggaggaattctggccaataaaggaatgaactgtttagtcgcaattacagcgatagctgtagccaactattcctt

SEQ ID NO: 67258 - DNA, 600 bp, Chicken  19866894336772_2
atgtgttgaggaagtaagtctacatctgagctggcactctagctgtttcctcctcctcctcctcagagcagcaagcctcctcttacgtacctggtagttctaggtaagtcgtgccagagatagcattcaaacaaaatccttcctttcattgtaaagattctcactggattccctcagcattttctgcatgttacctctamattcatttctgaaagcttagaatctgaaaaagggaagggaagatctgtcttccctaagctatttctttatgtctggcatacatattctcctatctttgcragcagaacaaaactacacagattacaaattcctgtgacacatctcttggatgcctttagtcatccagatttccctggttaagccccagttaacagataactccaccaagtgtggagggagaaggaaggaggaattctggccaataaaggaatgaactgtttagtcgcaattacagcgatagctgtagccaactattccttcccgaaaccaaatagcttcaaaaagtggctgggccaaacagctattaatgctaagtaatgttaactaaaaagcattctagatcacacgagcttcaaatta

SEQ ID NO: 67259 - DNA, 600 bp, Chicken  19866894336786_1
gatttcaacacactgaatactaccaaagtaagggataacaattagtttaagctactgcaagtctacaaagtcttaaatattgatgctgtgtagggacgtcagctctttcaagagtgatctttcaattaaacaataagaggtgacgacagttcatcattttgattccgtttctaatctgatgcattaaaaatgtgatcctaaagtacaagatactgcatgttacatattaacacgtgggtatttcaaagggatgagccatattcaaattgcttcactcagcaggcttgagtgaatcatcarcagcatgattcggagtacttaaggtagaaccctggattaccttgggagagcatggatgaattggaagcacctgaagaatacctatatagggtgcctatctaattaatacaattggtagtcaatgaaccttctacactttaccattcagctaatgccaggatcattcccctggaaaaaggacaatcaaatacttccatgtagctgaataataaggtaagtggagttgaaatcctagtccccagttccttcatgagatcagtgaccacagggtaaggtactgtgcaaaacactttcatccaa

SEQ ID NO: 67260 - DNA, 599 bp, Chicken  19866894336791_1
  misc_feature (1)..(204): n is any nucleotide
nnnnnnnnnnnnnnnnnnnnnnnnnnnnnnnnnnnnnnnnnnnnnnnnnnnnnnnnnnnnnnnnnnnnnnnnnnnnnnnnnnnnnnnnnnnnnnnnnnnnnnnnnnnnnnnnnnnnnnnnnnnnnnnnnnnnnnnnnnnnnnnnnnnnnnnnnnnnnnnnnnnnnnnnnnnnnnnnnnnnnnnnnnnnnnnnnnnnnnnnnnnncaaggagaggatgaatgtagacaaaacatttcccataggagaaatacagagcctttgccttcagtccatttgcaggcaaagggtttggaggctgcmtgccaccatgctggagcccgtgccacctggagcagtgtctcaaggggatgctctgtgcctgggtagttcctcatcaggttgccaccactgctcatagcctggcagtatggctgtaccaggcagcacaagactgtacccactgccaggatacagtgaaacttccaatcacaaatacatgtattttttaaaaagcatgagaataaataattgctgataaccttacagaacaaacaagaagtatttgcatattagcctgcacttaactttacaattcagtcttgcactcttttgtttcactt

SEQ ID NO: 67261 - DNA, 600 bp, Chicken  19866894336791_2
acctggagcagtgtctcaaggggatgctctgtgcctgggtagttcctcatcaggttgccaccactgctcatagcctggcagtatggctgtaccaggcagcacaagactgtacccactgccaggatacagtgaaacttccaatcacaaatacatgtattttttaaaaagcatgagaataaataattgctgataaccttacagaacaaacaagaagtatttgcatattagcctgcacttaactttacaattcagtcttgcactcttttgtttcacttattttttttttgtttcttgcttcaytgcaaagyattgagctggactgcttggcaactaattcacagctgtagttgctaagaaacaatccaagaaagtagattagtctccagtaacctgcttcattgttagagatgtttattttgcataaaggcagttgctgtatacaaagggctttattgaatttggatgaacaagcaaatcatgcagcattatgtctcttttcaatagttttctttactatcacaaagcttcacacaaacatttgagctcttcctcagggaataggatttatttgttcaaagttgtgagatctaaccaggacca

SEQ ID NO: 67262 - DNA, 600 bp, Chicken  19866894336791_3
cagtgtctcaaggggatgctctgtgcctgggtagttcctcatcaggttgccaccactgctcatagcctggcagtatggctgtaccaggcagcacaagactgtacccactgccaggatacagtgaaacttccaatcacaaatacatgtattttttaaaaagcatgagaataaataattgctgataaccttacagaacaaacaagaagtatttgcatattagcctgcacttaactttacaattcagtcttgcactcttttgtttcacttattttttttttgtttcttgcttcaytgcaaagyattgagctggactgcttggcaactaattcacagctgtagttgctaagaaacaatccaagaaagtagattagtctccagtaacctgcttcattgttagagatgtttattttgcataaaggcagttgctgtatacaaagggctttattgaatttggatgaacaagcaaatcatgcagcattatgtctcttttcaatagttttctttactatcacaaagcttcacacaaacatttgagctcttcctcagggaataggatttatttgttcaaagttgtgagatctaaccaggaccaaaatggaa

SEQ ID NO: 67263 - DNA, 599 bp, Chicken  19866894336798_1
  misc_feature (1)..(137): n is any nucleotide
nnnnnnnnnnnnnnnnnnnnnnnnnnnnnnnnnnnnnnnnnnnnnnnnnnnnnnnnnnnnnnnnnnnnnnnnnnnnnnnnnnnnnnnnnnnnnnnnnnnnnnnnnnnnnnnnnnnnnnnnnnnnnnnnnnnnnnnnngcaagtgtcccagagaggacctgttttgctggttcccatgggcttgttcatgtttgtaccccagtcaagacttggcaaatacctttcaagtcacagcagaatgcttagtttgcctagcaagaagcttgctttgtttaaaaatcagtgtgaaggtgattactgrctgcagaagcatgttgatttcattccayamactctgacaagggtgcaccctcagtgtacctcagtgccattaggaaatggtgtccagtcaccaggaaaacttgcactcgttttactccaaaataagtggtgggacttgcccagtcaaagcaagggtgaaatcattagaaaattaattctgtgacaaattaaggccttaattctgaaatacacactcattgtattcagagcatcagataatcacgctgctatcgtgcatgaaaataacratgagcatcttcacaatggccatagtttgtt

SEQ ID NO: 67264 - DNA, 599 bp, Chicken  19866894336798_2
  misc_feature (1)..(109): n is any nucleotide
nnnnnnnnnnnnnnnnnnnnnnnnnnnnnnnnnnnnnnnnnnnnnnnnnnnnnnnnnnnnnnnnnnnnnnnnnnnnnnnnnnnnnnnnnnnnnnnnnnnnnnnnnnnnngcaagtgtcccagagaggacctgttttgctggttcccatgggcttgttcatgtttgtaccccagtcaagacttggcaaatacctttcaagtcacagcagaatgcttagtttgcctagcaagaagcttgctttgtttaaaaatcagtgtgaaggtgattactgrctgcagaagcatgttgatttcattccayamactctgacaagggtgcaccctcagtgtacctcagtgccattaggaaatggtgtccagtcaccaggaaaacttgcactcgttttactccaaaataagtggtgggacttgcccagtcaaagcaagggtgaaatcattagaaaattaattctgtgacaaattaaggccttaattctgaaatacacactcattgtattcagagcatcagataatcacgctgctatcgtgcatgaaaataacratgagcatcttcacaatggccatagtttgttgcttgcctgtttccacttgttaggatta

SEQ ID NO: 67265 - DNA, 599 bp, Chicken  19866894336798_3
  misc_feature (1)..(107): n is any nucleotide
nnnnnnnnnnnnnnnnnnnnnnnnnnnnnnnnnnnnnnnnnnnnnnnnnnnnnnnnnnnnnnnnnnnnnnnnnnnnnnnnnnnnnnnnnnnnnnnnnnnnnnnnnnngcaagtgtcccagagaggacctgttttgctggttcccatgggcttgttcatgtttgtaccccagtcaagacttggcaaatacctttcaagtcacagcagaatgcttagtttgcctagcaagaagcttgctttgtttaaaaatcagtgtgaaggtgattactgrctgcagaagcatgttgatttcattccayamactctgacaagggtgcaccctcagtgtacctcagtgccattaggaaatggtgtccagtcaccaggaaaacttgcactcgttttactccaaaataagtggtgggacttgcccagtcaaagcaagggtgaaatcattagaaaattaattctgtgacaaattaaggccttaattctgaaatacacactcattgtattcagagcatcagataatcacgctgctatcgtgcatgaaaataacratgagcatcttcacaatggccatagtttgttgcttgcctgtttccacttgttaggattaaa

SEQ ID NO: 67266 - DNA, 600 bp, Chicken  19866894336798_4
tgtttaaaaatcagtgtgaaggtgattactgrctgcagaagcatgttgatttcattccayamactctgacaagggtgcaccctcagtgtacctcagtgccattaggaaatggtgtccagtcaccaggaaaacttgcactcgttttactccaaaataagtggtgggacttgcccagtcaaagcaagggtgaaatcattagaaaattaattctgtgacaaattaaggccttaattctgaaatacacactcattgtattcagagcatcagataatcacgctgctatcgtgcatgaaaataacratgagcatcttcacaatggccatagtttgttgcttgcctgtttccacttgttaggattaaaaccttttcctcgtagaagtgtgtgcactcattccagatggggccaagctctgccctctaatgtgttcactcaaatcccattgcagcagtatgggagctgtgtgcatgctgcgagcgcagattttggtccaaaatgccccagtgaaatgctttaacgttatactcataaaatgagccctcagycaataaggtaacttagttgtcagtgggagttcagtgcctttttcctctgtgcatgat

SEQ ID NO: 67267 - DNA, 532 bp, Chicken  19866894336798_5
cactcattgtattcagagcatcagataatcacgctgctatcgtgcatgaaaataacratgagcatcttcacaatggccatagtttgttgcttgcctgtttccacttgttaggattaaaaccttttcctcgtagaagtgtgtgcactcattccagatggggccaagctctgccctctaatgtgttcactcaaatcccattgcagcagtatgggagctgtgtgcatgctgcgagcgcagattttggtccaaaatgccccagtgaaatgctttaacgttatactcataaaatgagccctcagycaataaggtaacttagttgtcagtgggagttcagtgcctttttcctctgtgcatgatccctcttgtggcatcacagctgaggatcccagctcctggtgcccaaactggggtatatctgtgctgtgttgtagagagactcagcttcaacattgtccaaacagcaagcacctggtgctgagaaagttgttctctgaagccacttctttggcacaaatagagggtttttttaact

SEQ ID NO: 67268 - DNA, 599 bp, Chicken  19866894336803_1
  misc_feature (1)..(3): n is any nucleotide
nnnatccccatctcttcccctccccctgccgggacccgaggatgggacttctccaggagcctcccgcacacccgtcagggtgcggggaaacagcaccgcactggcaaacgcttttccaacacgccaaacctctgccatctgctctgaaaatcacagctcattttgctcagctgaatacatccaggcattccttctgcaccgggcgaggaaagggcctttacctctgcgctaggcggctattaacgtgcagggaaattatagcagtgcagcgccaaatgcaaatgctgtagatcaatcagrgtggatccagcagttcagctgctggaagtgaatagccgtgcgtctgtgcagtgccctccaccgcagtcacctgaaaggggcagcagcgttggcactggctgcaattagcaatcccacagatgaaaaataaacagtccgtcagcgtaacgcaacgaggtgctagaaaatacagtcatcatttctgtctgcagtgatacgaatagcccgactcccacagacagataattctaatttaaaataygctgtgaaaaaaatgcgctctttttattagatgctttcaacaattccctgtttccaaa

SEQ ID NO: 67269 - DNA, 600 bp, Chicken  19866894336803_2
aacgtgcagggaaattatagcagtgcagcgccaaatgcaaatgctgtagatcaatcagrgtggatccagcagttcagctgctggaagtgaatagccgtgcgtctgtgcagtgccctccaccgcagtcacctgaaaggggcagcagcgttggcactggctgcaattagcaatcccacagatgaaaaataaacagtccgtcagcgtaacgcaacgaggtgctagaaaatacagtcatcatttctgtctgcagtgatacgaatagcccgactcccacagacagataattctaatttaaaataygctgtgaaaaaaatgcgctctttttattagatgctttcaacaattccctgtttccaaatagagttttctgcaccttagtgactgcagaactcacgcaccactcgaatgcagactgaaggtgtgtgtgtgtggtgggacaggggggttgtttagtgggcattatcccagcacccctggaatccctccttccccttacaagtgagcacctgccatcaccaaggagcactgaacagggtcaggctggaagaatacagtgagcaccgaaccacgctgggcagcgcgttagcagagtcctggtgc

SEQ ID NO: 67270 - DNA, 600 bp, Chicken  19866894336809_1
tgcttatgctgtatttagcttatcccatctgcttccaattactgcatatgttttgttattgtttttattttggtgtggttctctgttttttataggcctgtcctttcagatgaggaagagtttattcccctgaaattaaacatattccaagataggtcaggaaaactaaatgcataattatttccagcatgttaatatggattaaatctcaggtgtttgtgtctatgtactaaattaaactcttgacatactgcattaaaaggcttactgtgtaaaataacttttaactaagttatcaawatctgatacagactgtgtttaggaggataaaatagttggaggataatatcctcctaaaaataggaggataaaataaaacctcgatagaaagtaacacataggtaaatcaaattcagaagttttacrctcttatttttttttactgcacagtagttatattaacaaatgtggttgtctttttgttgttgttgtttgtttgtctaatcatttgtattttgkctttattctatatttaaaaacaaacaaacaaaacaaaacaaaaaaactatgagcttactggagctatgagaaaagacttta

SEQ ID NO: 67271 - DNA, 600 bp, Chicken  19866894336809_2
cccctgaaattaaacatattccaagataggtcaggaaaactaaatgcataattatttccagcatgttaatatggattaaatctcaggtgtttgtgtctatgtactaaattaaactcttgacatactgcattaaaaggcttactgtgtaaaataacttttaactaagttatcaawatctgatacagactgtgtttaggaggataaaatagttggaggataatatcctcctaaaaataggaggataaaataaaacctcgatagaaagtaacacataggtaaatcaaattcagaagttttacrctcttatttttttttactgcacagtagttatattaacaaatgtggttgtctttttgttgttgttgtttgtttgtctaatcatttgtattttgkctttattctatatttaaaaacaaacaaacaaaacaaaacaaaaaaactatgagcttactggagctatgagaaaagactttattcaagaagagttgaagatatatggaagaaagggctaagtaggccagaaatacagaaagttgtttctttagtaatgtgatttgttacactggggccgcatattgtctgtttactcaagcaggtgga

SEQ ID NO: 67272 - DNA, 600 bp, Chicken  19866894336809_3
tgaaattaaacatattccaagataggtcaggaaaactaaatgcataattatttccagcatgttaatatggattaaatctcaggtgtttgtgtctatgtactaaattaaactcttgacatactgcattaaaaggcttactgtgtaaaataacttttaactaagttatcaawatctgatacagactgtgtttaggaggataaaatagttggaggataatatcctcctaaaaataggaggataaaataaaacctcgatagaaagtaacacataggtaaatcaaattcagaagttttacrctcrtatttttttttactgcacagtagttatattaacaaatgtggttgtctttttgttgttgttgtttgtttgtctaatcatttgtattttgkctttattctatatttaaaaacaaacaaacaaaacaaaacaaaaaaactatgagcttactggagctatgagaaaagactttattcaagaagagttgaagatatatggaagaaagggctaagtaggccagaaatacagaaagttgtttctttagtaatgtgatttgttacactggggccgcatattgtctgtttactcaagcaggtggatttg

SEQ ID NO: 67273 - DNA, 600 bp, Chicken  19866894336809_4; identical to SEQ ID NO: 67272

SEQ ID NO: 67274 - DNA, 600 bp, Chicken  19866894336809_5
tgtctatgtactaaattaaactcttgacatactgcattaaaaggcttactgtgtaaaataacttttaactaagttatcaawatctgatacagactgtgtttaggaggataaaatagttggaggataatatcctcctaaaaataggaggataaaataaaacctcgatagaaagtaacacataggtaaatcaaattcagaagttttacrctcttatttttttttactgcacagtagttatattaacaaatgtggttgtctttttgttgttgttgtttgtttgtctaatcatttgtattttgkctttattctatatttaaaaacaaacaaacaaaacaaaacaaaaaaactatgagcttactggagctatgagaaaagactttattcaagaagagttgaagatatatggaagaaagggctaagtaggccagaaatacagaaagttgtttctttagtaatgtgatttgttacactggggccgcatattgtctgtttactcaagcaggtggatttgctgaagaagtgctgatgatgcagtgttctgacccacatataagttcccaacagactgtaccagctggtgtagtttatgcgtatagttca

SEQ ID NO: 67275 - DNA, 600 bp, Chicken  19866894336812_1
ttgccggtgaaaagaaatagacactgttagaaaaaaattatttccatctaatgtagactaataaactagaaaagatgaactataccttatgcgttcccatttctctccagtggctataaaagaaacttagttcctagttcaggaattgcctaaaagtggatgagattaatacactttgaaaggtttttggaatatccagttctcattgtcctgaccatttatttttggactacccaggcctgtgtttgagcttcctagttaggaactcaatatataagttaatatgttttcagtgtaggyatctgcatgtgagctgtgtgtgtaagcacttactctaaataacggagacataggacttggtacagttgtcaacctgtaggcactcactcccctttcactctcgctaatgcaacagaaacctttacacaacattggtagagatgctgccagagcaatggaggacctctacaacgatgatccagctgaatgccaagtaatatgcctagtagaaaatattgagcaaaagaagacattgataatgtttcctactagaacaggaacatacctacaaaggtattcattaagatttagtgtagaaag

SEQ ID NO: 67276 - DNA, 600 bp, Chicken  19866894336815_1
gaaagataggttcgtgtcacgtggggggaagtaacgctgtgacatggaaacctgcctcaagcagggctaggtctccctgtggacagctgcatcttgatagcactcatgttcctgcagccagtgtgaggacctgaaggtggtttctgtgtttgatcttagctacccggaggccgaggctgaaatccaccactccttcctccctgacgacccagcaaactgtgattggtaactagcaaacatcctcctttttctgttttctcctgcttctctcgctcccatttacactccatgcccctacgyactcgacatcattctcatctgtctaggagagtctgaagatttgttggtgagacttggcttgcagaaacacccgccacacttgttatgcagttgcattgtttgatctcatgcttcatccattgcttgccagcactatctgtgacaaccaaatgacagcttctttagaggctgtgttatcatagcttgccttaagtaccatttccctgctccctttcatcatgggaacaaccttctcttgacttgcacctaaatgaggcattgctgctcagaaacctactccttctgtggcggtccacagcc

SEQ ID NO: 67277 - DNA, 599 bp, Chicken  19866894336817_1
  misc_feature (1)..(61): n is any nucleotide
nnnnnnnnnnnnnnnnnnnnnnnnnnnnnnnnnnnnnnnnnnnnnnnnnnnnnnnnnnnnntttatattaaatatattatatctatataaatttatatttgtatataattatatatcaaagcaccattacaataacatgttttgtaagatagtactaagaacaagggtgctttgctaggtgacaaggacaacagggctttcaaagacaatgcagaactgtgtctccctccagttacattagccccctatgcctccacccattagcttgtccagaatagaaacaggaaagagaaatttatyttgaacaatatcactgcaagatctgagtgcgacataagtcagtatcacaatcctgcctcagcactgtaagcagacctgagtgtttagtctgaagcaatctcccacactcattcctcatcagcagctgagaccaccactaatgcaatagccttmcctatgttatcccaaggacgggaacatcacactggggccaggcatcacaatgcagagtacaagattagtattaacaatatcaccagaacagtacctaatgcatggtagcactrgttaaatatgcagtcccacaaggacagcagtat

SEQ ID NO: 67278 - DNA, 600 bp, Chicken  19866894336817_2
actaagaacaagggtgctttgctaggtgacaaggacaacagggctttcaaagacaatgcagaactgtgtctccctccagttacattagccccctatgcctccacccattagcttgtccagaatagaaacaggaaagagaaatttatyttgaacaatatcactgcaagatctgagtgcgacataagtcagtatcacaatcctgcctcagcactgtaagcagacctgagtgtttagtctgaagcaatctcccacactcattcctcatcagcagctgagaccaccactaatgcaatagccttmcctatgttatcccaaggacgggaacatcacactggggccaggcatcacaatgcagagtacaagattagtattaacaatatcaccagaacagtacctaatgcatggtagcactrgttaaatatgcagtcccacaaggacagcagtatagtacctaacattagctgcaacattgtgtttcaaggaacctgttactttcctttgaaaatgcttcttgtctgtcatgctctttcaacaatagactaacagtatttcttgtttttctttttacctccttgatctcacttgctttcagagcccaaa

SEQ ID NO: 67279 - DNA, 600 bp, Chicken  19866894336817_3
tgtccagaatagaaacaggaaagagaaatttatyttgaacaatatcactgcaagatctgagtgcgacataagtcagtatcacaatcctgcctcagcactgtaagcagacctgagtgtttagtctgaagcaatctcccacactcattcctcatcagcagctgagaccaccactaatgcaatagccttmcctatgttatcccaaggacgggaacatcacactggggccaggcatcacaatgcagagtacaagattagtattaacaatatcaccagaacagtacctaatgcatggtagcactrgttaaatatgcagtcccacaaggacagcagtatagtacctaacattagctgcaacattgtgtttcaaggaacctgttactttcctttgaaaatgcttcttgtctgtcatgctctttcaacaatagactaacagtatttcttgtttttctttttacctccttgatctcacttgctttcagagcccaaaagacttccttccataacagcatcacaattattcatagtggctttgctatagatgtatggaaaatattctgtcttccccctttcttagttataaagaagacttttaatatgttt

SEQ ID NO: 67280 - DNA, 599 bp, Chicken  19866894336824_1
  misc_feature (1)..(68): n is any nucleotide
nnnnnnnnnnnnnnnnnnnnnnnnnnnnnnnnnnnnnnnnnnnnnnnnnnnnnnnnnnnnnnnnnnnncatgtgcaatagagtgtcttgtgtacttggtctgtcatgaaaattgcagaacatctgcaagtgaaggcaacacaaaaggattggttagagcaaaactaaagagccacaccttgccttagagaagaacgtggtgaggtagcatcgtgtcagcatttattccactgtctcagattcaacagatctgtcctacctagtgttaagcaatataccagcgtggcagaaacatcattcrtgtacaagcaagaagtgcaccgcgtgccattttttcagtccaatcttgcaatcagctgtacatcctcctctgcagcctgggctgtgccctgcccgcccttcctctcagctccagcgttagagaaacagggttcacaccaccctgtacttcttccttacccctctctccagatactgtttcacagcagccctgctctgattcagtactaaactagcacatgagaattcaaatttagaagggaaaaggtctgttttgggcctggtgggtatcyctgtactgtgacctccaagctagcaaat

SEQ ID NO: 67281 - DNA, 600 bp, Chicken  19866894336824_2
atataccagcgtggcagaaacatcattcrtgtacaagcaagaagtgcaccgcgtgccattttttcagtccaatcttgcaatcagctgtacatcctcctctgcagcctgggctgtgccctgcccgcccttcctctcagctccagcgttagagaaacagggttcacaccaccctgtacttcttccttacccctctctccagatactgtttcacagcagccctgctctgattcagtactaaactagcacatgagaattcaaatttagaagggaaaaggtctgttttgggcctggtgggtatcyctgtactgtgacctccaagctagcaaatcaatctttggtgagattgggtggtccaggaaacacagtggtccaamgctctctgcaacttgagtgatcttttaatgacaataatttttagacaagtagtgtgttcggttttgggcacctcaatacagaaaggacatggaggtgctggagcaggtccaaagaagggcaacaaggcttgtgaagggcttgcagaatatgccctgtgaggagagactgaaggaactggggctgtttggtctggggaagaggaggctgaggggtgacattattgct

SEQ ID NO: 67282 - DNA, 600 bp, Chicken  19866894336824_3
ttgcaatcagctgtacatcctcctctgcagcctgggctgtgccctgcccgcccttcctctcagctccagcgttagagaaacagggttcacaccaccctgtacttcttccttacccctctctccagatactgtttcacagcagccctgctctgattcagtactaaactagcacatgagaattcaaatttagaagggaaaaggtctgttttgggcctggtgggtatcyctgtactgtgacctccaagctagcaaatcaatctttggtgagattgggtggtccaggaaacacagtggtccaamgctctctgcaacttgagtgatcttttaatgacaataatttttagacaagtagtgtgttcggttttgggcacctcaatacagaaaggacatggaggtgctggagcaggtccaaagaagggcaacaaggcttgtgaagggcttgcagaatatgccctgtgaggagagactgaaggaactggggctgtttggtctggggaagaggaggctgaggggtgacattattgctctcttccaatatctgaaatgtgcttatagcaagagtggggttggtctcttctcattgctgacaggtgacaggat

SEQ ID NO: 67283 - DNA, 600 bp, Chicken  19866894336824_4
ttttaatgacaataatttttagacaagtagtgtgttcggttttgggcacctcaatacagaaaggacatggaggtgctggagcaggtccaaagaagggcaacaaggcttgtgaagggcttgcagaatatgccctgtgaggagagactgaaggaactggggctgtttggtctggggaagaggaggctgaggggtgacattattgctctcttccaatatctgaaatgtgcttatagcaagagtggggttggtctcttctcattgctgacaggtgacaggatgaggggaaatggcctccagttrcaccagggtaagtttaggttggatatcaggaaaaacttctttacagaaagggctgttaagcactggaataggctccctagggaggtggttgagtcaccatccctggatgtgtttaaaaactgtttggacgtggtgctcagggccatgacttagcggagggttgttaagatgtagagtagtatggttgggtcatggtgggactcgatgacctttaaagtcttttccaacctgagtgattctatgattctaattctcagcaccctttatctagttttctgtactttcaatacaagtactttc

SEQ ID NO: 67284 - DNA, 599 bp, Chicken  19866894336826_1
  misc_feature (1)..(152): n is any nucleotide
nnnnnnnnnnnnnnnnnnnnnnnnnnnnnnnnnnnnnnnnnnnnnnnnnnnnnnnnnnnnnnnnnnnnnnnnnnnnnnnnnnnnnnnnnnnnnnnnnnnnnnnnnnnnnnnnnnnnnnnnnnnnnnnnnnnnnnnnnnnnnnnnnnnnnnnnccagaggttacccagccgagggtgatagctctgcattcctgccatgtcttagcttttttaaattaaattcttgcaacatgaggatttaatcccttctgctatatacggcgcggctgtgtgtgtgtgtatttatatatatatatatatwtttttttttttccctacaaaaatttcatcaggagagttatttgtgtgtttgagaattggcttggatacagggtcggtaactttccacccggagcccatggaaagtttggggtttgaggcagaatatagggtcaggtttgggcttgtactgagtcgaaactagatctggggttgagagccactggggatgaaatctgttgcgttgctctttatgtattattttttattaaaaatgatggaaaagagcagttttcctgtgcccaggtcttccaaaagcagtgagatttatcactgttaaga

SEQ ID NO: 67285 - DNA, 600 bp, Chicken  19866894336826_2
tatagggtcaggtttgggcttgtactgagtcgaaactagatctggggttgagagccactggggatgaaatctgttgcgttgctctttatgtattattttttattaaaaatgatggaaaagagcagttttcctgtgcccaggtcttccaaaagcagtgagatttatcactgttaagatggcagtaagaaaatcagtggtttcagtacagaactggattcaaagtccaatcccagaagggtgactctggactgaaaattcagcccctgcggtttttacttgggatggaagaagataatagcyragactgtgatctggatgttggtttctcgttggttccagccaaggacaccccagctccagcastacraaggggtcagcacttaaggctggtcctcaccttaaagcaaacagaaaccaaacccacagcactggccaataaacaatcaattgccctaagccatggcccagatgtgaagcacctaccttccagtgagggtacgaagctgtttcatgatgctttgtgcatggagatctcaatatttcaacatggtgcttcacactgcaaggcgtgcccgaagctcttccctccacacagccatc

SEQ ID NO: 67286 - DNA, 600 bp, Chicken  19866894336826_3
atagggtcaggtttgggcttgtactgagtcgaaactagatctggggttgagagccactggggatgaaatctgttgcgttgctctttatgtattattttttattaaaaatgatggaaaagagcagttttcctgtgcccaggtcttccaaaagcagtgagatttatcactgttaagatggcagtaagaaaatcagtggtttcagtacagaactggattcaaagtccaatcccagaagggtgactctggactgaaaattcagcccctgcggtttttacttgggatggaagaagataatagcyragactgtgatctggatgttggtttctcgttggttccagccaaggacaccccagctccagcastacraaggggtcagcacttaaggctggtcctcaccttaaagcaaacagaaaccaaacccacagcactggccaataaacaatcaattgccctaagccatggcccagatgtgaagcacctaccttccagtgagggtacgaagctgtttcatgatgctttgtgcatggagatctcaatatttcaacatggtgcttcacactgcaaggcgtgcccgaagctcttccctccacacagccatca

SEQ ID NO: 67287 - DNA, 600 bp, Chicken  19866894336826_4
atgaaatctgttgcgttgctctttatgtattattttttattaaaaatgatggaaaagagcagttttcctgtgcccaggtcttccaaaagcagtgagatttatcactgttaagatggcagtaagaaaatcagtggtttcagtacagaactggattcaaagtccaatcccagaagggtgactctggactgaaaattcagcccctgcggtttttacttgggatggaagaagataatagcyragactgtgatctggatgttggtttctcgttggttccagccaaggacaccccagctccagcastacraaggggtcagcacttaaggctggtcctcaccttaaagcaaacagaaaccaaacccacagcactggccaataaacaatcaattgccctaagccatggcccagatgtgaagcacctaccttccagtgagggtacgaagctgtttcatgatgctttgtgcatggagatctcaatatttcaacatggtgcttcacactgcaaggcgtgcccgaagctcttccctccacacagccatcaagatgggcacagatgcagcttttcctcagtgaaggtcttgttttttgtcaccattttcagct

SEQ ID NO: 67288 - DNA, 600 bp, Chicken  19866894336826_5
aatctgttgcgttgctctttatgtattattttttattaaaaatgatggaaaagagcagttttcctgtgcccaggtcttccaaaagcagtgagatttatcactgttaagatggcagtaagaaaatcagtggtttcagtacagaactggattcaaagtccaatcccagaagggtgactctggactgaaaattcagcccctgcggtttttacttgggatggaagaagataatagcyragactgtgatctggatgttggtttctcgttggttccagccaaggacaccccagctccagcastacraaggggtcagcacttaaggctggtcctcaccttaaagcaaacagaaaccaaacccacagcactggccaataaacaatcaattgccctaagccatggcccagatgtgaagcacctaccttccagtgagggtacgaagctgtttcatgatgctttgtgcatggagatctcaatatttcaacatggtgcttcacactgcaaggcgtgcccgaagctcttccctccacacagccatcaagatgggcacagatgcagcttttcctcagtgaaggtcttgttttttgtcaccattttcagctctag

SEQ ID NO: 67289 - DNA, 600 bp, Chicken  19866894336830_1
caacatccgtaggcattgtgtttatcacaggaagaggattctatctacaaaacacggcaccatgattcacacagaagatgcccccattttcagaaactgagcttatggcaaatttagggaccactacttccactttggagttagactgtcagtgtcttgttaagatgtttctgagggagtagaagccagtctttctgttgatgctgaagtgcttaagtaatcactgtcatatgcaaaggctgtttgggggaactgctttttcacctttcaattaacattcattaaccatcaaaactaaaygtaagtggcatcagtgttctgttcagaggctgcaggaaacaatgagtgaaaygcttatcctttgttagagccagcagcttctgtgacttaattaaaatatggcattaatttcaaaatcattcattaaatcgttataatgaaatgacgataggcgccaaaattttgcttgttcactctaacagtttattttaggaaactcagtccaacaggatgaaccttgaatatacagattaatgcaggggaggaaattttatgatgtctgttagttaatacagaagccaatcttattaatcatggatt

SEQ ID NO: 67290 - DNA, 600 bp, Chicken  19866894336830_2
cacggcaccatgattcacacagaagatgcccccattttcagaaactgagcttatggcaaatttagggaccactacttccactttggagttagactgtcagtgtcttgttaagatgtttctgagggagtagaagccagtctttctgttgatgctgaagtgcttaagtaatcactgtcatatgcaaaggctgtttgggggaactgctttttcacctttcaattaacattcattaaccatcaaaactaaaygtaagtggcatcagtgttctgttcagaggctgcaggaaacaatgagtgaaaygcttatcctttgttagagccagcagcttctgtgacttaattaaaatatggcattaatttcaaaatcattcattaaatcgttataatgaaatgacgataggcgccaaaattttgcttgttcactctaacagtttattttaggaaactcagtccaacaggatgaaccttgaatatacagattaatgcaggggaggaaattttatgatgtctgttagttaatacagaagccaatcttattaatcatggatttacagagggctgttttattagatgttaaccagagcttatgttgacaattatt

SEQ ID NO: 67291 - DNA, 579 bp, Chicken  19866894336835_1
ttcactctgcacaagaatcatagaatggtttgggaaggtatggacctttaagatcacctagttccaagcctcctgctataggcaggggcacctccctctagaccaggttgctcaaagccccatccagcctggccttgaatgcttccagggagaggatgtgtacagtctcactgggcaacctgttccagtgtctcaacgctttaacaataaagaatttcttcctaatatctagtctaaatctaccctcttccagtttaaagacatttccccttgtcttgttgctacatgcccttataaaaygtccttctccagctttcctgtaggccccactccatccaccacctcaaagtgctcgcagccactgtttggtctccagaaacattcagcaagcattgttgaacgtcagtaggtgccattttttcagcatggaggaattcagtgacacgcctttactccatatgcactttcatgtcagacagcattctatcagactgcccctcttctgctgtctgttacacagcaacaaaatgtaatgaaatattggtggggaaggttcaacttctattgccatactgacat

SEQ ID NO: 67292 - DNA, 600 bp, Chicken  19866894336839_1
tattagcattgtaaaatgagaattttatgaactgaattttcctgtagttagtgtaatgttggtggaactgcagctaccttggacaaaccctggtgtgtgtaaacagtttgagatcaatagagaatattactaccctgaatttatctcagcagaggtaaattggaggactttgtgcaacagaactatcaaaggaccaagaacaataaagaaatagtcagggaatgcactttaaaattttgtttagacttgtgtctttgaaatagttaaagtacagactgaaaaatgagtttttctgacacrtgtgatgatctctgagaaaatgcatacttaacctatatgagcatccacagaaactcaacactggccaatgtggagagagatgggacaaagggagtagtagggtagcaggtccattacgcctaatttccatgaagaagaatggacagagggctgtgtttaggaagtgtgaaattaggaaaaaaaaaaaaaaaaaaaaaagacaaagaaagcataatagaacgggaattctacgcaatagaaaccaaaggcagcagtttggtgagaatctagcttggaatatattatccgggctgtataaca

SEQ ID NO: 67293 - DNA, 599 bp, Chicken  19866894336842_1
  misc_feature (1)..(52): n is any nucleotide
nnnnnnnnnnnnnnnnnnnnnnnnnnnnnnnnnnnnnnnnnnnnnnnnnnnntctccatcgtggccgcagcgttgggcgctccgctgcttctgctcctgctgggcgccgccgcgctgctctgtgcccggaggagaccctacagcgaatacgagcccatcaactgagcggcgccgctcggcccggggagcgatcgcggctgctgcgggaaacacagcgccgctgtctcctctttgtcttcgcttctgggggggtgcggggcaaggtgggcagtggggccctccccgtgccgctgtgccgcrctccgtgctgctgcctgcactgacggcggtgcttcctttcttcctgctgcacactgccgggggctgacagggcagcgggtccgggtgatcccggtcatcgtcctcatcctcctcatcctcctcctgggggagggcacctcgtgctgcccggcctcaccgaaggctgctgctatgagggggaactccgcagcacagcgcagcgactgcttcagctcaggtcccggcagagccttcaggagcccccgggtcacagccggagctgctgcccttccgcgtgcggcgatggttggtggcggtgc

SEQ ID NO: 67294 - DNA, 600 bp, Chicken  19866894336845_1
tctagttgaaggtctgaccttgttacaaaatatctacatggaaaagccaggtacatttttcacctatttggaattacacagcatatgtaaaagacttgtttattgctttgatgatttctgtgggagaaaggagtttcttcttgaaatattaatgtggaaaaatataaaagggccaagacaggcttgttccatgctgttgtacgttaaaactaagtgctgcataaaataccaatgtccagtaattttgtcagtgttggaaattacatacgccactgccttcagctcccctctcaatctcarcaggactgtggattttggcgtaataatacaaaggtcaccactgtacacagttcagtatcccrgttcctgaaaactgtgaggaattcttggtgctgaagagaatcagattcctcccatacgtgaacccctcttaatttctgataaacattgctgaaattaacacttctaaattgtgctgaacacgtttttctgcttttagatgaacggagacaaggttttgctgtcataagacatcagtgggtctgctcgagatttagagactacttttatcctgttacactaatgtgcttcagtgtggat

SEQ ID NO: 67295 - DNA, 600 bp, Chicken  19866894336845_2
cctatttggaattacacagcatatgtaaaagacttgtttattgctttgatgatttctgtgggagaaaggagtttcttcttgaaatattaatgtggaaaaatataaaagggccaagacaggcttgttccatgctgttgtacgttaaaactaagtgctgcataaaataccaatgtccagtaattttgtcagtgttggaaattacatacgccactgccttcagctcccctctcaatctcarcaggactgtggattttggcgtaataatacaaaggtcaccactgtacacagttcagtatcccrgttcctgaaaactgtgaggaattcttggtgctgaagagaatcagattcctcccatacgtgaacccctcttaatttctgataaacattgctgaaattaacacttctaaattgtgctgaacacgtttttctgcttttagatgaacggagacaaggttttgctgtcataagacatcagtgggtctgctcgagatttagagactacttttatcctgttacactaatgtgcttcagtgtggatgtgaccagaagaaaaccaccacacaytgaagctatttaaagaatctgagagtaactgatggt

SEQ ID NO: 67296 - DNA, 600 bp, Chicken  19866894336845_3
tacaaaggtcaccactgtacacagttcagtatcccrgttcctgaaaactgtgaggaattcttggtgctgaagagaatcagattcctcccatacgtgaacccctcttaatttctgataaacattgctgaaattaacacttctaaattgtgctgaacacgtttttctgcttttagatgaacggagacaaggttttgctgtcataagacatcagtgggtctgctcgagatttagagactacttttatcctgttacactaatgtgcttcagtgtggatgtgaccagaagaaaaccaccacacaytgaagctatttaaagaatctgagagtaactgatggtcttcagtgcctgcagttcaataaaagtgtaatgctgtcmaatcataaaacrgctgagctgagctgtttagttctctaagggtgcatatcctttttcctttccctttgtcaactgactgaagctacctactacttgtaaatacttcttcagtgactaatctctggactttgtcttttcactcttttttattcattgagatgtttttcctgaaagtcagagagcataaggagwtatgctmtactctcatttgcatcatcactgttt

SEQ ID NO: 67297 - DNA, 600 bp, Chicken  19866894336845_4
atcagattcctcccatacgtgaacccctcttaatttctgataaacattgctgaaattaacacttctaaattgtgctgaacacgtttttctgcttttagatgaacggagacaaggttttgctgtcataagacatcagtgggtctgctcgagatttagagactacttttatcctgttacactaatgtgcttcagtgtggatgtgaccagaagaaaaccaccacacaytgaagctatttaaagaatctgagagtaactgatggtcttcagtgcctgcagttcaataaaagtgtaatgctgtcmaatcataaaacrgctgagctgagctgtttagttctctaagggtgcatatcctttttcctttccctttgtcaactgactgaagctacctactacttgtaaatacttcttcagtgactaatctctggactttgtcttttcactcttttttattcattgagatgtttttcctgaaagtcagagagcataaggagwtatgctmtactctcatttgcatcatcactgtttgaagcttcctggaatccctattagggataatagagataattagcctaaaagtattaaaaaaaaaaaaaaaaaaaa

SEQ ID NO: 67298 - DNA, 600 bp, Chicken  19866894336845_5
ccatacgtgaacccctcttaatttctgataaacattgctgaaattaacacttctaaattgtgctgaacacgtttttctgcttttagatgaacggagacaaggttttgctgtcataagacatcagtgggtctgctcgagatttagagactacttttatcctgttacactaatgtgcttcagtgtggatgtgaccagaagaaaaccaccacacaytgaagctatttaaagaatctgagagtaactgatggtcttcagtgcctgcagttcaataaaagtgtaatgctgtcmaatcataaaacrgctgagctgagctgtttagttctctaagggtgcatatcctttttcctttccctttgtcaactgactgaagctacctactacttgtaaatacttcttcagtgactaatctctggactttgtcttttcactcttttttattcattgagatgtttttcctgaaagtcagagagcataaggagwtatgctmtactctcatttgcatcatcactgtttgaagcttcctggaatccctattagggataatagagataattagcctaaaagtattaaaaaaaaaaaaaaaaaaaaaaaaacccacaa

SEQ ID NO: 67299 - DNA, 433 bp, Chicken  19866894336845_6
tgtggatgtgaccagaagaaaaccaccacacaytgaagctatttaaagaatctgagagtaactgatggtcttcagtgcctgcagttcaataaaagtgtaatgctgtcmaatcataaaacrgctgagctgagctgtttagttctctaagggtgcatatcctttttcctttccctttgtcaactgactgaagctacctactacttgtaaatacttcttcagtgactaatctctggactttgtcttttcactcttttttattcattgagatgtttttcctgaaagtcagagagcataaggagwtatgctmtactctcatttgcatcatcactgtttgaagcttcctggaatccctattagggataatagagataattagcctaaaagtattaaaaaaaaaaaaaaaaaaaaaaaaacccacaaaaaacccttaaag

SEQ ID NO: 67300 - DNA, 426 bp, Chicken  19866894336845_7
gtgaccagaagaaaaccaccacacaytgaagctatttaaagaatctgagagtaactgatggtcttcagtgcctgcagttcaataaaagtgtaatgctgtcmaatcataaaacrgctgagctgagctgtttagttctctaagggtgcatatcctttttcctttccctttgtcaactgactgaagctacctactacttgtaaatacttcttcagtgactaatctctggactttgtcttttcactcttttttattcattgagatgtttttcctgaaagtcagagagcataaggagwtatgctmtactctcatttgcatcatcactgtttgaagcttcctggaatccctattagggataatagagataattagcctaaaagtattaaaaaaaaaaaaaaaaaaaaaaaaacccacaaaaaacccttaaag

SEQ ID NO: 67301 - DNA, 599 bp, Chicken  19866894336849_1
  misc_feature (1)..(54): n is any nucleotide
nnnnnnnnnnnnnnnnnnnnnnnnnnnnnnnnnnnnnnnnnnnnnnnnnnnnnncagaaatactatgagatagatactgaatactttttcataaaattggttgttaaactgcaatggaaaatcagtaactgaaaatcctaaaaccaaaagactttcttagaaaaaaaacattactaaactagattggacagttctctttaagcacttcttagaagcactaagaaaatccaatacttagcaaagtacatggtaccttcagtaggcagatacagagttcccttggaagctcataggcaaatrcttgaaacacatagctgttttcaaattaggccaaaaagattggtggccaaaaagattttaccacttcagacatggtctcatggaaaaataatctacgtaggtattttcataaaacttgaaaggaatttcatgctacccctccctcccaaaatggaaaccatgtgaagaattgtcacacatagccatcgtggtgcttttgttaatcaacaagaacaagtagttcaacagaaatggaataattggaaatagttctattcattcaaattaaaaaataaaatacaggaaaataggaaatactc

SEQ ID NO: 67302 - DNA, 599 bp, Chicken  19866894336851_1
  misc_feature (1)..(13): n is any nucleotide
nnnnnnnnnnnnntttgtcatcttgtgggtacttctcatgcaacattagtaaaaagttaccatatatatataatttttaactgcatatcagaccaatgggaaaagtgaatatgccattacattggcatcttatcatgtgtgaggataggtggcagtagatatggttgctttaagcctaagaaatagagtgctcacaacctggtaatagaaaagaaatctcttacctcttccagaagatcagaacttgtcaaatactccaaagaaggtattctccaagtacagatacttctcttgtggctrccagcccttaaatgaggttagggtgaattgcttccacatgtgctggctatgccccttcarcaggtgctcaattgccagttcaggccctgatccaatagttcccatacaycacgtaaccctccatgatgagttacaaatatgtacaacaacaaagtcagtaaaaacatgcttttaactcaacttatacatcaattcccacagtctcctgtgcttcaggcacttgcaaaattctgcaatttacagagacattagatttcctccctgaggtataattttaaaataaatgaataagcattatc

SEQ ID NO: 67303 - DNA, 600 bp, Chicken  19866894336851_2
catatatatataatttttaactgcatatcagaccaatgggaaaagtgaatatgccattacattggcatcttatcatgtgtgaggataggtggcagtagatatggttgctttaagcctaagaaatagagtgctcacaacctggtaatagaaaagaaatctcttacctcttccagaagatcagaacttgtcaaatactccaaagaaggtattctccaagtacagatacttctcttgtggctrccagcccttaaatgaggttagggtgaattgcttccacatgtgctggctatgccccttcarcaggtgctcaattgccagttcaggccctgatccaatagttcccatacaycacgtaaccctccatgatgagttacaaatatgtacaacaacaaagtcagtaaaaacatgcttttaactcaacttatacatcaattcccacagtctcctgtgcttcaggcacttgcaaaattctgcaatttacagagacattagatttcctccctgaggtataattttaaaataaatgaataagcattatcctgatgtatggtgcagaagtaatcagaatgtggctctttcatcaggagttgggtgatttac

SEQ ID NO: 67304 - DNA, 600 bp, Chicken  19866894336851_3
tatgccattacattggcatcttatcatgtgtgaggataggtggcagtagatatggttgctttaagcctaagaaatagagtgctcacaacctggtaatagaaaagaaatctcttacctcttccagaagatcagaacttgtcaaatactccaaagaaggtattctccaagtacagatacttctcttgtggctrccagcccttaaatgaggttagggtgaattgcttccacatgtgctggctatgccccttcarcaggtgctcaattgccagttcaggccctgatccaatagttcccatacaycacgtaaccctccatgatgagttacaaatatgtacaacaacaaagtcagtaaaaacatgcttttaactcaacttatacatcaattcccacagtctcctgtgcttcaggcacttgcaaaattctgcaatttacagagacattagatttcctccctgaggtataattttaaaataaatgaataagcattatcctgatgtatggtgcagaagtaatcagaatgtggctctttcatcaggagttgggtgatttacctaaaagtacatctgtctgctggggctatgagtctttaaatgggacatt

SEQ ID NO: 67305 - DNA, 600 bp, Chicken  19866894336856_1
acagagttccttaaaggaagacctcattgcacacagaggagaaataagcgatgagtaaaccctctgaatacatgaaaggatgcgaacccaaatagcaacgctaattgctgcactgggagcctccatgctgccctgctgcagccttgtcccaaaccaaccccgaggaaatgcgtggctctggctgtcacacaattcctgcagaggcaaacacacacagaactctgctgcatgcaagcactgaggtcagtcagagctgtgagatattaattggatgctggggaatgcagagagttaggctgyatamggaagatctaactccgataccacctgcaagcaagtaaacattttctctgtctgtatrggaaaataaagtcatckttaagtccttcagaagatcacaagcaaagggcactgaaaccagcatgtcagcccagtggctatgggctgctgagaaaaaccaatctgatcccagagttcagagccctaccaaccccactgccctcctgccgccaactgcagctactcctgaaagagagagcctcctctgaaggctaagatttcaaaaccygctaacaataacaattcacgtgatgaaaaaca

SEQ ID NO: 67306 - DNA, 600 bp, Chicken  19866894336856_2
agttccttaaaggaagacctcattgcacacagaggagaaataagcgatgagtaaaccctctgaatacatgaaaggatgcgaacccaaatagcaacgctaattgctgcactgggagcctccatgctgccctgctgcagccttgtcccaaaccaaccccgaggaaatgcgtggctctggctgtcacacaattcctgcagaggcaaacacacacagaactctgctgcatgcaagcactgaggtcagtcagagctgtgagatattaattggatgctggggaatgcagagagttaggctgyatamggaagatctaactccgataccacctgcaagcaagtaaacattttctctgtctgtatrggaaaataaagtcatckttaagtccttcagaagatcacaagcaaagggcactgaaaccagcatgtcagcccagtggctatgggctgctgagaaaaaccaatctgatcccagagttcagagccctaccaaccccactgccctcctgccgccaactgcagctactcctgaaagagagagcctcctctgaaggctaagatttcaaaaccygctaacaataacaattcacgtgatgaaaaacataac

SEQ ID NO: 67307 - DNA, 600 bp, Chicken  19866894336856_3
ctctgaatacatgaaaggatgcgaacccaaatagcaacgctaattgctgcactgggagcctccatgctgccctgctgcagccttgtcccaaaccaaccccgaggaaatgcgtggctctggctgtcacacaattcctgcagaggcaaacacacacagaactctgctgcatgcaagcactgaggtcagtcagagctgtgagatattaattggatgctggggaatgcagagagttaggctgyatamggaagatctaactccgataccacctgcaagcaagtaaacattttctctgtctgtatrggaaaataaagtcatckttaagtccttcagaagatcacaagcaaagggcactgaaaccagcatgtcagcccagtggctatgggctgctgagaaaaaccaatctgatcccagagttcagagccctaccaaccccactgccctcctgccgccaactgcagctactcctgaaagagagagcctcctctgaaggctaagatttcaaaaccygctaacaataacaattcacgtgatgaaaaacataacgcacgagagctaatgctcaaacatcagagcagtgctggactgctccattttgatgac

SEQ ID NO: 67308 - DNA, 600 bp, Chicken  19866894336856_4
gatgcgaacccaaatagcaacgctaattgctgcactgggagcctccatgctgccctgctgcagccttgtcccaaaccaaccccgaggaaatgcgtggctctggctgtcacacaattcctgcagaggcaaacacacacagaactctgctgcatgcaagcactgaggtcagtcagagctgtgagatattaattggatgctggggaatgcagagagttaggctgyatamggaagatctaactccgataccacctgcaagcaagtaaacattttctctgtctgtatrggaaaataaagtcatckttaagtccttcagaagatcacaagcaaagggcactgaaaccagcatgtcagcccagtggctatgggctgctgagaaaaaccaatctgatcccagagttcagagccctaccaaccccactgccctcctgccgccaactgcagctactcctgaaagagagagcctcctctgaaggctaagatttcaaaaccygctaacaataacaattcacgtgatgaaaaacataacgcacgagagctaatgctcaaacatcagagcagtgctggactgctccattttgatgacaatttctttgagaactg

SEQ ID NO: 67309 - DNA, 459 bp, Chicken  19866894336856_5
tggatgctggggaatgcagagagttaggctgyatamggaagatctaactccgataccacctgcaagcaagtaaacattttctctgtctgtatrggaaaataaagtcatckttaagtccttcagaagatcacaagcaaagggcactgaaaccagcatgtcagcccagtggctatgggctgctgagaaaaaccaatctgatcccagagttcagagccctaccaaccccactgccctcctgccgccaactgcagctactcctgaaagagagagcctcctctgaaggctaagatttcaaaaccygctaacaataacaattcacgtgatgaaaaacataacgcacgagagctaatgctcaaacatcagagcagtgctggactgctccattttgatgacaatttctttgagaactgtgttactattactgcttgcacgggggttgagcgcatcataggcaatgca

SEQ ID NO: 67310 - DNA, 490 bp, Chicken  19866894336872_1
ctgccacatccatccacgtgtaccaacctgccacagctgcctaccaacgctgtccctctgcctggggctgagcacagccagcagtgatcgctgccctcgcagtgcagatctgtaagagacacatccagagccattactgtggggcacggcgcgatgggggggggggaagggaagggggaggcactgcaggcggaggggggacgtgccaaagaacaccccacaaagccatcgataggaaaagattttccatttaatactagactctctcaggattgagatgcaggcttttttttttttttytttttttttcttttttcttcttctttctttttatgcaattacatccaatgttaaaattggtaatacataatttacaaagattaaacatcaaaacaatgatctatttagatatgctttgtaaaaaggaaatatattagcagcatttattttcagcaatcacacagcctacacccatgcagactaaagagtt

SEQ ID NO: 67311 - DNA, 600 bp, Chicken  19866894336880_1
attcccattagcttatgtggaaggtaaagatctcctcctctgttcttttctgctttggcttttctttctcagactctggatttctgtaatctccccaaatgcatccactatgttttatctattgaaatgtcttctgtaatatcatatttgctccacctctctcaaataatgtctcaaatttcttctcattcacaaacataagtgcttttgcatactataatgccgttcaagcagtacttccattcaagcagaaggaaagctataactgttctcctgagattctcccttgaatccatgaamcaattaaggaagttatacttctaaatgaacatgcatgcaggccaaagaggaaccagcgttgttcagtgtatagggaaataatttggctgaagaggaaagcaatgaacaattcatgctgggagagcccctgacacctccttctaacaagcacagtagctgtgtttttttttttttataatacaatcttgcacattagtgaaatcatatgtattcatggtactcgtccttttgttaaatgaccaaattaaatccagtgtaaaactctacaattagtaaacagctgaaatgttatctgttgaa

SEQ ID NO: 67312 - DNA, 600 bp, Chicken  19866894336885_1
tactctcaatgctctgagggcattcataggccttaatggccttggccagtgccaccttagacctacacccacaccatggtggtccatgggcccagaagaccaacttaaactcaagcccagggcttcattccctgcctatgctgtgtcgttggggtgctggttttcagctgtatgatatccatgtgtatgcatggccatgagccctgctggtcctgactgggtggactgacttcccagcttgaccttggacttacgtcatcatcacagtcttgcctgttgctctgggctgtccccccatcrtcacctaccccctggctgggtgcaatgggaaggtccctggctggaaggcccctgctctgctggttcccttgggaatcccctgacactcctggcaccaaacacccaagccccatcagcccacacatgtgggcaagtggagaggagaccaagcacaacagcttatagggtgcagccagttccttacctctctgcctgtgggtcactagcatcacatggccatacttgcccctgcccagctcccgaataacctcatagtgctcagccacctcagtgcgcaccaggctctgagctgtgatctcc

SEQ ID NO: 67313 - DNA, 600 bp, Chicken  19866894336890_1
accaacacagtgcacataaaaacaaaccaaaccaaaataacctactgccatgttttggcttcatatagcaaggaaagcaagcctcgcttgcactcagctctgatgtgctaccaccaggagtaccctgagaagtcggatgaaatatatataaaacactgaagcccttgtgagtacattctcggtataaatttgaacctcaaatgggaatgtgatttgaatttaaacacttaaagctgtggccttaacagtaggcacttttgtatattcatgcttctgccactgtcctcagtctcccatggycctgaatgacgtgttgttcaaaaacaattggcttcttgtgtgcagaagagcagcttggccctctccccaccattgtcttttatgtccagtgaggaaaaagggtgggatgaaaaaaagagagacagatttcaatcaaaagcattacattgataagcgtttaataacagcctcccttgtgatcagatgaaacctaatgcattatattttgctggcaaaagtgatagcttcaaagtactgcctgcacagatgactacctgtgtcactgcagacagcagcaattcccacctctgccattgctgg

SEQ ID NO: 67314 - DNA, 600 bp, Chicken  19866894336894_1
aaggtagaagattcattattaaatgcattaataaagtccttgataaataaaggtcctgtggctatatatatttatatatatatatatatagtgtatatatacatatgtatacacacacacacttataataccgagatttgtttttatcatctgttagaattagtggaaatatggcttctcttgaacacactgaatattttggaagaaaaagtactgagctatttcatttcagctgagtgtcagtccttcccttctgctttctcctgtagagttaaaggtctatgtggaatactgttttcrggaaggctgttctttagaactttcatttcatggaaagcactcattttatgttcaaatttacaaaatatgagatactagaattttcatcaaaacagaaatgctaagaataaaaaaatgatgtttgggacttctggtttaggattctgaaagatgactgcaagtccttttagcaaatcaggacagaggtaataaagcagctcagatgagacaccaaaatcacttggtataaaccaagcacagagtgaaaaaagggcctcacgtgaaaaataaagagcaccattttacctgtgcagtgatcta

SEQ ID NO: 67315 - DNA, 600 bp, Chicken  19866894336895_1
aaacaataccattcatttcttgcccttggagcagaaagaaaatgtctgctttgtttacttgctcatttgatgcaacccatgagatgcagtttcattccaagtgtaccatcataaactttatgcttctcctgttttatctgcccagcattttttccaaacaaaataatctgggcaatccatcttctggcttttgtgtttatgaaggagtgaaaagttttttcctaatcttcaacaaagcctgttttccagctctgacgctctttgtgcacttgacttatccacagactcctgtcagcaagrgagctggagccagaatacacaaaattattgaacagacgatactccatttgcagtaaaagaaaaaatataattgagagtaagtgttcttggaacacaccatcttcctgttctctatcagaagcagaactggtaatttcattttgctaaggagagaaatatgcattgaacctggatcttgcagtctttactcgcaaaactgaaggggatggaagggacgactagatatcgagcctaacccctctgctaaactaggttccctacactaggtcacaaaggtaactgtccagatgaatcatgaat

SEQ ID NO: 67316 - DNA, 600 bp, Chicken  19866894336899_1
gtaaaagggtttcccttgccaaaccacctagcccttatgtaatctttctgtaacctgtagattatatttccatgaggtatctgctgtgcagtaattcttgaaagtcacaggtaaagacataagttttgctttatgaacaaaagaacatcagttatcacctcaagatatcaatgtcatcagttgcacagctgtacagaatacttgattaattgtgataagagaggtatctcaactctagccatgcctaattgtcttcaagtctggctgagacagagaactaattatttttccacagtctgygattgtgcttcctttgcattatctaaagaaggtgattaactaaatgagacttggctgaagtacccaacaagaatgtggcagacagcgtattttctgatgcccttctatctgctaaattataggtgtagatgatatcttgccgacaaatactgccttaggaaatcttatttaagagcaattattttctaatgtcagagtccaaatgtcgagatctgttttcactttacagttgaaagagaggtttacaggtcaagtacacactatcttcttatctgccagatgtataactgtgtataagac

SEQ ID NO: 67317 - DNA, 600 bp, Chicken  19866894336911_1
tttacatcagtcttaactatctgcaatcagatgatttacattccagagttggggatgaagaatcagtcagttgtatttattttctactcacctcctctggggtgtatagagtgtattactctttttccagtaatttgcatgtaccagaacattggatacctacagtgagtcgcagatctgaaaaatgagggttaacccacccctagaagttattgcctttaaaaactgacctcctttagtttatcgtgttaacagtactatagaatactgtcacattggctcgtgaacagtgaattttcmyacagtatgttctgccatacttaagtttttattattaatctcttttrtttcaggaatataaacaaggaaacaaacctgaaatttgttcatacttctgtgcatggtgtaggtcataaatttgtgcagctggccttcaaggcgtttgatcttagacctccttttgctgttccggagcagaaggatcctgatccagaatttcccacagtgaagtatccaaatcctgaagaaggcaaaggtgttctggtaaatatatataattaatatttcttaatgttctaaatacagtgtaaatatgtattt

SEQ ID NO: 67318 - DNA, 600 bp, Chicken  19866894336911_2
ttacatcagtcttaactatctgcaatcagatgatttacattccagagttggggatgaagaatcagtcagttgtatttattttctactcacctcctctggggtgtatagagtgtattactctttttccagtaatttgcatgtaccagaacattggatacctacagtgagtcgcagatctgaaaaatgagggttaacccacccctagaagttattgcctttaaaaactgacctcctttagtttatcgtgttaacagtactatagaatactgtcacattggctcgtgaacagtgaattttcmyacagtatgttctgccatacttaagtttttattattaatctcttttrtttcaggaatataaacaaggaaacaaacctgaaatttgttcatacttctgtgcatggtgtaggtcataaatttgtgcagctggccttcaaggcgtttgatcttagacctccttttgctgttccggagcagaaggatcctgatccagaatttcccacagtgaagtatccaaatcctgaagaaggcaaaggtgttctggtaaatatatataattaatatttcttaatgttctaaatacagtgtaaatatgtatttc

SEQ ID NO: 67319 - DNA, 600 bp, Chicken  19866894336911_3
gttggggatgaagaatcagtcagttgtatttattttctactcacctcctctggggtgtatagagtgtattactctttttccagtaatttgcatgtaccagaacattggatacctacagtgagtcgcagatctgaaaaatgagggttaacccacccctagaagttattgcctttaaaaactgacctcctttagtttatcgtgttaacagtactatagaatactgtcacattggctcgtgaacagtgaattttcmyacagtatgttctgccatacttaagtttttattattaatctcttttrtttcaggaatataaacaaggaaacaaacctgaaatttgttcatacttctgtgcatggtgtaggtcataaatttgtgcagctggccttcaaggcgtttgatcttagacctccttttgctgttccggagcagaaggatcctgatccagaatttcccacagtgaagtatccaaatcctgaagaaggcaaaggtgttctggtaaatatatataattaatatttcttaatgttctaaatacagtgtaaatatgtatttcttagtagttgcagtgtctcagtgtttatttctcgtctatttttaca

SEQ ID NO: 67320 - DNA, 600 bp, Chicken  19866894336917_1
ctgcacagagcagattctgtccatgaagaaaagctctccctttcttgccatgttacattttccttagaagaaaactactctgtttataatggatgttcaagcttgttgcatcacttttatgtaaaggcatggccacattgatggtgaaatcaccagcaccacttgaagatgcctgcaggctcctctcctccttgcagtcagatggccgaactcatcctgcagccaaagccttgtgcagcacaaggttaaggttaggcctaaggttagggttacagtatttttgctcaagaaaggagatayaagctttactctttattcttttactctttactcttttttcactgctttcagaggctsagttagtatggaaattgatcaaaagacacacaagtttgaatagatgcacatgtaaagtgtccatctaatactagctactaaaccatttgagttctattgtagcagagagagcaaaaagaaatggacaccatattagctaatgcaattttgaacagagttgagtagcatgattgcctacacctgggaaaaggtaactatagccattgaagagaaatatggctggagaagacgccagatagtcag

SEQ ID NO: 67321 - DNA, 600 bp, Chicken  19866894336917_2
ttttccttagaagaaaactactctgtttataatggatgttcaagcttgttgcatcacttttatgtaaaggcatggccacattgatggtgaaatcaccagcaccacttgaagatgcctgcaggctcctctcctccttgcagtcagatggccgaactcatcctgcagccaaagccttgtgcagcacaaggttaaggttaggcctaaggttagggttacagtatttttgctcaagaaaggagatayaagctttactctttattcttttactctttactcttttttcactgctttcagaggctsagttagtatggaaattgatcaaaagacacacaagtttgaatagatgcacatgtaaagtgtccatctaatactagctactaaaccatttgagttctattgtagcagagagagcaaaaagaaatggacaccatattagctaatgcaattttgaacagagttgagtagcatgattgcctacacctgggaaaaggtaactatagccattgaagagaaatatggctggagaagacgccagatagtcagagccttaacaatcaggattggaaarctaattatatgcaaataattggaaaggaaaaa

SEQ ID NO: 67322 - DNA, 600 bp, Chicken  19866894336917_3
ctttactcttttttcactgctttcagaggctsagttagtatggaaattgatcaaaagacacacaagtttgaatagatgcacatgtaaagtgtccatctaatactagctactaaaccatttgagttctattgtagcagagagagcaaaaagaaatggacaccatattagctaatgcaattttgaacagagttgagtagcatgattgcctacacctgggaaaaggtaactatagccattgaagagaaatatggctggagaagacgccagatagtcagagccttaacaatcaggattggaaarctaattatatgcaaataattggaaaggaaaaattcagtgttgtgcaggtgattctgtatatcagaacagaaggccaagggtttgcacatgtctcagaatacaaatgcagaatagacacggttgctttgttcaagggtcagaaaaggtggtgaaggaactggaatatgggagcatggcaggactgcagacatactgggcttaaagagatgattgactagggaaagccttacctttgggggaggcacagttcttgacagaacagatgggcttcaaccaggctgctgtgggctgtaacacaaa

SEQ ID NO: 67323 - DNA, 599 bp, Chicken  19866894336918_1
  misc_feature (1)..(120): n is any nucleotide
nnnnnnnnnnnnnnnnnnnnnnnnnnnnnnnnnnnnnnnnnnnnnnnnnnnnnnnnnnnnnnnnnnnnnnnnnnnnnnnnnnnnnnnnnnnnnnnnnnnnnnnnnnnnnnnnnnnnnnnntcgtcttctgctgcactgtctcagaagggacgagacttcccccttcctctacaaggtaagagctcacagagaccattaccaccaccatttcctttgcacacacattcacacgtgtgtgcaaagcctcacgatccttcgcaccctcactcgctttgtgcccggaccctgcggtgcatttamacctgcacgtgcccagcagcacacagcagctcaccccacgcagcagcacgagctgatggcacacactgaatgtcccacaccacatcacagcaccaacacagggcatgcagtgggggatttccttcagcctgcagagatggagtgttggcagcctgggaagcaagcgagcgtgggaaaaagataaagcacacgagcagtggcttcatcctaaacacaacgtgagaggctttatttggagctacagtgacttcagccccatatgtcccacgtgggctcaaagtgctgcagcatccacatgc

SEQ ID NO: 67324 - DNA, 600 bp, Chicken  19866894336925_1
gatttagaacaaacaaaggaatagtgttggaatattgcttttgattttcactcttctttatctggaatgcagttctgtgcttctaccacagcagtagggaactcattacatactgtgttctctgtcactgtgttctagctatgtttttcctttattgttttaaccaaacaaaactagtgtctaaatatctgtaatgttaaaacaaaacaacaaaaaaaggtttaaaaacaaaactagactataagtactgcagtgccagctgtattctctgtattcatagaagataccaacatggctttrcaagtagctaggcattggaaytctattaagtactgaaaagatcttcacctggattaaatgcattttttttttctctaaagtagcagtgagtggaaagtaagaggtaatgatgagagcatggataattttattgaaactacagacttggtaaattgttatgtctggacccagtaattcatggggtggatgttgaggtgaaaatgaagaaactccactcacaagtgatgctctgagctgtagttttgtactgctgcctgcctttgggattttctaccttgggactgggtctgtggggaggga

SEQ ID NO: 67325 - DNA, 600 bp, Chicken  19866894336925_2
tagtgttggaatattgcttttgattttcactcttctttatctggaatgcagttctgtgcttctaccacagcagtagggaactcattacatactgtgttctctgtcactgtgttctagctatgtttttcctttattgttttaaccaaacaaaactagtgtctaaatatctgtaatgttaaaacaaaacaacaaaaaaaggtttaaaaacaaaactagactataagtactgcagtgccagctgtattctctgtattcatagaagataccaacatggctttrcaagtagctaggcattggaaytctattaagtactgaaaagatcttcacctggattaaatgcattttttttttctctaaagtagcagtgagtggaaagtaagaggtaatgatgagagcatggataattttattgaaactacagacttggtaaattgttatgtctggacccagtaattcatggggtggatgttgaggtgaaaatgaagaaactccactcacaagtgatgctctgagctgtagttttgtactgctgcctgcctttgggattttctaccttgggactgggtctgtggggagggagcctttccagaaacttgctgc

SEQ ID NO: 67326 - DNA, 600 bp, Chicken  19866894336928_1
agtgcagatttcttctaggtcgaatgcaagacagctgctaccattgcctcttctccagatacataccctatagatcagctttttcaagttttggtgtgttcgttttgatttgggacaacacaaagatacatatttatgtgtgttgctgcagaccattagcagggcattacatttcagctgtaaaaaaaaggagagggaatttcaatcgcacggttattgttaagttctgtttgcctcctcgtgagctgtgagctgtatccaaatgtacacagcctcgctgcctctggaggaagggggttscaaggaagaggtttattttccctttttggtgccatgtgtggggagttttctgtgtagtcgtgggaacaggagatgccctcttggccccagaagagaaatgtttgcacacgaacctcactgcacaggaggaccctcacagcaggaaaggcctgctgacatcagcaaatctgatccatgcgtttgaaggcagcacagacccaaagcgctgcgctgagccgtggcctgaagtggagccacagttccaataggaactctgcataaccgtgcttgttccacacagtgatgagcatttacctgagg

SEQ ID NO: 67327 - DNA, 574 bp, Chicken  19866894336933_1
cttatgccctgctccagccagatgctgcagaggagtggccaaagattagctctcaggggcagggacctgtctttgtttttacagtgcttagttctgtaggacactaatccctgtttgaggtccccaagcactagggcagcacaaataatacacacaacatagtagcaaaaatatccctcggccctactcctttttcttttgtgctatgccctgcacttggctgagagtaatctaagaagaaggaaggactgtgcagctcctggggatgcggccgttattgccgtgtttattctaatcttytgaggttcattcatccctttcaggagaagtgtttccacctgggacttatatgatgttcctttttgttacacagtgatatctgaaatgtgtcgatccgcttatgcggaggcagggataccaggaaagagggctatataatattgggatatagttggcagcctgtcttctgctaagagaatgggaacaggacagatgattgttggaaaaaggcagtagttctcaagcatctgtgtttctcagattcctgcaaaagaggcatcataaatactcatac

SEQ ID NO: 67328 - DNA, 600 bp, Chicken  19866894336937_1
gacaagtttccacttgtagcatcaaagggtgacggtcacacccctgctgcaggccacacagacacactgagggctgctcagaaaggatctgtgcatcagatgcttggactgcaatgactgaggccagcaggcactaagcagacagctcaggtgtatacccatggcacagaggggacctggaggccacagggcagtccaaagccacaagcagaggatatgatttccaaggcacagctgctcaaacttttgtgctggccaagattcagcagctcccaggatgcaaaccagactgcaaagccyttttcttgtccttcttcccaggcagctatgagcatcctgagggaggctccctgsgctgccytgctccctttcttggaggcagcaggtaacccccgcagcccattttaccccttgtggctgctcaagagaagctgtggctccacatgyttaggttcaaagactggcctttcaatttagtgctagaaccagctctagattctcacagargcctggctcagagagcagctcatgcctccttctgaaaagctgcagcttttccaaagcactccagctgtgcctcactgatcaggaatagtctcc

SEQ ID NO: 67329 - DNA, 600 bp, Chicken  19866894336937_2
cacacagacacactgagggctgctcagaaaggatctgtgcatcagatgcttggactgcaatgactgaggccagcaggcactaagcagacagctcaggtgtatacccatggcacagaggggacctggaggccacagggcagtccaaagccacaagcagaggatatgatttccaaggcacagctgctcaaacttttgtgctggccaagattcagcagctcccaggatgcaaaccagactgcaaagccyttttcttgtccttcttcccaggcagctatgagcatcctgagggaggctccctgsgctgccytgctccctttcttggaggcagcaggtaacccccgcagcccattttaccccttgtggctgctcaagagaagctgtggctccacatgyttaggttcaaagactggcctttcaatttagtgctagaaccagctctagattctcacagargcctggctcagagagcagctcatgcctccttctgaaaagctgcagcttttccaaagcactccagctgtgcctcactgatcaggaatagtctcccctctgtgtagaaccatttgattgaggtttcagagcacggctactccagttgct

SEQ ID NO: 67330 - DNA, 600 bp, Chicken  19866894336937_3
acacactgagggctgctcagaaaggatctgtgcatcagatgcttggactgcaatgactgaggccagcaggcactaagcagacagctcaggtgtatacccatggcacagaggggacctggaggccacagggcagtccaaagccacaagcagaggatatgatttccaaggcacagctgctcaaacttttgtgctggccaagattcagcagctcccaggatgcaaaccagactgcaaagccyttttcttgtccttcttcccaggcagctatgagcatcctgagggaggctccctgsgctgccytgctccctttcttggaggcagcaggtaacccccgcagcccattttaccccttgtggctgctcaagagaagctgtggctccacatgyttaggttcaaagactggcctttcaatttagtgctagaaccagctctagattctcacagargcctggctcagagagcagctcatgcctccttctgaaaagctgcagcttttccaaagcactccagctgtgcctcactgatcaggaatagtctcccctctgtgtagaaccatttgattgaggtttcagagcacggctactccagttgctggacact

SEQ ID NO: 67331 - DNA, 600 bp, Chicken  19866894336937_4
caggtgtatacccatggcacagaggggacctggaggccacagggcagtccaaagccacaagcagaggatatgatttccaaggcacagctgctcaaacttttgtgctggccaagattcagcagctcccaggatgcaaaccagactgcaaagccyttttcttgtccttcttcccaggcagctatgagcatcctgagggaggctccctgsgctgccytgctccctttcttggaggcagcaggtaacccccgcagcccattttaccccttgtggctgctcaagagaagctgtggctccacatgyttaggttcaaagactggcctttcaatttagtgctagaaccagctctagattctcacagargcctggctcagagagcagctcatgcctccttctgaaaagctgcagcttttccaaagcactccagctgtgcctcactgatcaggaatagtctcccctctgtgtagaaccatttgattgaggtttcagagcacggctactccagttgctggacactgtaccaaatgcagagctagggaggtgagwacagaaagcccacactgcctcacctcctccttcttcttctttggtttgctctcctcc

SEQ ID NO: 67332 - DNA, 600 bp, Chicken  19866894336937_5
gcagaggatatgatttccaaggcacagctgctcaaacttttgtgctggccaagattcagcagctcccaggatgcaaaccagactgcaaagccyttttcttgtccttcttcccaggcagctatgagcatcctgagggaggctccctgsgctgccytgctccctttcttggaggcagcaggtaacccccgcagcccattttaccccttgtggctgctcaagagaagctgtggctccacatgyttaggttcaaagactggcctttcaatttagtgctagaaccagctctagattctcacagargcctggctcagagagcagctcatgcctccttctgaaaagctgcagcttttccaaagcactccagctgtgcctcactgatcaggaatagtctcccctctgtgtagaaccatttgattgaggtttcagagcacggctactccagttgctggacactgtaccaaatgcagagctagggaggtgagwacagaaagcccacactgcctcacctcctccttcttcttctttggtttgctctcctcccctttgtcttctgtgtcagattctgctttgcgtttgcttccctcagacttctcactctca

SEQ ID NO: 67333 - DNA, 552 bp, Chicken  19866894336937_6
ccccgcagcccattttaccccttgtggctgctcaagagaagctgtggctccacatgyttaggttcaaagactggcctttcaatttagtgctagaaccagctctagattctcacagargcctggctcagagagcagctcatgcctccttctgaaaagctgcagcttttccaaagcactccagctgtgcctcactgatcaggaatagtctcccctctgtgtagaaccatttgattgaggtttcagagcacggctactccagttgctggacactgtaccaaatgcagagctagggaggtgagwacagaaagcccacactgcctcacctcctccttcttcttctttggtttgctctcctcccctttgtcttctgtgtcagattctgctttgcgtttgcttccctcagacttctcactctcatgtgcagttttctgagactgaaggaactctgcaatgaggtctgggcagtcgaggttctcctctggctcccatgtgttatcttcactggaatcaaaaccagcagtttaatttacatacagggacagacacaaagtc

SEQ ID NO: 67334 - DNA, 600 bp, Chicken  19866894336939_1
agtatccctcactagttggcagcagtttctgaaagctgggctctatacctgtttttatgccttcaaacattctcaattagcagacaggctttagaacgttctccccattctgcattttctgtcggacctctttgaaaccctgaaatcagctgtgtattgcaggtagttggactcgtttttcctaagtcaaggcaagcatacagcaatagcaaacgagatgctacactattgctcttcagatgaatcagaaagtcaccagcttttagcttttctactttatattattcctggaaataatamaagagtgcctaatacaaaacttctttcttttttagttttgcatctagaattacacaagctygaaggaaaataaatcagaggatgctcagtgcttccctaactcctgaaaaaggcagactgacagaaacagattgaagttttagtgaaaatctgagacctgtgcagatttcattctgccattctcaagggaaagcaaggtgggaataaaagagaatgagaagagcaattcacgaactattcagcctaacttaatccccagacaccagaagagttttgtttgcagagtaccagaaaagaatt

SEQ ID NO: 67335 - DNA, 600 bp, Chicken  19866894336939_2
ttcaaacattctcaattagcagacaggctttagaacgttctccccattctgcattttctgtcggacctctttgaaaccctgaaatcagctgtgtattgcaggtagttggactcgtttttcctaagtcaaggcaagcatacagcaatagcaaacgagatgctacactattgctcttcagatgaatcagaaagtcaccagcttttagcttttctactttatattattcctggaaataatamaagagtgcctaatacaaaacttctttcttttttagttttgcatctagaattacacaagctygaaggaaaataaatcagaggatgctcagtgcttccctaactcctgaaaaaggcagactgacagaaacagattgaagttttagtgaaaatctgagacctgtgcagatttcattctgccattctcaagggaaagcaaggtgggaataaaagagaatgagaagagcaattcacgaactattcagcctaacttaatccccagacaccagaagagttttgtttgcagagtaccagaaaagaattttttcctgggtcgttaaatgttaatctgaattaattcatgctcctcttatcaggcagatta

SEQ ID NO: 67336 - DNA, 595 bp, Chicken  19866894336939_3
aaggaatggaagaaaaagcataggcatgtaaatggaaagccctctgggtaaggtccagaggtagctggaaaagtctactgcctgtgctgaaagaaagtagaacaaaggtagctttaaagtttcatttgctctcacgcggcagtggcaggggtaaagcatttgtaccacaagcacaagtaaagtaaattagcttgggattgctgcggaactggctgcagcacgaggatgcaggatctgtacccccaactcttaagtactgaggtaggcagaaagggacctcagtatggggcaggaactgawaaccagacttaaaaacaaggtttttgcagctagcttacagtgaaagctaaatgcttaacctcggcagtgatcagacagtggtcattcacttgtttggagagcctagttgcacccattaattttaacagaaggatgagagttatttaattcagagtcttttcaaaatgaaatcaagagaagaagacaaaaatgaagactaatgagacgacttaagaagaccactttcactgtgatttattagaaaagaaataacctggaagccaggattcacaaaatcccaaccaatcatccattt

SEQ ID NO: 67337 - DNA, 600 bp, Chicken  19866894336940_1
agtgaatgaccgtttcctcacacagttgtttttgccttcaggaaacctgatgagaagatgttgttcagccctcctcatccctctcctttccagcatatcaaggtgtttatttccttgatgttctccaaataacaaaggagaggaatatgcttacacagataccactcctgttgaaacccacatcaaagttgtaaccctagtgtttcagtagtcaacatcatatgtgtcctgagagaggacagacgaatagaagttttcccgaggaaatgcatcaagctcgaagtttgacattacatatcygtagggaaataaacaggtatttggtacacgatctcagaggaaaatttcatcttttctggcaaaaataagtttttgctagttaagacacaatcaggaggactcagctgcaggactcaagcagctctccctgcaaattggcataatgacattcatatcatgtttgctcatgatggcattctttttataccccatcagaaagtaactgttccattgttttatgtgctcaataatctgtacagaaacagagggaggcttgcttttttctcactgcatctacaaataggacttagatgcatgagg

SEQ ID NO: 67338 - DNA, 550 bp, Chicken  19866894336942_1
tggtttgaaaatataaaaatgctatttagaacaccacgaaccagctgaggcttaatttcaccagcataaccatttcttattgtttatagcacaaaactaagcagaagagctgttcagagtcagggtcccttcctgccaggcaagcaccaaacccatggcagtattcctgccaccaagtaacataccttttgagtaacatctttaatcctaaatgtcatttttctgcttcagatctccagcatatgatagcacaaagttctctgatacattttagatcaaaacctgaaattgatcttagaygaatttacatctgcaggcatatttctaggacttgattgtatatgcctcttgtcaaatacatttgttatgaaagggtattttccataaaccttccagaaaaaaaaacaaatgttttgtttatggaaacagccttggggttagagtggaaaaaaatactccagtactttctgttttcaatacacttttaaaaaaattaaacaaaacaaaatattgcaaaagtattaaaatgtttatatgaaagagtattttt

SEQ ID NO: 67339 - DNA, 600 bp, Chicken  19866894336944_1
ctgaatcaacctcagttttccagtacgctgcatcttgtcttttcccttggaaaatgtttaggaggagctagttgaaaagatttcagggaaacatgttattcagtacattcttatgaaacatatattctctatgactttgccaatttttgactaaattccgagggaaacaaagcaaaaacatctgtaagcaaacagcatagtcttgggccaattcacttatctcatttatcagctaccttgcaaggtagtgggatgcttgccttggtcagccccatgctcctggtattatctttcctcaasagttagatctaaaaaaaaaagttctaaaagttagaattaaaagctggagaaaagggtagataatggtgccctgggggtgcatttttttcagggaagttcaggtcttaccacgaaaccagaataaagctaaaacttgaaatctcaaaattctccrttaaatggaagcaccgatgtctttccagtgctgtgcaattgctaaatgaacattttatcctgggcactgtgagcagataggatatattttcaactaattggtaatgtgtttgagtaagatgtgtttgtccttgtgtagcaggacat

SEQ ID NO: 67340 - DNA, 600 bp, Chicken  19866894336944_2
attccgagggaaacaaagcaaaaacatctgtaagcaaacagcatagtcttgggccaattcacttatctcatttatcagctaccttgcaaggtagtgggatgcttgccttggtcagccccatgctcctggtattatctttcctcaasagttagatctaaaaaaaaaagttctaaaagttagaattaaaagctggagaaaagggtagataatggtgccctgggggtgcatttttttcagggaagttcaggtcttaccacgaaaccagaataaagctaaaacttgaaatctcaaaattctccrttaaatggaagcaccgatgtctttccagtgctgtgcaattgctaaatgaacattttatcctgggcactgtgagcagataggatatattttcaactaattggtaatgtgtttgagtaagatgtgtttgtccttgtgtagcaggacatatgctcctgtgtaagtctgacatgttgaaagtgcttatgaatttgcagcctgttggcactagttccattattctttccttgattagcacaagacagctgctgaagttcactgactgtacaagttatggagaataagataacgtgtkaagtttct

SEQ ID NO: 67341 - DNA, 600 bp, Chicken  19866894336944_3
attctccrttaaatggaagcaccgatgtctttccagtgctgtgcaattgctaaatgaacattttatcctgggcactgtgagcagataggatatattttcaactaattggtaatgtgtttgagtaagatgtgtttgtccttgtgtagcaggacatatgctcctgtgtaagtctgacatgttgaaagtgcttatgaatttgcagcctgttggcactagttccattattctttccttgattagcacaagacagctgctgaagttcactgactgtacaagttatggagaataagataacgtgtkaagtttctccaaagtttgtatcagaaattgtytaaatgcttgtatcaagttttggtgaatgtggcatcaaacctttgaggctgagaagcgctatgagtgaaattactgcttcacctgcagtaacattccttcagagagctctcctgcttttcatccacttgtagtactgaaactgtgagaagagtgacaactgaaaattcttagggatgaggtaaacacacctgctgaggaatttattctctattttgttctggagttgtgacacactctaggctaaagcctttggtgtctgttttggca

SEQ ID NO: 67342 - DNA, 600 bp, Chicken  19866894336944_4
ccagtgctgtgcaattgctaaatgaacattttatcctgggcactgtgagcagataggatatattttcaactaattggtaatgtgtttgagtaagatgtgtttgtccttgtgtagcaggacatatgctcctgtgtaagtctgacatgttgaaagtgcttatgaatttgcagcctgttggcactagttccattattctttccttgattagcacaagacagctgctgaagttcactgactgtacaagttatggagaataagataacgtgtkaagtttctccaaagtttgtatcagaaattgtytaaatgcttgtatcaagttttggtgaatgtggcatcaaacctttgaggctgagaagcgctatgagtgaaattactgcttcacctgcagtaacattccttcagagagctctcctgcttttcatccacttgtagtactgaaactgtgagaagagtgacaactgaaaattcttagggatgaggtaaacacacctgctgaggaatttattctctattttgttctggagttgtgacacactctaggctaaagcctttggtgtctgttttggcaattggagagatgtgctatggtgctatatacct

SEQ ID NO: 67343 - DNA, 600 bp, Chicken  19866894336945_1
tcaccgtgcacagtctggggctgaatctcaatgcgagctgtctgctcaccattgattcacatctgcaaagcctttggcccaggattttagatgctcactttgatgggcctgttggagcccctgcatctcagttatgtacgctgctcatcccttatgaattatcgcatgaaaaacagccccaaaatccctactagcaaggatggatgcagaaggttccgcaccaccctccacattgtggtacccacagcatactcatgctccttccttagattcctttgcttggatgcatgtttattgacmaagacattcgtaaggtcccctaaaaagccccaaagcttagcagaaatctggaatgggacccacaatgggaatgggaaatgcagattttccccctctctgatctttctctttgcgcatattttggattggagcagacaaggaaagaattattttagggttctgtattcacagaatcatagaagagtgctgcagcatggcaccccatgagtgattctgtgtcacctccagtggcacttgcagggacagctcagcaccatgtggggacgtgggggcatcggggaattttggggaccttgtggg

SEQ ID NO: 67344 - DNA, 600 bp, Chicken  19866894336957_1
tcaggaaaaataaccttcctggtggctatgccacattgaagtgcatgctacacttatgcacagcagtacaaaatagggaaatcacatcacaattacttaagaaactctcaacagattcctgtgtagccaggtaaaagctcagtggagacaacagcagtctttgcatgtatttgtagggatgctataaccaaccaggcattacacgtccatatatacagtttctctcatactacgccatgtgagccttcacagttcacttctgtttcccacaagcagaaatgtgaacagtatttagaaaawaaatgctgcagtttgccagcctggtatgtaaaagttttctctgtctctcactctgtgaatgagcatcacagaaaggcatgttccaacctaaccaaacaaaggatctaagatattgtttacycaagttacacttgaacactgtgggaagtaccaactttaatttttacttccatacataaattactgttagaactcaaaatcaaccttctaacaaccaagaattctctacatcagcactccatttctgcccacaaagatccctaaaatatagttccctatcagttaatgcatattcagact

SEQ ID NO: 67345 - DNA, 600 bp, Chicken  19866894336957_2
tgtagccaggtaaaagctcagtggagacaacagcagtctttgcatgtatttgtagggatgctataaccaaccaggcattacacgtccatatatacagtttctctcatactacgccatgtgagccttcacagttcacttctgtttcccacaagcagaaatgtgaacagtatttagaaaawaaatgctgcagtttgccagcctggtatgtaaaagttttctctgtctctcactctgtgaatgagcatcacagaaaggcatgttccaacctaaccaaacaaaggatctaagatattgtttacycaagttacacttgaacactgtgggaagtaccaactttaatttttacttccatacataaattactgttagaactcaaaatcaaccttctaacaaccaagaattctctacatcagcactccatttctgcccacaaagatccctaaaatatagttccctatcagttaatgcatattcagactaattttaaccttcttaccttgaaaacacttattgcattaaagaagcgaaaccagtgcattaaaaaaacccagagaactactaagaagtactgcagtggaacctggtggaacttccactgag

SEQ ID NO: 67346 - DNA, 600 bp, Chicken  19866894336960_1
agctccaatgaaagtcaatagcagatctgtcttggatcaatagcattataaagccatctataaaaaaaaagtttgcaggttgagaattagtcattatcctattggtcatgaaactggtagtttgaacctgaaactaatttttctggaacctaattatacctttcaaggagctccagatgacatgctttgcagcagttaaatttatcataccttgttctgtgcacattacagacaacactgttttatacagattgtttggcaatcagacagtaaacaggtgaggtaatttaacagcttgascctgcctcacttttctggtttttaaagaagcatccttcaattttgaatactccgttacatgtgtgcatatcaacaggaatggtttaccaaatactaagagactccattaaaaacaaagtttatttaaggtaattttatttagaaatttccttttttttttttttttaaatttagaaaggagctacttgtgggggatagcactgaatacatgtggaatatatataataattatataataattatataatatatgataatatatataatatatattggggtatacatattatatatatacat

SEQ ID NO: 67347 - DNA, 600 bp, Chicken  19866894336965_1
agatctataggtctatattcacttatgccatgtggagttttcttcttattccatttccctttgaattatagttgcaattcagaaaggtcactttctcagatgtaaataaaatgttgtttccatgacatgctcatatgagtccaagagcagtcatcaatcactgctagttgattcagtacagtagcagctactgtagatccttatcaaaattcactttgaattttcactctgggtgaaggtcatttttcctaacttttccaatcctaaaattatgcatttaatctatgctagttttctagkctcctacaactctgttggaaggaaatagatataccaagtaagaaatgttgttaggtgttaggtgcaccaagatagaaatcaatcccaactaaaagagacgtcaaatttctgatggaatgaattgctcttcctaggatctgttctctcttttctgtccacagggatatgcttttgcagataacttagtcaacacacgttactttttaaaaactatagttcaataaggtgagtgaagggtttaatttcttgattacatgacccagataacagccttgaaaacatccttgccattgtcgtaat

SEQ ID NO: 67348 - DNA, 599 bp, Chicken  19866894336976_1
  misc_feature (1)..(98): n is any nucleotide
nnnnnnnnnnnnnnnnnnnnnnnnnnnnnnnnnnnnnnnnnnnnnnnnnnnnnnnnnnnnnnnnnnnnnnnnnnnnnnnnnnnnnnnnnnnnnnnnnncctgcagatgcaattctaagcccaagcacccacgtgcaacaggaaatgcaacacgcatggtgacacctacagttggctgcagtcgaagtcttagagttgacatcagagtccagcttcccatctactgctcacctttggtctcatccaagacgtaacacgcagtcagtggctcctccatttcacaggagaaaaactgcttaaygaccccctccatattctatttttcccctcctctctcatggcacggcctgcaagcaaagcagaggagcctgggtttgtcccttagttacccagtggactggaattcacttgagtcctgccacatacagcagccaggctttctccttaacagattagctatgtgcagaaagctgcctacttatgtggtttaacctaatttccacatcactgacttcctttttcagctcactggagttgaaacaacaggggccctgcttcatatttctctctaagcacaccattacaagaaggtagaaaaga

SEQ ID NO: 67349 - DNA, 599 bp, Chicken  19866894336990_1
  misc_feature (1)..(28): n is any nucleotide
nnnnnnnnnnnnnnnnnnnnnnnnnnnnccgggatgcgcctggtgctgatccccaaagtgacatggtgtcccctggtgctggccgtgctgccccgctccctctgctcctcgggtctgacaggctggaggtagagggagaaggttctggtgaacaaaagtcctcaagaaatgcaaattgtcctcttctgggctgctcgctgccaagccaacctggcagctctgggattttccagtctgcccagggccatccctctgcaacacatctccggctgtgccagcagggacatgctgggcatggtycccttgtgctggcarggacacagcagggacagtcccctggtgctggcagggacatcctggggacagtccccgtgctgccatacagccacgctgggctttgatctgagcctagcacagcacggcacgcagagggcaggcagatgggcaccaacctgacagagcagcacagggggcaccgggcaccttccagccatgggacagccacgtcaycacygggrcatcccaaggtccccaacctccccagccccgtgcagcagccgctcccagggctggtgcaattcggggccgggcagtgctgg

SEQ ID NO: 67350 - DNA, 599 bp, Chicken  19866894336990_2
  misc_feature (1)..(13): n is any nucleotide
nnnnnnnnnnnnnccgggatgcgcctggtgctgatccccaaagtgacatggtgtcccctggtgctggccgtgctgccccgctccctctgctcctcgggtctgacaggctggaggtagagggagaaggttctggtgaacaaaagtcctcaagaaatgcaaattgtcctcttctgggctgctcgctgccaagccaacctggcagctctgggattttccagtctgcccagggccatccctctgcaacacatctccggctgtgccagcagggacatgctgggcatggtccccttgtgctggcarggacacagcagggacagtcccctggtgctggcagggacatcctggggacagtccccgtgctgccatacagccacgctgggctttgatctgagcctagcacagcacggcacgcagagggcaggcagatgggcaccaacctgacagagcagcacagggggcaccgggcaccttccagccatgggacagccacgtcaycacygggrcatcccaaggtccccaacctccccagccccgtgcagcagccgctcccagggctggtgcaattcggggccgggcagtgctgggtgtgctccccagga

SEQ ID NO: 67351 - DNA, 519 bp, Chicken  19866894336990_3
ctggcagctctgggattttccagtctgcccagggccatccctctgcaacacatctccggctgtgccagcagggacatgctgggcatggtccccttgtgctggcarggacacagcagggacagtcccctggtgctggcagggacatcctggggacagtccccgtgctgccatacagccacgctgggctttgatctgagcctagcacagcacggcacgcagagggcaggcagatgggcaccaacctgacagagcagcacagggggcaccgggcaccttccagccatgggacagccacgtcaycacygggrcatcccaaggtccccaacctccccagccccgtgcagcagccgctcccagggctggtgcaattcggggccgggcagtgctgggtgtgctccccaggacaggttcctacagtcgggaggggcgatggcagcagggtttgctgaaagcactcatagtgtggggggtgccgtggctgttcggggctgggctgctctccccgactcacccattggg

SEQ ID NO: 67352 - DNA, 515 bp, Chicken  19866894336990_4
cagctctgggattttccagtctgcccagggccatccctctgcaacacatctccggctgtgccagcagggacatgctgggcatggtccccttgtgctggcarggacacagcagggacagtcccctggtgctggcagggacatcctggggacagtccccgtgctgccatacagccacgctgggctttgatctgagcctagcacagcacggcacgcagagggcaggcagatgggcaccaacctgacagagcagcacagggggcaccgggcaccttccagccatgggacagccacgtcaycacygggrcatcccaaggtccccaacctccccagccccgtgcagcagccgctcccagggctggtgcaattcggggccgggcagtgctgggtgtgctccccaggacaggttcctacagtcgggaggggcgatggcagcagggtttgctgaaagcactcatagtgtggggggtgccgtggctgttcggggctgggctgctctccccgactcacccattggg

SEQ ID NO: 67353 - DNA, 511 bp, Chicken  19866894336990_5
tctgggattttccagtctgcccagggccatccctctgcaacacatctccggctgtgccagcagggacatgctgggcatggtccccttgtgctggcarggacacagcagggacagtcccctggtgctggcagggacatcctggggacagtccccgtgctgccatacagccacgctgggctttgatctgagcctagcacagcacggcacgcagagggcaggcagatgggcaccaacctgacagagcagcacagggggcaccgggcaccttccagccatgggacagccacgtcaycacygggrcatcccaaggtccccaacctccccagccccgtgcagcagccgctcccagggctggtgcaattcggggccgggcagtgctgggtgtgctccccaggacaggttcctacagtcgggaggggcgatggcagcagggtttgctgaaagcactcatagtgtggggggtgccgtggctgttcggggctgggctgctctccccgactcacccattggg

SEQ ID NO: 67354 - DNA, 599 bp, Chicken  19866894336997_1
  misc_feature (1)..(38): n is any nucleotide
nnnnnnnnnnnnnnnnnnnnnnnnnnnnnnnnnnnnnntgcgctgggactaaactgctccagttctgggcacctgtgccagaagagaagaactacattccctggaagactgctcgctgtgctgttatcatttctgctcagggggaacagatacaaggccttggaaggtcatatgacatctctcttttctatcatcagcctctcctcactactgctcatcccgaccacacgcaatgcctcagcactagtgtaaggcctacagctttcagatactctcattatatttgatttacttgcttcmgttctaattatattgcattatagtgtgttatcttgcattccgataccatatttagtaaattagtttgtttctcctcagattgttgctgctgttttwaattatttggggtccctgtttcccctttctggaggtgcagattttgtgaaatccctccaccctgctagtcatggaactgagctgaaccagcccataaaccatcaacatttcgggtggagaatgcagcaaaagctgcyttttatcrtttagaatgaatctttctctgctctcagagagcttcgttagcttcgttgggaaagttt

SEQ ID NO: 67355 - DNA, 600 bp, Chicken  19866894336997_2
ttccctggaagactgctcgctgtgctgttatcatttctgctcagggggaacagatacaaggccttggaaggtcatatgacatctctcttttctatcatcagcctctcctcactactgctcatcccgaccacacgcaatgcctcagcactagtgtaaggcctacagctttcagatactctcattatatttgatttacttgcttcmgttctaattatattgcattatagtgtgttatcttgcattccgataccatatttagtaaattagtttgtttctcctcagattgttgctgctgttttwaattatttggggtccctgtttcccctttctggaggtgcagattttgtgaaatccctccaccctgctagtcatggaactgagctgaaccagcccataaaccatcaacatttcgggtggagaatgcagcaaaagctgcyttttatcrtttagaatgaatctttctctgctctcagagagcttcgttagcttcgttgggaaagtttatctctttcacaggtgctcactgaagacttgactttgaaagcccaggcagactgtcaatattctgggrtatctataaactttgagcactgctatctt

SEQ ID NO: 67356 - DNA, 600 bp, Chicken  19866894336997_3
tgcctcagcactagtgtaaggcctacagctttcagatactctcattatatttgatttacttgcttcmgttctaattatattgcattatagtgtgttatcttgcattccgataccatatttagtaaattagtttgtttctcctcagattgttgctgctgttttwaattatttggggtccctgtttcccctttctggaggtgcagattttgtgaaatccctccaccctgctagtcatggaactgagctgaaccagcccataaaccatcaacatttcgggtggagaatgcagcaaaagctgcyttttatcrtttagaatgaatctttctctgctctcagagagcttcgttagcttcgttgggaaagtttatctctttcacaggtgctcactgaagacttgactttgaaagcccaggcagactgtcaatattctgggrtatctataaactttgagcactgctatcttgcttytgtaaagggaaaataaataaataaataaaaagctttcttttgtaaaactgcttttcaagggactacatgccattggtttttctctcttaatgctcaaagcgtgctggaccttaaataagtttgccactttgc

SEQ ID NO: 67357 - DNA, 600 bp, Chicken  19866894336997_4
cactagtgtaaggcctacagctttcagatactctcattatatttgatttacttgcttcmgttctaattatattgcattatagtgtgttatcttgcattccgataccatatttagtaaattagtttgtttctcctcagattgttgctgctgttttwaattatttggggtccctgtttcccctttctggaggtgcagattttgtgaaatccctccaccctgctagtcatggaactgagctgaaccagcccataaaccatcaacatttcgggtggagaatgcagcaaaagctgcyttttatcrtttagaatgaatctttctctgctctcagagagcttcgttagcttcgttgggaaagtttatctctttcacaggtgctcactgaagacttgactttgaaagcccaggcagactgtcaatattctgggrtatctataaactttgagcactgctatcttgcttytgtaaagggaaaataaataaataaataaaaagctttcttttgtaaaactgcttttcaagggactacatgccattggtttttctctcttaatgctcaaagcgtgctggaccttaaataagtttgccactttgccctatgga

SEQ ID NO: 67358 - DNA, 485 bp, Chicken  19866894336997_5
tttctcctcagattgttgctgctgttttwaattatttggggtccctgtttcccctttctggaggtgcagattttgtgaaatccctccaccctgctagtcatggaactgagctgaaccagcccataaaccatcaacatttcgggtggagaatgcagcaaaagctgcyttttatcrtttagaatgaatctttctctgctctcagagagcttcgttagcttcgttgggaaagtttatctctttcacaggtgctcactgaagacttgactttgaaagcccaggcagactgtcaatattctgggrtatctataaactttgagcactgctatcttgcttytgtaaagggaaaataaataaataaataaaaagctttcttttgtaaaactgcttttcaagggactacatgccattggtttttctctcttaatgctcaaagcgtgctggaccttaaataagtttgccactttgccctatggagctacaggtat

SEQ ID NO: 67359 - DNA, 451 bp, Chicken  19866894336997_6
tttggggtccctgtttcccctttctggaggtgcagattttgtgaaatccctccaccctgctagtcatggaactgagctgaaccagcccataaaccatcaacatttcgggtggagaatgcagcaaaagctgcyttttatcrtttagaatgaatctttctctgctctcagagagcttcgttagcttcgttgggaaagtttatctctttcacaggtgctcactgaagacttgactttgaaagcccaggcagactgtcaatattctgggrtatctataaactttgagcactgctatcttgcttytgtaaagggaaaataaataaataaataaaaagctttcttttgtaaaactgcttttcaagggactacatgccattggtttttctctcttaatgctcaaagcgtgctggaccttaaataagtttgccactttgccctatggagctacaggtat

SEQ ID NO: 67360 - DNA, 600 bp, Chicken  19866894337000_1
gaattgtccagttgtgttttccctagaactcactgggagttcttctgggagtaccttctgactccactgggagtaccttctgacaaggtatcaaagttacttgtttgcatgttcaaattttgttttaatgaagtactgcagtttcattagaataggaagttcacagcagtttctcttttaattttctgcaaaactacctgatgcattaataaagagggtgggacttttcaattaaaaaaaaataaaaaatcaagagaatggtcccacaccacgttcttatgtctaaattagaaatatatrgatttgaaggctggactatttggtggataaggaagtggttggatggtcaatagccagagggctgtgatcaacaactctaggtccagctggaggccggttatgagtgatgtcctccagggatccttcttggaaccagtgctcttcaacatctttatcaatgacatagatagtgggattgaacggaccctcagcaagtctgctgatggcaccaagctgagtggcacagctgatacaagataggtaaggaatgcaatccaaaggaacctgaaccagcttgaacagtgggtccacatgaatcta

SEQ ID NO: 67361 - DNA, 600 bp, Chicken  19866894337000_2
acatgaatctactgatgttcaacaaggccaaatacaagatgttgaacttgtatttgtcggggcaatcccagataaatgtacagactggggagaagttcttgagagtagccctgctgagaaggacttgaaggtcctgatgaaaagctggacatgagccagcagtgtgcacttgcagctcagaaggctaactgtatcctgggctgcatcaaaagaggggtggccagtagggcaagggcaagattgtcccattattctctgctctcgtgaggccccatgtgcagtattgtgttcaggcctggkgcacccagtacaggaaagacgtgaagctattgaagagagtccagaggagggccacagggatgatcagagggctggagcaccttgcctataaagaaaagctgagggagctaagctagttcagcctggagaagaacaggttccagggagacctcactgcagtatttaagtgcttaaagggagcttataaacaggagggacaccgccattttacattgtttaatagcaacaggggaggggggaataatttaaaactaaaagaggggagatttacattagatattgggagaaaaaaattttact

SEQ ID NO: 67362 - DNA, 600 bp, Chicken  19866894337000_3
ggagcttataaacaggagggacaccgccattttacattgtttaatagcaacaggggaggggggaataatttaaaactaaaagaggggagatttacattagatattgggagaaaaaaattttactcaaagggtggaacactggaacaggctgcccagaggagttgtggatttcccatccctggagctgtacaaggccaggcaagatgggaatctgggcaaccagatcaagtgggcggcaatcctacccatttgcacaagggttggaactagatgatccttaaggtccccttcaacccaagycattctatgagaaaaaaaatgaacatttttygccaaatatagtgttatgtttatcaagagccaagtgtgaataacctgttttctctttctaatgcctgaagatagccagcaggtaataaatttcctcattgttgctaataacactgacaaagaaaaacaacaatcagtttagtgaactgtatgaaaaatcagagatcaatatcatattaagtcatctaaaagcaaaagtcctttaagcgttttccaaacaaagaacttgacaacaggatgctgctactgtggagatgaattgtacaccat

SEQ ID NO: 67363 - DNA, 600 bp, Chicken  19866894337000_4
ttacattgtttaatagcaacaggggaggggggaataatttaaaactaaaagaggggagatttacattagatattgggagaaaaaaattttactcaaagggtggaacactggaacaggctgcccagaggagttgtggatttcccatccctggagctgtacaaggccaggcaagatgggaatctgggcaaccagatcaagtgggcggcaatcctacccatttgcacaagggttggaactagatgatccttaaggtccccttcaacccaagycattctatgagaaaaaaaatgaacatttttygccaaatatagtgttatgtttatcaagagccaagtgtgaataacctgttttctctttctaatgcctgaagatagccagcaggtaataaatttcctcattgttgctaataacactgacaaagaaaaacaacaatcagtttagtgaactgtatgaaaaatcagagatcaatatcatattaagtcatctaaaagcaaaagtcctttaagcgttttccaaacaaagaacttgacaacaggatgctgctactgtggagatgaattgtacaccatgctgtcagtwaggttagaaggttatagtgta

SEQ ID NO: 67364 - DNA, 600 bp, Chicken  19866894337000_5
gaaaaaaaatgaacatttttygccaaatatagtgttatgtttatcaagagccaagtgtgaataacctgttttctctttctaatgcctgaagatagccagcaggtaataaatttcctcattgttgctaataacactgacaaagaaaaacaacaatcagtttagtgaactgtatgaaaaatcagagatcaatatcatattaagtcatctaaaagcaaaagtcctttaagcgttttccaaacaaagaacttgacaacaggatgctgctactgtggagatgaattgtacaccatgctgtcagtwaggttagaaggttatagtgtaatcttttagtctagttcctatgtgatttgagtatgaatgaagatctcatggaagtataggctacgaggttacacccataataagggatgcagggccctgttcccaaggaacctttctatacactgggctgtgtacctccactgtatatccaaatgaagctagagaatatagagcagcctctttacctccttcacttccaagggaaggaagttccacacaaggcttgactagagcacagctcacagaaagagaccacagggagtcatgaaaacttgggtg

SEQ ID NO: 67365 - DNA, 577 bp, Chicken  19866894337008_1
agaagatcaaaataaaaaccataagcatttacatcttctaactgcttaaagagtggcctactactcaatactggtggtcatttcatattgcacctgatgacaaaagaacttctgcagagttgtctgactcatctgtgactatttaaatttgaaagggaagaatgtaaagttagttagaaaacacaggatcgatcatgtatcaatatatctatgctactttcattagatgcctgtttaatctgatgacaaaagaaagcaacacaaaaatcctttgatggtaaaactggacaaaactacctygacgctcacagaactcagctttacaactggaagggtttttaatcttattgtccagcataaacctcctctgtgctgatgtaacctgatagtttttggggtgtttttttacctcttcttaaataaaaacaactagccatttctcattttataaggatatttcactggtctgcttacaagcaagcaaaattgcttgtaacaggtgtctcagcaataccaggcaaagtatatgcaggtagtccaatactcatgtacagaaagaagagttgaagtcatccaa

SEQ ID NO: 67366 - DNA, 600 bp, Chicken  19866894337014_1
gacaaacactcacacgcagagcagagcagagagctgtgagcgcagcccagcagctggcagccccaggcagccctgcagcagcatccccagtgccctgcacccccaggctgccccacgtcacactgatgggggcacacagcaatcctgttgctgctgctgctgccttttccgagcctgtttgtctcttcaatctgaaatggatttccacccatcactctgtcaagcagctccttttcttttgcgttaattcacataaccagcctttaaccaccaacccttcctgcaccgcagctcttgctwtacacgcctcaccacacacagcagcaatggctgtggctcaagtttattaaacgcatggatggagcggctgcacataccctgggatgtgtgtgcacgagcgtgtgagcaagtctgcactccatcaacagacagctccccaacagcctcctattaactacagagctgcaaaggctttgctcccaaacagaaaactactaaacacaccataaaatgcaatgggagctacaaaggggctggagcaatgtgcagagaaaggcgacgtgttgtggttccaaaatgcggggacccccaccatcagtc

SEQ ID NO: 67367 - DNA, 600 bp, Chicken  19866894337019_1
tgaaacaatttccaaagacctgtggtagtgtttccatttctggtgcactataaatcaaaattggatgttttctgagaggtgtgcttaactgaggtggaagacaaactgtgaggacagccagtgattgtggcatgttgcccagagaggctgtgcagtctctgcccttagaggttttcaaacctgaagaacgtgatctgatctcacaactgatcttactttaagtagttcaactagaaacctctcatgggccattccaacctgattttgtttttgatgtagtgatcctacaacataattcawgcaagtctagcatcctatgggcagatcagtctagattatttcaaggttctgatctctacagtccataaaatgtatcaagatggaaatactgtattaccaaaattactcttatcattttccaaatccacatttttcatattatacatacatagagagagaatacgaataaaggtaggcataaggagaaaacgttatttccagtgtgcattcaaggtgaatgacaaatcattgtaatgataacataatcgattctctgatttgtttgtttcccttagggggagaaaatattttcatagggat

SEQ ID NO: 67368 - DNA, 600 bp, Chicken  19866894337019_2
atagaattgctcaggttggaaaaggccttaaagatcatcgagtccaaccacaacctcaccatcctaccctaactgtaataaccctctggtaaatcatgtccctgagcaccacatccaaacggtttttagacacatccagtgatggtgactcaatcacctccctggggaccatatgccagtgcttaacaaccctttctgtaaagtggtttctaatatccaacctaagcttaccctgttgtgacttaaggccatttcccctcgttctgtcacctgtcacctgtgagaagagaccaaccctgytctcgctgtaagcacctttcagatattggaagaraacaataaggtctcccctcagcctccttttccccagactaaacaaccccggttcctttagtctctccttgtagggcatattctccaagccctttacaagccttgttgccctttggacctgctccagcacctcagtgtcctttctgtactgaggtgcccaaaactgaacacagttctcaaggtgaggcctcaccaatgccgagtacaggagcaggattacttccctagtcctgctcaccataccattcctgatacaagccaggatgc

SEQ ID NO: 67369 - DNA, 600 bp, Chicken  19866894337019_3
tcatcgagtccaaccacaacctcaccatcctaccctaactgtaataaccctctggtaaatcatgtccctgagcaccacatccaaacggtttttagacacatccagtgatggtgactcaatcacctccctggggaccatatgccagtgcttaacaaccctttctgtaaagtggtttctaatatccaacctaagcttaccctgttgtgacttaaggccatttcccctcgttctgtcacctgtcacctgtgagaagagaccaaccctgytctcgctgtaagcacctttcagatattggaagaraacaataaggtctcccctcagcctccttttccccagactaaacaaccccggttcctttagtctctccttgtagggcatattctccaagccctttacaagccttgttgccctttggacctgctccagcacctcagtgtcctttctgtactgaggtgcccaaaactgaacacagttctcaaggtgaggcctcaccaatgccgagtacaggagcaggattacttccctagtcctgctcaccataccattcctgatacaagccaggatgctactggccttcttggccacctgggcacactgctg

SEQ ID NO: 67370 - DNA, 600 bp, Chicken  19866894337022_1
accaaaacaaaacaaataaaaaacccaccaaaagaaaccaaccaaacaaatcagaaaaacaccccaaaaccaacagcagcaaaaaaagaaaaaaaaaaaatcccaatccaaccagaattccatagcataaggagtatgatggatttataaattaacagtgcttcattctctatttccttattagaagtcaggaattactagaaaataattctaatgtagctggactaaaacagctgcatgtttgaaaacatcatgaaagaattatagaaacccgtataattaagatcatgcagatatttraattaaggtaggtacatgaacataacagcattgatcatatcagctttctgagaacattaaaacatttctacttaaaaaaaaaaaatcacttcctattagacagacttaatgggcatatccattgattcagatacaccttgtgggtgtccttggatacaaagcagatatcagtgaaaaaatatatttgtatttaattgaagcttgtgggtcaatgaattgcaatcttttcttaaagaacagtaaaaattaaatgcaatgcttgcccactgtaatctttacccactataaggataccacaca

SEQ ID NO: 67371 - DNA, 600 bp, Chicken  19866894337022_2
aatatatttgtatttaattgaagcttgtgggtcaatgaattgcaatcttttcttaaagaacagtaaaaattaaatgcaatgcttgcccactgtaatctttacccactataaggataccacacaaaaacaaagcttgtagtgtatctatctccttcccatacagtgtctttacttcctactcttctctcccattaatttcaaaataacatcagtcaactgctggacaggatgaaaacctcagaagtttcaaactgtatttgctttatctatattatcataacaatcaagctgaaagattaygtatttcagtagatgcagacaggaacagttttcttgcatgaggaatctggttaagaaggtagcatttttctttcaactcattcaaagctgtctgtaacatagaagaggttgctcatctcaataacacagktcacttttcctacaaggctaactcaccaaaaatggtcagcagaccattttattttaaaaaccatcttcagagtagacaatggcttaacttatcagcatactcattttagtagattaatttccaaatggcaatgtcaatttaatttagatrtcaatgtcaatttagaaaat

SEQ ID NO: 67372 - DNA, 600 bp, Chicken  19866894337022_3
agcttgtagtgtatctatctccttcccatacagtgtctttacttcctactcttctctcccattaatttcaaaataacatcagtcaactgctggacaggatgaaaacctcagaagtttcaaactgtatttgctttatctatattatcataacaatcaagctgaaagattaygtatttcagtagatgcagacaggaacagttttcttgcatgaggaatctggttaagaaggtagcatttttctttcaactcattcaaagctgtctgtaacatagaagaggttgctcatctcaataacacagktcacttttcctacaaggctaactcaccaaaaatggtcagcagaccattttattttaaaaaccatcttcagagtagacaatggcttaacttatcagcatactcattttagtagattaatttccaaatggcaatgtcaatttaatttagatrtcaatgtcaatttagaaaatgcatcgttatcayccatcaaattagcaataccaaatcagtcaccaaatggtaggcctactacaggcagcagaaagtaggctcacaatcgcaggctctagttctcatgggggacttcgatcacctcaatat

SEQ ID NO: 67373 - DNA, 516 bp, Chicken  19866894337022_4
caatcaagctgaaagattaygtatttcagtagatgcagacaggaacagttttcttgcatgaggaatctggttaagaaggtagcatttttctttcaactcattcaaagctgtctgtaacatagaagaggttgctcatctcaataacacagktcacttttcctacaaggctaactcaccaaaaatggtcagcagaccattttattttaaaaaccatcttcagagtagacaatggcttaacttatcagcatactcattttagtagattaatttccaaatggcaatgtcaatttaatttagatrtcaatgtcaatttagaaaatgcatcgttatcayccatcaaattagcaataccaaatcagtcaccaaatggtaggcctactacaggcagcagaaagtaggctcacaatcgcaggctctagttctcatgggggacttcgatcacctcaatatttaccagaaaagcaacactaccaggcacacatggtcctggagtttcctgcaatgcatggaaggtaa

SEQ ID NO: 67374 - DNA, 483 bp, Chicken  19866894337022_5
tgcagacaggaacagttttcttgcatgaggaatctggttaagaaggtagcatttttctttcaactcattcaaagctgtctgtaacatagaagaggttgctcatctcaataacacagktcacttttcctacaaggctaactcaccaaaaatggtcagcagaccattttattttaaaaaccatcttcagagtagacaatggcttaacttatcagcatactcattttagtagattaatttccaaatggcaatgtcaatttaatttagatrtcaatgtcaatttagaaaatgcatcgttatcayccatcaaattagcaataccaaatcagtcaccaaatggtaggcctactacaggcagcagaaagtaggctcacaatcgcaggctctagttctcatgggggacttcgatcacctcaatatttaccagaaaagcaacactaccaggcacacatggtcctggagtttcctgcaatgcatggaaggtaa

SEQ ID NO: 67375 - DNA, 600 bp, Chicken  19866894337027_1
gacagttacaactctcactgatataatgactggaggaaacctctgtgagaataaatgttcaagccttccttctcagaattccaattgaacgggaaagaaagacttccagtgatttatctgagcatgggaacaggacttttaattttaagagaacaaatgaaaaaattataaagctttatcttatcctaaaaatatttactgttgcgtcttttacttatatttcctcaaaactgctgagaaaaccacagaaattggatgaaagagctagggcatggatgagaaatccttgtaaaaaatcawattttgtaataaagcataagcttgcataaacataaacttgcttgaacatatactatcaaaatcaagatgcttttacacttgaaaagtccaaacaaaaatataatatgtgaagcaagattttctttaaatcaggaagttacctcaaaggagactatgctgaattcctttggaagaactgttccttgatttttaatacaatcctagatatctgtgcacatacatcagatatatacacattctgcattagagatatgcagaaaaacaaattgcttttgtcagtttgtttgcaacaacaggaga

SEQ ID NO: 67376 - DNA, 600 bp, Chicken  19866894337033_1
aataagaaatggaagattttgcaatgtctgctgaacttccatttcaaagtcaggtaaaacagcagggagtgggaagaagggagggaaatggggactactgtttcagagacaggtgacattttggagcagaacaacatgagatggtctcctgtcaagaagcaataagaggaggaagaatgaaaaatagctcccccaaagaaaattgctctgtcccaggcaaatgacggtggagggatttctaatcctttggtaaagtgacagtgagggatttaatgctgtcaggcaggtatgacagtgtcrggaagagtgactaaggaagagtgactcagagtcaggtgccactgggaaaagaagtgcctgacccatgagcaaagccattgcttggtgcttgctctgccagtcactgtagagaagaatggagaggggctgggtgagggccgttaacaacatgggaagaaagaataagactggcgccactgggcgaggaaattaataagaaaatgaagaagctcagaaaataatgtgtgatgtggaaagtgatgagaaagacacctccttgtatatcttaagcactgctctgtcctcaggatacctgggatc

SEQ ID NO: 67377 - DNA, 600 bp, Chicken  19866894337035_1
agataaaaacatacagacttccataggaaaataaatgaatatgaatacagtgcaatttagtattaagaatcttatttctgcataggcatttgcagaacatattttcttcaaggagttaagcaatcacacaacaattactagaaactacagacttctagtagtttaaaggaaactaaaatgagaattactcccattatcatacgagagcatgctaccagtgaaatgaggactggcttcccacagcatcccattccatcttactgatcagtcccatctcagtcccctccagagggagagcasagagctgctggaaggcacgagtagaacctttttgtgctctttccttcaggtaactggaaggtctggagatacacaaaaactgttccaacaaacagatagaagaaacttaaaacattctgtgatttgtratgtaaagtggaagtgtggcacacaaacattttgaaactctttcttggataactatttttttagttacaaagaaacagatgtaaatacatcatcacggcacaacaaatgtacacacaaaaaattctgcaagattttgttgtcttcagactaaaaagtgggaaaaatacatga

SEQ ID NO: 67378 - DNA, 600 bp, Chicken  19866894337035_2
caacaattactagaaactacagacttctagtagtttaaaggaaactaaaatgagaattactcccattatcatacgagagcatgctaccagtgaaatgaggactggcttcccacagcatcccattccatcttactgatcagtcccatctcagtcccctccagagggagagcasagagctgctggaaggcacgagtagaacctttttgtgctctttccttcaggtaactggaaggtctggagatacacaaaaactgttccaacaaacagatagaagaaacttaaaacattctgtgatttgtratgtaaagtggaagtgtggcacacaaacattttgaaactctttcttggataactatttttttagttacaaagaaacagatgtaaatacatcatcacggcacaacaaatgtacacacaaaaaattctgcaagattttgttgtcttcagactaaaaagtgggaaaaatacatgaaagcaaccggggaaggctaatgagatatagctcttcactgaatatccttgggtgtacagaactttcgagaacaaataaagatacaatgaataaaaagaagttttgtaccacttatactattgcttgct

SEQ ID NO: 67379 - DNA, 600 bp, Chicken  19866894337044_1
tcttagaggactgcaccaaaactggtttaaacagctactgagtataatttaaagtggtgctgtcaggttaaacaactgggctttctcttcctgccgtgtgtgcaaactcagatgatttgaatagagttgttactgtggaacaagttaacatgacagcaatactcagctgtacactaatactgaaccaagcagattttacatgtgcactggttgggaagcagagtaattctgtaacttcagtgaagttacgctggatttatactaacataaaaggaggaccttggtctcttatcttccccraagtatgctgtatgcattttagtgtttcttaggaattaacagaaatgtcagtcatgctttagcagagcctaaaaataccttctagttaaatggattgtcacagaaatgctcaaaatgtgaaaggacgtgtaactccaatctttatacttaggtgcatggccatgctcatacatgaagtctctcttggaaagtggtgccctaatcaaagcaaaacacagcttatcacccttgagaccatatcagtgttctttaacatagacactatgtaaataaggaagagattgaaaaacactttgtaag

SEQ ID NO: 67380 - DNA, 600 bp, Chicken  19866894337049_1
ttccaatcctcaaatctcactagctattttagtcttagatttatcttctctgttacttgcacattacatagaaaaaaagagagtacatgagcacacatgcatgcattgttcctgctctctgaatcacaattatataaatcaatgattttttaggctagaaaaaaatgaaaatggaagtagtggctcaaagtctgcataaggagaagtgagcttttggtgatctggctgaacagaagttttctgggagggataagttgtgctttgccatcatctgccgcagccagtgagtctcccagctcycaggcctgggtaacaaggcacagaggcaacakctgaaagggcagaaagctcaaggataaaaatacatagctccaaatcttagcaacaattcagggtatgcctgtgtcgcttaacatgttattatctttgtgctgtctgacagtactaaactaatatttgcttccagcactgccagaactgaaagctatcgcaacacgtcattaacctcaatcttctctgaaatgttaacggagacacaaccctaaacaacatggtattacagtgattgacttgtatatgagattcttaaactcaaaactt

SEQ ID NO: 67381 - DNA, 600 bp, Chicken  19866894337049_2
tcttagatttatcttctctgttacttgcacattacatagaaaaaaagagagtacatgagcacacatgcatgcattgttcctgctctctgaatcacaattatataaatcaatgattttttaggctagaaaaaaatgaaaatggaagtagtggctcaaagtctgcataaggagaagtgagcttttggtgatctggctgaacagaagttttctgggagggataagttgtgctttgccatcatctgccgcagccagtgagtctcccagctcycaggcctgggtaacaaggcacagaggcaacakctgaaagggcagaaagctcaaggataaaaatacatagctccaaatcttagcaacaattcagggtatgcctgtgtcgcttaacatgttattatctttgtgctgtctgacagtactaaactaatatttgcttccagcactgccagaactgaaagctatcgcaacacgtcattaacctcaatcttctctgaaatgttaacggagacacaaccctaaacaacatggtattacagtgattgacttgtatatgagattcttaaactcaaaacttgcttgtttttctccttgtttgtaataatactt

SEQ ID NO: 67382 - DNA, 599 bp, Chicken  19866894337050_1
  misc_feature (1)..(86): n is any nucleotide
nnnnnnnnnnnnnnnnnnnnnnnnnnnnnnnnnnnnnnnnnnnnnnnnnnnnnnnnnnnnnnnnnnnnnnnnnnnnnnnnnnnnnncttatgaatgagtctgaaagctggtactaatcacttatgacttactattttatttctttccttgcatcacttgaaagataacttacaaaggcagaagggggatcacaggctcttccctaaggaaaaggctgaaaagtagttaaggagtggctagcacttcttcagtttcttgtaagctgaaagccagctggcaaaactacgtggaagcagcagytgaactagggaagggattacatgtcctcatggagagcagcacagtgtgcaaagctgttcctcttcatgttgctttcaaacccaagcttcctgcagtaatgcttaggagagtgatagggaagagcagagctctcataagatactgtaataaactgtgttctgtgatttgtttgtaatctgcatcttccacctactcttgctgtacctttccagaagtcttggcaatatttgatggtagaggtttgttagcratcccatggattttcttaactaaatggtgctgtgcaggaaaaagattca

SEQ ID NO: 67383 - DNA, 600 bp, Chicken  19866894337050_2
gtttcttgtaagctgaaagccagctggcaaaactacgtggaagcagcagytgaactagggaagggattacatgtcctcatggagagcagcacagtgtgcaaagctgttcctcttcatgttgctttcaaacccaagcttcctgcagtaatgcttaggagagtgatagggaagagcagagctctcataagatactgtaataaactgtgttctgtgatttgtttgtaatctgcatcttccacctactcttgctgtacctttccagaagtcttggcaatatttgatggtagaggtttgttagcratcccatggattttcttaactaaatggtgctgtgcaggaaaaagattcaagctctgccttactccaaacttgtatgaagtctcctgccactagttttctgaaacaaaaatatttcctttgggacacacggctttgcaagcagatgctttcacgttcctcccctgtacttaagggctggatggagatatgaagacaataaaaggaaggtgacagaacatcatggttcactgttcttgctgtccccacatgtgaacattctcctgtaagggcagtactgtaacttctgcagtattgaaggag

SEQ ID NO: 67384 - DNA, 600 bp, Chicken  19866894337050_3
agcagatgctttcacgttcctcccctgtacttaagggctggatggagatatgaagacaataaaaggaaggtgacagaacatcatggttcactgttcttgctgtccccacatgtgaacattctcctgtaagggcagtactgtaacttctgcagtattgaaggagatttaagtatttctgtagcatttacttgtttattgtgtttcagtttattcggagaacatttcaaaactgcatgacatggattacattatcaaaacagaacttaatacagctaaccagcaaagcatgcaaacactacyaggctgtatcataaattgcacttaaaccccaggagtttgttgaatgttctcagtctatgtgtttctttatttactccaaatcagtagttttcccagaagttatgtttcttgtactgaatgcatctttaagactatcaacatctctcactaaagcaatcagacaatcaaaaacagagaggagaacagtattcagtaagtttacactggaaaaactgaaggtatgaatcagaatactatcacattttagaacctgcacaataaaagatgtgtgtttttttttttttwaaggagaaaccttgt

SEQ ID NO: 67385 - DNA, 600 bp, Chicken  19866894337050_4
ctaaccagcaaagcatgcaaacactacyaggctgtatcataaattgcacttaaaccccaggagtttgttgaatgttctcagtctatgtgtttctttatttactccaaatcagtagttttcccagaagttatgtttcttgtactgaatgcatctttaagactatcaacatctctcactaaagcaatcagacaatcaaaaacagagaggagaacagtattcagtaagtttacactggaaaaactgaaggtatgaatcagaatactatcacattttagaacctgcacaataaaagatgtgtgyttttttttttttwaaggagaaaccttgtaatgatttcagcacrtcacctctcaagcacatcaaaaaacaggttttcatctgaatttcagctccttacatcattaaggatgcataaagtggtttaggaatcttgtctttcagtgtgatgctctgcttcttgcagctgcgctctgctgaagctagtggcatatctagatttagatccaggaaacaccagtcccatcttctgagatagattcacagcagggcattacttctgctcaatctttaataggcactttcatttgaggccctttcctt

SEQ ID NO: 67386 - DNA, 600 bp, Chicken  19866894337050_5
catgcaaacactacyaggctgtatcataaattgcacttaaaccccaggagtttgttgaatgttctcagtctatgtgtttctttatttactccaaatcagtagttttcccagaagttatgtttcttgtactgaatgcatctttaagactatcaacatctctcactaaagcaatcagacaatcaaaaacagagaggagaacagtattcagtaagtttacactggaaaaactgaaggtatgaatcagaatactatcacattttagaacctgcacaataaaagatgtgtgtttttttttttttwaaggagaaaccttgtaatgatttcagcacrtcacctctcaagcacatcaaaaaacaggttttcatctgaatttcagctccttacatcattaaggatgcataaagtggtttaggaatcttgtctttcagtgtgatgctctgcttcttgcagctgcgctctgctgaagctagtggcatatctagatttagatccaggaaacaccagtcccatcttctgagatagattcacagcagggcattacttctgctcaatctttaataggcactttcatttgaggccctttcctttgataagacagaa

SEQ ID NO: 67387 - DNA, 600 bp, Chicken  19866894337050_6
ttgcacttaaaccccaggagtttgttgaatgttctcagtctatgtgtttctttatttactccaaatcagtagttttcccagaagttatgtttcttgtactgaatgcatctttaagactatcaacatctctcactaaagcaatcagacaatcaaaaacagagaggagaacagtattcagtaagtttacactggaaaaactgaaggtatgaatcagaatactatcacattttagaacctgcacaataaaagatgtgtgtttttttttttttwaaggagaaaccttgtaatgatttcagcacrtcacctctcaagcacatcaaaaaacaggttttcatctgaatttcagctccttacatcattaaggatgcataaagtggtttaggaatcttgtctttcagtgtgatgctctgcttcttgcagctgcgctctgctgaagctagtggcatatctagatttagatccaggaaacaccagtcccatcttctgagatagattcacagcagggcattacttctgctcaatctttaataggcactttcatttgaggccctttcctttgataagacagaaagagaaaagggctgcttgcaagtactgaaa

SEQ ID NO: 67388 - DNA, 600 bp, Chicken  19866894337050_7
gcacttaaaccccaggagtttgttgaatgttctcagtctatgtgtttctttatttactccaaatcagtagttttcccagaagttatgtttcttgtactgaatgcatctttaagactatcaacatctctcactaaagcaatcagacaatcaaaaacagagaggagaacagtattcagtaagtttacactggaaaaactgaaggtatgaatcagaatactatcacattttagaacctgcacaataaaagatgtgtgtttttttttttttwaaggagaaaccttgtaatgatttcagcacrtracctctcaagcacatcaaaaaacaggttttcatctgaatttcagctccttacatcattaaggatgcataaagtggtttaggaatcttgtctttcagtgtgatgctctgcttcttgcagctgcgctctgctgaagctagtggcatatctagatttagatccaggaaacaccagtcccatcttctgagatagattcacagcagggcattacttctgctcaatctttaataggcactttcatttgaggccctttcctttgataagacagaaagagaaaagggctgcttgcaagtactgaaatg

SEQ ID NO: 67389 - DNA, 600 bp, Chicken  19866894337050_8
cacttaaaccccaggagtttgttgaatgttctcagtctatgtgtttctttatttactccaaatcagtagttttcccagaagttatgtttcttgtactgaatgcatctttaagactatcaacatctctcactaaagcaatcagacaatcaaaaacagagaggagaacagtattcagtaagtttacactggaaaaactgaaggtatgaatcagaatactatcacattttagaacctgcacaataaaagatgtgtgtttttttttttttwaaggagaaaccttgtaatgatttcagcacrtcrcctctcaagcacatcaaaaaacaggttttcatctgaatttcagctccttacatcattaaggatgcataaagtggtttaggaatcttgtctttcagtgtgatgctctgcttcttgcagctgcgctctgctgaagctagtggcatatctagatttagatccaggaaacaccagtcccatcttctgagatagattcacagcagggcattacttctgctcaatctttaataggcactttcatttgaggccctttcctttgataagacagaaagagaaaagggctgcttgcaagtactgaaatga

SEQ ID NO: 67390 - DNA, 600 bp, Chicken  19866894337051_1
tatagggacagcaggagagtgttcagtacttaacacagggaaactcagaatgctacactttgaacagagactatctagctagcacaaatactaagcacaagtaaatccttttctccgaagactgtgaatgtagaaccatgactgaggagatttaaaatgtcctctctgctgtgcactgtacaaacatagaaggaagtaattaatgtacaaagagtgagatttgcacagcaaaagagccttttcatgaatgtgtaggagcctgcttgcttgcacttgcacacacagagcactgcaaaagcrtagaggggtgtgtttttaaacagttgtgggcttcatctgttgtcaggaactgtggttcctaggcttcagaacaattgtcttttgtgtgtcacttgaaaaactgcactggaattttttattttatcctcagtcttgggatttgatgatgctagaatcaagatttgtttagcaggattactcaggagctgagaaatctgttttagaaggtggtcttggagggtttgctaatgtctgcctggttccccctgttctttctgatggcgttcattcattgttctcaaaaataatatgttaactgat

SEQ ID NO: 67391 - DNA, 599 bp, Chicken  19866894337062_1
  misc_feature (1)..(84): n is any nucleotide
nnnnnnnnnnnnnnnnnnnnnnnnnnnnnnnnnnnnnnnnnnnnnnnnnnnnnnnnnnnnnnnnnnnnnnnnnnnnnnnnnnnnttttagcacctggagatgtgcctttgaaagacatttacccaaaaggtaagaggttcatatacttgtactgcaacaactgtacatgcttggttttgttttgtaagctgcatagcttgtgaattctttacaaaatgtttttaaagaatcacaaagcaggcatttgaagagaaatgagagtagttacactcattttgccaactttaagatctatttggrtcttagtaacgtgcttaattgtacctccgaggaattaaacatgctgcctacactatgaatattccagtagatagcatctcgctttgccctcactggggaccagctagaggattgtgattgttccagttcagcagtcagycttcaccagtattgtcagcctctgctcagtacccaacygatgcaccattataagacatgcctcatttgtcaaagcagttgtccatgcatctcagtttgaaggcaaatcctggctctgtttccagcagggacagcaggagagggtattttgagaatgcatg

SEQ ID NO: 67392 - DNA, 600 bp, Chicken  19866894337062_2
catatacttgtactgcaacaactgtacatgcttggttttgttttgtaagctgcatagcttgtgaattctttacaaaatgtttttaaagaatcacaaagcaggcatttgaagagaaatgagagtagttacactcattttgccaactttaagatctatttggrtcttagtaacgtgcttaattgtacctccgaggaattaaacatgctgcctacactatgaatattccagtagatagcatctcgctttgccctcactggggaccagctagaggattgtgattgttccagttcagcagtcagycttcaccagtattgtcagcctctgctcagtacccaacygatgcaccattataagacatgcctcatttgtcaaagcagttgtccatgcatctcagtttgaaggcaaatcctggctctgtttccagcagggacagcaggagagggtattttgagaatgcatgyagccctatcgcttctgtgtctttgctttcatacttgagatctcaacatttgtcattgttttattaaggatgctgcagggtacatttctgcctcactttttaaatgtgtttatggacctgttgtgctcaaatttgtctgg

SEQ ID NO: 67393 - DNA, 600 bp, Chicken  19866894337062_3
tgttttgtaagctgcatagcttgtgaattctttacaaaatgtttttaaagaatcacaaagcaggcatttgaagagaaatgagagtagttacactcattttgccaactttaagatctatttggrtcttagtaacgtgcttaattgtacctccgaggaattaaacatgctgcctacactatgaatattccagtagatagcatctcgctttgccctcactggggaccagctagaggattgtgattgttccagttcagcagtcagycttcaccagtattgtcagcctctgctcagtacccaacygatgcaccattataagacatgcctcatttgtcaaagcagttgtccatgcatctcagtttgaaggcaaatcctggctctgtttccagcagggacagcaggagagggtattttgagaatgcatgyagccctatcgcttctgtgtctttgctttcatacttgagatctcaacatttgtcattgttttattaaggatgctgcagggtacatttctgcctcactttttaaatgtgtttatggacctgttgtgctcaaatttgtctggtccctttttgaactcgtgtgtctctacagaaagttcat

SEQ ID NO: 67394 - DNA, 600 bp, Chicken  19866894337062_4
tcttagtaacgtgcttaattgtacctccgaggaattaaacatgctgcctacactatgaatattccagtagatagcatctcgctttgccctcactggggaccagctagaggattgtgattgttccagttcagcagtcagycttcaccagtattgtcagcctctgctcagtacccaacygatgcaccattataagacatgcctcatttgtcaaagcagttgtccatgcatctcagtttgaaggcaaatcctggctctgtttccagcagggacagcaggagagggtattttgagaatgcatgyagccctatcgcttctgtgtctttgctttcatacttgagatctcaacatttgtcattgttttattaaggatgctgcagggtacatttctgcctcactttttaaatgtgtttatggacctgttgtgctcaaatttgtctggtccctttttgaactcgtgtgtctctacagaaagttcataagttcactactccctgtcatgaaccaatctcttataaggtttatcaagtgccccttgttctagcattgaaggttgtgtgaataacagttcttcatttatcttgaccatcacctacatgcctt

SEQ ID NO: 67395 - DNA, 600 bp, Chicken  19866894337063_1
catatataataagtgctatggagtaacttctgtactagcatgctcttgtatctgctgtactttgagaagaatgaaagtacttttgacagtaccttctgtcaaaacatggtatctgatatagcttatttttttgttttctttaatagatgtaatagatggaccataaaattcctgtagcaatagtttcaaactggcattgtatgaatgtgtcttctgagatctgcatcattaaaaccatttgtcttctgaaaaattcaactgctcttcaaggcaattttgatcaaataaaggtgtcaattycttctaaagacatccacagtgacatgggtttctatactgagacataacccagtgtattgttacccattgtgtatattttaaaatgaatataaatcaactagtaagttgmtattttttgcttgcatacattgaatggtgaaagtaaacagaagataaacttaaaaaaataatcttgatttgtctgtctttcaatcttagactgtaatattctcattctcataatctattttgctaccttttttgttatttttacttgtcaggctgacgtgcggaaaagaacatccaatacaaagttgtctg

SEQ ID NO: 67396 - DNA, 600 bp, Chicken  19866894337063_2
tatctgatatagcttatttttttgttttctttaatagatgtaatagatggaccataaaattcctgtagcaatagtttcaaactggcattgtatgaatgtgtcttctgagatctgcatcattaaaaccatttgtcttctgaaaaattcaactgctcttcaaggcaattttgatcaaataaaggtgtcaattycttctaaagacatccacagtgacatgggtttctatactgagacataacccagtgtattgttacccattgtgtatattttaaaatgaatataaatcaactagtaagttgmtattttttgcttgcatacattgaatggtgaaagtaaacagaagataaacttaaaaaaataatcttgatttgtctgtctttcaatcttagactgtaatattctcattctcataatctattttgctaccttttttgttatttttacttgtcaggctgacgtgcggaaaagaacatccaatacaaagttgtctgcaaggattgattttatttcatttttttgaaaaataattcattacaacataattgtaattgattactggaaatctgaccagtgttttgaaagtgaagacaaactatcaga

SEQ ID NO: 67397 - DNA, 443 bp, Chicken  19866894337063_3
ttttgttatttttacttgtcaggctgacgtgcggaaaagaacatccaatacaaagttgtctgcaaggattgattttatttcatttttttgaaaaataattcattacaacataattgtaattgattactggaaatctgaccagtgttttgaaagtgaagacaaactatcagaatgatatgaatacatataaaatttattccttgtgttttaccatctctgaaagtagtttgacttgactagtacagtatgattataacttgatttaagttccttgcatcttgtcattagtcacaagctgtrctataaagttacctgcaaaacatggaaagatgaaatagaacttccaaactgtttttttttttttaataatgctcattactgcttgcaagtaatatgaatatgtaaaatcagtgggcttaatttctctttttaagagagaaaat

SEQ ID NO: 67398 - DNA, 600 bp, Chicken  19866894337066_1
tgtgcctgacactgttttcagatttgtttgaccatttcagttgcaattctatactgtccctattagatagataggtcactttcacactttcaggattctcttgtagatctcagtgttggcaaaaagataaacatatagaatagtaaattcagttattgctcattttactttgcatgtacaaaacaacattaagtgaaatatgcaaggttttaaaactaaggaatcagtacctgcaaggaattaaagtaatttactttaaataaactcaatgattgttttaaaattccaataattcagaaktcagatatatgcaattccaaagcaaaatatgcatcttcttatcccaagcagttgaataaacctaattctcttatacaagtagtaccagcagtctgtttcaataaaaaacaaaaccaattcaacagtggtgtgaattcacttgctcataagattatcaaagtatggcaaatgaatacaggatttttagttctcagggttgcaaatcctttgacctttacagtcacaagcactcagtcatgggtgaaaaagaaagacagtgtgagtcttctgaatggttttgttattcttcatcagggttac

SEQ ID NO: 67399 - DNA, 600 bp, Chicken  19866894337070_1
gtactttcaagtactttaagctgaaagaaacagccctgttctccagagccccaggatagacctaattaatcatttttcttgaaggacaatgaggacttgaatgctaggatgaattggctgggtggcacaggcagggaagctgttcaatccctgtctcctatccttagaccacttgattgttgctgaggtagaatctctgtgtgtcttgtgtatacaacacaatgtacatacatacacatttgcttcaagacactgtctaacctgggaaatgtccgtgatgaaacctactttttttccacrgaggttttttgcttttactgaatcattgttttccctgagaaaactcgtgtgagtgtggagaaaaaatagtcctattcagatctactaatcagccttggtcctratagtctgtgtgaggtggccaaaaacagccttaaggctatttttttacatcagtgtcttaaactcactacatgccaaactgcaaactgccatgatagtgaggagctgaaacatcagctgaaatctccacagtgtaaaatcgtctttctatgctgtatccatccatccatccatatgtctatatatatatatatatat

SEQ ID NO: 67400 - DNA, 600 bp, Chicken  19866894337070_2
ctaggatgaattggctgggtggcacaggcagggaagctgttcaatccctgtctcctatccttagaccacttgattgttgctgaggtagaatctctgtgtgtcttgtgtatacaacacaatgtacatacatacacatttgcttcaagacactgtctaacctgggaaatgtccgtgatgaaacctactttttttccacrgaggttttttgcttttactgaatcattgttttccctgagaaaactcgtgtgagtgtggagaaaaaatagtcctattcagatctactaatcagccttggtcctratagtctgtgtgaggtggccaaaaacagccttaaggctatttttttacatcagtgtcttaaactcactacatgccaaactgcaaactgccatgatagtgaggagctgaaacatcagctgaaatctccacagtgtaaaatcgtctttctatgctgtatccatccatccatccatatgtctatatatatatatatatatgtatatttccccagtcatttcttagaggaaattggtgagggaacatatatattagctgtgcactgaaagaccaccagcctttgcagtgcatggttgcaggtga

SEQ ID NO: 67401 - DNA, 599 bp, Chicken  19866894337073_1
  misc_feature (1)..(182): n is any nucleotide
nnnnnnnnnnnnnnnnnnnnnnnnnnnnnnnnnnnnnnnnnnnnnnnnnnnnnnnnnnnnnnnnnnnnnnnnnnnnnnnnnnnnnnnnnnnnnnnnnnnnnnnnnnnnnnnnnnnnnnnnnnnnnnnnnnnnnnnnnnnnnnnnnnnnnnnnnnnnnnnnnnnnnnnnnnnnnnnnnnnnnncatcccagccagagtcattataccaagtagcagagaagtaaatgtgggatggaagacgaaagaaaagagctaacgcagtggtctgcagccatgtttaaaaactctctctccagtctayacctgcctttagtgtaggagtgaggggcagtagaagtgttgaaaaggacctttagtccaggcataccctgtacctcatcttcactatcagtaaaacaaggatatttatgaggaaaggggaagggatttaacatcagtcaggattaagtcaatggtagtgcattgcatgatggtgtaaggaaactgcttgtgatttacctttttttcaaaatgatgatacctagagccatgcttgctatgagagagccctggggaaaggaaaagaaagaaagagaaagacaaaacagaaggtcagcatga

SEQ ID NO: 67402 - DNA, 600 bp, Chicken  19866894337080_1
gtggtgctaagaatgcctagttttacatcttcgttccgaaactcggagaacaaaaaaggtgttctgcatgacttcctcaagctggatcttgctctgcctcttggcacacaccatcatttttcaggtacatttttttccccgctgctagctgcgctgcagggcaccatctcctaggtcatcatcaaagggtttctttgtcagccaggcaagctggctccttcatcctctgcaaagccagagccaggccgctcccactgacatccaccatggtcccgtgccagacccgcagcgatacgttgygctgctctccatattccggcagacccgtgccagttcgccttatctgatattctggctccatgagaacgagtccctcatgactcacgtccacctcatgcctgatgtgcacgggaaggagctgtttttcaagccgggtcccacaaactccttgcttctcacagagctgtctactggaaaacacggaacacatacgcgttcaatgcaccctctatgggctctgctgggaatagcacttgtgcgggtgagaaagtgactttggaatgatggtggaactgaggcagaacctacaaactagttttc

SEQ ID NO: 67403 - DNA, 599 bp, Chicken  19866894337082_1
  misc_feature (1)..(117): n is any nucleotide
nnnnnnnnnnnnnnnnnnnnnnnnnnnnnnnnnnnnnnnnnnnnnnnnnnnnnnnnnnnnnnnnnnnnnnnnnnnnnnnnnnnnnnnnnnnnnnnnnnnnnnnnnnnnnnnnnnnnntagactccttagttgtctttaggaaggttatcatctcagggaatcactgctatcaaaaagattattcttaaaagctgtggagttacttattcagtctgtcaaggctcgttacattagaagactccatgacagaatatctaagaaatctatctttttgttcatggaaggaaatgatggtcccastaaggaaaccgcagatttaattatacagtagatttcctcacagacaaaatttccagtgacctcggtatgtcagcacttgctttcaaatcttattcctcagcactgactttggtttttgcttgctaaaacacttcaagtgaggctgttcgtccaaagcagttctcccagccccaggtctgcacccctaattctctttgaactgtatttgcttgcagagaagacagtggaattccgtgtttaatgtaacactggtggaagcatgcccttaattgttgcgttaaattctttattaagcatta

SEQ ID NO: 67404 - DNA, 600 bp, Chicken  19866894337096_1
aatgcaaaccactgagggccaaaccaagttctagcaacatcaccaacaacatgcagggagactcttggagagcccagttttgctgtgcctaccgagttcctgagggtgttcaggaagtgcatagatgtggcactgcgggacctggctagcgggcatggtggagatgggttggcggttagactagatgatcttagtggccttttccaaccttaatgattctatgattctaaaaatggttttctttgtttctgagacattgtgaaaagcgctgttcaaatccttttcataaaaaaaaatgaygtggtgtcttcatgttctcacagttcgtaaaattgttcctttattgcaaaatcaagaagtaagttttcccatggagcagtttcaaatggcactacctgtatgtgctgttgatgagggtaagatgaacacatgaaagacaggtcagacttcagaagaggaattaaaagtcagaccgccccacatcctsaagtctctaaattgttggaggagtgtggttatgaactcaaaatgtgtcttgtagttgcttactgagatgatttaccctttttcccccaagtattctgcttgagttctgggcta

SEQ ID NO: 67405 - DNA, 600 bp, Chicken  19866894337096_2
atcttagtggccttttccaaccttaatgattctatgattctaaaaatggttttctttgtttctgagacattgtgaaaagcgctgttcaaatccttttcataaaaaaaaatgaygtggtgtcttcatgttctcacagttcgtaaaattgttcctttattgcaaaatcaagaagtaagttttcccatggagcagtttcaaatggcactacctgtatgtgctgttgatgagggtaagatgaacacatgaaagacaggtcagacttcagaagaggaattaaaagtcagaccgccccacatcctsaagtctctaaattgttggaggagtgtggttatgaactcaaaatgtgtcttgtagttgcttactgagatgatttaccctttttcccccaagtattctgcttgagttctgggctattaattctcatacagagacatctccctgcatccaggctcagtgatcaactttgaaaccacatcttcactttcatcctcagcgacagctgtcagtgggctcagttcagtgaacaacttattctgcacattagcattcaacattttgggtgaaatcttctcccagtgcacagtacaaacagcctttctg

SEQ ID NO: 67406 - DNA, 405 bp, Chicken  19866894337096_3
atccaacagatacttattattcactgaatctcaaccccacatgtatatttaccactaagtgttaattagcaatatgagaatccaccacagagaaacagtttcacttagttcaggataagcagcagggtgggataagcaattaatgtgggttgtatcacatttgagaagcagagagcaggctgataggaagacataacccctctgtgattcacagcacttaagcactgtgatgtggcaagctttgaatatctccttttgaagaatatctggttagaactatctgaacaaaagggaaaaaarcacttgttatgcctcagtgattgcatggagtcacactgtgtgctgctcccaggtacccaagaaactgtgttccagccccaccgaggttaggagccttcatgtcag

SEQ ID NO: 67407 - DNA, 600 bp, Chicken  19866894337106_1
tcactgcaggctttgaaattaccataaacagattcagagaatggcacagagggatgtttcagtggattttaacacttgtgctgtatctggacagtgagcttttctaaaggaaaagataacaaaaaaagcagaacacaaagcaactactttgtaggggtttttggtttttactgaatgaatgtatctgtaagtgatatgacttgccagcagttttgtctggtacctaaaatggaaataatggtatttgaaggaaagcggccatttaaaatattagactcagatcagtgttgctaataacayttcaggacctgcttgctccaaagcgttacttctaattacatatcgactacaacggaaccgttgcacaaatttaasagttgtccactgacaaacgtaggyatggttggccatgtaatccatgggaagttaatttcagtttacatgcatatgtacatggggtgtatttttggtttgaaagtttcctttttttttgttttgcttgcttcctttctttattgctttacaacctaatctgactgtaggcttgtgttcggttttcaccccctttcacatacttgagaaaactggaatgcatgactc

SEQ ID NO: 67408 - DNA, 600 bp, Chicken  19866894337106_2
ttgtgctgtatctggacagtgagcttttctaaaggaaaagataacaaaaaaagcagaacacaaagcaactactttgtaggggtttttggtttttactgaatgaatgtatctgtaagtgatatgacttgccagcagttttgtctggtacctaaaatggaaataatggtatttgaaggaaagcggccatttaaaatattagactcagatcagtgttgctaataacayttcaggacctgcttgctccaaagcgttacttctaattacatatcgactacaacggaaccgttgcacaaatttaasagttgtccactgacaaacgtaggyatggttggccatgtaatccatgggaagttaatttcagtttacatgcatatgtacatggggtgtatttttggtttgaaagtttcctttttttttgttttgcttgcttcctttctttattgctttacaacctaatctgactgtaggcttgtgttcggttttcaccccctttcacatacttgagaaaactggaatgcatgactcgagttactttaaggagcttggttgggttttgagaaaatacgtataagcatttagataccaaatgaataaagtgta

SEQ ID NO: 67409 - DNA, 600 bp, Chicken  19866894337106_3
ttttctaaaggaaaagataacaaaaaaagcagaacacaaagcaactactttgtaggggtttttggtttttactgaatgaatgtatctgtaagtgatatgacttgccagcagttttgtctggtacctaaaatggaaataatggtatttgaaggaaagcggccatttaaaatattagactcagatcagtgttgctaataacayttcaggacctgcttgctccaaagcgttacttctaattacatatcgactacaacggaaccgttgcacaaatttaasagttgtccactgacaaacgtaggyatggttggccatgtaatccatgggaagttaatttcagtttacatgcatatgtacatggggtgtatttttggtttgaaagtttcctttttttttgttttgcttgcttcctttctttattgctttacaacctaatctgactgtaggcttgtgttcggttttcaccccctttcacatacttgagaaaactggaatgcatgactcgagttactttaaggagcttggttgggttttgagaaaatacgtataagcatttagataccaaatgaataaagtgtaaaatctccttcgtgcaggatgtta

SEQ ID NO: 67410 - DNA, 600 bp, Chicken  19866894337108_1
tcactgggtagcagcaggcatgcaaaacagtttcatttcagcagtgtctgccagaaaataccaagaagcagcctcatggctacaaagactcagcacccaacgtaaaactaatctggaagtgaagaaaggtggcatgaagggtaatccaactttgcattttcctcccatctcccctctgcttggcccaattttgcagcacctgaacacttgaggcagaaggcagaccccttctattcataggaagtctagcatatagagaatagccacagtgtgccatgcagagccacagtaattttcttytaaaggaatttctttctctgcaaagtgatacacttcatttttgaggtttttggtcaatctgaatatagtaaaggggatgagatacagcatgacttgtttcaccttaagtagcgtgacagcgtgcttctttcctgacttggtccatatcggcatcattcccagttttaccgcaacaacaccaactctgacagaatctgcagatcagaagagagcacagctgcaactccatgcttaacatttaaaagaaggcatctcacaacggacagaactcctggtgaggtctcagacttgttctgctgt

SEQ ID NO: 67411 - DNA, 600 bp, Chicken  19866894337128_1
gctgagcaggacgagaagtcccccggcagaacacaggaggggcagctgtgccaaagctgcccacgtcccggagcagagcgggatgccatgcgcctcttccacagctcccacccaaccagagccagagcagccgagtcagcatcaccacacagctccttctgagctcagtactgtgatgatggaattaaggaacaacacatcttcaagaaaaaaatgtcaagctgtgcagatttgtgcacattttgaagagtagaaagcagaattcacagttcagactgtggaaagtgatgtggatgatgmagaatggaataaaatattgagatgtttttatgtgactaaagagtcatagaatgaatcacagaagggcttgggttggaaaggacctcaaggatcatcaagtccgagcccctgccacaggcaggggttaaaattataggagaaagctggtttgtgatgaagctgacaggaagagcacaggaatatgaagtgaaataggaaggataggactgcaagtggtgaatgtgaagcttgctttgttagaaggaggaatggagaaagaataagagacctgaatggatatggtggaaaaataaaaggcta

SEQ ID NO: 67412 - DNA, 600 bp, Chicken  19866894337130_1
tcacagacagtggatgtataaacagatccaaaagagaactaacaggggctgtgccctccaacactcgtcagtgtgaggcggtgtgaggtgaatggctcagggaaagaggcaaggcacctgtgctccccacagagacaccgtgaaccgaagggaatcggggctggagcaagtgatgaatagaaaagctatttgttctgctcctgcagctgtgcacagcctaggcctgttttggagtgaaggcctggcagcagcagcaggccggactgcagggctgtctccttggctgctccctgccagggyggtctggctctccagataacgtgccagtgaggacgcgagggctcggtgatactccgctaaatttagattcctggcgttttcttgtgctgaagtagggcgggctgctgttcagccagcatgctttggctggatcagaaactagctgatgtcaggttccgtcagcctgtgtaagatggtgacagctgcagcgttagccggcatgatgggtgcgttgggatgtctgactcagcatgtggtggagtgctctcctaactcacgttgtgtggaacaaagttcccttctggaaagctgacacctcag

SEQ ID NO: 67413 - DNA, 600 bp, Chicken  19866894337131_1
cagtttctcatttgacagaaaagcctgtgcaatggcagtataaaagctccgtgctacaccactgccttctcctggctcatctttaaaagtaacttttactctgtggacagccattggggtggtggcacacctgcgaccaaaatgattgttgagctgcctcatggtctgctgaattagaagatctctgtctcgatcaacctattaaaaaaaaaaccaaaaggttttctgttctttatcaatcatcatattgagagaatttgagcttcacaaggaagtgtctggacacttctgcatagattmaaaaactaccaaatagataatgaaaaactacaccatwaktgcaataaggtttaagacaactgcttgcagattctgaaacacagtttcttctattaagttagtgcagtgtcttatggtgcaacttctaatgagacaaactaacattttttacctccagtgttaaatccctggattgctggtttctaagtttttccatctccctgcggaactttgattccttcacttcaaagccacctaattcagtcaggatcttaaaataaaaaataaaaccgaaatcagaataagagaagttcacagtta

SEQ ID NO: 67414 - DNA, 600 bp, Chicken  19866894337131_2
gtataaaagctccgtgctacaccactgccttctcctggctcatctttaaaagtaacttttactctgtggacagccattggggtggtggcacacctgcgaccaaaatgattgttgagctgcctcatggtctgctgaattagaagatctctgtctcgatcaacctattaaaaaaaaaaccaaaaggttttctgttctttatcaatcatcatattgagagaatttgagcttcacaaggaagtgtctggacacttctgcatagattmaaaaactaccaaatagataatgaaaaactacaccatwaktgcaataaggtttaagacaactgcttgcagattctgaaacacagtttcttctattaagttagtgcagtgtcttatggtgcaacttctaatgagacaaactaacattttttacctccagtgttaaatccctggattgctggtttctaagtttttccatctccctgcggaactttgattccttcacttcaaagccacctaattcagtcaggatcttaaaataaaaaataaaaccgaaatcagaataagagaagttcacagttaattggaaaagtaattgttctcataataaaaaatacat

SEQ ID NO: 67415 - DNA, 600 bp, Chicken  19866894337131_3
ataaaagctccgtgctacaccactgccttctcctggctcatctttaaaagtaacttttactctgtggacagccattggggtggtggcacacctgcgaccaaaatgattgttgagctgcctcatggtctgctgaattagaagatctctgtctcgatcaacctattaaaaaaaaaaccaaaaggttttctgttctttatcaatcatcatattgagagaatttgagcttcacaaggaagtgtctggacacttctgcatagattmaaaaactaccaaatagataatgaaaaactacaccatwaktgcaataaggtttaagacaactgcttgcagattctgaaacacagtttcttctattaagttagtgcagtgtcttatggtgcaacttctaatgagacaaactaacattttttacctccagtgttaaatccctggattgctggtttctaagtttttccatctccctgcggaactttgattccttcacttcaaagccacctaattcagtcaggatcttaaaataaaaaataaaaccgaaatcagaataagagaagttcacagttaattggaaaagtaattgttctcataataaaaaatacatac

SEQ ID NO: 67416 - DNA, 600 bp, Chicken  19866894337131_4
tacttctatttttacttcacctcttgcctccaaggaagttcttgatttccaacaaactggactatcacccaactacactccagaagaatgcatagagctcatgtgactatggttaattacttgatcacaagctaagcaaggtgcgagttaaaatatactatggaacactgacagataaaaccaatacactttaaataataaagcctgttatctacagcaaggtaatctgattataaatcctcttgagaggtctttccacatattgtacagtgttaaccaacacaacttggcttaatatayagggaattctacacactaagcccagtcctacaatgccctagagtgcagccagttaaaaatggcttttgcctaccgtgctaaccagttaccacatattagcatatgaaggagctaataacttgatatgcatttggaacraacaaagaacgagtaagagtacttagcagcaattgcagtggaggaaaaaagccttcaaaataaattgaatatgaaagtctggcagattctgatatttttcttctcagtgaaatgctgacataatgaagtccttcctcctctgaccagtaaacaagytgtgag

SEQ ID NO: 67417 - DNA, 600 bp, Chicken  19866894337131_5
aggtgcgagttaaaatatactatggaacactgacagataaaaccaatacactttaaataataaagcctgttatctacagcaaggtaatctgattataaatcctcttgagaggtctttccacatattgtacagtgttaaccaacacaacttggcttaatatayagggaattctacacactaagcccagtcctacaatgccctagagtgcagccagttaaaaatggcttttgcctaccgtgctaaccagttaccacatattagcatatgaaggagctaataacttgatatgcatttggaacraacaaagaacgagtaagagtacttagcagcaattgcagtggaggaaaaaagccttcaaaataaattgaatatgaaagtctggcagattctgatatttttcttctcagtgaaatgctgacataatgaagtccttcctcctctgaccagtaaacaagytgtgagctcagtttacttagattagacattgtctccagcctgagaagtttcagtaatttaggtaagttaatttttccaattcacagttcttctcaaaatgtggtcaygagaaagaggcatgttatattccacactttccgcctc

SEQ ID NO: 67418 - DNA, 600 bp, Chicken  19866894337131_6
atatayagggaattctacacactaagcccagtcctacaatgccctagagtgcagccagttaaaaatggcttttgcctaccgtgctaaccagttaccacatattagcatatgaaggagctaataacttgatatgcatttggaacraacaaagaacgagtaagagtacttagcagcaattgcagtggaggaaaaaagccttcaaaataaattgaatatgaaagtctggcagattctgatatttttcttctcagtgaaatgctgacataatgaagtccttcctcctctgaccagtaaacaagytgtgagctcagtttacttagattagacattgtctccagcctgagaagtttcagtaatttaggtaagttaatttttccaattcacagttcttctcaaaatgtggtcaygagaaagaggcatgttatattccacactttccgcctcaggtgaaacaaagatggaaaaactttctgtatgtcactcctccttttatgtaaaaatgcatcacagctgtcctttttgaacaggaagagcagactggacattyatactgaagtgctaattataaaccttaagattttcaataaaatagtacttttc

SEQ ID NO: 67419 - DNA, 600 bp, Chicken  19866894337131_7
tatgaaggagctaataacttgatatgcatttggaacraacaaagaacgagtaagagtacttagcagcaattgcagtggaggaaaaaagccttcaaaataaattgaatatgaaagtctggcagattctgatatttttcttctcagtgaaatgctgacataatgaagtccttcctcctctgaccagtaaacaagytgtgagctcagtttacttagattagacattgtctccagcctgagaagtttcagtaatttaggtaagttaatttttccaattcacagttcttctcaaaatgtggtcaygagaaagaggcatgttatattccacactttccgcctcaggtgaaacaaagatggaaaaactttctgtatgtcactcctccttttatgtaaaaatgcatcacagctgtcctttttgaacaggaagagcagactggacattyatactgaagtgctaattataaaccttaagattttcaataaaatagtacttttcagttctatgttacaatccccaagctcgtaaatgtaactccttgctcctacagctgtgcttgagaatcccctactgagacttaggattttatgtattgttataccagc

SEQ ID NO: 67420 - DNA, 563 bp, Chicken  19866894337131_8
tcagtgaaatgctgacataatgaagtccttcctcctctgaccagtaaacaagytgtgagctcagtttacttagattagacattgtctccagcctgagaagtttcagtaatttaggtaagttaatttttccaattcacagttcttctcaaaatgtggtcaygagaaagaggcatgttatattccacactttccgcctcaggtgaaacaaagatggaaaaactttctgtatgtcactcctccttttatgtaaaaatgcatcacagctgtcctttttgaacaggaagagcagactggacattyatactgaagtgctaattataaaccttaagattttcaataaaatagtacttttcagttctatgttacaatccccaagctcgtaaatgtaactccttgctcctacagctgtgcttgagaatcccctactgagacttaggattttatgtattgttataccagctgcaaatcttagcactgattttagcagttctaggttttaaatattcacaaatacttaagcatgtaatttttatgaagccagtcaaatgaactttaatttcatg

SEQ ID NO: 67421 - DNA, 600 bp, Chicken  19866894337135_1
tcataaagtgaataacagctctgatcctgtcatatgagatttttcaatacctttaaatttaagaaacttggttctctccattctggacagaaatgttccgtgataccattttaaaagttgcagtagctttatggctttatgtagtaccttgatctctacccatttaattgctattcttgtgtaacacccattttgtatacattagtaaatatcactctcaccagatgtttactttggggatttggacagcacctgtgaattactggaatctaactgtattttcctactcccgtttcgaaygtatagctcagatatactcagaaattttcaactgaattacatttgacaggttctacatgattcatgatgaataaaaaatattctttattgaaactgtcagaataaaattaaagaactgacatttttttctgtttcttttgcttcaggaatgactggcaattacctactaacaaaccctcttcttcgaccacacggcactaacaacccctataacacattgctcgctgaaactggtgtatgtaatgccccttcagctcctgtgtttaactcaccaggtgtgcttatacttcctgaataaaa

SEQ ID NO: 67422 - DNA, 600 bp, Chicken  19866894337136_1
gttattttgtctttgccttcctctccattccagcttcacagttttctgtgtgaagaacaactactgtaagccaagagccagtttcccatctgccttacggctgctcagcagcagcaggagaacaatctgcaccatgacacatttctataccatatcccttgtttttatgactgttgcatgcaagaacatgctttgatgcattctttggtcctgcagggcctgtactgtttccagaggttacacaatcaatacaacgctgattcaaaaagtctatttctttgggaatggttagtaaaggaraggagtgagaaggaaaggaaatttgacctccgagcaacctatatgcagctatcagtcatacagcattagaggattatttaagcttttatgttcagtgtcatctaatgaaaatgcataagagctggcgactgatgcaaatacaagacagaaaactgcacatcattacactatttataattcacatgaatttcagactctgtttaaagtcaactgacaacacagaactcttcagacaagagttgaaaatggctcctgaagatacagctgcagatctttgcgcagtgataacttgcactttct

SEQ ID NO: 67423 - DNA, 599 bp, Chicken  19866894337138_1
  misc_feature (1)..(128): n is any nucleotide
nnnnnnnnnnnnnnnnnnnnnnnnnnnnnnnnnnnnnnnnnnnnnnnnnnnnnnnnnnnnnnnnnnnnnnnnnnnnnnnnnnnnnnnnnnnnnnnnnnnnnnnnnnnnnnnnnnnnnnnnnnnnnnnnggggatttgggcccgttttggggtgaaattgaaagagatggggatggaaatgggggattgaagcccattttggggtgagatggagagatgcggtgacagaaatggtggacttgggcccactttggggtgaaatggagcgatgcggtgacagaaacgggggatttgggcccaygttggggtgccagggggttattttgtcccattttgggggtctccaggacgcagctggaggagtccatgatggtgcggctgagcgagagccgccagcagagggcgctgcgccgcctccgggccatgggagccgtcaacctggactccatcacccactttggggacacggccgccctcctgggaccccaagatcaggtgggtgtggcccttagccccgccccctcgcccttagccccgcccctttgcccccagtttcacctcctattggtcgcaggagtcgctgccgccgccccccaaaaa

SEQ ID NO: 67424 - DNA, 579 bp, Chicken  19866894337140_1
  misc_feature (1)..(28): n is any nucleotide
nnnnnnnnnnnnnnnnnnnnnnnnnnnnctggtgtgtcctatccacagctgacccgccgtgagttccaaactagtgcagtttcccgggatattgacactgctgctaagttcattggtgctggtgctgccacagtcggggtggctggttcaggagcaggtattgggacagtgtttggcagcttgatcattggctatgccaggtaagtaagatgccaggctggcttgaatttattcctttctagcactaagcttggtagaggagtgaagctttttctggagcttatgttctattctatacaygtagcgtgtagaatcacatactttaactgaagcattccttcctccctggaatgtagaaggaatgttatattccatcattctattaaaacaaataagaaagtgcctgaactgtttgaatccaccttatacttactattggatgatgaagaagctctgtggagctctgcctcctcctagaaggaatgaaacactagtcatcaatggcaactgttgcttggtaccaccagggcaggtgaaactagccattggggttttatgtggctactggcaatcactaaa

SEQ ID NO: 67425 - DNA, 599 bp, Chicken  19866894337142_1
  misc_feature (1)..(181): n is any nucleotide
nnnnnnnnnnnnnnnnnnnnnnnnnnnnnnnnnnnnnnnnnnnnnnnnnnnnnnnnnnnnnnnnnnnnnnnnnnnnnnnnnnnnnnnnnnnnnnnnnnnnnnnnnnnnnnnnnnnnnnnnnnnnnnnnnnnnnnnnnnnnnnnnnnnnnnnnnnnnnnnnnnnnnnnnnnnnnnnnnnnnnaatgagtctctcacgtctgggacactgccacgtgacttgggaaaagaaaatgttaagggagaagcagggaggcaggctggagccccagtgctctggctgcagcagaaagctaagtcttmgattggggagagccagagttaatggaaaacacaagaacattaaatatggactttgcaaagagaaatgttgtcaggctttattctttcttcctttgaaagtcaaagggagccccttagagctcatctctttggacttcagagaagcggctgagacggcatcaaagggagatcagcaaactggagacactgctgctaaaatgcgttacaaagcaggaaggaaccgaaccaactccaagggcagcggtgaaaagcagtgctgatggagggagggtgagcctggggaggagtgaacgctgcgg

SEQ ID NO: 67426 - DNA, 600 bp, Chicken  19866894337142_2
ggctttattctttcttcctttgaaagtcaaagggagccccttagagctcatctctttggacttcagagaagcggctgagacggcatcaaagggagatcagcaaactggagacactgctgctaaaatgcgttacaaagcaggaaggaaccgaaccaactccaagggcagcggtgaaaagcagtgctgatggagggagggtgagcctggggaggagtgaacgctgcggggccttaagggctggctgctgagattcctatttccacgtgtggcacaagcagtgccggcagtgctgggtcaccwtggggcagcrgctcycaggtgagcagggatgctcctggcagcaccrctccctgccasggtcctcacacactcagtgccattcaccaagccaatgacacaggcgttgcttcaccgtggtcggagcccttggctcataaaataggagcttgggtttcctgcctttcatcaagtcaggagcccttcaggatccagctcattgagggaagataacatctcttggcgcgcgctctttcctcacttgtaggttaacttcattgttcagcctctgcgcagcacataatacatctcacccctggtaat

SEQ ID NO: 67427 - DNA, 600 bp, Chicken  19866894337142_3
tttcttcctttgaaagtcaaagggagccccttagagctcatctctttggacttcagagaagcggctgagacggcatcaaagggagatcagcaaactggagacactgctgctaaaatgcgttacaaagcaggaaggaaccgaaccaactccaagggcagcggtgaaaagcagtgctgatggagggagggtgagcctggggaggagtgaacgctgcggggccttaagggctggctgctgagattcctatttccacgtgtggcacaagcagtgccggcagtgctgggtcaccwtggggcagcrgctcycaggtgagcagggatgctcctggcagcaccrctccctgccasggtcctcacacactcagtgccattcaccaagccaatgacacaggcgttgcttcaccgtggtcggagcccttggctcataaaataggagcttgggtttcctgcctttcatcaagtcaggagcccttcaggatccagctcattgagggaagataacatctcttggcgcgcgctctttcctcacttgtaggttaacttcattgttcagcctctgcgcagcacataatacatctcacccctggtaatatccagcaaa

SEQ ID NO: 67428 - DNA, 600 bp, Chicken  19866894337142_4
tcctttgaaagtcaaagggagccccttagagctcatctctttggacttcagagaagcggctgagacggcatcaaagggagatcagcaaactggagacactgctgctaaaatgcgttacaaagcaggaaggaaccgaaccaactccaagggcagcggtgaaaagcagtgctgatggagggagggtgagcctggggaggagtgaacgctgcggggccttaagggctggctgctgagattcctatttccacgtgtggcacaagcagtgccggcagtgctgggtcaccwtggggcagcrgctcycaggtgagcagggatgctcctggcagcaccrctccctgccasggtcctcacacactcagtgccattcaccaagccaatgacacaggcgttgcttcaccgtggtcggagcccttggctcataaaataggagcttgggtttcctgcctttcatcaagtcaggagcccttcaggatccagctcattgagggaagataacatctcttggcgcgcgctctttcctcacttgtaggttaacttcattgttcagcctctgcgcagcacataatacatctcacccctggtaatatccagcaaatttcc

SEQ ID NO: 67429 - DNA, 600 bp, Chicken  19866894337142_5
ctcatctctttggacttcagagaagcggctgagacggcatcaaagggagatcagcaaactggagacactgctgctaaaatgcgttacaaagcaggaaggaaccgaaccaactccaagggcagcggtgaaaagcagtgctgatggagggagggtgagcctggggaggagtgaacgctgcggggccttaagggctggctgctgagattcctatttccacgtgtggcacaagcagtgccggcagtgctgggtcaccwtggggcagcrgctcycaggtgagcagggatgctcctggcagcaccrctccctgccasggtcctcacacactcagtgccattcaccaagccaatgacacaggcgttgcttcaccgtggtcggagcccttggctcataaaataggagcttgggtttcctgcctttcatcaagtcaggagcccttcaggatccagctcattgagggaagataacatctcttggcgcgcgctctttcctcacttgtaggttaacttcattgttcagcctctgcgcagcacataatacatctcacccctggtaatatccagcaaatttcccgactgatgtggatggataccagccaggcac

SEQ ID NO: 67430 - DNA, 600 bp, Chicken  19866894337142_6
ggacttcagagaagcggctgagacggcatcaaagggagatcagcaaactggagacactgctgctaaaatgcgttacaaagcaggaaggaaccgaaccaactccaagggcagcggtgaaaagcagtgctgatggagggagggtgagcctggggaggagtgaacgctgcggggccttaagggctggctgctgagattcctatttccacgtgtggcacaagcagtgccggcagtgctgggtcaccwtggggcagcrgctcycaggtgagcagggatgctcctggcagcaccrctccctgccasggtcctcacacactcagtgccattcaccaagccaatgacacaggcgttgcttcaccgtggtcggagcccttggctcataaaataggagcttgggtttcctgcctttcatcaagtcaggagcccttcaggatccagctcattgagggaagataacatctcttggcgcgcgctctttcctcacttgtaggttaacttcattgttcagcctctgcgcagcacataatacatctcacccctggtaatatccagcaaatttcccgactgatgtggatggataccagccaggcaccaccagttata

SEQ ID NO: 67431 - DNA, 599 bp, Chicken  19866894337143_1
  misc_feature (1)..(139): n is any nucleotide
nnnnnnnnnnnnnnnnnnnnnnnnnnnnnnnnnnnnnnnnnnnnnnnnnnnnnnnnnnnnnnnnnnnnnnnnnnnnnnnnnnnnnnnnnnnnnnnnnnnnnnnnnnnnnnnnnnnnnnnnnnnnnnnnnnnnnnnnnnnaaaacccaccatttttatgtatggatggttgtctaattagttgggtgctaacagtgtcaacggtttataggctggtttggcccaattctgtgactagtggggtggagggatacacagatcctggaaagaggtatgggaaaaggggtagagagatgggcccygaaacaaaaacagtggcaacaatctgaggaggaagaaactaatttactaaataaaatactggaatgtaagataaacacatacaatataactagaattgaagctaatatatcaagtataatgatagaaagagtrtctgaaagctgaaggccttacactratgcagaggtgagatgcgcggctgggacgagcagcagggaagagagcctgatgatcgaaaagggaaaagagaatgtcaggtgacctactaaggcyttatatctgttccccctgagcagaaatgataacagaacagcgaaca

SEQ ID NO: 67432 - DNA, 599 bp, Chicken  19866894337143_2
  misc_feature (1)..(6): n is any nucleotide
nnnnnnaaaacccaccatttttatgtatggatggttgtctaattagttgggtgctaacagtgtcaacggtttataggctggtttggcccaattctgtgactagtggggtggagggatacacagatcctggaaagaggtatgggaaaaggggtagagagatgggcccygaaacaaaaacagtggcaacaatctgaggaggaagaaactaatttactaaataaaatactggaatgtaagataaacacatacaatataactagaattgaagctaatatatcaagtataatgatagaaagagtrtctgaaagctgaaggccttacactratgcagaggtgagatgcgcggctgggacgagcagcagggaagagagcctgatgatcgaaaagggaaaagagaatgtcaggtgacctactaaggcyttatatctgttccccctgagcagaaatgataacagaacagcgaacagtcttctgaggaatgtagtagttcttttcttctgggacagctgccctgaactggagtattaactctttgactcccagcgcacaacatgatgttatgatgtggcatattgataacccaaaattataaaactatg

SEQ ID NO: 67433 - DNA, 600 bp, Chicken  19866894337143_3
tatggatggttgtctaattagttgggtgctaacagtgtcaacggtttataggctggtttggcccaattctgtgactagtggggtggagggatacacagatcctggaaagaggtatgggaaaaggggtagagagatgggcccygaaacaaaaacagtggcaacaatctgaggaggaagaaactaatttactaaataaaatactggaatgtaagataaacacatacaatataactagaattgaagctaatatatcaagtataatgatagaaagagtrtctgaaagctgaaggccttacactratgcagaggtgagatgcgcggctgggacgagcagcagggaagagagcctgatgatcgaaaagggaaaagagaatgtcaggtgacctactaaggcyttatatctgttccccctgagcagaaatgataacagaacagcgaacagtcttctgaggaatgtagtagttcttttcttctgggacagctgccctgaactggagtattaactctttgactcccagcgcacaacatgatgttatgatgtggcatattgataacccaaaattataaaactatgacaaacagtgtttggcatccaaagat

SEQ ID NO: 67434 - DNA, 600 bp, Chicken  19866894337143_4
cagatcctggaaagaggtatgggaaaaggggtagagagatgggcccygaaacaaaaacagtggcaacaatctgaggaggaagaaactaatttactaaataaaatactggaatgtaagataaacacatacaatataactagaattgaagctaatatatcaagtataatgatagaaagagtrtctgaaagctgaaggccttacactratgcagaggtgagatgcgcggctgggacgagcagcagggaagagagcctgatgatcgaaaagggaaaagagaatgtcaggtgacctactaaggcyttatatctgttccccctgagcagaaatgataacagaacagcgaacagtcttctgaggaatgtagtagttcttttcttctgggacagctgccctgaactggagtattaactctttgactcccagcgcacaacatgatgttatgatgtggcatattgataacccaaaattataaaactatgacaaacagtgtttggcatccaaagattaagatggaaattcagaaaattctctgctttgcagaatccacactattctggacaacaactaacgcaaaacaaaaacaaacaactatcaccacca

SEQ ID NO: 67435 - DNA, 600 bp, Chicken  19866894337145_1
gtgtgtgtatgtgggtttgttgttgtctttttgcttttcttatcaacagctgcacaagcatttaatttcaaacgggagtgtatctgtttttcttgacccagtagcaataactgaaacacagtcaaaaggactgcaggatcttcacagaggaaccagatctgtatttttagggaatgactgatagaaaataaccagcttaaaggatcctacctagagaaaactgcctctggtttacctgccttggagttagggagaagtagtgttaccccaaaaacggttcactttagcatttttttcacwgakgacacagaagatactgaagttctaatgatgtgtttgggaaagcacagtgtcattcattatgtactcgtcactgaaatatcctaccatgcctcatatgctcatcattaaaggattcatatgtttcttccttttctgaggcactttcttctccccttaatttattacaccagcaaaagaaaattggacttcagtttgataaaagagctctattgtgcatcacatgaggaagctgcagtctgtggctcagctggaatgaaagagaatactgcaaagactttcacgtgctttctgagcaaa

SEQ ID NO: 67436 - DNA, 600 bp, Chicken  19866894337145_2
tgtgtatgtgggtttgttgttgtctttttgcttttcttatcaacagctgcacaagcatttaatttcaaacgggagtgtatctgtttttcttgacccagtagcaataactgaaacacagtcaaaaggactgcaggatcttcacagaggaaccagatctgtatttttagggaatgactgatagaaaataaccagcttaaaggatcctacctagagaaaactgcctctggtttacctgccttggagttagggagaagtagtgttaccccaaaaacggttcactttagcatttttttcacwgakgacacagaagatactgaagttctaatgatgtgtttgggaaagcacagtgtcattcattatgtactcgtcactgaaatatcctaccatgcctcatatgctcatcattaaaggattcatatgtttcttccttttctgaggcactttcttctccccttaatttattacaccagcaaaagaaaattggacttcagtttgataaaagagctctattgtgcatcacatgaggaagctgcagtctgtggctcagctggaatgaaagagaatactgcaaagactttcacgtgctttctgagcaaacgc

SEQ ID NO: 67437 - DNA, 403 bp, Chicken  19866894337145_3
cagcaaaagaaaattggacttcagtttgataaaagagctctattgtgcatcacatgaggaagctgcagtctgtggctcagctggaatgaaagagaatactgcaaagactttcacgtgctttctgagcaaacgcaatcacaactcctctaaaacagtcaagaaaaacagcatatggaaaagcacttacaaaatgtcacacagcaagctctctgagtagcatcttgtttggatgctgcatcttaacatccctttttgctctctgtattccaaaagaaacccccactgctttttaggagaaaktagtgtgaagttgcattgattttagactgtgcgctgtgatttctgaagtgctttgagggagatgaaccagcttttcatgaagaaaatttgcccattgtactct

SEQ ID NO: 67438 - DNA, 599 bp, Chicken  19866894337156_1
  misc_feature (1)..(76): n is any nucleotide
nnnnnnnnnnnnnnnnnnnnnnnnnnnnnnnnnnnnnnnnnnnnnnnnnnnnnnnnnnnnnnnnnnnnnnnnnnnntgcctagtttgagagaaatgctgaatgttgaaccgaagcggtgggatctgtgtgcctttcctattctctcatgctttagagcttttccagtatttgtaagcaaattggatggtcactgaggcaggcatttagaagtcgggctcctgctttgtatgagagaccctgctagagacattattccttgcttctgatgttgtacagtgattattttaatgaattatacrgtgtgaaattgctgcagctacagcatttggtccattcctgtcccagtctcagtgtggctcttctgttcacctgaagcgatgaagagcttcatcagagagacctccagagtatttggatgttgctctggagctcagagatcagggtcacaaatgcaaggcccaaattgtggggaaatgcctcagtcatgtcaattttctcttccaggctgctccatcagatagtgataagcaatgtctctcttccctgcctttcctgctgtgttttgcgtgttacttttgtgtcycttgtgttaatacgt

SEQ ID NO: 67439 - DNA, 600 bp, Chicken  19866894337156_2
tttaatgaattatacrgtgtgaaattgctgcagctacagcatttggtccattcctgtcccagtctcagtgtggctcttctgttcacctgaagcgatgaagagcttcatcagagagacctccagagtatttggatgttgctctggagctcagagatcagggtcacaaatgcaaggcccaaattgtggggaaatgcctcagtcatgtcaattttctcttccaggctgctccatcagatagtgataagcaatgtctctcttccctgcctttcctgctgtgttttgcgtgttacttttgtgtcycttgtgttaatacgtgatgtgaatctaaaccaatttcaggtctggtgtttcagttgtcagtgaccttaaaacataggacatgtagtgtcagactgttaccagastccttgccatttatttgcagtggcagattgcttaaattcttaagaacttttagcaactttcttttttccccaatttgttaattttaggactgaagaagacaagagactgaattatctgaattatgcttctgcaacagaactgggtttctcctcgttggacatggcagagcctggggaagtctttcattttttttgt

SEQ ID NO: 67440 - DNA, 575 bp, Chicken  19866894337156_3
tcatcagagagacctccagagtatttggatgttgctctggagctcagagatcagggtcacaaatgcaaggcccaaattgtggggaaatgcctcagtcatgtcaattttctcttccaggctgctccatcagatagtgataagcaatgtctctcttccctgcctttcctgctgtgttttgcgtgttacttttgtgtcycttgtgttaatacgtgatgtgaatctaaaccaatttcaggtctggtgtttcagttgtcagtgaccttaaaacataggacatgtagtgtcagactgttaccagastccttgccatttatttgcagtggcagattgcttaaattcttaagaacttttagcaactttcttttttccccaatttgttaattttaggactgaagaagacaagagactgaattatctgaattatgcttctgcaacagaactgggtttctcctcgttggacatggcagagcctggggaagtctttcattttttttgttttcttgatgttgcaagcagctgatctggaagccaggaggggtcaccagtttgtctggaaaacaggtaggaatgagatg

SEQ ID NO: 67441 - DNA, 599 bp, Chicken  19866894337161_1
  misc_feature (1)..(186): n is any nucleotide
nnnnnnnnnnnnnnnnnnnnnnnnnnnnnnnnnnnnnnnnnnnnnnnnnnnnnnnnnnnnnnnnnnnnnnnnnnnnnnnnnnnnnnnnnnnnnnnnnnnnnnnnnnnnnnnnnnnnnnnnnnnnnnnnnnnnnnnnnnnnnnnnnnnnnnnnnnnnnnnnnnnnnnnnnnnnnnnnnnnnnnnnnnatatttctactaaggaaaaggctcttcacagaactttgcaaaggaaagtggactatccaggcagctgagaaggaacctgttcttctgtcaagaaaacacagaatttggacaaargtgcatygtggagtgtgtcaagacccaaaggggtttgctccccagtctgcagctacttacagtccatgatccttccagctaaggactctgcactgaatcccgcgaagaccacggtgtgaacagcaccaatcctggcacaagccagcatggctgccacagacaggggggacacggacatatagatggcaaccttgtcccccttctgtatcccatatttcttcagggtgttggcaagacggcacgtcagatccagaagttccctgcagcacagaagcaatgttgtcacacgagtgcacaac

SEQ ID NO: 67442 - DNA, 599 bp, Chicken  19866894337161_2
  misc_feature (1)..(179): n is any nucleotide
nnnnnnnnnnnnnnnnnnnnnnnnnnnnnnnnnnnnnnnnnnnnnnnnnnnnnnnnnnnnnnnnnnnnnnnnnnnnnnnnnnnnnnnnnnnnnnnnnnnnnnnnnnnnnnnnnnnnnnnnnnnnnnnnnnnnnnnnnnnnnnnnnnnnnnnnnnnnnnnnnnnnnnnnnnnnnnnnnnnatatttctactaaggaaaaggctcttcacagaactttgcaaaggaaagtggactatccaggcagctgagaaggaacctgttcttctgtcaagaaaacacagaatttggacaaargtgcatygtggagtgtgtcaagacccaaaggggtttgctccccagtctgcagctacttacagtccatgatccttccagctaaggactctgcactgaatcccgcgaagaccacggtgtgaacagcaccaatcctggcacaagccagcatggctgccacagacaggggggacacggacatatagatggcaaccttgtcccccttctgtatcccatatttcttcagggtgttggcaagacggcacgtcagatccagaagttccctgcagcacagaagcaatgttgtcacacgagtgcacaacctgtttt

SEQ ID NO: 67443 - DNA, 514 bp, Chicken  19866894337161_3
ccttccagctaaggactctgcactgaatcccgcgaagaccacggtgtgaacagcaccaatcctggcacaagccagcatggctgccacagacaggggggacacggacatatagatggcaaccttgtcccccttctgtatcccatatttcttcagggtgttggcaagacggcacgtcagatccagaagttccctgcagcacagaagcaatgttgtcacacgagtgcacaacctgttttatacaggcagataaaaaaaggatgagcttgagctaagagaggtgttgtgcctctggatattgtygcctctgcggtaccaggcatgccaacctctgcaccttgaagtggcctgggatctggttggagccagaccgttcctgcccttggggaaaggagaaagtgggacagggagccacacctgctgtctatcacagaatatcccaagttggaagggaccctcaaggatcacagagtcctacctgtggccccacgcagcaccacccaaacccaaacccgat

SEQ ID NO: 67444 - DNA, 600 bp, Chicken  19866894337162_1
actttgctctatgtaatgaccgcttatctcaagaaaaagaggagtcgctgtcctaggtgactcccttctgaagggagcaggaagcctgatacaccaaccagacccatgccatagaaaagtctactgcctcactggggcttgggcctggataagagacattagtagaaaactcactagcttggtatggccctatgattattttccattattgttttttgatgttggcaactatgaagtagcaaaaaagttcaagggcaatcaaagagacttcagggccttagcataattatttaaaggatyggggacacaggcagtctattttcctctgtcctttcagtagaaggaaatagtaatgaaaggaacaggcagagctctttgatcagtacttgtgtgcgtgggtcgtggaatagtctagacagcaccaggtctcctggcacctgatgggatgtatctttctcagtgtgaggtctgtacaggacttagcagggcttattgatagacctttaaaatagatttgaagggagaaagggataaagccaggctcaccagtgataagctatggtatggcacaccaaaatttgagagtgagatccttcagtc

SEQ ID NO: 67445 - DNA, 599 bp, Chicken  19866894337163_1
  misc_feature (1)..(274): n is any nucleotide
nnnnnnnnnnnnnnnnnnnnnnnnnnnnnnnnnnnnnnnnnnnnnnnnnnnnnnnnnnnnnnnnnnnnnnnnnnnnnnnnnnnnnnnnnnnnnnnnnnnnnnnnnnnnnnnnnnnnnnnnnnnnnnnnnnnnnnnnnnnnnnnnnnnnnnnnnnnnnnnnnnnnnnnnnnnnnnnnnnnnnnnnnnnnnnnnnnnnnnnnnnnnnnnnnnnnnnnnnnnnnnnnnnnnnnnnnnnnnnnnnnnnnnnnnnnnnnnnnnnnnnnnnnnnnnnnnntctgtgattctatgaaaatgaggctytggggttaaagcatacagttttactcagcagtggtcaggaacaagctgaaacacaggaattattaggaaagagggagaaaacagaacaaacaatccccttatgatatgacatgaactcaggatgtgcctacatcttgaacgctttgtacagctctgaaccctctacatcctttttggagagaagacctggccaacgttcaaaaatggttaataaggtctggaaccacttctgtacaaagaaaagaccaagactcttcagcctggaaacgacagaactgacaagagatatgacagcagtt

SEQ ID NO: 67446 - DNA, 589 bp, Chicken  19866894337163_2
tcaggatgtgcctacatcttgaacgctttgtacagctctgaaccctctacatcctttttggagagaagacctggccaacgttcaaaaatggttaataaggtctggaaccacttctgtacaaagaaaagaccaagactcttcagcctggaaacgacagaactgacaagagatatgacagcagttccatgtaggtgacactgagagctacaaacagcttttcactgcctcttctcatacaacacccagatgccatcaaacaaaaccagaggtaacaggtacaaactatgtctcaatgacagwgtattggggatggcaaagaatgacatcagtgaccagataccgacatcacatactacagacacagaactatcacttcttgcttgaaaccataatttacagaaagcagggaaattattgctgtacgttctctttagtctttaattcttccattctcttaattctaattcttctaattagaagaagaatctagaattagaagtctaattcttctaatttaatccttccttcaactaattcttccttagttagctcatcagaaccaggatccaggagtagctgaaccattgct

SEQ ID NO: 67447 - DNA, 600 bp, Chicken  19866894337171_1
ctctcttctacaggcaggtgagagaagccacaggtgtggatatcaacatgagagttggcattcattctgggaacgtactgtgtggtgtgattggcctccgcaagtggcagtacgatgtctggtctcacgatgtttccttagcgaaccgcatggagtctgcaggcgtacctgggtgaggccttccactctcactgctggctcactgtcatcacctttctcatagtcatggcttgtcagtctggaatctgtaactgttccgtgacacaaatcgctataatgatgtgaataaaatggacaaaygtgtacttgcctgagcagtaaaaacccagtattttctggttgttcttttttattgagctgtacaagtgtgttagcaggaaagtgactacttcttgacctctccttcatttcagaaagttgtgtggctttagcactgtgttattgagttgactggacctgtgttgtgtacatgggtaatgctatatttttaagcttcagtaaagaatagatacagaacataggttgacaaagaaaagctgcatatttacagcagttggtgtttctgttgrtatatcaattggttccctggtcacctgattt

SEQ ID NO: 67448 - DNA, 526 bp, Chicken  19866894337171_2
cgctataatgatgtgaataaaatggacaaaygtgtacttgcctgagcagtaaaaacccagtattttctggttgttcttttttattgagctgtacaagtgtgttagcaggaaagtgactacttcttgacctctccttcatttcagaaagttgtgtggctttagcactgtgttattgagttgactggacctgtgttgtgtacatgggtaatgctatatttttaagcttcagtaaagaatagatacagaacataggttgacaaagaaaagctgcatatttacagcagttggtgtttctgttgrtatatcaattggttccctggtcacctgatttatgttagctcaatattcaaacacttcacaacactgaactctcagaaattaaaataaaccctggtgaggagcgtccaaggaagaagaatttatagctgttgtgtattctctctgagctgtatttggcatgggcagaatgggaaggagaatgagtagtcctgggtggaagagctgaggcaaaatgtaccatgacttg

SEQ ID NO: 67449 - DNA, 599 bp, Chicken  19866894337172_1
  misc_feature (1)..(118): n is any nucleotide
nnnnnnnnnnnnnnnnnnnnnnnnnnnnnnnnnnnnnnnnnnnnnnnnnnnnnnnnnnnnnnnnnnnnnnnnnnnnnnnnnnnnnnnnnnnnnnnnnnnnnnnnnnnnnnnnnnnnnnactcgaggcttaaggaatgttacatgaattcttaacttcccaatgctgttacttaaccatatttttactttcaacccttatttccagctcataatgtgaaatcagctgaaacttaaaacatatccttaactaagtaggaggctctgctgagagaatgtctctgaagcaatagttcagaatawaggcatgttcaactactgaaatagaaagactttttgctactcaccattctgcaatttcagggtgaaggattttgttgttcacattaaatctgcaaaaagcaaaaatacaaacatcaacaagcagctaggcatagaaaagaagagaytgtagagtttgttgggtttgtttttttaaaaaatgtgccctccttgaggctgtgaaaacttgcaaaggcaaataatagaatggctcgggttggaagtgacctgaagggttatctagttccaactcccctgctatgtgcagggctgccaaccag

SEQ ID NO: 67450 - DNA, 600 bp, Chicken  19866894337172_2
ttcttaacttcccaatgctgttacttaaccatatttttactttcaacccttatttccagctcataatgtgaaatcagctgaaacttaaaacatatccttaactaagtaggaggctctgctgagagaatgtctctgaagcaatagttcagaatawaggcatgttcaactactgaaatagaaagactttttgctactcaccattctgcaatttcagggtgaaggattttgttgttcacattaaatctgcaaaaagcaaaaatacaaacatcaacaagcagctaggcatagaaaagaagagaytgtagagtttgttgggtttgtttttttaaaaaatgtgccctccttgaggctgtgaaaacttgcaaaggcaaataatagaatggctcgggttggaagtgacctgaagggttatctagttccaactcccctgctatgtgcagggctgccaaccagtagatctagcaccagctcaggctgcccagtgccccatccaacctagtcataaacacctccagggatggggcatccaccacctccctggacagtctgctccagcacctcaccatcctctcagtgaaaaacttccctaatcttaatctt

SEQ ID NO: 67451 - DNA, 600 bp, Chicken  19866894337174_1
gagaaaaggattcaatatctaaggttaatgcaaaattcacttcagggtgcaggggtaggaaaaaagctctggttatcaaatgtgctgataacacatatcgagttttgtcatagctatcagctgccaggagctaattcaagtctgggttacaactttggatagggttaaggtttgaagaaagaagatgtgaagaacacaatttcttctacattttccttagctaacatatatgatagataagatgttattctagatattcattgacttaagttgcattttgctgtaaatgctgccacatarctgtaattacatctattaatttgtaaactaatcatgactggatactgcagagctctgaaattagaaacaggttcatgacgtcaaagccttggcgcatctttcaatatatggatgcataatcactggatgaaataaagactagagttttaaggggttcttggctgttaggaaacccacttagaatcatagagtcgttaagattggataagayyaytaaaataatctagttcaggcatcaacccattaccaccatgcccactaaactatggctctctgccatgtctacacatttcttgaaca

SEQ ID NO: 67452 - DNA, 600 bp, Chicken  19866894337174_2
tttccttagctaacatatatgatagataagatgttattctagatattcattgacttaagttgcattttgctgtaaatgctgccacatarctgtaattacatctattaatttgtaaactaatcatgactggatactgcagagctctgaaattagaaacaggttcatgacgtcaaagccttggcgcatctttcaatatatggatgcataatcactggatgaaataaagactagagttttaaggggttcttggctgttaggaaacccacttagaatcatagagtcgttaagattggataagayyaytaaaataatctagttcaggcatcaacccattaccaccatgcccactaaactatggctctctgccatgtctacacatttcttgaacacctccagggttggtgactccatcacctcccagagcagcctgtgccaatgcctcaccactattttggagaagtaatttttcctaatgtccaattttcactggctgaatgcttcattgctagatgcttgtggattcttgaattaggaaaatagtgtttgaagtctacattgcttttttcatttttcagattttattgttcactcttcactgta

SEQ ID NO: 67453 - DNA, 600 bp, Chicken  19866894337174_3
ttccttagctaacatatatgatagataagatgttattctagatattcattgacttaagttgcattttgctgtaaatgctgccacatarctgtaattacatctattaatttgtaaactaatcatgactggatactgcagagctctgaaattagaaacaggttcatgacgtcaaagccttggcgcatctttcaatatatggatgcataatcactggatgaaataaagactagagttttaaggggttcttggctgttaggaaacccacttagaatcatagagtcgttaagattggataagayyaytaaaataatctagttcaggcatcaacccattaccaccatgcccactaaactatggctctctgccatgtctacacatttcttgaacacctccagggttggtgactccatcacctcccagagcagcctgtgccaatgcctcaccactattttggagaagtaatttttcctaatgtccaattttcactggctgaatgcttcattgctagatgcttgtggattcttgaattaggaaaatagtgtttgaagtctacattgcttttttcatttttcagattttattgttcactcttcactgtat

SEQ ID NO: 67454 - DNA, 600 bp, Chicken  19866894337174_4
ccttagctaacatatatgatagataagatgttattctagatattcattgacttaagttgcattttgctgtaaatgctgccacatarctgtaattacatctattaatttgtaaactaatcatgactggatactgcagagctctgaaattagaaacaggttcatgacgtcaaagccttggcgcatctttcaatatatggatgcataatcactggatgaaataaagactagagttttaaggggttcttggctgttaggaaacccacttagaatcatagagtcgttaagattggataagayyaytaaaataatctagttcaggcatcaacccattaccaccatgcccactaaactatggctctctgccatgtctacacatttcttgaacacctccagggttggtgactccatcacctcccagagcagcctgtgccaatgcctcaccactattttggagaagtaatttttcctaatgtccaattttcactggctgaatgcttcattgctagatgcttgtggattcttgaattaggaaaatagtgtttgaagtctacattgcttttttcatttttcagattttattgttcactcttcactgtattg

SEQ ID NO: 67455 - DNA, 600 bp, Chicken  19866894337174_5
cagggtgagagcagtaaaatacagaagaatctttttataatgttgaatgctgcatgaccatgaaaattaggaagatattttatgacagtctaatcttatttttcattatattcacctctatgtgttcacagattcagcaaatctctcagtttgggttctagcatggatttaggagataatcaaacatctagtataggtttgtagacctggagtatgatacaaagcagtattaaacgctagggctagtaaaactaatgcctctgtagaccaatttattgctatatgcttccagaattgccrtggcagatagattagtagagagggcagtgatacctctcagatttggggagctttgaaattaagttaaagaaattcaaaggttgaagttttatttcaggcttctgcaagagctttagagttaggaaatgacttgccaaaaactgaaatatgttgtttttagtgatctaaaattatagcttgagggttagagagctagctggtattgttttagggcaaaaagttacccttcattttagattatcaataaaaataagacatgttttaactggaaaaactgtataactattttatatacgtgct

SEQ ID NO: 67456 - DNA, 600 bp, Chicken  19866894337175_1
cagctattttttactcacagtcaaattataaggccacagtattattatattcaaatctcctttttcttggttacagaattcttatatgctttcctgctttttcttgagcactaaagaaaatactgtttttgaatgctatttctttactaatgtgaactttctattgatgcatttcctgtgctttaattcagtctgtgggcacaatattttctcacctgtgagatgacaagcttgctgatttttgagtattgtcttcttccatatatttcatatttctttaatggtgatttatcacaagakcatatgttcaactggaaccttttaaagaagttttaatagacactactgaactaaagaaatttctttaaaaaaaagaaatttccatttcttttctgttttcttccgaattattaagcatacacctttaacaaaattgttaactgtgcattcttgttttcctttaatttrtattctgaatagagaaaatagtcatatctgatggttttacaagtctgttggtcaaactgttgcctctgtgcttgtaactactgaagtgggagtagcatgatcacaaaaaacagagaatcaacagctcagatc

SEQ ID NO: 67457 - DNA, 600 bp, Chicken  19866894337175_2
gcatttcctgtgctttaattcagtctgtgggcacaatattttctcacctgtgagatgacaagcttgctgatttttgagtattgtcttcttccatatatttcatatttctttaatggtgatttatcacaagakcatatgttcaactggaaccttttaaagaagttttaatagacactactgaactaaagaaatttctttaaaaaaaagaaatttccatttcttttctgttttcttccgaattattaagcatacacctttaacaaaattgttaactgtgcattcttgttttcctttaatttrtattctgaatagagaaaatagtcatatctgatggttttacaagtctgttggtcaaactgttgcctctgtgcttgtaactactgaagtgggagtagcatgatcacaaaaaacagagaatcaacagctcagatctccctttgaaaatgagaaagtgcaatcttagaaggattcttccatttctttttactcctaacattgtcagttgtagatagaatcttactgttgtaggttgattttgctgtccattcagttaaaagcatacatatgcatgtatgtgcatctgtgtgttttcagcagata

SEQ ID NO: 67458 - DNA, 600 bp, Chicken  19866894337196_1
ccgttgtcaaatgttatttttttacattggctaggactgttctgtagttatttaatatcacagtctgtcgttacgtgattagtattttaaatacattaatgtggatttgagtcagctatcccagttttgcagtctgccccttcctacagatcatctacacacatatactccttgtttaagatgagggtctgtcttctaaaggagggacttttgtgtatccttaggatgtgttcttaaacacagacttgttacagacaaatcagggttataggtgtccctctctccttccagatgcctgaragacctcttagcatcacwcttstattcagttacatactttgtgtggttaccggtgctactcatagaaggaatattaggaaaatagcgtgtacttctaattcccctcagtgctacctagtaggaattgacttcagtatgtagttcatggcttgtgaacatttctgagactttggcctggtgtgtaactgcaggttgttgcagtgacttcttttaagcggcctgttgttctccaggtggaatggaaagattgtgtccaccaattttgaatacttcccgctctgctcctccctgctagctaaa

SEQ ID NO: 67459 - DNA, 600 bp, Chicken  19866894337196_2
tttttacattggctaggactgttctgtagttatttaatatcacagtctgtcgttacgtgattagtattttaaatacattaatgtggatttgagtcagctatcccagttttgcagtctgccccttcctacagatcatctacacacatatactccttgtttaagatgagggtctgtcttctaaaggagggacttttgtgtatccttaggatgtgttcttaaacacagacttgttacagacaaatcagggttataggtgtccctctctccttccagatgcctgaragacctcttagcatcacwcttstattcagttacatactttgtgtggttaccggtgctactcatagaaggaatattaggaaaatagcgtgtacttctaattcccctcagtgctacctagtaggaattgacttcagtatgtagttcatggcttgtgaacatttctgagactttggcctggtgtgtaactgcaggttgttgcagtgacttcttttaagcggcctgttgttctccaggtggaatggaaagattgtgtccaccaattttgaatacttcccgctctgctcctccctgctagctaaagagtggttctctgttttc

SEQ ID NO: 67460 - DNA, 600 bp, Chicken  19866894337196_3
tacattggctaggactgttctgtagttatttaatatcacagtctgtcgttacgtgattagtattttaaatacattaatgtggatttgagtcagctatcccagttttgcagtctgccccttcctacagatcatctacacacatatactccttgtttaagatgagggtctgtcttctaaaggagggacttttgtgtatccttaggatgtgttcttaaacacagacttgttacagacaaatcagggttataggtgtccctctctccttccagatgcctgaragacctcttagcatcacwcttstattcagttacatactttgtgtggttaccggtgctactcatagaaggaatattaggaaaatagcgtgtacttctaattcccctcagtgctacctagtaggaattgacttcagtatgtagttcatggcttgtgaacatttctgagactttggcctggtgtgtaactgcaggttgttgcagtgacttcttttaagcggcctgttgttctccaggtggaatggaaagattgtgtccaccaattttgaatacttcccgctctgctcctccctgctagctaaagagtggttctctgttttcaatg

SEQ ID NO: 67461 - DNA, 600 bp, Chicken  19866894337200_1
atttctagaactctaattcataatttcctttcagagataaagttcttgatatatcaacttatatactagtgaaatcattgttgagcaataaaagcatctataatttagcaatattaaattatcttgcaattaactcctggcatgggagaaagatctacctttgaactgctccatgaaaagtgctcatttcattgaaatatgttgtgggtgcctcaaaactaatgtctgtaactctcagattaatgcttcattcagtattttgaaaagaaactaatgaatctagatctagaattatactaratgtaaagtcaaagcaatcaaaatctaaacataaatgacctcacatatatgaggaatagatggagaatgggactcaactgattagctgatgatctcctcagagatcccaactacaaaaaaacgcaacacaattagctgccaattccaaaactgaaatctcagttgtgatcttgaaagtgtacatgctgacagttaaaaatttaacgtgcaaataaactcaattggctttgatgatctgctgtaaattatgctcattcctaaggtttttgtttatttattttagaagtgggacatgagtaa

SEQ ID NO: 67462 - DNA, 600 bp, Chicken  19866894337202_1
cgtaagcttgatattcctctttatagaaatagttgaacacattttagcaaaactgctaacagcaaagaaaattctcccccaccgcacaaacattctctcttcattctatggaataagataattgcaatacactctgcatgctgggtatatattttcatgtcagctagagaatcaaacccagagacagccaaatccagacaactatccaatggtcttctaacacatctacttcacagctggcactgccggaggtttccccagctgaactctgccagtcagtgccctcttcagattagcackgaagcctgctaagaaggtgatgtggaaatgctcacatgaccctacagatttacatttaaagaacataattttggcatagggtgcctagaacctctacaatagtcagatttgcttggcagtttaaaagtctgtactttagattattgtgaggattcaggatctctattaacagtacaagttagatgtctttgtaaaaacaatcatctaactggttttgaaggcacgatgtctgatgaaaacagcttttgctgcactaaaaacttaactggtactcgatccgaaccctcacaattccctcgg

SEQ ID NO: 67463 - DNA, 600 bp, Chicken  19866894337212_1
tatttaacatataatgcaaactaataacaattaagtcagcagcagcggaatgctctcagcaagccacactgcagactattatgcagcttagccacagtggaatgaccatttattaatctgccaacatatgcagcccaattggctacttatggtcatcggccaatcagcatgcaaggatttacacagagacagtgctgttacttttagcagttgtgaaacatctatttattctggacttgcagactggccattcccaccagacctttcactgcttgctcataattctccctaccagacacrcaggattaatcctcatatccaacaaaatcagcagtgaaattcctcttgatttgcaaaaagccaacaattcagcccgagtttcaccttgtgcttagatgatgtaatacagtttgaycaaaacaggccaagaggtggatgaaatttaagcttgttaagcagtgcctttgagctacttctgtttaacctgtacagttatatttaaatcttgtttaaatccatcaaatgagcatcagccctactgccccttctcatcctcgagtggggacagatagattgagctgagctgagagctgagctttt

SEQ ID NO: 67464 - DNA, 526 bp, Chicken  19866894337212_2
atctgccaacatatgcagcccaattggctacttatggtcatcggccaatcagcatgcaaggatttacacagagacagtgctgttacttttagcagttgtgaaacatctatttattctggacttgcagactggccattcccaccagacctttcactgcttgctcataattctccctaccagacacrcaggattaatcctcatatccaacaaaatcagcagtgaaattcctcttgatttgcaaaaagccaacaattcagcccgagtttcaccttgtgcttagatgatgtaatacagtttgaycaaaacaggccaagaggtggatgaaatttaagcttgttaagcagtgcctttgagctacttctgtttaacctgtacagttatatttaaatcttgtttaaatccatcaaatgagcatcagccctactgccccttctcatcctcgagtggggacagatagattgagctgagctgagagctgagctttttaattcctcttctatcagataaaaaatactgctgcaacttg

SEQ ID NO: 67465 - DNA, 599 bp, Chicken  19866894337220_1
  misc_feature (1)..(76): n is any nucleotide
nnnnnnnnnnnnnnnnnnnnnnnnnnnnnnnnnnnnnnnnnnnnnnnnnnnnnnnnnnnnnnnnnnnnnnnnnnnngaagtcaacctgcagcactcggtgcagtccccctttttgtagcaactgcagtcaggtcacaactattttaatttcagccagacccacagttattctcataaaagtctgtatgtgacagtgatttcacccttttagcattctctctcatttattccgtatttcctctccaaaactttttgccagcgatcctagcagaggatttcagggcaatgagaaaacacacraaactcaccttacactgaaaatagcctgctttccatcccctgcagaaaagtttttttaatttatccctagtttagagaccacatcagaaacacgccatgattcaaaattcacaaagtggcctccaaaagattaggagatcataaatattctgctgaaaataacccaaagccaacagattacggtagtctcggcaaattctgtaaaattttcttcastttctcctwaaaagcmttgagattaactactggaartcatattctagactctgtttcaaagatagttcccacattacgtcaga

SEQ ID NO: 67466 - DNA, 600 bp, Chicken  19866894337220_2
tctctcatttattccgtatttcctctccaaaactttttgccagcgatcctagcagaggatttcagggcaatgagaaaacacacraaactcaccttacactgaaaatagcctgctttccatcccctgcagaaaagtttttttaatttatccctagtttagagaccacatcagaaacacgccatgattcaaaattcacaaagtggcctccaaaagattaggagatcataaatattctgctgaaaataacccaaagccaacagattacggtagtctcggcaaattctgtaaaattttcttcastttctcctwaaaagcmttgagattaactactggaartcatattctagactctgtttcaaagatagttcccacattacgtcagaagaccagtatacaaagaactggctcttgaagtaggaactctaactgaaaatctgaaagttaagtcttaaaatgttgtatcatctttttgaaatctccttctgaaatggctaaactaaataccttacttcttcattggtcactggtaggcacacaagctccattactacttcacacaacagaatttgaagtagtagcacacctatctaattggaagtg

SEQ ID NO: 67467 - DNA, 600 bp, Chicken  19866894337220_3
tattccgtatttcctctccaaaactttttgccagcgatcctagcagaggatttcagggcaatgagaaaacacacraaactcaccttacactgaaaatagcctgctttccatcccctgcagaaaagtttttttaatttatccctagtttagagaccacatcagaaacacgccatgattcaaaattcacaaagtggcctccaaaagattaggagatcataaatattctgctgaaaataacccaaagccaacagattacggtagtctcggcaaattctgtaaaattttcttcastttctcctwaaaagcmttgagattaactactggaartcatattctagactctgtttcaaagatagttcccacattacgtcagaagaccagtatacaaagaactggctcttgaagtaggaactctaactgaaaatctgaaagttaagtcttaaaatgttgtatcatctttttgaaatctccttctgaaatggctaaactaaataccttacttcttcattggtcactggtaggcacacaagctccattactacttcacacaacagaatttgaagtagtagcacacctatctaattggaagtgtcgtagtta

SEQ ID NO: 67468 - DNA, 600 bp, Chicken  19866894337220_4
tatttcctctccaaaactttttgccagcgatcctagcagaggatttcagggcaatgagaaaacacacraaactcaccttacactgaaaatagcctgctttccatcccctgcagaaaagtttttttaatttatccctagtttagagaccacatcagaaacacgccatgattcaaaattcacaaagtggcctccaaaagattaggagatcataaatattctgctgaaaataacccaaagccaacagattacggtagtctcggcaaattctgtaaaattttcttcastttctcctwaaaagcmttgagattaactactggaartcatattctagactctgtttcaaagatagttcccacattacgtcagaagaccagtatacaaagaactggctcttgaagtaggaactctaactgaaaatctgaaagttaagtcttaaaatgttgtatcatctttttgaaatctccttctgaaatggctaaactaaataccttacttcttcattggtcactggtaggcacacaagctccattactacttcacacaacagaatttgaagtagtagcacacctatctaattggaagtgtcgtagttatgcatac

SEQ ID NO: 67469 - DNA, 600 bp, Chicken  19866894337220_5
ttgccagcgatcctagcagaggatttcagggcaatgagaaaacacacraaactcaccttacactgaaaatagcctgctttccatcccctgcagaaaagtttttttaatttatccctagtttagagaccacatcagaaacacgccatgattcaaaattcacaaagtggcctccaaaagattaggagatcataaatattctgctgaaaataacccaaagccaacagattacggtagtctcggcaaattctgtaaaattttcttcastttctcctwaaaagcmttgagattaactactggaartcatattctagactctgtttcaaagatagttcccacattacgtcagaagaccagtatacaaagaactggctcttgaagtaggaactctaactgaaaatctgaaagttaagtcttaaaatgttgtatcatctttttgaaatctccttctgaaatggctaaactaaataccttacttcttcattggtcactggtaggcacacaagctccattactacttcacacaacagaatttgaagtagtagcacacctatctaattggaagtgtcgtagttatgcatacagaacatacacactaggatc

SEQ ID NO: 67470 - DNA, 599 bp, Chicken  19866894337221_1
  misc_feature (1)..(22): n is any nucleotide
nnnnnnnnnnnnnnnnnnnnnnctgaatatctgtaatttactgtattcaatcagcatcataatttttcttgtaaggtactaagcccatgtagagctcagtgataacagccataaatcatggagacaattcacaaatgaggagtgcttaacttaatcacccagtactgaccagagtaaatgtcactagctgataggagaaaaggtgtaccttatttctgtggtcattagcacctgtaagagaaatgaggtttgtcaatgtgagattgctggactcttgaattggtggataacttttcattkttgtccactgtgaaatatttataaaataaatcacgggtaaactattatttagtttttgtatgttcacagatctcaagcaggaaaaaaawcactgcagtaacccagactgtgcctccaaagaacatyctcttctctctggtatcagtatgagaaaaawtcgcaatttgtatttaatgatgccaagtgagaaggaatataccacaactatctgtaaattatttgacagaggttactcacctctgttaaatagcgccctatttcttccttgaattcacccagctttagtccctatttggtca

SEQ ID NO: 67471 - DNA, 600 bp, Chicken  19866894337221_2
tagagctcagtgataacagccataaatcatggagacaattcacaaatgaggagtgcttaacttaatcacccagtactgaccagagtaaatgtcactagctgataggagaaaaggtgtaccttatttctgtggtcattagcacctgtaagagaaatgaggtttgtcaatgtgagattgctggactcttgaattggtggataacttttcattkttgtccactgtgaaatatttataaaataaatcacgggtaaactattatttagtttttgtatgttcacagatctcaagcaggaaaaaaawcactgcagtaacccagactgtgcctccaaagaacatyctcttctctctggtatcagtatgagaaaaawtcgcaatttgtatttaatgatgccaagtgagaaggaatataccacaactatctgtaaattatttgacagaggttactcacctctgttaaatagcgccctatttcttccttgaattcacccagctttagtccctatttggtcatgttattccttcatctgtcrgataaaagggctctgtgtagtattacttttctttyttcccatgtacgatttaaactatttatttaaaaaa

SEQ ID NO: 67472 - DNA, 600 bp, Chicken  19866894337221_3
attcacaaatgaggagtgcttaacttaatcacccagtactgaccagagtaaatgtcactagctgataggagaaaaggtgtaccttatttctgtggtcattagcacctgtaagagaaatgaggtttgtcaatgtgagattgctggactcttgaattggtggataacttttcattkttgtccactgtgaaatatttataaaataaatcacgggtaaactattatttagtttttgtatgttcacagatctcaagcaggaaaaaaawcactgcagtaacccagactgtgcctccaaagaacatyctcttctctctggtatcagtatgagaaaaawtcgcaatttgtatttaatgatgccaagtgagaaggaatataccacaactatctgtaaattatttgacagaggttactcacctctgttaaatagcgccctatttcttccttgaattcacccagctttagtccctatttggtcatgttattccttcatctgtcrgataaaagggctctgtgtagtattacttttctttyttcccatgtacgatttaaactatttatttaaaaaatacaaacttcacaacgactggaagcagttgtttgcta

SEQ ID NO: 67473 - DNA, 600 bp, Chicken  19866894337221_4
cccagtactgaccagagtaaatgtcactagctgataggagaaaaggtgtaccttatttctgtggtcattagcacctgtaagagaaatgaggtttgtcaatgtgagattgctggactcttgaattggtggataacttttcattkttgtccactgtgaaatatttataaaataaatcacgggtaaactattatttagtttttgtatgttcacagatctcaagcaggaaaaaaawcactgcagtaacccagactgtgcctccaaagaacatyctcttctctctggtatcagtatgagaaaaawtcgcaatttgtatttaatgatgccaagtgagaaggaatataccacaactatctgtaaattatttgacagaggttactcacctctgttaaatagcgccctatttcttccttgaattcacccagctttagtccctatttggtcatgttattccttcatctgtcrgataaaagggctctgtgtagtattacttttctttyttcccatgtacgatttaaactatttatttaaaaaatacaaacttcacaacgactggaagcagttgtttgctactgcagctcttgagaagatcatctgccaaag

SEQ ID NO: 67474 - DNA, 600 bp, Chicken  19866894337221_5
tataaaataaatcacgggtaaactattatttagtttttgtatgttcacagatctcaagcaggaaaaaaawcactgcagtaacccagactgtgcctccaaagaacatyctcttctctctggtatcagtatgagaaaaawtcgcaatttgtatttaatgatgccaagtgagaaggaatataccacaactatctgtaaattatttgacagaggttactcacctctgttaaatagcgccctatttcttccttgaattcacccagctttagtccctatttggtcatgttattccttcatctgtcrgataaaagggctctgtgtagtattacttttctttyttcccatgtacgatttaaactatttatttaaaaaatacaaacttcacaacgactggaagcagttgtttgctactgcagctcttgagaagatcatctgccaaagcagtagatgcaaattttatttttcatataactttttatgctaattattaatgaaaatttctcatcttcctgcattgttctataaatatagtagctttacattctaatctgtaatctgagtattacaaattctaatcaagttgcttcccccatctaagcatca

SEQ ID NO: 67475 - DNA, 600 bp, Chicken  19866894337221_6
tttgtatgttcacagatctcaagcaggaaaaaaawcactgcagtaacccagactgtgcctccaaagaacatyctcttctctctggtatcagtatgagaaaaawtcgcaatttgtatttaatgatgccaagtgagaaggaatataccacaactatctgtaaattatttgacagaggttactcacctctgttaaatagcgccctatttcttccttgaattcacccagctttagtccctatttggtcatgttattccttcatctgtcrgataaaagggctctgtgtagtattacttttctttyttcccatgtacgatttaaactatttatttaaaaaatacaaacttcacaacgactggaagcagttgtttgctactgcagctcttgagaagatcatctgccaaagcagtagatgcaaattttatttttcatataactttttatgctaattattaatgaaaatttctcatcttcctgcattgttctataaatatagtagctttacattctaatctgtaatctgagtattacaaattctaatcaagttgcttcccccatctaagcatcatttagcagattaaatccctcagagcaaggcaaata

SEQ ID NO: 67476 - DNA, 599 bp, Chicken  19866894337227_1
  misc_feature (1)..(112): n is any nucleotide
nnnnnnnnnnnnnnnnnnnnnnnnnnnnnnnnnnnnnnnnnnnnnnnnnnnnnnnnnnnnnnnnnnnnnnnnnnnnnnnnnnnnnnnnnnnnnnnnnnnnnnnnnnnnnnnnggggaaaactgggattgtactggaaaacacatggtatctaaggaactgttcctgtgaccagaaaacacacgaaccttatagcaggcaactacactgcttcaatgaaggagactgtaacaatccttgtctcactggtacacagagtacaagagactttagatcagcaagggaaccaaaaccaactgcamctgcagccaccagggaaaaacaacagcatctgttcagatctcatcatacctgggtggcacccagacatgtactgctggcagcagctgacacctctttcagggaggtatctgatctgaccttttaagggtttttaactgtctgctcattttactctccaaaatttcctgaaagcatttccaactctgcccttgattaatttgtatctcttgattttggcatggccaaacaaattgataaaggctgttccactgtacttgcaaaaagcaacaaggcacagttttaaatcacagaatattga

SEQ ID NO: 67477 - DNA, 600 bp, Chicken  19866894337234_1
cctgtttggtataagcacagctgaagactgaaagcttgtgcttctaaatgctacaagtctttcctatgacctttttggtatggcaaaatacaacactctgcattgctgttttctctttcagatgagcaggagacaaccggtgctataatctacacggtggaactgaagcgatacggcggtccgttgggaataaccatctctgggaccgaggaaccctttgatcccattgtcatttcgggcctgacaaaaagagggctggcagaaaggtgaggtttgggggtcagaagggccaaatcagcrtgggaagggattttaatgtttgcaaagktttgaggccagggtggtgctgcccacctggcttttcagacccatgtgcttggcatgtggggtggccaggactgtgcccttagggcagtgagagaggtttgaagcagggcactactggtagagtcagagcyagtgtgctgattgaacacagcagctgagagaatgtatttatctgcctctcttccactgagatgcttcctagtccatgatcttctatgccacagcttgcactgggagagtgcccacctgccctgaatctgtatccatctggtc

SEQ ID NO: 67478 - DNA, 600 bp, Chicken  19866894337234_2
tgaaagcttgtgcttctaaatgctacaagtctttcctatgacctttttggtatggcaaaatacaacactctgcattgctgttttctctttcagatgagcaggagacaaccggtgctataatctacacggtggaactgaagcgatacggcggtccgttgggaataaccatctctgggaccgaggaaccctttgatcccattgtcatttcgggcctgacaaaaagagggctggcagaaaggtgaggtttgggggtcagaagggccaaatcagcrtgggaagggattttaatgtttgcaaagktttgaggccagggtggtgctgcccacctggcttttcagacccatgtgcttggcatgtggggtggccaggactgtgcccttagggcagtgagagaggtttgaagcagggcactactggtagagtcagagcyagtgtgctgattgaacacagcagctgagagaatgtatttatctgcctctcttccactgagatgcttcctagtccatgatcttctatgccacagcttgcactgggagagtgcccacctgccctgaatctgtatccatctggtcaatgctcacrtgctgctaaactgcagtt

SEQ ID NO: 67479 - DNA, 600 bp, Chicken  19866894337234_3
ggaactgaagcgatacggcggtccgttgggaataaccatctctgggaccgaggaaccctttgatcccattgtcatttcgggcctgacaaaaagagggctggcagaaaggtgaggtttgggggtcagaagggccaaatcagcrtgggaagggattttaatgtttgcaaagktttgaggccagggtggtgctgcccacctggcttttcagacccatgtgcttggcatgtggggtggccaggactgtgcccttagggcagtgagagaggtttgaagcagggcactactggtagagtcagagcyagtgtgctgattgaacacagcagctgagagaatgtatttatctgcctctcttccactgagatgcttcctagtccatgatcttctatgccacagcttgcactgggagagtgcccacctgccctgaatctgtatccatctggtcaatgctcacrtgctgctaaactgcagttgatagccatggcattggtatggcctacagaaaccacagatyttggggctcttctggtccttgctggttgctcattctgttctgtatgaaggaatctcagtgtagggctgctcggaacagcagacatttat

SEQ ID NO: 67480 - DNA, 543 bp, Chicken  19866894337234_4
ttttaatgtttgcaaagktttgaggccagggtggtgctgcccacctggcttttcagacccatgtgcttggcatgtggggtggccaggactgtgcccttagggcagtgagagaggtttgaagcagggcactactggtagagtcagagcyagtgtgctgattgaacacagcagctgagagaatgtatttatctgcctctcttccactgagatgcttcctagtccatgatcttctatgccacagcttgcactgggagagtgcccacctgccctgaatctgtatccatctggtcaatgctcacrtgctgctaaactgcagttgatagccatggcattggtatggcctacagaaaccacagatyttggggctcttctggtccttgctggttgctcattctgttctgtatgaaggaatctcagtgtagggctgctcggaacagcagacatttatactgcataaaggtagctgcagatttaccttcagaagcctgggaggttgtctctgtgtgtgcctgggtctgaatatatgtgcatgcgtgggattta

SEQ ID NO: 67481 - DNA, 484 bp, Chicken  19866894337234_5
catgtgcttggcatgtggggtggccaggactgtgcccttagggcagtgagagaggtttgaagcagggcactactggtagagtcagagcyagtgtgctgattgaacacagcagctgagagaatgtatttatctgcctctcttccactgagatgcttcctagtccatgatcttctatgccacagcttgcactgggagagtgcccacctgccctgaatctgtatccatctggtcaatgctcacrtgctgctaaactgcagttgatagccatggcattggtatggcctacagaaaccacagatyttggggctcttctggtccttgctggttgctcattctgttctgtatgaaggaatctcagtgtagggctgctcggaacagcagacatttatactgcataaaggtagctgcagatttaccttcagaagcctgggaggttgtctctgtgtgtgcctgggtctgaatatatgtgcatgcgtgggattta

SEQ ID NO: 67482 - DNA, 600 bp, Chicken  19866894337239_1
aagttgccatgtatctgggtgaccctgtctctgttgcactgcagagaagagctctgcggtatgtgatttgctcaacaccgatgatagatgtggactaaagtggtgggatgaaaagcacctgggtcagaaacagtgtgtgaagtgcatagacagatgtagccttatgtaaataggtaataccattacataccaatcctcctcctctttctactcatcaccctcctctgcccttatgctttatgtccttatgcttgctgaagacctatatcaaaggttaactaaaggcaaccctggatttartaattgactctgaaccttgtttggttattatattttcttaaatgatcatcctcaggaaagttacatgttgtgcgatgtagttaaaataatctcataggaagaagcctaatttcatcattcatagaattttagtatcaccaaggttggaagagatcttcaagatgattcagtctaaatgtccaactaccgccactatttctccactaaaccatgtcccttagtacaacatctaaacttttcttgaacacttctagggatgatgactcaaccacccacctgggcagccaggtccaacacctg

SEQ ID NO: 67483 - DNA, 600 bp, Chicken  19866894337243_1
gcttaatgagcacagcaacagccatacaagaactggacaaaattaatacctgttttgctgtgaaaaatcactccacaaagaaattacacattctcaagcagtcaaaactcgctttgcagaattctgttaaactgcagcagatgagaaagagtgacgtcctaaagtgcaattttgtcaaggccacacaagtaaatacataaatttcgtaacacacaaaaatgtattaaaatgtcatttcaaaaactggtatcaaatcgaagctgctactcatatacactaattctcaacatcagttatctktgatgcaggaaacattttrccttgaacaacgtacaacaacataatactagggactgcaatgttaaagaaatctgaagtaaaagacaggaacatccagcagaaataaacacgtaaaaatcagcagactgaaatgcatatatttctttgaaacgatgttgcttacgtcacgcagacaaaaaaaaatcatgaactattttccagagaaaagtaaaaatgtacctggtagccttcggtcttcttttggcaccatttcaacagagcattcctctttgaaccaccatactcccgggctagggctgc

SEQ ID NO: 67484 - DNA, 600 bp, Chicken  19866894337243_2
agccatacaagaactggacaaaattaatacctgttttgctgtgaaaaatcactccacaaagaaattacacattctcaagcagtcaaaactcgctttgcagaattctgttaaactgcagcagatgagaaagagtgacgtcctaaagtgcaattttgtcaaggccacacaagtaaatacataaatttcgtaacacacaaaaatgtattaaaatgtcatttcaaaaactggtatcaaatcgaagctgctactcatatacactaattctcaacatcagttatctktgatgcaggaaacattttrccttgaacaacgtacaacaacataatactagggactgcaatgttaaagaaatctgaagtaaaagacaggaacatccagcagaaataaacacgtaaaaatcagcagactgaaatgcatatatttctttgaaacgatgttgcttacgtcacgcagacaaaaaaaaatcatgaactattttccagagaaaagtaaaaatgtacctggtagccttcggtcttcttttggcaccatttcaacagagcattcctctttgaaccaccatactcccgggctagggctgccaacgggtcctttctctcc

SEQ ID NO: 67485 - DNA, 600 bp, Chicken  19866894337245_1
caaagcacaacaggtcatttttcagagggctttttgcactagcagaatctgaaatctcagcttcacaaaattatctttcaagataaaaatataaaaaaccactatacacactctttaaattttaacaacataataaatttagaaaatgctcaaaatacaacgtttttctcacacattacaagtttttcttaaacatgaaggctgatccatatcatatgtaatagcatggtataataccattatacagtcatattttagacacactgatgtgtttatagatgttgggaatatgatatttgyaggatactgtgatctgaatgagagtattctattagtcttctctaatttccagtgaatttatcattattcctttgagatacacctcttccttttcatgaaccttaaaatagagtggtattttaatcatatattttgtatttcaaaacttcatatataaatgggtattttagaattatatgtctttctcctactgatctagattcctacctcagttacttccctcaagtacccagtgaccagaatgaaaaaaaaacaacacattttcatgctcattggccagttttagagcttacttttgca

SEQ ID NO: 67486 - DNA, 600 bp, Chicken  19866894337247_1
cccgccgggcctcagagccccgcgcagtgcggcctgcggcacccggcgctgtgctgcgtggctgtgccgggctgggggctgcgaattcatttagcggtggccgttgccaaatttattggattcgtctctccgttataagccataagctatgggactcgtggcttttttgacgtaggattgtattgatagctccagcacggtgttttcaatccgttttgcaacacaattggttaaataatccatttccgtgcttcatataactgcggtgggcttattcatctgtggcattcctgtctctgsgtttccctccccacaaacggtgctccaacacacccgtgcaggcgcgaaccgctggctctcatcaacctcaaaaagaagaacgaggagacgggggaggaggagctgagcgcccgcctrgagcactgcagggcgagggccacgcgccacatcttcctcatccgccactcgcagtacaacctggacggccgcgccgacaaggacaggactctgaccccgctgggtaggtaggcctggaggcgctgtgctcctcacctccggcactgcgatggatgtgagctgctgtcccagcagygcaggtcg

SEQ ID NO: 67487 - DNA, 600 bp, Chicken  19866894337247_2
ggattcgtctctccgttataagccataagctatgggactcgtggcttttttgacgtaggattgtattgatagctccagcacggtgttttcaatccgttttgcaacacaattggttaaataatccatttccgtgcttcatataactgcggtgggcttattcatctgtggcattcctgtctctgsgtttccctccccacaaacggtgctccaacacacccgtgcaggcgcgaaccgctggctctcatcaacctcaaaaagaagaacgaggagacgggggaggaggagctgagcgcccgcctrgagcactgcagggcgagggccacgcgccacatcttcctcatccgccactcgcagtacaacctggacggccgcgccgacaaggacaggactctgaccccgctgggtaggtaggcctggaggcgctgtgctcctcacctccggcactgcgatggatgtgagctgctgtcccagcagygcaggtcggtagcgcagctctccttcgggttttgctgcccaagctccgtccgtgttacggatcctttgtaacagaaaggtgtttttccatttttgatcatctaaatccaaacatttaaatttgct

SEQ ID NO: 67488 - DNA, 566 bp, Chicken  19866894337247_3
gtctctgsgtttccctccccacaaacggtgctccaacacacccgtgcaggcgcgaaccgctggctctcatcaacctcaaaaagaagaacgaggagacgggggaggaggagctgagcgcccgcctrgagcactgcagggcgagggccacgcgccacatcttcctcatccgccactcgcagtacaacctggacggccgcgccgacaaggacaggactctgaccccgctgggtaggtaggcctggaggcgctgtgctcctcacctccggcactgcgatggatgtgagctgctgtcccagcagygcaggtcggtagcgcagctctccttcgggttttgctgcccaagctccgtccgtgttacggatcctttgtaacagaaaggtgtttttccatttttgatcatctaaatccaaacatttaaatttgctttgtggcgttcaggaaacgctggcttgtgaaaaaaacataaggggaagtttccagttaccgtaagggttttgagcaggttttcctgctggccaatacagtttctttcctttggctgtagctttttgtcttaaactgagttc

SEQ ID NO: 67489 - DNA, 600 bp, Chicken  19866894337255_1
cataataagcacctcagataattagcaagcataccgctatctctcttcaaagcgatcagtggaattaatttggttgggtaaccatggctattttctagttcagcagccatatggtatttctgagtttagtgtgacttcctgtgagcagctcttaccgagtcagctgtgctctggtgtgaagtgcaacgaaaattaaacactcttggaaggtgtgaaaatgctctttctgatattaaaagaaaagacaggttgcttttctgccctaaagaaaagcacgttgctttgtggtgtaagagtgcrctgtaacctctaaattacatgtttagtgagaccgtaatgctaaaatagccttgcttggcactgagggttttaatcagaacttgtcagattcatgttttgttgtaaacaaagtacctcttaactcttaaaaatggaagctgtgtaactataacttacccttctaaagggatctctcctaagtgaagtaaaatacagtaatgagtcctggtattaatagaacaagacgaaatttccatctgaactatgattttaaggcttgcaattgtcaaaggctatctgtcaaataacttttgaaactcc

SEQ ID NO: 67490 - DNA, 599 bp, Chicken  19866894337256_1
  misc_feature (1)..(38): n is any nucleotide
nnnnnnnnnnnnnnnnnnnnnnnnnnnnnnnnnnnnnntagagcaaaagaaattgaaaccatggatctttgccatgaatctacattggcacatggccagttaagaactggaacaggttggtattagcagtagggaagcctgaatatgctcccatcatacctatgccagcagggctcttggtgcaatgacaagatgatagtcttgacagactgagaactttcttttttaaacacacaccaaaagagaggggggaggtttaagagggtgggagggagaagaaaagacacaaaaaagcttaaytctgctgatgtgacttctataatttgttgtcagtgatgccaccaatgttaattctggcagggttaattatgagaaattaaaaagctgctcagaacagactgtacccttcatactccaataaagaagcagctctgaagtgagaaaatttcttcattaatatacatccccaaagggctaccgcgtgcagctttctgaatatgaatcataaactcccagggaccctgcaggaagcaggggagataggattcagaggagactgaatcttacttttactgtttcaggagaatgatgctcaggct

SEQ ID NO: 67491 - DNA, 600 bp, Chicken  19866894337259_1
tcagcctctaacagagcaaatgcagctttttttggtgtgttcccccccccccataaaatcatgtctcactgaaatcatctggataactacctggctacctttctgcctgcgtggcaaaaggaacaggaatattaaggctcagcaaacagaacagccacatacaaagcccaaacacgtgccaaagctttactgattacttttaatgaaacctgggactcacctggtgcagaaaccaagatctggcatcgggtaaggatggccaggagaaagtcgttgtgtgagtggactgcatgaagacaracagctcattaggaacacattggtggtcacaggcaccggctcaaagtaggtctctgtgtcgcctcacagccctgctttcattattcacttagctayaaagtcacaacttccatataaagttttttaagagggtgtttgtttttcctcttcacataacccagaacctgctactagaaagaataccacactgcacaggtgcaagctggattgcttctcagtgtgccaagcaccaatcgtgcactagagcacactgcatggcaggtcaggtgcgctcagccagcaacaaagaggccttgctgt

SEQ ID NO: 67492 - DNA, 517 bp, Chicken  19866894337259_2
acctttctgcctgcgtggcaaaaggaacaggaatattaaggctcagcaaacagaacagccacatacaaagcccaaacacgtgccaaagctttactgattacttttaatgaaacctgggactcacctggtgcagaaaccaagatctggcatcgggtaaggatggccaggagaaagtcgttgtgtgagtggactgcatgaagacaracagctcattaggaacacattggtggtcacaggcaccggctcaaagtaggtctctgtgtcgcctcacagccctgctttcattattcacttagctayaaagtcacaacttccatataaagttttttaagagggtgtttgtttttcctcttcacataacccagaacctgctactagaaagaataccacactgcacaggtgcaagctggattgcttctcagtgtgccaagcaccaatcgtgcactagagcacactgcatggcaggtcaggtgcgctcagccagcaacaaagaggccttgctgtcctccctcccacg

SEQ ID NO: 67493 - DNA, 600 bp, Chicken  19866894337268_1
gatccggcagtagtcctgttgcacgacgttccgacggtccgaggccgaagggcagaagcagcgaggccgctcttgggcaacgagagggtgcaggtaccgggtgggtccaggaagaagccgccgagtaagtcagggaggaagcagcaggtctcaggtagcaggcccagggaagtccgtcagcatacggtccgtagagaaggatctgaaagcagaaacctcgagtctgtcgtggtgagggatctgatggcagaaacccttcactggtctgtcgtggtgagagataagcctctagtccgccgwggttgttggaccctcttttatcctccattttctcctgcctacgtgacattcctgggtgcttgagcaagagtcctgtgcatacctcctgagatggccatcttcctcgagataagtccacacaaaaagaccgtttcccggccattagcagcagcttatccctctctcgttgcccctggccttgtccatctgtgctcctcagaggatttcacaatccttagccaggacctgtccatcagtgtcctccagacagaagatttctctacctttgcccaggacttgcctggacttgttcctcagcaa

SEQ ID NO: 67494 - DNA, 600 bp, Chicken  19866894337269_1
ccagggctagctcagtgcaaagagaagcttgctgtggagttctcttatctggctgcttttcattcccagcatagcactggcagtgaccaaagaatgtggtgttctgaggacaggcagcagagcagggctaccagctgtgctgctgagtgacacaaggcatcagctgtgagtgagtggccaggtggatgtgcatatgtagtgagtggggtggtttggagcagctgtggccctccccagttgtctctatgtggtcactgtaccctcctgccctgcaaggaccttgtagcctcattctgctcygtaacagtacagctgaacagtatcagcaccagggagcagagggctgcgcctggtctcagtgttacactctgtgaagtgaggcaggccagaagccatcacctcaggacctgaatcccagcttcaggttttctgctctgaaataattcagcaggaaataaagagcctcacaggtggatttaggcagttcataagcctgcagggctggagtgcagagggccagggcagtacccagacaaagaggcaggagagtgctgatggtggctgtaatatttcaaaataggtttaaattttatttgtctt

SEQ ID NO: 67495 - DNA, 600 bp, Chicken  19866894337270_1
tctatgctggtgagcaggtttcaagtttggtgaagccttccccgctttttacaatttttgcttcaatttgtgaagttgatgcagctgtgctattactcctgagaacatgttagaaacccgtgtggtggttgatgtctgctacaaggagcacaggcttggagtcagagggaattgcatcccctatcagtgaggttggcaagtccctcccaagcaccatgccaccaccattacagatacctcctccctattgctgctgaccttctggaattgcttcttctggacatcgtgcttggtgctcawgtctctgtcacctcaacattaggcagcagcagtgtgagacctgagacagaccagtgagcatggtaacatgctgcttgcggacttggtgtgcaggtgaggtctcgtgccccaggagagcacaaaagtggtgttcctggagccacatttgagagcagtttgggatttacccactggcaaagcaaacaccccacctgtgtgtgctttcttgctttggctgggattgccaaagtgatggctgcagggagactcctcagcggaaagagaaggggtttccccaggagttctgtgtgtatgtgcact

SEQ ID NO: 67496 - DNA, 600 bp, Chicken  19866894337273_1
cttctctattccctttgcttagatctcacctgagttggaaacaaatgctttaactcgaactgcagtgtggcctatctccttcccgagctcccattaccattctagactctggctctatcattaaataatctataaagcatccaaagcatctcttgatcttttcttattaccctgcttcacccaaatgccacgagcatatgcatgctccaaccctctgcctcacttgctgtgtgtgcgccttggtttcacttacaaggaggcagaaagttgttccaaagatgaccaagctgagatacccaygcttttgttccccagcctgctgggaggctagaacttgactgtgggaatcacaaagcagaaaaatacacagtactagtattttaagatgagacagtttggccagacagtggcagtttcctttttttttyctggccatgactcagtctaagccagaattgcagaatgagtgatggaaattgcaaattcaatggctataggccagttaaatttgtaacatggtcagcaagaacaccccacttgtctaacacagatctattctttgcaaagcctttctgtgttttgcatgatattaagaataaa

SEQ ID NO: 67497 - DNA, 600 bp, Chicken  19866894337273_2
tctataaagcatccaaagcatctcttgatcttttcttattaccctgcttcacccaaatgccacgagcatatgcatgctccaaccctctgcctcacttgctgtgtgtgcgccttggtttcacttacaaggaggcagaaagttgttccaaagatgaccaagctgagatacccaygcttttgttccccagcctgctgggaggctagaacttgactgtgggaatcacaaagcagaaaaatacacagtactagtattttaagatgagacagtttggccagacagtggcagtttcctttttttttyctggccatgactcagtctaagccagaattgcagaatgagtgatggaaattgcaaattcaatggctataggccagttaaatttgtaacatggtcagcaagaacaccccacttgtctaacacagatctattctttgcaaagcctttctgtgttttgcatgatattaagaataaaaacagaaaaaaagcctttctaaatgaccccaaaaaccacagcttcccagcatacttgagagcctgataggcagtggtaatatttttgggcaaagtgatattgaagctaacaaagaaggttgattactc

SEQ ID NO: 67498 - DNA, 600 bp, Chicken  19866894337280_1
caggctccgggctgtgcttgcccatggtcagcaaggcccttcgggtggctctgagcgtgctttggttgttcaggctcctgggtgggcccctgtgagcaaggtgggcccttccagctgtctgagaagttgttgtatgtctgctgtaatgaggaacagtgtttggggaaggagggtgcaccgaggatccccagcgcctgaattcattcatagcacagatgcagactaaaaggccacttacaaacgtggctctgccagtaaagctgcacgtactttgagcacaggacgaggcccggggctccragtcctccagtgcatgggttctcactccagagggtgaaaactccgatccctcaaagaatgggagctcattacagtaaagcacataggctggcagcagcatagcagaaacactaaaacccaaagacagtcatagacctgcatcttccaacagctcgttatttctgtatacacagtggctgattctgacgaggtgtaaaggctaaaatgaggtagcaagcattgttttgcttttccccccttttggccctttaacttcttcctttcttaccaaagaaaagcaaatctactttttgagcctcc

SEQ ID NO: 67499 - DNA, 599 bp, Chicken  19866894337282_1
  misc_feature (1)..(50): n is any nucleotide
nnnnnnnnnnnnnnnnnnnnnnnnnnnnnnnnnnnnnnnnnnnnnnnnnntaggatgtgtgcatcagaccaaggatccagggctgtggttgaaatttttagtggtgttcgtaattcacatcccaagtaatgactggctgaggaacggagattggaaacaccaaaaaaaatcacacacactttttccttttatttcttcttctctcctacatcagagttgcagaagaaatatgcattcgtacgtaggtaaggacctgtttgcgtgtgtgggtagtaattccaacactcattttcatacccytgctcagtgatgcagataactaatttagcaaaaggcatgatacccagaaattgttatttggtagccttatagatgtgaaaaatgctcagtatttgcttctctaattttatctgtagccttcagctacaggagaattattaataagctctgtgttgtgtatctgcagatgttccaagatctcttcatgacgagttatatagcatactaaattttcatgcaggcattctctcctccaaaaaggtataaaataagaaaacttggataaatccaccacagcaactggaggaatatggttattt

SEQ ID NO: 67500 - DNA, 599 bp, Chicken  19866894337285_1
  misc_feature (1)..(135): n is any nucleotide
nnnnnnnnnnnnnnnnnnnnnnnnnnnnnnnnnnnnnnnnnnnnnnnnnnnnnnnnnnnnnnnnnnnnnnnnnnnnnnnnnnnnnnnnnnnnnnnnnnnnnnnnnnnnnnnnnnnnnnnnnnnnnnnnnnnnnnntggggtggttcatcctcctcccttcctacgacacagtgtgcatgtaactttttaattaaaatctgccttcccaaaggaggtggcagctcacacagcttccctggctacatttcgtcatggagagggtgctcaggctgcagccagtgctgctggaggtgtttaagrgacgtgtggacatggcacagatggacatggtttgaggggcgggctyggmtgattgatggttggacttggtgatcttgcaggtcttttccaacccaaatgatgctgtgattctatgatgaagacttgaattgtcaaaaataaaaatwaaaaaatcagctttccccaaaaaagcatgactgagaaagccaccagagcttgctggtgttggaaaacaccaaacctggtcacaggcaaatgttgcgtagaggtcagytgcctgaggraaatgcggagagagacagaaaggccccaaaatgact

SEQ ID NO: 67501 - DNA, 599 bp, Chicken  19866894337285_2
  misc_feature (1)..(89): n is any nucleotide
nnnnnnnnnnnnnnnnnnnnnnnnnnnnnnnnnnnnnnnnnnnnnnnnnnnnnnnnnnnnnnnnnnnnnnnnnnnnnnnnnnnnnnnnntggggtggttcatcctcctcccttcctacgacacagtgtgcatgtaactttttaattaaaatctgccttcccaaaggaggtggcagctcacacagcttccctggctacatttcgtcatggagagggtgctcaggctgcagccagtgctgctggaggtgtttaagrgacgtgtggacatggcacagatggacatggtttgaggggcgggctyggmtgattgatggttggacttggtgatcttgcaggtcttttccaacccaaatgatgctgtgattctatgatgaagacttgaattgtcaaaaataaaaatwaaaaaatcagctttccccaaaaaagcatgactgagaaagccaccagagcttgctggtgttggaaaacaccaaacctggtcacaggcaaatgttgcgtagaggtcagytgcctgaggraaatgcggagagagacagaaaggccccaaaatgacttgggtggtaagagcagtaattctcaactgagccttaactgacatgt

SEQ ID NO: 67502 - DNA, 599 bp, Chicken  19866894337285_3
  misc_feature (1)..(86): n is any nucleotide
nnnnnnnnnnnnnnnnnnnnnnnnnnnnnnnnnnnnnnnnnnnnnnnnnnnnnnnnnnnnnnnnnnnnnnnnnnnnnnnnnnnnnntggggtggttcatcctcctcccttcctacgacacagtgtgcatgtaactttttaattaaaatctgccttcccaaaggaggtggcagctcacacagcttccctggctacatttcgtcatggagagggtgctcaggctgcagccagtgctgctggaggtgtttaagrgacgtgtggacatggcacagatggacatggtttgaggggcgggctyggmtgattgatggttggacttggtgatcttgcaggtcttttccaacccaaatgatgctgtgattctatgatgaagacttgaattgtcaaaaataaaaatwaaaaaatcagctttccccaaaaaagcatgactgagaaagccaccagagcttgctggtgttggaaaacaccaaacctggtcacaggcaaatgttgcgtagaggtcagytgcctgaggraaatgcggagagagacagaaaggccccaaaatgacttgggtggtaagagcagtaattctcaactgagccttaactgacatgtctc

SEQ ID NO: 67503 - DNA, 600 bp, Chicken  19866894337285_4
atcctcctcccttcctacgacacagtgtgcatgtaactttttaattaaaatctgccttcccaaaggaggtggcagctcacacagcttccctggctacatttcgtcatggagagggtgctcaggctgcagccagtgctgctggaggtgtttaagrgacgtgtggacatggcacagatggacatggtttgaggggcgggctyggmtgattgatggttggacttggtgatcttgcaggtcttttccaacccaaatgatgctgtgattctatgatgaagacttgaattgtcaaaaataaaaatwaaaaaatcagctttccccaaaaaagcatgactgagaaagccaccagagcttgctggtgttggaaaacaccaaacctggtcacaggcaaatgttgcgtagaggtcagytgcctgaggraaatgcggagagagacagaaaggccccaaaatgacttgggtggtaagagcagtaattctcaactgagccttaactgacatgtctcgtggctattccacctctaaatgccctgtacaagaaatgagagctcagaacccagtgccagatgacaccagtcctgctagaggcaaaaccttcaaatat

SEQ ID NO: 67504 - DNA, 600 bp, Chicken  19866894337285_5
ggagagggtgctcaggctgcagccagtgctgctggaggtgtttaagrgacgtgtggacatggcacagatggacatggtttgaggggcgggctyggmtgattgatggttggacttggtgatcttgcaggtcttttccaacccaaatgatgctgtgattctatgatgaagacttgaattgtcaaaaataaaaatwaaaaaatcagctttccccaaaaaagcatgactgagaaagccaccagagcttgctggtgttggaaaacaccaaacctggtcacaggcaaatgttgcgtagaggtcagytgcctgaggraaatgcggagagagacagaaaggccccaaaatgacttgggtggtaagagcagtaattctcaactgagccttaactgacatgtctcgtggctattccacctctaaatgccctgtacaagaaatgagagctcagaacccagtgccagatgacaccagtcctgctagaggcaaaaccttcaaatatttatccttcagatctctgttccagagaattgtttcaagcaccaaaattccttggcttggggggagatatggagaaaaaacaatgaggtgctaggcctagaacgtcat

SEQ ID NO: 67505 - DNA, 600 bp, Chicken  19866894337285_6
ctcaggctgcagccagtgctgctggaggtgtttaagrgacgtgtggacatggcacagatggacatggtttgaggggcgggctyggmtgattgatggttggacttggtgatcttgcaggtcttttccaacccaaatgatgctgtgattctatgatgaagacttgaattgtcaaaaataaaaatwaaaaaatcagctttccccaaaaaagcatgactgagaaagccaccagagcttgctggtgttggaaaacaccaaacctggtcacaggcaaatgttgcgtagaggtcagytgcctgaggraaatgcggagagagacagaaaggccccaaaatgacttgggtggtaagagcagtaattctcaactgagccttaactgacatgtctcgtggctattccacctctaaatgccctgtacaagaaatgagagctcagaacccagtgccagatgacaccagtcctgctagaggcaaaaccttcaaatatttatccttcagatctctgttccagagaattgtttcaagcaccaaaattccttggcttggggggagatatggagaaaaaacaatgaggtgctaggcctagaacgtcatctyctaaata

SEQ ID NO: 67506 - DNA, 600 bp, Chicken  19866894337285_7
ctgaggraaatgcggagagagacagaaaggccccaaaatgacttgggtggtaagagcagtaattctcaactgagccttaactgacatgtctcgtggctattccacctctaaatgccctgtacaagaaatgagagctcagaacccagtgccagatgacaccagtcctgctagaggcaaaaccttcaaatatttatccttcagatctctgttccagagaattgtttcaagcaccaaaattccttggcttggggggagatatggagaaaaaacaatgaggtgctaggcctagaacgtcatctyctaaataacccgaggcttgtgctcccatggagcaaatgacctcgtgcaatcaaattaaacactgtgagtttatcagcgtttcctccaagtgcctcaaggataacaagtttagtagaagctatttagaagaaaatcaggatgtcagagataaagaagtagctctctaatccaactctgcttcctgtgctgtggccttaccaaagatctggagatggactgcacctcatctggtccacaagtggcactgaaccagggggtgcacttcctgaggtgccccttcctcagtggcagcagccccag

SEQ ID NO: 67507 - DNA, 600 bp, Chicken  19866894337296_1
aacaagaacaaagttccacttactaccatgttcagccttcgctgcataattcccagcagcagataagctgactgcagataactgggcataacctactgtacgctgtgctgcagctggatccagtagagcttgctccttcccagcagtgagaagagctggacaaaactcagtctgcaacacatacgctggtgtgctactttagggacacaacagcaacatgctgcttctgattacagaactatttaatttcctattatccctctagatcaaaaacagctacagcttaatccaagaaaccayatttctggagaagaaaataccctgagagagccttctgaaatgaagagaaggactctttttcagaaaaaaaatgctgaatgcagtttttgaccagagcttccagattctcaggaatcaaccattgcttctgagggtccaggaaagacaaaaagcctatcagtctgaattcacgtatgtttctacacagcaggcaagagttcccattgccactgtaaacttttataagattcacaaatcctatttgaaaactacaggtttaaaccatatctcaaatraacaagagctttactgttcaatata

SEQ ID NO: 67508 - DNA, 600 bp, Chicken  19866894337296_2
gctacagcttaatccaagaaaccayatttctggagaagaaaataccctgagagagccttctgaaatgaagagaaggactctttttcagaaaaaaaatgctgaatgcagtttttgaccagagcttccagattctcaggaatcaaccattgcttctgagggtccaggaaagacaaaaagcctatcagtctgaattcacgtatgtttctacacagcaggcaagagttcccattgccactgtaaacttttataagattcacaaatcctatttgaaaactacaggtttaaaccatatctcaaatraacaagagctttactgttcaatatatccagaaatttctcaagatttttttttcccctcagtctgctccattagagacagatttcttaccactctgcttgttgaaacagaaaattctttcaaaagaaaatattttgatgcaatccataccgtcctcatagatactagctgtaataactgtggatgcagtttactcacagcggatagccatcccctagtacacatggctcacaattagaagataaaaagataaaacacattcaacgagagaagagctgaaagagagtgtaatggagaaatat

SEQ ID NO: 67509 - DNA, 600 bp, Chicken  19866894337296_3
agccttctgaaatgaagagaaggactctttttcagaaaaaaaatgctgaatgcagtttttgaccagagcttccagattctcaggaatcaaccattgcttctgagggtccaggaaagacaaaaagcctatcagtctgaattcacgtatgtttctacacagcaggcaagagttcccattgccactgtaaacttttataagattcacaaatcctatttgaaaactacaggtttaaaccatatctcaaatraacaagagctttactgttcaatatatccagaaatttctcaagatttttttttrccctcagtctgctccattagagacagatttcttaccactctgcttgttgaaacagaaaattctttcaaaagaaaatattttgatgcaatccataccgtcctcatagatactagctgtaataactgtggatgcagtttactcacagcggatagccatcccctagtacacatggctcacaattagaagataaaaagataaaacacattcaacgagagaagagctgaaagagagtgtaatggagaaatatggtaagacttacggtcaagtccattgatgtatctcattgtaatttcacagtgc

SEQ ID NO: 67510 - DNA, 599 bp, Chicken  19866894337314_1
  misc_feature (1)..(77): n is any nucleotide
nnnnnnnnnnnnnnnnnnnnnnnnnnnnnnnnnnnnnnnnnnnnnnnnnnnnnnnnnnnnnnnnnnnnnnnnnnnnnactggaaggccttaagcaccatgtgagatcagaattaaagggcattttaatatgaacctgagataggttcaaatggaaactgaactgcactgattgctgacaacatacgagttgaattacagcaacaaacattaacatttttgcagtggttttgcaggtatttattttccagtattttttactttattagacaggagtgggaaaaaatttcattcagaacacrcaattatacactacaaaccaaactaaccaacttgatgcaggtttcattacagtgtcataacgtaatgaaatccaaagataaaacacaagttggggggtaatttagggtttttttttttaatgcattatctttgaatttccatttccttccatagaactrcatagtagtaaagaygacraactagaaagacagcagaacacctytttaaatgacctctgtcaggatgtttctcattgttcaattctgcttagctaatgacaatctattctccaccacttttccttgagccattaccacaa

SEQ ID NO: 67511 - DNA, 600 bp, Chicken  19866894337314_2
aactgcactgattgctgacaacatacgagttgaattacagcaacaaacattaacatttttgcagtggttttgcaggtatttattttccagtattttttactttattagacaggagtgggaaaaaatttcattcagaacacrcaattatacactacaaaccaaactaaccaacttgatgcaggtttcattacagtgtcataacgtaatgaaatccaaagataaaacacaagttggggggtaatttagggtttttttttttaatgcattatctttgaatttccatttccttccatagaactrcatagtagtaaagaygacraactagaaagacagcagaacacctytttaaatgacctctgtcaggatgtttctcattgttcaattctgcttagctaatgacaatctattctccaccacttttccttgagccattaccacaataaagttcagtgacattttaaagtaaaggaaaaccatctgctaacacatggatggctagcatctttgacagcataattttcatcaaggacagcagcagaaatgatgccttgtgaatgccacatatatcacaagtgacatcaacctgtgcttttcattatt

SEQ ID NO: 67512 - DNA, 600 bp, Chicken  19866894337314_3
tgacaacatacgagttgaattacagcaacaaacattaacatttttgcagtggttttgcaggtatttattttccagtattttttactttattagacaggagtgggaaaaaatttcattcagaacacrcaattatacactacaaaccaaactaaccaacttgatgcaggtttcattacagtgtcataacgtaatgaaatccaaagataaaacacaagttggggggtaatttagggtttttttttttaatgcattatctttgaatttccatttccttccatagaactrcatagtagtaaagaygacraactagaaagacagcagaacacctytttaaatgacctctgtcaggatgtttctcattgttcaattctgcttagctaatgacaatctattctccaccacttttccttgagccattaccacaataaagttcagtgacattttaaagtaaaggaaaaccatctgctaacacatggatggctagcatctttgacagcataattttcatcaaggacagcagcagaaatgatgccttgtgaatgccacatatatcacaagtgacatcaacctgtgcttttcattattctccacgcgctgcat

SEQ ID NO: 67513 - DNA, 600 bp, Chicken  19866894337314_4
aacatacgagttgaattacagcaacaaacattaacatttttgcagtggttttgcaggtatttattttccagtattttttactttattagacaggagtgggaaaaaatttcattcagaacacrcaattatacactacaaaccaaactaaccaacttgatgcaggtttcattacagtgtcataacgtaatgaaatccaaagataaaacacaagttggggggtaatttagggtttttttttttaatgcattatctttgaatttccatttccttccatagaactrcatagtagtaaagaygacraactagaaagacagcagaacacctytttaaatgacctctgtcaggatgtttctcattgttcaattctgcttagctaatgacaatctattctccaccacttttccttgagccattaccacaataaagttcagtgacattttaaagtaaaggaaaaccatctgctaacacatggatggctagcatctttgacagcataattttcatcaaggacagcagcagaaatgatgccttgtgaatgccacatatatcacaagtgacatcaacctgtgcttttcattattctccacgcgctgcatgtgg

SEQ ID NO: 67514 - DNA, 600 bp, Chicken  19866894337314_5
aaacattaacatttttgcagtggttttgcaggtatttattttccagtattttttactttattagacaggagtgggaaaaaatttcattcagaacacrcaattatacactacaaaccaaactaaccaacttgatgcaggtttcattacagtgtcataacgtaatgaaatccaaagataaaacacaagttggggggtaatttagggtttttttttttaatgcattatctttgaatttccatttccttccatagaactrcatagtagtaaagaygacraactagaaagacagcagaacacctytttaaatgacctctgtcaggatgtttctcattgttcaattctgcttagctaatgacaatctattctccaccacttttccttgagccattaccacaataaagttcagtgacattttaaagtaaaggaaaaccatctgctaacacatggatggctagcatctttgacagcataattttcatcaaggacagcagcagaaatgatgccttgtgaatgccacatatatcacaagtgacatcaacctgtgcttttcattattctccacgcgctgcatgtggaaaggaagatgcaatctcacattaa

SEQ ID NO: 67515 - DNA, 600 bp, Chicken  19866894337315_1
gtgtctttctgccacactgtctctatgtgcagagtaagtccttactctctttcacacgcattaagtactttagctcgggattaaactaatgctagctattgaaaatgttacgtaatgatcatggaatggccttcgccaggtgctgcagtgggtgagtttcctgtgaggaaatcatagtgtcatgcaataatgacaatcactgctgtctatgaagtccacctttttaattgctttgctggcatatggattctgcacaggatctcattttcttactgcaggctgcctttgttttttcacacrttctaatcacataattcagtatggttttcttataaatcatagtatggacacattcacaccactgatcttatgacctttttttcctgcaacgttggagttactccatactgctaacgtagtcctttataatctagaagaactcactagaataggaaacagattttacacagttaagaagtgccattttagctttgacatagtggagaaacttctacttccttctaatcaaaacgagcatccctcctttctctccatcctccttagcatgtgaaagaaattaatgattgacagtcaggctct

SEQ ID NO: 67516 - DNA, 599 bp, Chicken  19866894337316_1
  misc_feature (1)..(92): n is any nucleotide
nnnnnnnnnnnnnnnnnnnnnnnnnnnnnnnnnnnnnnnnnnnnnnnnnnnnnnnnnnnnnnnnnnnnnnnnnnnnnnnnnnnnnnnnnnnntgcgctcgagtgaaggggctgctagaacaatatcaggattatttgaggaaataatgcgatatgaagattagcacataggataataactgtggggtatagcagtgtttttatggtccgttctgtgttgcttaacgttattagtcattctgtgtcaggcactgttaaaccagatttctaaaggaagccctttgccttgctctcgtgctgrcggctttggtgtattgttaagctttacaggctctgtgtctccgtgcataatgtagcacttactggtctgaactgtaattcagttttataatcttttactactgtgggacattgtcccttacagaattcccataacctcaaacactgttttctcataaaaacaaaccaaaacagttgttccccatgctttatagtttagggtagcatagtgccactgcgcaggacctggacatctccggatcattttgttcctgcacattaagaaactgaattttcctttgatgtctggaatcagaaygg

SEQ ID NO: 67517 - DNA, 569 bp, Chicken  19866894337316_2
tgrcggctttggtgtattgttaagctttacaggctctgtgtctccgtgcataatgtagcacttactggtctgaactgtaattcagttttataatcttttactactgtgggacattgtcccttacagaattcccataacctcaaacactgttttctcataaaaacaaaccaaaacagttgttccccatgctttatagtttagggtagcatagtgccactgcgcaggacctggacatctccggatcattttgttcctgcacattaagaaactgaattttcctttgatgtctggaatcagaayggagcaggagacgtgcagttaccctgcagcagtacagttggrtgacattggtccttgtgcagatctatgggggtcgtgcacgtcctgctgcctgctctcctccccaaggagtcaaatgggaccccatgctgagaccaacctcatgagatggctctgcaccatcacagggtcaggcatgattcatgccctgtgcaaaggcaagactaaaactgggggagaatataacttgactggaacatggaataagtgaattcttgccacacaggtat

SEQ ID NO: 67518 - DNA, 527 bp, Chicken  19866894337316_3
tccgtgcataatgtagcacttactggtctgaactgtaattcagttttataatcttttactactgtgggacattgtcccttacagaattcccataacctcaaacactgttttctcataaaaacaaaccaaaacagttgttccccatgctttatagtttagggtagcatagtgccactgcgcaggacctggacatctccggatcattttgttcctgcacattaagaaactgaattttcctttgatgtctggaatcagaayggagcaggagacgtgcagttaccctgcagcagtacagttggrtgacattggtccttgtgcagatctatgggggtcgtgcacgtcctgctgcctgctctcctccccaaggagtcaaatgggaccccatgctgagaccaacctcatgagatggctctgcaccatcacagggtcaggcatgattcatgccctgtgcaaaggcaagactaaaactgggggagaatataacttgactggaacatggaataagtgaattcttgccacacaggtat

SEQ ID NO: 67519 - DNA, 599 bp, Chicken  19866894337321_1
  misc_feature (1)..(159): n is any nucleotide
nnnnnnnnnnnnnnnnnnnnnnnnnnnnnnnnnnnnnnnnnnnnnnnnnnnnnnnnnnnnnnnnnnnnnnnnnnnnnnnnnnnnnnnnnnnnnnnnnnnnnnnnnnnnnnnnnnnnnnnnnnnnnnnnnnnnnnnnnnnnnnnnnnnnnnnnnnnnnnnataaatggtagccttcactgaaccctgcagaagccagatgtggtgcattcatttccatgtgcagtcttattagagtatctaacaggtgttccacaaagcaatgctatactttgtgagacaaacatggaaaactgtagcttsagaatttactgttactatctaagcacgaaccttgatctatttttttaatgtgtacagttaaggtggtgtgctgttgtgtggtttatccagtaaacaggaaatracatcagtacattttgtttgtattctgatggctcttggtcacaggtctttgcaccccgagctgggcactgaacaaacatgcaccagagagagagttggctgaggtatctgtatcaagtgtgcatttaccaggaggatgttgtggagaatgctttagattctttctttggctcttcagagttttgaagtaacaacta

SEQ ID NO: 67520 - DNA, 599 bp, Chicken  19866894337321_2
  misc_feature (1)..(56): n is any nucleotide
nnnnnnnnnnnnnnnnnnnnnnnnnnnnnnnnnnnnnnnnnnnnnnnnnnnnnnnnataaatggtagccttcactgaaccctgcagaagccagatgtggtgcattcatttccatgtgcagtcttattagagtatctaacaggtgttccacaaagcaatgctatactttgtgagacaaacatggaaaactgtagcttsagaatttactgttactatctaagcacgaaccttgatctatttttttaatgtgtacagttaaggtggtgtgctgttgtgtggtttatccagtaaacaggaaatracatcagtacattttgtttgtattctgatggctcttggtcacaggtctttgcaccccgagctgggcactgaacaaacatgcaccagagagagagttggctgaggtatctgtatcaagtgtgcatttaccaggaggatgttgtggagaatgctttagattctttctttggctcttcagagttttgaagtaacaactatgaaatacttttaatagctttttattatgagaatgaagaagtagatttccaagttcttactcctgaaaataggatttatcttccaaaccttaagccactgtaa

SEQ ID NO: 67521 - DNA, 600 bp, Chicken  19866894337346_1
gctaagtgtaagaaagttttttttttttttcaggaagtcacaaaagagtcaatcatgcgtgataatcctttgtctttggcatgtagaatgccaacccccattcacatcaatctttagttttactaacaatagggattttaaaaatcctaagttcagtcagccataattgtgtttgtggtggttgttgagggagaaattgacagctgtgtgtctccaacagcttgaaagcgtggcctctggtgtagacacgtttcctccagaggacagagaacatccatttgttacctgtgtcccaggcaygtcctgctgagaggccccctgggcctggctgagcactgaagcacatcctacctagtgatgttgtgctctgggttctttcagatggcagaaacagagcctatacagarcaatcagacagctgatgaaactgaaagtgattcctccgcagagtgagatagaacaatctgggtaaagaaaatgcagaacagataaatgaggaacactgtgagttttctgggagatcacaagcagcctcaaactctatctacactgttagaaggggcactattaacattctgcgggaagactgacgcaaccctg

SEQ ID NO: 67522 - DNA, 600 bp, Chicken  19866894337346_2
caatctttagttttactaacaatagggattttaaaaatcctaagttcagtcagccataattgtgtttgtggtggttgttgagggagaaattgacagctgtgtgtctccaacagcttgaaagcgtggcctctggtgtagacacgtttcctccagaggacagagaacatccatttgttacctgtgtcccaggcaygtcctgctgagaggccccctgggcctggctgagcactgaagcacatcctacctagtgatgttgtgctctgggttctttcagatggcagaaacagagcctatacagarcaatcagacagctgatgaaactgaaagtgattcctccgcagagtgagatagaacaatctgggtaaagaaaatgcagaacagataaatgaggaacactgtgagttttctgggagatcacaagcagcctcaaactctatctacactgttagaaggggcactattaacattctgcgggaagactgacgcaaccctgagaaagccctgggtatgccctgagaagtaatttggctggtgagatctgagaaaagcctgtccctctcactgcacacatgctgaaaccaagataagagctggaatttg

SEQ ID NO: 67523 - DNA, 599 bp, Chicken  19866894337348_1
  misc_feature (1)..(42): n is any nucleotide
nnnnnnnnnnnnnnnnnnnnnnnnnnnnnnnnnnnnnnnnnncctgaatctctcctctgtcctcagatccctcacttcagggctcctgatggctctcagacatcgataccactgagggctgctgctgtgtgggctatttaggtgatcccattgctgtggagtcagatacatcctgcgttccccatacacaggtcatgtgtacttctgtgctttggaaccacagtgcaacgcaccctgaggtgaacagcgtagggcagagcagagctgcaccgaggcagtgaggtaactggatctggagtyccttctgctgctatcagcctgattttgccaggtgtgtgctgggcatactccaggggatggctgtaggcattgctatgcgtcttccttcagcagatgccaggaccccctgctccatgcagcgaggcgctggggtgtcaggccaagggatgccaagcctgctgcagggctctgtccccgtgctgaccccgtggtgaggtctctgtgtcctgctggcctcccgtggtgccgatggccggagccgtggtgcccgtgccccagctccatggagtgctgycccgtctgtgcgactcctggagctg

SEQ ID NO: 67524 - DNA, 600 bp, Chicken  19866894337348_2
gcagtgaggtaactggatctggagtyccttctgctgctatcagcctgattttgccaggtgtgtgctgggcatactccaggggatggctgtaggcattgctatgcgtcttccttcagcagatgccaggaccccctgctccatgcagcgaggcgctggggtgtcaggccaagggatgccaagcctgctgcagggctctgtccccgtgctgaccccgtggtgaggtctctgtgtcctgctggcctcccgtggtgccgatggccggagccgtggtgcccgtgccccagctccatggagtgctgycccgtctgtgcgactcctggagctgctgccctcctgcctctttctggtgcatgtttacggctcggagggagccgtcctgccccaattccccatgcactcctaatttcatatgtccatatatatccatgcagcatttgatacaggttttatgggcatttccatacgttttacagacacagccattacagagacaggtttcacctgagaaacctcaggggagcaaagcactgaatcgccttagtcttggcctcagaacaaggctctcttctctctcttgccagagctgccgctatcagctct

SEQ ID NO: 67525 - DNA, 600 bp, Chicken  19866894337350_1
gagcctttagttctagtcattgcctaaatctcacctacaagttttgaaacaagtgaatatacatcatatacagtataaaagagatcaataaagaaatttggaacctaccaatactggtagcgggtgtcatgcacaaaactgaccctgcgtgtcatgcaatgataggtgaaaaaagtggataaagggaagaaacaggttagctgtttagagttaacattcaaagtgagattcaagcataaccacagataagttagttaaatgaaagtttaaggtcattcatagttttgctttaatgctaamgatgtgattaggttcatattaagttcctacccgagcatatgacttttggcgtgtttctgtgtacataaatctgcagcaacaggtttttgtttacagaaacatcttagattaaatatcacattgttttgcaattttagagctcgctgcatgattcggacagcttaacgctgagcagatcaatgctcaccaaaaaagctgaaatggaagtatccaacactactctgcaggggcttcgtcaaattgatgctcaatgttaacctacgcacttttaacgcaaggcatgaagcaggggaggtgttt

SEQ ID NO: 67526 - DNA, 600 bp, Chicken  19866894337354_1
aacaaacaaaaaaccctacaaaaaccaacctctaaaagaaactaaatcctcttttctctgttcattgtggccccacttagcatcactatctggcagagatggtttctgccacacaccttcactttgcaaagctggtgctgatattacagccatgtgacattaattaatctaggttcaggggaggctgtgcacactcatgaagacaaacagaccatagaatcttatgtttggattaggatgtcctgtgctgacaatgtctgctctctggcagaataaatggacatgggaaaatccatacaykctcacagtgctcactttacacaagtctcattttaaggctcctgttaagcagagtatattgtgctaggaagactttggtmtgaccaaacattgttcttcttctatgtttattggctgtgccacggaagtggttaccagtccatatgagccatgtttccatctgtttctcagcaaaattattatcagccccaaacctcaaaagaagctctttagatttaatctttgaagcacctaatttgagtgcctgtgctatgtctctatgctcaccatagtagtgtgcaatctaaatcatctaggtgg

SEQ ID NO: 67527 - DNA, 600 bp, Chicken  19866894337354_2
acaaacaaaaaaccctacaaaaaccaacctctaaaagaaactaaatcctcttttctctgttcattgtggccccacttagcatcactatctggcagagatggtttctgccacacaccttcactttgcaaagctggtgctgatattacagccatgtgacattaattaatctaggttcaggggaggctgtgcacactcatgaagacaaacagaccatagaatcttatgtttggattaggatgtcctgtgctgacaatgtctgctctctggcagaataaatggacatgggaaaatccatacaykctcacagtgctcactttacacaagtctcattttaaggctcctgttaagcagagtatattgtgctaggaagactttggtmtgaccaaacattgttcttcttctatgtttattggctgtgccacggaagtggttaccagtccatatgagccatgtttccatctgtttctcagcaaaattattatcagccccaaacctcaaaagaagctctttagatttaatctttgaagcacctaatttgagtgcctgtgctatgtctctatgctcaccatagtagtgtgcaatctaaatcatctaggtggg

SEQ ID NO: 67528 - DNA, 600 bp, Chicken  19866894337354_3
catcactatctggcagagatggtttctgccacacaccttcactttgcaaagctggtgctgatattacagccatgtgacattaattaatctaggttcaggggaggctgtgcacactcatgaagacaaacagaccatagaatcttatgtttggattaggatgtcctgtgctgacaatgtctgctctctggcagaataaatggacatgggaaaatccatacaykctcacagtgctcactttacacaagtctcattttaaggctcctgttaagcagagtatattgtgctaggaagactttggtmtgaccaaacattgttcttcttctatgtttattggctgtgccacggaagtggttaccagtccatatgagccatgtttccatctgtttctcagcaaaattattatcagccccaaacctcaaaagaagctctttagatttaatctttgaagcacctaatttgagtgcctgtgctatgtctctatgctcaccatagtagtgtgcaatctaaatcatctaggtgggactgtcagagcagaatcttccttttcatattctgagcaaccagtggagacgctttttgcttttcagaaaccagagggag

SEQ ID NO: 67529 - DNA, 600 bp, Chicken  19866894337365_1
attaaaaaaaaaaaaacaccaattactttatcaccaaaagctcattacaaaaatttctgcaatgagtagaaaaattagtgtcccttttccagttactcctggctatctaaaagacttataattcgctctcatctagtgagtagggcagtcaccaatattatattagtatttatatttaatctgtgcttttcaaagtttcaaccttatgccttttaaagcttggtgcattttaactagattctcggatttttttttttttttaatgtaggtgattgttagtgtttgaaaaatgagtaaaawcatagaaaaattaggctaataaaaaaataatactaattcactctatgaattgctagattaaatattttcaactatttaagcatcaagctgaatttgaacaaagtacamctgtacccttttgagcatacgttttatccttgaagagtgctattggaaagataaaagtattgcaattgtagtcacatggtgcaaaaataattaagtattaaattattccacagtaatttttatatatctcacacagaacaacttttaactatggtaataactgtattatccagctaactaagttttctcttt

SEQ ID NO: 67530 - DNA, 600 bp, Chicken  19866894337365_2
aaaagacttataattcgctctcatctagtgagtagggcagtcaccaatattatattagtatttatatttaatctgtgcttttcaaagtttcaaccttatgccttttaaagcttggtgcattttaactagattctcggatttttttttttttttaatgtaggtgattgttagtgtttgaaaaatgagtaaaawcatagaaaaattaggctaataaaaaaataatactaattcactctatgaattgctagattaaatattttcaactatttaagcatcaagctgaatttgaacaaagtacamctgtacccttttgagcatacgttttatccttgaagagtgctattggaaagataaaagtattgcaattgtagtcacatggtgcaaaaataattaagtattaaattattccacagtaatttttatatatctcacacagaacaacttttaactatggtaataactgtattatccagctaactaagttttctctttctccaatagattagactacccacaaattttaaaagttgcataagaattagttgattaaacatatgtatgaaaatatctactgtgactgtttcaactatcacttacaaa

SEQ ID NO: 67531 - DNA, 600 bp, Chicken  19866894337368_1
tgaattgacaagattgtgatgctaacttgcactggagttacaacagccaatgtagtcccttttgaagtagaaaattctacatattcctacctcttttgtcacttatttagacatttgtaaggtggttaagagatttgacagctcacattagctaaactaacaagaattaagtatattattctgatagattctcaaaagaaaacaagcaatacgtgaaagctgtgtgtgaatttttgagatgaaagataccaccagtactagttctaaatagacagctagaaaaatacataacccgatgamgccctatgggttctaacaactctgacttctgcatgtcctttttaagtcaacgacaccatcaccgtgaaatgaaaacaaagagtgttttgtgctccctctgctggctctggagcagcaggagctgacaaataccaaacccagagctctgctgttcagcccaactcagacataatgaaacagaaacaaaaagcagtgactttcagtacgcttttgcatgtagctgttgttgtttaacaactgaacaataacaacaaaaactgaaatgatttttttcttcttataaggaaaaaatgtagcact

SEQ ID NO: 67532 - DNA, 599 bp, Chicken  19866894337373_1
  misc_feature (1)..(72): n is any nucleotide
nnnnnnnnnnnnnnnnnnnnnnnnnnnnnnnnnnnnnnnnnnnnnnnnnnnnnnnnnnnnnnnnnnnnnnnntatatgaagcataaatcataagtgttcacagcgcagagttgggctgctcctggaaattgcatgttttgagtgcagcaaaaaccggcaactgcagcacgattagatgctaaggaaagagaagaatttcttatggcgtttcgaagcttcttataaaacagtatcttcacctataattgcaaccaagatgttaccacagggccatggattgttgtttaaaaggcttttttyccaaaaagtaatgatgaaattacayattgtcatttaaaagcttttaaaaatatgytccttatcttctcccatttgtgcagcagtgcctggcttagggaagtgaaggggatatgcatgattagctratgatggatgatttcctaaatgacactgagtagagattaagacacttggatttttctaaatgtgtattttagtgctatataaaggtgctaaaatgacagctctggagacagaagtttcctctttacccagcagtggacagaagagaggatcattctgtgtttgctctattcaga

SEQ ID NO: 67533 - DNA, 599 bp, Chicken  19866894337373_2
  misc_feature (1)..(47): n is any nucleotide
nnnnnnnnnnnnnnnnnnnnnnnnnnnnnnnnnnnnnnnnnnnnnnntatatgaagcataaatcataagtgttcacagcgcagagttgggctgctcctggaaattgcatgttttgagtgcagcaaaaaccggcaactgcagcacgattagatgctaaggaaagagaagaatttcttatggcgtttcgaagcttcttataaaacagtatcttcacctataattgcaaccaagatgttaccacagggccatggattgttgtttaaaaggcttttttyccaaaaagtaatgatgaaattacayattgtcatttaaaagcttttaaaaatatgytccttatcttctcccatttgtgcagcagtgcctggcttagggaagtgaaggggatatgcatgattagctratgatggatgatttcctaaatgacactgagtagagattaagacacttggatttttctaaatgtgtattttagtgctatataaaggtgctaaaatgacagctctggagacagaagtttcctctttacccagcagtggacagaagagaggatcattctgtgtttgctctattcagatagtcctttstctacctatagatac

SEQ ID NO: 67534 - DNA, 599 bp, Chicken  19866894337373_3
  misc_feature (1)..(17): n is any nucleotide
nnnnnnnnnnnnnnnnntatatgaagcataaatcataagtgttcacagcgcagagttgggctgctcctggaaattgcatgttttgagtgcagcaaaaaccggcaactgcagcacgattagatgctaaggaaagagaagaatttcttatggcgtttcgaagcttcttataaaacagtatcttcacctataattgcaaccaagatgttaccacagggccatggattgttgtttaaaaggcttttttyccaaaaagtaatgatgaaattacayattgtcatttaaaagcttttaaaaatatgytccttatcttctcccatttgtgcagcagtgcctggcttagggaagtgaaggggatatgcatgattagctratgatggatgatttcctaaatgacactgagtagagattaagacacttggatttttctaaatgtgtattttagtgctatataaaggtgctaaaatgacagctctggagacagaagtttcctctttacccagcagtggacagaagagaggatcattctgtgtttgctctattcagatagtcctttstctacctatagataccattcagactycaagtctgcagtcaggatt

SEQ ID NO: 67535 - DNA, 600 bp, Chicken  19866894337373_4
aaattgcatgttttgagtgcagcaaaaaccggcaactgcagcacgattagatgctaaggaaagagaagaatttcttatggcgtttcgaagcttcttataaaacagtatcttcacctataattgcaaccaagatgttaccacagggccatggattgttgtttaaaaggcttttttyccaaaaagtaatgatgaaattacayattgtcatttaaaagcttttaaaaatatgytccttatcttctcccatttgtgcagcagtgcctggcttagggaagtgaaggggatatgcatgattagctratgatggatgatttcctaaatgacactgagtagagattaagacacttggatttttctaaatgtgtattttagtgctatataaaggtgctaaaatgacagctctggagacagaagtttcctctttacccagcagtggacagaagagaggatcattctgtgtttgctctattcagatagtcctttstctacctatagataccattcagactycaagtctgcagtcaggatttctggggacatcttaaaaattagaggtgaaagaccactgagatcttttacttaggatatccagcattggca

SEQ ID NO: 67536 - DNA, 600 bp, Chicken  19866894337373_5
aatgatgaaattacayattgtcatttaaaagcttttaaaaatatgytccttatcttctcccatttgtgcagcagtgcctggcttagggaagtgaaggggatatgcatgattagctratgatggatgatttcctaaatgacactgagtagagattaagacacttggatttttctaaatgtgtattttagtgctatataaaggtgctaaaatgacagctctggagacagaagtttcctctttacccagcagtggacagaagagaggatcattctgtgtttgctctattcagatagtcctttstctacctatagataccattcagactycaagtctgcagtcaggatttctggggacatcttaaaaattagaggtgaaagaccactgagatcttttacttaggatatccagcattggcagcttttacttgaatcactgatctagtaatcttgagactcatctggtaaaaaaatgcatccttaaaattaatttctttatctgttttctagctaaaagtttacctcaaaggttttgatgtgaaagtgtatttaagaagagactggaaacaatttccagaagtgaagaagctgatttacattcaca

SEQ ID NO: 67537 - DNA, 600 bp, Chicken  19866894337373_6
aaaagcttttaaaaatatgytccttatcttctcccatttgtgcagcagtgcctggcttagggaagtgaaggggatatgcatgattagctratgatggatgatttcctaaatgacactgagtagagattaagacacttggatttttctaaatgtgtattttagtgctatataaaggtgctaaaatgacagctctggagacagaagtttcctctttacccagcagtggacagaagagaggatcattctgtgtttgctctattcagatagtcctttstctacctatagataccattcagactycaagtctgcagtcaggatttctggggacatcttaaaaattagaggtgaaagaccactgagatcttttacttaggatatccagcattggcagcttttacttgaatcactgatctagtaatcttgagactcatctggtaaaaaaatgcatccttaaaattaatttctttatctgttttctagctaaaagtttacctcaaaggttttgatgtgaaagtgtatttaagaagagactggaaacaatttccagaagtgaagaagctgatttacattcacagatactcttccttcagaaaggaagtt

SEQ ID NO: 67538 - DNA, 574 bp, Chicken  19866894337374_1
agagagagcagagaccatacagctagttagccatagctgcatatgggaaagcagaatgccatgaagtcagttgtttagaaaactggattctctctgtcctttcattataaacaagtctgttcattagctgaaaaagaaacttcaaacactgtccagaccagaacaaacttgtatctctgatccgttcaaataggagtctttgccaggagggtttgcaattgattaaggtattttttcctgcagggaagaatgtgcttgctgtggtcttaataaatcctttacaatagggacacctcagcrcccattatctgagcaggtaggagggtcacaggtacctggttaacgctgcagatggaagagctgaggaattgtcctggttcatgagtacatattaggtttctctttttggaggctgcatgtgttctggttgtgctggctgtctcatgctgctccagggcagtggttgtctcctggtatcagctgtctccatcggggtttattgatggagtccatctgcataccttatcaacaagattttgctgcgtacccacatttctgacctctcatcaagttt

SEQ ID NO: 67539 - DNA, 526 bp, Chicken  19866894337377_1
cagtgcagagagcagatgatgctcaatcaataagcaaccacaaaatatttgatctcttgttattgttcatacaaattccaaacactgctctaatgataatttcatttaagtggcctggccttatatcaattgaagtacaaatgctgatcaggaattggaattcttcaaaaccaacaaacttgcagatgctgctacattttctccagagccctgtgagctgatctggcaatactatcatcccacttttaaatactgagatctgaaacaccactgtggttcaagtcaggttctctgaaaaaygctactctcttcagcattcaccattgaggcttccagctccatcttaaaagccagtaagtctgtagatagtacaacagggagaagggaacaccagggatgtttgaaatcactgttgatctccatattttggagctattagtcagctgtctgatagcacaaggtgtactagttctatagttctagccaaactggcccaagaaaccaagcaaggaactctgccccaaat

SEQ ID NO: 67540 - DNA, 600 bp, Chicken  19866894337381_1
tctggccctgcactcaccaccctcaggaaggctttccctgggcaggatgctgaggaaggggaaggaaggctaaaccttcattttggggatgccaaagcctccatccgctcagcctggagatggaggcaggcagtgcacagctctggtttcttggttcctgtggggaagaggccctgcactgtgtcagcatcccctcagcagagtttaactgcaaattggttcaagaaatgtatgcaaataaggagactttgatctccagctgcctgtgctggtgcatggggagtgggtaaagcttcctarcatcccaggctgaatgactgttttatttgcctgtgatgaattgttcatattttactttatggaaaccatatttagggtgtaaatactgagtacgataagcagatgcaagaagaatgagcctggtggtggccttgcttggacaacactgcaatgctgagcaaagggaggtgaggcagaaaagcaaaagcccaccgagcactgtgtgccaggcagtcgagagcgatgtcctgacctgaccctgcacagatctaatgtgtagagctgtagagctccacacctggtcacagcttgggccccacc

SEQ ID NO: 67541 - DNA, 600 bp, Chicken  19866894337381_2
gagctccacacctggtcacagcttgggccccaccgtggctcccgctgcgagcactggggctggcaggagctgtcccttgttggagttgtgtagtagaggtatcccagaagccacacctgtgggagcagccagagggaagaagcagggaaatgtgcttgctgggctcaggctgcatgcctatggagtgtacactctgctgctctggaacaaacagcagttcttactttcttgccttgctttgagtcagacagctgggttccagcaaggaaagctttcctgcctttgttttgcttttctttrgtgtctttcatttgaatggctggtgtctctgggagctcagggccttcagcccatgccaggggagtctgttggtgccctggggaagcagggagaggcgtgggagcagcctgcgaggcagcgacaggcagcttggctcttcttaaaaaagggagacttgggaagggggtgttctgggaaacacaggccttacagagatgggaccatgcgtgagaacagcggttcctgccaagacactgagcacagaagaaagtgcatggtgtgtttgggattccaagcattttccagcagagcagggacatg

SEQ ID NO: 67542 - DNA, 600 bp, Chicken  19866894337381_3
gagcagcctgcgaggcagcgacaggcagcttggctcttcttaaaaaagggagacttgggaagggggtgttctgggaaacacaggccttacagagatgggaccatgcgtgagaacagcggttcctgccaagacactgagcacagaagaaagtgcatggtgtgtttgggattccaagcattttccagcagagcagggacatgttcagcagcgggaagatggcccactgagtgggttgggagcctgtgtgctcaccttctgctgacagccctacgtgcagccagcacaagccctttctgctawcactgctctgctaggagctcttgcagtcagtctgcctgtgcagccctcatccttacatgagtgtgcagcttgctgaatgtacagaggattcagagcatagggcttccaccccaaccccggaacaccaacaggctgacacttcagtgcaggtgcaacctgcttgctttcctgaagctcctgctgggctggagcaacctttggggatcaggggagcttgtggtggctgcaggagatccataggaaccttcatgactggggaggtcccaccaatcactgactgcagcatccccatgcatggat

SEQ ID NO: 67543 - DNA, 465 bp, Chicken  19866894337385_1
  misc_feature (1)..(81): n is any nucleotide
nnnnnnnnnnnnnnnnnnnnnnnnnnnnnnnnnnnnnnnnnnnnnnnnnnnnnnnnnnnnnnnnnnnnnnnnnnnnnnnnnacagatattctctaattcactaagcaaagtgaaacaactttcatagatgggaatgaagaagttgccatttcttccttcacggtaaacagtatatcccacagcttcaggcagatagacttggaccaattataatggaacataaaccgtatctgacagaatctagccaaaaatcaaccactgagattttaaattaaatgtatatatatgtgtattaaatcwtatatatgacatatatatatgtatatgagtttatatatattatatatatatataatgtatatattatataagcatacatatgtgtatatatatatatatgagtttataatatattatayctatatatatttaaaaaaacagttaacgggtaggttttttgggggg

SEQ ID NO: 67544 - DNA, 346 bp, Chicken  19866894337385_2
acagatattctctaattcactaagcaaagtgaaacaactttcatagatgggaatgaagaagttgccatttcttccttcacggtaaacagtatatcccacagcttcaggcagatagacttggaccaattataatggaacataaaccgtatctgacagaatctagccaaaaatcaaccactgagattttaaattaaatgtatatatatgtgtattaaatcwtatatatgacatatatatatgtatatgagtttatatatattatatatatatataatgtatatattatataagcatacatayctatatatatttaaaaaaacagttaacgggtaggttttttgggggg

SEQ ID NO: 67545 - DNA, 600 bp, Chicken  19866894337391_1
agatctcatctcatggagctgagatttatttttacattactgaaggcaaggcagtgtaaatcatagctgcaatggagtattttaggaagctaacactcacagagctgctccagggtggaattctgatggagagaagattgaagtcccatttgacgcgctcttgacctacaatgtttttattttttctttaaagaggatatggcagacaagaatcctaacacttgaaaggggctattccacacgaggactacgtgagaaataggtgctgagaggctgtctgcattccagcatggctgcaarcaaggcagcacatcacaagcagtcttttccacagccagccaagctgtaggaacacaaaaacaatttacaacgagcttgagtccaccagatatggtgaatttacagcctactcgagtacctgagatggtatgatttaccatcagctccccagcgtctgctgggagcgagaactgaacgatttaggttgataaacgtttgaaagaatgagaccatcaaaataaccctccagctttcttggtatccatatcgagaacaggcagagcctcagcacaggcccaggcagaccttgttagggaggct

SEQ ID NO: 67546 - DNA, 599 bp, Chicken  19866894337395_1
  misc_feature (1)..(166): n is any nucleotide
nnnnnnnnnnnnnnnnnnnnnnnnnnnnnnnnnnnnnnnnnnnnnnnnnnnnnnnnnnnnnnnnnnnnnnnnnnnnnnnnnnnnnnnnnnnnnnnnnnnnnnnnnnnnnnnnnnnnnnnnnnnnnnnnnnnnnnnnnnnnnnnnnnnnnnnnnnnnnnnnnnnnnnaaaagagagaaaaaagctggaagtttcccccagaaagcagcaaggcttcaacacttgctttcatcctcccccagaactgagcccagcagctccccttgctggagaagctcatatgcctggagagccgagcaccsgagactgaaatgactttgctcaaaaagtgagcctgcttactaggcatattttccccaaacaatcccatctgtactgaaaatctgtcatcagcttgttagttcaaggcagctggagaataaaagaagcactttgtcaaatgtagtggttttgtgaacatccatgargcragtcaggaattaaagtgtaaaacaaaacttttccaatactgctcggctacgctcaccattaggatcattacagttgctcaaagattattttggcattcctgtgtgccatcagtaagctycagagctatatt

SEQ ID NO: 67547 - DNA, 599 bp, Chicken  19866894337395_2
  misc_feature (1)..(1): n is any nucleotide
naaaagagagaaaaaagctggaagtttcccccagaaagcagcaaggcttcaacacttgctttcatcctcccccagaactgagcccagcagctccccttgctggagaagctcatatgcctggagagccgagcaccsgagactgaaatgactttgctcaaaaagtgagcctgcttactaggcatattttccccaaacaatcccatctgtactgaaaatctgtcatcagcttgttagttcaaggcagctggagaataaaagaagcactttgtcaaatgtagtggttttgtgaacatccatgargcragtcaggaattaaagtgtaaaacaaaacttttccaatactgctcggctacgctcaccattaggatcattacagttgctcaaagattattttggcattcctgtgtgccatcagtaagctycagagctatatttagagcaatttgctttcaacactctgatgtagccagaaagatatgaggtagaggmcaagttgttgtctcaaggcttcggctccacttttgggctctaagcagagctctcagtgactttactcaaacactggctcactacaaaatcatgtgtgcattctggcaact

SEQ ID NO: 67548 - DNA, 600 bp, Chicken  19866894337395_3
aagagagaaaaaagctggaagtttcccccagaaagcagcaaggcttcaacacttgctttcatcctcccccagaactgagcccagcagctccccttgctggagaagctcatatgcctggagagccgagcaccsgagactgaaatgactttgctcaaaaagtgagcctgcttactaggcatattttccccaaacaatcccatctgtactgaaaatctgtcatcagcttgttagttcaaggcagctggagaataaaagaagcactttgtcaaatgtagtggttttgtgaacatccatgargcragtcaggaattaaagtgtaaaacaaaacttttccaatactgctcggctacgctcaccattaggatcattacagttgctcaaagattattttggcattcctgtgtgccatcagtaagctycagagctatatttagagcaatttgctttcaacactctgatgtagccagaaagatatgaggtagaggmcaagttgttgtctcaaggcttcggctccacttttgggctctaagcagagctctcagtgactttactcaaacactggctcactacaaaatcatgtgtgcattctggcaactgagc

SEQ ID NO: 67549 - DNA, 600 bp, Chicken  19866894337395_4
gagccgagcaccsgagactgaaatgactttgctcaaaaagtgagcctgcttactaggcatattttccccaaacaatcccatctgtactgaaaatctgtcatcagcttgttagttcaaggcagctggagaataaaagaagcactttgtcaaatgtagtggttttgtgaacatccatgargcragtcaggaattaaagtgtaaaacaaaacttttccaatactgctcggctacgctcaccattaggatcattacagttgctcaaagattattttggcattcctgtgtgccatcagtaagctycagagctatatttagagcaatttgctttcaacactctgatgtagccagaaagatatgaggtagaggmcaagttgttgtctcaaggcttcggctccacttttgggctctaagcagagctctcagtgactttactcaaacactggctcactacaaaatcatgtgtgcattctggcaactgagcccatgtctaagggcaggttaaagrtctcactgaagacaaagacctgttattgtccaaatacattaagacatgttctcacctttataagctagattaaaaatcatttgtttttctgtgct

SEQ ID NO: 67550 - DNA, 600 bp, Chicken  19866894337395_5
ccaaacaatcccatctgtactgaaaatctgtcatcagcttgttagttcaaggcagctggagaataaaagaagcactttgtcaaatgtagtggttttgtgaacatccatgargcragtcaggaattaaagtgtaaaacaaaacttttccaatactgctcggctacgctcaccattaggatcattacagttgctcaaagattattttggcattcctgtgtgccatcagtaagctycagagctatatttagagcaatttgctttcaacactctgatgtagccagaaagatatgaggtagaggmcaagttgttgtctcaaggcttcggctccacttttgggctctaagcagagctctcagtgactttactcaaacactggctcactacaaaatcatgtgtgcattctggcaactgagcccatgtctaagggcaggttaaagrtctcactgaagacaaagacctgttattgtccaaatacattaagacatgttctcacctttataagctagattaaaaatcatttgtttttctgtgctgaaaaagccaaaatacttttcgctgagctgaaggaggtgtagagaaatctactgttctcgcttctta

SEQ ID NO: 67551 - DNA, 462 bp, Chicken  19866894337395_6
aaacttttccaatactgctcggctacgctcaccattaggatcattacagttgctcaaagattattttggcattcctgtgtgccatcagtaagctycagagctatatttagagcaatttgctttcaacactctgatgtagccagaaagatatgaggtagaggmcaagttgttgtctcaaggcttcggctccacttttgggctctaagcagagctctcagtgactttactcaaacactggctcactacaaaatcatgtgtgcattctggcaactgagcccatgtctaagggcaggttaaagrtctcactgaagacaaagacctgttattgtccaaatacattaagacatgttctcacctttataagctagattaaaaatcatttgtttttctgtgctgaaaaagccaaaatacttttcgctgagctgaaggaggtgtagagaaatctactgttctcgcttctta

SEQ ID NO: 67552 - DNA, 599 bp, Chicken  19866894337399_1
  misc_feature (1)..(181): n is any nucleotide
nnnnnnnnnnnnnnnnnnnnnnnnnnnnnnnnnnnnnnnnnnnnnnnnnnnnnnnnnnnnnnnnnnnnnnnnnnnnnnnnnnnnnnnnnnnnnnnnnnnnnnnnnnnnnnnnnnnnnnnnnnnnnnnnnnnnnnnnnnnnnnnnnnnnnnnnnnnnnnnnnnnnnnnnnnnnnnnnnnnnnttgcataatcttgacctaaaactcacagtgggcactgtaacactgttggaggtattttgtctgctgtgtatgtgaagacaaaagagaaatgcaacctgtagccacatcatccttaatgsgctgctatgctygtgctgaaagtagctgtgcagtggaagtagcggcattaggcaatgtcagcctcaccagccctctgggcctctctgtaagctaatggagagcacaggattcccccaaggggctgtggagtgggttgctggacttgttcctggcattcccaccccacttccccagctgatgccccttggcgccctgtgagcgcgatgcggcaagtaggcctgcagcctttggaagaggaggaagaaggaggaagtggttgtgctgacttgggagaaagatatttttgaagaacctcagt

SEQ ID NO: 67553 - DNA, 599 bp, Chicken  19866894337399_2
  misc_feature (1)..(169): n is any nucleotide
nnnnnnnnnnnnnnnnnnnnnnnnnnnnnnnnnnnnnnnnnnnnnnnnnnnnnnnnnnnnnnnnnnnnnnnnnnnnnnnnnnnnnnnnnnnnnnnnnnnnnnnnnnnnnnnnnnnnnnnnnnnnnnnnnnnnnnnnnnnnnnnnnnnnnnnnnnnnnnnnnnnnnnnnnttgcataatcttgacctaaaactcacagtgggcactgtaacactgttggaggtattttgtctgctgtgtatgtgaagacaaaagagaaatgcaacctgtagccacatcatccttaatgsgctgctatgctygtgctgaaagtagctgtgcagtggaagtagcggcattaggcaatgtcagcctcaccagccctctgggcctctctgtaagctaatggagagcacaggattcccccaaggggctgtggagtgggttgctggacttgttcctggcattcccaccccacttccccagctgatgccccttggcgccctgtgagcgcgatgcggcaagtaggcctgcagcctttggaagaggaggaagaaggaggaagtggttgtgctgacttgggagaaagatatttttgaagaacctcagtgcctggtgcaaa

SEQ ID NO: 67554 - DNA, 600 bp, Chicken  19866894337399_3
gcctcaccagccctctgggcctctctgtaagctaatggagagcacaggattcccccaaggggctgtggagtgggttgctggacttgttcctggcattcccaccccacttccccagctgatgccccttggcgccctgtgagcgcgatgcggcaagtaggcctgcagcctttggaagaggaggaagaaggaggaagtggttgtgctgacttgggagaaagatatttttgaagaacctcagtgcctggtgcaaagcatgaaggttttcagtgggtaccaacaatatgatcaatacaaacaggmagggtctgcaacctctgattgccagaacctctccacgtgcacagggcccagcttccccttctcttccagcttatctccagcagcatttctttcaagctaaacaaaatcaggggcttttaggaacttagaaatgtctgcttagtttcagcttcgataagctcctgcttcaactcattcttaatgtatcaaaattaaatgttttaaacatatttatctggttgctatgggttttgcctgatgcgtcagacactttatccatcaactatgacaatcgaataatatttttattttcagatatgg

SEQ ID NO: 67555 - DNA, 496 bp, Chicken  19866894337400_1
aaagcagatgtaaattttattgataccactttccagtgtggacaagcccttaggtagcattttgacatcaccaaatccgcttttgtttccatgctctccctgctacaatgctgtcaagtacagaggaacagttatttctgaataactctttttcagggaaaattttagtggggacacttctgttcatgatagattgcacaagatcaatttgaatcgacaaaaatgaaggttctgctatgatagcataattttattttttctctccagaacaagaacaccaagtgctgtcatgaactgaaytacacatgcgtagacatccaggcaagccaaatccagacacctgtgttgaacgatgttgctaaaggtaagtgaagaacatgcaccaaccttcgacatctaatagcggaaccattaaatccattggtgtgctgcctcttacgatatggtaaagctgatattagatatttttcattagagcagctattccagctgattt

SEQ ID NO: 67556 - DNA, 599 bp, Chicken  19866894337407_1
  misc_feature (1)..(184): n is any nucleotide
nnnnnnnnnnnnnnnnnnnnnnnnnnnnnnnnnnnnnnnnnnnnnnnnnnnnnnnnnnnnnnnnnnnnnnnnnnnnnnnnnnnnnnnnnnnnnnnnnnnnnnnnnnnnnnnnnnnnnnnnnnnnnnnnnnnnnnnnnnnnnnnnnnnnnnnnnnnnnnnnnnnnnnnnnnnnnnnnnnnnnnnnttttctatgaagtttaacaggaagtaatttcatataaaggaccagagatgtaaatgctttctgaaccaaaagacagtgacagctcttttgtaatattagcagaagtatccagcacytccgtgacagatctactgaatacytatagaatagattgtgattattcttcattactgtattttcattttaactgggactgtggtaaaagcttgatgagttgcttgacttctgcaataatttctcaaaaaatgttttttgtttttgtttttgttttttttttaattaaaaataaagactgtgtttgcattgcagtaggcctgggaagatccaggggaaaatcatttcacctcattgtttccactcagaagrcagtttctcattgcaaggacattacaatcaaagtaaaaaggagaccatc

SEQ ID NO: 67557 - DNA, 599 bp, Chicken  19866894337407_2
  misc_feature (1)..(160): n is any nucleotide
nnnnnnnnnnnnnnnnnnnnnnnnnnnnnnnnnnnnnnnnnnnnnnnnnnnnnnnnnnnnnnnnnnnnnnnnnnnnnnnnnnnnnnnnnnnnnnnnnnnnnnnnnnnnnnnnnnnnnnnnnnnnnnnnnnnnnnnnnnnnnnnnnnnnnnnnnnnnnnnnttttctatgaagtttaacaggaagtaatttcatataaaggaccagagatgtaaatgctttctgaaccaaaagacagtgacagctcttttgtaatattagcagaagtatccagcacytccgtgacagatctactgaatacytatagaatagattgtgattattcttcattactgtattttcattttaactgggactgtggtaaaagcttgatgagttgcttgacttctgcaataatttctcaaaaaatgttttttgtttttgtttttgttttttttttaattaaaaataaagactgtgtttgcattgcagtaggcctgggaagatccaggggaaaatcatttcacctcattgtttccactcagaagrcagtttctcattgcaaggacattacaatcaaagtaaaaaggagaccatccagaaagatatatgcattgtgtgt

SEQ ID NO: 67558 - DNA, 575 bp, Chicken  19866894337407_3
caaaagacagtgacagctcttttgtaatattagcagaagtatccagcacytccgtgacagatctactgaatacytatagaatagattgtgattattcttcattactgtattttcattttaactgggactgtggtaaaagcttgatgagttgcttgacttctgcaataatttctcaaaaaatgttttttgtttttgtttttgttttttttttaattaaaaataaagactgtgtttgcattgcagtaggcctgggaagatccaggggaaaatcatttcacctcattgtttccactcagaagrcagtttctcattgcaaggacattacaatcaaagtaaaaaggagaccatccagaaagatatatgcattgtgtgttcactggtagtaaagatgtgatttatgttatggcttgcccttcatttcttgtagtctcctaactagctagtgggtaacaagaaaagggataataaaaatcatttctttgctggtttatatgcagggcaaattgacagtggcttcccttcctgatatttatcaaatcagtgtgcagtgcaaaagtatttaacagctgcatttt

SEQ ID NO: 67559 - DNA, 599 bp, Chicken  19866894337413_1
  misc_feature (1)..(64): n is any nucleotide
nnnnnnnnnnnnnnnnnnnnnnnnnnnnnnnnnnnnnnnnnnnnnnnnnnnnnnnnnnnnnnnntattacacttagattttctgtttaccctgcatatatcagcacagggctattatttcctgctgcagggtatttagaactgacaaacacagtgccatttttaactatagaaaacacccagcaaaattagaaatcattgagactaatatttgaactctagtactgtttttctacaactatctactcttacaatatatagttatgtttgagatatttatctctccacaaatgtgcttcaraatggcaaacaggctgaaaaattattggcagagtgagggcaaaaacaggcaccttgcttccataggaattagagttctataatcacagtaaaaccctagaaggaaaraaaggtcttacatgggttggaaactctgtttaccagatttcagaaagcagtaaccagtacaaaatcattattaaataacagtgtttataaagtaacccctcagaggtcgtattaaaaaatattatcagattctgaatgttaaaataataataatagtgagcatagaaaagccatgagagtcatttatactgt

SEQ ID NO: 67560 - DNA, 600 bp, Chicken  19866894337413_2
gggctattatttcctgctgcagggtatttagaactgacaaacacagtgccatttttaactatagaaaacacccagcaaaattagaaatcattgagactaatatttgaactctagtactgtttttctacaactatctactcttacaatatatagttatgtttgagatatttatctctccacaaatgtgcttcaraatggcaaacaggctgaaaaattattggcagagtgagggcaaaaacaggcaccttgcttccataggaattagagttctataatcacagtaaaaccctagaaggaaaraaaggtcttacatgggttggaaactctgtttaccagatttcagaaagcagtaaccagtacaaaatcattattaaataacagtgtttataaagtaacccctcagaggtcgtattaaaaaatattatcagattctgaatgttaaaataataataatagtgagcatagaaaagccatgagagtcatttatactgtgggcccttaaaactacttttcaggaaaatagaaatcaatacccagtagccaggaataggtgaaacaagctgtactacagaactcaggaatgtagcctagaaagcatga

SEQ ID NO: 67561 - DNA, 600 bp, Chicken  19866894337413_3
attaaaaaatattatcagattctgaatgttaaaataataataatagtgagcatagaaaagccatgagagtcatttatactgtgggcccttaaaactacttttcaggaaaatagaaatcaatacccagtagccaggaataggtgaaacaagctgtactacagaactcaggaatgtagcctagaaagcatgaatttcagggcgggtttagagatcagtgttaagaactgactcagcatggggctactgtgaaggtgtgtgaagggagcttattctatccaggatgtaacacaagaaaaatayatttsacatctacacagggctcttaaacccatcttgactaatgrctatgagtaactgtgtttataytgggctatccaactggctgcctttggaaggaggaaacttcagaagtcagcaaaggtcagtaaaatgcaagatttaaaccttctcactagctcgtgatgccagggcctattcacagaatcacacaatcacrgaactataggggttggaagggacctccagagatcatcgagtccaacccccgtgcaaagcaggccccctacagcagtctgcacaggtaggcatccaggcaggtct

SEQ ID NO: 67562 - DNA, 600 bp, Chicken  19866894337413_4
aaaatattatcagattctgaatgttaaaataataataatagtgagcatagaaaagccatgagagtcatttatactgtgggcccttaaaactacttttcaggaaaatagaaatcaatacccagtagccaggaataggtgaaacaagctgtactacagaactcaggaatgtagcctagaaagcatgaatttcagggcgggtttagagatcagtgttaagaactgactcagcatggggctactgtgaaggtgtgtgaagggagcttattctatccaggatgtaacacaagaaaaatayatttsacatctacacagggctcttaaacccatcttgactaatgrctatgagtaactgtgtttataytgggctatccaactggctgcctttggaaggaggaaacttcagaagtcagcaaaggtcagtaaaatgcaagatttaaaccttctcactagctcgtgatgccagggcctattcacagaatcacacaatcacrgaactataggggttggaagggacctccagagatcatcgagtccaacccccgtgcaaagcaggccccctacagcagtctgcacaggtaggcatccaggcaggtcttgaat

SEQ ID NO: 67563 - DNA, 600 bp, Chicken  19866894337413_5
agtgagcatagaaaagccatgagagtcatttatactgtgggcccttaaaactacttttcaggaaaatagaaatcaatacccagtagccaggaataggtgaaacaagctgtactacagaactcaggaatgtagcctagaaagcatgaatttcagggcgggtttagagatcagtgttaagaactgactcagcatggggctactgtgaaggtgtgtgaagggagcttattctatccaggatgtaacacaagaaaaatayatttsacatctacacagggctcttaaacccatcttgactaatgrctatgagtaactgtgtttataytgggctatccaactggctgcctttggaaggaggaaacttcagaagtcagcaaaggtcagtaaaatgcaagatttaaaccttctcactagctcgtgatgccagggcctattcacagaatcacacaatcacrgaactataggggttggaagggacctccagagatcatcgagtccaacccccgtgcaaagcaggccccctacagcagtctgcacaggtaggcatccaggcaggtcttgaatatctccagagaaagatactccacaacygccctgggaagc

SEQ ID NO: 67564 - DNA, 600 bp, Chicken  19866894337413_6
gagtcatttatactgtgggcccttaaaactacttttcaggaaaatagaaatcaatacccagtagccaggaataggtgaaacaagctgtactacagaactcaggaatgtagcctagaaagcatgaatttcagggcgggtttagagatcagtgttaagaactgactcagcatggggctactgtgaaggtgtgtgaagggagcttattctatccaggatgtaacacaagaaaaatayatttsacatctacacagggctcttaaacccatcttgactaatgrctatgagtaactgtgtttataytgggctatccaactggctgcctttggaaggaggaaacttcagaagtcagcaaaggtcagtaaaatgcaagatttaaaccttctcactagctcgtgatgccagggcctattcacagaatcacacaatcacrgaactataggggttggaagggacctccagagatcatcgagtccaacccccgtgcaaagcaggccccctacagcagtctgcacaggtaggcatccaggcaggtcttgaatatctccagagaaagatactccacaacygccctgggaagcctgttccagtgctacgtcaccc

SEQ ID NO: 67565 - DNA, 600 bp, Chicken  19866894337413_7
gggcgggtttagagatcagtgttaagaactgactcagcatggggctactgtgaaggtgtgtgaagggagcttattctatccaggatgtaacacaagaaaaatayatttsacatctacacagggctcttaaacccatcttgactaatgrctatgagtaactgtgtttataytgggctatccaactggctgcctttggaaggaggaaacttcagaagtcagcaaaggtcagtaaaatgcaagatttaaaccttctcactagctcgtgatgccagggcctattcacagaatcacacaatcacrgaactataggggttggaagggacctccagagatcatcgagtccaacccccgtgcaaagcaggccccctacagcagtctgcacaggtaggcatccaggcaggtcttgaatatctccagagaaagatactccacaacygccctgggaagcctgttccagtgctacgtcaccctcaccatgaagttcttttgcacatttatgcagaacttcctatgcttcagtttgtggccatttccccttttccaatcgccacacaccactgaaaagagtctggcctcatccctttgcctcctgcaccttag

SEQ ID NO: 67566 - DNA, 600 bp, Chicken  19866894337413_8
cttgactaatgrctatgagtaactgtgtttataytgggctatccaactggctgcctttggaaggaggaaacttcagaagtcagcaaaggtcagtaaaatgcaagatttaaaccttctcactagctcgtgatgccagggcctattcacagaatcacacaatcacrgaactataggggttggaagggacctccagagatcatcgagtccaacccccgtgcaaagcaggccccctacagcagtctgcacaggtaggcatccaggcaggtcttgaatatctccagagaaagatactccacaacygccctgggaagcctgttccagtgctacgtcaccctcaccatgaagttcttttgcacatttatgcagaacttcctatgcttcagtttgtggccatttccccttttccaatcgccacacaccactgaaaagagtctggcctcatccctttgcctcctgcaccttagatatttacagacattaatcagaccccttttgagacttcttttcttaaggctgracagaccctggtcactcagccttttcttgtaagagaggtgctccaggccctttatcatcttcgtggccccctgctggactctt

SEQ ID NO: 67567 - DNA, 600 bp, Chicken  19866894337413_9
caaagcaggccccctacagcagtctgcacaggtaggcatccaggcaggtcttgaatatctccagagaaagatactccacaacygccctgggaagcctgttccagtgctacgtcaccctcaccatgaagttcttttgcacatttatgcagaacttcctatgcttcagtttgtggccatttccccttttccaatcgccacacaccactgaaaagagtctggcctcatccctttgcctcctgcaccttagatatttacagacattaatcagaccccttttgagacttcttttcttaaggctgracagaccctggtcactcagccttttcttgtaagagaggtgctccaggccctttatcatcttcgtggccccctgctggactctttccaggagatccctaccttttttgtactgggtagcccagacctggatacagtactccaggtgaggcctgactagggcagagtggagggggaggatcacctcccttgacctgctggacactctccttttaatgcaccccaggatgccattggccttcttggccaccagagcacactgctggtttatggccaaaagcctgttctctggcttggatgact

SEQ ID NO: 67568 - DNA, 600 bp, Chicken  19866894337419_1
ctcaactcttcttgaaaaaaaaaaaaaataataatatttggacgcctcttgcttcctgaataatcaaatgctggttatttcatctgctcatatagactaaaatcccatttatctataaccctttgatatgaaactcactcctttgaatctaggttatgtccccctggtgtgaattacttatacaataactccctcaattatttgaagctctgtttatccaaatgttttgatgttcccaaagtattttgaataaacagggctttgctgtcattggatgtaacagatatcttttgggatacwggatgatttcccctgaccttattttgtatcatcttgtgcttgaaacgtacaagtaatgtaaacttaagtgtatagcatatgggcaccatcttcagtatttttatttctgtccccattaattatttttcttcagtcctcattaaaggcccaaactccagamattctgctcaggaagaactcaatacagattcaagtaaaagttcttttcttgactaaagagtgaatattaataacaaaaagacatagaattttgctcagttttatcacacttctgatacaaagcaaagtttttgtttattt

SEQ ID NO: 67569 - DNA, 600 bp, Chicken  19866894337419_2
cccctggtgtgaattacttatacaataactccctcaattatttgaagctctgtttatccaaatgttttgatgttcccaaagtattttgaataaacagggctttgctgtcattggatgtaacagatatcttttgggatacwggatgatttcccctgaccttattttgtatcatcttgtgcttgaaacgtacaagtaatgtaaacttaagtgtatagcatatgggcaccatcttcagtatttttatttctgtccccattaattatttttcttcagtcctcattaaaggcccaaactccagamattctgctcaggaagaactcaatacagattcaagtaaaagttcttttcttgactaaagagtgaatattaataacaaaaagacatagaattttgctcagttttatcacacttctgatacaaagcaaagtttttgtttatttgtttttgcatttttcagtcattccaattgacactagttacatctttgcaaagtcctcgcattcatttttttgttgttgtttgccactacttttcttatagtacccatgaaaatcttaagggtaaagatcatgaaatgatgcaagaactggaggaaaaaca

SEQ ID NO: 67570 - DNA, 599 bp, Chicken  19866894337429_1
  misc_feature (1)..(40): n is any nucleotide
nnnnnnnnnnnnnnnnnnnnnnnnnnnnnnnnnnnnnnnncagcagagcagagaatctgcactgggacaggaaccccacagctccaggttcacactaaacccgatgctaagcagggatgtacacatccagcagtttgggaccataagaccaagagggccaagattcaaaggttcagatgcagttctgcagctgcaggaataatttgtctcctgtgcacactcctgtcagatttatagataatcacagaaagaaaacactatccagccccctgcattttctgaatggagggcagctgtaaytcactgaaaatctgtctgattcaattatgtgcataataagatgtactgacagaatctgacggatctgtctagacaagcaaatgaatttctaattgtaactgcatatattaaaaaaagcaaatttaagcmagcttagtctattcttatatcttatcgatcctgaaaattaagaygttatctttgtgcactgagtcaacaatacgtttgagaagagtataaccgaaagcagtggaagtcacatttgacacattctaattgcttgctactgccatgcacggagsctttaagactgcaaagta

SEQ ID NO: 67571 - DNA, 600 bp, Chicken  19866894337429_2
gcagtttgggaccataagaccaagagggccaagattcaaaggttcagatgcagttctgcagctgcaggaataatttgtctcctgtgcacactcctgtcagatttatagataatcacagaaagaaaacactatccagccccctgcattttctgaatggagggcagctgtaaytcactgaaaatctgtctgattcaattatgtgcataataagatgtactgacagaatctgacggatctgtctagacaagcaaatgaatttctaattgtaactgcatatattaaaaaaagcaaatttaagcmagcttagtctattcttatatcttatcgatcctgaaaattaagaygttatctttgtgcactgagtcaacaatacgtttgagaagagtataaccgaaagcagtggaagtcacatttgacacattctaattgcttgctactgccatgcacggagsctttaagactgcaaagtaaataattacatcatcattcactcttttgcacagtacactgttaggaaatagaggtctgagaccaagtatttttaattccagatcacacagcagtctattccatacactaaaaaaacaaatgaatccatat

SEQ ID NO: 67572 - DNA, 600 bp, Chicken  19866894337429_3
cagatgcagttctgcagctgcaggaataatttgtctcctgtgcacactcctgtcagatttatagataatcacagaaagaaaacactatccagccccctgcattttctgaatggagggcagctgtaaytcactgaaaatctgtctgattcaattatgtgcataataagatgtactgacagaatctgacggatctgtctagacaagcaaatgaatttctaattgtaactgcatatattaaaaaaagcaaatttaagcmagcttagtctattcttatatcttatcgatcctgaaaattaagaygttatctttgtgcactgagtcaacaatacgtttgagaagagtataaccgaaagcagtggaagtcacatttgacacattctaattgcttgctactgccatgcacggagsctttaagactgcaaagtaaataattacatcatcattcactcttttgcacagtacactgttaggaaatagaggtctgagaccaagtatttttaattccagatcacacagcagtctattccatacactaaaaaaacaaatgaatccatatcacctgtaaactctattttttgcaacaggaagcatataagcatc

SEQ ID NO: 67573 - DNA, 564 bp, Chicken  19866894337429_4
aatggagggcagctgtaaytcactgaaaatctgtctgattcaattatgtgcataataagatgtactgacagaatctgacggatctgtctagacaagcaaatgaatttctaattgtaactgcatatattaaaaaaagcaaatttaagcmagcttagtctattcttatatcttatcgatcctgaaaattaagaygttatctttgtgcactgagtcaacaatacgtttgagaagagtataaccgaaagcagtggaagtcacatttgacacattctaattgcttgctactgccatgcacggagsctttaagactgcaaagtaaataattacatcatcattcactcttttgcacagtacactgttaggaaatagaggtctgagaccaagtatttttaattccagatcacacagcagtctattccatacactaaaaaaacaaatgaatccatatcacctgtaaactctattttttgcaacaggaagcatataagcatcccttatctttcaaagcagcagataaacagtgcccaatttcctacgggtctcacttccccatttattcagcta

SEQ ID NO: 67574 - DNA, 600 bp, Chicken  19866894337430_1
attccctcttgccagaatccagttgttattaacatttcatgtgtgtgcttttgtgtagaatctttacattaatgcacactgatataatttgttgttttttcaaaccagtattattcaaaaggagtttaaagtaagggtggttttttttaatgtattttcagcaactgaagagcttgatacagaaaatgagtttttattgcctcctgtttttggggaagaatatgaggagcaaccaaggcctcgtcccaaaaagaaggtaatgatatcatgctattaaaatgtcacaaattttaagtgggmaaaaatatrtcatctttttttagttctcttactgttctaaaatgttcagttgcttaccaatacctggtttccaatcttccttgttgtagattgatatacttacagtaattaagttctgtgtctgctgcagttaactgttggctttaataggagcgcagtttctaaattctgatcccatttttgctatagaggaacagtggtagaactgttgccatgtgttttacactgtattgtatatacttcctgtgctctcagttatgcttttctaccttctacatggaagaaaactctcaatttcat

SEQ ID NO: 67575 - DNA, 600 bp, Chicken  19866894337430_2
tgccagaatccagttgttattaacatttcatgtgtgtgcttttgtgtagaatctttacattaatgcacactgatataatttgttgttttttcaaaccagtattattcaaaaggagtttaaagtaagggtggttttttttaatgtattttcagcaactgaagagcttgatacagaaaatgagtttttattgcctcctgtttttggggaagaatatgaggagcaaccaaggcctcgtcccaaaaagaaggtaatgatatcatgctattaaaatgtcacaaattttaagtgggmaaaaatatrtcatctttttttagttctcttactgttctaaaatgttcagttgcttaccaatacctggtttccaatcttccttgttgtagattgatatacttacagtaattaagttctgtgtctgctgcagttaactgttggctttaataggagcgcagtttctaaattctgatcccatttttgctatagaggaacagtggtagaactgttgccatgtgttttacactgtattgtatatacttcctgtgctctcagttatgcttttctaccttctacatggaagaaaactctcaatttcatttcatagtg

SEQ ID NO: 67576 - DNA, 599 bp, Chicken  19866894337448_1
  misc_feature (1)..(101): n is any nucleotide
nnnnnnnnnnnnnnnnnnnnnnnnnnnnnnnnnnnnnnnnnnnnnnnnnnnnnnnnnnnnnnnnnnnnnnnnnnnnnnnnnnnnnnnnnnnnnnnnnnnnntcaaatgcatgcaaaatgtaaagcaagttctgttacatttgaaaactaaaatgaatatactatggatggagttgcacatcatgggagctgctctaagtgaataagctgttaggggaaatattactgcatgcaattgaaatgctctcttgttgagctcagcccacagacatgactgcatctgtcaagcagagatgagagrragtttttgaagccagaacaggcattttcttcttcatatctttcccgttagagctgaagattcaccgagccattctaaatgagagggaagaaagtaattatctttctgtatatgcccaatcttagagtyatakaatcataggattgtttgagttggaaggaaccattgaaagtcatctagtccaattcccttgtgaagaacagggacacctacagcttgatcagattgcttacagccctgtccagcctgacctttaatgttttcagggatggggaatccagcacctccctgggcaacct

SEQ ID NO: 67577 - DNA, 599 bp, Chicken  19866894337448_2
  misc_feature (1)..(100): n is any nucleotide
nnnnnnnnnnnnnnnnnnnnnnnnnnnnnnnnnnnnnnnnnnnnnnnnnnnnnnnnnnnnnnnnnnnnnnnnnnnnnnnnnnnnnnnnnnnnnnnnnnnntcaaatgcatgcaaaatgtaaagcaagttctgttacatttgaaaactaaaatgaatatactatggatggagttgcacatcatgggagctgctctaagtgaataagctgttaggggaaatattactgcatgcaattgaaatgctctcttgttgagctcagcccacagacatgactgcatctgtcaagcagagatgagagaragtttttgaagccagaacaggcattttcttcttcatatctttcccgttagagctgaagattcaccgagccattctaaatgagagggaagaaagtaattatctttctgtatatgcccaatcttagagtyatakaatcataggattgtttgagttggaaggaaccattgaaagtcatctagtccaattcccttgtgaagaacagggacacctacagcttgatcagattgcttacagccctgtccagcctgacctttaatgttttcagggatggggaatccagcacctccctgggcaacctg

SEQ ID NO: 67578 - DNA, 600 bp, Chicken  19866894337448_3
tctgttacatttgaaaactaaaatgaatatactatggatggagttgcacatcatgggagctgctctaagtgaataagctgttaggggaaatattactgcatgcaattgaaatgctctcttgttgagctcagcccacagacatgactgcatctgtcaagcagagatgagagaragtttttgaagccagaacaggcattttcttcttcatatctttcccgttagagctgaagattcaccgagccattctaaatgagagggaagaaagtaattatctttctgtatatgcccaatcttagagtyatakaatcataggattgtttgagttggaaggaaccattgaaagtcatctagtccaattcccttgtgaagaacagggacacctacagcttgatcagattgcttacagccctgtccagcctgacctttaatgttttcagggatggggaatccagcacctccctgggcaacctgctccagtgcttcaccatccttattgcaagaaacttcattacatccaatctaagtcttcccacttttagtttgaaaccatttcccttttttctgtcaccacagactctgctaaagtgtctgtcctcttmc

SEQ ID NO: 67579 - DNA, 600 bp, Chicken  19866894337448_4
ttacatttgaaaactaaaatgaatatactatggatggagttgcacatcatgggagctgctctaagtgaataagctgttaggggaaatattactgcatgcaattgaaatgctctcttgttgagctcagcccacagacatgactgcatctgtcaagcagagatgagagaragtttttgaagccagaacaggcattttcttcttcatatctttcccgttagagctgaagattcaccgagccattctaaatgagagggaagaaagtaattatctttctgtatatgcccaatcttagagtyatakaatcataggattgtttgagttggaaggaaccattgaaagtcatctagtccaattcccttgtgaagaacagggacacctacagcttgatcagattgcttacagccctgtccagcctgacctttaatgttttcagggatggggaatccagcacctccctgggcaacctgctccagtgcttcaccatccttattgcaagaaacttcattacatccaatctaagtcttcccacttttagtttgaaaccatttcccttttttctgtcaccacagactctgctaaagtgtctgtcctcttmcttct

SEQ ID NO: 67580 - DNA, 456 bp, Chicken  19866894337448_5
ggaagaaagtaattatctttctgtatatgcccaatcttagagtyatakaatcataggattgtttgagttggaaggaaccattgaaagtcatctagtccaattcccttgtgaagaacagggacacctacagcttgatcagattgcttacagccctgtccagcctgacctttaatgttttcagggatggggaatccagcacctccctgggcaacctgctccagtgcttcaccatccttattgcaagaaacttcattacatccaatctaagtcttcccacttttagtttgaaaccatttcccktttttctgtcaccacagactctgctaaagtgtctgtcctcttmcttcttatagcccccctttatatactgaaaggcctctatcaggtctccctggacccttatcttttccaggctgaacagctccatctctctcagcctgtcctcacagggggggg

SEQ ID NO: 67581 - DNA, 413 bp, Chicken  19866894337448_6
yatakaatcataggattgtttgagttggaaggaaccattgaaagtcatctagtccaattcccttgtgaagaacagggacacctacagcttgatcagattgcttacagccctgtccagcctgacctttaatgttttcagggatggggaatccagcacctccctgggcaacctgctccagtgcttcaccatccttattgcaagaaacttcattacatccaatctaagtcttcccacttttagtttgaaaccatttcccttttttctgtcaccacagactctgctaaagtgtctgtcctcttmcttcttatagcccccctttatatactgaaaggcctctatcaggtctccctggacccttatcttttccaggctgaacagctccatctctctcagcctgtcctcacagggggggg

SEQ ID NO: 67582 - DNA, 600 bp, Chicken  19866894337464_1
gcagcacttctgtaattgcagacacacctgtgaagctataaatgtaattgcgtctggggagatcattgcaatcagagaaagaaggccatcagctctctgcaaccatgctgaactctgcaaatgagggagtagcaaagtgttggagaaggcactacacctacccagaaagagggctgttccatggtgcatggtttgctgccattttcacgctccctgttagagccagtaactctcatccacagtgtgtgatcccccatctactaagagtttctctaagattagcctgctctgcactgagcyccagtggcccaaatttcattgggaaggtcttctcgcgtccctgtgtggtggttgctctttcggaaagcaaaggaacagagggggaaaaggctccttgagaggcctcggaaggcgtgtgggtcatccaaggctccttggtgtgctccaaggtcttcagcgccatctactgccatgctgaaccctttctgccttgccgtctctacaggaatgggtttccaggacactttgacgatggcgacagtgatgacgactgttgccctgcaaatcctacgggttgagtgcaaactttaaagtatgtta

SEQ ID NO: 67583 - DNA, 600 bp, Chicken  19866894337466_1
tccacttttgttctggaggggttcagagcggtaacccatgaaggcagcactcacagcagcaatgctacagggctcagcagtccgagccaacgtggcagggcctggagctcttgcaagttcattgtggtcccgttggtttgtcttgttctgctaggggctggtgtctgatatacagggaaaaagcagtctgagcctacttgctttcctctgcaagaaagataggccaaaagcagcacttcatcagcaaataacaggttttgtccattttttatgtggattcgtacctgcattcatgcagtwaaatttgctgcacaggagaataacgcttccatatgcctttggtaatawggctttttgttgctcccagccaagtggggacttaacagatgctgcagtggtgaaaggcaccatcttgtttcatggtcctgccggtgtccctcctctgcctggggtccaccattttactccatctcctttgccctctcagctagacaaaaggttcagggatccttgacagagctctgaagatgcttctcattacttctgtttgttctgctgctcatctccctctcaaagccaagcagcacctaccaaccagcc

SEQ ID NO: 67584 - DNA, 600 bp, Chicken  19866894337466_2
actcacagcagcaatgctacagggctcagcagtccgagccaacgtggcagggcctggagctcttgcaagttcattgtggtcccgttggtttgtcttgttctgctaggggctggtgtctgatatacagggaaaaagcagtctgagcctacttgctttcctctgcaagaaagataggccaaaagcagcacttcatcagcaaataacaggttttgtccattttttatgtggattcgtacctgcattcatgcagtwaaatttgctgcacaggagaataacgcttccatatgcctttggtaatawggctttttgttgctcccagccaagtggggacttaacagatgctgcagtggtgaaaggcaccatcttgtttcatggtcctgccggtgtccctcctctgcctggggtccaccattttactccatctcctttgccctctcagctagacaaaaggttcagggatccttgacagagctctgaagatgcttctcattacttctgtttgttctgctgctcatctccctctcaaagccaagcagcacctaccaaccagccagcgcaggagaaatagcagctcctttgtgcagagagccgacaccatca

SEQ ID NO: 67585 - DNA, 600 bp, Chicken  19866894337468_1
tgaagaaattatctattcaataatttgaaaatgtacccatttgatttcttagtaatagcagatgtttggttcttaaaaaggaaagcaacccaaattcactaaaaagagacaacctgaagtgactttctcatgagcacacgggaagcatgcagatgcacagaatcattaatagctaccaagctgtgggtcacaaaacctacaggtgcaaacagctgcttatttccaggcttaagggctacgtggcatctgaggataaccactgatgtttgttcaggaaaacagtttgctgtctaggtaaayatggtatctcagtggcaaaagaagatacttcctatacacatttactaagttcaccatgaagagtcatgwtgtctcccagaagctctgtacaaagggcttcaccatgtgctcaccagaaactagcagcagaaaagcagcacaacaaagccaatctgcaaagccaacaaacacagaatgaagcccaaggccatttcacactgcacctaaagctagcaggcccacgtcaagcccgtggccacccaatgcagccagtattgcccagtgaagtctgaagccctgctagctgtacaaagggcatgc

SEQ ID NO: 67586 - DNA, 600 bp, Chicken  19866894337468_2
ttcttaaaaaggaaagcaacccaaattcactaaaaagagacaacctgaagtgactttctcatgagcacacgggaagcatgcagatgcacagaatcattaatagctaccaagctgtgggtcacaaaacctacaggtgcaaacagctgcttatttccaggcttaagggctacgtggcatctgaggataaccactgatgtttgttcaggaaaacagtttgctgtctaggtaaayatggtatctcagtggcaaaagaagatacttcctatacacatttactaagttcaccatgaagagtcatgwtgtctcccagaagctctgtacaaagggcttcaccatgtgctcaccagaaactagcagcagaaaagcagcacaacaaagccaatctgcaaagccaacaaacacagaatgaagcccaaggccatttcacactgcacctaaagctagcaggcccacgtcaagcccgtggccacccaatgcagccagtattgcccagtgaagtctgaagccctgctagctgtacaaagggcatgcataaaaactygacagtggagctgaagttagtctataaactacgaaatgagcagatttataaagttaagt

SEQ ID NO: 67587 - DNA, 600 bp, Chicken  19866894337468_3
agtggcaaaagaagatacttcctatacacatttactaagttcaccatgaagagtcatgwtgtctcccagaagctctgtacaaagggcttcaccatgtgctcaccagaaactagcagcagaaaagcagcacaacaaagccaatctgcaaagccaacaaacacagaatgaagcccaaggccatttcacactgcacctaaagctagcaggcccacgtcaagcccgtggccacccaatgcagccagtattgcccagtgaagtctgaagccctgctagctgtacaaagggcatgcataaaaactygacagtggagctgaagttagtctataaactacgaaatgagcagatttataaagttaagttctgtgctctgagcatttgcagagaaatttctctgaagataatattttatctgaaagtgttaaactgcagtcttatatccataaagcctcaggatccacacttcctttcgtttcttcaacacatactattctgtgtcctcagcatatgtgaaaagcagtaacacaaagggttaatacattgttttccgtattaaaggagaaaccccagtataagaatcctgtacgtttctgagtacttatg

SEQ ID NO: 67588 - DNA, 599 bp, Chicken  19866894337471_1
  misc_feature (1)..(58): n is any nucleotide
nnnnnnnnnnnnnnnnnnnnnnnnnnnnnnnnnnnnnnnnnnnnnnnnnnnnnnnnnncgcgtccgtcttatggaggcatagcgctcctcggctctccttcggggaggaactttgagagaagtttcagtgcctgctgcttgaggggctcgttaactgcgaataatgaaagaatgtgtctgtgagaggggaatatttaccagctcgagccacaaggtggtaaacaccgaagattgctgttggtttttttttctgcctgtagatttgtcagaaaatattttattgttcattcaaatcgtggrgattttagtagtggtgtgtgatggaagaagcgatgctttgactcagtgcttttcagcctagaaaataagcataacttcagtatgcattgctagatgtgtctgtagaaaacaaatcactttcttaacatggagctttgartttcactagtttgaacatgtcggggtatagcacgtaaatgagcagagaatggaaaaygcaatgctgtgatgtgtgtaacatttctggagctccttttgctttcgttgtctgtccgttgaaaaagctttgttggagtgcacccagaaaggcctgctccgtg

SEQ ID NO: 67589 - DNA, 600 bp, Chicken  19866894337471_2
tgaggggctcgttaactgcgaataatgaaagaatgtgtctgtgagaggggaatatttaccagctcgagccacaaggtggtaaacaccgaagattgctgttggtttttttttctgcctgtagatttgtcagaaaatattttattgttcattcaaatcgtggrgattttagtagtggtgtgtgatggaagaagcgatgctttgactcagtgcttttcagcctagaaaataagcataacttcagtatgcattgctagatgtgtctgtagaaaacaaatcactttcttaacatggagctttgartttcactagtttgaacatgtcggggtatagcacgtaaatgagcagagaatggaaaaygcaatgctgtgatgtgtgtaacatttctggagctccttttgctttcgttgtctgtccgttgaaaaagctttgttggagtgcacccagaaaggcctgctccgtgttcctaaggctggataggggaaacgttgctgttgatgatcaggagcagactggggttaaatgttcttggctgcatgggatttgtgtactgtggctgcagagcgactgtagggaagggaagagtgcgtaagtggctggcag

SEQ ID NO: 67590 - DNA, 600 bp, Chicken  19866894337471_3
accagctcgagccacaaggtggtaaacaccgaagattgctgttggtttttttttctgcctgtagatttgtcagaaaatattttattgttcattcaaatcgtggrgattttagtagtggtgtgtgatggaagaagcgatgctttgactcagtgcttttcagcctagaaaataagcataacttcagtatgcattgctagatgtgtctgtagaaaacaaatcactttcttaacatggagctttgartttcactagtttgaacatgtcggggtatagcacgtaaatgagcagagaatggaaaaygcaatgctgtgatgtgtgtaacatttctggagctccttttgctttcgttgtctgtccgttgaaaaagctttgttggagtgcacccagaaaggcctgctccgtgttcctaaggctggataggggaaacgttgctgttgatgatcaggagcagactggggttaaatgttcttggctgcatgggatttgtgtactgtggctgcagagcgactgtagggaagggaagagtgcgtaagtggctggcagttctgctagtgctgttctgtaagttcgctgtgtcagtggtctgctatttatttatcc

SEQ ID NO: 67591 - DNA, 599 bp, Chicken  19866894337472_1
  misc_feature (1)..(5): n is any nucleotide
nnnnnacagggcaagggggaatgattttaaatgaaaggaagggagtttcagattagatgtaagggagaaaatttttactgagacagtggtgaggtgctgaaacaggctgtccagagaggctgtggatgccccgtccctagaggtgtttaaggccgggttgtatgggaccctctgcagcctgatctactactcaatctagcagttggcaacactgcctgtggcagggggaggttgcagttggtgatccttgaggtcccttctaactgaagccattctatgattctttgattccatgattastgtgacatctgctgcattttgtgtagaacccagttctaaaatatctaccaccatgggtaaaggtggtaaggacttagtttcaagaaagcttaatctaattaaatgagaaaatactggaatcgtgatgtacctgattattacattctcaggaaacagaacaatagtaatgaattttagattaagaaagaggtacctacaaagtttaggatctgtacagtaagcatatttattaagggaaaagattttatgacgtaaatttggactttggctcctgccatcaagttctgctcgagatgcca

SEQ ID NO: 67592 - DNA, 600 bp, Chicken  19866894337472_2
taattatatccacaaactatttgaatgcatgaacaggcatgttatgaaaaacagaatgctggcaattctgttcctttttctcattttttagatcagaaaaacactgttattattgttatacataatgatgcttggtttactaacatttgtaatgagctttaagactattaaataggaggtgctagagatcagcagtcttttatttgcctatgtcacagtcaatttatttcataaatttcttcctatggaagatcttgaaaatttacttattcttgtttgattcatacttgcagtactcaytatgacagagtctgtgtatgtgtggattgttcttctctagtccccaaaaagaaaaaaaaaaaaaaaaaaaagtgaagataaaatgaagctactccttcagtgctttaaaagtcttcacctagctgagctgtactgtggtgggcaggatgcaactgaatgtggaggacatttgtttgctttgtaacttcactgggatccctcaggcacttcatgtacagtctagcctgcatgatagagtagcagcaggggagaaagtgaaggcaaacacaggatgtcagaaagaagtctttaaagtagatg

SEQ ID NO: 67593 - DNA, 600 bp, Chicken  19866894337472_3
aatgctggcaattctgttcctttttctcattttttagatcagaaaaacactgttattattgttatacataatgatgcttggtttactaacatttgtaatgagctttaagactattaaataggaggtgctagagatcagcagtcttttatttgcctatgtcacagtcaatttatttcataaatttcttcctatggaagatcttgaaaatttacttattcttgtttgattcatacttgcagtactcaytatgacagagtctgtgtatgtgtggattgttcttctctagtccccaaaaagaayaaaaaaaaaaaaaaaaagtgaagataaaatgaagctactccttcagtgctttaaaagtcttcacctagctgagctgtactgtggtgggcaggatgcaactgaatgtggaggacatttgtttgctttgtaacttcactgggatccctcaggcacttcatgtacagtctagcctgcatgatagagtagcagcaggggagaaagtgaaggcaaacacaggatgtcagaaagaagtctttaaagtagatgttcagatagctgaaatattgaacatcctgtttggggattgtctttcagggaaga

SEQ ID NO: 67594 - DNA, 600 bp, Chicken  19866894337476_1
tagtaacctgcattaacatacttctgtatctaactgcagtaactgattagaaattcgtttttatatcaaaaaaaggaaagtcttagcatgcagtaacatagaactcaattaaaaaaaaataggccagtgatttccttcacatctgttttttcaaatttatcaagcgtgagcttccaaaggttagtaagagaagtatgtattagactacatcactgacatatatatattcacacacacacaccatagtacaaaatctcattttcaactacagatgcatcgcatcagaagtagaacaaagcytttttttttcctgactggaaaaagcagatgctgatctgacaaaagagtgggaaagcagcaaaatgtgccttgacagatattatgtgtgtactctttttggtctataaactgcaccaccatctccggcaatcctcaaatcccttccatttcctcagcatccagaaaaatctcatttcaatgtaattgttgccacaacactaaaggccagtttgaacaggcagttaactgaggaattactcacaagtaataaccctacaccctccttagacttaagagtttggcttttaatacaacatcctg

SEQ ID NO: 67595 - DNA, 600 bp, Chicken  19866894337476_2
tttttcctgactggaaaaagcagatgctgatctgacaaaagagtgggaaagcagcaaaatgtgccttgacagatattatgtgtgtactctttttggtctataaactgcaccaccatctccggcaatcctcaaatcccttccatttcctcagcatccagaaaaatctcatttcaatgtaattgttgccacaacactaaaggccagtttgaacaggcagttaactgaggaattactcacaagtaataaccctacaccctccttagacttaagagtttggcttttaatacaacatcctgatcrgtcagtataaaagccaaagcatctcactgacaactctgtgttgcatataatcgagttactaagtgagcctgtaaaagcacgaggcccaagttagccaacacacacaacccctgcaaatcattcattcacatgaaaatgcagctgttaagaacrgaacatattttacctttcatcacagtaggaaaatttcatatcgagactgtgacgactgaggaacgttttactgtccaaggggacctcaatgtttgatgggtgaggaattggttcacatatcaacaccaagcacgtcatgggaggctt

SEQ ID NO: 67596 - DNA, 447 bp, Chicken  19866894337476_3
tccagaaaaatctcatttcaatgtaattgttgccacaacactaaaggccagtttgaacaggcagttaactgaggaattactcacaagtaataaccctacaccctccttagacttaagagtttggcttttaatacaacatcctgatcrgtcagtataaaagccaaagcatctcactgacaactctgtgttgcatataatcgagttactaagtgagcctgtaaaagcacgaggcccaagttagccaacacacacaacccctgcaaatcattcattcacatgaaaatgcagctgttaagaacrgaacatattttacctttcatcacagtaggaaaatttcatatcgagactgtgacgactgaggaacgttttactgtccaaggggacctcaatgtttgatgggtgaggaattggttcacatatcaacaccaagcacgtcatgggaggctt

SEQ ID NO: 67597 - DNA, 600 bp, Chicken  19866894337481_1
cagtggtcagcatcacagcatgcctctgccagcccattttccctttggcaagaaagctgccaaccacagcttccatttataacaattaagcagatgaagcttaaaacccacatacatgcataaaatcttccaagggagctccagcaagggcaggaagatgagagtgagagaaaagatgttagaagatgagccccatggactcacaccagaacacaaccagagacagcaaaggttaatggcactatggctcattgagggagaatggaccgtgggcatgaggagcagcacagcctggtgagrtctccagccattccctaaatgaagcagttctaccatctgcaggcaagcaygctttggcattaaacattttgcacgatggcctaattaatagagcacaaagtgacttattaaatctaaattaaggaaccaactgactagcaaaaaaatacatgtctctggtcaggtaatggctgtatcaaacattttgatgtgctgaaagcccagcaacattcactggtagactgcaaacaagcaaaagaagataatcagaaatttttaaaacaaaagagaggaaggacacatggmtttgggaagtctgtc

SEQ ID NO: 67598 - DNA, 600 bp, Chicken  19866894337481_2
agaaagctgccaaccacagcttccatttataacaattaagcagatgaagcttaaaacccacatacatgcataaaatcttccaagggagctccagcaagggcaggaagatgagagtgagagaaaagatgttagaagatgagccccatggactcacaccagaacacaaccagagacagcaaaggttaatggcactatggctcattgagggagaatggaccgtgggcatgaggagcagcacagcctggtgagrtctccagccattccctaaatgaagcagttctaccatctgcaggcaagcaygctttggcattaaacattttgcacgatggcctaattaatagagcacaaagtgacttattaaatctaaattaaggaaccaactgactagcaaaaaaatacatgtctctggtcaggtaatggctgtatcaaacattttgatgtgctgaaagcccagcaacattcactggtagactgcaaacaagcaaaagaagataatcagaaatttttaaaacaaaagagaggaaggacacatggmtttgggaagtctgtcagattaccagactagcagaaatggaaggatgactggttatcmtctgtcca

SEQ ID NO: 67599 - DNA, 600 bp, Chicken  19866894337481_3
cacagcctggtgagrtctccagccattccctaaatgaagcagttctaccatctgcaggcaagcaygctttggcattaaacattttgcacgatggcctaattaatagagcacaaagtgacttattaaatctaaattaaggaaccaactgactagcaaaaaaatacatgtctctggtcaggtaatggctgtatcaaacattttgatgtgctgaaagcccagcaacattcactggtagactgcaaacaagcaaaagaagataatcagaaatttttaaaacaaaagagaggaaggacacatggmtttgggaagtctgtcagattaccagactagcagaaatggaaggatgactggttatcmtctgtccagttcctccctatgtcctcctctgtcagcagttctgtcttctgcaggcttgcatcaattccaaaactttctcagtcccatcacaaattaagagctttgaggttgcagctacaaaagatgagcccatagatccaaggagaactcagtgctcagaaatgcacccaatgtttgctctgtacctccatgccctgcatttcatctcattacacttttcagactctgttttgtcaccccctc

SEQ ID NO: 67600 - DNA, 600 bp, Chicken  19866894337481_4
gcaagcaygctttggcattaaacattttgcacgatggcctaattaatagagcacaaagtgacttattaaatctaaattaaggaaccaactgactagcaaaaaaatacatgtctctggtcaggtaatggctgtatcaaacattttgatgtgctgaaagcccagcaacattcactggtagactgcaaacaagcaaaagaagataatcagaaatttttaaaacaaaagagaggaaggacacatggmtttgggaagtctgtcagattaccagactagcagaaatggaaggatgactggttatcmtctgtccagttcctccctatgtcctcctctgtcagcagttctgtcttctgcaggcttgcatcaattccaaaactttctcagtcccatcacaaattaagagctttgaggttgcagctacaaaagatgagcccatagatccaaggagaactcagtgctcagaaatgcacccaatgtttgctctgtacctccatgccctgcatttcatctcattacacttttcagactctgttttgtcaccccctcaagatcaaaggataccttgaccttactttcaccttgaggtcagcacctccycagccc

SEQ ID NO: 67601 - DNA, 600 bp, Chicken  19866894337481_5
ttatcmtctgtccagttcctccctatgtcctcctctgtcagcagttctgtcttctgcaggcttgcatcaattccaaaactttctcagtcccatcacaaattaagagctttgaggttgcagctacaaaagatgagcccatagatccaaggagaactcagtgctcagaaatgcacccaatgtttgctctgtacctccatgccctgcatttcatctcattacacttttcagactctgttttgtcaccccctcaagatcaaaggataccttgaccttactttcaccttgaggtcagcacctccycagcccaccagaggcacctgctggttagagcatgccctcatctccttcagtgctacttgaggaaaccaaatcaccatggcttgctgtagccttgccacaatgataaggctgcacaaaaatctcagagggtgcgcagaaggaaagtgggacagaaaacagatgtctgcctgttacttcaaaaagaaaacaaggtgcaattcatgttttaagtgcaatttttacgtctctgcattgaaaatatagttaaaggcatgtgttctcctctcccacagaggatactaatggaataatccaattact

SEQ ID NO: 67602 - DNA, 600 bp, Chicken  19866894337483_1
gaactcttaagcagaaagcatctaatggaaggttgagcacaaatcagcaagtttgaagactgtgattaggccactctgaggctgaaattatagctgacttctatgctgctgtgtgaatacagtagtatttaccagaaagcaaagcttacaaacacatttctgtcagcgagagaagcttgatagaatatactcgtacagctacattctaagtctgtgcagtctgtggttttagtccagccgaagattccattcaataacttcaataaaattatttcacttgtatttttacactatttaatrttacctgaataaaatacaattttatgaaaggcagtttcaagatctctgaatgcagtgtttgaactttatattattagccattttgcctctaaacccttgtgtaatctgaatgcaaatacgtaactatagaagtttcatttctttggtttctactgcaacaaaagaaaaagaattaatttggaatactaatgtaataagttcctaaattgcttttcattttatgttaattgtaaagatgtaagtgcaaataaaacaaacttctaaagagaacaatttaggctttattgccattatttctct

SEQ ID NO: 67603 - DNA, 435 bp, Chicken  19866894337486_1
acttgactccagactcagtggggcatggtggtgtcatccccattcacagtagcactttggaactccccgtccctgtcgtcatggagcccgaccacatcgctgggcgggtggcaagggatgtcagccagcacactaaatgactccattcacaccgtggccatgagcaccaactctgtgagcgtggcactctctacctcacacaacctcgcttctctggactcggtagccttgcacgaagtgggcctcagccttgagccagtggcggtgtcttccataaatcaggaagtagccatggggccrggtcatgtgggatgtgtccgcagacaatcttgccttcgtaccgtcctctctgcaaatggaagactccaattcgaacaaggagaacatggcaaccttgtttaccatatgtgagtgtgcatttgctgctttctttgg

SEQ ID NO: 67604 - DNA, 600 bp, Chicken  19866894337489_1
cagcccactgctcttgtcactgagtgggaactactctgcccctctgactgttaccagcagtgggaacaaggtctatctccgttggtcctctgatcatgcctacaacagaaaaggcttcaaaatccgctactccggtgagtgcccggcaggggctgcatgcctctgccaacagcgtggtcatcccttcagctatggatctacacaaaattgctgcagaggggcagaggccatctgtgaccacaggaggtgccaaagcccgggggagggcacacaaagcctttttctgaggctggtgaggcytgggaaagcagctccacctccagcaaaacccagcrgctctggctgggcttcctccgctactcttagcagtcagaaccagaatgtataaccacagacagcttggtttcggatggatgaaacccaccccaggcaattcagtcaggattcctttgttacaaaattattgtstctctgcaaagatgagaccattttgagatgtgtgaacactaacatcacgaaacataagttgtgctaagagctccctggtgcatgctgacacttagatgtcactcactgagttacaaacgtgtagaaaatggt

SEQ ID NO: 67605 - DNA, 600 bp, Chicken  19866894337489_2
ctgcccctctgactgttaccagcagtgggaacaaggtctatctccgttggtcctctgatcatgcctacaacagaaaaggcttcaaaatccgctactccggtgagtgcccggcaggggctgcatgcctctgccaacagcgtggtcatcccttcagctatggatctacacaaaattgctgcagaggggcagaggccatctgtgaccacaggaggtgccaaagcccgggggagggcacacaaagcctttttctgaggctggtgaggcytgggaaagcagctccacctccagcaaaacccagcrgctctggctgggcttcctccgctactcttagcagtcagaaccagaatgtataaccacagacagcttggtttcggatggatgaaacccaccccaggcaattcagtcaggattcctttgttacaaaattattgtstctctgcaaagatgagaccattttgagatgtgtgaacactaacatcacgaaacataagttgtgctaagagctccctggtgcatgctgacacttagatgtcactcactgagttacaaacgtgtagaaaatggtgtaaaaagcctcgtgccctcctcaggcattgtgct

SEQ ID NO: 67606 - DNA, 600 bp, Chicken  19866894337489_3
acagcgtggtcatcccttcagctatggatctacacaaaattgctgcagaggggcagaggccatctgtgaccacaggaggtgccaaagcccgggggagggcacacaaagcctttttctgaggctggtgaggcytgggaaagcagctccacctccagcaaaacccagcrgctctggctgggcttcctccgctactcttagcagtcagaaccagaatgtataaccacagacagcttggtttcggatggatgaaacccaccccaggcaattcagtcaggattcctttgttacaaaattattgtstctctgcaaagatgagaccattttgagatgtgtgaacactaacatcacgaaacataagttgtgctaagagctccctggtgcatgctgacacttagatgtcactcactgagttacaaacgtgtagaaaatggtgtaaaaagcctcgtgccctcctcaggcattgtgctctgttcttggaggagcagaaccagggattcctggttgctcattcagcacaaaaccactgctgtgtgctgagagcttgctgagaattccttcaagtgaattactattttttggaacttagcaaatcttaattaa

SEQ ID NO: 67607 - DNA, 600 bp, Chicken  19866894337489_4
gccctcctcaggcattgtgctctgttcttggaggagcagaaccagggattcctggttgctcattcagcacaaaaccactgctgtgtgctgagagcttgctgagaattccttcaagtgaattactattttttggaacttagcaaatcttaattaatggaagttataaaactgggttgagaacttgccagcacgtcataaataagttatgactttactcagtaaatgaattaagtaatatttaattatcagaaattactttttatttctagagctgagtgaaacgtagatagtagctctgcrctctttccccctttgtatttatctatccctggttctgtttcttgtacagcctcaggttatggtaagcagccgaagccaggactgccacrtgattcccgagaacaggaaagggatttgtgctgcagcccatgcagtgatttatgtacctccctttgcccttcttgcagctccttactgcagcctcccgcagcctccagcccatgggctgatcctcagccagacggggctgcagcccggctccacggttcgctttggctgtgacagcggctaccggctcgtgggtcacagcactgccacctg

SEQ ID NO: 67608 - DNA, 589 bp, Chicken  19866894337489_5
gagagcttgctgagaattccttcaagtgaattactattttttggaacttagcaaatcttaattaatggaagttataaaactgggttgagaacttgccagcacgtcataaataagttatgactttactcagtaaatgaattaagtaatatttaattatcagaaattactttttatttctagagctgagtgaaacgtagatagtagctctgcrctctttccccctttgtatttatctatccctggttctgtttcttgtacagcctcaggttatggtaagcagccgaagccaggactgccacrtgattcccgagaacaggaaagggatttgtgctgcagcccatgcagtgatttatgtacctccctttgcccttcttgcagctccttactgcagcctcccgcagcctccagcccatgggctgatcctcagccagacggggctgcagcccggctccacggttcgctttggctgtgacagcggctaccggctcgtgggtcacagcactgccacctgctcccagcacccacagggctacttccactggaacgaaagcgatcccgctgtgccaaggtgagagcaagaagctgcatc

SEQ ID NO: 67609 - DNA, 600 bp, Chicken  19866894337490_1
gcctgttactactgcctcaagctcaccttgtcagctctcccaacactagtaccaatctcctcacaatttcactggaaggatgctcagctttctgcctcaacatcaactttgcaaagattgaatgccctgggttcaaaaaaaggtatcaatggcaaatagagccactggagagcaatgcagtttgcagggctcagcagagctgcagagatcacaagcctgcaggagtgacccgcaaattgcaaaacaccagcagagcactaacagggctcaaaaagcctgaaatgccctcattttatgcartgctttctaaaaaggagatggagcttgattgaacgtctcttcacttctgacccacgtttgtgttcccaggaattcagacttgtctgcagaggtaaatgaggtacatgcaagctattcctaaaagccaaactgagaagtttcacacgttacacaatgcattttaaatagataatgctggagggaggaagggtgagcggcccagattgaccatttgataaatcaggaacaactggagctaactttatccctctcatccactcaagaggcttataatctcacaccttggagcaataaattagg

SEQ ID NO: 67610 - DNA, 599 bp, Chicken  19866894337500_1
  misc_feature (1)..(85): n is any nucleotide
nnnnnnnnnnnnnnnnnnnnnnnnnnnnnnnnnnnnnnnnnnnnnnnnnnnnnnnnnnnnnnnnnnnnnnnnnnnnnnnnnnnnncacttaacccagcctgcatttccctcctggtgctgcaggtccctgctgctgccccacggtgctgaggaaggagataaagcatggtgacatgcttggaataagtggaggagactggaagtggtattttgggtgcatgcttgttccatgcagcaaaaatgtgatcctctggatccatagtcaaaggcacattaggaataggtaaacacaagtatttytgcccaccggggagctggtatcctttagcagtcactgctgtgggktgttcacaccagacttctgtgcaacagcagcccaaaagggagatgctttttgagtcmggagtgttttggtggtctgactggggaagcaagcagtggtgctagcaggtagctgggctttcaccagtggggttcactgcagcatgctcagccttcmtgctaaagggattgtcttgcagcgagtctcatgcagttgcattgcatgggaacataagcttttgcttttttgaacagtaccacttgtgaccgatattgat

SEQ ID NO: 67611 - DNA, 599 bp, Chicken  19866894337500_2
  misc_feature (1)..(40): n is any nucleotide
nnnnnnnnnnnnnnnnnnnnnnnnnnnnnnnnnnnnnnnncacttaacccagcctgcatttccctcctggtgctgcaggtccctgctgctgccccacggtgctgaggaaggagataaagcatggtgacatgcttggaataagtggaggagactggaagtggtattttgggtgcatgcttgttccatgcagcaaaaatgtgatcctctggatccatagtcaaaggcacattaggaataggtaaacacaagtatttytgcccaccggggagctggtatcctttagcagtcactgctgtgggktgttcacaccagacttctgtgcaacagcagcccaaaagggagatgctttttgagtcmggagtgttttggtggtctgactggggaagcaagcagtggtgctagcaggtagctgggctttcaccagtggggttcactgcagcatgctcagccttcmtgctaaagggattgtcttgcagcgagtctcatgcagttgcattgcatgggaacataagcttttgcttttttgaacagtaccacttgtgaccgatattgatcggtcttcagccttgtcagtacragatctttatcttctatatttc

SEQ ID NO: 67612 - DNA, 600 bp, Chicken  19866894337500_3
atttccctcctggtgctgcaggtccctgctgctgccccacggtgctgaggaaggagataaagcatggtgacatgcttggaataagtggaggagactggaagtggtattttgggtgcatgcttgttccatgcagcaaaaatgtgatcctctggatccatagtcaaaggcacattaggaataggtaaacacaagtatttytgcccaccggggagctggtatcctttagcagtcactgctgtgggktgttcacaccagacttctgtgcaacagcagcccaaaagggagatgctttttgagtcmggagtgttttggtggtctgactggggaagcaagcagtggtgctagcaggtagctgggctttcaccagtggggttcactgcagcatgctcagccttcmtgctaaagggattgtcttgcagcgagtctcatgcagttgcattgcatgggaacataagcttttgcttttttgaacagtaccacttgtgaccgatattgatcggtcttcagccttgtcagtacragatctttatcttctatatttctatcactactctgtaataaaagctaccgctgtattttgtgtgtttccctgtgtagctt

SEQ ID NO: 67613 - DNA, 600 bp, Chicken  19866894337500_4
gaagtggtattttgggtgcatgcttgttccatgcagcaaaaatgtgatcctctggatccatagtcaaaggcacattaggaataggtaaacacaagtatttytgcccaccggggagctggtatcctttagcagtcactgctgtgggktgttcacaccagacttctgtgcaacagcagcccaaaagggagatgctttttgagtcmggagtgttttggtggtctgactggggaagcaagcagtggtgctagcaggtagctgggctttcaccagtggggttcactgcagcatgctcagccttcmtgctaaagggattgtcttgcagcgagtctcatgcagttgcattgcatgggaacataagcttttgcttttttgaacagtaccacttgtgaccgatattgatcggtcttcagccttgtcagtacragatctttatcttctatatttctatcactactctgtaataaaagctaccgctgtattttgtgtgtttccctgtgtagctttttagcagctcctgtccttcaggccaacagcacctctgtatccgcaccgtctctcattttcaggctttccctttttagggtctgaggtagctcagta

SEQ ID NO: 67614 - DNA, 557 bp, Chicken  19866894337500_5
ctttagcagtcactgctgtgggktgttcacaccagacttctgtgcaacagcagcccaaaagggagatgctttttgagtcmggagtgttttggtggtctgactggggaagcaagcagtggtgctagcaggtagctgggctttcaccagtggggttcactgcagcatgctcagccttcmtgctaaagggattgtcttgcagcgagtctcatgcagttgcattgcatgggaacataagcttttgcttttttgaacagtaccacttgtgaccgatattgatcggtcttcagccttgtcagtacragatctttatcttctatatttctatcactactctgtaataaaagctaccgctgtattttgtgtgtttccctgtgtagctttttagcagctcctgtccttcaggccaacagcacctctgtatccgcaccgtctctcattttcaggctttccctttttagggtctgaggtagctcagtatcaacacttcctgcctgaggcagcgcttgggctgtgctcaacaaaacacagccgctcccctgccttcctctgcacaccca

SEQ ID NO: 67615 - DNA, 600 bp, Chicken  19866894337505_1
atattttttcttattttagttctatatatgttaagatcttcctccttctcaaatggagcactgccaattaaattgacctagtgaagaaagaaaacaaatgataatgaagagaaaaaatgaaactcttgtaacagaggtttggaaagctccatcttttcactactatcttttacacaacattcgaaaacggcccccctgctgacttaagtcagtcattaatctaagaaaatcgtgtcttaataaagtcatggttttgatatttaatactacagctattccaatacaacacctgatacacayacatacagagtgcagagctgaatcctgacctatactaatcaggtttctgaagctttgcctcatgcatactcacttggctagtctactcagtgctgttttaacagacacagaaacagatmacttctcagcagatccctcttccatctttcttctagtcaagatgtacttcatcatcacactagcaattctgaacatgttcccttgtaggaatgaaagccaggcactttgcaacactacttgtgcactgaggcctctcgttcacaagttcatgaaactgcacattgcagggtggggaagaac

SEQ ID NO: 67616 - DNA, 600 bp, Chicken  19866894337505_2
aaactcttgtaacagaggtttggaaagctccatcttttcactactatcttttacacaacattcgaaaacggcccccctgctgacttaagtcagtcattaatctaagaaaatcgtgtcttaataaagtcatggttttgatatttaatactacagctattccaatacaacacctgatacacayacatacagagtgcagagctgaatcctgacctatactaatcaggtttctgaagctttgcctcatgcatactcacttggctagtctactcagtgctgttttaacagacacagaaacagatmacttctcagcagatccctcttccatctttcttctagtcaagatgtacttcatcatcacactagcaattctgaacatgttcccttgtaggaatgaaagccaggcactttgcaacactacttgtgcactgaggcctctcgttcacaagttcatgaaactgcacattgcagggtggggaagaacccagcactaggaaatagaaaagatttcaaaggtcattcaataggatttttctcatcattttgttgaaattttacacttctgcgttttgagaaacctaatgagatggtttctctggaagc

SEQ ID NO: 67617 - DNA, 600 bp, Chicken  19866894337505_3
atgttcccttgtaggaatgaaagccaggcactttgcaacactacttgtgcactgaggcctctcgttcacaagttcatgaaactgcacattgcagggtggggaagaacccagcactaggaaatagaaaagatttcaaaggtcattcaataggatttttctcatcattttgttgaaattttacacttctgcgttttgagaaacctaatgagatggtttctctggaagctctgaaacagtatatcactagttagacattgtcaagaaaagaataacaatattttaatcttccttgctggatcygagcaccttttctggcttactcagtattacgcctcttgcttatatttctactaaatacaatgtcttcagctaaagctaaatatagcactgagactaaaaggcattctttgaagaatatttatgcacatgtaattcatttttgtaataaaagttttgaggatatctttgtgratgcatcgcagccagcagattgctttagttctgaagaactaaattctgcttaaygacagaattaagtcaagttgaagagtgcaggggtgcagagacactaaatttcatattctggacaaagatccaaat

SEQ ID NO: 67618 - DNA, 600 bp, Chicken  19866894337505_4
gaaattttacacttctgcgttttgagaaacctaatgagatggtttctctggaagctctgaaacagtatatcactagttagacattgtcaagaaaagaataacaatattttaatcttccttgctggatcygagcaccttttctggcttactcagtattacgcctcttgcttatatttctactaaatacaatgtcttcagctaaagctaaatatagcactgagactaaaaggcattctttgaagaatatttatgcacatgtaattcatttttgtaataaaagttttgaggatatctttgtgratgcatcgcagccagcagattgctttagttctgaagaactaaattctgcttaaygacagaattaagtcaagttgaagagtgcaggggtgcagagacactaaatttcatattctggacaaagatccaaattttgccaatgaaaaatattgtaatttaatgaacatttttcccagaggtttgcaaaacaagcaaggaaacagtcagacaactttatggataatacattcagacattttcctctggagaggctgaagtggcagtaagaactcttcagattttttttttccatatcttactttc

SEQ ID NO: 67619 - DNA, 600 bp, Chicken  19866894337505_5
ctctgaaacagtatatcactagttagacattgtcaagaaaagaataacaatattttaatcttccttgctggatcygagcaccttttctggcttactcagtattacgcctcttgcttatatttctactaaatacaatgtcttcagctaaagctaaatatagcactgagactaaaaggcattctttgaagaatatttatgcacatgtaattcatttttgtaataaaagttttgaggatatctttgtgratgcatcgcagccagcagattgctttagttctgaagaactaaattctgcttaaygacagaattaagtcaagttgaagagtgcaggggtgcagagacactaaatttcatattctggacaaagatccaaattttgccaatgaaaaatattgtaatttaatgaacatttttcccagaggtttgcaaaacaagcaaggaaacagtcagacaactttatggataatacattcagacattttcctctggagaggctgaagtggcagtaagaactcttcagattttttttttccatatcttactttctgacagaagaaatacatatatgcacatgtttatgtatgtgtaacccctctaatg

SEQ ID NO: 67620 - DNA, 600 bp, Chicken  19866894337506_1
ataatgggatgatggaaaataccatgctaatagcagggtggcaaagtctttggctgcaacaaatgagaatgagcccaaaatgcagcagccacagatgcagaaatgaaggaaaaatgctgcttaccctcggaagacctcaggtaggcagggatctccagcaagataccttctcctccattgccaacccttaaatgaggtctgggaggggttggatcctggctccaccccttctggtcaattaggtgcattgctccccccccaccccccttcccccaagctccccttggccctgccttcccrcccagtgcttcatcactggttcatgctgtgacttagcatttccactacaagtaccatcgtttgacaaagacaatgaataagaacttgcaacctatcaacgaccaatcacttccaatatttttgttttcagcttgcgtttggcattgtaatgtatttcttgagcacaaactctcaagcattttcagctataggtaatatgattactcagatttttattcctatttgttgtacagttcacaatttctccctggtagcttcaggttgtagcaattatgttattaggaagattgattatcacat

SEQ ID NO: 67621 - DNA, 600 bp, Chicken  19866894337521_1
aattggaacgagaaaatgacctcacagattgctgggaggaacataatggctgcaatgtgcacaaaaaggcaggtggaagcattccaggtctctggtgacccagaattcgaaggagctgtgtgaggcttctttatcaggtatggagaaagcattttaaggctttgaacagtagtggagtaaagaaattacgtgcttgacctttcatgtgaggatagtggagttggtggtgcttattcagtgctgaactgacaggaaagccagctgcagctctttgctgtaggcagatgaagtgaagcaccrtagtccagatgaaggcaggaatagaatggggcacctgagggctgcgtctccatcagaccratgcctttatctaggaatgagggctttgcttttgtgataacaaacactgaacaggctaaagtcatttagtgcaccatttcagtcctcttgaggaggaagtaaacaaatctaagaaatgtcttaatctgaagatgggtgagctttaccttctgtctgagtctgcacccgggagcttcctgggtaaccagcaatggcagcgtgtgcagccctgctgactgtgtctgtatcaaagatgtttgc

SEQ ID NO: 67622 - DNA, 600 bp, Chicken  19866894337521_2
acaaaaaggcaggtggaagcattccaggtctctggtgacccagaattcgaaggagctgtgtgaggcttctttatcaggtatggagaaagcattttaaggctttgaacagtagtggagtaaagaaattacgtgcttgacctttcatgtgaggatagtggagttggtggtgcttattcagtgctgaactgacaggaaagccagctgcagctctttgctgtaggcagatgaagtgaagcaccrtagtccagatgaaggcaggaatagaatggggcacctgagggctgcgtctccatcagaccratgcctttatctaggaatgagggctttgcttttgtgataacaaacactgaacaggctaaagtcatttagtgcaccatttcagtcctcttgaggaggaagtaaacaaatctaagaaatgtcttaatctgaagatgggtgagctttaccttctgtctgagtctgcacccgggagcttcctgggtaaccagcaatggcagcgtgtgcagccctgctgactgtgtctgtatcaaagatgtttgcacaacagcagcagtgtgagaacacgtgtgaaaccgtcagaatttagtctgctgagccctt

SEQ ID NO: 67623 - DNA, 600 bp, Chicken  19866894337522_1
tggcttgctgcgtgctgcacaacatcgctctgcgacgccggatgcccctggaaccccccgacggccccgaacccgaccccgaacccgagctgcccctgcaggctccccacgtgcagatctccagcgaagcgcgggctgtgcgtgctcggatcgtgcagcaggtgagggacagcatggggtgaggaaaggacgtcgtgcagcacagcgggggcgcagattgggggcgctggggacgcgtggtgggggtgtgagaccccaatacctcgaggggagcacctggggatgcgagccccaaaaccytgggggatgtgctcagagacattggggacacgcctggggacacgcggtggggatgggagccccaaatccttgggggaacacggggggaatgtggggatgtgagcccccaaatccttggagacgcactggggacgcacttggggatgttggggatacgtggtgggggtgtgagacccaaaaacctcaaggggtgcacgtggggatgtggggatgtgagccccaaaaccctgggggatacctggagaactcggggacacatccggccatgtgttggggatgtgagatcccaaatccttgggg

SEQ ID NO: 67624 - DNA, 600 bp, Chicken  19866894337541_1
aaaagtctcagtgtaaagctaatctggattagttgagttaattctcctcttagttaaaggagacacagatctaaaggggaatgatactgccttgtattcgtactctgtagtggtgccaaattgtttttttttaccatctcttgatttaaaatgaagtttttataatcaaattttgtttaagtttcttgttctttgtaacaacttctctctgagtcttctggtaatggtaagtgcagggtactggttcttatgaagctgtgtgctgcaatgtgtcagacttcaaacttaagatttaaatawtttcagtaaagactaggacttcagggcaagctagaagagggtgtggtgtgtgggttcagtacttctttgcagagcagttctctcgaaagcaaggaaatgccacttgggcccctttgtggtactatttcattgctatcagctgagtcctctgcaaatacacaaaactccttcacaaagcaacttgggttcatcggaactccaagtcagatcattttacctatagataatcctagaactgtcagattcctttgacaggcaagaaaccaagcctcgtgtagtaaagttgcaagccacagaggt

SEQ ID NO: 67625 - DNA, 599 bp, Chicken  19866894337551_1
  misc_feature (1)..(119): n is any nucleotide
nnnnnnnnnnnnnnnnnnnnnnnnnnnnnnnnnnnnnnnnnnnnnnnnnnnnnnnnnnnnnnnnnnnnnnnnnnnnnnnnnnnnnnnnnnnnnnnnnnnnnnnnnnnnnnnnnnnnnnnaaatcttttaaaaattctatttattaagcacaattctgtcgccctttagacaagatgagaaaattctttctccctaactggtccctttgagatcaattgtggtattaaggaaaattatgcccagattcttcaaaactcttttccatctgtttatattataacacatgagaaattacagagmtattcaagcaaagctcttaaatctgtgggactcaaarcaatatgtggagtgtttagggattactgaaacatactatatgctatatacttgtgattcttaagtaacataatatttcactaacagcatcaatcaatctatccctaaattcttcctagaaattttatatcattctatactggagggtgcctggcactgaggctgggcttggtcaatagatgttcactaaggttcttctaattctgtaaatttgttacaacaccttccattctatcatctcggtatgatcttttatttctatt

SEQ ID NO: 67626 - DNA, 599 bp, Chicken  19866894337551_2
  misc_feature (1)..(82): n is any nucleotide
nnnnnnnnnnnnnnnnnnnnnnnnnnnnnnnnnnnnnnnnnnnnnnnnnnnnnnnnnnnnnnnnnnnnnnnnnnnnnnnnnnaaatcttttaaaaattctatttattaagcacaattctgtcgccctttagacaagatgagaaaattctttctccctaactggtccctttgagatcaattgtggtattaaggaaaattatgcccagattcttcaaaactcttttccatctgtttatattataacacatgagaaattacagagmtattcaagcaaagctcttaaatctgtgggactcaaarcaatatgtggagtgtttagggattactgaaacatactatatgctatatacttgtgattcttaagtaacataatatttcactaacagcatcaatcaatctatccctaaattcttcctagaaattttatatcattctatactggagggtgcctggcactgaggctgggcttggtcaatagatgttcactaaggttcttctaattctgtaaatttgttacaacaccttccattctatcatctcggtatgatcttttatttctattttttttccaaggcattatcaattcttctccacctcta

SEQ ID NO: 67627 - DNA, 537 bp, Chicken  19866894337554_1
gagggggatgtgcctttcctagtcttacaaagtgacttacgtttattattttttttctttcagattgcacctgtatccttctcaactcatgtatggaaaataagacctgatgcaactggcatgcaggacagtttcccttgttatctgtggcaaagagtctttatgactgtttaacaaaatggttcagattcgtcccagctcagcttggacctcccctgaaaggtatgagatttcttgaataaggaaaaccatgcacatgctgaaacacaaatcctctgctaaaagtttttaagacttgasagctcggtagcacagcaatgttgcttaataactactgggtttctgttcaagacttagactacttttcccacttactgctgttaatttaaagaaagtgtttctttccttgtgctttgtaactttgtagaccaccatacagaaataagaggattatttggcctatggaaataggccaatttgggaagcagtaccaatgctttcaggctcaatcactcactcatttatgctggcagctgt

SEQ ID NO: 67628 - DNA, 599 bp, Chicken  19866894337569_1
  misc_feature (1)..(27): n is any nucleotide
nnnnnnnnnnnnnnnnnnnnnnnnnnnttgcatagggaaatttacctctctgctcatctacaccttcacagtgggggtaaggagggaatgtaagaaggttccaccaaggagcagagaagtgacaaaatcattaaagagcaagggaaaaataggttcttccctctgtagaccctctttcctttctccagcctctcttggagaaccgaggagaaaagaaaatgtggtggaatggggtgtgacttcaacttctcagatgagaagcaaataaaatgcaaatcaatagcactatttgttcctccraattttaaaataaatataataaacccccacaaacttcttattttcacctcatccttcctctaagacattctctgcttctgtaagcattgatctggattcgtagaatcattaagattggaaaagaccacaaagatcattgagtccaaccatcagcccaccaccaccatgcccatagccacgtccctcagatgggttctattccagccagccatgttcctgaggccaaagctgttcccagggctcagaattgctgttctttctctccacagtttaatggcaggaatcgctgcagggatgct

SEQ ID NO: 67629 - DNA, 600 bp, Chicken  19866894337577_1
acgctgcccaactttgttccagtattttgctcctagctttaatgggattttgactatactggtacgttatgatggattaatgaacttaggaaaatatctgaatgtttggggaacagcccctctaaaatgctattaaaactgtatagtatagaaagtatagtatgctttggggcatgctggaaagtgttgtattggtgctgtggtagtcaggtctggcaaaaagtgaatgtattttgtcaggcaattctaagggatatgtaagtgcctgcttaggtaatgctgaaacaagaagtttccacrtaccaaagcaaagtcagagtgcaataattgtgggtttagatgctgtttaatccttgctcacttgagtttaggtgggctctaagtgtatggtaagtggtagtggaagtgatctttggcaatgatacaagttaaaatgtgtgtcgtccccccccctttttttttatctttgctgtggatttggttatgaatccacaaacttacataggtatctgaaaattctacagactagttgcttaaggcactgaattctaaatgatgatgtagtggataatgaaatccagctatcttgctttgtattca

SEQ ID NO: 67630 - DNA, 600 bp, Chicken  19866894337577_2
gtatagtatgctttggggcatgctggaaagtgttgtattggtgctgtggtagtcaggtctggcaaaaagtgaatgtattttgtcaggcaattctaagggatatgtaagtgcctgcttaggtaatgctgaaacaagaagtttccacrtaccaaagcaaagtcagagtgcaataattgtgggtttagatgctgtttaatccttgctcacttgagtttaggtgggctctaagtgtatggtaagtggtagtggaagtgatctttggcaatgatacaagttaaaatgtgtgtcgtcccccccccrttttttttatctttgctgtggatttggttatgaatccacaaacttacataggtatctgaaaattctacagactagttgcttaaggcactgaattctaaatgatgatgtagtggataatgaaatccagctatcttgctttgtattcattagtgagcacttattagaccgtatcattgcaggcttcttggcttgtattagatcttgcataagaaattgtttcatggtgcctagcctggtgacctgtctgatagtaacccgatagtgattagtgtcagtgactccaaaacaagaggcaggtct

SEQ ID NO: 67631 - DNA, 600 bp, Chicken  19866894337582_1
attggtcacaatcccttttggttcctgcagcctccctggggatagcatcaccatccgctggctggaagcagagtaggacactctcaagtccataaccatacacacgtaggcgcacttcatgctgtctaactaccgtcaagcttatacagacagatacttcttcccttggtaggcttgcacagataagcaccaggtagaggattaaatgttgggcgcagagtttttggactttcttttgtgtatggaattgcaatatgtgccagatgaaaaaagggattggtcttcccacctactttctayctccattcttcttttgttcctgaaacagatacattttttaatgtagtttaagacttagggaaagattttaaaagaaagaaagaaagcgtgtcacagtgctactccttttcagctgaataagtgtaccaggtcttagacaaaaagtcaaaatctgcttttagaataaaatcttgcttttgaaaatgattaactatagtgaaaagttatagtggatttcatggcaaagttttggacaaagttcaaaatctttcatacattttcctattcttggatttttgcggtatcattatgtgttacgtg

SEQ ID NO: 67632 - DNA, 600 bp, Chicken  19866894337586_1
gctcatgcaggtgagtatttgccagctatagaggttcccccatgctcccagggttaggcactttattggtctgcttgatgagctgacagtagagctcatctcgaagaggtcgtaaatcgtgtcctgtttggagaataccttgaattatagggatgggatcagacatagactccagctgctgtaaagagttaaatatcttgattgcttcatcttgcagagttgtgtatcctttgtctttcagcactacaaacaaaaaatggggagaacagtgtttagactgagaaatgaaagagcactcamaatcagcataggaattgttcagtgatattttacagcccttattaagcaggatgatttccatttcaaatctatggtgccaacttattctatgagctattctgctactgagatttgttctgaattgcatgaactaccattttgaaatttctgacaagttagcttaaaatacacatcttgcttgatcagacggttrttttttatggagaagcttccttccagagcaatccacactgctgagagtgcattgttttgtcactgtcacaaggaagtgataagctaatcagattgtaagtgaggtaa

SEQ ID NO: 67633 - DNA, 600 bp, Chicken  19866894337586_2
tatcttgattgcttcatcttgcagagttgtgtatcctttgtctttcagcactacaaacaaaaaatggggagaacagtgtttagactgagaaatgaaagagcactcamaatcagcataggaattgttcagtgatattttacagcccttattaagcaggatgatttccatttcaaatctatggtgccaacttattctatgagctattctgctactgagatttgttctgaattgcatgaactaccattttgaaatttctgacaagttagcttaaaatacacatcttgcttgatcagacggttrttttttatggagaagcttccttccagagcaatccacactgctgagagtgcattgttttgtcactgtcacaaggaagtgataagctaatcagattgtaagtgaggtaaagcataagtgccttatgcaaagtgacaaagatacacaacatcatttttgtctactgcagtagamgttcaattaaatccaaacaatacaaataaaataagatctctgccgtgaaactgcaagttccttttcaagtgctggaaaagaaagcaactggttcttgtactgcagattgttcagcatgggctcacaact

SEQ ID NO: 67634 - DNA, 600 bp, Chicken  19866894337586_3
aaatctatggtgccaacttattctatgagctattctgctactgagatttgttctgaattgcatgaactaccattttgaaatttctgacaagttagcttaaaatacacatcttgcttgatcagacggttrttttttatggagaagcttccttccagagcaatccacactgctgagagtgcattgttttgtcactgtcacaaggaagtgataagctaatcagattgtaagtgaggtaaagcataagtgccttatgcaaagtgacaaagatacacaacatcatttttgtctactgcagtagamgttcaattaaatccaaacaatacaaataaaataagatctctgccgtgaaactgcaagttccttttcaagtgctggaaaagaaagcaactggttcttgtactgcagattgttcagcatgggctcacaactttcacaacatacttaaaagcaccatgagatacttgggtttatggggtggaagagatcactctgatgtctgaatcaattaggtctacaggatatcaaagcacagaactgtacagacatatcttacaaatattaagcttctaaccagccagtatactgttacagaaagtaaat

SEQ ID NO: 67635 - DNA, 599 bp, Chicken  19866894337588_1
  misc_feature (1)..(219): n is any nucleotide
nnnnnnnnnnnnnnnnnnnnnnnnnnnnnnnnnnnnnnnnnnnnnnnnnnnnnnnnnnnnnnnnnnnnnnnnnnnnnnnnnnnnnnnnnnnnnnnnnnnnnnnnnnnnnnnnnnnnnnnnnnnnnnnnnnnnnnnnnnnnnnnnnnnnnnnnnnnnnnnnnnnnnnnnnnnnnnnnnnnnnnnnnnnnnnnnnnnnnnnnnnnnnnnnnnnnnnnnnnncttttgatacctactgcataactccaggccgtattgtctttcctttcctggctttccctctgtataaaggatctttgccaycatcagtattccaatatttaaaacttcattttgtatcacctataaactgtatttttggctcactggtactactctctggcaatcctatcatcttatcgtgttaaccaaggctttaatctcaggggctattggcccacagtgcatccctgaaccaagctccattcagacttacagtagtctgtcctcgagcactgctgtctgggttcaagggagccagagcattccctggagtaatctgagttcagagcacacaaaacagtctggttcttggacagcattacttaaagtcctaggaggag

SEQ ID NO: 67636 - DNA, 600 bp, Chicken  19866894337588_2
acagcatgcagttgacacgtgcttatattctaagtaaaaggcagtgtgagctcaaactcttttcctaatttccctccagagcctcagttattcaggacacaatgtcacctgctgcggagaactgtggaatacacgctgctgctgctgctgcttgcagtctaattagcctttttcttttgatgaaaaatgtgtccagatatcagtgtttgaatgcctgattaattcttacagaagtggtgagaatcgcaattgcaatatttattcctaagaacacaaacagaactggtcacgtagtacgayctggcgaagcaaacctcttttctccccatgagctgctccttgcagccrcgtatcgtaaccagtcagcgcagcagccacaatctcgctttcaaggcttgcttgctcacttgcttggttaaacatgactggcagctgcaaattgagttgttgttaactggtacatctgaagaaataaactaaagcattcttactaattttgataacttatatccttctacrtgagtgaagagaaacataatgaaggaaaatttatctatcagtggctgaattgcctagcccttggtagcttcatgacaccat

SEQ ID NO: 67637 - DNA, 600 bp, Chicken  19866894337588_3
agctcaaactcttttcctaatttccctccagagcctcagttattcaggacacaatgtcacctgctgcggagaactgtggaatacacgctgctgctgctgctgcttgcagtctaattagcctttttcttttgatgaaaaatgtgtccagatatcagtgtttgaatgcctgattaattcttacagaagtggtgagaatcgcaattgcaatatttattcctaagaacacaaacagaactggtcacgtagtacgayctggcgaagcaaacctcttttctccccatgagctgctccttgcagccrcgtatcgtaaccagtcagcgcagcagccacaatctcgctttcaaggcttgcttgctcacttgcttggttaaacatgactggcagctgcaaattgagttgttgttaactggtacatctgaagaaataaactaaagcattcttactaattttgataacttatatccttctacrtgagtgaagagaaacataatgaaggaaaatttatctatcagtggctgaattgcctagcccttggtagcttcatgacaccatgagcaaaacaaagaaacatttttactggaaatggcacattcaggggtt

SEQ ID NO: 67638 - DNA, 600 bp, Chicken  19866894337588_4
taattcttacagaagtggtgagaatcgcaattgcaatatttattcctaagaacacaaacagaactggtcacgtagtacgayctggcgaagcaaacctcttttctccccatgagctgctccttgcagccrcgtatcgtaaccagtcagcgcagcagccacaatctcgctttcaaggcttgcttgctcacttgcttggttaaacatgactggcagctgcaaattgagttgttgttaactggtacatctgaagaaataaactaaagcattcttactaattttgataacttatatccttctacrtgagtgaagagaaacataatgaaggaaaatttatctatcagtggctgaattgcctagcccttggtagcttcatgacaccatgagcaaaacaaagaaacatttttactggaaatggcacattcaggggtttgaattcattaagttctccaaggtaaattgagataattttcttttctttttttgctgcagatatatagaaatggccagacaaaacaatatacacatcaacccccctctgccatattacaataaaggaaaccataatcaagcattgcaaaataaatatccttttcttctcta

SEQ ID NO: 67639 - DNA, 599 bp, Chicken  19866894337593_1
  misc_feature (1)..(165): n is any nucleotide
nnnnnnnnnnnnnnnnnnnnnnnnnnnnnnnnnnnnnnnnnnnnnnnnnnnnnnnnnnnnnnnnnnnnnnnnnnnnnnnnnnnnnnnnnnnnnnnnnnnnnnnnnnnnnnnnnnnnnnnnnnnnnnnnnnnnnnnnnnnnnnnnnnnnnnnnnnnnnnnnnnnnnaatatgttatttattatctctctgtctattacctactgtggttttttaaattttcttcattttccccaaagaaaataaacatttctcttacatgttagtagttgattaaagtttgtcaatgtgtgaaattaccgrcatcaagcaaacaatgtgtgtgcaagtatccactacataagaaaaaattgattgtagactgcaaataggatacacttcttatgagtagacttgcctttcataggatttaattgcttgttccaacttctctttataggcatcaagattcaccgcctgaggattaattagcgtgatccgcttcttgtcattgctcaaatgggccaacgatagtatctatggtacagtaaaagaaaaagacatcatttatcattcaacttttcctccatcagaacaacagagcgcccacaagtctaggatcc

SEQ ID NO: 67640 - DNA, 599 bp, Chicken  19866894337595_1
  misc_feature (1)..(19): n is any nucleotide
nnnnnnnnnnnnnnnnnnnattccaaatgctgctctagcttgaatgcttacgtctttgaaatcaggtatgatcgcagctcagggtgaaattttttccatacctcacaggagctgtcattaacatactgcgtgtactacagccctaaatatagtctttctatcacgaaatctcaatgccagatctatgactatttcacgtaatttatctgataagactattatgattccaaacagtctgtttctgagcacacaggatctgaaaccacttaaaatatatggaattacagaatcatagaatcwtcaaggttggaaaagacctcaaagatcatccagttcaactgctcacctatcaccastatttcccactaaattgtgtcctttaatacaacatctaaacatttcttgaacacttccaagtatggtgactccaccaaatccctgggcaacccattctacgcctgaccattctctaaaagaagtatttcctaacatccaacctgaatcccccctggtgcaacttaaggccattccctctcatactattgctgttatatgagagaagaggctgactcccagctcacaaaaacctcccttcaggt

SEQ ID NO: 67641 - DNA, 600 bp, Chicken  19866894337595_2
tgaaatcaggtatgatcgcagctcagggtgaaattttttccatacctcacaggagctgtcattaacatactgcgtgtactacagccctaaatatagtctttctatcacgaaatctcaatgccagatctatgactatttcacgtaatttatctgataagactattatgattccaaacagtctgtttctgagcacacaggatctgaaaccacttaaaatatatggaattacagaatcatagaatcwtcaaggttggaaaagacctcaaagatcatccagttcaactgctcacctatcaccastatttcccactaaattgtgtcctttaatacaacatctaaacatttcttgaacacttccaagtatggtgactccaccaaatccctgggcaacccattctacgcctgaccattctctaaaagaagtatttcctaacatccaacctgaatcccccctggtgcaacttaaggccattccctctcatactattgctgttatatgagagaagaggctgactcccagctcacaaaaacctcccttcaggtagttttagagggcaataaggtcacctttgagcctcctctccatactaaacaatccca

SEQ ID NO: 67642 - DNA, 600 bp, Chicken  19866894337613_1
tttctggtagttattttatagtggggcctctttagctcacgatacctcttctgttagtgatgttccaaactttttgccgtcaggccagtccatgatcacctctaagattcctggacaattgaggttctccatctgagctcgttgtgtaatcaacacaattcactcactcgaagtggcatcagtagcatgatgggtggagggaacctttcccttgaacatccagtttagcactggcagtcgaggtgttagaaggagctgcatttcagtaccgaatactttggaagcagctcaaaccccctmatacgtggctaagatctccttttcagttggagtgttccaacsccctgtgtgctcgactccagaatcccaggggtcagcctcaggtctctttgccacaaactcaaagtagaacctttctttccagcagcagtggagaggacattctttacatcctttcccatccatactggccccagggacacagctccggttatctcctgtttaatctgctcaaaagcctactgctgctcaggagcccacacaaaattatacttcttctgcgtcacctgataaaggaggcttacaatgaggctatagttt

SEQ ID NO: 67643 - DNA, 600 bp, Chicken  19866894337613_2
tacctcttctgttagtgatgttccaaactttttgccgtcaggccagtccatgatcacctctaagattcctggacaattgaggttctccatctgagctcgttgtgtaatcaacacaattcactcactcgaagtggcatcagtagcatgatgggtggagggaacctttcccttgaacatccagtttagcactggcagtcgaggtgttagaaggagctgcatttcagtaccgaatactttggaagcagctcaaaccccctmatacgtggctaagatctccttttcagttggagtgttccaacsccctgtgtgctcgactccagaatcccaggggtcagcctcaggtctctttgccacaaactcaaagtagaacctttctttccagcagcagtggagaggacattctttacatcctttcccatccatactggccccagggacacagctccggttatctcctgtttaatctgctcaaaagcctactgctgctcaggagcccacacaaaattatacttcttctgcgtcacctgataaaggaggcttacaatgaggctatagtttggaacatgcattcgacagaagtccactacacccaaaaaagat

SEQ ID NO: 67644 - DNA, 600 bp, Chicken  19866894337618_1
ttatctatgcaaaaaacattttttttactctgaaattcataaccagatatgttatcgctgccctcaaaattagtcagctagaactctcaaaacttggcctcatccactgagcaataggctgctttgcatgatgatcaaaagaggcaagaggtaaatcgtgcttcaagagaatcatttgaacacctactgagacaggagaataacatttaatttccctagcccctgatgagcctgatttcttcccctgtcatataatctaaaataaataacctatcagtcctttcaccatgtggcctgctrcaaagctgttcagtttagcatatgcactttrctgtccccattgcatcgtttgatatgagttcacatataaaccattttttttccatcaaaaatctcactyagaaaagaagacatgcatcyctcatggtctacattagccaccatcaccagtgactcatccctctgcagcaaactgaaacaacttatcctggataatcctgtttcatctcattcatctctctgtggtcctttcttgttaactatttcactgctgccctcttggttactgaagaaactgaaygtactgagggacaatatgag

SEQ ID NO: 67645 - DNA, 600 bp, Chicken  19866894337618_2
gaaattcataaccagatatgttatcgctgccctcaaaattagtcagctagaactctcaaaacttggcctcatccactgagcaataggctgctttgcatgatgatcaaaagaggcaagaggtaaatcgtgcttcaagagaatcatttgaacacctactgagacaggagaataacatttaatttccctagcccctgatgagcctgatttcttcccctgtcatataatctaaaataaataacctatcagtcctttcaccatgtggcctgctrcaaagctgttcagtttagcatatgcactttrctgtccccattgcatcgtttgatatgagttcacatataaaccattttttttccatcaaaaatctcactyagaaaagaagacatgcatcyctcatggtctacattagccaccatcaccagtgactcatccctctgcagcaaactgaaacaacttatcctggataatcctgtttcatctcattcatctctctgtggtcctttcttgttaactatttcactgctgccctcttggttactgaagaaactgaaygtactgagggacaatatgagtcaaagtaagcccaaatttgggtttcagaag

SEQ ID NO: 67646 - DNA, 600 bp, Chicken  19866894337618_3
catccactgagcaataggctgctttgcatgatgatcaaaagaggcaagaggtaaatcgtgcttcaagagaatcatttgaacacctactgagacaggagaataacatttaatttccctagcccctgatgagcctgatttcttcccctgtcatataatctaaaataaataacctatcagtcctttcaccatgtggcctgctrcaaagctgttcagtttagcatatgcactttrctgtccccattgcatcgtttgatatgagttcacatataaaccattttttttccatcaaaaatctcactyagaaaagaagacatgcatcyctcatggtctacattagccaccatcaccagtgactcatccctctgcagcaaactgaaacaacttatcctggataatcctgtttcatctcattcatctctctgtggtcctttcttgttaactatttcactgctgccctcttggttactgaagaaactgaaygtactgagggacaatatgagtcaaagtaagcccaaatttgggtttcagaagttgagaggaacatcaccatcatgcatccaccaatcctctgtagaaaggaagatgatggccttcttttga

SEQ ID NO: 67647 - DNA, 600 bp, Chicken  19866894337618_4
gctttgcatgatgatcaaaagaggcaagaggtaaatcgtgcttcaagagaatcatttgaacacctactgagacaggagaataacatttaatttccctagcccctgatgagcctgatttcttcccctgtcatataatctaaaataaataacctatcagtcctttcaccatgtggcctgctrcaaagctgttcagtttagcatatgcactttrctgtccccattgcatcgtttgatatgagttcacatataaaccattttttttccatcaaaaatctcactyagaaaagaagacatgcatcyctcatggtctacattagccaccatcaccagtgactcatccctctgcagcaaactgaaacaacttatcctggataatcctgtttcatctcattcatctctctgtggtcctttcttgttaactatttcactgctgccctcttggttactgaagaaactgaaygtactgagggacaatatgagtcaaagtaagcccaaatttgggtttcagaagttgagaggaacatcaccatcatgcatccaccaatcctctgtagaaaggaagatgatggccttcttttgaagcatggaaactaccacatt

SEQ ID NO: 67648 - DNA, 600 bp, Chicken  19866894337618_5
tttcaccatgtggcctgctrcaaagctgttcagtttagcatatgcactttrctgtccccattgcatcgtttgatatgagttcacatataaaccattttttttccatcaaaaatctcactyagaaaagaagacatgcatcyctcatggtctacattagccaccatcaccagtgactcatccctctgcagcaaactgaaacaacttatcctggataatcctgtttcatctcattcatctctctgtggtcctttcttgttaactatttcactgctgccctcttggttactgaagaaactgaaygtactgagggacaatatgagtcaaagtaagcccaaatttgggtttcagaagttgagaggaacatcaccatcatgcatccaccaatcctctgtagaaaggaagatgatggccttcttttgaagcatggaaactaccacattatcactttcacacagcagtccacattcacagcatggagggcaaaagaaggtcccctgccatgaagcacaatgaatttgcctctaaatgcatactatttttatattagaattaaatgtgacttgagtacctttgtgcctgcaacagatcaagccggtactc

SEQ ID NO: 67649 - DNA, 600 bp, Chicken  19866894337648_1
caggcacctgtgcgggtatgggtgtaaatagaaccataactttagatgaacttctaacatctaaaacaaatgtataaatctctgagtttttatatttggcccagatcatattccctgtgcagctggtggaaccaaatgcttcatttactcttcagagacatttaacctcccccctccaaatttacaatgtcagcgaaaaattagattctttctactgaaacctgatcccaggtttgagaaggtgctcggtgatattaataaccttaaaaataggcacttcagctggggtccacatagacrtgtttgtattggaattgctgagttgagagattctgataccaaatcaggctccactgggttcccccagtataggcaagtccatttcgaggaaatcttcatacatatagtgcacaggggagaggcaggcaactttttcatctattccaacatgcacaagaatcagaaggagagaaattttcaagcaccctgatggggtcgctcccactggaaagaacattcagagtcatctggtgcaggaacctgaaatgtccttctgcacttgaaaacgcccagtcagccttcagcttttcaagcccraga

SEQ ID NO: 67650 - DNA, 531 bp, Chicken  19866894337648_2
acrtgtttgtattggaattgctgagttgagagattctgataccaaatcaggctccactgggttcccccagtataggcaagtccatttcgaggaaatcttcatacatatagtgcacaggggagaggcaggcaactttttcatctattccaacatgcacaagaatcagaaggagagaaattttcaagcaccctgatggggtcgctcccactggaaagaacattcagagtcatctggtgcaggaacctgaaatgtccttctgcacttgaaaacgcccagtcagccttcagcttttcaagcccragaagagacagccagcaagggtaagataaggtctgtaaaatcaagagaggacaaggagaggctgtagggagtggatggatccttgaaatctcccaacacaggaagaaaatcaattagtgaaattagcaggtggccaaagacagaaggaagggattcttcaaatgacttgcagttaatccgcagagctcctcaccaccagtggatgcattctccttgtttgaagagttttca

SEQ ID NO: 67651 - DNA, 600 bp, Chicken  19866894337649_1
actaagttagatgtcctaagtcccctcctccaaggcatctctcctttattagagaaattcctgtgaaacaaatcacataaaccagccactacatttcagcaaggtattatgttctaaattacctgggtatcaaagcagcacagtcacttcagtgttaatgtaagagaaggcctaaactagttcactgccatacctggaagcacccttgaagttttaaaagccttaatgaaacatacatgagaaaatgtttcagccacacattatattacatgctgtatgttatttacaactttccccacrccttcaattagccagattatctagaccacaatggtcatttccataggcagatagacatctctctcctaaagggttaacagtcacttaaatgggatttaacttgagatgaattgctacagcttcctcagttttcaggatcatttcagagaaccctgtcatcatctcaaagcaactcgaggtaatggtgccagccagaagactccggtgttgaacaatgtcaagtccagatactgccccagcaccacacaccagctggggcagcagtgctcaggaagggcagctgcccacagaatcaccttc

SEQ ID NO: 67652 - DNA, 600 bp, Chicken  19866894337671_1
ttaatacatgcagcaggcactaattttgacaccatgatccaggcttgtacctgatatgagctaaagttcactcattttaggttgactgatttttttcttcatgtcaccacgtacttctcaacccttgatttatgatactgtgtaggtttagtctcttacagaccacctttgcaagctttgtgctgctgtcaagcagatgaaaatgcagttaagtttgtttcttgatttgtgctgctgatgttgatgacttttttagagactggaagaaaacactgcttgttgttgcccagggaagatggyatatgcttttttgactgttattctggatgcttgagtaagttacaaataagtgatagcttctagttcagaaaatttgatttcartaggtttatttcacttgaaattgttatcatttagataagctgcttgtagtttaatgggagcatttggactctgagctggcattagctgagtgttctgttctacaagactggttacattttccacaggaaattggtttgtaaatcatcctggaagtttcagcttatttgaaggcctgagggtgaaacgtactataacaatctgaaatggagcttgaga

SEQ ID NO: 67653 - DNA, 600 bp, Chicken  19866894337671_2
gactgatttttttcttcatgtcaccacgtacttctcaacccttgatttatgatactgtgtaggtttagtctcttacagaccacctttgcaagctttgtgctgctgtcaagcagatgaaaatgcagttaagtttgtttcttgatttgtgctgctgatgttgatgacttttttagagactggaagaaaacactgcttgttgttgcccagggaagatggyatatgcttttttgactgttattctggatgcttgagtaagttacaaataagtgatagcttctagttcagaaaatttgatttcartaggtttatttcacttgaaattgttatcatttagataagctgcttgtagtttaatgggagcatttggactctgagctggcattagctgagtgttctgttctacaagactggttacattttccacaggaaattggtttgtaaatcatcctggaagtttcagcttatttgaaggcctgagggtgaaacgtactataacaatctgaaatggagcttgagaagaatgtggcatcagtaacacctgggagctgccaaacctaggcagagaaacaacacgtgaaacaaaaagatgtcctcgtaaat

SEQ ID NO: 67654 - DNA, 600 bp, Chicken  19866894337673_1
cacacgcatttaacagtgcatggaaagaaaagcttaaggaccaagcaggaacggagcaaaatctccagggtgacacttgcctttggagacagcactaacaggcaatcacatggtttcttgcatttgtcattcttggtgccgcgccaaaatgatcagggctgtcacccgatcttttttgctgacttcaaaagagtttcccaaatcttcagcaaactcttcagccttaattgaaaacacctcatgcctgcgttttctacaaagcgggacgatgtcaaaatatttatcttagagacaaattaytgggcaagtggtggcctgaagataatttgttgggacaacgggataaagggttggaaaaagggggtgattatgtaaaaagatttatggcttgtgctgttctctgtgctgcactgaggtatccccataaacaaactcttcctctggttctgtctcatgccatgtcatttcaatgcctacagtgtatggagaagggaagaaatattgtgaggaaatagtgggcagcgctgtttgctttcagacatcttgtaaatgcctttctattcttataagtatgaccttaattacgagtgaggtctcaga

SEQ ID NO: 67655 - DNA, 600 bp, Chicken  19866894337674_1
agctggatttctgtaattatttgtatgtaaaatatttctaactcctcatctttagtgagtagagatctgggattagcagtcaggtcaccaggcatgaaacatagcatacaggcgaagttttattagggggaaaagaggtagttaaactgagagccagggtcctattccctacagtcttaactcccatgagattgcccctcctcaaaaggacagcagaattataagctacacaccatacgcgaacctggcaaacagaccacagagcttcaagaatatacttgagcactattgcggaatcckgagtgagcttaccagccttctccaggaaacttttgttgaaggaagaaaggaaataatattaaaaataagtgcacgtgtttaaaataaataaataaaccatcatcagctctggcctctctctggactcatgaaatagacttcctaccccaatttataaaactgaagttcttatgtgactagctagacgtagagaaaatctgcatttacactcatgaatttaaatgttcagttttaatcacagacaagtaaatgttctatggtaacattgatactctgtggaggaaggcagtgcgtcatgca

SEQ ID NO: 67656 - DNA, 600 bp, Chicken  19866894337690_1
acagcatgctgacttctgtgtttctaagatgctcacaactgtgtgcaggagttcatttatacagccacatcaccttgggagacagtaacttattgctgaatttggtaactttaacttaatgaaccccatttcacactattgtgatagaagtcctgaggagttctcagcacagatgacaaggaaaaggggagctccatcttcatctgcacatcagtctccagcacattgtttgtgttggacttaggaatcagctttttagcattttttctttccactattaagcaatcaaagcctttaaaryatgggactatcgagattgtctttaagagataattcagtggcagaagacaaaaaaattgtctcctttaatgaattattcaaatcgcatgcaaaagctggcacaccagaagctaattatgatttcgttttatgttttgtgattttcaacattagaagctttcttgggcctccctaaaaccatttgaacatcccatcccctcaggtagaaaatctcaaacaagacagctgttctcctaagtggaaaactcagcaaacaaacaaaattaaccaagagaaaataatagaattttctttatgaat

SEQ ID NO: 67657 - DNA, 600 bp, Chicken  19866894337690_2
cagcatgctgacttctgtgtttctaagatgctcacaactgtgtgcaggagttcatttatacagccacatcaccttgggagacagtaacttattgctgaatttggtaactttaacttaatgaaccccatttcacactattgtgatagaagtcctgaggagttctcagcacagatgacaaggaaaaggggagctccatcttcatctgcacatcagtctccagcacattgtttgtgttggacttaggaatcagctttttagcattttttctttccactattaagcaatcaaagcctttaaaryatgggactatcgagattgtctttaagagataattcagtggcagaagacaaaaaaattgtctcctttaatgaattattcaaatcgcatgcaaaagctggcacaccagaagctaattatgatttcgttttatgttttgtgattttcaacattagaagctttcttgggcctccctaaaaccatttgaacatcccatcccctcaggtagaaaatctcaaacaagacagctgttctcctaagtggaaaactcagcaaacaaacaaaattaaccaagagaaaataatagaattttctttatgaatt

SEQ ID NO: 67658 - DNA, 600 bp, Chicken  19866894337700_1
tctctagagccctttgtggcactcttgggaagttctggtgaggtgacttggtgggcactgctaagccacaagaccatgtggggtgagatggggctgattctgctctgttcccacgctgctgctcaactgcagatgattgaaagggaatcatagaatcataggaatgccctttctgcctgtggacatacttctctctccgtccctcacttgaagtttttcgcttcaataacagcagcatgctgaacgtgctttgctgtgtcatcagggcaatgacatccccaggtacaaaacctcacctascactgccatgccactgctgtaaatgctgcttaagcctttattactcttacatcaaggagctctgataccagctcttggccctccaaccacagcaaaagcaccagtgccctgcccacatagggctgccaggaggctctttgctcaaacgaaccagggaaaatgtctgcaagaagcatctgccagcatcacatccccacgctctgctcagtcacaggcagcggagctgccccagacggcggcagtctgccccccccaaggacatacagggatgagtcacctcgtggcagctgctgagcaggg

SEQ ID NO: 67659 - DNA, 600 bp, Chicken  19866894337712_1
gtttagtttgcaattataagaagtattgaaaactgtcatattctttgactgcgctgctttcaggaggcagtgggtggcaaagaataaaagcataccttaattatacagtctatctgtttattttcacagctgtagcgcagctgaaatgtgcagcagacatcataattccacagaacatggtctctggatgctgcacctgccagccccgccatctcagtgccagttggggatgtatgtgtgttgaacaatgagggaagactacaagaggtttatcccattagaaataaattacagtgtagygtagcatgaaaatgatgtgtcagtgaatacagaacacgggattaccttctgtctcttttctttatcatagataacaagagcagtatgtgaaggagatttatagtgcgctcatttgaagctgaccaagcaatttagatgagatgaattacagattktatttctgtagagaagaatgtgttcccactaaaatgccattaattgctttattatttaaggcacaaattgtatccagcaatttgttggtctcctattttttccagttgaaataattcaccatagaaagattattctgtcagaaaa

SEQ ID NO: 67660 - DNA, 600 bp, Chicken  19866894337712_2
gacatcataattccacagaacatggtctctggatgctgcacctgccagccccgccatctcagtgccagttggggatgtatgtgtgttgaacaatgagggaagactacaagaggtttatcccattagaaataaattacagtgtagygtagcatgaaaatgatgtgtcagtgaatacagaacacgggattaccttctgtctcttttctttatcatagataacaagagcagtatgtgaaggagatttatagtgcgctcatttgaagctgaccaagcaatttagatgagatgaattacagattktatttctgtagagaagaatgtgttcccactaaaatgccattaattgctttattatttaaggcacaaattgtatccagcaatttgttggtctcctattttttccagttgaaataattcaccatagaaagattattctgtcagaaaatgatgatgaacctgctaacaaatttatttgaaagaagctgtactttcatttcacgatcagtggtggcttggctaaacacaaaaatcttaacaaaaatcacggcaaaaacaatttgcaaatatgggcatctttttacatgttggctgtcgtgctgt

SEQ ID NO: 67661 - DNA, 600 bp, Chicken  19866894337720_1
attacagatttcagagtaggtccttggggaacaccttctcatggagggacaagctcagcactttccatccaaggtggggcataagccctctcacagatggcatttccaagctctcttggtcaccagcaagtgacagacaggctgttaggaaggagtgccagatgaactcattgagcttccccagctcaacagatttcacagtgagcctttaagatggtacatatccagtgggacactcggatctgttgtgtcctcagacaactgacctgggaaggaaataacagaattgccttgaaggawaaattcattgtctacacaaagagttattgctctttaaggaagaggcagttaagaaaaactctctcagtattaaggtagcatagcccttgtggaagccttcagtatttacttgatctaaatctgaatctagttattttttttatttatccccataaatcagtttacacgattaagctgctggaaactgtttccattaaaaggtttagctgggaggtgaaaactgcaagcaggatggccaggatagcacacagtgcaactcactctgagaaactcacttaatcttacttcactccctacctt

SEQ ID NO: 67662 - DNA, 600 bp, Chicken  19866894337726_1
accatcccagccgaaactaagatagcttcttacatatgttgtgcaaattttaggattatataatgtcttaacagggaaaaattcttgttggacaaaaaggtaggcaaccagttcttaaatatcaaataataggcttccctatagctaggcaattaagatcctaaattaagatactgattccaggaaacgattgtgtttaaaactgtgaagggggtcaaaacagagaaaaaaatattttcactgaaggagggctgattttgaccaacattttttcccctgcattttaggacaaatcttgcwgtactatatttagtaatatatagtaaatatatagatgagaggtaaatgcattttaaggaaaggacaataaggacagtgcaaagaagggcatttgcattctccaaatatttttagctatatataaggagagagaaatggaaaaggaatgaacaggcccgaagtgctgaaccttttgaaattaatctggctagaacaaagctatttttttacctttattgtcagattgtcttaaatatayattgttaaaacaatgtataatgttaaaataaaatcagcagagtaaaaatacattttgagaga

SEQ ID NO: 67663 - DNA, 600 bp, Chicken  19866894337726_2
cactgaaggagggctgattttgaccaacattttttcccctgcattttaggacaaatcttgcwgtactatatttagtaatatatagtaaatatatagatgagaggtaaatgcattttaaggaaaggacaataaggacagtgcaaagaagggcatttgcattctccaaatatttttagctatatataaggagagagaaatggaaaaggaatgaacaggcccgaagtgctgaaccttttgaaattaatctggctagaacaaagctatttttttacctttattgtcagattgtcttaaatatayattgttaaaacaatgtataatgttaaaataaaatcagcagagtaaaaatacattttgagagaataacagtgagaatgttaaaacttttcttctatgtatcatactatttcatttgttcagtacaatgatacaagtgtgatttatatgcagtgcttgaatttattgctttgcttgtcaagttctcccattatatcttgaatatttttaagttgaaggaagagaatactgcagggcacatctgtgaagctgcaaatgtggataaagtgtttattacatcattaacatttattttgttctaaa

SEQ ID NO: 67664 - DNA, 600 bp, Chicken  19866894337733_1
aatgagagaaagccttctaatccttaccagaaggccacgcagacggaacttgccctcttcatcagttactgtatcttctccatagatgctacacccttcctgccccacagcttctactgagactccttgctcaggctctccatttaatgaagaaacagtgccataacagctagaggaagaaacaattgctagttacatgcaaatgctgttttaatgtgtatttttaagacatgattgttgtaactcatgagaaaagtactccatatatctagcatagcatgcaaaagcagaatttgtaaygtatgcacctaaaactgcttcaaagcatttaaatgagctgcagttcrgaggacaacttaaggaatccaagttcccaayccttcaagaaaagtaacactcaccccagggggcaggaaaagggaggacccttaagtcagatacctggagtggtacacagtcctcagaataaatctctcctctcccactgaacatagcacaagccactcgcagtgccactgacacggtaccttcttcgcaatgtttttccttacagttctgttgtggtcttagctagtatatacatgcgcatgaaaaagaggc

SEQ ID NO: 67665 - DNA, 600 bp, Chicken  19866894337733_2
acttgccctcttcatcagttactgtatcttctccatagatgctacacccttcctgccccacagcttctactgagactccttgctcaggctctccatttaatgaagaaacagtgccataacagctagaggaagaaacaattgctagttacatgcaaatgctgttttaatgtgtatttttaagacatgattgttgtaactcatgagaaaagtactccatatatctagcatagcatgcaaaagcagaatttgtaaygtatgcacctaaaactgcttcaaagcatttaaatgagctgcagttcrgaggacaacttaaggaatccaagttcccaayccttcaagaaaagtaacactcaccccagggggcaggaaaagggaggacccttaagtcagatacctggagtggtacacagtcctcagaataaatctctcctctcccactgaacatagcacaagccactcgcagtgccactgacacggtaccttcttcgcaatgtttttccttacagttctgttgtggtcttagctagtatatacatgcgcatgaaaaagaggctagaaacagtactctcaagcacaagcacaattgtgccttcaaaagta

SEQ ID NO: 67666 - DNA, 589 bp, Chicken  19866894337733_3
tccatagatgctacacccttcctgccccacagcttctactgagactccttgctcaggctctccatttaatgaagaaacagtgccataacagctagaggaagaaacaattgctagttacatgcaaatgctgttttaatgtgtatttttaagacatgattgttgtaactcatgagaaaagtactccatatatctagcatagcatgcaaaagcagaatttgtaaygtatgcacctaaaactgcttcaaagcatttaaatgagctgcagttcrgaggacaacttaaggaatccaagttcccaayccttcaagaaaagtaacactcaccccagggggcaggaaaagggaggacccttaagtcagatacctggagtggtacacagtcctcagaataaatctctcctctcccactgaacatagcacaagccactcgcagtgccactgacacggtaccttcttcgcaatgtttttccttacagttctgttgtggtcttagctagtatatacatgcgcatgaaaaagaggctagaaacagtactctcaagcacaagcacaattgtgccttcaaaagtaccttcaagccttcagaacag

SEQ ID NO: 67667 - DNA, 599 bp, Chicken  19866894337734_1
  misc_feature (1)..(112): n is any nucleotide
nnnnnnnnnnnnnnnnnnnnnnnnnnnnnnnnnnnnnnnnnnnnnnnnnnnnnnnnnnnnnnnnnnnnnnnnnnnnnnnnnnnnnnnnnnnnnnnnnnnnnnnnnnnnnnnnctattatctactttacataagagaagtcctgaattaggctaggagatttagttgactattttatcaattgttggagcacagcaaatagattatctggctaagaagtgttcacttccattgctcagtcagccaaaatccatgaagtaatgaggaagaaggaacagtctccaaaatgtcatgccaaatayttgattttactattacaggagatgctgagaaaattccttttgatgtgactgggccagacaagagcatttagttgccttctgttttgatctgcatttatttttctgtcagggacacagagaagracaaaacatagcaaggtcrtacttscccaagaagttctttcttctaatactgtgagtgaaaaggaagaatcctaaaagcacctccttaagtggttgtttgttttttcaaatgacagaaagtgcaagagtggaaacagaataaattttgtggaaaaatctcacaaagttatctctaa

SEQ ID NO: 67668 - DNA, 600 bp, Chicken  19866894337734_2
tttacataagagaagtcctgaattaggctaggagatttagttgactattttatcaattgttggagcacagcaaatagattatctggctaagaagtgttcacttccattgctcagtcagccaaaatccatgaagtaatgaggaagaaggaacagtctccaaaatgtcatgccaaatayttgattttactattacaggagatgctgagaaaattccttttgatgtgactgggccagacaagagcatttagttgccttctgttttgatctgcatttatttttctgtcagggacacagagaagracaaaacatagcaaggtcrtacttscccaagaagttctttcttctaatactgtgagtgaaaaggaagaatcctaaaagcacctccttaagtggttgtttgttttttcaaatgacagaaagtgcaagagtggaaacagaataaattttgtggaaaaatctcacaaagttatctctaaattttttataccaacttacaagtcttcttttaccaagcacaggcactttgttctacaatacttatctttgcacttgcttctagtaacttatcagaggtgatagagaaaatccagtcattttgga

SEQ ID NO: 67669 - DNA, 600 bp, Chicken  19866894337734_3
gaattaggctaggagatttagttgactattttatcaattgttggagcacagcaaatagattatctggctaagaagtgttcacttccattgctcagtcagccaaaatccatgaagtaatgaggaagaaggaacagtctccaaaatgtcatgccaaatayttgattttactattacaggagatgctgagaaaattccttttgatgtgactgggccagacaagagcatttagttgccttctgttttgatctgcatttatttttctgtcagggacacagagaagracaaaacatagcaaggtcrtacttscccaagaagttctttcttctaatactgtgagtgaaaaggaagaatcctaaaagcacctccttaagtggttgtttgttttttcaaatgacagaaagtgcaagagtggaaacagaataaattttgtggaaaaatctcacaaagttatctctaaattttttataccaacttacaagtcttcttttaccaagcacaggcactttgttctacaatacttatctttgcacttgcttctagtaacttatcagaggtgatagagaaaatccagtcattttggaaagggagaaggcctttctg

SEQ ID NO: 67670 - DNA, 600 bp, Chicken  19866894337734_4
ggctaggagatttagttgactattttatcaattgttggagcacagcaaatagattatctggctaagaagtgttcacttccattgctcagtcagccaaaatccatgaagtaatgaggaagaaggaacagtctccaaaatgtcatgccaaatayttgattttactattacaggagatgctgagaaaattccttttgatgtgactgggccagacaagagcatttagttgccttctgttttgatctgcatttatttttctgtcagggacacagagaagracaaaacatagcaaggtcrtacttscccaagaagttctttcttctaatactgtgagtgaaaaggaagaatcctaaaagcacctccttaagtggttgtttgttttttcaaatgacagaaagtgcaagagtggaaacagaataaattttgtggaaaaatctcacaaagttatctctaaattttttataccaacttacaagtcttcttttaccaagcacaggcactttgttctacaatacttatctttgcacttgcttctagtaacttatcagaggtgatagagaaaatccagtcattttggaaagggagaaggcctttctgtaccac

SEQ ID NO: 67671 - DNA, 599 bp, Chicken  19866894337737_1
  misc_feature (1)..(58): n is any nucleotide
nnnnnnnnnnnnnnnnnnnnnnnnnnnnnnnnnnnnnnnnnnnnnnnnnnnnnnnnnntctagttttctttttttaaaccaagtaaatttttgtttgcccagcgatagtctgctctctcatgccaggcaaactagctggcttaagcagtaatgaaacatgtttgtaggaaatgtggtatgctgtaatcacaactaaagtatcctttttgcgcgtcacatgtaataaccctcctccatccagtaccctttgtaatccactgcgtatctgggatgctcctgttcagaaagttttctgcctgrtaggcagcttacccttcatgctagcaaggagagaagcatgtaggaattactccttgrgaaagaaaaggagttctcgtgtacttttgaagggaacaagaaggaacatgtagtcaaaggcaggaaattgcttacacagaaatggagcatrgattccagatgaggttatagtggaaggggagagaaataacattcagcgtagtactgggtgctgctcttcaggagctcagaaatgctgttgtttctgcatcttcactttctgtttgtattcacctcagcgttatcaaccttatgtgactgaa

SEQ ID NO: 67672 - DNA, 599 bp, Chicken  19866894337737_2
  misc_feature (1)..(1): n is any nucleotide
ntctagttttctttttttaaaccaagtaaatttttgtttgcccagcgatagtctgctctctcatgccaggcaaactagctggcttaagcagtaatgaaacatgtttgtaggaaatgtggtatgctgtaatcacaactaaagtatcctttttgcgcgtcacatgtaataaccctcctccatccagtaccctttgtaatccactgcgtatctgggatgctcctgttcagaaagttttctgcctgrtaggcagcttacccttcatgctagcaaggagagaagcatgtaggaattactccttgrgaaagaaaaggagttctcgtgtacttttgaagggaacaagaaggaacatgtagtcaaaggcaggaaattgcttacacagaaatggagcatrgattccagatgaggttatagtggaaggggagagaaataacattcagcgtagtactgggtgctgctcttcaggagctcagaaatgctgttgtttctgcatcttcactttctgtttgtattcacctcagcgttatcaaccttatgtgactgaacagtaggaagagctcatcctaaacacagatgcagtgatgctgccaagcagagaaatt

SEQ ID NO: 67673 - DNA, 600 bp, Chicken  19866894337737_3
taatgaaacatgtttgtaggaaatgtggtatgctgtaatcacaactaaagtatcctttttgcgcgtcacatgtaataaccctcctccatccagtaccctttgtaatccactgcgtatctgggatgctcctgttcagaaagttttctgcctgrtaggcagcttacccttcatgctagcaaggagagaagcatgtaggaattactccttgrgaaagaaaaggagttctcgtgtacttttgaagggaacaagaaggaacatgtagtcaaaggcaggaaattgcttacacagaaatggagcatrgattccagatgaggttatagtggaaggggagagaaataacattcagcgtagtactgggtgctgctcttcaggagctcagaaatgctgttgtttctgcatcttcactttctgtttgtattcacctcagcgttatcaaccttatgtgactgaacagtaggaagagctcatcctaaacacagatgcagtgatgctgccaagcagagaaattacattaaattgcaaacagtagattaaggagattactcattttctctctgtatcaaaaagtgtttaatttatccattcacatcagcactctct

SEQ ID NO: 67674 - DNA, 600 bp, Chicken  19866894337742_1
taaaaatcaaaaaccccctctatccaaaggagtatattcaatttcttcttcttttagatggcagaacacaccaaacatttctgtactggctgcaataggttgctgagtgcagagttcacatacacaatacattgcttaatccacagtatcagtgatgtccataggaatcaaaacaaagaatgcgcaagagttataagattttatcttagaagataatctgtctataacaaaaaacagtttcatgcattttttttcctacttttttttccccataaggactctcatttggatttttacaaygctgctctgatgctgaagtacttacatagtcctctcaaacgtcttaccaaatatccaacatattttttacgttagactatagttcccgtatgtgcagcaggaacactaatttccgcttgtctgctatttttgtgctatgtcatgtgggctcactaccctaactgcatataatgacctattagtttaagatgcttataacaggaaggcataaacaccaggtaccgtcacctgctacctctctgacactctgattaactactgcagctacccagaaatagtccccactcatgcaaataccct

SEQ ID NO: 67675 - DNA, 600 bp, Chicken  19866894337757_1
catctggagcagtactgaaactgttttgtcctttgtgactttgtacttcccacaaccataaataactgaaactaagtctaaaaacgttagaagttcttgcctgttgttgcatgtttgtgggttgtttgttttttttttaataacattatttagactcagaaaacaattaacaaatgtttatcactaccttaacgtcttccattatgtgaaaattattacttgtacctttatagagccttgggtcctggaaaggctttgtccactgaaagatgggctgaatcctgaaaaacctgctgtaayttatgccctgtcctgacagtaaagaatgatttatggacaaatcgggaaaaggagtttgagaaggttggaaactggagtagttcagacagtaaaggggtttgtgctcctatgtttcctttttgttttcatttttaaggactgactttaagcragttcaggctttcaagaaaaaagttctaaccatgatttgttttgaasattctccttaaagacagcaaaaagcccacgctacattttgtgtagcaattcttgctaatgtttgcctcaaagacttgaagtgatgagagcacaagcacagca

SEQ ID NO: 67676 - DNA, 600 bp, Chicken  19866894337757_2
agactcagaaaacaattaacaaatgtttatcactaccttaacgtcttccattatgtgaaaattattacttgtacctttatagagccttgggtcctggaaaggctttgtccactgaaagatgggctgaatcctgaaaaacctgctgtaayttatgccctgtcctgacagtaaagaatgatttatggacaaatcgggaaaaggagtttgagaaggttggaaactggagtagttcagacagtaaaggggtttgtgctcctatgtttcctttttgttttcatttttaaggactgactttaagcragttcaggctttcaagaaaaaagttctaaccatgatttgttttgaasattctccttaaagacagcaaaaagcccacgctacattttgtgtagcaattcttgctaatgtttgcctcaaagacttgaagtgatgagagcacaagcacagcaccattaacagttttctgattttatacacatcatatcttgttaaaacagtgaactcttagagaagggagaaaggctcaatatagaaactacacaggattcttattgttctgagaggtgagctggtaacaaaagaagtcagcacaaggactat

SEQ ID NO: 67677 - DNA, 600 bp, Chicken  19866894337757_3
ccattatgtgaaaattattacttgtacctttatagagccttgggtcctggaaaggctttgtccactgaaagatgggctgaatcctgaaaaacctgctgtaayttatgccctgtcctgacagtaaagaatgatttatggacaaatcgggaaaaggagtttgagaaggttggaaactggagtagttcagacagtaaaggggtttgtgctcctatgtttcctttttgttttcatttttaaggactgactttaagcragttcaggctttcaagaaaaaagttctaaccatgatttgttttgaasattctccttaaagacagcaaaaagcccacgctacattttgtgtagcaattcttgctaatgtttgcctcaaagacttgaagtgatgagagcacaagcacagcaccattaacagttttctgattttatacacatcatatcttgttaaaacagtgaactcttagagaagggagaaaggctcaatatagaaactacacaggattcttattgttctgagaggtgagctggtaacaaaagaagtcagcacaaggactatcgattatgctataataccctgttgatatgaagcataaaagaagaatc

SEQ ID NO: 67678 - DNA, 600 bp, Chicken  19866894337779_1
tgctgacacgaagagtatggaagtgggtaagagtgagagttgtgttagagcagagtagtcatggggtgctgatgataacctggctgggaaaaaacaatttactgcccctcattaataagtatcattaattatattatgctgtttgtcatttggtcctctatagatgtgagatcaacaaaaatagatgagtagtgaaactgtactttctttccagaatgtaaagaaggtaagcctttaattataccattatttggggatatgattaaacgactgagttgtagatgagaccagtggccagtrtacctctgtacagactagcaaactagcttaagtgctgtttaacaagatagcagagctgatctagcttcaagccctttgctgtcwgaggtagtcatgctccttcctgtgggagtttcccagctgtcctcctgcactgayagtaggccagtgtgaggaaatgggctggcaaaatccacttgtggctttctgctgctttgtctgtcatggtccattcatggggcagtcacataactgcagtggtagcacgcaggaagtgctgagtggccgtggcagtcccaatttgtacttggctggactggg

SEQ ID NO: 67679 - DNA, 600 bp, Chicken  19866894337779_2
tgggaaaaaacaatttactgcccctcattaataagtatcattaattatattatgctgtttgtcatttggtcctctatagatgtgagatcaacaaaaatagatgagtagtgaaactgtactttctttccagaatgtaaagaaggtaagcctttaattataccattatttggggatatgattaaacgactgagttgtagatgagaccagtggccagtrtacctctgtacagactagcaaactagcttaagtgctgtttaacaagatagcagagctgatctagcttcaagccctttgctgtcwgaggtagtcatgctccttcctgtgggagtttcccagctgtcctcctgcactgayagtaggccagtgtgaggaaatgggctggcaaaatccacttgtggctttctgctgctttgtctgtcatggtccattcatggggcagtcacataactgcagtggtagcacgcaggaagtgctgagtggccgtggcagtcccaatttgtacttggctggactggggctgaccgtgctgctctgcctggtttagagaagtcgctgaagatcggttttgttttaagcaatgtttgtttatttatttattct

SEQ ID NO: 67680 - DNA, 600 bp, Chicken  19866894337779_3
ctgtttgtcatttggtcctctatagatgtgagatcaacaaaaatagatgagtagtgaaactgtactttctttccagaatgtaaagaaggtaagcctttaattataccattatttggggatatgattaaacgactgagttgtagatgagaccagtggccagtrtacctctgtacagactagcaaactagcttaagtgctgtttaacaagatagcagagctgatctagcttcaagccctttgctgtcwgaggtagtcatgctccttcctgtgggagtttcccagctgtcctcctgcactgayagtaggccagtgtgaggaaatgggctggcaaaatccacttgtggctttctgctgctttgtctgtcatggtccattcatggggcagtcacataactgcagtggtagcacgcaggaagtgctgagtggccgtggcagtcccaatttgtacttggctggactggggctgaccgtgctgctctgcctggtttagagaagtcgctgaagatcggttttgttttaagcaatgtttgtttatttatttattctattgcccgaaggtcttgtttaaacaatgtgcctaactgtagtgttacagttaaa

SEQ ID NO: 67681 - DNA, 600 bp, Chicken  19866894337788_1
tctacaagattagccagcaaatcctactcttacacagagccatggtcctacagccctaccaaatgcaaggaagtactcactggccacagtgtcagtgaatctgagcaagcatgtgtgtctaaagactgtgcagtgagcccctctgctgtgttgttgttttcttttagtcagaggagtggagagggaaaggatgtgaagatccctgttagtgttgtgtcttcagcttcgaaaaagataggttaggtagagccctgcggatcagtatgttgagtgtattaagaaaatttacacagatataarcctacagaggtaatatttgagaaataaacctcaaatgtggatacactggcctggaatatagcatttatatgaaaaaggcacatgcctctggtaatgtctctatggtttattttgctacatttaggtagagcagcccccttgcttagccatgcttttgctgcagggaggtgaggagagctgggttctgctctctgccttgcaaacttttgcccactttggggcaagttgctctttgcctcagctcttcacctgcagaacctgtgagtggcacttccctgcctcctggtggtgctgagggta

SEQ ID NO: 67682 - DNA, 600 bp, Chicken  19866894337802_1
aggtgttttttgactctcaaaaattcagtcccttgtagaaaaggcatagatatagttacttgtttgcaaatatttccaatgtataaataaggtgatagtttattatgtacttactgaagtatgttttccatgacagtgattctctttttcactgcttttatcgaactattgctaaaaactaatcagtttgaagtgcaaattataatcacagaattgctgcagtataactgaagtcagacttcagtcctttattgcaaaatcagggatttttctaccaactgtccctgctgttactaaacmctgtttgggagggcatatgggatcagagtctcagaggttagaataaactggggaagtgtgggaaaaacttgataggggttggggaacgttatagaactatctaaaatcataaagttctcttgacgtgttgattttaagggtattgcttttcatcaactggacctgatgcaaggtgtaaaatgttttaaataactctattgagaagatattttgttttaagaaaatgtaaacttggaatgaatgcatctttaatgttgacaaactgcatatgaatgatcatgtttgatcactgtgtgctaa

SEQ ID NO: 67683 - DNA, 600 bp, Chicken  19866894337811_1
tggggtgggcccgtacagagccaggagttggacttaatgatctgtgtgggttccttccgactcaggatattctgtgaaaatgtttgcttgttgttaggtttacccgcaaggctatctgcttcattgcattaccagaaactgaacaatgctcacagccagtatgaaggagaaagaggaaatctccggggacagatacagcctcaatgccagtcagagatctaagcaagattttgcctgaacactagcattcagagggcaccaagggacatgtctggttccattcctggtcccaggtggctkagtgcatgcctgtggggagaagggtgacggtctccctgtaggtctgcgtgtcttcakcagaactgtggtgtgtgacctcgcwgggggccacctgaagacactctgggtgttatgttgctgtgcctgtggtgctacgtggcatggcgccataaagggaggatcgccctgaatgcttcccctgtttgctgggacctctctgctgctgtctccactgcaccccactgagaagggctgggacttggttttaggaagccgatttatggcagctgacaattcctccaaacaagccctgtgcttctg

SEQ ID NO: 67684 - DNA, 600 bp, Chicken  19866894337811_2
cgactcaggatattctgtgaaaatgtttgcttgttgttaggtttacccgcaaggctatctgcttcattgcattaccagaaactgaacaatgctcacagccagtatgaaggagaaagaggaaatctccggggacagatacagcctcaatgccagtcagagatctaagcaagattttgcctgaacactagcattcagagggcaccaagggacatgtctggttccattcctggtcccaggtggctkagtgcatgcctgtggggagaagggtgacggtctccctgtaggtctgcgtgtcttcakcagaactgtggtgtgtgacctcgcwgggggccacctgaagacactctgggtgttatgttgctgtgcctgtggtgctacgtggcatggcgccataaagggaggatcgccctgaatgcttcccctgtttgctgggacctctctgctgctgtctccactgcaccccactgagaagggctgggacttggttttaggaagccgatttatggcagctgacaattcctccaaacaagccctgtgcttctgttgtggtttaaccttgcaggcagctttgcaccacgcaggcgtccgctcgctcccccc

SEQ ID NO: 67685 - DNA, 600 bp, Chicken  19866894337811_3
tttgcttgttgttaggtttacccgcaaggctatctgcttcattgcattaccagaaactgaacaatgctcacagccagtatgaaggagaaagaggaaatctccggggacagatacagcctcaatgccagtcagagatctaagcaagattttgcctgaacactagcattcagagggcaccaagggacatgtctggttccattcctggtcccaggtggctkagtgcatgcctgtggggagaagggtgacggtctccctgtaggtctgcgtgtcttcakcagaactgtggtgtgtgacctcgcwgggggccacctgaagacactctgggtgttatgttgctgtgcctgtggtgctacgtggcatggcgccataaagggaggatcgccctgaatgcttcccctgtttgctgggacctctctgctgctgtctccactgcaccccactgagaagggctgggacttggttttaggaagccgatttatggcagctgacaattcctccaaacaagccctgtgcttctgttgtggtttaaccttgcaggcagctttgcaccacgcaggcgtccgctcgctccccccaggtgggacagggggagagaatcag

SEQ ID NO: 67686 - DNA, 600 bp, Chicken  19866894337820_1
cctagatgatatgaaccattactttcatgatccgggagaaatctaaagcctattttattttcttttccttttaggagaataatatttattaaaactgtggatagtttttataactggatcttcgaaggaaacatatgagtaagatgagtcaatgatggttttctgaatctttgatagttatttagtgtacttttatcatctttttaattgtcatgttctctttgtactttcttcatttcaggaaagactgggaaactcttttattctccagtgagtccagagagacacttgattcttatmtcattttaatttagatactagtagatgtgctgacaagggtatcaaaaattccttatgtgaatcatgctattgttggcatagagtctttttataggacagatgagctgttgttgctgcatggaaatgtttaaaagcattcagtctgaatcactgaggattctccctaatgtttttgacagtgcaaggccttgtcatactcatccttatactggccatttcttcaattagaaaaggcagcccaaggctgtagcattcatatgtcatgtcccaccaccctattaaagagatgtgtcagatctg

SEQ ID NO: 67687 - DNA, 600 bp, Chicken  19866894337822_1
tctcagctatgtagatgaggaaatgtaggaggtacgttcaaagtaaatgcctgtactaagcaaattggatggaaaacacaattttacttgactgtaccgctgagacaccatagtttcatttgactaatgtcctggctcttcatttaatgttttcagatatgtagcatgcagataggggatttaggttcagtagaaaaaaattctttcttcacaagaaaaaacattctgcattgttgcagtaacttgaaaaataactagatccaaagcactgttggctttttttttttttttcctgaggawaatcttgcttttttgaagtgaactaatataattatatgcacagcactaagaccgagggggggacttaactgtggacacttttgcacaggttattcatgactgtgacacttgtgtgataattaaataagccaagagaatgaaaccactcaggaggcatgggcgatagcawaagtataagtatggggaggcatggcaagttggttatatcaccttgccatgatctcgcaagggtaagcattatgtgtttaccacggtgaaagcaaccactgggtggcttgaaacatatgcagtacccaatgc

SEQ ID NO: 67688 - DNA, 600 bp, Chicken  19866894337822_2
agataggggatttaggttcagtagaaaaaaattctttcttcacaagaaaaaacattctgcattgttgcagtaacttgaaaaataactagatccaaagcactgttggctttttttttttttttcctgaggawaatcttgcttttttgaagtgaactaatataattatatgcacagcactaagaccgagggggggacttaactgtggacacttttgcacaggttattcatgactgtgacacttgtgtgataattaaataagccaagagaatgaaaccactcaggaggcatgggcgatagcawaagtataagtatggggaggcatggcaagttggttatatcaccttgccatgatctcgcaagggtaagcattatgtgtttaccacggtgaaagcaaccactgggtggcttgaaacatatgcagtacccaatgctaccgcctgaaacaccatattaagtcttgagaaacaagtcctatggcagcatggcactccagaaagaattgagtcaaataatgagacactcatttcaaaaagctctcctgtaaatacttgggccaaagttcatggcattgagtggatttatcatatcccctaacatgca

SEQ ID NO: 67689 - DNA, 600 bp, Chicken  19866894337826_1
gatattaagtttggacaagctgtcttggatgttttttgttaaactaagttgcaaaatggctgcaaatgctgctttttcacattcttaccagatcacagattattcctgtcaccatatcttttgacagaaaagaagcagtaagtcagccacttatttatgttgggagaaaagaacatttgcagcattctcctcattgctgaaagaaataattcctcccctgtttcatgaaatcttactgcttttgcaacttttagatttacaaaataaaacgcctctggagtttttctcagcaaaacagcractttgatgggattttgaaaggatgcagtratttgttcaactttcacaagaaaaagtccccatgcacttattatgtcagagcaactttccaaagattggcatagctttgtgagctggtcttcattgaccaatactgctagaagacaacacctgggagtgaggctcatctgcatataaagtcagaagcacttttgcatgcatttgtttcagaaaggccttttctttaattatctttatttgttccattcttgcagatatttttcaaacagaattgcttgcttgtggtttctctgaatttgc

SEQ ID NO: 67690 - DNA, 600 bp, Chicken  19866894337826_2
gttttttgttaaactaagttgcaaaatggctgcaaatgctgctttttcacattcttaccagatcacagattattcctgtcaccatatcttttgacagaaaagaagcagtaagtcagccacttatttatgttgggagaaaagaacatttgcagcattctcctcattgctgaaagaaataattcctcccctgtttcatgaaatcttactgcttttgcaacttttagatttacaaaataaaacgcctctggagtttttctcagcaaaacagcractttgatgggattttgaaaggatgcagtratttgttcaactttcacaagaaaaagtccccatgcacttattatgtcagagcaactttccaaagattggcatagctttgtgagctggtcttcattgaccaatactgctagaagacaacacctgggagtgaggctcatctgcatataaagtcagaagcacttttgcatgcatttgtttcagaaaggccttttctttaattatctttatttgttccattcttgcagatatttttcaaacagaattgcttgcttgtggtttctctgaatttgctttccatttaatttcaagctcatagtctgt

SEQ ID NO: 67691 - DNA, 600 bp, Chicken  19866894337834_1
tggtaaggtgggcattgccacatccccaatggatgtggtcagcaaaatcactgccatttctctgcccactagtaagacagacactatcttttctgggcatagtgggcttttgagaatgcatgctccaaactgtagcctcattgtaagccccctttgtcaggtgacgcagaagaatttttcgttgggccctgagcagcagcaggcttttgagcaaattaagcaggagatagcctgtgccatggcctcagggctagtatggatgggacaggatgtaaagaacatcctctacactgctgctgragagaaaggtcccacttggagtttgtgacaaagatcttcatgagagacccaaggccgacccctgggattctggagtagagcatacagggggtcagaagagtgctacactccaactgaaaaggagatcttagctgtgtatgagggggttcaggctgcttccgaagtaattggcactgaaacgcagctccttytggcacctcractgccagtgctgaactggatgtttaaaggaaatgtcccctccacccatcacgctacagatgccacttggagtaagtggattgtgttgattacacaamg

SEQ ID NO: 67692 - DNA, 600 bp, Chicken  19866894337834_2
ggtaaggtgggcattgccacatccccaatggatgtggtcagcaaaatcactgccatttctctgcccactagtaagacagacactatcttttctgggcatagtgggcttttgagaatgcatgctccaaactgtagcctcattgtaagccccctttgtcaggtgacgcagaagaatttttcgttgggccctgagcagcagcaggcttttgagcaaattaagcaggagatagcctgtgccatggcctcagggctagtatggatgggacaggatgtaaagaacatcctctacactgctgctggrgagaaaggtcccacttggagtttgtgacaaagatcttcatgagagacccaaggccgacccctgggattctggagtagagcatacagggggtcagaagagtgctacactccaactgaaaaggagatcttagctgtgtatgagggggttcaggctgcttccgaagtaattggcactgaaacgcagctccttytggcacctcractgccagtgctgaactggatgtttaaaggaaatgtcccctccacccatcacgctacagatgccacttggagtaagtggattgtgttgattacacaamga

SEQ ID NO: 67693 - DNA, 600 bp, Chicken  19866894337834_3
agcagcagcaggcttttgagcaaattaagcaggagatagcctgtgccatggcctcagggctagtatggatgggacaggatgtaaagaacatcctctacactgctgctggagagaaaggtcccacttggagtttgtgacaaagatcttcatgagagacccaaggccgacccctgggattctggagtagagcatacagggggtcagaagagtgctacactccaactgaaaaggagatcttagctgtgtatgagggggttcaggctgcttccgaagtaattggcactgaaacgcagctccttytggcacctcractgccagtgctgaactggatgtttaaaggaaatgtcccctccacccatcacgctacagatgccacttggagtaagtggattgtgttgattacacaamgagcrtggatggggaacctcagccatccaggaatcccagaggtgatcatggactggcctgaaggcaaaaagttcggcacatccccagcagaagaggtatcacatgctaaagaggcccaccatacaatgaaaatgaaaagaaattgccctgctcacagatggatcgtgtcgtattgtggggaagcatcacaga

SEQ ID NO: 67694 - DNA, 600 bp, Chicken  19866894337834_4
ggcttttgagcaaattaagcaggagatagcctgtgccatggcctcagggctagtatggatgggacaggatgtaaagaacatcctctacactgctgctggagagaaaggtcccacttggagtttgtgacaaagatcttcatgagagacccaaggccgacccctgggattctggagtagagcatacagggggtcagaagagtgctacactccaactgaaaaggagatcttagctgtgtatgagggggttcaggctgcttccgaagtaattggcactgaaacgcagctccttytggcacctcractgccagtgctgaactggatgtttaaaggaaatgtcccctccacccatcacgctacagatgccacttggagtaagtggattgtgttgattacacaamgagcrtggatggggaacctcagccatccaggaatcccagaggtgatcatggactggcctgaaggcaaaaagttcggcacatccccagcagaagaggtatcacatgctaaagaggcccaccatacaatgaaaatgaaaagaaattgccctgctcacagatggatcgtgtcgtattgtggggaagcatcacagatagaaggctg

SEQ ID NO: 67695 - DNA, 600 bp, Chicken  19866894337834_5
gagagaaaggtcccacttggagtttgtgacaaagatcttcatgagagacccaaggccgacccctgggattctggagtagagcatacagggggtcagaagagtgctacactccaactgaaaaggagatcttagctgtgtatgagggggttcaggctgcttccgaagtaattggcactgaaacgcagctccttytggcacctcractgccagtgctgaactggatgtttaaaggaaatgtcccctccacccatcacgctacagatgccacttggagtaagtggattgtgttgattacacaamgagcrtggatggggaacctcagccatccaggaatcccagaggtgatcatggactggcctgaaggcaaaaagttcggcacatccccagcagaagaggtatcacatgctaaagaggcccaccatacaatgaaaatgaaaagaaattgccctgctcacagatggatcgtgtcgtattgtggggaagcatcacagatagaaggctgctgcgtggagccccacatgacaagttgcagaggccactgaaggtaaaggacaatcaagccaatttgcagaggtaaaggctgtccagctggccttagat

SEQ ID NO: 67696 - DNA, 600 bp, Chicken  19866894337834_6
aaaggtcccacttggagtttgtgacaaagatcttcatgagagacccaaggccgacccctgggattctggagtagagcatacagggggtcagaagagtgctacactccaactgaaaaggagatcttagctgtgtatgagggggttcaggctgcttccgaagtaattggcactgaaacgcagctccttytggcacctcractgccagtgctgaactggatgtttaaaggaaatgtcccctccacccatcacgctacagatgccacttggagtaagtggattgtgttgattacacaamgagcrtggatggggaacctcagccatccaggaatcccagaggtgatcatggactggcctgaaggcaaaaagttcggcacatccccagcagaagaggtatcacatgctaaagaggcccaccatacaatgaaaatgaaaagaaattgccctgctcacagatggatcgtgtcgtattgtggggaagcatcacagatagaaggctgctgcgtggagccccacatgacaagttgcagaggccactgaaggtaaaggacaatcaagccaatttgcagaggtaaaggctgtccagctggccttagatgttgc

SEQ ID NO: 67697 - DNA, 600 bp, Chicken  19866894337847_1
attgttatgccaaatgtttatgagtgcccagtccccttcagtgcactatgctggtagtagcaaaaaggtgatgttgccctttctgcaacaaataattttcattttcactttataacaaatttctagccagctggcatggagaaggaaattgaaacacttcatattgatctgtaaatataaaggcatatttatatacccctctattcccgagggaaggtccatatagaacctaatgcagtgcttctacatggcttccattggtttgcaaataactttccttcactccatgactggcctctycgataatgtcagccaaattcaacagatagtaaaagctggtcagacggtaacactcccattagaaaaacaaattagaaaagcaaactaacccttatccaaaggaactctcaaaaattaaaataaaacaataaaatacaaaaaataaaataaaacaaggagttactstctgatgtcaggggcttgtctgcttagctttttatgttttgttggcttatttttatgcaatctagtagtcatagttaactgactaggtctaccattatactaccatattataatactaccatattataacttggt

SEQ ID NO: 67698 - DNA, 600 bp, Chicken  19866894337847_2
gatctgtaaatataaaggcatatttatatacccctctattcccgagggaaggtccatatagaacctaatgcagtgcttctacatggcttccattggtttgcaaataactttccttcactccatgactggcctctycgataatgtcagccaaattcaacagatagtaaaagctggtcagacggtaacactcccattagaaaaacaaattagaaaagcaaactaacccttatccaaaggaactctcaaaaattaaaataaaacaataaaatacaaaaaataaaataaaacaaggagttactstctgatgtcaggggcttgtctgcttagctttttatgttttgttggcttatttttatgcaatctagtagtcatagttaactgactaggtctaccattatactaccatattataatactaccatattataacttggtctcactgcttgtccagaaaaaagggtatgggcatatagaactgcagtggaaaaatgatccaaaagatccacatcttctcctgtacttaattaagaattaagatacatttcatttttttaagctttatttatctatttattttcttttacaccaactgtgaatcac

SEQ ID NO: 67699 - DNA, 600 bp, Chicken  19866894337849_1
gacagctctttttttttttttttttttagtaactaaaagactaactatgaatttggttttagaatacgaaaaaaacaaaaatgcatcatgtattgcaagaattttaagtggaaattatctgctactataatggttcattaataacaatttattactcataccccaaatatatcactgttggattgcaatgccatcatcctagctcttgctataaagagttgagtactgtacagatagccaatgatttcctaactatagcccttctgaagaaatcaaagataccatagttttcaagtctaytgccaataatrtattttattcacagaaattatttattttaaatcaaagtgttttcagataatctttgttgaaattgttttaattctgaaaatattcaaaactaaataaaagagagaagagagattcaggtcagtaaaatggaayaaccatagaaacttattaattttagagtctaaacactcttcagtaattagttagtgttataatatgaatatatatttttccttttttttttttttttttccctgaatgaagatgaagtcagtttcttctccaggagaccacactgtagccttccag

SEQ ID NO: 67700 - DNA, 600 bp, Chicken  19866894337849_2
ttttttttttttttttagtaactaaaagactaactatgaatttggttttagaatacgaaaaaaacaaaaatgcatcatgtattgcaagaattttaagtggaaattatctgctactataatggttcattaataacaatttattactcataccccaaatatatcactgttggattgcaatgccatcatcctagctcttgctataaagagttgagtactgtacagatagccaatgatttcctaactatagcccttctgaagaaatcaaagataccatagttttcaagtctaytgccaataatrtattttattcacagaaattatttattttaaatcaaagtgttttcagataatctttgttgaaattgttttaattctgaaaatattcaaaactaaataaaagagagaagagagattcaggtcagtaaaatggaayaaccatagaaacttattaattttagagtctaaacactcttcagtaattagttagtgttataatatgaatatatatttttccttttttttttttttttttccctgaatgaagatgaagtcagtttcttctccaggagaccacactgtagccttccagtacttgaaagg

SEQ ID NO: 67701 - DNA, 600 bp, Chicken  19866894337849_3
caatttattactcataccccaaatatatcactgttggattgcaatgccatcatcctagctcttgctataaagagttgagtactgtacagatagccaatgatttcctaactatagcccttctgaagaaatcaaagataccatagttttcaagtctaytgccaataatrtattttattcacagaaattatttattttaaatcaaagtgttttcagataatctttgttgaaattgttttaattctgaaaatattcaaaactaaataaaagagagaagagagattcaggtcagtaaaatggaayaaccatagaaacttattaattttagagtctaaacactcttcagtaattagttagtgttataatatgaatatatatttttccttttttttttttttttttccctgaatgaagatgaagtcagtttcttctccaggagaccacactgtagccttccagtacttgaaaggagattacaagcaggagaagggcctactttttacatggttcaacagtgaaatgacaaaggggaatggctttaaaccaaaaaagaatagatttaggttagatgttaggaagaaattttttgctcagagagcagtg

SEQ ID NO: 67702 - DNA, 600 bp, Chicken  19866894337857_1
aggcaggcacataattatgggaatatataaatagaaagcagtattttttgatatattgagggtataaggaccgtctcagacactcacaaagagaagaaatgggaagtcatatgacgtaaattcattttctcataaagtcattagaactttatatcctttataatctttgttgggtgtctgctttgtcttcaaactcttagtaaaggagctctgccctacaaacacaccgcagacacccttcacgctaaaggaaagaagtaataaacatgactgctctaattagattagagaagaagagawagagcaagtaggaaggtagattaattcattatttgaagactttgagctgagtttctagcacagaccttattgtcagtaaggaactacaaactggagagtggtgtgtgtggaaatactgcaggaaacaacagaaaaaattctaaggaggctaaagttgtgattattttgatataactctgggtataaatgagagagagactgaaaatactgcttagtgtgagtgctagagaaaatctggatacagtcagcaaaccatctcaaagggacacaggcagcatcactactactattttcattgtt

SEQ ID NO: 67703 - DNA, 600 bp, Chicken  19866894337862_1
tgcccttttagagctagaatccacactttcttaaaagctctttggatttctgccctcctgcctcctacagggcggccactccaaacgtgattgctttaatggttcaaagccctcaactaatttccagcctcgtttttattcatggccagtttatatccatttgttctcgtgccagaactgtcctttggctgaaatagctgtcctccctccatagtgcttactcctcggacatatttatagaaagctatgggaagtatcccaacccccctcgtgctccaatccctctggttctcatacctytgtaggctcaccatccctcctcagagttaaagagcacggagtctgcacgtgattgtgttctgcctgggaagtggggcattggtgcggtccagagagaaatctcatcccctccctgggcctgtccctctctctgcacattcctggaaggagcagcagtctctcagcaagcatctcttacaaatccttaccccaaaagagctccaagatcagcagcagcttccagcaacaacagcggcatgagaagcagcagaagagagaactgtaaattatttgaaaatatgtaaatctgctcattaaata

SEQ ID NO: 67704 - DNA, 599 bp, Chicken  19866894337867_1
  misc_feature (1)..(72): n is any nucleotide
nnnnnnnnnnnnnnnnnnnnnnnnnnnnnnnnnnnnnnnnnnnnnnnnnnnnnnnnnnnnnnnnnnnnnnnnaaatttctgtaaagaactgaatgttattggagtttcagctgttaaaactcttctttttagttcatctaagtaactgagctatctatgagaaaggaacatgcttcctgataaagaaataaagaagaatcattactggtggctttttgaaatagggtggtatgagggacattttaagtggcacaaactagcaccaagcatatattgtaaacagacaacaaaaaaagcaamgtctcgtattaagataaaacaactaaacagtgttcagaaacggaaaaggattatgaagcagaaagccaaagaatggctagagaattagaaaagatcatgctctgccaaaagtcacctgggtcaaagtaaagagccagagctaatgagaccagatccacctgcattccttcatacatcttcctgcaaacataactgaaagaatctagaatgtttattagtttttttttttccagatttcataacatcaaactacttttgctatgcttgaactcttccatgtgaaaaagtctttaagattt

SEQ ID NO: 67705 - DNA, 600 bp, Chicken  19866894337871_1
gaagaaattatactcacaagctagtgagccaccaaaattagaagagaagaagaaagtgttggaaaattattttggcagcaagctgactccttcaagacctctattttgtgctgcactgagtgtaaagagagaagttgctgatttgttgtgagatttaattctgtgtacactagcattttatgcatattttagagatctccagggaaaaattatctgccaattcagaaagcactttaattaattaaaaagctttcctttctatgttcttaatgcaacttctgtaacattttcatgctaggrcttattgagttatttgaaaaccattattcatacaagactttgagaattttcaacaccagacttctgggtttaggctctgatgtctccatgcaaacagccaaaaaatccagcttacatttttcaaaaatgcagagtgtcaagaagtttcacatcacctcctaagaataccttaccaaaagccaggtgaaggtccatctagctctgcaaccagctcttcacagcaaccagaggcagatgcttagtaaagcacgaggaaggcacagcacagacatacagggagtacctcctgaataaccctgg

SEQ ID NO: 67706 - DNA, 600 bp, Chicken  19866894337871_2
tgggtttaggctctgatgtctccatgcaaacagccaaaaaatccagcttacatttttcaaaaatgcagagtgtcaagaagtttcacatcacctcctaagaataccttaccaaaagccaggtgaaggtccatctagctctgcaaccagctcttcacagcaaccagaggcagatgcttagtaaagcacgaggaaggcacagcacagacatacagggagtacctcctgaataaccctggatatccaaaagcctaactcgagacatgccaaaaaaattcccccaaacatctggaatctgagaargactaaggagacgttgccctggaagactstgtgccaccatcacttccagacactcattaccactagcactgcacacatcctctctctctcagctttctcaaagactcagtttctgtttatgaacataataacaaatcttttcacttcctaaatggggtgaagaatgagtctcttaactgcttcaataaagtttcagccctggttaatctgtgacagaacagataatgaaagtcccatctccagcaatgaaattatgcaggtgaaagttacattacataaaacaacagtgattatgtatag

SEQ ID NO: 67707 - DNA, 600 bp, Chicken  19866894337871_3
acagccaaaaaatccagcttacatttttcaaaaatgcagagtgtcaagaagtttcacatcacctcctaagaataccttaccaaaagccaggtgaaggtccatctagctctgcaaccagctcttcacagcaaccagaggcagatgcttagtaaagcacgaggaaggcacagcacagacatacagggagtacctcctgaataaccctggatatccaaaagcctaactcgagacatgccaaaaaaattcccccaaacatctggaatctgagaargactaaggagacgttgccctggaagactstgtgccaccatcacttccagacactcattaccactagcactgcacacatcctctctctctcagctttctcaaagactcagtttctgtttatgaacataataacaaatcttttcacttcctaaatggggtgaagaatgagtctcttaactgcttcaataaagtttcagccctggttaatctgtgacagaacagataatgaaagtcccatctccagcaatgaaattatgcaggtgaaagttacattacataaaacaacagtgattatgtatagtctggagacctgggtacaagaacatcttg

SEQ ID NO: 67708 - DNA, 600 bp, Chicken  19866894337874_1
tctgtaattctatttttggtgtcctgaaatgcatataggcttctactggaaagtttgtaacactagactcctgcactgtaacagggaaggcagccatgggccatgcctacagtcctgtcatttgcctgacaggagctgtgcacaccaagcagatccaagtggaggtgcccgcagattaatagcactctgaagtgaagatgaattcattgtctacatgaagccattaaacaatgctgtgttcatcctacgctgatcacctgcagcctttgttatcagcaaagacaagtggctcaagaggawgyctaacactgttatagcacgggcatccaagctgacaagcgttttcactttctaggagcaagtctttttgcatcagaaatatttgtacattgattaaagaactcatggaacctttgttgtccaaaatgaaggatttagaatcatagaatcacggaatagatttgttaagttttcagttatttagacaaaaattttaatgtggacactcaaatcacttactagaactcatccagctgtgatgggataaggaacaccctgagcttaattcccaccactgtgattcttgagtagtccttggga

SEQ ID NO: 67709 - DNA, 600 bp, Chicken  19866894337874_2
tgtaattctatttttggtgtcctgaaatgcatataggcttctactggaaagtttgtaacactagactcctgcactgtaacagggaaggcagccatgggccatgcctacagtcctgtcatttgcctgacaggagctgtgcacaccaagcagatccaagtggaggtgcccgcagattaatagcactctgaagtgaagatgaattcattgtctacatgaagccattaaacaatgctgtgttcatcctacgctgatcacctgcagcctttgttatcagcaaagacaagtggctcaagaggawgyctaacactgttatagcacgggcatccaagctgacaagcgttttcactttctaggagcaagtctttttgcatcagaaatatttgtacattgattaaagaactcatggaacctttgttgtccaaaatgaaggatttagaatcatagaatcacggaatagatttgttaagttttcagttatttagacaaaaattttaatgtggacactcaaatcacttactagaactcatccagctgtgatgggataaggaacaccctgagcttaattcccaccactgtgattcttgagtagtccttgggatg

SEQ ID NO: 67710 - DNA, 575 bp, Chicken  19866894337882_1
aatttatcaaactacatgagaagtaattgatatttatgatgatttcataattttcctcagttaccaaattagggttcatccagcatgcaagtttgcctcattaatttctgtaagacttctcatctaaggcaaaggcgaaagcttcagatcattacgttttctttcttagagcattctcttctgtatataatcaacacactttgccatacagtcctgtctttatacgttttgagttactgcctgggctccagtattgcagcacaacctttgccaacaagctgtagatggatttgcaatatmatttgcaatcttttcttatgttacattaaacattgcaattttttaaarttacatttcaaatttttgtaaaaacaaaccaacaaaaaccaacaaacacaacactattttcagatggtttttaacgccatccatacgttaaccacatttgatttctttttttctttttcagtcttgctccatgggtaccagttggggggtctggaaatccatgcgcagatcacttccaactcaaaacttttctctggctcccaagtccagtttgcagcacctcctaa

SEQ ID NO: 67711 - DNA, 527 bp, Chicken  19866894337882_2
aattttcctcagttaccaaattagggttcatccagcatgcaagtttgcctcattaatttctgtaagacttctcatctaaggcaaaggcgaaagcttcagatcattacgttttctttcttagagcattctcttctgtatataatcaacacactttgccatacagtcctgtctttatacgttttgagttactgcctgggctccagtattgcagcacaacctttgccaacaagctgtagatggatttgcaatatmatttgcaatcttttcttatgttacattaaacattgcaattttttaaarttacatttcaaatttttgtaaaaacaaaccaacaaaaaccaacaaacacaacactattttcagatggtttttaacgccatccatacgttaaccacatttgatttctttttttctttttcagtcttgctccatgggtaccagttggggggtctggaaatccatgcgcagatcacttccaactcaaaacttttctctggctcccaagtccagtttgcagcacctcctaa

SEQ ID NO: 67712 - DNA, 600 bp, Chicken  19866894337884_1
ttgggaaggagaggagaggacattgccctttatgtgagagaatagccaaaatgtatggagctctgctctgggacatgtcaggagtgaggcaagagctcatgggtgaaggttagtgagtaggtcctctcagcttctgtctggctgatctggtctaacttctggtggctgatcagctggaaagcagcttttccaagaaggatcttggagtcttggtgaacagcgagcttgccatgagtcagcaattcacccttgagtcaaaaacattatcctaggctgcattaggaagagattgccagcatrtcaggtgatgtgatccttcccctgtactcagctctgatcaggcttcatctggaatactgtgctctccagtgcaatgaacatatgagcgtactagagtgagtcccatacaggtcataaaggtgattaaagaactggactaacttttcatatgtgcagagactgagagagctgggatgttttagcctggaaaaggctaatggggaatcttakcagcatatataaatatctaatgggcaggaatgacaacaagggagctagacttctcaatagtgctcaatgacaggatgagaggaaatgtgc

SEQ ID NO: 67713 - DNA, 600 bp, Chicken  19866894337884_2
tggtgaacagcgagcttgccatgagtcagcaattcacccttgagtcaaaaacattatcctaggctgcattaggaagagattgccagcatrtcaggtgatgtgatccttcccctgtactcagctctgatcaggcttcatctggaatactgtgctctccagtgcaatgaacatatgagcgtactagagtgagtcccatacaggtcataaaggtgattaaagaactggactaacttttcatatgtgcagagactgagagagctgggatgttttagcctggaaaaggctaatggggaatcttakcagcatatataaatatctaatgggcaggaatgacaacaagggagctagacttctcaatagtgctcaatgacaggatgagaggaaatgtgcacaartagaaatggcggccctgcacatagcaggggggttgaaactagrcgatcattgtggtccttttcaacctaggccattctatgattcaatgaaatgcatgagattccatttaaacacaaaaaagcagcatttcactgtacaggtggtcaaacactaacacaggttgcccagagaagcggtggattgtgsttccttcmtcagtggaga

SEQ ID NO: 67714 - DNA, 600 bp, Chicken  19866894337884_3
tgatgtgatccttcccctgtactcagctctgatcaggcttcatctggaatactgtgctctccagtgcaatgaacatatgagcgtactagagtgagtcccatacaggtcataaaggtgattaaagaactggactaacttttcatatgtgcagagactgagagagctgggatgttttagcctggaaaaggctaatggggaatcttakcagcatatataaatatctaatgggcaggaatgacaacaagggagctagacttctcaatagtgctcaatgacaggatgagaggaaatgtgcacaartagaaatggcggccctgcacatagcaggggggttgaaactagrcgatcattgtggtccttttcaacctaggccattctatgattcaatgaaatgcatgagattccatttaaacacaaaaaagcagcatttcactgtacaggtggtcaaacactaacacaggttgcccagagaagcggtggattgtgsttccttcmtcagtggagatatttaaaacccaattggacatgctcacagacaacttgccgtagctgaccctgcttgagcagggcacgttggactagatgatctaaagagatacc

SEQ ID NO: 67715 - DNA, 600 bp, Chicken  19866894337884_4
ctggaatactgtgctctccagtgcaatgaacatatgagcgtactagagtgagtcccatacaggtcataaaggtgattaaagaactggactaacttttcatatgtgcagagactgagagagctgggatgttttagcctggaaaaggctaatggggaatcttakcagcatatataaatatctaatgggcaggaatgacaacaagggagctagacttctcaatagtgctcaatgacaggatgagaggaaatgtgcacaartagaaatggcggccctgcacatagcaggggggttgaaactagrcgatcattgtggtccttttcaacctaggccattctatgattcaatgaaatgcatgagattccatttaaacacaaaaaagcagcatttcactgtacaggtggtcaaacactaacacaggttgcccagagaagcggtggattgtgsttccttcmtcagtggagatatttaaaacccaattggacatgctcacagacaacttgccgtagctgaccctgcttgagcagggcacgttggactagatgatctaaagagatacctttcaacctcaatccttctatgattctgtggtatttctatttt

SEQ ID NO: 67716 - DNA, 600 bp, Chicken  19866894337884_5
gctaatggggaatcttakcagcatatataaatatctaatgggcaggaatgacaacaagggagctagacttctcaatagtgctcaatgacaggatgagaggaaatgtgcacaartagaaatggcggccctgcacatagcaggggggttgaaactagrcgatcattgtggtccttttcaacctaggccattctatgattcaatgaaatgcatgagattccatttaaacacaaaaaagcagcatttcactgtacaggtggtcaaacactaacacaggttgcccagagaagcggtggattgtgsttccttcmtcagtggagatatttaaaacccaattggacatgctcacagacaacttgccgtagctgaccctgcttgagcagggcacgttggactagatgatctaaagagatacctttcaacctcaatccttctatgattctgtggtatttctatttttaatcatcacctcccaaagctgaggtccagcattttgcttgaagaactaacttaatgggaatggcttgaaaatatccatcggtgataggacttaacttgatagccacatcacctgtctcagtctagtcaaactgtggggctttc

SEQ ID NO: 67717 - DNA, 600 bp, Chicken  19866894337884_6
ggaatcttakcagcatatataaatatctaatgggcaggaatgacaacaagggagctagacttctcaatagtgctcaatgacaggatgagaggaaatgtgcacaartagaaatggcggccctgcacatagcaggggggttgaaactagrcgatcattgtggtccttttcaacctaggccattctatgattcaatgaaatgcatgagattccatttaaacacaaaaaagcagcatttcactgtacaggtggtcaaacactaacacaggttgcccagagaagcggtggattgtgsttccttcmtcagtggagatatttaaaacccaattggacatgctcacagacaacttgccgtagctgaccctgcttgagcagggcacgttggactagatgatctaaagagatacctttcaacctcaatccttctatgattctgtggtatttctatttttaatcatcacctcccaaagctgaggtccagcattttgcttgaagaactaacttaatgggaatggcttgaaaatatccatcggtgataggacttaacttgatagccacatcacctgtctcagtctagtcaaactgtggggctttccaaaagca

SEQ ID NO: 67718 - DNA, 600 bp, Chicken  19866894337887_1
catggctaaaggacagcatgctgaatttgctggatgtcactgtgtttcagttgaaaaaacaaacaaaaaaaacccaccaaacatgctcagcctgtttacaggaatgcaatgtatggcttatcaaattgcagattttacaatttgtagtaagtttatcgacctggaggcattgtaaaaatagatacttgagagtaaagagaagttaaacaagaatgagattaggttcaatagggccaaattggaacatcttgctgaagcactggttgtatgcaacaaacttttctgtgctgatgaaggccygaataaaggkctgctagtccaacctccctgcagtgagtagggatacctgcagcttgatcaggttgttcacagcctggtccagcctgacctcaaatgccttctagaaaggggcatccaacacctctctgggcaacctgtgccagtgcctcaccacccttattgtaaaaaaacttctttccttatatccagtctaaatctccctcctttagtttaaaccatttccccttttcctatcacaacagaccctgctaaagtgtctgcctctttctttcttatagctccccttcttgatactgaaag

SEQ ID NO: 67719 - DNA, 600 bp, Chicken  19866894337887_2
ggacagcatgctgaatttgctggatgtcactgtgtttcagttgaaaaaacaaacaaaaaaaacccaccaaacatgctcagcctgtttacaggaatgcaatgtatggcttatcaaattgcagattttacaatttgtagtaagtttatcgacctggaggcattgtaaaaatagatacttgagagtaaagagaagttaaacaagaatgagattaggttcaatagggccaaattggaacatcttgctgaagcactggttgtatgcaacaaacttttctgtgctgatgaaggccygaataaaggkctgctagtccaacctccctgcagtgagtagggatacctgcagcttgatcaggttgttcacagcctggtccagcctgacctcaaatgccttctagaaaggggcatccaacacctctctgggcaacctgtgccagtgcctcaccacccttattgtaaaaaaacttctttccttatatccagtctaaatctccctcctttagtttaaaccatttccccttttcctatcacaacagaccctgctaaagtgtctgcctctttctttcttatagctccccttcttgatactgaaaggctgtgctca

SEQ ID NO: 67720 - DNA, 600 bp, Chicken  19866894337890_1
gcagttgtcatcatagagggagaaggagttgttccgtttctgccctcaatagaccggtatttctgctagttctcagtggttaagcactgaatctaggctttcagtgcagtttggatacttgtttgaactagttactgtgggcaccatcacccatccctgttctcttgtgccccatgatatacctgatttcagaacgtgaccagctttttccccatgctgggcaatcagaactggagttttgttgtaagaagggagcagtgactgtggtattctggtgcttttacagacatcctatggacratctctctgtgaccatagcttgtaagttttccttccactgtgcttggaaaaagattagaatttaaattttaaatattgaacactgtcaaatgttattagagcatgttagataggcatcctttttcttggaggtacatacgtatttagcttttgtttaaaataaaactgcctggatgtattaaataggcttttttcctccaccatgctgtgtgcaatgccaggtcttactactattaatagctcatatacgaatgtattcatgcattggaaccaatatttgattaatactcataaagttgc

SEQ ID NO: 67721 - DNA, 563 bp, Chicken  19866894337890_2
gtgcttggaaaaagattagaatttaaattttaaatattgaacactgtcaaatgttattagagcatgttagataggcatcctttttcttggaggtacatacgtatttagcttttgtttaaaataaaactgcctggatgtattaaataggcttttttcctccaccatgctgtgtgcaatgccaggtcttactactattaatagctcatatacgaatgtattcatgcattggaaccaatatttgattaatactcataaagttgctgcattgatgttggcaggtgttatccctatgttacagcrggaaccaaaccatttaaagatgaaattgtggtgtttcaaataccctctgattctgaatagccagaatggcatgtctgtgtcctggctcccaactacgcagccctttttaacaatctctttaatagcatagtttcattgtgttcaccaggctttgctgtgatacaccatctttccctgcagcctaccttgattcaatgcatagctactaactttcccagcgaacgaagaggattcctatagataacagctttcttcattatcct

SEQ ID NO: 67722 - DNA, 599 bp, Chicken  19866894337896_1
  misc_feature (1)..(122): n is any nucleotide
nnnnnnnnnnnnnnnnnnnnnnnnnnnnnnnnnnnnnnnnnnnnnnnnnnnnnnnnnnnnnnnnnnnnnnnnnnnnnnnnnnnnnnnnnnnnnnnnnnnnnnnnnnnnnnnnnnnnnnnnnnttaaacgctgaaggccatagaaagcctgcagtgagtttcctggagaagtctcttaggccgctccaaaatcttgtccgggagtctgaaagacgtccgtgatgcgttcagagggacagtgcatgttccattcttcaaatatttatagatatgcctcgtgtttgagtgaagctgacgtttytggtgaagtagaaggattacagcagggggaggaattaccctaaatcggtaggcatttttgtccattaactaacacaaggctaaaaggagaattaagcatctggcagtcaggagctcggctccactgcaagggagatttcatagcagtatgcttcaagatcaattacagaaaaaaaaagaagaaggaaaacaaaaatgaactagaacagtgtgctgcataacactgggtgctaaggagactggaaaaaaacactgaagctggaaggtttgggccctggacatgtgtaatggcctgttgtc

SEQ ID NO: 67723 - DNA, 600 bp, Chicken  19866894337897_1
agattcactctgacactgggagcacgcacagtacatctgacaaatcctaaaagctttggcaaaggtctgcacattagcaataactataagaagaactgaacacaggtcgagtcataagacaggcaggggtcactcgcagaaactgatccgccaattggaaattcagggtatgttctcaattttgagatagagtacttgaaaccgttccctcataaaagcttatgtatttaaacactactaaaactaagttggcaaatcgcattacagtctatataggctgacggtactcaaacactaacygatgagcagttagaaagaggtcattacacacaaaaattggtgacagtacaatgtgaccttctgagaacgtgcttaatttgcactttccccccactcccaaaggcacaactgtgattggacaaagtttttccaagctgcctaacttaccgtaagaaaaactgcccaggttactactgtattttccactgggaggattatatatctgcctggcatccctttttggtcctgccgaagctttctttggaggtgaacttgaggttgtatcttcacttgttcttttttgactgacagaagaaaata

SEQ ID NO: 67724 - DNA, 600 bp, Chicken  19866894337897_2
cccaaaggcacaactgtgattggacaaagtttttccaagctgcctaacttaccgtaagaaaaactgcccaggttactactgtattttccactgggaggattatatatctgcctggcatccctttttggtcctgccgaagctttctttggaggtgaacttgaggttgtatcttcacttgttcttttttgactgacagaagaaaataaaaacagatcattttacccctgtggtgacaagtacaggaataactattcagcttcaaagattaacaactgtaaactagcagcaactactgaagaygtcctcaataataattctgaaaaggaagtagactagtctctagttrgttcaggctattgtatccctaaagcaagaccaagattattatatcacagctttaaatcctttcaggatgggttttaattctggttgygaaacttttaacttgtgctgcatacattatataaacacacagcttggaatctttgttttgtgaacagcaaaagttaacaacacttttttcattgttgctgttaaygaaaaacatcttactttgcatctgccttctgtaccggtttccaggacagcgtgactgtactt

SEQ ID NO: 67725 - DNA, 600 bp, Chicken  19866894337897_3
acttaccgtaagaaaaactgcccaggttactactgtattttccactgggaggattatatatctgcctggcatccctttttggtcctgccgaagctttctttggaggtgaacttgaggttgtatcttcacttgttcttttttgactgacagaagaaaataaaaacagatcattttacccctgtggtgacaagtacaggaataactattcagcttcaaagattaacaactgtaaactagcagcaactactgaagaygtcctcaataataattctgaaaaggaagtagactagtctctagttrgttcaggctattgtatccctaaagcaagaccaagattattatatcacagctttaaatcctttcaggatgggttttaattctggttgygaaacttttaacttgtgctgcatacattatataaacacacagcttggaatctttgttttgtgaacagcaaaagttaacaacacttttttcattgttgctgttaaygaaaaacatcttactttgcatctgccttctgtaccggtttccaggacagcgtgactgtacttttataagaagggggaatgtggaagagatcctgcggagacaaaattg

SEQ ID NO: 67726 - DNA, 600 bp, Chicken  19866894337897_4
ccgaagctttctttggaggtgaacttgaggttgtatcttcacttgttcttttttgactgacagaagaaaataaaaacagatcattttacccctgtggtgacaagtacaggaataactattcagcttcaaagattaacaactgtaaactagcagcaactactgaagaygtcctcaataataattctgaaaaggaagtagactagtctctagttrgttcaggctattgtatccctaaagcaagaccaagattattatatcacagctttaaatcctttcaggatgggttttaattctggttgygaaacttttaacttgtgctgcatacattatataaacacacagcttggaatctttgttttgtgaacagcaaaagttaacaacacttttttcattgttgctgttaaygaaaaacatcttactttgcatctgccttctgtaccggtttccaggacagcgtgactgtacttttataagaagggggaatgtggaagagatcctgcggagacaaaattggacagttcattctgcagtcaaatccacatccactgcgctcaaagttttggttacctactgaggctccagcatagcacttgcctttga

SEQ ID NO: 67727 - DNA, 522 bp, Chicken  19866894337897_5
acaggaataactattcagcttcaaagattaacaactgtaaactagcagcaactactgaagaygtcctcaataataattctgaaaaggaagtagactagtctctagttrgttcaggctattgtatccctaaagcaagaccaagattattatatcacagctttaaatcctttcaggatgggttttaattctggttgygaaacttttaacttgtgctgcatacattatataaacacacagcttggaatctttgttttgtgaacagcaaaagttaacaacacttttttcattgttgctgttaaygaaaaacatcttactttgcatctgccttctgtaccggtttccaggacagcgtgactgtacttttataagaagggggaatgtggaagagatcctgcggagacaaaattggacagttcattctgcagtcaaatccacatccactgcgctcaaagttttggttacctactgaggctccagcatagcacttgcctttgaagagttttaaaacccaaacctttaaag

SEQ ID NO: 67728 - DNA, 600 bp, Chicken  19866894337900_1
caatgcacgcaagcctgaaagcagtaatgaaaggccaaagcattttcagtctgaagtgcacatatgactgccgtcccttacctgtctactgtgtccagaccagccattcaagaaagttgagagagtggtgaggcactggcacagactgcccagagaagctgtggatgccccatccctgaaagtgttcaaggccaggttagatggggccctgggcagactgatctagtggatgacaacactgcccatgtctggggattgcaactagattgtctttgaagtcccttccaacacaagccattytatgattcaacttttgtatgccatttggatccttcttcaggtgcacccctgaaacatccatgaatgcagaaaaaagccaagaataaattttgatggagaaccttgatgagcccggaaaataggaaaatgatgtagctgccacatgcacagtgggaaacctcctggtgccagatttctagggaaagtaaaaggagaatctgccctcatgagtggtgacctcctggcactgagctgagcgcctgtcctaccaccaactctcactgcttcatacttgtgagaagagctcagtggtaaacacac

SEQ ID NO: 67729 - DNA, 600 bp, Chicken  19866894337902_1
ttcatcattcatcacttcatagcagcactcatagactggatagtcttagctatggagctccaacagcttgcagtgtaaaacagaagttattttgatttatataccacagatccttatttattagcagatacaaacatctcttcagacaatcttctaccaggcaagtcagatatatcctcttagagccacgtttgtaagataggagaaagcacacagctatatcataaacagtcactgagcaagctactgatgctcactctacttttaaagcaaatactactagttagaaaacatgtaaayaaacacagaaaccaagagcacaaaaacatgacacacataatttgtataagtaggctgacaaatggaatacttttcaggctcttcacatgaaaccttaaggaacttacccaaaaagctgcgatctcaatgtgttggacaaatccccacatacagcattatagatgtgagctcaggcaatggcctcagaacttcaccttaagacttctattatcattttatgttggtggaagtaactacttcagaactcctgttctcatacagcattggaaaaaatacaaggtacactacccaaataactgt

SEQ ID NO: 67730 - DNA, 600 bp, Chicken  19866894337909_1
gtaaacattgggtcagccctagctctggctgttctcctgctttaataacccattgttcgcctgtggttgtctcagtgagataaaccaccaacaggcagcatctccagaggggaagtgccgtcccacgcatgtcacggggtgcaagcccagggctgggctttgtggggggcaggcccatgagtgagtccattgcacaaacatctgcctggcctagcagctcaagccatttctaacaggcttaaagccataactgccccatattcactcctcagtgtgggctggatggggcctgttgaggcrcatgccatcaccctgccttccgttgtgacctacgttagcaccaggctatgggtaacggtggctgcaggtaaggctgaagtacagaaggtgatcacaaagcatatttaaccataggagaaaagagacaatgggcagagaaattaatccaaccatacaggaaatgataaaaatcaagaagtcactcatttaatattttcctcatatcctcatgtccaataaggaagtgcactgaacatagtttacatcccactaatgagacatccaatcgcccagaagaaagtaataatgaacacgagctct

SEQ ID NO: 67731 - DNA, 600 bp, Chicken  19866894337909_2
aagaagtcactcatttaatattttcctcatatcctcatgtccaataaggaagtgcactgaacatagtttacatcccactaatgagacatccaatcgcccagaagaaagtaataatgaacacgagctctgtttccaccaaatctaccagaaagatttttaagggtctgctttcccactgacacaaacacatgactcccattagccttaataaaggaaggctgcattcaatgagagagtaatttcccaggactgcaaaaccaaactgtggcaggactgagacacaggagagactgctaagaraagttgtctctcacaaaaccatactgacagaccaaattctttcataattttcccatgaatttcttcagcttttgttaagtgttttacgctttaggccagggaaaatattatggacttttcttatgccaaaattatggaaaaacaaattagatagtggaatgcttagctcatttttagactgaacagcatataacctaaaaaaaatgcactcttttgtttactttaatcttaatgcattgtccctgtatactatttttgactctgtaatatgttaaatcttgctcctgtaacaatgcaaat

SEQ ID NO: 67732 - DNA, 600 bp, Chicken  19866894337923_1
ttgaagaacttacaagagataatacgctattttaaagctttatgtaggagaacttagtgagagggaattcgtgtgtttttcaggtgaaatcatagttgatcatagaactgatcatagaatcacaaggttggaaagaatctacaagatcatctagtccaactgtcctcccattacccttgctatcacaagctactaaaccatatctcgtagctcctcatccagacacctcttgaacactgctagggacggcgactccaccacctccctgggaaatcatattcccataataatcatattccyatttcctttgacatagttcttgcatcttcttactttccagaaactaaacttgggtgattttgtcatccaacaacagatctctgacctcctggtccatcratagaatgaaagcttagccttcaattatctgctcagaaattctcaaaaargtttccaataaaaataaataagattcaatttgacagaacctaataacttaatcaaagagcattcttccagctgaagtttgggccagatcatctccagagatcgcttcaaaccttgacctctctgtaattctcttactgttagaggcactta

SEQ ID NO: 67733 - DNA, 600 bp, Chicken  19866894337923_2
tcatagaactgatcatagaatcacaaggttggaaagaatctacaagatcatctagtccaactgtcctcccattacccttgctatcacaagctactaaaccatatctcgtagctcctcatccagacacctcttgaacactgctagggacggcgactccaccacctccctgggaaatcatattcccataataatcatattccyatttcctttgacatagttcttgcatcttcttactttccagaaactaaacttgggtgattttgtcatccaacaacagatctctgacctcctggtccatcratagaatgaaagcttagccttcaattatctgctcagaaattctcaaaaargtttccaataaaaataaataagattcaatttgacagaacctaataacttaatcaaagagcattcttccagctgaagtttgggccagatcatctccagagatcgcttcaaaccttgacctctctgtaattctcttactgttagaggcacttacacagacatacttttcaagtcagagtattatgcagtaccattgcctgacaagccaaataagaaacttaaaaacttatgtcctgaaacgtaagaaactga

SEQ ID NO: 67734 - DNA, 600 bp, Chicken  19866894337923_3
tctagtccaactgtcctcccattacccttgctatcacaagctactaaaccatatctcgtagctcctcatccagacacctcttgaacactgctagggacggcgactccaccacctccctgggaaatcatattcccataataatcatattccyatttcctttgacatagttcttgcatcttcttactttccagaaactaaacttgggtgattttgtcatccaacaacagatctctgacctcctggtccatcratagaatgaaagcttagccttcaattatctgctcagaaattctcaaaaargtttccaataaaaataaataagattcaatttgacagaacctaataacttaatcaaagagcattcttccagctgaagtttgggccagatcatctccagagatcgcttcaaaccttgacctctctgtaattctcttactgttagaggcacttacacagacatacttttcaagtcagagtattatgcagtaccattgcctgacaagccaaataagaaacttaaaaacttatgtcctgaaacgtaagaaactgacagttcttccctaagattgtgatttccatgtacctcaggacaaggrcact

SEQ ID NO: 67735 - DNA, 600 bp, Chicken  19866894337923_4
aaargtttccaataaaaataaataagattcaatttgacagaacctaataacttaatcaaagagcattcttccagctgaagtttgggccagatcatctccagagatcgcttcaaaccttgacctctctgtaattctcttactgttagaggcacttacacagacatacttttcaagtcagagtattatgcagtaccattgcctgacaagccaaataagaaacttaaaaacttatgtcctgaaacgtaagaaactgacagttcttccctaagattgtgatttccatgtacctcaggacaaggrcactagatggttggcctgagcaggtttgaagatgagtttatatggaatacagattatttcaaggcttcacatttgcataccagacgtagatgtttcgcttaattgtagcaaaaaagttattacattctttgatctcttttagctgtcagcagtgtttatcttttagcccattctagatttttaaccatccttattatacagctttttaatactgaaatgctggtgataatctgttttggtttttattatcattgaaattgtttttagggtcagtagcaggtgctttagtaagatctctac

SEQ ID NO: 67736 - DNA, 600 bp, Chicken  19866894337925_1
taaggagggaataagaatatttatgcatttccaagagtgctacaaatcccagttggtaatgtacatttggatgtcttcatatggaagttactacaggaatcacaaggtgttgaaagaaatctttcaaaaaaggttgatttcggtgttttgtgatcacaaataaccaagtgaagcacagctctgaaagaacgcatggcaagctccaggggcaacactggttgtctctcaaagggctccaacccatgaggataaattgaggcatggtgagaattcatgagctcacagtacgaacaagtatcrcattcaggagagatatatacctgttctgtgatgattgcttgctgcagtgagaatacagagaaagcaatatacgacccaaatgattaaaggcaagaagcagaagtccactgtaaaagcagcagcccagaatgygtgtcaagagtgaattatgaaaatagccttgtacatccacagcaatttcacagagccattctgataacgatgaacacgacagcatgcaataggaataacaatgcctggaattatttcaaacgatatattttttaaggaccgtcactttagttctctctttgcatctgt

SEQ ID NO: 67737 - DNA, 586 bp, Chicken  19866894337925_2
gttgatttcggtgttttgtgatcacaaataaccaagtgaagcacagctctgaaagaacgcatggcaagctccaggggcaacactggttgtctctcaaagggctccaacccatgaggataaattgaggcatggtgagaattcatgagctcacagtacgaacaagtatcrcattcaggagagatatatacctgttctgtgatgattgcttgctgcagtgagaatacagagaaagcaatatacgacccaaatgattaaaggcaagaagcagaagtccactgtaaaagcagcagcccagaatgygtgtcaagagtgaattatgaaaatagccttgtacatccacagcaatttcacagagccattctgataacgatgaacacgacagcatgcaataggaataacaatgcctggaattatttcaaacgatatattttttaaggaccgtcactttagttctctctttgcatctgtgcatggtagctgaattaatgataaatatgacttaagcaacgaaagagtcagcattacactctgttatcagccctccttcctgcctggaaatagcatgaagatattccttataagtgaa

SEQ ID NO: 67738 - DNA, 599 bp, Chicken  19866894337926_1
  misc_feature (1)..(16): n is any nucleotide
nnnnnnnnnnnnnnnntattggcaaatcaaatataatttcaggaaataaatcaagtcctgataccagaagtgtttatgtagacttacacacagttacaaataaacatgaagctatgagaaggacaaaagaatcaaagtgatgggtatctaatcagtgttgtatagtataaacatagtaaataaacacaggttagatttttaacagcttttcagaatttaaatgcccccattttcattggaagtacataaaatttttggaggacaacctcataaagaattcatactggtgcacatgtgatrgaaatctgaagcaagtgtgccctaacatttgtgaaaagccaatttaaaggagcatttatttttgctgtattcaaaattcacataacaacatgcatctttacagaaagaataatgccacattgtgtgcacaaattctgattatctacttcatctctgcgtaatgatttttgaaatcagatttatctgaactatccattctctaatatttttttttcacatttgtctccctctaagactatgccctctgctcttctagttatgtaacattctataatagcaaatgactgggactgaggact

SEQ ID NO: 67739 - DNA, 600 bp, Chicken  19866894337934_1
agcttgtttgagcagtggcttgcttgcttttgccatgtgatgtgagtcattggttacatgcaagttctctactgactctccttccttctgaagcagcccattatagttctgtgcaatattgtgatgtttgttaataccggagaatctgtgataacaacattaggaaataactatttctgttagcacaggccaatgttccccaaagttgcttagtggcaatgctttgaagaggacagataggtcttgactaagttcatttcaacaaattggggaagtcactactgtacatcaattttcttygtttcttcttgactgcaatataaaggttgctctgtagatccactatcacatgttttttcaaatgcttgtgtcttcacatcaggtggctaaaatactcagaaaaataaattctgactggtatgatgggacrtgatccattctacctgtgtggaattgatagacattttgaagttaggtcttatctgagatacacagtatgccaacgaatgtcctaattgctttttcatttcattaagctagtgtgtgggccctagggatagttaagtttgagcacttaaacataacttcgggaacaaagag

SEQ ID NO: 67740 - DNA, 600 bp, Chicken  19866894337934_2
ttaataccggagaatctgtgataacaacattaggaaataactatttctgttagcacaggccaatgttccccaaagttgcttagtggcaatgctttgaagaggacagataggtcttgactaagttcatttcaacaaattggggaagtcactactgtacatcaattttcttygtttcttcttgactgcaatataaaggttgctctgtagatccactatcacatgttttttcaaatgcttgtgtcttcacatcaggtggctaaaatactcagaaaaataaattctgactggtatgatgggacrtgatccattctacctgtgtggaattgatagacattttgaagttaggtcttatctgagatacacagtatgccaacgaatgtcctaattgctttttcatttcattaagctagtgtgtgggccctagggatagttaagtttgagcacttaaacataacttcgggaacaaagagatgagttagtttcagtagaagatgttcactgtttttgagtaaaaggcctgttttgttgttgttgttgttttgtggaaaagttcattttaaaaagatagcagctaactaaactggaataatctatcaaagg

SEQ ID NO: 67741 - DNA, 599 bp, Chicken  19866894337937_1
  misc_feature (1)..(98): n is any nucleotide
nnnnnnnnnnnnnnnnnnnnnnnnnnnnnnnnnnnnnnnnnnnnnnnnnnnnnnnnnnnnnnnnnnnnnnnnnnnnnnnnnnnnnnnnnnnnnnnnnntagacatagaggtagcagcaccatggggccagtgctgtccaccctggattcacaagggaaggccataaggtagccagatctacacagggctttatgtgcctgcagagaagtgccaattacagaaggtttttgtcaccatgactctgtcacctgttgttcagaggtgaaaggaagaggggtcagagatggtttgagattcccraattacaatcacagctgcttgcactcgagttccagtcccttaggagcaaggggatggaaatccatacagcactcacatcagttcatgttcagcctctgtcttgccctctgtcacagggggtgagatggggaaaggttaataagcaaactgcttttaacaaatcttgggcctggagatagctacattttaattgactgtgttaatctgttcgcctatcttgctccttttttcatctttgcatctattaattattgcaaagcagttcttactgataactccccggcagtttgcactgttct

SEQ ID NO: 67742 - DNA, 600 bp, Chicken  19866894337938_1
ctaaatagccctgctcttgagttagacacatgttgtaacacataactaaaagtttgctcgtagtgttttagtttgaggaaatgcattaggcaaagcaaaatatgtagcagaatatctattagccaccatccattatcatgaagttgcttgaaaaaccaactcaatggcataaaaaaacctcacaaacagtaggaatcactgttcctcgcattcaaacagttagccttaaggccagtacctttcagacacgtgtggggcagctctgttacagggtatcttgtgtctgaagagcagagtttrttacgctgactgctgaaatagatgcaaaggtaattgctaccagtggtgctttttttatcaggagctattaaatggaaacactggcagagcaaaaacagccgtaggagagaccatgcattttaatatctaaattttacttacagttcagactcatctcatggggacatatggataactttgagctgggttcctgaaagcatgctgagctgcagggctttgtggaacttgtcaatacttctgtctttcatgatcacatggcaaagattaagggcagtactgaaaatattgtgaaaattagct

SEQ ID NO: 67743 - DNA, 600 bp, Chicken  19866894337941_1
tgaatgtggataattcataggaattatttctaattaacaaacaacataaaatttaccttaaaaataatttttaaaacatccttaaaatagagtatcttgttctgtacttcatccactctctttgacacattcgaacaagcaaaaatacaaagaaggtattggtgaatattcagctttccgatgttattagctttgttcgggagtgttaaacatattgagctagtatgtctgctccttcttaacaaagaaattaaatactttagaaacacatgggctgaagataaccaggacagtagaaarcacagactggctgaggtcatacacaagtggtacatattcagtaatcaatttatcacaaactacattatgcgccgtaaatcagcattcactttgtatgattaaagtatttactagaaaaggtaataggattaytcaatgccagatacacaggggaacattagctgcgctcagaatccaagggcacaatataataaataactaggaagttcagaactggccagttgctaactcccagtcgtgaaggctgtaggcacaatgagtttagcagtataaaatattttctgtgtgcactgtgtcatg

SEQ ID NO: 67744 - DNA, 600 bp, Chicken  19866894337941_2
gaacaagcaaaaatacaaagaaggtattggtgaatattcagctttccgatgttattagctttgttcgggagtgttaaacatattgagctagtatgtctgctccttcttaacaaagaaattaaatactttagaaacacatgggctgaagataaccaggacagtagaaarcacagactggctgaggtcatacacaagtggtacatattcagtaatcaatttatcacaaactacattatgcgccgtaaatcagcattcactttgtatgattaaagtatttactagaaaaggtaataggattaytcaatgccagatacacaggggaacattagctgcgctcagaatccaagggcacaatataataaataactaggaagttcagaactggccagttgctaactcccagtcgtgaaggctgtaggcacaatgagtttagcagtataaaatattttctgtgtgcactgtgtcatgatatctgcacataccttttcaagaaccatctaataaccccctgtgatgaggcaaatactggtgttycatgtgaactttgacagacactgtgagactgtgggaaagaatccttcttgattggtggcatcaatt

SEQ ID NO: 67745 - DNA, 600 bp, Chicken  19866894337941_3
atgcgccgtaaatcagcattcactttgtatgattaaagtatttactagaaaaggtaataggattaytcaatgccagatacacaggggaacattagctgcgctcagaatccaagggcacaatataataaataactaggaagttcagaactggccagttgctaactcccagtcgtgaaggctgtaggcacaatgagtttagcagtataaaatattttctgtgtgcactgtgtcatgatatctgcacataccttttcaagaaccatctaataaccccctgtgatgaggcaaatactggtgttycatgtgaactttgacagacactgtgagactgtgggaaagaatccttcttgattggtggcatcaattaactccagaagtgaatgttacaatctttctggaaaggacttctttaaagaaaattgaaatttaagagcattttgtgcaagactgtttttctgaaatttatacagaaaatgtatttactgaagtgcttcttcagtcattgtggtttcaaatccagtcatgcactcacttaggaaaatataartttccattaaaaatgtgataaattttctatagacttctaaagccttcttttag

SEQ ID NO: 67746 - DNA, 396 bp, Chicken  19866894337941_4
ccttttcaagaaccatctaataaccccctgtgatgaggcaaatactggtgttycatgtgaactttgacagacactgtgagactgtgggaaagaatccttcttgattggtggcatcaattaactccagaagtgaatgttacaatctttctggaaaggacttctttaaagaaaattgaaatttaagagcattttgtgcaagactgtttttctgaaatttatacagaaaatgtatttactgaagtgcttcttcagtcattgtggtttcaaatccagtcatgcactcacttaggaaaatataartttccattaaaaatgtgataaattttctatagacttctaaagccttcttttagcctcggtaaatgcaatgctccaaatcatgttgtaagctgtaag

SEQ ID NO: 67747 - DNA, 599 bp, Chicken  19866894337943_1
  misc_feature (1)..(182): n is any nucleotide
nnnnnnnnnnnnnnnnnnnnnnnnnnnnnnnnnnnnnnnnnnnnnnnnnnnnnnnnnnnnnnnnnnnnnnnnnnnnnnnnnnnnnnnnnnnnnnnnnnnnnnnnnnnnnnnnnnnnnnnnnnnnnnnnnnnnnnnnnnnnnnnnnnnnnnnnnnnnnnnnnnnnnnnnnnnnnnnnnnnnnnaatgcagagagcaattccacccctgaagcacaatctctgtagtactgaaattagaaagtatctagactcacatgtatttacctattgtcatggttctttttgacataagaggatgctraagtgcagttcaatcacctattgccatgtgccaattcacttatcagttgcytgctrttggcatctcctttccattcctgttctgcaacagtcagccagcctccatcacacagctctgccaaaagctctgccaagacaaataggaggaatgtgtgtgcttttcagttctgggccaaaacaagtttaattgcagtcaatgtcagaaccctwgatttcaggatgcacaatttttatctccacagarttgaaaacagtaccctctcctcctcaggagcattaatacagataggataagggagg

SEQ ID NO: 67748 - DNA, 599 bp, Chicken  19866894337943_2
  misc_feature (1)..(131): n is any nucleotide
nnnnnnnnnnnnnnnnnnnnnnnnnnnnnnnnnnnnnnnnnnnnnnnnnnnnnnnnnnnnnnnnnnnnnnnnnnnnnnnnnnnnnnnnnnnnnnnnnnnnnnnnnnnnnnnnnnnnnnnnnnnnnnnnnnnaatgcagagagcaattccacccctgaagcacaatctctgtagtactgaaattagaaagtatctagactcacatgtatttacctattgtcatggttctttttgacataagaggatgctraagtgcagttcaatcacctattgccatgtgccaattcacttatcagttgcytgctrttggcatctcctttccattcctgttctgcaacagtcagccagcctccatcacacagctctgccaaaagctctgccaagacaaataggaggaatgtgtgtgcttttcagttctgggccaaaacaagtttaattgcagtcaatgtcagaaccctwgatttcaggatgcacaatttttatctccacagarttgaaaacagtaccctctcctcctcaggagcattaatacagataggataagggagggactgggatgtactccgcatattacaaccaggggccctcctccttttctta

SEQ ID NO: 67749 - DNA, 599 bp, Chicken  19866894337943_3
  misc_feature (1)..(126): n is any nucleotide
nnnnnnnnnnnnnnnnnnnnnnnnnnnnnnnnnnnnnnnnnnnnnnnnnnnnnnnnnnnnnnnnnnnnnnnnnnnnnnnnnnnnnnnnnnnnnnnnnnnnnnnnnnnnnnnnnnnnnnnnnnnnnnaatgcagagagcaattccacccctgaagcacaatctctgtagtactgaaattagaaagtatctagactcacatgtatttacctattgtcatggttctttttgacataagaggatgctraagtgcagttcaatcacctattgccatgtgccaattcacttatcagttgcytgctrttggcatctcctttccattcctgttctgcaacagtcagccagcctccatcacacagctctgccaaaagctctgccaagacaaataggaggaatgtgtgtgcttttcagttctgggccaaaacaagtttaattgcagtcaatgtcagaaccctwgatttcaggatgcacaatttttatctccacagarttgaaaacagtaccctctcctcctcaggagcattaatacagataggataagggagggactgggatgtactccgcatattacaaccaggggccctcctccttttcttactagc

SEQ ID NO: 67750 - DNA, 600 bp, Chicken  19866894337943_4
gcacaatctctgtagtactgaaattagaaagtatctagactcacatgtatttacctattgtcatggttctttttgacataagaggatgctraagtgcagttcaatcacctattgccatgtgccaattcacttatcagttgcytgctrttggcatctcctttccattcctgttctgcaacagtcagccagcctccatcacacagctctgccaaaagctctgccaagacaaataggaggaatgtgtgtgcttttcagttctgggccaaaacaagtttaattgcagtcaatgtcagaaccctwgatttcaggatgcacaatttttatctccacagarttgaaaacagtaccctctcctcctcaggagcattaatacagataggataagggagggactgggatgtactccgcatattacaaccaggggccctcctccttttcttactagcagaggaagagacctttctcagtttcaagcctaagagcaattctgactaagccctgagtgcttttgtgtcacagcttttactggatgtgtctcatggtagaggtatttctgagcagacggcctggggtggcacccttggatattctgaggagctg

SEQ ID NO: 67751 - DNA, 600 bp, Chicken  19866894337943_5
ctagactcacatgtatttacctattgtcatggttctttttgacataagaggatgctraagtgcagttcaatcacctattgccatgtgccaattcacttatcagttgcytgctrttggcatctcctttccattcctgttctgcaacagtcagccagcctccatcacacagctctgccaaaagctctgccaagacaaataggaggaatgtgtgtgcttttcagttctgggccaaaacaagtttaattgcagtcaatgtcagaaccctwgatttcaggatgcacaatttttatctccacagarttgaaaacagtaccctctcctcctcaggagcattaatacagataggataagggagggactgggatgtactccgcatattacaaccaggggccctcctccttttcttactagcagaggaagagacctttctcagtttcaagcctaagagcaattctgactaagccctgagtgcttttgtgtcacagcttttactggatgtgtctcatggtagaggtatttctgagcagacggcctggggtggcacccttggatattctgaggagctgcctgttgagccaaagattttcaaaagcttccttg

SEQ ID NO: 67752 - DNA, 600 bp, Chicken  19866894337943_6
aggggccctcctccttttcttactagcagaggaagagacctttctcagtttcaagcctaagagcaattctgactaagccctgagtgcttttgtgtcacagcttttactggatgtgtctcatggtagaggtatttctgagcagacggcctggggtggcacccttggatattctgaggagctgcctgttgagccaaagattttcaaaagcttccttgagcacaagacacagaaaactgaagagagaccaccccagggagtgtctttgccagcacttcacatggctgtcttacagcaacacamaaaggtcagtgacactcgctgttcacaccttaaatttggctgctctaaaattatttttcacagccttcactaagggaactgtcaggacattcccaacctttgtatgcccataaatgtgactgcctcaaaagagattatttcaatgcaagtgttacttaaaattagacgttattaaaatagaggcactgattacttttctgacattattttctaagtttaaaaaaagctttggctgctctggtagcagccgtcttctcccatttgaaagcatccttggagaaactgtgaacgtgtagctcc

SEQ ID NO: 67753 - DNA, 600 bp, Chicken  19866894337950_1
gggaaaaagaaaacatgatgttatgatgacttcctgcttgacagatgagttctcgtgctggaaggctgcttttttcctcacttggctttaaagaacagcagttagctactccagacattacagtcacaatgcttttaggacatggatgcttttaggacatttttgggtgccccgtccatccctggaggtgttcaaggctgggttggatggggccctgggcagcctggtctagtattagatatggaggttggtggccctgcctgtggcggggggttggagattcatgatctttgaggtccyttccaacccaggccattctgtgattctgtgacatgaagcaaagtttgctgcacaaattacatgggcaaattctgcaccatccttcctgcacagaaccacccacatctgaggcttccaggtctgaacagctgtaatttctcctttgaatgttaaatagctctttaatgcctatctgactaacgggcattaagcccacagcagtgacaggctagcagttacctggtagatgtttaatgttcctgcaggtcactgaagaataccaacttgaatttgactccttctgactggaccgtcctcaac

SEQ ID NO: 67754 - DNA, 600 bp, Chicken  19866894337955_1
ctaggaaaacttccagtaagatagctgagcagactctcttttcttggactttccttgactgccatgccagaacggccaacgtgcactggcgaatccgtagctgtatctccactggtgtaacttaaggaatgatatggatgtatacccttgtagacagaacataaagaaactaatgaagtattgtgtaaactgtaaaaaggaagtggcatttgttctgaatatgagattggaacacaataactataaagtctcagccccagaaatttcaggcaagtagcagtttgtttgggccaggttatrcrccatatattatgggcccagttatacactgtatattatataccgtataatatgtgggcattacgctgcttttgaagttgctacaatatttgaaaaataaggtgtaaaaataattttaaaagtgaaacgtaacaaatggaattgcagacgtgtataattaatctaagacaaatatgtagaaggaacagtacactgactataaatctcatgtggatttaatccttgaagaccaaaccccatacaatccttagtataaatatagtccaacctcagggaaggcaaagaatgggagctggggac

SEQ ID NO: 67755 - DNA, 600 bp, Chicken  19866894337955_2
aggaaaacttccagtaagatagctgagcagactctcttttcttggactttccttgactgccatgccagaacggccaacgtgcactggcgaatccgtagctgtatctccactggtgtaacttaaggaatgatatggatgtatacccttgtagacagaacataaagaaactaatgaagtattgtgtaaactgtaaaaaggaagtggcatttgttctgaatatgagattggaacacaataactataaagtctcagccccagaaatttcaggcaagtagcagtttgtttgggccaggttatrcrccatatattatgggcccagttatacactgtatattatataccgtataatatgtgggcattacgctgcttttgaagttgctacaatatttgaaaaataaggtgtaaaaataattttaaaagtgaaacgtaacaaatggaattgcagacgtgtataattaatctaagacaaatatgtagaaggaacagtacactgactataaatctcatgtggatttaatccttgaagaccaaaccccatacaatccttagtataaatatagtccaacctcagggaaggcaaagaatgggagctggggactt

SEQ ID NO: 67756 - DNA, 600 bp, Chicken  19866894337960_1
ggaagttttttaccaggagagtggtgaggtgctggaacgggctgcccagagtggttgtggatgccccgtccctggaggtgttcaaggccaggttggatggggccctgggcagcctggtctagtattaaatgtggaggttggtggccctgcctgtggcagagggattggagattcatgatccttgagttcccttcaaacccaggccattctgtgattctgtgatgacaacagcacaccactggtaataaatccctcacaagagcttcactaacaaacccaaccaaaagctgatgactgcaygcactccaagcactcactgagaaataaaattatttaaatacaaccgtaaacaagtcattttaaaaatgaaatctgccggactatttgtccagaaatactgtaatacaaatagtcattctatgagcgcagctccaaaagtaatgccttctattttattctgttggcctatgacatgcgagacggatgttggtgatatacaccaacagcagtagaggttgaaccttgccaccaatattccattacatgttgctgctatgtgacagatggcagcagaggggcagtctgacaggatggtggcag

SEQ ID NO: 67757 - DNA, 600 bp, Chicken  19866894337960_2
gttttgtagctgggaatttgctctatcaaatagtgttatcacgctctttgtatctgttgtagtttccatggaaagaaataggaggcattactttcagagcgacctacatatatctcagctgacacactccactgacgcagtaaggagttaccacatgaccctttgaagaacataatgcctataagcatgcaagtgccattccaaggcaaactctttgttatattttaagatccatcaaaatgattgtgtactggcgtacaaagtctttccagtgccaaaacaaacgatctatgcaaaaasaaagtcatgtccatttgacttaaacaaggccttcactgagttttcttcacacccgawccctgaagcagtaaaagcagtccaacaagtaccaagaggctattacgagacctgccaggaaatgtgcaaacccacttgggtcaatgaatcaccgtggtgatcggttatcccatcccttccaagcttctgcaggagacaagcaggttctccctgtgcaggtggcaagctgatggtttgcagtgcttttcttctggaagccttcactgttatgtagcactctcatctatttctcaggagaaaatt

SEQ ID NO: 67758 - DNA, 600 bp, Chicken  19866894337960_3
tgtagtttccatggaaagaaataggaggcattactttcagagcgacctacatatatctcagctgacacactccactgacgcagtaaggagttaccacatgaccctttgaagaacataatgcctataagcatgcaagtgccattccaaggcaaactctttgttatattttaagatccatcaaaatgattgtgtactggcgtacaaagtctttccagtgccaaaacaaacgatctatgcaaaaasaaagtcatgtccatttgacttaaacaaggccttcactgagttttcttcacacccgawccctgaagcagtaaaagcagtccaacaagtaccaagaggctattacgagacctgccaggaaatgtgcaaacccacttgggtcaatgaatcaccgtggtgatcggttatcccatcccttccaagcttctgcaggagacaagcaggttctccctgtgcaggtggcaagctgatggtttgcagtgcttttcttctggaagccttcactgttatgtagcactctcatctatttctcaggagaaaattacactgggtcctaagcaccgttctccaaacaggaatcagagtagcacataatttatg

SEQ ID NO: 67759 - DNA, 600 bp, Chicken  19866894337963_1
agctgaccagagtctatggactggatccaaaacagtatttgagaaccaatgtggactgtttggtggaatgtaaatgcagaagaacaaaaccgacccatgtcccctggtctttgtattatctgtcctgcacagggcttgtagtttgtgactttacggactccaaagtaaaacagttttacagccctgagcagcttagcatttagcttacactaaagcacagacatttagtgtttctcaatctttgtccctgtgggaacccaagtctacacatgtcctcagatcagatctaagagacaccarcagaactggactttctattggacatagttrcacatcaccatattttaaatcacagctaacagcttttacatcgctatgtttgtttgcttgcttttctggtttcattacaatggtccagcaaagcctctgcccaaaagtttcaacttcaaattcctttgaaggatgagaatacttagaagtgtgtttcttaagaaagtcctctaagtgccagactatagcctacaaagaaggtatgcatgtggctgtgtgtgcagggagctgggctcctcctgttgcagcccatgtgccaaaggtttccat

SEQ ID NO: 67760 - DNA, 600 bp, Chicken  19866894337963_2
aacagtatttgagaaccaatgtggactgtttggtggaatgtaaatgcagaagaacaaaaccgacccatgtcccctggtctttgtattatctgtcctgcacagggcttgtagtttgtgactttacggactccaaagtaaaacagttttacagccctgagcagcttagcatttagcttacactaaagcacagacatttagtgtttctcaatctttgtccctgtgggaacccaagtctacacatgtcctcagatcagatctaagagacaccarcagaactggactttctattggacatagttrcacatcaccatattttaaatcacagctaacagcttttacatcgctatgtttgtttgcttgcttttctggtttcattacaatggtccagcaaagcctctgcccaaaagtttcaacttcaaattcctttgaaggatgagaatacttagaagtgtgtttcttaagaaagtcctctaagtgccagactatagcctacaaagaaggtatgcatgtggctgtgtgtgcagggagctgggctcctcctgttgcagcccatgtgccaaaggtttccatagcccaggctgcagttagtgcttacagcac

SEQ ID NO: 67761 - DNA, 600 bp, Chicken  19866894337975_1
caccatcatgcattcagtttcagtttttaaataccccaaacccccaaaaataaatagcattagcctggaatcaagacacagtagtcacagtagtcctaaattatctgtgctttgcaaaatgcatgatttttcctatataaagtcatctgacagttaattaccctcagaaagagccaggtctttatttctaccttgtgaatatagaatcacagagttgtaggacttggaagggacctccaaagatcatcaagtccaacccacctgccaaagcaggctccctacagcaggtgaatacatccrgcatcagcttcctgccayaggatgctatatattatcactaaaataaaaagtaattaaaaaccacacaccacctcttctcttcrcttacttcagcatattcagagattaagattgggccatgccttcagacctggtccttctaatatcaggttttagactataaatagtttgtggtctgttttcttatcattcaagcagttagataacctttacaacatgaacagtaatagttgctctaacactaatattccctcctactacagccaggaatttctcactaaaarttttctcttaacttct

SEQ ID NO: 67762 - DNA, 600 bp, Chicken  19866894337975_2
ttcagtttttaaataccccaaacccccaaaaataaatagcattagcctggaatcaagacacagtagtcacagtagtcctaaattatctgtgctttgcaaaatgcatgatttttcctatataaagtcatctgacagttaattaccctcagaaagagccaggtctttatttctaccttgtgaatatagaatcacagagttgtaggacttggaagggacctccaaagatcatcaagtccaacccacctgccaaagcaggctccctacagcaggtgaatacatccrgcatcagcttcctgccayaggatgctatatattatcactaaaataaaaagtaattaaaaaccacacaccacctcttctcttcrcttacttcagcatattcagagattaagattgggccatgccttcagacctggtccttctaatatcaggttttagactataaatagtttgtggtctgttttcttatcattcaagcagttagataacctttacaacatgaacagtaatagttgctctaacactaatattccctcctactacagccaggaatttctcactaaaarttttctcttaacttcttwgcwtagcaagcagttt

SEQ ID NO: 67763 - DNA, 600 bp, Chicken  19866894337975_3
gtcacagtagtcctaaattatctgtgctttgcaaaatgcatgatttttcctatataaagtcatctgacagttaattaccctcagaaagagccaggtctttatttctaccttgtgaatatagaatcacagagttgtaggacttggaagggacctccaaagatcatcaagtccaacccacctgccaaagcaggctccctacagcaggtgaatacatccrgcatcagcttcctgccayaggatgctatatattatcactaaaataaaaagtaattaaaaaccacacaccacctcttctcttcrcttacttcagcatattcagagattaagattgggccatgccttcagacctggtccttctaatatcaggttttagactataaatagtttgtggtctgttttcttatcattcaagcagttagataacctttacaacatgaacagtaatagttgctctaacactaatattccctcctactacagccaggaatttctcactaaaarttttctcttaacttcttwgcwtagcaagcagtttacctggaaacactaaatcactttcagtcacwactttccacaaagcaaatcctacaagtaataggt

SEQ ID NO: 67764 - DNA, 600 bp, Chicken  19866894337975_4
caggtgaatacatccrgcatcagcttcctgccayaggatgctatatattatcactaaaataaaaagtaattaaaaaccacacaccacctcttctcttcrcttacttcagcatattcagagattaagattgggccatgccttcagacctggtccttctaatatcaggttttagactataaatagtttgtggtctgttttcttatcattcaagcagttagataacctttacaacatgaacagtaatagttgctctaacactaatattccctcctactacagccaggaatttctcactaaaarttttctcttaacttcttwgcwtagcaagcagtttacctggaaacactaaatcactttcagtcacwactttccacaaagcaaatcctacaagtaataggtagtatcatcttcactcagaacacacctgcagcctatgatcatattttttagatgaattaacattttctgaggtttattactaacttgggatgtttatcgtatctatacttttatagtaaaaagtagttttcttgcaatcaagacagaattgatattacattacgcttcaaatcacagcttcccctgtagtgataggaaggt

SEQ ID NO: 67765 - DNA, 600 bp, Chicken  19866894337975_5
atcagcttcctgccayaggatgctatatattatcactaaaataaaaagtaattaaaaaccacacaccacctcttctcttcrcttacttcagcatattcagagattaagattgggccatgccttcagacctggtccttctaatatcaggttttagactataaatagtttgtggtctgttttcttatcattcaagcagttagataacctttacaacatgaacagtaatagttgctctaacactaatattccctcctactacagccaggaatttctcactaaaarttttctcttaacttcttwgcwtagcaagcagtttacctggaaacactaaatcactttcagtcacwactttccacaaagcaaatcctacaagtaataggtagtatcatcttcactcagaacacacctgcagcctatgatcatattttttagatgaattaacattttctgaggtttattactaacttgggatgtttatcgtatctatacttttatagtaaaaagtagttttcttgcaatcaagacagaattgatattacattacgcttcaaatcacagcttcccctgtagtgataggaaggtttggccttatattattag

SEQ ID NO: 67766 - DNA, 600 bp, Chicken  19866894337975_6
agcttcctgccayaggatgctatatattatcactaaaataaaaagtaattaaaaaccacacaccacctcttctcttcrcttacttcagcatattcagagattaagattgggccatgccttcagacctggtccttctaatatcaggttttagactataaatagtttgtggtctgttttcttatcattcaagcagttagataacctttacaacatgaacagtaatagttgctctaacactaatattccctcctactacagccaggaatttctcactaaaarttttctcttaacttcttwgcwtagcaagcagtttacctggaaacactaaatcactttcagtcacwactttccacaaagcaaatcctacaagtaataggtagtatcatcttcactcagaacacacctgcagcctatgatcatattttttagatgaattaacattttctgaggtttattactaacttgggatgtttatcgtatctatacttttatagtaaaaagtagttttcttgcaatcaagacagaattgatattacattacgcttcaaatcacagcttcccctgtagtgataggaaggtttggccttatattattaggag

SEQ ID NO: 67767 - DNA, 600 bp, Chicken  19866894337975_7
gtaattaaaaaccacacaccacctcttctcttcrcttacttcagcatattcagagattaagattgggccatgccttcagacctggtccttctaatatcaggttttagactataaatagtttgtggtctgttttcttatcattcaagcagttagataacctttacaacatgaacagtaatagttgctctaacactaatattccctcctactacagccaggaatttctcactaaaarttttctcttaacttcttwgcwtagcaagcagtttacctggaaacactaaatcactttcagtcacwactttccacaaagcaaatcctacaagtaataggtagtatcatcttcactcagaacacacctgcagcctatgatcatattttttagatgaattaacattttctgaggtttattactaacttgggatgtttatcgtatctatacttttatagtaaaaagtagttttcttgcaatcaagacagaattgatattacattacgcttcaaatcacagcttcccctgtagtgataggaaggtttggccttatattattaggagttaaaaaaaatcacatttaagaaaaaacattttgtaaataaaga

SEQ ID NO: 67768 - DNA, 600 bp, Chicken  19866894337978_1
gagttctgttctagctgcatttatctggtgattatctttgctgggttaaaaactgtgatcattaggagagtattcagcttggaaataggatgaaggaaaatagagaatccagagcagagcagtctgggtttaggtttttggaaaagtctatataaaaggaaatggcttgtttgcaatctttcttactttagagtttcaagatgcataaaacaggagtctatcacatgaagatagatccaggatttaaagattccatttttggtttagaatttgggtgagagagaaatccaaccctgtttkgggcctatgggagatgagtttggctgattgtgtcagtgattcgcttacagtcgaactgaccgtttttaaagtaaattaaagttaccagggttgttttgggaagaatgattaattacattcacattccacaggatattagatgtagagataccaaggctcttgatgtgccagcctttgtaaaacgcagcttctgccccaaatcctgacagtgtgcctccttgttttcctccagcttgacttatgtctctttgacttgctttgtaggcttgacacaaattaatattcctagtgtcaggtggt

SEQ ID NO: 67769 - DNA, 600 bp, Chicken  19866894337979_1
caagatattaaacaacaaaactttatataaagagaaaacattgacgaataattttgaaaaatactttattttttgggattccctgtggtgacgcattttatctgctaagaaaataaaatgcattcagtcatcctaaatgtctctagatccagctggccttttgtaatctatgctatttgggcttatatctggtgtcttttcatagctggctagtcactggagcttacttaaattctcactatgttgtgatttttgctgggagaagatgaatgtattagtatggaccatctcttaaagtayagatattaaaattaatcaagaggtaaatttgaagaagaaacaagtaccattcagcaggaagaataggggcaagaatggaagggatttacatcaggaagggattaaaggataggcaygggaagaataacaactgaggttaaagaaaaaagaaaagaaagaaggaaaaaaaaaagaaaaaagcagagaacctagaacaaaaataaatgaaagaatwagtgaagtacagagtaataatcagaatatatttataattttgccttttaatagtaggataatgaatatattataatacatgtataa

SEQ ID NO: 67770 - DNA, 600 bp, Chicken  19866894337979_2
aatgcattcagtcatcctaaatgtctctagatccagctggccttttgtaatctatgctatttgggcttatatctggtgtcttttcatagctggctagtcactggagcttacttaaattctcactatgttgtgatttttgctgggagaagatgaatgtattagtatggaccatctcttaaagtayagatattaaaattaatcaagaggtaaatttgaagaagaaacaagtaccattcagcaggaagaataggggcaagaatggaagggatttacatcaggaagggattaaaggataggcaygggaagaataacaactgaggttaaagaaaaaagaaaagaaagaaggaaaaaaaaaagaaaaaagcagagaacctagaacaaaaataaatgaaagaatwagtgaagtacagagtaataatcagaatatatttataattttgccttttaatagtaggataatgaatatattataatacatgtataaatggtttttggtgttacatcttataaataaaagtcacataaaatacttctattgtgtgcttagagcatattgcacaaagatggatttgaacacaaaagtagtaatacagccattgc

SEQ ID NO: 67771 - DNA, 600 bp, Chicken  19866894337979_3
taatctatgctatttgggcttatatctggtgtcttttcatagctggctagtcactggagcttacttaaattctcactatgttgtgatttttgctgggagaagatgaatgtattagtatggaccatctcttaaagtayagatattaaaattaatcaagaggtaaatttgaagaagaaacaagtaccattcagcaggaagaataggggcaagaatggaagggatttacatcaggaagggattaaaggataggcaygggaagaataacaactgaggttaaagaaaaaagaaaagaaagaaggyaaaaaaaaagaaaaaagcagagaacctagaacaaaaataaatgaaagaatwagtgaagtacagagtaataatcagaatatatttataattttgccttttaatagtaggataatgaatatattataatacatgtataaatggtttttggtgttacatcttataaataaaagtcacataaaatacttctattgtgtgcttagagcatattgcacaaagatggatttgaacacaaaagtagtaatacagccattgcagaatagtcagcttttgtttttttaccttttcttgccaaaacaccca

SEQ ID NO: 67772 - DNA, 600 bp, Chicken  19866894337979_4
cactggagcttacttaaattctcactatgttgtgatttttgctgggagaagatgaatgtattagtatggaccatctcttaaagtayagatattaaaattaatcaagaggtaaatttgaagaagaaacaagtaccattcagcaggaagaataggggcaagaatggaagggatttacatcaggaagggattaaaggataggcaygggaagaataacaactgaggttaaagaaaaaagaaaagaaagaaggaaaaaaaaaagaaaaaagcagagaacctagaacaaaaataaatgaaagaatwagtgaagtacagagtaataatcagaatatatttataattttgccttttaatagtaggataatgaatatattataatacatgtataaatggtttttggtgttacatcttataaataaaagtcacataaaatacttctattgtgtgcttagagcatattgcacaaagatggatttgaacacaaaagtagtaatacagccattgcagaatagtcagcttttgtttttttaccttttcttgccaaaacacccactttacaatccaaatgcccttgtcttgctggggaagttcatcattgaacac

SEQ ID NO: 67773 - DNA, 600 bp, Chicken  19866894337982_1
atggctgtgcccctggcggtgaggtggcagtgcttgagcacataaagaagtgacactgctgggtctgcctgcactggggagctgcattggtgaggtgaaggcagagcactggctgtggcctttgttgtgggcgtcctttttttttttttttagcaaggatacagaagacatcaaaactgtttttaaatgtctgtttaatttttctgctaaatagactttcatactgcagttctcatttctgcttatccagttcactttacaccagatatgttaaaatagtcaggaaggactactaaaagraaaattccctctcaagagaaattttggatgcagataaggttgtcagaatggcttctccttttctctcataacataaattataaggtgaatcaagacttcctcagtgttgtctcttggcttgctgaaggtctcactggtattcctatgctaacagagtagattgggacttctcctgcagccttaaattggaaaggcrcaggtcagttttccatctcttactgtactgagttcacccattagcttccaaagcagacttaatttcgaagtctatggagctgggttctggagtagctcttcttt

SEQ ID NO: 67774 - DNA, 600 bp, Chicken  19866894337982_2
aatttttctgctaaatagactttcatactgcagttctcatttctgcttatccagttcactttacaccagatatgttaaaatagtcaggaaggactactaaaagraaaattccctctcaagagaaattttggatgcagataaggttgtcagaatggcttctccttttctctcataacataaattataaggtgaatcaagacttcctcagtgttgtctcttggcttgctgaaggtctcactggtattcctatgctaacagagtagattgggacttctcctgcagccttaaattggaaaggcrcaggtcagttttccatctcttactgtactgagttcacccattagcttccaaagcagacttaatttcgaagtctatggagctgggttctggagtagctcttctttaaaataaaaagacttccacgtatggctgtatgtgattgtcatgatgcctgccatttttagcgttgaatgtacacctaggaattyatctcttctgcaggtttctttcatctgctgccttgacagtgtttcagtctaatcagtatgcagcagaagttgtttttgctgtctatatatagatgctgatgttcatacttgg

SEQ ID NO: 67775 - DNA, 600 bp, Chicken  19866894337982_3
gtgaatcaagacttcctcagtgttgtctcttggcttgctgaaggtctcactggtattcctatgctaacagagtagattgggacttctcctgcagccttaaattggaaaggcrcaggtcagttttccatctcttactgtactgagttcacccattagcttccaaagcagacttaatttcgaagtctatggagctgggttctggagtagctcttctttaaaataaaaagacttccacgtatggctgtatgtgattgtcatgatgcctgccatttttagcgttgaatgtacacctaggaattyatctcttctgcaggtttctttcatctgctgccttgacagtgtttcagtctaatcagtatgcagcagaagttgtttttgctgtctatatatagatgctgatgttcatacttggtattctgtaytgctcttcgtagcaggcatcctgcgtgggtgggtcagcctcactctggggtctgcattgtcccgggtgacttgtgacagcagtgggcttctttaggggactaagaatgttaattgagcacggtttaagatgagtgaagtccttctgtttggatatactggtgcatacttatgttttgt

SEQ ID NO: 67776 - DNA, 533 bp, Chicken  19866894337982_4
ttccatctcttactgtactgagttcacccattagcttccaaagcagacttaatttcgaagtctatggagctgggttctggagtagctcttctttaaaataaaaagacttccacgtatggctgtatgtgattgtcatgatgcctgccatttttagcgttgaatgtacacctaggaattyatctcttctgcaggtttctttcatctgctgccttgacagtgtttcagtctaatcagtatgcagcagaagttgtttttgctgtctatatatagatgctgatgttcatacttggtattctgtaytgctcttcgtagcaggcatcctgcgtgggtgggtcagcctcactctggggtctgcattgtcccgggtgacttgtgacagcagtgggcttctttaggggactaagaatgttaattgagcacggtttaagatgagtgaagtccttctgtttggatatactggtgcatacttatgttttgtgtactcctcacatatgggggcaaggagcctctgagtgtttgtcacagagctttag

SEQ ID NO: 67777 - DNA, 600 bp, Chicken  19866894337983_1
gtactggtgcttcttgtctttccatcagaatgtgcacagccaatttgggtgttcccaattttgactcaatggtttgctcatgttgattacataatgacacatatttccaaggctgtggttgggtgcaggtgctacgatcaagttcttggtgttttgattctcaggaggatcctcagaaaatggagcatctgtagttacatttataattacaaatcatgcaatgagatcatcattaagtctcttctcatgataacagcatgcaactttttaaagcacatgggttgtatattggaaaatgcrtttaaggggaaacactccaacataaagtaccctgaacattttcaaagcactgattttagtatgcttgaaggttgttttacagtcatctctcctctttcttcataggcaactcctcaacaggttatttccaacacctttcaatagcagtacacaaactgtacagcaaacaaaggcaatacctaagctatgcagtgatggaagaatctttgtttaataagtgaagctaaagtacaaaaaaacctatggccacgttactgttctgtaatagaaataatcttttgttggcattactaccttatt

SEQ ID NO: 67778 - DNA, 600 bp, Chicken  19866894337990_1
ccatgctcccccacataacactctcgtttactgcagacttctctggtaaagagggggcaacatctactgaaatttttattaaaatgattcccttctcctggaaaaatatgaaggaaatagcagttaaaatcaacttgtactgacttcagaaaagaaataggtacactgagtaaagtacagggtatagcaaaaaggcaaaaagttgtgataactcccaaaagtactgtccctttatatcaggcaccagtaaagatctaggagcaggaatttcattcacatactagaaaatactgccaaacrtacatcttcyccctttctgttcatagctgcccagcctgaaccaaagttttctcagtagtgtayrccacacctgtcaatttgacacacagataaatcaactttaactaatggaagataatttttttgtacagaactgtaaaacactcccttaataagcactttcttaataaagtgctttcatttgtattcactsaaaagagagctcaacagtgkcctgcagaaagctttytctccaacatcagagaaattaagcacttttgtctgttcccaagtgttcccagtcagtagaaaaacaataca

SEQ ID NO: 67779 - DNA, 600 bp, Chicken  19866894337990_2
ccacataacactctcgtttactgcagacttctctggtaaagagggggcaacatctactgaaatttttattaaaatgattcccttctcctggaaaaatatgaaggaaatagcagttaaaatcaacttgtactgacttcagaaaagaaataggtacactgagtaaagtacagggtatagcaaaaaggcaaaaagttgtgataactcccaaaagtactgtccctttatatcaggcaccagtaaagatctaggagcaggaatttcattcacatactagaaaatactgccaaacrtacatcttcyccctttctgttcatagctgcccagcctgaaccaaagttttctcagtagtgtayrccacacctgtcaatttgacacacagataaatcaactttaactaatggaagataatttttttgtacagaactgtaaaacactcccttaataagcactttcttaataaagtgctttcatttgtattcactsaaaagagagctcaacagtgkcctgcagaaagctttytctccaacatcagagaaattaagcacttttgtctgttcccaagtgttcccagtcagtagaaaaacaatacactctatcgta

SEQ ID NO: 67780 - DNA, 600 bp, Chicken  19866894337990_3
ctactgaaatttttattaaaatgattcccttctcctggaaaaatatgaaggaaatagcagttaaaatcaacttgtactgacttcagaaaagaaataggtacactgagtaaagtacagggtatagcaaaaaggcaaaaagttgtgataactcccaaaagtactgtccctttatatcaggcaccagtaaagatctaggagcaggaatttcattcacatactagaaaatactgccaaacrtacatcttcyccctttctgttcatagctgcccagcctgaaccaaagttttctcagtagtgtayrccacacctgtcaatttgacacacagataaatcaactttaactaatggaagataatttttttgtacagaactgtaaaacactcccttaataagcactttcttaataaagtgctttcatttgtattcactsaaaagagagctcaacagtgkcctgcagaaagctttytctccaacatcagagaaattaagcacttttgtctgttcccaagtgttcccagtcagtagaaaaacaatacactctatcgtagtcactgaaaaacaatgagcattttactctattagtctgctattcagcataag

SEQ ID NO: 67781 - DNA, 600 bp, Chicken  19866894337990_4
tactgaaatttttattaaaatgattcccttctcctggaaaaatatgaaggaaatagcagttaaaatcaacttgtactgacttcagaaaagaaataggtacactgagtaaagtacagggtatagcaaaaaggcaaaaagttgtgataactcccaaaagtactgtccctttatatcaggcaccagtaaagatctaggagcaggaatttcattcacatactagaaaatactgccaaacrtacatcttcyccctttctgttcatagctgcccagcctgaaccaaagttttctcagtagtgtayrccacacctgtcaatttgacacacagataaatcaactttaactaatggaagataatttttttgtacagaactgtaaaacactcccttaataagcactttcttaataaagtgctttcatttgtattcactsaaaagagagctcaacagtgkcctgcagaaagctttytctccaacatcagagaaattaagcacttttgtctgttcccaagtgttcccagtcagtagaaaaacaatacactctatcgtagtcactgaaaaacaatgagcattttactctattagtctgctattcagcataaga

SEQ ID NO: 67782 - DNA, 600 bp, Chicken  19866894337990_5
ggcaaaaagttgtgataactcccaaaagtactgtccctttatatcaggcaccagtaaagatctaggagcaggaatttcattcacatactagaaaatactgccaaacrtacatcttcyccctttctgttcatagctgcccagcctgaaccaaagttttctcagtagtgtayrccacacctgtcaatttgacacacagataaatcaactttaactaatggaagataatttttttgtacagaactgtaaaacactcccttaataagcactttcttaataaagtgctttcatttgtattcactsaaaagagagctcaacagtgkcctgcagaaagctttytctccaacatcagagaaattaagcacttttgtctgttcccaagtgttcccagtcagtagaaaaacaatacactctatcgtagtcactgaaaaacaatgagcattttactctattagtctgctattcagcataagactgacaaattcataatttctgaacatcttgggaccttcaaagtttaaagaaactttgcttcagaaatggaaataccatctaatttatcctgatttgacaggctggtggtcaattactaaatgcaaaaca

SEQ ID NO: 67783 - DNA, 600 bp, Chicken  19866894337990_6
cccaaaagtactgtccctttatatcaggcaccagtaaagatctaggagcaggaatttcattcacatactagaaaatactgccaaacrtacatcttcyccctttctgttcatagctgcccagcctgaaccaaagttttctcagtagtgtayrccacacctgtcaatttgacacacagataaatcaactttaactaatggaagataatttttttgtacagaactgtaaaacactcccttaataagcactttcttaataaagtgctttcatttgtattcactsaaaagagagctcaacagtgkcctgcagaaagctttytctccaacatcagagaaattaagcacttttgtctgttcccaagtgttcccagtcagtagaaaaacaatacactctatcgtagtcactgaaaaacaatgagcattttactctattagtctgctattcagcataagactgacaaattcataatttctgaacatcttgggaccttcaaagtttaaagaaactttgcttcagaaatggaaataccatctaatttatcctgatttgacaggctggtggtcaattactaaatgcaaaacataagaaaaacgcataatgac

SEQ ID NO: 67784 - DNA, 600 bp, Chicken  19866894337990_7
ctttatatcaggcaccagtaaagatctaggagcaggaatttcattcacatactagaaaatactgccaaacrtacatcttcyccctttctgttcatagctgcccagcctgaaccaaagttttctcagtagtgtayrccacacctgtcaatttgacacacagataaatcaactttaactaatggaagataatttttttgtacagaactgtaaaacactcccttaataagcactttcttaataaagtgctttcatttgtattcactsaaaagagagctcaacagtgkcctgcagaaagctttytctccaacatcagagaaattaagcacttttgtctgttcccaagtgttcccagtcagtagaaaaacaatacactctatcgtagtcactgaaaaacaatgagcattttactctattagtctgctattcagcataagactgacaaattcataatttctgaacatcttgggaccttcaaagtttaaagaaactttgcttcagaaatggaaataccatctaatttatcctgatttgacaggctggtggtcaattactaaatgcaaaacataagaaaaacgcataatgacatacactattgagaca

SEQ ID NO: 67785 - DNA, 600 bp, Chicken  19866894337990_8
caggaattcttctgttcttgtcacatagtacagtcttttctacttcacaaccagcaactcctgcccaaggcctaacacagtaattaaatcaataaagtaaacacatttgctactagacgtcatttcaaaaagtgagaacaacaaaaaaactgaagaattaaattaatcttaagtaaaccgcaatgcaaataatgaattcaaaaacatgttgacatgcactacagtacaaggtagaacagcatctaccaggaatgctctgcatatctgtcccacaatgggaatgtttttctaacatgtttygagagagaagtaaagtaagattttggtggtggtggtgtttttttttttttttttgtttgattgtttttgtttttaatccctgtgtgataagctatagcaggacaccaccttaattcttaatggaaagtaattgcatcactcatgtctggtgaggagcaaccaacaccaaaacttaatgccccacaatgcatttgtagagcacggcttagtctgggctctagttcaatgtggtcttgtattttacgtattttatgattagagatgggattagttgcctggttaatattaaacaaaattgca

SEQ ID NO: 67786 - DNA, 600 bp, Chicken  19866894337992_1
acaactatcctttgcttgagagatcaccgtttggctttaacgatctgtcctgtcagagatagtgtttaatcttctctttttgattaaactaatagagatggttttgccaagtcatctctaaggttctgtttgcttcagatgtcccagacatttgactttgttatagcttttatacctgaatataaaacaagactggcatttgtgactctggttgttgatctcagccagagatcaggaagaaattctttactgtgagggtggtgagacactggaacaggttgcccagtgacgttgtgaatrccccctcctttgaaacactcaaggccatggcagggactttgagcaacctggtctagcagaaggtgtccctgcctacagcacggggggttggaattagatgatcctaaggatcccttccaacccaaaccattctataattctatgatatcttcctaatatgactaatggtcaatttgtgtaattgtggctccatttgtatgcagtgaagatgtggcagataagcagaaagaaagaaatacatgctatcaacagttaattgtcacaagggttaagaagctaataatttcagcctatatttag

SEQ ID NO: 67787 - DNA, 600 bp, Chicken  19866894337992_2
gagcacatttctatgccttggaaaggggcctgctgcttgtttggaaagtgctgtggggcaggaggggaccttcaactcctttgcagctggtttggttaccaccaaagtgatgtgacagaaatgaccttatttgctctcactgagatctgtgcttctctaagacttgcccacgtttggccaaagagccaaactgctctataatctgaatcagttacattaaatttctacatacaatttcagagatggatgctaacctttaaaaaattaagtattctaaatccaaactgactggggcaagawgaatgtggcaaccagcttttagggttatatctttgtgttatgtcacaygagagtattccagtcagtctcatagaggagtgcactggtagtctgcatatttgttgtgcagatcccagagcattaaaatgcacttctttgagagagacagtaaaatgaaggcagcaaggagtagaggaggtagagasatggtgatttaccaaaacattctggatccttttggagaggaggagataaaggactgtctgcattctttatagctgcatgtatatctaactaatggcagaatgcccastgcttttg

SEQ ID NO: 67788 - DNA, 600 bp, Chicken  19866894337992_3
tgctgtggggcaggaggggaccttcaactcctttgcagctggtttggttaccaccaaagtgatgtgacagaaatgaccttatttgctctcactgagatctgtgcttctctaagacttgcccacgtttggccaaagagccaaactgctctataatctgaatcagttacattaaatttctacatacaatttcagagatggatgctaacctttaaaaaattaagtattctaaatccaaactgactggggcaagawgaatgtggcaaccagcttttagggttatatctttgtgttatgtcacaygagagtattccagtcagtctcatagaggagtgcactggtagtctgcatatttgttgtgcagatcccagagcattaaaatgcacttctttgagagagacagtaaaatgaaggcagcaaggagtagaggaggtagagasatggtgatttaccaaaacattctggatccttttggagaggaggagataaaggactgtctgcattctttatagctgcatgtatatctaactaatggcagaatgcccastgcttttggaaaacacttacgtacccaaagaaataattcattctacagtggatccc

SEQ ID NO: 67789 - DNA, 600 bp, Chicken  19866894337992_4
ccaaactgctctataatctgaatcagttacattaaatttctacatacaatttcagagatggatgctaacctttaaaaaattaagtattctaaatccaaactgactggggcaagawgaatgtggcaaccagcttttagggttatatctttgtgttatgtcacaygagagtattccagtcagtctcatagaggagtgcactggtagtctgcatatttgttgtgcagatcccagagcattaaaatgcacttctttgagagagacagtaaaatgaaggcagcaaggagtagaggaggtagagasatggtgatttaccaaaacattctggatccttttggagaggaggagataaaggactgtctgcattctttatagctgcatgtatatctaactaatggcagaatgcccastgcttttggaaaacacttacgtacccaaagaaataattcattctacagtggatcccagcaaagagttgaactgtgatctgtgtcagaatttagcttgatttctgcctacgttttatgatgtgatacatattttaagtcaagatcaatgggacaaaaagtagttttgtaggagatctacatycggttatacata

SEQ ID NO: 67790 - DNA, 600 bp, Chicken  19866894337992_5
ggcaagawgaatgtggcaaccagcttttagggttatatctttgtgttatgtcacaygagagtattccagtcagtctcatagaggagtgcactggtagtctgcatatttgttgtgcagatcccagagcattaaaatgcacttctttgagagagacagtaaaatgaaggcagcaaggagtagaggaggtagagasatggtgatttaccaaaacattctggatccttttggagaggaggagataaaggactgtctgcattctttatagctgcatgtatatctaactaatggcagaatgcccastgcttttggaaaacacttacgtacccaaagaaataattcattctacagtggatcccagcaaagagttgaactgtgatctgtgtcagaatttagcttgatttctgcctacgttttatgatgtgatacatattttaagtcaagatcaatgggacaaaaagtagttttgtaggagatctacatycggttatacatactacatcttgagcctgtaaaatgaatcctctattattgtgtagcatggttttggtgtgtcctaagtttatttactagaagattatgcacactcttatctccggtaca

SEQ ID NO: 67791 - DNA, 600 bp, Chicken  19866894337992_6
ggaggtagagasatggtgatttaccaaaacattctggatccttttggagaggaggagataaaggactgtctgcattctttatagctgcatgtatatctaactaatggcagaatgcccastgcttttggaaaacacttacgtacccaaagaaataattcattctacagtggatcccagcaaagagttgaactgtgatctgtgtcagaatttagcttgatttctgcctacgttttatgatgtgatacatattttaagtcaagatcaatgggacaaaaagtagttttgtaggagatctacatycggttatacatactacatcttgagcctgtaaaatgaatcctctattattgtgtagcatggttttggtgtgtcctaagtttatttactagaagattatgcacactcttatctccggtacaattagatttcagagatgtccagcaaatatcacaaaggtcctctatgccttcaaaatccattttgaagtcgatgagtagctgtataataggttgactatttctacagcaagaaatagtgacagactgaaaaatctattcatttgttttctaatttaaaagaaaaataaatacagaaccataa

SEQ ID NO: 67792 - DNA, 600 bp, Chicken  19866894337995_1
tccgactcttgaatagtttttattcttcaagcattagtgctgcctatcgccattgtattcaaccccagatttttcttcatcaggtgcacaatgttatcaatgatgcagttgatttgctggagttccgtgacagagttattaaggcctctttgaactatgggcatttggttgtttcaacttctcttcagtgttatgtattttcgtaagtaatacatattcacaaagcctttttgagtttatttaacccttgtaagaaagcagcagcaactttcttttggaaactaattgaagtattctatytagaatcatcatcagaaaaggagagtatagttgcactcctcctgccatcctttccttcagcctcttgttggtgcactgtctgtatgtgttgttacagaaagttctactctttgaggtggaggcagcagtagtgctggctggatgcaagcatgtttgccccagttgggtgactccatccactgtcttctttgaatactgcttctggtatgccagttattttggaatagagtaggaatgatttaatcctacatgatgttttaagaatattgtattctgtttcttatgctgaaatctgaagtt

SEQ ID NO: 67793 - DNA, 600 bp, Chicken  19866894338000_1
gaaaaacctcatcttcaggcagagcagtgtcaaaagttaccagccagaagctaaagaaagaattatagtggctgacttgcaggttcagatacaggtctgcatagcatattctagataaagaaaacctaaatcctcatgcaccagtctgctgttgataagaagacttatttttaggactaagactttacacaatcaatcaagatttcctcagaataccagagcaagtgaaacttccaagtcagccacaagatcacttgctgctctccccactagaggaggtaaagtcttctctggcttggmtcttacttacaaggattatttttagaagtaaaaacaaggctgggattcgtgaccctgtctagacagacaccaactatggacgaacctctgaacaactcagtcagtattttataatacaactctcttgcctattagaacctctttggtttgtgccatgtttaggaaactaagggacttttcatagcaaagcattttcaatgaacagaacaagtcctgaggctacaagctatttccccactgccccatcaacacattcacactgagactgaaatgaacataatctctagaaacagtcttaga

SEQ ID NO: 67794 - DNA, 600 bp, Chicken  19866894338002_1
gggcgccggcagccgcagcccctctgcccacgcatccccccatgcttttggggatgagcgcctgcagcaggaaggcgctgaccctgctcagcagcgtgttcgccgtctgcggcctcggcctgctgggcatctctgtcagcaccgactactggctctacctggaggaaggtatcgtccagccccagaaccagtcggctgaaatcaagctgtcgctgcacgcagggctctggagggtctgcttcctggcaggtacggcttcctccccatcatgtccccctcctattgtgctattttgcttcyaaagtcaggcacggcaccctgtaagcaccccagcaaggtggatgaatctgttccgccacgtaggtctgcagagtttgctgtggtgcccatcgcagtgcctgggcagccacccaaactctcctttttgtccctgcgaaattgggattcagctcagctgaaacattccctcatctcgtgctgcttttggcgaagtgatgtgggtcagacaaagccagactgaatgggagttggacgcacagatccagaactgtgaggagggaggggctccagtgggtcctctcaggtgaccccaaaccctct

SEQ ID NO: 67795 - DNA, 600 bp, Chicken  19866894338004_1
tgtggttttcggattgaattatggaagggccattggcttgggagataggaacaaggagaggtgagggaataagcaattttttggttcaccagctcttttggatggaaaagaaaagtcatttggagttgaatgaagtgttgcatttcttcagaaatgaaacacttcatttgagtggccaaggggtatttttctttcaaaataaagaaaacagaaggtggtttcgaaaccaaatgtttttcttctgcaccctgatgctgaaaagggacttggcactactgaggatgactgaggggcttatgratgtgtcactgtcccttaaaaatacaaacagaaaagggctcttctggycccaggtccccctctgtctactttgactttagttactgcatgggtgaccaaaggatggggacctccaaccacttctgygctgagcccatctccctgcatgccacctacaaagactgtttgttaaaaattgttgcagccaatttgctgagcttttaattaagctgtcatgttgaaacagaaccctctcctgggaggtgaatgcagactttatggccattttgcttttgcttaggatttagaaacttacttctg

SEQ ID NO: 67796 - DNA, 600 bp, Chicken  19866894338004_2
gaacaaggagaggtgagggaataagcaattttttggttcaccagctcttttggatggaaaagaaaagtcatttggagttgaatgaagtgttgcatttcttcagaaatgaaacacttcatttgagtggccaaggggtatttttctttcaaaataaagaaaacagaaggtggtttcgaaaccaaatgtttttcttctgcaccctgatgctgaaaagggacttggcactactgaggatgactgaggggcttatgratgtgtcactgtcccttaaaaatacaaacagaaaagggctcttctggycccaggtccccctctgtctactttgactttagttactgcatgggtgaccaaaggatggggacctccaaccacttctgygctgagcccatctccctgcatgccacctacaaagactgtttgttaaaaattgttgcagccaatttgctgagcttttaattaagctgtcatgttgaaacagaaccctctcctgggaggtgaatgcagactttatggccattttgcttttgcttaggatttagaaacttacttctggtgtacttagaattgctaataagacagaaagattattgaccacttgtg

SEQ ID NO: 67797 - DNA, 600 bp, Chicken  19866894338004_3
tgaatgaagtgttgcatttcttcagaaatgaaacacttcatttgagtggccaaggggtatttttctttcaaaataaagaaaacagaaggtggtttcgaaaccaaatgtttttcttctgcaccctgatgctgaaaagggacttggcactactgaggatgactgaggggcttatgratgtgtcactgtcccttaaaaatacaaacagaaaagggctcttctggycccaggtccccctctgtctactttgactttagttactgcatgggtgaccaaaggatggggacctccaaccacttctgygctgagcccatctccctgcatgccacctacaaagactgtttgttaaaaattgttgcagccaatttgctgagcttttaattaagctgtcatgttgaaacagaaccctctcctgggaggtgaatgcagactttatggccattttgcttttgcttaggatttagaaacttacttctggtgtacttagaattgctaataagacagaaagattattgaccacttgtggttattacaaggcataaatcagtaagcttaacaagggggggaaggaaactgtaaagttggattctcctggagaatttg

SEQ ID NO: 67798 - DNA, 600 bp, Chicken  19866894338005_1
tgagtttaataatgatgtcattaggctgggcagccaactgtgcttgaaatttctctagagctctgtgacaagttgttcttcgcaactcagttgtccattctgcatcagactcatgtcagaagcagtgatttgtaacaagcttttttaagtccttttttgaaggtatctttttctgggcttcctacctgtgaattatcttatcttagtattctctgtagatgtagatcattggccactcttactgcatatatgaagctcattagcttgaaagtttttctcctggccactctcagtcattayttgctggtcctaaacttgatgcactcatatctttgctataacttaaacagtatgcttcttcacttttgctgtgtgatttctaataatagaagtgaaaggacgtcagctgtgggaaaataggatatatgtagctggaagaacaaaatctttagacaggtttccagttgactgggaaacattcatggggctcttttttccccatacccttctgtattctcacttttcttcttgcctaaggagtggcagataagtcactggtgctactctaagtttagatgaccaattcagcaagggtgacag

SEQ ID NO: 67799 - DNA, 488 bp, Chicken  19866894338005_2
caccctctgaaaaagtccttggagtaatagataaaatgtcagaaataattaagaaaaatactgatacacactgtggcagagaattataccttttgagatggttgttgtcatcatctgcaatcagtcccctgatagatataaatacaaactttatcaccttgttttagatgacgatgtgttgaattgatgttgatgaagactatattttggaaacttcagttagagccaaagagtgtttccagtgcaaagcagaggatgtaagattaaaatagagtaagtaatcataacagaatacagacrttcctttatacactacttacttgatcctgttcatgaaaatcctttctcctctttttcattcttaaattttctttgacttatttttatcccaagcatcactatgaatggaaagtaaacatctctccatatgctcttagtgcttagactgcagctggtgttaagatgttcaatatatttaacagtcaaaa

SEQ ID NO: 67800 - DNA, 599 bp, Chicken  19866894338011_1
  misc_feature (1)..(77): n is any nucleotide
nnnnnnnnnnnnnnnnnnnnnnnnnnnnnnnnnnnnnnnnnnnnnnnnnnnnnnnnnnnnnnnnnnnnnnnnnnnnnaaacaccagtattttgatgggaagtaaaacaacagacaataaagaaggttcatgtaaggcaaagataaaatattttcctatgtggtgcaacctataatatagacaaagcttttagggaagtggatgcttcacacttaattctgcaaacttacacattgtaaacatattcaacccagatcactgtaaatgaaacaaactctgaagtagtagttaacaatgagtwcagcactgactcgttatgcaggagaacaaatattagaaatgaatatagaaaatatttttttcaggaaaataaattctatttatttaatatattyaacatggtttgtaactggaatgcttaactgctgacctctgaattaaagctattttaaaaagagtactctctgctctgccttggtgaggccacatctggaatactgtctccagttgtgggctcctcagttygaaaaatacagagaactattggagagaatacaggggagggcaacaaagatgacagaagatctggagtatctcctg

SEQ ID NO: 67801 - DNA, 600 bp, Chicken  19866894338011_2
tgggaagtaaaacaacagacaataaagaaggttcatgtaaggcaaagataaaatattttcctatgtggtgcaacctataatatagacaaagcttttagggaagtggatgcttcacacttaattctgcaaacttacacattgtaaacatattcaacccagatcactgtaaatgaaacaaactctgaagtagtagttaacaatgagtwcagcactgactcgttatgcaggagaacaaatattagaaatgaatatagaaaatatttttttcaggaaaataaattctatttatttaatatattyaacatggtttgtaactggaatgcttaactgctgacctctgaattaaagctattttaaaaagagtactctctgctctgccttggtgaggccacatctggaatactgtctccagttgtgggctcctcagttygaaaaatacagagaactattggagagaatacaggggagggcaacaaagatgacagaagatctggagtatctcctgtgcaaggaaaggttgagagatctggggctgttcagcctggaaaagagaaggctgagaggggatctcatcactgtttataaacatctaaagtgcag

SEQ ID NO: 67802 - DNA, 515 bp, Chicken  19866894338011_3
cttacacattgtaaacatattcaacccagatcactgtaaatgaaacaaactctgaagtagtagttaacaatgagtwcagcactgactcgttatgcaggagaacaaatattagaaatgaatatagaaaatatttttttcaggaaaataaattctatttatttaatatattyaacatggtttgtaactggaatgcttaactgctgacctctgaattaaagctattttaaaaagagtactctctgctctgccttggtgaggccacatctggaatactgtctccagttgtgggctcctcagttygaaaaatacagagaactattggagagaatacaggggagggcaacaaagatgacagaagatctggagtatctcctgtgcaaggaaaggttgagagatctggggctgttcagcctggaaaagagaaggctgagaggggatctcatcactgtttataaacatctaaagtgcaggaatcaagtccatggaggcagactctttttggcggcatgcagcaa

SEQ ID NO: 67803 - DNA, 600 bp, Chicken  19866894338012_1
agcatcagtgagtttacctcgtactgaacaaaggcaagccttgcttccctgctcatcagccaacactgtctgcaggatgttgtgggttcctctccctcagaagttccacactaagtaacctacatttatcagcagcatgagggcagatcctaagttgttctgggtgaccttagatagtggaccaaaaagttacccatttcccttttctgagacctacagcatcccagaaacagaacagcccctggtgtggacacccctagaatacttgcaagggacagatgtgagcaagtaacaatggtratctactctgcgatctgtgttacagcagcatcttccaattagcccaaatgacaacacagcctctrtaaattatagccataaataccaggggtaagataygtatccttgggtgtttacagagaagtacagaagaaacattcaaagtgaggtcacattagaacttaaccaagctgaagtagtaccttacaggccagcaccaagatatgccagttgctagcaagtaagtagctctcaaaatgcctttcagaaaactgtaaagatgtgtggcaggaaaagttacaattcctcagaatcaaaccc

SEQ ID NO: 67804 - DNA, 600 bp, Chicken  19866894338012_2
ctgtctgcaggatgttgtgggttcctctccctcagaagttccacactaagtaacctacatttatcagcagcatgagggcagatcctaagttgttctgggtgaccttagatagtggaccaaaaagttacccatttcccttttctgagacctacagcatcccagaaacagaacagcccctggtgtggacacccctagaatacttgcaagggacagatgtgagcaagtaacaatggtratctactctgcgatctgtgttacagcagcatcttccaattagcccaaatgacaacacagcctctrtaaattatagccataaataccaggggtaagataygtatccttgggtgtttacagagaagtacagaagaaacattcaaagtgaggtcacattagaacttaaccaagctgaagtagtaccttacaggccagcaccaagatatgccagttgctagcaagtaagtagctctcaaaatgcctttcagaaaactgtaaagatgtgtggcaggaaaagttacaattcctcagaatcaaacccatctactcactagctcatttttaaagaaaatgtaaagctttcacaatacctaactacagcagact

SEQ ID NO: 67805 - DNA, 600 bp, Chicken  19866894338012_3
gaagttccacactaagtaacctacatttatcagcagcatgagggcagatcctaagttgttctgggtgaccttagatagtggaccaaaaagttacccatttcccttttctgagacctacagcatcccagaaacagaacagcccctggtgtggacacccctagaatacttgcaagggacagatgtgagcaagtaacaatggtratctactctgcgatctgtgttacagcagcatcttccaattagcccaaatgacaacacagcctctrtaaattatagccataaataccaggggtaagataygtatccttgggtgtttacagagaagtacagaagaaacattcaaagtgaggtcacattagaacttaaccaagctgaagtagtaccttacaggccagcaccaagatatgccagttgctagcaagtaagtagctctcaaaatgcctttcagaaaactgtaaagatgtgtggcaggaaaagttacaattcctcagaatcaaacccatctactcactagctcatttttaaagaaaatgtaaagctttcacaatacctaactacagcagactacacaactaaaacagcacagagggtactgtccaa

SEQ ID NO: 67806 - DNA, 599 bp, Chicken  19866894338017_1
  misc_feature (1)..(66): n is any nucleotide
nnnnnnnnnnnnnnnnnnnnnnnnnnnnnnnnnnnnnnnnnnnnnnnnnnnnnnnnnnnnnnnnnnctgcagctaggcacagtgtagtttttgatgatgtagtgagcccccctgtgtgctattaagatggagcattttctctgcgggagcaccagttcaagggatttgtgcctccatgttgcccctgcagctcttctgtcatggccaaagagaaaagtgttgtctaatgttttcagctgcagagctaagatctgggacagccttgaatgtgtggcactgcagagagatttgcttgcttaygtttgcaacttcatttcttctggctctggtagcacagatgtgcttttaaaagtaatatccgacattggaatgtaattctaccagctggcgttggtagaagaaagatcaataaatacagattttaaaagttactcatattacctgagactcaaaacactgaagacagcatgattagaaatagatcacaaatatatcgaagtttgcataataacatccccrgtgaacggtactaaaatggttgctcaytaacctttgcacagttcagtttaaaagtgtttttatattgatatactgtatgt

SEQ ID NO: 67807 - DNA, 600 bp, Chicken  19866894338017_2
ttgtctaatgttttcagctgcagagctaagatctgggacagccttgaatgtgtggcactgcagagagatttgcttgcttaygtttgcaacttcatttcttctggctctggtagcacagatgtgcttttaaaagtaatatccgacattggaatgtaattctaccagctggcgttggtagaagaaagatcaataaatacagattttaaaagttactcatattacctgagactcaaaacactgaagacagcatgattagaaatagatcacaaatatatcgaagtttgcataataacatccccrgtgaacggtactaaaatggttgctcaytaacctttgcacagttcagtttaaaagtgtttttatattgatatactgtatgttattttttatatttattatttactatatgaaagaatgcttggtaacagaaacagaggaagagatgagccgtttggacttgctttaattataaacaaacacttaggcaatcatgagattgaattttctctcattggagggctgcaaaattaatatggcacttcagggtgtttcaggatgtgaacatagtgaaaacacttctcaatgaattgaatttacttt

SEQ ID NO: 67808 - DNA, 600 bp, Chicken  19866894338017_3
aagatctgggacagccttgaatgtgtggcactgcagagagatttgcttgcttaygtttgcaacttcatttcttctggctctggtagcacagatgtgcttttaaaagtaatatccgacattggaatgtaattctaccagctggcgttggtagaagaaagatcaataaatacagattttaaaagttactcatattacctgagactcaaaacactgaagacagcatgattagaaatagatcacaaatatatcgaagtttgcataataacatccccrgtgaacggtactaaaatggttgctcaytaacctttgcacagttcagtttaaaagtgtttttatattgatatactgtatgttattttttatatttattatttactatatgaaagaatgcttggtaacagaaacagaggaagagatgagccgtttggacttgctttaattataaacaaacacttaggcaatcatgagattgaattttctctcattggagggctgcaaaattaatatggcacttcagggtgtttcaggatgtgaacatagtgaaaacacttctcaatgaattgaatttactttaagatcctgcactctagtaatgtagag

SEQ ID NO: 67809 - DNA, 599 bp, Chicken  19866894338025_1
  misc_feature (1)..(78): n is any nucleotide
nnnnnnnnnnnnnnnnnnnnnnnnnnnnnnnnnnnnnnnnnnnnnnnnnnnnnnnnnnnnnnnnnnnnnnnnnnnnnnatccgctgagggatgaaaccttagtcagtacgcaatgcctgcaaacccagaggtgaagctgcagtgccttgctattgaagacacctaccccatttttcttctccctgttatctctgaagaacattgagtatgtcctaattggggacattgtgtcccccatgtccttattgcaatgtctatccaacagtttcagtgtgtgtgagcagtacgtgaaagatgtcygtgttcattggacagtgcatttgagaaaatgaaaaatacaagactgtaggtataccccttctccctgtgacactacatcctagaagagcacaataagaactggtctgttatctcagtgtccaaccataaatgctcagcatcacaaatcaaaaggacatctattactaaacagttattccctgtgaaagctcttgccgggattttacaccaatttaattcagtcacagaggcaataayaacttttacttcagatgcagtcacaccagcaaaagcactctgcattagcactgctcatcctg

SEQ ID NO: 67810 - DNA, 600 bp, Chicken  19866894338025_2
tgtccttattgcaatgtctatccaacagtttcagtgtgtgtgagcagtacgtgaaagatgtcygtgttcattggacagtgcatttgagaaaatgaaaaatacaagactgtaggtataccccttctccctgtgacactacatcctagaagagcacaataagaactggtctgttatctcagtgtccaaccataaatgctcagcatcacaaatcaaaaggacatctattactaaacagttattccctgtgaaagctcttgccgggattttacaccaatttaattcagtcacagaggcaataayaacttttacttcagatgcagtcacaccagcaaaagcactctgcattagcactgctcatcctgaatttacaggggacaggtagagcagtataggcccctccacatggtccaattgtgcctatgctagaccccattataaagagtcatttcactgtgaagaactgaggattagacagctctaccagattcttcagtgttctggggtgagcctgtactcctcgtgcattcttgtaactggcaagttacacccacagagtgcaaagtaagagcagggggaaagtacattacccaggcagatact

SEQ ID NO: 67811 - DNA, 600 bp, Chicken  19866894338027_1
cattcagagtgagagcactgcatcctgtcctcgctctgaagaatgtttgatgttgcagaggatggcaaatggcatgtgagatgctagtgggagggataaaattttccactacactgtccctcccccaaaaagaattttaaaggttaagtgatattaaaaacacaagggagttgggagcgtcagccaccaggcactgcgttatctcagtgtgctaatctcacttgtcagataatatcccacaaacaggagcatgacagaacaaagctgactggaggtcctaaatcacaaaggcacagtatwtgttacagttttagaagctgtgatcaaggacagtatgctaagatctttcaagatgtttcctttagtttctcctctctaccaccacctttaataaaatctttgttaacatattatgaaaatgctttttcccagcgtgtggctggttttgtgtcacttaatacctgaaattaagccatctgccatgcttatcacttccaccttcagaccaacacttaaaagaaaaattaaatacctcyttttacacacatttaccttttaactccagacatttctctacaggcatttctatctcactgtcac

SEQ ID NO: 67812 - DNA, 600 bp, Chicken  19866894338027_2
ccacaaacaggagcatgacagaacaaagctgactggaggtcctaaatcacaaaggcacagtatwtgttacagttttagaagctgtgatcaaggacagtatgctaagatctttcaagatgtttcctttagtttctcctctctaccaccacctttaataaaatctttgttaacatattatgaaaatgctttttcccagcgtgtggctggttttgtgtcacttaatacctgaaattaagccatctgccatgcttatcacttccaccttcagaccaacacttaaaagaaaaattaaatacctcyttttacacacatttaccttttaactccagacatttctctacaggcatttctatctcactgtcactgctaggattcagccttggattttattcacagttgtaggaaaccataacacaactcacagaccaaatcatgccgggcagtgcccaaaggaagaggcctaagcacttcctcactcatcccttggaggacatctagactgccttgcacattatctctagagcttttacagttcatctgttacatatttgacagttagcattagctttacactaagctttgcaaggagaaagcacgatc

SEQ ID NO: 67813 - DNA, 600 bp, Chicken  19866894338033_1
acaaacatttgcaacacacacacacccctacacctggacatgtcagaagttacttgtggccttgtttttgtaggatggggaaaatgaagaaaggggaatggcagagaatgaaggaaggggaacacatgagcatgaaatgatagcccacacaagaaagccatgatgatgagcaaaacctaagctgcaggtttctaagcacactcacaatctaggaaacaaagcaaagcaaaaatccagatacaaccaagactcatttttgctcagtcacacagaaaatcagcaatattctgccaaactgtrtctctttcccaaatgctgcccagtaagatgatgtgatttgtcactgtttctggctgaaaggagaaaaggaacagaagaggcccgggaagcaggagctggctggttctgtttgctaccagcagagagggagaggacacagtcaagagaaccagctcgagttctgtagaaacccagcaatcatcttctgagttataaagtgataaggatggcccaaaagagaaaagctattttcaaagaaaactcttctaacattgagctacrgtctgcagagcagcacaaaaaggccattgcaaaatgtsa

SEQ ID NO: 67814 - DNA, 600 bp, Chicken  19866894338033_2
cagtcacacagaaaatcagcaatattctgccaaactgtrtctctttcccaaatgctgcccagtaagatgatgtgatttgtcactgtttctggctgaaaggagaaaaggaacagaagaggcccgggaagcaggagctggctggttctgtttgctaccagcagagagggagaggacacagtcaagagaaccagctcgagttctgtagaaacccagcaatcatcttctgagttataaagtgataaggatggcccaaaagagaaaagctattttcaaagaaaactcttctaacattgagctacrgtctgcagagcagcacaaaaaggccattgcaaaatgtsaagagtttgtgttttttttgttgttgttgttgttttcrtagctcagcagacacgaaaagcaacaacttctgggcttgcaacatcaactgtgaccagcgcagagatccctgcttttgaaggctgtggcagagtaagrgaagttggtgaacagagaccagaccagcaatcccttgtggtcaagagggaacaaacatggcttggaagaaggaatctcacagtacttttgaaggactggacgtatctgtggggaggccaagagctt

SEQ ID NO: 67815 - DNA, 580 bp, Chicken  19866894338033_3
rtctctttcccaaatgctgcccagtaagatgatgtgatttgtcactgtttctggctgaaaggagaaaaggaacagaagaggcccgggaagcaggagctggctggttctgtttgctaccagcagagagggagaggacacagtcaagagaaccagctcgagttctgtagaaacccagcaatcatcttctgagttataaagtgataaggatggcccaaaagagaaaagctattttcaaagaaaactcttctaacattgagctacrgtctgcagagcagcacaaaaaggccattgcaaaatgtsaagagtttgtgttttttttgttgttgttgttgttttcrtagctcagcagacacgaaaagcaacaacttctgggcttgcaacatcaactgtgaccagcgcagagatccctgcttttgaaggctgtggcagagtaagrgaagttggtgaacagagaccagaccagcaatcccttgtggtcaagagggaacaaacatggcttggaagaaggaatctcacagtacttttgaaggactggacgtatctgtggggaggccaagagcttctcccacatggcagactg

SEQ ID NO: 67816 - DNA, 568 bp, Chicken  19866894338033_4
aatgctgcccagtaagatgatgtgatttgtcactgtttctggctgaaaggagaaaaggaacagaagaggcccgggaagcaggagctggctggttctgtttgctaccagcagagagggagaggacacagtcaagagaaccagctcgagttctgtagaaacccagcaatcatcttctgagttataaagtgataaggatggcccaaaagagaaaagctattttcaaagaaaactcttctaacattgagctacrgtctgcagagcagcacaaaaaggccattgcaaaatgtsaagagtttgtgstttttttgttgttgttgttgttttcrtagctcagcagacacgaaaagcaacaacttctgggcttgcaacatcaactgtgaccagcgcagagatccctgcttttgaaggctgtggcagagtaagrgaagttggtgaacagagaccagaccagcaatcccttgtggtcaagagggaacaaacatggcttggaagaaggaatctcacagtacttttgaaggactggacgtatctgtggggaggccaagagcttctcccacatggcagactg

SEQ ID NO: 67817 - DNA, 542 bp, Chicken  19866894338033_5
ttgtcactgtttctggctgaaaggagaaaaggaacagaagaggcccgggaagcaggagctggctggttctgtttgctaccagcagagagggagaggacacagtcaagagaaccagctcgagttctgtagaaacccagcaatcatcttctgagttataaagtgataaggatggcccaaaagagaaaagctattttcaaagaaaactcttctaacattgagctacrgtctgcagagcagcacaaaaaggccattgcaaaatgtsaagagtttgtgttttttttgttgttgttgttgttttcrtagctcagcagacacgaaaagcaacaacttctgggcttgcaacatcaactgtgaccagcgcagagatccctgcttttgaaggctgtggcagagtaagrgaagttggtgaacagagaccagaccagcaatcccttgtggtcaagagggaacaaacatggcttggaagaaggaatctcacagtacttttgaaggactggacgtatctgtggggaggccaagagcttctcccacatggcagactg

SEQ ID NO: 67818 - DNA, 444 bp, Chicken  19866894338033_6
acagtcaagagaaccagctcgagttctgtagaaacccagcaatcatcttctgagttataaagtgataaggatggcccaaaagagaaaagctattttcaaagaaaactcttctaacattgagctacrgtctgcagagcagcacaaaaaggccattgcaaaatgtsaagagtttgtgttttttttgttgttgttgttgttttcrtagctcagcagacacgaaaagcaacaacttctgggcttgcaacatcaactgtgaccagcgcagagatccctgcttttgaaggctgtggcagagtaagrgaagttggtgaacagagaccagaccagcaatcccttgtggtcaagagggaacaaacatggcttggaagaaggaatctcacagtacttttgaaggactggacgtatctgtggggaggccaagagcttctcccacatggcagactg

SEQ ID NO: 67819 - DNA, 600 bp, Chicken  19866894338047_1
ccacccacactctctcctcctgccttgctcccacagcactgtcctctccctggggtcagggtcagcccacacaggggcacacagccctggcaccgacactggaaggatctacctggtgcagttctgttccactctcctcctcccattgagcttgctcttattaaatcactgctgcccatgctgcatttgggccacagattgttgcgcccctacaactgcacgttcaaatggcaacagcccttcctgggggcttctgcaagaggaactttctcaaggcaccgagcttgtggtttgttgtaytgcctggctggttttataccctgtatcacccacaagaacatcaacaccttatgtgctctgctaatggaccgtatttctgcatcacatcccccagagcccctgcacacagcagygtgtgacacatcaggaatttcctaatttgttgactgtcacaggtttgctttcaccttcgtgcaaaaatcagtcccaggagcctatagccagatttttattcttgactgcaatgcctccacgttcagcatgtgctggttaataacagtgtgtaataataacagctcttggctttcagctgatgataca

SEQ ID NO: 67820 - DNA, 600 bp, Chicken  19866894338047_2
tggtgcagttctgttccactctcctcctcccattgagcttgctcttattaaatcactgctgcccatgctgcatttgggccacagattgttgcgcccctacaactgcacgttcaaatggcaacagcccttcctgggggcttctgcaagaggaactttctcaaggcaccgagcttgtggtttgttgtaytgcctggctggttttataccctgtatcacccacaagaacatcaacaccttatgtgctctgctaatggaccgtatttctgcatcacatcccccagagcccctgcacacagcagygtgtgacacatcaggaatttcctaatttgttgactgtcacaggtttgctttcaccttcgtgcaaaaatcagtcccaggagcctatagccagatttttattcttgactgcaatgcctccacgttcagcatgtgctggttaataacagtgtgtaataataacagctcttggctttcagctgatgatacattaaagacaagaagggaaggtgagattttgctagctgaaggcttgctctgtatgcctacaacaagctttatactcacaaaacatagggctcaggtagatttgaatcagtacca

SEQ ID NO: 67821 - DNA, 600 bp, Chicken  19866894338061_1
aaacacatctatttcagactgtcctggttgcataaacacctattcttgagaatccccagagctgaaagttacctgtacagatatggggttgggatactgagtatttggaaacagggaccttcatttctgatctttgtaatgacaccattttacaaatatatgcactacaaaaactaaaaaggtgagcttaataaatattgaaattagacctgagactctgctacaagacagtagagctgtgggagcttttcttataagacctcaccaggcaatgagaaccatgaaatgtatgtgtggaartgaaaatctgctcatgattttcatgccaaacaagccttatatgaggaagtagataaggttatttttattccctaggtgggagttattagggtcatttattactcatgaagtaaggcctatagtaagttgctagtatttgcagagtgtttacagtttttcatgtaagctctctattttttgataaaactacttcttgcacttttcagagtgtatttattttttatcatgtatatttgtgtacgcacatacaaaccttgctccttatcttagaggacttgtccaacactttcaaaatgactt

SEQ ID NO: 67822 - DNA, 600 bp, Chicken  19866894338068_1
tctgattttcagggaaacatttcctttggccaaaagctcagcgttgagagcaataaacatctgcatcaaaacataaatgtttggaaaagatggattaggaatgccactcctaatggtgtcagcactgaagctgagaagtcacttgaaagacagagagatgtggcaccgctcagggcaaagcacacttccttatcctcactctttgaaggatatccaaaagaaatatcccataagaatgggcggccacacaaaagccatgctggatcaacagcccaaaagaaggcagtggcgacacagctyaggtcgtcccataaagaaataacccctctggccttccatcagtgaatgaaatctcagtatttactgggagaaactactgtggaaaacaggtaaaccaaacccagttaatatctatgtaatcacataacgagatgtaatgtccagatgtagaccttctcctgtcaatcctatgggttctgatgtttagaagtattaaatgtgcacggtatagaaataacctcaacaaggctaggcttggcaatgactggttgggcctccctgccatgatctgcctctttgctttatgaaacggtcaatatt

SEQ ID NO: 67823 - DNA, 600 bp, Chicken  19866894338068_2
atccccctggttgctgtggaaatgatcgtgtcccaaacaggagattagagctctaaagcagcggtgaacagcaggaagacaagaatcatgttttcatactgactgctttcttacagagcatgagtggaaaactaaaatgggggggggtgtgattagagaaccagagtgagattcctgaaactccgggtttcacaaagctttcccagaggaatcagtggcttctaagtgtgtttgttttaagtaaggccagcaaatacaagtggcaaagctacagaagataaggatgagatgatccgttartgtctcccaaactgattactccctgaaggataccctcagcaaagctttgtagttcagtgtttgaagcaagcaggcttacagcaagccccaagggacagagatggggatctctgcagggaacgttgcgtgctcccagcagcaggaagggaagcacaatttaggcggtgaagttataatgggacagtgcagatctatcagactaagtcatctctgcaatggaaggatgcaccaggaacagctcagcttgtctctaagttggaaatatcgatgtagggtcagtggtggttgggggcaaacagg

SEQ ID NO: 67824 - DNA, 599 bp, Chicken  19866894338074_1
  misc_feature (1)..(151): n is any nucleotide
nnnnnnnnnnnnnnnnnnnnnnnnnnnnnnnnnnnnnnnnnnnnnnnnnnnnnnnnnnnnnnnnnnnnnnnnnnnnnnnnnnnnnnnnnnnnnnnnnnnnnnnnnnnnnnnnnnnnnnnnnnnnnnnnnnnnnnnnnnnnnnnnnnnnnnncagccctacagcagccacactctgcacagccccgccaccagcccgcaggacgcccagcagcctacctgcaaccttctatatctggcttaattggagttagtcaccgaactactgcaggagtaacaggaacgttgcgttagcaatttccsccagacatttgaacagcacaataaggtacaaaacctttattttctttctaaattcagacatggcaaaggaaaagaggttccaagactgacatcgcgtagtccagttatttccctttatcgtacacccaagcaatcaccgaagttatccttttctttgtcactgaggaaagtcaaaatacaacagatatctgaagtgaattttcatgccacttaattggtccattttctctgtatagattaaaacactycttctgctggaagctaacaaatagtactcaggcactcacagctcgctctgt

SEQ ID NO: 67825 - DNA, 600 bp, Chicken  19866894338074_2
tagtcaccgaactactgcaggagtaacaggaacgttgcgttagcaatttccsccagacatttgaacagcacaataaggtacaaaacctttattttctttctaaattcagacatggcaaaggaaaagaggttccaagactgacatcgcgtagtccagttatttccctttatcgtacacccaagcaatcaccgaagttatccttttctttgtcactgaggaaagtcaaaatacaacagatatctgaagtgaattttcatgccacttaattggtccattttctctgtatagattaaaacactycttctgctggaagctaacaaatagtactcaggcactcacagctcgctctgtgttatgtcacatcctatcttttgaaagcattattaaaatagagcattaacatcttctctttgtgcagagaatccacctactttacaatagcaaggaagaaaacacagaagtacaccaggagatgcgctgagcacagactggtacaagtcggctgtccccaacaaaccacccacagagagccactcattgcacaagtgtcacagaacaattaggggctgctcatggcttacaggtccagccataaacagc

SEQ ID NO: 67826 - DNA, 600 bp, Chicken  19866894338076_1
ttagggtctctgtgggtttggttaattgtcacagactcgtttaccgcaggcggaggaattttaatgtacagagcaagatggtttattcattcaaaaatattttatgggaagttgctctgagctgaagtcatgtaaaatgcactcttgggggccgagccttcttacggtctcatgtctgaaacaaaggaagaacatccataaactaagagcagaaaactcttggtcgcagaccagcatttccccttgttttgagcgttgctcatgtcccagaatgactgatttttcagctttcctttgagrgcaatactgagctgcaaccaatcattcccatgtggtgcayagagcattagtgaattgccctgtcagtttgaaggtggcattcaactccagccaacaggaaggcaacagaagttccttcagtcactgtgatgggaagcaatctgtattagtctatcttgcctttttgttgttgttgtttggaaggtgtggaaaaggaaggaggaacataattcatcttcaattttgtttttaaattaaggctgtcaggtggttccaacagagtggggaaatccccatggtggttgcacacggtcccacatg

SEQ ID NO: 67827 - DNA, 600 bp, Chicken  19866894338076_2
ttaccgcaggcggaggaattttaatgtacagagcaagatggtttattcattcaaaaatattttatgggaagttgctctgagctgaagtcatgtaaaatgcactcttgggggccgagccttcttacggtctcatgtctgaaacaaaggaagaacatccataaactaagagcagaaaactcttggtcgcagaccagcatttccccttgttttgagcgttgctcatgtcccagaatgactgatttttcagctttcctttgagrgcaatactgagctgcaaccaatcattcccatgtggtgcayagagcattagtgaattgccctgtcagtttgaaggtggcattcaactccagccaacaggaaggcaacagaagttccttcagtcactgtgatgggaagcaatctgtattagtctatcttgcctttttgttgttgttgtttggaaggtgtggaaaaggaaggaggaacataattcatcttcaattttgtttttaaattaaggctgtcaggtggttccaacagagtggggaaatccccatggtggttgcacacggtcccacatgactcatttttcctaatccacttaaaacagggttgcaattg

SEQ ID NO: 67828 - DNA, 600 bp, Chicken  19866894338077_1
tgagagaaaagtgaaaaataagggaaaaaaggagacctagcaactccatatgcagcagcctctgattgggcacgtttatctaagacagctgcctttttaaactagtagaacaaacacgtacggcacgtacagcatggacaagaatccggtcttgggtatttttcaggttacaaattttcagcagccagaaccttcaaaatataaaggctaaatgcatcagaaataagcaataaaccttcttaatgctgttaataaaattcttaatgcttttactgaaatacagtcatagtgagacaaggmacatggctacaccccaagaaatatttatttgacacttacgtaagcttagctattgataaaatatacatttctgttgctttttgagtatgtttcctacattttatatattatggaatgatgttttatgcatacaagtgagaacttacatgctgaactggaaactcagctttttgctgaagtgattggcgcacatgagctcaactccagtctaaggatgctgatttactccaggaaggaacttgctcctgaaggcaagttgaagacctttctgagataaagctgcagtttgcggttccgaag

SEQ ID NO: 67829 - DNA, 600 bp, Chicken  19866894338088_1
cttcccccaagcagtctaaaatttgattaactgatcaagtcaaaacagtctgataatacacaggggaacagaatagtttgcattggcccaagtgcacagttgaaaatagtaatttcctgttaaatactggttcttgcctctttcttctcctatctcagctctaggaaggtctgtgggctctgctgtcattccactgttgatatactcactactagctgcatgagtagcaatatgttattttcatgtcaaagtgagtctccagatagcttttgcttcaccaaacctggtagattacgttckttctttctttctttctttctttctttctttctttctttctttctttctttctttctttctttctttctttctttctttctttctttcatagttgttgtctttcctaaattaatcctgtatttctaatcagtgcaaaactttgggcttctttcttcacggcataccctgatgagggcaatagctgcaaacactttgaatgtcagattcttcattactgaaatacttgaaaagcctcattagtaagaaacaaaacagaaacacccacatccattttacttatctgtgtcatcagtgacagtt

SEQ ID NO: 67830 - DNA, 600 bp, Chicken  19866894338089_1
tacagaaatatactgccttttattatttgttcagcactttccaaggagaaaaatacaccacaggagaagcagacagtaacctcactgggactgcagctaagagtggtgaaaataaataaaggctgtttctttccatttccctagaacacagggtatgtgcaaagccatgggatccactgggctgctttcagcagactctgctttgggattatcaggagcaagacaaaacagcattacatgacacactcttgcccagccttctttgacaggcataaattaaaatgacaaattactttagtycagatgaagttttgtatcccttctcccatcctctagtaacgtatcaagctatacaactactgatttcctattaaatgacatttctatctagcatgctatccatttgtcacatgaaggcatttgttttttcacagcccaagagttaaggaatcaagtcttgaattcagaagccttcagataattttcctgttctaccagagacatctgtggcaagtccatattgcccagatttatcttactttcctccaggctctaaatcatgttgcatatgctaaaagatggactgtcctgggcccattt

SEQ ID NO: 67831 - DNA, 600 bp, Chicken  19866894338091_1
catatcgtatttcatccatcaaacaaatatggaatgtgctctaatttcacgctttccttttttttttttttttttttaattattttttgtgagggattgaaagcttcaaatggaatatgagtggtcatgtgacatcagctcccactaaggataaagtatattcactcccactcaaaaacaacccttaatttgccagctcctccatcccgctccagacagtgagcgtcctctggtgctaagccaccaaaggtgcacgaaggtttgcaaccagcagtccttggagtggcagagactgagtcracatcctgcatgatttgtcttattgtcacgttcccagctccacaagacactgcagtacttcaatgaaacgctgagtctgttaacttttttttcacaaaaaaaaagggattactcgcatatattcctattgaatatggacagtttctgttgtgcttcacaagacatactgtgggaatgagggaagggtgtgtgcaatcatagtcttttctgggaacacctgctgctctctccttttgtatagcgtatacagcagagtaatagatcctataaagtgctttccttaactgcctactttaagaa

SEQ ID NO: 67832 - DNA, 600 bp, Chicken  19866894338093_1
ctatcttgacaagcagcctacaaagtgctcctttccaaacaatactactgcttacctcaagaagaaatgaagacactttttcacctgagtgaaggagcatatgccaggatggggataagggtctcaagatccagatctcctctccatactctccccagtacttacacttgttaaaccgagcctgcatcagattcatcggctcccagactccacacaatagtgacaaggtaagaataaagataagacattcataatacagcactagaacagcttggttagagttaatgccctaaggaaatyagaaaataaagactgtggtgagaaaggcaggcagatctttaaaaacagctgatagacaccaacatcgttcatgtttcactcccctctacctgagaggtagaagawctctgtcacactgtcacaaagcayaccctcctctatcctgcctcctaggctggaggtagaggaaaggcagcagtcctgtgagtcacccttggaaatctacacacatcaaacagctactcaccacacagggaacaaaattaatgtcagcctaccagctccagtgcctccacagaaagacactgctccgaacttaca

SEQ ID NO: 67833 - DNA, 600 bp, Chicken  19866894338093_2
aggatggggataagggtctcaagatccagatctcctctccatactctccccagtacttacacttgttaaaccgagcctgcatcagattcatcggctcccagactccacacaatagtgacaaggtaagaataaagataagacattcataatacagcactagaacagcttggttagagttaatgccctaaggaaatyagaaaataaagactgtggtgagaaaggcaggcagatctttaaaaacagctgatagacaccaacatcgttcatgtttcactcccctctacctgagaggtagaagawctctgtcacactgtcacaaagcayaccctcctctatcctgcctcctaggctggaggtagaggaaaggcagcagtcctgtgagtcacccttggaaatctacacacatcaaacagctactcaccacacagggaacaaaattaatgtcagcctaccagctccagtgcctccacagaaagacactgctccgaacttacaatttgttgccatgattaatagatacagttctttcaagtgacttgcccacatataaagaccaaatcttgctgctgaaacatgcacactgactatttttcaatctga

SEQ ID NO: 67834 - DNA, 600 bp, Chicken  19866894338093_3
tccagatctcctctccatactctccccagtacttacacttgttaaaccgagcctgcatcagattcatcggctcccagactccacacaatagtgacaaggtaagaataaagataagacattcataatacagcactagaacagcttggttagagttaatgccctaaggaaatyagaaaataaagactgtggtgagaaaggcaggcagatctttaaaaacagctgatagacaccaacatcgttcatgtttcactcccctctacctgagaggtagaagawctctgtcacactgtcacaaagcayaccctcctctatcctgcctcctaggctggaggtagaggaaaggcagcagtcctgtgagtcacccttggaaatctacacacatcaaacagctactcaccacacagggaacaaaattaatgtcagcctaccagctccagtgcctccacagaaagacactgctccgaacttacaatttgttgccatgattaatagatacagttctttcaagtgacttgcccacatataaagaccaaatcttgctgctgaaacatgcacactgactatttttcaatctgacaaaattaatcatcatactgagaa

SEQ ID NO: 67835 - DNA, 599 bp, Chicken  19866894338103_1
  misc_feature (1)..(29): n is any nucleotide
nnnnnnnnnnnnnnnnnnnnnnnnnnnnncagcctccacaaactgctgtttctaccatgaaaagcactctgacgctcaattataccagtatctattaattttaggtacttacatggttctcatggctacagaagctgcgtgctttacactccttaatgcacttcctttctgtcagcgtatgcagcaccagaagatccccactggaaatacatcagggttgtgcctgtctgatcccagtggctgcctaaagccatggggaactgatatgaggatgctgtgtcagaccactgccttttttgygttccacttcacggaccctgttctgacacgctgtgcaggaaacccgtgcattgtcaggactcaaactttgtttgatgcctgtaaacyctttattggatctagaaataaggaatttgcttaaggttatgcaagagatcagtagtaaatcaggaaattgagcctaagcctcttagagcagcagcctaatggttgttttcagaagagtttcactacattacaccagctaagtgcctggctcactcactgctctgtggattaacagagggcagactgactattgaatttttaaaacaaaaaat

SEQ ID NO: 67836 - DNA, 600 bp, Chicken  19866894338103_2
gtatctattaattttaggtacttacatggttctcatggctacagaagctgcgtgctttacactccttaatgcacttcctttctgtcagcgtatgcagcaccagaagatccccactggaaatacatcagggttgtgcctgtctgatcccagtggctgcctaaagccatggggaactgatatgaggatgctgtgtcagaccactgccttttttgygttccacttcacggaccctgttctgacacgctgtgcaggaaacccgtgcattgtcaggactcaaactttgtttgatgcctgtaaacyctttattggatctagaaataaggaatttgcttaaggttatgcaagagatcagtagtaaatcaggaaattgagcctaagcctcttagagcagcagcctaatggttgttttcagaagagtttcactacattacaccagctaagtgcctggctcactcactgctctgtggattaacagagggcagactgactattgaatttttaaaacaaaaaataaatacctgctatgagctcttcaaaagcttttcctagcaaggttttgggaaattcccaaaggtcttaattgcatatctatacacagaa

SEQ ID NO: 67837 - DNA, 600 bp, Chicken  19866894338107_1
tttgaataatgtgaacaggattttgcccattgtttacttttgtagaacaatttcagttaattgatgttagaatctcccaggggcatgtaattaagccatttcagaaagctgcacaggcaatggaatagaccacaggagggctcttgttgtggcttaacctggcaggtggctaagcacagtacagttttttgctcactccccccacttcctgggggaactgaggagataataataattaaaaaaacaaaagtagaacttgtgggttgagataaaactactaagatagagaaaaagaaaggraagttgggtatgacaatataaatgtgtataactgaagtagtgcatgagcaattcctcagcaccccgcaaccgatgcccaggtagcccctcaatcagtggtagagagagatgaactcccacccccttcaaaattacttccacaggatgtcatatggtttggaagatttttttttttttgccagtttaagccagctgtcttaatcttgttcctcccagctctttggttcctttactgagaatggtcttggctctgtacagcacttcttagcagtaaccataaacatcagtttgatatcagca

SEQ ID NO: 67838 - DNA, 600 bp, Chicken  19866894338107_2
tttccactggaggatcagatgcatagcatggaccttggcgtatgactacattaatgatggaacatcactgtagagcttctttcacctgctttaagtctacaaaccaatttatcttgtagtaacttggtcatatgctcacaatccgtttctctttcagagaatgagcagtacctctattcaaaggttaatactgtgatattgtggttcacagcctgatcgtggctagctctgtgtatccgtgaaggcctgctctcctttatccaaatgcttcatgtcaccttttggtacatagaagaaatkctgctrcttgaacgttgtgcaaattagattgagtttcttcccttgtgatcagggagaggctattcagcttatcctcgtctttcagagatctcttaaaaggcagcactcaagaaaccaagctaaagcagcaattgcttccgaatcattcattttcacagcagcctactgctacaacctgctattttttgcttaagtgtaatttgctacttgggaaataaacaaaaggcaagttctgatgtttagcttgagacattgcttttagctgtgtggggtggcagtgaaaagtgtgcatgcaaatgc

SEQ ID NO: 67839 - DNA, 600 bp, Chicken  19866894338107_3
ctggaggatcagatgcatagcatggaccttggcgtatgactacattaatgatggaacatcactgtagagcttctttcacctgctttaagtctacaaaccaatttatcttgtagtaacttggtcatatgctcacaatccgtttctctttcagagaatgagcagtacctctattcaaaggttaatactgtgatattgtggttcacagcctgatcgtggctagctctgtgtatccgtgaaggcctgctctcctttatccaaatgcttcatgtcaccttttggtacatagaagaaatkctgctrcttgaacgttgtgcaaattagattgagtttcttcccttgtgatcagggagaggctattcagcttatcctcgtctttcagagatctcttaaaaggcagcactcaagaaaccaagctaaagcagcaattgcttccgaatcattcattttcacagcagcctactgctacaacctgctattttttgcttaagtgtaatttgctacttgggaaataaacaaaaggcaagttctgatgtttagcttgagacattgcttttagctgtgtggggtggcagtgaaaagtgtgcatgcaaatgcgtgcag

SEQ ID NO: 67840 - DNA, 600 bp, Chicken  19866894338122_1
aacataccatttccacttttagccccactcctttcttcttcttatctgcaataaaaacacggaagagttagaccccaaccagaaggatatttgtgcttctcatgccccttcctcatttttcttacctccccacctcactccatgcgtttccatagcatgacccagacttgcttccagattacaacattcagcttggtgtgctcagtgctttctgagtatccacacaggatctgctctctctggtagaaagagaactaagaagtaaaagctgcaaaaagtaatacagctgaaagagcagargaatggctgtaagacttctgcagcaacttgaactctgtgaggatgcaactgttcttctacttcacagtttatgtctatcaaaccagctgcagcgtgatcggaatttgacactggagaaaactgacctgttwgctgggaaacatggaaacattactgcttatccagtgatgcttttaacactgtcaggcaggcagtcagtgggctccaactgaaagaaccaacaccagctccttcagagcacatcccctctgcattgctgatacacagctggcttggcaggacgtccccatggagtgatgt

SEQ ID NO: 67841 - DNA, 600 bp, Chicken  19866894338122_2
acctcactccatgcgtttccatagcatgacccagacttgcttccagattacaacattcagcttggtgtgctcagtgctttctgagtatccacacaggatctgctctctctggtagaaagagaactaagaagtaaaagctgcaaaaagtaatacagctgaaagagcagargaatggctgtaagacttctgcagcaacttgaactctgtgaggatgcaactgttcttctacttcacagtttatgtctatcaaaccagctgcagcgtgatcggaatttgacactggagaaaactgacctgttwgctgggaaacatggaaacattactgcttatccagtgatgcttttaacactgtcaggcaggcagtcagtgggctccaactgaaagaaccaacaccagctccttcagagcacatcccctctgcattgctgatacacagctggcttggcaggacgtccccatggagtgatgtgagctgatggacagcccaggctgccacccacagacttcaggacagcaatgagagttgcagctctgtgtgtattcagagcataacagcttttaaagggtttcacacattatatcactttttaaaaattcctt

SEQ ID NO: 67842 - DNA, 600 bp, Chicken  19866894338123_1
gtcttgctttgagcttcctgaattctcactcagtgttctccccaaatgcgaggatcttacgtgcacgtcttgagtgacagctgggaggctgagcagtgatggttttggaatggcaatcgtttatctaaatagatttttctgatgaaggtctgactcagctattggtctcctatttttattaaatggcctgctaacagtaaaggaaaaatcaaaaatgttttagaagttcaaacgagtttgctgctcttccattagtttttgagaaactctcttttactttcacagctcttcaaaaaacarygagagagtaaggcagatctcttgtacagagagcacctgcttgacctcagaatgyggccattcttaaagcagaacagctgaacacaggtgtactctgtgcattgtagggatggtgctcagccttccaaaacagccgctcaagactggatgtgagattgcattttgtatgtggaaaggtagtgatgtgatggcaccggttcatacttgtatgacgcatgtgaatacaccacatctctcaagggacaacttggttttgaaatgaaaataggaagagtgcaaagtcttgctattggtctgaca

SEQ ID NO: 67843 - DNA, 600 bp, Chicken  19866894338123_2
tcttgctttgagcttcctgaattctcactcagtgttctccccaaatgcgaggatcttacgtgcacgtcttgagtgacagctgggaggctgagcagtgatggttttggaatggcaatcgtttatctaaatagatttttctgatgaaggtctgactcagctattggtctcctatttttattaaatggcctgctaacagtaaaggaaaaatcaaaaatgttttagaagttcaaacgagtttgctgctcttccattagtttttgagaaactctcttttactttcacagctcttcaaaaaacarygagagagtaaggcagatctcttgtacagagagcacctgcttgacctcagaatgyggccattcttaaagcagaacagctgaacacaggtgtactctgtgcattgtagggatggtgctcagccttccaaaacagccgctcaagactggatgtgagattgcattttgtatgtggaaaggtagtgatgtgatggcaccggttcatacttgtatgacgcatgtgaatacaccacatctctcaagggacaacttggttttgaaatgaaaataggaagagtgcaaagtcttgctattggtctgacaa

SEQ ID NO: 67844 - DNA, 600 bp, Chicken  19866894338123_3
cttacgtgcacgtcttgagtgacagctgggaggctgagcagtgatggttttggaatggcaatcgtttatctaaatagatttttctgatgaaggtctgactcagctattggtctcctatttttattaaatggcctgctaacagtaaaggaaaaatcaaaaatgttttagaagttcaaacgagtttgctgctcttccattagtttttgagaaactctcttttactttcacagctcttcaaaaaacarygagagagtaaggcagatctcttgtacagagagcacctgcttgacctcagaatgyggccattcttaaagcagaacagctgaacacaggtgtactctgtgcattgtagggatggtgctcagccttccaaaacagccgctcaagactggatgtgagattgcattttgtatgtggaaaggtagtgatgtgatggcaccggttcatacttgtatgacgcatgtgaatacaccacatctctcaagggacaacttggttttgaaatgaaaataggaagagtgcaaagtcttgctattggtctgacaaattttctttggttcagagtacctcagcaaaaataccaagtgtgccaaaacgtgc

SEQ ID NO: 67845 - DNA, 538 bp, Chicken  19866894338123_4
cattcttaaagcagaacagctgaacacaggtgtactctgtgcattgtagggatggtgctcagccttccaaaacagccgctcaagactggatgtgagattgcattttgtatgtggaaaggtagtgatgtgatggcaccggttcatacttgtatgacgcatgtgaatacaccacatctctcaagggacaacttggttttgaaatgaaaataggaagagtgcaaagtcttgctattggtctgacaaattttctttggttcagagtacctcagcaaaaataccaagtgtgccaaaacgtgcaaygtagtgaatgtacgactgtgccaagccaggctgtcacttgtggaacgtgcttatttgtgttatgtgcatgcccacacactttacttccaattaattattcacaattacgaatatactttgacacttctacttttccacttgcaaatactcagggtacttgttccaacatccagttggttcagcactgttttgcttatcagtattttgaatgaatcacttcaggtaaagccgccaggta

SEQ ID NO: 67846 - DNA, 600 bp, Chicken  19866894338124_1
tttgtgagccattcattacaatcatctttgcttctagatcctccaacaacaacgtgacagtcgatgctgcaggggggcttttacgttcactgagtaaaactccaggtcctctaaaaatcaggtatgatgtgactgtgctgctttagatattgatgtggggctggtgtgataatcttaagaatctccttttatcaaaagcaacagtgaactgtgcttcagaagacaggtagtgatggcccgagagattgctgtgcagcactgcaagttgtattacagctttatctgctgcattcattacgraccatcatgtaaaactgtggcaagaaactgttctgactttgtaggcttccacctgccttacaaagaagggtttaattctgtgtaaacaccttttgcactgtgtcctcatcagagcatcccacrgttctgctggttaacattagagccacaagagccaggcttcttctcgttgctgtcagtgatatgcagacagaagttgaagtttacatcctcctctgtttgttctccatttgcatcctgtttcctctacagacattactttgatcagcaaagcagcctttgcatgtatatggggtgctg

SEQ ID NO: 67847 - DNA, 600 bp, Chicken  19866894338124_2
atgatgtgactgtgctgctttagatattgatgtggggctggtgtgataatcttaagaatctccttttatcaaaagcaacagtgaactgtgcttcagaagacaggtagtgatggcccgagagattgctgtgcagcactgcaagttgtattacagctttatctgctgcattcattacgraccatcatgtaaaactgtggcaagaaactgttctgactttgtaggcttccacctgccttacaaagaagggtttaattctgtgtaaacaccttttgcactgtgtcctcatcagagcatcccacrgttctgctggttaacattagagccacaagagccaggcttcttctcgttgctgtcagtgatatgcagacagaagttgaagtttacatcctcctctgtttgttctccatttgcatcctgtttcctctacagacattactttgatcagcaaagcagcctttgcatgtatatggggtgctgagcactcagctgccagaggtagagatgaatctgtgcgtgtcaataaaacagttctgttgtattgtgctttgcagcatagaagagccctgggtatgtaagttgagtgtcacgagccttcttgag

SEQ ID NO: 67848 - DNA, 599 bp, Chicken  19866894338125_1
  misc_feature (1)..(64): n is any nucleotide
nnnnnnnnnnnnnnnnnnnnnnnnnnnnnnnnnnnnnnnnnnnnnnnnnnnnnnnnnnnnnnnnaggcgttgagctcggcgcagccgatgggacctgacacgcgctctcctcccgtcaccttcccttcctgccacgacccctcaaacccgggctgggaggggttaatggtgggagccggcgtggagtttgtgcaagtttggagcagctcggctgcctcggcgctgccgtggcgctcattagagctgacaggtcccccctcgtgatgcagacgctctccgccgacacagcgggagctccgygctgaaaactttataattggtggctgtggtggcagctccccactcgcacacgcagcactctgcaagcccttcaggatttgtttttttccttctcccttccctcccttctttaagccccggtaattgctttcatccccacgcgttacgccaagagcaggcaatggcagcgcagcccccctggattgggaaagcagggggccgagtttgctgtgcatccctcccccwaccccaggctctgtgtcccccgtggtgacacctggcacaaacagaccagggacggccgggggagaaggtgagaa

SEQ ID NO: 67849 - DNA, 560 bp, Chicken  19866894338125_2
ccgtggcgctcattagagctgacaggtcccccctcgtgatgcagacgctctccgccgacacagcgggagctccgygctgaaaactttataattggtggctgtggtggcagctccccactcgcacacgcagcactctgcaagcccttcaggatttgtttttttccttctcccttccctcccttctttaagccccggtaattgctttcatccccacgcgttacgccaagagcaggcaatggcagcgcagcccccctggattgggaaagcagggggccgagtttgctgtgcatccctcccccwaccccaggctctgtgtcccccgtggtgacacctggcacaaacagaccagggacggccgggggagaaggtgagaacggcactgccaggtgccccaaatgcggcccctctgcactgggggggtcagggaacgggatgggggacagggacagcacacagagccctgcccgcccctccttcaccccttgcagcctccagatgaaaaagcaccactccccactttttatctccttccttccctacgaactgaattacacacagcg

SEQ ID NO: 67850 - DNA, 600 bp, Chicken  19866894338128_1
tacaaagaacagaaatcaccacaggcagctgacaaatttgaactcaaaactaacagaaataagttactgctggtctagaagagaaaagcagccatacataacatcgcttagtagctgacaacactgcttcttcaaagcacctcttgaggtgaaggcctattgtattacatctgcctgtcccaggtacagtgaaagaggaaacaacatgcctgcgatcattgagcagataaagagctgccagaaatcctaactccccactgctggtctaaccacttctccttattagccatctgagctcaygagcccattcagattttgagccacaattccagtcaaagcaggaatacttcaccagtttcaaataactccaaattttttgcggctccacaaccaatactcctggaatgcttacaaattacagccccccttccataccctcagtgctcctggatatgacgattataatccttatttgcctcctaggaaatcatgaatcttcactaattaacattcataaagtacttgatgatcttcaggtgacagcagaagtttaccttcaaatccaaatcagaaatgatcctgggttcaccaagtacctta

SEQ ID NO: 67851 - DNA, 600 bp, Chicken  19866894338132_1
ccctccgtcctgcccacatctgcagggcattacccacagtgtaaccaatactccagatgtggcggccccgctgccatagagaccggacctatcggctctgcaacacgaaccatctgtgcctatgacccaaaatcactccggctttccttaaccgccgcaccaccgcgctcgtgctgtctgccgcagctcagaccgggcacgaccgctctccgttcatcacggagacatcgcagaatcgtttgagtcggaagggaccctgaaaggtcacccggtccaaccccgactccctctcagaacgcrgccccgcacgttagcagatacgggacgacacagaccgcttctccccgccgcgctgcggcgcgtgggcgcgcggaggctccgttctccgtctcaccccggacctccgccctcagagctctgcgcgttggatgccagcgctcctgcaggaagcgggacacgggctgcgccgtgcgcgctgctgcggtcctcggcacgacgctccccgttcgcgaccgtcacgcgccgtacctgagagccgcgctcctcgccttacaccgctgcgacgcgagatacccgcccgcagcagcggctctccccgcg

SEQ ID NO: 67852 - DNA, 530 bp, Chicken  19866894338134_1
aataatagcaaacaccaaatatgaagattcttagcaaatgaattacactcagtagtggccataaatgctccttaaatatctcagcattctgttaagaaaatcaaccaaaatgagatcgaatagatttttttctgaatatttcctgtgtgctcagtatcttcatcattgaacgaacattctacatctgcaattttctaatgccaggaaaatgtaaggtggtcaggtagtcataccatagaatcacagaattgtagagtcataatatagaatgtcctaagttggaaggaaccttaaagatcrtctggatccaaaccctcttctttggatcacccactagatcaggttgcccagggtcccatccaacctgaccttgaacaactccattgatgcggtattcacaacttctctgggcaactttttccagtgcctcaccactctctcagtggaaaatttcctcctaatatctaatctaaatcttttgtttttcagtttaaagccttccccctttgtcctatcactatctgtataaa

SEQ ID NO: 67853 - DNA, 600 bp, Chicken  19866894338136_1
tgtatcccagctaattgaataacctacactgacagaactgtagcctagatgacatagtaataggtctttccattgtaggtttttaaaatttattggcatcttgggctataaatgggattagatgatgagatgcatacgtgatgcaattgctgctcaccagagttaagctgagcgctgtgcagggtcatggggaggaacatctctgggggacacagaggtaacagcacttccagcacatcctgggcatcagatattttgagggctctctcggtggattttaggcaaaatctgctggaggtraggaaagaaggcactaaatctaattttctttgtatcagcagccctttctccttgcaggacatttgaagtacctaaattttcagtgcagaaaaacagcacaactgggcaccttgcttaggacaagccaacaccagtttgtcactgtgcagtaactggagctctggtgcataaaccaatcctcctcgctgctcccagtgggatgctggcatcccattttcccaaacaccccagcgtctttggaaagtctggattccagttttggagcagaagagaagcaaaaagcaccagctgctatagaga

SEQ ID NO: 67854 - DNA, 600 bp, Chicken  19866894338136_2
actaaatctaattttctttgtatcagcagccctttctccttgcaggacatttgaagtacctaaattttcagtgcagaaaaacagcacaactgggcaccttgcttaggacaagccaacaccagtttgtcactgtgcagtaactggagctctggtgcataaaccaatcctcctcgctgctcccagtgggatgctggcatcccattttcccaaacaccccagcgtctttggaaagtctggattccagttttggagcagaagagaagcaaaaagcaccagctgctatagagaatccttctcacmggcttttgacatcagctttgtctccaggagcccacccctagtataaccatcgcctgagtgtaaagactggtatgtgtctccggaaatggagtttagatgtttgtcttatctgaacaagttcagcaactgaacacactgtgcaaaaaagcatgagcaaccctgacaaagcaactgccgcctccttatcacggtctccaaaaggactaaaaagaatcaagcatcagagacttatctctcgagagatgttcagtgcccatggcttactgatcagctctaactccctttttacccggagttttg

SEQ ID NO: 67855 - DNA, 600 bp, Chicken  19866894338141_1
agctatggaaacagcaacacacaacaccatgctctgactcttgtctttgtgtgaagctggttacacccagcccttggttctaggcagtttcaagtgaaggttctcttcctcgtttattttcaaacagaaaggaggagagggaaaggacacatggacaaaaggatgatgattcaaagcacccatcagcctcagccagctctgatcactaggtgcctgctaccccgtatcaacggtatgcagccagccctcaagtccatgtgtaaataatcacaaccactgagctcctcatgggtcctagcragaaaaattgcctttgtgaaactgccacaggatgtgccttattctctggtctgtattcattattcccttgtttaaaaatttcatttatgcagtcaggaacaatgccgtgagatctaggccaacaactgcacattcaaactaactgggaagaaaagccaaagcaaatagtcctgggttctgcagcacacagcacacactggataattacccacccaaaatattcagagaaaaacaagtacagtattgacacacacacacacacacaaaaagtcaagattggtccacaaataatttagcagc

SEQ ID NO: 67856 - DNA, 600 bp, Chicken  19866894338156_1
tgggcctgagcctcctcagccactagcaaattaaatgtgcccagaaacactgccaggcacggaggccaactggcacagaatggtttgtatctctgctcacaaccacgtcttagcttccccaacacagcagctaagtgcaaaatgaaccctgatccatgcttagcaatgatttaagagttagctagttgtcatggaccaaaagcatgccaatgtctgggagtctgagtatcctcatgtatacttacttactcctctgcacagcaactgtcacagacaccacttagtttgctgaagacagaygcagcctaaggcactggtatgacataaacgtcttcttatccttgtcctgtcccaatatcrccacattccagcaaagtgaaggaaggtgtatggctctaaatctggttataacaatagtgtttttcaggttcaagctatcactcttactcaagtgagaaactgaagatctctgctgcctgcaatctaagaataattgcaaggagccagacgttatatgcttaaaatgacaaagttagacaaaaccagcttaacttcataagctgtcctctttttcccatcccatagcactgtcatctgtct

SEQ ID NO: 67857 - DNA, 600 bp, Chicken  19866894338156_2
ggaggccaactggcacagaatggtttgtatctctgctcacaaccacgtcttagcttccccaacacagcagctaagtgcaaaatgaaccctgatccatgcttagcaatgatttaagagttagctagttgtcatggaccaaaagcatgccaatgtctgggagtctgagtatcctcatgtatacttacttactcctctgcacagcaactgtcacagacaccacttagtttgctgaagacagaygcagcctaaggcactggtatgacataaacgtcttcttatccttgtcctgtcccaatatcrccacattccagcaaagtgaaggaaggtgtatggctctaaatctggttataacaatagtgtttttcaggttcaagctatcactcttactcaagtgagaaactgaagatctctgctgcctgcaatctaagaataattgcaaggagccagacgttatatgcttaaaatgacaaagttagacaaaaccagcttaacttcataagctgtcctctttttcccatcccatagcactgtcatctgtctgatactaattcttcaatacttgccactttaaatgttatgtccccagaaaagtgtcccacc

SEQ ID NO: 67858 - DNA, 600 bp, Chicken  19866894338167_1
attctgataccatagttagtaaagtaagttttcctccttagatcgttgccgctgctccgttctttttccctttctgagcccagctcccgttcccctgcccctttccctttccccattcccattgttgcgagccagggcacacacaaacccactgcttcccctgtcacgggcgtagattgatgtagattgatctagataactctgtgacagtcacattggttaagataatcctagagaagtgatctgcgagactgcgaggcatggctattgtgaccttcatagattagattatagtctggrcagtctgctgaactctgcattctgtaccgaatgggttttttgcttttttttttttttttttttccctcccttttagcagctaccagctatgagtctgctgtttattgtaggagcactgtgtaagggattaaaagccaccctgttctttgccaataattggcctatagttaacatcttgctttggaattgtgttcatatatagccaaatcggggccctgatggagacacctgcctggtacttttatgcaatgtggtatgatttgatctaagggggtacaacttacgtggggcttggcttgt

SEQ ID NO: 67859 - DNA, 599 bp, Chicken  19866894338175_1
  misc_feature (1)..(132): n is any nucleotide
nnnnnnnnnnnnnnnnnnnnnnnnnnnnnnnnnnnnnnnnnnnnnnnnnnnnnnnnnnnnnnnnnnnnnnnnnnnnnnnnnnnnnnnnnnnnnnnnnnnnnnnnnnnnnnnnnnnnnnnnnnnnnnnnnnnntacagctttcagatcacgaacgcttcaaccatgacatcttttgggatgatctgagagatgctgaaaatccacagccttgctggaagacatgtaacctcttttcaacaactcagacttggttcagtgagtttgaggtataggagctacacttatacatctcttaatgtrtaacggaacaagcaattggccactgcacacagatgttagagatgtctttgtataagccrccttagtcatatgcatttgtatgccaaaactataactttatgggtatttttcccccccacttgccttgttcttttccaaaccaggcagataaaacaattaatttctcagagttcaagttttttaacaaagcagaagtcagagagaaggtgtatctatcattaccctgaaaataaagaagaaggtaacttcaaacagactccaagaaagcaggtaattttccaccccagcttctgtctgcc

SEQ ID NO: 67860 - DNA, 599 bp, Chicken  19866894338175_2
  misc_feature (1)..(73): n is any nucleotide
nnnnnnnnnnnnnnnnnnnnnnnnnnnnnnnnnnnnnnnnnnnnnnnnnnnnnnnnnnnnnnnnnnnnnnnnntacagctttcagatcacgaacgcttcaaccatgacatcttttgggatgatctgagagatgctgaaaatccacagccttgctggaagacatgtaacctcttttcaacaactcagacttggttcagtgagtttgaggtataggagctacacttatacatctcttaatgtrtaacggaacaagcaattggccactgcacacagatgttagagatgtctttgtataagccrccttagtcatatgcatttgtatgccaaaactataactttatgggtatttttcccccccacttgccttgttcttttccaaaccaggcagataaaacaattaatttctcagagttcaagttttttaacaaagcagaagtcagagagaaggtgtatctatcattaccctgaaaataaagaagaaggtaacttcaaacagactccaagaaagcaggtaattttccaccccagcttctgtctgcctcagacttatgcagatatcaaatcagggaccaaaaaaagcagataactactgagctggg

SEQ ID NO: 67861 - DNA, 600 bp, Chicken  19866894338176_1
tagaaaattaatgcccgtgtacactgtactaaatgttaacatatatatcaattgactgcataatcatagtgaaggatgatccaaagagttttgctgaaagtatatgttcttaaaaaaatacctgaagtacggtttttagtggtattgagtagctggataaagattatcctgtataaaatgtcttgatagcctcagatatgcattctacaatatttatttttgtaattacttgactgatatgtcataaggcttggaatcagcttcagaatctaacttactgtgttcagttttgggcacctyagtacagaaaggacatggaggtgctggagcaggtccaaagaagggcaacaaggctggtgaagggcttggagaatgtgccctataaggagcaactgaaggaactggggccgttttagtctggggaggaggaggctgaggggagaccttatttctctcttccaatatctgaaagatgcctacagaaagagcggggttggtctcttctcactggtgacaggacaaggggagatggcctcaagttgcgccagggtaaatttaggttggatattaggaaacacttctttacggaaagggttgtga

SEQ ID NO: 67862 - DNA, 600 bp, Chicken  19866894338179_1
accagaaactaagagtattctcatgctagatgcatgttactgtgcttctatggaagcaatgcaatatataaattttagacttcacgtttaggttacatgttgtaattattttgtatttgctacacttagactgttccgactttttcttcttagttttctttttacttctgctatgtcacatacatagcctcacgataaactgcttagactgaggttttactataagattctttacctccccaaaagacttagctctgagacaattctcatctttcattaccaaaagccagaggattcatytaacttagacaaagattttgtatttacgaataatgcattgattttttctctctgctaacagtttgacatgctctcttttgtcttattaatactatcattattatctatggtctaacttttttctttttataatcatgttaacatccctatggtataaggaaacatgctacgwccatacattatttttacaataataaaataatttaacagttcattcactttctttcttatttgcaaggttttctatcctacctactcaagcttcatttttttctggagaccaaagtatgctttagtacg

SEQ ID NO: 67863 - DNA, 600 bp, Chicken  19866894338179_2
atgtcacatacatagcctcacgataaactgcttagactgaggttttactataagattctttacctccccaaaagacttagctctgagacaattctcatctttcattaccaaaagccagaggattcatytaacttagacaaagattttgtatttacgaataatgcattgattttttctctctgctaacagtttgacatgctctcttttgtcttattaatactatcattattatctatggtctaacttttttctttttataatcatgttaacatccctatggtataaggaaacatgctacgwccatacattatttttacaataataaaataatttaacagttcattcactttctttcttatttgcaaggttttctatcctacctactcaagcttcatttttttctggagaccaaagtatgctttagtacgtgtctgaatcacagaagcaatctgtctactcaaattttgtatttaacaagtaaaatcactaagagttttatactaatcaacagactgaatgatttctggtagcactgcattctcttactgagttcataccaaaacaggaaagttatagctttataacttcacatttcaggat

SEQ ID NO: 67864 - DNA, 599 bp, Chicken  19866894338181_1
  misc_feature (1)..(214): n is any nucleotide
nnnnnnnnnnnnnnnnnnnnnnnnnnnnnnnnnnnnnnnnnnnnnnnnnnnnnnnnnnnnnnnnnnnnnnnnnnnnnnnnnnnnnnnnnnnnnnnnnnnnnnnnnnnnnnnnnnnnnnnnnnnnnnnnnnnnnnnnnnnnnnnnnnnnnnnnnnnnnnnnnnnnnnnnnnnnnnnnnnnnnnnnnnnnnnnnnnnnnnnnnnnnnnnnnnnnnngagacggattgccagagagatgtgaacctctattgcctgttacacggactatcttacatgggaggctttctgtctggctgctgctygaggtgtccttcataggggtggggaagaaagaacctgctgagcagattggaaaaggtgatgattagccatcattggcaaaaggcagtgtttgagaggagagggaagacagttcagagaacagcacttagactgtacaatcaaactctgaagataaaggatgtggtggtatgtgggtttctgctactcttagagcacagagcacaagttggaggtctcttgtctgtaggtggctgtgggttctcctgaggtcctgctgtgagggttcaaaatctggaggttttctcagggagagattttt

SEQ ID NO: 67865 - DNA, 600 bp, Chicken  19866894338181_2
tgtccttcataggggtggggaagaaagaacctgctgagcagattggaaaaggtgatgattagccatcattggcaaaaggcagtgtttgagaggagagggaagacagttcagagaacagcacttagactgtacaatcaaactctgaagataaaggatgtggtggtatgtgggtttctgctactcttagagcacagagcacaagttggaggtctcttgtctgtaggtggctgtgggttctcctgaggtcctgctgtgagggttcaaaatctggaggttttctcagggagagatttttttccrgggaaaatagtgtatcaacatgcttgccctctaagaacagggagcctttaacaaagtaattgcattactttttctttgatagaagaaagacactgtctctgatatagacaccttggcttcccagaatactcagcttgggtgaaaaattgaattcattgtattattatttctcctttatttgccagccaccattcatttcagacaatcggtttagggtgctaagcatagctatgttgatgtaaagtgttgggacaatatgagatagatggatgcaagcttttgcctattctgttggtgtct

SEQ ID NO: 67866 - DNA, 600 bp, Chicken  19866894338183_1
ccttgggggcttggctgccacttctgttcagcagagctggactttatcttttcgtctctgagaaacagcttcccgtaaacaggagaattatcccaagtatttcctttcatttctagtttggcttctaattagctcaatccacttggcaagtgggcagtctttttccaaagtaaaaccatgtattataggatgtcaattgggaatatggtgcttgaattcccagccctccccttgatttcagtcgacttccttgggtggaagagtcgttacggtttgaagtctgaactgtaaggttcttarggttcttatggctttgaatgttaatacgctttatcatgataaattagaagtgtattggagtttcaagtgatctcccatgaagtatggattcttacagctgccagaaaaccagctcagctcttcatccgctctgttctctaccagtgaatggcaaattaacttgaatgtgcttgatgtattgaagtcagggaagtgttttctataggtttttagctgggattcttcttccagagtttccatatgaatgggttcagttccataatttaatgttgtgactgctatatcacagtgctgtggggt

SEQ ID NO: 67867 - DNA, 457 bp, Chicken  19866894338189_1
ttttattctatgaaacaacaagaaaataagacatttgaggagaggctgaagtagctgaagttgtttagtctggagaagaggaactgaggggaaaacattttgctgtctacagctggctcacgggaggttgcattgaggaggatttgcagtctctgcttcatgttgcatcctctttctctcataattcagtgattcagttgtgaaaatagtctgataagttcccactaggtagcttaaaacagcaataagattccatcccagccttctcaactagtaggaaaaaaccaacccagctccttyactcgtcattttcctaaaataattaatattccctcagagctgtcagcagtgaaatctcacataagacctcttgtttccatcaatcaaaagaaactaagagatagatagcaagaacgttctcccattttcctcacccatatttcttatcccttattat

SEQ ID NO: 67868 - DNA, 600 bp, Chicken  19866894338194_1
tcttgccacagcatcaggctggaatacatggagctgaataatgccattcagtgttacaaagcaattcattaatgggcaaacgcgggggggtggtggctgctgctggccaggggaggtagagcgaggagcgggttatgggctgcgtctgcccattccatttctgtgggccgtggagcaggagttgaatcttgggaaataacgaagcggaattcattctgatttaagtacctttttaatgcttaaccgcacgaattatcttcctgttaattgggggatttgaaatatcagtgagcatccacrcagccgtacctcgcrctgccctcgggaggtgtggggccatggtgctgtgggctcaggaggcagcgagggatgcactgcccatgttgggaggtgtggacgctgcgatgggcagtgatgccctcggcatctttccagctccaaggctggggctgccttggaaaagtcatcagttcctggaggtgggtgagcaggaacctcagtgccttctcccggcacagtgggcagcagttgaagccatggctcacatggaaccgctgccagaaagctcatctgcagagtgaaggggcttgtttccaagag

SEQ ID NO: 67869 - DNA, 600 bp, Chicken  19866894338194_2
aggctggaatacatggagctgaataatgccattcagtgttacaaagcaattcattaatgggcaaacgcgggggggtggtggctgctgctggccaggggaggtagagcgaggagcgggttatgggctgcgtctgcccattccatttctgtgggccgtggagcaggagttgaatcttgggaaataacgaagcggaattcattctgatttaagtacctttttaatgcttaaccgcacgaattatcttcctgttaattgggggatttgaaatatcagtgagcatccacrcagccgtacctcgcrctgccctcgggaggtgtggggccatggtgctgtgggctcaggaggcagcgagggatgcactgcccatgttgggaggtgtggacgctgcgatgggcagtgatgccctcggcatctttccagctccaaggctggggctgccttggaaaagtcatcagttcctggaggtgggtgagcaggaacctcagtgccttctcccggcacagtgggcagcagttgaagccatggctcacatggaaccgctgccagaaagctcatctgcagagtgaaggggcttgtttccaagagggaaaccagaatctg

SEQ ID NO: 67870 - DNA, 599 bp, Chicken  19866894338196_1
  misc_feature (1)..(54): n is any nucleotide
nnnnnnnnnnnnnnnnnnnnnnnnnnnnnnnnnnnnnnnnnnnnnnnnnnnnnngagctgttcttttagtagtcttcttgtcccctgaaaggaagctgttttaggtggtgtggttgaaatacccacctgcacaccgtgtcagtgaactttacagcacgttgctgtttctgtttcttccagtgcctggtagatggcattggaaatctgccagtaaggtatttgcaattcacatgctttcttatttcttgtgtctggactctttctccccgtgcagttggaaggattttgtatagaaacctrgaaattgttggattaggccagaaaagagattcagcaggctttgctgacatgaaaccctgccctggaaatgttgttttgatcatgaattgttgcagggtatgattctaagataacatatctccaaagatgctgtcctgacagctgtttctggccctttagggcatggaatgggaccttttcccagctctgactttctctagtctaactcagcatgttttcctttgcacgaagtgagctgcctacagaaaatatcaggggggtgcggacttaaatcaagaaccaggcattttcctcgtctt

SEQ ID NO: 67871 - DNA, 600 bp, Chicken  19866894338203_1
gcatcttttaatgctcatgatttacatcttgtctcttttaaaagcacagaagatgtaaattcactttctgctagcctactcatttaacgtagattaaaattcaactgtaattcctcacagctgtgtagattcccaagaaaaccttgagtatgagaaaataaagtccaattcctagctgctgtaaaccgactttgactcatgtgagctacgcaactactgacatatgagttaatatgagcaaaccaaactttattcgggaaagagaaccaggctattataattgcatttgattctcattcrctcaccagattcactctggaaaatgaaataaaccatgccaaaatacattaattctcttcaacgtatcaaaagtactccacagaagcagtgtaaagataaatagctattgttcttattttatttctagtccccttacgctccttactgttatgaggatcaaattcaaacacactgagtagctgttttgaatgtttgcaaccctagtgaaacagaatatgagcacgctgcagctacatcccaacttgcctgcctgccatccacccgtcatttggatgggtaatttctcccctcgggaccata

SEQ ID NO: 67872 - DNA, 599 bp, Chicken  19866894338207_1
  misc_feature (1)..(6): n is any nucleotide
nnnnnntgacttgaaattgtcttgttgtaagttgctatcatgtggcaatctctggctctctgaatataacaagaggcgtgttttaaatgttttttttaatctactaccaagtcacaatgtttaaacagaaaagtaccatgtgtcctacacatctgaaatgcaatcaagataaagctgttttttcaacctagagcaatacacaaaaaaagatcttaatccttttcaatgcatgtttttggtatttctggaaggaaaacacattgatcttcaaggttgtgtgatcaaactgtttgcaacagraacaaggctaacaatggatataaccaatgcaccattctctgctaccacagtattcaaaattaaacactgcggtaggccatgggtttcatagttatcacaattgagacatgaaacttaagcaattatgttttgcttgatgataaaagttgcyttcacayccaacagtctgtatatctctasttacaaaatattctatctatctcacaagggctgcaagattcaggaaaagcaacaagattttctatagaagcgagattctgaagtgccacatcatacagtttggcacccaaagagcctaa

SEQ ID NO: 67873 - DNA, 600 bp, Chicken  19866894338207_2
tctgaaatgcaatcaagataaagctgttttttcaacctagagcaatacacaaaaaaagatcttaatccttttcaatgcatgtttttggtatttctggaaggaaaacacattgatcttcaaggttgtgtgatcaaactgtttgcaacagraacaaggctaacaatggatataaccaatgcaccattctctgctaccacagtattcaaaattaaacactgcggtaggccatgggtttcatagttatcacaattgagacatgaaacttaagcaattatgttttgcttgatgataaaagttgcyttcacayccaacagtctgtatatctctasttacaaaatattctatctatctcacaagggctgcaagattcaggaaaagcaacaagattttctatagaagcgagattctgaagtgccacatcatacagtttggcacccaaagagcctaatgataatgagattaagctgtcccttttgtaacacagtgattttcacaaaacagagccaagaccctatactttcagctcctgatcactcacagtgaacatctcctgaactccactcaaaatactcaatgcaaaagtgaatttaaaatgtgcaa

SEQ ID NO: 67874 - DNA, 600 bp, Chicken  19866894338207_3
tgcaatcaagataaagctgttttttcaacctagagcaatacacaaaaaaagatcttaatccttttcaatgcatgtttttggtatttctggaaggaaaacacattgatcttcaaggttgtgtgatcaaactgtttgcaacagraacaaggctaacaatggatataaccaatgcaccattctctgctaccacagtattcaaaattaaacactgcggtaggccatgggtttcatagttatcacaattgagacatgaaacttaagcaattatgttttgcttgatgataaaagttgcyttcacayccaacagtctgtatatctctasttacaaaatattctatctatctcacaagggctgcaagattcaggaaaagcaacaagattttctatagaagcgagattctgaagtgccacatcatacagtttggcacccaaagagcctaatgataatgagattaagctgtcccttttgtaacacagtgattttcacaaaacagagccaagaccctatactttcagctcctgatcactcacagtgaacatctcctgaactccactcaaaatactcaatgcaaaagtgaatttaaaatgtgcaaagtgaag

SEQ ID NO: 67875 - DNA, 600 bp, Chicken  19866894338207_4
tttcaacctagagcaatacacaaaaaaagatcttaatccttttcaatgcatgtttttggtatttctggaaggaaaacacattgatcttcaaggttgtgtgatcaaactgtttgcaacagraacaaggctaacaatggatataaccaatgcaccattctctgctaccacagtattcaaaattaaacactgcggtaggccatgggtttcatagttatcacaattgagacatgaaacttaagcaattatgttttgcttgatgataaaagttgcyttcacayccaacagtctgtatatctctasttacaaaatattctatctatctcacaagggctgcaagattcaggaaaagcaacaagattttctatagaagcgagattctgaagtgccacatcatacagtttggcacccaaagagcctaatgataatgagattaagctgtcccttttgtaacacagtgattttcacaaaacagagccaagaccctatactttcagctcctgatcactcacagtgaacatctcctgaactccactcaaaatactcaatgcaaaagtgaatttaaaatgtgcaaagtgaaggcagagctcaattcttcttcag

SEQ ID NO: 67876 - DNA, 600 bp, Chicken  19866894338209_1
aggggaggtctgagcacgccgtgggtgtcccccaactcacactgtgttctttacgatgtcagagtggatgcgggccacaccattgacagcgtgagagccgatcacacagaggtgtgccatgttgatacgcttgcagtctccttcctcaatcaccgacatccttcggagacggtcaacgtcccctgggtagagagctgccacgcgctgcaggcaggcagagacaggggcatcagcgacccagctgtagaggctggaacgttcccatcctaaaagacagctggagcaagacccacagcccayggccagcccagtctcttacatccagatgcatctggttgagggcatagatgatctctaggtgacgtggcagcagcttttcaaacatggagactggccagcgctccagggcttcaggcagcacggtgtggttggtgtacgcacaggtctgttttgtgatctcccaggcctgcgtacagacagcaattaacatgcatgtgccaggccaggaggggaagaaaaccgcatgtaaggacaatacaacagctctcagccctgataaggatgatatgtgccttgcagctctccttaccttgtcccagt

SEQ ID NO: 67877 - DNA, 600 bp, Chicken  19866894338213_1
atgaccagcttagggctcaatgaaaggcaggagctgcagaaagcactttctgatgcacagcaccatgtagattgtctcagtgatctggttggccagaggagaaagcacctgaataaagcactgtctgaaaaaacacagtttctcttggcaatctttcaggctaccaaccaaattcatcaacatgagaagaaagtaacatttccagagcatatctgtttgttgccagaagatgtgaacaaacagatcaggacttgtaagaatgcccaagctagcctgaaagcctaccaaaatgaagtcacygggctgtggactcaaggaagggatttaatgaaagaagcaacagaacaagagaagagtgaagtgttaggtaaactgcaagaactacagaatatatatgacactgttttacaaaagtgtacccagagattgttagaactggagaaaaatatagtttccaggaaatatttcaaagaagatttggataaggcttgccattggctaaagcaagctgatattgtcacattcccagaagttaatgtaatgaatagtaactctgaactgtacacccagttgtccaagtatcaacagattcttgagcag

SEQ ID NO: 67878 - DNA, 600 bp, Chicken  19866894338216_1
cactccgcagcgatgtgacgccctggccccgcactggggggctctgcggagcccgcagggacggacttggcaggagcacggacgaggaggtcttggccagctgtgttcattgtagaccccgtgacccatttcatgcaaggaaagcccatctctctaaaggcttcggccgaggttcaggggggtagctccaaccatcgcactcttccttcggctccgttgctgcttggcagcgctgttgggctgcatccctgcccgccctcgtggttcggtggccagggtttgtgcactttcagcctccckgaggggtctcgtaacgggctcggcagctttcccrgaggtctgtcccctcttttcctctcctggctcgtcctgaaagcctcgtcctcaattcctgcccttctcttccagggcagtttttccttcctccagctgtcggcactcgggttccgcccctgcatccacgctcgtgctgcctgcttgagcagaccgcaggcgcttggagctgtktaatatcttcaggaagctgggctctggccatctctccccatttcttgtggcttttcacctctgtccgtgtccccgctcgctctgcggccagtg

SEQ ID NO: 67879 - DNA, 600 bp, Chicken  19866894338216_2
tggggggctctgcggagcccgcagggacggacttggcaggagcacggacgaggaggtcttggccagctgtgttcattgtagaccccgtgacccatttcatgcaaggaaagcccatctctctaaaggcttcggccgaggttcaggggggtagctccaaccatcgcactcttccttcggctccgttgctgcttggcagcgctgttgggctgcatccctgcccgccctcgtggttcggtggccagggtttgtgcactttcagcctccckgaggggtctcgtaacgggctcggcagctttcccrgaggtctgtcccctcttttcctctcctggctcgtcctgaaagcctcgtcctcaattcctgcccttctcttccagggcagtttttccttcctccagctgtcggcactcgggttccgcccctgcatccacgctcgtgctgcctgcttgagcagaccgcaggcgcttggagctgtktaatatcttcaggaagctgggctctggccatctctccccatttcttgtggcttttcacctctgtccgtgtccccgctcgctctgcggccagtgaaagcaagcatccccaggacgctgtgcaggtggc

SEQ ID NO: 67880 - DNA, 490 bp, Chicken  19866894338216_3
tcggctccgttgctgcttggcagcgctgttgggctgcatccctgcccgccctcgtggttcggtggccagggtttgtgcactttcagcctccckgaggggtctcgtaacgggctcggcagctttcccrgaggtctgtcccctcttttcctctcctggctcgtcctgaaagcctcgtcctcaattcctgcccttctcttccagggcagtttttccttcctccagctgtcggcactcgggttccgcccctgcatccacgctcgtgctgcctgcttgagcagaccgcaggcgcttggagctgtktaatatcttcaggaagctgggctctggccatctctccccatttcttgtggcttttcacctctgtccgtgtccccgctcgctctgcggccagtgaaagcaagcatccccaggacgctgtgcaggtggccgcaggtgaccctcttggagaggcacgtgtaagcggaggctacgtttggctggctggatctgt

SEQ ID NO: 67881 - DNA, 593 bp, Chicken  19866894338227_1
aaatgttcagctacatcatttcattctaaaaatcatattctatcatccttcaggtttcccactgagtaagtaggattttattagtagctaagccctcagagaacgatgattagtctttgtgtgctaacctccttcaaaatgtgggtgatggatagctggagaaactgtgagaaggaggcctgttttttgctggaattattctgaaaacaaagctaaaaagacattaggagaatattaaagaacagaagaaagtggaaagtgaatggcagaaccaactgagtacaaatccaaatcagaccmatgaatttataaaactaaagaaagaagttgaagaaaattgtttcatgtgcatgctttagcactaatttcactggtaacaaagtagagaagtatttcttatttatagacagtaatttggttgatattaccagtattagtactaatgaatcctgaggaggaggtttttattatgggagtaaaaattgtgatcatggcataccaagttttttttttaaaaaaaaggaagaggcagtgacaaactgcatatcctgttgctaaatgatggtaccttttagataaatagcattcaattt

SEQ ID NO: 67882 - DNA, 600 bp, Chicken  19866894338242_1
acttgaccaaatttactcttttcatttgtgctgaactttgaatcttgtcacaagttcattttgaaaacttccactctttgattcttctgcctactgctgttgtacagttgtatgatcaactgtactcttaatttacctacagtgatctttgatatgaggtattaaatatttttttaaaagggagagattgcagaatccagctgcagcaactttatcaatgaaaagcatattgtcatttcctccaagccatttatatagagatattctgcctgctggcattgcccagtttcatcaagaagyctacrtgtcttttcaagacatcttctctaagactgtaaaataacaatctgtgttcacatcaaagtcactaatacagagatggaatgtagggaagtctgtttcaaaatgcttagaacaaattgtatatatctgcatttttaaaatagtgttttgcattcagtcctgacaatcatagtaaaaactcgtaagagttcagagacccctaggctagcagagatcaaaactgcttatgcagtgtattgcttgcaaagttcccaactctgatattgttctttggctatactgaaaaattgtattcct

SEQ ID NO: 67883 - DNA, 600 bp, Chicken  19866894338242_2
accaaatttactcttttcatttgtgctgaactttgaatcttgtcacaagttcattttgaaaacttccactctttgattcttctgcctactgctgttgtacagttgtatgatcaactgtactcttaatttacctacagtgatctttgatatgaggtattaaatatttttttaaaagggagagattgcagaatccagctgcagcaactttatcaatgaaaagcatattgtcatttcctccaagccatttatatagagatattctgcctgctggcattgcccagtttcatcaagaagyctacrtgtcttttcaagacatcttctctaagactgtaaaataacaatctgtgttcacatcaaagtcactaatacagagatggaatgtagggaagtctgtttcaaaatgcttagaacaaattgtatatatctgcatttttaaaatagtgttttgcattcagtcctgacaatcatagtaaaaactcgtaagagttcagagacccctaggctagcagagatcaaaactgcttatgcagtgtattgcttgcaaagttcccaactctgatattgttctttggctatactgaaaaattgtattccttgcag

SEQ ID NO: 67884 - DNA, 600 bp, Chicken  19866894338249_1
aaaatgctaaagtaagttcaactttgaattataatttcaatgactgtctagtgaaatggattaatgctctggcactgcatctttgaggctttggctcgaatcttgtaggataaaaaaatctgtctgctttgacagttgaaaaggtcagaagtgaaataatgtcaggtggtcttagcccagttcagtgtctcgattaagaagtgaatgtaaaagctgttgatgcaggatgtcatatcggatcttttacaaaaatgtaaatcatttttatttacgttttatcagcaaaattagatgcagacygctgcattcttgagaggtggcgcttaggtcagacttcaggaactctggatttcaaagagaagaaagcaggtttactatatattgtatcttaagctaaaaagcttgcatccatcatgaaactgattctctgatatttgaccacgtcaagcatagttctcactcaaatattcttcaaagtttaatttgggaatttttaatagccaagagtgtatggaaagaacatcgttttgtcattgttcaggcaaggaagggggtcttgtacatttattttgtgaaactgctgtgattcagttcctaaat

SEQ ID NO: 67885 - DNA, 600 bp, Chicken  19866894338250_1
tgctgtctgccccaggcagaggtgtgtggggttgctcaggtgggtgagttgcaggctggtgaggtgatgtctcgcggtggtgctccgaaagtggaaggggctttcagatggggcctttctccactgtctctgcttgcttggacccaacgttcatctaggatagaatcatagaatggcctgggttgaaaaggaccacagtgatcatccagttccaactccctgctatgtgcagggtcatcaaccagcagcccaggctgcccagagccacatccagcctggccttgaatgcctgcagggatyggggcatccacagcctcctggggcaacctgttccatctacccagcattcattgtcccgcagaggccgtccacatgtgggagcagagagaatctaagaccatggcacacattgcatgggacttctggttacagcctctgagctctcacccctcagcacatgagaggtctgagaagctggacttgctgtttgggtcttggcccggttgtcatctccatcagcgcagagcaatgggcaagttggttcttggaggtaaacccgatgctgaaattcagttcaggagccgtagagatgtggcactg

SEQ ID NO: 67886 - DNA, 600 bp, Chicken  19866894338264_1
aacatccaaaactaattactgaaacataactacttcctttgaagctttagtggatagtagcaatttccatttatctaattttatgtgtcaattggaaacaattgtcaaactcagcatttcatgggaattaagaatggtattttcaagcacaaaacatcagaagagaagcgaaggtctctatcctcaccactgtgctagtccaactgcttcaccatcatgcaggtcctcaggattagatggagaagactcctcatctctgctcacctccccctctgccctgtgcaaaactgctacaccccraagttcttaatttccaatagctctattctttctgaggagatcaaaaatgtgtggccaagaccagggtttgtccccatcactaaaactcaytgagaagtttctgtaaataatgctcaaggtttccatgtcaagaaaggctttgccagaatgctgctcttgctccagcaaagtgcacagaattcagcccaattggctttgcaaggtacaatttcagggaagcaaagatttgtactaaatactgctccctacacatcaagaccagagatactttaaagaaaaggagggaaaaaaaaaggtaaa

SEQ ID NO: 67887 - DNA, 600 bp, Chicken  19866894338264_2
attggaaacaattgtcaaactcagcatttcatgggaattaagaatggtattttcaagcacaaaacatcagaagagaagcgaaggtctctatcctcaccactgtgctagtccaactgcttcaccatcatgcaggtcctcaggattagatggagaagactcctcatctctgctcacctccccctctgccctgtgcaaaactgctacaccccraagttcttaatttccaatagctctattctttctgaggagatcaaaaatgtgtggccaagaccagggtttgtccccatcactaaaactcaytgagaagtttctgtaaataatgctcaaggtttccatgtcaagaaaggctttgccagaatgctgctcttgctccagcaaagtgcacagaattcagcccaattggctttgcaaggtacaatttcagggaagcaaagatttgtactaaatactgctccctacacatcaagaccagagatactttaaagaaaaggagggaaaaaaaaaggtaaaggcaaagtttaaggaagawggagggacgacaagtaattgtgaggtctagagaaactaattctcagatgtatgaggaagagcttggaagag

SEQ ID NO: 67888 - DNA, 600 bp, Chicken  19866894338264_3
gctctattctttctgaggagatcaaaaatgtgtggccaagaccagggtttgtccccatcactaaaactcaytgagaagtttctgtaaataatgctcaaggtttccatgtcaagaaaggctttgccagaatgctgctcttgctccagcaaagtgcacagaattcagcccaattggctttgcaaggtacaatttcagggaagcaaagatttgtactaaatactgctccctacacatcaagaccagagatactttaaagaaaaggagggaaaaaaaaaggtaaaggcaaagtttaaggaagawggagggacgacaagtaattgtgaggtctagagaaactaattctcagatgtatgaggaagagcttggaagagcaactacagaaatacatgcagaggaaaagtgtgaaagatttgatacacacatacaaaagaaaatgaaaggaaaaaaagttcctatgagttcatcaagcacaaatacacagttcagtcccttgcctttgccctgtaccacactctccttcccaaatgcaccagcaccatcccattgcatccctgaacaaaagggaagagaagtgaagagaaagagaggagaaaaacacag

SEQ ID NO: 67889 - DNA, 600 bp, Chicken  19866894338266_1
ccagcagaaacaccaaatgaaaagagtactgagaaacttgctacaagacctgtgttttcttcttcttagaggaagttcaccaagactagaaaataaatacaccctaagaaacttccacactgattgtggggaggaaatctgctctcttttagtaaaactgccttgaatacattaaggtttgagccccaaaacctttgaagataccactcagtgtcaaaagaatggagtggtctgctcccaaatggtaggaccatgaataaagaaggcaagatacacatacaaagtatgaacaatgaaagytgatctctgaaaggctattccttatttctagtcacctaaagcaacaccaaaattctgtactagctgacagttgtgggaacttttttactgtacttttgagaactggctgttcgtctgggagatacaattattccagatttattgcttccagactagtgacaatccacagttttcacwccaaaatgttttctgtattattagaatgaacaaattcacattactggactgtggccatggtatcacaatataaataaacactaactccattaagcttaagtctgcttttagaagacatactga

SEQ ID NO: 67890 - DNA, 600 bp, Chicken  19866894338266_2
tttgagccccaaaacctttgaagataccactcagtgtcaaaagaatggagtggtctgctcccaaatggtaggaccatgaataaagaaggcaagatacacatacaaagtatgaacaatgaaagytgatctctgaaaggctattccttatttctagtcacctaaagcaacaccaaaattctgtactagctgacagttgtgggaacttttttactgtacttttgagaactggctgttcgtctgggagatacaattattccagatttattgcttccagactagtgacaatccacagttttcacwccaaaatgttttctgtattattagaatgaacaaattcacattactggactgtggccatggtatcacaatataaataaacactaactccattaagcttaagtctgcttttagaagacatactgactaaattagatatatggtaattaattattatcagaacttgagatccttatgaatcattttgtttgtttgttttaaaaaaggtcaaaatgcactattttacttaaagcatctcatacccagaggtgcctgccatgcattttcccatctgcctagactattcttatgtgaaagctatct

SEQ ID NO: 67891 - DNA, 460 bp, Chicken  19866894338267_1
tatgcatgggataagtgaacggctgtcattttgagtcagctacttttcagtcagactgagtgttatagcccaagtattaagacaataagggaagcagcagataaaataggccccaagattttgtttattcagatgacaaacaaatacgttccttagttgtttcccaaggaaaaaaaagctagtgtcttgttaccattttgtaatataagagcagtgcaatctactgtgtaattttcatcattttgattctctttatttcttaattagctttatatcccaacaacttctacataagctttwagagtgtggttgtacatgtcaagtcacattagttatgcaacagatcccaccttcggggcccgcamagtatgactgaccatgcaagatttcggctgtgaacagtaattccagatgacagtattcccttgatccctatgtacatcagggggaattgcaagag

SEQ ID NO: 67892 - DNA, 395 bp, Chicken  19866894338267_2
tagcccaagtattaagacaataagggaagcagcagataaaataggccccaagattttgtttattcagatgacaaacaaatacgttccttagttgtttcccaaggaaaaaaaagctagtgtcttgttaccattttgtaatataagagcagtgcaatctactgtgtaattttcatcattttgattctctttatttcttaattagctttatatcccaacaacttctacataagctttwagagtgtggttgtacatgtcaagtcacattagttatgcaacagatcccaccttcggggcccgcamagtatgactgaccatgcaagatttcggctgtgaacagtaattccagatgacagtattcccttgatccctatgtacatcagggggaattgcaagag

SEQ ID NO: 67893 - DNA, 599 bp, Chicken  19866894338272_1
  misc_feature (1)..(61): n is any nucleotide
nnnnnnnnnnnnnnnnnnnnnnnnnnnnnnnnnnnnnnnnnnnnnnnnnnnnnnnnnnnnnttactctttctttttctttctgatatattatttgtaaatgtaagtctcaaaacagctcatgcttgagccgcagctcctcagactttgtgtgggcattgcttggttaaaatcaatcccctagcttgtgggatttattttaactatgggagcaaaatgttctgggtggttttaaatgaagtgtgccaaaggtctgagcacagtggagaggctcttggcttgtggtgggcttggaaataacmtagggttagcagtgtctgaacttgtaaatgttgattgtttaagcactttcttaaattgctgtgtgcatgtttgagagtagatagtgaatagcttgctagcatcagcttaatatttgtttcacaatttctcggaagggttwttaattggaagaattttgaaygaactgctaacgaccttttgtcatactcttgaaataagttattgcttgtttgaagtcatagtcgtcagtgacaagtggattgtttakcttgaaggctcttgagagatgtccctgtggccttccagggcttgaagggag

SEQ ID NO: 67894 - DNA, 600 bp, Chicken  19866894338272_2
agactttgtgtgggcattgcttggttaaaatcaatcccctagcttgtgggatttattttaactatgggagcaaaatgttctgggtggttttaaatgaagtgtgccaaaggtctgagcacagtggagaggctcttggcttgtggtgggcttggaaataacmtagggttagcagtgtctgaacttgtaaatgttgattgtttaagcactttcttaaattgctgtgtgcatgtttgagagtagatagtgaatagcttgctagcatcagcttaatatttgtttcacaatttctcggaagggttwttaattggaagaattttgaaygaactgctaacgaccttttgtcatactcttgaaataagttattgcttgtttgaagtcatagtcgtcagtgacaagtggattgtttakcttgaaggctcttgagagatgtccctgtggccttccagggcttgaagggagcatgtacacagaaggagggctgacttttcacatggcctaatagtggtaggacaaggaaggatggctttaaacatagagaggagaattagggtagatatcaggtagatattttatttttctactcagaggatgctgaggcac

SEQ ID NO: 67895 - DNA, 600 bp, Chicken  19866894338272_3
tggttaaaatcaatcccctagcttgtgggatttattttaactatgggagcaaaatgttctgggtggttttaaatgaagtgtgccaaaggtctgagcacagtggagaggctcttggcttgtggtgggcttggaaataacmtagggttagcagtgtctgaacttgtaaatgttgattgtttaagcactttcttaaattgctgtgtgcatgtttgagagtagatagtgaatagcttgctagcatcagcttaatatttgtttcacaatttctcggaagggttwttaattggaagaattttgaaygaactgctaacgaccttttgtcatactcttgaaataagttattgcttgtttgaagtcatagtcgtcagtgacaagtggattgtttakcttgaaggctcttgagagatgtccctgtggccttccagggcttgaagggagcatgtacacagaaggagggctgacttttcacatggcctaatagtggtaggacaaggaaggatggctttaaacatagagaggagaattagggtagatatcaggtagatattttatttttctactcagaggatgctgaggcactgttacaggctgcccagagaa

SEQ ID NO: 67896 - DNA, 600 bp, Chicken  19866894338272_4
ggtctgagcacagtggagaggctcttggcttgtggtgggcttggaaataacmtagggttagcagtgtctgaacttgtaaatgttgattgtttaagcactttcttaaattgctgtgtgcatgtttgagagtagatagtgaatagcttgctagcatcagcttaatatttgtttcacaatttctcggaagggttwttaattggaagaattttgaaygaactgctaacgaccttttgtcatactcttgaaataagttattgcttgtttgaagtcatagtcgtcagtgacaagtggattgtttakcttgaaggctcttgagagatgtccctgtggccttccagggcttgaagggagcatgtacacagaaggagggctgacttttcacatggcctaatagtggtaggacaaggaaggatggctttaaacatagagaggagaattagggtagatatcaggtagatattttatttttctactcagaggatgctgaggcactgttacaggctgcccagagaagccccatccctggaggtgctcaaggccaggttggatgggactgggacccctgggtggcctgatctgatgggagcagctagcctgtgg

SEQ ID NO: 67897 - DNA, 599 bp, Chicken  19866894338276_1
  misc_feature (1)..(239): n is any nucleotide
nnnnnnnnnnnnnnnnnnnnnnnnnnnnnnnnnnnnnnnnnnnnnnnnnnnnnnnnnnnnnnnnnnnnnnnnnnnnnnnnnnnnnnnnnnnnnnnnnnnnnnnnnnnnnnnnnnnnnnnnnnnnnnnnnnnnnnnnnnnnnnnnnnnnnnnnnnnnnnnnnnnnnnnnnnnnnnnnnnnnnnnnnnnnnnnnnnnnnnnnnnnnnnnnnnnnnnnnnnnnnnnnnnnnnnnnnnnnnnnctgaatgaactgtgagaaactactggatgagagtgctatctcccagaaattgctgtaagtkwgcttagttgtattgctatgtgagagcaaggtcatctaggtaacagtgtcaggaactccaaattgaaatatggttaaaactgaagtgaaaccaatggggggaaaaagtagttagggagagtttgctgacaggagattagagtggaagagaaaggaaaagacaatggtgagtggggctggagaagtagatcatcagatcttcctagaagctatgttaaggcacatacgtgataaagaggtgattcaagacagccagcgtggcttcaccaagggcagattgtgcctgaccaatctggtgac

SEQ ID NO: 67898 - DNA, 599 bp, Chicken  19866894338276_2
  misc_feature (1)..(238): n is any nucleotide
nnnnnnnnnnnnnnnnnnnnnnnnnnnnnnnnnnnnnnnnnnnnnnnnnnnnnnnnnnnnnnnnnnnnnnnnnnnnnnnnnnnnnnnnnnnnnnnnnnnnnnnnnnnnnnnnnnnnnnnnnnnnnnnnnnnnnnnnnnnnnnnnnnnnnnnnnnnnnnnnnnnnnnnnnnnnnnnnnnnnnnnnnnnnnnnnnnnnnnnnnnnnnnnnnnnnnnnnnnnnnnnnnnnnnnnnnnnnnnctgaatgaactgtgagaaactactggatgagagtgctatctcccagaaattgctgtaagtkwgcttagttgtattgctatgtgagagcaaggtcatctaggtaacagtgtcaggaactccaaattgaaatatggttaaaactgaagtgaaaccaatggggggaaaaagtagttagggagagtttgctgacaggagattagagtggaagagaaaggaaaagacaatggtgagtggggctggagaagtagatcatcagatcttcctagaagctatgttaaggcacatacgtgataaagaggtgattcaagacagccagcgtggcttcaccaagggcagattgtgcctgaccaatctggtgacc

SEQ ID NO: 67899 - DNA, 600 bp, Chicken  19866894338277_1
caaggcagttctaagtaaataaaggcggtagagacaaccgcagctttattatcaggcaccacacagctcccccatcctttcttttgcattgtacagcatctctgcctctccagagtgataacaggaactgcatctctgataaggcatccttctgctccttattagtgctgagaagcaagtcggaggtgttagctgtgcagccagagtgccccagccctccgtggcagggagcagccatgtgcttgttcagacttacagctctttcagctccacacctccgttcgtgtcctgtaagacacrcacacacccagcagatctcagcagggatgcacaagtctttatgttaatacaaatactttggattttagcaagccacagtaatgtaatgtattccaacactcatggatataaagcatcagtccctcaggggaaggtccttcccagactggagcactcttatacaaatagcacagtgtcccaaggtagctatgggatggatgcacagcactttcattccctccacagatttgccttattagattacagcagccacagtaatgtgctgtcttctcactcagtggagaaaacagcaggttgcag

SEQ ID NO: 67900 - DNA, 599 bp, Chicken  19866894338282_1
  misc_feature (1)..(105): n is any nucleotide
nnnnnnnnnnnnnnnnnnnnnnnnnnnnnnnnnnnnnnnnnnnnnnnnnnnnnnnnnnnnnnnnnnnnnnnnnnnnnnnnnnnnnnnnnnnnnnnnnnnnnnnnngaatccgaaactgtgatgttgaagctcttgaattattcatatgatcttattcaatgcgctgtgattatttctgatgcttcaaactcctggatagcttttgatgcctgtattatttctatgtaaattccagccattagttggttttatcaataaggttcagattgaatcatgcctcccctgcaaattaatgcagayttgacaaatggaagagaagatccaaactcttcaactaaaggctgttggatgtgattttagaataaaaacatatatatacattatctcaagctttagaagttgctatctgaaaatattaggacgtatgggggcattttgcatattagcacacacggaagtgtgtttaactgcaagctttgaaagcttttaagctgtacagatagagtcctagttctgccatgaacttgggtcttagaagcacagaatatcccaatttgggatcattgagtccaactcctgaagagagctggccctaaaat

SEQ ID NO: 67901 - DNA, 599 bp, Chicken  19866894338291_1
  misc_feature (1)..(9): n is any nucleotide
nnnnnnnnntctctacttcttttgactgtagtggttgagttacgttgcaaaataggccaaaaggaagtgttctcaactgcacgtgtcttggtgccttctgtgctatttgctatgtggcctaaatactgactcagctggattgttgttgggggtggttggatttctttgtctatttatttttaagagtgaaactgctgtggggacagaagaagaaacaactggaagatcttaattactgtcgagaggaaaagtgagtataatctgtctgcatttatcaagttaaaatcaacagtgatgtarcygtgcaaaaggtactttatacagagtcctgcatgaaagttttctgagaagggaatgcatttctggctgcaattggggatgtagtttcgttccctcctccagttttttcagrctttgtcatgcttctacttgcaggctattttgcatgtaaatcaaaactaaacacttctcaattacattaaaggaaaagtttgcgagaaatggctgaacggttggctgacaagtacgaggaagccaaggagaagcaagaagatattatgaataggtgagtgcagactgctttctctttcatcacagat

SEQ ID NO: 67902 - DNA, 599 bp, Chicken  19866894338291_2
  misc_feature (1)..(7): n is any nucleotide
nnnnnnntctctacttcttttgactgtagtggttgagttacgttgcaaaataggccaaaaggaagtgttctcaactgcacgtgtcttggtgccttctgtgctatttgctatgtggcctaaatactgactcagctggattgttgttgggggtggttggatttctttgtctatttatttttaagagtgaaactgctgtggggacagaagaagaaacaactggaagatcttaattactgtcgagaggaaaagtgagtataatctgtctgcatttatcaagttaaaatcaacagtgatgtarcygtgcaaaaggtactttatacagagtcctgcatgaaagttttctgagaagggaatgcatttctggctgcaattggggatgtagtttcgttccctcctccagttttttcagrctttgtcatgcttctacttgcaggctattttgcatgtaaatcaaaactaaacacttctcaattacattaaaggaaaagtttgcgagaaatggctgaacggttggctgacaagtacgaggaagccaaggagaagcaagaagatattatgaataggtgagtgcagactgctttctctttcatcacagattg

SEQ ID NO: 67903 - DNA, 600 bp, Chicken  19866894338291_3
tgtggcctaaatactgactcagctggattgttgttgggggtggttggatttctttgtctatttatttttaagagtgaaactgctgtggggacagaagaagaaacaactggaagatcttaattactgtcgagaggaaaagtgagtataatctgtctgcatttatcaagttaaaatcaacagtgatgtarcygtgcaaaaggtactttatacagagtcctgcatgaaagttttctgagaagggaatgcatttctggctgcaattggggatgtagtttcgttccctcctccagttttttcagrctttgtcatgcttctacttgcaggctattttgcatgtaaatcaaaactaaacacttctcaattacattaaaggaaaagtttgcgagaaatggctgaacggttggctgacaagtacgaggaagccaaggagaagcaagaagatattatgaataggtgagtgcagactgctttctctttcatcacagattgcttgctgttgcatatatgtgtgccaacgtggtagaaaaagaataggcagacaatactgtgctggtttcttggaacactagccttctgaaatactttttttgcagctcagta

SEQ ID NO: 67904 - DNA, 600 bp, Chicken  19866894338291_4
tgcatgtaaatcaaaactaaacacttctcaattacattaaaggaaaagtttgcgagaaatggctgaacggttggctgacaagtacgaggaagccaaggagaagcaagaagatattatgaataggtgagtgcagactgctttctctttcatcacagattgcttgctgttgcatatatgtgtgccaacgtggtagaaaaagaataggcagacaatactgtgctggtttcttggaacactagccttctgaaatactttttttgcagctcagtaatgatattaagtactgagtttgcttgctgygagggaagttgagtcctgagcccgtaagacttaagctaaatgacaaaagatgtttcatagttacgtgaaaaactcttgttgtctgagcataactagtctaaaacatcagttaattcagcaatatatcttttcttgcatgtgaaggatgaagaaagtgcttcgtagtttccactctcagcttcctgttatatcagacagtgaaagagatatgaagaaagaactgcagacaatccatgaccagctgcagcacttgagcaatgcaatcagacaggtgagatgaaatgtctggctggtccggtt

SEQ ID NO: 67905 - DNA, 600 bp, Chicken  19866894338294_1
ttccaatggcaaagatcaagaattaaaagatagcaacaggcagcaagagcacaactccttcccgttgccatcccttcagagaacaagcctgtttttcggagaattaatgttcacattaggtacaattcatcctacctgcctggttccttttattgtacaataaaaatctgatttattctcatttggatacagagtatatagccgtgtaagtgtaggacggttataaacagttactttccaagtggcacgatataaagcctactgcccgaggtatttctgagcaatgacaagtgttactcrtcaaaaggcagagacagaaggctgtgttttggatctgaacattgtgcctggagctaatcactagttatgctgatacctgctcagttcttcggtcttaaaataaacaacgccaacaaatgaaaagcatgcaaatgtgcttcytcggtggacttatcccaagtctgktaagcctaactctttctattttgcttacagaatggtctcatcgtcgcctgttaccaagggtatgtggatattgtcatagccttatcacagtgccctcacctcgatgtgaactggcaggacaatgaagggaacacg

SEQ ID NO: 67906 - DNA, 600 bp, Chicken  19866894338294_2
ggttccttttattgtacaataaaaatctgatttattctcatttggatacagagtatatagccgtgtaagtgtaggacggttataaacagttactttccaagtggcacgatataaagcctactgcccgaggtatttctgagcaatgacaagtgttactcrtcaaaaggcagagacagaaggctgtgttttggatctgaacattgtgcctggagctaatcactagttatgctgatacctgctcagttcttcggtcttaaaataaacaacgccaacaaatgaaaagcatgcaaatgtgcttcytcggtggacttatcccaagtctgktaagcctaactctttctattttgcttacagaatggtctcatcgtcgcctgttaccaagggtatgtggatattgtcatagccttatcacagtgccctcacctcgatgtgaactggcaggacaatgaagggaacacggccctgatcacagctgcgcaggcaggtaagggtcttctctgccccttgtatgggggtcttaggagggatccatgctgtgactgctatttttaggacttttttcaaagccttacaagaaattcgtctgcataagattatcct

SEQ ID NO: 67907 - DNA, 600 bp, Chicken  19866894338294_3
atctgatttattctcatttggatacagagtatatagccgtgtaagtgtaggacggttataaacagttactttccaagtggcacgatataaagcctactgcccgaggtatttctgagcaatgacaagtgttactcrtcaaaaggcagagacagaaggctgtgttttggatctgaacattgtgcctggagctaatcactagttatgctgatacctgctcagttcttcggtcttaaaataaacaacgccaacaaatgaaaagcatgcaaatgtgcttcytcggtggacttatcccaagtctgktaagcctaactctttctattttgcttacagaatggtctcatcgtcgcctgttaccaagggtatgtggatattgtcatagccttatcacagtgccctcacctcgatgtgaactggcaggacaatgaagggaacacggccctgatcacagctgcgcaggcaggtaagggtcttctctgccccttgtatgggggtcttaggagggatccatgctgtgactgctatttttaggacttttttcaaagccttacaagaaattcgtctgcataagattatcctggccaagcctgctcccaaataagt

SEQ ID NO: 67908 - DNA, 600 bp, Chicken  19866894338301_1
taaaaataacaaaacaaaccaacacaacagaaaacacatcccttcagttcagtgtcattgacttgaacatcaataaaactaatagttatatgcccaataaaataaaattgacctgtaattaaaacctcttcccttttgagatgaaagtgctttaggcttcactgctatccatggtatgctggaaaagctcaacacagcatctaaggaactgaatgatctgtcatggcattagcactcatgccttgctagagatagtttatttatgaaggtacgtatttgctttgtattaatttatttatyggtgctgatctgacaaatttctctgcctttttttccactttgtatatttaaaagcaaacttgctgctgatattattttgaaaacacttgatcttatgagcagactgaagcaggatgtacctggtatggaagtcagcttctacaaaatcctacaggtatgagttgaaagtgtcttatgaagtaaagtgtctcataaagggtaactgtgaagggaagtatcatgggactgtagccagtttagctctgaatctttattcatgcttatctctaacatgctaaaattttagagaaaagctacagt

SEQ ID NO: 67909 - DNA, 600 bp, Chicken  19866894338305_1
tgctcccgggccgtttgtttttatttttattgcagtcagttgtgcgttgcgctgcgtccaaatctgtaacagagtgtccccatcccgaggagtttttttttccttccctttgctcagtggatgatgcgactctctttgctaatagaaaccaaaatgcagctttcatccccggaatgcgcgttgttcctcgcgcttctgggcgcccgtgccctgagttagctgctggcttttcagtcagttagttaggaattgggaggaggttttcctgcagtgagggtcccgggctgtgcttcacacttygggcaggactgggagctgcgcttctctcctgtgctctccttttgcagctgaaaaggagatggccgagctgcgtccagcagggcacagagcgatgcttccacggcagcccagcttggcctccattgggctggcgtggaaaggcctcatctgctgtaactatccacgtgttgggtccgtggggagggtgcagagcagcaccygaatgagttgggtggcggtcatttagcctcgctggccttcatgtctgtgaggtgctctgctctgagctggggctctcactgctctgttggctttggcttt

SEQ ID NO: 67910 - DNA, 600 bp, Chicken  19866894338305_2
cgcccgtgccctgagttagctgctggcttttcagtcagttagttaggaattgggaggaggttttcctgcagtgagggtcccgggctgtgcttcacacttygggcaggactgggagctgcgcttctctcctgtgctctccttttgcagctgaaaaggagatggccgagctgcgtccagcagggcacagagcgatgcttccacggcagcccagcttggcctccattgggctggcgtggaaaggcctcatctgctgtaactatccacgtgttgggtccgtggggagggtgcagagcagcaccygaatgagttgggtggcggtcatttagcctcgctggccttcatgtctgtgaggtgctctgctctgagctggggctctcactgctctgttggctttggctttgccaactcttccaccatgggcacgagatccccatgtcagcacttggggccaatttggccgtcagtgccagataacgccgacagccatttggggaaaggtatttgtgtaatagttaatgttctgtaccgaatatagagggtggggagaagtcaaactgcactgaatgctctgcttattttatatccactataactattttt

SEQ ID NO: 67911 - DNA, 600 bp, Chicken  19866894338311_1
atgagaacaattacttggaacaacttcagaaacagtcactgaatactcactaattttacttccagtctgaatattccatgggcaatttacaatgcttatcacccaccagatgaggatcattagctacagccagaagctgtttgtattagcttgcattattgtattagtttgtgttatcatttacctactatatgaagaaaatcttattcacaggtaagaaaagtaagcaaagagattgcaagagctttaaacccttcccaccctgtcattttcataggaatataggtcctacgccgagamtccttctttgcacaagtggcattttaaattatacagagaatatttgaacactttctttcaggaatgttatctatgaaaaattggtctatttattttcataattacatcctcttaattcttatcaaacgcaagctcagatccagagaatgtgaaccatttccatttttcaccaacagctctttagcacagtgcagtgtaggagaggtgatactgttaaagttaatggggaaactgtatattttattcttactagatggggcttctagcagactgttttcaatgaaattgggacaaaatatg

SEQ ID NO: 67912 - DNA, 454 bp, Chicken  19866894338313_1
ttctttgtacccaagtcacgaataccacagaaacacatctactgcaaagtagatgaaaaaatatactgcagccaaaaatatgcctgaaccttccacttgggaagcacctggacaagttcacaccgttcatctgaacaggtcttcaagaacaaatttgctccttttattgatcagctagggactgtatgtgggggcacaaaacattcgggacttgaatgaaacttccaatttgcaatgacctgtacaaaatgggaatgcgagtagttctcccaggagctgcagtgtacttgctcttcccayttcaaaggcacctcttgtcttctgtgaagactaaggccacaagtctgagagttacacacatatttgtatagctttgagacttgctatggttggcggtgtatagaatagtgctcatagtttagatatggactcaactgaacaaggcaaatctaat

SEQ ID NO: 67913 - DNA, 600 bp, Chicken  19866894338315_1
gttgtcagcttaggtcagtaaagtctgtgtggtttccttttgacagctgttacgtggctgataagaggaatttgggcagttacgaggcattctcgggtttgaatagcatccttgttaccaaaaccatcagtatagccaaaatgtatccacgtgccaacaaactggctgtattatctgcctcctttctacaactaggatatccgtgctgggattttgctggtgctgtgtattttcagctggaagaactgatggagcaggaggacttgttggctgtctcagtgctgagagtaaaccaagacytgtgttgtctgggctgtcaggctggtgctttcatgagaccagcaccraaaggctcctgtgctttattttcctgatgcatgttctttgtggcagcarggctgctgagttcatctcctctgcttaccacagttgatggagttaatcctaccttcacattcactggggaaaccataaaggagctgttaagcagagctaggcacaggggaagggacgtccagtgaccagtcatagccaatagttatataagctgtttcccttggtagcttcttgacagctcaacttgaagaatggaaatgtaaa

SEQ ID NO: 67914 - DNA, 600 bp, Chicken  19866894338315_2
tgttacgtggctgataagaggaatttgggcagttacgaggcattctcgggtttgaatagcatccttgttaccaaaaccatcagtatagccaaaatgtatccacgtgccaacaaactggctgtattatctgcctcctttctacaactaggatatccgtgctgggattttgctggtgctgtgtattttcagctggaagaactgatggagcaggaggacttgttggctgtctcagtgctgagagtaaaccaagacytgtgttgtctgggctgtcaggctggtgctttcatgagaccagcaccraaaggctcctgtgctttattttcctgatgcatgttctttgtggcagcarggctgctgagttcatctcctctgcttaccacagttgatggagttaatcctaccttcacattcactggggaaaccataaaggagctgttaagcagagctaggcacaggggaagggacgtccagtgaccagtcatagccaatagttatataagctgtttcccttggtagcttcttgacagctcaacttgaagaatggaaatgtaaaaaggcatttgtcctgacagttttacaggctgtgaacttgtaagaacg

SEQ ID NO: 67915 - DNA, 600 bp, Chicken  19866894338315_3
gtttgaatagcatccttgttaccaaaaccatcagtatagccaaaatgtatccacgtgccaacaaactggctgtattatctgcctcctttctacaactaggatatccgtgctgggattttgctggtgctgtgtattttcagctggaagaactgatggagcaggaggacttgttggctgtctcagtgctgagagtaaaccaagacytgtgttgtctgggctgtcaggctggtgctttcatgagaccagcaccraaaggctcctgtgctttattttcctgatgcatgttctttgtggcagcarggctgctgagttcatctcctctgcttaccacagttgatggagttaatcctaccttcacattcactggggaaaccataaaggagctgttaagcagagctaggcacaggggaagggacgtccagtgaccagtcatagccaatagttatataagctgtttcccttggtagcttcttgacagctcaacttgaagaatggaaatgtaaaaaggcatttgtcctgacagttttacaggctgtgaacttgtaagaacgtccctgtcagaattgtgtgtttggccttgatcacaaataattacactgg

SEQ ID NO: 67916 - DNA, 600 bp, Chicken  19866894338316_1
agagacctgcagacaagagcaaggggataggtcacccctgtgggacgtgctgcatatcactgccatggagaggggcatctgcggctggttcctgacccaaggctggttgctgcagggcagggaacacagtgggctgtctgtcggtacctggtgtgtgaagtggcgctggtcactgcatcgatctcctggtctttcagccgcttcagccgctggagctgctcttcgtggtctttgagcatctcctggacagatgacctgcagggcacagaggaaggagcccattaggggatggtgtgagcyggtgctccctgggatgggcgctgtgaaagaagcttggttgtggggttgagatggggcgtcccactgatagcattcacatctggggtgggctacattggagggtgatgggtttctttgccaaaaactgtgatttctcattggctatggctatgtggatatcagtgacacggsgacctgaataaaaggtatttgggggacataaaacatttggcacttctttcaaaatacaatgcgttcactatgaaatgatgtctacagccaggccttgctctgccaacctgcaaagccaatctcattccc

SEQ ID NO: 67917 - DNA, 600 bp, Chicken  19866894338316_2
actgcatcgatctcctggtctttcagccgcttcagccgctggagctgctcttcgtggtctttgagcatctcctggacagatgacctgcagggcacagaggaaggagcccattaggggatggtgtgagcyggtgctccctgggatgggcgctgtgaaagaagcttggttgtggggttgagatggggcgtcccactgatagcattcacatctggggtgggctacattggagggtgatgggtttctttgccaaaaactgtgatttctcattggctatggctatgtggatatcagtgacacggsgacctgaataaaaggtatttgggggacataaaacatttggcacttctttcaaaatacaatgcgttcactatgaaatgatgtctacagccaggccttgctctgccaacctgcaaagccaatctcattcccaaatccaccacaayscagtgcttctggagcccagtttttccttttcctgtgtccacaaaccatttcctggttcccttcccagggtggaggagacaagacatgcatgctatgctcacctctgcagctctcgcagccgctccagctcctgggcgctctgctgctccagtgtgg

SEQ ID NO: 67918 - DNA, 600 bp, Chicken  19866894338316_3
tgggcgctgtgaaagaagcttggttgtggggttgagatggggcgtcccactgatagcattcacatctggggtgggctacattggagggtgatgggtttctttgccaaaaactgtgatttctcattggctatggctatgtggatatcagtgacacggsgacctgaataaaaggtatttgggggacataaaacatttggcacttctttcaaaatacaatgcgttcactatgaaatgatgtctacagccaggccttgctctgccaacctgcaaagccaatctcattcccaaatccaccacaayscagtgcttctggagcccagtttttccttttcctgtgtccacaaaccatttcctggttcccttcccagggtggaggagacaagacatgcatgctatgctcacctctgcagctctcgcagccgctccagctcctgggcgctctgctgctccagtgtggccacacgctgcttatgctgcgccaccagctctgccctggcccgctctccatcctggctctgtgacagcagctgagcctccagctgctccttctcccgccgcagcctctcctcccgctgcccataagtctcctctaccaccttc

SEQ ID NO: 67919 - DNA, 600 bp, Chicken  19866894338316_4
gggcgctgtgaaagaagcttggttgtggggttgagatggggcgtcccactgatagcattcacatctggggtgggctacattggagggtgatgggtttctttgccaaaaactgtgatttctcattggctatggctatgtggatatcagtgacacggsgacctgaataaaaggtatttgggggacataaaacatttggcacttctttcaaaatacaatgcgttcactatgaaatgatgtctacagccaggccttgctctgccaacctgcaaagccaatctcattcccaaatccaccacaayscagtgcttctggagcccagtttttccttttcctgtgtccacaaaccatttcctggttcccttcccagggtggaggagacaagacatgcatgctatgctcacctctgcagctctcgcagccgctccagctcctgggcgctctgctgctccagtgtggccacacgctgcttatgctgcgccaccagctctgccctggcccgctctccatcctggctctgtgacagcagctgagcctccagctgctccttctcccgccgcagcctctcctcccgctgcccataagtctcctctaccaccttca

SEQ ID NO: 67920 - DNA, 599 bp, Chicken  19866894338317_1
  misc_feature (1)..(125): n is any nucleotide
nnnnnnnnnnnnnnnnnnnnnnnnnnnnnnnnnnnnnnnnnnnnnnnnnnnnnnnnnnnnnnnnnnnnnnnnnnnnnnnnnnnnnnnnnnnnnnnnnnnnnnnnnnnnnnnnnnnnnnnnnnnnncattgctctatgaaaccttaattaagaagcatttagctgtgactaatgttagttatgcacaatctttagcattattaagtagggttctgttaaatcattactgcgtggctttttcagtgtctctcagtaagatacatttgtacaaggctaaactaaatgaagtcctacctctccwgaaattttcagcaaaagccattaagaaatatgtaaatyaattcagtgagcaatactcgagacaaaaatcaatctcagtggaaaagcagaaatatcatactttacacaggattatgcagtaatttcatgggctggtttctctgtcacagcacttgctagacagtccttatacacaagtagacagatggattgtgaagaattaggaaatttgaagcatgtcaaaataaagagactcagggcttttttttccccyttttttattctatcagttctgtgacagcacaaattatcatcccagtg

SEQ ID NO: 67921 - DNA, 599 bp, Chicken  19866894338317_2
  misc_feature (1)..(87): n is any nucleotide
nnnnnnnnnnnnnnnnnnnnnnnnnnnnnnnnnnnnnnnnnnnnnnnnnnnnnnnnnnnnnnnnnnnnnnnnnnnnnnnnnnnnnnncattgctctatgaaaccttaattaagaagcatttagctgtgactaatgttagttatgcacaatctttagcattattaagtagggttctgttaaatcattactgcgtggctttttcagtgtctctcagtaagatacatttgtacaaggctaaactaaatgaagtcctacctctccwgaaattttcagcaaaagccattaagaaatatgtaaatyaattcagtgagcaatactcgagacaaaaatcaatctcagtggaaaagcagaaatatcatactttacacaggattatgcagtaatttcatgggctggtttctctgtcacagcacttgctagacagtccttatacacaagtagacagatggattgtgaagaattaggaaatttgaagcatgtcaaaataaagagactcagggcttttttttccccyttttttattctatcagttctgtgacagcacaaattatcatcccagtgcagcatgtaagtgtgcttgactttcatcacattaaaag

SEQ ID NO: 67922 - DNA, 595 bp, Chicken  19866894338317_3
taagatacatttgtacaaggctaaactaaatgaagtcctacctctccwgaaattttcagcaaaagccattaagaaatatgtaaatyaattcagtgagcaatactcgagacaaaaatcaatctcagtggaaaagcagaaatatcatactttacacaggattatgcagtaatttcatgggctggtttctctgtcacagcacttgctagacagtccttatacacaagtagacagatggattgtgaagaattaggaaatttgaagcatgtcaaaataaagagactcagggcttttttttccccyttttttattctatcagttctgtgacagcacaaattatcatcccagtgcagcatgtaagtgtgcttgactttcatcacattaaaagtaaaatctccagatgtgctcctgcggtgctaattaccatgaaacagaaccacatccagatccagaaaagaggaatttttctcaggaaggaatttttcaagagaaggagagagaggacagttaaatttcaagccaagtttgcccattcaaacttcaaaagttttataagcacataagaacccttttatcacaaaaaaagacaaacctgaaa

SEQ ID NO: 67923 - DNA, 599 bp, Chicken  19866894338320_1
  misc_feature (1)..(141): n is any nucleotide
nnnnnnnnnnnnnnnnnnnnnnnnnnnnnnnnnnnnnnnnnnnnnnnnnnnnnnnnnnnnnnnnnnnnnnnnnnnnnnnnnnnnnnnnnnnnnnnnnnnnnnnnnnnnnnnnnnnnnnnnnnnnnnnnnnnnnnnnnnnnntgtagggcttcacctctttcccccccgcacatacttttgtgcttgtctgacacggtgctggaacacagctttccctcactgccaacaaaaggatttttgtgttcttcagcacctctaggtcaggctctatcccggtggatgttcagatccactccgcaygcccacctccaccccttgctgatgctgtgccttctttacaaagctgcataaaggcagagggctttttcctcttcctctgtttcttcccagacctcttgagtcacagtcgtgacccagacaaggtgtcccatctgaactgttaatgtcactgcaaacctaaagggctgragcaacrcctcccaccccctgccaccagcacagggctcctctgcagcaccagaagagacacacagcgagaagccattgtctaaaaacataatttaatgtgatattttggtgagtgtggtcaacgactgagt

SEQ ID NO: 67924 - DNA, 600 bp, Chicken  19866894338320_2
cacatacttttgtgcttgtctgacacggtgctggaacacagctttccctcactgccaacaaaaggatttttgtgttcttcagcacctctaggtcaggctctatcccggtggatgttcagatccactccgcaygcccacctccaccccttgctgatgctgtgccttctttacaaagctgcataaaggcagagggctttttcctcttcctctgtttcttcccagacctcttgagtcacagtcgtgacccagacaaggtgtcccatctgaactgttaatgtcactgcaaacctaaagggctgragcaacrcctcccaccccctgccaccagcacagggctcctctgcagcaccagaagagacacacagcgagaagccattgtctaaaaacataatttaatgtgatattttggtgagtgtggtcaacgactgagttctttcgcagacaggaacaggtttgacgttagtgacatcatcattcacacgagcatcgcattgcacggaaaagtttacatttgaccccatacaaatgaagcagcagaggaaaaaaaaaaaamcacggtccagtgccacatcatgagtaatccgtctgaaaattcatcat

SEQ ID NO: 67925 - DNA, 600 bp, Chicken  19866894338320_3
ttttgtgcttgtctgacacggtgctggaacacagctttccctcactgccaacaaaaggatttttgtgttcttcagcacctctaggtcaggctctatcccggtggatgttcagatccactccgcaygcccacctccaccccttgctgatgctgtgccttctttacaaagctgcataaaggcagagggctttttcctcttcctctgtttcttcccagacctcttgagtcacagtcgtgacccagacaaggtgtcccatctgaactgttaatgtcactgcaaacctaaagggctgragcaacrcctcccaccccctgccaccagcacagggctcctctgcagcaccagaagagacacacagcgagaagccattgtctaaaaacataatttaatgtgatattttggtgagtgtggtcaacgactgagttctttcgcagacaggaacaggtttgacgttagtgacatcatcattcacacgagcatcgcattgcacggaaaagtttacatttgaccccatacaaatgaagcagcagaggaaaaaaaaaaaamcacggtccagtgccacatcatgagtaatccgtctgaaaattcatcattggaatt

SEQ ID NO: 67926 - DNA, 600 bp, Chicken  19866894338320_4
ggtgtcccatctgaactgttaatgtcactgcaaacctaaagggctgragcaacrcctcccaccccctgccaccagcacagggctcctctgcagcaccagaagagacacacagcgagaagccattgtctaaaaacataatttaatgtgatattttggtgagtgtggtcaacgactgagttctttcgcagacaggaacaggtttgacgttagtgacatcatcattcacacgagcatcgcattgcacggaaaagtttacatttgaccccatacaaatgaagcagcagaggaaaaaaaaaaaamcacggtccagtgccacatcatgagtaatccgtctgaaaattcatcattggaattaatattcattgaccaaaaaaaataataatgatgataataatcgagcagttcaaatgccgtgtatggcacaggctgaactctgaacctctgatacagcgcaggaaccgcttgggtttctggctgcgggttcctggtgtgacacagaacactgacacggggacggggggtcaggggaagggggcagccagggaggggtcgcgttgttcacgtgtatttcgtttccacgggaaaagaagaaagaaaaac

SEQ ID NO: 67927 - DNA, 600 bp, Chicken  19866894338322_1
gtaattcaaattggattggaaaatagaaactacagctttgttcttatatgagtattttgggaagttctactacaaaacatacatttgtaaacatgcattttacatacattaggaattcttttgtagaacatagggagacaatataatattgacagaaggtcaataagagaataaacaaaagtggggaatggttgttttgatgctttggctaatagagtttgtctgaacttcaacatgggctataaataatgaaaatattaagatacaatactgcagaagggcatttgtagtatcattccrttttcagagacaagttacctgctatttacacaacagttacggaggagtgctgcccaaaagaaattactcttccagtcatgactggcagtataaattatagccctgagtatcccaaaggatctcctccctggttggcaagaggaaagcagctggcacaaggctggatgcattaccaaaattttggcaaatacagtgtgggagatttgtgagagagcaagaacctatgatcctgtggggaaggaaacacaacgggcttcatacttcatgtcrgcatgaactgagttgtgtcagcatgagtta

SEQ ID NO: 67928 - DNA, 576 bp, Chicken  19866894338322_2
ctgcagaagggcatttgtagtatcattccrttttcagagacaagttacctgctatttacacaacagttacggaggagtgctgcccaaaagaaattactcttccagtcatgactggcagtataaattatagccctgagtatcccaaaggatctcctccctggttggcaagaggaaagcagctggcacaaggctggatgcattaccaaaattttggcaaatacagtgtgggagatttgtgagagagcaagaacctatgatcctgtggggaaggaaacacaacgggcttcatacttcatgtcrgcatgaactgagttgtgtcagcatgagttatgatagcacaaaaagccagtctacttggaaatagggtggaaatcattatccaaaatagtattcctcttctgcttaaggtaagaaatattcaggccttgattctaaagttatttttattacctcattccctgttgacatgactgcaaccactggaaacttgttaacttctactttcggttactccaacggtagctaagagaccaatctcagatggacccatgtgagttcctttagccagcacacatt

SEQ ID NO: 67929 - DNA, 600 bp, Chicken  19866894338324_1
atcaatagatggcacataactactcatatatttgcattaatccaggcatgaaactactatttccaaatcctactgtagaataacctatgaaagtgaaagactaacgtactcataaggaatcacacatgatgttgtatcgctgttcttagtacagcacacatttagaccaatcattttccaaatttgtaagaagctggctaatactgagctacaaactttgcaagaacaacaaaaagaaatattcatcagattgtatgaatttattttttaaaattcttcaactcattaagatttttaacycccatttataaataaataaacaaacagaatatttgagcaatctaattttttttcagrcattgaaccatgtttctgcagatagtcatataaaaactctaggttttgtaagtaagccagaaaatgcaagggtggaatatttattaataattaaagtaattccacgatgactctacttaatagaacacaacttttggttgctattactatacctttaaaacagcatttttaaataaacagatctcatccaaaaaaaatagtaacagcaaattgaaaaataattgacaagtgatccagctaatg

SEQ ID NO: 67930 - DNA, 600 bp, Chicken  19866894338324_2
tatttccaaatcctactgtagaataacctatgaaagtgaaagactaacgtactcataaggaatcacacatgatgttgtatcgctgttcttagtacagcacacatttagaccaatcattttccaaatttgtaagaagctggctaatactgagctacaaactttgcaagaacaacaaaaagaaatattcatcagattgtatgaatttattttttaaaattcttcaactcattaagatttttaacycccatttataaataaataaacaaacagaatatttgagcaatctaattttttttcagrcattgaaccatgtttctgcagatagtcatataaaaactctaggttttgtaagtaagccagaaaatgcaagggtggaatatttattaataattaaagtaattccacgatgactctacttaatagaacacaacttttggttgctattactatacctttaaaacagcatttttaaataaacagatctcatccaaaaaaaatagtaacagcaaattgaaaaataattgacaagtgatccagctaatgctaaactcatcctctttaaagttactattttatttaacatttgaagtttctcttcat

SEQ ID NO: 67931 - DNA, 551 bp, Chicken  19866894338324_3
tttctacatacattcatgaggttgatgtgacatcatccacactgcttaagaacaaaagacttgtctttattaaaacatcactcttttcagtcttcttttgctagtctaaggccaatagcatttctaaaagtactgcatggaatgttttcagtgcaggctaagaggtttcaaaaaaaatttagataactttactctcatctttgagaaagcagaagagctgtgaaaaatcattaatattactacaggtgtgggaaattatgctggaataatgcacattctgcacagtgtttatttccctgrctccctgctcaggcagttacgtgcccacataatgtggaccttgccctcttactctccccttctgactgcctgggtcagtccttacataaaagaaatcaagttccacctacaaagccgtctctctgtctttattttcatggcagacacttttatatcagagtactttcatcacagtggcacccataccagagccacaatactgtagttaagggtctgttctttggcatttctattctaaagcactattgtat

SEQ ID NO: 67932 - DNA, 600 bp, Chicken  19866894338333_1
tagccttcctcacttataaacatgactttgtaaatatgttttcagtgtctctttgaaataagtggttttatttattgtggggtttttgttgttgttgtttgtttgttttttacacagacagagaataattcttttaacagcttactcatatgtctctatctttttggcttctattttttattcaccccatccgtagtcactgtaaatggatacagtagtcaggaagctggctcattacctgaagcatggatgcagtacccaggcctaagcagctcagagagaggctgtgagttctgctasagtgagagaagacaactctcagtgatgccagtgggatatctctggtaagtacagagaggaattctgagcattttaattagtgttgctataaggctaatgtaatgtccctgaagagcaaactcgaattttagctgttgaaaagatatgtcatgttgaaaagtactggagatatgtagttccaatctctttctcccaggagctgcagtgctgacagatgctatgaggacacacataatggttttcttactatacttaaattaggaaaagactagaaaataacaaaaagacttcttaaatgca

SEQ ID NO: 67933 - DNA, 600 bp, Chicken  19866894338333_2
tagcctagaaacatctcatgcagctcataaatattattgctacccctgagaactatatattcccttgagaaagtttacgaggttgataacatgcaaagctcaactcagcttttcctgagttttcttttttttttctttttttttgtccagaccttaaaggcaagtatatatctttgatagcaaagcaattccaatgaagttgatgaagcttgtctagtttacaaaagctgagcgtgtgtttacaatgtgtcaaataggtgaccgtattgaagtcaccaagactgcattaggaggctttaytgcatagggatcagtgggtgttacactgagagatttgagtacacacaggtgttggcccagactctgcagcctggagaaacgacttcttatgattagctaatgatctgcttaataccaaactgagattctcagataaacatgagttaaaatgtttatccagcattcagcccttattatagcttttttcttttcctttttctataacaacataggaaatttacttaatacagaggagtaaatttctttcacaccttgaatttgcatcttaataattccacctgcagctgcttcctgagatca

SEQ ID NO: 67934 - DNA, 600 bp, Chicken  19866894338336_1
aaaactgctacataccaattagcagaatttctctgatcttttatttcttgtatttctaaaacattttttacctcagagagatctgaaaagaaaagcttctatctatgaattcttaacattgtgtctgaaagcaagtgcttaccacaatatttggaatttctgacttcactgtttgattatctatgtcaaactacacaactatactcactcttatggctttttttttcctcttccctctgatacaaatatactgttttaaattcaagaagagagaaagggagagaaataaccatatcactrcaccaatacacttatgacctgagcattttggaagagaagagggttactgggagtagtcagcatggggtggtcrtgctcaactaaccagtgactctatgatgtcatcatcagctggggggatgggtggagatcagtggatgtagtctaccttgatttcagcaatgcattttgtcactgtctctcacaacatccttataataaagctaaggaagtgtggaatagatgagtggatgatgagttggtttgagaactggctgtctggcagagctcagagtgttgtgatcggtggtgcaaaatcca

SEQ ID NO: 67935 - DNA, 600 bp, Chicken  19866894338336_2
cagagagatctgaaaagaaaagcttctatctatgaattcttaacattgtgtctgaaagcaagtgcttaccacaatatttggaatttctgacttcactgtttgattatctatgtcaaactacacaactatactcactcttatggctttttttttcctcttccctctgatacaaatatactgttttaaattcaagaagagagaaagggagagaaataaccatatcactrcaccaatacacttatgacctgagcattttggaagagaagagggttactgggagtagtcagcatggggtggtcrtgctcaactaaccagtgactctatgatgtcatcatcagctggggggatgggtggagatcagtggatgtagtctaccttgatttcagcaatgcattttgtcactgtctctcacaacatccttataataaagctaaggaagtgtggaatagatgagtggatgatgagttggtttgagaactggctgtctggcagagctcagagtgttgtgatcggtggtgcaaaatccagttggagaccttatttagcagtgttcctcaagggttggtgctgggtctggtcttattcaacatcttcatcaat

SEQ ID NO: 67936 - DNA, 600 bp, Chicken  19866894338340_1
ctattgagttaggaaagtgtgtagttttttcacatctatttctttggttgactctcaaaaggagaaccagtgttcacttcatctcacaggactcttcttgtgtttgtgcattctaaagaaccacgtctccggtgtcagataagagctacttgtggggggaaaaatggagttgtggcagaagagagaactgctgtgcaatttcacaccgccttcgctgcagttcaccccagcattcgcacagccctgctgagtctcaagcaggtggtacgcgatttgtgcgtagggccccatctcacgtcrcctactgcactgcagggtgcgtgccaggaagaagacgtgacatggaggggaacgtgtgtccaaggaggccctgctgtgggcctgcccagggctgctgagctccccggggagttgaggagtctgagcatggatatmttraaacaaatacgcactgggagatatacatgaagatggccctatgccttgctggaagaagctttttattcccccacagtttgggcaggatacacttattacacaaacagctggttgcaaacattttttgttgatggtggcaagtgcagaaacttttccagcaag

SEQ ID NO: 67937 - DNA, 600 bp, Chicken  19866894338340_2
cagataagagctacttgtggggggaaaaatggagttgtggcagaagagagaactgctgtgcaatttcacaccgccttcgctgcagttcaccccagcattcgcacagccctgctgagtctcaagcaggtggtacgcgatttgtgcgtagggccccatctcacgtcrcctactgcactgcagggtgcgtgccaggaagaagacgtgacatggaggggaacgtgtgtccaaggaggccctgctgtgggcctgcccagggctgctgagctccccggggagttgaggagtctgagcatggatatmttraaacaaatacgcactgggagatatacatgaagatggccctatgccttgctggaagaagctttttattcccccacagtttgggcaggatacacttattacacaaacagctggttgcaaacattttttgttgatggtggcaagtgcagaaacttttccagcaagcactgccctcgtgaaacttcccttttctgacaggagctgtgaaaagtcttctggaacagaatgggaatttgttaacagcttggcactggggtgtgaaagttggtggtgtgaatggcaacaaaggtttaatcaaca

SEQ ID NO: 67938 - DNA, 600 bp, Chicken  19866894338340_3
ataagagctacttgtggggggaaaaatggagttgtggcagaagagagaactgctgtgcaatttcacaccgccttcgctgcagttcaccccagcattcgcacagccctgctgagtctcaagcaggtggtacgcgatttgtgcgtagggccccatctcacgtcrcctactgcactgcagggtgcgtgccaggaagaagacgtgacatggaggggaacgtgtgtccaaggaggccctgctgtgggcctgcccagggctgctgagctccccggggagttgaggagtctgagcatggatatmttraaacaaatacgcactgggagatatacatgaagatggccctatgccttgctggaagaagctttttattcccccacagtttgggcaggatacacttattacacaaacagctggttgcaaacattttttgttgatggtggcaagtgcagaaacttttccagcaagcactgccctcgtgaaacttcccttttctgacaggagctgtgaaaagtcttctggaacagaatgggaatttgttaacagcttggcactggggtgtgaaagttggtggtgtgaatggcaacaaaggtttaatcaacattt

SEQ ID NO: 67939 - DNA, 600 bp, Chicken  19866894338341_1
caggttccattgctgggatcgtgcatgagagcacaagttcaaacaacaacagcagcaaaaacagcaacaacaacaaaaaaaccatctgggaaaaggagacctgttaaatagaatccgttaataacaaaataattgttcctctgcatgtgattcagacagctgcctaattgttaattacccctatctgagaacaacaggtaatgtgcagagctggctctctctgcccactgcttgctgctggtggtgccggagctgcagcgtgtcccagcaggtcaggatggagtggggcaggggagctcrtggctctgcaagggagagctgtgccattggaatcccagcaccttcatcagacaccctcagtctcttcaatcgcygtttgcctggtgctctttgtctacgggctcatgcacacctgcattcagccaccaagcaggcaccccccagcacacccttatggtttttggggccaggaaacgctgctgggttcctttctyttgcagcagtctggcaccgttgaagccgatgctgttccccacgtgcacaggccagcagccagcggagtgctctgcaggatgcagagctgataacagccccagggaa

SEQ ID NO: 67940 - DNA, 600 bp, Chicken  19866894338341_2
aaaaaaaccatctgggaaaaggagacctgttaaatagaatccgttaataacaaaataattgttcctctgcatgtgattcagacagctgcctaattgttaattacccctatctgagaacaacaggtaatgtgcagagctggctctctctgcccactgcttgctgctggtggtgccggagctgcagcgtgtcccagcaggtcaggatggagtggggcaggggagctcrtggctctgcaagggagagctgtgccattggaatcccagcaccttcatcagacaccctcagtctcttcaatcgcygtttgcctggtgctctttgtctacgggctcatgcacacctgcattcagccaccaagcaggcaccccccagcacacccttatggtttttggggccaggaaacgctgctgggttcctttctyttgcagcagtctggcaccgttgaagccgatgctgttccccacgtgcacaggccagcagccagcggagtgctctgcaggatgcagagctgataacagccccagggaaggtgacactttttgtcctttagcagtcagagaggtccgggggggtcagggcttgtccctggacttgctgtatcc

SEQ ID NO: 67941 - DNA, 600 bp, Chicken  19866894338341_3
caggtaatgtgcagagctggctctctctgcccactgcttgctgctggtggtgccggagctgcagcgtgtcccagcaggtcaggatggagtggggcaggggagctcrtggctctgcaagggagagctgtgccattggaatcccagcaccttcatcagacaccctcagtctcttcaatcgcygtttgcctggtgctctttgtctacgggctcatgcacacctgcattcagccaccaagcaggcaccccccagcacacccttatggtttttggggccaggaaacgctgctgggttcctttctyttgcagcagtctggcaccgttgaagccgatgctgttccccacgtgcacaggccagcagccagcggagtgctctgcaggatgcagagctgataacagccccagggaaggtgacactttttgtcctttagcagtcagagaggtccgggggggtcagggcttgtccctggacttgctgtatcctccaagcacagatggcgatgcatcatttttggaagcttcacacctccatgctttgctttagggagggtcccatacccaaggcccatcccctccgctcctgtccctgtccctttgcatccc

SEQ ID NO: 67942 - DNA, 600 bp, Chicken  19866894338354_1
tcttactacaagtagacgagcattctgagaagcagaatgtatgtgtatgtgataatagaaatgttcagctagtgcaaaaatacaggggtaagatctgctgacaagagaggtgcagaaatgtgtgccatacctttttctttgcagtctcttgctttccctttttttcttctggtgttttagaacttaggctggaatgatgagaaacctctttcaaccttcagttccaagtgaaagttttgctggtattgctctaaaacactagatctcttacaagtaacatatgctttcattagcaaatargttgtgactttggaccatattaaaagttaacaatttgaaaagtattaataggttttacagttttcagcattccagtacagtaaattgtcacctaacatgtactatttagggaaaaacagagatgattttttttctgtatattcaggctgctttatgtgtagaaagaaaactcagaagtacttatgcttagaaaatagttaagaaaggtaagttttgcatatacatgaaataatcagcaaatcaattcagcaaacaagctaagtgctaaaaataaatacagattgcttgtgttttctgaat

SEQ ID NO: 67943 - DNA, 600 bp, Chicken  19866894338358_1
gatgggctttggatcaggcccacatagaaatgcaatgaagtcagatcattacaagctaaaagcagatagaaatcttcttcacccaacccctttcccacggaacagagattttcaatgtgggagttgtgaagaagtatcaagtttgcaattgtttcactcttcctaccttatttaatgcagactttcctgccttctagcctgtacaaaaaaaatcctgcttatgaaataaggcatcctgctgctgaagagcttgaacatctcagctggacaggccacaagacttttaccacttaaaaaaamagcttgtgaaacacaagaattacagcatttgtgatgaggaaagrcttggatattttaactactccagactttaggaatattctgaagggaaagtgagctatggcactgagtaatatayataagctctcattattaaataggtttttgtagaacagaggattggctgcaacatttgtgtagcacagaataatacagctcttatttacatttgcataaatacacatcttgtctgtgttytttataaccatagaggaaaggaagagggttcacttctagttgatagtggctctttgagagcac

SEQ ID NO: 67944 - DNA, 600 bp, Chicken  19866894338358_2
atcattacaagctaaaagcagatagaaatcttcttcacccaacccctttcccacggaacagagattttcaatgtgggagttgtgaagaagtatcaagtttgcaattgtttcactcttcctaccttatttaatgcagactttcctgccttctagcctgtacaaaaaaaatcctgcttatgaaataaggcatcctgctgctgaagagcttgaacatctcagctggacaggccacaagacttttaccacttaaaaaaamagcttgtgaaacacaagaattacagcatttgtgatgaggaaagrcttggatattttaactactccagactttaggaatattctgaagggaaagtgagctatggcactgagtaatatayataagctctcattattaaataggtttttgtagaacagaggattggctgcaacatttgtgtagcacagaataatacagctcttatttacatttgcataaatacacatcttgtctgtgttytttataaccatagaggaaaggaagagggttcacttctagttgatagtggctctttgagagcacaatgtatcaattatcactgaaaattttcttgtttctgatacagc

SEQ ID NO: 67945 - DNA, 600 bp, Chicken  19866894338358_3
gggagttgtgaagaagtatcaagtttgcaattgtttcactcttcctaccttatttaatgcagactttcctgccttctagcctgtacaaaaaaaatcctgcttatgaaataaggcatcctgctgctgaagagcttgaacatctcagctggacaggccacaagacttttaccacttaaaaaaamagcttgtgaaacacaagaattacagcatttgtgatgaggaaagrcttggatattttaactactccagactttaggaatattctgaagggaaagtgagctatggcactgagtaatatayataagctctcattattaaataggtttttgtagaacagaggattggctgcaacatttgtgtagcacagaataatacagctcttatttacatttgcataaatacacatcttgtctgtgttytttataaccatagaggaaaggaagagggttcacttctagttgatagtggctctttgagagcacaatgtatcaattatcactgaaaattttcttgtttctgatacagcccagtttcctcatgcgtacgttatcttttttttttttttccaaaggagatgagatgaaatcactttccattgca

SEQ ID NO: 67946 - DNA, 600 bp, Chicken  19866894338358_4
gctgctgaagagcttgaacatctcagctggacaggccacaagacttttaccacttaaaaaaamagcttgtgaaacacaagaattacagcatttgtgatgaggaaagrcttggatattttaactactccagactttaggaatattctgaagggaaagtgagctatggcactgagtaatatayataagctctcattattaaataggtttttgtagaacagaggattggctgcaacatttgtgtagcacagaataatacagctcttatttacatttgcataaatacacatcttgtctgtgttytttataaccatagaggaaaggaagagggttcacttctagttgatagtggctctttgagagcacaatgtatcaattatcactgaaaattttcttgtttctgatacagcccagtttcctcatgcgtacgttatcttttttttttttttccaaaggagatgagatgaaatcactttccattgcatgtgacagggttttgtttctttagaaggaagattgctgcgcttagccacaatgcggcaacttcggcagctgtttgtagcccagcagtattatgttgcatgcatgaaaggaatgtggtga

SEQ ID NO: 67947 - DNA, 600 bp, Chicken  19866894338358_5
gttcccaaggttatcacacactgacttaaggccttgaattgaccagtgtgcacaggggtagatatagactcctcctgatttacggattaaaatgttcactgataaatttcctataattgaaatgttgttgctcattttaaactgtaaattcttcttcaagggcctgttcactggattctgggttcctcactgcagtccttgaatatgtgactccattggcgtctcctgtgcttttcacaatctccaggttgccatagctggagatgtaaggaataaccacaaccatcactgagaaccttwttaccctgatggtacatctcagaacaaacaagatacacgttcttgcaatgcaattattttcttacctactgaactctgcttctagtcacattttctaggtagctgtcattgttagcttctccttgacatgagagtgttttgttttttcaagttttcaccagaacacatcatctgcccatcatgtgctttttaaccctttctttctaaattcaggtgtccttcttcattataccattctttggactggaggtttctggttggcccttcactctgctcaagcttctgttctgattctcactc

SEQ ID NO: 67948 - DNA, 600 bp, Chicken  19866894338358_6
tgctctgtggttgtatatttcttcatcttttgctatctcactcttggaattgtcattctgatatcattgcagtgagccatgggttcctacagcagctgccaattagaagcagaatgaatatatcattcttcaaaaggagaaactggccttcattattatgtaattaagttaaggatctgatcttgatcttcaaaaccttcaaactggcacaaactgttcctgggaaggtctttccaagccagtgaccactaacatcattgctttctgagagaaccacaaaagaaacttgcttgctttaaygtgtttttcatagcataaattattcaacagacatgcaaggcacaaagaataggaaacaaacccaacacctatgaagcattttaaaccagtagttagcaaaaatttctcagacacaactgatgagtcaaaaacgcagaaaaaaaaaatgaagcatcctgggagggcattactgctgtattttagacctgtgctatctgactgttactttggtctttccatgtgatgagagaagttgtgcactccttcacgtttgtacactcccactgggaatgggttggtgctctgcttacatttttcccc

SEQ ID NO: 67949 - DNA, 600 bp, Chicken  19866894338361_1
cttgctcttgttacagaggattatttatgctttgcttgatatgacctggctcttcttatgggatttataattgcttatgcaatacctagcttaccagtgtccagcccagtacactcaaaaccacataaagcaaagcaaagtgaaatctgaactactagtgtaaattgctgaggctctaaattttgatcatttgatgaatggcaatattcagtaattctcagtgaggtttctgttgctggttcaaattagtttgaaaccttttgtagctcatgatgtgtgagtttacactacacaaaaaamcatctattggtttataactgatggttgcctacatatgggtgatcccaacagcagcgttacctactgcagtgttacaggtgtaaattgtttttagtctctaatatcttttgttgtttctactgcattttgcacaaatatatttatttcttaaaagagtatataaggaagatttgcaagtatatgtatttttcttctgagcaacttttgacctctacttaacactattgtcatagaatttaatttctaaactgatgtcaacttggcaggtttctcttattttgtttcctcttttacctaaca

SEQ ID NO: 67950 - DNA, 599 bp, Chicken  19866894338362_1
  misc_feature (1)..(113): n is any nucleotide
nnnnnnnnnnnnnnnnnnnnnnnnnnnnnnnnnnnnnnnnnnnnnnnnnnnnnnnnnnnnnnnnnnnnnnnnnnnnnnnnnnnnnnnnnnnnnnnnnnnnnnnnnnnnnnnnnctgtgccacagattacaaccctctgagctctgccagtcagtcaattccctatccacctcagagtccacatgcagcacctatattatgtgaacttgcctgtgataatgttattggacacagtgtctaggtagataacatcttgctgaagtctaggtagataacatccactgctttcttctcagctatycagacagctggttaagcattatttccctttcatgaatccatgcagacattaaattagctaagtattgaggcattaattaaaaaatcctgagatattgcctggtaatttgcagtccagattataaataaactacgaaaattaatttatactttaactattgataatacagttatgcttgctactgtgctttgacagatatcagagttttttttctggtttatttatttgtttgccttcatgagaacttcaggcttataaagttgaaagattcagagaaatggctaattattgaaaatcac

SEQ ID NO: 67951 - DNA, 599 bp, Chicken  19866894338368_1
  misc_feature (1)..(55): n is any nucleotide
nnnnnnnnnnnnnnnnnnnnnnnnnnnnnnnnnnnnnnnnnnnnnnnnnnnnnnngggtgttatctgtagaggttaacttctttaaatttcttttaatgtcttcatgattggaaaacagaaaaccttaatataaaagacaaattaaatttgctaataactgggaagtagagaaatatgccatcttataatttatgctgatagctttctgtagacttagaggggaaaaagaaatatattttagagttggccctgagaatgtgaaaaaccttctgtactacaatagaattgaagctgtttarctgcaggtatgaagttttaagcctgcaaaatctgcagtgatgtggaagttccatagatctgtagaaaataagtccaggaatggggcagaaggtagagatttcgacaagtctaaacatycaggaatttgactctgtaaatacatttgcatcagcagttttggatttaatactgtatgctatttcgctaaaatagaaacagtaatactaataaaggaatgctagtggaaaaattctgctattgcatgttctactaactatagaagcatatgtactatgagctactctgttgttttgaatgt

SEQ ID NO: 67952 - DNA, 600 bp, Chicken  19866894338368_2
gaaaaccttaatataaaagacaaattaaatttgctaataactgggaagtagagaaatatgccatcttataatttatgctgatagctttctgtagacttagaggggaaaaagaaatatattttagagttggccctgagaatgtgaaaaaccttctgtactacaatagaattgaagctgtttarctgcaggtatgaagttttaagcctgcaaaatctgcagtgatgtggaagttccatagatctgtagaaaataagtccaggaatggggcagaaggtagagatttcgacaagtctaaacatycaggaatttgactctgtaaatacatttgcatcagcagttttggatttaatactgtatgctatttcgctaaaatagaaacagtaatactaataaaggaatgctagtggaaaaattctgctattgcatgttctactaactatagaagcatatgtactatgagctactctgttgttttgaatgtttctgtagctggaattcaccatgcgagaggctgtgcagtgcctacatgcattggaagaatattgcccctctaaggaagactacagcaaactctgcttgctgctcacgttgcctcgcttg

SEQ ID NO: 67953 - DNA, 599 bp, Chicken  19866894338384_1
  misc_feature (1)..(75): n is any nucleotide
nnnnnnnnnnnnnnnnnnnnnnnnnnnnnnnnnnnnnnnnnnnnnnnnnnnnnnnnnnnnnnnnnnnnnnnnnnngaaatctaatttgactgagtgagtcacctcgccgcatggaattggatgtgccgggctttgttactatctgttcagcaaaagcctctgcgggatgcattaactccagctccatgacaaagcagcaaagattttgggcaacagaaagggctgctcacatcctgggaccttatggagctgaggatttttgatatccctagtcaaggggaatgggagggggatggtttyctcagcatcgtgctggttggcagcagagagaagcaggaaggggttttgcwgcacgagagcaaaatgcaccgtgtcaaacatgcagctcacccttctgcatcacaacacctttcagagccgcatcccgagcagcacccgttgctccatgcagacacagcagagcagcgcagtggggacgcgtggggtcggtgcaggggagcccagctgtggaaacgctgcctctgctctttgctaagccctgactcgatctcgtttcctttgcggcgagcgtaggaagcgcttacgcagacatcgggctt

SEQ ID NO: 67954 - DNA, 599 bp, Chicken  19866894338384_2
  misc_feature (1)..(25): n is any nucleotide
nnnnnnnnnnnnnnnnnnnnnnnnngaaatctaatttgactgagtgagtcacctcgccgcatggaattggatgtgccgggctttgttactatctgttcagcaaaagcctctgcgggatgcattaactccagctccatgacaaagcagcaaagattttgggcaacagaaagggctgctcacatcctgggaccttatggagctgaggatttttgatatccctagtcaaggggaatgggagggggatggtttyctcagcatcgtgctggttggcagcagagagaagcaggaaggggttttgcwgcacgagagcaaaatgcaccgtgtcaaacatgcagctcacccttctgcatcacaacacctttcagagccgcatcccgagcagcacccgttgctccatgcagacacagcagagcagcgcagtggggacgcgtggggtcggtgcaggggagcccagctgtggaaacgctgcctctgctctttgctaagccctgactcgatctcgtttcctttgcggcgagcgtaggaagcgcttacgcagacatcgggctttgtgaacatctgcccagcacccccaggctgcctgcaggcacrgagcgagc

SEQ ID NO: 67955 - DNA, 417 bp, Chicken  19866894338384_3
ggttttgcwgcacgagagcaaaatgcaccgtgtcaaacatgcagctcacccttctgcatcacaacacctttcagagccgcatcccgagcagcacccgttgctccatgcagacacagcagagcagcgcagtggggacgcgtggggtcggtgcaggggagcccagctgtggaaacgctgcctctgctctttgctaagccctgactcgatctcgtttcctttgcggcgagcgtaggaagcgcttacgcagacatcgggctttgtgaacatctgcccagcacccccaggctgcctgcaggcacrgagcgagcaaagctccccggccagatgttgccggggtcaggagctctgcagagccaaagcagcttttccaatcacagcctcaagaggaacaaatgtccccgtgctcccttcctacag

SEQ ID NO: 67956 - DNA, 600 bp, Chicken  19866894338386_1
catttctaccacacaatttgaaaaaaggatgctagtgttgcataatattttcgcacagttgattctgttgagaaaattcagaaaggcagaagggctggcagtcaggcactcacagtttgaggctacgctaattcaactaccgctgttcatttgaaatctatttctgtactagaaggcttgaacgaatcacgtccagcttctgtttctccatcaagacccaaaatgagccacctaagctgaggcaaggacacccatggcatggtctgcagcagcctggaggggtagacagatatgtatttrtgctgagmcaagagcatgctgccaggaaggacagaacgtccttctctctaatgctcctggctcctccacaggcctatccaacacctagcacccatgctgaacttctgcttaccatggttctacacaaactgttaacagggcagaaatcyacttgaggagtagcttttgagctggctgaggttggcctgtcccctctctggtgaaaccacagaggtgggcatagccaggagggacatgctgaggtggaaggacaaggacatcccttgcagtagcaatcatacgtcaaggtgcttcagctat

SEQ ID NO: 67957 - DNA, 600 bp, Chicken  19866894338386_2
ccacacaatttgaaaaaaggatgctagtgttgcataatattttcgcacagttgattctgttgagaaaattcagaaaggcagaagggctggcagtcaggcactcacagtttgaggctacgctaattcaactaccgctgttcatttgaaatctatttctgtactagaaggcttgaacgaatcacgtccagcttctgtttctccatcaagacccaaaatgagccacctaagctgaggcaaggacacccatggcatggtctgcagcagcctggaggggtagacagatatgtatttrtgctgagmcaagagcatgctgccaggaaggacagaacgtccttctctctaatgctcctggctcctccacaggcctatccaacacctagcacccatgctgaacttctgcttaccatggttctacacaaactgttaacagggcagaaatcyacttgaggagtagcttttgagctggctgaggttggcctgtcccctctctggtgaaaccacagaggtgggcatagccaggagggacatgctgaggtggaaggacaaggacatcccttgcagtagcaatcatacgtcaaggtgcttcagctatgctgtctt

SEQ ID NO: 67958 - DNA, 600 bp, Chicken  19866894338386_3
tttgaaatctatttctgtactagaaggcttgaacgaatcacgtccagcttctgtttctccatcaagacccaaaatgagccacctaagctgaggcaaggacacccatggcatggtctgcagcagcctggaggggtagacagatatgtatttrtgctgagmcaagagcatgctgccaggaaggacagaacgtccttctctctaatgctcctggctcctccacaggcctatccaacacctagcacccatgctgaacttctgcttaccatggttctacacaaactgttaacagggcagaaatcyacttgaggagtagcttttgagctggctgaggttggcctgtcccctctctggtgaaaccacagaggtgggcatagccaggagggacatgctgaggtggaaggacaaggacatcccttgcagtagcaatcatacgtcaaggtgcttcagctatgctgtcttctgcgctctgacttaaaaggatcgaagcctggagtttgctgcaccttacatttcagtaagttttatattcttgccaaaagtatttcaaaaatgtctattttaaacaaaagctacatgtaaattattcagataagaatgttt

SEQ ID NO: 67959 - DNA, 512 bp, Chicken  19866894338400_1
gtgtgcaagctcagattgcaagcgttcattagatatttccatctctgtgaacctcatcaatattaatatccccatctttaagactgggaagctgaagcagagagcggttattcatctttcccagtgtctagattagaggaaccaggaacaaaaacatagaaaattgaaggagcaatgtaaaaaaatactgctttttctgagaatatagtttgcatctcttttaactgaagctaccctgctctgttctaactcaattcagacaggaggaaacaataaaaaggacttttctcaaaatatctstgaaatgtcactctgccccatcagttctcagctgtcattttccctccagtggaagaggaggagcctggaagcactgctggaaaactccagggcagggactgtgatgcgtcttccttgatgtcaacgacaaaagtcataccaaattatgcggagagaattcctctgggcctgaagcaatcccgagagctggggctgcaggggtctgcagaagt

SEQ ID NO: 67960 - DNA, 600 bp, Chicken  19866894338411_1
tgcaattgcagatcttgagggcttacagatcatggtgaaaatattggactctccagatacagatctaaaatgtttggctgctgaaacaattgctaatgttgctagatttaaacgagcacgaaggacagtaaggcattatggaggaatcaagagactggtaagcagacattaaaattagtacctttcccataggcatatattttttttcaaaaaaaaattgtgatttgttgtttatgtgattcttgaaatagtagctgccatcactgaaaaaagcagtatagtatcaaacatacttgtagmaaattaaaaatatgtttgttttgttaggttgggctgttggattgtatgtcagtgagatcaactggtcttacaccatatcaagaaaaagatactgaaaaagcacgttgtggggctttagcactctggagctgcagcaaaagtaccaaaaataaggaagcaatccgtaaagctggcggcattccattattagctaagtggcttaaaagttcacatgtagacatcctaaccccagttgtagggatattacaagaatgcgcctcagaggtaagtaaaccacacacatatatgctatttctaatc

SEQ ID NO: 67961 - DNA, 600 bp, Chicken  19866894338422_1
cagtaacaattcactcctgttcagatactgtacatttcctcctgttggtgcttgtttgtttttttttcttttcccatcagatagagcagtaatgcttttcaggtcttggaaatcttcaggtttggacttgtactcagctcattggtttacttacctttgctgtagggaaggtgtgctatgcagtgaccagcttaggtttaaaattcctcttccttcagccccagagagcttcttttgccaagcagtacagaagcagctgctgccacttgtctgctttctggtatttggaggcagctgcayatctgactgataaakttctcctttctctagcttctgtactcttgtttgatcctgttctttcttctggcaggcagcagtggttcccactgccggtgggcagctctgggtgtttggcggggagtttgcatctcccagtggggaacagttctaccattacaaggatctctgggtcctgcatttggccaccaagacctgggagcagatcaagtaagtggtgtgttctcaagtccgtaatgatgacctcatgaggaactgtgtcagcatggtctgaacttggttcctggtgtggtgctgtgattt

SEQ ID NO: 67962 - DNA, 600 bp, Chicken  19866894338422_2
cctgttcagatactgtacatttcctcctgttggtgcttgtttgtttttttttcttttcccatcagatagagcagtaatgcttttcaggtcttggaaatcttcaggtttggacttgtactcagctcattggtttacttacctttgctgtagggaaggtgtgctatgcagtgaccagcttaggtttaaaattcctcttccttcagccccagagagcttcttttgccaagcagtacagaagcagctgctgccacttgtctgctttctggtatttggaggcagctgcayatctgactgataaakttctcctttctctagcttctgtactcttgtttgatcctgttctttcttctggcaggcagcagtggttcccactgccggtgggcagctctgggtgtttggcggggagtttgcatctcccagtggggaacagttctaccattacaaggatctctgggtcctgcatttggccaccaagacctgggagcagatcaagtaagtggtgtgttctcaagtccgtaatgatgacctcatgaggaactgtgtcagcatggtctgaacttggttcctggtgtggtgctgtgatttcccagctgtctgccc

SEQ ID NO: 67963 - DNA, 417 bp, Chicken  19866894338422_3
tctcctttctctagcttctgtactcttgtttgatcctgttctttcttctggcaggcagcagtggttcccactgccggtgggcagctctgggtgtttggcggggagtttgcatctcccagtggggaacagttctaccattacaaggatctctgggtcctgcatttggccaccaagacctgggagcagatcaagtaagtggtgtgttctcaagtccgtaatgatgacctcatgaggaactgtgtcagcatggtctgaacttggttcctggtgtggtgctgtgatttcccagctgtctgcccrtctctcccttgggtacagagatgcccatgtagaaatactggagaggacagcttccagaaaaaagaggaagcaagagacgtatccaagaccatcaaggacaaagctattttgtacaat

SEQ ID NO: 67964 - DNA, 600 bp, Chicken  19866894338425_1
ggcccaaggactatcccatagctacacatacagttccatttttttatatacgacttgatattattatatatattattatatatattattatataccacttgctcttctaatcagtcagttggaattgtggtggtatgggatcaaaatactgtagttggacagaaaaggaggcaaaagacatatatatgcatatatagatactttccccatattcctatggctttaagttgtagcacaaaaaagaaccttcaaataacttcgctcatagcagcaagaaaatggtagttagaaagaccattwctggaagaaagtcattattttgtttttccattgtacatactgctaaaagactcaagggttgtaacaggttatctagagctttctgtaacaacacaaggagctaagaaagcaagaatgaacaaaaagctctgtgccagtgcatattaaattatcccatgtaatttctactcttccagtctttgccccatgtatgtccagtttaaatgtcaaatacagaagggaaaattgcagacttttttgtacttacacactatataatcttttttttttcttcccctactttcactgagtttttaccca

SEQ ID NO: 67965 - DNA, 480 bp, Chicken  19866894338425_2
cagtttaaatgtcaaatacagaagggaaaattgcagacttttttgtacttacacactatataatcttttttttttcttcccctactttcactgagtttttacccagggaaggatagatcagaattatatgcagagttatatcctagggtctgcttgatacaaaccttttaaatacttttatttaattctgagcacctggtatttctgggagttcagttccacatttcttcccaactagttctctttagactttacaagaacaaagttaataaattccatggcaccaaacacagaaaaaaytggaagctgttttccaatccagagctagacaaccttgtgtctttgtccatatcatgcattcctcctgactggattctctctctgcatggacataaaatagtctagtatttgtatttggaccactttctttaatattattagactatgtaggcacttattttaggaatcatatggcttgtt

SEQ ID NO: 67966 - DNA, 414 bp, Chicken  19866894338427_1
gggaagagttccctgatgaatagatatgtcaccaacaagtttgatgcacagctttttcatacaataggtgtggaattcttaaacaaagatttggaagtggatggacactttgtcactctgcagatctgggacacagcaggtcaggaacgttttaggagcctgcggactcctttctacagaggttctgactgttgcctgcttaccttcagcgtggatgactctcaaagctttcaaaacttaagcaactggaagaaagaattcatttattacgcagatgtcaaggagcctgaaagctttccrtttgtgatattgggtaacaaagttgatataaatgagaggcaagtgtctacggaagaagcccaagactggtgcaggaataatggtaatcatccctattttaaaccagtgcaaaag

SEQ ID NO: 67967 - DNA, 600 bp, Chicken  19866894338428_1
gatcagaggacattagtatacaagactgtgagacagtctagaagctttctccatccactccacacacatcccctgtaaaataagcaatggtaacagtggttgactgaggcaacatataagaacatgctatgacttctcttgagagcactctatttccagcaacatgcccttgaaggatttcctgggagaggtgatccgttcttatcaacacagctaaaactctttgcaagaagccagatcatcttgttttaataacacattcatgcaaagctacttgattgctcctaatggtttggttgmaagatcgttctaaragctttcttacttacatgggaattctttttttcaagcctactccttttaggctgtgaagtcttgacttcacagttttcaaagcaataaggcacaggtggtataacagggagaccagtgaaggaggtaatgtccatgcaagcactgttcattactaatgcagactgcaaataagccatgctttaaaactcagatgcttgaaacaaatacaagaagctaaagtcacactgtgatggacttccatattagccagtgtgacaaaaacagtcttactgcagattatccatt

SEQ ID NO: 67968 - DNA, 596 bp, Chicken  19866894338428_2
agtatacaagactgtgagacagtctagaagctttctccatccactccacacacatcccctgtaaaataagcaatggtaacagtggttgactgaggcaacatataagaacatgctatgacttctcttgagagcactctatttccagcaacatgcccttgaaggatttcctgggagaggtgatccgttcttatcaacacagctaaaactctttgcaagaagccagatcatcttgttttaataacacattcatgcaaagctacttgattgctcctaatggtttggttgmaagatcgttctaaragctttcttacttacatgggaattctttttttcaagcctactccttttaggctgtgaagtcttgacttcacagttttcaaagcaataaggcacaggtggtataacagggagaccagtgaaggaggtaatgtccatgcaagcactgttcattactaatgcagactgcaaataagccatgctttaaaactcagatgcttgaaacaaatacaagaagctaaagtcacactgtgatggacttccatattagccagtgtgacaaaaacagtcttactgcagattatccattttccctaatg

SEQ ID NO: 67969 - DNA, 600 bp, Chicken  19866894338430_1
taaaggctgtctgtgggttccagaaaatgagcaacgcaacctttacctgcagcaacctattatatccatgcacttgcctgctcctcccatctttctgctggagttgacttgctcccagaagggcagaaaagagggacatgtgcgcgtggagcagttcctggtgtctgtggatctgtactgctctccaggctgcaacctctgagccagcagaggtactctcccacagctcttcactgctttgggtctgcttagagaacagatgttttcccattcttcctgagagcgtaggatctctgcacytcacatgggcgttcctgagtcattctcaaaagaaagggaggtttgatatcaatgttcaggagggttggaggattactaactgcgtgcaaacatctatggagcatactggttctgaagagcgtcccttggattgtgcggcctcctaggagagaaaaggatccaatgaatggtgttcaaaagagacgtggccaaagcagagaggctgtgctgctcctataaccagtgtaggattagagggagaattcaaggattgcaaagagtgccaagggagccacattactgtgcaacagccatgccaaa

SEQ ID NO: 67970 - DNA, 600 bp, Chicken  19866894338433_1
cttttgcagcagaacacagatttttatttacacagcattaagaagtataactaataaaatctgcccagatctacacggagacttgcacaacagtagttttgtttgcttaggcacattatttcaatgagaggagcaggctgctcatccttaactccattccatgtaagtcggtgtagttacaggctgacccaagactgtcaaagcatggtgttgaacctacaaatgatgtgttcagccagacactggactagcaaaacatatatatatatacatatatacaggaaaaatatcttaaaagtrtaagttacatatatattttattaacacttaccttctatttctacgtctgtctgagaattgctttttcctttacccactgacttgcttttggtagaacctgtgcttataccagctgtgtcctgtccttttgtaagtccattaggttcacttgtaggagaaggacatttctgaggagatgatggaggactgtttaatttatccttctgagttccatgccgatcttttaattttttttgtaacctttcatatgttttactagacctttcatctctaaagttggctcttccatgtgcaggcagg

SEQ ID NO: 67971 - DNA, 600 bp, Chicken  19866894338433_2
tggtagaacctgtgcttataccagctgtgtcctgtccttttgtaagtccattaggttcacttgtaggagaaggacatttctgaggagatgatggaggactgtttaatttatccttctgagttccatgccgatcttttaattttttttgtaacctttcatatgttttactagacctttcatctctaaagttggctcttccatgtgcaggcagggtatctaaatgaaagttaaataagcaaataaatcacaaagaacagaatgtaatcaaaaatcaatttaaaaatgccacgtgagctaagygtatgcttgtgtgcaaaaatacatctatattcctactataaaacggagctgtccagcaagtaaaattatacatggtaattggatcttaacgacctgttagaagagaaagcacaatctttccttctcatgtcatttttccacttaaaaattaatggtaaaatctttctatattcttctgtgagctgtaaggtgcagaataaagtcaacacagtcctcctcctataagtacttgattgcaaggtaggaaacttgccctgatgctgaatacaaaaaatacagaagttttaagtttgagaatgc

SEQ ID NO: 67972 - DNA, 600 bp, Chicken  19866894338434_1
gacttcaaatcaaaatatctttgaggcctttctagttttcccttacttaggaagtgggcagcccttccacgcccttcctaggcacatgaagcaactggtttacaaaggaaagtagctatgtccaaaaatagatgcaactgctttgtttttttcctttaaactatatgaacagtatatggtatgtactatatactatatggtatatactatatactatatggtatcctgggctccatcatgagaggggtggccagcagggacaaggaggtgactgtccctctctactctgctcttgtgagrccccatctggagtactgcatccaggtatggagcccccagtacaagaaagacagagagctgytggagagggtccagaggagggccacaaagatgatcagggggctggagcaccacctcccctacgaggacaggctgagggagctgggcttattcagcctggagaagagaaggctgcggggtgacctcatcgcagcctttcagtacctgaagggagcctataaacaggaaggtagtaaactctttgaaagggtagataacagcaggacaagggggaatggttttaagttgaaagagggaaga

SEQ ID NO: 67973 - DNA, 600 bp, Chicken  19866894338434_2
cccttccacgcccttcctaggcacatgaagcaactggtttacaaaggaaagtagctatgtccaaaaatagatgcaactgctttgtttttttcctttaaactatatgaacagtatatggtatgtactatatactatatggtatatactatatactatatggtatcctgggctccatcatgagaggggtggccagcagggacaaggaggtgactgtccctctctactctgctcttgtgagrccccatctggagtactgcatccaggtatggagcccccagtacaagaaagacagagagctgytggagagggtccagaggagggccacaaagatgatcagggggctggagcaccacctcccctacgaggacaggctgagggagctgggcttattcagcctggagaagagaaggctgcggggtgacctcatcgcagcctttcagtacctgaagggagcctataaacaggaaggtagtaaactctttgaaagggtagataacagcaggacaagggggaatggttttaagttgaaagagggaagatttaggttggatgtcagggggaagttctttaccaggagagtggtgaggtgctggaacgggc

SEQ ID NO: 67974 - DNA, 600 bp, Chicken  19866894338438_1
tcaaatgggtggtacaacccctcatttaggcaagacttttttaaagattgctaaatttagaataagttcattataaagcaaccattatctcatcccaaacctgtgaagtcttgcccttctcacattaatattgcaggagatttgctcatatttagatggtagcatttcatcatcactgagtcatctgttcaaaatccattgttgtttcacatcttaattccagtcatgccacacagcattcacattctgtgaactagttctcgcagaaatttctatggcaattaccaaattccccttttytataccagcacaccccaaacggaacagtttaatgactctagattaagatctttagaaagcatagaatttgctcaattcctcaattagcacacattactagaatcactaatagccatcagctgaatcatccacagctcaccatcatttttcttctgaaaaaaaaaaaaagaaacaaagctttagggacaggccattttcaaaactaaggttaggcaaatgttttaatctatatttctggcccagacaatgacgaggctgcagcattctcctcactacttcagttaaataagaaaaaagaag

SEQ ID NO: 67975 - DNA, 600 bp, Chicken  19866894338449_1
tcacgctaagagattttggtgaaagaaaggtagccaaactctgttttgtcatcagaactcttaagaggctgatgctgaacacatttctaaccataaaagcattggtgctgaactgacttctgtcatttccactttggtattactcagcggtccaagtctacttgcaaaggtccagcatgctaaatgctctgatctcatagcatcattaagaaatagccactatgctgacattcattcttattcctctgtggcaactgaacgggctgagaagggacagcttgacagctccctgcatcaggrggcagaaactcttcacagaccttgatgaaacgctctgccatatggtgcagcaacactggcacttcttccaggcaatctaagagtcaaaattagcatggtatgcacttaattagcagcatgggctgagaagacgaaatgtttgtcaagctagctatgtacattagagaccaccaagctggtctttcacaattctgaagcttaagttcagattttttattgttacagtacttgcttggaatacatcacatctcctcctgcatgccctgtaatccacagcctcagctatacaaggagccctct

SEQ ID NO: 67976 - DNA, 600 bp, Chicken  19866894338463_1
atagtgtagcttatatcataagcatccatttctcctgccctcaggacaccgtcaatccagtggaagatacaccagtgtgctgctgtcagtaacacagatggttgaaatctgcacatctcttccactgaatagtgaactgaatgtggtctaaagtaacctagcccagaatgcagtatgtgtaaatgagaaaaaaaaaaaagagcaatccttttcgtgcagattcaagcagcacctgatattcaagaacaataatctttagttgtgagaagtagcttccttcagcagatccatctggaatgwgagctctcatgaaatgtatcaattcaatgccaaaaccccagaaatcttatggagatgctgtgtatgaaaaactgagcagggttttaggagggctgcagggctgatatctactgtttggtctttgcagtttactcagacaatggcagtaagttgcttgaaaaggaaaggtacagagctgggctcaagtacaagctaaagtctatagcatctcagaggacttagaagaaatacaatgtgcatcatcttacaccagctgcctttcctacaggagggcagtttaatccctttctttccttctat

SEQ ID NO: 67977 - DNA, 599 bp, Chicken  19866894338467_1
  misc_feature (1)..(47): n is any nucleotide
nnnnnnnnnnnnnnnnnnnnnnnnnnnnnnnnnnnnnnnnnnnnnnnactgcctatggttctgtgaatgggagaaatgcctcacttcatccttcctgaaaacaaggctcctaaaaggagttgtatacgcctaaagtcattgattaaggaattctaagttaaatccatttccttactgtttcttaacatggctgccttgctgctgtagtagcccatggaattacctcgtgcctgataagatgcatcatccagaaatcagtatcttgtattcataggcagagactcaactgtacagccatgyrttgctgatacttcytcaggctatcagctatctgactagggagcctgctgctgccacaacagtatagtgtacaatgtatgtgcttcagaatcctctcaaatgtgcattcgtttgaaccccgctgtctatagactcttacctcaataacatcaactgctgcaaatttggatgaaaacagcgcrttctgrgaggcaccttctctgctggatactgcaccagagtgactgggaacaactgcttctgtccttgcttcaggtaaaattaagactgctgaagaaggtttaatgtctggtgtcatg

SEQ ID NO: 67978 - DNA, 599 bp, Chicken  19866894338467_2
  misc_feature (1)..(46): n is any nucleotide
nnnnnnnnnnnnnnnnnnnnnnnnnnnnnnnnnnnnnnnnnnnnnnactgcctatggttctgtgaatgggagaaatgcctcacttcatccttcctgaaaacaaggctcctaaaaggagttgtatacgcctaaagtcattgattaaggaattctaagttaaatccatttccttactgtttcttaacatggctgccttgctgctgtagtagcccatggaattacctcgtgcctgataagatgcatcatccagaaatcagtatcttgtattcataggcagagactcaactgtacagccatgyrttgctgatacttcytcaggctatcagctatctgactagggagcctgctgctgccacaacagtatagtgtacaatgtatgtgcttcagaatcctctcaaatgtgcattcgtttgaaccccgctgtctatagactcttacctcaataacatcaactgctgcaaatttggatgaaaacagcgcrttctgrgaggcaccttctctgctggatactgcaccagagtgactgggaacaactgcttctgtccttgcttcaggtaaaattaagactgctgaagaaggtttaatgtctggtgtcatgt

SEQ ID NO: 67979 - DNA, 599 bp, Chicken  19866894338467_3
  misc_feature (1)..(32): n is any nucleotide
nnnnnnnnnnnnnnnnnnnnnnnnnnnnnnnnactgcctatggttctgtgaatgggagaaatgcctcacttcatccttcctgaaaacaaggctcctaaaaggagttgtatacgcctaaagtcattgattaaggaattctaagttaaatccatttccttactgtttcttaacatggctgccttgctgctgtagtagcccatggaattacctcgtgcctgataagatgcatcatccagaaatcagtatcttgtattcataggcagagactcaactgtacagccatgyrttgctgatacttcytcaggctatcagctatctgactagggagcctgctgctgccacaacagtatagtgtacaatgtatgtgcttcagaatcctctcaaatgtgcattcgtttgaaccccgctgtctatagactcttacctcaataacatcaactgctgcaaatttggatgaaaacagcgcrttctgrgaggcaccttctctgctggatactgcaccagagtgactgggaacaactgcttctgtccttgcttcaggtaaaattaagactgctgaagaaggtttaatgtctggtgtcatgtcagcaaaccagtcc

SEQ ID NO: 67980 - DNA, 600 bp, Chicken  19866894338467_4
taacatggctgccttgctgctgtagtagcccatggaattacctcgtgcctgataagatgcatcatccagaaatcagtatcttgtattcataggcagagactcaactgtacagccatgyrttgctgatacttcytcaggctatcagctatctgactagggagcctgctgctgccacaacagtatagtgtacaatgtatgtgcttcagaatcctctcaaatgtgcattcgtttgaaccccgctgtctatagactcttacctcaataacatcaactgctgcaaatttggatgaaaacagcgcrttctgrgaggcaccttctctgctggatactgcaccagagtgactgggaacaactgcttctgtccttgcttcaggtaaaattaagactgctgaagaaggtttaatgtctggtgtcatgtcagcaaaccagtccagctcagggtcctgcactggtttcctcttcactttgatggtgaattcttctcctaggccagactccaatgaagacttcaatctttcctctaaggtctgtttgggcagcacagtttttcctagttgtcctcggtggtcccatttgtcattgttccagctgttcccaggg

SEQ ID NO: 67981 - DNA, 600 bp, Chicken  19866894338467_5
ggctgccttgctgctgtagtagcccatggaattacctcgtgcctgataagatgcatcatccagaaatcagtatcttgtattcataggcagagactcaactgtacagccatgyrttgctgatacttcytcaggctatcagctatctgactagggagcctgctgctgccacaacagtatagtgtacaatgtatgtgcttcagaatcctctcaaatgtgcattcgtttgaaccccgctgtctatagactcttacctcaataacatcaactgctgcaaatttggatgaaaacagcgcrttctgrgaggcaccttctctgctggatactgcaccagagtgactgggaacaactgcttctgtccttgcttcaggtaaaattaagactgctgaagaaggtttaatgtctggtgtcatgtcagcaaaccagtccagctcagggtcctgcactggtttcctcttcactttgatggtgaattcttctcctaggccagactccaatgaagacttcaatctttcctctaaggtctgtttgggcagcacagtttttcctagttgtcctcggtggtcccatttgtcattgttccagctgttcccaggggaggac

SEQ ID NO: 67982 - DNA, 600 bp, Chicken  19866894338467_6
tctgctggatactgcaccagagtgactgggaacaactgcttctgtccttgcttcaggtaaaattaagactgctgaagaaggtttaatgtctggtgtcatgtcagcaaaccagtccagctcagggtcctgcactggtttcctcttcactttgatggtgaattcttctcctaggccagactccaatgaagacttcaatctttcctctaaggtctgtttgggcagcacagtttttcctagttgtcctcggtggtcccatttgtcattgttccagctgttcccaggggaggactttgttgaggractcactttgaggctttccmattccttgctctgttgatgggtaccccggtagagtcctctgcatttcagctgcatcagcttgtgtcacagtgaggcagtttcctgaggtcaggtcagtatgagggctgctgggctcaaagtcatcccaaggcttctcatctacatcacgttcaacaaaataaggtcccatgctgccctgtggcttttggggctgaatttggatgttcacagttttctcattctctgtctcctctggctcactccagtctggccactcctctgctggcttttcggaggtag

SEQ ID NO: 67983 - DNA, 600 bp, Chicken  19866894338467_7
agtgactgggaacaactgcttctgtccttgcttcaggtaaaattaagactgctgaagaaggtttaatgtctggtgtcatgtcagcaaaccagtccagctcagggtcctgcactggtttcctcttcactttgatggtgaattcttctcctaggccagactccaatgaagacttcaatctttcctctaaggtctgtttgggcagcacagtttttcctagttgtcctcggtggtcccatttgtcattgttccagctgttcccaggggaggactttgttgaggractcactttgaggctttccmattccttgctctgttgatgggtaccccggtagagtcctctgcatttcagctgcatcagcttgtgtcacagtgaggcagtttcctgaggtcaggtcagtatgagggctgctgggctcaaagtcatcccaaggcttctcatctacatcacgttcaacaaaataaggtcccatgctgccctgtggcttttggggctgaatttggatgttcacagttttctcattctctgtctcctctggctcactccagtctggccactcctctgctggcttttcggaggtagtcaaagagctcctgctgctc

SEQ ID NO: 67984 - DNA, 599 bp, Chicken  19866894338490_1
  misc_feature (1)..(202): n is any nucleotide
nnnnnnnnnnnnnnnnnnnnnnnnnnnnnnnnnnnnnnnnnnnnnnnnnnnnnnnnnnnnnnnnnnnnnnnnnnnnnnnnnnnnnnnnnnnnnnnnnnnnnnnnnnnnnnnnnnnnnnnnnnnnnnnnnnnnnnnnnnnnnnnnnnnnnnnnnnnnnnnnnnnnnnnnnnnnnnnnnnnnnnnnnnnnnnnnnnnnnnnnnntggtggcacacatgactctggcagagggtggcacagggtggcacatggtggcacacagtgacacgtggtggcatgtggtggcacacaggacctggcasagggtggcacatggtggcacatgatgtcacatagtggcacatggtgccatgtggtggcacagggtggcacgtggtggcacagagaagcacagggtggcgcacagtggcatgtggtggcacatggtggcacacaggacctggcagagggtggcacaggttggcatgtagtggcacatggtggcatacagtggcacatagtggcacatggtggcacacaggacctggcacagggtggcacaggatggcatgtagtggcacgtggtggcacacagtggcacatggtggcacacggtggcaca

SEQ ID NO: 67985 - DNA, 600 bp, Chicken  19866894338494_1
tgagtacgtttgaaggctatttcagtggtggggtaactgtaacgtggaacataaagggatagagatctgtccattggattataactccagagacctaacatacagacagttattctgagtggttctacaaagctaagaagaaattaaaaactcagctgaatatatgttattcatggccagtgttagggggaagttcagcaaggggtgagagagttctctcatttctaacaaaaggctcctgctgtccatctgggcatgaatcttcttaaatgtcagctacactttgggagggcttgcacygctgggccagagctttgcatgaaagtggcctggttttgttttcttgttgacctccagtgcagttatgtgtgtctttgtttccttttgaaacacttctcatagtgttagaattgaactgtttaaaaaaaaagttgttcgtggttttttttttttttttttccccatggagatagatgtaaatattaaaagcaggcacagataaaataataaacattcaaaacagagaactttgaattatgctttgttttggaatagattcctccaacatgcgtggattcagagatatatgagtttcccttg

SEQ ID NO: 67986 - DNA, 600 bp, Chicken  19866894338498_1
atgtccatcaagataatgactttggtggcaaaagtaacacaaaaaatgatcgcctcttctcgtttcctctcaagtgcagatcacctccatcaccctgaatcagggttttgtgggttgcaccataaatgagccactgggtagatctcagttcagaaccgcactctcatgtgttggttgacacctgccaagcagcctgagcctgtccatgctcaggctttgcaggccttttggctcttcacatgaagcttgtcctataaggccttcacgggctgcaaaaaaagcgatctcagagttacacayagggcaaggtttactgggaattttgggtgttcacaatggaaacgtgctacagatcaccactgtttcttcctttcttctcttccaggtaggctgcaaagccatgatggttttcttccagtactgcgtcatggccaacttcttctggctgctggtggaagggttgtatcttcacaccctgttggtcatctccttcttttcagagaggaagtacttctggtggtacatcttaattggctggggtatgcatcttctcaggtctgaataccaggaggtgaccctggcaggcatttttaacagcaa

SEQ ID NO: 67987 - DNA, 600 bp, Chicken  19866894338504_1
acagccgggctgtggttctgtgccagtgggaaaaagaagcaaacatacatgcatacagacctacattttacatgtacgtacacatatctacatgtatgcatcgtattttacagagggaggtgtactcaagagacagctgcgagtgcatacagtcctctgtcgctattcagtgataatctacacccaattagcaaacagtattcttgaccctggaaagtattttgctcagtgacacactgtaggtgcattacgtgcatccctgatactcagaactgaaacactccgcaaatgatgcggtaygtgtgatttccaaaagaaaccatccaacaaaacaattgccagcactgcggttctgtggctgtggatttaagttttgttgtggacaaagtaccgtagatcgatttttatctcatcccaccattgctgaagatattttcctgtgtgccccgtaatctgctggaattaaaacaccacgcagatctgtaactacatcactgcatttaagcagtgtctttcataaaaccctcaatcccaatccctgcggcatccacccgctgcacacggctggtctgtagccggcacggtgacgcttcagaaacc

SEQ ID NO: 67988 - DNA, 520 bp, Chicken  19866894338506_1
aagctgcagacgtgtcccatcagctcccagctgaacaaaacccagagagagctttgggaatcagaccagaggcagacagccaacgaagtttgttgttgctttcttgctttttatttgttttccgaatctacttcctagtgtcttaattcactttacttttcatctggtcatctggcaaatgtcatctggtctggaaaatactttcaggatttgctggcagtagctcaaggcagcctgtcttcagggctgaggaatagaacaaaagtctgctaaaattccacctttgtgttaatttgtatyaaggcaaattatgcttaaattgtccttctcctttctggaagaaagyagtgaagcaggaactgtgaaaagagaggaaaagctgccttctaaacatatcgaagtaggacagaagccagcctaatcctcgctaaataaaacgtgaaacaaccaaaaaaagagaaagaagaggcagaaagcgaaaaactataacaaagagctagaaaatcaatcagcaatgcca

SEQ ID NO: 67989 - DNA, 474 bp, Chicken  19866894338506_2
gagagctttgggaatcagaccagaggcagacagccaacgaagtttgttgttgctttcttgctttttatttgttttccgaatctacttcctagtgtcttaattcactttacttttcatctggtcatctggcaaatgtcatctggtctggaaaatactttcaggatttgctggcagtagctcaaggcagcctgtcttcagggctgaggaatagaacaaaagtctgctaaaattccacctttgtgttaatttgtatyaaggcaaattatgcttaaattgtccttctcctttctggaagaaagyagtgaagcaggaactgtgaaaagagaggaaaagctgccttctaaacatatcgaagtaggacagaagccagcctaatcctcgctaaataaaacgtgaaacaaccaaaaaaagagaaagaagaggcagaaagcgaaaaactataacaaagagctagaaaatcaatcagcaatgcca

SEQ ID NO: 67990 - DNA, 600 bp, Chicken  19866894338507_1
aaggtcacttccattctaagctgttctatgattccacattgtcccccgcctgccctgtggtagctgcatcttgtgtggtgcgttacaaagcgtaacggttgaggtttgatttagccctcaaagcacaggcggggagctgtgagttttgagctgaggtagtgttacagtcaggctgcctgcaggaggatttctctgctgttgcttaaaatagcagcaggtaaggaacggaaaagctgatttgtgccctgtctgaccgacttctttgggcacgtcactggggcttctgcaaggcgattactyggtgtaggtcttgctgctttttatagcttcgtttgcttttctaaaatgagctcgtatggaagtccaccatcagaatcatagaattccttcggttggaagggacccttataggtcatctagtccaacacccctgcagtgaacagggacagatcagaatgtgcttttttgtttttctcctggataggggaatcccagttctgtaacttgaaaaacttctgatttacttttttaatgctctttcctttgacttttaacacttttcaaaagatgcagctttcttgctttttttttttttcttcg

SEQ ID NO: 67991 - DNA, 600 bp, Chicken  19866894338510_1
accatcacatcctggctttgctgcaggctttggtgacaagcaggacgagcccagagttggagcagctggaagaagaggacagaaggctgagcagaagtctggacaacgtggtccaaaatccctaccaagtcaggtgcaagctggcactcctgccactgtctgagaggtggctgtcggggggcatggtgagtcatggcatggatttgggctgtagggattgggctctcatccccactgccttcagaaaaggaaggctggttgtcattacctgaagccttgtttcatccagctgaagatcaytgtgtagcttaaagctgtattttaaggagcctgaagacatcagatagcttcatgttagattctaaccttctggggggatcagtcattttgttctctatctttcttaccaaacacgatgggactaaaagtagtgaacggggatagcagttggctcagtgaccgactcagggctgggctgagttgtccactttggttcctttgaggtaggagtggttttgcttctttcatcacaggaggattcctttggagacatctactgcaaagctttagatacatttggaatactctgctttggcctct

SEQ ID NO: 67992 - DNA, 600 bp, Chicken  19866894338510_2
tttgttctctatctttcttaccaaacacgatgggactaaaagtagtgaacggggatagcagttggctcagtgaccgactcagggctgggctgagttgtccactttggttcctttgaggtaggagtggttttgcttctttcatcacaggaggattcctttggagacatctactgcaaagctttagatacatttggaatactctgctttggcctctaccggctgatggaggagcccaatccattcaagaacaggcaagtatgcttcattttaagttgtactgaaagtcaaaggatgccagtygtgactttgaagttaagcatctgtggaaggcaatctgaattccttacctttgtcttragttcagacayccttgtaggcaacaaaggccatctgaggcaaacaggtgagtagtctgaacttggttctctgatgatttctggagatccggtgcttattggtgctttcatgaggttctctgaagttcatttgaagtgtgatttatcttttcttcattagagagcatgaagttataacactgctgagggcagagagaactgcctcatctgagcccttctactcccattctttccattgcaaggt

SEQ ID NO: 67993 - DNA, 600 bp, Chicken  19866894338510_3
gcagttggctcagtgaccgactcagggctgggctgagttgtccactttggttcctttgaggtaggagtggttttgcttctttcatcacaggaggattcctttggagacatctactgcaaagctttagatacatttggaatactctgctttggcctctaccggctgatggaggagcccaatccattcaagaacaggcaagtatgcttcattttaagttgtactgaaagtcaaaggatgccagtygtgactttgaagttaagcatctgtggaaggcaatctgaattccttacctttgtcttragttcagacayccttgtaggcaacaaaggccatctgaggcaaacaggtgagtagtctgaacttggttctctgatgatttctggagatccggtgcttattggtgctttcatgaggttctctgaagttcatttgaagtgtgatttatcttttcttcattagagagcatgaagttataacactgctgagggcagagagaactgcctcatctgagcccttctactcccattctttccattgcaaggtttccatgactgcttaatctccacatctcacagagacgctcagttttgatttagagat

SEQ ID NO: 67994 - DNA, 600 bp, Chicken  19866894338510_4
agtgaccgactcagggctgggctgagttgtccactttggttcctttgaggtaggagtggttttgcttctttcatcacaggaggattcctttggagacatctactgcaaagctttagatacatttggaatactctgctttggcctctaccggctgatggaggagcccaatccattcaagaacaggcaagtatgcttcattttaagttgtactgaaagtcaaaggatgccagtygtgactttgaagttaagcatctgtggaaggcaatctgaattccttacctttgtcttragttcagacayccttgtaggcaacaaaggccatctgaggcaaacaggtgagtagtctgaacttggttctctgatgatttctggagatccggtgcttattggtgctttcatgaggttctctgaagttcatttgaagtgtgatttatcttttcttcattagagagcatgaagttataacactgctgagggcagagagaactgcctcatctgagcccttctactcccattctttccattgcaaggtttccatgactgcttaatctccacatctcacagagacgctcagttttgatttagagattctgagcaatc

SEQ ID NO: 67995 - DNA, 600 bp, Chicken  19866894338518_1
aatctactgtgagaaatgaggtggtagtggtgtcaatcttagagaaacaggactaataaagagaaaaacctgggacaaccattcccaattgtgaagaaggaaaacagcagaaagaaaatgcattgctcttctttaagattcctgtacttacacactcaatcatgcctggctaaacagtgttccctccttaagagagcccgctgctgcaagcagttcatatacctgggatccacacgtctttcatgcttttgcatgcattgatctcagcactcaggaaacatttttccatacatcagcccwgctattacgaattaattgcgctgcatgtttgtctgtcacaaaatcacaggaacaggagcacggaataggaaagataaaaacttatctgatccagataatgaaaaagaagtgattgtggctcagatgacagcagaggacaatgctctttctttttcttatcagtatgtcaaggtagcagttcactgaagtagttttattgaggctttttctggcagaattgtgctgtctaatccacactgatgaatatttgctgcagstctgaacttctcaacacgcacagctctgcctccaatttcggtg

SEQ ID NO: 67996 - DNA, 600 bp, Chicken  19866894338518_2
ttgatctcagcactcaggaaacatttttccatacatcagcccwgctattacgaattaattgcgctgcatgtttgtctgtcacaaaatcacaggaacaggagcacggaataggaaagataaaaacttatctgatccagataatgaaaaagaagtgattgtggctcagatgacagcagaggacaatgctctttctttttcttatcagtatgtcaaggtagcagttcactgaagtagttttattgaggctttttctggcagaattgtgctgtctaatccacactgatgaatatttgctgcagstctgaacttctcaacacgcacagctctgcctccaatttcggtgttgatttagaaagaaaacacagagaaagctgaataatgaatcactggggaaactcctgtcaaataggtgcataaactgctaactgcgtagcagtaatacatactgttatttataattcatattcagtgtcatgctcttgaagcaattacgcaatgcctgcctctatcaatacaatgcatttcacatctctaaccattaatgacttgaacttcactctggagcaaaacagtgcagtggattcagcatgagactagaag

SEQ ID NO: 67997 - DNA, 600 bp, Chicken  19866894338529_1
atgctggcatttaacagttttgcaacggtgaagatattatcatgcctaagtaaatcttgcatttgcccatctgagactgaatctacagagacacatagcattagtatttggctgagtaacttatttcggctacttattgtagcaatttgttcttccccagatccacctataatacaacacgctgctgcttatttatctacctctaccataaatatttacaaataatcttctacagcaccttatataaatcacacagaatctcagatttgtttcatatttattttactgggcagctacctrtcttaactgacagctagcraagtggcagttctgtgaaatcacagtatttttcatcattattgtggtctcagaaccaaagatgttgctgccataaggcggtgggtgctaacatgttaacatctgtgcccatgtgtaactccatgcagaagattccactttttggtttgaagattagaagcacgagctggcagggtgcagtctattgtgcttctagggtatctttgaagtgttattattcatcctacttttcacaaattccagctcactgtatgagaattgcttcagcacttactattgttt

SEQ ID NO: 67998 - DNA, 600 bp, Chicken  19866894338529_2
ttgcaacggtgaagatattatcatgcctaagtaaatcttgcatttgcccatctgagactgaatctacagagacacatagcattagtatttggctgagtaacttatttcggctacttattgtagcaatttgttcttccccagatccacctataatacaacacgctgctgcttatttatctacctctaccataaatatttacaaataatcttctacagcaccttatataaatcacacagaatctcagatttgtttcatatttattttactgggcagctacctrtcttaactgacagctagcraagtggcagttctgtgaaatcacagtatttttcatcattattgtggtctcagaaccaaagatgttgctgccataaggcggtgggtgctaacatgttaacatctgtgcccatgtgtaactccatgcagaagattccactttttggtttgaagattagaagcacgagctggcagggtgcagtctattgtgcttctagggtatctttgaagtgttattattcatcctacttttcacaaattccagctcactgtatgagaattgcttcagcacttactattgtttatccagacaacacctacca

SEQ ID NO: 67999 - DNA, 600 bp, Chicken  19866894338530_1
gtagccctggaagtttgctgtttcactgtcactgcttacagtcctgtggggctgccctgtgatgtcctcatgctgagcattcttgatttactttgctgcagagcattctgctttgaagtaacttatgcagtcctgtgtagctgtgtaattgaatgtgggtggaaggtgtcagtggcattcctgataattgatgtcctgtgttgtgctactgaaagcgattcttcatagtggtagcggagctatatttcctggtgtcttctgttgtgtgctaagtgtggtaggtgctgcaaatgaaggaaygaagtggaatgctgctgatgctgtagatgttcctcggttgctgatgagtcctgtatctgtgggcgccgtgttgtgctggctgtgcactgctgtttaaaatttctgacctgaagagatcatctrgggggaggcggagactttagctttcaattcctggcatttctgctaagactgctgaccaattagtgctaattgtgctgggttgtgtgatgcggtcctggaacagtcatctgaggtcactggtctctgtcacctgccttctttggactcagtttgagactatgctttattctttcacat

SEQ ID NO: 68000 - DNA, 537 bp, Chicken  19866894338530_2
tatgcagtcctgtgtagctgtgtaattgaatgtgggtggaaggtgtcagtggcattcctgataattgatgtcctgtgttgtgctactgaaagcgattcttcatagtggtagcggagctatatttcctggtgtcttctgttgtgtgctaagtgtggtaggtgctgcaaatgaaggaaygaagtggaatgctgctgatgctgtagatgttcctcggttgctgatgagtcctgtatctgtgggcgccgtgttgtgctggctgtgcactgctgtttaaaatttctgacctgaagagatcatctrgggggaggcggagactttagctttcaattcctggcatttctgctaagactgctgaccaattagtgctaattgtgctgggttgtgtgatgcggtcctggaacagtcatctgaggtcactggtctctgtcacctgccttctttggactcagtttgagactatgctttattctttcacattcttttttttcttttaaggaataattcattattagccctgagataatcagccacccttca

SEQ ID NO: 68001 - DNA, 600 bp, Chicken  19866894338532_1
tttcacagaacagaagagaatattcttcacaggaggaacagttgatggaatcccagatgaaatacttaattagaacacccataacatacacagtctgctgctctttcaccatttgtctacttcgaaaatacaactggttagtaaagtaattttcatttttataaacatgcattttctatgttctgtagcagtcggtttcttctttccccctttcatttccatgtggattttagaacacaagttaggagttattacagaactttttaagggatgaaattgagcagttagtcgtgatgcccyaacaacgacgacagttgaacagtattcaaatagttttcttttcactctgtaagatgatgaccaggcttgtacttcaggattttcattttattccaaccccaagttttgtttcccaggccagcttgtgccacttcattttcactgcctgacaaatgtcatatgcatctgtttctttgtgttgcaaatctcaagatttgcataagtaaatagctttctgcattattgaaaccacaacagcgtacttatgtgctggaaactggagagctaaaaatttatttgactgccctgccatgagtaaag

SEQ ID NO: 68002 - DNA, 600 bp, Chicken  19866894338532_2
tttcattttattccaaccccaagttttgtttcccaggccagcttgtgccacttcattttcactgcctgacaaatgtcatatgcatctgtttctttgtgttgcaaatctcaagatttgcataagtaaatagctttctgcattattgaaaccacaacagcgtacttatgtgctggaaactggagagctaaaaatttatttgactgccctgccatgagtaaagatttaaaggactgaaaatgttattaatgatatcagtgtaatgtcttattactggtatgatcagaatgactgggttgaccygatgttagtcagtcttggccctttatttttaaaagcttcaattaagaagtatagaatagggcagagatgtaactkcatgctgaatttacctagcatggagttcacaggctttcaggagaaaaattggaacagaagtggtaggggtatgcctgtgkggagaaaattaccgcatgaggtgttctggactcttccagtgggtgtcttcctaaggtggttcctcttggttcttccttgaaacctgctgtgaatgtatctggcaatgtctatatatctttgtatttgcatgcgaggaaaaagagc

SEQ ID NO: 68003 - DNA, 600 bp, Chicken  19866894338532_3
tcatatgcatctgtttctttgtgttgcaaatctcaagatttgcataagtaaatagctttctgcattattgaaaccacaacagcgtacttatgtgctggaaactggagagctaaaaatttatttgactgccctgccatgagtaaagatttaaaggactgaaaatgttattaatgatatcagtgtaatgtcttattactggtatgatcagaatgactgggttgaccygatgttagtcagtcttggccctttatttttaaaagcttcaattaagaagtatagaatagggcagagatgtaactkcatgctgaatttacctagcatggagttcacaggctttcaggagaaaaattggaacagaagtggtaggggtatgcctgtgkggagaaaattaccgcatgaggtgttctggactcttccagtgggtgtcttcctaaggtggttcctcttggttcttccttgaaacctgctgtgaatgtatctggcaatgtctatatatctttgtatttgcatgcgaggaaaaagagcctcaaaactatgcatgtggagatacaacagaacttctgctacaactttatttgcagggggatttaactgctgcta

SEQ ID NO: 68004 - DNA, 600 bp, Chicken  19866894338532_4
agcgtacttatgtgctggaaactggagagctaaaaatttatttgactgccctgccatgagtaaagatttaaaggactgaaaatgttattaatgatatcagtgtaatgtcttattactggtatgatcagaatgactgggttgaccygatgttagtcagtcttggccctttatttttaaaagcttcaattaagaagtatagaatagggcagagatgtaactkcatgctgaatttacctagcatggagttcacaggctttcaggagaaaaattggaacagaagtggtaggggtatgcctgtgkggagaaaattaccgcatgaggtgttctggactcttccagtgggtgtcttcctaaggtggttcctcttggttcttccttgaaacctgctgtgaatgtatctggcaatgtctatatatctttgtatttgcatgcgaggaaaaagagcctcaaaactatgcatgtggagatacaacagaacttctgctacaactttatttgcagggggatttaactgctgctacgtgacgatagtatttgactgttgtcctcctgcctttcctgcatcaatctgttgctttttttagtctcttatttagaaag

SEQ ID NO: 68005 - DNA, 599 bp, Chicken  19866894338534_1
  misc_feature (1)..(116): n is any nucleotide
nnnnnnnnnnnnnnnnnnnnnnnnnnnnnnnnnnnnnnnnnnnnnnnnnnnnnnnnnnnnnnnnnnnnnnnnnnnnnnnnnnnnnnnnnnnnnnnnnnnnnnnnnnnnnnnnnnnnattatactttctttcagcatatccaagtcctaaaattggtatccagctgccaataaggtccaaccccttttatttactagctatagggaatcaggatgatttcaataaatacttctgtagtgaactctgactggaatacataaattttacagagaaacattatgcagagtgcggtatccaaacytctacagtaaatacttatctcaattacctagttctcctagacaacaacaagtatagggagggaaagcagaaagtttcagtctactttttaacaattttagcttgttcattctgtatgtgttaaatatcacaatkcaatccatttctccagactcaggtagcaattatgcttttacttttctaggcagtaatggaaaactgtctaatttagccattgtcagatattaaaaatgattcctgacttcagaactggcacaatataaatgtttactgagtttgcctgaaacaatctgccttact

SEQ ID NO: 68006 - DNA, 600 bp, Chicken  19866894338534_2
atatccaagtcctaaaattggtatccagctgccaataaggtccaaccccttttatttactagctatagggaatcaggatgatttcaataaatacttctgtagtgaactctgactggaatacataaattttacagagaaacattatgcagagtgcggtatccaaacytctacagtaaatacttatctcaattacctagttctcctagacaacaacaagtatagggagggaaagcagaaagtttcagtctactttttaacaattttagcttgttcattctgtatgtgttaaatatcacaatkcaatccatttctccagactcaggtagcaattatgcttttacttttctaggcagtaatggaaaactgtctaatttagccattgtcagatattaaaaatgattcctgacttcagaactggcacaatataaatgtttactgagtttgcctgaaacaatctgccttactttaggatttgatgttaactcctgctttgttgagaatgtactctctggcgtcggctttccattgtaataatgtgacactctgagcacagaaaaaattgcacagcatataaacaagctttccttccccttttcagtt

SEQ ID NO: 68007 - DNA, 600 bp, Chicken  19866894338534_3
aatcacatcactactgaaaacacatccttaggccatggcataaggcacaggggaaaacgtatttgatctgcttttctaaatcaccaaattttcatcaaaatttgcactgctgagcaggtatgctaaaggaagtctggaacagcagcactgaagcaggtctgaactgaggtgccttggcagataagactccatctgagctgctagaaataattgctacatatgcttttgggcaagtgcacttcacaaatttgagaacagagaagagagtcattggagttatctctggaaaggagaggtgaragccaaccttgcaacacactcaagactatccagggggttactgcaggactctgcaggaagacagaaagctggtttctctggcctcttaccctctacaatgtctcaccacagtgcagtagtggttaactaaattgccacttgccatagcaaagaggcagatatggcctcctaacctcacagaatgggttactcaagagcaccgtcggggctcctcaaggaaccttaaatgagggactagtggaaaatagactggggaatcaatacataagcacaataaggagccctactagctgcaagtca

SEQ ID NO: 68008 - DNA, 599 bp, Chicken  19866894338543_1
  misc_feature (1)..(30): n is any nucleotide
nnnnnnnnnnnnnnnnnnnnnnnnnnnnnnatgatttcagtctgtgtggcctggaatacagaggtgcaacttcaattttttttaaagctggcaaagaaatttgcagcacttctcaggcctttccaaaatacttctcttgtcagcaaacaaaggtttggcagcgcactacaacaagatatattcagcctttttcatgatttgcttgcatcagcttgtgtgtgggcaatgaaaaaatcgtgtattgccaagcatgagaactcaaagattatgaattggcctccagaatttcagagagctgcyttaaaattcatgaacttttaaagaacttatattgaagagaaaggtatttccatctgctttgtgatggttgagcattttgagttaaaatttaaagctagccaatataagcctattttaaagggraaaattacacagaaattcacgtgtctctgcaagattccagaagctgagctttcatgaacacccccaaatagcagtagaattgcagtaaaattaaaataaatgctgactttgagagtgtgttgcctgcagcaacagcatcagttttgggataagagttgacagcagtatcattcttt

SEQ ID NO: 68009 - DNA, 600 bp, Chicken  19866894338543_2
caaaatacttctcttgtcagcaaacaaaggtttggcagcgcactacaacaagatatattcagcctttttcatgatttgcttgcatcagcttgtgtgtgggcaatgaaaaaatcgtgtattgccaagcatgagaactcaaagattatgaattggcctccagaatttcagagagctgcyttaaaattcatgaacttttaaagaacttatattgaagagaaaggtatttccatctgctttgtgatggttgagcattttgagttaaaatttaaagctagccaatataagcctattttaaagggraaaattacacagaaattcacgtgtctctgcaagattccagaagctgagctttcatgaacacccccaaatagcagtagaattgcagtaaaattaaaataaatgctgactttgagagtgtgttgcctgcagcaacagcatcagttttgggataagagttgacagcagtatcattctttctctatcattcattttatcctttagccaagacctctgagcttctagtaacacctgtattttttactagaattgggcagaaagccgcaatcctctttcagagtgtattttattttgatatttcta

SEQ ID NO: 68010 - DNA, 600 bp, Chicken  19866894338545_1
taaagtcactttagtgctaatctttgtgcaaaatgcaaacctgttagagaagctcagcgcatgccttggtggctgctcacacacatgcagacgatttcaatgccattgccagctggttcaaagttcagacatgcacataaaagtgactgtcacaagtgcactgatttcaccaacagaaaaagagccccgagtgcatcagcttcgcacctcattataaatttgtgaagttcagctgattggctctactctaccttcaactgatgttattaacacagcatctttatactatagtctttgggytttgaagaaaactggatgaaaataaacattygttttgatcttttggatgttcaaatctttcagcacttgtacttcattacygactgtatcgattcagayttattamaaaccagggttttctgcctaacaactgcctgatcttatgaagttaggcctttcttctatttgcttttcagactcctcatttatttatattatttcctttgctgttaaatgtttaacagcataccccatgaatttatggagttactgaatttactgttattatataacctaaaaccttcaatttggctactgacc

SEQ ID NO: 68011 - DNA, 600 bp, Chicken  19866894338545_2
aatgcaaacctgttagagaagctcagcgcatgccttggtggctgctcacacacatgcagacgatttcaatgccattgccagctggttcaaagttcagacatgcacataaaagtgactgtcacaagtgcactgatttcaccaacagaaaaagagccccgagtgcatcagcttcgcacctcattataaatttgtgaagttcagctgattggctctactctaccttcaactgatgttattaacacagcatctttatactatagtctttgggytttgaagaaaactggatgaaaataaacattygttttgatcttttggatgttcaaatctttcagcacttgtacttcattacygactgtatcgattcagayttattamaaaccagggttttctgcctaacaactgcctgatcttatgaagttaggcctttcttctatttgcttttcagactcctcatttatttatattatttcctttgctgttaaatgtttaacagcataccccatgaatttatggagttactgaatttactgttattatataacctaaaaccttcaatttggctactgacctaaaaagccccacagaaatacatagctgcta

SEQ ID NO: 68012 - DNA, 600 bp, Chicken  19866894338545_3
cacatgcagacgatttcaatgccattgccagctggttcaaagttcagacatgcacataaaagtgactgtcacaagtgcactgatttcaccaacagaaaaagagccccgagtgcatcagcttcgcacctcattataaatttgtgaagttcagctgattggctctactctaccttcaactgatgttattaacacagcatctttatactatagtctttgggytttgaagaaaactggatgaaaataaacattygttttgatcttttggatgttcaaatctttcagcacttgtacttcattacygactgtatcgattcagayttattamaaaccagggttttctgcctaacaactgcctgatcttatgaagttaggcctttcttctatttgcttttcagactcctcatttatttatattatttcctttgctgttaaatgtttaacagcataccccatgaatttatggagttactgaatttactgttattatataacctaaaaccttcaatttggctactgacctaaaaagccccacagaaatacatagctgctaatagcacagggtaaacctcacagaaagcagccagacattctgttactagc

SEQ ID NO: 68013 - DNA, 600 bp, Chicken  19866894338545_4
atgccattgccagctggttcaaagttcagacatgcacataaaagtgactgtcacaagtgcactgatttcaccaacagaaaaagagccccgagtgcatcagcttcgcacctcattataaatttgtgaagttcagctgattggctctactctaccttcaactgatgttattaacacagcatctttatactatagtctttgggytttgaagaaaactggatgaaaataaacattygttttgatcttttggatgttcaaatctttcagcacttgtacttcattacygactgtatcgattcagayttattamaaaccagggttttctgcctaacaactgcctgatcttatgaagttaggcctttcttctatttgcttttcagactcctcatttatttatattatttcctttgctgttaaatgtttaacagcataccccatgaatttatggagttactgaatttactgttattatataacctaaaaccttcaatttggctactgacctaaaaagccccacagaaatacatagctgctaatagcacagggtaaacctcacagaaagcagccagacattctgttactagcatcttcaatccatagata

SEQ ID NO: 68014 - DNA, 600 bp, Chicken  19866894338545_5
tgccagctggttcaaagttcagacatgcacataaaagtgactgtcacaagtgcactgatttcaccaacagaaaaagagccccgagtgcatcagcttcgcacctcattataaatttgtgaagttcagctgattggctctactctaccttcaactgatgttattaacacagcatctttatactatagtctttgggytttgaagaaaactggatgaaaataaacattygttttgatcttttggatgttcaaatctttcagcacttgtacttcattacygactgtatcgattcagayttattamaaaccagggttttctgcctaacaactgcctgatcttatgaagttaggcctttcttctatttgcttttcagactcctcatttatttatattatttcctttgctgttaaatgtttaacagcataccccatgaatttatggagttactgaatttactgttattatataacctaaaaccttcaatttggctactgacctaaaaagccccacagaaatacatagctgctaatagcacagggtaaacctcacagaaagcagccagacattctgttactagcatcttcaatccatagataagcttca

SEQ ID NO: 68015 - DNA, 600 bp, Chicken  19866894338546_1
tagagtataggtaagatcagatcagatttacttccccatgctactgtcatgcttctggaaacccagataaagcctgtgagaagatttccctctcctccagttaggactgagacccatctctgaaaaagagcatctgtgtttctgtggcaggtagagaaatgaaaataattatacattaccactgcagtactagagataagatgcaccagtgacagcatggccatcaattccctttttgtccagggaaagaatatctttgatgttcatcctgtggatggacagctatcttcctggagaatktgtagtatgcatgagaaagagaactgcaacattcccttctttctaatgctcaaaatcctccatctacattgtagaatgccattagaaattcaggttttgacaagaaaagacttttagtgagagtgaccactttgctagcatgtgctagcaaattgctgacaaaatacactggtacagtcaggacacttacacatgcagaaaggggacaatggaactatagcatccaggtcatcagcagcatgaaaacgggattctgcacctggaaataatgaaatgataatgccctgaatatgaatgctt

SEQ ID NO: 68016 - DNA, 599 bp, Chicken  19866894338561_1
  misc_feature (1)..(133): n is any nucleotide
nnnnnnnnnnnnnnnnnnnnnnnnnnnnnnnnnnnnnnnnnnnnnnnnnnnnnnnnnnnnnnnnnnnnnnnnnnnnnnnnnnnnnnnnnnnnnnnnnnnnnnnnnnnnnnnnnnnnnnnnnnnnnnnnnnnnnaaaaaagatgaaccaactgtaatcccaagtgcaggaacccaaagggcagtcagtccttaagtgtgccccacacttctcagtgtaagtccttgtgtcccaggctcatgccctgccccctcagcccccttacctcccatcgcagctggggtgggatatttcggatttgrattttccggctcctgaaagaaatgaaaagtgatgaaaagccagatttggtgtcagcaacacatccatctcactctgaaccgctcctcattgatgtacctaatcaagctttacattcccacatgctcccagggcttctgatggctctctgttaattacaccctgctaggctctgcatttatactgcaagcttcactgtgagcaagatgtccaaatccaccaaccttcctgcacgggcacagctacaaatgctgagttctgccagattgattacaaggattagaaagcaaaaagaaaggag

SEQ ID NO: 68017 - DNA, 600 bp, Chicken  19866894338561_2
tcagcaacacatccatctcactctgaaccgctcctcattgatgtacctaatcaagctttacattcccacatgctcccagggcttctgatggctctctgttaattacaccctgctaggctctgcatttatactgcaagcttcactgtgagcaagatgtccaaatccaccaaccttcctgcacgggcacagctacaaatgctgagttctgccagattgattacaaggattagaaagcaaaaagaaaggagccatgcagtcatttaacctgaaagcaaatctggagcatgaaagggagaccaygtggatgcccatggcacctggaaacttggctccagcatcccacttggtctctggtcacttctccactcacatttttggctttttcaaacctaatttttcctaaaatagaattctggggggaatttttttgatgccaaattgacccaggaggtgctgccatggattgctgtgagtccatggggcagctccagaacccacacacagccacactgctgccacccaagagcccccaccaacacagaacgctgagaaatgattttttttcctcgctgttgtggtgtttccaccacacgatgctgc

SEQ ID NO: 68018 - DNA, 600 bp, Chicken  19866894338570_1
aaaatgagatagcaaaggacagctccctccccctttcccgtttcaaaaaccttccagagttgtgtgttcttgaagtgctgcataggcagaaaagcatacaatgcagttgtcagcattgtgctgatgtgtggcacattaaaaaaaaaaaaaaatacacacaaaaggggtggggagagctggtgcctccagggagtaaaactgtggggcccctttccctaccagcaaacggacctacacgcaatagtttattacttctcattttgctcaggcaaatgtaatgcacagacgtcagagggagcrttgcaacgtgctaaatggtgttgctgaagatcagggtccccttgaactatttttcctgtgagcttgctcccacgagatgccacagctttattactcaattcctcaaagttgtgcttacttgccagaaggaaggagtatgcttcctttctgggtgtagtttcttttgttgtgtggcagaaggtaatcaaaagcagctggttctgatctctcctaggtcaccatgacttcaatgtgcacagtccaagcagtcacttgtgagcaaggagagcaggtattggcacctcctcattagccttcatc

SEQ ID NO: 68019 - DNA, 600 bp, Chicken  19866894338570_2
agatcagggtccccttgaactatttttcctgtgagcttgctcccacgagatgccacagctttattactcaattcctcaaagttgtgcttacttgccagaaggaaggagtatgcttcctttctgggtgtagtttcttttgttgtgtggcagaaggtaatcaaaagcagctggttctgatctctcctaggtcaccatgacttcaatgtgcacagtccaagcagtcacttgtgagcaaggagagcaggtattggcacctcctcattagccttcatcaatgagaatattggctatggtgttgcrtgagtgccactggctgaccaatggaggggccctaccctgctaagctggagcaacactttctgagtggtgatttcattgcctgrttgctgcagtgatttggagcacagctgtgaygttatgctttttctggcaaaaatttagctgaggggtaagtatgagatgtccaggccagatttcatagtgtgatggagagctgggagaagctggtgcgtggtgtatgtgaaaactgccaattgcttgtgttcctaaaaaggctcatctgtgtttgaattaaaccagcctggataggacgttcatttt

SEQ ID NO: 68020 - DNA, 600 bp, Chicken  19866894338570_3
gtgcttacttgccagaaggaaggagtatgcttcctttctgggtgtagtttcttttgttgtgtggcagaaggtaatcaaaagcagctggttctgatctctcctaggtcaccatgacttcaatgtgcacagtccaagcagtcacttgtgagcaaggagagcaggtattggcacctcctcattagccttcatcaatgagaatattggctatggtgttgcrtgagtgccactggctgaccaatggaggggccctaccctgctaagctggagcaacactttctgagtggtgatttcattgcctgrttgctgcagtgatttggagcacagctgtgaygttatgctttttctggcaaaaatttagctgaggggtaagtatgagatgtccaggccagatttcatagtgtgatggagagctgggagaagctggtgcgtggtgtatgtgaaaactgccaattgcttgtgttcctaaaaaggctcatctgtgtttgaattaaaccagcctggataggacgttcattttatcctcttgttagggatgtatttggagatatgcctggtgctgattggtggcctctgctggcctgcaggtacaggggaccaaca

SEQ ID NO: 68021 - DNA, 600 bp, Chicken  19866894338570_4
tcctttctgggtgtagtttcttttgttgtgtggcagaaggtaatcaaaagcagctggttctgatctctcctaggtcaccatgacttcaatgtgcacagtccaagcagtcacttgtgagcaaggagagcaggtattggcacctcctcattagccttcatcaatgagaatattggctatggtgttgcrtgagtgccactggctgaccaatggaggggccctaccctgctaagctggagcaacactttctgagtggtgatttcattgcctgrttgctgcagtgatttggagcacagctgtgaygttatgctttttctggcaaaaatttagctgaggggtaagtatgagatgtccaggccagatttcatagtgtgatggagagctgggagaagctggtgcgtggtgtatgtgaaaactgccaattgcttgtgttcctaaaaaggctcatctgtgtttgaattaaaccagcctggataggacgttcattttatcctcttgttagggatgtatttggagatatgcctggtgctgattggtggcctctgctggcctgcaggtacaggggaccaacaaactgtttgggatgccttcatgtttttcagg

SEQ ID NO: 68022 - DNA, 600 bp, Chicken  19866894338571_1
tttgtttttaccttcttgcacattcattgctcttgcttgttggggctgttccctttgaagtatattctcctgttggtaagtgacctggcaggtgtgtgatgaccaatgtgaatttccatattttttgtctcttgtcccacatacaagtcctgactggaattccacttattctagcagaacatttgggttgtaagtaggaaggaactgccctcaggtgagctcccagtactcccagtgtatggtttgtaatgcatgaggcactgataataggaatagcaatattgaacatacttaggtatkgcaggtakcattgagcgtgatgctggactttgaaacagggataataagtagaactacagattctgtgaggcatccctggtgcattttaagtaacaagaagcaaatgttattaccctacttctaagtaaaacatgtaggtataacagcaagtgaatgtgagttaaaagaagagtaactctccctctcctttcacctagcgctgtgtatcaagtttaatcctgcattttcctgacagttgaacttttttatgactgatgtgttagatgagcagagtgctgatgctcctgatgtctgttatgt

SEQ ID NO: 68023 - DNA, 600 bp, Chicken  19866894338571_2
taccttcttgcacattcattgctcttgcttgttggggctgttccctttgaagtatattctcctgttggtaagtgacctggcaggtgtgtgatgaccaatgtgaatttccatattttttgtctcttgtcccacatacaagtcctgactggaattccacttattctagcagaacatttgggttgtaagtaggaaggaactgccctcaggtgagctcccagtactcccagtgtatggtttgtaatgcatgaggcactgataataggaatagcaatattgaacatacttaggtatkgcaggtakcattgagcgtgatgctggactttgaaacagggataataagtagaactacagattctgtgaggcatccctggtgcattttaagtaacaagaagcaaatgttattaccctacttctaagtaaaacatgtaggtataacagcaagtgaatgtgagttaaaagaagagtaactctccctctcctttcacctagcgctgtgtatcaagtttaatcctgcattttcctgacagttgaacttttttatgactgatgtgttagatgagcagagtgctgatgctcctgatgtctgttatgttagcactt

SEQ ID NO: 68024 - DNA, 600 bp, Chicken  19866894338572_1
actacaccacagaataacctttacatcaggatgtgtgtgtcctgtgtcagaaataatttgtactgaaaatacctttgtgtttgtctccatttgataaaactggcttttcttgagataccagaacaacagctttctcagttagctgtgcttctctgctcacaactgagagtggtatcctgtttgaggtttttgtagtaatacaacaattacattttaaaatacattaaagaaaattcattttattcttataaatttaaattattgcataccatagcattggaatctggcaggtggaaaagraaccacatcaataagttgtactatgaaagaatactctgtggttttatagtgcctttcatctgaggatgccagcacactttataaactttcattacctttcacagcatgtatgtgtgtatctgagggctatttaattcacagaaaaaaaattaaaaagacatagaatgacaattcagaccagtcaagggttacatattttattgcctgggaaaatgaggaaatccaaagaagtgtgatctctctttgtcttctctaggcataatttaaggtattattttccatattggatgacaacaagca

SEQ ID NO: 68025 - DNA, 600 bp, Chicken  19866894338573_1
agttacttctgggccaaggggtgcagagtggggcatggggactggcctgctaacttcctcgctgctcctgaggtaggagcaggagatgttcagtccctgagccagggatggagccaagggcggcacaagctgcttccatccaagatgtgcagaggctctgtgcccatggtgttactgggcatgagctgtttgccttggcatgaccaaagcagcatccctgtctgggatggcagaccctggctgctggcactgtcccctcctcctggcatagccaccatggtcctccttgtcccttggtcwgccacattcctcagccaacacaactgcatagaatcatcgaggttggaaaagaccactaagatcatttagtccaaccatcaacccatccccactrtgcccactaaccacgtcctcagtgccacatctccayagttcatcagcacctccctgggcagtctgtgccactgcatcaccgctctttctgagaagtgttttttttgtagagcactgacttttatgggagcagacacatggcaatggcctccccacatcacaagccaggaccgtgagcatctctggcttctgcttgaaattcagctc

SEQ ID NO: 68026 - DNA, 600 bp, Chicken  19866894338573_2
ccctgagccagggatggagccaagggcggcacaagctgcttccatccaagatgtgcagaggctctgtgcccatggtgttactgggcatgagctgtttgccttggcatgaccaaagcagcatccctgtctgggatggcagaccctggctgctggcactgtcccctcctcctggcatagccaccatggtcctccttgtcccttggtcwgccacattcctcagccaacacaactgcatagaatcatcgaggttggaaaagaccactaagatcatttagtccaaccatcaacccatccccactrtgcccactaaccacgtcctcagtgccacatctccayagttcatcagcacctccctgggcagtctgtgccactgcatcaccgctctttctgagaagtgttttttttgtagagcactgacttttatgggagcagacacatggcaatggcctccccacatcacaagccaggaccgtgagcatctctggcttctgcttgaaattcagctcttggcatgacatggtactcccacatcacccatccccagggagctctgtgttgctttctccatcccccagacggcacatcttcccctctaaccac

SEQ ID NO: 68027 - DNA, 600 bp, Chicken  19866894338573_3
tgcttccatccaagatgtgcagaggctctgtgcccatggtgttactgggcatgagctgtttgccttggcatgaccaaagcagcatccctgtctgggatggcagaccctggctgctggcactgtcccctcctcctggcatagccaccatggtcctccttgtcccttggtcwgccacattcctcagccaacacaactgcatagaatcatcgaggttggaaaagaccactaagatcatttagtccaaccatcaacccatccccactrtgcccactaaccacgtcctcagtgccacatctccayagttcatcagcacctccctgggcagtctgtgccactgcatcaccgctctttctgagaagtgttttttttgtagagcactgacttttatgggagcagacacatggcaatggcctccccacatcacaagccaggaccgtgagcatctctggcttctgcttgaaattcagctcttggcatgacatggtactcccacatcacccatccccagggagctctgtgttgctttctccatcccccagacggcacatcttcccctctaaccactctgtcctcccctccgccctgcaggtggtgatggac

SEQ ID NO: 68028 - DNA, 599 bp, Chicken  19866894338578_1
  misc_feature (1)..(59): n is any nucleotide
nnnnnnnnnnnnnnnnnnnnnnnnnnnnnnnnnnnnnnnnnnnnnnnnnnnnnnnnnnnacaaaatgcccagaagaacccctcagaaagtccagaggttttgtaggagacaccaaggggagcatagcagcctcagcctttctgtgggcagtactgctggaagctgttctaccaggcacatggtgctcgggagggttcagaacccccacagccccattccgagccccctgtgctccctggaagcacccatagatgctgcaacagggacagacactgggccagccggcacctggctctctgrccccttgcaccctgagcagacctgcactctttcccttcccattcgactcattgctttctgggcggctgcagcactcatcccctggagggcagcagtaggggatggtttckctttgtgctccagagtttgttgttatttttcaaggattttcagacagcgacctggaaggcattgtggatgatggctacagccctgacaagaagaaaggtagggagggcctgtgggcgggttggtgcccacagcatggggcagagacggccacaccgcagggaccccagagggcatctccccatggcagg

SEQ ID NO: 68029 - DNA, 600 bp, Chicken  19866894338578_2
accaaggggagcatagcagcctcagcctttctgtgggcagtactgctggaagctgttctaccaggcacatggtgctcgggagggttcagaacccccacagccccattccgagccccctgtgctccctggaagcacccatagatgctgcaacagggacagacactgggccagccggcacctggctctctgrccccttgcaccctgagcagacctgcactctttcccttcccattcgactcattgctttctgggcggctgcagcactcatcccctggagggcagcagtaggggatggtttckctttgtgctccagagtttgttgttatttttcaaggattttcagacagcgacctggaaggcattgtggatgatggctacagccctgacaagaagaaaggtagggagggcctgtgggcgggttggtgcccacagcatggggcagagacggccacaccgcagggaccccagagggcatctccccatggcagggggaccccacaatgggtctgaggagattggcaggggcacctgccgtcgtggtagcagtggctggcactggtggccctggaccaaccagcacatactacagccaccagcaga

SEQ ID NO: 68030 - DNA, 600 bp, Chicken  19866894338580_1
cagggtggttcaatgcttttattccacaccataaaaagacagtaagtgagtgctacatacttgaaccccgcaggcacccaagaaagccaagaagaggattgaaggtgcgaattccaatgtcttctccatgttcgagcaggcccagatccaggaattcaaagaggtaggtggattgcatagaaacaaccgggggcccttgatgcaatgtgaccttcagcttttttcctcagtgctttgagaacgatgacagctggcttgcaataagaggcagagtgcccattttttgagtcgctttatttyaaaagtgagaataacagcttggtgacattgttaaatacggagctgcctcawagcatcctgtgagcttgctcccatggttggaggctcgagttatcctcccagtttgatctcatcttggtgtgagagggctttgggcaaggcacagcsttggggttgggctgccataggaagccatcrcccyacagcatgggtgaggggtacagaagctttggcaaaggctgttggctctccctgagctccctgccctcctcctctgctttcaggcgttcaccatcatggatcagaaccgagacggcttca

SEQ ID NO: 68031 - DNA, 600 bp, Chicken  19866894338580_2
gctacatacttgaaccccgcaggcacccaagaaagccaagaagaggattgaaggtgcgaattccaatgtcttctccatgttcgagcaggcccagatccaggaattcaaagaggtaggtggattgcatagaaacaaccgggggcccttgatgcaatgtgaccttcagcttttttcctcagtgctttgagaacgatgacagctggcttgcaataagaggcagagtgcccattttttgagtcgctttatttyaaaagtgagaataacagcttggtgacattgttaaatacggagctgcctcawagcatcctgtgagcttgctcccatggttggaggctcgagttatcctcccagtttgatctcatcttggtgtgagagggctttgggcaaggcacagcsttggggttgggctgccataggaagccatcrcccyacagcatgggtgaggggtacagaagctttggcaaaggctgttggctctccctgagctccctgccctcctcctctgctttcaggcgttcaccatcatggatcagaaccgagacggcttcatcgacaaggcagacctgagagatacatttgctgcactcggtgagcccccat

SEQ ID NO: 68032 - DNA, 600 bp, Chicken  19866894338580_3
ccaggaattcaaagaggtaggtggattgcatagaaacaaccgggggcccttgatgcaatgtgaccttcagcttttttcctcagtgctttgagaacgatgacagctggcttgcaataagaggcagagtgcccattttttgagtcgctttatttyaaaagtgagaataacagcttggtgacattgttaaatacggagctgcctcawagcatcctgtgagcttgctcccatggttggaggctcgagttatcctcccagtttgatctcatcttggtgtgagagggctttgggcaaggcacagcsttggggttgggctgccataggaagccatcrcccyacagcatgggtgaggggtacagaagctttggcaaaggctgttggctctccctgagctccctgccctcctcctctgctttcaggcgttcaccatcatggatcagaaccgagacggcttcatcgacaaggcagacctgagagatacatttgctgcactcggtgagcccccatttaggagcctctcctccccagcagctctgaccatattagaccaactaagtgcaaaaccagctgtgagtcctcgtttagcccagccccagtggttaa

SEQ ID NO: 68033 - DNA, 600 bp, Chicken  19866894338580_4
tagaaacaaccgggggcccttgatgcaatgtgaccttcagcttttttcctcagtgctttgagaacgatgacagctggcttgcaataagaggcagagtgcccattttttgagtcgctttatttyaaaagtgagaataacagcttggtgacattgttaaatacggagctgcctcawagcatcctgtgagcttgctcccatggttggaggctcgagttatcctcccagtttgatctcatcttggtgtgagagggctttgggcaaggcacagcsttggggttgggctgccataggaagccatcrcccyacagcatgggtgaggggtacagaagctttggcaaaggctgttggctctccctgagctccctgccctcctcctctgctttcaggcgttcaccatcatggatcagaaccgagacggcttcatcgacaaggcagacctgagagatacatttgctgcactcggtgagcccccatttaggagcctctcctccccagcagctctgaccatattagaccaactaagtgcaaaaccagctgtgagtcctcgtttagcccagccccagtggttaactgcatctcatgtgtgttttgctgaaaacc

SEQ ID NO: 68034 - DNA, 600 bp, Chicken  19866894338580_5
aacaaccgggggcccttgatgcaatgtgaccttcagcttttttcctcagtgctttgagaacgatgacagctggcttgcaataagaggcagagtgcccattttttgagtcgctttatttyaaaagtgagaataacagcttggtgacattgttaaatacggagctgcctcawagcatcctgtgagcttgctcccatggttggaggctcgagttatcctcccagtttgatctcatcttggtgtgagagggctttgggcaaggcacagcsttggggttgggctgccataggaagccatcrcccyacagcatgggtgaggggtacagaagctttggcaaaggctgttggctctccctgagctccctgccctcctcctctgctttcaggcgttcaccatcatggatcagaaccgagacggcttcatcgacaaggcagacctgagagatacatttgctgcactcggtgagcccccatttaggagcctctcctccccagcagctctgaccatattagaccaactaagtgcaaaaccagctgtgagtcctcgtttagcccagccccagtggttaactgcatctcatgtgtgttttgctgaaaacctgac

SEQ ID NO: 68035 - DNA, 479 bp, Chicken  19866894338580_6
gttagcatggggaatcagagcaactcgcagagcagttggtgtttgaccctgtaggtactagacagaacctgcacctggattacccagagccaagtgctcccttcgttctctcttgaataagcacctggatgctcccaccctgcagcatccctgagtttatgggcattgggaggatttatggggctcatgggaagctgtgaagccacagctgggcgctctcatcactgaggccaacacaaactggcaatgggcctgtcctggagatcacccaaactcaggtaaaaggatgcaggctttcaracctgttcatttcacccacatatagccagcttcaggtacagctcccactgtcctcatcgttacagcaaagaccttgtcaccaggtccaggagagcccatagtactgctatttttgcccmaaaatatcttctaaagagcaggctaacccctaggacagtggggcagaggaataaggagtg

SEQ ID NO: 68036 - DNA, 360 bp, Chicken  19866894338580_7
agcacctggatgctcccaccctgcagcatccctgagtttatgggcattgggaggatttatggggctcatgggaagctgtgaagccacagctgggcgctctcatcactgaggccaacacaaactggcaatgggcctgtcctggagatcacccaaactcaggtaaaaggatgcaggctttcaracctgttcatttcacccacatatagccagcttcaggtacagctcccactgtcctcatcgttacagcaaagaccttgtcaccaggtccaggagagcccatagtactgctatttttgcccmaaaatatcttctaaagagcaggctaacccctaggacagtggggcagaggaataaggagtg

SEQ ID NO: 68037 - DNA, 599 bp, Chicken  19866894338587_1
  misc_feature (1)..(79): n is any nucleotide
nnnnnnnnnnnnnnnnnnnnnnnnnnnnnnnnnnnnnnnnnnnnnnnnnnnnnnnnnnnnnnnnnnnnnnnnnnnnnnnctagcagagcaaggagtaggcagaagagcagcctttgtgcctggaaccagctcccttgagagcactgtgcagaactcatttcttcatttcaggttcaagggagcagtaaataggctcctttcttactgcacctcaggagcggctgcttagtggtgacaggggagatgatgctatggcactgctcagcacacatgcagggagcctgttccttgaggagtaargaagggaaagatgcaaactattcttcatttccaagatagagatttgcttctttcatgttagcagctcttcctaggacagtaagctggtggttcttcaacttaaggacgagctgggtgacaaaggygggctgatagcagcgttttgcaaggcccaatagatattacatggaagaaagcgctgttcctgccctctgggacacctgagaagcctgttctctgctccacgtgctagcagtgcagctgttaaaactctggaacatttttggacaaagagcgctatgttcctatgagactttaaa

SEQ ID NO: 68038 - DNA, 600 bp, Chicken  19866894338587_2
ccagctcccttgagagcactgtgcagaactcatttcttcatttcaggttcaagggagcagtaaataggctcctttcttactgcacctcaggagcggctgcttagtggtgacaggggagatgatgctatggcactgctcagcacacatgcagggagcctgttccttgaggagtaargaagggaaagatgcaaactattcttcatttccaagatagagatttgcttctttcatgttagcagctcttcctaggacagtaagctggtggttcttcaacttaaggacgagctgggtgacaaaggygggctgatagcagcgttttgcaaggcccaatagatattacatggaagaaagcgctgttcctgccctctgggacacctgagaagcctgttctctgctccacgtgctagcagtgcagctgttaaaactctggaacatttttggacaaagagcgctatgttcctatgagactttaaaaatgaattaatagaacattgatttaacttactggctttttgcagtgcctttgtttccaggcagtaaaagtctgcttgccagttgtccagccagaagccagtatctatgaaaatctgccccaggctg

SEQ ID NO: 68039 - DNA, 571 bp, Chicken  19866894338591_1
gaaggagagatttggctagattttctacaaatgatgccagtatagcattattcttctctcaggttcgtcacaacccagtttgagatggggacaagataataagattttctgggaaacatgtgtctagcgctgcacaacagtaggtaaaatagtcacacattattttgtgctttttccttctttgccaagacttgcccagaatctgggtggtttaggcagagtatttatgctgcagtaaatacagattcagctgacaattcctgctgtgattggtatcaggcagtaaggactgagaaggcycyyttttaatatgctcacrtggcagatatgaacataagcattaatagcagattctaataaatcttcatgggaccagaatcaacatccaactgttgcagccttttaagcacatgcagttgtggcagatcttgcagtcctgacacagagagaagtcccacttgaattactaggcatttgcctcaaccaggattgaacgcctgcagacttctgacccagtcttttctcgtgacagcatccaattaaaattaatgaagtaacttgtttgggatca

SEQ ID NO: 68040 - DNA, 569 bp, Chicken  19866894338591_2
aggagagatttggctagattttctacaaatgatgccagtatagcattattcttctctcaggttcgtcacaacccagtttgagatggggacaagataataagattttctgggaaacatgtgtctagcgctgcacaacagtaggtaaaatagtcacacattattttgtgctttttccttctttgccaagacttgcccagaatctgggtggtttaggcagagtatttatgctgcagtaaatacagattcagctgacaattcctgctgtgattggtatcaggcagtaaggactgagaaggcycyyttttaatatgctcacrtggcagatatgaacataagcattaatagcagattctaataaatcttcatgggaccagaatcaacatccaactgttgcagccttttaagcacatgcagttgtggcagatcttgcagtcctgacacagagagaagtcccacttgaattactaggcatttgcctcaaccaggattgaacgcctgcagacttctgacccagtcttttctcgtgacagcatccaattaaaattaatgaagtaacttgtttgggatca

SEQ ID NO: 68041 - DNA, 568 bp, Chicken  19866894338591_3
ggagagatttggctagattttctacaaatgatgccagtatagcattattcttctctcaggttcgtcacaacccagtttgagatggggacaagataataagattttctgggaaacatgtgtctagcgctgcacaacagtaggtaaaatagtcacacattattttgtgctttttccttctttgccaagacttgcccagaatctgggtggtttaggcagagtatttatgctgcagtaaatacagattcagctgacaattcctgctgtgattggtatcaggcagtaaggactgagaaggcycyyttttaatatgctcacrtggcagatatgaacataagcattaatagcagattctaataaatcttcatgggaccagaatcaacatccaactgttgcagccttttaagcacatgcagttgtggcagatcttgcagtcctgacacagagagaagtcccacttgaattactaggcatttgcctcaaccaggattgaacgcctgcagacttctgacccagtcttttctcgtgacagcatccaattaaaattaatgaagtaacttgtttgggatca

SEQ ID NO: 68042 - DNA, 552 bp, Chicken  19866894338591_4
attttctacaaatgatgccagtatagcattattcttctctcaggttcgtcacaacccagtttgagatggggacaagataataagattttctgggaaacatgtgtctagcgctgcacaacagtaggtaaaatagtcacacattattttgtgctttttccttctttgccaagacttgcccagaatctgggtggtttaggcagagtatttatgctgcagtaaatacagattcagctgacaattcctgctgtgattggtatcaggcagtaaggactgagaaggcycyyttttaatatgctcacrtggcagatatgaacataagcattaatagcagattctaataaatcttcatgggaccagaatcaacatccaactgttgcagccttttaagcacatgcagttgtggcagatcttgcagtcctgacacagagagaagtcccacttgaattactaggcatttgcctcaaccaggattgaacgcctgcagacttctgacccagtcttttctcgtgacagcatccaattaaaattaatgaagtaacttgtttgggatca

SEQ ID NO: 68043 - DNA, 550 bp, Chicken  19866894338596_1
ttacctcatgacatgttagagaataaggaagagtccgaagatatttagaggggtcttttacatcattaagaaactgcagaaaggaagagctcgggtgagttatttccttaagtacaactcattagcacaaggccaaggaaaccaggtttatttcaaactcattggaacctcatgggataaatacgtctggtagtccttcttcttcaggtaaatatgaaaagtggaaaatgctaactcattttaggagaaaacttctaaaataagttactggaatcccagaagtaagaaatgatcataatkgcaacaaaattacccttctttcttttcaatctatatccagtgccagtggagcaagctgtatcagccacccataccgcgtgtagtcaactatttaaatagaagcaatcagaactacatgtgtcacaggaacacagtaaaattctgttgaacttgggtcaaattcagaatgcaatctcacataatttgcaattactgcagcttaatgtaacactccagaggacaaaccagcttgctgttagcattttctgtg

SEQ ID NO: 68044 - DNA, 600 bp, Chicken  19866894338597_1
tgcaacagttgcagaagtacaaaaggcttgagcacagcggggagaatctggaagctgattaattttcaaatacctaaagggacaggtttagttgaggatggccaaggagtattgcaacccagctgcctccatcaccacttcaaagagcatatctcaccatgtaaacctggttgataggacatcaaacaccctttgagggcagctctcttttttcccatgcagaacgaggacagatggtaaggagaggaagaaggtgatgaagacggttgtgtgagactaattcacagatctatgcctatygaatggcatcttctcactgtaaaaatttttggatttcattttccagaatctgttgtgaacaaaggaaatgaatcatgatccactggttaagaactgagaaataagctcagtccttacacaaatggacataatttctgttaggaataaatgtcattgtacccacttaagtcaaagctaaatttggccagtaacatataccaagctccaaactactgatgataattaagaaataatgacagtggaatagaacaatgtcacaggataaaggtcttctgctgctcaacaaatgctaaaatgagg

SEQ ID NO: 68045 - DNA, 599 bp, Chicken  19866894338611_1
  misc_feature (1)..(61): n is any nucleotide
nnnnnnnnnnnnnnnnnnnnnnnnnnnnnnnnnnnnnnnnnnnnnnnnnnnnnnnnnnnnntgtagcactgctggcatggaaggagcagtggtaccacgcttacctgctagcaaaggtccaatttatgggaggttactgttcacaatcatatctacttcacaacctcttatacagcattagagaagataacaatttccatctagttaatctccagcagttataatctgaatgcatttatatatatactcttgaaatgttaatttattctgtgcatttttagaatccagatgtcattttaygttacagagatatcctgctttcacattctgtaacgtagtagacaaaaagcctctgtgccagtggaagatgtactgatttctgatttcctacctctagttaattagtttattcaggaaatttcaaataaagatgyttccattccctttccaaactcctcctatttcgaaaatcagaatgaaaacttttgacttyagcaactgacctggatgtgaagattctctttctccctctacccttccatatggctgaaattcagaaaattctgttgtagaaattatttgcgatatcagatatctca

SEQ ID NO: 68046 - DNA, 600 bp, Chicken  19866894338611_2
tactgttcacaatcatatctacttcacaacctcttatacagcattagagaagataacaatttccatctagttaatctccagcagttataatctgaatgcatttatatatatactcttgaaatgttaatttattctgtgcatttttagaatccagatgtcattttaygttacagagatatcctgctttcacattctgtaacgtagtagacaaaaagcctctgtgccagtggaagatgtactgatttctgatttcctacctctagttaattagtttattcaggaaatttcaaataaagatgyttccattccctttccaaactcctcctatttcgaaaatcagaatgaaaacttttgacttyagcaactgacctggatgtgaagattctctttctccctctacccttccatatggctgaaattcagaaaattctgttgtagaaattatttgcgatatcagatatctcaaaggatttgtgaaactttttttgtcctgaaaataacgagactattgttttttttcctaattatatttgttattttataaatattaattttaatgaggtattcacttcaactcataatagcagaaagaaagaaaca

SEQ ID NO: 68047 - DNA, 600 bp, Chicken  19866894338611_3
tttccatctagttaatctccagcagttataatctgaatgcatttatatatatactcttgaaatgttaatttattctgtgcatttttagaatccagatgtcattttaygttacagagatatcctgctttcacattctgtaacgtagtagacaaaaagcctctgtgccagtggaagatgtactgatttctgatttcctacctctagttaattagtttattcaggaaatttcaaataaagatgyttccattccctttccaaactcctcctatttcgaaaatcagaatgaaaacttttgacttyagcaactgacctggatgtgaagattctctttctccctctacccttccatatggctgaaattcagaaaattctgttgtagaaattatttgcgatatcagatatctcaaaggatttgtgaaactttttttgtcctgaaaataacgagactattgttttttttcctaattatatttgttattttataaatattaattttaatgaggtattcacttcaactcataatagcagaaagaaagaaacaaaccaaccaaaatggtcttctcccttataaaaagcctaattacttatctctacttacat

SEQ ID NO: 68048 - DNA, 600 bp, Chicken  19866894338614_1
ctgcactccgttatgctaagaaaatgatctcaggtagacaagcaaagaacatactgtcctctgacaggcagtcagacccagctgcttagaagttaaacaaatagttctaccttgccatgtctctgatattaaaatcaggttcacaccaggtgtccaggatctctaagagtctacactggagctcaggatattctgccacgtaatcttcaaccaggttaattttatcttgaaacagtagtggtgcacacatctaggaaaagaaatttaggttatttgcactagatgttaagaattatgccytgwctttgatcagaatggtcagtgctgaagcaaacagaaggcatggaaggggcccaagtcatcaaacccttgcttaaccaactagtgctgtctaaaagacagatgttgcattttcagcacaactattagcaaaagtggcaaagcttcaaagcagtaaaaccaataaactttaccaaaatgatcatttgtcaagaacccagctagaatttttgattgtagtggctctaagtaggaaaatagtgtagtaaggggtctaagaaaatacactctgtcactcctctagaggcagaggtacttcag

SEQ ID NO: 68049 - DNA, 600 bp, Chicken  19866894338614_2
cactccgttatgctaagaaaatgatctcaggtagacaagcaaagaacatactgtcctctgacaggcagtcagacccagctgcttagaagttaaacaaatagttctaccttgccatgtctctgatattaaaatcaggttcacaccaggtgtccaggatctctaagagtctacactggagctcaggatattctgccacgtaatcttcaaccaggttaattttatcttgaaacagtagtggtgcacacatctaggaaaagaaatttaggttatttgcactagatgttaagaattatgccytgwctttgatcagaatggtcagtgctgaagcaaacagaaggcatggaaggggcccaagtcatcaaacccttgcttaaccaactagtgctgtctaaaagacagatgttgcattttcagcacaactattagcaaaagtggcaaagcttcaaagcagtaaaaccaataaactttaccaaaatgatcatttgtcaagaacccagctagaatttttgattgtagtggctctaagtaggaaaatagtgtagtaaggggtctaagaaaatacactctgtcactcctctagaggcagaggtacttcagcca

SEQ ID NO: 68050 - DNA, 599 bp, Chicken  19866894338633_1
  misc_feature (1)..(40): n is any nucleotide
nnnnnnnnnnnnnnnnnnnnnnnnnnnnnnnnnnnnnnnnattatactgggcatcaaattcactaaggctctttatgtcgaagaaaagaaaaagacagtttaggccaagttataacctgagcttgcctgtaagagaattctgatatatagacattatatgataccacctgaaagtccttctccaaaatttcatttttcacatggctgcagagcccttgatgctcttgagagtatggtacagaagagtccaggctggttcctttttggtgctcagacagcacgaaagttgaattttgtggrgctccaagktcttaaaagcctcattctcaagactcataagattagcttaatttgagaaaatttgagcaaaaaatgtctttggagataaataattaataacatgtaataacaggtaccgtaagaagcagaacattttgtattgtcttatcttaggtagaataagattatggtgctttttcaatgaactttctctcttagcttccaacaatttgtttggtgaaacatcacatcttttctgtggcagtgcattgttgccatgcaaaactttcagtagtcaagccatcttttctcttgaagga

SEQ ID NO: 68051 - DNA, 599 bp, Chicken  19866894338633_2
  misc_feature (1)..(31): n is any nucleotide
nnnnnnnnnnnnnnnnnnnnnnnnnnnnnnnattatactgggcatcaaattcactaaggctctttatgtcgaagaaaagaaaaagacagtttaggccaagttataacctgagcttgcctgtaagagaattctgatatatagacattatatgataccacctgaaagtccttctccaaaatttcatttttcacatggctgcagagcccttgatgctcttgagagtatggtacagaagagtccaggctggttcctttttggtgctcagacagcacgaaagttgaattttgtggrgctccaagktcttaaaagcctcattctcaagactcataagattagcttaatttgagaaaatttgagcaaaaaatgtctttggagataaataattaataacatgtaataacaggtaccgtaagaagcagaacattttgtattgtcttatcttaggtagaataagattatggtgctttttcaatgaactttctctcttagcttccaacaatttgtttggtgaaacatcacatcttttctgtggcagtgcattgttgccatgcaaaactttcagtagtcaagccatcttttctcttgaaggatactctttg

SEQ ID NO: 68052 - DNA, 600 bp, Chicken  19866894338651_1
tgcaaaacatgatggtcatgctttatttcttgctctttaatgtagaagaacatagttttgcaagaatacatcaacttcatagaatttattgatttcatttgaagcaaaacagtactgagttgaaactaggccaattgagaaagcccagctacttttccatagctaataataatcattattacatttattctgtgatactgtttaaagccctggctcccagtgttttaagagcacgtatcgttctctattaactaaacaaagccaagtgtatcttctacatgtgcaacggtaaccttaatyttaagcttcctggaaacaatttctacctgtacttgatgcactgccacatttttaataacaaatatttctttaaaaaccactttgtcatctttctgggtttgtgtagtccttccctgcttctgtggctgagaggctaaagaaaacatgttgcttttgtgcttgtactgctggtcatcataattcacgttagaacttaattcctctcttgccctgtgattttgttggggtacattagaaggatacaagggaagaagcatgagagtctcttcccgatgtttgaggtgttttgcagggagaagt

SEQ ID NO: 68053 - DNA, 599 bp, Chicken  19866894338654_1
  misc_feature (1)..(112): n is any nucleotide
nnnnnnnnnnnnnnnnnnnnnnnnnnnnnnnnnnnnnnnnnnnnnnnnnnnnnnnnnnnnnnnnnnnnnnnnnnnnnnnnnnnnnnnnnnnnnnnnnnnnnnnnnnnnnnnntcacttgtggtctaccaaatcccacacgctcactgtgagctgcccaccctcccaacgagcacacacagggagcagccattcctgcactggtatgagcagccccaaccccttccttcatgggtcacccaatgaagggacggcggggcagcgttccccattacagcacagcctcatgcattatgtctttsttatgctaatgccccggcgctgcacaatttaaatagcacttccagaaaaattaagtatgttcattgacacagtgaaatgttttcaccctccatgtaaccttcacagtttctgtacaaaatctatcagtcagtaaactattcatctgcgaatgcttaccaattattatgcctaatgtattacaatacattacagtgaattctttttaaatgccaggaaatgcagctgtctggcaacctagcttgcctgtattatggagctatcaataaacagcacagcgtttgcaactggattttgactg

SEQ ID NO: 68054 - DNA, 600 bp, Chicken  19866894338655_1
taaaaaggtaacttcatattccaaatggccttactgggattatacaaggagaccagaccttggataggatcagaccctttgtcagtttatttatacctacagttcttgtgctcactgccttactgtgggatctaaggctagaatactgtactgaatgaataagttttgtggtcaagccagaagcacccctacgttgctgtttgagtgatgctgatgaaagtccattaagaatgtgtcaaatatgcatgacgtgtattacaagaacatgttgatagttttaaataatctcttggaagatgrcagaatttgattccctatgtattccctcaggaatacttcaaagtcatgttcaacacaataccactaatttaccgttttaacagagggttaaaataggtgcttcttggaaatcaactgttggcattattcaataatgcagaccacatttgcaaatcatgacaccatgtcaagggataaaagcaatttatttagttcatgaaataaatctctgacatgataaaagtactaactctttggaatgtaatgcttaacaaaccaaatcttcaaggagaagtttttttattttctttctctgtactt

SEQ ID NO: 68055 - DNA, 600 bp, Chicken  19866894338656_1
caagattgcatccccctagattacacctagcctacgtctctaacccttgaggtgaaatcacagcagacatctttactgcagccctcacccatcatcctcttggtacagctcaaataaatgacatgaggcgtatggtgcttgaatcttgttgtagacatctagagccatctgcagtgccacaagtgtggtgtcatgctgagaaagagggaaaaaaaccaaatcagtcaccctcatgaatgtggcagggcagctcagaccataccagtagtggacaggacagtgctggagggaagtccccaytgwaacttccacagggaagaagggaaaggagcagtactgtttgraaagtgatctgtgacggtgccagagaaggcaaggaagtgaaacacagccatgtatgtcctgcatcattctgctaagaattattttctacagggcagttttgggagagatgcttgactttccagtcattaggctgctgaaaagtgagggggatgactttagctacactgctgtaacatcacatttgagtaccactaagtaagtgtagcagtatcccctcaaagactaccagtctcatccacaagtttgagctaaaag

SEQ ID NO: 68056 - DNA, 600 bp, Chicken  19866894338656_2
gattgcatccccctagattacacctagcctacgtctctaacccttgaggtgaaatcacagcagacatctttactgcagccctcacccatcatcctcttggtacagctcaaataaatgacatgaggcgtatggtgcttgaatcttgttgtagacatctagagccatctgcagtgccacaagtgtggtgtcatgctgagaaagagggaaaaaaaccaaatcagtcaccctcatgaatgtggcagggcagctcagaccataccagtagtggacaggacagtgctggagggaagtccccaytgwaacttccacagggaagaagggaaaggagcagtactgtttgraaagtgatctgtgacggtgccagagaaggcaaggaagtgaaacacagccatgtatgtcctgcatcattctgctaagaattattttctacagggcagttttgggagagatgcttgactttccagtcattaggctgctgaaaagtgagggggatgactttagctacactgctgtaacatcacatttgagtaccactaagtaagtgtagcagtatcccctcaaagactaccagtctcatccacaagtttgagctaaaaggag

SEQ ID NO: 68057 - DNA, 600 bp, Chicken  19866894338656_3
ccttgaggtgaaatcacagcagacatctttactgcagccctcacccatcatcctcttggtacagctcaaataaatgacatgaggcgtatggtgcttgaatcttgttgtagacatctagagccatctgcagtgccacaagtgtggtgtcatgctgagaaagagggaaaaaaaccaaatcagtcaccctcatgaatgtggcagggcagctcagaccataccagtagtggacaggacagtgctggagggaagtccccaytgwaacttccacagggaagaagggaaaggagcagtactgtttgraaagtgatctgtgacggtgccagagaaggcaaggaagtgaaacacagccatgtatgtcctgcatcattctgctaagaattattttctacagggcagttttgggagagatgcttgactttccagtcattaggctgctgaaaagtgagggggatgactttagctacactgctgtaacatcacatttgagtaccactaagtaagtgtagcagtatcccctcaaagactaccagtctcatccacaagtttgagctaaaaggagcaaagtgctggttaggaattttcctcaggggccccagagga

SEQ ID NO: 68058 - DNA, 600 bp, Chicken  19866894338664_1
attccaggttactgtaagtattcgtggttgttttccacggtaaaagcgtgtgcaaatctacaaacaccaaagtcatctattttcaaagcaaatgtaaatgagtgaggatgactgcatacgtaacactgtgatatatccaggcataaccacatgccacgagatgaataccacaaacctgtgctgagcctcaggcaccgtacccccaaacatccatccatcaccaattcccaaccagcagcagcagaccccgtgcgctgtttaagagacgattgtgagagcattcaccccacccagcactgytgaagaagggctcccacgctgaagggagtcacaaataattaaatgtttcaaaacacaatggatatgacatgctttcaaaatagcatctctagaatcgcttccactagggcgaggagctctcgggagggaaagccctttcactcacttcacttgattacctgtattaaagggcttaatttctccggtgcatttccttcccaaatcacctctttctgccagcatcattgtggcagatgctctctcagccccacacacaccccatgaggatatgagtgctgggtaggtctatttttctaatgt

SEQ ID NO: 68059 - DNA, 600 bp, Chicken  19866894338666_1
agtcttctgcttttcatgcattcaagaagtgatgcttgtgcttacatgaggacatctggtaagcaacaagatgcagctcactagcacaggtgcagtgggtttccttgtattgaggctagttgggctgagcactgatccctgctcatggatttgcttcatgcatgcttttctgcagaactctgctgatgcatgattgtcttgacttccgttgccttctatttgctgtttctggggccttgtaatagatctctgagtgctggcagatatcctgagtgcatggcacagcaagaggtcagcatrgcacrcataagactgagagccacagtctttccatctttgcaaccactatgccttgggatccacaggagttcagccttcttgaaagcctgacagtgcacagaatgctaatataacctttctggtctcaataacttaaagatagtagtattttacatgtgttgcacttgtatggttccttcyatctaagaccagtaaatgatttcctagtatctaattaaaatactgtgctgtactaagcgagtagtttaaccagtgctgagagcatgacctgtgaaactgactgctcttcacaatgtcagc

SEQ ID NO: 68060 - DNA, 373 bp, Chicken  19866894338666_10
tmgtggtgatttcattctgctgcagaacctgcctgtcaagagaacaacaattctcccaggactccagtgacwccaatgccagcttactccatgatggagacaccacaactgaaggatgagttgaaaaggttggcgttacctccatgagaacacctctttgagcataaacttgtgagcaagtagygtgaaagaaagcaaccgggatgaaagagaaaccttggtgaagytcttccagctcaccagtggagttcctggcatgagcaccttcctgagctataacagtacagcattaccttagcytaagttcctacttttttctttcagatttggagtccgtgctctcccaaaacgccagatggtgttgaaactgaaa

SEQ ID NO: 68061 - DNA, 600 bp, Chicken  19866894338666_2
tctgcttttcatgcattcaagaagtgatgcttgtgcttacatgaggacatctggtaagcaacaagatgcagctcactagcacaggtgcagtgggtttccttgtattgaggctagttgggctgagcactgatccctgctcatggatttgcttcatgcatgcttttctgcagaactctgctgatgcatgattgtcttgacttccgttgccttctatttgctgtttctggggccttgtaatagatctctgagtgctggcagatatcctgagtgcatggcacagcaagaggtcagcatrgcacrcataagactgagagccacagtctttccatctttgcaaccactatgccttgggatccacaggagttcagccttcttgaaagcctgacagtgcacagaatgctaatataacctttctggtctcaataacttaaagatagtagtattttacatgtgttgcacttgtatggttccttcyatctaagaccagtaaatgatttcctagtatctaattaaaatactgtgctgtactaagcgagtagtttaaccagtgctgagagcatgacctgtgaaactgactgctcttcacaatgtcagcaaatc

SEQ ID NO: 68062 - DNA, 600 bp, Chicken  19866894338666_3
tgctgatgcatgattgtcttgacttccgttgccttctatttgctgtttctggggccttgtaatagatctctgagtgctggcagatatcctgagtgcatggcacagcaagaggtcagcatrgcacrcataagactgagagccacagtctttccatctttgcaaccactatgccttgggatccacaggagttcagccttcttgaaagcctgacagtgcacagaatgctaatataacctttctggtctcaataacttaaagatagtagtattttacatgtgttgcacttgtatggttccttcyatctaagaccagtaaatgatttcctagtatctaattaaaatactgtgctgtactaagcgagtagtttaaccagtgctgagagcatgacctgtgaaactgactgctcttcacaatgtcagcaaatctactgatacgtcaaatcaatatctaactcaggaccccagaagcttgacttgctcagttttttcttcatcaagtctcccatgcaatttcctttatgggaaaagaactgctccatggaattcagtaaacacttttttcccctgccttgcaagagctgccygttcttagaaagccctg

SEQ ID NO: 68063 - DNA, 600 bp, Chicken  19866894338666_4
cttgtatggttccttcyatctaagaccagtaaatgatttcctagtatctaattaaaatactgtgctgtactaagcgagtagtttaaccagtgctgagagcatgacctgtgaaactgactgctcttcacaatgtcagcaaatctactgatacgtcaaatcaatatctaactcaggaccccagaagcttgacttgctcagttttttcttcatcaagtctcccatgcaatttcctttatgggaaaagaactgctccatggaattcagtaaacacttttttcccctgccttgcaagagctgccygttcttagaaagccctgagtggcctctgtagtcagacctgacttacatctkgatgtaaaccattttccattttaaattccacaaaaagcaagtgtcccagtctagaaagaaagtgtcagctgttccatccagtatgcaggtgagtagtaagtaaaagaggttgtactgctgcttaattattataattatattagaatatctgccactaagaatggaaaatattggctattataagtgctaagtctgatmgtggtgatttcattctgctgcagaacctgcctgtcaagagaacaacaattc

SEQ ID NO: 68064 - DNA, 600 bp, Chicken  19866894338666_5
ttaaaatactgtgctgtactaagcgagtagtttaaccagtgctgagagcatgacctgtgaaactgactgctcttcacaatgtcagcaaatctactgatacgtcaaatcaatatctaactcaggaccccagaagcttgacttgctcagttttttcttcatcaagtctcccatgcaatttcctttatgggaaaagaactgctccatggaattcagtaaacacttttttcccctgccttgcaagagctgccygttcttagaaagccctgagtggcctctgtagtcagacctgacttacatctkgatgtaaaccattttccattttaaattccacaaaaagcaagtgtcccagtctagaaagaaagtgtcagctgttccatccagtatgcaggtgagtagtaagtaaaagaggttgtactgctgcttaattattataattatattagaatatctgccactaagaatggaaaatattggctattataagtgctaagtctgatmgtggtgatttcattctgctgcagaacctgcctgtcaagagaacaacaattctcccaggactccagtgacwccaatgccagcttactccatgatggagacacc

SEQ ID NO: 68065 - DNA, 600 bp, Chicken  19866894338666_6
ctccatggaattcagtaaacacttttttcccctgccttgcaagagctgccygttcttagaaagccctgagtggcctctgtagtcagacctgacttacatctkgatgtaaaccattttccattttaaattccacaaaaagcaagtgtcccagtctagaaagaaagtgtcagctgttccatccagtatgcaggtgagtagtaagtaaaagaggttgtactgctgcttaattattataattatattagaatatctgccactaagaatggaaaatattggctattataagtgctaagtctgatmgtggtgatttcattctgctgcagaacctgcctgtcaagagaacaacaattctcccaggactccagtgacwccaatgccagcttactccatgatggagacaccacaactgaaggatgagttgaaaaggttggcgttacctccatgagaacacctctttgagcataaacttgtgagcaagtagygtgaaagaaagcaaccgggatgaaagagaaaccttggtgaagytcttccagctcaccagtggagttcctggcatgagcaccttcctgagctataacagtacagcattaccttagcyta

SEQ ID NO: 68066 - DNA, 600 bp, Chicken  19866894338666_7
tggcctctgtagtcagacctgacttacatctkgatgtaaaccattttccattttaaattccacaaaaagcaagtgtcccagtctagaaagaaagtgtcagctgttccatccagtatgcaggtgagtagtaagtaaaagaggttgtactgctgcttaattattataattatattagaatatctgccactaagaatggaaaatattggctattataagtgctaagtctgatmgtggtgatttcattctgctgcagaacctgcctgtcaagagaacaacaattctcccaggactccagtgacwccaatgccagcttactccatgatggagacaccacaactgaaggatgagttgaaaaggttggcgttacctccatgagaacacctctttgagcataaacttgtgagcaagtagygtgaaagaaagcaaccgggatgaaagagaaaccttggtgaagytcttccagctcaccagtggagttcctggcatgagcaccttcctgagctataacagtacagcattaccttagcytaagttcctacttttttctttcagatttggagtccgtgctctcccaaaacgccagatggtgttgaaactgaa

SEQ ID NO: 68067 - DNA, 489 bp, Chicken  19866894338666_8
gtatgcaggtgagtagtaagtaaaagaggttgtactgctgcttaattattataattatattagaatatctgccactaagaatggaaaatattggctattataagtgctaagtctgatmgtggtgatttcattctgctgcagaacctgcctgtcaagagaacaacaattctcccaggactccagtgacwccaatgccagcttactccatgatggagacaccacaactgaaggatgagttgaaaaggttggcgttacctccatgagaacacctctttgagcataaacttgtgagcaagtagygtgaaagaaagcaaccgggatgaaagagaaaccttggtgaagytcttccagctcaccagtggagttcctggcatgagcaccttcctgagctataacagtacagcattaccttagcytaagttcctacttttttctttcagatttggagtccgtgctctcccaaaacgccagatggtgttgaaactgaaa

SEQ ID NO: 68068 - DNA, 446 bp, Chicken  19866894338666_9
aattattataattatattagaatatctgccactaagaatggaaaatattggctattataagtgctaagtctgatmgtggtgatttcattctgctgcagaacctgcctgtcaagagaacaacaattctcccaggactccagtgacwccaatgccagcttactccatgatggagacaccacaactgaaggatgagttgaaaaggttggcgttacctccatgagaacacctctttgagcataaacttgtgagcaagtagygtgaaagaaagcaaccgggatgaaagagaaaccttggtgaagytcttccagctcaccagtggagttcctggcatgagcaccttcctgagctataacagtacagcattaccttagcytaagttcctacttttttctttcagatttggagtccgtgctctcccaaaacgccagatggtgttgaaactgaaa

SEQ ID NO: 68069 - DNA, 600 bp, Chicken  19866894338668_1
gcacattcaaatcatcacattagcacaagcagaagttagaagcaatgtaaaggtagcgcctttgatggcttcttttcaaagcacctgtcctgacttacagcatttttaggatgcagctgattgccatccaacttttattcagctgcttttgtaaagtcctcctctcacccctgggcagctgctccaaagaagcaggcggggacctgcagggagtgatcactgagaggtgatgatgatgaagatgatgaagatgcctgagattccaatcctccctcccatccccaggcgctcagtgcagarcctgccgycgctccccaggcagaactgggatgcacaccctgcacctgagccacagaaataagggcaccattagaaatcattagaaaggaaatctgattcttgagaaagacagaagtgaatctctgggtaacttttcttctcaatgcaagcagctcatcttgtagaaacaggctgggggcaatggggagagtctgaatcaaggacctgaaccattggtatctcttatcaagtttttacatttcaatgggcctcagaaaacagcagatttgtcaggcatgagatggacattatgggcacaaa

SEQ ID NO: 68070 - DNA, 600 bp, Chicken  19866894338668_2
aaatcatcacattagcacaagcagaagttagaagcaatgtaaaggtagcgcctttgatggcttcttttcaaagcacctgtcctgacttacagcatttttaggatgcagctgattgccatccaacttttattcagctgcttttgtaaagtcctcctctcacccctgggcagctgctccaaagaagcaggcggggacctgcagggagtgatcactgagaggtgatgatgatgaagatgatgaagatgcctgagattccaatcctccctcccatccccaggcgctcagtgcagarcctgccgycgctccccaggcagaactgggatgcacaccctgcacctgagccacagaaataagggcaccattagaaatcattagaaaggaaatctgattcttgagaaagacagaagtgaatctctgggtaacttttcttctcaatgcaagcagctcatcttgtagaaacaggctgggggcaatggggagagtctgaatcaaggacctgaaccattggtatctcttatcaagtttttacatttcaatgggcctcagaaaacagcagatttgtcaggcatgagatggacattatgggcacaaacgcagtct

SEQ ID NO: 68071 - DNA, 599 bp, Chicken  19866894338669_1
  misc_feature (1)..(230): n is any nucleotide
nnnnnnnnnnnnnnnnnnnnnnnnnnnnnnnnnnnnnnnnnnnnnnnnnnnnnnnnnnnnnnnnnnnnnnnnnnnnnnnnnnnnnnnnnnnnnnnnnnnnnnnnnnnnnnnnnnnnnnnnnnnnnnnnnnnnnnnnnnnnnnnnnnnnnnnnnnnnnnnnnnnnnnnnnnnnnnnnnnnnnnnnnnnnnnnnnnnnnnnnnnnnnnnnnnnnnnnnnnnnnnnnnnnnnnccttggaaaaccaagaaaaccagcatgtgaggaggagctacagtcaacaaacccaagccaggctgatggytgcaccagactcctgatctctgttgcaataggtagttgtaaagtgtgcaagggtaactagatgtatgatgtggaacttatcttaataaagaaacaagtttgaattgctcatttactttgcatctgtcagtcttatgaaacctgacttctatgctgaggtggcctggagaaaaatgtttgcccttgtagcagttgattttcagatgatgagatcttcagtactgattctgtgttggtagctccacctcagtctctgaagagaggttttctgctttttagtttctgtgatctgtggttcct

SEQ ID NO: 68072 - DNA, 600 bp, Chicken  19866894338669_2
aaacaagtttgaattgctcatttactttgcatctgtcagtcttatgaaacctgacttctatgctgaggtggcctggagaaaaatgtttgcccttgtagcagttgattttcagatgatgagatcttcagtactgattctgtgttggtagctccacctcagtctctgaagagaggttttctgctttttagtttctgtgatctgtggttccttgtacttcctcagatcactttgattaactgctaatagtccctggtgaatcaccatttgtataaccagcccaaagataattgaagataactkatcgctgcaccctcatcttgcagctttctcaagtgcagtattgttacattgcttgctctgttgtcttccggatgctagagcagcacctctctaaatgtgctaaatcagcagcttggttggtctcatcacaagaaatgctaaatacattgttactgtgctgtgagtttgtctactgaactatctgcacacaacagtctaatttcccctaccatgactctgttactagcatttattcttagatttccacttccacaaggcaacatagagatttgcacaagaaattctgagattgcttgaata

SEQ ID NO: 68073 - DNA, 600 bp, Chicken  19866894338677_1
cctacattttgtatctgtgagtaattttccagtgctgtgctgttttccatacatatatatcaatcaggagaaagataaaattcaataagtttttatgaagaatactgggcattcatttatttatgtctattactttcactatttcaagtgtatttcatcttttccttttgttcggtcttgaagttatttgttgtgtttaattctttaactgttagtggaaaatttttcataatggatagtagaagtctcttctgcatgcttcttctcagactcataatacctattctactttttttcccwgtcctcttttccataatcattttgggaaacaaaaatacaatatctaaaagcatgcagatcctaaaaaagagagctgtgtttatagaatcacagaattgtttgagttggacaggaccattaagggtcatctaatccaactcccctgcaatgaacagagacacctacagcttggcccagttgctcagagtcctgctcagtttgaccttgagtgtctccacggatgggacatccaccacatctctgggcaacctgttccagtgcctcaccacccttactgtaaaaagcttcttccttatatcc

SEQ ID NO: 68074 - DNA, 478 bp, Chicken  19866894338682_1
agcacttgggaagtgtgcagctgatggatgcttctttctttaaataaaatgaacatttcttggaaccagtgcttcctgagttaaaaagataaattattcgtattgcaagacaggatgtaaaggactaatttatctgacatactagggaccgtttgggaaattggtgattatgaaatttgtttgcttttctgttggctaatttgctgatatgataaatttttatgaaatgttccttatgcttagtaggtaaactgtggtcattttctgcatagctgcttaccgttgtgaattcctttcatstctctttctctgctggacccagaccgtgacagttttcactgccaaatctcaattccatgtacaaaatggacgaaataattgaatacacaaaagcctctaatctgttctaattcccttcatcagccttactttgttttctccctcttactatgttttcttcccaattacttttcctgta

SEQ ID NO: 68075 - DNA, 600 bp, Chicken  19866894338689_1
aagagaggacaggggagaaagtagaaacctttgagagataaaaccaaacagaaaacagagccagatgaggggatggcacagtgtaaaatgtctggagatccgctcgatgcatatggacaaaggacaaatgtgtgaaaatatttttctctctcgctgaggagtttggaaaattgctttcattttctctgcaccaaatagattcttgttccctgcccttcaaatgtagtaaaaaagaaatgagtggctcagtaaggggcaacagatttatggctggatttaaatcagtgcaacttcacctgrgaggttcagttttggatgtattcagaagagggaataagcagaagaattattctggtatagcggtagtaaatagtccagcagtctcaggccaatttctgcagtgccatatctcataagggctgataaatccaacacgtgccgctgctgaggagactggcagtgttaaaaactggctctgggtctacatagccagcaatggtttgaccacgtcccagtcccacaccagcaacatccttctgtgatgctgagatctaatagtggcctcggcctccwgtgtttcattaactgtttgtcagcgtt

SEQ ID NO: 68076 - DNA, 600 bp, Chicken  19866894338689_2
gatttaaatcagtgcaacttcacctgrgaggttcagttttggatgtattcagaagagggaataagcagaagaattattctggtatagcggtagtaaatagtccagcagtctcaggccaatttctgcagtgccatatctcataagggctgataaatccaacacgtgccgctgctgaggagactggcagtgttaaaaactggctctgggtctacatagccagcaatggtttgaccacgtcccagtcccacaccagcaacatccttctgtgatgctgagatctaatagtggcctcggcctccwgtgtttcattaactgtttgtcagcgttggaaatatatattaccatgttagatggtgagctggaacaacattctccccctcccactatgagagattaaaaacggaattacaaaaatactgttgtggataatttcagcccagaaatactgagcagctcttgtgaatgatcatgctttcactaatgcttcctggtagagcagcgtccttattcctactgaaatcaccgagagctactcagaagggtggtttaatgcatttaggaggtttggagagctgtctgaaagcagtcagccagtctgca

SEQ ID NO: 68077 - DNA, 600 bp, Chicken  19866894338690_1
gctcgctcatagtcgaaggtgagccgggaacggagctccccggagctgctgttgatggcgaaggcgtctcggccctctgccacgccaggcccccccgccggctgctccagcactgcatactgcagctccccaaacacaccggtgtccgtgtcgatggcacgcagggtggtcacaagtgtgcccggaggcaggttctcccgcatgctggcactcagcacttccactgggaagtacggcttgttgtcattgacatccttcacctcgatggctacaggcaccagagcaaagtgccctcctggsacatccgtggcctgcaccacaagagcatgggatgcctgtgtctcccggtccaggggccgtgccaggcacagggcgcctgtgctctcgtggatctggaagagcccgtgctggtcacccgagctgatgctgtagtgaacatggccgcggggccctgagtcggcatcgtgggccgtcagacggagcagctctgtgccgggaggcgtgctctcactcactgctgtgcggtactcagctcgggcaaacacaggcgggttgtcattgacgtcctgcacggtgatgagcacaggcgccgtggtgctg

SEQ ID NO: 68078 - DNA, 600 bp, Chicken  19866894338697_1
acagaaaaaaaaaagttacttcaagttccaccagtatgaaaacgttttgagaaatacaaatttcaagtttatgcaagcctgcaatcccacctgcacaacctctctttcagataaatcaagttatgattccctatgtcatactgcttgttttacattatactcttaaagaaaagagcagatgttagaaatatttaaggaaaaaaacccgacttactgatctgacagccatcgggatctctcttttggttcacagtgcttatctcaagctgttcctcagtgatactctcttcagagaagagratctgacggctgaaagaaaaatgcacaaagcttacagtttatatccacaagactggaaatttggcatgcctggaggctttagcattattattattacaaatgtattctggaatttgtgtttttggcataaccagaagattcgttgtaaagaatgtagctttatttattttttttaatgcgttaagttagcttggattacttcaaattcaaatacttcagcaatgaccacaaataacatcctttttgatttgatgtagtaaaaagaaagctaacaaacatgacttcagrcatcacttagca

SEQ ID NO: 68079 - DNA, 600 bp, Chicken  19866894338697_2
tcagagaagagratctgacggctgaaagaaaaatgcacaaagcttacagtttatatccacaagactggaaatttggcatgcctggaggctttagcattattattattacaaatgtattctggaatttgtgtttttggcataaccagaagattcgttgtaaagaatgtagctttatttattttttttaatgcgttaagttagcttggattacttcaaattcaaatacttcagcaatgaccacaaataacatcctttttgatttgatgtagtaaaaagaaagctaacaaacatgacttcagrcatcacttagcaacaacttttgaaataccaccattattatcttaggacgcagcaacctgaaaaactggccctcctacaacctgagcttggtcaagacagacttgttagttacagtttcctttaatgaaaagctattttgaagtaaaaaaaaagttaaaaaaaaaatctcttaacagagctattactgtcctgatgctgtttttaaaagaacatacttaattcagtacatacgttgtctgcctgtaacatcctccagtttaatgcaaggcctctgattttataaaggcagaagttggtgct

SEQ ID NO: 68080 - DNA, 600 bp, Chicken  19866894338697_3
gtaaagaatgtagctttatttattttttttaatgcgttaagttagcttggattacttcaaattcaaatacttcagcaatgaccacaaataacatcctttttgatttgatgtagtaaaaagaaagctaacaaacatgacttcagrcatcacttagcaacaacttttgaaataccaccattattatcttaggacgcagcaacctgaaaaactggccctcctacaacctgagcttggtcaagacagacttgttagttacagtttcctttaatgaaaagctattttgaagtaaaaaaaaagttraaaaaaaaatctcttaacagagctattactgtcctgatgctgtttttaaaagaacatacttaattcagtacatacgttgtctgcctgtaacatcctccagtttaatgcaaggcctctgattttataaaggcagaagttggtgctacagtctcaattgtcagtacaccccctccacccacaactactcttcagcagtgctagttctacgcctccaatgttgtaacagcatcagggagcttcctctgcagacacagaccttgctaacgctaagtgttgtataaacacagccaggagatttaa

SEQ ID NO: 68081 - DNA, 600 bp, Chicken  19866894338699_1
tctggttatacaatgccaccttctcttatacaaggagaggtttcagaagcagtacgtcctgcagttcttggtaatagattgcgctcacctccacttcaggcttctttaggggcacctttgctaagcaaagcagcaccataaccattaggtgtgtctggtggtctctcatcatttacagggaagtcaccacaggggaacatggggagatgcaggagatacctcagcaggctgagttctgctaaggctctctcacaagaaaacaagcagacagacaaacactgctgaaataacatccagacrtggatagggacaaagctgaactcatgaggctgaggtgggctcaagaggaaaagtggcatctggtggctcttctggccattaactccaagtactggcactttctgcttctgaaaaagcaggattttgctaagcagcttccatattcacagctcgctcaggtgtctgaatcccaygaggacctgtccctttgccaactgattctggctcattgagatagacatttgtaacattcccctggttctcttcaataagtaaccattttctccatttcccagcacttgggaagttttacaccccagc

SEQ ID NO: 68082 - DNA, 600 bp, Chicken  19866894338699_2
tacagggaagtcaccacaggggaacatggggagatgcaggagatacctcagcaggctgagttctgctaaggctctctcacaagaaaacaagcagacagacaaacactgctgaaataacatccagacrtggatagggacaaagctgaactcatgaggctgaggtgggctcaagaggaaaagtggcatctggtggctcttctggccattaactccaagtactggcactttctgcttctgaaaaagcaggattttgctaagcagcttccatattcacagctcgctcaggtgtctgaatcccaygaggacctgtccctttgccaactgattctggctcattgagatagacatttgtaacattcccctggttctcttcaataagtaaccattttctccatttcccagcacttgggaagttttacaccccagccamgtagtgcaatgagtgagtactaggttacagctgggtgcagtgatacactgcatttggcctgggtagcccmgatgctattagcagacaagctcctcagcaaactgaaggatccttccccttatgcccacagaaaacttgattttaatggaactgcagtaatgaaactcaag

SEQ ID NO: 68083 - DNA, 600 bp, Chicken  19866894338699_3
atagggacaaagctgaactcatgaggctgaggtgggctcaagaggaaaagtggcatctggtggctcttctggccattaactccaagtactggcactttctgcttctgaaaaagcaggattttgctaagcagcttccatattcacagctcgctcaggtgtctgaatcccaygaggacctgtccctttgccaactgattctggctcattgagatagacatttgtaacattcccctggttctcttcaataagtaaccattttctccatttcccagcacttgggaagttttacaccccagccamgtagtgcaatgagtgagtactaggttacagctgggtgcagtgatacactgcatttggcctgggtagcccmgatgctattagcagacaagctcctcagcaaactgaaggatccttccccttatgcccacagaaaacttgattttaatggaactgcagtaatgaaactcaagtcttagacttccagagggaattaaacatccgtcccttcagagtttacagtaaaagtgctgcaaaagcgagagctacaaaaatgccacattgatacctagtcttcaatgatgtcctgagacacgctttgtt

SEQ ID NO: 68084 - DNA, 600 bp, Chicken  19866894338699_4
ggccattaactccaagtactggcactttctgcttctgaaaaagcaggattttgctaagcagcttccatattcacagctcgctcaggtgtctgaatcccaygaggacctgtccctttgccaactgattctggctcattgagatagacatttgtaacattcccctggttctcttcaataagtaaccattttctccatttcccagcacttgggaagttttacaccccagccamgtagtgcaatgagtgagtactaggttacagctgggtgcagtgatacactgcatttggcctgggtagcccmgatgctattagcagacaagctcctcagcaaactgaaggatccttccccttatgcccacagaaaacttgattttaatggaactgcagtaatgaaactcaagtcttagacttccagagggaattaaacatccgtcccttcagagtttacagtaaaagtgctgcaaaagcgagagctacaaaaatgccacattgatacctagtcttcaatgatgtcctgagacacgctttgttaaagtttgccaaaatctccaagacacttcagagaaagatagtaaagaggagcaaacaataagaaaaacgg

SEQ ID NO: 68085 - DNA, 600 bp, Chicken  19866894338699_5
gtaagcctgatgttctaaaattcagcattaacagcacatgcagctaaggaaaattctctttggaagagagacaaaagtgagaatcttacacatgaagtaaaatagctttacaaaaaacgtttagtgctatttttttctttctgagtcccgagatccccttgagctaaaaactatgttttgcatctttttaagcaatcagcttaccacaattagtaattttatgttactcattcttctggtgaaactagaaactggaagggccagaccctacaactctctcttccatagcccggtgctgcrttccctcaggaaaatatggaaatagcagaataacagaagaaacacttctgcagcaccaaacccagtattatttgaacagaactcctgcatcagcaactagaaaatagtatttttaggtgggaatgttctaaatgctagaaagctgttttccagaataaccacctcaccacagctgaccgtgcatcatcgcccatgaccatcagcacatgtcctgtgatcagacccccagaaatctgagcatatgctgccctgctgctgaagccaggttttgtaagatattgggagagaaagagccaggct

SEQ ID NO: 68086 - DNA, 600 bp, Chicken  19866894338701_1
tactttttaggaccacagtatcttttgctagagactgatttgtttgtacaaaactgtttgtagacaatactgctattcaaaaaaaaaaaaaatacactgtacatatttcctttcaagtgttgttcatttactgtacggctggcatgtgttgtggaacaaaattcattgtcaccaagtggcaagaagttggcaaacaggagaaaagtatcaataaccacctgctgccactgcaggtactgcataactttgcatatttctcgcatgactcatgtctaattgactgacttactacaatactcwattacaatatgagatattttggaggcttttcattgctgtaagattgtgggttgctttttttcagcctgctgacgtatgaacgttttctgtgtagtktctctgactgtattttgttcatcaactccagctctgcttttcaagacctgtagacccaactttcccatactttgggttggctgctttttttactatatgtatttttcccttctgtctgttctctccttctccacatcaatttacctgctacccttagagaacatttctctatgttttctagattggctgtgtttttctgtttct

SEQ ID NO: 68087 - DNA, 600 bp, Chicken  19866894338701_2
ctgtacatatttcctttcaagtgttgttcatttactgtacggctggcatgtgttgtggaacaaaattcattgtcaccaagtggcaagaagttggcaaacaggagaaaagtatcaataaccacctgctgccactgcaggtactgcataactttgcatatttctcgcatgactcatgtctaattgactgacttactacaatactcwattacaatatgagatattttggaggcttttcattgctgtaagattgtgggttgctttttttcagcctgctgacgtatgaacgttttctgtgtagtktctctgactgtattttgttcatcaactccagctctgcttttcaagacctgtagacccaactttcccatactttgggttggctgctttttttactatatgtatttttcccttctgtctgttctctccttctccacatcaatttacctgctacccttagagaacatttctctatgttttctagattggctgtgtttttctgtttctctttgatttcattttcttctgtgagtcttggtttcactttgaggtttctatataaaggccaggccttattgttaactggatctgctcgagacttta

SEQ ID NO: 68088 - DNA, 600 bp, Chicken  19866894338705_1
tcccagtgtttatacaaaaattaaccctttcttaggccagcagcaaggatgcccacttgtgaccccacggggtatctttctctcctgctattacttcctgctctcttcagcacacagagccccctccaactccattagacactggctgggacagtccggctgcagccctgcacctccctgtgtgcacagctgtgtgcatcccttcctgctgctgccggcacctcggtcaggaggagcaccgcagtgctccgaggaagcgagaatgagcaaagcgcaacaaaacatttctcagcaaaatgwgcaggtggaaacatgtcttcaaagagctgcaatgcagttcaccaccgcttctctatctgtcctcgtttgtacgtaccgtgtgttgttgcaatagacctaaagcaacatgctacgctccttagggcaaggctgtctgcctttgttctgcaaaccttcgctatgcttccaacagcattccgtgcttcctggtgtgcggagggagtgcaggctggctgtgtgctgggaggacacactactaaatccagtggactaaaggctaacgggataacccagtgataatgcagactgtggagcctggcg

SEQ ID NO: 68089 - DNA, 599 bp, Chicken  19866894338708_1
  misc_feature (1)..(32): n is any nucleotide
nnnnnnnnnnnnnnnnnnnnnnnnnnnnnnnnaattttttggaaagcctttctctttctgccattaaagtaagctgctccagccatgtagccacagtaaaatattaggggtggggaacaagttcctggctctccatccaattgttggaaacattaaaatggatgcagctaaacagcctcacagcccctgatgacttttcagtgaaaatctgaagtgtttacttggagtcataaaatgtgaaaaataaacctacctttctagaaggctaactgttccattctctctatttactgccaggarttttcactgaaacatgccaaaggtgaacttgcattgraggtagtaaagggcagtgaaagaataatcatttagcacctgggctgtgctcatcttcggtcactgaagttaatattttctatagtttatatttagctgacaatattcctgtcactttatttaaacagcttgagactgttctttggactggagctcatatgccctggaatgctttgactcatgaattgtttctcctgataatgttacatcacgtaaccacctctgtttaattggtcggtattggcctctcagtgacgactgcc

SEQ ID NO: 68090 - DNA, 600 bp, Chicken  19866894338708_2
tttggaaagcctttctctttctgccattaaagtaagctgctccagccatgtagccacagtaaaatattaggggtggggaacaagttcctggctctccatccaattgttggaaacattaaaatggatgcagctaaacagcctcacagcccctgatgacttttcagtgaaaatctgaagtgtttacttggagtcataaaatgtgaaaaataaacctacctttctagaaggctaactgttccattctctctatttactgccaggarttttcactgaaacatgccaaaggtgaacttgcattgraggtagtaaagggcagtgaaagaataatcatttagcacctgggctgtgctcatcttcggtcactgaagttaatattttctatagtttatatttagctgacaatattcctgtcactttatttaaacagcttgagactgttctttggactggagctcatatgccctggaatgctttgactcatgaattgtttctcctgataatgttacatcacgtaaccacctctgtttaattggtcggtattggcctctcagtgacgactgcctttaaagtcctatgactacaccatgtgtctctggatat

SEQ ID NO: 68091 - DNA, 413 bp, Chicken  19866894338708_3
tttaaacagcttgagactgttctttggactggagctcatatgccctggaatgctttgactcatgaattgtttctcctgataatgttacatcacgtaaccacctctgtttaattggtcggtattggcctctcagtgacgactgcctttaaagtcctatgactacaccatgtgtctctggatatccaatttcctactgttggaaaaagaaaaaaggcagtactgacttccagctatctttaccaataactacgggaacaagagggaacatgccaagaacttatccatcagcaacttattackatttgttgttttaggcagcaagtaacagaatatacaatataaataaaarcaattgttaataataaaattaaaaaaacaatggttgctataaataagtattaattcacatattt

SEQ ID NO: 68092 - DNA, 364 bp, Chicken  19866894338708_4
atgctttgactcatgaattgtttctcctgataatgttacatcacgtaaccacctctgtttaattggtcggtattggcctctcagtgacgactgcctttaaagtcctatgactacaccatgtgtctctggatatccaatttcctactgttggaaaaagaaaaaaggcagtactgacttccagctatctttaccaataactacgggaacaagagggaacatgccaagaacttatccatcagcaacttattackatttgttgttttaggcagcaagtaacagaatatacaatataaataaaarcaattgttaataataaaattaaaaaaacaatggttgctataaataagtattaattcacatattt

SEQ ID NO: 68093 - DNA, 600 bp, Chicken  19866894338710_1
agctggatgcaaaccaatgacattaatagctctcattaggacagaccatatggactaaagcccaagattatattactgtcattgtgattacaataggtttctagtcactgaaaatgtgtcccagtttatcaaggtctctattgtgactattttttaatgaagttagagtaacaaacagttcagcactctccatttgtgattccaaaataaataatcctgattgtatttccatggccttttcaatatcagagctcctatctgtctttagcttttctattacacttcagttaacatattacragacaaaattatttctccaattcacaacaagccactagcaatagcagttctatttaattaatcccagggtcaacttatttcatttagttctgttgagtagcagtggtttcctattaagcaaatctgttctttcttagcctacatttattcattatcatgaccaaagtgcattctgatttttgtaatttctgaagacacaacttagctcatcttagaaagacttgtcatagcaaagcatttaataatgaaagatattacccctatcgtacaggtgatagggttactgaggcacaaaaagat

SEQ ID NO: 68094 - DNA, 600 bp, Chicken  19866894338720_1
agagaaagaaaatctgatatatatctttaaaaccaaactacaaaagaaatgcaaaactacaataaaaattggctaggtaacaacacataacagcattagaatccatgttttcagagatacatgtgcatgtggaggttggtaacgtgtccttctggaaactgaaataggtagctacaatttccaaatagcccagtatgacaaaaatttacttgaataaagcgagcactttggaaagcatgaccttcatttagttgtccaaatagaatttaagcccttctgaaaatctgattccagttatcrataccggccccttctaaatctgcttcctcttagagacgctttgccctggatttattgctggtgatgggaggctgtcacaagctgaaattagtttatcgatatcttcatactgtctaatggtccatacaataaaagtgccgtgctgcttggtacgagatcagtctgtgaacaggatccagatgcaggataatgagatgtcaggacagcagacacagaccacatcaaggagctgaaacagccgcaggagttccttgtggaacatctagctcagggcaaactgatctttcctatcacattagc

SEQ ID NO: 68095 - DNA, 600 bp, Chicken  19866894338722_1
agaggtctctaatgatggtgtgataccctctggatctaagagaaggtgtgggcaggaacactcactgttttggctgaccatgtaagttattcttcccactctgagcccagcaatcagtttggttgcttctctttgacttgtacattcatgagcatgtcatccctctatgtctcttttcaccttctcatttgagtattctcttttacatctatttgaatcataaacttcttgaaataagttatctctgttttcatgatgtcaggaaaaacagtgccctaatgttattcagatccttcggtwtctgctgaaataatgaggcttagtgtgagccattgcaaaatgcctagagactgctagatttgcctgtacaattgccgtgctgtaccttggccgaattgttgtttgtaaagcagttttgtcactaatacaaaagacactgcataaaagcagttcctattaccttctaatagacattttccatctgaattgtgagtctagaattgctgactatctccttgaacacttacagatgataatgttacatgttcttccagctaatatatataattgctttttatcaagcagggcttggtagcagta

SEQ ID NO: 68096 - DNA, 599 bp, Chicken  19866894338725_1
  misc_feature (1)..(14): n is any nucleotide
nnnnnnnnnnnnnnccctaatcctctcctcctctccttgctggtattagatgggtttgaatctatctgccacagctttgctcctggatttgctgtaacagcatgtacggagcttgaaaggtaaagtcatcatgccccgcttctccatgttttagtgtggtccaaagtttatccatactttaggtgtttaggtatttatcctgttcaggtattgatcagtcaccaaaatgtagtgttggtaattactgtgttaaatacaaaacaaaggaggattcgtagtctgcctgcttccagctacagyggctgtggagctccgtatatttggactgtaaaactaagctgagaagtagttaygcaatctaaggatgtcctcatcaccttattggcgtggcttttagcttgttttcaaaaactacagatgtacaccatarcttaagaaactatagtaatttatttggattctggttttgttttccaacaaagggcattattttaaatcagcaagagttctgttttgtattaaaacttcattataatgcatttttctatctttttggcatactgtttcagatcactggcayccaaaaactcacctcaccc

SEQ ID NO: 68097 - DNA, 600 bp, Chicken  19866894338725_2
gtttgaatctatctgccacagctttgctcctggatttgctgtaacagcatgtacggagcttgaaaggtaaagtcatcatgccccgcttctccatgttttagtgtggtccaaagtttatccatactttaggtgtttaggtatttatcctgttcaggtattgatcagtcaccaaaatgtagtgttggtaattactgtgttaaatacaaaacaaaggaggattcgtagtctgcctgcttccagctacagyggctgtggagctccgtatatttggactgtaaaactaagctgagaagtagttaygcaatctaaggatgtcctcatcaccttattggcgtggcttttagcttgttttcaaaaactacagatgtacaccatarcttaagaaactatagtaatttatttggattctggttttgttttccaacaaagggcattattttaaatcagcaagagttctgttttgtattaaaacttcattataatgcatttttctatctttttggcatactgtttcagatcactggcayccaaaaactcacctcacccagcaaaaagattgatctgaatcacattttcaggraaagatagaatgaatgattg

SEQ ID NO: 68098 - DNA, 600 bp, Chicken  19866894338725_3
atgccccgcttctccatgttttagtgtggtccaaagtttatccatactttaggtgtttaggtatttatcctgttcaggtattgatcagtcaccaaaatgtagtgttggtaattactgtgttaaatacaaaacaaaggaggattcgtagtctgcctgcttccagctacagyggctgtggagctccgtatatttggactgtaaaactaagctgagaagtagttaygcaatctaaggatgtcctcatcaccttattggcgtggcttttagcttgttttcaaaaactacagatgtacaccatarcttaagaaactatagtaatttatttggattctggttttgttttccaacaaagggcattattttaaatcagcaagagttctgttttgtattaaaacttcattataatgcatttttctatctttttggcatactgtttcagatcactggcayccaaaaactcacctcacccagcaaaaagattgatctgaatcacattttcaggraaagatagaatgaatgattggttgtggcttgaaaagttgtatagcaggttccaaaatgagcagcatttatggctgatttataagcacttaaaaaata

SEQ ID NO: 68099 - DNA, 600 bp, Chicken  19866894338725_4
tgcctgcttccagctacagyggctgtggagctccgtatatttggactgtaaaactaagctgagaagtagttaygcaatctaaggatgtcctcatcaccttattggcgtggcttttagcttgttttcaaaaactacagatgtacaccatarcttaagaaactatagtaatttatttggattctggttttgttttccaacaaagggcattattttaaatcagcaagagttctgttttgtattaaaacttcattataatgcatttttctatctttttggcatactgtttcagatcactggcayccaaaaactcacctcacccagcaaaaagattgatctgaatcacattttcaggraaagatagaatgaatgattggttgtggcttgaaaagttgtatagcaggttccaaaatgagcagcatttatggctgatttataagcacttaaaaaatagaatggaaatgccaatatagcattgactaccaaagaacctttataaaatctccctttaaattataatgtcttgaatgtaatgcattttaatgttcttaattttggattaggaaggaagaggaattaatgacatttgtactatgcatcttt

SEQ ID NO: 68100 - DNA, 595 bp, Chicken  19866894338725_5
ctaagctgagaagtagttaygcaatctaaggatgtcctcatcaccttattggcgtggcttttagcttgttttcaaaaactacagatgtacaccatarcttaagaaactatagtaatttatttggattctggttttgttttccaacaaagggcattattttaaatcagcaagagttctgttttgtattaaaacttcattataatgcatttttctatctttttggcatactgtttcagatcactggcayccaaaaactcacctcacccagcaaaaagattgatctgaatcacattttcaggraaagatagaatgaatgattggttgtggcttgaaaagttgtatagcaggttccaaaatgagcagcatttatggctgatttataagcacttaaaaaatagaatggaaatgccaatatagcattgactaccaaagaacctttataaaatctccctttaaattataatgtcttgaatgtaatgcattttaatgttcttaattttggattaggaaggaagaggaattaatgacatttgtactatgcatctttgctatgggaagtcacagcgtctcataatggcttagatggcagcaataa

SEQ ID NO: 68101 - DNA, 600 bp, Chicken  19866894338727_1
gctcattccgaaagatagggcatcaacacaacgtttcacttacctgactcccagtggccattactatttacagttctaagtgttaccacattttcccccaatcatttcccattttctgtatttccaaaggagtatacaatacattctatcaccacttcccttcatgaacttctatgatgcaattttatatattggcattagcttagacataaaggaaagtctgttttacagatattttctacatttaataaaagctcatatactttggaatgcctgaagctgcccaggtccagctccagrgtagacagatgaacagtatttcagagaaacccagtttacttcaaacatttgtttaagcaagtacttgtggcccagttgggtaatttggcagcaagttgaagaacaaaacaaattaagcagcaagcagtttgtaagcatccagtcatacttcaatcagcacataccctgtgcaataaaatatgtcaagttcacttagtgaacagttggataactgtaagaacttggagcagtactgctttggcatcataccactgcctactccctcctccacagtaggtaggaacaagcatatgagaagtg

SEQ ID NO: 68102 - DNA, 600 bp, Chicken  19866894338730_1
ctgacagaaaacatatactatccattatttttatgcaaatcagcgaacagctattcatctgctttaaaaacaaggtgcttgggcattatttacttctctcatccagcaaaccatttattagttggatactgtcagattgaactcgctattgccatgttcaaaactagacatacattaagtgctccatgattcattctgccctataagccctcttgtcttctacatttgtttgccttcagacagtttttagagtttgacttttcaatctcttctcccttccccaatcccaatggctttatyaggcttgtccatgtcaatgaagtcaggattaggccctccatttgtaactgtgccagtgctgtagaaaaaccaacacataccagaagtcaacaacaagagaaatacaatgttgaactagattaagtggtcgtctccatataactctacacaatactgatcaagattttcagagaatagaaccatttgagtaggaaggaatcctcaaaggccacctagtccaactcccccgcaatgaacaatgacaccaacagctagatgaggttgctcagagccctgtgcaacctgatcttgaatgtcmcc

SEQ ID NO: 68103 - DNA, 600 bp, Chicken  19866894338730_2
tyaggcttgtccatgtcaatgaagtcaggattaggccctccatttgtaactgtgccagtgctgtagaaaaaccaacacataccagaagtcaacaacaagagaaatacaatgttgaactagattaagtggtcgtctccatataactctacacaatactgatcaagattttcagagaatagaaccatttgagtaggaaggaatcctcaaaggccacctagtccaactcccccgcaatgaacaatgacaccaacagctagatgaggttgctcagagccctgtgcaacctgatcttgaatgtcmccagggacggggcatccaccacctctttgggcaacctgttccagagcctcctcaccctcgctgtaaaacgcttcctccttatgtccaatctaaaccttctctcttttagtttcaaatcatttcctcttgtcctgtcccagactctttaggggaaccctcaggctctacaacaataaaattactacatattgtaactaatgagtactcagtgctgattttcaacatgcaagaaaaaaaactccgaatgggaactataaagcagctttaaaaggaagacaaaaaaggttactgatcttaaaa

SEQ ID NO: 68104 - DNA, 600 bp, Chicken  19866894338738_1
tacagcagagcatgagcctgccattagtagaaagcatcctgtgacctcaagaagtgagctgatgcagtgaagcaattggatcacaagtcaaggagatagaaagtaaatccattggggactagtgggaatctgggtctacccagtagaaaaacgatgagatggagaacttgtccttaaatgaagggagatgtacataaaaataccaaaaaaagaatgtatgtccaaatatgagtagaggtgagatttgaaacagctcccttattttggaagggcaaagcctccaaacactattacctatcycatccaaaacacctgcgtcctcctaaaagaggagaaaattgggttagattttaggaagagattctttactcagagggcactgagaccatggcacaggtttcccagagggctgtggttgccccattcctgggaggtgttcacagccaggttggatgaggccctggacagcctgatctagtgtttggtaaccagatcacggcagggaagttggaactagatggcctttaaggtcctttccaacctaacccattctatcctatattggcactatccagttgactgcactggccattcagagca

SEQ ID NO: 68105 - DNA, 600 bp, Chicken  19866894338744_1
ataatgttggataaaactagttttttttaaattacagaaaatagaaaaaggaggtgggagggagagagggagtgctgcagtctggtactgtgcactgttgtatagctgtttgcctctgtgttttctgcagcctgtctcaagaagaccttgctgtgcctttttatccctgataggtttaggtttgcttcctgttttgtgtaagaaatgcctggccaattagacctgcaaaaatatccttttaattctggatgatcccactgctaggaatgggggggtagcatggaaatggcagtggcaagrccatggacacccatgaggtctcctaagaggatgcagggactcagagcattggataattgggccatgggttagctggtcccttctgccccagtgagcactgactaccaggagcagcatgtgatggggacagcagggatggagctgaaccaaatgcatctcctctccttccagtgcctgtcagacaacatccttgatcagaagccctggagggggaggggtaccaagtggaagaaaggggaagggttgggttatggctggaagaacgccagattctttggcttttatcagtgaacctttcaa

SEQ ID NO: 68106 - DNA, 599 bp, Chicken  19866894338751_1
  misc_feature (1)..(90): n is any nucleotide
nnnnnnnnnnnnnnnnnnnnnnnnnnnnnnnnnnnnnnnnnnnnnnnnnnnnnnnnnnnnnnnnnnnnnnnnnnnnnnnnnnnnnnnnnntgaaccccagctctctcagcatgtcctcatagaagaggtgttccatcccttgggtcacttttgtggccctcctctgggcacgctccaacaagtctctcctgtaccaaggactccacacttggatgcagtgttccaggtgaagtctcaacagctcagagcagggggccaggatcaccccactcaacctgttggccaaacttcttttgatgyagcccaggatacagttrgctttctgggctgcgagggcacatctttgctgaaacactaggaactgatgtggagtatttcagacttgagcactccttcttccctgagcagggaaacaacacatccacaaacaagacattcttactcagtgatttctatcagtggtgctgagctgcaccaggcgtccattccactcccttggcagggacacagtgctgtgctccccagtcatgtccccttcataccctacctataggaactgcacctcccagcaatgcctgggatcaatcctggctctttat

SEQ ID NO: 68107 - DNA, 599 bp, Chicken  19866894338751_2
  misc_feature (1)..(73): n is any nucleotide
nnnnnnnnnnnnnnnnnnnnnnnnnnnnnnnnnnnnnnnnnnnnnnnnnnnnnnnnnnnnnnnnnnnnnnnnntgaaccccagctctctcagcatgtcctcatagaagaggtgttccatcccttgggtcacttttgtggccctcctctgggcacgctccaacaagtctctcctgtaccaaggactccacacttggatgcagtgttccaggtgaagtctcaacagctcagagcagggggccaggatcaccccactcaacctgttggccaaacttcttttgatgyagcccaggatacagttrgctttctgggctgcgagggcacatctttgctgaaacactaggaactgatgtggagtatttcagacttgagcactccttcttccctgagcagggaaacaacacatccacaaacaagacattcttactcagtgatttctatcagtggtgctgagctgcaccaggcgtccattccactcccttggcagggacacagtgctgtgctccccagtcatgtccccttcataccctacctataggaactgcacctcccagcaatgcctgggatcaatcctggctctttatggtgactatatttccaa

SEQ ID NO: 68108 - DNA, 600 bp, Chicken  19866894338751_3
tggtgctgagctgcaccaggcgtccattccactcccttggcagggacacagtgctgtgctccccagtcatgtccccttcataccctacctataggaactgcacctcccagcaatgcctgggatcaatcctggctctttatggtgactatatttccaaacttgtaaacatagatttacagacaaagcatcttttcatctattatttgaccactaacaagcacgtaccaacaaaaccattgtatgggtcacactaatctgtacgccatgcattatatacaaagaatatctctctttagtccrtaatcaagacctagtgctggttgtataggctctttggagaagagacagcaggctgagctagacagcactggcaagcagccagtgtgcaggtgagagaagaaagggacccctaccttagtctctgcccagcatccccatatgcctgacccctttctgactgtctgaataagatgtcattgattttcataaaagagatgctattgagcaaccactaggaagtcattaagcattgtaaataactaaaatagagatactgttgtcaaaatacactgaataattgcaatttgtaatgcatgagct

SEQ ID NO: 68109 - DNA, 600 bp, Chicken  19866894338753_1
atttgagatttcccagcccgggttttgtccatggttaatgtcaggagcgatgaaaaaatgagtctctgctgttttcccctgctgatgcttctctgcttgctgcgtgaatgtgaggatgtgacacagccgtagcaaaaggcagtgacgtccgtgataggttcaggtgcagtttgtagctttgggcagcaggtggagtcaaaccggactaaatagcacagatggtatttgccctactactaaaatggagggcagaatcaaagctttcgttacgaggttctctgaattccagagatgattctsttggtcacgaggaagcaagtcgagcagtcggtcaccctgagcaagtagagaaacacaaaatatagctttgggagggaaaaaatgggggaaagctgcaataaatggccatttcggttaaaaatgcacgctttaagacttgctgcaatgttcttgataggttgaattgtgcccttctagaaagatgcacgagtacrtttatgtataaaaacacaacccaaagccaaagaaaccttttycttccactgtctcttaatcgagaccttctgattttacgagctckgagtccttggatattatttc

SEQ ID NO: 68110 - DNA, 600 bp, Chicken  19866894338753_2
gtcaaaccggactaaatagcacagatggtatttgccctactactaaaatggagggcagaatcaaagctttcgttacgaggttctctgaattccagagatgattctsttggtcacgaggaagcaagtcgagcagtcggtcaccctgagcaagtagagaaacacaaaatatagctttgggagggaaaaaatgggggaaagctgcaataaatggccatttcggttaaaaatgcacgctttaagacttgctgcaatgttcttgataggttgaattgtgcccttctagaaagatgcacgagtacrtttatgtataaaaacacaacccaaagccaaagaaaccttttycttccactgtctcttaatcgagaccttctgattttacgagctckgagtccttggatattatttctcattattttcctaggggaaggtaaccttaaactacgacgggggttttatttccagcacctgcattcactccttgttagacacaaatgatgcttctgctctctccctgagaggcgccagcagcattccaagtaagaacatccagatcttgttgcctgtacacttgaattaatttcatcagtgataggagatgat

SEQ ID NO: 68111 - DNA, 600 bp, Chicken  19866894338753_3
ctaaaatggagggcagaatcaaagctttcgttacgaggttctctgaattccagagatgattctsttggtcacgaggaagcaagtcgagcagtcggtcaccctgagcaagtagagaaacacaaaatatagctttgggagggaaaaaatgggggaaagctgcaataaatggccatttcggttaaaaatgcacgctttaagacttgctgcaatgttcttgataggttgaattgtgcccttctagaaagatgcacgagtacrtttatgtataaaaacacaacccaaagccaaagaaaccttttycttccactgtctcttaatcgagaccttctgattttacgagctckgagtccttggatattatttctcattattttcctaggggaaggtaaccttaaactacgacgggggttttatttccagcacctgcattcactccttgttagacacaaatgatgcttctgctctctccctgagaggcgccagcagcattccaagtaagaacatccagatcttgttgcctgtacacttgaattaatttcatcagtgataggagatgatccaggcagagcgtgcatctgataccaccagaggtggggtgcc

SEQ ID NO: 68112 - DNA, 600 bp, Chicken  19866894338753_4
gaattccagagatgattctsttggtcacgaggaagcaagtcgagcagtcggtcaccctgagcaagtagagaaacacaaaatatagctttgggagggaaaaaatgggggaaagctgcaataaatggccatttcggttaaaaatgcacgctttaagacttgctgcaatgttcttgataggttgaattgtgcccttctagaaagatgcacgagtacrtttatgtataaaaacacaacccaaagccaaagaaaccttttycttccactgtctcttaatcgagaccttctgattttacgagctckgagtccttggatattatttctcattattttcctaggggaaggtaaccttaaactacgacgggggttttatttccagcacctgcattcactccttgttagacacaaatgatgcttctgctctctccctgagaggcgccagcagcattccaagtaagaacatccagatcttgttgcctgtacacttgaattaatttcatcagtgataggagatgatccaggcagagcgtgcatctgataccaccagaggtggggtgccagtgctgctggagcctggggcctctatccaaagcagctccatkc

SEQ ID NO: 68113 - DNA, 600 bp, Chicken  19866894338753_5
kgagtccttggatattatttctcattattttcctaggggaaggtaaccttaaactacgacgggggttttatttccagcacctgcattcactccttgttagacacaaatgatgcttctgctctctccctgagaggcgccagcagcattccaagtaagaacatccagatcttgttgcctgtacacttgaattaatttcatcagtgataggagatgatccaggcagagcgtgcatctgataccaccagaggtggggtgccagtgctgctggagcctggggcctctatccaaagcagctccatkcttcttattttttaaagaagcctaagagtaaaaggctgatgaacacacgggctaagacagttcaggagagccagcgttgttttccacttatgtgctcgcaatgtaaatgttgacttayccctggataagttctaggatgcctgttggttttcagggctggtaatgtaccttgaaaacagactacttttatgcctgtagctgttttcaagaagttgttgtttctccaaacccttttgctttatgcgtggtaaccttttgtctatgtttttatgtgcctcggtgctgttgagccctggggtt

SEQ ID NO: 68114 - DNA, 600 bp, Chicken  19866894338753_6
ctctctccctgagaggcgccagcagcattccaagtaagaacatccagatcttgttgcctgtacacttgaattaatttcatcagtgataggagatgatccaggcagagcgtgcatctgataccaccagaggtggggtgccagtgctgctggagcctggggcctctatccaaagcagctccatkcttcttattttttaaagaagcctaagagtaaaaggctgatgaacacacgggctaagacagttcaggagagccagcgttgttttccacttatgtgctcgcaatgtaaatgttgacttayccctggataagttctaggatgcctgttggttttcagggctggtaatgtaccttgaaaacagactacttttatgcctgtagctgttttcaagaagttgttgtttctccaaacccttttgctttatgcgtggtaaccttttgtctatgtttttatgtgcctcggtgctgttgagccctggggtttagtgtgggccttactgcaggttgctgagctggccttgcattaaccacacagctgagctcccttcttgtaaagaggttgggaagtaaaataacagggctgtgagtcaccccaactgct

SEQ ID NO: 68115 - DNA, 600 bp, Chicken  19866894338754_1
ttttctaacaatattttgaaaagataaattcttagaagccttctttttcttgtatgcataaacatttgcacatgttagtagtttaattactgttttgcacctcacatgcccctttatatttgtgcggattgccatttggtattagcacagccgttctcattgtattcgtataatggcacgagacccttgtgtgaaagtgtcttatgcagcagatgcaaaatgttttcaagttgtacatgattttaaacaataatggttatctgtgactttgttgcctgatagctttacagggttggttcyctttactgtaaaatctatatatcccartgtctgtgatgctgacaaagaaaaccaaagtactgtgcaagttggaactattaaaatcagtggtgttatattaatttttcttcaaagccaggaaataagaaggcaattggcagaaatgaatttcccccactgttctaaaacgtggaaaatgtcctaatccttttataaaaatgatagtatacctttgtatctcagcagagaatgtagtggatttagttgtgtttattttattttattttattttacaatgggaataccacacataaaagaaca

SEQ ID NO: 68116 - DNA, 600 bp, Chicken  19866894338754_2
attcttagaagccttctttttcttgtatgcataaacatttgcacatgttagtagtttaattactgttttgcacctcacatgcccctttatatttgtgcggattgccatttggtattagcacagccgttctcattgtattcgtataatggcacgagacccttgtgtgaaagtgtcttatgcagcagatgcaaaatgttttcaagttgtacatgattttaaacaataatggttatctgtgactttgttgcctgatagctttacagggttggttcyctttactgtaaaatctatatatcccartgtctgtgatgctgacaaagaaaaccaaagtactgtgcaagttggaactattaaaatcagtggtgttatattaatttttcttcaaagccaggaaataagaaggcaattggcagaaatgaatttcccccactgttctaaaacgtggaaaatgtcctaatccttttataaaaatgatagtatacctttgtatctcagcagagaatgtagtggatttagttgtgtttattttattttattttattttacaatgggaataccacacataaaagaacatattgcatactcgatggcttttgcttg

SEQ ID NO: 68117 - DNA, 600 bp, Chicken  19866894338762_1
gaataaaatgttccttggttactctggagaagaggctaaacagagatagtagagactatatctcaagtaatgatgagaaaaccaggataactgcttgaagttttgtaaagctcttacatagattttatatttagtttcccaatctagaaactgatagaaatctatatgctcaccatccctttttcaaacggatcttgatgctccagtgaccgagagaggtaaaatacttcagatttgtcttcatttccaaataaaataatatgcacactggcatcagtacctgcccccattttgtcaccygtgtatactttgatagtatactctgcctgatctcctgcttgacttcctcctttatttaagttatttatgcaattyttttgtttgtctcctccaataacaaaagatactgggatttctctctgtatttctggcttatttggatccacagaaaatgttctgcaaaacaaaaccccacaattttttgtagtaagtaaaccacacgttaaaaaaaccctatgagtttatatggaacagttgaaggtggactttcaaaatactatacattggctcacacacttcatgatggtaattttaatccag

SEQ ID NO: 68118 - DNA, 563 bp, Chicken  19866894338762_2
agaaaaccaggataactgcttgaagttttgtaaagctcttacatagattttatatttagtttcccaatctagaaactgatagaaatctatatgctcaccatccctttttcaaacggatcttgatgctccagtgaccgagagaggtaaaatacttcagatttgtcttcatttccaaataaaataatatgcacactggcatcagtacctgcccccattttgtcaccygtgtatactttgatagtatactctgcctgatctcctgcttgacttcctcctttatttaagttatttatgcaattyttttgtttgtctcctccaataacaaaagatactgggatttctctctgtatttctggcttatttggatccacagaaaatgttctgcaaaacaaaaccccacaattttttgtagtaagtaaaccacacgttaaaaaaaccctatgagtttatatggaacagttgaaggtggactttcaaaatactatacattggctcacacacttcatgatggtaattttaatccagtgcctccttactgttttcaaatattatgctataaaaag

SEQ ID NO: 68119 - DNA, 599 bp, Chicken  19866894338765_1
  misc_feature (1)..(86): n is any nucleotide
nnnnnnnnnnnnnnnnnnnnnnnnnnnnnnnnnnnnnnnnnnnnnnnnnnnnnnnnnnnnnnnnnnnnnnnnnnnnnnnnnnnnnnaggagcggcgggttttaattacacgccagggtctgattttatggagctctttttgtactggagttgctcctgagtgctcctctgcagctcagcccagcagctgggagccctgtgctgtgcctcctatggagcgctgggcacagccctggcggtgctggaggagcagtgactgcagagctgtttcctggtggttggtggggcacagcgcacagcrcacmgcacactgcacaccgccaggtgtgtgctttggtggagcagtatggcttccaatctcaaacttgcgtcagaacttatgtcagcatcaatygcagcatcgctgtgacacacacgtaggaagtgaataagctttctggaggtcagaagttatttctctttaattttggtaccaacacgtccagcattgatggaatttgagtgatgtggttgaaatgattccctcccggggctgttacagagcagcattgggcagcagtgctgcctttgatgtgcaatgggtgactgtttttgtcgccc

SEQ ID NO: 68120 - DNA, 599 bp, Chicken  19866894338765_2
  misc_feature (1)..(82): n is any nucleotide
nnnnnnnnnnnnnnnnnnnnnnnnnnnnnnnnnnnnnnnnnnnnnnnnnnnnnnnnnnnnnnnnnnnnnnnnnnnnnnnnnnaggagcggcgggttttaattacacgccagggtctgattttatggagctctttttgtactggagttgctcctgagtgctcctctgcagctcagcccagcagctgggagccctgtgctgtgcctcctatggagcgctgggcacagccctggcggtgctggaggagcagtgactgcagagctgtttcctggtggttggtggggcacagcgcacagcrcacmgcacactgcacaccgccaggtgtgtgctttggtggagcagtatggcttccaatctcaaacttgcgtcagaacttatgtcagcatcaatygcagcatcgctgtgacacacacgtaggaagtgaataagctttctggaggtcagaagttatttctctttaattttggtaccaacacgtccagcattgatggaatttgagtgatgtggttgaaatgattccctcccggggctgttacagagcagcattgggcagcagtgctgcctttgatgtgcaatgggtgactgtttttgtcgcccatct

SEQ ID NO: 68121 - DNA, 600 bp, Chicken  19866894338765_3
gcgggttttaattacacgccagggtctgattttatggagctctttttgtactggagttgctcctgagtgctcctctgcagctcagcccagcagctgggagccctgtgctgtgcctcctatggagcgctgggcacagccctggcggtgctggaggagcagtgactgcagagctgtttcctggtggttggtggggcacagcgcacagcrcacmgcacactgcacaccgccaggtgtgtgctttggtggagcagtatggcttccaatctcaaacttgcgtcagaacttatgtcagcatcaatygcagcatcgctgtgacacacacgtaggaagtgaataagctttctggaggtcagaagttatttctctttaattttggtaccaacacgtccagcattgatggaatttgagtgatgtggttgaaatgattccctcccggggctgttacagagcagcattgggcagcagtgctgcctttgatgtgcaatgggtgactgtttttgtcgcccatctctgctgcccgtgcagctgagtgagcagagatggggcgtccaacgaggagcagcgcagcagagcctctgctccgggtgatcccaagcacag

SEQ ID NO: 68122 - DNA, 600 bp, Chicken  19866894338768_1
aaaagagaaataaatgaaagatctaagctgtgtggtttcacatcccccagttgagttgcccagtgaaagaagcaagtaatttacaagaggaatgctgactgaaggacaaccagaacaaccctttagatgacttacaaagcacagacaaccacagaaatgcatctctgagacccaccacaggttcagcttgacacttgccccgcagtgggacttctctgtctcactgtggaaaatctaatctcaccatgaaaagggtaggtgtggccctgagggacatggttagtgggcatggtggcgacrkgttgatggttcaactacatgatcttagtggtctttcccaaccttaatgattctatgattcactaaccacctttgcatattcgcatatctgcaggccctgaaaagagcaagttcaatctcaagtaattttaatgcatctggaccatgagactggttggagaaagccactgaatgtcatgaggagcactgtcactggcttagtgactgcagagtcaggtctatggtgaaatagctccaaccagaattaccagcgtcactataagaagattgcagcgtctggttcagactgtgcctgaaaag

SEQ ID NO: 68123 - DNA, 600 bp, Chicken  19866894338768_2
aaagagaaataaatgaaagatctaagctgtgtggtttcacatcccccagttgagttgcccagtgaaagaagcaagtaatttacaagaggaatgctgactgaaggacaaccagaacaaccctttagatgacttacaaagcacagacaaccacagaaatgcatctctgagacccaccacaggttcagcttgacacttgccccgcagtgggacttctctgtctcactgtggaaaatctaatctcaccatgaaaagggtaggtgtggccctgagggacatggttagtgggcatggtggcgacrkgttgatggttcaactacatgatcttagtggtctttcccaaccttaatgattctatgattcactaaccacctttgcatattcgcatatctgcaggccctgaaaagagcaagttcaatctcaagtaattttaatgcatctggaccatgagactggttggagaaagccactgaatgtcatgaggagcactgtcactggcttagtgactgcagagtcaggtctatggtgaaatagctccaaccagaattaccagcgtcactataagaagattgcagcgtctggttcagactgtgcctgaaaagg

SEQ ID NO: 68124 - DNA, 600 bp, Chicken  19866894338779_1
cacacacaataagagcatgaaaacgtgccacacatgagcgttttgtgtactgcacagctgctaaaagcctttgtcctaacatagttattgcacaaatacctaagtaacaagctgtgattcttgttcatcagcagccatagctgtgttagaaaaatgtaagagggaaaagaaaggtgaaaattcaaagcctctctcatgcatgtattttttcagagcactttctcttttcaggcatgggtctcactattcctctctcccttacttttgttgtgtttccattcttcccagtttgaaagtctyctctgcttcaagtcagtctctcagttcactccctcgtctttggacatggaccccacacagtacctactttgctgtgcctgttcctccccccmttccctttaaatgctggtaccagcacagctaacttctccccccgccctcatgccattcccacttgaacatgtaatctctcttcctgctcagagcacagcagccagaacattttgtttacaggctgcattaaaagcccatctcatcatgtcagccccttcacagccctacgctccgccagcccagagcagcaccacacatcactgcctt

SEQ ID NO: 68125 - DNA, 600 bp, Chicken  19866894338779_2
caaatacctaagtaacaagctgtgattcttgttcatcagcagccatagctgtgttagaaaaatgtaagagggaaaagaaaggtgaaaattcaaagcctctctcatgcatgtattttttcagagcactttctcttttcaggcatgggtctcactattcctctctcccttacttttgttgtgtttccattcttcccagtttgaaagtctyctctgcttcaagtcagtctctcagttcactccctcgtctttggacatggaccccacacagtacctactttgctgtgcctgttcctccccccmttccctttaaatgctggtaccagcacagctaacttctccccccgccctcatgccattcccacttgaacatgtaatctctcttcctgctcagagcacagcagccagaacattttgtttacaggctgcattaaaagcccatctcatcatgtcagccccttcacagccctacgctccgccagcccagagcagcaccacacatcactgccttctcagctaatcagtgccatgtggaagtaagaggcatgcctgttttcccctgctgagaatagttttcagctttccagaaagaattttccaatg

SEQ ID NO: 68126 - DNA, 600 bp, Chicken  19866894338782_1
tttgggaaataaattttatgtatgggtaacaatgtggttctttatagaatggtgacagttccaagatacgccttgaatgtcctcatcttcttgagaatgcagttaatgagttggttctaggtgagaaggaatcactgcattggttactgtaggccccgtgtgaagacttgtgctatgaggggtctccctggtatgtggctgtgtcatgggtatattcagggactttaggctagtcattcttgaagcttgtcgtacagtatgacagccatccagatgacctatcattcttttaccatctartaagagggaagttacctcttcctcttccatggtatcatgccyttttctttcttttattgtctgtagagtttttgctttatgattcaaagaaactgtctaaaatggtcaaatacagaacacttccaatgcttaagataagcagcttttccccaaataccagaaagaaaatcccaggtagaacattctgaggcattatttttatcaaaggaagaaaagaagacatctgatctgttttttggcctcttttttgggtgctgatgttcactcactgtagggaccctgatttgatcaaagagtggt

SEQ ID NO: 68127 - DNA, 578 bp, Chicken  19866894338782_2
tatagaatggtgacagttccaagatacgccttgaatgtcctcatcttcttgagaatgcagttaatgagttggttctaggtgagaaggaatcactgcattggttactgtaggccccgtgtgaagacttgtgctatgaggggtctccctggtatgtggctgtgtcatgggtatattcagggactttaggctagtcattcttgaagcttgtcgtacagtatgacagccatccagatgacctatcattcttttaccatctartaagagggaagttacctcttcctcttccatggtatcatgccyttttctttcttttattgtctgtagagtttttgctttatgattcaaagaaactgtctaaaatggtcaaatacagaacacttccaatgcttaagataagcagcttttccccaaataccagaaagaaaatcccaggtagaacattctgaggcattatttttatcaaaggaagaaaagaagacatctgatctgttttttggcctcttttttgggtgctgatgttcactcactgtagggaccctgatttgatcaaagagtggtgtatgacagagcagcagagt

SEQ ID NO: 68128 - DNA, 530 bp, Chicken  19866894338784_1
agttcctttcaacgtgagtactgctcaagactatctagactgtaaactacatctttagcagaataatatctttcaggtcctttcccacagtaactcagctcacatattgtaaaatgcaatcaaaactatgaacacaccaaaattttggaaatgctttaaagcattgcctggttctatatttatcttcaatttacattttgaattaattaaatccttgctgtgcaatttcagggcctgatactcttaaaagaaagatgacacacacaatattcctaagcgttttattgtttatatacaggrtatgctgcatgcaaaattcatacctgttccgttactgagcgtctctggtaataattcagtattggcttcaccaacaagctatctttgaaatgggattcatccaagctataattcaagtttatattgatgggagataatttatctctaaattctgtttcatcctgtgagtgacaatcacataataataataaaaaaaagaataattattttggatgagtacggtcttattt

SEQ ID NO: 68129 - DNA, 600 bp, Chicken  19866894338797_1
gaaaaatgtgtcaagaaagagtgtagaagaaaacagattaaccagcctgagttacttcatggcctatccaaggcttcatctcaaagtcaaattgcagcaattcccaaagtcagctgagtaaatttcagtgggttcagcatattcaccatgaatatcagaattgctggattcttgtgtctcctcatggactgcatttgacaatgcaaacaacaacaacaacaacaaaacaaacaaacaaacaaacaaaaaatcaacagaagtttttcctgcctcttacatttcttctcccgtttctctcayatctacaaatatgtgaatgcagactgaagatttgccctcagatgagacacttcttggatctctctcctttggccactgttttcataacaaatattctacttctgctcaattccaaggctattttttctctttatccatctgctttttctactgtcaggagtagaagacgtcaggaacttactttgcggtaccacacatttgaattgctgactttgcagtgatagtacttgtgagatttgtagatcagttttatgcagtcattaagttgattgctgtgaaagtttctgaccatttgaatct

SEQ ID NO: 68130 - DNA, 600 bp, Chicken  19866894338797_2
tacttgtgagatttgtagatcagttttatgcagtcattaagttgattgctgtgaaagtttctgaccatttgaatcttcaccaaaagcaacctcaagcccattactcattaactgcatttgctttatagcacctatagctaggaagcaacaatgaagtatactgggaatttgagttcattcctcttgcaaaagacactggaacaactttatcctgctacataaggcctgtcccttcatatactctatcagaactgaaataaacccagaatgtgccatgcactttccacataagaatgggaygtcccttagcgttagaacaaggattctaaccagccacaaaaagttttctatatttagaaaagacacttccagacctgagggcttttttgaagaagtctgtcttggaaaatcgtggagagtctgcaggagatatggggaacctttttgggttttttttggcttgctgttaagctgggtctatcttaaggcacccattagaatttgatagggcagatgaatgagcatgctgctagaacacctgaatagggaatattagtgagatagcttagcaggagcgtggatgagaaagagaccaggtca

SEQ ID NO: 68131 - DNA, 599 bp, Chicken  19866894338810_1
  misc_feature (1)..(11): n is any nucleotide
nnnnnnnnnnnaaaactcctgtaagaaagtatcatagtgataaaggactggtgcccagagacagactagaattcacatcccctggcattcgttctctgaggcacagctggagggagtttcatcccattctaatatggatgcacctatttctctctgttgcctggagagcttttgaattgggtcctgggcctcttgtccgtaagaggtgagcagtgtcagagcagagctgaatgcagtcagcattgccttgaggctaatgtcctgaccactgagcagtccctcttgattcaatatctgtayctctgttattgtaactagaggtttgtaaacaacaagccatctggttcaacactggaaacttatcagaatctcatcctgactatctgactcttgagctcactcaacttggccggcaagtttgcaatcagagccagtctcttcccatagtatccatctgtgttggtcccagtgagggctaagaaatgcgaagagaaactttaaattatgcaaggtttgggaacaaacattattttggagctttttgtagctcaaaaactccatgaaagctcaaaatggttctcattagcattggctttccc

SEQ ID NO: 68132 - DNA, 600 bp, Chicken  19866894338819_1
gatgtctaggtaactgtatcgtaagtattttaacagatagtagaatccatgatatagactttgcttgaaaggatttatcttcacagttgatgaggaacttcttattgcctacttctgcttttttttttttttttcctgataatgttagatataaatagttgaaaacatgaaagggcatgtgaaatatgttgtgatacaactatcatctatctttttacataaagacttcaagacaaaatttcaagatatgtagtgggagcaagcatgcaagactgcagatgttatttttccttgtttgcmtttgtgcatattctttcacttaagctctgagctttgtcaacaatggtgcaacttattgcaggctttctatttctattgcttaatactacttactgtttgaacagcttttttattttttttccctgaagaaaaaaaaacaaaaaccccacagcaacaataacaactaaacaacaaaaccctaaatcccaaccaaaaaaaaaacaaaaccccaaactttgtttcccaagacagattgttgcttttcttaccttttccaaaaactggtattgactagtacagatgggaactgaaatacatttt

SEQ ID NO: 68133 - DNA, 581 bp, Chicken  19866894338819_2
tgcttttcttaccttttccaaaaactggtattgactagtacagatgggaactgaaatacattttttagttctgcaggaatgccatgcaaatgcttactaccacttagagctatgcatacttaatattggttctattaataatggtttggaaataacagtgctgtaataagtaaagccataaatggttgcttaataattatatggtaccatttaggttatgggttttatggaatctgcagttataatattatgaagaattatacaactccttaattgcacaatcttttaaattatgcagtycatgaacacattttttttctaatgcttcacacagaaattaattttatatccccctagttctagaaaccaaagtaattcttttaacaagtgtcttgaaatgctgtttttttktttttttttttgacggccaaattctgagatgttctgattttattttttcttatgtttctttaataactaagtactgaaaatagttacatgcaagaatactcttaagtttagctttcattctgagctttctactgctgaggaatcacacagtatttgcagagaaaaggagg

SEQ ID NO: 68134 - DNA, 470 bp, Chicken  19866894338819_3
atgcatacttaatattggttctattaataatggtttggaaataacagtgctgtaataagtaaagccataaatggttgcttaataattatatggtaccatttaggttatgggttttatggaatctgcagttataatattatgaagaattatacaactccttaattgcacaatcttttaaattatgcagtycatgaacacattttttttctaatgcttcacacagaaattaattttatatccccctagttctagaaaccaaagtaattcttttaacaagtgtcttgaaatgctgtttttttktttttttttttgacggccaaattctgagatgttctgattttattttttcttatgtttctttaataactaagtactgaaaatagttacatgcaagaatactcttaagtttagctttcattctgagctttctactgctgaggaatcacacagtatttgcagagaaaaggagg

SEQ ID NO: 68135 - DNA, 600 bp, Chicken  19866894338820_1
acaaaatgagaataaatgtaaaaacttgtgtgataaataacaaagtggatttctggatagtgcacagtcacaaaaatctgtgtggatgagaaaagttggatctgctctcctctttgcctttttttttttttcacattcaaaaaatttaatgtgttcatatatgaagagtttatatgactttgactttatgcttaggaaaggaattaagagagaaaaaagactgagcatcccttatctggtctatttcacaactctaaagtgaagatttaggaatggatgccaaggaagctcaggctttcytgccccctgcctccttttccctgggtttgacttcagattctatattctaaatttcaatttggaactgcaaagacatttacaaatgaatgcccagagatgcattattagcactccagtcttcattctgtatattgcatgcgagttactgcagtttatactgagtcagtactgaacactcagagaaagctgcatcagtaagctgtcccaagcctgcacaaatgtggaagtaaattgcatttcaaatgcaattctttgttctggataagaagtaactgtctctaagactttactgctgaagct

SEQ ID NO: 68136 - DNA, 599 bp, Chicken  19866894338822_1
  misc_feature (1)..(39): n is any nucleotide
nnnnnnnnnnnnnnnnnnnnnnnnnnnnnnnnnnnnnnnaaccaactgacctggttctgcctgagccagctccagggagaagataacagccaagggtaaaagcaaatgaaatacctgtgtggttgtagtttgcaacaaagctccacaactgtttgtgtcaagtaaagaccagcctgtccctcatctgtctgaaggaatttactgtgcagcggttgctctttgatctctgatctttaaggtatgggttgaagttctggccctcattcctttgaggtgggctcctgagctgagtcccgtgcrctcactacatgagggcagctgccactgagtgatgccttgaaaagttcttcactttgcagttctggatcgtgtgctggggcctggatctgcccttacagtaactccttgcttcttccaaataggaaggatttatattagtccctactagatcagtacagtcttggccaaatgtgggatcaccccaaatactaatgggcagraagaactrtatgaatcctgcacaatcagctgtctgtgagaccttcaggaattaggtactttcctattctgtgactgcagctgtatggagaaataactta

SEQ ID NO: 68137 - DNA, 600 bp, Chicken  19866894338822_2
actgtgcagcggttgctctttgatctctgatctttaaggtatgggttgaagttctggccctcattcctttgaggtgggctcctgagctgagtcccgtgcrctcactacatgagggcagctgccactgagtgatgccttgaaaagttcttcactttgcagttctggatcgtgtgctggggcctggatctgcccttacagtaactccttgcttcttccaaataggaaggatttatattagtccctactagatcagtacagtcttggccaaatgtgggatcaccccaaatactaatgggcagraagaactrtatgaatcctgcacaatcagctgtctgtgagaccttcaggaattaggtactttcctattctgtgactgcagctgtatggagaaataacttagcactgtaaatcaattacattaatgtgctttttctgaggatagaccacagaaaggacggctgcaacatagtccaaatgctgctcccacttatgcttcagaaataacattttggggcaggatgtgttctccaatcctaaacttgcatgttactttccttcaattctctaacttgaagcatgagttacacttatccagaaaac

SEQ ID NO: 68138 - DNA, 600 bp, Chicken  19866894338822_3
gcggttgctctttgatctctgatctttaaggtatgggttgaagttctggccctcattcctttgaggtgggctcctgagctgagtcccgtgcrctcactacatgagggcagctgccactgagtgatgccttgaaaagttcttcactttgcagttctggatcgtgtgctggggcctggatctgcccttacagtaactccttgcttcttccaaataggaaggatttatattagtccctactagatcagtacagtcttggccaaatgtgggatcaccccaaatactaatgggcagraagaactrtatgaatcctgcacaatcagctgtctgtgagaccttcaggaattaggtactttcctattctgtgactgcagctgtatggagaaataacttagcactgtaaatcaattacattaatgtgctttttctgaggatagaccacagaaaggacggctgcaacatagtccaaatgctgctcccacttatgcttcagaaataacattttggggcaggatgtgttctccaatcctaaacttgcatgttactttccttcaattctctaacttgaagcatgagttacacttatccagaaaacaatgtttt

SEQ ID NO: 68139 - DNA, 600 bp, Chicken  19866894338826_1
taaaaaaatatatatatacacacatacacagcaaatcagctgagtctgcatggattcccgtgtaatagtaaaaaagtatattcttgacgtttttttcagtgtagcatttctatgcttactaggatatgagggcactcttctggagagtacggtacagatgataattcagtcatatttctagaggaaaatatacagcagaaactttggaacttgtgtttaaaaataatctactacagttcttcaatctgtgtcactttgacaagatttagttttttgtcagtaatgctaatgaaaataccragaaatatgtatcccccttatattctgcctgtaatcaaacattttttaktatcttaagactataatttttaccaacataattttatttggcagaacaacctagtatgatttaaaaaaaaaaacatatatacaattttgctcgtaaagtaacagatccagattcagtacctctgccagcactacctttactgctagagcttggcaaaggcacacacacaattacactcacacacgatgactctgccagcagtcctatgcataccagcaaaaatgaaatcagaaaagacagtcttatttatg

SEQ ID NO: 68140 - DNA, 600 bp, Chicken  19866894338826_2
aaaaaaatatatatatacacacatacacagcaaatcagctgagtctgcatggattcccgtgtaatagtaaaaaagtatattcttgacgtttttttcagtgtagcatttctatgcttactaggatatgagggcactcttctggagagtacggtacagatgataattcagtcatatttctagaggaaaatatacagcagaaactttggaacttgtgtttaaaaataatctactacagttcttcaatctgtgtcactttgacaagatttagttttttgtcagtaatgctaatgaaaatacccrgaaatatgtatcccccttatattctgcctgtaatcaaacattttttaktatcttaagactataatttttaccaacataattttatttggcagaacaacctagtatgatttaaaaaaaaaaacatatatacaattttgctcgtaaagtaacagatccagattcagtacctctgccagcactacctttactgctagagcttggcaaaggcacacacacaattacactcacacacgatgactctgccagcagtcctatgcataccagcaaaaatgaaatcagaaaagacagtcttatttatgc

SEQ ID NO: 68141 - DNA, 600 bp, Chicken  19866894338826_3
aaaaaatatatatatacacacatacacagcaaatcagctgagtctgcatggattcccgtgtaatagtaaaaaagtatattcttgacgtttttttcagtgtagcatttctatgcttactaggatatgagggcactcttctggagagtacggtacagatgataattcagtcatatttctagaggaaaatatacagcagaaactttggaacttgtgtttaaaaataatctactacagttcttcaatctgtgtcactttgacaagatttagttttttgtcagtaatgctaatgaaaatacccaraaatatgtatcccccttatattctgcctgtaatcaaacattttttaktatcttaagactataatttttaccaacataattttatttggcagaacaacctagtatgatttaaaaaaaaaaacatatatacaattttgctcgtaaagtaacagatccagattcagtacctctgccagcactacctttactgctagagcttggcaaaggcacacacacaattacactcacacacgatgactctgccagcagtcctatgcataccagcaaaaatgaaatcagaaaagacagtcttatttatgcc

SEQ ID NO: 68142 - DNA, 600 bp, Chicken  19866894338826_4
atggattcccgtgtaatagtaaaaaagtatattcttgacgtttttttcagtgtagcatttctatgcttactaggatatgagggcactcttctggagagtacggtacagatgataattcagtcatatttctagaggaaaatatacagcagaaactttggaacttgtgtttaaaaataatctactacagttcttcaatctgtgtcactttgacaagatttagttttttgtcagtaatgctaatgaaaatacccagaaatatgtatcccccttatattctgcctgtaatcaaacattttttaktatcttaagactataatttttaccaacataattttatttggcagaacaacctagtatgatttaaaaaaaaaaacatatatacaattttgctcgtaaagtaacagatccagattcagtacctctgccagcactacctttactgctagagcttggcaaaggcacacacacaattacactcacacacgatgactctgccagcagtcctatgcataccagcaaaaatgaaatcagaaaagacagtcttatttatgccatgcaaatgtgcacaatgctgcaaaagaaataacacagtagattcac

SEQ ID NO: 68143 - DNA, 600 bp, Chicken  19866894338829_1
accacaagtccaactttggttccttttacaaggccaaacaccttaaaaaaagaaggtactgtaaatattaagcttatgtaaagtttaaaaatgtttctgtatattctacacaatagcatgttaaatgcaggtgtcacaaatttattttcactttaagctttcaagcataaagatgagacagtgacagacaagaaaacaaaagggtactaatgtctccttgtttctccttatcagtaagtcacactgcttcccttccaagactgtgaatcatttgggacaataagaaataactttgggcayagcatctctttcaggttaaatcaagaagctagattttgggatgcatcttgtttccctgtcccaccagagayagagttatgtccctttcccattgctggccatgggcactgcgaggcacagcgactgatgaascagttgtggcagagggcacacaactatggcagctgagttccagccaaaagttaagcttggctttgtctgctcctctttaagggttctgggagggccccattaaaactgctaagagaaataaaaagacaacacctagaaagcaaaaaacccagataccaatgtaagagc

SEQ ID NO: 68144 - DNA, 600 bp, Chicken  19866894338829_2
gcttatgtaaagtttaaaaatgtttctgtatattctacacaatagcatgttaaatgcaggtgtcacaaatttattttcactttaagctttcaagcataaagatgagacagtgacagacaagaaaacaaaagggtactaatgtctccttgtttctccttatcagtaagtcacactgcttcccttccaagactgtgaatcatttgggacaataagaaataactttgggcayagcatctctttcaggttaaatcaagaagctagattttgggatgcatcttgtttccctgtcccaccagagayagagttatgtccctttcccattgctggccatgggcactgcgaggcacagcgactgatgaascagttgtggcagagggcacacaactatggcagctgagttccagccaaaagttaagcttggctttgtctgctcctctttaagggttctgggagggccccattaaaactgctaagagaaataaaaagacaacacctagaaagcaaaaaacccagataccaatgtaagagcaagaaaaacaatytttcttccttctgaacccctcttctcactagtactcaaaggttaactgattctttaat

SEQ ID NO: 68145 - DNA, 600 bp, Chicken  19866894338829_3
gtcacaaatttattttcactttaagctttcaagcataaagatgagacagtgacagacaagaaaacaaaagggtactaatgtctccttgtttctccttatcagtaagtcacactgcttcccttccaagactgtgaatcatttgggacaataagaaataactttgggcayagcatctctttcaggttaaatcaagaagctagattttgggatgcatcttgtttccctgtcccaccagagayagagttatgtccctttcccattgctggccatgggcactgcgaggcacagcgactgatgaascagttgtggcagagggcacacaactatggcagctgagttccagccaaaagttaagcttggctttgtctgctcctctttaagggttctgggagggccccattaaaactgctaagagaaataaaaagacaacacctagaaagcaaaaaacccagataccaatgtaagagcaagaaaaacaatytttcttccttctgaacccctcttctcactagtactcaaaggttaactgattctttaatactgtatagagtyctcctctaaacacatactgaaaagttcaagttacctttctgctgtcct

SEQ ID NO: 68146 - DNA, 600 bp, Chicken  19866894338829_4
ggttaaatcaagaagctagattttgggatgcatcttgtttccctgtcccaccagagayagagttatgtccctttcccattgctggccatgggcactgcgaggcacagcgactgatgaascagttgtggcagagggcacacaactatggcagctgagttccagccaaaagttaagcttggctttgtctgctcctctttaagggttctgggagggccccattaaaactgctaagagaaataaaaagacaacacctagaaagcaaaaaacccagataccaatgtaagagcaagaaaaacaatytttcttccttctgaacccctcttctcactagtactcaaaggttaactgattctttaatactgtatagagtyctcctctaaacacatactgaaaagttcaagttacctttctgctgtccttcaacagccactgaattcgttgctgataaagttcaatcaccctgacaaaagccagagcacagctttagataaggcattcttttgcatgtaatcaacaacttgacttcatcatgtcaaatcaccttttaaaagtactgttttcagtgttctcatagaaccagcaattacagggctaccaatt

SEQ ID NO: 68147 - DNA, 600 bp, Chicken  19866894338829_5
tttcccattgctggccatgggcactgcgaggcacagcgactgatgaascagttgtggcagagggcacacaactatggcagctgagttccagccaaaagttaagcttggctttgtctgctcctctttaagggttctgggagggccccattaaaactgctaagagaaataaaaagacaacacctagaaagcaaaaaacccagataccaatgtaagagcaagaaaaacaatytttcttccttctgaacccctcttctcactagtactcaaaggttaactgattctttaatactgtatagagtyctcctctaaacacatactgaaaagttcaagttacctttctgctgtccttcaacagccactgaattcgttgctgataaagttcaatcaccctgacaaaagccagagcacagctttagataaggcattcttttgcatgtaatcaacaacttgacttcatcatgtcaaatcaccttttaaaagtactgttttcagtgttctcatagaaccagcaattacagggctaccaattttaatactacttctcccagaggtgtttaactgactagagatggagctagctgaaaaaccagatcactgaca

SEQ ID NO: 68148 - DNA, 569 bp, Chicken  19866894338834_1
tgtccttcattatgtctggatttgtaatcaaggctgactccagacagcaaaattaatccatgctccctgaatctcagctggaagaaaatggatttgctttactgactctgccaaagctgaagcaatttaccccggctgaggatctgattcttatccctgcctcaggttactatgtgtgtttcagcacacagcacaaaagcatgatcttcgaactgaccagaggtcgaacatggcttccaggctggaaggccacagcagaactgaatccaagcagcacaattggtgtgagaaacacagtgytgggtaaaaygaaaatcctggagtaacaccttgtgtgataaataaccccatctcccrccccagcaccagcagctgaggtgcctttcccacaggcacagccagtagccccytgatgcaggcaggccggcactgatcctggccctggcggggtgatgataagcagtacygcaggacacactgcagggaatgcgagaggctgtaaatgaaggccttcctaattagaaggtggtcagaagcacacacagattcctggtccagggtaagctgct

SEQ ID NO: 68149 - DNA, 559 bp, Chicken  19866894338834_2
tatgtctggatttgtaatcaaggctgactccagacagcaaaattaatccatgctccctgaatctcagctggaagaaaatggatttgctttactgactctgccaaagctgaagcaatttaccccggctgaggatctgattcttatccctgcctcaggttactatgtgtgtttcagcacacagcacaaaagcatgatcttcgaactgaccagaggtcgaacatggcttccaggctggaaggccacagcagaactgaatccaagcagcacaattggtgtgagaaacacagtgytgggtaaaaygaaaatcctggagtaacaccttgtgtgataaataaccccatctcccrccccagcaccagcagctgaggtgcctttcccacaggcacagccagtagccccytgatgcaggcaggccggcactgatcctggccctggcggggtgatgataagcagtacygcaggacacactgcagggaatgcgagaggctgtaaatgaaggccttcctaattagaaggtggtcagaagcacacacagattcctggtccagggtaagctgct

SEQ ID NO: 68150 - DNA, 512 bp, Chicken  19866894338834_3
ccatgctccctgaatctcagctggaagaaaatggatttgctttactgactctgccaaagctgaagcaatttaccccggctgaggatctgattcttatccctgcctcaggttactatgtgtgtttcagcacacagcacaaaagcatgatcttcgaactgaccagaggtcgaacatggcttccaggctggaaggccacagcagaactgaatccaagcagcacaattggtgtgagaaacacagtgytgggtaaaaygaaaatcctggagtaacaccttgtgtgataaataaccccatctcccrccccagcaccagcagctgaggtgcctttcccacaggcacagccagtagccccytgatgcaggcaggccggcactgatcctggccctggcggggtgatgataagcagtacygcaggacacactgcagggaatgcgagaggctgtaaatgaaggccttcctaattagaaggtggtcagaagcacacacagattcctggtccagggtaagctgct

SEQ ID NO: 68151 - DNA, 459 bp, Chicken  19866894338834_4
ccaaagctgaagcaatttaccccggctgaggatctgattcttatccctgcctcaggttactatgtgtgtttcagcacacagcacaaaagcatgatcttcgaactgaccagaggtcgaacatggcttccaggctggaaggccacagcagaactgaatccaagcagcacaattggtgtgagaaacacagtgytgggtaaaaygaaaatcctggagtaacaccttgtgtgataaataaccccatctcccrccccagcaccagcagctgaggtgcctttcccacaggcacagccagtagccccytgatgcaggcaggccggcactgatcctggccctggcggggtgatgataagcagtacygcaggacacactgcagggaatgcgagaggctgtaaatgaaggccttcctaattagaaggtggtcagaagcacacacagattcctggtccagggtaagctgct

SEQ ID NO: 68152 - DNA, 402 bp, Chicken  19866894338834_5
tactatgtgtgtttcagcacacagcacaaaagcatgatcttcgaactgaccagaggtcgaacatggcttccaggctggaaggccacagcagaactgaatccaagcagcacaattggtgtgagaaacacagtgytgggtaaaaygaaaatcctggagtaacaccttgtgtgataaataaccccatctcccrccccagcaccagcagctgaggtgcctttcccacaggcacagccagtagccccytgatgcaggcaggccggcactgatcctggccctggcggggtgatgataagcagtacygcaggacacactgcagggaatgcgagaggctgtaaatgaaggccttcctaattagaaggtggtcagaagcacacacagattcctggtccagggtaagctgct

SEQ ID NO: 68153 - DNA, 600 bp, Chicken  19866894338838_1
gcttatttacatagaagatgaatcaaatttggtactactgtgtgacgctaaaattaatatttgactatcgtttttcaggcacttccaacctgttctcatgctatgatcaatattttctgctattttccatctatccagctatatgtgaaaatctggagcaagggttattgagccaaatttcatcatctggcaggtaattacagccctcgtaatcttcatctgggagtcacccatgtggggacatgggcagagtaggacccatccgtatttgttctacttctctggtgtatttgtttaacrtacttatcagcagctttcattttgcagctagaaggcccgtagcaaggtggagaagctggcatttgcattgagattccaattaagttgaaattagcatgaacctctgttcagtaactgatgtttaatgtatggcagatgaaatggtactttgataaacggactccaaggattgttatgacatttctcgtctgcatcctacaacgtgattagactgccatagtgctgcgtgattaatagagttagttctatctgcactgaacctttctggcacaggaatctcttagaaacagtgtaccttag

SEQ ID NO: 68154 - DNA, 600 bp, Chicken  19866894338849_1
tattacctaagacagcatagtactttttacccttggacattttagtacccaaccttatgcattctcttcatgatgctccaagctgggagaccatccctaggtgacaggactaaatccctcatgcgttgccagtgtagtagtgtcatgctgcaggctgcttccttgtccagccactagcgtagcaagtatcttctctccccaacattatatgaaattaatcgaggccattcctcttcttcagctggatgattttgtatgcatacatcaagtaataaaatggaagccagagaattgtagctyagcatggaaggagtattccatgtgtgtttggaatgtgctttttcaaccttcattacctaatgcacgttatacagtattgtctgatttagaatcaatatgttgacaatacatttttaaaatgagaaacgtgtttcctactgacctgtggggaattgtcatgtgcaataatccaatagtgttgtgatgaatctgcattaaaatattgaactcaacgttgtccaaagagtatgaaacgattcacagactgaacactttgtgaaggagtcatagaggcaattcttcacattttaggctagactt

SEQ ID NO: 68155 - DNA, 600 bp, Chicken  19866894338853_1
tgctcttagtcaccgatacctttggtgcattgctgtgcgtttcacgtatgcttgttgctggaaactgacaaattaaagattggagatatgagtaaataatgcgccggcataataatccttagcagctaaacggtgctcgggaggtggtagattaactgtgcgaatgctgattggaagcgacagagtgaggctgtattgaagatgttatttaggtatcaccttggtgttgtcaccttcaggagctgctgtaaggccgtgccggtgatccgggtgttgtgcttcatggcagaaatcccgtgygcctggagagttgatgtctgtggtccccagatgcctgggatgccctgttattcgtgtgcatttgggtgggctgcgagggaagaactgttcaagcgaaaaattcctgcctctcgttaagcccaaattagttcgctataacttccacttcccgatccatgaaattgatgctggattcccagtctgccgtatgaatgctgaaattctgtactcgggaaggcactgtgctatagctctttctgcaccataagcagcactgccagaacgattggctcaaactactgcacgctgttgatgtgccct

SEQ ID NO: 68156 - DNA, 599 bp, Chicken  19866894338855_1
  misc_feature (1)..(121): n is any nucleotide
nnnnnnnnnnnnnnnnnnnnnnnnnnnnnnnnnnnnnnnnnnnnnnnnnnnnnnnnnnnnnnnnnnnnnnnnnnnnnnnnnnnnnnnnnnnnnnnnnnnnnnnnnnnnnnnnnnnnnnnnntagccctgcttcctgtcaccattagtggcccagatcaggtactcagtcagagcaatggagtcctataagaggcagctgttggactgtttaccttgatatgacttctagtctatgctaattgtattaatacagcttaacagttaatacaacttaaaatgtattctaactatgacagatgygaggttaatagaattacaggctttggaaaaataggaatttrtgtgtcatagatggaatgactgtggtgctaaattcattacaactaagggtatggaagcagtaattttaaggctatgtggaaaaagggttgttaccctgactgttttattggctgagtcgtagggcagggtcccagggttcagaattctgggatggagaactgggagagcactgagttgcaatgtgcattctgaaggtctcccacgcttaagatagatcatctttccaaggctgttgtatattgagtctgcattgggtg

SEQ ID NO: 68157 - DNA, 599 bp, Chicken  19866894338855_2
  misc_feature (1)..(80): n is any nucleotide
nnnnnnnnnnnnnnnnnnnnnnnnnnnnnnnnnnnnnnnnnnnnnnnnnnnnnnnnnnnnnnnnnnnnnnnnnnnnnnnntagccctgcttcctgtcaccattagtggcccagatcaggtactcagtcagagcaatggagtcctataagaggcagctgttggactgtttaccttgatatgacttctagtctatgctaattgtattaatacagcttaacagttaatacaacttaaaatgtattctaactatgacagatgygaggttaatagaattacaggctttggaaaaataggaatttrtgtgtcatagatggaatgactgtggtgctaaattcattacaactaagggtatggaagcagtaattttaaggctatgtggaaaaagggttgttaccctgactgttttattggctgagtcgtagggcagggtcccagggttcagaattctgggatggagaactgggagagcactgagttgcaatgtgcattctgaaggtctcccacgcttaagatagatcatctttccaaggctgttgtatattgagtctgcattgggtgtgctgtgttgagcgtaaggctgtgttttgcaggggatcaca

SEQ ID NO: 68158 - DNA, 600 bp, Chicken  19866894338856_1
ccattttggactaatggacacacatcacacagggaaacacctgcagtttccccgacttcccaatccccactatgaccatgacctaattcagggtcattttttttcagtttgtagtagaaactcatgtgtcacacaccttctgtactgtcccataaacagctcatctgtgcaccaggctacacagacactttggtaaagaataaggcaagaaatttcatgtgttaagttatacaccagagggagtcccttgaatgtagtacaaacatcctgatactaccaaagaaaagttaatttaaaaartgacgggactcaagagctgtggtccatagttcactctatggctcctcctgtctgcaaaagttcgtgaccatccagtatcatttacactgtacgttttataggcagccaagttcaggatctgttgaaagtgaaattgctccttatatatatatttttttttccagaatggatccttagctatttctcattgagagaaccatatgaaactgatttgttctaggcaatattagataccagatttcaagtaggttgatatggaacaaacacacttctcacatttagaactgctttcaggtaata

SEQ ID NO: 68159 - DNA, 600 bp, Chicken  19866894338857_1
ttccacttgcactctgccttgagatgggatgggagcctgcaccacaaggagacttcaccttgcctgcgtggtctcctgcaatgaaccccattggcctgccttcctggtggacttctcccccgagtaaattcccccccctcaacacatccacactcctttatccactcacctggtggtggctttccccatccctgtgctcatcctctcccagcgaggacctgtcccacttggatgctgaagtgagatgagagctctttgttgggactaacaaagccaagtttggtctgggtgagaagagcrggtgcagagcacttgccrtccctcatcctacagcagctaggcctcgccacatccttggaaggcctcatgactgagcttgaccacctccagtccccttcaagagactgcccggagagccacttggagacattgagatgtgaccatgcacacagcactttggagaaccagatccctgctgttccctccccgcttcaaggcctgggcagctcctaggagtccagcatggcctccaagcccttttgtctacacccttgttcagtcctgatgtgtcttgtcatgtctggttttcattaacgtact

SEQ ID NO: 68160 - DNA, 600 bp, Chicken  19866894338857_2
ttgagatgggatgggagcctgcaccacaaggagacttcaccttgcctgcgtggtctcctgcaatgaaccccattggcctgccttcctggtggacttctcccccgagtaaattcccccccctcaacacatccacactcctttatccactcacctggtggtggctttccccatccctgtgctcatcctctcccagcgaggacctgtcccacttggatgctgaagtgagatgagagctctttgttgggactaacaaagccaagtttggtctgggtgagaagagcrggtgcagagcacttgccrtccctcatcctacagcagctaggcctcgccacatccttggaaggcctcatgactgagcttgaccacctccagtccccttcaagagactgcccggagagccacttggagacattgagatgtgaccatgcacacagcactttggagaaccagatccctgctgttccctccccgcttcaaggcctgggcagctcctaggagtccagcatggcctccaagcccttttgtctacacccttgttcagtcctgatgtgtcttgtcatgtctggttttcattaacgtactaagagctcaaatgagtcg

SEQ ID NO: 68161 - DNA, 599 bp, Chicken  19866894338864_1
  misc_feature (1)..(85): n is any nucleotide
nnnnnnnnnnnnnnnnnnnnnnnnnnnnnnnnnnnnnnnnnnnnnnnnnnnnnnnnnnnnnnnnnnnnnnnnnnnnnnnnnnnnntctcattttagtgagaggcaataaaaaaatctgggcaaaataatcccatggagactttttgatacaaacacccagcctagatagcagcactgtatttatggtgggaaatcagaagtgatttttcaggactaatatggcttcttaaaatttcagaacatgttgaagaatactccctccacatactattgcattgcccagggaaaactctcttttartgctgcaggagagtcagctggaagtactttacaaacatctgtttattagaacatctaaaagccgaatataacagttcctactgagcaatagccagcacagctgtgcacacacgacacttagctaaggacaaaggtcactcattttctttagacttctgtgttgattgatgtgaatatgtaaaatctttattctgaggcaataactgaaccctcaatgacatctgtcrctagaatcctacactgtcagagcaygcacmctgttcaggtgtattstctgcttcccaggaagtctggtggaa

SEQ ID NO: 68162 - DNA, 526 bp, Chicken  19866894338864_2
taaaatttcagaacatgttgaagaatactccctccacatactattgcattgcccagggaaaactctcttttartgctgcaggagagtcagctggaagtactttacaaacatctgtttattagaacatctaaaagccgaatataacagttcctactgagcaatagccagcacagctgtgcacacacgacacttagctaaggacaaaggtcactcattttctttagacttctgtgttgattgatgtgaatatgtaaaatctttattctgaggcaataactgaaccctcaatgacatctgtcrctagaatcctacactgtcagagcaygcacmctgttcaggtgtattstctgcttcccaggaagtctggtggaaaatgacacaatgtaaagtacacttgcaaacttgtataaaccaggtagttcttaagaacatttactgtgatgtcaaaatatttactggaggtctgtttgtttttacagttactaataattatgttgcctatgtttgctacaaatcatcacttatg

SEQ ID NO: 68163 - DNA, 501 bp, Chicken  19866894338864_3
tactccctccacatactattgcattgcccagggaaaactctcttttartgctgcaggagagtcagctggaagtactttacaaacatctgtttattagaacatctaaaagccgaatataacagttcctactgagcaatagccagcacagctgtgcacacacgacacttagctaaggacaaaggtcactcattttctttagacttctgtgttgattgatgtgaatatgtaaaatctttattctgaggcaataactgaaccctcaatgacatctgtcrctagaatcctacactgtcagagcaygcacmctgttcaggtgtattstctgcttcccaggaagtctggtggaaaatgacacaatgtaaagtacacttgcaaacttgtataaaccaggtagttcttaagaacatttactgtgatgtcaaaatatttactggaggtctgtttgtttttacagttactaataattatgttgcctatgtttgctacaaatcatcacttatg

SEQ ID NO: 68164 - DNA, 496 bp, Chicken  19866894338864_4
cctccacatactattgcattgcccagggaaaactctcttttartgctgcaggagagtcagctggaagtactttacaaacatctgtttattagaacatctaaaagccgaatataacagttcctactgagcaatagccagcacagctgtgcacacacgacacttagctaaggacaaaggtcactcattttctttagacttctgtgttgattgatgtgaatatgtaaaatctttattctgaggcaataactgaaccctcaatgacatctgtcrctagaatcctacactgtcagagcaygcacmctgttcaggtgtattstctgcttcccaggaagtctggtggaaaatgacacaatgtaaagtacacttgcaaacttgtataaaccaggtagttcttaagaacatttactgtgatgtcaaaatatttactggaggtctgtttgtttttacagttactaataattatgttgcctatgtttgctacaaatcatcacttatg

SEQ ID NO: 68165 - DNA, 480 bp, Chicken  19866894338864_5
cattgcccagggaaaactctcttttartgctgcaggagagtcagctggaagtactttacaaacatctgtttattagaacatctaaaagccgaatataacagttcctactgagcaatagccagcacagctgtgcacacacgacacttagctaaggacaaaggtcactcattttctttagacttctgtgttgattgatgtgaatatgtaaaatctttattctgaggcaataactgaaccctcaatgacatctgtcrctagaatcctacactgtcagagcaygcacmctgttcaggtgtattstctgcttcccaggaagtctggtggaaaatgacacaatgtaaagtacacttgcaaacttgtataaaccaggtagttcttaagaacatttactgtgatgtcaaaatatttactggaggtctgtttgtttttacagttactaataattatgttgcctatgtttgctacaaatcatcacttatg

SEQ ID NO: 68166 - DNA, 600 bp, Chicken  19866894338871_1
acacagattatgatatactttcagtaggctctgagtgacatattgtttcatgtgcattttatttaaaatatccaggagagggaatatttcatgtcatcaataagaaaaatgtgcttacagaacttcaacatttcttgtttccattcttcataatcaatgaaaaaaaaaattcttttggtccttaatactttgaaggtatgcgtgatagagattggcgaatggaaaattatgaaggtcagatagaaaggaggaagatctggatagaggtatttatgttaaaaaacaaacaaacaaacaaamaaagatggcagagccaagaacagatacgagtgtggcagaagcatgacttgagtaatattaaaaaccctcatcattaacttttttggcttgaagtctaactttgtaatctactttaaaatttggtgatggtaaaatatacatagattagaaggaatacaagactgcactctataagtaaagatacaagtttcttgcattaattaatgataatttcagatgagttagtttattattttccatttttttttctttttttaacgagtttatgtcagcttgaataagcaggtaatgcttatcatt

SEQ ID NO: 68167 - DNA, 600 bp, Chicken  19866894338887_1
tctcttccatcttaccgtgttattattctgcaccttttgagggtacggtttatcctgagtaattaaaacacagttagctcgacaagtcccgaccgtaatggaatagcttaggttttatttttattttttttttaatctctttttttgtgtgccccgttttccaggaagcccaacaccagagccggcttcattaaaacaggaaactccctcgaaacgcgcggctgcggaagagagattttagcagaaattgagggcagcgcagccctgcgtggggcacagctccatcccgacagctcccayagaaagcaacacagcctcccccccccaggacgccccgctgcacacacaccaaaggcctcatttgggatgcccagggacgctcccaggcctcggagcatcgctcagagctgctcggcacagcattcgccctgccccaggctcccggcagcctgcaggatgggttttgttctgctgctctctaagcaccggccccatgacggcgaaaggcaaacatggcacacaaggctataatcccgtttctctgcagaataatgctccgagcgctcagcgctgaggacaagcccatattactcgctgtgt

SEQ ID NO: 68168 - DNA, 600 bp, Chicken  19866894338889_1
tcacagtcataatagctggtcattgcttaaaactcatttatcattctgtactcttcagtgcctgagaagttctgtacatagtatgagatattccactgcaaagagaaataagggctcttatataataaaacatactcaaacattaatatttgcatataatccaggaaatacaagtaataacatgtaatgtggagtatcacttaaacctaaattgattttattaagggaaacaaaattctgtgataccaacataggtcacaatccacactatgtaatttctctaccagtctgagagagaakttctcttacattatactgccactagtgcttyaaatgttcagtgaattattagaaatgctctccatttgttttattcttaagacatcaattagaacatctcatatactgtaagtacatttcccatatacaccagactatgccagacataaacgttatttggagactatatactaatctaaacacatatggaacttccatttccactattccatgctaatatagtacctacccttaaagagacatgtctccagcttctccaaatgggttcagccacaaacagtcagactcatttccatgtca

SEQ ID NO: 68169 - DNA, 600 bp, Chicken  19866894338889_2
actcatttatcattctgtactcttcagtgcctgagaagttctgtacatagtatgagatattccactgcaaagagaaataagggctcttatataataaaacatactcaaacattaatatttgcatataatccaggaaatacaagtaataacatgtaatgtggagtatcacttaaacctaaattgattttattaagggaaacaaaattctgtgataccaacataggtcacaatccacactatgtaatttctctaccagtctgagagagaakttctcttacattatactgccactagtgcttyaaatgttcagtgaattattagaaatgctctccatttgttttattcttaagacatcaattagaacatctcatatactgtaagtacatttcccatatacaccagactatgccagacataaacgttatttggagactatatactaatctaaacacatatggaacttccatttccactattccatgctaatatagtacctacccttaaagagacatgtctccagcttctccaaatgggttcagccacaaacagtcagactcatttccatgtcatagcatgtgtttttcatggtacaacaaaagg

SEQ ID NO: 68170 - DNA, 600 bp, Chicken  19866894338892_1
gtgacaagaacaaccatgaaccagcaggaatgtaaaacgtcttcactttgttatctcacagcattgagatgctcataacagtttagaaagcgtaccgcccacaccacaggatcttgctcctctttaattttctctaatttgtgtagtgaataaccaaatactcataatgcaattagaagataatcaggcttgtaattatgttaattgctggagacttacatcaatcctccagcaaaatgataggatttcaggggaactgttaacatgggaagagagaggaagcgcacatgagagagaaaragagactgggggagtgagtaaattgatgaacagcttaggcttgtatcattgagcaacaatgagaatacagtggtgcaacaattgaacagggcctcragggaagaagctcagaaaattaggttttaggtaccagcaactcaacctcttttgtctgttttcttcccataaataatcatgttgtgcatctatatttattgtaataagcccaattcagagaaatcagatccatagctgaacagagaacaaaagggaactgttcagctatgcagcagattgtcatgtctcccacatcagtgaaag

SEQ ID NO: 68171 - DNA, 600 bp, Chicken  19866894338892_2
gcccacaccacaggatcttgctcctctttaattttctctaatttgtgtagtgaataaccaaatactcataatgcaattagaagataatcaggcttgtaattatgttaattgctggagacttacatcaatcctccagcaaaatgataggatttcaggggaactgttaacatgggaagagagaggaagcgcacatgagagagaaaragagactgggggagtgagtaaattgatgaacagcttaggcttgtatcattgagcaacaatgagaatacagtggtgcaacaattgaacagggcctcragggaagaagctcagaaaattaggttttaggtaccagcaactcaacctcttttgtctgttttcttcccataaataatcatgttgtgcatctatatttattgtaataagcccaattcagagaaatcagatccatagctgaacagagaacaaaagggaactgttcagctatgcagcagattgtcatgtctcccacatcagtgaaagagccactgtattaccttctgtcctcgactcctgggggtattcttttctcatgggtgatgtccgatattacatttaaagccataatactgcaactgc

SEQ ID NO: 68172 - DNA, 599 bp, Chicken  19866894338896_1
  misc_feature (1)..(47): n is any nucleotide
nnnnnnnnnnnnnnnnnnnnnnnnnnnnnnnnnnnnnnnnnnnnnnntgcaaagggacatcgggctccgtcctctgcaccccagcatggcagggacagagtgggatggagggctggaggtgatgaagggatgaagggctcctctgggccgtgctggctgcaggttcgtgccctccctgccctcagcacgttcctggcagcactctgtgtgcaatggcaaagcgccgccaggcacacctgatgtgtttgacctccccagaagcaggaggctgcagctcgtgccatccggggcagctcagcrcactgccctgcacccactgagctttgtttgcaggcgctgtcccactctgctgcaccgctgcagctgtcgttgctcagagctgggcttaccctgcatgagccctatgggcggcagcagtacagcwgcatcccagrgggaggaaggctcctgctcgacccagcatgtgagattctcctgcttccctgtgcagctccttggaggctgaacagcattcagggtctcrggagagaggcaggcagaaaatgggtttattttctctctgtggcacagcagagcattaaatatcttcaaagagactt

SEQ ID NO: 68173 - DNA, 600 bp, Chicken  19866894338896_2
aagggatgaagggctcctctgggccgtgctggctgcaggttcgtgccctccctgccctcagcacgttcctggcagcactctgtgtgcaatggcaaagcgccgccaggcacacctgatgtgtttgacctccccagaagcaggaggctgcagctcgtgccatccggggcagctcagcrcactgccctgcacccactgagctttgtttgcaggcgctgtcccactctgctgcaccgctgcagctgtcgttgctcagagctgggcttaccctgcatgagccctatgggcggcagcagtacagcwgcatcccagrgggaggaaggctcctgctcgacccagcatgtgagattctcctgcttccctgtgcagctccttggaggctgaacagcattcagggtctcrggagagaggcaggcagaaaatgggtttattttctctctgtggcacagcagagcattaaatatcttcaaagagacttgctgattgccgctgctggcatggggggggctctgtgctcagagaggaggaggaggaggagggtggtggtggtggtgcagagcagcttctcagccccactgcctcgtcccaatgcggccaggggac

SEQ ID NO: 68174 - DNA, 600 bp, Chicken  19866894338896_3
gggctcctctgggccgtgctggctgcaggttcgtgccctccctgccctcagcacgttcctggcagcactctgtgtgcaatggcaaagcgccgccaggcacacctgatgtgtttgacctccccagaagcaggaggctgcagctcgtgccatccggggcagctcagcrcactgccctgcacccactgagctttgtttgcaggcgctgtcccactctgctgcaccgctgcagctgtcgttgctcagagctgggcttaccctgcatgagccctatgggcggcagcagtacagcwgcatcccagrgggaggaaggctcctgctcgacccagcatgtgagattctcctgcttccctgtgcagctccttggaggctgaacagcattcagggtctcrggagagaggcaggcagaaaatgggtttattttctctctgtggcacagcagagcattaaatatcttcaaagagacttgctgattgccgctgctggcatggggggggctctgtgctcagagaggaggaggaggaggagggtggtggtggtggtgcagagcagcttctcagccccactgcctcgtcccaatgcggccaggggacagagcagccc

SEQ ID NO: 68175 - DNA, 600 bp, Chicken  19866894338896_4
ccgccaggcacacctgatgtgtttgacctccccagaagcaggaggctgcagctcgtgccatccggggcagctcagcrcactgccctgcacccactgagctttgtttgcaggcgctgtcccactctgctgcaccgctgcagctgtcgttgctcagagctgggcttaccctgcatgagccctatgggcggcagcagtacagcwgcatcccagrgggaggaaggctcctgctcgacccagcatgtgagattctcctgcttccctgtgcagctccttggaggctgaacagcattcagggtctcrggagagaggcaggcagaaaatgggtttattttctctctgtggcacagcagagcattaaatatcttcaaagagacttgctgattgccgctgctggcatggggggggctctgtgctcagagaggaggaggaggaggagggtggtggtggtggtgcagagcagcttctcagccccactgcctcgtcccaatgcggccaggggacagagcagccccggggctcacagacatcttctgctgctgcttttggttctcgtgaaggacaaacagaggcaggcggccgcccggagctggctcacggcat

SEQ ID NO: 68176 - DNA, 600 bp, Chicken  19866894338898_1
caaatttacttggttatgttcaaaaaaactcagactttttcaccttctttactgggctgcatttcatagatctgtgagccattctgttatcctgaattttaaaggattttttttaaagtggatactcatgtcataattgctttagtggtagagaattttcatccagtctgaaaattgtattccagttacaaaacacataattattgatatagaatcatccattttaaaatgtcaagtagccccgaacactcaaaacattacaattagactaatacatctttttgttttgcacaaaaaacrtaatttccctagtttcccatgctgtgcatacatcatacatagactgagctattcagttttctagtgccttaattytgtcagtcatttccaaatgtgagaatgctctcacatgtcattagttatatagtctattttcagtataggtacccttaaagaatcttgacagtgtttgctagatgcagcatagtgaccttgggaggtttattgaggcacgtggaagtaataaagatagcaaatactcagatggcactcagcaaacccctgtggaaagaggttagcaatgcagagctgctgtaataa

SEQ ID NO: 68177 - DNA, 600 bp, Chicken  19866894338898_2
gagccattctgttatcctgaattttaaaggattttttttaaagtggatactcatgtcataattgctttagtggtagagaattttcatccagtctgaaaattgtattccagttacaaaacacataattattgatatagaatcatccattttaaaatgtcaagtagccccgaacactcaaaacattacaattagactaatacatctttttgttttgcacaaaaaacrtaatttccctagtttcccatgctgtgcatacatcatacatagactgagctattcagttttctagtgccttaattytgtcagtcatttccaaatgtgagaatgctctcacatgtcattagttatatagtctattttcagtataggtacccttaaagaatcttgacagtgtttgctagatgcagcatagtgaccttgggaggtttattgaggcacgtggaagtaataaagatagcaaatactcagatggcactcagcaaacccctgtggaaagaggttagcaatgcagagctgctgtaataaaaacagactcaaagagaatttctttgttcatcgtaattttatttttttttcacttatttcactgaaaaatcagaa

SEQ ID NO: 68178 - DNA, 600 bp, Chicken  19866894338900_1
tgacagaatccgctgccgttcctgggcaccctgagagctcccgcccaggacggctgtccggacggccccgccgcgatcccatccggccgcgaagcacctaccgggagccgcagagtccgacgccgcagcggagcggtcccggcagcgctcgcagccgcctgtggaacggaacggagcggggcagggcggccctcggctcccgcccaccgcgctgactgagccgccccgcggggctctgagggctgcgcgctgggccggcgggaggagcttcccttgggctgcgttttgtgtgtgtgtgcktgagaaaaaggagtcccaaacgcaggttggaagctgtggaggctgcagcggagggcggccaggcgcgctgcacggcgctcggttgccccgtgagaaacaccggcgttgtgctccgggtttccaatgccaaacacttcacagctgctcagcgctccctcagtgaaacacatccgtggctgagctcttcttcaaggtacgagctgtggaaatattaaacaaaaccccttttcccctcatggatcatatggaaattaatgtaaataggttctgggttaaagaaaaacgtgtattaatactaga

SEQ ID NO: 68179 - DNA, 600 bp, Chicken  19866894338910_1
ccaggctgcccagagccacatccagcctggccttgaatgcctgcagggatggggcatccacagcctccttgggcaacctgttcagtgcgtcaccaccctctgggggaaaaacttccttcctcatatccaacctaaccctccccgtctcagtttaaaaccattcccccttgtcctatcaccatccaccctcataaacagccattccccttctgtttatacactcccttcagatattggaaggcccaatattggatcacggcagaaaaaaacaccccctcttagaggagaaatcctcagctkttacacttcagttttatttcaaagctctttcagagtcagaactggaaacaaaaggggaagttaagaggcagacaaaaatatcttcccctgaacactctgtgcctttttccaaatgccaccccwaacgcctgccctcccacagctgcctctaaataaatacataaatgcctcaggccatgtgtgcaccatcacgttgctcctccagctctgctccaaagcaactggtttgaaacaaccacctgatttcacaactgtaagatgttacgttggaaaaacaaagaaacaaaaatgccacggtag

SEQ ID NO: 68180 - DNA, 600 bp, Chicken  19866894338910_2
tatccaacctaaccctccccgtctcagtttaaaaccattcccccttgtcctatcaccatccaccctcataaacagccattccccttctgtttatacactcccttcagatattggaaggcccaatattggatcacggcagaaaaaaacaccccctcttagaggagaaatcctcagctkttacacttcagttttatttcaaagctctttcagagtcagaactggaaacaaaaggggaagttaagaggcagacaaaaatatcttcccctgaacactctgtgcctttttccaaatgccaccccwaacgcctgccctcccacagctgcctctaaataaatacataaatgcctcaggccatgtgtgcaccatcacgttgctcctccagctctgctccaaagcaactggtttgaaacaaccacctgatttcacaactgtaagatgttacgttggaaaaacaaagaaacaaaaatgccacggtaggaataaagtattaaaaacaatataccaggctgttaactcatcagaagctcagcacgcatttggatcagatcgtagaggaagcaccaaggacataccacgcatctgtgacagctaaaacgctag

SEQ ID NO: 68181 - DNA, 599 bp, Chicken  19866894338917_1
  misc_feature (1)..(120): n is any nucleotide
nnnnnnnnnnnnnnnnnnnnnnnnnnnnnnnnnnnnnnnnnnnnnnnnnnnnnnnnnnnnnnnnnnnnnnnnnnnnnnnnnnnnnnnnnnnnnnnnnnnnnnnnnnnnnnnnnnnnnnnnaaaaataactgcagctacagccagaactcaccttttctgggtagcgtggtgggttcttttgtaaccacctttccttctgcaatcacacatgctgtgcttttgcccacaggaactctctgcccaacttcaaccacacctgcaggccattgcccagctattcccatcacaggaactcccacrggacwgcagaaacccacctgggagagccacaatggaagcagctgggtgaacgtccgtctctactgcttgccaggattttctctcctctcacttcctccttcatcaatttgttgttctccatgctctgtattcctacctggaagtggaaaccagcatccccaagtttccttctgaaaatgctgttcccgcagtatttgctctttgactggcatcagtggttttggggagatttccgagcagtctgttcatgcacaactctgccaaattttgcagatgttaggaagttcagataagacaag

SEQ ID NO: 68182 - DNA, 599 bp, Chicken  19866894338917_2
  misc_feature (1)..(115): n is any nucleotide
nnnnnnnnnnnnnnnnnnnnnnnnnnnnnnnnnnnnnnnnnnnnnnnnnnnnnnnnnnnnnnnnnnnnnnnnnnnnnnnnnnnnnnnnnnnnnnnnnnnnnnnnnnnnnnnnnnnaaaaataactgcagctacagccagaactcaccttttctgggtagcgtggtgggttcttttgtaaccacctttccttctgcaatcacacatgctgtgcttttgcccacaggaactctctgcccaacttcaaccacacctgcaggccattgcccagctattcccatcacaggaactcccacrggacwgcagaaacccacctgggagagccacaatggaagcagctgggtgaacgtccgtctctactgcttgccaggattttctctcctctcacttcctccttcatcaatttgttgttctccatgctctgtattcctacctggaagtggaaaccagcatccccaagtttccttctgaaaatgctgttcccgcagtatttgctctttgactggcatcagtggttttggggagatttccgagcagtctgttcatgcacaactctgccaaattttgcagatgttaggaagttcagataagacaagaacca

SEQ ID NO: 68183 - DNA, 600 bp, Chicken  19866894338917_3
tcatcaatttgttgttctccatgctctgtattcctacctggaagtggaaaccagcatccccaagtttccttctgaaaatgctgttcccgcagtatttgctctttgactggcatcagtggttttggggagatttccgagcagtctgttcatgcacaactctgccaaattttgcagatgttaggaagttcagataagacaagaaccaggcagagctctctgcaaaatcccccacacttctgatctccaccatggcctctccccccaaagcttctggccctggcatgaaaacaggacagaggrrgagtgtggatcwcagaagtcattactagttttcaaccgagaagattcactgatcctattgtgaacagtctgcttcagctggagcctccagaaacacgcacacagccttattctgtctgtgcgtgaaggcaataagaaccccagtttggaaaccagttagcagtacaagtcattaggggaggtactaaatgttgctgctttaatagctcactgatcatttaataatgtcgctgctgcagagcatggtggcaccattcgcctgcttttgttttgctttttgaaattcagggtcattccgct

SEQ ID NO: 68184 - DNA, 600 bp, Chicken  19866894338917_4
catcaatttgttgttctccatgctctgtattcctacctggaagtggaaaccagcatccccaagtttccttctgaaaatgctgttcccgcagtatttgctctttgactggcatcagtggttttggggagatttccgagcagtctgttcatgcacaactctgccaaattttgcagatgttaggaagttcagataagacaagaaccaggcagagctctctgcaaaatcccccacacttctgatctccaccatggcctctccccccaaagcttctggccctggcatgaaaacaggacagaggrrgagtgtggatcwcagaagtcattactagttttcaaccgagaagattcactgatcctattgtgaacagtctgcttcagctggagcctccagaaacacgcacacagccttattctgtctgtgcgtgaaggcaataagaaccccagtttggaaaccagttagcagtacaagtcattaggggaggtactaaatgttgctgctttaatagctcactgatcatttaataatgtcgctgctgcagagcatggtggcaccattcgcctgcttttgttttgctttttgaaattcagggtcattccgctt

SEQ ID NO: 68185 - DNA, 600 bp, Chicken  19866894338917_5
gttctccatgctctgtattcctacctggaagtggaaaccagcatccccaagtttccttctgaaaatgctgttcccgcagtatttgctctttgactggcatcagtggttttggggagatttccgagcagtctgttcatgcacaactctgccaaattttgcagatgttaggaagttcagataagacaagaaccaggcagagctctctgcaaaatcccccacacttctgatctccaccatggcctctccccccaaagcttctggccctggcatgaaaacaggacagaggrrgagtgtggatcwcagaagtcattactagttttcaaccgagaagattcactgatcctattgtgaacagtctgcttcagctggagcctccagaaacacgcacacagccttattctgtctgtgcgtgaaggcaataagaaccccagtttggaaaccagttagcagtacaagtcattaggggaggtactaaatgttgctgctttaatagctcactgatcatttaataatgtcgctgctgcagagcatggtggcaccattcgcctgcttttgttttgctttttgaaattcagggtcattccgctttgaagtgagtgg

SEQ ID NO: 68186 - DNA, 600 bp, Chicken  19866894338933_1
caagcagcatctaacagttgtgggagttgtgtataggctttaaaatctaaaagtgtgtctttgcagactgctctctagacaggaactgttaagttttatactttgtgttttgttaatgattgacttcaaacattgctgaagagttctctatttagcaccgttactactaggactaagtacatgctagtctgtcagtgtaggtcagaaacaacccacactagaaacagctgaggagaggggaaaggaggttcatttttccaagatcttttctgctttgttaacattagatatgaacagtcrcagtcttttctttaaaacatttgagaccaaggactggggctctgtctgaaagatggaatgaaatacgcagatttcagagagggtttctaactgggactaagattctgaattatgtgttaatcgtgtctaaagtaaaagataattatagcaaattcagttactgatctctataaaccttgggttttcattaaccgttctttttaagcattgcaagtaaatctaggaacagtgtgtatcttgtcatggacaaaggtgaaagataatgtactcagatgctctaaatttagctgacaatggata

SEQ ID NO: 68187 - DNA, 600 bp, Chicken  19866894338945_1
gcatccaggcaggtattgaatatctccgtagaagaagactctacaatctctctgggcaacctgttccaggcaccatcacctttaccataaagaagttcttctgcgtgtttgcatggaccttcctacatttaagttttagaccattgctccttgtctggagagaaaaggctagcagtagacagggccagggaaatctccctaacacatctgcagtggatggaattggccagcgtttcaccttctgcgtgggttctttcatggaattgtaacaggcacgttccataggttcctcctactctktatgacttmtgttttcaagagaaaaaggaagcaaagataaagcaaaggtaagaagtaaggagaggagaactatgcttactgcctccccagaccgtaattgtatagcagctaakgttgggaaggatctctggaggtcatacagtatttaaatggagtagaagaaggtaagctcatatgacacatacttgcccgctagtaggtccctagcctgcactggattgttctgctccagatgctaaactctgcayttcttgctaaacttcacgaggttttcactggcccagatcccaggttttacag

SEQ ID NO: 68188 - DNA, 600 bp, Chicken  19866894338945_2
caggtattgaatatctccgtagaagaagactctacaatctctctgggcaacctgttccaggcaccatcacctttaccataaagaagttcttctgcgtgtttgcatggaccttcctacatttaagttttagaccattgctccttgtctggagagaaaaggctagcagtagacagggccagggaaatctccctaacacatctgcagtggatggaattggccagcgtttcaccttctgcgtgggttctttcatggaattgtaacaggcacgttccataggttcctcctactctktatgacttmtgttttcaagagaaaaaggaagcaaagataaagcaaaggtaagaagtaaggagaggagaactatgcttactgcctccccagaccgtaattgtatagcagctaakgttgggaaggatctctggaggtcatacagtatttaaatggagtagaagaaggtaagctcatatgacacatacttgcccgctagtaggtccctagcctgcactggattgttctgctccagatgctaaactctgcayttcttgctaaacttcacgaggttttcactggcccagatcccaggttttacagtgctgttct

SEQ ID NO: 68189 - DNA, 600 bp, Chicken  19866894338945_3
tggaccttcctacatttaagttttagaccattgctccttgtctggagagaaaaggctagcagtagacagggccagggaaatctccctaacacatctgcagtggatggaattggccagcgtttcaccttctgcgtgggttctttcatggaattgtaacaggcacgttccataggttcctcctactctktatgacttmtgttttcaagagaaaaaggaagcaaagataaagcaaaggtaagaagtaaggagaggagaactatgcttactgcctccccagaccgtaattgtatagcagctaakgttgggaaggatctctggaggtcatacagtatttaaatggagtagaagaaggtaagctcatatgacacatacttgcccgctagtaggtccctagcctgcactggattgttctgctccagatgctaaactctgcayttcttgctaaacttcacgaggttttcactggcccagatcccaggttttacagtgctgttctgtcaccccgcacagcaagcctttctctrcccaatgcacagtttaatgcctcccacgcaacagttgaaggtacacactggctcatcacccaagatcagggatatc

SEQ ID NO: 68190 - DNA, 600 bp, Chicken  19866894338945_4
ggttctttcatggaattgtaacaggcacgttccataggttcctcctactctktatgacttmtgttttcaagagaaaaaggaagcaaagataaagcaaaggtaagaagtaaggagaggagaactatgcttactgcctccccagaccgtaattgtatagcagctaakgttgggaaggatctctggaggtcatacagtatttaaatggagtagaagaaggtaagctcatatgacacatacttgcccgctagtaggtccctagcctgcactggattgttctgctccagatgctaaactctgcayttcttgctaaacttcacgaggttttcactggcccagatcccaggttttacagtgctgttctgtcaccccgcacagcaagcctttctctrcccaatgcacagtttaatgcctcccacgcaacagttgaaggtacacactggctcatcacccaagatcagggatatcgaataatgctgaccccttgcatcaccctgcttgtcacgctgtgccacttggtgtcaagccattgcttacttacttttgagtccagaaggtcaaagggcctccaatctgcctgccaggcccttcatccagcccatg

SEQ ID NO: 68191 - DNA, 600 bp, Chicken  19866894338945_5
taaagcaaaggtaagaagtaaggagaggagaactatgcttactgcctccccagaccgtaattgtatagcagctaakgttgggaaggatctctggaggtcatacagtatttaaatggagtagaagaaggtaagctcatatgacacatacttgcccgctagtaggtccctagcctgcactggattgttctgctccagatgctaaactctgcayttcttgctaaacttcacgaggttttcactggcccagatcccaggttttacagtgctgttctgtcaccccgcacagcaagcctttctctrcccaatgcacagtttaatgcctcccacgcaacagttgaaggtacacactggctcatcacccaagatcagggatatcgaataatgctgaccccttgcatcaccctgcttgtcacgctgtgccacttggtgtcaagccattgcttacttacttttgagtccagaaggtcaaagggcctccaatctgcctgccaggcccttcatccagcccatgtttctcagcattcagatgagagtcctgtgtgaggccacgtcaaaagttattttggagacaagacatatccacgactgtccccatgtctc

SEQ ID NO: 68192 - DNA, 600 bp, Chicken  19866894338948_1
aatctataattatcattactaattccacttaattagtcacaagccagcagccaaattggctttctcataattatcagataagcagtaagcacatctcatagattataattaacactgcttaattaaaatctaatatacatacaccctttcctcggcgtatgcctaattgggttcatgaacagaggggtgcaaagcccctgtcctgtcccccctcccctcaagaaggtttgctcagtgccatgaagttggttgagcttgcagtgaagtttgtgcccaggctgtgctctctgggggtaaaaktagtggaaagcttggaaatgarcccaaaaaggggcactctgtgcctgcagggtgctgtgcagccctcagctggatgggttctggaggtgcacggagctgagctgtagcatcagtgtggtgagttggctcatcaggagggggaaaggggcagagagggaggagctcaccctgctgtgagaggcgyacacctgagttcgagtgcttgttgagcaggaattggggctggatgggttttgggacaagctgctttcatcctgcccttgctcatgaacaccttccttgcccttctgtctttgtttt

SEQ ID NO: 68193 - DNA, 600 bp, Chicken  19866894338948_2
ttccacttaattagtcacaagccagcagccaaattggctttctcataattatcagataagcagtaagcacatctcatagattataattaacactgcttaattaaaatctaatatacatacaccctttcctcggcgtatgcctaattgggttcatgaacagaggggtgcaaagcccctgtcctgtcccccctcccctcaagaaggtttgctcagtgccatgaagttggttgagcttgcagtgaagtttgtgcccaggctgtgctctctgggggtaaaaktagtggaaagcttggaaatgarcccaaaaaggggcactctgtgcctgcagggtgctgtgcagccctcagctggatgggttctggaggtgcacggagctgagctgtagcatcagtgtggtgagttggctcatcaggagggggaaaggggcagagagggaggagctcaccctgctgtgagaggcgyacacctgagttcgagtgcttgttgagcaggaattggggctggatgggttttgggacaagctgctttcatcctgcccttgctcatgaacaccttccttgcccttctgtctttgttttctttaaaacaccttgactagaa

SEQ ID NO: 68194 - DNA, 600 bp, Chicken  19866894338948_3
gggtgcaaagcccctgtcctgtcccccctcccctcaagaaggtttgctcagtgccatgaagttggttgagcttgcagtgaagtttgtgcccaggctgtgctctctgggggtaaaaktagtggaaagcttggaaatgarcccaaaaaggggcactctgtgcctgcagggtgctgtgcagccctcagctggatgggttctggaggtgcacggagctgagctgtagcatcagtgtggtgagttggctcatcaggagggggaaaggggcagagagggaggagctcaccctgctgtgagaggcgyacacctgagttcgagtgcttgttgagcaggaattggggctggatgggttttgggacaagctgctttcatcctgcccttgctcatgaacaccttccttgcccttctgtctttgttttctttaaaacaccttgactagaaaaaaggcatctccccaatgcacgatgaactcacacaagatactcttctgagttaagtattttttattattattgttattgctccagctgtgacctctccatctctgctgggatctgcaataataaagcagcttgaataaattacacttaaagaaggtggatg

SEQ ID NO: 68195 - DNA, 600 bp, Chicken  19866894338951_1
tgaacggggcaagaaaaatgcagattatttgacaggatccacaaaagggaagatagaggtgtaatttcattgacctctgggctgctctgatttacattagctgaggtaatgcccctattattttctgtcacctcaggtccagtaagttgaacacgtcccacattatgcaatgttgtgaaaatatgcattccggctttctcaggtgttggaaaaacagaacaaagctttgcatttgactttcagtgaattttctactctgttttgaaacacattttatcctgaggtcctctttcatgtgcygggaatggaacatttccttcaagagaaaagaatgctgccaaaaacagcaaatgtgcagaaactggattttttttttcctagagaaagaaaaatgatgcataagttttattattacaaatcatagctcagttatttgtttcacctctctgacagataggctagtgctcagcaggagaaagtgctgtaaataatcagtttgctatttatacactgaaatgaggaaacatatttataggaaacaataataattagaaaacatttataaaaatctgctgggttgctatttggtgtctgtggagt

SEQ ID NO: 68196 - DNA, 600 bp, Chicken  19866894338953_1
ggctctaaatggaaaatacacattgacaagcaatgccttatcacatcatttcttcatgattgttatgattgttatgcacagctatgaacattcagaaacacacttaatgtctctataatacgttaaagaagtggtaataatatattacataaagtgattggatagcacatacataatactgacgaatttatttaatcaaattaagaatgccacaaaagagttattttccagctattttggattgaaatgatcactgctggaagtctaatttaaatttttatgattagattatgataaccrttgctattctgaattaaacatatatggtcctagaagtctatacaagcaccaattaatctatcctgagattattggaacaagtaaatgtatctactgttgaatattttattaacttttcattttaataagatacctcccttaggacagagttttcctcacactggactctgacaagttctcatgatgccacggtctccttactaattggatgatctacaaagaaaagaatcttggttattatctgccacttagttgttgagacccacaagtttctgaagaaactgtgctcatagatctacc

SEQ ID NO: 68197 - DNA, 600 bp, Chicken  19866894338959_1
aagcaaagctcattcagattagataaagcatgcttttccatgaaactggtaaagaaaaacgtggacataaaaaagtacagagacaccacaatgacaccactggacagaagagcccacctaccatgtgaatatccaggcaaggactgattcccctttgattggcttctccttgcaagtttgcatatgttaatacacattttgatgttcccaagtattgcctagcacaatacttttattatcagtatttctcaactttgattagaaacaaagtcagttctgttctcttgtgaaagcagcacraggcgtcgttttattgtgtgtaaaagattgatggagtatgcagacagctcaacaagccaaggctctaagagcaagaacatgagagtctgagtggagcagaaatagaaattgtatcattgtcatatacagtgaacaagagtgcttgaatacaaggatggtaaaaaggtcttaacctgtgtatcccaaggcaggacatggaaggggttttcaagcccagtgaagagtattgttggtcactgaaggaggctacaagatctactctggaataagcatggacaaaaaacacaggatgctgacccc

SEQ ID NO: 68198 - DNA, 600 bp, Chicken  19866894338959_2
tgcagacagctcaacaagccaaggctctaagagcaagaacatgagagtctgagtggagcagaaatagaaattgtatcattgtcatatacagtgaacaagagtgcttgaatacaaggatggtaaaaaggtcttaacctgtgtatcccaaggcaggacatggaaggggttttcaagcccagtgaagagtattgttggtcactgaaggaggctacaagatctactctggaataagcatggacaaaaaacacaggatgctgacccctggacatctggggtcttaaaaagtcttttaagtaaaawtgtatgatgttttaaaggcattagaaagagtgtattgcttatgggaaaggaggagttaatggggagggcagtctgggctagaagaatgttggacagcaggcagcagcacatgagagcacgtgaagataagagcagtgcattaggggaaaacaacaagtgctgtggaggtcttactagcagggacaaggccgaggaatgtatgttgattgcaggggaaaaacagctgcagctatgaggggatggtgtgggtggaagaatagaatgagaaatttcagatataaagcaatgagagagcaaaaa

SEQ ID NO: 68199 - DNA, 600 bp, Chicken  19866894338961_1
ttgtgttatttggaggcaaacatgcaaaaaagactgcaacgccagattgcagctcaatgaaatgaaggcaaaacagggtctgcacaagcacagaggtgtaaaacgatggcagaagagcatctgtggctgggatgcacccgtctggctgtgcagatcacagcagcaggcacagccccaatgccacaggcccaaagggtcctccagtgcccagcaaacagtgggggttccccagcacaggatcagggcagcagaaaccccagtttctgggctcacccatcactttgctcctgaggccagggycacggagtgtgaaaaagctgaaaaagccttctgtggagcagggacggttttctcctattcacacacgcacacacacacacagaaaaaaaaaaaaatcccaaccccaaacgtgctcgtaaggagaagcaaagatcagaaatactgtaagcagtggagacgaagcaccaaaaatagcacccgaagttccctctgtgtgctccctgtaggcagccggctctatatttgtcttcacttgccgttctgctgcaatcaatttacagttgccgctggcgargaacccatctattaaaagccaggctg

SEQ ID NO: 68200 - DNA, 586 bp, Chicken  19866894338961_2
catcactttgctcctgaggccagggycacggagtgtgaaaaagctgaaaaagccttctgtggagcagggacggttttctcctattcacacacgcacacacacacacagaaaaaaaaaaaaatcccaaccccaaacgtgctcgtaaggagaagcaaagatcagaaatactgtaagcagtggagacgaagcaccaaaaatagcacccgaagttccctctgtgtgctccctgtaggcagccggctctatatttgtcttcacttgccgttctgctgcaatcaatttacagttgccgctggcgargaacccatctattaaaagccaggctgggatctgcagagaagatgtctgcaataaaatatttggccattttcatagaaaaacccaagcgcctcttgcggagcccccagccgcagccccatgcatggggccatcgtgctgctccggccgtgccccactgcactgctggccgctcacctgtgcagctccagccaaggtgcagcacatggcccgaagtctgggggagaaagatttgctctgcagctgcttggaggcctggaagcatttggcattttctgcctgctggctc

SEQ ID NO: 68201 - DNA, 600 bp, Chicken  19866894338962_1
gcagaagcaaggtaataagaactgtgaagagcacaaaagctcaaaactacacctgagtagtattaaacatcctagggaaagaaatacttgttggataagtcctacagtcattgaaatcactgcagaagaatcttacagctgactaagtccatcacctatgatatgagaagcttgtacaggtaaacatccttggaagctcattcctttttcacaaaagctcttaaaaaggaaactaaaaatagtggtgatgttcttgataaattcctaatagttgccaaatcttcaacctaagtgattgtrctgaaggctaagagatctgtaaatcagtgcagtagcttcttattggaatgcaagatmawttttcactaattttccctgctttgtagatcacaaagccaaaagaaacatacagaastaagagttgtcatcttatcttcctaaacacagaagagaatgtacttagagtaacttcacaatattttgtctgtatgcatattccactgtgagttcagagatttttatacaagaactacccagtcagcatgcacacactctgttatttcttaatttctgtctaactctgcagatgcacaaatacaa

SEQ ID NO: 68202 - DNA, 600 bp, Chicken  19866894338962_2
tagtattaaacatcctagggaaagaaatacttgttggataagtcctacagtcattgaaatcactgcagaagaatcttacagctgactaagtccatcacctatgatatgagaagcttgtacaggtaaacatccttggaagctcattcctttttcacaaaagctcttaaaaaggaaactaaaaatagtggtgatgttcttgataaattcctaatagttgccaaatcttcaacctaagtgattgtrctgaaggctaagagatctgtaaatcagtgcagtagcttcttattggaatgcaagatmawttttcactaattttccctgctttgtagatcacaaagccaaaagaaacatacagaastaagagttgtcatcttatcttcctaaacacagaagagaatgtacttagagtaacttcacaatattttgtctgtatgcatattccactgtgagttcagagatttttatacaagaactacccagtcagcatgcacacactctgttatttcttaatttctgtctaactctgcagatgcacaaatacaaaggatggtcagaataaggaaagaggtggcaaaacaaaagagatgaactctgtattaa

SEQ ID NO: 68203 - DNA, 600 bp, Chicken  19866894338962_3
gtattaaacatcctagggaaagaaatacttgttggataagtcctacagtcattgaaatcactgcagaagaatcttacagctgactaagtccatcacctatgatatgagaagcttgtacaggtaaacatccttggaagctcattcctttttcacaaaagctcttaaaaaggaaactaaaaatagtggtgatgttcttgataaattcctaatagttgccaaatcttcaacctaagtgattgtrctgaaggctaagagatctgtaaatcagtgcagtagcttcttattggaatgcaagatmawttttcactaattttccctgctttgtagatcacaaagccaaaagaaacatacagaastaagagttgtcatcttatcttcctaaacacagaagagaatgtacttagagtaacttcacaatattttgtctgtatgcatattccactgtgagttcagagatttttatacaagaactacccagtcagcatgcacacactctgttatttcttaatttctgtctaactctgcagatgcacaaatacaaaggatggtcagaataaggaaagaggtggcaaaacaaaagagatgaactctgtattaaaa

SEQ ID NO: 68204 - DNA, 600 bp, Chicken  19866894338962_4
atcactgcagaagaatcttacagctgactaagtccatcacctatgatatgagaagcttgtacaggtaaacatccttggaagctcattcctttttcacaaaagctcttaaaaaggaaactaaaaatagtggtgatgttcttgataaattcctaatagttgccaaatcttcaacctaagtgattgtrctgaaggctaagagatctgtaaatcagtgcagtagcttcttattggaatgcaagatmawttttcactaattttccctgctttgtagatcacaaagccaaaagaaacatacagaastaagagttgtcatcttatcttcctaaacacagaagagaatgtacttagagtaacttcacaatattttgtctgtatgcatattccactgtgagttcagagatttttatacaagaactacccagtcagcatgcacacactctgttatttcttaatttctgtctaactctgcagatgcacaaatacaaaggatggtcagaataaggaaagaggtggcaaaacaaaagagatgaactctgtattaaaaaagaaatctagacgtgtgcatacacacayggaggggcaagtagcttctttctctyt

SEQ ID NO: 68205 - DNA, 600 bp, Chicken  19866894338962_5
cacaaagccaaaagaaacatacagaastaagagttgtcatcttatcttcctaaacacagaagagaatgtacttagagtaacttcacaatattttgtctgtatgcatattccactgtgagttcagagatttttatacaagaactacccagtcagcatgcacacactctgttatttcttaatttctgtctaactctgcagatgcacaaatacaaaggatggtcagaataaggaaagaggtggcaaaacaaaagagatgaactctgtattaaaaaagaaatctagacgtgtgcatacacacayggaggggcaagtagcttctttctctytagtgcttatcacatgcatgtttcttgttcacctttaggctgmtctcagagatgatgtatatgaaaagtggctagagaaacacagcctgtaacaacgtcttgtttcacaagagggccaaccagcatatctggaactgaagatttcaaaggagacagtaagtatagcccagggctctcatcactactggtggatcaactctctcagttctggwgcagacaggcagcctgaagttcatttggactgcctcccaacatggagattattaccttattc

SEQ ID NO: 68206 - DNA, 600 bp, Chicken  19866894338962_6
staagagttgtcatcttatcttcctaaacacagaagagaatgtacttagagtaacttcacaatattttgtctgtatgcatattccactgtgagttcagagatttttatacaagaactacccagtcagcatgcacacactctgttatttcttaatttctgtctaactctgcagatgcacaaatacaaaggatggtcagaataaggaaagaggtggcaaaacaaaagagatgaactctgtattaaaaaagaaatctagacgtgtgcatacacacayggaggggcaagtagcttctttctctytagtgcttatcacatgcatgtttcttgttcacctttaggctgmtctcagagatgatgtatatgaaaagtggctagagaaacacagcctgtaacaacgtcttgtttcacaagagggccaaccagcatatctggaactgaagatttcaaaggagacagtaagtatagcccagggctctcatcactactggtggatcaactctctcagttctggwgcagacaggcagcctgaagttcatttggactgcctcccaacatggagattattaccttattcaaaagagctgaagtacaaactaccac

SEQ ID NO: 68207 - DNA, 600 bp, Chicken  19866894338962_7
acttagagtaacttcacaatattttgtctgtatgcatattccactgtgagttcagagatttttatacaagaactacccagtcagcatgcacacactctgttatttcttaatttctgtctaactctgcagatgcacaaatacaaaggatggtcagaataaggaaagaggtggcaaaacaaaagagatgaactctgtattaaaaaagaaatctagacgtgtgcatacacacayggaggggcaagtagcttctttctctytagtgcttatcacatgcatgtttcttgttcacctttaggctgmtctcagagatgatgtatatgaaaagtggctagagaaacacagcctgtaacaacgtcttgtttcacaagagggccaaccagcatatctggaactgaagatttcaaaggagacagtaagtatagcccagggctctcatcactactggtggatcaactctctcagttctggwgcagacaggcagcctgaagttcatttggactgcctcccaacatggagattattaccttattcaaaagagctgaagtacaaactaccacacatttctacactaatcctgtggaggtaagcatctacaggtga

SEQ ID NO: 68208 - DNA, 600 bp, Chicken  19866894338962_8
ggcaaaacaaaagagatgaactctgtattaaaaaagaaatctagacgtgtgcatacacacayggaggggcaagtagcttctttctctytagtgcttatcacatgcatgtttcttgttcacctttaggctgmtctcagagatgatgtatatgaaaagtggctagagaaacacagcctgtaacaacgtcttgtttcacaagagggccaaccagcatatctggaactgaagatttcaaaggagacagtaagtatagcccagggctctcatcactactggtggatcaactctctcagttctggwgcagacaggcagcctgaagttcatttggactgcctcccaacatggagattattaccttattcaaaagagctgaagtacaaactaccacacatttctacactaatcctgtggaggtaagcatctacaggtgataagcgtttctaagctaaagcaaacctaagcctgttatatacacaattctgagaaaacaaatatacagctctgtacatgcacacattttgggcaaaataaagcccatcatagtggacttcatagttattacagatccttgtcccatgcaaaaacttaggataaggccct

SEQ ID NO: 68209 - DNA, 600 bp, Chicken  19866894338967_1
cgtactgcggctgctgcaaaacagttctgatctgtatgttttgaatagtctggagaagtggaaatgctttgctgcttaactcatttttggttaaactgatcagggatcagatgtctgctgagactttggtaacactttttagagctttgatctgaagcacatgatcatctttcctcacagcattagaagtagaaagaacaaccagaatttttaaagcacttcagagaaatgctgaaggcacatccacagttttattagcaaatcacctgatatttttcctacagtgctttctctagcagmagtcctagggagaaggatacttacacgcarttttaaagggagctgtctttaaacarcccttcaacctgaaggtgaagaaataaaccaataaagaaccaaacatatcatcatcctgtgcaggaaatggattagtgaagctccaaccaaacaggtttccaacacttcagtgtttgatgaacacagcttcgtctgcagaggaaagatttctcacgtcagtctgaaatgttgtatattctaaaaggagtttttagcttagatcaaattacaaataatgaaaaatgagacactgggaaatattct

SEQ ID NO: 68210 - DNA, 600 bp, Chicken  19866894338967_2
tctgtatgttttgaatagtctggagaagtggaaatgctttgctgcttaactcatttttggttaaactgatcagggatcagatgtctgctgagactttggtaacactttttagagctttgatctgaagcacatgatcatctttcctcacagcattagaagtagaaagaacaaccagaatttttaaagcacttcagagaaatgctgaaggcacatccacagttttattagcaaatcacctgatatttttcctacagtgctttctctagcagmagtcctagggagaaggatacttacacgcarttttaaagggagctgtctttaaacarcccttcaacctgaaggtgaagaaataaaccaataaagaaccaaacatatcatcatcctgtgcaggaaatggattagtgaagctccaaccaaacaggtttccaacacttcagtgtttgatgaacacagcttcgtctgcagaggaaagatttctcacgtcagtctgaaatgttgtatattctaaaaggagtttttagcttagatcaaattacaaataatgaaaaatgagacactgggaaatattctcctctttattcctgaggtaatacaaaaatc

SEQ ID NO: 68211 - DNA, 600 bp, Chicken  19866894338967_3
agtggaaatgctttgctgcttaactcatttttggttaaactgatcagggatcagatgtctgctgagactttggtaacactttttagagctttgatctgaagcacatgatcatctttcctcacagcattagaagtagaaagaacaaccagaatttttaaagcacttcagagaaatgctgaaggcacatccacagttttattagcaaatcacctgatatttttcctacagtgctttctctagcagmagtcctagggagaaggatacttacacgcarttttaaagggagctgtctttaaacarcccttcaacctgaaggtgaagaaataaaccaataaagaaccaaacatatcatcatcctgtgcaggaaatggattagtgaagctccaaccaaacaggtttccaacacttcagtgtttgatgaacacagcttcgtctgcagaggaaagatttctcacgtcagtctgaaatgttgtatattctaaaaggagtttttagcttagatcaaattacaaataatgaaaaatgagacactgggaaatattctcctctttattcctgaggtaatacaaaaatccctccatcaaactggtgatttttttt

SEQ ID NO: 68212 - DNA, 600 bp, Chicken  19866894338973_1
tgaggtaaccaacctgaaacactttttgcatatgaaaaagtaagacctccaaacataaagcaattttctttttcaacactgaaagacatgcaagtgaatgtaaagtggggatttcttccagtccccaggttacacggttagcagcttattaaaaatgtacattcattgtaacattatttcttccacagtatgtgtaatacaaacgagttgcaatacatcaaataatacttaggaacatttcccataaatgattctttgtgctgtcccatgaaacagcagttgtgatctgtgtgttacagygacccaaacacaaaacacatgatatagaaatgcaacagaaaggaaggtagtaccgcaatgatcggccctcacgcattttgtttcatgttttaacattacccaaaataggtgtttgcatactaatatgttatgacccawgtggcagcaccrttcctatcaaccgaacgttgccaccagccgatggtgaaggaggagatatgaatgccacaagacaccagatgaacaaaactgggctgagccgtgttgctgaaagcatttgctcacatctgcaacatgcaaaggagaccagttgcgccattt

SEQ ID NO: 68213 - DNA, 600 bp, Chicken  19866894338973_2
tagcagcttattaaaaatgtacattcattgtaacattatttcttccacagtatgtgtaatacaaacgagttgcaatacatcaaataatacttaggaacatttcccataaatgattctttgtgctgtcccatgaaacagcagttgtgatctgtgtgttacagygacccaaacacaaaacacatgatatagaaatgcaacagaaaggaaggtagtaccgcaatgatcggccctcacgcattttgtttcatgttttaacattacccaaaataggtgtttgcatactaatatgttatgacccawgtggcagcaccrttcctatcaaccgaacgttgccaccagccgatggtgaaggaggagatatgaatgccacaagacaccagatgaacaaaactgggctgagccgtgttgctgaaagcatttgctcacatctgcaacatgcaaaggagaccagttgcgccatttgaaccagacaccatgaagacacttcctttaactgagtgagattctttctttacagcagtcttttgagcacttggttgtgtgcaaagtgatccattaccagcacagaaacgcttctgtaaggcgtaaccacgcatgggc

SEQ ID NO: 68214 - DNA, 600 bp, Chicken  19866894338973_3
aaaaatgtacattcattgtaacattatttcttccacagtatgtgtaatacaaacgagttgcaatacatcaaataatacttaggaacatttcccataaatgattctttgtgctgtcccatgaaacagcagttgtgatctgtgtgttacagygacccaaacacaaaacacatgatatagaaatgcaacagaaaggaaggtagtaccgcaatgatcggccctcacgcattttgtttcatgttttaacattacccaaaataggtgtttgcatactaatatgttatgacccawgtggcagcaccrttcctatcaaccgaacgttgccaccagccgatggtgaaggaggagatatgaatgccacaagacaccagatgaacaaaactgggctgagccgtgttgctgaaagcatttgctcacatctgcaacatgcaaaggagaccagttgcgccatttgaaccagacaccatgaagacacttcctttaactgagtgagattctttctttacagcagtcttttgagcacttggttgtgtgcaaagtgatccattaccagcacagaaacgcttctgtaaggcgtaaccacgcatgggcattcacactcca

SEQ ID NO: 68215 - DNA, 600 bp, Chicken  19866894338991_1
gctgagcagatggggctccactcttcagtcctttgcagatttgttacatgcctgaggtcatccaggtccttgaaatcagtgggagtcaggaagctaaaggtttgtgagaccctgcttataaagtgctggagcttctgtggcttaacaaatgacagtctgtcagcaaggctggagtacctaatcacaggcactcttcatctgctctgaaaataaaataccttgcatgggagagtggtccaagaatgtttgtgtggacagttattagggatcagctgatgggtggtgaccctgtaagccacmgtaaatcaattgctttctgttatttcccatyctctcagctgctttctgatcttcaaaataacagtgtttgcagtcctggggtctgagaggatcacacacaaatgattgtaaaacactgatgttgcaggtagtgatgatgccccataggtattctccggtgtcccctgctgagatggtacagtaatagaaaaaaagtgagtaaatgcccttcctgggtgtataaacaaactgtgcagattatccaccacatcacacctaggtttagaagcaccatacggcactgcttggcagacacttggc

SEQ ID NO: 68216 - DNA, 600 bp, Chicken  19866894338991_2
tttgcagatttgttacatgcctgaggtcatccaggtccttgaaatcagtgggagtcaggaagctaaaggtttgtgagaccctgcttataaagtgctggagcttctgtggcttaacaaatgacagtctgtcagcaaggctggagtacctaatcacaggcactcttcatctgctctgaaaataaaataccttgcatgggagagtggtccaagaatgtttgtgtggacagttattagggatcagctgatgggtggtgaccctgtaagccacmgtaaatcaattgctttctgttatttcccatyctctcagctgctttctgatcttcaaaataacagtgtttgcagtcctggggtctgagaggatcacacacaaatgattgtaaaacactgatgttgcaggtagtgatgatgccccataggtattctccggtgtcccctgctgagatggtacagtaatagaaaaaaagtgagtaaatgcccttcctgggtgtataaacaaactgtgcagattatccaccacatcacacctaggtttagaagcaccatacggcactgcttggcagacacttggcaatatttagtgacgatgctagctatatataa

SEQ ID NO: 68217 - DNA, 600 bp, Chicken  19866894338991_3
taacagtgtttgcagtcctggggtctgagaggatcacacacaaatgattgtaaaacactgatgttgcaggtagtgatgatgccccataggtattctccggtgtcccctgctgagatggtacagtaatagaaaaaaagtgagtaaatgcccttcctgggtgtataaacaaactgtgcagattatccaccacatcacacctaggtttagaagcaccatacggcactgcttggcagacacttggcaatatttagtgacgatgctagctatatataatggaattacagagggtgtgagaaagcwgcacctcctcccatctgcccccttaagggaagcaaatgctttgctataacactgttccctgagagctagaactttagcaaataagggttgttaataagatttcattttctcactaatgctgtggtgctacattattaatttaaaactgtatttagcctgacatgctaaagtgctaggcctcattattaatgcataaacctatgcctctgttgtttaattaaacaccatgattatgaagttctgatgtggtttaatgatagcaggctggagtggcagaacattcctgtgctcagatctccc

SEQ ID NO: 68218 - DNA, 600 bp, Chicken  19866894338996_1
agcgaggtaagaaggtatagggatgtgatggactatagggatgtgattgtttttctgtccaaaagaagcagcaaacgcagcttgctttaatggaaaatcagagtgcagcagtgctgctggaaatgagggcaggctgtggcttgctgaagaccagcagtggttagaggcagcagttttatactggctggagtgttctcagcatctccattacaaattaaaaaaaaaaaagactcattgtttcatgctgttgagtagaaaaatacaaagctgttccctctttgggatggctgagggagaaayagtaatgacgtaagggaatagcagtctgaactgctgcagcagagctcatgctgcaagcagcctttgtgctgaggcactgtgcaaaggctcaggtgcacaccggggtgaggggggaatcgtttgggagcagaacacattcattgcattctgcctggcaccacaaggacgtgatcctgagttgggctgtgccacccctgactgatgattgccatctgcagttctaacagtgctccacgacttactaatgcttgctgagagcatgcacctctcctgatttcgaaggagaatctttggaatgca

SEQ ID NO: 68219 - DNA, 599 bp, Chicken  19866894339000_1
  misc_feature (1)..(223): n is any nucleotide
nnnnnnnnnnnnnnnnnnnnnnnnnnnnnnnnnnnnnnnnnnnnnnnnnnnnnnnnnnnnnnnnnnnnnnnnnnnnnnnnnnnnnnnnnnnnnnnnnnnnnnnnnnnnnnnnnnnnnnnnnnnnnnnnnnnnnnnnnnnnnnnnnnnnnnnnnnnnnnnnnnnnnnnnnnnnnnnnnnnnnnnnnnnnnnnnnnnnnnnnnnnnnnnnnnnnnnnnnnnnnnnaatggcttgagttggaagggacctcaaggatcatcagtctgcagcccccctgctacaggcagggctgccaacctccrtatctaatactagaccaggatgcctagggccccatccaacctggctttgatgcagtttatgcatagtttatgcacagtttatgcaagctagttcctgtcaagttgattttatgatctttgaagaaaatattcgggaaatagaaaaatatttgtggaaaacaaaacctgttttttccttgcaatgtcattctctattttaattttacccattggtttcttaggacaaattatctccgatattcctttttttccaggaaaatcacctggccatactatttaaacccaattattttcagaaa

SEQ ID NO: 68220 - DNA, 600 bp, Chicken  19866894339002_1
gtcctaaggaactgctatcaatcccatccaaactactgctcctgccacatcacgaggcccctgcagaggtcccagtgcccattcccacccacaaagaccatgcgcacccatccttcttgttaaactgctttaatatttggacatgaaaacaggacaaagccattcaggctgtgcacagacaagacgcccccgagccatggtttaaggctgcagggtttcccttctcaatggatgtgtagatttggccaagatgcagtttagctggtgacgtcctgagcgtgccaggggggtgcatgtgtrgggtagggtaagggggatgagggctccccaggcagctcagaggttgttcagctccagcaaggtctggtccaggacctggtgtatccccacattctcctctttggcactggccagactctctgtgaacacaagggacacccagccacacagcaggatgcacacgcagacacagtagaagcacacccaggcacagccggacccacgcacaccacgccaagcacagacacacgcacacagacagacatctcagtgtggtgccagcagggatgtgcccagaccctcagggacccccagggacag

SEQ ID NO: 68221 - DNA, 600 bp, Chicken  19866894339004_1
tttttcatgaagttcccagatgactgcacactcctgaatgcagcaatctgtttaatccagttttagccttccttttcctgttttgctgtgtacttttcattccatgccagcagctattgaggcagcactgtgggtccattatctgttttgggcctcgtggaatatacgttggctttgctctgcgcgtgcctgcatgagagcgagggaataaacatacatgtggccaattagtacacttaaattaatgaagagcaatctatgaatctcgttattctgagaatttggaaatgctgagaatgytttccatgtagccttcaaaaacttccaaagcagctataaggtcacagtctaatactcacttctgtatacttatgccttttctaaaaatatttcccaacataatctgcagtatatggaacaggagggcagagggggaactgcagtgtttacgaccaaagtgcaaagatgggaaagaaatttaaacccacaaaaggcraatcttttgatctctgcctctttttcctcattataaacttcacagtaccagcagttatgtttkaactaaacactgagtttatggacccgtgtctctgtctgcag

SEQ ID NO: 68222 - DNA, 600 bp, Chicken  19866894339004_2
agagcgagggaataaacatacatgtggccaattagtacacttaaattaatgaagagcaatctatgaatctcgttattctgagaatttggaaatgctgagaatgytttccatgtagccttcaaaaacttccaaagcagctataaggtcacagtctaatactcacttctgtatacttatgccttttctaaaaatatttcccaacataatctgcagtatatggaacaggagggcagagggggaactgcagtgtttacgaccaaagtgcaaagatgggaaagaaatttaaacccacaaaaggcraatcttttgatctctgcctctttttcctcattataaacttcacagtaccagcagttatgtttkaactaaacactgagtttatggacccgtgtctctgtctgcagataacggaaggtcaagaggaactctcctcctgcctttgcagattttccttgaattgggacacccaaacaagtcagtgggagtctaaacaacactcgtgatctggatgcgtcgctgcttgtagtatgtcgaatatgatcaaagatgtctgctctggaaatacataaccctgatagaaaagtctgggtaacagcacag

SEQ ID NO: 68223 - DNA, 600 bp, Chicken  19866894339004_3
tgaatctcgttattctgagaatttggaaatgctgagaatgytttccatgtagccttcaaaaacttccaaagcagctataaggtcacagtctaatactcacttctgtatacttatgccttttctaaaaatatttcccaacataatctgcagtatatggaacaggagggcagagggggaactgcagtgtttacgaccaaagtgcaaagatgggaaagaaatttaaacccacaaaaggcraatcttttgatctctgcctctttttcctcattataaacttcacagtaccagcagttatgtttkaactaaacactgagtttatggacccgtgtctctgtctgcagataacggaaggtcaagaggaactctcctcctgcctttgcagattttccttgaattgggacacccaaacaagtcagtgggagtctaaacaacactcgtgatctggatgcgtcgctgcttgtagtatgtcgaatatgatcaaagatgtctgctctggaaatacataaccctgatagaaaagtctgggtaacagcacaggtagaagggcctctcatcccaacagagccagagctgtgtgttgcgagggccacaatgcccaag

SEQ ID NO: 68224 - DNA, 600 bp, Chicken  19866894339011_1
tgtctctctttagcattactttgctacctttcctcatacctgttgctacgtcttcgaaatgtaaaagcatttgtaaaattatgatgaagatccacttaaagcaacctccctgctcttgaagaattgctgggtgaggttttctgacacagacctacattatatccttatctctaaattggaggaatatggcataatactacagtgtgatggaaagcacagcaatggtagcagggtagcaaagtccaggctacagcaagtgaagagaagcccaaatgcagcagccacaaacacaaacaaagraaaaaaagaatctgcttacccttggaaggcctcagatatgcagggatgtccagcgagatctcctcacctccactgccagcccttaaatgagggctggggtgtgtggatcctgtctctagctcttccagtcacttggatgcattgcttacacccgagctccctgggttggccctgccttcccaccaggtgctccatcactgcttcaggctgagactcagcattcctgatacatatggatttggaggctgcatgtgggatcaatcaaagcaggctgataatctcaaaacaggaggcgttcac

SEQ ID NO: 68225 - DNA, 600 bp, Chicken  19866894339013_1
ggcttagtggagctctctgcacagtgctcatgaagggcccccttcctttttcttgcagagcatcccgaagccccggcttgccctgaactgcgttggaggcaggagcacgacggagatgctgcggcacctgcagtgagctgggctggggggtgggctcagagctgctccaggacagggcgtgtgggttggggtgtgatgggggagagctgcacctcggggaccgtgggcaacccaaggccccattcctcttgcagacccaaagggaccatggtgacctatggaggaatggcaaagcaaccsgtgacagtgccagtggtgagtacagggatgctcttgggtacctgtgcaggagttcagtgcatcctctgccactgctgtctggatgtcacattcagagcctccagattgggtttgttatgggatgagctgctttgcattctgctctgggtctcttggttgcacttacggaggatttggactgctctgaagtgcctgcactgaaacaaccccacagatgctgagtgtccaacttgtcctggtgcaaactgttcttgcatgctggggctgtgtgtgtctcyttgmtgtgaaactgggttttat

SEQ ID NO: 68226 - DNA, 513 bp, Chicken  19866894339013_2
tggaggaatggcaaagcaaccsgtgacagtgccagtggtgagtacagggatgctcttgggtacctgtgcaggagttcagtgcatcctctgccactgctgtctggatgtcacattcagagcctccagattgggtttgttatgggatgagctgctttgcattctgctctgggtctcttggttgcacttacggaggatttggactgctctgaagtgcctgcactgaaacaaccccacagatgctgagtgtccaacttgtcctggtgcaaactgttcttgcatgctggggctgtgtgtgtctcyttgmtgtgaaactgggttttatcccagtgagacacagctcagtgctgcagcacgtggtgtttcattagtgtgaacctgtcaaggcagatctgtcccaaattagagctccgagtgaggctcctcacactagcaaggactcgggaacaggttgaaggggacagatctcatctcctgtttctgcagagtgccttcatcttcagggatgtgaggctg

SEQ ID NO: 68227 - DNA, 509 bp, Chicken  19866894339013_3
ggaatggcaaagcaaccsgtgacagtgccagtggtgagtacagggatgctcttgggtacctgtgcaggagttcagtgcatcctctgccactgctgtctggatgtcacattcagagcctccagattgggtttgttatgggatgagctgctttgcattctgctctgggtctcttggttgcacttacggaggatttggactgctctgaagtgcctgcactgaaacaaccccacagatgctgagtgtccaacttgtcctggtgcaaactgttcttgcatgctggggctgtgtgtgtctcyttgmtgtgaaactgggttttatcccagtgagacacagctcagtgctgcagcacgtggtgtttcattagtgtgaacctgtcaaggcagatctgtcccaaattagagctccgagtgaggctcctcacactagcaaggactcgggaacaggttgaaggggacagatctcatctcctgtttctgcagagtgccttcatcttcagggatgtgaggctg

SEQ ID NO: 68228 - DNA, 600 bp, Chicken  19866894339014_1
aaactctgcagctcctgcctgaattgagctggaaggaaggaagagctgtaagaagttttagtttggagatgcatttttcttggctgggaaggtcacaaggttcagtattggtccctgggttcccttcagacttgtgcaatgcagggacatagtgcctagtcccccgctgcagttttaattaatccatcttttaaagacatggactgtaattagaagcaggttcctatcagtgtgaatactgaaccaggggaaggaaactgctaattaaaccaaagacatgttactggcattctcaaggarcacaggatgctcaggtcacagacttgtgcctgtgatggtagtaggtttcytgggactgctgagggaagaaacgctgtcagatattcatgaaagtcttttctagtgcacaaatagtaccacagattaatgactgatttttactgttttgtttgttttccctctccagggctactacgcatcatggatctccctttgtctgaatagctaaatyaggcagctttattttatttctttgtaatctgtttcccttgctgcttgatacacaatgagtcaacccattagagtttgtgctacttaaga

SEQ ID NO: 68229 - DNA, 600 bp, Chicken  19866894339014_2
agaagttttagtttggagatgcatttttcttggctgggaaggtcacaaggttcagtattggtccctgggttcccttcagacttgtgcaatgcagggacatagtgcctagtcccccgctgcagttttaattaatccatcttttaaagacatggactgtaattagaagcaggttcctatcagtgtgaatactgaaccaggggaaggaaactgctaattaaaccaaagacatgttactggcattctcaaggarcacaggatgctcaggtcacagacttgtgcctgtgatggtagtaggtttcytgggactgctgagggaagaaacgctgtcagatattcatgaaagtcttttctagtgcacaaatagtaccacagattaatgactgatttttactgttttgtttgttttccctctccagggctactacgcatcatggatctccctttgtctgaatagctaaatyaggcagctttattttatttctttgtaatctgtttcccttgctgcttgatacacaatgagtcaacccattagagtttgtgctacttaagaaaaatttaaattagtkatcaaaagcttaaaacaaacagtttttacactac

SEQ ID NO: 68230 - DNA, 600 bp, Chicken  19866894339014_3
agaagcaggttcctatcagtgtgaatactgaaccaggggaaggaaactgctaattaaaccaaagacatgttactggcattctcaaggarcacaggatgctcaggtcacagacttgtgcctgtgatggtagtaggtttcytgggactgctgagggaagaaacgctgtcagatattcatgaaagtcttttctagtgcacaaatagtaccacagattaatgactgatttttactgttttgtttgttttccctctccagggctactacgcatcatggatctccctttgtctgaatagctaaatyaggcagctttattttatttctttgtaatctgtttcccttgctgcttgatacacaatgagtcaacccattagagtttgtgctacttaagaaaaatttaaattagtkatcaaaagcttaaaacaaacagtttttacactactgaattccattaaaatgtaattttttgctttaaacactgtaaaggacttctctttcagctccctctctctgacatagactcctctgttactgtggtttctcatcctttatttctattctgagacagctgtgaaacagtggccacagtcaactgtgggtgat

SEQ ID NO: 68231 - DNA, 501 bp, Chicken  19866894339014_4
cacagacttgtgcctgtgatggtagtaggtttcytgggactgctgagggaagaaacgctgtcagatattcatgaaagtcttttctagtgcacaaatagtaccacagattaatgactgatttttactgttttgtttgttttccctctccagggctactacgcatcatggatctccctttgtctgaatagctaaatyaggcagctttattttatttctttgtaatctgtttcccttgctgcttgatacacaatgagtcaacccattagagtttgtgctacttaagaaaaatttaaattagtkatcaaaagcttaaaacaaacagtttttacactactgaattccattaaaatgtaattttttgctttaaacactgtaaaggacttctctttcagctccctctctctgacatagactcctctgttactgtggtttctcatcctttatttctattctgagacagctgtgaaacagtggccacagtcaactgtgggtgatgagggt

SEQ ID NO: 68232 - DNA, 600 bp, Chicken  19866894339018_1
acatctcattttgttattttctgttcctaggagctcagtgtgcgggtgacttctgcatgacaacatgtaatgcagattccctgaaactgtactttgcatatggtaaaagttcaataaacaaggcacatgttgagatagaggtttctgcataatctctgattttgattgctagttccagacagcatcaagaaggttacagcccagttttcaaatcattattcagggttactttgcaaggacagtagtgtctaaatactgttttctgggcagacagatttgagaaaaattggtattgaagcrcacaaaaaaattcaaagaaattcaagaattaagcagtatagtgatatcttactgcttttcagcagtgatgtaatgtcagctacaaagccagcatggttcctatttacaccttcaccagaaattagtttccaatatacatgttgtactcacctgtttgtcatgaatcaggttgtcctggagatgtgtttgtttaaaggcagtgggaagctgtaaatctaaaatctatgttgggggttttgatcggcctttaagctcagaaatagggattttgtttcacactcgtctttaatttctaaggaa

SEQ ID NO: 68233 - DNA, 554 bp, Chicken  19866894339019_1
tgagattatggcacttggaggtgatgctggcaagaaacatgaaaacttaataggaaggacttccagaggtacattggccagaaaagggagactaaacagaatagacatccttaacccattgacaaataagataggagaactagtgacaactgacatggaggaggatggaatttacactgaagttaatgcctgtgtgtatgataatgagcttgacttctgcaaggcctcggacgtggtcccacaccacattctttatactgagatgaatgggctcaaagggtgggctattcagtggatacrgaattggttggaaggtcacagccagagagtggtggtcaaaggctctatgcccaggtgcaggccagtgatgagtggtgtccccaaggggccattctgggattagtactcttaacgtttttatcagcagcacagtcaataggatcaagcgtactctcagcaagtttgcagacaacaccaagctgagtagtgtagttaatgtaatagaaggaagggatgccatccagagcaacccaaacaagccccaaaggtgggct

SEQ ID NO: 68234 - DNA, 599 bp, Chicken  19866894339025_1
  misc_feature (1)..(109): n is any nucleotide
nnnnnnnnnnnnnnnnnnnnnnnnnnnnnnnnnnnnnnnnnnnnnnnnnnnnnnnnnnnnnnnnnnnnnnnnnnnnnnnnnnnnnnnnnnnnnnnnnnnnnnnnnnnnntgggtgctctttaatctcttacctcctgggaaaaaactggcatttaaaaaaatgttagcaacagcaatcacagaagggatgaaaaaagcctgaaaagccagttgttgtgtttctctgtggatgtgacattttcaaatgttctgtccatcatatctgactatgttcagttgaactggacagtgtattgcaarctctgcatgcttgttactctgctaatttttcagggatgtacatcttattttaaacctcctctaagttatctgaagaaaagattttttgarttgtttttaatttttatatttccagatctgaaacagagctccctgacctgactgtcatggactcctcagattccctttaaatttcgagttccttgtcggttccaaggaagctgagagaggccaaatcgcccactgccactaatgagaacctagaacagtccggtgttagccacagcagcagctctatcatagaagcatagaatgatttg

SEQ ID NO: 68235 - DNA, 599 bp, Chicken  19866894339025_2
  misc_feature (1)..(19): n is any nucleotide
nnnnnnnnnnnnnnnnnnntgggtgctctttaatctcttacctcctgggaaaaaactggcatttaaaaaaatgttagcaacagcaatcacagaagggatgaaaaaagcctgaaaagccagttgttgtgtttctctgtggatgtgacattttcaaatgttctgtccatcatatctgactatgttcagttgaactggacagtgtattgcaarctctgcatgcttgttactctgctaatttttcagggatgtacatcttattttaaacctcctctaagttatctgaagaaaagattttttgarttgtttttaatttttatatttccagatctgaaacagagctccctgacctgactgtcatggactcctcagattccctttaaatttcgagttccttgtcggttccaaggaagctgagagaggccaaatcgcccactgccactaatgagaacctagaacagtccggtgttagccacagcagcagctctatcatagaagcatagaatgatttgggttggatctttaagatcacgtagttccaacctcctgctataggcaaggccacctccctctagaccaggttgctcacagccccatccagc

SEQ ID NO: 68236 - DNA, 600 bp, Chicken  19866894339035_1
tgcttctttttaacataattccctgccaactacctctgtgtcacttttaacttgttgtgttcatgatgtgaagtatactcagaaacaaacattgcagttggcaaaatttccccccccgtacttagtctgaacagcagtagttccttgatgggaatatttcttatgaaaaatggctaagcacaaagcattgcctctactgataagtcaagtaggaatcctgctatgctaatgaataatcaaagattgtcaggcatattggaagctttcattttaattttcccatttgttcatttttctacyattgtatttgtacttcgctgctctttattaaggaagagttttctaccttcaaggaactagcagcatcataggtcttctcaaatgcattatcagtcgcagatatgtttaaatttgtgcaaagcatccaaattactgaccattttcttcaccaatctttagagttaagatgatctcatgattcaggagtataacaagttgagtgcagcagacaaaaagaataatgaaaacctctcagacatgagagatacctactaatggttcttggtcagagtacatctgcacctatttctgctcaactgt

SEQ ID NO: 68237 - DNA, 599 bp, Chicken  19866894339045_1
  misc_feature (1)..(12): n is any nucleotide
nnnnnnnnnnnntgatgttaaaatgtctgtatgagcaacttttccaaggtaaaatcctatttccctatgaattgcatatcctgactgactttgtggacctattctttccataatgcttgggttgggtttttttgccagtttaattagcagctgcaagttaacaagcttttggttataatcagaactcaccagttaactgttctgcaggtagtgtttgggaatatgtgtagaactaaagatttgaaagatacacaaattggacacaattttcaaaattcctatttatctggtgatttggaytgatctttggagactgctctgtttctttttattactgaagctataccgaagctgaaaattcataaacagttcacactacttcgaaacatgagcaaaagagactattttgcagggaaccagtttgataaaattatgaataggttcacactgcaaaaatcaaacatgacttaagttttgtgcaggaacaggggtcttactgtagaacttagagtattcatgatgttaattttcgttaaaagtgcttccactttttttacaaatgataaaattattccagaaggagaaatctgtaaatttta

SEQ ID NO: 68238 - DNA, 600 bp, Chicken  19866894339050_1
tacaagggcaaacaagattagcagtgtgaagccaatattttgccacctatatggaagagtcagtgaaaaacactcaggacaaaaggcactgtctggaactccaaattaaaccagccatgtgagcacattatacctgaattgtaaataagggtgatgcagcaatgcacagtgcaacaactactcctgattcaaaagtcctcatctcagctcacacagtacctactcagtgcacatcaccaacatgataagtcctggcagcccagagaagcaacaacaccaggcttgccaaaccagggtgamatcccatgctgcagccagccccagtgagagctggactgcatcactggggagatcagagtgactcaaagagggcaggaacaaggcagagggaggtgaartgatacagaaacaagttaatagactaagaaagaaaaaaaaagtaaagcaaaggttgcttttccagcactcagatccaaaatgaaggatttgtccttgttccacatgctgtccggagtgctcagctttatggtcagaagctgagaggatgcaaagcacaggtgtgyrtgctttggtgcttcagcgctgtgttcctcatttgtg

SEQ ID NO: 68239 - DNA, 600 bp, Chicken  19866894339050_2
ctccaaattaaaccagccatgtgagcacattatacctgaattgtaaataagggtgatgcagcaatgcacagtgcaacaactactcctgattcaaaagtcctcatctcagctcacacagtacctactcagtgcacatcaccaacatgataagtcctggcagcccagagaagcaacaacaccaggcttgccaaaccagggtgamatcccatgctgcagccagccccagtgagagctggactgcatcactggggagatcagagtgactcaaagagggcaggaacaaggcagagggaggtgaartgatacagaaacaagttaatagactaagaaagaaaaaaaaagtaaagcaaaggttgcttttccagcactcagatccaaaatgaaggatttgtccttgttccacatgctgtccggagtgctcagctttatggtcagaagctgagaggatgcaaagcacaggtgtgyrtgctttggtgcttcagcgctgtgttcctcatttgtgagagcagctcatgcacctggtgctcaggggcaacagtgatgtggctgctggtaatagaaacaagtatttgctgaaccagcaattaaaagagtgataag

SEQ ID NO: 68240 - DNA, 600 bp, Chicken  19866894339050_3
agaagcaacaacaccaggcttgccaaaccagggtgamatcccatgctgcagccagccccagtgagagctggactgcatcactggggagatcagagtgactcaaagagggcaggaacaaggcagagggaggtgaartgatacagaaacaagttaatagactaagaaagaaaaaaaaagtaaagcaaaggttgcttttccagcactcagatccaaaatgaaggatttgtccttgttccacatgctgtccggagtgctcagctttatggtcagaagctgagaggatgcaaagcacaggtgtgyrtgctttggtgcttcagcgctgtgttcctcatttgtgagagcagctcatgcacctggtgctcaggggcaacagtgatgtggctgctggtaatagaaacaagtatttgctgaaccagcaattaaaagagtgataagagacatctactgacagagccagtgctatagcatccttatcacaggttcagaatcactttgtccacttgtactagctggcttcacattatgtttaaagggatgtgaaatacacagtaacaaaacagccttagaacaaataaggtcgaggaggcaagaaaagaggaa

SEQ ID NO: 68241 - DNA, 600 bp, Chicken  19866894339050_4
gaagcaacaacaccaggcttgccaaaccagggtgamatcccatgctgcagccagccccagtgagagctggactgcatcactggggagatcagagtgactcaaagagggcaggaacaaggcagagggaggtgaartgatacagaaacaagttaatagactaagaaagaaaaaaaaagtaaagcaaaggttgcttttccagcactcagatccaaaatgaaggatttgtccttgttccacatgctgtccggagtgctcagctttatggtcagaagctgagaggatgcaaagcacaggtgtgyrtgctttggtgcttcagcgctgtgttcctcatttgtgagagcagctcatgcacctggtgctcaggggcaacagtgatgtggctgctggtaatagaaacaagtatttgctgaaccagcaattaaaagagtgataagagacatctactgacagagccagtgctatagcatccttatcacaggttcagaatcactttgtccacttgtactagctggcttcacattatgtttaaagggatgtgaaatacacagtaacaaaacagccttagaacaaataaggtcgaggaggcaagaaaagaggaag

SEQ ID NO: 68242 - DNA, 600 bp, Chicken  19866894339056_1
ttcccttgaaggcagcaagagctttgatttgctttggagcagctatagggacacaattctcacagaggtcttctccctcccttaatttttatagagatttttcacagtctgctcaaagtgatgctcccctgagcatgcttctccaacaccattgtcagcacgactgactcagctgctctttctgtgtagagatgggtaattttttgaagatgggagcatggtggctcaggtgtgtggcaatcagtgagtgctgatgctgcaccctgtgtgacaggtatctaattcttctgattgtgctgytataaacttgttacagccaatccgataaatgttacccatgtttacaaagacattagtaactaacttgttgtggaactgtatgctgattgcagcttctcaggttgataaattgaaggctggagaaaacattcccttctccccctgagacatgttcatgaggacatcagcttctacaggggctctatgttttattagacctgaaaatggggtatatacaaagccctgcattgcctaaggcaggatataaaagagtgaggcttatgggtcagagcagtgctttctccatttgcatttttaatg

SEQ ID NO: 68243 - DNA, 600 bp, Chicken  19866894339056_2
taaagtaggcagacccctctggtcctacttatccctcctctcactctaagcagtggcttcaaatgataaacaaatgaatatatctctgtctctataacctgtagtttaagaacaaaaccactggtttccttttagagagactgacttttaagactgttcctgaagtgtagcttttttttccgtgagttatggaaaccactgttgtattaatccagaaaatcagagtctgcatctgttgttggttttgttggagtttaatatttttcactgtagcagaaagcaactggaacactgcagatktatttggttggaactgggattttatgtggagatatgaggctggtaagtccttgtattctgcttcttcttaattctgctgtggttgtagataggaacccctgtctgatgagcagctgatttttgttgaggtgctgtacagtcatagtactgcagcgtaaattggtgtcctccaaacgtgagggttaatatatgcctctggctcaaagcggcttttctaaaggtgattttttttcctttaaagagaagtgaatcttaaaatgtccgggatgaatttgttaacatttatcccagctgcagtcc

SEQ ID NO: 68244 - DNA, 600 bp, Chicken  19866894339059_1
gcttggtctgtagggttagcaccacattttttacatgggtcaaagagtattaagctagtgttagacaggggcagtttttatctctgataagttaaatgattgtgatttaaccatggtggagaagccagactgaacatggaaggtgtgcagtctgctttctagcactacactaaatataatacatgtgggcaaaacacagtatcagcacaataggctgtgccaggccagtttggcactgcagcctctcaaaagctccaagttgaaaggagcaggtttgggggcaaactgaagctctctgtrcagcactccagaaatcatgtctttyccagatgtctattgactgaataacccaagcctcrgaggagagctgagtgacccattttagcccttgggtgagctctttgaacctcagggctcagctcatccygaagatgtgctgatctcacagggacccaccacaaactgwccacaacaccttagcttgatgagatacgtatcaaacagggtgtcagcaacctattggaaatccttgaccctgggtatttgtcaycaatttgctttgtggccctcagagacacgttgacagaggagggtgaagcc

SEQ ID NO: 68245 - DNA, 600 bp, Chicken  19866894339059_2
attttttacatgggtcaaagagtattaagctagtgttagacaggggcagtttttatctctgataagttaaatgattgtgatttaaccatggtggagaagccagactgaacatggaaggtgtgcagtctgctttctagcactacactaaatataatacatgtgggcaaaacacagtatcagcacaataggctgtgccaggccagtttggcactgcagcctctcaaaagctccaagttgaaaggagcaggtttgggggcaaactgaagctctctgtrcagcactccagaaatcatgtctttyccagatgtctattgactgaataacccaagcctcrgaggagagctgagtgacccattttagcccttgggtgagctctttgaacctcagggctcagctcatccygaagatgtgctgatctcacagggacccaccacaaactgwccacaacaccttagcttgatgagatacgtatcaaacagggtgtcagcaacctattggaaatccttgaccctgggtatttgtcaycaatttgctttgtggccctcagagacacgttgacagaggagggtgaagccacggcacccagcagcatgctttatg

SEQ ID NO: 68246 - DNA, 600 bp, Chicken  19866894339059_3
gttagacaggggcagtttttatctctgataagttaaatgattgtgatttaaccatggtggagaagccagactgaacatggaaggtgtgcagtctgctttctagcactacactaaatataatacatgtgggcaaaacacagtatcagcacaataggctgtgccaggccagtttggcactgcagcctctcaaaagctccaagttgaaaggagcaggtttgggggcaaactgaagctctctgtrcagcactccagaaatcatgtctttyccagatgtctattgactgaataacccaagcctcrgaggagagctgagtgacccattttagcccttgggtgagctctttgaacctcagggctcagctcatccygaagatgtgctgatctcacagggacccaccacaaactgwccacaacaccttagcttgatgagatacgtatcaaacagggtgtcagcaacctattggaaatccttgaccctgggtatttgtcaycaatttgctttgtggccctcagagacacgttgacagaggagggtgaagccacggcacccagcagcatgctttatgtgtgctgcagagcagaaaagctgctgcctgacac

SEQ ID NO: 68247 - DNA, 600 bp, Chicken  19866894339059_4
gactgaacatggaaggtgtgcagtctgctttctagcactacactaaatataatacatgtgggcaaaacacagtatcagcacaataggctgtgccaggccagtttggcactgcagcctctcaaaagctccaagttgaaaggagcaggtttgggggcaaactgaagctctctgtrcagcactccagaaatcatgtctttyccagatgtctattgactgaataacccaagcctcrgaggagagctgagtgacccattttagcccttgggtgagctctttgaacctcagggctcagctcatccygaagatgtgctgatctcacagggacccaccacaaactgwccacaacaccttagcttgatgagatacgtatcaaacagggtgtcagcaacctattggaaatccttgaccctgggtatttgtcaycaatttgctttgtggccctcagagacacgttgacagaggagggtgaagccacggcacccagcagcatgctttatgtgtgctgcagagcagaaaagctgctgcctgacactaccctgccagctctctcacatacacaccaaaagccaccagagccagcacaattcattttgcctgcta

SEQ ID NO: 68248 - DNA, 600 bp, Chicken  19866894339059_5
acactaaatataatacatgtgggcaaaacacagtatcagcacaataggctgtgccaggccagtttggcactgcagcctctcaaaagctccaagttgaaaggagcaggtttgggggcaaactgaagctctctgtrcagcactccagaaatcatgtctttyccagatgtctattgactgaataacccaagcctcrgaggagagctgagtgacccattttagcccttgggtgagctctttgaacctcagggctcagctcatccygaagatgtgctgatctcacagggacccaccacaaactgwccacaacaccttagcttgatgagatacgtatcaaacagggtgtcagcaacctattggaaatccttgaccctgggtatttgtcaycaatttgctttgtggccctcagagacacgttgacagaggagggtgaagccacggcacccagcagcatgctttatgtgtgctgcagagcagaaaagctgctgcctgacactaccctgccagctctctcacatacacaccaaaagccaccagagccagcacaattcattttgcctgctatagtagatattcatacattcattcctcaatggaggaatt

SEQ ID NO: 68249 - DNA, 600 bp, Chicken  19866894339059_6
agctccaagttgaaaggagcaggtttgggggcaaactgaagctctctgtrcagcactccagaaatcatgtctttyccagatgtctattgactgaataacccaagcctcrgaggagagctgagtgacccattttagcccttgggtgagctctttgaacctcagggctcagctcatccygaagatgtgctgatctcacagggacccaccacaaactgwccacaacaccttagcttgatgagatacgtatcaaacagggtgtcagcaacctattggaaatccttgaccctgggtatttgtcaycaatttgctttgtggccctcagagacacgttgacagaggagggtgaagccacggcacccagcagcatgctttatgtgtgctgcagagcagaaaagctgctgcctgacactaccctgccagctctctcacatacacaccaaaagccaccagagccagcacaattcattttgcctgctatagtagatattcatacattcattcctcaatggaggaattcaaagacctggttggagggttttgctgctattattattatacttaaatatttactgtgacattaaaatgaggcttgatggcatg

SEQ ID NO: 68250 - DNA, 600 bp, Chicken  19866894339063_1
agagaggtagataggttgggtcgatctggatggccaatacagagaaagactgcgctatgggaatagggatacgggacaaggatagaatcacagaatcataaaatcactgaagttggaaaaggccaccaagatcatcttgtccaaccaccagcccatcaccagcatgcccactaaaccatattgctcagcatctcaactccctccaaaccccacaagcacacctgactgctccccaccctgcactgcccagcttgcttggaataaccttcacataaccagggccaggcttcaccatcctcycgtggtacacagaacatctgtcttaatatctaacctttgtgctttctctttgcaaattaagttgattacaacctggctccgctccagcagaccargggagcgattcatcactgtcatctccgaggtttggggaggttcttatcatgtcccccctctgctgctgtgcttctagagaagatgaaacctacccctttggtgaggtcaagtcattcactttatcagccctgctggttgcttgtgggatcccgcaatggggttggtgccaccattaaaggaagggaacccaataacctgaagaac

SEQ ID NO: 68251 - DNA, 600 bp, Chicken  19866894339063_2
tcataaaatcactgaagttggaaaaggccaccaagatcatcttgtccaaccaccagcccatcaccagcatgcccactaaaccatattgctcagcatctcaactccctccaaaccccacaagcacacctgactgctccccaccctgcactgcccagcttgcttggaataaccttcacataaccagggccaggcttcaccatcctcycgtggtacacagaacatctgtcttaatatctaacctttgtgctttctctttgcaaattaagttgattacaacctggctccgctccagcagaccargggagcgattcatcactgtcatctccgaggtttggggaggttcttatcatgtcccccctctgctgctgtgcttctagagaagatgaaacctacccctttggtgaggtcaagtcattcactttatcagccctgctggttgcttgtgggatcccgcaatggggttggtgccaccattaaaggaagggaacccaataacctgaagaacatttcttggattgcttatacattttgggtaatttgggtccctctgagcatctctcagtctcatctctgtttagctttgccttggccgtggctgag

SEQ ID NO: 68252 - DNA, 600 bp, Chicken  19866894339063_3
aacctacccctttggtgaggtcaagtcattcactttatcagccctgctggttgcttgtgggatcccgcaatggggttggtgccaccattaaaggaagggaacccaataacctgaagaacatttcttggattgcttatacattttgggtaatttgggtccctctgagcatctctcagtctcatctctgtttagctttgccttggccgtggctgagtagggggtacagccataggacgaggaccctcaccctatagcaaatgctcctcaccagggcctttgtgtttgaccacagccactccyaggccagcagatgcatgcacatctgcatgcccagaggcatcactgctcatccagctttttggacactgaatctcaaggcaacctgccttaccaggaagatgctgtgcctttcccatctgcaccttgactttattttccccagtgctcaatgccccgaatccctctgaggtcagcagagagatgtctctccagctgctgaaacttcagcaccagagatacaattctgttcacccaaccctttgccaatcaccctccctgcttctttatgatttaaagagctgctgggtgaacagctcgaag

SEQ ID NO: 68253 - DNA, 599 bp, Chicken  19866894339068_1
  misc_feature (1)..(70): n is any nucleotide
nnnnnnnnnnnnnnnnnnnnnnnnnnnnnnnnnnnnnnnnnnnnnnnnnnnnnnnnnnnnnnnnnnnnnntataagcaatatctttgcctttatttttttttcgtaggtagaagaatagaagccagattttctaaatgtagaatcaaaagttgactgaagtctgaatttctatgcccaatgggactgcagctgagaagtccagattttcagcttaagttataacacgtggagattttgccagtgtaaggagttagacaataagaacgggctggcagtgggagaagtggggtttcgcatcyctccccacccctcccctccctggaacacaacatatttctaccaggagtaaaaataaataaatccccagttgtcttgctgtgcccaattagtattccgtccacaagctgtcccatcagggaaaaatgccgccctcatacacgtgttcaggatagcactgatggatctgagggcctctccaaacacagtgaccatctgctaggcaaaacataggggtctgacaagcaggagccattcagccctgttgttgggccacattattacatatttgacaagggtaatgagaggctgtcattaacct

SEQ ID NO: 68254 - DNA, 599 bp, Chicken  19866894339069_1
  misc_feature (1)..(124): n is any nucleotide
nnnnnnnnnnnnnnnnnnnnnnnnnnnnnnnnnnnnnnnnnnnnnnnnnnnnnnnnnnnnnnnnnnnnnnnnnnnnnnnnnnnnnnnnnnnnnnnnnnnnnnnnnnnnnnnnnnnnnnnnnnnntaagggaaacagaaaacgtgtacagttggcatatgttgtgaaggtaatgcatataaagtcagctggtatccattggtgccccttcctgcaacatttccaaaaagtcaatagaatgcctctatctagtaaaacaaaccaacctgaaagacctggcctagagctggccagactttccraacacagcrtttaccacaattattcttagatgaaatccaggcacagctgttcctaatggaacaataaccaacatttcgaaccatggcaaaagtttatactaaaactcatagaaacagtttgcaatttgaagtaaaaataactaacagataagagctacctttctgctttgtagcattactctcagtccctacattttaaatatgtctgttttcaaaagtattcagacatattaaggacaaatatttacaaacctgatattcactactactaatgctaaaagcttcttaacaatctatgt

SEQ ID NO: 68255 - DNA, 599 bp, Chicken  19866894339069_2
  misc_feature (1)..(115): n is any nucleotide
nnnnnnnnnnnnnnnnnnnnnnnnnnnnnnnnnnnnnnnnnnnnnnnnnnnnnnnnnnnnnnnnnnnnnnnnnnnnnnnnnnnnnnnnnnnnnnnnnnnnnnnnnnnnnnnnnnntaagggaaacagaaaacgtgtacagttggcatatgttgtgaaggtaatgcatataaagtcagctggtatccattggtgccccttcctgcaacatttccaaaaagtcaatagaatgcctctatctagtaaaacaaaccaacctgaaagacctggcctagagctggccagactttccraacacagcrtttaccacaattattcttagatgaaatccaggcacagctgttcctaatggaacaataaccaacatttcgaaccatggcaaaagtttatactaaaactcatagaaacagtttgcaatttgaagtaaaaataactaacagataagagctacctttctgctttgtagcattactctcagtccctacattttaaatatgtctgttttcaaaagtattcagacatattaaggacaaatatttacaaacctgatattcactactactaatgctaaaagcttcttaacaatctatgtattccaatt

SEQ ID NO: 68256 - DNA, 600 bp, Chicken  19866894339070_1
ccgttttcgtgtgcgtttccagtcttggaagctgggtctctccataagaacttgacaggtatttatagactcttaacatctcaaaccttgctacaaatggacgtgctgggtctgcacggaaaccccatcaccgaggatagggctccctgctacaaacacacacactgctgggccagctcattgcttccacactgaatattaaatatccatcttcacccaggtgaaagcacggagctcaagggagggctgacatgactggttagtaagtttgcaacttggccgcaaatgagaagtgagatrctatctttaaagggcttcattacacttgaatgtgaacttcctctacggtagaaggcctctccaaagacaragcaggcaaygcaaacacaagagaaacgagcacatgatcgtcctggaaggaaattactatacaaggtgagcagtggactttgaacacttggctttactgtgtttcagtggctgtaacaaacaraagcaccctcacatcctgccgtcatctcytgtgcaacgcagggctgcactcagggcagcaggacactcctcgccacccacccstgatccagatggggaccctgtgct

SEQ ID NO: 68257 - DNA, 600 bp, Chicken  19866894339070_2
tcttaacatctcaaaccttgctacaaatggacgtgctgggtctgcacggaaaccccatcaccgaggatagggctccctgctacaaacacacacactgctgggccagctcattgcttccacactgaatattaaatatccatcttcacccaggtgaaagcacggagctcaagggagggctgacatgactggttagtaagtttgcaacttggccgcaaatgagaagtgagatrctatctttaaagggcttcattacacttgaatgtgaacttcctctacggtagaaggcctctccaaagacaragcaggcaaygcaaacacaagagaaacgagcacatgatcgtcctggaaggaaattactatacaaggtgagcagtggactttgaacacttggctttactgtgtttcagtggctgtaacaaacaraagcaccctcacatcctgccgtcatctcytgtgcaacgcagggctgcactcagggcagcaggacactcctcgccacccacccstgatccagatggggaccctgtgctcaactcaagccaaaagggaaatgcacgtatctattcttcagttttaactgaggcagtctctgcccagaag

SEQ ID NO: 68258 - DNA, 600 bp, Chicken  19866894339070_3
tcaaaccttgctacaaatggacgtgctgggtctgcacggaaaccccatcaccgaggatagggctccctgctacaaacacacacactgctgggccagctcattgcttccacactgaatattaaatatccatcttcacccaggtgaaagcacggagctcaagggagggctgacatgactggttagtaagtttgcaacttggccgcaaatgagaagtgagatrctatctttaaagggcttcattacacttgaatgtgaacttcctctacggtagaaggcctctccaaagacaragcaggcaaygcaaacacaagagaaacgagcacatgatcgtcctggaaggaaattactatacaaggtgagcagtggactttgaacacttggctttactgtgtttcagtggctgtaacaaacaraagcaccctcacatcctgccgtcatctcytgtgcaacgcagggctgcactcagggcagcaggacactcctcgccacccacccstgatccagatggggaccctgtgctcaactcaagccaaaagggaaatgcacgtatctattcttcagttttaactgaggcagtctctgcccagaagcaccgtcaga

SEQ ID NO: 68259 - DNA, 594 bp, Chicken  19866894339070_4
gaatattaaatatccatcttcacccaggtgaaagcacggagctcaagggagggctgacatgactggttagtaagtttgcaacttggccgcaaatgagaagtgagatrctatctttaaagggcttcattacacttgaatgtgaacttcctctacggtagaaggcctctccaaagacaragcaggcaaygcaaacacaagagaaacgagcacatgatcgtcctggaaggaaattactatacaaggtgagcagtggactttgaacacttggctttactgtgtttcagtggctgtaacaaacaraagcaccctcacatcctgccgtcatctcytgtgcaacgcagggctgcactcagggcagcaggacactcctcgccacccacccstgatccagatggggaccctgtgctcaactcaagccaaaagggaaatgcacgtatctattcttcagttttaactgaggcagtctctgcccagaagcaccgtcagaaacacacacaaccaaccaacttggaattggactcratgatcctcatgggtcccttccaacatgggatattctttgattctatgattccaggtgtgcggaagaacggc

SEQ ID NO: 68260 - DNA, 565 bp, Chicken  19866894339070_5
gaaagcacggagctcaagggagggctgacatgactggttagtaagtttgcaacttggccgcaaatgagaagtgagatrctatctttaaagggcttcattacacttgaatgtgaacttcctctacggtagaaggcctctccaaagacaragcaggcaaygcaaacacaagagaaacgagcacatgatcgtcctggaaggaaattactatacaaggtgagcagtggactttgaacacttggctttactgtgtttcagtggctgtaacaaacaraagcaccctcacatcctgccgtcatctcytgtgcaacgcagggctgcactcagggcagcaggacactcctcgccacccacccstgatccagatggggaccctgtgctcaactcaagccaaaagggaaatgcacgtatctattcttcagttttaactgaggcagtctctgcccagaagcaccgtcagaaacacacacaaccaaccaacttggaattggactcratgatcctcatgggtcccttccaacatgggatattctttgattctatgattccaggtgtgcggaagaacggc

SEQ ID NO: 68261 - DNA, 511 bp, Chicken  19866894339070_6
tggccgcaaatgagaagtgagatrctatctttaaagggcttcattacacttgaatgtgaacttcctctacggtagaaggcctctccaaagacaragcaggcaaygcaaacacaagagaaacgagcacatgatcgtcctggaaggaaattactatacaaggtgagcagtggactttgaacacttggctttactgtgtttcagtggctgtaacaaacaraagcaccctcacatcctgccgtcatctcytgtgcaacgcagggctgcactcagggcagcaggacactcctcgccacccacccstgatccagatggggaccctgtgctcaactcaagccaaaagggaaatgcacgtatctattcttcagttttaactgaggcagtctctgcccagaagcaccgtcagaaacacacacaaccaaccaacttggaattggactcratgatcctcatgggtcccttccaacatgggatattctttgattctatgattccaggtgtgcggaagaacggc

SEQ ID NO: 68262 - DNA, 372 bp, Chicken  19866894339070_7
gaaggaaattactatacaaggtgagcagtggactttgaacacttggctttactgtgtttcagtggctgtaacaaacaraagcaccctcacatcctgccgtcatctcytgtgcaacgcagggctgcactcagggcagcaggacactcctcgccacccacccstgatccagatggggaccctgtgctcaactcaagccaaaagggaaatgcacgtatctattcttcagttttaactgaggcagtctctgcccagaagcaccgtcagaaacacacacaaccaaccaacttggaattggactcratgatcctcatgggtcccttccaacatgggatattctttgattctatgattccaggtgtgcggaagaacggc

SEQ ID NO: 68263 - DNA, 600 bp, Chicken  19866894339073_1
gtaaagcaaaggatcacacaccaggtaaacaaaataagttcatttactacttccatcagcaggcacgtattgagtaacttaaagaaaattaggtcttaagccaatctagtacttacttgggggaaaaaaaaagctgaaccatgaacttccccctttcattttcttgctgatcatgacatcatgtggtatggaatattcctatcatcactttgggtcagacaccctttttgtgttcactctcaactctttgttcatctccaaactacttgttgggtaagagctgagtagaggaaataaaayatgccttggcacttttcaaacactgttctccagtaactaaaatactggtttgttgtcagtactattttacatacaaatccaaagcacaacatcatgtagactactgtgaagaaaactaactcggttccattcagaaccagtacaatctccaatttcaagccatttatattttgcttaggttacatcttagttatatcttgctacagactacatcctcattaacatccctccttctattccctcactctgtccccttctctgacctacttcccattcactaatatcattccatccatctat

SEQ ID NO: 68264 - DNA, 599 bp, Chicken  19866894339077_1
  misc_feature (1)..(12): n is any nucleotide
nnnnnnnnnnnntgtggcttcaagctttattcagaaatcatatccaattaattgtctccgtctcctgcacaaatgagtatggtctcactgaacctgcacaacagtgctctgcagctgtgatcacacctagagactattgcatagcttattcataggatttgctgttaaattcctaaactgttcaaggttgatgttgtttctaatgactaatgccttcaaatcacttattctctgttcactgcctctgaaagtattttttttcagtaaaggggaaagtgtatgtacagcagagccttgccyctctcaagctagttcgagcaggagcaaaacctccagcagcggcacggcagcaaaggcaccgctgctgcatccctactgcaggatatgaaagctgggatgagaaggtgatgggaagaaaaawaatggragaaatgaccattgttctatactgactgaggaacccttgcctgctggaatggcccacacaggctctcagcagctacgagaaatgaagagtgccttccacatcattccacccaaagggctcggagctgctttagcagttcaggctctgatttttattacgcattcttcagtca

SEQ ID NO: 68265 - DNA, 600 bp, Chicken  19866894339077_2
cacacctagagactattgcatagcttattcataggatttgctgttaaattcctaaactgttcaaggttgatgttgtttctaatgactaatgccttcaaatcacttattctctgttcactgcctctgaaagtattttttttcagtaaaggggaaagtgtatgtacagcagagccttgccyctctcaagctagttcgagcaggagcaaaacctccagcagcggcacggcagcaaaggcaccgctgctgcatccctactgcaggatatgaaagctgggatgagaaggtgatgggaagaaaaawaatggragaaatgaccattgttctatactgactgaggaacccttgcctgctggaatggcccacacaggctctcagcagctacgagaaatgaagagtgccttccacatcattccacccaaagggctcggagctgctttagcagttcaggctctgatttttattacgcattcttcagtcactctggaaacgcgaggggagtgacagcttgagacgatcttattgctcactgccacacagtcctttttgtcagacccatagcagagctaattcagcttgctaaccagcataaagaaagttttc

SEQ ID NO: 68266 - DNA, 600 bp, Chicken  19866894339077_3
tagagactattgcatagcttattcataggatttgctgttaaattcctaaactgttcaaggttgatgttgtttctaatgactaatgccttcaaatcacttattctctgttcactgcctctgaaagtattttttttcagtaaaggggaaagtgtatgtacagcagagccttgccyctctcaagctagttcgagcaggagcaaaacctccagcagcggcacggcagcaaaggcaccgctgctgcatccctactgcaggatatgaaagctgggatgagaaggtgatgggaagaaaaawaatggragaaatgaccattgttctatactgactgaggaacccttgcctgctggaatggcccacacaggctctcagcagctacgagaaatgaagagtgccttccacatcattccacccaaagggctcggagctgctttagcagttcaggctctgatttttattacgcattcttcagtcactctggaaacgcgaggggagtgacagcttgagacgatcttattgctcactgccacacagtcctttttgtcagacccatagcagagctaattcagcttgctaaccagcataaagaaagttttctgctgg

SEQ ID NO: 68267 - DNA, 600 bp, Chicken  19866894339084_1
tgtatctccagtggattttggggtactgtaaaagagatgagataccaagggtttgttttggacttgtattttggtgtgtgtaaggccagacacctgaactaaaaaaaaaaaacaaaaaaatctgtcagtttcaattgtaacgtaggattagtagtcactgtttattgcagtaaaggtattctgagattgctttttgaaaaatgcaagattatgaatgtgaagatatctaaaaatacatctggtagtctcagatgcccagcttctgtggtagttactcctttaaaatttttacaggagggwtcattttagcatgcacaactgsattcactttttttcataccattaggacacacaggacaatacactccagatcttaatgcattttccatatattattaaagcgctttcaatctggccaaatatgtaataaaatgtaatctcttgcctaaacagcttaaatcttaaatgatgctgtaaattaaaaatgtaagatggagatgaaacatgtagttgacactttctccatgcaaataataggcattttaatattttatgcttttttctttgatgtaattgtagaaaaatagtagtagttcatac

SEQ ID NO: 68268 - DNA, 600 bp, Chicken  19866894339084_2
gtactgtaaaagagatgagataccaagggtttgttttggacttgtattttggtgtgtgtaaggccagacacctgaactaaaaaaaaaaaacaaaaaaatctgtcagtttcaattgtaacgtaggattagtagtcactgtttattgcagtaaaggtattctgagattgctttttgaaaaatgcaagattatgaatgtgaagatatctaaaaatacatctggtagtctcagatgcccagcttctgtggtagttactcctttaaaatttttacaggagggwtcattttagcatgcacaactgsattcactttttttcataccattaggacacacaggacaatacactccagatcttaatgcattttccatatattattaaagcgctttcaatctggccaaatatgtaataaaatgtaatctcttgcctaaacagcttaaatcttaaatgatgctgtaaattaaaaatgtaagatggagatgaaacatgtagttgacactttctccatgcaaataataggcattttaatattttatgcttttttctttgatgtaattgtagaaaaatagtagtagttcatactatttaatcaaagatattttaa

SEQ ID NO: 68269 - DNA, 600 bp, Chicken  19866894339084_3
atatcttaaatacttaggtttattattattattacagctatccttaccagttttctgatggtctgaagaggtgtgtagctagttcattcaagtgtaatcttcatcacctgggttcatatcactctttgactttcctgtggtcagaatttttctgttttttatagaagttcagtgacgctgatcagaattgatcattatttctatcagtaatttaaaaattatagtttcactttactggaagtgtccagaaaatatgaataagtacttcaggttaactaaactgaagattgttagtttacyagtgaaaaaatgcctaagatgtcrtagtacagtttttctgaagtgtagggtgatttgctgaacttacattgaaagcactttattgccacctcacccttacacagcaagaaaaataataaatcatataaatgatcagtttgcagtctgcctgacatttgtctaatgtgactcacagaaatgtagtacattcttgaatagatctgtgtgtttggtgtggctgctggtttgtataaccaggaaatgtgaacttctaaacaagctgttcaaagtcagtgtcttataagaagcaacgtaattaac

SEQ ID NO: 68270 - DNA, 600 bp, Chicken  19866894339084_4
attattattacagctatccttaccagttttctgatggtctgaagaggtgtgtagctagttcattcaagtgtaatcttcatcacctgggttcatatcactctttgactttcctgtggtcagaatttttctgttttttatagaagttcagtgacgctgatcagaattgatcattatttctatcagtaatttaaaaattatagtttcactttactggaagtgtccagaaaatatgaataagtacttcaggttaactaaactgaagattgttagtttacyagtgaaaaaatgcctaagatgtcrtagtacagtttttctgaagtgtagggtgatttgctgaacttacattgaaagcactttattgccacctcacccttacacagcaagaaaaataataaatcatataaatgatcagtttgcagtctgcctgacatttgtctaatgtgactcacagaaatgtagtacattcttgaatagatctgtgtgtttggtgtggctgctggtttgtataaccaggaaatgtgaacttctaaacaagctgttcaaagtcagtgtcttataagaagcaacgtaattaacactagttatgactgtcatgtactt

SEQ ID NO: 68271 - DNA, 600 bp, Chicken  19866894339085_1
taaaattaattttagccaattacagggacgtaggcataagggaatacataccatcccacagtatggcccagcctggggatagctggtatctggcccattgtaaaggatcaggtagttgctactgcagtcccctgggtcatcaatgctgatgaaatcgaagttcactgtgacaattcgtcccttgggcacagtaatgacccactcacaatgagtgttgttccagtaagttgcagggaatctgggactagcaaacgtgcctgtgctgccgtataatgttcctccacatcctgtaaatggacwtggttaacaagcttagaagacttagttccacaagatactacacagtgtagtacgttagtacagtattagtagtagcactgaaaagcagagagacactgagctggaacagtgaatacaggtaagagcacttttccaatgagacaaaactaaggctctagcttcagcagcctgacattatggaaggatcgtcatacatcactggatgttgctgaacgctaaaaatcaactcagaaatcatatttttgtaggtgaacttaggattgtctttttttttttccctccatctgcttcatcaacact

SEQ ID NO: 68272 - DNA, 600 bp, Chicken  19866894339086_1
tacgcagctgtgctcttttcattttgatacaagaattacagaataggtttcaagactgccaaaaattcacccactttttttgtttctttgcagctccatcttctcttgacataaatacattactggtcaattttcaaatagaacatgtagagctccaatctaaagtctgaactcttcaataacaataaaaagtaaaaattaaaataagttttgttacttatattatccgatgcattttctgagggctactctgaaagtaatgcctctcattgtatggtgttggcccatgtcgtcagaggyggatgttggtggtgtggcagtaggggtcgaacyttcccaccagtattccatgacgtgttactgccgtgtgacagatggcagcaraggggcagtctgacacartgggtctgacatggaagtgcacatgaagcagaggtgtgtcactgaactcctccatgtggaaacaatgtcacccactgacattcaccgacgcacacggagcattgaaggagaccaagcagtgatgtgagcacagtgaggctgtgggcagtggcaatagtaacagtaggtcagctccgctggtgcagattgttacacgca

SEQ ID NO: 68273 - DNA, 600 bp, Chicken  19866894339086_2
aattacagaataggtttcaagactgccaaaaattcacccactttttttgtttctttgcagctccatcttctcttgacataaatacattactggtcaattttcaaatagaacatgtagagctccaatctaaagtctgaactcttcaataacaataaaaagtaaaaattaaaataagttttgttacttatattatccgatgcattttctgagggctactctgaaagtaatgcctctcattgtatggtgttggcccatgtcgtcagaggyggatgttggtggtgtggcagtaggggtcgaacyttcccaccagtattccatgacgtgttactgccgtgtgacagatggcagcaraggggcagtctgacacartgggtctgacatggaagtgcacatgaagcagaggtgtgtcactgaactcctccatgtggaaacaatgtcacccactgacattcaccgacgcacacggagcattgaaggagaccaagcagtgatgtgagcacagtgaggctgtgggcagtggcaatagtaacagtaggtcagctccgctggtgcagattgttacacgcacggtacgcaggctcttcttcatcactggtgaaa

SEQ ID NO: 68274 - DNA, 600 bp, Chicken  19866894339086_3
tctttgcagctccatcttctcttgacataaatacattactggtcaattttcaaatagaacatgtagagctccaatctaaagtctgaactcttcaataacaataaaaagtaaaaattaaaataagttttgttacttatattatccgatgcattttctgagggctactctgaaagtaatgcctctcattgtatggtgttggcccatgtcgtcagaggyggatgttggtggtgtggcagtaggggtcgaacyttcccaccagtattccatgacgtgttactgccgtgtgacagatggcagcaraggggcagtctgacacartgggtctgacatggaagtgcacatgaagcagaggtgtgtcactgaactcctccatgtggaaacaatgtcacccactgacattcaccgacgcacacggagcattgaaggagaccaagcagtgatgtgagcacagtgaggctgtgggcagtggcaatagtaacagtaggtcagctccgctggtgcagattgttacacgcacggtacgcaggctcttcttcatcactggtgaaaaggcatagctcatggtggggacagttttgtagctgagaatgtggaaagagg

SEQ ID NO: 68275 - DNA, 600 bp, Chicken  19866894339086_4
ctcttgacataaatacattactggtcaattttcaaatagaacatgtagagctccaatctaaagtctgaactcttcaataacaataaaaagtaaaaattaaaataagttttgttacttatattatccgatgcattttctgagggctactctgaaagtaatgcctctcattgtatggtgttggcccatgtcgtcagaggyggatgttggtggtgtggcagtaggggtcgaacyttcccaccagtattccatgacgtgttactgccgtgtgacagatggcagcaraggggcagtctgacacartgggtctgacatggaagtgcacatgaagcagaggtgtgtcactgaactcctccatgtggaaacaatgtcacccactgacattcaccgacgcacacggagcattgaaggagaccaagcagtgatgtgagcacagtgaggctgtgggcagtggcaatagtaacagtaggtcagctccgctggtgcagattgttacacgcacggtacgcaggctcttcttcatcactggtgaaaaggcatagctcatggtggggacagttttgtagctgagaatgtggaaagaggtttcaagaaggattacag

SEQ ID NO: 68276 - DNA, 600 bp, Chicken  19866894339094_1
aatacaatatacgtgagctggaatcccatggtgccaggcagggcagcacatctcgagtcctgaggcaggcagagcagctcacatcagatcagctctgtagctccgggccctgaaggaccactgaagcctttagtctctgtccctcagcccttgtttcccatggagtcaggttctttccaacggcctagcccccgctttcagtaactctgatttttgccatggcaacctgtaaaattctgtacttggcttgaggttgaaaattagcatgctctccattcactcacctggttccttccctcyctgttagttctgcaagggccattgaaccgtcacacagtgtatttccatacgaggggggtaggggcgaggatttggcattcagaatgcatgcagttgatgggaagaaacctgggtgaggaacaccctagcgaaacaggaaggttacgaggaagattcaaagcccccaacacacactttctagatacacacgggaagtcatttttaacagcaaggccgaactgaatacgggtgatgacagggggcttacagcgcagcacgagccgcatctagcggcaaaggaaagtaatgcttctctttggr

SEQ ID NO: 68277 - DNA, 600 bp, Chicken  19866894339094_2
ctgttagttctgcaagggccattgaaccgtcacacagtgtatttccatacgaggggggtaggggcgaggatttggcattcagaatgcatgcagttgatgggaagaaacctgggtgaggaacaccctagcgaaacaggaaggttacgaggaagattcaaagcccccaacacacactttctagatacacacgggaagtcatttttaacagcaaggccgaactgaatacgggtgatgacagggggcttacagcgcagcacgagccgcatctagcggcaaaggaaagtaatgcttctctttggrggagaaggacggctgcttagtgaaagatcaagccctggagaggaactagggcttccttctatgctgctcaagtctggagcctacactgagagtgtactgccttcaggaataaaaacagctcccactaagagttacaaccctcagcaattcagccagggctggtttggaagctacagtagcagccatcaggctactttgcctccttgataaagactgctgctccctgcactaagcagggcagcatgggcagaaaggcaccaaatacagaccggtgaaagagagttgcatgcattagccaag

SEQ ID NO: 68278 - DNA, 600 bp, Chicken  19866894339095_1
tcctttctctgagcaaagcttagacagttacaagtctgccaacacaagttaaagacaagaccttccataaattgtattgcataactgctccagctccgatttgtccaaaaagaatggttttcgtgggacattttagaaccaagacaatgttatgactaccgatttactggcctgatggaaccagtaaactacggttcttaatgaaattagatccatagatttagtgcattttgaagcatgtagataagcagaaagagaagatagggtgattgaggaagctacatgcactggctacttccycagatgtttttataaccttcactaatttgcaatttggaatatcttgagccccaagtaatatctttcatataaatcctcttccccctgccgagcaaggggtggattataatgaaattttaatgaggcaaagttgtgaggcagatcagagcgctgtgcaggaatgtttgaaagactttcagacatgggatgaaaatcaatattgaaaaaagaaaatgaaaatcatctttctgtacttaaaggggtaatggaaaacaaacaaaaagtttctttctctcctcagtggctcccaggtgttaccgg

SEQ ID NO: 68279 - DNA, 600 bp, Chicken  19866894339102_1
cctggctttgaaaatgaaactgggtttattgcagcactgaatgtggggtgtataaatgtttcccagtggttttcaaagctgtttcttaaagctgaaagtgaaagataactgcattgctctttttctggctcacaaattctgctgacatcaaatttgttcagtgagagaagctactttgaaagaagttctctatccggggacctgtaccttatcccaaggaaataacttactgtcttctgttttctatgacaacacacgcacacacaaaaggtttcaacatacgtacatctaaaggcaaaygraaagcaaaatcctaactctccaattgtagcagcaaataacgtgctgaacacttcgtgcatgttcatttaaaattctctcttttcattgttttcccaaattctgggaggagagaggtgraggttcagcttcttcagtgaccagagtaggggctgcatcattgtgtcggtgtaagagagaaagggccaatatgggatccttcacaagggctggttaatgtgcccagacccgtgattcaaatatgaatttagcaacctcaaagctcatcrtgcttctaaggttacatcttcctgatgtatt

SEQ ID NO: 68280 - DNA, 600 bp, Chicken  19866894339102_2
tggctttgaaaatgaaactgggtttattgcagcactgaatgtggggtgtataaatgtttcccagtggttttcaaagctgtttcttaaagctgaaagtgaaagataactgcattgctctttttctggctcacaaattctgctgacatcaaatttgttcagtgagagaagctactttgaaagaagttctctatccggggacctgtaccttatcccaaggaaataacttactgtcttctgttttctatgacaacacacgcacacacaaaaggtttcaacatacgtacatctaaaggcaaaygraaagcaaaatcctaactctccaattgtagcagcaaataacgtgctgaacacttcgtgcatgttcatttaaaattctctcttttcattgttttcccaaattctgggaggagagaggtgraggttcagcttcttcagtgaccagagtaggggctgcatcattgtgtcggtgtaagagagaaagggccaatatgggatccttcacaagggctggttaatgtgcccagacccgtgattcaaatatgaatttagcaacctcaaagctcatcrtgcttctaaggttacatcttcctgatgtatttc

SEQ ID NO: 68281 - DNA, 600 bp, Chicken  19866894339102_3
ttttctggctcacaaattctgctgacatcaaatttgttcagtgagagaagctactttgaaagaagttctctatccggggacctgtaccttatcccaaggaaataacttactgtcttctgttttctatgacaacacacgcacacacaaaaggtttcaacatacgtacatctaaaggcaaaygraaagcaaaatcctaactctccaattgtagcagcaaataacgtgctgaacacttcgtgcatgttcatttaaaattctctcttttcattgttttcccaaattctgggaggagagaggtgraggttcagcttcttcagtgaccagagtaggggctgcatcattgtgtcggtgtaagagagaaagggccaatatgggatccttcacaagggctggttaatgtgcccagacccgtgattcaaatatgaatttagcaacctcaaagctcatcrtgcttctaaggttacatcttcctgatgtatttctttttctttttgaagtagagactttgtgcttagcaaaaagaagagcggggaacccagaggaaagctggggagggactctcttcagagaatgtagtaacaaagagtaatgacttttagt

SEQ ID NO: 68282 - DNA, 600 bp, Chicken  19866894339102_4
ggtttcaacatacgtacatctaaaggcaaaygraaagcaaaatcctaactctccaattgtagcagcaaataacgtgctgaacacttcgtgcatgttcatttaaaattctctcttttcattgttttcccaaattctgggaggagagaggtgraggttcagcttcttcagtgaccagagtaggggctgcatcattgtgtcggtgtaagagagaaagggccaatatgggatccttcacaagggctggttaatgtgcccagacccgtgattcaaatatgaatttagcaacctcaaagctcatcrtgcttctaaggttacatcttcctgatgtatttctttttctttttgaagtagagactttgtgcttagcaaaaagaagagcggggaacccagaggaaagctggggagggactctcttcagagaatgtagtaacaaagagtaatgacttttagttgaaaggtagtagatktggattaggtacaaggggggaatttctttactcagagggcagtgaggcgctggcacagatgcccagagacgctgtggttccccatccctggaggcactcaaggccaggttggatggggccctgggcagcctga

SEQ ID NO: 68283 - DNA, 580 bp, Chicken  19866894339102_5
gtgaccagagtaggggctgcatcattgtgtcggtgtaagagagaaagggccaatatgggatccttcacaagggctggttaatgtgcccagacccgtgattcaaatatgaatttagcaacctcaaagctcatcrtgcttctaaggttacatcttcctgatgtatttctttttctttttgaagtagagactttgtgcttagcaaaaagaagagcggggaacccagaggaaagctggggagggactctcttcagagaatgtagtaacaaagagtaatgacttttagttgaaaggtagtagatktggattaggtacaaggggggaatttctttactcagagggcagtgaggcgctggcacagatgcccagagacgctgtggttccccatccctggaggcactcaaggccaggttggatggggccctgggcagcctgagctggtggggggcagccctgcccacagcaggggttggggcagggtgagcttttgaggtcccttccaacccagaccattctatgaacgttgcatttattattgaggaaatgttattttttaagaaatattttactctttatttatatt

SEQ ID NO: 68284 - DNA, 526 bp, Chicken  19866894339118_1
cccacttgagtcttaattttctctgtcgggtttatcagattatttggctcaaataaacccatcagaaaatagccattaggtggagagcaggctgaagggaatggaaataaaagtaggatggagttggagggggaaaaaaaaggggccacctgcctgttttcctattttatgcaaggtaacaaggagtgctgcatgtgttgtgcaggatcagggtaaagtgggttgtgctgagtggaaaactgtcataaacacttcagctatgtgtgaatcatagaatcaccacggttggaaaagacctcyragatcatccagtccaacrtcctcccaccaccaatgtagcatttctcaccaaacrttgccctgggttcagcagggggctgtagtargggagcaggcagcttctccaccagaggaatctgcaaactggagttctctgtgcttatggcagcagaactggcacctactggggtgggtcacatcacaggctggagcttcccctcattaatacctgaagctcaagcacttg

SEQ ID NO: 68285 - DNA, 525 bp, Chicken  19866894339118_2
ccacttgagtcttaattttctctgtcgggtttatcagattatttggctcaaataaacccatcagaaaatagccattaggtggagagcaggctgaagggaatggaaataaaagtaggatggagttggagggggaaaaaaaaggggccacctgcctgttttcctattttatgcaaggtaacaaggagtgctgcatgtgttgtgcaggatcagggtaaagtgggttgtgctgagtggaaaactgtcataaacacttcagctatgtgtgaatcatagaatcaccacggttggaaaagacctcyragatcatccagtccaacrtcctcccaccaccaatgtagcatttctcaccaaacrttgccctgggttcagcagggggctgtagtargggagcaggcagcttctccaccagaggaatctgcaaactggagttctctgtgcttatggcagcagaactggcacctactggggtgggtcacatcacaggctggagcttcccctcattaatacctgaagctcaagcacttg

SEQ ID NO: 68286 - DNA, 507 bp, Chicken  19866894339118_3
tctctgtcgggtttatcagattatttggctcaaataaacccatcagaaaatagccattaggtggagagcaggctgaagggaatggaaataaaagtaggatggagttggagggggaaaaaaaaggggccacctgcctgttttcctattttatgcaaggtaacaaggagtgctgcatgtgttgtgcaggatcagggtaaagtgggttgtgctgagtggaaaactgtcataaacacttcagctatgtgtgaatcatagaatcaccacggttggaaaagacctcyragatcatccagtccaacrtcctcccaccaccaatgtagcatttctcaccaaacrttgccctgggttcagcagggggctgtagtargggagcaggcagcttctccaccagaggaatctgcaaactggagttctctgtgcttatggcagcagaactggcacctactggggtgggtcacatcacaggctggagcttcccctcattaatacctgaagctcaagcacttg

SEQ ID NO: 68287 - DNA, 471 bp, Chicken  19866894339118_4
aacccatcagaaaatagccattaggtggagagcaggctgaagggaatggaaataaaagtaggatggagttggagggggaaaaaaaaggggccacctgcctgttttcctattttatgcaaggtaacaaggagtgctgcatgtgttgtgcaggatcagggtaaagtgggttgtgctgagtggaaaactgtcataaacacttcagctatgtgtgaatcatagaatcaccacggttggaaaagacctcyragatcatccagtccaacrtcctcccaccaccaatgtagcatttctcaccaaacrttgccctgggttcagcagggggctgtagtargggagcaggcagcttctccaccagaggaatctgcaaactggagttctctgtgcttatggcagcagaactggcacctactggggtgggtcacatcacaggctggagcttcccctcattaatacctgaagctcaagcacttg

SEQ ID NO: 68288 - DNA, 440 bp, Chicken  19866894339118_5
gcaggctgaagggaatggaaataaaagtaggatggagttggagggggaaaaaaaaggggccacctgcctgttttcctattttatgcaaggtaacaaggagtgctgcatgtgttgtgcaggatcagggtaaagtgggttgtgctgagtggaaaactgtcataaacacttcagctatgtgtgaatcatagaatcaccacggttggaaaagacctcyragatcatccagtccaacrtcctcccaccaccaatgtagcatttctcaccaaacrttgccctgggttcagcagggggctgtagtargggagcaggcagcttctccaccagaggaatctgcaaactggagttctctgtgcttatggcagcagaactggcacctactggggtgggtcacatcacaggctggagcttcccctcattaatacctgaagctcaagcacttg

SEQ ID NO: 68289 - DNA, 600 bp, Chicken  19866894339124_1
cattacctgttcacaagcttactagttttctgccactatctgttgctaacacacacgcctgtttgttcctgggtcacgctcagtacaactaacccaattgtgcttatttttcagatcctaggcaatgcagactatgtcttcactagtatctttacattagaaattattcttaaggtaaccaatctgagcaataaattcatttctacttctttctcctctctctcttcctttctttctttcttgattttttttctttcttgacttctttctttctttctcttttgccttctcttgctctcygttgctttttttttttctttaactccttttactctctgcacaaaagattgcttatcttttggttttatgcttttgctagttgcttaaaaatctgatgtgaacttgtaaaataaggcctatatcaacacaatgctttttagaggaaatgcaatgacaggatgacaagtatgagaggaccaagataaaggccatcaccccagaaattgctctcactgccctggccagcttttccaaaacagaatttatttgctttacaaagaaccctgagctcatactcctcttatttgtcctacaactcaa

SEQ ID NO: 68290 - DNA, 557 bp, Chicken  19866894339133_1
ggctgcacaagagcatgggcattcaagacacagaatcataggatccttggggttggataggacctttaaaggtcatctatacaactcccctgcaatgaacaggaacatctgcagcttgatcaggtgctcagagcctgatccagcctggccttgattgtctccagggatggagcatccatcacatctcagggcaacctgttccagtgctttaccaccctaccaacccagaatggtccttcgagctagtctgaaggatgcactccctaatagtgtgtgggccctaggtaggctttgtagacraagtgcttggggaaaggattaaaaagaagtgaagttgagagttgagagatgaagatctcgtcattatgccaggattctcagccttcccatggcttcatttgcttgtacaaacctaatgaacctgctgccatgacagcatcacattgctattccagcacattgtttttcgctgctgtctcctgtgaattaggcatgagcatgtgcctcctcttttggtgtaactactcttttgtagttacattcatttgagatgattg

SEQ ID NO: 68291 - DNA, 600 bp, Chicken  19866894339134_1
gttactggatatataagggaggcatgtcctatggttttgagcagaataattcccatcaaaaatggccttttgcattttatgctgcagaggggctgccttttatccagcattgttctgcagtgatggtcagcattggttgtgtgaggccagcgtgggcatctctgggcagctgtgggtgaggttccaggtgcagtgttgtgattattgcaatgaaattgttgggcttttgcctttaaacacagggtgtgtttcataggacagcttcaagcataacagcagctgccactgttgcagctaagragattgatatttgtgatgcttggtctaggactgtgaattgctcatgttaaacttatgagaccaacactctgctgcctgttagatggttgtgagttttctttttgttcttttgttgacaaaatccacgagaacttcagttttgttgctcacctaaatgtgtttatctgaatcaaggttctcagcaggaaatctctggaaatgacctgtgtttgtaattcatgctcttcgtggtttaatgttcaaattaagataggcatcttctggtcatttgcacattgtttgtgactggataaaatctga

SEQ ID NO: 68292 - DNA, 600 bp, Chicken  19866894339155_1
tgcggggcaagttggtttggcactgtcctatgcaatcactctcatgggaacattccagtggggtgttagacaaagtgctgaagttgaaaacctggtaacgttaatttcttccttttcgtttcttggttcctttgtgtagttgtgacatgatgctttaaggatggtagtcttcttagttaacttaggatgttaattaccttatcgggcacctaaagcactacttacagacagtagagaaaaacagcttcttctagagtataatttgtctcattgattttgaatgtctattcagatgaattktccatctctttataatctccctttttcagtagaaagaaggctgtctagttttgatgtagacatctgcattcaaagtcactaaattacataaaatgaatccctcaataagtaagattttttctgaaagattttttgacattggagatttgaatttttttgctatgcgttattgcatgttttatttatatttgtatccatcattagaatttttaagatctcgttaattcactgtaaaggcttacacgttcttaccttgttttaagttagcaaatatttgaaaatatttaagtttatattcac

SEQ ID NO: 68293 - DNA, 600 bp, Chicken  19866894339156_1
tatttttttctctacttactgctatctagtataagatataaagacagaaactctttaaggtgctaaaattcagaatttttgaaaagaggtattttggatgtttgctgaaaacaaacctcattaaaaacacttggtggacagtggctgtaatggtttaaagaaagcattttcaacaccatttttctgggcatggatgtccccagatttcagcccttggagctgttgtgtgggcaggggctcccagtgggacctaccacctccacaacctgcacccagcctcgggctgggagaactgcatcraggttacttatataggtaagaagttatttacataaataaatgataaggagatgctcttgcagctgtgacacagacagatatattctggtggagagcagcgataacattgtactattaaatacagccaatggaagtggctatcagtgaatatttccccagcccagatgccattctcctagagaaaaacacagyaaaagacaattctatggtgtctggtgtccaacccatggctggtgcaaatcaggattgtccctgggctgcaaatacagtttacagtcaatttacaccagatgggagttg

SEQ ID NO: 68294 - DNA, 600 bp, Chicken  19866894339156_2
gatgtccccagatttcagcccttggagctgttgtgtgggcaggggctcccagtgggacctaccacctccacaacctgcacccagcctcgggctgggagaactgcatcraggttacttatataggtaagaagttatttacataaataaatgataaggagatgctcttgcagctgtgacacagacagatatattctggtggagagcagcgataacattgtactattaaatacagccaatggaagtggctatcagtgaatatttccccagcccagatgccattctcctagagaaaaacacagyaaaagacaattctatggtgtctggtgtccaacccatggctggtgcaaatcaggattgtccctgggctgcaaatacagtttacagtcaatttacaccagatgggagttggacttcacaaagaaatgcctggaggctaaatgatattcttgaaagttgcaaagccttggattatgaaatctctcttaatatatttccatttcagctccttccagtatcatttgctcacagcagtctgaatgcagatgaaacatctatttcattatctcaaatagctcataaatgctttttaaaaattccatt

SEQ ID NO: 68295 - DNA, 599 bp, Chicken  19866894339158_1
  misc_feature (1)..(4): n is any nucleotide
nnnnaaggattgactctttgaattgtttagaattcagcatgaagtggaactgcaaatccatgcatatctcatagggcttgagagatgaataatgtggtgcttaattcttcttagaagagggaactgaattcttctgcttcacatgctgagggaatgatgttgacgctgctatctagagaaatgcttgaggatgtacacttcagtatacagagaaaaatagtggacttaagattttatctgctttttagcttaacttctaaatagcatgtaggtggaggtggatgttatatgcacaaggcrttctgcaagatttctgtgagtaattatttaagtaattaagtacagttctcatttatgtggcaaggctggaaagtttcatcmtctctgccagaagtctttctaagacacaaattataccaggaaaagagtcmatttttcagaggaatacagaaccgtagagactgttagagctctggagatcakctagttcaaacccttgctaaagcaggttccctagggaatttctgtgttccaatctgtgcctattgcttcttgttctggcactgggcaccactggaaagagcctggcctcatctgct

SEQ ID NO: 68296 - DNA, 600 bp, Chicken  19866894339158_2
gagatgaataatgtggtgcttaattcttcttagaagagggaactgaattcttctgcttcacatgctgagggaatgatgttgacgctgctatctagagaaatgcttgaggatgtacacttcagtatacagagaaaaatagtggacttaagattttatctgctttttagcttaacttctaaatagcatgtaggtggaggtggatgttatatgcacaaggcrttctgcaagatttctgtgagtaattatttaagtaattaagtacagttctcatttatgtggcaaggctggaaagtttcatcmtctctgccagaagtctttctaagacacaaattataccaggaaaagagtcmatttttcagaggaatacagaaccgtagagactgttagagctctggagatcakctagttcaaacccttgctaaagcaggttccctagggaatttctgtgttccaatctgtgcctattgcttcttgttctggcactgggcaccactggaaagagcctggcctcatctgcttgacgcctgcctgttagatatttataagcgttgataagatgcctcctcagtcttctccagactgaacagccccagatctcta

SEQ ID NO: 68297 - DNA, 600 bp, Chicken  19866894339158_3
ttctgcttcacatgctgagggaatgatgttgacgctgctatctagagaaatgcttgaggatgtacacttcagtatacagagaaaaatagtggacttaagattttatctgctttttagcttaacttctaaatagcatgtaggtggaggtggatgttatatgcacaaggcrttctgcaagatttctgtgagtaattatttaagtaattaagtacagttctcatttatgtggcaaggctggaaagtttcatcmtctctgccagaagtctttctaagacacaaattataccaggaaaagagtcmatttttcagaggaatacagaaccgtagagactgttagagctctggagatcakctagttcaaacccttgctaaagcaggttccctagggaatttctgtgttccaatctgtgcctattgcttcttgttctggcactgggcaccactggaaagagcctggcctcatctgcttgacgcctgcctgttagatatttataagcgttgataagatgcctcctcagtcttctccagactgaacagccccagatctctaggcctttcctcatagacttaagcaatacttggttatcagtgctgaatatt

SEQ ID NO: 68298 - DNA, 600 bp, Chicken  19866894339158_4
cttgaggatgtacacttcagtatacagagaaaaatagtggacttaagattttatctgctttttagcttaacttctaaatagcatgtaggtggaggtggatgttatatgcacaaggcrttctgcaagatttctgtgagtaattatttaagtaattaagtacagttctcatttatgtggcaaggctggaaagtttcatcmtctctgccagaagtctttctaagacacaaattataccaggaaaagagtcmatttttcagaggaatacagaaccgtagagactgttagagctctggagatcakctagttcaaacccttgctaaagcaggttccctagggaatttctgtgttccaatctgtgcctattgcttcttgttctggcactgggcaccactggaaagagcctggcctcatctgcttgacgcctgcctgttagatatttataagcgttgataagatgcctcctcagtcttctccagactgaacagccccagatctctaggcctttcctcatagacttaagcaatacttggttatcagtgctgaatatttcatggtggaataattgctttaacgcctagtatttctgtggtcagtcctaat

SEQ ID NO: 68299 - DNA, 600 bp, Chicken  19866894339161_1
gttgctgttgtataagatctgcttaccctgactccattgtttcccttcaacccaataagtccaacctacatatatcatatataaaagcaaatgaaagtagggagggtaaatagacatgcatattaaagcatttcaatcacatgttgattacatgacttccctgtgctctggggtagatagtgcagtgtgatagagaagttggctgggttaacatactggctccttacacaacctccttgttctatgggagagatgacactgccctgcagggaggctgggcaaccatcataattgttcttsctgttccagctacctttggttacaccagcactcttagttcatccttaccttaggattgggtaaagaacacaaatgcagaatcacagaggttgaggttaggagggacctctgggttcatcttatccaattcttacataaacagggacacccagggctgtgtactcagaaccacatctaacaggcttttgaagatctccagagaggagactctggaccatctctaggcaacctgtagcaatgtttggtcactcatacagcacaggagtgtttagaggggagcagctgattcatgtcatctgc

SEQ ID NO: 68300 - DNA, 599 bp, Chicken  19866894339164_1
  misc_feature (1)..(201): n is any nucleotide
nnnnnnnnnnnnnnnnnnnnnnnnnnnnnnnnnnnnnnnnnnnnnnnnnnnnnnnnnnnnnnnnnnnnnnnnnnnnnnnnnnnnnnnnnnnnnnnnnnnnnnnnnnnnnnnnnnnnnnnnnnnnnnnnnnnnnnnnnnnnnnnnnnnnnnnnnnnnnnnnnnnnnnnnnnnnnnnnnnnnnnnnnnnnnnnnnnnnnnnnncaggagcaggggctcgaggggcagctggagccccaacttcacctgctgctgtggcaatcgccagtgagagggtggcagctccgggcgcagtcgcagggscggcagccgctggtgccgaagccccagtatccgggcaggcagcggtcacagcgcggccccgccacaccaggcttgcaggggcagtcaccggtgctggggtcgcagaaggtgcgggggcccagggggagcgcggccgatcccagagggtggcaggagcaggctgtggggacaccacggggttagtcctccagcaaygacgactcgctggcttaacgggagggtaaaaatttttactttgcgactacaaaggcaacaaaagagcaaagccattacgtgtcacagaacctgactttctcttc

SEQ ID NO: 68301 - DNA, 599 bp, Chicken  19866894339164_2
  misc_feature (1)..(6): n is any nucleotide
nnnnnncaggagcaggggctcgaggggcagctggagccccaacttcacctgctgctgtggcaatcgccagtgagagggtggcagctccgggcgcagtcgcagggscggcagccgctggtgccgaagccccagtatccgggcaggcagcggtcacagcgcggccccgccacaccaggcttgcaggggcagtcaccggtgctggggtcgcagaaggtgcgggggcccagggggagcgcggccgatcccagagggtggcaggagcaggctgtggggacaccacggggttagtcctccagcaaygacgactcgctggcttaacgggagggtaaaaatttttactttgcgactacaaaggcaacaaaagagcaaagccattacgtgtcacagaacctgactttctcttcaaatacctgctgctgtgcatatgtgtaattttgttctggtgacgtgcttgtgggctcagggctttgacagatatggagcactgcttcaaaatatgaaaggatgagttcatattgacagtcaacttttagagaagaccacgaatccaaaatctccgccaaagtaatccccgaattttccccgccctttccattccc

SEQ ID NO: 68302 - DNA, 600 bp, Chicken  19866894339168_1
caaagaatgagaaggtcttccaattcctttctcatagctgtggaagtcgaaggacttttcttcttctcttcttccaccacgctcccaagacagtggtacgaacattttcaacccttccctatgctttccctgatgatctttggaggtttcttctctgtgtttaaaaactatttgtagtgttataaacagacagttgatttttgcatactccttcccagcattctgttgcaactttttcctgtttagagtcacgcccactgcgatttgttaaaaaaatgtgtatcacttggcagtgttctygcaccaaaagaaaaaaagatatatttgtatataaagtaacttctttgcgtgttcacgttttattttggaaaaacaggtgtttaaaaattttagaatttttttaacaaaattctaaaaagaaaaaaaaaatcacaatatttacagagataacataatggcttagccatgcaaaacaaatcactttggtttttcccccattttactttggtttaaatactgaccaagattataattttctttttctcctctttgccaaataaaatagtaacaaatcaaaagtttagaggcatataacaggat

SEQ ID NO: 68303 - DNA, 599 bp, Chicken  19866894339170_1
  misc_feature (1)..(174): n is any nucleotide
nnnnnnnnnnnnnnnnnnnnnnnnnnnnnnnnnnnnnnnnnnnnnnnnnnnnnnnnnnnnnnnnnnnnnnnnnnnnnnnnnnnnnnnnnnnnnnnnnnnnnnnnnnnnnnnnnnnnnnnnnnnnnnnnnnnnnnnnnnnnnnnnnnnnnnnnnnnnnnnnnnnnnnnnnnnnnnacgtccgagagccgagggacgcggaaactgaatggggacctcctcgcctcggctctttcataacagcaggaacgcggcgcggcgatgcggtaacgcggcgattaggcaacgttttgtgaggggagrgaaggaaaggttcggtaatccgaagtgaataaagcccgaaagagccaactaagccatacctggatctcatgaatgcggccgaagccgtccttccagaagaactcgtagagattgtagagggtgttgggtccgggcatttcgtgcagactcttcaccctgcccagctgcggggagggctccagcagctcccccggccgcgccgctttgttctccgcgccgctccgcacctccagggactgactgcccgacagcccgggcgcctggtgaaacctgctgacaaaaagcgcgtgctggaagta

SEQ ID NO: 68304 - DNA, 600 bp, Chicken  19866894339174_1
ttcaaagattgattgaaataaaaatgtaaaggaaaatgtcttgttaaaataaataaaataatgatttcagcttctgttccattttgtctaaagtgactgacctaaactaggagacatctactaaattaagacacaatgaaaacaaatgaatcctggagaatattgctgagaatgacatcacttagccagtggcttaaataccacaaattcagttgatacttgcagatcggatatacagcaacaacatacaacaaaagcacatgaaacacagataggtatgtgaagagagaccacattackaaaacgttcacaaagcagtggcatgtgagaaagagggtaacattctgacttaagtaggctttgattcggaagaactgagaagtaacacttggcctagaactgctactgatttcctcagagcagctctccagaagccactyctaaagaggctttccaacttcttcttgacaacattttaaaaaaggatgatatgaaccagctgctgcttggaagaagaggaaggctagaacagcagaaaccctggacataacagaaatgactacagagaagagtggaaatcgtagactaaaatataacaaa

SEQ ID NO: 68305 - DNA, 560 bp, Chicken  19866894339174_2
aacaaatgaatcctggagaatattgctgagaatgacatcacttagccagtggcttaaataccacaaattcagttgatacttgcagatcggatatacagcaacaacatacaacaaaagcacatgaaacacagataggtatgtgaagagagaccacattackaaaacgttcacaaagcagtggcatgtgagaaagagggtaacattctgacttaagtaggctttgattcggaagaactgagaagtaacacttggcctagaactgctactgatttcctcagagcagctctccagaagccactyctaaagaggctttccaacttcttcttgacaacattttaaaaaaggatgatatgaaccagctgctgcttggaagaagaggaaggctagaacagcagaaaccctggacataacagaaatgactacagagaagagtggaaatcgtagactaaaatataacaaacagcacataaatgggaaggtcagttcttaagcagcagcaggaatagtgtttgttctctctgaagacagctgctactcccttctgaagcactaccaaggca

SEQ ID NO: 68306 - DNA, 600 bp, Chicken  19866894339178_1
ctccattcctccccagtctgcatcgtgtaacttgaatataatgtttagtttagagcatcctgtgaagcaaggaaatgcaaatgaaaaggaggactgaaaggggaagagagagataaacttcctgggcagtgaatgtgcagtgacataattttgttaattgtactgggaaaaagttgaaaagaggaaataaatagagtcaataacgggcactgttctggcctcagctgcctgtatccttttaagtggctgaccgtgtgtgtctgagcctgacctggcagtgtgtggcatctgtcactggtycttctggaaaaaaaagaaaccctgtagttcagtaaaggaaaaatacttcattgcaaataattcaccttgttctgacacctcaaattagaatgaataaaatcgaatgtgtttagtcacagtggtgtactaaattcccatactttccttccctccttccacacacacacagcttctatgggaaytgagtgcagtgtgtgaacttaacgcgttttactttgggaatcagatacgtgataacatcaacttacccagcttggcttccagcgtgaagccctggccctgtgaaagccttcctcacca

SEQ ID NO: 68307 - DNA, 600 bp, Chicken  19866894339178_2
ggaaataaatagagtcaataacgggcactgttctggcctcagctgcctgtatccttttaagtggctgaccgtgtgtgtctgagcctgacctggcagtgtgtggcatctgtcactggtycttctggaaaaaaaagaaaccctgtagttcagtaaaggaaaaatacttcattgcaaataattcaccttgttctgacacctcaaattagaatgaataaaatcgaatgtgtttagtcacagtggtgtactaaattcccatactttccttccctccttccacacacacacagcttctatgggaaytgagtgcagtgtgtgaacttaacgcgttttactttgggaatcagatacgtgataacatcaacttacccagcttggcttccagcgtgaagccctggccctgtgaaagccttcctcaccattgtttgctcgccctcaaatttataaggcttccttatgccatcatgctttccttttagtcgcttatgtggaactcaagtttgggctgtgtttaataagccgagtagctctgcttgcgtgaaactgggctgtaaatattgattactcgcttgacttgggtgggagatgtttgtatggcatcct

SEQ ID NO: 68308 - DNA, 546 bp, Chicken  19866894339178_3
cctcacgtggtgctttaagcacttcagtgaagctgtcttcaataaataaacctttggggattcttgcagcacagctttttggagatggcacaacacttactctggactttatcttctaccagcttaggtgcaagatctttgaattacctgggatgtgtacctactctgataatagcacgctggcatggcaggtatgcaacagagcctgatggcttggcttatttcctacagtttcatcgtgaaaatggagggattggatctagagttttgggttgtgtggcaccttttgccccagtgcaygtatgtgtccaggttgatgtgtacaagttgagatgtgttttctggtcatagtgatggctgaaacaggtctaggacctatggactctgctactggagctaggaccagaggcctgaagttacaccagggaaggttcgggttggatattaggaattatttcttgtcagaaagagtggtgaggcactggcacaggctgcccagggatgtggtggggtcaccgtccctggagatgttcaagaaacatggag

SEQ ID NO: 68309 - DNA, 600 bp, Chicken  19866894339181_1
ggctatatttcctcatacatataggacagaatgtggaactatgacactctggaaacatctggaagctccttaactgcatgtctactgtagggtttaatcacgacattaataaaggaaaattcagagtatagaatatgaaacaagttaaaacattttcctcaagtgctgcaaaacataaaatgagatctgtaaacacaatttgatgtgcatatctttttgaactcaactgtttttccctatttcttaaaagaccagaagatattaccagaactatagaaaatgacggttctgttcttaaakaacatcaagttaaaacctcaacagtagtcaagtaaaaattaaaactgaaaatagcagaacaacctaactgtgtgatctaattccctgttacttgccatattaccagcaaagcatatggatccgctgggaagctcatatttctagctctccacaatatcactcatttactagctttgatttataattgaaagatcaagtcataaaattgstgcttcttcagacctacatgtattgagtcttcagaaagaataagcttaaattaccaaaacacttgcactgacacttattactaaattttac

SEQ ID NO: 68310 - DNA, 600 bp, Chicken  19866894339181_2
tatctttttgaactcaactgtttttccctatttcttaaaagaccagaagatattaccagaactatagaaaatgacggttctgttcttaaakaacatcaagttaaaacctcaacagtagtcaagtaaaaattaaaactgaaaatagcagaacaacctaactgtgtgatctaattccctgttacttgccatattaccagcaaagcatatggatccgctgggaagctcatatttctagctctccacaatatcactcatttactagctttgatttataattgaaagatcaagtcataaaattgstgcttcttcagacctacatgtattgagtcttcagaaagaataagcttaaattaccaaaacacttgcactgacacttattactaaattttacaagaagacagcattcactaggtatgagagggcagaatattktgcagagcagttttatattcctgtcttaacttatcagctaggaaatgagctctactgtaggatgtgcctcttgctcttcacaggtggtacaggaagggcaatccaattcttccctccagaactgcagaattgcaataaaattgtagacaaaagatatgaagattttag

SEQ ID NO: 68311 - DNA, 557 bp, Chicken  19866894339181_3
aaactgaaaatagcagaacaacctaactgtgtgatctaattccctgttacttgccatattaccagcaaagcatatggatccgctgggaagctcatatttctagctctccacaatatcactcatttactagctttgatttataattgaaagatcaagtcataaaattgstgcttcttcagacctacatgtattgagtcttcagaaagaataagcttaaattaccaaaacacttgcactgacacttattactaaattttacaagaagacagcattcactaggtatgagagggcagaatattktgcagagcagttttatattcctgtcttaacttatcagctaggaaatgagctctactgtaggatgtgcctcttgctcttcacaggtggtacaggaagggcaatccaattcttccctccagaactgcagaattgcaataaaattgtagacaaaagatatgaagattttagtgaagtactggaaggaatgcaaggaaagcaagggttacctgtgttatccagataaagattccagtaactcactaaaacaggctgctatc

SEQ ID NO: 68312 - DNA, 599 bp, Chicken  19866894339195_1
  misc_feature (1)..(29): n is any nucleotide
nnnnnnnnnnnnnnnnnnnnnnnnnnnnnaacggtaaaaggatggaaagctaaatagtgacatggaaaagagcgtgacaggcagcctgcactttagagcactcagggacttcagacatcttgcagctctcagccccggctgtcagctgccatagcactgccctaccttacaggtctggagtttgtagtttgcttttgccctaaacagcttgaaaagagctcagaggtgcctccttgaggaagaagtactgtaagaaatgccaggaagttcaggctgcttgtgcgagagactggcctctamattaagacaacaccaccagggagatgtcagtctcgggagtgaaatgcagaagttcaaaggccagctgtaaagcttaagtgtgggtgtgctcatgggtgctgtgcctaccttgatggtgcacaccatacaagatgcagactaygagccttcccaccaagaccataagccaggaaaaacacagatttgcaaagtctgttaagattccagcctgtaaaatgcaggattccaktaacaggtataggagtcttaaaaatgygtacaactttctggtacctcacaacatcatggaggccacaaat

SEQ ID NO: 68313 - DNA, 600 bp, Chicken  19866894339195_2
cagctgccatagcactgccctaccttacaggtctggagtttgtagtttgcttttgccctaaacagcttgaaaagagctcagaggtgcctccttgaggaagaagtactgtaagaaatgccaggaagttcaggctgcttgtgcgagagactggcctctamattaagacaacaccaccagggagatgtcagtctcgggagtgaaatgcagaagttcaaaggccagctgtaaagcttaagtgtgggtgtgctcatgggtgctgtgcctaccttgatggtgcacaccatacaagatgcagactaygagccttcccaccaagaccataagccaggaaaaacacagatttgcaaagtctgttaagattccagcctgtaaaatgcaggattccaktaacaggtataggagtcttaaaaatgygtacaactttctggtacctcacaacatcatggaggccacaaatgcatgaatgaaatcagatttctaacagcagagcagatagcgtgccttatacaaaagaaaacaacactgtctcttttcatactattgtttatgtacatgtttatgtagttaaacagcaaaagctttcctttaagggaaatgaca

SEQ ID NO: 68314 - DNA, 600 bp, Chicken  19866894339195_3
ctccttgaggaagaagtactgtaagaaatgccaggaagttcaggctgcttgtgcgagagactggcctctamattaagacaacaccaccagggagatgtcagtctcgggagtgaaatgcagaagttcaaaggccagctgtaaagcttaagtgtgggtgtgctcatgggtgctgtgcctaccttgatggtgcacaccatacaagatgcagactaygagccttcccaccaagaccataagccaggaaaaacacagatttgcaaagtctgttaagattccagcctgtaaaatgcaggattccaktaacaggtataggagtcttaaaaatgygtacaactttctggtacctcacaacatcatggaggccacaaatgcatgaatgaaatcagatttctaacagcagagcagatagcgtgccttatacaaaagaaaacaacactgtctcttttcatactattgtttatgtacatgtttatgtagttaaacagcaaaagctttcctttaagggaaatgacacactgagattgtttattctgttattactttaaaggcatttctatttgatttcattattcaatatgtattttcctttcccagttacac

SEQ ID NO: 68315 - DNA, 600 bp, Chicken  19866894339195_4
atgccaggaagttcaggctgcttgtgcgagagactggcctctamattaagacaacaccaccagggagatgtcagtctcgggagtgaaatgcagaagttcaaaggccagctgtaaagcttaagtgtgggtgtgctcatgggtgctgtgcctaccttgatggtgcacaccatacaagatgcagactaygagccttcccaccaagaccataagccaggaaaaacacagatttgcaaagtctgttaagattccagcctgtaaaatgcaggattccaktaacaggtataggagtcttaaaaatgygtacaactttctggtacctcacaacatcatggaggccacaaatgcatgaatgaaatcagatttctaacagcagagcagatagcgtgccttatacaaaagaaaacaacactgtctcttttcatactattgtttatgtacatgtttatgtagttaaacagcaaaagctttcctttaagggaaatgacacactgagattgtttattctgttattactttaaaggcatttctatttgatttcattattcaatatgtattttcctttcccagttacacttgcaagacaggtacaaaatccgcaca

SEQ ID NO: 68316 - DNA, 599 bp, Chicken  19866894339196_1
  misc_feature (1)..(23): n is any nucleotide
nnnnnnnnnnnnnnnnnnnnnnncaaggtgctttgttgtggcctggggctggcagggcccgtggtagcaacaccccgccttctctcgtgttcaggagtttgcccaggaccacaagcagttcctgcctgccctgggtgctctatttcagttgcactacagaactggagaggttcctctcagcactgaacgctgcatggaggaacaaataccaggtgagcgtttccctgcctgtaggcaaggcaggcccacctttctgcaaagggcgtgcagccccagagctccgtgcccgtacatccatgrggtgtggtgcctccctgcctgactgctccacgcgttgcaggtcgacctcctgcacaaggccattctggacgcagctgtcaagaagaaatgtgaggatgctcagagcctcatcaacagcgcctggcagcgcagcgacagcctgtgccgtgggcgggcagagcgagacccctggtgttagccctgaggggcaggatggctgayggacgccccagatgctctcagagtgggcacggacagcgcctgtggccgacggcgtcccaacctcttctgccatcacacctgtggtccccgtggccatg

SEQ ID NO: 68317 - DNA, 600 bp, Chicken  19866894339196_2
acaaataccaggtgagcgtttccctgcctgtaggcaaggcaggcccacctttctgcaaagggcgtgcagccccagagctccgtgcccgtacatccatgrggtgtggtgcctccctgcctgactgctccacgcgttgcaggtcgacctcctgcacaaggccattctggacgcagctgtcaagaagaaatgtgaggatgctcagagcctcatcaacagcgcctggcagcgcagcgacagcctgtgccgtgggcgggcagagcgagacccctggtgttagccctgaggggcaggatggctgayggacgccccagatgctctcagagtgggcacggacagcgcctgtggccgacggcgtcccaacctcttctgccatcacacctgtggtccccgtggccatgctggagacaaagccagccttgccctgttgtgcagcctgcgccctcctcgccctccagctgctgtggggcacagcgcgctgccttgcaaggagcacccccgttgtgttggagcggggtgggatggggttgggcatccaccgggcacagcacggctttgttcagtgcagaacagagcaggtggcagccgtggtgagacgggcac

SEQ ID NO: 68318 - DNA, 600 bp, Chicken  19866894339200_1
gaagttagactagtagaagaaaaatagggaaaggcactggagaaaaactgcagtatgtcccccatattgtaaggatgtcatggtaacagtgacctgtgcaacatgcctgcaggtagaaaaaatagctattttatgagattctttactttcccattccaagttctcaattttaaaccttagtcagtagctccaacttcctccctttaagaggtttagcataggaaaaaaacctcaaaatcttagcaaacaaattcaaccatttttccacccctccctgagacaagacttaccatacttgcrtcaacaacctgccctttgccagatatggtacgttcataaagggctataataatgcccagtgcacataacacacctccaccagcaaaatcagctagaagatttaaaggtgcatatggattttcaccttttctacccagctttgacagcacacctgaaagtacagcaaatgaagcaaacacacaaattaaaagtgatgtttgtaagtcaagtttcactctttgcaatctatgcaggcaaacacaggccaaagcaaacttcccccaatggattgctgattcatctccagacacatcttagcaa

SEQ ID NO: 68319 - DNA, 600 bp, Chicken  19866894339212_1
tggtctgcctttgctagcacacagtgagaaaaagcacggggtcacaggaacaggcatcttcagaagtcctctgcccatcccttgtcctcaaagcaggatcagctatccccagataacctcctgagcctcatcgccccgcacacgctcttctcatgttaacaatcatttgagattacgtgaatttggtctgctgctcttccctgaaaacagctcgcttaaaacccaattacctcctcaccaaccccagacacttcttgtcataacccctgaactcctgagctcaaacccttctgcagcaaytgaatgaagtgtgcagcatctccagcttgagcctggcaagggctgctcatgcatgcatgcataaaggcggcagaaagaggagctccggtttaccatgaagaactggcacagggtgatatgtgggaaaatgttgtgagctttgttcttcccgcagatctgctttgattgctgccagaactcggagagcttctgagccagggggccggtagggcgcaggtagaggacgtactcccgaggcagggtgtcatccaggaacggatcacccacatgggagaacagcctgagagagggagaaaggag

SEQ ID NO: 68320 - DNA, 600 bp, Chicken  19866894339212_2
tcatgcatgcatgcataaaggcggcagaaagaggagctccggtttaccatgaagaactggcacagggtgatatgtgggaaaatgttgtgagctttgttcttcccgcagatctgctttgattgctgccagaactcggagagcttctgagccagggggccggtagggcgcaggtagaggacgtactcccgaggcagggtgtcatccaggaacggatcacccacatgggagaacagcctgagagagggagaaaggagggttagattggcatagaaaggtgttttcttcagcaaaatcagcttyccctgtcctcgctccatttccttctccctttatagaaaaaaatcaactcttgggggtcaggcagagaggtgcactgtctctcttgcagcccattaccactactaagtaatacagaaaattgcgttttagtttcagactgagagtctgaagatgtaacctcactcactgtctctgcctttctggcattgtgtgcrtaacgtggtggggaaagcactggaaatggcttagcatctctgagaaggtggctctcagtgttctgtttgggcactgcggtgcagggaggactttcctttctcttcc

SEQ ID NO: 68321 - DNA, 555 bp, Chicken  19866894339212_3
ggtgtcatccaggaacggatcacccacatgggagaacagcctgagagagggagaaaggagggttagattggcatagaaaggtgttttcttcagcaaaatcagcttyccctgtcctcgctccatttccttctccctttatagaaaaaaatcaactcttgggggtcaggcagagaggtgcactgtctctcttgcagcccattaccactactaagtaatacagaaaattgcgttttagtttcagactgagagtctgaagatgtaacctcactcactgtctctgcctttctggcattgtgtgcrtaacgtggtggggaaagcactggaaatggcttagcatctctgagaaggtggctctcagtgttctgtttgggcactgcggtgcagggaggactttcctttctcttccccttttttttctattgctagagatcaccaactctcagcccaggcttttttctctattgtttatttacagccctcaaaccctggctctttaattgcaactgtgttttaggccatgttcccatcaaaacatctgcagtaacattctgcttt

SEQ ID NO: 68322 - DNA, 599 bp, Chicken  19866894339219_1
  misc_feature (1)..(149): n is any nucleotide
nnnnnnnnnnnnnnnnnnnnnnnnnnnnnnnnnnnnnnnnnnnnnnnnnnnnnnnnnnnnnnnnnnnnnnnnnnnnnnnnnnnnnnnnnnnnnnnnnnnnnnnnnnnnnnnnnnnnnnnnnnnnnnnnnnnnnnnnnnnnnnnnnnnnnaaaataataacaataatccttttctcccctacaagacctatgtgtaaatctaagaatttctctatggtgacctgagacattcaggtcaccacacatctacactgagtggttgacttagccaagtaccttccacttcagcaactggattgarcattcagagattaacaaggctaacccagctcacaaagatgatgtggagggaccacaagccacagacagtgaataacttgacctttcttagtatgccataccacagaatacmagctggtattcaayacgtgcttaagtgttctgtgaaatcaagaytgtagcattcaagttctcatggaaaccttccagcagtgaagttctagtctgcaggaggctgactcactgaggaaggacttttactaggagcaatacagtgctgcatcagagtgcaactgaagtgcagcccatcctagaaggatg

SEQ ID NO: 68323 - DNA, 599 bp, Chicken  19866894339219_2
  misc_feature (1)..(38): n is any nucleotide
nnnnnnnnnnnnnnnnnnnnnnnnnnnnnnnnnnnnnnaaaataataacaataatccttttctcccctacaagacctatgtgtaaatctaagaatttctctatggtgacctgagacattcaggtcaccacacatctacactgagtggttgacttagccaagtaccttccacttcagcaactggattgarcattcagagattaacaaggctaacccagctcacaaagatgatgtggagggaccacaagccacagacagtgaataacttgacctttcttagtatgccataccacagaatacmagctggtattcaayacgtgcttaagtgttctgtgaaatcaagaytgtagcattcaagttctcatggaaaccttccagcagtgaagttctagtctgcaggaggctgactcactgaggaaggacttttactaggagcaatacagtgctgcatcagagtgcaactgaagtgcagcccatcctagaaggatgacaggaaacacacaacgaagtgaacactgtgatgtaaaaattcagtgaaatttaagcaaaacactcttaaaacccaagcaatgttcagagtccatcattttatcacctgtg

SEQ ID NO: 68324 - DNA, 599 bp, Chicken  19866894339219_3
  misc_feature (1)..(24): n is any nucleotide
nnnnnnnnnnnnnnnnnnnnnnnnaaaataataacaataatccttttctcccctacaagacctatgtgtaaatctaagaatttctctatggtgacctgagacattcaggtcaccacacatctacactgagtggttgacttagccaagtaccttccacttcagcaactggattgarcattcagagattaacaaggctaacccagctcacaaagatgatgtggagggaccacaagccacagacagtgaataacttgacctttcttagtatgccataccacagaatacmagctggtattcaayacgtgcttaagtgttctgtgaaatcaagaytgtagcattcaagttctcatggaaaccttccagcagtgaagttctagtctgcaggaggctgactcactgaggaaggacttttactaggagcaatacagtgctgcatcagagtgcaactgaagtgcagcccatcctagaaggatgacaggaaacacacaacgaagtgaacactgtgatgtaaaaattcagtgaaatttaagcaaaacactcttaaaacccaagcaatgttcagagtccatcattttatcacctgtgctaagggcgactat

SEQ ID NO: 68325 - DNA, 600 bp, Chicken  19866894339219_4
ataacaataatccttttctcccctacaagacctatgtgtaaatctaagaatttctctatggtgacctgagacattcaggtcaccacacatctacactgagtggttgacttagccaagtaccttccacttcagcaactggattgarcattcagagattaacaaggctaacccagctcacaaagatgatgtggagggaccacaagccacagacagtgaataacttgacctttcttagtatgccataccacagaatacmagctggtattcaayacgtgcttaagtgttctgtgaaatcaagaytgtagcattcaagttctcatggaaaccttccagcagtgaagttctagtctgcaggaggctgactcactgaggaaggacttttactaggagcaatacagtgctgcatcagagtgcaactgaagtgcagcccatcctagaaggatgacaggaaacacacaacgaagtgaacactgtgatgtaaaaattcagtgaaatttaagcaaaacactcttaaaacccaagcaatgttcagagtccatcattttatcacctgtgctaagggcgactattattaacagcctataaagccacatgatctgg

SEQ ID NO: 68326 - DNA, 600 bp, Chicken  19866894339233_1
tgtctcagtagtatcatatttctgtctgcatgccttagtgttcacagctaaactaatcatggcaactagagtcagttaagtacctgaatgtctggatggatgaaggaacactaccggggatgaatttctctcctttaacgctaacatccacgtaaataggctaggtcagatcatccccaccttttgcagtgctgctatgctgatgggcattatcatgcctcttacacggagcactttggggggtctgatttttaccctcttttgctcaaactgtgtacacagcagctgctatgagatagygagtaatggagcagatggcacttactggacagaagtggctgctgtccaacaaatacaattttccaccaaataaggtaagggcagcatctttttttcttttttttctttttttttctttctttttttttttttttttatgaacgtggactttgctttaatgatcttctggctgcctcacaactgtacctctcccataattctgtgccattatcctggaaatgttccagagattgaagcaagtccatgattcagaacagattactattgtgatggctattcttgcagtatggactaaagctg

SEQ ID NO: 68327 - DNA, 600 bp, Chicken  19866894339241_1
aagggagcattacatttgatctaagaatatttttcatgccaaaactgtgaaattttaaacctctaaattattatgtcttcttcagtgttaaacttatcccaatggaagaacactgatactgtgatctgtttcttttccttccacctgtaatactaatgtgactttcttactgttgcagtataggaactaaacaaaggaacaccatgatgtgagcgtgttttgtcatctttatattctctttttttttctaaaaattagtgcagtgtcccagaacagaagagtaagttttctaatctaccrctgtttccaccatttctgaattgtctgcatgtagaacgtattatatggaggaactgagggcatggaaattattatatacacgcagtcagaaacacaggctagactaacacagtgcagtcataatattttgcacaatccttccagccttggataggctgcacaactgctctgttaggaactccaatcaaaaatgttctcagattaagagaacaatcccatgttattgtatgttaggatcctgaccaaatcagttatacatgttcagcatttaacttttcaaagtgattttcaaagcaggaa

SEQ ID NO: 68328 - DNA, 600 bp, Chicken  19866894339243_1
ccctcccctggactctctccagtagctccctgtctttcttgaactgagaagcccagaactggacacagcacttcaggtgtggcctcactacagcagagtaggagagtattacttccctcaacctgttgaccatactttttttaatacacgctaggatgccactggctttcttggccacaggggtacactgctgactcatgtccaactgttgtgcacagggacactcaggtctttctctgcagagctcctctccagcagggcatcccctaacctgttctgatgcatgaggttattcctctygaggtgcaggactctgcatttgcccttgtctttcacattattgtcgccactgctgaaacacacccacccaccacctcactgtgctcacatccactgcttggtctccataaacattcagcaagagtcaatgaatctcagtgagtgcagttctttctgtacagaggaattcatacacccttccatgtcagacgccatttkgtcagactgcccgtctgctgctgtcacatggcaacaaaatgtaatggaatactggctagaaggttcaacctctactgccataccaccagcatccacctccga

SEQ ID NO: 68329 - DNA, 600 bp, Chicken  19866894339243_2
tgtccaactgttgtgcacagggacactcaggtctttctctgcagagctcctctccagcagggcatcccctaacctgttctgatgcatgaggttattcctctygaggtgcaggactctgcatttgcccttgtctttcacattattgtcgccactgctgaaacacacccacccaccacctcactgtgctcacatccactgcttggtctccataaacattcagcaagagtcaatgaatctcagtgagtgcagttctttctgtacagaggaattcatacacccttccatgtcagacgccatttkgtcagactgcccgtctgctgctgtcacatggcaacaaaatgtaatggaatactggctagaaggttcaacctctactgccataccaccagcatccacctccgacattgtggattaacataataaaataggaggcattattttcacagcagcccacattgctgaagagatggagttttttgttagtttgtttgtttgttttattattattattttgttcagatttttttattgtaagaatattttggttctatacctcttaggccagttataaatttagttgaattattttgtagcagtagt

SEQ ID NO: 68330 - DNA, 600 bp, Chicken  19866894339245_1
tccttggggtcagccctgtgctatggggttgttgtggggcagcagtgggctcggcatggcatggggtcacagccaggggacaatgttggaccacccgggcactgatgggatgacctcactgtggtgtctccccctgctcctaccacctcctgccatcaggtgcagcactcacaacaccagtcttcccagggacgccagctcttcattgcatgtttgtactgtttaacaaagccagagcctaagaaatacattcaagcaccgccgtgatgctgaaagccaccactgtatgggaacagaacsagcacygtgtcccctccatcccattgcagtgaggtgtttggggctgctgttstcaggagtgagcgataagggccataacttccctttttawgcccattctgttcctggctggcatcctgcatggctctgtctgtcatttttattgtgactcacaatggtcccagtggagtcrgctgtgattcactcggacaagaggtgcttctgtctgcatagagctgaagtggaaacactgccgttgttgagacctgtatggcacttagctaaataaacaccttctaaataaaaggaagaaccaccaat

SEQ ID NO: 68331 - DNA, 600 bp, Chicken  19866894339245_2
gggtcagccctgtgctatggggttgttgtggggcagcagtgggctcggcatggcatggggtcacagccaggggacaatgttggaccacccgggcactgatgggatgacctcactgtggtgtctccccctgctcctaccacctcctgccatcaggtgcagcactcacaacaccagtcttcccagggacgccagctcttcattgcatgtttgtactgtttaacaaagccagagcctaagaaatacattcaagcaccgccgtgatgctgaaagccaccactgtatgggaacagaacsagcacygtgtcccctccatcccattgcagtgaggtgtttggggctgctgttstcaggagtgagcgataagggccataacttccctttttawgcccattctgttcctggctggcatcctgcatggctctgtctgtcatttttattgtgactcacaatggtcccagtggagtcrgctgtgattcactcggacaagaggtgcttctgtctgcatagagctgaagtggaaacactgccgttgttgagacctgtatggcacttagctaaataaacaccttctaaataaaaggaagaaccaccaatagccac

SEQ ID NO: 68332 - DNA, 600 bp, Chicken  19866894339245_3
ggcatggcatggggtcacagccaggggacaatgttggaccacccgggcactgatgggatgacctcactgtggtgtctccccctgctcctaccacctcctgccatcaggtgcagcactcacaacaccagtcttcccagggacgccagctcttcattgcatgtttgtactgtttaacaaagccagagcctaagaaatacattcaagcaccgccgtgatgctgaaagccaccactgtatgggaacagaacsagcacygtgtcccctccatcccattgcagtgaggtgtttggggctgctgttstcaggagtgagcgataagggccataacttccctttttawgcccattctgttcctggctggcatcctgcatggctctgtctgtcatttttattgtgactcacaatggtcccagtggagtcrgctgtgattcactcggacaagaggtgcttctgtctgcatagagctgaagtggaaacactgccgttgttgagacctgtatggcacttagctaaataaacaccttctaaataaaaggaagaaccaccaatagccacttcttcctcagaacactactactgacatctgtgtttatatgctcct

SEQ ID NO: 68333 - DNA, 600 bp, Chicken  19866894339245_4
cacccgggcactgatgggatgacctcactgtggtgtctccccctgctcctaccacctcctgccatcaggtgcagcactcacaacaccagtcttcccagggacgccagctcttcattgcatgtttgtactgtttaacaaagccagagcctaagaaatacattcaagcaccgccgtgatgctgaaagccaccactgtatgggaacagaacsagcacygtgtcccctccatcccattgcagtgaggtgtttggggctgctgttstcaggagtgagcgataagggccataacttccctttttawgcccattctgttcctggctggcatcctgcatggctctgtctgtcatttttattgtgactcacaatggtcccagtggagtcrgctgtgattcactcggacaagaggtgcttctgtctgcatagagctgaagtggaaacactgccgttgttgagacctgtatggcacttagctaaataaacaccttctaaataaaaggaagaaccaccaatagccacttcttcctcagaacactactactgacatctgtgtttatatgctcctgtgacagctgtgtgaggactgcaaagtgctcctgcatgc

SEQ ID NO: 68334 - DNA, 600 bp, Chicken  19866894339245_5
aacaccagtcttcccagggacgccagctcttcattgcatgtttgtactgtttaacaaagccagagcctaagaaatacattcaagcaccgccgtgatgctgaaagccaccactgtatgggaacagaacsagcacygtgtcccctccatcccattgcagtgaggtgtttggggctgctgttstcaggagtgagcgataagggccataacttccctttttawgcccattctgttcctggctggcatcctgcatggctctgtctgtcatttttattgtgactcacaatggtcccagtggagtcrgctgtgattcactcggacaagaggtgcttctgtctgcatagagctgaagtggaaacactgccgttgttgagacctgtatggcacttagctaaataaacaccttctaaataaaaggaagaaccaccaatagccacttcttcctcagaacactactactgacatctgtgtttatatgctcctgtgacagctgtgtgaggactgcaaagtgctcctgcatgctccaggtgcctcaggttgggtgtcctcccatgccttaatatgaatatgaggaccaaggcacgatcccattgggtccattat

SEQ ID NO: 68335 - DNA, 600 bp, Chicken  19866894339249_1
gggccttcctacccccgggcagatcaacactgcccccaactcggtgccatctgcaaacttactgagggcgccctcatccagatcaccaataaggatatggaacaagatggggcccagtaccaacccctggggagcaccacctcacgaccggctgccatttggatctcagtccatccaccaccactctcttggcccggctctccggttcgttgcccaacaacacgtgtacctgtccagccacggctgctgcttctccacgagagtgctgtgggagagagccaaaggctttgctgaagtctrygtagatgasatccacagcctttccgtcgtgcaccagctgggtcagccggtcatagaagatcgggttggtcggacaggacccgcctgtcatgaagccgtgctggctgggcctgatcccccggttgtcctgcacgtgccgtgggatctcactcaaaatgatctgctccatraccttccctggcactgaggtcaggcagacacatgtgtagttccccagatcccccttatgacccttcttgtaggtgggtgtcacattagcagtctccagtcccctggacctccccatctgaccaggaccac

SEQ ID NO: 68336 - DNA, 600 bp, Chicken  19866894339249_2
ggccttcctacccccgggcagatcaacactgcccccaactcggtgccatctgcaaacttactgagggcgccctcatccagatcaccaataaggatatggaacaagatggggcccagtaccaacccctggggagcaccacctcacgaccggctgccatttggatctcagtccatccaccaccactctcttggcccggctctccggttcgttgcccaacaacacgtgtacctgtccagccacggctgctgcttctccacgagagtgctgtgggagagagccaaaggctttgctgaagtctrygtagatgasatccacagcctttccgtcgtgcaccagctgggtcagccggtcatagaagatcgggttggtcggacaggacccgcctgtcatgaagccgtgctggctgggcctgatcccccggttgtcctgcacgtgccgtgggatctcactcaaaatgatctgctccatraccttccctggcactgaggtcaggcagacacatgtgtagttccccagatcccccttatgacccttcttgtaggtgggtgtcacattagcagtctccagtcccctggacctccccatctgaccaggaccact

SEQ ID NO: 68337 - DNA, 600 bp, Chicken  19866894339249_3
acccccgggcagatcaacactgcccccaactcggtgccatctgcaaacttactgagggcgccctcatccagatcaccaataaggatatggaacaagatggggcccagtaccaacccctggggagcaccacctcacgaccggctgccatttggatctcagtccatccaccaccactctcttggcccggctctccggttcgttgcccaacaacacgtgtacctgtccagccacggctgctgcttctccacgagagtgctgtgggagagagccaaaggctttgctgaagtctrygtagatgasatccacagcctttccgtcgtgcaccagctgggtcagccggtcatagaagatcgggttggtcggacaggacccgcctgtcatgaagccgtgctggctgggcctgatcccccggttgtcctgcacgtgccgtgggatctcactcaaaatgatctgctccatraccttccctggcactgaggtcaggcagacacatgtgtagttccccagatcccccttatgacccttcttgtaggtgggtgtcacattagcagtctccagtcccctggacctccccatctgaccaggaccactcatagatga

SEQ ID NO: 68338 - DNA, 504 bp, Chicken  19866894339249_4
ccatccaccaccactctcttggcccggctctccggttcgttgcccaacaacacgtgtacctgtccagccacggctgctgcttctccacgagagtgctgtgggagagagccaaaggctttgctgaagtctrygtagatgasatccacagcctttccgtcgtgcaccagctgggtcagccggtcatagaagatcgggttggtcggacaggacccgcctgtcatgaagccgtgctggctgggcctgatcccccggttgtcctgcacgtgccgtgggatctcactcaaaatgatctgctccatraccttccctggcactgaggtcaggcagacacatgtgtagttccccagatcccccttatgacccttcttgtaggtgggtgtcacattagcagtctccagtcccctggacctccccatctgaccaggaccactcatagatgatgggaaacacctcggcagtcgcctcaccggctccctcagcacccccaggtgggtcccaacagcc

SEQ ID NO: 68339 - DNA, 599 bp, Chicken  19866894339251_1
  misc_feature (1)..(110): n is any nucleotide
nnnnnnnnnnnnnnnnnnnnnnnnnnnnnnnnnnnnnnnnnnnnnnnnnnnnnnnnnnnnnnnnnnnnnnnnnnnnnnnnnnnnnnnnnnnnnnnnnnnnnnnnnnnnnnctgagccctcgctgctgcgtgcgtcagcgggcgggatgagctgtctctccggcagcagggaagtgctgcgctctcctcttacagctagaagcagagcagaaggcacaagcagacctgaagcagataacacgagaaagggtgttttttgacaagcttttggggagcacacaacgcctggggttccttctcycatccacacctggggaagctgctgctgarcacaggcagaggagaagcttgctcctggtttctctgcagggagcaccagaacatactgttatccatgtgaaaagtttgatttcaacccygtgaaatcccagtgcaataactgtatgggtctgctccaagccctgcacgaccccgaggccaaattatcccagcatcctgtatgtaaccaggaaygagacacagggacagcaacgcaactgcatggtccatcatctctaaccagacaccaaacaacagctcaacacttcttaaaggataaag

SEQ ID NO: 68340 - DNA, 599 bp, Chicken  19866894339251_2
  misc_feature (1)..(81): n is any nucleotide
nnnnnnnnnnnnnnnnnnnnnnnnnnnnnnnnnnnnnnnnnnnnnnnnnnnnnnnnnnnnnnnnnnnnnnnnnnnnnnnnnctgagccctcgctgctgcgtgcgtcagcgggcgggatgagctgtctctccggcagcagggaagtgctgcgctctcctcttacagctagaagcagagcagaaggcacaagcagacctgaagcagataacacgagaaagggtgttttttgacaagcttttggggagcacacaacgcctggggttccttctcycatccacacctggggaagctgctgctgarcacaggcagaggagaagcttgctcctggtttctctgcagggagcaccagaacatactgttatccatgtgaaaagtttgatttcaacccygtgaaatcccagtgcaataactgtatgggtctgctccaagccctgcacgaccccgaggccaaattatcccagcatcctgtatgtaaccaggaaygagacacagggacagcaacgcaactgcatggtccatcatctctaaccagacaccaaacaacagctcaacacttcttaaaggataaaggggtgggggacaaggtgaaaaagagaaag

SEQ ID NO: 68341 - DNA, 600 bp, Chicken  19866894339251_3
tcgctgctgcgtgcgtcagcgggcgggatgagctgtctctccggcagcagggaagtgctgcgctctcctcttacagctagaagcagagcagaaggcacaagcagacctgaagcagataacacgagaaagggtgttttttgacaagcttttggggagcacacaacgcctggggttccttctcycatccacacctggggaagctgctgctgarcacaggcagaggagaagcttgctcctggtttctctgcagggagcaccagaacatactgttatccatgtgaaaagtttgatttcaacccygtgaaatcccagtgcaataactgtatgggtctgctccaagccctgcacgaccccgaggccaaattatcccagcatcctgtatgtaaccaggaaygagacacagggacagcaacgcaactgcatggtccatcatctctaaccagacaccaaacaacagctcaacacttcttaaaggataaaggggtgggggacaaggtgaaaaagagaaagcacaaacgtttggtaggttcttccctctgctcccatcacacgacatcaaccacaggtgtgcagtgtcctccaagagaaccaacttaactg

SEQ ID NO: 68342 - DNA, 600 bp, Chicken  19866894339251_4
gcacaagcagacctgaagcagataacacgagaaagggtgttttttgacaagcttttggggagcacacaacgcctggggttccttctcycatccacacctggggaagctgctgctgarcacaggcagaggagaagcttgctcctggtttctctgcagggagcaccagaacatactgttatccatgtgaaaagtttgatttcaacccygtgaaatcccagtgcaataactgtatgggtctgctccaagccctgcacgaccccgaggccaaattatcccagcatcctgtatgtaaccaggaaygagacacagggacagcaacgcaactgcatggtccatcatctctaaccagacaccaaacaacagctcaacacttcttaaaggataaaggggtgggggacaaggtgaaaaagagaaagcacaaacgtttggtaggttcttccctctgctcccatcacacgacatcaaccacaggtgtgcagtgtcctccaagagaaccaacttaactgcatgagagccataaaagcactgcggagcagggaaggcagatgcagtccctctacctacactggtaggtgagcaccatcttgccaggtagcaaca

SEQ ID NO: 68343 - DNA, 600 bp, Chicken  19866894339255_1
ttacctatacagggagcacactgttccactggtgagccttagcatgcatagcgtggtcacttttgtgcgtgtaccaaacatatggactgcttatttcctaacagagtgtcagtggcttttcagagaccggccactgtgtgttgcctccccacagcttgactttctgcacttctagagtggctagttaaaaccacagaggagaagcagggtaagcttgatgggcagtgatgtttccagagtcctgctgtgtccttcttctgtatgattgatctctgctgacccaaccagctatattacaaygctgtgtgggtctgtgaagctccagaatgtatagagagccacatttgacagcactaattgctcaacttgtgctcagttagtttcttcttctgctgtgaaaatttctgaggactttgagcaactcatcctgtctttctgtgcctttacttttccaggggaaacagcaaatactattgtgctgttgcggtatgtttttcttttgtactcagcaactcagtactcagacattggatttgcctttagggaattgtcagtgtatatgcatacgtgcatatatatatgtaggtagcactgaaagta

SEQ ID NO: 68344 - DNA, 600 bp, Chicken  19866894339256_1
aatggctcactttattgcagttttcccaaaaatatgaggatcaacaacagtgcctgacttcaggttgcctctagaggactgcttctacaaggtccattaaacagaaagataccaccaccagtgcatgactatgcagagctaaaagtattctgggaaagtattggtgcacatcagccctgttcttatcctggtcctgagacatctgcagctggtcactgctggagcctgagcagtaagacagacaaaccatcatccaccctaatggcagaattctgcaacaaagaaaccatcattctccarcgcttacagagctcctggcatgacaatatctaaattttctgtactaatgtgagttgaggaaatgcatttatttttgataataaccttttgaccttcaggatgaacttagatggttcaatacagatagtagaccagtgagaaagtttcctatcaactgcaagcaaatacacggagctgtatttgcatatggaaagaaagaaagaaacagtttaaaaataataacttatttcctcaataaaagtgttcttggaataaatatacctacatacaatcatgcaaatatatacgcattttagttgt

SEQ ID NO: 68345 - DNA, 600 bp, Chicken  19866894339260_1
attcagtctcatgcatgttatctttggtttaaaggacctacctgcaagttctaaatgcagatggccttaccctaaaatagggtaaaatggggcaataaagaatcctgccttttcaaatgaataggagatagcgtgaaataaagacaataagaatgatggtattgtagatctaactccctgtgaaagatttttaatggtaagtgagagtcctttcacagagcccttgccttcaaattacctctgaggatcttcacatgggagcacaatgggtaattggttttagacatttattcttggttwcacttaagcaaatatgagtaacttccaaatacatgtactttactcagggctcgcagctgtatgtttaacatacagactttatgctgatacctgaatttttgtcctaatcaatgcaaaatgctcagaatatacaaacaagtagtgaaaggcaggacacacactgtttgtttcttgcttatgtattgctgtgcaacgcagtttgcaatatagccatacagttgcacttctgtcttttgtaactactgagaagtgacatttcccccagaactttgaataacctcataatattttgtataaaca

SEQ ID NO: 68346 - DNA, 599 bp, Chicken  19866894339263_1
  misc_feature (1)..(43): n is any nucleotide
nnnnnnnnnnnnnnnnnnnnnnnnnnnnnnnnnnnnnnnnnnngtggcccctacctggagaacgtccttcgtgggaggcatagtgtggatggggcaggcggtacctccccatctcggtacttgcgggagatgaagtcccgtctctgctcagtgctggcatctgggtggagaacctctgtggcagggatgcgggcagcccaaaatctgttggctcggtcattgcccagcacaatgaagagctgtgggagagacctgaagtcagcagcaggcagagcaggatacccagcatccctgcatcasagtggagctcatgggactgctgtgctgcccacagaagccctgagcacctctacctgcacgatttcattggaccagacactggtgtcgagcttcaggctttgcaccttggaaatgttggagcccaggctgcgatgctgccctgtgrrgagcaggcaagtgagcaacccatggccctgaccacacccagggggtacccacaccctgcccacccctggggagaagcaccggcctgcgcactgcttgcagatgaccacacagaggttgatggatgcccagtcggggctgtgagcccagcagtc

SEQ ID NO: 68347 - DNA, 600 bp, Chicken  19866894339263_2
gctcagtgctggcatctgggtggagaacctctgtggcagggatgcgggcagcccaaaatctgttggctcggtcattgcccagcacaatgaagagctgtgggagagacctgaagtcagcagcaggcagagcaggatacccagcatccctgcatcasagtggagctcatgggactgctgtgctgcccacagaagccctgagcacctctacctgcacgatttcattggaccagacactggtgtcgagcttcaggctttgcaccttggaaatgttggagcccaggctgcgatgctgccctgtgrrgagcaggcaagtgagcaacccatggccctgaccacacccagggggtacccacaccctgcccacccctggggagaagcaccggcctgcgcactgcttgcagatgaccacacagaggttgatggatgcccagtcggggctgtgagcccagcagtctgcacagtatctgttggctttgttggaccagatcttctcygccacctcatagtcatagagcgtctcagctatggcctcctgcagggcctccatccactcccgtttctcccgctctgactctgccacaaagctgcagcaccagcagc

SEQ ID NO: 68348 - DNA, 600 bp, Chicken  19866894339263_3
ctcagtgctggcatctgggtggagaacctctgtggcagggatgcgggcagcccaaaatctgttggctcggtcattgcccagcacaatgaagagctgtgggagagacctgaagtcagcagcaggcagagcaggatacccagcatccctgcatcasagtggagctcatgggactgctgtgctgcccacagaagccctgagcacctctacctgcacgatttcattggaccagacactggtgtcgagcttcaggctttgcaccttggaaatgttggagcccaggctgcgatgctgccctgtgrrgagcaggcaagtgagcaacccatggccctgaccacacccagggggtacccacaccctgcccacccctggggagaagcaccggcctgcgcactgcttgcagatgaccacacagaggttgatggatgcccagtcggggctgtgagcccagcagtctgcacagtatctgttggctttgttggaccagatcttctcygccacctcatagtcatagagcgtctcagctatggcctcctgcagggcctccatccactcccgtttctcccgctctgactctgccacaaagctgcagcaccagcagcc

SEQ ID NO: 68349 - DNA, 600 bp, Chicken  19866894339263_4
ctgagcacctctacctgcacgatttcattggaccagacactggtgtcgagcttcaggctttgcaccttggaaatgttggagcccaggctgcgatgctgccctgtgrrgagcaggcaagtgagcaacccatggccctgaccacacccagggggtacccacaccctgcccacccctggggagaagcaccggcctgcgcactgcttgcagatgaccacacagaggttgatggatgcccagtcggggctgtgagcccagcagtctgcacagtatctgttggctttgttggaccagatcttctcygccacctcatagtcatagagcgtctcagctatggcctcctgcagggcctccatccactcccgtttctcccgctctgactctgccacaaagctgcagcaccagcagccaatactcacatatcatgttccagctgccargtgctctctgaacagttcccatccccattcccaaccctgctcccattcccatccccatccctgttcccatccctgtccccatccccatcctcattcccatctccaaccctgttcccatccccatccccattcctgttcccatccccatccccatctccatccc

SEQ ID NO: 68350 - DNA, 600 bp, Chicken  19866894339263_5
accacacccagggggtacccacaccctgcccacccctggggagaagcaccggcctgcgcactgcttgcagatgaccacacagaggttgatggatgcccagtcggggctgtgagcccagcagtctgcacagtatctgttggctttgttggaccagatcttctcygccacctcatagtcatagagcgtctcagctatggcctcctgcagggcctccatccactcccgtttctcccgctctgactctgccacaaagctgcagcaccagcagccaatactcacatatcatgttccagctgccargtgctctctgaacagttcccatccccattcccaaccctgctcccattcccatccccatccctgttcccatccctgtccccatccccatcctcattcccatctccaaccctgttcccatccccatccccattcctgttcccatccccatccccatctccatccccattctcatctccaactctgttcccatctccattcccatccctgttcctatcccagtccctgttcccattcccattcccattccccttcccatccccatccccatccccatccccatccccatccccatcctcactt

SEQ ID NO: 68351 - DNA, 600 bp, Chicken  19866894339264_1
tgtaattacggagtgactccacatcctgctgcaggctccttgcattgcatttactgggctaaccccagctcacctaacgcctgctggttaccttgcatgggttctaagggagatgttggttttgcaatgacatgactgccgctgcagagcaaccgtgtttttgtcacagtctgctgctgattaaagagcaccgtaacagcttttaacttctgaaataacagtgcaaagtcctaagttacagggaattctggcattgcataaatgaccctttttcagaacaaggttaaaaaaaaaaaaaamaaaacaacctattgctcttcaaagatgtttagtcccccgatttctctttagcagcgtgaatttcaagtgagatctcgacaaaggaaataactcaagtagtactggtctttacagtgacgagccactctaagtttcatgagatttcacttagtggaccagtggggaaatcctaccccttacacgatgcatgagctcatttcacaggcagcaaggaccgtgcttcatattctgtgtcagctcccgaaagctcaccaagacggaggcagaactcactgtttttgctgctgatagatatcaacg

SEQ ID NO: 68352 - DNA, 600 bp, Chicken  19866894339267_1
ggtcagtactgtctgttgcatctataactagattaatgttcagagaatccaaaatcgcattattcactctttcctgacacctggtgtttcatcattgtctgtcatcattatctgctccaatttaatacatagaatgcacagcctggataaagaggagtctcagggggatctcatcgttgtctgtaaatatctgaagggaggctgcaaagagggcagagccaggctcttgtcagttgtgcccagtggcagtgggctcaagcaggaacacacagaagattccctctgaacaccaggaagcayttccgtgctgtatgagtaactgagcactggcacagcttgcccagaggggttgtggagtctcctccttggagatatcccaaagctgtctggacatggtcctgggcaccctgctctgggttggagcagatggaccaagagatcctttccagcctcaactaatctgtgattttatgatggaatagctgggggaaaaaaaagtgaaaaacagtgggagattggaggatcaaaataataaaagcataaaaaacatttatagtacaggtttttagccctgaaaacaatatagaggaaggatacagc

SEQ ID NO: 68353 - DNA, 600 bp, Chicken  19866894339268_1
agggaacaaacaaaagacattacaccagcctgtcctttgtaatctctttgaagagagtaaatggtcacaagttaatgcatactcctgtaaagacagctatactaggctagaaagagatgtcactgaagaggtcagcgtgggtggtctgaactcagctctgagcgtcagcttgtgatttttagtttgggaggcaatgttttcaaagtgagtcttacagtagcaggagtgccaaatccctcaaagggactgttcttattttctgtagcacagaagagaacagacagtggctcttaagccaawcagttctgaaaatacagtaccttgacttgtaggtccttcaggaaagcctggcctagaactgagtccctggctcggctggctttaggctccttatctttgttccataaagcttcttgcctgcacatatgcatgatggaacacaccaaggtttaattcagtgtcactgcctggttttttaactaaatcttaagctgacacaagctaatattaatttctatgtaaatgatgtggctatcttctgtctcctatgttgctttgacagtaaggtaatttggacagattgtgattgaatagacaact

SEQ ID NO: 68354 - DNA, 600 bp, Chicken  19866894339269_1
ctacctgtgcaacctattgtagagaacctgctttagcaggggagttagactcaatgatctcttaaggtcccctccaactcctgcagttttgtgattctgtgatttgattttctgggaaaacataaataaattctgtattatatatttaaaaatagggacagcttaggtggagaaaacatttcatactgagcaaagacactatgggtattttctccacagggaaaattcttcattgtttctgttttatccccactctttcctcttcttaaatcagcaacactctactggcgtaaatctaargaagtgtaaactgtcatctaaawcaaagccatcagtatgaaagcagctagcaagttttcacaggtgaaaaatcccattttaagtaactttttaatttcatttttctgtctttgtgtgcctgttctgggggtgcatgcaagtctgtacccacactgagcagctaaaatgacatatatgacatgttaatatttctttggctttctaactttacttatgaagtaaatagcaaacaagaaggaactcacaagtactttgagttgttgcagtgtgcaaaatagagcagacagtgcactaatttct

SEQ ID NO: 68355 - DNA, 600 bp, Chicken  19866894339269_2
gaacctgctttagcaggggagttagactcaatgatctcttaaggtcccctccaactcctgcagttttgtgattctgtgatttgattttctgggaaaacataaataaattctgtattatatatttaaaaatagggacagcttaggtggagaaaacatttcatactgagcaaagacactatgggtattttctccacagggaaaattcttcattgtttctgttttatccccactctttcctcttcttaaatcagcaacactctactggcgtaaatctaargaagtgtaaactgtcatctaaawcaaagccatcagtatgaaagcagctagcaagttttcacaggtgaaaaatcccattttaagtaactttttaatttcatttttctgtctttgtgtgcctgttctgggggtgcatgcaagtctgtacccacactgagcagctaaaatgacatatatgacatgttaatatttctttggctttctaactttacttatgaagtaaatagcaaacaagaaggaactcacaagtactttgagttgttgcagtgtgcaaaatagagcagacagtgcactaatttctcattatgatctcttggctcacct

SEQ ID NO: 68356 - DNA, 599 bp, Chicken  19866894339272_1
  misc_feature (1)..(117): n is any nucleotide
nnnnnnnnnnnnnnnnnnnnnnnnnnnnnnnnnnnnnnnnnnnnnnnnnnnnnnnnnnnnnnnnnnnnnnnnnnnnnnnnnnnnnnnnnnnnnnnnnnnnnnnnnnnnnnnnnnnnnctcgtggaggcctggtcatctagccctcagtctggctgctacagaagctatcggggagagtgagatgccaaacgggatcacagaatcaacctggagcttgtttacaagaataagatacttagatgcctaacgccagtggcacagtccaggtaagggaagaaatgtctctatatgtatcaaacygaggaayactgattcgcacagaaraaatctaccastctgtgatacttccagatgagacaggcaatgaggggaaacaccagcaagttcaagaacggatgaaccacgtcagctctgttgcasctaatttttccctgtcctggctgtttgaaatatcctacttacttctacctgtatttggatcgctgccccagcttcagggcagagaatgggagcagccatttttgccagctcagaaaacatccagttgcaagagtttgcgctacaaaggatttgcaactggaattgagacattttctcac

SEQ ID NO: 68357 - DNA, 599 bp, Chicken  19866894339272_2
  misc_feature (1)..(110): n is any nucleotide
nnnnnnnnnnnnnnnnnnnnnnnnnnnnnnnnnnnnnnnnnnnnnnnnnnnnnnnnnnnnnnnnnnnnnnnnnnnnnnnnnnnnnnnnnnnnnnnnnnnnnnnnnnnnnnctcgtggaggcctggtcatctagccctcagtctggctgctacagaagctatcggggagagtgagatgccaaacgggatcacagaatcaacctggagcttgtttacaagaataagatacttagatgcctaacgccagtggcacagtccaggtaagggaagaaatgtctctatatgtatcaaacygaggaayactgattcgcacagaaraaatctaccastctgtgatacttccagatgagacaggcaatgaggggaaacaccagcaagttcaagaacggatgaaccacgtcagctctgttgcasctaatttttccctgtcctggctgtttgaaatatcctacttacttctacctgtatttggatcgctgccccagcttcagggcagagaatgggagcagccatttttgccagctcagaaaacatccagttgcaagagtttgcgctacaaaggatttgcaactggaattgagacattttctcactcacctg

SEQ ID NO: 68358 - DNA, 599 bp, Chicken  19866894339272_3
  misc_feature (1)..(93): n is any nucleotide
nnnnnnnnnnnnnnnnnnnnnnnnnnnnnnnnnnnnnnnnnnnnnnnnnnnnnnnnnnnnnnnnnnnnnnnnnnnnnnnnnnnnnnnnnnnnnctcgtggaggcctggtcatctagccctcagtctggctgctacagaagctatcggggagagtgagatgccaaacgggatcacagaatcaacctggagcttgtttacaagaataagatacttagatgcctaacgccagtggcacagtccaggtaagggaagaaatgtctctatatgtatcaaacygaggaayactgattcgcacagaaraaatctaccastctgtgatacttccagatgagacaggcaatgaggggaaacaccagcaagttcaagaacggatgaaccacgtcagctctgttgcasctaatttttccctgtcctggctgtttgaaatatcctacttacttctacctgtatttggatcgctgccccagcttcagggcagagaatgggagcagccatttttgccagctcagaaaacatccagttgcaagagtttgcgctacaaaggatttgcaactggaattgagacattttctcactcacctggcacatatttaaataaa

SEQ ID NO: 68359 - DNA, 599 bp, Chicken  19866894339272_4
  misc_feature (1)..(82): n is any nucleotide
nnnnnnnnnnnnnnnnnnnnnnnnnnnnnnnnnnnnnnnnnnnnnnnnnnnnnnnnnnnnnnnnnnnnnnnnnnnnnnnnnnctcgtggaggcctggtcatctagccctcagtctggctgctacagaagctatcggggagagtgagatgccaaacgggatcacagaatcaacctggagcttgtttacaagaataagatacttagatgcctaacgccagtggcacagtccaggtaagggaagaaatgtctctatatgtatcaaacygaggaayactgattcgcacagaaraaatctaccastctgtgatacttccagatgagacaggcaatgaggggaaacaccagcaagttcaagaacggatgaaccacgtcagctctgttgcasctaatttttccctgtcctggctgtttgaaatatcctacttacttctacctgtatttggatcgctgccccagcttcagggcagagaatgggagcagccatttttgccagctcagaaaacatccagttgcaagagtttgcgctacaaaggatttgcaactggaattgagacattttctcactcacctggcacatatttaaataaaactcagagacc

SEQ ID NO: 68360 - DNA, 600 bp, Chicken  19866894339272_5
gtggaggcctggtcatctagccctcagtctggctgctacagaagctatcggggagagtgagatgccaaacgggatcacagaatcaacctggagcttgtttacaagaataagatacttagatgcctaacgccagtggcacagtccaggtaagggaagaaatgtctctatatgtatcaaacygaggaayactgattcgcacagaaraaatctaccastctgtgatacttccagatgagacaggcaatgaggggaaacaccagcaagttcaagaacggatgaaccacgtcagctctgttgcasctaatttttccctgtcctggctgtttgaaatatcctacttacttctacctgtatttggatcgctgccccagcttcagggcagagaatgggagcagccatttttgccagctcagaaaacatccagttgcaagagtttgcgctacaaaggatttgcaactggaattgagacattttctcactcacctggcacatatttaaataaaactcagagaccaacaacaataagctggctcttcgtcatcatctgtttatatggtttgcaatcacagatggtagctgtgtcttcagggaaagagcttt

SEQ ID NO: 68361 - DNA, 600 bp, Chicken  19866894339273_1
tgcatcatgaaacttcagtggggataaaacatcaagtgttataaatgcatttccatttatattaatttaagtaggctgaatccgggacatctatgtttacaaataaaattctcatattaatctttatattgttgtgaagaattgttaaccagaattgtaaattagtaaatatccaagtaaaggatttaaatactagaaggtaactgtcctcactttaaaatagtaataaacacagctattcttaatatttttctagtcatatgaaaagttaaaattatgctccataacaaaaaagcagasttttttttttagtatgttgyctctgttgtcaaatctgtaacaagacaataattaaactcagcaggattcatgttctaattagagtagggcaagaaactattctcttgtcccatggcagttccatgagatgcctattactcttatctagcttttcataacaagcaaaacaaaaaaatccactgagggaaacttaatgatcccctagtttgaggggttccaatgaaagaagagagtgtgcagattatgtccaagtgagggtgttacagaataaatttcactaaaccaccttgcttctatttt

SEQ ID NO: 68362 - DNA, 600 bp, Chicken  19866894339273_2
gggataaaacatcaagtgttataaatgcatttccatttatattaatttaagtaggctgaatccgggacatctatgtttacaaataaaattctcatattaatctttatattgttgtgaagaattgttaaccagaattgtaaattagtaaatatccaagtaaaggatttaaatactagaaggtaactgtcctcactttaaaatagtaataaacacagctattcttaatatttttctagtcatatgaaaagttaaaattatgctccataacaaaaaagcagatttttttttttagtatgttgyctctgttgtcaaatctgtaacaagacaataattaaactcagcaggattcatgttctaattagagtagggcaagaaactattctcttgtcccatggcagttccatgagatgcctattactcttatctagcttttcataacaagcaaaacaaaaaaatccactgagggaaacttaatgatcccctagtttgaggggttccaatgaaagaagagagtgtgcagattatgtccaagtgagggtgttacagaataaatttcactaaaccaccttgcttctatttttgtactgcatgcatgaaaat

SEQ ID NO: 68363 - DNA, 600 bp, Chicken  19866894339276_1
aaaggtgaatcagatttctgcaatgttgtatcccactcattttgttgccttgttttttgtattttaataaaatacaaaattttgttgcttcctatacattaactatattttttgtgtggcccaagacagttcctcttcctgcaatcagagtcattaaggttggagaagacctctggaatcttcaagtctaggcctaccaaaaggttggacacccatggaatagactgctactggactggtatttcacaaagcctcaggttctctgggatgatgcacacatacgttttgtatctgtttaayatatcattaagattcttaagatgtggcctgagttaaaggaaataaaatcaygatacacatctatgtaatcacaccgcttaaatgccagtggcatcccatgctgcagaattatcactaaatgatgtaattactaccaatttcccaactgttcctcagcacctccagtaaaaacctttcattattaattgacccttggttgtgtatgagcctgcacataccctgaagcattcatcaacttcctgtggttggtcagtagatgtctaatcgtggtctgtttctctgatggcaaaactgaagaga

SEQ ID NO: 68364 - DNA, 600 bp, Chicken  19866894339276_2
gttttttgtattttaataaaatacaaaattttgttgcttcctatacattaactatattttttgtgtggcccaagacagttcctcttcctgcaatcagagtcattaaggttggagaagacctctggaatcttcaagtctaggcctaccaaaaggttggacacccatggaatagactgctactggactggtatttcacaaagcctcaggttctctgggatgatgcacacatacgttttgtatctgtttaayatatcattaagattcttaagatgtggcctgagttaaaggaaataaaatcaygatacacatctatgtaatcacaccgcttaaatgccagtggcatcccatgctgcagaattatcactaaatgatgtaattactaccaatttcccaactgttcctcagcacctccagtaaaaacctttcattattaattgacccttggttgtgtatgagcctgcacataccctgaagcattcatcaacttcctgtggttggtcagtagatgtctaatcgtggtctgtttctctgatggcaaaactgaagagaaatgttgacatcttttacatgcctgtgagctagagctaatcataagctgta

SEQ ID NO: 68365 - DNA, 600 bp, Chicken  19866894339279_1
aatcttttgtctgaaggacacagacgggtaaagtccggacaagtccttctcaaagttggcgaaatcttttgtctgaagattttacaagccaggggcaacgagagagagagaaatcgcaagcttaatggccgggaagcagtcttttgtgtgggtttatctcgagggagatagccatctcgggggggtactgcacatggctcttacccaagcttacccaagctcttacccacactggcagaagaagaaggataaaaagggagccaacaaccaagagattaggtgtcagacatcagaagcctyacgagctgatgcctgaaagctgaaggactctcttctggacctgctacctgagatctgctgcttcctcctggacttacccagctgcttgttcctggcacctgcttgcagcttaaagcctgtcacgctgctgctgctctccccctgcgcttttgcctcggacaatcggaacaacatacaacgggacgctgctggatcttggtggtgactatcccccctttatgcaattcttgcttctttcctatctttcctatcgcctgctttctgttccccatcaccctaattcaatagtcgccatcctcc

SEQ ID NO: 68366 - DNA, 600 bp, Chicken  19866894339281_1
atcaacactatttttctcttaaatccaaaatatgactctagacctgcttcaaaattgagaaatcaagacaatgagccaagagtgtgccctggctgctagagggcaaagagcagtattagatgcattaaacacagtatagccagccagttagacaagatggttctcccaatatatttagctgcggtgaagcctcaccttgaatattgtgcacagttctgggctccataatataaaaagtatgataatgtccttgaaagaatgataagatccaagcagagtggtactgttgatacactggakggaagggaagccatctagatggacgtggacaggctggagaagtgtgcccataagaaccggagacgtgcacccataagagcctggcaaggttcaacaaggacaagtgcaaggtgcttgtgatggttttatgatttttggttatcagtattccacatcacaacatcatgcagtgtactgggagctaaggagcaaatgctttagttccgggtacccgtctggaagagaagaactacgttccccaagagccttttcgagtactgttatcattcctgctcaagggaacagatataagggygcagg

SEQ ID NO: 68367 - DNA, 600 bp, Chicken  19866894339281_2
tggakggaagggaagccatctagatggacgtggacaggctggagaagtgtgcccataagaaccggagacgtgcacccataagagcctggcaaggttcaacaaggacaagtgcaaggtgcttgtgatggttttatgatttttggttatcagtattccacatcacaacatcatgcagtgtactgggagctaaggagcaaatgctttagttccgggtacccgtctggaagagaagaactacgttccccaagagccttttcgagtactgttatcattcctgctcaagggaacagatataagggygcaggtcatctgacttgtccctcttctcgtctcaccgtgttccctgtcggatcggctcgctactgctgcgcccgactgcacgcaaggcttcagtattagcgtaaggcctttggctctcggacaatctttctctcaattattgttgatttatattgtattatagtgtgttatcttacattccgatactatatttagtaaattagtttgtttctcctcagatcgttgttgctgtttttaattattttggggtcccctgtttcccttcctggaggcgcggattttgtgaaatccctccacccc

SEQ ID NO: 68368 - DNA, 600 bp, Chicken  19866894339287_1
cttctgcatacactgtcagagatagtgagcttacaatgaaaggacagagtttagagtgctattacctgtgactgtttctttctatattttccgtctgcaaagttcaagaatcccataattgagatggacaaaattatcttgatgactaaaccacaaaaactgcaatgaaacaagactactgctattcttagtatttaatagttgagcaatatcctaaagcaatgtgttatcagaaatagggaaattttttgctctgttcaagaaaggcagtttctagaacaagaacaaggagtttgtgtktgcattctgtacctagaagactgaccagactcatggcacttgcagacttcattaataaaccagaaacaggtagacttagaaatccaaactattcaaaagcaactctcatagcattagatacaataagggattaatctgtcttcagggaaaaagaaaacctagttattaccttatctwttctagatgctcatcagatggtgacctggcttatcttttgggtgaacgctctaagcacaagtcatttctcatcaaatttatccagttgcacttggaaaaacagagctaattgttatcaaatag

SEQ ID NO: 68369 - DNA, 600 bp, Chicken  19866894339287_2
actgctattcttagtatttaatagttgagcaatatcctaaagcaatgtgttatcagaaatagggaaattttttgctctgttcaagaaaggcagtttctagaacaagaacaaggagtttgtgtktgcattctgtacctagaagactgaccagactcatggcacttgcagacttcattaataaaccagaaacaggtagacttagaaatccaaactattcaaaagcaactctcatagcattagatacaataagggattaatctgtcttcagggaaaaagaaaacctagttattaccttatctwttctagatgctcatcagatggtgacctggcttatcttttgggtgaacgctctaagcacaagtcatttctcatcaaatttatccagttgcacttggaaaaacagagctaattgttatcaaatagtagtcctcagcccattcagatagttcttttgaacatttaaacataaatgaatggcatatttggtagcgttgagaaccctgaattctgcaacaatgtgttcacctagggcagtgttaggagctgagtacaccaaaaagaattgaagcatatgttatgttgtgcttgatgttttcacta

SEQ ID NO: 68370 - DNA, 600 bp, Chicken  19866894339288_1
attttgctttttgtcataaactaacttaatggcaaaggtgcaataaaattacaaagcaatacaagaaacacagaatgtgctgtacttatcatgtgtttgtagcctgaagcaatagtttgccacttaaactctaggataagtaatagtaccagaaacttggtgctctcatccgtatgtcatggaaatattgtgtgaatcagatgcctgttgaaatccaacattaaaactctagggattttttttttatcaatacaatttcttacagtttaaaacatagaactttttttttaactagtaatmtctagataacctgtgtataagaacagttattctatggactagatttgcatcttcagcttagaagcctgggagagtatagagttagaagttctggatgaacactcaaacacatacatagcatgagatcatggaaaaagctagcttactgataattccacrtgtagttatgtggaaatacctatcaactcctacagtgaaaccaacttgtcaggcatgaaggagattgctacagggggtgttgttacatctgggtatcaggagttcatcatatagcttttgttcatcagaaatgcagacagt

SEQ ID NO: 68371 - DNA, 547 bp, Chicken  19866894339288_2
gtgctctcatccgtatgtcatggaaatattgtgtgaatcagatgcctgttgaaatccaacattaaaactctagggattttttttttatcaatacaatttcttacagtttaaaacatagaactttttttttaactagtaatmtctagataacctgtgtataagaacagttattctatggactagatttgcatcttcagcttagaagcctgggagagtatagagttagaagttctggatgaacactcaaacacatacatagcatgagatcatggaaaaagctagcttactgataattccacrtgtagttatgtggaaatacctatcaactcctacagtgaaaccaacttgtcaggcatgaaggagattgctacagggggtgttgttacatctgggtatcaggagttcatcatatagcttttgttcatcagaaatgcagacagtataagcacgatgaagacttggctactggatgcaaaaatggactgctgagagatctataggatataactgcagcgccacaggaaaaccctttgtaacccttgaaacc

SEQ ID NO: 68372 - DNA, 599 bp, Chicken  19866894339290_1
  misc_feature (1)..(74): n is any nucleotide
nnnnnnnnnnnnnnnnnnnnnnnnnnnnnnnnnnnnnnnnnnnnnnnnnnnnnnnnnnnnnnnnnnnnnnnnnncagtgttataacgggtaggagagagcagtttcagccgtgagtgagtgctcagataaatggcgtagctaattctgtcagagatgaatataaaacatacccaagatggcttgttttgtatttgcttttaaaaaaaaaagaaaactaacatatatcatgatttttttttcaatcattggtttgtatgccacacagatgaaaagcaatattactatgatgcctttatcartattctgacaaggactgctttcaagttaaagactgataaagaacgccaacttttgatattactagaacagccctatcagctttaattttcttttgttttcctgttgccaaggaaaggccattagagagaaattatgatctcaaactggttaatcgagtgacgtgcactattttccataaactgccctggctgatttttaaagctgtatgcaatctcattgccaagcaggctacagaacgtagtagaatttgcaaatatcaaatgtcgtcagtctttaggccagtaattctcaaaccatg

SEQ ID NO: 68373 - DNA, 600 bp, Chicken  19866894339290_2
tttttctgttttatttctttctaccaatttactagtaggatgaatgatcacccacagcattttctataaaacataattgacagctaataatactttgtacctctttagcctggcatagttgatgttttcaaagcctttacaaacattagccgaatcaagtgtcacccaatcaagtaggccggtattattcatgtattttgacagttaaactagaaaacaaaatcagtttccttacgaccacaaggtgtttgtgtgaaagctaagaagagaacatgtatcttctgacatctattcctatgytcaaccatagaaagatatttttttttctcaaatacgaatatgattatcattgtgattgaaggattgtgattaacattcttttgggaatagctaatatgacttctttatttctgtaccagaagctttcaagtataatatatcatcctgagtgcgttataataggactgacacaaacagagagtacgctaaaaaattcttctctgaagctcagctggatgttagcacaaatgtataaggaaatatgtgaactgaaagagagaaacaaagaatggtagagaaaggtgaggagatgctgacaga

SEQ ID NO: 68374 - DNA, 599 bp, Chicken  19866894339292_1
  misc_feature (1)..(94): n is any nucleotide
nnnnnnnnnnnnnnnnnnnnnnnnnnnnnnnnnnnnnnnnnnnnnnnnnnnnnnnnnnnnnnnnnnnnnnnnnnnnnnnnnnnnnnnnnnnnnntagacctgatttgagtgtacctctctgaaaactgttaagcctacttttgtgtagaagaacttggctctttttcagaaaatgaaacagctaaaagagcctacattttgattaatagttttgaagaatatgagtttcaaaacagaacataatgcaagctgtatcagggggaaaatctctccctttcttcttatctacttagaagttgrgwaaggcccatcccttcttaaaaaaggtcctcaaagaactatttacattttccattctccactgaaaattgtctgaatatttaaagtagccaaaaatctttcaagacccatctgaagtgtttaaacaagtacttagtctaagctaggatcccttcaaaccaaactattaagatcaggaaggtcataatatttgacatgggtatttccaaatctgaagcaggttgttaatgtacacactcttgattacatactgggatcattttccatttcatttgtgaycttgcaagagttaacagtgt

SEQ ID NO: 68375 - DNA, 599 bp, Chicken  19866894339292_2
  misc_feature (1)..(92): n is any nucleotide
nnnnnnnnnnnnnnnnnnnnnnnnnnnnnnnnnnnnnnnnnnnnnnnnnnnnnnnnnnnnnnnnnnnnnnnnnnnnnnnnnnnnnnnnnnnntagacctgatttgagtgtacctctctgaaaactgttaagcctacttttgtgtagaagaacttggctctttttcagaaaatgaaacagctaaaagagcctacattttgattaatagttttgaagaatatgagtttcaaaacagaacataatgcaagctgtatcagggggaaaatctctccctttcttcttatctacttagaagttgrgwaaggcccatcccttcttaaaaaaggtcctcaaagaactatttacattttccattctccactgaaaattgtctgaatatttaaagtagccaaaaatctttcaagacccatctgaagtgtttaaacaagtacttagtctaagctaggatcccttcaaaccaaactattaagatcaggaaggtcataatatttgacatgggtatttccaaatctgaagcaggttgttaatgtacacactcttgattacatactgggatcattttccatttcatttgtgaycttgcaagagttaacagtgtct

SEQ ID NO: 68376 - DNA, 600 bp, Chicken  19866894339292_3
tcttatctacttagaagttgrgwaaggcccatcccttcttaaaaaaggtcctcaaagaactatttacattttccattctccactgaaaattgtctgaatatttaaagtagccaaaaatctttcaagacccatctgaagtgtttaaacaagtacttagtctaagctaggatcccttcaaaccaaactattaagatcaggaaggtcataatatttgacatgggtatttccaaatctgaagcaggttgttaatgtacacactcttgattacatactgggatcattttccatttcatttgtgaycttgcaagagttaacagtgtcttcattgctactaagcctaatgtctcatcttttattctattyagcatactgattttgcaggtagaaattttgttctcagacattcatttatctgaattattccaaaacagagccaaaatgtctggcagtggtcaccttggctgatctcagttttacctcttccacactgcacagcatgaaccttgcctaatggaagaggcccttccagctggataattccagtgtctgttaaaggaacagttcctcacatctgccttttctagcctgctgattcaaatt

SEQ ID NO: 68377 - DNA, 588 bp, Chicken  19866894339292_4
ttacattttccattctccactgaaaattgtctgaatatttaaagtagccaaaaatctttcaagacccatctgaagtgtttaaacaagtacttagtctaagctaggatcccttcaaaccaaactattaagatcaggaaggtcataatatttgacatgggtatttccaaatctgaagcaggttgttaatgtacacactcttgattacatactgggatcattttccatttcatttgtgaycttgcaagagttaacagtgtcttcattgctactaagcctaatgtctcatcttttattctattyagcatactgattttgcaggtagaaattttgttctcagacattcatttatctgaattattccaaaacagagccaaaatgtctggcagtggtcaccttggctgatctcagttttacctcttccacactgcacagcatgaaccttgcctaatggaagaggcccttccagctggataattccagtgtctgttaaaggaacagttcctcacatctgccttttctagcctgctgattcaaattaatatgattggaattacagcttcttatatgctatcacaaaacaaagaaact

SEQ ID NO: 68378 - DNA, 600 bp, Chicken  19866894339301_1
caggccacatcaggcacagaaggagactgaaggcataagagagctcagtcccgcctttgcactgggaccagactgctcctgcagccgtcaagaggcagaagtattagcctttatgtaccaactgaagcatttatatctgcagaggtactctggataaataccttacttgtggggtggggaaggaatagggaaacaagaacttacatagaacagttcttcagaaaagctttgcatttatcaaaaatattccttcccagctggcttctatttgcagcaagaatgagatcctttagaccatgsaacttaatggtaacagccctactgtgaaggacctgagtcactttcagctacaatgygasctgggaggcaatcaactcaccctgcaaagagcacacagtcgcaccactcaggaacttactttgtttcttcttactcttttcttaaaaagccttttacacgttactggaatcctaatcgtcctactgagatttcatgcttctgatttcgtagaggagaaagcttagtcacaaataaaccttgcacggtggaaaaatgtcgaggaagaaaatatcaagccagacaagtatgactggaaactca

SEQ ID NO: 68379 - DNA, 600 bp, Chicken  19866894339301_2
ttgcactgggaccagactgctcctgcagccgtcaagaggcagaagtattagcctttatgtaccaactgaagcatttatatctgcagaggtactctggataaataccttacttgtggggtggggaaggaatagggaaacaagaacttacatagaacagttcttcagaaaagctttgcatttatcaaaaatattccttcccagctggcttctatttgcagcaagaatgagatcctttagaccatgsaacttaatggtaacagccctactgtgaaggacctgagtcactttcagctacaatgygasctgggaggcaatcaactcaccctgcaaagagcacacagtcgcaccactcaggaacttactttgtttcttcttactcttttcttaaaaagccttttacacgttactggaatcctaatcgtcctactgagatttcatgcttctgatttcgtagaggagaaagcttagtcacaaataaaccttgcacggtggaaaaatgtcgaggaagaaaatatcaagccagacaagtatgactggaaactcagatgtaaagaattcaaatgtttcaaaacatgccgcgataggtatattcccacttca

SEQ ID NO: 68380 - DNA, 600 bp, Chicken  19866894339301_3
cactgggaccagactgctcctgcagccgtcaagaggcagaagtattagcctttatgtaccaactgaagcatttatatctgcagaggtactctggataaataccttacttgtggggtggggaaggaatagggaaacaagaacttacatagaacagttcttcagaaaagctttgcatttatcaaaaatattccttcccagctggcttctatttgcagcaagaatgagatcctttagaccatgsaacttaatggtaacagccctactgtgaaggacctgagtcactttcagctacaatgygasctgggaggcaatcaactcaccctgcaaagagcacacagtcgcaccactcaggaacttactttgtttcttcttactcttttcttaaaaagccttttacacgttactggaatcctaatcgtcctactgagatttcatgcttctgatttcgtagaggagaaagcttagtcacaaataaaccttgcacggtggaaaaatgtcgaggaagaaaatatcaagccagacaagtatgactggaaactcagatgtaaagaattcaaatgtttcaaaacatgccgcgataggtatattcccacttcattc

SEQ ID NO: 68381 - DNA, 600 bp, Chicken  19866894339302_1
atataggccaatataaggataatatccttctgtttaatctcactttcataatgatgcacccagaaaaataaaagcagacaactgtcagagaaagaacaaaaggtcagaaaactgaaatccttctgtaacatcattctacaatcaaaagcaatgaactctcagagctgacccacaaatgttacttaagatcaaatcatctgtatgagaactgctgagggtgaaacaggatgccctgaataactccattcatctcccatttgctttttgtaaaacaggcaaactacctcttactgcacccayagcaggagcagcccaaagcagggctatgcaccacagttctcacctcacaggtaatgcagaagtgagactgaggacycaccaagaaaaagggatactctgaaaatgaacactgcaattattctgcttctaaaaatcaatacacgttccttctcattccagtgctccagcataactagggctgtgcaagggcctcagaargcagaytggcgggcctttttggggacaggaggacctaaaagcatcaaatcccaccaccatacatgagagatgattctcactcctccagagctgcactccagc

SEQ ID NO: 68382 - DNA, 600 bp, Chicken  19866894339302_2
gacaactgtcagagaaagaacaaaaggtcagaaaactgaaatccttctgtaacatcattctacaatcaaaagcaatgaactctcagagctgacccacaaatgttacttaagatcaaatcatctgtatgagaactgctgagggtgaaacaggatgccctgaataactccattcatctcccatttgctttttgtaaaacaggcaaactacctcttactgcacccayagcaggagcagcccaaagcagggctatgcaccacagttctcacctcacaggtaatgcagaagtgagactgaggacycaccaagaaaaagggatactctgaaaatgaacactgcaattattctgcttctaaaaatcaatacacgttccttctcattccagtgctccagcataactagggctgtgcaagggcctcagaargcagaytggcgggcctttttggggacaggaggacctaaaagcatcaaatcccaccaccatacatgagagatgattctcactcctccagagctgcactccagctttgctgttctgtgcactgtagttttcttaatagttgtgttttatatgaaggtttgaattaggttctatggagttt

SEQ ID NO: 68383 - DNA, 600 bp, Chicken  19866894339302_3
tgtatgagaactgctgagggtgaaacaggatgccctgaataactccattcatctcccatttgctttttgtaaaacaggcaaactacctcttactgcacccayagcaggagcagcccaaagcagggctatgcaccacagttctcacctcacaggtaatgcagaagtgagactgaggacycaccaagaaaaagggatactctgaaaatgaacactgcaattattctgcttctaaaaatcaatacacgttccttctcattccagtgctccagcataactagggctgtgcaagggcctcagaargcagaytggcgggcctttttggggacaggaggacctaaaagcatcaaatcccaccaccatacatgagagatgattctcactcctccagagctgcactccagctttgctgttctgtgcactgtagttttcttaatagttgtgttttatatgaaggtttgaattaggttctatggagtttagctactggtattagytccaagagacctttgtttctttgcagaaacaaaactcacagcagtttctgatacaataattttacaactccacttttcwacttgaagccgaacgtgcagaaataaa

SEQ ID NO: 68384 - DNA, 600 bp, Chicken  19866894339302_4
agaactgctgagggtgaaacaggatgccctgaataactccattcatctcccatttgctttttgtaaaacaggcaaactacctcttactgcacccayagcaggagcagcccaaagcagggctatgcaccacagttctcacctcacaggtaatgcagaagtgagactgaggacycaccaagaaaaagggatactctgaaaatgaacactgcaattattctgcttctaaaaatcaatacacgttccttctcattccagtgctccagcataactagggctgtgcaagggcctcagaargcagaytggcgggcctttttggggacaggaggacctaaaagcatcaaatcccaccaccatacatgagagatgattctcactcctccagagctgcactccagctttgctgttctgtgcactgtagttttcttaatagttgtgttttatatgaaggtttgaattaggttctatggagtttagctactggtattagytccaagagacctttgtttctttgcagaaacaaaactcacagcagtttctgatacaataattttacaactccacttttcwacttgaagccgaacgtgcagaaataaatttgga

SEQ ID NO: 68385 - DNA, 600 bp, Chicken  19866894339302_5
tactctgaaaatgaacactgcaattattctgcttctaaaaatcaatacacgttccttctcattccagtgctccagcataactagggctgtgcaagggcctcagaargcagaytggcgggcctttttggggacaggaggacctaaaagcatcaaatcccaccaccatacatgagagatgattctcactcctccagagctgcactccagctttgctgttctgtgcactgtagttttcttaatagttgtgttttatatgaaggtttgaattaggttctatggagtttagctactggtattagytccaagagacctttgtttctttgcagaaacaaaactcacagcagtttctgatacaataattttacaactccacttttcwacttgaagccgaacgtgcagaaataaatttggagacacgaaggcgatggattgggtggagggactgagcaccaatgatattcatcgcttctgagaagatcctacaatgaaagttagaattgctcatttcagagaattaagccaaaatgtttgcttcctaattaagcctgggaccgcagtaaggtcttcctggatatgctcactgcttgcacatcttgtgca

SEQ ID NO: 68386 - DNA, 600 bp, Chicken  19866894339302_6
actagggctgtgcaagggcctcagaargcagaytggcgggcctttttggggacaggaggacctaaaagcatcaaatcccaccaccatacatgagagatgattctcactcctccagagctgcactccagctttgctgttctgtgcactgtagttttcttaatagttgtgttttatatgaaggtttgaattaggttctatggagtttagctactggtattagytccaagagacctttgtttctttgcagaaacaaaactcacagcagtttctgatacaataattttacaactccacttttcwacttgaagccgaacgtgcagaaataaatttggagacacgaaggcgatggattgggtggagggactgagcaccaatgatattcatcgcttctgagaagatcctacaatgaaagttagaattgctcatttcagagaattaagccaaaatgtttgcttcctaattaagcctgggaccgcagtaaggtcttcctggatatgctcactgcttgcacatcttgtgcatggatttacatggggaactggcgcggagggcatgcaagagccctctttcgccacccccacgttggacacttcatgccat

SEQ ID NO: 68387 - DNA, 600 bp, Chicken  19866894339305_1
ccaggtgaggtctgtgtttgagctggaggctctgatggagctgcattgggacttgcagctgaccctgctgctggcatgggcttagggggggtagcagaagcagtcacaggcagtatcgtcacaccacgaatatcaattaagctaacccctgcttgtgatggtctccaattctgaggtcaggtccaaagcctaatatgggtctctgcaaagccaaactcactactaactggtcttgcatagcccaagtgtgatgtcagacattttcatatggagctgtttaccagaatgaggtgtcaatcrgaaatgcttcctccccagaaatgttgttatgtggacagttgtgcttttgcttaaaaatattttctttccaatctagttgatgtcattttggaaattgtttcaactaaacaagcaagctattcttagtgtaaagtacatccttctggatggttataccattygaattatgtgcttgttatgtaaatgtaccagcgaagctcagtgagtctggcaagactctgaatatctaggtactaaatttcagtttggaatgggtcttggaatgttactctttgcttctcatataatcctctcttctgt

SEQ ID NO: 68388 - DNA, 600 bp, Chicken  19866894339305_2
tctccaattctgaggtcaggtccaaagcctaatatgggtctctgcaaagccaaactcactactaactggtcttgcatagcccaagtgtgatgtcagacattttcatatggagctgtttaccagaatgaggtgtcaatcrgaaatgcttcctccccagaaatgttgttatgtggacagttgtgcttttgcttaaaaatattttctttccaatctagttgatgtcattttggaaattgtttcaactaaacaagcaagctattcttagtgtaaagtacatccttctggatggttataccattygaattatgtgcttgttatgtaaatgtaccagcgaagctcagtgagtctggcaagactctgaatatctaggtactaaatttcagtttggaatgggtcttggaatgttactctttgcttctcatataatcctctcttctgtctccattctagaggctagcaacccaagtccagttctgattcccaactcaaaagattcttttgagaaaaaagacattatctcatgtgacactgcagtaaaatgaagcacgttgtcctatagcagcagacttttgcagtctttattcctaggaaagaaatcaa

SEQ ID NO: 68389 - DNA, 535 bp, Chicken  19866894339308_1
ctgtgagaattcaggacttgtaacagttttaaaggaattcagctttctcagtcatccccctccctttaattgaagtattccttcccttcctgaggaagtcacgtgaaaccctgtttacttaaggatgtatataaaacactacctggagatcactccagcacagtattggcaaaccgtgaatcatgcagaaatttagaggttccttgtatcattccaactcctgtgtaactgacttggaagtactgtgcacaacaaatacagaacttgaaatctaaaccctgtattccaatttttttcttytgtttagtttgagattatttcttccacaacatctaaaactataagagaagccatcgtaaggtgagaagctcacttaagagggccagaaaaccacattagtgaacttctgtttagagtagcagacacattacaataagtcaacatggaaaataagggcctcttgccttactaagcaggtcccaatctccctgttctaagcaagaatttatttattctaacacaatcttaaaaaaaa

SEQ ID NO: 68390 - DNA, 599 bp, Chicken  19866894339314_1
  misc_feature (1)..(64): n is any nucleotide
nnnnnnnnnnnnnnnnnnnnnnnnnnnnnnnnnnnnnnnnnnnnnnnnnnnnnnnnnnnnnnnnattcttcctcctcctcaacttggagaaaggagggaggcagctgaccaagttacagatatgttttcttgtatatgctgatagccatcctacagttatgcacagttctttctcaggataagtgacctcagtttcagaagagctgaggaagaaactattctccccacccatattgcccaaagaaaaatggtgctgactcttgaggttcatcatgatcctgtgtaaaaacagaatatgtrtaaagtcaagagcagaatacaattttggcaggccaactttttaagaaatatccacaaatctttcatgagttacagttttggcttctcagtttataaaaattttgattttcatattttcctggcttccctctgaccactaatatatattagagttttttcatgataaagcagtttcaggttgcatcccagagaaagggtgtcattcttaaagactggtgctggggaggacactgctttcttggggcttgaagagcggtgaacttgcacacttgcatttccaggaactgcaaataatgctt

SEQ ID NO: 68391 - DNA, 600 bp, Chicken  19866894339334_1
tcggacattaatctaacagacataaactatgggcattatagggagcaggctgggagggaggaaaagcgacctgtggggttgcctgcctctctccagctgctgccagacaactgcaaccacctcacccagccaggggccgggcctctcaaaggatgatttcagttgaccagaagcattattaactctcagcatgaagtctgtaagggaaacaggggcacgaagatgtgccatgcagggccgggccttcccagggcagctttgaagtagacaccactcactaccaccattcctccggatgarttctctgtaatcttaggtctgcttttgcctccatggtctatttgaccaatctactgaaaattattaagagcttatctaaatccaccttggagttaatttgtggcctaaggctctgacttacagtaatgggacctagggacccaccataaagatgaaaaatagcagctattaaatccgtaaaaaggaaacaactcagaaaaggcaagggatgccaagctggccaaggcagaggagagtcagacttacaggaccatatggctcaggcatagtttgaattatccttccaattaaggtcacttt

SEQ ID NO: 68392 - DNA, 599 bp, Chicken  19866894339335_1
  misc_feature (1)..(33): n is any nucleotide
nnnnnnnnnnnnnnnnnnnnnnnnnnnnnnnnntttcccttgcactttttcctggggcatgggtctgtgggtcttcatccccttaggatggccaaaccagaccaaaccagaccaaaactgtgactacaactgactttaaactttaagataatcaaaaaacatttcactgcaccaactaagctctgtagagtccatccagaaatggcttgtgataaatttctgaaaatctgatgattttcagccactccaaatagacttgaaagacagtcttgaaagactgcctagctgaaggaagtttgscccttggggaaaatctggccaacttttttactttagtaaaaagagtaatttttaactctttaaaattctgttgtataataaaatcaataaaaatgttagtttatcattctagttactatcagggatctcaatctaagaacracattactgtcagtgacatggatccatacgtctagaaatatagaattagctaaatgggtacatatcacagcaaaactaatcagcactgcagatctgaagaagaaaattggaagtatttgttgagcatagttgttctatgtctcgtaattatagttttc

SEQ ID NO: 68393 - DNA, 600 bp, Chicken  19866894339335_2
tttaagataatcaaaaaacatttcactgcaccaactaagctctgtagagtccatccagaaatggcttgtgataaatttctgaaaatctgatgattttcagccactccaaatagacttgaaagacagtcttgaaagactgcctagctgaaggaagtttgscccttggggaaaatctggccaacttttttactttagtaaaaagagtaatttttaactctttaaaattctgttgtataataaaatcaataaaaatgttagtttatcattctagttactatcagggatctcaatctaagaacracattactgtcagtgacatggatccatacgtctagaaatatagaattagctaaatgggtacatatcacagcaaaactaatcagcactgcagatctgaagaagaaaattggaagtatttgttgagcatagttgttctatgtctcgtaattatagttttctgctaaactataaactgttgatcagtttgagtactgaatgcatattcatcacatttgaagtagcattatatgtggggggaaacaaactatattccatttagaaataaccttttcgtttgagaaattattcatttttagcata

SEQ ID NO: 68394 - DNA, 600 bp, Chicken  19866894339336_1
ctctgtgttagttctgtaatgtctctccttatacggagggatgctggcacatgctgtactaaaccacacaaataactataatgactggaaagcatgatgtatgccaaacccttcacaaacttaattgataatataaagtgtcctaaagcagctctcccttgtctggaacactgttcagttagcaagataacaagaggccaaggtaaggaaaatgatggagtagcaatacaaatactaactctgtatatgtcctcatgggacctttaatagcactgcacagtggaaggatttccttttatrgttttatcataaaggtctcctttgaactcagagtttgaactctgccatcctgcatattgcaggggactgaaacagaaagtctttcttttgagaacttcagcacgtgttamactcatgtttgaaacactgggaaagacataygaaaaatatattcagtagcaattgtttaaaaataaaaagaagtagaaaagcacataacagccacgtccattttcactgctgggaactgcaggatgtaagtagtcccattaggagtggcgctgaagcctggcttcctgtggctttctcctttctggattg

SEQ ID NO: 68395 - DNA, 600 bp, Chicken  19866894339336_2
cttcacaaacttaattgataatataaagtgtcctaaagcagctctcccttgtctggaacactgttcagttagcaagataacaagaggccaaggtaaggaaaatgatggagtagcaatacaaatactaactctgtatatgtcctcatgggacctttaatagcactgcacagtggaaggatttccttttatrgttttatcataaaggtctcctttgaactcagagtttgaactctgccatcctgcatattgcaggggactgaaacagaaagtctttcttttgagaacttcagcacgtgttamactcatgtttgaaacactgggaaagacataygaaaaatatattcagtagcaattgtttaaaaataaaaagaagtagaaaagcacataacagccacgtccattttcactgctgggaactgcaggatgtaagtagtcccattaggagtggcgctgaagcctggcttcctgtggctttctcctttctggattgtctgatgcttaatatatgcttgagctctctctgtggtctttcccctgtactcagcactggtgaggccgcacctcaagtattgtgttcaattttgggcccctcactacaag

SEQ ID NO: 68396 - DNA, 600 bp, Chicken  19866894339336_3
cctaaagcagctctcccttgtctggaacactgttcagttagcaagataacaagaggccaaggtaaggaaaatgatggagtagcaatacaaatactaactctgtatatgtcctcatgggacctttaatagcactgcacagtggaaggatttccttttatrgttttatcataaaggtctcctttgaactcagagtttgaactctgccatcctgcatattgcaggggactgaaacagaaagtctttcttttgagaacttcagcacgtgttamactcatgtttgaaacactgggaaagacataygaaaaatatattcagtagcaattgtttaaaaataaaaagaagtagaaaagcacataacagccacgtccattttcactgctgggaactgcaggatgtaagtagtcccattaggagtggcgctgaagcctggcttcctgtggctttctcctttctggattgtctgatgcttaatatatgcttgagctctctctgtggtctttcccctgtactcagcactggtgaggccgcacctcaagtattgtgttcaattttgggcccctcactacaagaaagacattgaggccctggaacgtgttcaga

SEQ ID NO: 68397 - DNA, 599 bp, Chicken  19866894339338_1
  misc_feature (1)..(25): n is any nucleotide
nnnnnnnnnnnnnnnnnnnnnnnnntatctagacccccccatcaaatgtggagtaaagctatttgccaccatgcaactcattcacttctccaaaacagtcagaggcacaaactgttttattttggcttttccctttttccaccacttgtgaggcttctggaaggagaataaaaatgatggcaaatgcctgttcgagttagtatattgacctcttcaggcagaaaaatccactttttgttatgtttatagaaactcattcttggaataacaccagataaaagtttttatttgttaaaatgwgcatgcaactctgagttgstgaattctgtcctccttccatccattccttggtttggggcagtcagctactacagtcagcaaccgtttcttcacggtggtgtttgatgactgattactgagaccagaaaacctgtggttttcacacttagtctttaattgataagtaagaggtatcttgaaactgtctcagttttcttatttgaaaagtactgtttttagaggctctgatttatctagctctgctacactgtaattatccaactgcattgttgatttagttgaaagagttgtaattaggt

SEQ ID NO: 68398 - DNA, 599 bp, Chicken  19866894339338_2
  misc_feature (1)..(6): n is any nucleotide
nnnnnntatctagacccccccatcaaatgtggagtaaagctatttgccaccatgcaactcattcacttctccaaaacagtcagaggcacaaactgttttattttggcttttccctttttccaccacttgtgaggcttctggaaggagaataaaaatgatggcaaatgcctgttcgagttagtatattgacctcttcaggcagaaaaatccactttttgttatgtttatagaaactcattcttggaataacaccagataaaagtttttatttgttaaaatgwgcatgcaactctgagttgstgaattctgtcctccttccatccattccttggtttggggcagtcagctactacagtcagcaaccgtttcttcacggtggtgtttgatgactgattactgagaccagaaaacctgtggttttcacacttagtctttaattgataagtaagaggtatcttgaaactgtctcagttttcttatttgaaaagtactgtttttagaggctctgatttatctagctctgctacactgtaattatccaactgcattgttgatttagttgaaagagttgtaattaggtacattcttctgaaaagact

SEQ ID NO: 68399 - DNA, 600 bp, Chicken  19866894339339_1
ccaaacagtgtcctcactcacactagcttctcctttcaagagcatgggaggaggtctcttattttaattacatttcttgaaattgaagggtgcctctgagcaaggcaactaatatcacagccaggtttacgcctaggaaactatgactaacaaaataataaaagactaatttgtcacctctggatatgcagtttagtccaaccctgtcacctttatacacaacccccaggaacatttctttatccacagggagtttgcattcaaatctctacgtgtacccctccattagataaataatgytagatccagaagtgagaaatgggagaccagccttctagccaaagcagattcatttcatttgatttggatattttttaaattcccacttttgccctctgctgttgtctcagatccctctctaataaataaccagtccacatcactaaattgctgcacataactcagagcaatttgttactgttggcaatgtctgtgcagcgggggcccaggaacaggccagcatggaagcagcactacctcccactcttcaggagcatgatttctgcctgattacagaaggggtcattggtaggacaatgc

SEQ ID NO: 68400 - DNA, 600 bp, Chicken  19866894339340_1
tccagggaaaaacatattggattgcaacttgaacagtagatgagaagctggtctgtctcgaactgtgtggctatgaactacactggttcctagaaatcatcgctggaaaagagtgtctgcagccttgggaaacagtgagtaagtcaactgtccacaacagtggagtattctcttgtgtccaagtgtagcttctctaggacttgaaactgtcagacaaaaactgtgtgtaattgtaacagaaaactcagactaaaatcaaaaccttctctctgcggacatcccagtgaggctaccttaacygtgaaggattctttgcctttaaaagcagaaaatcagaaagctacaaacttactatgtatagatgtcaagctatacatatatatttccttggattggaagattaaattgaaccagtggtataatttaatacttttttttaatttacattactaatacattaggttgtagaagataattaaatgacatcctttgaaagctaggtattaattaaatgctcactaaatgcaagaaggaatcagggttaaattcaaaactatgatgtttactgaacatttattggtggtacaaggtgaccaaaga

SEQ ID NO: 68401 - DNA, 600 bp, Chicken  19866894339345_1
taatcctgactgattgtacaggttaggaatttatacttaaatgcattcctaagctggagcttccatctcgtgcacaagtcagagtagggaaggctgtattttaaatgatacctcttagctggtttggggccagtctactcttgactcgccacatctcagtgctagctgcaatttagccattaacaacgtcaaatttggaaagaactgactggctcaaacatgaggtgagggttaataaagcaaaatcctggttttgtgccatcccagcaggtccagctgccagcatttctaacagctccrctagggcctcgcatcctgtaatgtctgcaagctcaggggagcaatccctgtttatatcactaaatttttacaatccagtccaaaggaattcctctacagtgctctggtcacccttaagaggcttctaacagtactctgaataaataaactctcagcagttaacaaataacccaaatcaatcaacctagtggccatgtaaatgcaggaaaagcacatgctaggtgtttgtgcaacatttagtgtaagcctgtaagtgtaatacagacagaaatgaaactatttcatgggcgttaggaccag

SEQ ID NO: 68402 - DNA, 600 bp, Chicken  19866894339346_1
atcctgctccactgcagcgcgagcaatctgagtttccagcccaactcagaggcctaccctctatcaagcccatcccatccccaaaagaaatagctgatatctcacacaaacggagaatttaatgggaaggcattgcaggacactgcctctgtctaaaagtaaagcagtaaaaaatgaaggaaactgggaacattaaagcatgcaaaagctttcagagcaatctactatcaacatgagcaaggcatttcgtttggaaatgatgcaactgcgcttggtttgaagaagtcaggctaccttttyrtctttacaggaggtacacaggcagctagagctgctgcactgcacagtgcacccaaacaaagtccagatttcacgactaatatccacagctaggactgtatctcactgaaggctaaaacaaacagaaagaccacttcctcactctcccgcttattgttccagctgacttggtctgggctacttctcatctgtaacgttgagtgctcacagtaggacctgcactgcaccactgtgtaagactgaggacaccttcagagggataaaagtcacaaaggagctcttaaaagcacacagaacttt

SEQ ID NO: 68403 - DNA, 600 bp, Chicken  19866894339346_2
tcctgctccactgcagcgcgagcaatctgagtttccagcccaactcagaggcctaccctctatcaagcccatcccatccccaaaagaaatagctgatatctcacacaaacggagaatttaatgggaaggcattgcaggacactgcctctgtctaaaagtaaagcagtaaaaaatgaaggaaactgggaacattaaagcatgcaaaagctttcagagcaatctactatcaacatgagcaaggcatttcgtttggaaatgatgcaactgcgcttggtttgaagaagtcaggctaccttttyrtctttacaggaggtacacaggcagctagagctgctgcactgcacagtgcacccaaacaaagtccagatttcacgactaatatccacagctaggactgtatctcactgaaggctaaaacaaacagaaagaccacttcctcactctcccgcttattgttccagctgacttggtctgggctacttctcatctgtaacgttgagtgctcacagtaggacctgcactgcaccactgtgtaagactgaggacaccttcagagggataaaagtcacaaaggagctcttaaaagcacacagaactttg

SEQ ID NO: 68404 - DNA, 600 bp, Chicken  19866894339354_1
atctcattatgaattcctgaatgaaaaacacttaacctcttttcctgctgaatgtgctattctctgtcttaggacatccatctcctgttgctgctgctgttgttgtttattgaaatgcttttctgaatgtgataaatgcgttaccacacacgggtctggcagcagtttgacatacacagtcggcaattcctgtagctttctttcttcgttatggaagatctgtaactggatttgttccacaaatatgaatgagattacctagaaagccaagaagtttttaggtttgaggcagccccaagwcatcatttaaaakaaaatctttattttaaaaaactactcttgggggcatccagcttcccatttcagtctcatgaaattcccacttcaatctaatgcaccagtcagtacctcctcactgcaacacatcctcccatttcagggtgacatataaacctaatcttaacaaattaaatactcaggctacttcttcaccaggacttgactctattttcagtcattcaaaaaacaattttcctaatgaagacccagtcctctgggaaatgaggcccaaatttgctcatcatggctgtcattcaccaa

SEQ ID NO: 68405 - DNA, 600 bp, Chicken  19866894339354_2
ttcctgaatgaaaaacacttaacctcttttcctgctgaatgtgctattctctgtcttaggacatccatctcctgttgctgctgctgttgttgtttattgaaatgcttttctgaatgtgataaatgcgttaccacacacgggtctggcagcagtttgacatacacagtcggcaattcctgtagctttctttcttcgttatggaagatctgtaactggatttgttccacaaatatgaatgagattacctagaaagccaagaagtttttaggtttgaggcagccccaagwcatcatttaaaakaaaatctttattttaaaaaactactcttgggggcatccagcttcccatttcagtctcatgaaattcccacttcaatctaatgcaccagtcagtacctcctcactgcaacacatcctcccatttcagggtgacatataaacctaatcttaacaaattaaatactcaggctacttcttcaccaggacttgactctattttcagtcattcaaaaaacaattttcctaatgaagacccagtcctctgggaaatgaggcccaaatttgctcatcatggctgtcattcaccaaggtactcagcata

SEQ ID NO: 68406 - DNA, 599 bp, Chicken  19866894339378_1
  misc_feature (1)..(66): n is any nucleotide
nnnnnnnnnnnnnnnnnnnnnnnnnnnnnnnnnnnnnnnnnnnnnnnnnnnnnnnnnnnnnnnnnnatatgaagtgccataatcaaaaagaaaaaaaattgcacaggctctcaccaaaagagaatgatttttttttgtttgttgttcttttctaaccatcccagtacagtaggctgatgctagcttttcctccaggtaagctctctgatcctaattactgtaccgctgtatgaaaggcatggccagcacaggagagggagctacagtacagtgggaggagggtcaatatattcatgaacwgtggaaccgaatcagtgagaaatttaactaagtagtaaaagaaagaccagaaaaacaaaaaaaagagaagaactgcacacacaaaacaaccaaccaaccaataaggccatcttttttaatgacaggatttcccacaaatgctacagcaacgctgagagggaggaaaaaaagattcttcttcatttctctacacytcttaattttcaaatactttttmtcctgttctatttttacttcattttaaaatggcatttgggccagaaagayacctttctgtccccatcctcttctcactctct

SEQ ID NO: 68407 - DNA, 600 bp, Chicken  19866894339378_2
ggtaagctctctgatcctaattactgtaccgctgtatgaaaggcatggccagcacaggagagggagctacagtacagtgggaggagggtcaatatattcatgaacwgtggaaccgaatcagtgagaaatttaactaagtagtaaaagaaagaccagaaaaacaaaaaaaagagaagaactgcacacacaaaacaaccaaccaaccaataaggccatcttttttaatgacaggatttcccacaaatgctacagcaacgctgagagggaggaaaaaaagattcttcttcatttctctacacytcttaattttcaaatactttttmtcctgttctatttttacttcattttaaaatggcatttgggccagaaagayacctttctgtccccatcctcttctcactctctcccttaaacattttttttaattattattttcaatttattccctccaacatgcatctcttcatgaagttggaagagttgacttcacagaagaaaatgctgtctagctaaaataaaacaaagctttgccacagtcttgaacaggtctagaatttaatttcattagcaggaaaaaaaaaagtcaaaccaacctggtca

SEQ ID NO: 68408 - DNA, 600 bp, Chicken  19866894339378_3
ctgtaccgctgtatgaaaggcatggccagcacaggagagggagctacagtacagtgggaggagggtcaatatattcatgaacwgtggaaccgaatcagtgagaaatttaactaagtagtaaaagaaagaccagaaaaacaaaaaaaagagaagaactgcacacacaaaacaaccaaccaaccaataaggccatcttttttaatgacaggatttcccacaaatgctacagcaacgctgagagggaggaaaaaaagattcttcttcatttctctacacytcttaattttcaaatactttttmtcctgttctatttttacttcattttaaaatggcatttgggccagaaagayacctttctgtccccatcctcttctcactctctcccttaaacattttttttaattattattttcaatttattccctccaacatgcatctcttcatgaagttggaagagttgacttcacagaagaaaatgctgtctagctaaaataaaacaaagctttgccacagtcttgaacaggtctagaatttaatttcattagcaggaaaaaaaaaagtcaaaccaacctggtcaatacatgaaaactcaacatacct

SEQ ID NO: 68409 - DNA, 600 bp, Chicken  19866894339378_4
acagtgggaggagggtcaatatattcatgaacwgtggaaccgaatcagtgagaaatttaactaagtagtaaaagaaagaccagaaaaacaaaaaaaagagaagaactgcacacacaaaacaaccaaccaaccaataaggccatcttttttaatgacaggatttcccacaaatgctacagcaacgctgagagggaggaaaaaaagattcttcttcatttctctacacytcttaattttcaaatactttttmtcctgttctatttttacttcattttaaaatggcatttgggccagaaagayacctttctgtccccatcctcttctcactctctcccttaaacattttttttaattattattttcaatttattccctccaacatgcatctcttcatgaagttggaagagttgacttcacagaagaaaatgctgtctagctaaaataaaacaaagctttgccacagtcttgaacaggtctagaatttaatttcattagcaggaaaaaaaaaagtcaaaccaacctggtcaatacatgaaaactcaacataccttaacagtaactttgactgactccattataaggtgagtacattcttttgtc

SEQ ID NO: 68410 - DNA, 600 bp, Chicken  19866894339380_1
tctattcaacactggtgagaagatactggagtgctctatctagctctgtgctccctggtataataaagatgtggactactggagtgagaccagagaaggaccatgaagaaaattaaggaactggagcatctggcatgtagagaggcagagagttggtgctgtggcagctcaagagaggtcctaccaatgtatttaaacatttggcggaaggtggagccaggctcttagcaaaagggaagagatgatggatgcaaactgaaatacaggaaatctaatttaaatggaagacaaagcattttysctttggaaggggatcagacactggaaccagctgccctgagtsattgtggcatctctgttcttggagatgctcagaacccaagcggacaaggtcctcagcaacttgccctgtagcaagctgcttctgtgatggaagtagaagtcagccagcctcagagaaaaaacagtctgtcttcagattsatggtaaagcagaaacagtgctaaacactgctcctttgccagcgctgccaatttgttcatctctttaggttcgtgtaggtttgrgaatcaaagtgcaatgtgcagccacttgcgcaat

SEQ ID NO: 68411 - DNA, 600 bp, Chicken  19866894339380_2
ctattcaacactggtgagaagatactggagtgctctatctagctctgtgctccctggtataataaagatgtggactactggagtgagaccagagaaggaccatgaagaaaattaaggaactggagcatctggcatgtagagaggcagagagttggtgctgtggcagctcaagagaggtcctaccaatgtatttaaacatttggcggaaggtggagccaggctcttagcaaaagggaagagatgatggatgcaaactgaaatacaggaaatctaatttaaatggaagacaaagcattttysctttggaaggggatcagacactggaaccagctgccctgagtsattgtggcatctctgttcttggagatgctcagaacccaagcggacaaggtcctcagcaacttgccctgtagcaagctgcttctgtgatggaagtagaagtcagccagcctcagagaaaaaacagtctgtcttcagattsatggtaaagcagaaacagtgctaaacactgctcctttgccagcgctgccaatttgttcatctctttaggttcgtgtaggtttgrgaatcaaagtgcaatgtgcagccacttgcgcaatg

SEQ ID NO: 68412 - DNA, 600 bp, Chicken  19866894339380_3
ctctgtgctccctggtataataaagatgtggactactggagtgagaccagagaaggaccatgaagaaaattaaggaactggagcatctggcatgtagagaggcagagagttggtgctgtggcagctcaagagaggtcctaccaatgtatttaaacatttggcggaaggtggagccaggctcttagcaaaagggaagagatgatggatgcaaactgaaatacaggaaatctaatttaaatggaagacaaagcattttysctttggaaggggatcagacactggaaccagctgccctgagtsattgtggcatctctgttcttggagatgctcagaacccaagcggacaaggtcctcagcaacttgccctgtagcaagctgcttctgtgatggaagtagaagtcagccagcctcagagaaaaaacagtctgtcttcagattsatggtaaagcagaaacagtgctaaacactgctcctttgccagcgctgccaatttgttcatctctttaggttcgtgtaggtttgrgaatcaaagtgcaatgtgcagccacttgcgcaatgcctctgaggctggcagtggcaatttagcagaagttgtcttgt

SEQ ID NO: 68413 - DNA, 600 bp, Chicken  19866894339380_4
accaatgtatttaaacatttggcggaaggtggagccaggctcttagcaaaagggaagagatgatggatgcaaactgaaatacaggaaatctaatttaaatggaagacaaagcattttysctttggaaggggatcagacactggaaccagctgccctgagtsattgtggcatctctgttcttggagatgctcagaacccaagcggacaaggtcctcagcaacttgccctgtagcaagctgcttctgtgatggaagtagaagtcagccagcctcagagaaaaaacagtctgtcttcagattsatggtaaagcagaaacagtgctaaacactgctcctttgccagcgctgccaatttgttcatctctttaggttcgtgtaggtttgrgaatcaaagtgcaatgtgcagccacttgcgcaatgcctctgaggctggcagtggcaatttagcagaagttgtcttgtaacgcttatcttaagggccaagaaagtggagggtgtcataaaaagtaattatcaaaatggtgtaagataaacgtggtatgtaattaccttgttaaagtagatacagtttcctgaacaaggacagtagaaattaaaaatg

SEQ ID NO: 68414 - DNA, 600 bp, Chicken  19866894339380_5
gaaatctaatttaaatggaagacaaagcattttysctttggaaggggatcagacactggaaccagctgccctgagtsattgtggcatctctgttcttggagatgctcagaacccaagcggacaaggtcctcagcaacttgccctgtagcaagctgcttctgtgatggaagtagaagtcagccagcctcagagaaaaaacagtctgtcttcagattsatggtaaagcagaaacagtgctaaacactgctcctttgccagcgctgccaatttgttcatctctttaggttcgtgtaggtttgrgaatcaaagtgcaatgtgcagccacttgcgcaatgcctctgaggctggcagtggcaatttagcagaagttgtcttgtaacgcttatcttaagggccaagaaagtggagggtgtcataaaaagtaattatcaaaatggtgtaagataaacgtggtatgtaattaccttgttaaagtagatacagtttcctgaacaaggacagtagaaattaaaaatgaagcttttagagttgaactctgtgacatttaggttgtaaagcaacttgcaccatacgccaccttggaactgctcttgtcttgag

SEQ ID NO: 68415 - DNA, 600 bp, Chicken  19866894339380_6
gtaattatcaaaatggtgtaagataaacgtggtatgtaattaccttgttaaagtagatacagtttcctgaacaaggacagtagaaattaaaaatgaagcttttagagttgaactctgtgacatttaggttgtaaagcaacttgcaccatacgccaccttggaactgctcttgtcttgagctgaattcccgtagcacacagggagcgtgtgtaaacatatagtctgttttcatgtaaaggttgtgagattcagctctaaggtagtcagtagcttgctgtcgttactacaaaggaacagctyttgttctttctgctgtattgctttgctttgttcctttcctacttatcagggtccttgaggagaagagcctttttgattagcaaggggaggtgtgtaaggaaagctccattctttcagttggagagctcttctggcctaaagcaaatcactctttttgtgaaaagtgtaagagaaccggacctacatcataggttcatgcatcgtgaactctgcaaaagacaggtctagatcaagagtttttatgtggttgattcattgttggtgtaactcaaccttttaattcttcattttctcttcctg

SEQ ID NO: 68416 - DNA, 600 bp, Chicken  19866894339383_1
aatctgaaggtcttctgaatcggtgaggctaagacaagcttctcctttatatttacattgccttggatgtggaaattaaaatccaggcagcaaaatgtacttttaattggtgtgggtggtagatgagctctctccttttcagtctgccttctggttttaattgggtagaaaactattgtaaatattttcttctttcacgctgctccttcccaagctcttctgtaaacaagtgaggtattgtttagctgctatacactacatcccacacaccccaaaccaaaacagagaagaagtacacaktcaaattgctactgatcatttgggattctaagggtctttttaaatcacaccacagagcgactcgcatacctccacataagttagcacaagatgtaatatcttttttttacctttccttttcgttatcagctcaagaagagaaaagcagacttggaaacktcagcaaatgaacctagaaagatttgctcagcagcctctaagtctttggtcagcagctctgtgctgttcaaggcacaagtacaagtgcatcactgttctctcatttaaatgtagaataattctaggattcatggcaatgcc

SEQ ID NO: 68417 - DNA, 600 bp, Chicken  19866894339383_2
attgggtagaaaactattgtaaatattttcttctttcacgctgctccttcccaagctcttctgtaaacaagtgaggtattgtttagctgctatacactacatcccacacaccccaaaccaaaacagagaagaagtacacaktcaaattgctactgatcatttgggattctaagggtctttttaaatcacaccacagagcgactcgcatacctccacataagttagcacaagatgtaatatcttttttttacctttccttttcgttatcagctcaagaagagaaaagcagacttggaaacktcagcaaatgaacctagaaagatttgctcagcagcctctaagtctttggtcagcagctctgtgctgttcaaggcacaagtacaagtgcatcactgttctctcatttaaatgtagaataattctaggattcatggcaatgccagcttaaacttagctctaaagaaaccctttgttttcaaataaatcactgcctcgttttagataattctataaagaatcttattcatccaccacgtaacatattagttaacatgaaaagagcaccaagaaggcagtcaacctccaaaaaattctgaagaa

SEQ ID NO: 68418 - DNA, 599 bp, Chicken  19866894339388_1
  misc_feature (1)..(24): n is any nucleotide
nnnnnnnnnnnnnnnnnnnnnnnntggaggaggaggagtaggcaatgctgtcacctctagagaaaggcttggaagccctttaattattgcagagaagtggagacctggagatgaaagtcattgccttggggataaggaagaagcggctggagcatgcttagagagagttcaaaggacacctcttacaatgatcctaagcagaatgccaccttacaattaggcaagctttgcaagcctgctgctgtgatcattcatttcagccttactgaaaatcatttagggcttctactatggggaaaraagagtcccatagagagttagttaaattactgacactcctgccacacttgggtgtgtacacctgaatcctttattccttttatttctattttatttttgctttacttgataaaggccaccatctaaaagtcacagtgcagtgggtaaggggtcactgtggggttctcatgtagtgtaaggggctgctccagggttgttttgcccagagggtacagctggagccatggctgctgtatgtgaagactttgtggaggggttgatggcaagggaggaaggtgggatttttttttttttccttc

SEQ ID NO: 68419 - DNA, 600 bp, Chicken  19866894339388_2
tccctggctgtgctgagaccactctactctgggacatagccttgaaagcaattgtaatctgcccttaatgtcacccaagaaaagcagacctacctgtgaatggttgtgcagaatggcatttgaatgtgatatatcataagggaatatttcaagaagcatggagagagataagtgaagcagagttaaagtgacgtggattatttgtatgatgacttttttttcctgcaagcataactctgctattgagactttctgttcttaggcataattattcctttaccagtgttcttttagaagttytgaatgaattatagactctgaatgaaatatagacaatttattgttttattgtcacaggctacttcttcacctgggaacctcattgaacattattgttaagtagggttcctgttgacttttccatgcatgtcaagatgtgaagagttggtaattaacgttaatgtcaccacatgtgaggcttctttcctgagaaggcagtaggcagccagtctgcctccttcatgtgggagactgcagcctgcagtcagaggaatgtctgggcaatggatgggtgacccttcattcagcgatcacctgaac

SEQ ID NO: 68420 - DNA, 600 bp, Chicken  19866894339391_1
tgggaacctgagcactgctgcaaagccaaaggtttttttgccttatcgtatccaaaactcactaaagcaaaatagcgcaaaatgacagagaaacaaactctgatccaaatcaatatttggaagaaactgtcaacaaagaacttaatatatacaccaagcttccccttaggaacagactaattttgtacagacgttcctgagtgggagatgcatccataaaaacacgttgtccctggatttcacagtagcgtgggacctccttactgaattagcttccaggcacaactcaatcatatcctsttccccygtggccagttctgagcagcttcccctgctctgtctccgtaggggttaattcctctctgttatgcagacactgggattgccctgagactttccacagtagaaagagaaaatggaaataaaaagcagctccttgcatgatttgtggaaaatgcaaaatacaatagcaataaaaacagtaatgagctcattacaattgaaatgtctcattactactgcaaatgccaatcatatacgtggccaggttcctgatggtgcaggcagtcctttcaatactgtccctccttgctccaggga

SEQ ID NO: 68421 - DNA, 600 bp, Chicken  19866894339391_2
ctgagcactgctgcaaagccaaaggtttttttgccttatcgtatccaaaactcactaaagcaaaatagcgcaaaatgacagagaaacaaactctgatccaaatcaatatttggaagaaactgtcaacaaagaacttaatatatacaccaagcttccccttaggaacagactaattttgtacagacgttcctgagtgggagatgcatccataaaaacacgttgtccctggatttcacagtagcgtgggacctccttactgaattagcttccaggcacaactcaatcatatcctsttccccygtggccagttctgagcagcttcccctgctctgtctccgtaggggttaattcctctctgttatgcagacactgggattgccctgagactttccacagtagaaagagaaaatggaaataaaaagcagctccttgcatgatttgtggaaaatgcaaaatacaatagcaataaaaacagtaatgagctcattacaattgaaatgtctcattactactgcaaatgccaatcatatacgtggccaggttcctgatggtgcaggcagtcctttcaatactgtccctccttgctccagggatacaagt

SEQ ID NO: 68422 - DNA, 469 bp, Chicken  19866894339392_1
acccggctctgcagggctgtccagcctgcagcagggctgtgtgctgctttcctcgctccgagcggggctgttgagctggagggtcatctcccagctctccgctttgtgactcacccttggcagggcctcctgctctgctctcaggtccgggttgtgctgagggtgcggtgtgaggcagtggctttgccagttgtcacactcaggcggtgctgccagctctgtgctggctgccgggtgcagcaatgctgtggggcacagagaggacccacagcccgtggggggactgcaaggagaggatgygagctcagcactacgtgccctgcagctcccagcagcatccccagcgcgccgggcatccctccatccatcagtgcctcctccccgtcctgccgctcccttttgcttgcctaatccccggtgttgatatcgctgtcagaaaacaaattggcttcctttcattaccaagctg

SEQ ID NO: 68423 - DNA, 583 bp, Chicken  19866894339394_1
tgccaggcactgataatgtgtttgtggtactacagcactgaacagtgaagcactttttgcttttcacaaaaaaagccatgacaaaggccaacgtagaagagtaaagcaggttgggacactcaaacagaatttgccaaaggggctgcaataataggccagggaatatttgatttgcacaatacgtccaggaaataggaatgacagcttaggagaaaatatggttaaataattggtttctaaagcattttgattctataagttaaagcattatagcacagttgagatatacagtgattgatrgatattcagataatttccatctccggggttgcattttrctcatctattcatgtgattcaatacatttagactgagcctaaggaaggaaattttacagcaggatggtggaggggagagtttcacgttccccttaaattccaaaactctttcatgaaatatagaaagaaattaccaactcacagtcagtttgtaaattttttatagcagctgttgatatgcaccatgcactacagatattgaagccaaaaatcagtaatctttctctatgtaattaaaaatgaaa

SEQ ID NO: 68424 - DNA, 545 bp, Chicken  19866894339394_2
tgaacagtgaagcactttttgcttttcacaaaaaaagccatgacaaaggccaacgtagaagagtaaagcaggttgggacactcaaacagaatttgccaaaggggctgcaataataggccagggaatatttgatttgcacaatacgtccaggaaataggaatgacagcttaggagaaaatatggttaaataattggtttctaaagcattttgattctataagttaaagcattatagcacagttgagatatacagtgattgatrgatattcagataatttccatctccggggttgcattttrctcatctattcatgtgattcaatacatttagactgagcctaaggaaggaaattttacagcaggatggtggaggggagagtttcacgttccccttaaattccaaaactctttcatgaaatatagaaagaaattaccaactcacagtcagtttgtaaattttttatagcagctgttgatatgcaccatgcactacagatattgaagccaaaaatcagtaatctttctctatgtaattaaaaatgaaa

SEQ ID NO: 68425 - DNA, 600 bp, Chicken  19866894339399_1
atgggtagtgagcacaactaagtgtgatcggtactgtcacacctcgcctgggtcagctacaataacagctatctaagcagcaggaaaaccaggagatcctctgatagcagatttagtctatgtatttcccaaattcagattcttcaaagaattgctgcatgggaaatgcatttcattacatgtaataatttagacagataataatttcacctgacagacagaacaaagctaaaataaggcttttgaaattcacagtagccactgaattacattttagatctggtaaaccaaacaaacacyttcagtttccttaattcttctgagaaaataagctcygtggaacaacagcatataatatatatgtaacgtacacctattgaggaattctgattacataaagaaacagtcacgatgacactgttcagttttactgtagtttagaggggaaatcattatcttgtagaagcaactaaaaagagagatctctgattactgctttttctacatgactgttcacactttgtttgctattagcatttcaggcttcaaataacaattttagtaattttatctgtacaggcatgctcayagcaattcaac

SEQ ID NO: 68426 - DNA, 600 bp, Chicken  19866894339399_2
tcacacctcgcctgggtcagctacaataacagctatctaagcagcaggaaaaccaggagatcctctgatagcagatttagtctatgtatttcccaaattcagattcttcaaagaattgctgcatgggaaatgcatttcattacatgtaataatttagacagataataatttcacctgacagacagaacaaagctaaaataaggcttttgaaattcacagtagccactgaattacattttagatctggtaaaccaaacaaacacyttcagtttccttaattcttctgagaaaataagctcygtggaacaacagcatataatatatatgtaacgtacacctattgaggaattctgattacataaagaaacagtcacgatgacactgttcagttttactgtagtttagaggggaaatcattatcttgtagaagcaactaaaaagagagatctctgattactgctttttctacatgactgttcacactttgtttgctattagcatttcaggcttcaaataacaattttagtaattttatctgtacaggcatgctcayagcaattcaactttgataatcaatgtggcattcctgaccaccttaac

SEQ ID NO: 68427 - DNA, 600 bp, Chicken  19866894339399_3
aaacaaacacyttcagtttccttaattcttctgagaaaataagctcygtggaacaacagcatataatatatatgtaacgtacacctattgaggaattctgattacataaagaaacagtcacgatgacactgttcagttttactgtagtttagaggggaaatcattatcttgtagaagcaactaaaaagagagatctctgattactgctttttctacatgactgttcacactttgtttgctattagcatttcaggcttcaaataacaattttagtaattttatctgtacaggcatgctcayagcaattcaactttgataatcaatgtggcattcctgaccaccttaacatggaatgccgaaggatgaatgaacacacacttccactgaagaactactgactccccaacagtgcgtacrtcattctccggtgaaagattcagatgtccttaacttcagccctctcctaaccacttttttttgctaagttctacaagtagatttggaaaaccaggtgcttattattcttcttcctaatactatacactattttaaatacaaaattatatggttactgacttttaggggagccagccaagctta

SEQ ID NO: 68428 - DNA, 600 bp, Chicken  19866894339399_4
tcacgatgacactgttcagttttactgtagtttagaggggaaatcattatcttgtagaagcaactaaaaagagagatctctgattactgctttttctacatgactgttcacactttgtttgctattagcatttcaggcttcaaataacaattttagtaattttatctgtacaggcatgctcayagcaattcaactttgataatcaatgtggcattcctgaccaccttaacatggaatgccgaaggatgaatgaacacacacttccactgaagaactactgactccccaacagtgcgtacrtcattctccggtgaaagattcagatgtccttaacttcagccctctcctaaccacttttttttgctaagttctacaagtagatttggaaaaccaggtgcttattattcttcttcctaatactatacactattttaaatacaaaattatatggttactgacttttaggggagccagccaagcttattagactgattttgttatactactagaagcagctctagaagcaagatacactccaaaaaacatctttcattttacctgtactgcaatttgtgttccgttggatgtagccaacaatgt

SEQ ID NO: 68429 - DNA, 521 bp, Chicken  19866894339408_1
aaaaaaaagaattgtgtaagtccgttattttggtcaggttccaggtttgcccaggttttgcagatcagccttagagcgctctcaggttaaaggaggcagttagatgaataggtggaagggaagtatacggccctaatgatccctgtaaaaaaatacgctgcggcgcaatccatcacgcccggactgctgagccaacacgtggggagctctcagcgcagggcaggaccccgcgattgcctaggaacaacctgcgggcacggcgccagccgcagagcgaagcagcagagggagacagcagcrtgctgggcacgccaagccaccagggcgtctctcacacttccctctgggacatcatccaagttatttaaagacttgacagaagaatggggcagttcagcttgtgtatgatatgctatgtatctccccgcattgctcggtgtcataaaaaaaaaaaaaaaaaaagtgtgaagtgaaggaatgtgaattttcctctttagtatttcagctgcttggtgggttta

SEQ ID NO: 68430 - DNA, 600 bp, Chicken  19866894339409_1
aggatatgttaactcataggaaagttgtactcaatttcagttttaaatgaattcttcctcccttcccccatcattttatttcattttgattacagtgattcctaagctccagtttctttctagtttcagacagggcctgaggtctttctgctactgcttgtgcaatgaaaaaaaaaggggatggggggagggatagcacacaagaagggaaaacgcagggtctgaaatgtccctcaaggacctgaatgtttgttcttggaacgctgactgcagtgtcagtaaggcttgagcagctggacrtgcattgtcagcagatgtactgagcgtttctggaacacattgcctgccttcttgccactaaaatacctgatcaatgcaaagtttatccwcactggcactaaaatgaacagatattgtccagatgtgaatttcrcatccaatagcaggttaaggaaaagagctgcactgctgcctctgttagcctgagcttgcaggtgtgatgtgaagcttgcgcaagtccttcagaggctacattttctcccagctcgaacacttgaaaaggttaattaattatcagactggctggcataattcaagcac

SEQ ID NO: 68431 - DNA, 600 bp, Chicken  19866894339409_2
ttacagtgattcctaagctccagtttctttctagtttcagacagggcctgaggtctttctgctactgcttgtgcaatgaaaaaaaaaggggatggggggagggatagcacacaagaagggaaaacgcagggtctgaaatgtccctcaaggacctgaatgtttgttcttggaacgctgactgcagtgtcagtaaggcttgagcagctggacrtgcattgtcagcagatgtactgagcgtttctggaacacattgcctgccttcttgccactaaaatacctgatcaatgcaaagtttatccwcactggcactaaaatgaacagatattgtccagatgtgaatttcrcatccaatagcaggttaaggaaaagagctgcactgctgcctctgttagcctgagcttgcaggtgtgatgtgaagcttgcgcaagtccttcagaggctacattttctcccagctcgaacacttgaaaaggttaattaattatcagactggctggcataattcaagcacctgctttcagatgcttagcaggcactgttatggaaactgctgtgcaggatatctcagaccagagataatcctcccctatgtcttatctg

SEQ ID NO: 68432 - DNA, 600 bp, Chicken  19866894339409_3
ggcctgaggtctttctgctactgcttgtgcaatgaaaaaaaaaggggatggggggagggatagcacacaagaagggaaaacgcagggtctgaaatgtccctcaaggacctgaatgtttgttcttggaacgctgactgcagtgtcagtaaggcttgagcagctggacrtgcattgtcagcagatgtactgagcgtttctggaacacattgcctgccttcttgccactaaaatacctgatcaatgcaaagtttatccwcactggcactaaaatgaacagatattgtccagatgtgaatttcrcatccaatagcaggttaaggaaaagagctgcactgctgcctctgttagcctgagcttgcaggtgtgatgtgaagcttgcgcaagtccttcagaggctacattttctcccagctcgaacacttgaaaaggttaattaattatcagactggctggcataattcaagcacctgctttcagatgcttagcaggcactgttatggaaactgctgtgcaggatatctcagaccagagataatcctcccctatgtcttatctgtagatagctaattttcatacaaaacatggagttgggaatccaac

SEQ ID NO: 68433 - DNA, 600 bp, Chicken  19866894339409_4
actgctgcctctgttagcctgagcttgcaggtgtgatgtgaagcttgcgcaagtccttcagaggctacattttctcccagctcgaacacttgaaaaggttaattaattatcagactggctggcataattcaagcacctgctttcagatgcttagcaggcactgttatggaaactgctgtgcaggatatctcagaccagagataatcctcccctatgtcttatctgtagatagctaattttcatacaaaacatggagttgggaatccaacagtattaatgctcagaagctcttaagcttckccagggtcctgctgcccactgcagctgctcacccagccatcttctggcctcccagcttcacagggtactgcctcacacacaagctgtcgtggggcattggattaatttttcatgctgtgctctctctctctctctctctttttttttttttctttttactacactttgttttgttttgttaggctgaaagctctctgagctttgtattatccccttttgctgttgtgaatacaatggaatcctgagctcttttagactctccacttgctcctgcgatatgaataattagtgaactaggtt

SEQ ID NO: 68434 - DNA, 600 bp, Chicken  19866894339409_5
ctttcagatgcttagcaggcactgttatggaaactgctgtgcaggatatctcagaccagagataatcctcccctatgtcttatctgtagatagctaattttcatacaaaacatggagttgggaatccaacagtattaatgctcagaagctcttaagcttckccagggtcctgctgcccactgcagctgctcacccagccatcttctggcctcccagcttcacagggtactgcctcacacacaagctgtcgtggggcattggattaatttttcatgctgtgctctctctctctctctctckttttttttttttctttttactacactttgttttgttttgttaggctgaaagctctctgagctttgtattatccccttttgctgttgtgaatacaatggaatcctgagctcttttagactctccacttgctcctgcgatatgaataattagtgaactaggttccttatgatacctttcattttcaaacacgttgttcttacccaagtgaggaaagtccagtacttcaaaagactctgtgaaatggctctagtgaggatactgtcaagcttccccatgtgttgtgtttttacagttctctag

SEQ ID NO: 68435 - DNA, 600 bp, Chicken  19866894339413_1
ttctttacagctgggatttgtgatctgagttttgttgtcatcattagattctacagcttcaaaatggttttgtttgtttctaatctgttcttctttgcttctactcctaccagcatccacactaaccaaagcttttctgaaaactgagatttcaggcccttttgcaaggagggcagaaaaatcaacaagaaatcagctttaaaaggaagaatgtaaatgaaatcaatcaagcagaagaagatgaaagaaaaaatccaaacggctggaatcagtctgatttcacccgaactttccccaaayggagaacctccctcagaagtcaagcacagagccttatttcacattttccacagtaacctttagagttcaaaatgctcatctgctcacccccccacgtcccctcgcagcggtgtttgcaaatgacacaaacatttgactatgatctgtgctctccctaacgcagcccagcccgtgcccgcgcctgctaacaattttctctggagcaagttcaagcacaatttgctcatgctggtatctatctgtcatcggatgtgtcagccgaatctctttcagcttcgggtggggaggaaagagacaaaa

SEQ ID NO: 68436 - DNA, 600 bp, Chicken  19866894339421_1
tttgcaactagattgtttgaaaatgaagaaagcagtcccaaccccaagtggtttccacaggagatcaaggagatggcaaataagaacttaagagatgctcacctagttgctgttctgcagttcttagtacttgagacaggaaccctctcagacactgcagtgccctttccttctaggagttactaactggtgtcagcttaacctaaatctttgctttccattgtatttactgggccattaagacttcatactctactcatacagcatatcatattttatagcacgtcatgccaccaaaascaagtcccttgttctatactgraaagcagtagrcagggaagagaactgtaagaaagaatcatagaatcgctaaggttggaaaagacccacaggatcatccagtccaaccattcacccatcaccaatggttctcactaaaccatgtccctcaacacaacatccaaacgctctttgaacaccaccaggctcggtgactccaccacctctctgggcagcccattccagtgcctgaccaccctttcagacaagtagtatttcctaacgtccagcctgaaccttccctggcacagcttgaaacca

SEQ ID NO: 68437 - DNA, 600 bp, Chicken  19866894339421_2
atgaagaaagcagtcccaaccccaagtggtttccacaggagatcaaggagatggcaaataagaacttaagagatgctcacctagttgctgttctgcagttcttagtacttgagacaggaaccctctcagacactgcagtgccctttccttctaggagttactaactggtgtcagcttaacctaaatctttgctttccattgtatttactgggccattaagacttcatactctactcatacagcatatcatattttatagcacgtcatgccaccaaaascaagtcccttgttctatactgraaagcagtagrcagggaagagaactgtaagaaagaatcatagaatcgctaaggttggaaaagacccacaggatcatccagtccaaccattcacccatcaccaatggttctcactaaaccatgtccctcaacacaacatccaaacgctctttgaacaccaccaggctcggtgactccaccacctctctgggcagcccattccagtgcctgaccaccctttcagacaagtagtatttcctaacgtccagcctgaaccttccctggcacagcttgaaaccattatggcatgaaggaaccattt

SEQ ID NO: 68438 - DNA, 600 bp, Chicken  19866894339421_3
agtcccaaccccaagtggtttccacaggagatcaaggagatggcaaataagaacttaagagatgctcacctagttgctgttctgcagttcttagtacttgagacaggaaccctctcagacactgcagtgccctttccttctaggagttactaactggtgtcagcttaacctaaatctttgctttccattgtatttactgggccattaagacttcatactctactcatacagcatatcatattttatagcacgtcatgccaccaaaascaagtcccttgttctatactgraaagcagtagrcagggaagagaactgtaagaaagaatcatagaatcgctaaggttggaaaagacccacaggatcatccagtccaaccattcacccatcaccaatggttctcactaaaccatgtccctcaacacaacatccaaacgctctttgaacaccaccaggctcggtgactccaccacctctctgggcagcccattccagtgcctgaccaccctttcagacaagtagtatttcctaacgtccagcctgaaccttccctggcacagcttgaaaccattatggcatgaaggaaccatttaacttgtgttc

SEQ ID NO: 68439 - DNA, 600 bp, Chicken  19866894339428_1
ctcatagagtcaaatggaagcagcagggcgcctgccactgagcctccggctcctgacagggatgcacgtaatgagaatggaaacagattatggtcagcctaatatccaaatgacaaatggagatcctggagagaaacttgttttattggtgttggaggggaattccgctgctttcccatcactgcggtcctcgaatgtggagccaggtaaaattgcactcatttgcaggagtgcttggcagccccagcaagcacagcagtgccagcaccaaatgcaccagcgtgcacaggggggatgtgratgctctacacccatttacakggggatttgccatttgggatcagaagacaccccatgctctgccccccatcagtgctgtaggacagctttgagggcacaatgcggaaccaggagcacccagaggctgggaaatgctgttttccagagatccccggggtgaaggcaattaaaagcaggggctggacaatgtaactccacacctcatccctccctgagaagcacagcaccaacgtgaccagacaggctttgatgaaggctcgctgttgtctggcacactgtcctgtgagcaaatgtacctca

SEQ ID NO: 68440 - DNA, 600 bp, Chicken  19866894339428_2
agcagggcgcctgccactgagcctccggctcctgacagggatgcacgtaatgagaatggaaacagattatggtcagcctaatatccaaatgacaaatggagatcctggagagaaacttgttttattggtgttggaggggaattccgctgctttcccatcactgcggtcctcgaatgtggagccaggtaaaattgcactcatttgcaggagtgcttggcagccccagcaagcacagcagtgccagcaccaaatgcaccagcgtgcacaggggggatgtgratgctctacacccatttacakggggatttgccatttgggatcagaagacaccccatgctctgccccccatcagtgctgtaggacagctttgagggcacaatgcggaaccaggagcacccagaggctgggaaatgctgttttccagagatccccggggtgaaggcaattaaaagcaggggctggacaatgtaactccacacctcatccctccctgagaagcacagcaccaacgtgaccagacaggctttgatgaaggctcgctgttgtctggcacactgtcctgtgagcaaatgtacctcacaccatgcagctccatgcctc

SEQ ID NO: 68441 - DNA, 600 bp, Chicken  19866894339428_3
gccatcttaataagtgcatctcccagccaggggtgagaagcagcagctgaagcgccggcgtggatgtcaagttacaaatgagacatccaactgcttcatttattagagggaatcaattcgacttttcatattcaccaggagtttcaggcaggaaggaccccatcaacagcctgcactcagcccatcacatctcagcacaaagcaacacatgggggggggcaaaggggatgaaaaatctcttgctgcatagtgttactggagaacacaagtgctgttttacagagccaggaagggaaagcrtgaggacagcacacagtatgtgctgccccatcctcccagctctgctggggaatcacagcaggaaaaaggactgttatcatggagcgcaattaggcggcgtgtttgggaaccacaaatggcccttttgcctctgaaacagtagaactgtaacaaaaacatcgcaaaacatctccaagtccttttccagcaagcacaaccaacagggcaacaaatgggagcacaatacggcagcaaaagaccagcaaggagccccagcacacccatacgagctgtggctttgcagcactttgccctcttcag

SEQ ID NO: 68442 - DNA, 600 bp, Chicken  19866894339429_1
agcttaaaaggggattttaaaagttgctcagttctgaaacagggatgtcttagttgcttgtgtagatgtcattattctggaacaccagatgtaaatcttctctgcagtaccaataaatgcacagaattccttcatcttcttgtcctgcgtgttttggaacaaacagcaacacctgaaaaagatgctggagatgcagggaggacagtttcattgtgcagaaaaatctagctgtcactgccacgtagctaaatgaaaaggagccatttataatttggtgagaacaattttgtatgtgtgtgkttttttttccatttgttcccctcacyccaccccccctcccaaaatatattcagcttactctgatctacagaactctgatactaaccaactggtatgtttgggggactccataattgtrtcttaaaatggagtcatatttctgcagtataattccctctgttcacctgatgtgattgaatttacaagattggccctatccctgggaacaaatcatacattttgttgaattatttgaaatattttttgatgtaaggtaccattttccccaaacaaaccacactcagtgttaccctcayggct

SEQ ID NO: 68443 - DNA, 600 bp, Chicken  19866894339429_2
ctcagttctgaaacagggatgtcttagttgcttgtgtagatgtcattattctggaacaccagatgtaaatcttctctgcagtaccaataaatgcacagaattccttcatcttcttgtcctgcgtgttttggaacaaacagcaacacctgaaaaagatgctggagatgcagggaggacagtttcattgtgcagaaaaatctagctgtcactgccacgtagctaaatgaaaaggagccatttataatttggtgagaacaattttgtatgtgtgtgkttttttttccatttgttcccctcacyccaccccccctcccaaaatatattcagcttactctgatctacagaactctgatactaaccaactggtatgtttgggggactccataattgtrtcttaaaatggagtcatatttctgcagtataattccctctgttcacctgatgtgattgaatttacaagattggccctatccctgggaacaaatcatacattttgttgaattatttgaaatattttttgatgtaaggtaccattttccccaaacaaaccacactcagtgttaccctcayggcttctgaccaaatgagtgaacattactc

SEQ ID NO: 68444 - DNA, 600 bp, Chicken  19866894339429_3
gcacagaattccttcatcttcttgtcctgcgtgttttggaacaaacagcaacacctgaaaaagatgctggagatgcagggaggacagtttcattgtgcagaaaaatctagctgtcactgccacgtagctaaatgaaaaggagccatttataatttggtgagaacaattttgtatgtgtgtgkttttttttccatttgttcccctcacyccaccccccctcccaaaatatattcagcttactctgatctacagaactctgatactaaccaactggtatgtttgggggactccataattgtrtcttaaaatggagtcatatttctgcagtataattccctctgttcacctgatgtgattgaatttacaagattggccctatccctgggaacaaatcatacattttgttgaattatttgaaatattttttgatgtaaggtaccattttccccaaacaaaccacactcagtgttaccctcayggcttctgaccaaatgagtgaacattactctgtccctcactgtcgttgctttggagttcttgarcatcatatttacacttctaatttacatttaggaacattcagaactgaggcatgaattt

SEQ ID NO: 68445 - DNA, 600 bp, Chicken  19866894339429_4
gtgkttttttttccatttgttcccctcacyccaccccccctcccaaaatatattcagcttactctgatctacagaactctgatactaaccaactggtatgtttgggggactccataattgtrtcttaaaatggagtcatatttctgcagtataattccctctgttcacctgatgtgattgaatttacaagattggccctatccctgggaacaaatcatacattttgttgaattatttgaaatattttttgatgtaaggtaccattttccccaaacaaaccacactcagtgttaccctcayggcttctgaccaaatgagtgaacattactctgtccctcactgtcgttgctttggagttcttgarcatcatatttacacttctaatttacatttaggaacattcagaactgaggcatgaattttggagaaagagacggtcttgcaaattcagggaggaaggatgctctgctctgagtaagcaagaagtgctcacgggaaacattaattctcaattaattcttcttaagaaggctgctagagtgatgctggtcagctcggtagcctcagttgcttattttcaatattgggataatttttctc

SEQ ID NO: 68446 - DNA, 563 bp, Chicken  19866894339429_5
tgatctacagaactctgatactaaccaactggtatgtttgggggactccataattgtrtcttaaaatggagtcatatttctgcagtataattccctctgttcacctgatgtgattgaatttacaagattggccctatccctgggaacaaatcatacattttgttgaattatttgaaatattttttgatgtaaggtaccattttccccaaacaaaccacactcagtgttaccctcayggcttctgaccaaatgagtgaacattactctgtccctcactgtcgttgctttggagttcttgarcatcatatttacacttctaatttacatttaggaacattcagaactgaggcatgaattttggagaaagagacggtcttgcaaattcagggaggaaggatgctctgctctgagtaagcaagaagtgctcacgggaaacattaattctcaattaattcttcttaagaaggctgctagagtgatgctggtcagctcggtagcctcagttgcttattttcaatattgggataatttttctccctctcatttcagggagtgaagtgcat

SEQ ID NO: 68447 - DNA, 600 bp, Chicken  19866894339430_1
agtggggaggtagctcactgatgatctggggcactgaagagccaaggagggactccaccatgttggccactgccaccaccaccaccaccacccaggctaggtggccaagcagcacatcaccactggacagctcggagcagccggctcacagttgctaagagacagcacatgccaacatggcttgaacgaaagccagacaaaaccgcggggctgcaggagagacaggctcacacccagaatgccaacttctggtgtcttttctttggttcccgtcagctctgcagcactgtaggagtcggyttgattggggcagacctcacatgagtcacaacaactttgccaatcttccccggtcttgatttgtagcatttattgataatggcaacgtgttaattataggatgtgctcacaaattgtgaattcagcagcaaggaacacaaaatgttctgcttgcaccaatgtgtgcccacccacctattttcttcccattcgaattgcattccacttgtctcccagtactatagtctcttccccgtgtttggcacaggcctcctgaagaaaggagtcagaactagctgaatgctaacatggatcctggag

SEQ ID NO: 68448 - DNA, 600 bp, Chicken  19866894339434_1
gtgattctgcccctctactctgctctcacaagatccccacctggagtactgcgtccagttctgaagcccccaacacaagaaagacatggatttgttggaacacattcagagaagagccatgaagatgatcagaggactggagaacctcccctacaaagacagaatgagagagctgggattctccagcctagagaagagaaggctccagagggaccttatagaggccttccagtatctgaagagggcctacaaaaaagctggggagggacttcttataagggcatgtagtgatgggacgargagaaatagttttaaactagaagaggatagatttagattaggaaaaaattctttactgtgagggtggtgagacactggaacaggttgcccactgaggttgtggatgccccctccctggagaccttcaaggccaggctggacggggctttgagcaaccaggtctagagagaggtgttcctgtctaaagcaggggggttggaactagatgatctacaaggtcccttccaactcaaaccattctatgattatatgattctatgacctgattaaacatttactgtactctcatctattaggtct

SEQ ID NO: 68449 - DNA, 600 bp, Chicken  19866894339441_1
gtctggcccctaaggtaagcaaatcccacagctgtgcacagcaaactctacccataaaaaaaaaggcactccaggctggaggctcacaactagctttgcttcaacatctcttgctaaccaactccatggcctattgacccttaggtcaatagaaaagagcaaacagtagaaattttcttgagcctggctctctctcactgctccctcctcaaagcctcagagatgttgtacagttcactcacccttccctctgctctgcttctatgtgaaggaggaaaagacatggtgtctgcccttctrttatcaagttctcaggtctgcgggttattcttattcttgtttatttgtttgttttccttggtattctatcagtatttttcttatctcttcctcaggtctgaagaaacaaagttttggtagcttagctgagattagccagcaygaatagctaagtccttagtccttcaggctcttcccaggcccttgcactacmagatttttgccttctcttttgwttctgtacagtctcccttgagaaatggcaawcagtgtgaatagtatcaggcaggtaaaatgaggcccatacaatttccatatctt

SEQ ID NO: 68450 - DNA, 600 bp, Chicken  19866894339441_2
aggtcaatagaaaagagcaaacagtagaaattttcttgagcctggctctctctcactgctccctcctcaaagcctcagagatgttgtacagttcactcacccttccctctgctctgcttctatgtgaaggaggaaaagacatggtgtctgcccttctrttatcaagttctcaggtctgcgggttattcttattcttgtttatttgtttgttttccttggtattctatcagtatttttcttatctcttcctcaggtctgaagaaacaaagttttggtagcttagctgagattagccagcaygaatagctaagtccttagtccttcaggctcttcccaggcccttgcactacmagatttttgccttctcttttgwttctgtacagtctcccttgagaaatggcaawcagtgtgaatagtatcaggcaggtaaaatgaggcccatacaatttccatatcttgctttccacaacctctttccagcagaagaaagccaggatatcccctaacggagctgcacagctgtggttattatcctgacactgcaacataagcaaagcaaacaaaagtaatgcttaagtggcaatgcaagaaagaaactgg

SEQ ID NO: 68451 - DNA, 600 bp, Chicken  19866894339441_3
ctcactgctccctcctcaaagcctcagagatgttgtacagttcactcacccttccctctgctctgcttctatgtgaaggaggaaaagacatggtgtctgcccttctrttatcaagttctcaggtctgcgggttattcttattcttgtttatttgtttgttttccttggtattctatcagtatttttcttatctcttcctcaggtctgaagaaacaaagttttggtagcttagctgagattagccagcaygaatagctaagtccttagtccttcaggctcttcccaggcccttgcactacmagatttttgccttctcttttgwttctgtacagtctcccttgagaaatggcaawcagtgtgaatagtatcaggcaggtaaaatgaggcccatacaatttccatatcttgctttccacaacctctttccagcagaagaaagccaggatatcccctaacggagctgcacagctgtggttattatcctgacactgcaacataagcaaagcaaacaaaagtaatgcttaagtggcaatgcaagaaagaaactggagactggattcctcaccacagccactggaaggtaaggcaaagccaggagga

SEQ ID NO: 68452 - DNA, 600 bp, Chicken  19866894339441_4
ctcagagatgttgtacagttcactcacccttccctctgctctgcttctatgtgaaggaggaaaagacatggtgtctgcccttctrttatcaagttctcaggtctgcgggttattcttattcttgtttatttgtttgttttccttggtattctatcagtatttttcttatctcttcctcaggtctgaagaaacaaagttttggtagcttagctgagattagccagcaygaatagctaagtccttagtccttcaggctcttcccaggcccttgcactacmagatttttgccttctcttttgwttctgtacagtctcccttgagaaatggcaawcagtgtgaatagtatcaggcaggtaaaatgaggcccatacaatttccatatcttgctttccacaacctctttccagcagaagaaagccaggatatcccctaacggagctgcacagctgtggttattatcctgacactgcaacataagcaaagcaaacaaaagtaatgcttaagtggcaatgcaagaaagaaactggagactggattcctcaccacagccactggaaggtaaggcaaagccaggaggattcctacttttagaacattcat

SEQ ID NO: 68453 - DNA, 600 bp, Chicken  19866894339441_5
ccctctgctctgcttctatgtgaaggaggaaaagacatggtgtctgcccttctrttatcaagttctcaggtctgcgggttattcttattcttgtttatttgtttgttttccttggtattctatcagtatttttcttatctcttcctcaggtctgaagaaacaaagttttggtagcttagctgagattagccagcaygaatagctaagtccttagtccttcaggctcttcccaggcccttgcactacmagatttttgccttctcttttgwttctgtacagtctcccttgagaaatggcaawcagtgtgaatagtatcaggcaggtaaaatgaggcccatacaatttccatatcttgctttccacaacctctttccagcagaagaaagccaggatatcccctaacggagctgcacagctgtggttattatcctgacactgcaacataagcaaagcaaacaaaagtaatgcttaagtggcaatgcaagaaagaaactggagactggattcctcaccacagccactggaaggtaaggcaaagccaggaggattcctacttttagaacattcatagaattttttaacaaaccagtacatgcagga

SEQ ID NO: 68454 - DNA, 599 bp, Chicken  19866894339473_1
  misc_feature (1)..(16): n is any nucleotide
nnnnnnnnnnnnnnnnttcctcctcctcctcctcctcctctcccagcccattgtgggcacagggaggccccttgtcctcctgcgtcccccactgctgggaggtggcagctgttcggtgaagctgtgttggggctctcctttggttcctgcctcgcatccacatggtcagccagaggtggctgcgtgtcaccctctggggcactgctgctgtcacatggtgtggtggctttggttgcaaggccgccaacagggacagtccttggctttggaaccgggggcttggcttcctcaggtgtctcytcaggtggcttcaagtggtggctcagtggttgagtggctgatgttcccacttgctttgtcagccaaccattgccttcaatggggctggtggccggtaccacaggagcttctgtggggacctgcggggtctgcctctggcagggggacaccagaggtggctcttgggttgagatcttcttggcttccagctccctgttcttcagcatctgccggtgctgggcgctggcctgggagacgtcgcagactttgatgcggttcatttgtgagagcttcacattctttatcttggggtcaatgat

SEQ ID NO: 68455 - DNA, 594 bp, Chicken  19866894339473_2
tggcagggggacaccagaggtggctcttgggttgagatcttcttggcttccagctccctgttcttcagcatctgccggtgctgggcgctggcctgggagacgtcgcagactttgatgcggttcatttgtgagagcttcacattctttatcttggggtcaatgatattgatgtagcccaagacttcactcccaggctccgggtcaggctcaacccaggtgggcaggtagtcaaacatgttggctttctccaggttcaggaggccggggtggatgagcagggagaggtcagccgcctcgccrtgcctgtctcccgcctggccctcgtgcagccctttgcctttgttttccaccttctgtgttttgtcctggttctcggatgaagtcttgctgatctggtctgcactcttggccttcaccagggcatatttggggtttatcagcttcttcaccatggcgttggcaggggtcaccggcacaacggagggcagcgttacaggctctggttcgggctccatgcccatggagatggacttgaggctcacccctttggacatgaggtacagctcctggaactgctgtcaaacgcctccacca

SEQ ID NO: 68456 - DNA, 600 bp, Chicken  19866894339474_1
tgttttctcattattgcaactccacgcagatcagcaaagtttcatttcactgttacaaacgatacttgatctctctgagccctgctttgccatacggtgtttactacacaggtcaccagagcctgtcactacctacctgtatctccctgctctctggccacacacatgtcaaaattctgtgcccccccttccctgtccctgccctggggaagcgagagtggcaacaggaacgggattactcactgggatcaggaagtcaatgcaaaggttgtctcagagatttccagaaatccaccaagkcctgaactacctcaagcacttcttgttctcaaagacacaaggatgctgtgtaacacttgaagctcagttctgcctttaggccaagaatcggctgtctgctgcttaactcacacaagagattgcaatgaagggcaatatttttttcttaacttgtcacagttctgcttatcaaagaaaagatgctcaatgacaaaatactgtgacattgctatcatatttggagacttctaaggcatccgggaggcccacagttctgatctcctcccttttttgcaagcattttacttccccacatgcaaa

SEQ ID NO: 68457 - DNA, 537 bp, Chicken  19866894339482_1
ctgtgctgtttgaagacaagcaggagtctcaacagctattagcagtcggaaatctgatggcccttgtatttaacagttacttatgatgccaatccgtacactcaaaatcttacagacgcatctataaaaacagaatatagtagaattttgcaactgatacaaaaatttaaggcaaaagaatatttcatttaaagccagaatcttgtctcctgctgttaccagtattaggcagaataaactgactgtaccagttaggcatctttgaggtcatctcattcctatcattttttcattcttaakttttttttttttttcattctcaataatttcaaattaggttaagcctggaaatagggattttatctctgataatatgttcttgttagcatttgcttgttctagtgactgatatccttgaccttcacttaaaagtctacaaacttactaggagtatgtgttctatacatactgtatatgtaaacacatataaactgtggaacatgaccgtgtcaaactgtattccatgagagcatttca

SEQ ID NO: 68458 - DNA, 600 bp, Chicken  19866894339502_1
cgtgtatatatggatgtatatatacctatgtcatacatagaatcacttgttccttgatattaaaacaagatgtttcagtcctgcaggaaaggacacttcctccagatgtgcactgttttcaagacacaagtgtagatgctgtggtagagtgggaataggaggaatgctgtttggcacctctttgctctacagctgagcaacaggatttctgaatgttgtggcacttatagcacactttggaaacagcaaaaaaatgatgatgtttccactatttcagaactcagtacatatagatggcargaaytggggcagtctgggactaaaatgagcctttaaccactgaagttttttggaaatttgggtccagtttgatataagtcctgtttttaatacatactgaggataaaatggaaacatctcccccctgttttaaagtgacctgatctgtgtgcttcataacatttctgtcacattaagagctctctcgtaaggaaaacaagagatacaaaatctgccaaatctccaataatattcaaataatcagtggctaattactcttacaaaaatgttatgcagttgcgggagtttaattttgcattc

SEQ ID NO: 68459 - DNA, 600 bp, Chicken  19866894339502_2
tatatatggatgtatatatacctatgtcatacatagaatcacttgttccttgatattaaaacaagatgtttcagtcctgcaggaaaggacacttcctccagatgtgcactgttttcaagacacaagtgtagatgctgtggtagagtgggaataggaggaatgctgtttggcacctctttgctctacagctgagcaacaggatttctgaatgttgtggcacttatagcacactttggaaacagcaaaaaaatgatgatgtttccactatttcagaactcagtacatatagatggcargaaytggggcagtctgggactaaaatgagcctttaaccactgaagttttttggaaatttgggtccagtttgatataagtcctgtttttaatacatactgaggataaaatggaaacatctcccccctgttttaaagtgacctgatctgtgtgcttcataacatttctgtcacattaagagctctctcgtaaggaaaacaagagatacaaaatctgccaaatctccaataatattcaaataatcagtggctaattactcttacaaaaatgttatgcagttgcgggagtttaattttgcattcatcc

SEQ ID NO: 68460 - DNA, 535 bp, Chicken  19866894339508_1
ccgggctgcacaccacctccagaccagtgctccttgatagccacggggctcataccgggcaaagggccaggctgcagccaggccagctcccgttctgctccgtggggctgcccagccagggcaggcacagccccaggcagagcacgaggccctgtgtagctcaacctgacggcacacggctacagcacaccaggccaaccgcaggagtgctctgaatacaaatcgcacatgatcaaggctcaatttgaatgctatattggtggatatattttttttttctaactaatcttgtgttaaacmactctttcctcaaacaaacacctttttttcacctggcattgaagatgttgctcgcagtgatggagctcccagctgcctcacctctcacccaacacgatgccttcatattacatttaaacaaaacttatcatccacaagcaaagaagatgtgtgaatgtctaaagcttatgtaaattaagaggctgaacacacaggtcctaaaaatagtagataataacagcatttcttcactata

SEQ ID NO: 68461 - DNA, 600 bp, Chicken  19866894339524_1
gaaaactgcaaagtgcttctgaattgcacaaacttttcacaagacaaagagtttccaagatgcactgatggtaataacaagacaatgagtacagagaaaccgctttaacagagaaacactgactcctgaagttgttttgatgggggcagatctacatatattcacctgagttccaacaccatccacaacagaaaactgcacagaacctgctagtgatcatgctgtactccaccttcactgtttcttctgagaaatatgcctcactaaatctaatttaaaagcagttccagcccctttatrtaagataacaaattagacatgctatacacagatgatcactctgcatgctgatacttttccagctgggtagatgctacagcagagtacaaattaattaattaactttaattaactcagataaaaaggaaagacaagagaacagtgaaaacccagttactgcaaatgtgatcaggctgtgcctgcatagagtatatgagaagttaggagggtagtttgggagtgaattctgtacattgcatcatgaagcacaccagactggaaatagtaagacttgctgagatgtatgtggaagttggaatg

SEQ ID NO: 68462 - DNA, 600 bp, Chicken  19866894339524_2
cactctgcatgctgatacttttccagctgggtagatgctacagcagagtacaaattaattaattaactttaattaactcagataaaaaggaaagacaagagaacagtgaaaacccagttactgcaaatgtgatcaggctgtgcctgcatagagtatatgagaagttaggagggtagtttgggagtgaattctgtacattgcatcatgaagcacaccagactggaaatagtaagacttgctgagatgtatgtggaagttggaatggagcacgcatttttcacctcggtggtggaaaaagcrgcagagcagatagaggtaaatagaagggagtgatgtagggcagygggacagagctatataaggggacrgggkatgagtatagatgataagaggagcctttgtaaactcctatcacatgagctgctcccattcctttctgttccaccatctgcaatggttagtccctaggcaaattgtcaactattttacagattaagcaaaaggcatgtcctgctcctctgttggtatgaacacaaaaagcactacacaagacactgggaatgtgtcctgtactattacagaaaaccaactattcttcag

SEQ ID NO: 68463 - DNA, 600 bp, Chicken  19866894339524_3
agagtacaaattaattaattaactttaattaactcagataaaaaggaaagacaagagaacagtgaaaacccagttactgcaaatgtgatcaggctgtgcctgcatagagtatatgagaagttaggagggtagtttgggagtgaattctgtacattgcatcatgaagcacaccagactggaaatagtaagacttgctgagatgtatgtggaagttggaatggagcacgcatttttcacctcggtggtggaaaaagcrgcagagcagatagaggtaaatagaagggagtgatgtagggcagygggacagagctatataaggggacrgggkatgagtatagatgataagaggagcctttgtaaactcctatcacatgagctgctcccattcctttctgttccaccatctgcaatggttagtccctaggcaaattgtcaactattttacagattaagcaaaaggcatgtcctgctcctctgttggtatgaacacaaaaagcactacacaagacactgggaatgtgtcctgtactattacagaaaaccaactattcttcagtaggagcagggggaagaaacagaaaaagaagaggaaaaacaaat

SEQ ID NO: 68464 - DNA, 600 bp, Chicken  19866894339524_4
ttaattaactcagataaaaaggaaagacaagagaacagtgaaaacccagttactgcaaatgtgatcaggctgtgcctgcatagagtatatgagaagttaggagggtagtttgggagtgaattctgtacattgcatcatgaagcacaccagactggaaatagtaagacttgctgagatgtatgtggaagttggaatggagcacgcatttttcacctcggtggtggaaaaagcrgcagagcagatagaggtaaatagaagggagtgatgtagggcagygggacagagctatataaggggacrgggkatgagtatagatgataagaggagcctttgtaaactcctatcacatgagctgctcccattcctttctgttccaccatctgcaatggttagtccctaggcaaattgtcaactattttacagattaagcaaaaggcatgtcctgctcctctgttggtatgaacacaaaaagcactacacaagacactgggaatgtgtcctgtactattacagaaaaccaactattcttcagtaggagcagggggaagaaacagaaaaagaagaggaaaaacaaatcaagacccacaagatgtagagtct

SEQ ID NO: 68465 - DNA, 600 bp, Chicken  19866894339524_5
ttaactcagataaaaaggaaagacaagagaacagtgaaaacccagttactgcaaatgtgatcaggctgtgcctgcatagagtatatgagaagttaggagggtagtttgggagtgaattctgtacattgcatcatgaagcacaccagactggaaatagtaagacttgctgagatgtatgtggaagttggaatggagcacgcatttttcacctcggtggtggaaaaagcrgcagagcagatagaggtaaatagaagggagtgatgtagggcagygggacagagctatataaggggacrgggkatgagtatagatgataagaggagcctttgtaaactcctatcacatgagctgctcccattcctttctgttccaccatctgcaatggttagtccctaggcaaattgtcaactattttacagattaagcaaaaggcatgtcctgctcctctgttggtatgaacacaaaaagcactacacaagacactgggaatgtgtcctgtactattacagaaaaccaactattcttcagtaggagcagggggaagaaacagaaaaagaagaggaaaaacaaatcaagacccacaagatgtagagtcttttc

SEQ ID NO: 68466 - DNA, 599 bp, Chicken  19866894339534_1
  misc_feature (1)..(22): n is any nucleotide
nnnnnnnnnnnnnnnnnnnnnntctatgtaccaatagaatcgctcaggttggaaaagcccttaaagaccatcgagtccaaccacaacccaaccatcctgccctaactaacaaccctccgctcaatcatggccctgagcaccacatccaaagggttgttaaacacatgcagggatggtgactcaaccacctccctgggcagcccattccagtgcttaacaaccctttctgtaaagaagtgtttcctgacatccaacctaagcctcccctggcacaacttgaggccatttcccctcgtcctktcacctgtcagcagtgagaagggaccaaccccgctctgctgcaaccacctttcaggtactggaagagaacaataaggtctcctctcagcctccttttcgcagaccaarcagccccagttccttcagtctctcctcataggccatattctccaagcccttcacctgagagaggacgaaagggatgtttgtagggaaagctcatgacttttattggaccactcatgctgctgcgaaaatggacaaccttttgtacacagcattccttcattagttgctgtaagagatggtttgacattcac

SEQ ID NO: 68467 - DNA, 600 bp, Chicken  19866894339534_2
acaaccctccgctcaatcatggccctgagcaccacatccaaagggttgttaaacacatgcagggatggtgactcaaccacctccctgggcagcccattccagtgcttaacaaccctttctgtaaagaagtgtttcctgacatccaacctaagcctcccctggcacaacttgaggccatttcccctcgtcctktcacctgtcagcagtgagaagggaccaaccccgctctgctgcaaccacctttcaggtactggaagagaacaataaggtctcctctcagcctccttttcgcagaccaarcagccccagttccttcagtctctcctcataggccatattctccaagcccttcacctgagagaggacgaaagggatgtttgtagggaaagctcatgacttttattggaccactcatgctgctgcgaaaatggacaaccttttgtacacagcattccttcattagttgctgtaagagatggtttgacattcactacttccacacagcagtggcttgttctgagttgcatgttaaccgtccttgctaaccgctctcattcttgcagacctcgttgtggagctgtacccacggaaacctcacgc

SEQ ID NO: 68468 - DNA, 599 bp, Chicken  19866894339535_1
  misc_feature (1)..(74): n is any nucleotide
nnnnnnnnnnnnnnnnnnnnnnnnnnnnnnnnnnnnnnnnnnnnnnnnnnnnnnnnnnnnnnnnnnnnnnnnnntaagtctgtgatggatgcgtacaacacaatgtctataaatcttcctctcatttgtagctgtgacatttttgtagtcattgaaatgcttaagtcattgggtaagaatgtagtagttcaaggaacagctcaaagcaaatgtgaaagccccacacaatttctttctaataatttccactgatttcttaatttgttcatttggttaaaataggcgcttgtagttacaagycaaatcttactacttatctaaaacattgccacacaaagtcagtcatagtgtgcacttacctcaggaatttgttagaagatctttgatatgaaaaacttaagaatacaartgcaaaggttctgcaatatttcttatcggagtctcttcccagacaatgtagcttgctgtttcaaggctctgtacatccacagatttctgatgctttcatctcttacgagatgaaaccccatcgagtgggttgttgattagcagttactttctaatcttaatctgcgatttgctgcctgaagtcagtgtat

SEQ ID NO: 68469 - DNA, 600 bp, Chicken  19866894339535_2
taaatcttcctctcatttgtagctgtgacatttttgtagtcattgaaatgcttaagtcattgggtaagaatgtagtagttcaaggaacagctcaaagcaaatgtgaaagccccacacaatttctttctaataatttccactgatttcttaatttgttcatttggttaaaataggcgcttgtagttacaagycaaatcttactacttatctaaaacattgccacacaaagtcagtcatagtgtgcacttacctcaggaatttgttagaagatctttgatatgaaaaacttaagaatacaartgcaaaggttctgcaatatttcttatcggagtctcttcccagacaatgtagcttgctgtttcaaggctctgtacatccacagatttctgatgctttcatctcttacgagatgaaaccccatcgagtgggttgttgattagcagttactttctaatcttaatctgcgatttgctgcctgaagtcagtgtatgggcctgcttttctttagctcttaaaggtttatggcataatacttcctattacctgcagaaaaggtgctttatagcagagttataggcaaagaacaaatttacagttgcc

SEQ ID NO: 68470 - DNA, 438 bp, Chicken  19866894339535_3
tgtagcttgctgtttcaaggctctgtacatccacagatttctgatgctttcatctcttacgagatgaaaccccatcgagtgggttgttgattagcagttactttctaatcttaatctgcgatttgctgcctgaagtcagtgtatgggcctgcttttctttagctcttaaaggtttatggcataatacttcctattacctgcagaaaaggtgctttatagcagagttataggcaaagaacaaatttacagttgccagttttagaggtttaggaatcaacttgtacttttagactggagaarcggttttgtcttattctcatctgctgtgtctctttaataatcttccagtgtctgtagtaatttgttcattttctgaaatttgctattatgatttgataggtaaacttgttcatgttgtagcacttctgtatagcaagg

SEQ ID NO: 68471 - DNA, 599 bp, Chicken  19866894339538_1
  misc_feature (1)..(191): n is any nucleotide
nnnnnnnnnnnnnnnnnnnnnnnnnnnnnnnnnnnnnnnnnnnnnnnnnnnnnnnnnnnnnnnnnnnnnnnnnnnnnnnnnnnnnnnnnnnnnnnnnnnnnnnnnnnnnnnnnnnnnnnnnnnnnnnnnnnnnnnnnnnnnnnnnnnnnnnnnnnnnnnnnnnnnnnnnnnnnnnnnnnnnnnnnnnnnnnggagaagggaagtactgcagcattgtggtttttaacagtgagaaggtaacactcattttgcgcacaacataactcagttaagttatttatgttgggagaagggtatccrttgccttgttgattgttctcttagcctagacatgctttacaattacctacaattttctttattatgtagttcatacttggctctatttctacgtagaagcatttctttggtacagcagtaacttcaagttggtcttgcttggactgtaatcccatgcttctgttgtctgattttaaaggaagttagcagggaattttgtggtcattctcaactttttttttctgtttccttagataaaatatacagctgctggaaaagagaattttcagaactttggtgttgttactgatacaccagtc

SEQ ID NO: 68472 - DNA, 600 bp, Chicken  19866894339542_1
agtgtcctggggcacttctaagctgcacagacaagcaacaactgctgcagcttagacaagcatatgctccagagaaggagacacattccagatgaggagcaggcccagcaaagtgaaggggaaaggttttggagggaactgaaggaatgctaaggatatagaaagctacaaagcaaaaagaaacagtcctaatgtcagtgatagcataaactatccaacagcaagctaattaacattcctattgacaagctattgaccaattagagtaaatatcatgggacatgactctgagatccaggrtcctgcttgaacccagcagccagagaatagctggagcaaggtggggagcatcagaaccattgtgtatgggtgatggagctccactgcagccaggacacrcctgctcccctgggcgtgctgtgtgttacccctccctgcacacgcctgcagcagtcaccacctcagaatcactgcacataaccgcagagccctcagtgccactgatagtcttggatggaagactgatggcatcagtggtcctctgagtgcaaagtaatagcatgacttgcatgttgaaaagatagataaatgtacatcagc

SEQ ID NO: 68473 - DNA, 600 bp, Chicken  19866894339542_2
caggcccagcaaagtgaaggggaaaggttttggagggaactgaaggaatgctaaggatatagaaagctacaaagcaaaaagaaacagtcctaatgtcagtgatagcataaactatccaacagcaagctaattaacattcctattgacaagctattgaccaattagagtaaatatcatgggacatgactctgagatccaggrtcctgcttgaacccagcagccagagaatagctggagcaaggtggggagcatcagaaccattgtgtatgggtgatggagctccactgcagccaggacacrcctgctcccctgggcgtgctgtgtgttacccctccctgcacacgcctgcagcagtcaccacctcagaatcactgcacataaccgcagagccctcagtgccactgatagtcttggatggaagactgatggcatcagtggtcctctgagtgcaaagtaatagcatgacttgcatgttgaaaagatagataaatgtacatcagcatataacttagaaattcctgtccatctttccctcttacaaagcagatagggcagtaatacatgagtagtgcccaaccactctccaaagatgccttgtaa

SEQ ID NO: 68474 - DNA, 599 bp, Chicken  19866894339555_1
  misc_feature (1)..(78): n is any nucleotide
nnnnnnnnnnnnnnnnnnnnnnnnnnnnnnnnnnnnnnnnnnnnnnnnnnnnnnnnnnnnnnnnnnnnnnnnnnnnnnttgaaaagtggtctctctctgagtgcatcccatttaatcttgagctggaattcatgtcttatgaacaccttgtttcctgacaggaccaaattgaaattctgcttccaaatggtacctgtgtcaaaatttagttctggagagcagactcttcatgccttcttttgacaaattcttgttttaatgctaagaggatgctgatacacactcctgtcaggacaaagkagtgtgttttagaatgtatggaagaagaaaaatcacgtttccccctgatttgctattcacatggtgctccgatgttgccaatcgttttgtttttgggaaaatgcaatataaatttgaagaagtgtttgcaagtggctgtttgctggaaactctttaatgagaaagtagctgacagttccggtgcctcagatcagtttttccctgaaacatggaatggaattcttaaaattactcagaagtctaagccagcaatctaaaaataatttccaatttatattattcctgattatgccttgtac

SEQ ID NO: 68475 - DNA, 600 bp, Chicken  19866894339555_2
gaattcttaaaattactcagaagtctaagccagcaatctaaaaataatttccaatttatattattcctgattatgccttgtacatgctgacaatgttctgatctatttgatctacacattattaaattgttatgggcaacctgtaagaagttccgtttgagacaaagtataataacttctcacacaacttccattccattgaaagggaatgaaagaggacagagggaagaaagaaggactattatttgctatttattgctgttgtaatcatttaatttgtgagtatatgtttttttttaytactgaattttaactctgtgcatgttgctatctgccaggtactttgttctgcacaaattgaaaaacctgaaatttcttgatactcggcaagtaaccaggaaagagagagaggaagctctggttagaggtgccttcatgaaagtggttaaacccaaggatgctaaggtaggaaagtaaaagaaaaaaggggcaatatgttattcattaatactgttttaatacagctacaaaagctagctaatatatgttattaagcttaaaagaatgtgtttttttttttgtcttgtctgaagatatgta

SEQ ID NO: 68476 - DNA, 600 bp, Chicken  19866894339556_1
gagcactctgctaatcaagtgtgacagtgcatgtatcaattgaaaatcattgttacggtgattattccaagctggactgtgcaaagatgatgaataacactttggggaacagcaagtagatttctgccgcagagaatcattgcatccaggtgtttttcttcaaaggcatttcttagtctgaagatacatgcaggaatcccctcttttggtgtgtatagatctgactgtgtgggatcaggtggtgtttgcttctaggattgctcacagcacaggatggctgcagacctgggcaggtccccrtgttcctgctgtgcaggagcagaggaggacaccccagactgggggaccacaggagagattttctccacagcaaaaccttgttctcctttctgcctttgggaatctgctttcctcaggagccaagggctcgcctcatgctttgcccaccattgttctgggctgaatcaaagggttttcagctctgggattattgtggcacgaaagccgcagacttaaaaactgaaagatgcaattcagctgctggtatataaatatgcagaaattatagctcgttcctaatcttaattgagcaccatatga

SEQ ID NO: 68477 - DNA, 591 bp, Chicken  19866894339560_1
aggttctgccagtgagaaatctgcaaatgagcctacagaaaatgaaatacattgaggaagtcgaggtctcctctgagatccagcgattaaacacagggctcagtgtcgggcagccccacagggttagtggtgaatggcagaacacagcagggcagtgcagcaaagcatgcagaatcagcttcccacccagacccaactcaagctgcccgagtgcctctgcctgcggtgcttccccccaaaacctggattaaaagacatcttcctggatggatgcatggaaaattcctcactcccacttcytggtaaaatggcagtagcactamactggcttcatcatcttttattaattagccatttcttactatttgcagctgctctccctgcaaggcctgaacagctgccatacaacaagagagtggggcaatgcactgcaacgtgcagctttctcaaaaatcacatttgtgactgcagactactgcccagagaacagaacctccaaagtaagagaggaacaggatttggttccaccattcaaataaccagcaggggggaaataacacttggagaaacgcaaagagccccaaagccctg

SEQ ID NO: 68478 - DNA, 568 bp, Chicken  19866894339560_2
caaatgagcctacagaaaatgaaatacattgaggaagtcgaggtctcctctgagatccagcgattaaacacagggctcagtgtcgggcagccccacagggttagtggtgaatggcagaacacagcagggcagtgcagcaaagcatgcagaatcagcttcccacccagacccaactcaagctgcccgagtgcctctgcctgcggtgcttccccccaaaacctggattaaaagacatcttcctggatggatgcatggaaaattcctcactcccacttcytggtaaaatggcagtagcactamactggcttcatcatcttttattaattagccatttcttactatttgcagctgctctccctgcaaggcctgaacagctgccatacaacaagagagtggggcaatgcactgcaacgtgcagctttctcaaaaatcacatttgtgactgcagactactgcccagagaacagaacctccaaagtaagagaggaacaggatttggttccaccattcaaataaccagcaggggggaaataacacttggagaaacgcaaagagccccaaagccctg

SEQ ID NO: 68479 - DNA, 600 bp, Chicken  19866894339566_1
gattcaattatgagctcgctatcgagctcagcctcccgctcctcccgcaggatgctgtactggatggacggggaggcaggtgagggaggaggccctccgatgtggctgaaggtcatgtagttggagtgcagcacctcctcagcagccaatgggtcctctgagaccagttcgatctctgagtccccagactcggcactgctggcttcattatccaggggtgaggggacagcagggcgcccaggcttcatcttctgctcttgcttctctgcagaaacggccggtgactgctgcacctcagasgtctcgaaagagaagccttttgcttccttaatggcactgatgagctcgtcctctgacaggctgcctttgccctgtgattctgagcctgatggttctgtgcacagaaagaaagggagaaaaaaagaaaaaaaaattaacaaaaagtggtattttctggctgcttaggcaacaaacaatagatttgacgctagcatagaaccctctagaagagctggtaacacaggcagaaagtcatctcatctgaggtggctaacagtaatcacagcttgtcctcgtagggtatttcctacattataaaca

SEQ ID NO: 68480 - DNA, 599 bp, Chicken  19866894339572_1
  misc_feature (1)..(176): n is any nucleotide
nnnnnnnnnnnnnnnnnnnnnnnnnnnnnnnnnnnnnnnnnnnnnnnnnnnnnnnnnnnnnnnnnnnnnnnnnnnnnnnnnnnnnnnnnnnnnnnnnnnnnnnnnnnnnnnnnnnnnnnnnnnnnnnnnnnnnnnnnnnnnnnnnnnnnnnnnnnnnnnnnnnnnnnnnnnnnnnncagcagagcaaagcagacagtgagtgatcccccagtcaccggagaggggagcaaatagctctggaacagcactacttacctggagaagcacctcacacacaccagctcatccacatcccagagrctgactagagcatcagcgctgcccgtggcaaagtacttccccatgggatcgaacttgatgcagatgcagtttgaaggatgggcattgatggactgaatgggtttcagttctgggtagctgcagagatgaagggagaggacaggaagcagtgagagaatcataaggcctctgtgcaagcagggcaggtgtgagacacgccaggaccaagcatgaaacaaaacagtgcaggggacactgctggaaacrtcaagtgttgagtgaacaaagaaaaacatcacagtcacacacagagaatccag

SEQ ID NO: 68481 - DNA, 600 bp, Chicken  19866894339572_2
actacttacctggagaagcacctcacacacaccagctcatccacatcccagagrctgactagagcatcagcgctgcccgtggcaaagtacttccccatgggatcgaacttgatgcagatgcagtttgaaggatgggcattgatggactgaatgggtttcagttctgggtagctgcagagatgaagggagaggacaggaagcagtgagagaatcataaggcctctgtgcaagcagggcaggtgtgagacacgccaggaccaagcatgaaacaaaacagtgcaggggacactgctggaaacrtcaagtgttgagtgaacaaagaaaaacatcacagtcacacacagagaatccagcccagaactggggcaacttccttccaggcaggtttgctcccatcatagtgactgggaatcactgggacgtgggactctggttccccaaactgcctcagcaagcagygatgcaccagggcagccagccttggtaccccacccagcagccaccacagccacccacctgaggatgttgatgcagccattcccattagtgaggaagaacatgttgttatcattgttccaggagatctcattgacctcaaac

SEQ ID NO: 68482 - DNA, 600 bp, Chicken  19866894339572_3
agttctgggtagctgcagagatgaagggagaggacaggaagcagtgagagaatcataaggcctctgtgcaagcagggcaggtgtgagacacgccaggaccaagcatgaaacaaaacagtgcaggggacactgctggaaacrtcaagtgttgagtgaacaaagaaaaacatcacagtcacacacagagaatccagcccagaactggggcaacttccttccaggcaggtttgctcccatcatagtgactgggaatcactgggacgtgggactctggttccccaaactgcctcagcaagcagygatgcaccagggcagccagccttggtaccccacccagcagccaccacagccacccacctgaggatgttgatgcagccattcccattagtgaggaagaacatgttgttatcattgttccaggagatctcattgacctcaaacttgaactgttcctctgctttggagcgatgcgtctttgcgtcaatgaaggtgacgacatcatccttgttccccaccgcaatggtctgtccatcagggctccaacagatgttgatgttctcccctagagggacagaaaagcagcaggtcccatttccaccc

SEQ ID NO: 68483 - DNA, 600 bp, Chicken  19866894339576_1
atttgaaaggaaccttccaacctaaggcagtctatgtctctgtgattcccttcagtcttatattccctggttcttgcttgtgccttagcacagctgcctatctgaatgttcatccaggtgtatttcatgtagtgtttgctgggtgtcatctacatctagtcaaacaatgaattcagctctggctgaacccagatggaacctactatgcagacatttagtggtgtggaagtgtatcacaaatagcaggaaggtggaacaacactgtcatagcattgcagacctgtgtgtttgtcagctttyttcttcaagacagaggaatatcgctgtatggggaytgttaagtcatgrcctgaaccactgattgagcacctgaggcaaagactcagtcagacccaggggcacaggtgaaggcaattcatctgtgtgaccggagggggtggagcctggctgcasctctcagacctcatttcagggctgactgccacttggaaaggttctttttttttrgaggtctttctttgttgaagttttctattgtgaagctagaattttctgatgtgggtgagcaatctttttcctttgttttatagtgcctttttc

SEQ ID NO: 68484 - DNA, 600 bp, Chicken  19866894339576_2
gtctctgtgattcccttcagtcttatattccctggttcttgcttgtgccttagcacagctgcctatctgaatgttcatccaggtgtatttcatgtagtgtttgctgggtgtcatctacatctagtcaaacaatgaattcagctctggctgaacccagatggaacctactatgcagacatttagtggtgtggaagtgtatcacaaatagcaggaaggtggaacaacactgtcatagcattgcagacctgtgtgtttgtcagctttyttcttcaagacagaggaatatcgctgtatggggaytgttaagtcatgrcctgaaccactgattgagcacctgaggcaaagactcagtcagacccaggggcacaggtgaaggcaattcatctgtgtgaccggagggggtggagcctggctgcasctctcagacctcatttcagggctgactgccacttggaaaggttctttttttttrgaggtctttctttgttgaagttttctattgtgaagctagaattttctgatgtgggtgagcaatctttttcctttgttttatagtgcctttttcttgtgctggtccttctatcgttgcacctttgttgt

SEQ ID NO: 68485 - DNA, 600 bp, Chicken  19866894339576_3
ccttcagtcttatattccctggttcttgcttgtgccttagcacagctgcctatctgaatgttcatccaggtgtatttcatgtagtgtttgctgggtgtcatctacatctagtcaaacaatgaattcagctctggctgaacccagatggaacctactatgcagacatttagtggtgtggaagtgtatcacaaatagcaggaaggtggaacaacactgtcatagcattgcagacctgtgtgtttgtcagctttyttcttcaagacagaggaatatcgctgtatggggaytgttaagtcatgrcctgaaccactgattgagcacctgaggcaaagactcagtcagacccaggggcacaggtgaaggcaattcatctgtgtgaccggagggggtggagcctggctgcasctctcagacctcatttcagggctgactgccacttggaaaggttctttttttttrgaggtctttctttgttgaagttttctattgtgaagctagaattttctgatgtgggtgagcaatctttttcctttgttttatagtgcctttttcttgtgctggtccttctatcgttgcacctttgttgtaatgtytttccca

SEQ ID NO: 68486 - DNA, 600 bp, Chicken  19866894339576_4
atctagtcaaacaatgaattcagctctggctgaacccagatggaacctactatgcagacatttagtggtgtggaagtgtatcacaaatagcaggaaggtggaacaacactgtcatagcattgcagacctgtgtgtttgtcagctttyttcttcaagacagaggaatatcgctgtatggggaytgttaagtcatgrcctgaaccactgattgagcacctgaggcaaagactcagtcagacccaggggcacaggtgaaggcaattcatctgtgtgaccggagggggtggagcctggctgcasctctcagacctcatttcagggctgactgccacttggaaaggttctttttttttrgaggtctttctttgttgaagttttctattgtgaagctagaattttctgatgtgggtgagcaatctttttcctttgttttatagtgcctttttcttgtgctggtccttctatcgttgcacctttgttgtaatgtytttcccattgtattaatctgttcaattgctatagctactcaagtggctgatatttcaaagtagttaaaacagataaggaaatcaggggtttgatgcacacaaattgttttgg

SEQ ID NO: 68487 - DNA, 600 bp, Chicken  19866894339576_5
cagacatttagtggtgtggaagtgtatcacaaatagcaggaaggtggaacaacactgtcatagcattgcagacctgtgtgtttgtcagctttyttcttcaagacagaggaatatcgctgtatggggaytgttaagtcatgrcctgaaccactgattgagcacctgaggcaaagactcagtcagacccaggggcacaggtgaaggcaattcatctgtgtgaccggagggggtggagcctggctgcasctctcagacctcatttcagggctgactgccacttggaaaggttctttttttttrgaggtctttctttgttgaagttttctattgtgaagctagaattttctgatgtgggtgagcaatctttttcctttgttttatagtgcctttttcttgtgctggtccttctatcgttgcacctttgttgtaatgtytttcccattgtattaatctgttcaattgctatagctactcaagtggctgatatttcaaagtagttaaaacagataaggaaatcaggggtttgatgcacacaaattgttttggatgtagttttttagactgtctcctactggagtagtaatattctgataatatctc

SEQ ID NO: 68488 - DNA, 600 bp, Chicken  19866894339576_6
gtcatgrcctgaaccactgattgagcacctgaggcaaagactcagtcagacccaggggcacaggtgaaggcaattcatctgtgtgaccggagggggtggagcctggctgcasctctcagacctcatttcagggctgactgccacttggaaaggttctttttttttrgaggtctttctttgttgaagttttctattgtgaagctagaattttctgatgtgggtgagcaatctttttcctttgttttatagtgcctttttcttgtgctggtccttctatcgttgcacctttgttgtaatgtytttcccattgtattaatctgttcaattgctatagctactcaagtggctgatatttcaaagtagttaaaacagataaggaaatcaggggtttgatgcacacaaattgttttggatgtagttttttagactgtctcctactggagtagtaatattctgataatatctctgctaaacagataatgatgaggatttgactttgcaactatttaatatgtactcagtgatgtactgtgttccttaggagtatcagcttgcacatggcacacctaggagtaggggaatgcatcagagctgatgggc

SEQ ID NO: 68489 - DNA, 600 bp, Chicken  19866894339577_1
tgaaaataaatctgaaagtgctccacattttcaaatgagaaagagcagacagtttccatcgcggaactccaaagaaacaagtaccagattgataacaaagacttaaaatacatttttgagttgaggaggtagttcttgcatgttttggaaataatacacttgtttttagtttgaaaaataacagtaaatgatctaagtagtcactgagctaattagctgacttggggagttttgaagaaaaatgcaattaccaaaaaaataaaaataaaaaaaagagagagagaaaggaaagaaaaaggyaaaaaaaagacagcaaaagagaagataaatgggataatatgcaaccacaaagctgtttttgccaggtatcctgaactatttctttactgagataactgattttctgagcaaaaggaaatgtagtagatctaatctatgtggattttggtctagcatttgataagacaccacatgggaagttattaattaagatgaagaagatggggattagtacaaaaagagtaaaatgtatagggaattttctgagggagaagtgccaataggttactgttgggataaagagattactagtgattcaag

SEQ ID NO: 68490 - DNA, 492 bp, Chicken  19866894339579_1
tcttctgatggggctttttcatgcaggctgtggaataaggagacctttgagcacctcctggggtacctcaactcaccggaagcaaaggaaatgggactgttcctgatttctggatacaacctgtttaagcagcctgtaccagtaaggagcagggcacaggggaggcaggcagggcctcagctctgggcagtgggcaggtttgaatttctgggctggagctgggtgtcagggacatctctgtcactcctgtccctgctgtaccacaattgattactgccatttgagtgatatcagaccttytcccctttgcaggatccatcttggaagaacattgtccttggcttcaggaacttgacaccgaaagagcttgaactcttccctggctacaggtactttcaggccctttttctgagagtttctgggctccatacattcccttaaaagaagtacgaatcacctcaaagaaagcactaacaatgcatgaaaactatt

SEQ ID NO: 68491 - DNA, 600 bp, Chicken  19866894339585_1
gagataatagggcaacaatcgtatttgatatttgggccagttggctcatactccatgcctaagaaacccaactataagcagcagctgctccttttaatgttaatgcttagaatgtttcccttactggtgatacgtcatagaaagtaatgcctgtgatgaaaccttgattaataaaataatgatggtgttgatggcctacttcccatacattgcacagaatcacagaacagcaggaattggaaaggacctctatgaatcatagaatggcctgggttggaaaggatcacaatgatcatctaktttcaacccctctgacacaggtagggttgccaaccagtagaccaggctgcccagagccacatccagcttgggcttgaatgcctccagtgacagggcaaccacaacctccttgggcaacctgttccaatgcttcaccaccctctgcatgaaaaaactcctcctaaggaacaggatatcatcgtgtccaactcccctgctacagcaggttccctacagcyggtcacacaggtcggtgtaaaggcgggtctcaaatatctccagaggagattccacaacttccctgggcagcttgttccaggc

SEQ ID NO: 68492 - DNA, 600 bp, Chicken  19866894339585_2
atcacagaacagcaggaattggaaaggacctctatgaatcatagaatggcctgggttggaaaggatcacaatgatcatctaktttcaacccctctgacacaggtagggttgccaaccagtagaccaggctgcccagagccacatccagcttgggcttgaatgcctccagtgacagggcaaccacaacctccttgggcaacctgttccaatgcttcaccaccctctgcatgaaaaaactcctcctaaggaacaggatatcatcgtgtccaactcccctgctacagcaggttccctacagcyggtcacacaggtcggtgtaaaggcgggtctcaaatatctccagaggagattccacaacttccctgggcagcttgttccaggctctgccacccttatagaacttcctgtgttcccttctgctaagcacattgtattaacagaatgacagtagtttggtcccttgagaagaaaagggcagcacattcactccttttcattcttctcaagcattcattcatttcattcctctccagcttacaatttaagacatgcttaaccagagagactatgttttgctagtcatctctttcatcttgcaga

SEQ ID NO: 68493 - DNA, 599 bp, Chicken  19866894339587_1
  misc_feature (1)..(42): n is any nucleotide
nnnnnnnnnnnnnnnnnnnnnnnnnnnnnnnnnnnnnnnnnnaatgcaccaccccaatatgcaagtgtgaacctattgactgaagatgcagaaatctaagagtttgtattggttttcaatgaaagtgtcaactgtggattcttttttgcaaagacaggacttatttctagaccttttttccttcctaataaacgttatagagaaaggaaagctttggagggctgatgcagaagagactactgcagcagcataggagaactgaaaaagggtcatgttagcaacatgtgagtatgtatgtgytcttcatctgctcccaactccacagcagctgcacaaaacacactgagattacactgatttaggaggatggactagataacctctgaactctcagccctattattttctatgaatcagcagaaagagaaactcccttcttgtgcaaatctcggttcttgcagctccaaaytcccatttttcttttcaggtgtctgaattacataaacacaggaatcttatcatgagacataaaccagacccaacgtaattacaacacagatcagttatcagcagattcttgttcctgcccctacagagtt

SEQ ID NO: 68494 - DNA, 600 bp, Chicken  19866894339587_2
gaccttttttccttcctaataaacgttatagagaaaggaaagctttggagggctgatgcagaagagactactgcagcagcataggagaactgaaaaagggtcatgttagcaacatgtgagtatgtatgtgytcttcatctgctcccaactccacagcagctgcacaaaacacactgagattacactgatttaggaggatggactagataacctctgaactctcagccctattattttctatgaatcagcagaaagagaaactcccttcttgtgcaaatctcggttcttgcagctccaaaytcccatttttcttttcaggtgtctgaattacataaacacaggaatcttatcatgagacataaaccagacccaacgtaattacaacacagatcagttatcagcagattcttgttcctgcccctacagagtttcctagaagaggagtgcagacataaaatacacatgatgcaaaccttgtcacacaaaaataataggaataatcactctggtgattctgcttattggattttatcatatgtaattttgccagtttttgtcawcaagggaagtccatytttttcacatattatcaatgtgagc

SEQ ID NO: 68495 - DNA, 512 bp, Chicken  19866894339587_3
ctcccttcttgtgcaaatctcggttcttgcagctccaaaytcccatttttcttttcaggtgtctgaattacataaacacaggaatcttatcatgagacataaaccagacccaacgtaattacaacacagatcagttatcagcagattcttgttcctgcccctacagagtttcctagaagaggagtgcagacataaaatacacatgatgcaaaccttgtcacacaaaaataataggaataatcactctggtgattctgcttattggattttatcatatgtaattttgccagtttttgtcawcaagggaagtccatytttttcacatattatcaatgtgagctaggaagctttccaggaatctaacagttactgtagactcaatgggtctaaaagcccatttactttgtgccctacttcttctttattcatcacatagtaccctataattacacacagtaagagattttaataaacagatttttactgccactgtcatctttaccttataaaag

SEQ ID NO: 68496 - DNA, 497 bp, Chicken  19866894339587_4
aatctcggttcttgcagctccaaaytcccatttttcttttcaggtgtctgaattacataaacacaggaatcttatcatgagacataaaccagacccaacgtaattacaacacagatcagttatcagcagattcttgttcctgcccctacagagtttcctagaagaggagtgcagacataaaatacacatgatgcaaaccttgtcacacaaaaataataggaataatcactctggtgattctgcttattggattttatcatatgtaattttgccagtttttgtcawcaagggaagtccatytttttcacatattatcaatgtgagctaggaagctttccaggaatctaacagttactgtagactcaatgggtctaaaagcccatttactttgtgccctacttcttctttattcatcacatagtaccctataattacacacagtaagagattttaataaacagatttttactgccactgtcatctttaccttataaaag

SEQ ID NO: 68497 - DNA, 600 bp, Chicken  19866894339588_1
ttgtgctgagaatgtcaggaaagcaagtttggagccctgacttgagatctgtacttacattgcagtgaaacagcctcagcaaagcctcctctgcacatcacttgttgtgtacatttggaatacctcatatggtattttctacagagcagaattggaatatactaaagaccactttcctcactcggacccatcttcacacattacaagtggagaagtgacagtgaaaggagagcttaatcaagtggaagaagatgggtaagttatttgtttattatattcgttacagtcatgcccagggayacaatgattctaggactctgttatgcaaaagtcactgagaaacacaaggcaagagctggtgtgagtcctgaaaagcttgcagccacacagacaacacacgcaccaayrtggaaagaaagccaaaatgactgtgracacagcagttttggtaaacatcgtcccagggccatgggaattgttttaytgtttgtttttttttaacttcatatttaatttaggctgagtcaaagggtgaaattcasatgggaaaagactagcaaagtggagaaccaaagagacaaggtagcacagagacgaggg

SEQ ID NO: 68498 - DNA, 600 bp, Chicken  19866894339588_2
tgtacatttggaatacctcatatggtattttctacagagcagaattggaatatactaaagaccactttcctcactcggacccatcttcacacattacaagtggagaagtgacagtgaaaggagagcttaatcaagtggaagaagatgggtaagttatttgtttattatattcgttacagtcatgcccagggayacaatgattctaggactctgttatgcaaaagtcactgagaaacacaaggcaagagctggtgtgagtcctgaaaagcttgcagccacacagacaacacacgcaccaayrtggaaagaaagccaaaatgactgtgracacagcagttttggtaaacatcgtcccagggccatgggaattgttttaytgtttgtttttttttaacttcatatttaatttaggctgagtcaaagggtgaaattcasatgggaaaagactagcaaagtggagaaccaaagagacaaggtagcacagagacgagggaggaggaagacagcaggagcagaaagcagcagcagagaagactcagttgcatgggatgctgtgaggtggcactcaacctgcagacaagagatgggaacaggcatgaa

SEQ ID NO: 68499 - DNA, 600 bp, Chicken  19866894339588_3
gtacatttggaatacctcatatggtattttctacagagcagaattggaatatactaaagaccactttcctcactcggacccatcttcacacattacaagtggagaagtgacagtgaaaggagagcttaatcaagtggaagaagatgggtaagttatttgtttattatattcgttacagtcatgcccagggayacaatgattctaggactctgttatgcaaaagtcactgagaaacacaaggcaagagctggtgtgagtcctgaaaagcttgcagccacacagacaacacacgcaccaayrtggaaagaaagccaaaatgactgtgracacagcagttttggtaaacatcgtcccagggccatgggaattgttttaytgtttgtttttttttaacttcatatttaatttaggctgagtcaaagggtgaaattcasatgggaaaagactagcaaagtggagaaccaaagagacaaggtagcacagagacgagggaggaggaagacagcaggagcagaaagcagcagcagagaagactcagttgcatgggatgctgtgaggtggcactcaacctgcagacaagagatgggaacaggcatgaag

SEQ ID NO: 68500 - DNA, 600 bp, Chicken  19866894339588_4
ttttctacagagcagaattggaatatactaaagaccactttcctcactcggacccatcttcacacattacaagtggagaagtgacagtgaaaggagagcttaatcaagtggaagaagatgggtaagttatttgtttattatattcgttacagtcatgcccagggayacaatgattctaggactctgttatgcaaaagtcactgagaaacacaaggcaagagctggtgtgagtcctgaaaagcttgcagccacacagacaacacacgcaccaayrtggaaagaaagccaaaatgactgtgracacagcagttttggtaaacatcgtcccagggccatgggaattgttttaytgtttgtttttttttaacttcatatttaatttaggctgagtcaaagggtgaaattcasatgggaaaagactagcaaagtggagaaccaaagagacaaggtagcacagagacgagggaggaggaagacagcaggagcagaaagcagcagcagagaagactcagttgcatgggatgctgtgaggtggcactcaacctgcagacaagagatgggaacaggcatgaagacacataaattggtcgcaaaaactgt

SEQ ID NO: 68501 - DNA, 600 bp, Chicken  19866894339588_5
gacccatcttcacacattacaagtggagaagtgacagtgaaaggagagcttaatcaagtggaagaagatgggtaagttatttgtttattatattcgttacagtcatgcccagggayacaatgattctaggactctgttatgcaaaagtcactgagaaacacaaggcaagagctggtgtgagtcctgaaaagcttgcagccacacagacaacacacgcaccaayrtggaaagaaagccaaaatgactgtgracacagcagttttggtaaacatcgtcccagggccatgggaattgttttaytgtttgtttttttttaacttcatatttaatttaggctgagtcaaagggtgaaattcasatgggaaaagactagcaaagtggagaaccaaagagacaaggtagcacagagacgagggaggaggaagacagcaggagcagaaagcagcagcagagaagactcagttgcatgggatgctgtgaggtggcactcaacctgcagacaagagatgggaacaggcatgaagacacataaattggtcgcaaaaactgtagaccatcacgtctcagttagcctctctcactgtgcgtacagtgctcctg

SEQ ID NO: 68502 - DNA, 600 bp, Chicken  19866894339588_6
tggaagaagatgggtaagttatttgtttattatattcgttacagtcatgcccagggayacaatgattctaggactctgttatgcaaaagtcactgagaaacacaaggcaagagctggtgtgagtcctgaaaagcttgcagccacacagacaacacacgcaccaayrtggaaagaaagccaaaatgactgtgracacagcagttttggtaaacatcgtcccagggccatgggaattgttttaytgtttgtttttttttaacttcatatttaatttaggctgagtcaaagggtgaaattcasatgggaaaagactagcaaagtggagaaccaaagagacaaggtagcacagagacgagggaggaggaagacagcaggagcagaaagcagcagcagagaagactcagttgcatgggatgctgtgaggtggcactcaacctgcagacaagagatgggaacaggcatgaagacacataaattggtcgcaaaaactgtagaccatcacgtctcagttagcctctctcactgtgcgtacagtgctcctgtttactaattcaccacaggggtctgcgtacaaaaaggctgcccaagtttagcagcctt

SEQ ID NO: 68503 - DNA, 600 bp, Chicken  19866894339590_1
aggtgatcgatgctcctttctcctgctgttctcaaacgtcatcatttttaagtctgacatattgaagcaaaggaatacatgactccagaaaaagtttccttgtctagctgccttgtttctccaacagatttaatttgggaggaatctaagtcaaacatctccagggtcccgtatccagcaatcagatctcacattctgtcagctgttaacagtatttattttcatttttccaggtcaagtacagagagaattacgagaaatctaaaggcaaatcaatgctcgagtttgtggatacaccawtgtatcaagtttcaaaggatgttcaaaagatgcaaagtgaggttagtaaggtttgtgtttgaatgtccagcatttagatcagtagagaggctaacaggcatcttgcacacaggttaagaaaatagatgaaatgatcatagaatttttataagctgaggatagggctgaagtagcactaagttctcctttctgtaactcagtccttccttcaaattagttttttttctccaaaagctggagatgctaatgttgtatatgggataacttctgagaaatgggaagaagctcaagaggtcatct

SEQ ID NO: 68504 - DNA, 600 bp, Chicken  19866894339596_1
gcccagctccatcacccagcagctttctccccagtccatctccacaaccttcccagagcccagcagctgcacgaacacctcagaactttagtgtcccatccccaggtcctttaaacactccaggtgaatgtgagatctatattgcagaccatgaattggtttatattttgataacagatttcctaggaattattacagtttttatttggcatgacataaacattaaacagctctgctgaacagccagcattgcaaatagtgggcatgttgtatgcatcatggtgctcttctctatcccarttgtatgaagcagtttctgatgctgtgagttaacatgctgactcctcctcccagtgttgtgtgctttgcagattagaaagcacgggctgaaggaaaactgcagtaagttctgtgtgctgatttaatgtttagtgtaccagagtgaggcaaaatgagaatctatgaaatgagtgtctgaaacttttggagcttctcagaaaaaaaagaagtaataaatgggaattactgcactgtccacagaacatgttatttctgcagaaagatgagaagattggacaggtacttaagttgtggagtaca

SEQ ID NO: 68505 - DNA, 600 bp, Chicken  19866894339599_1
aatagcatcaaaaccacagtacaaacatggtatgaccctgaaaagaacatagagaagagcatactgtgtcagaacagaaactgatctcacccaatgttttccttccaacagtggccgtaagcaaatgctcataaaagagtaagaatggggcaattgtatttggtgctgtaactgactattgtttcagattgcaactagtttcaagtcaagagattttctgagcttcttgtggtctctttctttattctcaacagatctctctctgagttctaccctgattcacttttgaaaaataagctycatagatctactcccctttacatcaaaagtcaccatcttttgttgagtttgaacctggctcccattagcttcactaaatgatcctctgtaggtgcacagtagatcctgctccactcatgattttgtcagaccatggtcataatacccctccatgctgcagttgactgctatgccatcccctttgtgggagccatggttacctctgtggatcaactctaagtgttgccagagtccagaggagggccactaagatgatcagagggctggagcacctctcctatgaagaaaggttgagggaac

SEQ ID NO: 68506 - DNA, 599 bp, Chicken  19866894339600_1
  misc_feature (1)..(161): n is any nucleotide
nnnnnnnnnnnnnnnnnnnnnnnnnnnnnnnnnnnnnnnnnnnnnnnnnnnnnnnnnnnnnnnnnnnnnnnnnnnnnnnnnnnnnnnnnnnnnnnnnnnnnnnnnnnnnnnnnnnnnnnnnnnnnnnnnnnnnnnnnnnnnnnnnnnnnnnnnnnnnnnnnttgaaaactccttttgaggagctttgcatttttaggataaatatagtgagatcaaggacatgtttaactagaaactacatcaagtgcaaggtctttcattggggtaggagcaatcccaaacacaaatacaggttgggcrgagaatgacttgagagcagccctgaggagaaggatttggacatgtcagttgatgaaagactcaacacgagccagcaatgtgcacttgcagaccagaaagtgaactgtatcctgagttgcatcaagagaagtgtgaccagcaggtcagggaggtgattctgcccctctactctgctcttgtgagaacccatgtgtagtactgtgtccagttctggagcccccagcataagaaggacatggagctgttggagcaagtcagaaagatggtcagaagactggagcaccttccctacggggtca

SEQ ID NO: 68507 - DNA, 579 bp, Chicken  19866894339600_2
cgagccagcaatgtgcacttgcagaccagaaagtgaactgtatcctgagttgcatcaagagaagtgtgaccagcaggtcagggaggtgattctgcccctctactctgctcttgtgagaacccatgtgtagtactgtgtccagttctggagcccccagcataagaaggacatggagctgttggagcaagtcagaaagatggtcagaagactggagcaccttccctacggggtcaggctgaaagagctgaggatcttcagcctagagaggagaagctccagggagaccttaaagtggccttscagtacctgaaggaggcctacaggaatgctggagaggggactatttataacagcaggtagcaacaagatgagtgtaaatggcttaaactggaaaagagtagatttagactagatattaggaagaaattgtttactgtcatgattgtgagacactggaacaggctatccagagaggttgtggatactccctcaaggtattcaaggccaggctgtatggggggggttgagcaacccagactagagggagatgtctctgcctatggcggggagaaaggggat

SEQ ID NO: 68508 - DNA, 599 bp, Chicken  19866894339602_1
  misc_feature (1)..(111): n is any nucleotide
nnnnnnnnnnnnnnnnnnnnnnnnnnnnnnnnnnnnnnnnnnnnnnnnnnnnnnnnnnnnnnnnnnnnnnnnnnnnnnnnnnnnnnnnnnnnnnnnnnnnnnnnnnnnnnntgtattcctggtgcactttgtcaatctgctttgacaagaggtatgggagacctttgagccaaaccaatccgttatatccaatacgatttctgtatatataaggatcctaacctatttagcaatactttttagcattttcctgcatgctcacgggtaacacgagaagataatttaatgttcaaaaaaaaraaaaaagaaaaaaaaaagatgctcaggaatacagcaaagcagaactgtgatgaaawtactggcactgagataaatgatgaaatgaggtcaggaaacatacaaagactgatttcaaagaaccagaatcatagaataatttcaaatccagctgtctaagctgtagaacccacggaaagagaaaacaagagggcatcagagcaattctctcacctatgtcagcatttgctgtgactggctgctaaattagcaacaagaaaatgagcaacatgttcacagccctgtatggcccacttatacca

SEQ ID NO: 68509 - DNA, 599 bp, Chicken  19866894339602_2
  misc_feature (1)..(55): n is any nucleotide
nnnnnnnnnnnnnnnnnnnnnnnnnnnnnnnnnnnnnnnnnnnnnnnnnnnnnnntgtattcctggtgcactttgtcaatctgctttgacaagaggtatgggagacctttgagccaaaccaatccgttatatccaatacgatttctgtatatataaggatcctaacctatttagcaatactttttagcattttcctgcatgctcacgggtaacacgagaagataatttaatgttcaaaaaaaaraaaaaagaaaaaaaaaagatgctcaggaatacagcaaagcagaactgtgatgaaawtactggcactgagataaatgatgaaatgaggtcaggaaacatacaaagactgatttcaaagaaccagaatcatagaataatttcaaatccagctgtctaagctgtagaacccacggaaagagaaaacaagagggcatcagagcaattctctcacctatgtcagcatttgctgtgactggctgctaaattagcaacaagaaaatgagcaacatgttcacagccctgtatggcccacttataccacgaaaccaactaattcagagtcaagagcgtgcacgtcaaaaagatttccttgtgac

SEQ ID NO: 68510 - DNA, 600 bp, Chicken  19866894339603_1
tccagcttgcaaacttagtgctgggcaaggcaatacgctcacgcctcttggatgtgtgtcaggagctcactgctctgtgaggcttggctaaggctcttgagttctctcccagggaatttatcaggagagataggatctctctcttttgtgtgtgcaagtttatattttgctttggacccagcatccatactgatatcatatttgattttttgcaaatccatcccccctaggtgtatggatgaaccagaaggaagctgatcgcaccgctcacctctcttttcctctcagctgtcaatcacytctctgcttttgtgacctagagttcaattgtctcaaggtttatttttattgtatttttcgtgttaattaaatttggattccaggcttaacaaaagcaaaaatggttttgctgaggctgggaagcagaatgtgtatcactgttatctgagcccagccagcaggcaaatgataccaacttcgctagaggcttcaagaggccaagaaatagagagagagatgaagaaagaaggagaaggaaagaaatcacaagatccctatcagcttgcagttttcctagcttgtctgttccattttgggaga

SEQ ID NO: 68511 - DNA, 599 bp, Chicken  19866894339605_1
  misc_feature (1)..(193): n is any nucleotide
nnnnnnnnnnnnnnnnnnnnnnnnnnnnnnnnnnnnnnnnnnnnnnnnnnnnnnnnnnnnnnnnnnnnnnnnnnnnnnnnnnnnnnnnnnnnnnnnnnnnnnnnnnnnnnnnnnnnnnnnnnnnnnnnnnnnnnnnnnnnnnnnnnnnnnnnnnnnnnnnnnnnnnnnnnnnnnnnnnnnnnnnnnnnnnnnncaccatgggctggaacccaacgggcacctgcaggcagcagcgggcagggcagggcagggcagggcggggcggggcgcacacacacggctgcgctgggcagagcagartggctgcggccctgaggagggtgaggacaaagcaccgggacacagaactgcagacgggccgctggcctgcactgctggctacggcctggagacgaccacctgggagagaggcctggccgaggtctgaggctgcccggccgctgtgtggtcgccccacagggtccatgtctgtgacagggatgctgccggtgcggctcagccccctcgtgtggggcgacccgcagcgagcacgcagctgcaccaaaccaaccccgcctgcagcatcgcgccgcagagcaacaccagcgccctcatcccgc

SEQ ID NO: 68512 - DNA, 600 bp, Chicken  19866894339614_1
aaggatgcacagtgacaagctagttgaaatgctactcatgccatgggaacaatgaagcatgacattttgtctttttaatctggaaacaaatttactggaaaattaagaaagattaatttattctgttctcagaaaggtggcattatggatacatgaattaaatgtgtatacaggggagattaaactgtcttttttaaaaagtatatttagctgttttctaaatttatttggcacctgggatatgcattcacttgcagttttcattcatggaaatctatacatactgacatccaaaaactmtgtcttttaagaaacttctttaaaaatattttttcttcacctaaataccaacatgaaattacatgacttttgcctgtgctagtttgttactaaaatatttagaccaaagtggataatcatgtacccatttttcaaaacgaatttaatctctgatgaagattgccccaatcctactaattgttgttttgttttttttttttttaatttgatgctgttttcttctacaacttaatttaaagccacacaagttcagatttcttcttaataaggggcagattttaaggattagctgtcatcttt

SEQ ID NO: 68513 - DNA, 526 bp, Chicken  19866894339619_1
cacgctcgcatgcacctcggggagcccacagcagtggccagacacgcgcaggtgggtacacacctggtgggcaggcatggggagggggtcatccctgctggctcatcctgctggaaaatccccccaggttttggcacgcagtagtgcggcggctccagaagcagatgttgagcctcggggctttagtagctggaaattgcttttcacacccacttgaatttacagcccccccagcatctcatggcggtgagttccaggctgggtggcaaagcccttcctttcgcatgttttaaaccttaytgtgctgatgccctcttgttcctgcacagtgctggctccctgcccggggtcagcctggctttacagcctcctttctgttccctctcctgcatctcctctcccagcctttcacttaaagggggaaaatgctgtctgtgggcatctgcctttgcaaggtgccatgggggctgctcttcttattgtcagtaatgcttctgtatgttttcaaaggacttcacagggctca

SEQ ID NO: 68514 - DNA, 600 bp, Chicken  19866894339624_1
gtctctatgctcacacagtggggttggataattgtgtcaggagacaaaggacaggagaggggaagaaggaattgaatgagtggaagagaaaaataggaagcgaacgggagtggatatagcagtgcagaccttgtgtagctgcctctgaaaacgtccttgggaaggactgttctgacctcctcgctcttgagatgtgtctcaccttgcagagaggtggcagctgctggctgcctgcccagccctgttttaatccagaccccacacgaaatgagagcagccagaggcagggaaggacgttcrgaaatttaatgcagggggcagtggggagttggagaaggaggggagagccccatgcagctgccttccatccaactcctatggcatgggagccggagtccccactggagtcgctgtgatttttggggctcctgcctgcagctgctgggtctggtttagacactctgcacatgcacagagctctgctgagctgcttgtttccatggcttgctgctgctcctcctgccttaccttttgctccctttacagcggcattactcatctttgctccagatgggtttacctggcagtgcaccgacagct

SEQ ID NO: 68515 - DNA, 600 bp, Chicken  19866894339633_1
gccacaactactgctgaagcacaccagccactacttcactgtgcttgcatccactgtttggtctctaaaaacattcagcaagtatcagtgaatgtcagcttttttttttttctccacatgggggaattcagtgacacaccttcgcctccctcaccacattcttctctctaaattggagaggtgtggatttgagggatggaccctttagtggataaggaattggctggctggatgcagacaaagggttgtgatcaacggttctgtgtgcgggtggaggctggtcacaagcagtgtccctcrggggtcagtcttcggactggtgctcttcaacatctttatcaatgacataaatgaaggcattgagtgcaccctcagcaaatttgctgatgacactaagctgagcagtgcagytgatacactggaaggaaaggaaaccatccagagggacctggacaggctggagaagtgggcccatgaaaacctactgaggttcagtaaggctaagtgcagggtgctgcacttgggtctgggcaatcccaggtatttatacaaactggggaaagatctccttgagagcagccctgcagagaaggacttggg

SEQ ID NO: 68516 - DNA, 575 bp, Chicken  19866894339633_2
ctccacatgggggaattcagtgacacaccttcgcctccctcaccacattcttctctctaaattggagaggtgtggatttgagggatggaccctttagtggataaggaattggctggctggatgcagacaaagggttgtgatcaacggttctgtgtgcgggtggaggctggtcacaagcagtgtccctcrggggtcagtcttcggactggtgctcttcaacatctttatcaatgacataaatgaaggcattgagtgcaccctcagcaaatttgctgatgacactaagctgagcagtgcagytgatacactggaaggaaaggaaaccatccagagggacctggacaggctggagaagtgggcccatgaaaacctactgaggttcagtaaggctaagtgcagggtgctgcacttgggtctgggcaatcccaggtatttatacaaactggggaaagatctccttgagagcagccctgcagagaaggacttgggggtcctggtagatgaaaagctggacgtgagctagcagtgtgcttgtgcagcccaaaagacccaactgtgttgtgggctgcattaaa

SEQ ID NO: 68517 - DNA, 599 bp, Chicken  19866894339640_1
  misc_feature (1)..(212): n is any nucleotide
nnnnnnnnnnnnnnnnnnnnnnnnnnnnnnnnnnnnnnnnnnnnnnnnnnnnnnnnnnnnnnnnnnnnnnnnnnnnnnnnnnnnnnnnnnnnnnnnnnnnnnnnnnnnnnnnnnnnnnnnnnnnnnnnnnnnnnnnnnnnnnnnnnnnnnnnnnnnnnnnnnnnnnnnnnnnnnnnnnnnnnnnnnnnnnnnnnnnnnnnnnnnnnnnnnnngctgtggcagaagtcacggagcaaggcaacagctcagctgctgaaaatacttcagaccatcctctctgcagtcctcttttaaaacgaraagagattttagaggtggtggaggaattaaagctctccgcaaatcctgagaaaatgggtgttaatattcaccctggaaagtgagtgggagagaggggaaggagaagtggaagggcattccccattttgcagaggcagatggaggaggatcaggacatctgctcctgcagcgggctgcagtagtggccacttccctggaatggatcatcaggaataggtttctgacctatttgtgccacgtccttttatctcctgctacttgcatgacccagtaatagcagaggagagggagtgtgattt

SEQ ID NO: 68518 - DNA, 600 bp, Chicken  19866894339641_1
ccgtttcccttccctaaatggggcaccacattacacagatacccctccatgtgaacaggcagaggcaggaactgttatttctgggaagaagggcagcctcccagtgtggtgacagagcctgacacagctggaggagagcattacccggagaaatcatcaattgtgaatggacatttagtgacacacgtgctggcactgtgcagcactctgcaaggtaattgtgcagaccatttccccgggaagtatgttctgcacaagcacacacagtcatctcctgggaaaccctgttctgcttcattyctgatcgcatctgaaatccttaatggagtatgtgaagtatgtgacccagccttaagacaatgagacaaatcaggtgaaaacgtagaaaacggttaccagaaacttgtccattccagcctttctctggcagaagactgggcagaaacaaaaataagcttcagtaagactgaagatgtcagggaaaatcatccccaaggacaggacaggagctggaatcataaaggcaaacagatggtagagaatcagaaaaccctccgttgggttccagctcctcaattaactttatattctaacrcacat

SEQ ID NO: 68519 - DNA, 600 bp, Chicken  19866894339641_2
cattyctgatcgcatctgaaatccttaatggagtatgtgaagtatgtgacccagccttaagacaatgagacaaatcaggtgaaaacgtagaaaacggttaccagaaacttgtccattccagcctttctctggcagaagactgggcagaaacaaaaataagcttcagtaagactgaagatgtcagggaaaatcatccccaaggacaggacaggagctggaatcataaaggcaaacagatggtagagaatcagaaaaccctccgttgggttccagctcctcaattaactttatattctaacrcacattagaaagagacagcaccragacaatctagctgtttcctttatgagccagaaactatctcttagccttgttcaacgttccatgataatcacccaaggaatcacttgggtccatcacacaagaagcaggacaccagtccctctgggctgcacgtgatgggttttccccaccactgctctctcttctctgctccagaagccagcccatagcgttacagctcagcaccgagttcatccaggatttacaaggcacgtactgtggtaactctgaaaccacctgcaggagttttttttttgg

SEQ ID NO: 68520 - DNA, 600 bp, Chicken  19866894339641_3
cttaatggagtatgtgaagtatgtgacccagccttaagacaatgagacaaatcaggtgaaaacgtagaaaacggttaccagaaacttgtccattccagcctttctctggcagaagactgggcagaaacaaaaataagcttcagtaagactgaagatgtcagggaaaatcatccccaaggacaggacaggagctggaatcataaaggcaaacagatggtagagaatcagaaaaccctccgttgggttccagctcctcaattaactttatattctaacrcacattagaaagagacagcaccragacaatctagctgtttcctttatgagccagaaactatctcttagccttgttcaacgttccatgataatcacccaaggaatcacttgggtccatcacacaagaagcaggacaccagtccctctgggctgcacgtgatgggttttccccaccactgctctctcttctctgctccagaagccagcccatagcgttacagctcagcaccgagttcatccaggatttacaaggcacgtactgtggtaactctgaaaccacctgcaggagttttttttttggtgacttctaattcttgggaaaga

SEQ ID NO: 68521 - DNA, 600 bp, Chicken  19866894339650_1
ccttttccaaagcctgccgtgctttgaaagctcacaatgaggtccccatggctaaaacagtccctttttgtactccatgcctgtcagacattctccagatgcatgaaacttctgatgtaaattgagatccccatcctgtccccatcttctcccagcaataaaatgtatttctttgtcttgaaacatcatctgattctgtcatcatactctcagttttgaacatttagtgactgaatttctcttctgtgagaaacattttcttactattccaggctgattttgccacctccaaattcaatrggaaatctttctttcacctygttttccttctcagcagggaggatgggtttgaaattaaaataaaatagcttcttcctcactcaakcttatatctcatgcctgctttattctcatctgaaatgcctcattcctccgtaattttagttgtactgaagtgtcacatcgataaaggcaggaaggaaatataactagcttaatttatccctatttttatctcaactaaatctgatctaaatccctcagttattaaacagggtttcattccaagtatgccacctgcaaaggatactttgagaaaaa

SEQ ID NO: 68522 - DNA, 600 bp, Chicken  19866894339650_2
gctttgaaagctcacaatgaggtccccatggctaaaacagtccctttttgtactccatgcctgtcagacattctccagatgcatgaaacttctgatgtaaattgagatccccatcctgtccccatcttctcccagcaataaaatgtatttctttgtcttgaaacatcatctgattctgtcatcatactctcagttttgaacatttagtgactgaatttctcttctgtgagaaacattttcttactattccaggctgattttgccacctccaaattcaatrggaaatctttctttcacctygttttccttctcagcagggaggatgggtttgaaattaaaataaaatagcttcttcctcactcaakcttatatctcatgcctgctttattctcatctgaaatgcctcattcctccgtaattttagttgtactgaagtgtcacatcgataaaggcaggaaggaaatataactagcttaatttatccctatttttatctcaactaaatctgatctaaatccctcagttattaaacagggtttcattccaagtatgccacctgcaaaggatactttgagaaaaacactgcatccagacctccag

SEQ ID NO: 68523 - DNA, 600 bp, Chicken  19866894339650_3
agacattctccagatgcatgaaacttctgatgtaaattgagatccccatcctgtccccatcttctcccagcaataaaatgtatttctttgtcttgaaacatcatctgattctgtcatcatactctcagttttgaacatttagtgactgaatttctcttctgtgagaaacattttcttactattccaggctgattttgccacctccaaattcaatrggaaatctttctttcacctygttttccttctcagcagggaggatgggtttgaaattaaaataaaatagcttcttcctcactcaakcttatatctcatgcctgctttattctcatctgaaatgcctcattcctccgtaattttagttgtactgaagtgtcacatcgataaaggcaggaaggaaatataactagcttaatttatccctatttttatctcaactaaatctgatctaaatccctcagttattaaacagggtttcattccaagtatgccacctgcaaaggatactttgagaaaaacactgcatccagacctccagctcagaagctcacaggtaaagaaaaaaaacccaaacctccctaacaaacaaagtctcatgaggaa

SEQ ID NO: 68524 - DNA, 497 bp, Chicken  19866894339653_1
tctcccatctgacaaaacaaataaaaatatgttttcatgaggaaaaaaaaaaaaagtctgtattgtattatgacccttacgtgatcattccgtttagggaagaaaatattttagcatgtacattttttgttaccttgactgcaggtaatctctttaaaagctatcacttggaaagtatcatagtcctgtaggaaatattagagaactgctggattcctctgagtgatggaatgccagctgtctgggagaaaatcatcactccctttcattccatcttctcagaattgcaaaatgtttccrtaaaaggacttattaggaaagctgttcaggtgcttttagttcttttagttgaaattgctgaggataactcaagaaatacaagatctgaccttgaacaaatcttcaaagctaagctgcgtggatcaagttactgaaatacatgggtgtgggaatattccacattctctgtattaactaatgccaaattcaaggagatt

SEQ ID NO: 68525 - DNA, 599 bp, Chicken  19866894339657_1
  misc_feature (1)..(19): n is any nucleotide
nnnnnnnnnnnnnnnnnnnaattctaaggttgtttcctatgttaagagaattggtctaagctgacttctatgtgtacagcagtttagctgctttgagtcctgatgagccactgtgtgtatgtgagagagaaattactgatcttaactgttttccagcttaatactcctctgataacaataggggatgggaatgctgtcaataactcagcactcatctgcagcaaatcagaagaacgggcatagtcagtggatttagaatcataatataaactgacctaagactgcttattcattgcctgytttttattcctagctatttctgtactggttaaattaaatcacaacaacacagtaactaatagtaacatataccaatatattggtgttcttttagattgtccccagtgcaacctgggctctggccaatcactattctttcaagcaattcccaggatcagttcaagagcttgagcactccagggaccattcccaatagatgagttccatgcagccaacttgttctggaggctgagtgagtttagatgcaggctgatccttgccagttggcctcagtgcccaggaatgttcccaatcgtaat

SEQ ID NO: 68526 - DNA, 600 bp, Chicken  19866894339663_1
ggtgatctttctggtatgagttttgaatactcttaagcgctttggacccggtgttcctgccgtatttttgagagctacattcccactaagttgtattgcagttttagtagcatgcagagtgaagtccttgtttcttaaaaagtattttgtttaatactcagatactttgttgcttccccaaaactattgtctaaccttctcaacagtggacatcaccctactggagtccttcaccattgctcatccttaagtctcgcaagaggagcttaatacaatgcaatattttattcctgaacctaygtataagttgtatttctctgtggcttttttgtttgtttgtttgcttgttattgttatyattatttgtttgtacgtttgctgagatttaagaaagactgagttagttttartcatgcttgcaaaatatttccctgaagcaaagaacagtcagtaatatttcagcatcgggagcggttagaaagataatgggaatatttcagtagctaacaccaatacaacagtggtattattttttttactgtcaactttaatccatcaagtctaaaagcagcagctgctttttcagttgtttatctggaa

SEQ ID NO: 68527 - DNA, 600 bp, Chicken  19866894339663_2
gccgtatttttgagagctacattcccactaagttgtattgcagttttagtagcatgcagagtgaagtccttgtttcttaaaaagtattttgtttaatactcagatactttgttgcttccccaaaactattgtctaaccttctcaacagtggacatcaccctactggagtccttcaccattgctcatccttaagtctcgcaagaggagcttaatacaatgcaatattttattcctgaacctaygtataagttgtatttctctgtggcttttttgtttgtttgtttgcttgttattgttatyattatttgtttgtacgtttgctgagatttaagaaagactgagttagttttartcatgcttgcaaaatatttccctgaagcaaagaacagtcagtaatatttcagcatcgggagcggttagaaagataatgggaatatttcagtagctaacaccaatacaacagtggtattattttttttactgtcaactttaatccatcaagtctaaaagcagcagctgctttttcagttgtttatctggaatagaaatataactctaactgtccaaatttacaagcaactgcaggtcatatgggggcaa

SEQ ID NO: 68528 - DNA, 600 bp, Chicken  19866894339663_3
catgcagagtgaagtccttgtttcttaaaaagtattttgtttaatactcagatactttgttgcttccccaaaactattgtctaaccttctcaacagtggacatcaccctactggagtccttcaccattgctcatccttaagtctcgcaagaggagcttaatacaatgcaatattttattcctgaacctaygtataagttgtatttctctgtggcttttttgtttgtttgtttgcttgttattgttatyattatttgtttgtacgtttgctgagatttaagaaagactgagttagttttartcatgcttgcaaaatatttccctgaagcaaagaacagtcagtaatatttcagcatcgggagcggttagaaagataatgggaatatttcagtagctaacaccaatacaacagtggtattattttttttactgtcaactttaatccatcaagtctaaaagcagcagctgctttttcagttgtttatctggaatagaaatataactctaactgtccaaatttacaagcaactgcaggtcatatgggggcaatatttcatggaaaaaaatgtgaggaagcaaatctttacaattagatttgatg

SEQ ID NO: 68529 - DNA, 600 bp, Chicken  19866894339666_1
aatgcaaccttggctctcctttccgatactaacaaaggtgttatttctaacctctgattttagctggtcgtactttcttgaggttctttgttgtggcaggagaagaggtggttgaacatacgtctttgtgaattgcttgtttctttaaagaactgatgaagccaacccacgttaactgtccattaatcagcatttctgtgcctcagcacaggcattccttcagcttctctctggtcagagaatggcagcctctgctcattgccctaacaaacagcaggtataaagtgcttctgtgccacrtataggtggcatttagcactcttacaaggtatttgtccactgcatttttttctaaacattaagaaaatcattaaagcataagtattacttcagatactgccaagtgcatgccttcttgagcacaagtgctgctcagatcaggctgttgaaggaacttactgagtggcgtttggacagctttgcctgactagatgccagcctgcttgcagtcgtcgtgctgctgctatctcactgctctgcctcctgatgcttccatgttttcttttcctttgtcaccttggcaattgggcttcatggtgg

SEQ ID NO: 68530 - DNA, 599 bp, Chicken  19866894339679_1
  misc_feature (1)..(27): n is any nucleotide
nnnnnnnnnnnnnnnnnnnnnnnnnnncgttcaatgagatgctgacaccgaggggctgtgctgtggcgcccctgttctgctgggagctgggcagcattgctgtgacctcagctgtggggcaggcagggttggcagcatctcctcactcctacacaccccaatcctctctctgcaggccggatgggctcatgtaccagatgttcaggaaccagttcctctccttctccatgtaccaaagtaagtgctgccgtgcctgctgggccaggacctgcctgcagcatcctgggtgtgctgcccagytctgcagcagagaactggctgtggatgctcacagcccacgggcttttctcttggctcttctcccaccctctgcctcccaggggccaggaagagctctgtgcaaaggcagctcggagctgggctggtgctgagcccgcaggcaggtacctcctgccctcatcccctctctccttgcaggcttcgtgcagttcctccagtactactaccagagcgggtgcttgtaccggctccgagcactgggcgagaggcacaacatggacctcactgtgggtaagccaggatcctggtccagctggacg

SEQ ID NO: 68531 - DNA, 541 bp, Chicken  19866894339679_2
tcacagcccacgggcttttctcttggctcttctcccaccctctgcctcccaggggccaggaagagctctgtgcaaaggcagctcggagctgggctggtgctgagcccgcaggcaggtacctcctgccctcatcccctctctccttgcaggcttcgtgcagttcctccagtactactaccagagcgggtgcttgtaccggctccgagcactgggcgagaggcacaacatggacctcactgtgggtaagccaggatcctggtccagctggacgtgctgtcacctctgctcctgccagcagcycccctaccagggcctggctggtgctaggctaagtgggagctgtgttcctgctagaagcaatggtggtagttatttttgttccaagatcggtcttactgtggtttatgagcggtggcatcagaaaagatgccacaaacataaccagcatccccccagcgcagcctctgcagcccagctctgactgagggcagccccacgggagcagcttcctccagggatgcccactctagacctcagggat

SEQ ID NO: 68532 - DNA, 599 bp, Chicken  19866894339682_1
  misc_feature (1)..(127): n is any nucleotide
nnnnnnnnnnnnnnnnnnnnnnnnnnnnnnnnnnnnnnnnnnnnnnnnnnnnnnnnnnnnnnnnnnnnnnnnnnnnnnnnnnnnnnnnnnnnnnnnnnnnnnnnnnnnnnnnnnnnnnnnnnnnnnnattcttggatggctgaggttcccagtctgagtctcactgtgtaatcaatgcaatccacttactccaggtggtatcagtagcatgatgggtggagggaacttttcctttaaacatccagcttagcactggcgttgaggtgctaaaaggagctgcgtttcagtaccgattacttyggaagcagcttgaacctccttcagacatgactaatatctccttttcagttgaagtgtagtactcttcagaccccctgtacttttgactccagaatccaaggggttggacttgagtctgtcttgaggtcctttaccaaaggctccaagtgcgaccactctctccagcatcagtatagaggatgttctttacatcatgttccatccatactggccctagggccgcgacacaggctatctcctgtttaatttgttcaaaaacctgctgctgctcagggccccacataaaattattcttcttc

SEQ ID NO: 68533 - DNA, 600 bp, Chicken  19866894339682_2
gactccagaatccaaggggttggacttgagtctgtcttgaggtcctttaccaaaggctccaagtgcgaccactctctccagcatcagtatagaggatgttctttacatcatgttccatccatactggccctagggccgcgacacaggctatctcctgtttaatttgttcaaaaacctgctgctgctcagggccccacataaaattattcttcttccgcatcacctgatgaagggggctaacagtgaggctatagtttgaaacatgcattctccaaaagcccactacacccggaaaagatygtgtctctttcttattagtgagcagagacgtgacagtgattttgttgatcacatccgtttggatgtgaagatgtccatcttgccactttatacgtaggaattgaattttctatgcaggttctttcactttgctttgcttaatagtgaaaccagctcacagaaggatttattctctctcctttcttgaaaacttcctctgctgtgttgctccacacaataatgtcatcaatgtactgtggttgctttggagcatcaccctgttccagtgcagtttgaattaacccgtggcaagtgggtggg

SEQ ID NO: 68534 - DNA, 600 bp, Chicken  19866894339685_1
cattgcccttctctggacgtactctgaggcctcagtgccttgtagcaggggctgtgtacttcagtacacagtacttgaagtgtggacctggatttcttacagagtggatctgggagcatcctgatacgagggaatggttcctgggctttggtgggaagggcttgctctgtctgctgctgcttgtggaccttgctgtctgttctgtctgagggggttgctgaatgccaaaatgaaagataccctcctgcctgggaaattcttctcttctcacttgggatctcatttcctcttgccagactsaaggccactctgaaaagcccctgaccacccagcagagggaaatcacaaaataacgagatctgctaaatacaagccagcctaaaggatgtgctgagaagcccctagatgtgaaacgtatgaacccaatggatgcagcactgtaacctggtcccttgcactggtgtggcccagcgggagtctctcctgcttgtgtttgcttgctgtacctacagctgtgggttggtggcacaccacggctctgctccctctgaaacgtcctcacttgctcagtgcgaggatgttggggtttacctcgctctg

SEQ ID NO: 68535 - DNA, 599 bp, Chicken  19866894339691_1
  misc_feature (1)..(56): n is any nucleotide
nnnnnnnnnnnnnnnnnnnnnnnnnnnnnnnnnnnnnnnnnnnnnnnnnnnnnnnntattttcttgattatgctactaagtcatcagtgttttgttgaggttgagctggctgtttagatggttgataagaatgaagattgtcagggctctagccctgtcactactaacaggcttgtgttagagatgcttcttagatgcatcttagagatgctgatagatccaccattcttaatatagtcagactcccgggtgctggcttttgttgcagtagaaggaaatggtgcaccaatgatgatttgkttctgttttcaagggtatctttgaaagaaacaaatttaaagtgttcctatgaagtccaaacaaatcctagttctcaagtttctgtggaagtgaaatccatggaatgcagtgacttgtggtggcacatcctttctagaatcctgaaatgcaaatagtgtcaactcaccttggtttctgttttctttgacaaaaaataatgatttctttctaaaatagaagctaaaaagataaaccctgcctgtcattaagactcattgttgcagcatcagcttttactggttttaaacatacattgtggt

SEQ ID NO: 68536 - DNA, 600 bp, Chicken  19866894339691_2
atttaaagtgttcctatgaagtccaaacaaatcctagttctcaagtttctgtggaagtgaaatccatggaatgcagtgacttgtggtggcacatcctttctagaatcctgaaatgcaaatagtgtcaactcaccttggtttctgttttctttgacaaaaaataatgatttctttctaaaatagaagctaaaaagataaaccctgcctgtcattaagactcattgttgcagcatcagcttttactggttttaaacatacattgtggttattacaaatatgacatacagtcagaaagttacygaatgtgtatttatacactgtaaaatgtgtaaacattgattatgcctttgttgtatttcctgtgtttctatgtatcttccatatttattttcattatggttttgttgtttctatggacatttgcatgtaaacagtgagaatcttttgtttcttagaagtttgtctgttcctattgcttattttctaatacagagatttgggggataattcatttggttgctgtggaaatggctctgatgtcacaaacaggattctagtttaccaagccctgaaaaaacaaagagtggagaatgaactaat

SEQ ID NO: 68537 - DNA, 600 bp, Chicken  19866894339692_1
agggtattcactgcccttctgtcctcacagtgcacctctgtgctcacgtccctacctggggacaccttggaggtcactctcctctgcgccgtccccactgtgattggacagttttctccctgagccctgggatagggagcctgtgggggagaaagggcgctggggacatgacaggggatggggacagcccgggggaccatctcgctcccacctgtgtggctgggcacctcctggtactctggcatcaggctgtagtccagctcctcatacacagcctcggaggcagcatccttgctgggrcctgcaaggcagcatgtatggcacctgtgtccccagtgcccccacggtgctgccccgtgttggggaacccccaaagtggtgcccaccttggcacttggactgtgtgcggtgtgcctgcacggccagggcggccagggccacgcagagcagcgtccccaggagcacacacagcaccgtgagtgctgacacactcctcggtgctgcagtcagcgggacagcgctgtgggtgagagctgtggggcagtgatgggaagtgtgaggccccatggggatctgatggcagcggttagaggacagtga

SEQ ID NO: 68538 - DNA, 440 bp, Chicken  19866894339692_2
gttggggaacccccaaagtggtgcccaccttggcacttggactgtgtgcggtgtgcctgcacggccagggcggccagggccacgcagagcagcgtccccaggagcacacacagcaccgtgagtgctgacacactcctcggtgctgcagtcagcgggacagcgctgtgggtgagagctgtggggcagtgatgggaagtgtgaggccccatggggatctgatggcagcggttagaggacagtgagcatggacaaagccatttgctgaggtgtctctgtcccggaggctgctacctggggctrggctggtggcctcactgctgtccctgctgtcctcgtcacacgtgatgtggatgatcccggtggggccgcattcctgcagctgccagggtgccgaggggcagcgccatagcgagcgggccccctcctcacacctcacccag

SEQ ID NO: 68539 - DNA, 600 bp, Chicken  19866894339707_1
aaaaccagggcatttgtagctgaacctgccactttccagcttacagtgtcgttactgaatctccctgttgcaaacaaagaagaaaccttaggagataaattgccttgtggcactgggcccctaagagctgctgctgaaaggtcatacgcaagcacaggctgggggaaaagggaagcaattttcagaaaacaaattgtacagcaataatctggtttacccttctgtgaagctgtgatgggacaagatcaggtgcagtggttctgtataggtctaagacataactgtgtgtatttttagtcycttgatctcaccagccttagagataagctattttctcagtgcccttacttgcttttatttctggaagaaaacgtttgaagactaactttgttcagtgtcccatagaacaagtacagcagatttgctatttgaggaaagttcaaagttattaatgtggcaaaaaagttctgaaagctgttctctatccagattctcctccctgcaaacacgaacatctgaaagaaagcaggtagtgcaagttctgcaagaaggatctgctcttgctacagattagctcatctaaggacaaaatggatggtc

SEQ ID NO: 68540 - DNA, 600 bp, Chicken  19866894339707_2
tagaacaagtacagcagatttgctatttgaggaaagttcaaagttattaatgtggcaaaaaagttctgaaagctgttctctatccagattctcctccctgcaaacacgaacatctgaaagaaagcaggtagtgcaagttctgcaagaaggatctgctcttgctacagattagctcatctaaggacaaaatggatggtcacctcatgtcacttttttagagttgaccaattcctgttgggttagtatgggcagctatgtgaatttatgaagaggagaaataacccttacttacctatgcgkgtggtttggttaggtggcctcaatctcaatgttataacataggattttaagtatatttttcttttgaaaagtgttgtcatagaatcatttgagttgaaggtactcttagtggtcatctagtctaactcccctacagctccatcaggtgctcagagccccatccagcctgaccttgagtgtctccaagggtggggcatccaccacctttctgggcaatctgtgccggtgtctcaccactgttatcataaaattcttcctatccaatctaaacattctctcatttagcttgaaaccattttc

SEQ ID NO: 68541 - DNA, 600 bp, Chicken  19866894339716_1
gtggcgtgggagaactcatctgctttagtggctggcagaagctgaactgggagtctgaaagagggaatcagtgcataagggaacaaaagcagaatggaagtgtaggaaacggaagcattcaacttttcattgagcattcaacttctaagatggcattttgcacatatgcgtgatgcagtaatgcaggggcacaaagattaagacaatattattgaagtttcaaatgcaaaatggctggtaggaagctttgacctgcatagaaccttgctttcatctattctaaatactgacagcacaacrttgcttcctacagatccttatggaggattgttatgctacaggaggattgttatgctaagctgggttactttctaatgagttacttttagtagcattaatgtcacctcatctttctctactggcaatgttaatcttcaacacagaatgggaatgcatgtatttaagtgtagttattacagtatattattttacatgcacttaacatattttaaattgtaatatctgcctcaattctgaacacacgtgcattatgttaaaacgtattttgacagcatttgtgatcatgtaacaatatgacct

SEQ ID NO: 68542 - DNA, 600 bp, Chicken  19866894339730_1
atgataacatactctttcctaacctgttccaccccaaatgcccctttttcgttctgtcccctgaagaaatttagcctgatgaaaaatgaccactgcaaatattctcatctgaacaggtcaagttgctaagaaggttggtaaccaagaaaagaccattaagttggaaaggacaaggcatgaagctgaattttttaacatcagtataattctaattttttttacttaaattgcattaaacattaacagcttgtgattatttagccaggatctctttgcttcctaacttacaggagtgcaatrtatcytaccttaaagttctttaaaacttcctgtgtatttttgggttgagagtaaggcttgggtgtcagcataggcacagccttggagacaacacttttgctgggagaygtgcggcctgtcgaaccactgggctctaattcagtggtgggaacaatggttgcttcaatggtggcagtgaattttggagcaggcagtgattgttgccttaagtatctcagaggattcgggtctttcagtggggaatttggctccactgaatggcttctttccaggatttttggcatctgcaaacgctcaagg

SEQ ID NO: 68543 - DNA, 600 bp, Chicken  19866894339730_2
aacatactctttcctaacctgttccaccccaaatgcccctttttcgttctgtcccctgaagaaatttagcctgatgaaaaatgaccactgcaaatattctcatctgaacaggtcaagttgctaagaaggttggtaaccaagaaaagaccattaagttggaaaggacaaggcatgaagctgaattttttaacatcagtataattctaattttttttacttaaattgcattaaacattaacagcttgtgattatttagccaggatctctttgcttcctaacttacaggagtgcaatrtatcytaccttaaagttctttaaaacttcctgtgtatttttgggttgagagtaaggcttgggtgtcagcataggcacagccttggagacaacacttttgctgggagaygtgcggcctgtcgaaccactgggctctaattcagtggtgggaacaatggttgcttcaatggtggcagtgaattttggagcaggcagtgattgttgccttaagtatctcagaggattcgggtctttcagtggggaatttggctccactgaatggcttctttccaggatttttggcatctgcaaacgctcaaggacagc

SEQ ID NO: 68544 - DNA, 600 bp, Chicken  19866894339730_3
ctgaacaggtcaagttgctaagaaggttggtaaccaagaaaagaccattaagttggaaaggacaaggcatgaagctgaattttttaacatcagtataattctaattttttttacttaaattgcattaaacattaacagcttgtgattatttagccaggatctctttgcttcctaacttacaggagtgcaatrtatcytaccttaaagttctttaaaacttcctgtgtatttttgggttgagagtaaggcttgggtgtcagcataggcacagccttggagacaacacttttgctgggagaygtgcggcctgtcgaaccactgggctctaattcagtggtgggaacaatggttgcttcaatggtggcagtgaattttggagcaggcagtgattgttgccttaagtatctcagaggattcgggtctttcagtggggaatttggctccactgaatggcttctttccaggatttttggcatctgcaaacgctcaaggacagcttcgctaatggtgaatctttcgatgtactgctggagaatgctctcagcctcctcctgggtctttgcattcttgtatgcctcatgaagctcccgttctcttctc

SEQ ID NO: 68545 - DNA, 599 bp, Chicken  19866894339737_1
  misc_feature (1)..(127): n is any nucleotide
nnnnnnnnnnnnnnnnnnnnnnnnnnnnnnnnnnnnnnnnnnnnnnnnnnnnnnnnnnnnnnnnnnnnnnnnnnnnnnnnnnnnnnnnnnnnnnnnnnnnnnnnnnnnnnnnnnnnnnnnnnnnnnnagagaacaataaaatccatcacagttctgagatgcattgcatcgcgacagcaggaaaggaacgtgctaacatccacctaagaaaacactgctaattgcctatctgatattgctaaaataccaacaataagtacaggaaaagaatcagatagcataggaaagcatatgtactgytctgcaactttccccarttggttacctcaaaggaagattttgcggacagtgaaratcacagcttacctgggcctgtcaaaaataccctgatgtccatagcatcacatcgatcggacagtctgcttacatgaatatacatgcaatactggagcttcaccgctatttatttgagcctttcagacacttgatagaaaaaaagaaagcggactgtgaatagcaaaaggaccaagaagcaagcatgctgtagaagcccacatttatttttaattccagttttggaaacgaactgatttccaatc

SEQ ID NO: 68546 - DNA, 599 bp, Chicken  19866894339737_2
  misc_feature (1)..(110): n is any nucleotide
nnnnnnnnnnnnnnnnnnnnnnnnnnnnnnnnnnnnnnnnnnnnnnnnnnnnnnnnnnnnnnnnnnnnnnnnnnnnnnnnnnnnnnnnnnnnnnnnnnnnnnnnnnnnnnagagaacaataaaatccatcacagttctgagatgcattgcatcgcgacagcaggaaaggaacgtgctaacatccacctaagaaaacactgctaattgcctatctgatattgctaaaataccaacaataagtacaggaaaagaatcagatagcataggaaagcatatgtactgytctgcaactttccccarttggttacctcaaaggaagattttgcggacagtgaaratcacagcttacctgggcctgtcaaaaataccctgatgtccatagcatcacatcgatcggacagtctgcttacatgaatatacatgcaatactggagcttcaccgctatttatttgagcctttcagacacttgatagaaaaaaagaaagcggactgtgaatagcaaaaggaccaagaagcaagcatgctgtagaagcccacatttatttttaattccagttttggaaacgaactgatttccaatcaaaagaattcctatgaa

SEQ ID NO: 68547 - DNA, 599 bp, Chicken  19866894339737_3
  misc_feature (1)..(73): n is any nucleotide
nnnnnnnnnnnnnnnnnnnnnnnnnnnnnnnnnnnnnnnnnnnnnnnnnnnnnnnnnnnnnnnnnnnnnnnnnagagaacaataaaatccatcacagttctgagatgcattgcatcgcgacagcaggaaaggaacgtgctaacatccacctaagaaaacactgctaattgcctatctgatattgctaaaataccaacaataagtacaggaaaagaatcagatagcataggaaagcatatgtactgytctgcaactttccccarttggttacctcaaaggaagattttgcggacagtgaaratcacagcttacctgggcctgtcaaaaataccctgatgtccatagcatcacatcgatcggacagtctgcttacatgaatatacatgcaatactggagcttcaccgctatttatttgagcctttcagacacttgatagaaaaaaagaaagcggactgtgaatagcaaaaggaccaagaagcaagcatgctgtagaagcccacatttatttttaattccagttttggaaacgaactgatttccaatcaaaagaattcctatgaaggtgccaggccagcctgtgatcatgccgaagacctgt

SEQ ID NO: 68548 - DNA, 600 bp, Chicken  19866894339740_1
taagttgactctacccaccttggtgaaggatggtgagccaggacttcttaagatgttctgtaggtcagttttctttgtgtagaacagaataatacagtaagttatctgttcgccaacatagtagatttaacagaagacttttcgtatcccaactggaacaataaaaagcagtcacaattccttttcattctctgtgtttaaagattgcagtttgtaacagaacgtaacttcttaccagtacattgagttactcctaaggacggtagtcttttcttgtgtacttaatgacattgttctgcygggaatgtcttgttcaggcttaacagcattacaaaccctcattacatgcaaagtaatgtatgtgtgtgaagtcactgtagttctggtgaacagtactgttttgtttgctcacaagatctgaaaaagctatctccacaacttgctgtgctgaaataactgaggatggtttttcttycttccttccctcctactctgtttctggattttcttcagcaaataaaatctcatgtaatgtctgattatttaactaacccgtacaggttgtacaccctgagctttctgcctgcaggtgagggatct

SEQ ID NO: 68549 - DNA, 600 bp, Chicken  19866894339740_2
aattccttttcattctctgtgtttaaagattgcagtttgtaacagaacgtaacttcttaccagtacattgagttactcctaaggacggtagtcttttcttgtgtacttaatgacattgttctgcygggaatgtcttgttcaggcttaacagcattacaaaccctcattacatgcaaagtaatgtatgtgtgtgaagtcactgtagttctggtgaacagtactgttttgtttgctcacaagatctgaaaaagctatctccacaacttgctgtgctgaaataactgaggatggtttttcttycttccttccctcctactctgtttctggattttcttcagcaaataaaatctcatgtaatgtctgattatttaactaacccgtacaggttgtacaccctgagctttctgcctgcaggtgagggatctcttcacagttcttgctgtcccactaccttcagcaaataggaagttttgtacttaaatttagagaatgtgtgttaagtagtttaaaagggacctggaaagcagaaccagccagaactgtcttcatttttatcctctgattttaaacccatgctggtagctaactgtgagcctttaa

SEQ ID NO: 68550 - DNA, 600 bp, Chicken  19866894339741_1
gctcaagcataagtggttttgataatacagtttttactccttttaagtctagaagaaaaagcaagaaaaacctcctgcaacaggcattatatttttgtagaaaacagctccccaattcttacgttataaacaaataattacttttaattctctgactcctaacaaaggtaagaggaatattaaagctccatgttccagactcattgggttacacaagacttttagccttcattttaaaggagagcttaaatatgtgaccaaactgtgccttgaaggttgaacttccccccacaacatagmaggtaaataaaaaagtatgaaatacgtttcatctctaaatatctttgataccagggccaagttcataattattagcaggtatgaaagaagagttttgtgcatttatgctagtggcacgaagacatcctaatccagaagtaaatattttgtttacatctaacttcaaacatctataatatagacatctgcactgctctaaactgcctttattgtccgggtaaagaaacaaacacttacagggaacctgttaatcttgcctctttcatgcacgcgctgcaatgagatgagtaacttcctgcc

SEQ ID NO: 68551 - DNA, 600 bp, Chicken  19866894339741_2
ccgggtaaagaaacaaacacttacagggaacctgttaatcttgcctctttcatgcacgcgctgcaatgagatgagtaacttcctgcccactacttattctactgtactgagcataaggaaatttctagggagcatatgtatgtgacattttgtaaaattatcttccgtatctttatgggaatggtatccttgctgaaacaatggcacaaggatggcaggacttcagaatccaaatatttttatcctaagataaattcttgtgttgttgctgttgttgtattttttttattattttttggktttttttttcatattcatagaatcatagaactgtttgagttgaaagggacccttaaaagtcatctagtccaattcccctgcagtgaacagggatacctacagctacatcaggttgctcagagcctcatccagcctcatcttggaatgtctccagcgatggagcatccaccacctctctggacagcctgtgccagtgattcactacctatcctcttggctgttcacactccttgaggagcaaaagaggacccatcctcttttcttcttggttgttttatatatagtaaagtcagtgcacaa

SEQ ID NO: 68552 - DNA, 599 bp, Chicken  19866894339743_1
  misc_feature (1)..(11): n is any nucleotide
nnnnnnnnnnnacacaggaatgggagtgctgcactcatgagtcactctgtttggaaacctttacatattaaaaaaaaaaaaagaaaaagaaaggagggaaaaaaaagccatgtgttaaaagtatcttagccaaacatgttctttctcttaagcatacaacaaaacacaaatgtcctcacggtaaatatcctccgttttattactttagatcacttttcagtgctgtaatcatgtaataaggtttgcaattggctccaaaagaagcacaccatctaaatataaacttcttgcttcccagtycactttgtctgtgttactctggggaggacaaccagagttcagggggtctgagcctaccagtgacattgatgggagtaggctcaattctccttgtaaaygtcacatctaaggagactaattttcttctccacattgcagtttctaccacattcaggcagttcagatttctatgaactgaattagagatctgcagcagaaaaaaagagtatggcaggtctatgtgaacagctgatgtaccagcagcattttgatcggtaacatcagttgtaggtatcaaccaatattttattttgcatcct

SEQ ID NO: 68553 - DNA, 600 bp, Chicken  19866894339743_2
aaaaaaaagccatgtgttaaaagtatcttagccaaacatgttctttctcttaagcatacaacaaaacacaaatgtcctcacggtaaatatcctccgttttattactttagatcacttttcagtgctgtaatcatgtaataaggtttgcaattggctccaaaagaagcacaccatctaaatataaacttcttgcttcccagtycactttgtctgtgttactctggggaggacaaccagagttcagggggtctgagcctaccagtgacattgatgggagtaggctcaattctccttgtaaaygtcacatctaaggagactaattttcttctccacattgcagtttctaccacattcaggcagttcagatttctatgaactgaattagagatctgcagcagaaaaaaagagtatggcaggtctatgtgaacagctgatgtaccagcagcattttgatcggtaacatcagttgtaggtatcaaccaatattttattttgcatcctacaaaaagtaggagaaaataaaatgaattattttgcttttaaatatagaggaatttgaacagtagaccactgaaatcattcttaaacaagtcgctatag

SEQ ID NO: 68554 - DNA, 600 bp, Chicken  19866894339751_1
ataaaacattagcaaagccaagaactgtgcctcatgcaactgtgatttttaaaagattgcaacacttagtaagaatgaaatatgataatatttttataatattcttcatgtcagaccctcaaaagcgtttcacaatggcaaatgtcagtaagtatacttctctctgtttacaagtggcaaaaataatacacagatgaattacttagcaatagcaaaagttagtaagggaactggagctagaacccagagctcttagtgataaagccctcattctctgagtggtctcaggagatctatgcrtgctgaggcccacagcaggacttgaacttgtatgaagaggtaggttcctctgcctacagaaaggcacaggactctggtatatgtcatctaacataggtacaaagttttataaaccagatggtagaagattattgacttggaaaatgtgttgaattccttgactagtaggatatttctgagaatggtgtagcatcaaagaatgtatatgtactgcatacatcaagtgtgtgcatgcatgtctgtgataaaattttgtttatcccatttagctcattttagttgcataaactacagacaaaa

SEQ ID NO: 68555 - DNA, 600 bp, Chicken  19866894339751_2
tgaggcccacagcaggacttgaacttgtatgaagaggtaggttcctctgcctacagaaaggcacaggactctggtatatgtcatctaacataggtacaaagttttataaaccagatggtagaagattattgacttggaaaatgtgttgaattccttgactagtaggatatttctgagaatggtgtagcatcaaagaatgtatatgtactgcatacatcaagtgtgtgcatgcatgtctgtgataaaattttgtttatcccatttagctcattttagttgcataaactacagacaaaatawcacattagtcatcaagaagcacttgtgaagtgtgcagcatcctcagctcatggtgaaggttatgggaaataaggatatcatgtgttcagacatccttaattattttatgttctggggaaaatggataagattattttttgtagatcaaaataactggcccttactgtttctcagataaaattccaagtttgtttccatgagaatacactgtattctaagttctaaatataaggtaaatataataatttagctttaaaattggtgaaagattaattatttagatgaagccaggcatctaat

SEQ ID NO: 68556 - DNA, 600 bp, Chicken  19866894339752_1
gtattatttatacgggactatttcataaattgatcaagctcatttttagttctgtgttctctaaaccgctgtgctactccttcagttaaaaccccatccgctctgatactattagggaaactgctggagatattgaatgcacccgtgcccaagaatgacttctcccccagagatcttacttaaagcactctttggtttgtgctgaaccatttgtctcacccctggaggcattcaaggccaggctggatgtggctctgggcagcctggtctggtggttggcgaccctgcacatagcagggrggttgaaactcgatgatcattgtggtccttttcaacccaggccattctatgatgctgtgattctatgattaatagatactcttttagatatgtgttctcaacttgttgatcaatctgagagtaatttaaaggactagtactaacagaattaataaaacacaatgctttacatcatctcttgtaayatttctcctattttttcccctgcccttccttctaacacatgaggtcaagtaggaaactaagttgattagacttaatcctgttctcaacaagtctgtgccataatttgggatttag

SEQ ID NO: 68557 - DNA, 545 bp, Chicken  19866894339752_2
cactctttggtttgtgctgaaccatttgtctcacccctggaggcattcaaggccaggctggatgtggctctgggcagcctggtctggtggttggcgaccctgcacatagcagggrggttgaaactcgatgatcattgtggtccttttcaacccaggccattctatgatgctgtgattctatgattaatagatactcttttagatatgtgttctcaacttgttgatcaatctgagagtaatttaaaggactagtactaacagaattaataaaacacaatgctttacatcatctcttgtaayatttctcctattttttcccctgcccttccttctaacacatgaggtcaagtaggaaactaagttgattagacttaatcctgttctcaacaagtctgtgccataatttgggatttaggataggrtgaggagaaaaggtggtagacagctgattgtttaagaatttatttagtatgattccagacaatcaagtagtcttgtctgtacggctttttcttcgcgctcttacagattagatgcagtttttt

SEQ ID NO: 68558 - DNA, 423 bp, Chicken  19866894339752_3
actcgatgatcattgtggtccttttcaacccaggccattctatgatgctgtgattctatgattaatagatactcttttagatatgtgttctcaacttgttgatcaatctgagagtaatttaaaggactagtactaacagaattaataaaacacaatgctttacatcatctcttgtaayatttctcctattttttcccctgcccttccttctaacacatgaggtcaagtaggaaactaagttgattagacttaatcctgttctcaacaagtctgtgccataatttgggatttaggataggrtgaggagaaaaggtggtagacagctgattgtttaagaatttatttagtatgattccagacaatcaagtagtcttgtctgtacggctttttcttcgcgctcttacagattagatgcagtttttt

SEQ ID NO: 68559 - DNA, 600 bp, Chicken  19866894339770_1
tgtatggaggttgcagtgctatttccagtggaagctaaagaagctgaaaggcaaactgataagacagatactcactctttcacaaaattgtgcagctgctgccgaacagacctttgagcctggtcaaacaggatctgaaagaaaagaataccaaaaaggtttgcaacatggaagcatttaggagttagcaaacagatgccatctacgaccttagcattactccagggcttggtcatgcccactgctctactgttatgcaatggataatgcctttttttgccctgtggctgcagtagtccyttacargtgcagagctcctgcactgcagctctccaagcatgtgagacctgagccaccaacctgcttcctgaaaagagcaaccatccctatagtcgattttgaaccacctctctccagagcctcaaattgctcattttgccagaggagggcactgtcaccccaacaccacagtgtcctgggaaggagacaggagcatcgtctgaaggcccacaggacccaagtgctgatgaactgaagtccaagacaggtggtataaagggagtcagttcctacagatctttcaaacatcacactcctgtc

SEQ ID NO: 68560 - DNA, 600 bp, Chicken  19866894339770_2
gaggttgcagtgctatttccagtggaagctaaagaagctgaaaggcaaactgataagacagatactcactctttcacaaaattgtgcagctgctgccgaacagacctttgagcctggtcaaacaggatctgaaagaaaagaataccaaaaaggtttgcaacatggaagcatttaggagttagcaaacagatgccatctacgaccttagcattactccagggcttggtcatgcccactgctctactgttatgcaatggataatgcctttttttgccctgtggctgcagtagtccyttacargtgcagagctcctgcactgcagctctccaagcatgtgagacctgagccaccaacctgcttcctgaaaagagcaaccatccctatagtcgattttgaaccacctctctccagagcctcaaattgctcattttgccagaggagggcactgtcaccccaacaccacagtgtcctgggaaggagacaggagcatcgtctgaaggcccacaggacccaagtgctgatgaactgaagtccaagacaggtggtataaagggagtcagttcctacagatctttcaaacatcacactcctgtctatcgc

SEQ ID NO: 68561 - DNA, 600 bp, Chicken  19866894339775_1
ggcctctgcatcaaagaatttggccaagaacagagagaattgttgtgtccgactgaagatggacagcatatttatggaatacctgtgggcatttgctgcagagttgcagccaaattgctaatggaactgtgtcttccggttgggcttgctggaaagcacaatgtcagggattttctgaatgctgtagtctggaagctcctatgaattttcacaaatgtgagagcaccaaaataaaaaagctaaattttcagaagtaggagttttgagctgctttatgttgattagctttaaagggaatckacataggttgctccaaaagcaatgccttctatttctttccttggaaattacagtagatacaaagagtatgacartatttgattgagcaaattctcagctacaaaatactatttttaacagtcattaccrttagctatgcattttgatcagcaatgaacaagagcctggatgccatgcttgtaaaacctgcactagcagaggtgactgtcactgtccccacttctcaaatgctctatccactccctcactctgctcatatccactgtttgatctccataaccattcagcaagtgtcaatga

SEQ ID NO: 68562 - DNA, 600 bp, Chicken  19866894339775_2
tggaatacctgtgggcatttgctgcagagttgcagccaaattgctaatggaactgtgtcttccggttgggcttgctggaaagcacaatgtcagggattttctgaatgctgtagtctggaagctcctatgaattttcacaaatgtgagagcaccaaaataaaaaagctaaattttcagaagtaggagttttgagctgctttatgttgattagctttaaagggaatckacataggttgctccaaaagcaatgccttctatttctttccttggaaattacagtagatacaaagagtatgacartatttgattgagcaaattctcagctacaaaatactatttttaacagtcattaccrttagctatgcattttgatcagcaatgaacaagagcctggatgccatgcttgtaaaacctgcactagcagaggtgactgtcactgtccccacttctcaaatgctctatccactccctcactctgctcatatccactgtttgatctccataaccattcagcaagtgtcaatgactgtcactgagtgccatttcctccacgtggatgaacacagtgacacacctttgcttcatctgcacttccatgtc

SEQ ID NO: 68563 - DNA, 600 bp, Chicken  19866894339775_3
tgtcttccggttgggcttgctggaaagcacaatgtcagggattttctgaatgctgtagtctggaagctcctatgaattttcacaaatgtgagagcaccaaaataaaaaagctaaattttcagaagtaggagttttgagctgctttatgttgattagctttaaagggaatckacataggttgctccaaaagcaatgccttctatttctttccttggaaattacagtagatacaaagagtatgacartatttgattgagcaaattctcagctacaaaatactatttttaacagtcattaccrttagctatgcattttgatcagcaatgaacaagagcctggatgccatgcttgtaaaacctgcactagcagaggtgactgtcactgtccccacttctcaaatgctctatccactccctcactctgctcatatccactgtttgatctccataaccattcagcaagtgtcaatgactgtcactgagtgccatttcctccacgtggatgaacacagtgacacacctttgcttcatctgcacttccatgtcagatgccagtgtgttagaccactgctctgctgccatctgtcacatggcaacaaaa

SEQ ID NO: 68564 - DNA, 600 bp, Chicken  19866894339783_1
tctcctcttcaacatttgaaaaatgttgtgtgtgtttaagggggacacagctttttgttttgccgtgtttcttaagtaaaaaatggagggggaaaaagtcatgattaaggagtgtcttcggaagcatggttgcgcaactgcacaatgtttaaaacactgagatgactgttatctggagctcaaactcctttcttcccttcactgaaatttcaggtagcttggtgggttatggtgagagagctttacacaacaactgaactgtgattttagcagtagtgctgctaatccaggaccttgtcrttggtgtcttttgtagagacatggtaaaactaatacaaatgttgtatttaaaatgtttttagggatcttcatttcctcctccatctgaatatgctccaccgccgaatccaagctctgaccaccttgtagctgcaaatccatttgatgacaactataatactgtgtcttataaaccacttccttcaggaaatccttattttagtaatcctggttatcctggctttgggggctataacactttcagaatgccacctcacatgctgcacagagtgtccacgccatatggtggttcctattccc

SEQ ID NO: 68565 - DNA, 599 bp, Chicken  19866894339784_1
  misc_feature (1)..(158): n is any nucleotide
nnnnnnnnnnnnnnnnnnnnnnnnnnnnnnnnnnnnnnnnnnnnnnnnnnnnnnnnnnnnnnnnnnnnnnnnnnnnnnnnnnnnnnnnnnnnnnnnnnnnnnnnnnnnnnnnnnnnnnnnnnnnnnnnnnnnnnnnnnnnnnnnnnnnnnnnnnnnnnaagacacttggtgacttagtcctgttaactctgttgaaaatgattacattatattcaacatataacaattcttaagtagttacatacagagggatgttctgttctcttacaggctggcaaagtcattgtcccctgtcctccytgtccaaaggtttgtttgtaactataaattgctaactagcattaatttctttcaattcaagagcattatttcacatataatgagtgacttcaacattccaaattgtgaagctgagaaaactgaccctcttttcgtatacatgatgcgtagaaagtcgtcaggtgctatctttccactaacctaatagtatagttgtgatagcaaaggtatattaatggctgctttagaaatcaaattaaaaaggcaaagttgatcatgacatattcgatggtgaagatacagataaaagtgttctgaag

SEQ ID NO: 68566 - DNA, 533 bp, Chicken  19866894339784_2
tgaagaagaaaaatagcatatgcagtccttgtggaatggttaatataaaggagaaaaagcagtttggtcttcagtcaaatactgtcattttagtaatttccaccattgcgtgtcctttaattatctcctactttcttttttcctgtagctactgccacagcttattctaatctttctttacaagtatatctccttttgcctggctgaaggagagtgccacccaacaataggcagtgattgatggtgtcaatgtgccatgcctactactttgccaccacatcttaccgaatacagacctckactttaaattatattcttttaagtgtacttttagccagtaacttcaatatgacgtctgttttaatgacaaaaactaaagattgtatatgctgtatctaggtgaaaatgaatgtttgtatactctgggtgtcttcaaaaacagttattttctacctggcaaacctgaagatggccatggtataatttctcctgtttttatatgtatcttcagagagctaaggcaaactctttca

SEQ ID NO: 68567 - DNA, 600 bp, Chicken  19866894339790_1
atcaatgtcaagacaatgaaggagaagcataaactttgtcccagtgcaaggtaataacataacccctcctagactccgcactatgacattcttgtaagaaagatggagcgtgggcagcaaccctgcccacagcagggggttggaaccagatgatctttcaagtcccttctgacccaagccattctgtgattcaaggcatcctaaaccagccttgccaattaataccagccccttcttggcctgttgcgtgcaggcaaaccccggctcatatttgtgagatttactcattgagaacaatartaaagggaggaaccagaagggtggtaaaagtttggttgcattcacttatcaatacttttcatgccagacagcattgcttttatcctgttcaaagagtggaggtggaaagcaagaaataagagaaaacaatctggaaagagatagtgatagtgatatatatatcacatataaagataaggcatagagtgggtgtgtggagaaagggctgtagtggggaaaattagaagagagatgagaaagaaaatgtagtagggatggcaaactattcaaagttgaggttgtagaaaatgagacagagag

SEQ ID NO: 68568 - DNA, 441 bp, Chicken  19866894339790_2
tgatatatatatcacatataaagataaggcatagagtgggtgtgtggagaaagggctgtagtggggaaaattagaagagagatgagaaagaaaatgtagtagggatggcaaactattcaaagttgaggttgtagaaaatgagacagagagctgtagaaagctctgctcaaaaaactttggttttagccctaatatgtggatgctcagtacaatttttgctgccagtgatgcgatgcttttgtttcctatggatttctagctaacagccctgtacattccccttggctgagggcatggagyacatgtaaaatgctagcactgaagtgccctagaacctcctytcctctgtaggacttctgctctctaagggactcttggaaagagtgaaaacagcagttcaaaaagtgtttgagaaaatacagttgagctcaaaagtctcag

SEQ ID NO: 68569 - DNA, 400 bp, Chicken  19866894339790_3
gtgtggagaaagggctgtagtggggaaaattagaagagagatgagaaagaaaatgtagtagggatggcaaactattcaaagttgaggttgtagaaaatgagacagagagctgtagaaagctctgctcaaaaaactttggttttagccctaatatgtggatgctcagtacaatttttgctgccagtgatgcgatgcttttgtttcctatggatttctagctaacagccctgtacattccccttggctgagggcatggagyacatgtaaaatgctagcactgaagtgccctagaacctcctytcctctgtaggacttctgctctctaagggactcttggaaagagtgaaaacagcagttcaaaaagtgtttgagaaaatacagttgagctcaaaagtctcag

SEQ ID NO: 68570 - DNA, 600 bp, Chicken  19866894339795_1
tctggctccacacaggatcaccccaaatccaaattctatgtctgatagcattatccaaactctccttgaactccagcagctcggggccgtgcccgctgccctgtggagcctgttccatgcccaccagcctctgaggcagaacatttttctgatatccaacctgaaccataagctttgaggatcctggaagagaggttttgtgctttgagagggactccagcttccttcctcatgtcaccccaactgctcgcagtgcgggccaggaagataaatatgaagtgaaaaccttttctaggaaaraaacaaaagggaacaactgccacaagaatctgactgaatctcattcccaaacaactcagtgccagctgcacagcaggaaagcagatctaaatggacagttgaagcagtcatgtttgatctttgcacagaggaggccacaggctgtatcagtgccaagtcctgtattgcagcccacagctcgcagctaaatgggactctgcccctggaaagcagtttggtcttaatttaatggctaggtgatgaagatagcaccacaactctttctaatcagagattaagtccttttggtgttgatttact

SEQ ID NO: 68571 - DNA, 600 bp, Chicken  19866894339801_1
ctaactcggtagttcccatagcttgccttgctacaatgaacaactctttgttcccaattttgctaacatagcattaaacaatttgctcataaagtccttgtacgttagaagtagataacaaagacatacaccgaaccagtaccaagcagacaaaggaagctctgtttaggaaagcaagcactgtgcatccaaggcaaggagccaacgcccagctctaccagtggacatagcgaaagatgttgctgagttaacctatatcaagagtgagaaatgaatgcatccagcttcctgttgaacttwggttatgaggcayttatgtggtaatacaagaatgtagtgatgtgattcatatttataagtaagtgtcttaatgtttctagcagtaccttagggattatggcaagttactcattggtttcttatgtattaacgtgtctttacgccactgtggtttgagaagagctcacattctgtagcacctatggaagtctcctgcccctcctgcagcagcaggggtgccctggggctggtgggcgcagccctgcccatggcatggcttggagatggatgggctttaaggtcccttccaacccaagcctt

SEQ ID NO: 68572 - DNA, 600 bp, Chicken  19866894339801_2
tcccatagcttgccttgctacaatgaacaactctttgttcccaattttgctaacatagcattaaacaatttgctcataaagtccttgtacgttagaagtagataacaaagacatacaccgaaccagtaccaagcagacaaaggaagctctgtttaggaaagcaagcactgtgcatccaaggcaaggagccaacgcccagctctaccagtggacatagcgaaagatgttgctgagttaacctatatcaagagtgagaaatgaatgcatccagcttcctgttgaacttwggttatgaggcayttatgtggtaatacaagaatgtagtgatgtgattcatatttataagtaagtgtcttaatgtttctagcagtaccttagggattatggcaagttactcattggtttcttatgtattaacgtgtctttacgccactgtggtttgagaagagctcacattctgtagcacctatggaagtctcctgcccctcctgcagcagcaggggtgccctggggctggtgggcgcagccctgcccatggcatggcttggagatggatgggctttaaggtcccttccaacccaagccttcatatgcttctgt

SEQ ID NO: 68573 - DNA, 600 bp, Chicken  19866894339802_1
ctggaaaacttgtataatcaaggaaaatggcattgcattgttagtgtaatgtctttttgctgtttcattagaaattccattaattgttttattactgttttcataaaagctgttgggtagtccagtaaatgagaaaataaacctgctttgaactgcaggtgattgatcttattgctaatcaagcatggtgaaggtagatgtctgccttttgtgttttaagtgtcaccatatggctaagcagttctaattagtgcactgtttgtggagaaacctttgtaatagtaacatgacctctttctytatagaaaatgcactgcatttcttatggcgggaggtcattactctggatggagtgaaaatctactataatccctttactggctggtatgtttttgtgcttatctatttctgagaacacctcaaatattttatttttatatatctatatctatacagatagttgtatatgtgtgtatatatatttttttaaaggcaaattatcttatataacacatgactaaataagtaaatcttgaggacataattcttaaagctgcttgtattaatttcagtagagatgtatgtttacaagattagtgc

SEQ ID NO: 68574 - DNA, 600 bp, Chicken  19866894339808_1
ggaagcagatgggtccaagcatgacaccagggaccctgactccactcactgcagaacttcaggacaggtacaattctcctcactttccttatgtgaaagagtgaagctctcacactttttctctttttctgacagaggtgtttatcatcagtcagtcatcactgctgtatatttatttaatagcagtgggagaatccctctgcttctgggggactcttttgttaaaggaatgctggaggttatagcccctgtttgatgaaatcagggattgctaaactaatgaaagactgactaaaacaygcaattttgtttgtagtgaaaatccttttttaccagcaattgttttttaagagycatataacaaayatttaagtgtgtatatcatgtttctgtagtttatcttctgacaaatgtctctgaatctatgaatactgtggtctgagcctatgtttcattggcaatctggatcctagctgctgtacttcttactcttgacttacgagaacccaaagatgtaggcaccatttcaattaatttccccaaatcaatttaattcctgtgctcagtgtacatgtggctctgttgcatgcagaagagaac

SEQ ID NO: 68575 - DNA, 600 bp, Chicken  19866894339808_2
aacttcaggacaggtacaattctcctcactttccttatgtgaaagagtgaagctctcacactttttctctttttctgacagaggtgtttatcatcagtcagtcatcactgctgtatatttatttaatagcagtgggagaatccctctgcttctgggggactcttttgttaaaggaatgctggaggttatagcccctgtttgatgaaatcagggattgctaaactaatgaaagactgactaaaacaygcaattttgtttgtagtgaaaatccttttttaccagcaattgttttttaagagycatataacaaayatttaagtgtgtatatcatgtttctgtagtttatcttctgacaaatgtctctgaatctatgaatactgtggtctgagcctatgtttcattggcaatctggatcctagctgctgtacttcttactcttgacttacgagaacccaaagatgtaggcaccatttcaattaatttccccaaatcaatttaattcctgtgctcagtgtacatgtggctctgttgcatgcagaagagaacaccaccaccattttctgatcatattttggtagaaataaaggccagtgctcaaag

SEQ ID NO: 68576 - DNA, 600 bp, Chicken  19866894339808_3
ggtacaattctcctcactttccttatgtgaaagagtgaagctctcacactttttctctttttctgacagaggtgtttatcatcagtcagtcatcactgctgtatatttatttaatagcagtgggagaatccctctgcttctgggggactcttttgttaaaggaatgctggaggttatagcccctgtttgatgaaatcagggattgctaaactaatgaaagactgactaaaacaygcaattttgtttgtagtgaaaatccttttttaccagcaattgttttttaagagycatataacaaayatttaagtgtgtatatcatgtttctgtagtttatcttctgacaaatgtctctgaatctatgaatactgtggtctgagcctatgtttcattggcaatctggatcctagctgctgtacttcttactcttgacttacgagaacccaaagatgtaggcaccatttcaattaatttccccaaatcaatttaattcctgtgctcagtgtacatgtggctctgttgcatgcagaagagaacaccaccaccattttctgatcatattttggtagaaataaaggccagtgctcaaagtgctactacatt

SEQ ID NO: 68577 - DNA, 600 bp, Chicken  19866894339816_1
tggcaatgataagagcacaaacaaaatgtgataaaaacaccagagacactacagtattcttaatcttgatctgtaatttggaagggcaattcacagaggtgcacttctttgatttcttccacacacacacacacaaaaacaaacactagaaatgggaaggagaacaaaagttagaatatctgttactgcttttgaagtagtgggtaagaaatgtttaagttcaaccttagaagtggcaaagaagcaaacgaacaggtagattccagcctaaagtgggagtacagtttcctctgagagcawcagaacaaatgyggttgtgggtrttttttgttgttgttgtttgttttggtttggtttggtttttgtttttgtgaccgagtgatttttaattgaattatgctgatgttccagacagcaaaaggtgctgtggcctcctgagacattaacagcacatctcttcaattgtgcacttaytttttgagatgctcacgcaccttcatccttccgtcagctttgtcggawgcaggctggtggatttgagggactgaggagttaaagacagatgcttctctgtgtcacagactgagaaagcattttctc

SEQ ID NO: 68578 - DNA, 600 bp, Chicken  19866894339816_2
gagcacaaacaaaatgtgataaaaacaccagagacactacagtattcttaatcttgatctgtaatttggaagggcaattcacagaggtgcacttctttgatttcttccacacacacacacacaaaaacaaacactagaaatgggaaggagaacaaaagttagaatatctgttactgcttttgaagtagtgggtaagaaatgtttaagttcaaccttagaagtggcaaagaagcaaacgaacaggtagattccagcctaaagtgggagtacagtttcctctgagagcawcagaacaaatgyggttgtgggtrttttttgttgttgttgtttgttttggtttggtttggtttttgtttttgtgaccgagtgatttttaattgaattatgctgatgttccagacagcaaaaggtgctgtggcctcctgagacattaacagcacatctcttcaattgtgcacttaytttttgagatgctcacgcaccttcatccttccgtcagctttgtcggawgcaggctggtggatttgagggactgaggagttaaagacagatgcttctctgtgtcacagactgagaaagcattttctccttttttttcaa

SEQ ID NO: 68579 - DNA, 600 bp, Chicken  19866894339816_3
aaatgtgataaaaacaccagagacactacagtattcttaatcttgatctgtaatttggaagggcaattcacagaggtgcacttctttgatttcttccacacacacacacacaaaaacaaacactagaaatgggaaggagaacaaaagttagaatatctgttactgcttttgaagtagtgggtaagaaatgtttaagttcaaccttagaagtggcaaagaagcaaacgaacaggtagattccagcctaaagtgggagtacagtttcctctgagagcawcagaacaaatgyggttgtgggtrttttttgttgttgttgtttgttttggtttggtttggtttttgtttttgtgaccgagtgatttttaattgaattatgctgatgttccagacagcaaaaggtgctgtggcctcctgagacattaacagcacatctcttcaattgtgcacttaytttttgagatgctcacgcaccttcatccttccgtcagctttgtcggawgcaggctggtggatttgagggactgaggagttaaagacagatgcttctctgtgtcacagactgagaaagcattttctccttttttttcaattgtagcaaga

SEQ ID NO: 68580 - DNA, 600 bp, Chicken  19866894339816_4
aatatctgttactgcttttgaagtagtgggtaagaaatgtttaagttcaaccttagaagtggcaaagaagcaaacgaacaggtagattccagcctaaagtgggagtacagtttcctctgagagcawcagaacaaatgyggttgtgggtrttttttgttgttgttgtttgttttggtttggtttggtttttgtttttgtgaccgagtgatttttaattgaattatgctgatgttccagacagcaaaaggtgctgtggcctcctgagacattaacagcacatctcttcaattgtgcacttaytttttgagatgctcacgcaccttcatccttccgtcagctttgtcggawgcaggctggtggatttgagggactgaggagttaaagacagatgcttctctgtgtcacagactgagaaagcattttctccttttttttcaattgtagcaagagtttcagaaatgatttaatgttgctattcatgagcttcagaaacagagtaatgaaaacaaagaaaagaaagaaactctacttttgaatgagggagtttgtttcacactcagctgtcttaatgctccgagccactctgaatgagaaacagct

SEQ ID NO: 68581 - DNA, 600 bp, Chicken  19866894339816_5
aaccttagaagtggcaaagaagcaaacgaacaggtagattccagcctaaagtgggagtacagtttcctctgagagcawcagaacaaatgyggttgtgggtrttttttgttgttgttgtttgttttggtttggtttggtttttgtttttgtgaccgagtgatttttaattgaattatgctgatgttccagacagcaaaaggtgctgtggcctcctgagacattaacagcacatctcttcaattgtgcacttaytttttgagatgctcacgcaccttcatccttccgtcagctttgtcggawgcaggctggtggatttgagggactgaggagttaaagacagatgcttctctgtgtcacagactgagaaagcattttctccttttttttcaattgtagcaagagtttcagaaatgatttaatgttgctattcatgagcttcagaaacagagtaatgaaaacaaagaaaagaaagaaactctacttttgaatgagggagtttgtttcacactcagctgtcttaatgctccgagccactctgaatgagaaacagcttaacagttcagggacagccagagtaaggaaggagttttaataagtgaa

SEQ ID NO: 68582 - DNA, 600 bp, Chicken  19866894339822_1
cctgaactgctgataaatgatggaaagtggcttagcagtcacctctgccagctccctcagtacctttgggtagattctgtctggccccatggacatgtgacagtccagttggagtagcagctcactgtttcctcctaagttgtgggtatattctgctccctatcctagtgttccagctctaggggctgagtaccctgaggataagtggtctaactgttaaaagtagaagtaaagaaggcattgagaaccacagttttctttgtccccagtgacagtgttccttgctgcgtccagtatacrcaggagattctccttggctcccctcttgctgttaatatgtttgtattaacatttttttcttgtctttaacagtggtggccagatggagttcttgctagacttttgcttttctgattctccctctgtgtatcctagtgacatctgtatactcttcccaggttgcctgacttttcttccaaagatcataaactctcttttaccaggccaatcttcttccccaccagcttgtcttatgkcacaaggggaacagcgtgttcctgtgcctttaagatttcttcttgaacaatggtcagccttcct

SEQ ID NO: 68583 - DNA, 600 bp, Chicken  19866894339822_2
ggcattgagaaccacagttttctttgtccccagtgacagtgttccttgctgcgtccagtatacrcaggagattctccttggctcccctcttgctgttaatatgtttgtattaacatttttttcttgtctttaacagtggtggccagatggagttcttgctagacttttgcttttctgattctccctctgtgtatcctagtgacatctgtatactcttcccaggttgcctgacttttcttccaaagatcataaactctcttttaccaggccaatcttcttccccaccagcttgtcttatgkcacaaggggaacagcgtgttcctgtgcctttaagatttcttcttgaacaatggtcagccttcctgtacccctttgcctttcaggactgactcccaagggatttccatatccatcaaatagttagaagtctagcctccagaattccagggtagcatttttttctgaccctgactttatagtcgctgtacccaagacagcttccagccactgcatctctgaccattccttctctgtagacagcagatctaacagtgcttcccctagtaggctctcttaccatctgtatcaggaagttctttt

SEQ ID NO: 68584 - DNA, 600 bp, Chicken  19866894339824_1
caagattgtcaccaagactgacaattaaacagggaggagagtatggctgtgctactcaacggctgtgctgctcaatgtctgtacaagagacatgttattttgaattactggtgttagaaaagataaaatcatcactagaaacacttgacagctcttaaggggacaatgctgtttagattacatgttggggctcatctactgaatgtaaaagaaatgctctgttatgaaggccataaaaaatcaattttatttccgccttgtcctttgttacaatacaaatttcttacctcttctgataaytttttgtttactgagctagaattcattgaagatattagttaatttctagttagttctagaaagacctgttatttgactatagtagtctggaaaatttagattttcttcaggctgcccttttgctaatcttttttcctcacttaagtgctttgaaattaaacaaatagtcattaaatacatttcttaccccaataataggagaaacagcattaacagagttcaaaggaaactggactttttaggccttgtgtgattactgtatttcttttcagttttattcaaccatttttcttgactgac

SEQ ID NO: 68585 - DNA, 600 bp, Chicken  19866894339828_1
gttattgttattcagtagttatgcatcttaacatttctgctggtatagagtacaatggacttttagagattaatatagtacggtaattttataataaatattacacaatgatttttactgtccttcagtactacttttagaattttatcttaacagaaagaataaagcataaagaaaaaaaattgatgtatcctagattaaatggaggaaaaaaagagcaatattgaattaaaataaatctatacaagatgcagaaataaagatccaacaatgcatcttttctgctgtacatccaagagytttacttattataatatagtaaaatgtaagaagttggccatatatttgtagcaaactatataccatcttaaagagaaacttaattcttactttttgtagagagatactaagaataatactagaaacacagtcacttgtaatggagattttatataaagagaagctgactaaaattacattcttaatgctttatcaaacagatctttgaaaattgaaagcatttcatgtggtttacaagaaaaaagcatgctactaattttctgcatctaattgaatacttagagaatattgaaaattaac

SEQ ID NO: 68586 - DNA, 600 bp, Chicken  19866894339832_1
tgcagcggctatttttgtctgctcttgagatagtgagaaaagtggaaaaaaaatttcctctgactgagattttcagcttttatcttcttttttttcaatccaatcaagttaaactcagtagtgaagtatgttgtttaccagcaaaacatccgtgttgccctgagttaccatgtggtcccacccaggatttacacagttctgttctgtcttaaaaacagttgatctttgtaatgagcactgggagctgcccagtcatcagttcagtgtgcgtagtgctctcagctcagcagataccaagcygctgtgaaggccatgggtgtgttttctgtaattcatgcaggaatctgcagaccctttgacttgacaagaatgaatggtgctggagcacctaaggcactgctctgttcttgcagccctcctgagtccctcagcagcctgcatcatgcgtaaaagccccacataatgcaccttcgcatccagtggagagcctcgctgctaggacaacagaagtaataggtttgggaaatgtaactcaacagttacccttccctctgcttcctttatgttaatcccatagcagttttcccttagctccacgtt

SEQ ID NO: 68587 - DNA, 600 bp, Chicken  19866894339835_1
atcaccaaatcagaaaaaagccagattgtaatttcttttaagttcacatggaacagcgaattttaacatttattttaaatgttcttttaatcatgaaaagaatcctttacaaagtagaccacactttacaggaactgaaccaaaggtacttggattcagtcaagtttggtttaaagaagccattatagcaaactgatctcacaaatcagctttgtgcctcattccccaagcttttgaagttggtattgaaaacaacaaaaaagaatttgtgcatttgcctttaggttggttagtatcagmatttcttcttttctcttcacaggaagaaaaccctacatttatcagagaatctaattccatgwtgtcgtctcagggtttcagctatgaaacaaaattattccttgcatcagaaaacacatttaaaagagctaaaaatatttgagttctaacaagacaaaccaacttaatgtgattttgtccaaatgtagaataatataccttaagcagcaaattaaaaaacccttttctatccactaaatcacaaagaacytgtaaaacgtgttgttttcctcatattaattagctacattttctcaaagt

SEQ ID NO: 68588 - DNA, 600 bp, Chicken  19866894339835_2
ttaacatttattttaaatgttcttttaatcatgaaaagaatcctttacaaagtagaccacactttacaggaactgaaccaaaggtacttggattcagtcaagtttggtttaaagaagccattatagcaaactgatctcacaaatcagctttgtgcctcattccccaagcttttgaagttggtattgaaaacaacaaaaaagaatttgtgcatttgcctttaggttggttagtatcagmatttcttcttttctcttcacaggaagaaaaccctacatttatcagagaatctaattccatgwtgtcgtctcagggtttcagctatgaaacaaaattattccttgcatcagaaaacacatttaaaagagctaaaaatatttgagttctaacaagacaaaccaacttaatgtgattttgtccaaatgtagaataatataccttaagcagcaaattaaaaaacccttttctatccactaaatcacaaagaacytgtaaaacgtgttgttttcctcatattaattagctacattttctcaaagttrtaagaaggtactgacccaatactgactttgtttctgttttcaagaagtgattgctcatta

SEQ ID NO: 68589 - DNA, 590 bp, Chicken  19866894339835_3
aacaacaaaaaagaatttgtgcatttgcctttaggttggttagtatcagmatttcttcttttctcttcacaggaagaaaaccctacatttatcagagaatctaattccatgwtgtcgtctcagggtttcagctatgaaacaaaattattccttgcatcagaaaacacatttaaaagagctaaaaatatttgagttctaacaagacaaaccaacttaatgtgattttgtccaaatgtagaataatataccttaagcagcaaattaaaaaacccttttctatccactaaatcacaaagaacytgtaaaacgtgttgttttcctcatattaattagctacattttctcaaagttrtaagaaggtactgacccaatactgactttgtttctgttttcaagaagtgattgctcattatcagaaatggattaaaaccaaagtcgagctctttcctcagatggtaccaagctagttatcataccaaaaatacaatgtttcattgaacagttaggcttgaatcagaagccaacataaaaaagatcggggtttttttgtgcacagactataacccatacacactctgaaagcttgtcca

SEQ ID NO: 68590 - DNA, 538 bp, Chicken  19866894339835_4
ttcttcttttctcttcacaggaagaaaaccctacatttatcagagaatctaattccatgwtgtcgtctcagggtttcagctatgaaacaaaattattccttgcatcagaaaacacatttaaaagagctaaaaatatttgagttctaacaagacaaaccaacttaatgtgattttgtccaaatgtagaataatataccttaagcagcaaattaaaaaacccttttctatccactaaatcacaaagaacytgtaaaacgtgttgttttcctcatattaattagctacattttctcaaagttrtaagaaggtactgacccaatactgactttgtttctgttttcaagaagtgattgctcattatcagaaatggattaaaaccaaagtcgagctctttcctcagatggtaccaagctagttatcataccaaaaatacaatgtttcattgaacagttaggcttgaatcagaagccaacataaaaaagatcggggtttttttgtgcacagactataacccatacacactctgaaagcttgtcca

SEQ ID NO: 68591 - DNA, 600 bp, Chicken  19866894339837_1
ctttctggaaaatatctgaccttgatacttcatattcaatttatgtaaacaattacaacagcatctgagccaaatagaaaaggctatttcttgaaaacctgcagggaatgcacatgggaatttcccacatgctgtggcaatcttaaaagtacctctgtgtaaccccacagtattaatgattaactccagaactgtgagtttttccgtacctccagtgaagttggtctgttcagttgcacactgtgctggggaggggtagtaaaaaataaataaatcacttcccacttcagtaacttgcayttaacaaactatctgccacatttcccccttgaaatccaaggattcctgtgaattgcacagttgatagatatcacaataagggaaatattttgtggctaagataatcttgcaagatggagctggaagcagttttgttcttctgaaattactcaaaggcagagatactttgctcagggcactcacccacacagagcagcgtggaccttcacaaataagctgaacactgttgacaccacgtttatatgaagttcgttattggtgttagctttgtgatttgtttccgttacatgtgctggaccg

SEQ ID NO: 68592 - DNA, 510 bp, Chicken  19866894339846_1
ttccagatttgagggctggttggtagaaacaggagtacaacactggaaaggggcagcaaggatggtaaagggtagggaaaatttaatggggtggagctgggaaaaaaacaacagtgatgaaggttagagagacgtataaatggttaatggaacagacagcaacagcttggtgcaattattcaccattccttgcaccggaaaactgagtgcatcaaatcaaactactgcggtgctgcttcaagactgagagctgcttccccgagcaccgcatccctgcgtgcacagccctggagcacacarcgcaacgggcagcaaagsttcccacaggctcacaaaaggactggacaaatccgcacagaatgagtccagctgaagtcaattaaaaacaaagcctgcttctgctccaggaagcacctgggcccctcagcagcagcagtgattttctgtccccaacacctatctccgtctgcttgccagtccctcgcggacacacagcaggttagaaagcgt

SEQ ID NO: 68593 - DNA, 492 bp, Chicken  19866894339846_2
gttggtagaaacaggagtacaacactggaaaggggcagcaaggatggtaaagggtagggaaaatttaatggggtggagctgggaaaaaaacaacagtgatgaaggttagagagacgtataaatggttaatggaacagacagcaacagcttggtgcaattattcaccattccttgcaccggaaaactgagtgcatcaaatcaaactactgcggtgctgcttcaagactgagagctgcttccccgagcaccgcatccctgcgtgcacagccctggagcacacarcgcaacgggcagcaaagsttcccacaggctcacaaaaggactggacaaatccgcacagaatgagtccagctgaagtcaattaaaaacaaagcctgcttctgctccaggaagcacctgggcccctcagcagcagcagtgattttctgtccccaacacctatctccgtctgcttgccagtccctcgcggacacacagcaggttagaaagcgt

SEQ ID NO: 68594 - DNA, 600 bp, Chicken  19866894339848_1
atttggatggcatgcaagctatcccccccatatgtaagccccatattcatgcctgatgttgctctatttgaacacctaatcatctcaggaatacatgaaaaccccttcagctgttaagagtttaccagttcttgaaatggtgccttgtttacagggaaattacaactgcagtgtttcttggggggaaatgttttgacaggtaggtaatacaggcaatgactttggattggcactacatgctatgtggaaagcaagatatccaaagcagcatttaaaaattatctttttgctcagttttcmtgtcacataaacagcaagaacagttttcttgaccactgttgctgatccagctggaagccttttctgttgtagcttctttcttctaaatatgctatgttgctgttcaaagcacagaaaacagccttaatgatgggcacctacactgtttcaatttatcattcattgtggatgctgagaactcttgtgcaagtgatcagatttctggtgttctctgagtgtttgcttttccatttcctttgaactgaagttgccaaatccttttatttgaagaagatgtggacaaattaacttatctgatca

SEQ ID NO: 68595 - DNA, 599 bp, Chicken  19866894339857_1
  misc_feature (1)..(182): n is any nucleotide
nnnnnnnnnnnnnnnnnnnnnnnnnnnnnnnnnnnnnnnnnnnnnnnnnnnnnnnnnnnnnnnnnnnnnnnnnnnnnnnnnnnnnnnnnnnnnnnnnnnnnnnnnnnnnnnnnnnnnnnnnnnnnnnnnnnnnnnnnnnnnnnnnnnnnnnnnnnnnnnnnnnnnnnnnnnnnnnnnnnnnnattctagtaaatccacttgaaatgactgcagtaagttcttactaaacttattacttagaaggatttgtgtttgtctttgaaattcagttctgattcttctacttcaagacgtgaatgycgtgttggacaatacgttgtagacgttgtttcatttgagcagttggttctgcctgtgctgagaaacgtgagtattatactgaagctactgaaaaaaatggatgctttatgataatgattgttattggaaggctcttctacagtgctcaattttgatgttaataaagrgtctcattcttgaatgtcactgattctgattgccttcaggatcaggaggcagaaagggcagagctttttctcatgtgcctgttgtgagatgagagattgctttgcctctcctcctttacgtgccattgtcct

SEQ ID NO: 68596 - DNA, 599 bp, Chicken  19866894339857_2
  misc_feature (1)..(15): n is any nucleotide
nnnnnnnnnnnnnnnattctagtaaatccacttgaaatgactgcagtaagttcttactaaacttattacttagaaggatttgtgtttgtctttgaaattcagttctgattcttctacttcaagacgtgaatgycgtgttggacaatacgttgtagacgttgtttcatttgagcagttggttctgcctgtgctgagaaacgtgagtattatactgaagctactgaaaaaaatggatgctttatgataatgattgttattggaaggctcttctacagtgctcaattttgatgttaataaagrgtctcattcttgaatgtcactgattctgattgccttcaggatcaggaggcagaaagggcagagctttttctcatgtgcctgttgtgagatgagagattgctttgcctctcctcctttacgtgccattgtcctgtagccaggccctccttgtgttgagagagagccaatgggaagctgcttcctgtgctaccaccttgcacaaaatgtacaggtggcttactgcatatcagtggcttgagctaatgggcctacaagaaaggattttgtcactgctcctcttcacttcccttttttctcct

SEQ ID NO: 68597 - DNA, 600 bp, Chicken  19866894339857_3
ctggagagatcagcacgtttttgtttacagtttgactcctgccttcctgttttactttggacaaactgctttgacctctcaaagttttatcatgatgtaacaaatactggggccagaggtgaagaccctgagacctgcctgagtctgctcactcctctgcgtgcctgtttacagcactgagggctcagctgactgctcccatatgagctaataatgaaaaaatagccttcataaaatctgaaatcttacttaaagtttggaaactgtagataagggtgtaaacatctgatgtttgttggktttttttttttgctaaaatattgaggaacaatcttctaaaactaaacttgtttttgaaaggcattctgtagctacagacttccaamactggatgcaatgcaggccattcttartaattacgttgtgttgatattgatttattctaaatgcagaattcaacgttttgaaatgtttgggtccctcagatttagtgagagcagttctttattgtcaaatagctggagaattctgctctgaaggaaaaatggtattctgaatatttcctctcatcgtagctggtatttttgccatacatgtatt

SEQ ID NO: 68598 - DNA, 600 bp, Chicken  19866894339857_4
ttatcatgatgtaacaaatactggggccagaggtgaagaccctgagacctgcctgagtctgctcactcctctgcgtgcctgtttacagcactgagggctcagctgactgctcccatatgagctaataatgaaaaaatagccttcataaaatctgaaatcttacttaaagtttggaaactgtagataagggtgtaaacatctgatgtttgttggktttttttttttgctaaaatattgaggaacaatcttctaaaactaaacttgtttttgaaaggcattctgtagctacagacttccaamactggatgcaatgcaggccattcttartaattacgttgtgttgatattgatttattctaaatgcagaattcaacgttttgaaatgtttgggtccctcagatttagtgagagcagttctttattgtcaaatagctggagaattctgctctgaaggaaaaatggtattctgaatatttcctctcatcgtagctggtatttttgccatacatgtattcttgtctttccaccagcttttgctgaaatataaatgacagatttgaagttggtcggttaccagcagcagcagctttgacttttcag

SEQ ID NO: 68599 - DNA, 600 bp, Chicken  19866894339857_5
cagaggtgaagaccctgagacctgcctgagtctgctcactcctctgcgtgcctgtttacagcactgagggctcagctgactgctcccatatgagctaataatgaaaaaatagccttcataaaatctgaaatcttacttaaagtttggaaactgtagataagggtgtaaacatctgatgtttgttggktttttttttttgctaaaatattgaggaacaatcttctaaaactaaacttgtttttgaaaggcattctgtagctacagacttccaamactggatgcaatgcaggccattcttartaattacgttgtgttgatattgatttattctaaatgcagaattcaacgttttgaaatgtttgggtccctcagatttagtgagagcagttctttattgtcaaatagctggagaattctgctctgaaggaaaaatggtattctgaatatttcctctcatcgtagctggtatttttgccatacatgtattcttgtctttccaccagcttttgctgaaatataaatgacagatttgaagttggtcggttaccagcagcagcagctttgacttttcagttttctgcagtattacaagggatttat

SEQ ID NO: 68600 - DNA, 599 bp, Chicken  19866894339861_1
  misc_feature (1)..(233): n is any nucleotide
nnnnnnnnnnnnnnnnnnnnnnnnnnnnnnnnnnnnnnnnnnnnnnnnnnnnnnnnnnnnnnnnnnnnnnnnnnnnnnnnnnnnnnnnnnnnnnnnnnnnnnnnnnnnnnnnnnnnnnnnnnnnnnnnnnnnnnnnnnnnnnnnnnnnnnnnnnnnnnnnnnnnnnnnnnnnnnnnnnnnnnnnnnnnnnnnnnnnnnnnnnnnnnnnnnnnnnnnnnnnnnnnnnnnnnnnnaaaaaatgttcaaaaagaaaaacggaataaatggagagaaatgctcatatgtaaatcaataatatcrttcatcttctgtttcgtcctgatgaatattaaagaaaaaaaagccagtttgggtatttggcatcattttcttgcatcgtatcccctgtacagcaaggggttggaaygagatgatctttaaaggtcccttccaaactaagccattctatgattctatgattgtttccctcccttgtgtccagggacgtacagttaaggatgcaggaaggtcagagctgggatgggggacagtggaaggaatgtttatttttctgcatggaaaactgtacattttctacagaagcagaaaaacggggggga

SEQ ID NO: 68601 - DNA, 599 bp, Chicken  19866894339861_2
  misc_feature (1)..(127): n is any nucleotide
nnnnnnnnnnnnnnnnnnnnnnnnnnnnnnnnnnnnnnnnnnnnnnnnnnnnnnnnnnnnnnnnnnnnnnnnnnnnnnnnnnnnnnnnnnnnnnnnnnnnnnnnnnnnnnnnnnnnnnnnnnnnnnnaaaaaatgttcaaaaagaaaaacggaataaatggagagaaatgctcatatgtaaatcaataatatcrttcatcttctgtttcgtcctgatgaatattaaagaaaaaaaagccagtttgggtatttggcatcattttcttgcatcgtatcccctgtacagcaaggggttggaaygagatgatctttaaaggtcccttccaaactaagccattctatgattctatgattgtttccctcccttgtgtccagggacgtacagttaaggatgcaggaaggtcagagctgggatgggggacagtggaaggaatgtttatttttctgcatggaaaactgtacattttctacagaagcagaaaaacgggggggaaatctcaaatgaatgctttgatgtgaagagatggaaatgttcccgcttccaaaaacaacttcagaacrgactgaaagaaatctaaagaatcttttgctgataagaa

SEQ ID NO: 68602 - DNA, 600 bp, Chicken  19866894339861_3
ttcttgcatcgtatcccctgtacagcaaggggttggaaygagatgatctttaaaggtcccttccaaactaagccattctatgattctatgattgtttccctcccttgtgtccagggacgtacagttaaggatgcaggaaggtcagagctgggatgggggacagtggaaggaatgtttatttttctgcatggaaaactgtacattttctacagaagcagaaaaacgggggggaaatctcaaatgaatgctttgatgtgaagagatggaaatgttcccgcttccaaaaacaacttcagaacrgactgaaagaaatctaaagaatcttttgctgataagaaatatttctgtgtaaaaaatgtcaccccgtgtaacctcagacctgggctgcacaccgccacagtgtctgccctgcctgctcctgcagagctcctggaactcctggtgattttgtctaygcatggggaacaaggactcctatggcagtgtcctgtgcattccccattttgggctccctttcagctctcagcagttctgggttgaggttattcaatgagagggcagaagaagtttagcagctgaatttctgtaaactccagctga

SEQ ID NO: 68603 - DNA, 600 bp, Chicken  19866894339861_4
ggggacagtggaaggaatgtttatttttctgcatggaaaactgtacattttctacagaagcagaaaaacgggggggaaatctcaaatgaatgctttgatgtgaagagatggaaatgttcccgcttccaaaaacaacttcagaacrgactgaaagaaatctaaagaatcttttgctgataagaaatatttctgtgtaaaaaatgtcaccccgtgtaacctcagacctgggctgcacaccgccacagtgtctgccctgcctgctcctgcagagctcctggaactcctggtgattttgtctaygcatggggaacaaggactcctatggcagtgtcctgtgcattccccattttgggctccctttcagctctcagcagttctgggttgaggttattcaatgagagggcagaagaagtttagcagctgaatttctgtaaactccagctgagtgtattgcataagcttctgctacaatagctagttttggttacagggggagtaaagagcagactggctcctggaaatggctagaagtgaaggtgcttcccctccttctctgtgatcatattaccccttggcaaagaacagagttaattcccattc

SEQ ID NO: 68604 - DNA, 600 bp, Chicken  19866894339861_5
gggaacaaggactcctatggcagtgtcctgtgcattccccattttgggctccctttcagctctcagcagttctgggttgaggttattcaatgagagggcagaagaagtttagcagctgaatttctgtaaactccagctgagtgtattgcataagcttctgctacaatagctagttttggttacagggggagtaaagagcagactggctcctggaaatggctagaagtgaaggtgcttcccctccttctctgtgatcatattaccccttggcaaagaacagagttaattcccattcccttytcctgatgggatttacacctttacatcctctccaaggaggcagccctcacccagaggctatgtgggtgaagcctaagagtgggtcttcttgcattcttctamtggatctgtttgtacaaaggacttaaaagacagggcaagagaggaaaccccagcacagtatgatgctccaccctctatagattccccataccttttaacatcttgacagccacggtgatggccttgtttggcttgtctttatcaatcccaattgcttccgccatcaccacttggccaaaacagccctcaccaagcggc

SEQ ID NO: 68605 - DNA, 547 bp, Chicken  19866894339861_6
agaagtttagcagctgaatttctgtaaactccagctgagtgtattgcataagcttctgctacaatagctagttttggttacagggggagtaaagagcagactggctcctggaaatggctagaagtgaaggtgcttcccctccttctctgtgatcatattaccccttggcaaagaacagagttaattcccattcccttytcctgatgggatttacacctttacatcctctccaaggaggcagccctcacccagaggctatgtgggtgaagcctaagagtgggtcttcttgcattcttctamtggatctgtttgtacaaaggacttaaaagacagggcaagagaggaaaccccagcacagtatgatgctccaccctctatagattccccataccttttaacatcttgacagccacggtgatggccttgtttggcttgtctttatcaatcccaattgcttccgccatcaccacttggccaaaacagccctcaccaagcggcttccccagggtcaggctggagggaggaacaagcaggtgtgttagcaggt

SEQ ID NO: 68606 - DNA, 600 bp, Chicken  19866894339863_1
ttcaacaaaatccttacatttaacaaaatccttaatgagcgtggaaaatgtacaataaagcacgtttgttagcacgtcccttcgtcctgtttgctctgtagagctgagcctccctccccactgcttcaccccacggctttggatttgtcccctgggggagcaggagagctccctgccagcccccagcactgggcgctctgcatcgctggcccattgctagtgctaaaattcactgcaagaagctctctgtttttaaggtaagtcaacccggttgttgttgagggttctgtggtatgaccrgagatatgaaaaatcccaggagagggcatttctagcgctgtatcagcctgctgtagcttcagccctgctgtttcagaggcctttgcctgcacaccatttctctaagaatgtcgacattcagcagccgccaccaaagccattcacattagcagcccgcctgtgaatcttaattaaacaggaaatgcctcacttgtgcattgaaattcagcatccagaatatctctgctccgctcctttgatgttccccatccgatccgggatgaacatccacatgttctcctgagacactcgcaggaaact

SEQ ID NO: 68607 - DNA, 600 bp, Chicken  19866894339863_2
ctgctgtagcttcagccctgctgtttcagaggcctttgcctgcacaccatttctctaagaatgtcgacattcagcagccgccaccaaagccattcacattagcagcccgcctgtgaatcttaattaaacaggaaatgcctcacttgtgcattgaaattcagcatccagaatatctctgctccgctcctttgatgttccccatccgatccgggatgaacatccacatgttctcctgagacactcgcaggaaactcgttctggtttatttacagtagggaagtgttgtgtcgtgtcttttawcccagatgcattggagccgctctgtgaactgttcacacagaggtcctcctcggggccccgcagcggcgatggggccgtgcacagccagctgccaccatagaaccgctgcatcactaaacagctctaagatcacccagcccaaccacccacacacccccggtagtgcccactgcctgcgtccatcagtgctgcacctcccctttccttaacgcccccacggatggtgactcccccgccccctgggcagcctgtgccgatgcatcaccactctttcagggaagcaattccaacgcgatgcac

SEQ ID NO: 68608 - DNA, 600 bp, Chicken  19866894339864_1
ttttaaaggaaattaataacaggaaattttataaatgactgtatatctaattaattcagcataatgagagaagagaccttctggagagctgaggtaatatacttcaccttttctcagtccccatcctaccccctctggttattttgaagatctttttgattttgctgatgagttactcaatgccatggatgcacagatcaccaaatcacattcacgagacttcagtaggacttaagcatatgcttcaggaagtatatacatttgtatatatcatatatttgtatatatcataagtatatryaagtgaacaatctcataactgtgagtaaaagttgcctgaattattattgtataacttatttttttgtgttacatattcygtatgacaactaaaaacacatttgaggatctagccttcacctagctatacatgtcacatgtatacaacaaagtacgaatttgacaagtattamagctaacatcttgagggagtaactgcatcagtagacaagggaagagccacggatgtcacctatctgaacttcagaaaggcctttgacacarttctccataacatccttctctccaaattggcaatat

SEQ ID NO: 68609 - DNA, 600 bp, Chicken  19866894339864_2
tttaaaggaaattaataacaggaaattttataaatgactgtatatctaattaattcagcataatgagagaagagaccttctggagagctgaggtaatatacttcaccttttctcagtccccatcctaccccctctggttattttgaagatctttttgattttgctgatgagttactcaatgccatggatgcacagatcaccaaatcacattcacgagacttcagtaggacttaagcatatgcttcaggaagtatatacatttgtatatatcatatatttgtatatatcataagtatatryaagtgaacaatctcataactgtgagtaaaagttgcctgaattattattgtataacttatttttttgtgttacatattcygtatgacaactaaaaacacatttgaggatctagccttcacctagctatacatgtcacatgtatacaacaaagtacgaatttgacaagtattamagctaacatcttgagggagtaactgcatcagtagacaagggaagagccacggatgtcacctatctgaacttcagaaaggcctttgacacarttctccataacatccttctctccaaattggcaatata

SEQ ID NO: 68610 - DNA, 600 bp, Chicken  19866894339864_3
ctggagagctgaggtaatatacttcaccttttctcagtccccatcctaccccctctggttattttgaagatctttttgattttgctgatgagttactcaatgccatggatgcacagatcaccaaatcacattcacgagacttcagtaggacttaagcatatgcttcaggaagtatatacatttgtatatatcatatatttgtatatatcataagtatatryaagtgaacaatctcataactgtgagtaaaagttgcctgaattattattgtataacttatttttttgtgttacatattcygtatgacaactaaaaacacatttgaggatctagccttcacctagctatacatgtcacatgtatacaacaaagtacgaatttgacaagtattamagctaacatcttgagggagtaactgcatcagtagacaagggaagagccacggatgtcacctatctgaacttcagaaaggcctttgacacarttctccataacatccttctctccaaattggcaatatatggatctaaaggctggatgattcgatggacgaggaagtggttgttaagccatacctgtggttgtcagtggctcaatgga

SEQ ID NO: 68611 - DNA, 600 bp, Chicken  19866894339864_4
tactcaatgccatggatgcacagatcaccaaatcacattcacgagacttcagtaggacttaagcatatgcttcaggaagtatatacatttgtatatatcatatatttgtatatatcataagtatatryaagtgaacaatctcataactgtgagtaaaagttgcctgaattattattgtataacttatttttttgtgttacatattcygtatgacaactaaaaacacatttgaggatctagccttcacctagctatacatgtcacatgtatacaacaaagtacgaatttgacaagtattamagctaacatcttgagggagtaactgcatcagtagacaagggaagagccacggatgtcacctatctgaacttcagaaaggcctttgacacarttctccataacatccttctctccaaattggcaatatatggatctaaaggctggatgattcgatggacgaggaagtggttgttaagccatacctgtggttgtcagtggctcaatggaaatcagtgactagtggtgtccctcaggggtcaatactgggactggtgctctttcacaccttcacgagtgacaatgactgtgtgattgagtgaa

SEQ ID NO: 68612 - DNA, 600 bp, Chicken  19866894339864_5
tatatatcatatatttgtatatatcataagtatatryaagtgaacaatctcataactgtgagtaaaagttgcctgaattattattgtataacttatttttttgtgttacatattcygtatgacaactaaaaacacatttgaggatctagccttcacctagctatacatgtcacatgtatacaacaaagtacgaatttgacaagtattamagctaacatcttgagggagtaactgcatcagtagacaagggaagagccacggatgtcacctatctgaacttcagaaaggcctttgacacarttctccataacatccttctctccaaattggcaatatatggatctaaaggctggatgattcgatggacgaggaagtggttgttaagccatacctgtggttgtcagtggctcaatggaaatcagtgactagtggtgtccctcaggggtcaatactgggactggtgctctttcacaccttcacgagtgacaatgactgtgtgattgagtgaaccctcagcaagtttgcagctgacaccaaggggagtggtgcagctgacatgcctaagataggcttgagcagtgggcctgggtgaactgtatg

SEQ ID NO: 68613 - DNA, 600 bp, Chicken  19866894339870_1
gggttccctttgggatagacattgtggtggtatgagaagtagcaaagaaggactcttcccaggtgcattgactctgttttcctcactactgatgactgtggtctgttcatcaaaactttagttacactaagtactgcatgtgcatctggatcactgtcaagtatattctagtccccgtagaagagatatgcaagaaagcaatgaggtgtgaatgatgcctgatgctcttggttattacagctctttagttgctagtctccatgcagtaatactgtgttttgtgatgcttccaggagatcyctgaattwgagtctgtaactccttgaagagtaaaacagaaaatcctgccccttttaataattcttaggctgttttgaggagcctcttttacttctagaataattgcagtgagtttcagctgagcgtaatatgacgtgactgactgtcttggtggtagatctggtagaaattattatccctgtctttgctgtgctcatccagcatctgctggcaggagacactgttaattgtactgacaaatgtttgacagccctctaagctgaaatggtgaaatgatataggctgcaaacagatacataa

SEQ ID NO: 68614 - DNA, 600 bp, Chicken  19866894339870_2
tttgggatagacattgtggtggtatgagaagtagcaaagaaggactcttcccaggtgcattgactctgttttcctcactactgatgactgtggtctgttcatcaaaactttagttacactaagtactgcatgtgcatctggatcactgtcaagtatattctagtccccgtagaagagatatgcaagaaagcaatgaggtgtgaatgatgcctgatgctcttggttattacagctctttagttgctagtctccatgcagtaatactgtgttttgtgatgcttccaggagatcyctgaattwgagtctgtaactccttgaagagtaaaacagaaaatcctgccccttttaataattcttaggctgttttgaggagcctcttttacttctagaataattgcagtgagtttcagctgagcgtaatatgacgtgactgactgtcttggtggtagatctggtagaaattattatccctgtctttgctgtgctcatccagcatctgctggcaggagacactgttaattgtactgacaaatgtttgacagccctctaagctgaaatggtgaaatgatataggctgcaaacagatacataatgcctttt

SEQ ID NO: 68615 - DNA, 600 bp, Chicken  19866894339870_3
ttccagtttagagaatagttagagatgtgcttgtgccttgaggaagaagcagcctctgtcccagggtggagcaggaatgagcaatggagggaagatctgaggcttaagatctattactgatgaaaagttatttacatgaccacagactaagtcctgtgcagaaagggcaccaatgtgtccccatatgtctcctttggaaggagaatcaggatcaatcatggagaaacatagcggcgctgctctgtattgttgtcagggttttctgcttgcaagcgaaatgcaatggtgcaatgaatttgraagcagcttttgcatgcaggtgtgataattgatggatatttgacaagtctgttgaagactgtggtttttaacgtgagtattaaatctactttgcttcatttacttttcatctacctaaactgtagttcctgctcatcctcagttgttttttcccctccatttaatacaagttgcttgctgcaggactacttaatccttcttcctctcaagtaaattgccatgtattagtgtaattatacactgagctttcattttgttgtctgcttcatcttagtagatcagcagttcttcataccatgt

SEQ ID NO: 68616 - DNA, 600 bp, Chicken  19866894339870_4
caggtgtgataattgatggatatttgacaagtctgttgaagactgtggtttttaacgtgagtattaaatctactttgcttcatttacttttcatctacctaaactgtagttcctgctcatcctcagttgttttttcccctccatttaatacaagttgcttgctgcaggactacttaatccttcttcctctcaagtaaattgccatgtattagtgtaattatacactgagctttcattttgttgtctgcttcatcttagtagatcagcagttcttcataccatgtaaatctctgcacttcrgcattgttttgcagaacctgctttgagctctgtcagatgtgacctgcatttttaaccttcacctgcatttttaccttgtatcttaggaaaaaaagaggggagttgagtaagtgacctgcagagcaacatatgtggtttgggttattttgacacgaaattctgggggatttttttttcagattgcattactacttgatctatctttcttttgctttgcacggtgcacatatgcacagtgtatatattgaacatgcacatatgcatgtatrtactgaatggagagactgatacagagatagg

SEQ ID NO: 68617 - DNA, 600 bp, Chicken  19866894339870_5
ttcttcataccatgtaaatctctgcacttcrgcattgttttgcagaacctgctttgagctctgtcagatgtgacctgcatttttaaccttcacctgcatttttaccttgtatcttaggaaaaaaagaggggagttgagtaagtgacctgcagagcaacatatgtggtttgggttattttgacacgaaattctgggggatttttttttcagattgcattactacttgatctatctttcttttgctttgcacggtgcacatatgcacagtgtatatattgaacatgcacatatgcatgtatrtactgaatggagagactgatacagagataggaagcaccttcctgccctgtttgtatttagcattgttactgggaagtggtgctttgaatttactgaagtgtagatggcattattgacacgtattcattatgaattatagttttttaatagaaaaaaaaagctgatatagcagtagagaataacctaccctgtattctcacaaaagatgtgagatcacgcaccttgagagaagcaaataggagatgggcttggcagaagtaggtgcacccatgccagtgttcatcagggaacagttcttga

SEQ ID NO: 68618 - DNA, 600 bp, Chicken  19866894339884_1
aatgaatcattgatttaacattaagggagcttgtttttttctgtgtattctcttgccaacttatgttacagtattcgataaaaaataaaatcaaacatttggtctttttttagcacgggcctcaaacttcataaatatcaatatgcatacagccaagcaaatcttgctgattgggaactctggctgacgatgtatctagaaatggaggttttcagcagaaagtggtgaatatagcagggacatatctggcctacactggaaggggtacaatagctttttgtcagggtgtgtgtgttaaaytacttatgtacttctagcccaaartgcacagatgtactgctgctgttgactgatgagatactggtgtccacacatgaactgcattcactgggaaagaaaaccagggaattctacaartatgtacatagaagatgaaggttatgaactgaagtgctgtgtagctggctgtagctttgatctttatgacccgtgaacgtttgtgcgttaggcagtatgagtggaaaaggctgcagcaggtgagggtagaagaggatcagagtttcccttgcccacatctggtcacggcttcccacctcatgc

SEQ ID NO: 68619 - DNA, 600 bp, Chicken  19866894339884_2
gggagcttgtttttttctgtgtattctcttgccaacttatgttacagtattcgataaaaaataaaatcaaacatttggtctttttttagcacgggcctcaaacttcataaatatcaatatgcatacagccaagcaaatcttgctgattgggaactctggctgacgatgtatctagaaatggaggttttcagcagaaagtggtgaatatagcagggacatatctggcctacactggaaggggtacaatagctttttgtcagggtgtgtgtgttaaaytacttatgtacttctagcccaaartgcacagatgtactgctgctgttgactgatgagatactggtgtccacacatgaactgcattcactgggaaagaaaaccagggaattctacaartatgtacatagaagatgaaggttatgaactgaagtgctgtgtagctggctgtagctttgatctttatgacccgtgaacgtttgtgcgttaggcagtatgagtggaaaaggctgcagcaggtgagggtagaagaggatcagagtttcccttgcccacatctggtcacggcttcccacctcatgctcagcatctgccatttccagttcc

SEQ ID NO: 68620 - DNA, 542 bp, Chicken  19866894339884_3
ggcctcaaacttcataaatatcaatatgcatacagccaagcaaatcttgctgattgggaactctggctgacgatgtatctagaaatggaggttttcagcagaaagtggtgaatatagcagggacatatctggcctacactggaaggggtacaatagctttttgtcagggtgtgtgtgttaaaytacttatgtacttctagcccaaartgcacagatgtactgctgctgttgactgatgagatactggtgtccacacatgaactgcattcactgggaaagaaaaccagggaattctacaartatgtacatagaagatgaaggttatgaactgaagtgctgtgtagctggctgtagctttgatctttatgacccgtgaacgtttgtgcgttaggcagtatgagtggaaaaggctgcagcaggtgagggtagaagaggatcagagtttcccttgcccacatctggtcacggcttcccacctcatgctcagcatctgccatttccagttcctgtgtgactgctccctggtgaggatatggcagaaa

SEQ ID NO: 68621 - DNA, 600 bp, Chicken  19866894339887_1
ctccttcagcagtctcaggcagcactcctccgtaatgcagcaattttaccgaattgctgtgcccatggtgtataattttgatctaactgctgctgatggcagtgtagggatgagcgctggcacacatatcttccttttgaaataattcataataggctgggctgggttctttgcacccttacgatgatggatgggtacaaagatagagaatcatggagtagtttgggttggaagggaccttaaagcccacccagccccaacccctgccatggggacacctcccatagaccaggctgcccraagtcccatccaacctgtccttgggcactgcgagggatgggcactggtggatcctwatgttgctgyacaccagagctggctgctctatgcagctcattacccgctatgagatgtgccaggaggactaagaccatcatattccttggtgcagatcacctgggacctgtcccgtgtctgttgaagacaccatatgtgcagtgggtttctctacgtgttaatgggattattcctgtggtcatacccagtgttctggagacaccatgaaaatggtctgtacttgcagctagggasctcagaaac

SEQ ID NO: 68622 - DNA, 600 bp, Chicken  19866894339887_2
ctgtgcccatggtgtataattttgatctaactgctgctgatggcagtgtagggatgagcgctggcacacatatcttccttttgaaataattcataataggctgggctgggttctttgcacccttacgatgatggatgggtacaaagatagagaatcatggagtagtttgggttggaagggaccttaaagcccacccagccccaacccctgccatggggacacctcccatagaccaggctgcccraagtcccatccaacctgtccttgggcactgcgagggatgggcactggtggatcctwatgttgctgyacaccagagctggctgctctatgcagctcattacccgctatgagatgtgccaggaggactaagaccatcatattccttggtgcagatcacctgggacctgtcccgtgtctgttgaagacaccatatgtgcagtgggtttctctacgtgttaatgggattattcctgtggtcatacccagtgttctggagacaccatgaaaatggtctgtacttgcagctagggasctcagaaacaacatcagcattaagaagcttcttcccttccctctggcttagctggagaagcattt

SEQ ID NO: 68623 - DNA, 600 bp, Chicken  19866894339887_3
ggtgtataattttgatctaactgctgctgatggcagtgtagggatgagcgctggcacacatatcttccttttgaaataattcataataggctgggctgggttctttgcacccttacgatgatggatgggtacaaagatagagaatcatggagtagtttgggttggaagggaccttaaagcccacccagccccaacccctgccatggggacacctcccatagaccaggctgcccraagtcccatccaacctgtccttgggcactgcgagggatgggcactggtggatcctwatgttgctgyacaccagagctggctgctctatgcagctcattacccgctatgagatgtgccaggaggactaagaccatcatattccttggtgcagatcacctgggacctgtcccgtgtctgttgaagacaccatatgtgcagtgggtttctctacgtgttaatgggattattcctgtggtcatacccagtgttctggagacaccatgaaaatggtctgtacttgcagctagggasctcagaaacaacatcagcattaagaagcttcttcccttccctctggcttagctggagaagcatttctcctgcttt

SEQ ID NO: 68624 - DNA, 600 bp, Chicken  19866894339887_4
ggctgcccraagtcccatccaacctgtccttgggcactgcgagggatgggcactggtggatcctwatgttgctgyacaccagagctggctgctctatgcagctcattacccgctatgagatgtgccaggaggactaagaccatcatattccttggtgcagatcacctgggacctgtcccgtgtctgttgaagacaccatatgtgcagtgggtttctctacgtgttaatgggattattcctgtggtcatacccagtgttctggagacaccatgaaaatggtctgtacttgcagctagggasctcagaaacaacatcagcattaagaagcttcttcccttccctctggcttagctggagaagcatttctcctgcttttcaggctggagagggaagaggattagaggtggccacacaagtttatctccgacactccatgtttcataaaccttaatctcaaacccatgttttttcacatattcctggggcaaatgctgtggggtaaggagmaaaatggaattracatcctctaaaagcaccacaggwccctaggtgtggaaagcagggcaccctttgccccttgrcacttgatggattctcccg

SEQ ID NO: 68625 - DNA, 600 bp, Chicken  19866894339887_5
tgggtttctctacgtgttaatgggattattcctgtggtcatacccagtgttctggagacaccatgaaaatggtctgtacttgcagctagggasctcagaaacaacatcagcattaagaagcttcttcccttccctctggcttagctggagaagcatttctcctgcttttcaggctggagagggaagaggattagaggtggccacacaagtttatctccgacactccatgtttcataaaccttaatctcaaacccatgttttttcacatattcctggggcaaatgctgtggggtaaggagmaaaatggaattracatcctctaaaagcaccacaggwccctaggtgtggaaagcagggcaccctttgccccttgrcacttgatggattctcccggcgatgccagaggtgttacggtgacggttgggtgtggtgatcatgagagtcttttccaacctatgtgatgcaatctcatcccgggccaccccagcccaatgccacctcctccacggagccctgcgttcctgcatgcctctgtgttgctttaccagcatcctccagggcttcttccatcccaaactctgccctcatcttgtgttcaag

SEQ ID NO: 68626 - DNA, 600 bp, Chicken  19866894339887_6
cgtgttaatgggattattcctgtggtcatacccagtgttctggagacaccatgaaaatggtctgtacttgcagctagggasctcagaaacaacatcagcattaagaagcttcttcccttccctctggcttagctggagaagcatttctcctgcttttcaggctggagagggaagaggattagaggtggccacacaagtttatctccgacactccatgtttcataaaccttaatctcaaacccatgttttttcacatattcctggggcaaatgctgtggggtaaggagmaaaatggaattracatcctctaaaagcaccacaggwccctaggtgtggaaagcagggcaccctttgccccttgrcacttgatggattctcccggcgatgccagaggtgttacggtgacggttgggtgtggtgatcatgagagtcttttccaacctatgtgatgcaatctcatcccgggccaccccagcccaatgccacctcctccacggagccctgcgttcctgcatgcctctgtgttgctttaccagcatcctccagggcttcttccatcccaaactctgccctcatcttgtgttcaagaaacatggaaaa

SEQ ID NO: 68627 - DNA, 600 bp, Chicken  19866894339887_7
gtcatacccagtgttctggagacaccatgaaaatggtctgtacttgcagctagggasctcagaaacaacatcagcattaagaagcttcttcccttccctctggcttagctggagaagcatttctcctgcttttcaggctggagagggaagaggattagaggtggccacacaagtttatctccgacactccatgtttcataaaccttaatctcaaacccatgttttttcacatattcctggggcaaatgctgtggggtaaggagmaaaatggaattracatcctctaaaagcaccacaggwccctaggtgtggaaagcagggcaccctttgccccttgrcacttgatggattctcccggcgatgccagaggtgttacggtgacggttgggtgtggtgatcatgagagtcttttccaacctatgtgatgcaatctcatcccgggccaccccagcccaatgccacctcctccacggagccctgcgttcctgcatgcctctgtgttgctttaccagcatcctccagggcttcttccatcccaaactctgccctcatcttgtgttcaagaaacatggaaaagtgacacttagatacatgttttag

SEQ ID NO: 68628 - DNA, 600 bp, Chicken  19866894339887_8
tgtacttgcagctagggasctcagaaacaacatcagcattaagaagcttcttcccttccctctggcttagctggagaagcatttctcctgcttttcaggctggagagggaagaggattagaggtggccacacaagtttatctccgacactccatgtttcataaaccttaatctcaaacccatgttttttcacatattcctggggcaaatgctgtggggtaaggagmaaaatggaattracatcctctaaaagcaccacaggwccctaggtgtggaaagcagggcaccctttgccccttgrcacttgatggattctcccggcgatgccagaggtgttacggtgacggttgggtgtggtgatcatgagagtcttttccaacctatgtgatgcaatctcatcccgggccaccccagcccaatgccacctcctccacggagccctgcgttcctgcatgcctctgtgttgctttaccagcatcctccagggcttcttccatcccaaactctgccctcatcttgtgttcaagaaacatggaaaagtgacacttagatacatgttttagtgggcgtagtagggttggattggggttggacttgggga

SEQ ID NO: 68629 - DNA, 600 bp, Chicken  19866894339888_1
ctgtgaaaaccaaaataggattaatggtattttattggattttttttttaaaggtgcgcttttttataggtgttgatgattgctaagtgcataatttataagttaaaaaggagtatttggaatattatatttcttattaactcatcactgagttagcttttcactatttcaggggataatggtgagaaaaatcagattactgtaggttttcaatatactaaaagtgcagtattagcaaagtgctttattagcagctacagcaaccactgcaagaagttgcttgcactaccactaaagacygagaactcagattttgrcaatatctattaaagttgtgtaactgcactccaagcattacaatgctgcctcggtttatggaattgccctttttatacacccagcaagggtcaatctctataacataaagttttaaagtgccacagcagctgattaatttgggtgtcatgtttggagaagttctacattgttcctgacttccttccagttcctcattccttcagaccctgtgatagaaggggaggstctgtaaattgccactcatgctgggagtgcacactgcgtcttctgcacatgagcaga

SEQ ID NO: 68630 - DNA, 600 bp, Chicken  19866894339888_2
ggattaatggtattttattggattttttttttaaaggtgcgcttttttataggtgttgatgattgctaagtgcataatttataagttaaaaaggagtatttggaatattatatttcttattaactcatcactgagttagcttttcactatttcaggggataatggtgagaaaaatcagattactgtaggttttcaatatactaaaagtgcagtattagcaaagtgctttattagcagctacagcaaccactgcaagaagttgcttgcactaccactaaagacygagaactcagattttgrcaatatctattaaagttgtgtaactgcactccaagcattacaatgctgcctcggtttatggaattgccctttttatacacccagcaagggtcaatctctataacataaagttttaaagtgccacagcagctgattaatttgggtgtcatgtttggagaagttctacattgttcctgacttccttccagttcctcattccttcagaccctgtgatagaaggggaggstctgtaaattgccactcatgctgggagtgcacactgcgtcttctgcacatgagcagagcagccaggcaaaattt

SEQ ID NO: 68631 - DNA, 600 bp, Chicken  19866894339888_3
tttattagcagctacagcaaccactgcaagaagttgcttgcactaccactaaagacygagaactcagattttgrcaatatctattaaagttgtgtaactgcactccaagcattacaatgctgcctcggtttatggaattgccctttttatacacccagcaagggtcaatctctataacataaagttttaaagtgccacagcagctgattaatttgggtgtcatgtttggagaagttctacattgttcctgacttccttccagttcctcattccttcagaccctgtgatagaaggggaggstctgtaaattgccactcatgctgggagtgcacactgcgtcttctgcacatgagcagagcagccaggcaaaatttggtgcaatgataatttwgtgggttgtcaacagatacatcacttcattaatagcacactgactgcctaatctcayctccaatattgtctttttcaaatccacttgtctccaggcttgtcatgggtgataggtggataaatatggcaatcactgtttgcactgttcttcataactctctgtgataagcccaaacaatagtccaagaagtcagacagcttctaagtcag

SEQ ID NO: 68632 - DNA, 600 bp, Chicken  19866894339888_4
gtgtaactgcactccaagcattacaatgctgcctcggtttatggaattgccctttttatacacccagcaagggtcaatctctataacataaagttttaaagtgccacagcagctgattaatttgggtgtcatgtttggagaagttctacattgttcctgacttccttccagttcctcattccttcagaccctgtgatagaaggggaggstctgtaaattgccactcatgctgggagtgcacactgcgtcttctgcacatgagcagagcagccaggcaaaatttggtgcaatgataatttwgtgggttgtcaacagatacatcacttcattaatagcacactgactgcctaatctcayctccaatattgtctttttcaaatccacttgtctccaggcttgtcatgggtgataggtggataaatatggcaatcactgtttgcactgttcttcataactctctgtgataagcccaaacaatagtccaagaagtcagacagcttctaagtcagacaactacagctgaaatgttgtggtattaattactattgykgtgcatttccttcccaaaatccttaaaaagaccacagaatgagatcactc

SEQ ID NO: 68633 - DNA, 600 bp, Chicken  19866894339888_5
atacacccagcaagggtcaatctctataacataaagttttaaagtgccacagcagctgattaatttgggtgtcatgtttggagaagttctacattgttcctgacttccttccagttcctcattccttcagaccctgtgatagaaggggaggstctgtaaattgccactcatgctgggagtgcacactgcgtcttctgcacatgagcagagcagccaggcaaaatttggtgcaatgataatttwgtgggttgtcaacagatacatcacttcattaatagcacactgactgcctaatctcayctccaatattgtctttttcaaatccacttgtctccaggcttgtcatgggtgataggtggataaatatggcaatcactgtttgcactgttcttcataactctctgtgataagcccaaacaatagtccaagaagtcagacagcttctaagtcagacaactacagctgaaatgttgtggtattaattactattgykgtgcatttccttcccaaaatccttaaaaagaccacagaatgagatcactctgtggtgacttagctttggattcactctttgatttcaaaatgcatttctgttaatag

SEQ ID NO: 68634 - DNA, 600 bp, Chicken  19866894339888_6
ttctgcacatgagcagagcagccaggcaaaatttggtgcaatgataatttwgtgggttgtcaacagatacatcacttcattaatagcacactgactgcctaatctcayctccaatattgtctttttcaaatccacttgtctccaggcttgtcatgggtgataggtggataaatatggcaatcactgtttgcactgttcttcataactctctgtgataagcccaaacaatagtccaagaagtcagacagcttctaagtcagacaactacagctgaaatgttgtggtattaattactattgykgtgcatttccttcccaaaatccttaaaaagaccacagaatgagatcactctgtggtgacttagctttggattcactctttgatttcaaaatgcatttctgttaatagtgtgagaaactggatttcagtatttccttcacaagacaytgaatgggtgtattttgagtcataaggcctggcatgctgacagcaggaagacaagctgatttgccttactgatggaatatgcaacttatatgtttttcctgttaacgtagactttcttcctctcagtatttttcacagagatgatgtcataaa

SEQ ID NO: 68635 - DNA, 600 bp, Chicken  19866894339888_7
tctgcacatgagcagagcagccaggcaaaatttggtgcaatgataatttwgtgggttgtcaacagatacatcacttcattaatagcacactgactgcctaatctcayctccaatattgtctttttcaaatccacttgtctccaggcttgtcatgggtgataggtggataaatatggcaatcactgtttgcactgttcttcataactctctgtgataagcccaaacaatagtccaagaagtcagacagcttctaagtcagacaactacagctgaaatgttgtggtattaattactattgykgtgcatttccttcccaaaatccttaaaaagaccacagaatgagatcactctgtggtgacttagctttggattcactctttgatttcaaaatgcatttctgttaatagtgtgagaaactggatttcagtatttccttcacaagacaytgaatgggtgtattttgagtcataaggcctggcatgctgacagcaggaagacaagctgatttgccttactgatggaatatgcaacttatatgtttttcctgttaacgtagactttcttcctctcagtatttttcacagagatgatgtcataaag

SEQ ID NO: 68636 - DNA, 600 bp, Chicken  19866894339888_8
ttgtcatgggtgataggtggataaatatggcaatcactgtttgcactgttcttcataactctctgtgataagcccaaacaatagtccaagaagtcagacagcttctaagtcagacaactacagctgaaatgttgtggtattaattactattgykgtgcatttccttcccaaaatccttaaaaagaccacagaatgagatcactctgtggtgacttagctttggattcactctttgatttcaaaatgcatttctgttaatagtgtgagaaactggatttcagtatttccttcacaagacaytgaatgggtgtattttgagtcataaggcctggcatgctgacagcaggaagacaagctgatttgccttactgatggaatatgcaacttatatgtttttcctgttaacgtagactttcttcctctcagtatttttcacagagatgatgtcataaagttcatgagcatgtgtgtttagatgtgcaagcatggtagatttgcttgagctgaactgttaaatgaccatctgtttgaaaagttctctgtgtattaaatagccatgcagccaggaatccagaagtaatgccatgtggctgagatgtt

SEQ ID NO: 68637 - DNA, 600 bp, Chicken  19866894339889_1
ggtctaacaggggcagtcttactgatagctataacttatttctagaaatctagactgtaagctggggactatcagacttttacacagtgaaaaaagagaagcttcaacctctcagtcttagaatcccagttaatctgggtgcccaggagcagaacacttgctcatctgtgactgctgctaactttcatccttttttctacttctcactcagaaggaaattacccagtaggaaaatttgcattgcaaaaatccttggttttgtcacctgaaactttaagacagatttctgttaatgactaytggaaataaaataagcctcaagacttaaccttcagagatgctcattgaaaggataaaactgacaatttgcttttttttttttttttttaacatatttgtaatcttcttttcagctacaaatatacccacctaaaaattgccacagaatctattatctctgttgggagcagtaatcctcaatgtggctctgttttttatgaaatctgaatagattagctcagaggatttcctttatcagtaaaatatttatttgaaaaacaaatagacaaatttgttttgtctggattaacctgtttcaga

SEQ ID NO: 68638 - DNA, 600 bp, Chicken  19866894339890_1
tcagcctggttcctgagagagagcaaacagtgccagcaaagtcctttgtgagtgatacagctgcatcagcacagggatgtctgccagcacaactattttttggcaagagaagggcaaaaagcccctgctccacctgatgtagctaggctggaaaacagaagcacaggacacctcttctcgaatgggatcgtcctcctatgccccccttctcgaaccccactttctcccagtactgctcacacacagctgcagcgctgctcaggatggggagggatgggtacagcccaagtgatgtgtggsacccaacacaaygggctgcaggagttgtgggctgtgtgccrtgggtcagctgagcaccwcactgagaccgtaactcaacagcattgtcactgctcttgttgcaagccacagagcttttgtttaaaaggaaaacggcttgaatgattttgtgtgggggaaaaaaaaaaaggtagtgttttctctgtgatagctgcagtactgctgcttcatctgtggagcgctgctggaagcagcaagcggccaaacacattgctgcagcctgttcatcgtaatgagcaatgaacttcatggatgagttgg

SEQ ID NO: 68639 - DNA, 600 bp, Chicken  19866894339890_2
ctgagagagagcaaacagtgccagcaaagtcctttgtgagtgatacagctgcatcagcacagggatgtctgccagcacaactattttttggcaagagaagggcaaaaagcccctgctccacctgatgtagctaggctggaaaacagaagcacaggacacctcttctcgaatgggatcgtcctcctatgccccccttctcgaaccccactttctcccagtactgctcacacacagctgcagcgctgctcaggatggggagggatgggtacagcccaagtgatgtgtggsacccaacacaaygggctgcaggagttgtgggctgtgtgccrtgggtcagctgagcaccwcactgagaccgtaactcaacagcattgtcactgctcttgttgcaagccacagagcttttgtttaaaaggaaaacggcttgaatgattttgtgtgggggaaaaaaaaaaaggtagtgttttctctgtgatagctgcagtactgctgcttcatctgtggagcgctgctggaagcagcaagcggccaaacacattgctgcagcctgttcatcgtaatgagcaatgaacttcatggatgagttgggaccatttagtc

SEQ ID NO: 68640 - DNA, 600 bp, Chicken  19866894339890_3
tcctttgtgagtgatacagctgcatcagcacagggatgtctgccagcacaactattttttggcaagagaagggcaaaaagcccctgctccacctgatgtagctaggctggaaaacagaagcacaggacacctcttctcgaatgggatcgtcctcctatgccccccttctcgaaccccactttctcccagtactgctcacacacagctgcagcgctgctcaggatggggagggatgggtacagcccaagtgatgtgtggsacccaacacaaygggctgcaggagttgtgggctgtgtgccrtgggtcagctgagcaccwcactgagaccgtaactcaacagcattgtcactgctcttgttgcaagccacagagcttttgtttaaaaggaaaacggcttgaatgattttgtgtgggggaaaaaaaaaaaggtagtgttttctctgtgatagctgcagtactgctgcttcatctgtggagcgctgctggaagcagcaagcggccaaacacattgctgcagcctgttcatcgtaatgagcaatgaacttcatggatgagttgggaccatttagtcaatagcattattaagcagagctcacttgc

SEQ ID NO: 68641 - DNA, 600 bp, Chicken  19866894339890_4
gctgcatcagcacagggatgtctgccagcacaactattttttggcaagagaagggcaaaaagcccctgctccacctgatgtagctaggctggaaaacagaagcacaggacacctcttctcgaatgggatcgtcctcctatgccccccttctcgaaccccactttctcccagtactgctcacacacagctgcagcgctgctcaggatggggagggatgggtacagcccaagtgatgtgtggsacccaacacaaygggctgcaggagttgtgggctgtgtgccrtgggtcagctgagcaccwcactgagaccgtaactcaacagcattgtcactgctcttgttgcaagccacagagcttttgtttaaaaggaaaacggcttgaatgattttgtgtgggggaaaaaaaaaaaggtagtgttttctctgtgatagctgcagtactgctgcttcatctgtggagcgctgctggaagcagcaagcggccaaacacattgctgcagcctgttcatcgtaatgagcaatgaacttcatggatgagttgggaccatttagtcaatagcattattaagcagagctcacttgccctctcctttcccacgtg

SEQ ID NO: 68642 - DNA, 600 bp, Chicken  19866894339895_1
cagccatccttgttcttcagcagcgggttggctccgtgctccacgagctctttgatcacctccaggttctgcctggtgcaagccatcattaggggagtcctgaaagaaaagagatgattaaaagcagtgtttcctgtcctggtcagtcctacccctgtcatccagagggtcagctgtggttgtaggtagcaaaccatggacaacaacacttctcctagtgtgagtgcaccagcaaatgccactctgaaaaacctctgttgccaaggaattgtttcagagggaagtttttaagagctttgkcctgtttcacgtgtctgggaacaacctttggtatggaggaacacttctacaagctccccagcagcgcagcattttctccatcccatagtttcagggagcagattgtgtgggattcctggcaagcaaggtcagcaggtacaacctgtacacagacaacagcccacctcgccctgcttccaactccacatccaccagtgatgatgttttcacaccttggaacccatacgttgcagattaacaacaccaactcctgcctggaaaggttcactctcgaatttctcctttttgaatgggagaaat

SEQ ID NO: 68643 - DNA, 599 bp, Chicken  19866894339897_1
  misc_feature (1)..(1): n is any nucleotide
ngccggcggtccttcctggcgtttcgcaagctgccccgagagggcgggaggccggagtacgggcttatcgacggcagccgtgttagccgagcgctgttatcaggatcagcccctagaagaagtgcttgtggaatgctgggctgctaggaagcacgcatggtttgtgtgcttactcctgtgtgccatgattcactaagccccccaggatgacttatgtgcatgggacacaggtactatcagatggcctcttgatttcagattaaattttctggttcagaagtaagaagaaacgggtgtaartgccagattcacaggcttgcaccttgttaagtgtctccagctatttttattggggaatgtattggatgtccacagcgtacttcagagctgcttcctgccgcttgtgttaggcttttgcctgtacttccaatacaacctatggctttgagtggaacatgagtatatcttcatgctagttacctcatgagagcagtaggcagatcagccaggtgagcagggtgtctagaccgatgtcctgattcagtcactggcttgcatgatctgctaaagggaaagatctagaactttctaaatggtcg

SEQ ID NO: 68644 - DNA, 599 bp, Chicken  19866894339907_1
  misc_feature (1)..(102): n is any nucleotide
nnnnnnnnnnnnnnnnnnnnnnnnnnnnnnnnnnnnnnnnnnnnnnnnnnnnnnnnnnnnnnnnnnnnnnnnnnnnnnnnnnnnnnnnnnnnnnnnnnnnnnatgtgtccttggctgtgaatttcataccagtacactaaattgaggtatgttaagagcagcttcacaccatttagtcagaatcttagaatggttgaggtaggatcatctagtcaaacagccctgcaggatcacttagaacaggatggagactcaacaaagtttctgggcaacctgctcttgttcgcagcaactcagacrgtaatatttgyttcctgatgttcagagagaaccttctgtgttccagtttgtgtcaactaccacttgtcctggcactggacatctctgaaaagagccttactgtgttgtctttgcacctttccatcagatacttacatacattgatgagctcttctctgacccttctcttctccagatacaatctcttcataatccttatggctctttgttgatctctttctagtagctttktgtctcttatactgtgctgcatagatggaacacagaatcacagactggttgaagtggaaagagacttc

SEQ ID NO: 68645 - DNA, 599 bp, Chicken  19866894339907_2
  misc_feature (1)..(91): n is any nucleotide
nnnnnnnnnnnnnnnnnnnnnnnnnnnnnnnnnnnnnnnnnnnnnnnnnnnnnnnnnnnnnnnnnnnnnnnnnnnnnnnnnnnnnnnnnnnatgtgtccttggctgtgaatttcataccagtacactaaattgaggtatgttaagagcagcttcacaccatttagtcagaatcttagaatggttgaggtaggatcatctagtcaaacagccctgcaggatcacttagaacaggatggagactcaacaaagtttctgggcaacctgctcttgttcgcagcaactcagacrgtaatatttgyttcctgatgttcagagagaaccttctgtgttccagtttgtgtcaactaccacttgtcctggcactggacatctctgaaaagagccttactgtgttgtctttgcacctttccatcagatacttacatacattgatgagctcttctctgacccttctcttctccagatacaatctcttcataatccttatggctctttgttgatctctttctagtagctttktgtctcttatactgtgctgcatagatggaacacagaatcacagactggttgaagtggaaagagacttctgtgtctgttt

SEQ ID NO: 68646 - DNA, 600 bp, Chicken  19866894339907_3
cacttagaacaggatggagactcaacaaagtttctgggcaacctgctcttgttcgcagcaactcagacrgtaatatttgyttcctgatgttcagagagaaccttctgtgttccagtttgtgtcaactaccacttgtcctggcactggacatctctgaaaagagccttactgtgttgtctttgcacctttccatcagatacttacatacattgatgagctcttctctgacccttctcttctccagatacaatctcttcataatccttatggctctttgttgatctctttctagtagctttktgtctcttatactgtgctgcatagatggaacacagaatcacagactggttgaagtggaaagagacttctgtgtctgtttggtcccatctctgctcaaacagggctactcagagccgggtgcccagaaccatatccagttgacttctgatatctgcaaggatgaagattctttaacatctctggacagcttgtacctgtgatctatcatccacacggtatagaagtgtttcttgatgctaaaatggaatctcttgtgtgttctgatttatgcccattgcttcttgtcctggcactggacat

SEQ ID NO: 68647 - DNA, 599 bp, Chicken  19866894339918_1
  misc_feature (1)..(17): n is any nucleotide
nnnnnnnnnnnnnnnnntccggtggacagaacagcaagaaaaatgaggcttccagacagacaatgcgaatcgtagtgttgtaacaatatgctcattctctgtgttctcttttgtcacctagttagctctttctgaagacaaaaaaatgggagtgaggaatgccttctaacagcctacatacttccgtaatttggtttcccaggtttcctaacataaaggatttacaaaatctcttcctgaaatagctggaactgaacttatttctaggctctgtgcccctccctggaaagaccgcagccycrtgaacttggctctgaattgcccggtgaaatgcctgcaaactgcagccctggttcatcggtgctgcagggtattgaagagctctttcatcaaggagagatgacagctttcttttcaaatcaactcacttaaggggaaaaaaataggagaggaacgagaaggaaaagctttcatctcacacagttcaaagctcatttttcatggtattggatatggacaatacttttaatccatttcttagtgagcctgagttcaacaaacacggactccctccccactgtctctaatgcatttccagc

SEQ ID NO: 68648 - DNA, 599 bp, Chicken  19866894339918_2
  misc_feature (1)..(15): n is any nucleotide
nnnnnnnnnnnnnnntccggtggacagaacagcaagaaaaatgaggcttccagacagacaatgcgaatcgtagtgttgtaacaatatgctcattctctgtgttctcttttgtcacctagttagctctttctgaagacaaaaaaatgggagtgaggaatgccttctaacagcctacatacttccgtaatttggtttcccaggtttcctaacataaaggatttacaaaatctcttcctgaaatagctggaactgaacttatttctaggctctgtgcccctccctggaaagaccgcagccycrtgaacttggctctgaattgcccggtgaaatgcctgcaaactgcagccctggttcatcggtgctgcagggtattgaagagctctttcatcaaggagagatgacagctttcttttcaaatcaactcacttaaggggaaaaaaataggagaggaacgagaaggaaaagctttcatctcacacagttcaaagctcatttttcatggtattggatatggacaatacttttaatccatttcttagtgagcctgagttcaacaaacacggactccctccccactgtctctaatgcatttccagcct

SEQ ID NO: 68649 - DNA, 600 bp, Chicken  19866894339919_1
ggagatcaaaattatgagctaactttatcatctatcaattgttgcaggctaaaaatattatcctttgtccaaataaaaaataatctctataaaaaggctgcatttcagaaatcaaagtatttaaaatctcaattgaatcacatccagagatttgcaactcaataagtgcaccatctttaacttacaacacccaatgaaatctgcttcaaacacattgcaaacttcatttatcagaaaggctcaacttcacagtaacttacagtactgtaaattacttcattcaaggcttttggcagtgaytactggttaaagataccaaactaaggtacatggaggggactgatttccaaatgaggagtgttatgcatttactgaaagcmatttcagagtcttaagtgaaggtcttaaagaacaagagacgaaaactagtcttataattttaccgagtccctttaaagatgctgaagttctaaragttctcatcagaggaactgagttgcttatgggaagggggcagaaattgccacagaaactgtagaaactctgctctcctttataggtccacaaagctccatctgtatgaactaataacacacattc

SEQ ID NO: 68650 - DNA, 600 bp, Chicken  19866894339919_2
taatctctataaaaaggctgcatttcagaaatcaaagtatttaaaatctcaattgaatcacatccagagatttgcaactcaataagtgcaccatctttaacttacaacacccaatgaaatctgcttcaaacacattgcaaacttcatttatcagaaaggctcaacttcacagtaacttacagtactgtaaattacttcattcaaggcttttggcagtgaytactggttaaagataccaaactaaggtacatggaggggactgatttccaaatgaggagtgttatgcatttactgaaagcmatttcagagtcttaagtgaaggtcttaaagaacaagagacgaaaactagtcttataattttaccgagtccctttaaagatgctgaagttctaaragttctcatcagaggaactgagttgcttatgggaagggggcagaaattgccacagaaactgtagaaactctgctctcctttataggtccacaaagctccatctgtatgaactaataacacacattcacacctaattctgcccatttgtctgtggagggaatgcagcattcaaagcagctttttaatgggtgcagcaacatctgaaa

SEQ ID NO: 68651 - DNA, 600 bp, Chicken  19866894339919_3
ctttaacttacaacacccaatgaaatctgcttcaaacacattgcaaacttcatttatcagaaaggctcaacttcacagtaacttacagtactgtaaattacttcattcaaggcttttggcagtgaytactggttaaagataccaaactaaggtacatggaggggactgatttccaaatgaggagtgttatgcatttactgaaagcmatttcagagtcttaagtgaaggtcttaaagaacaagagacgaaaactagtcttataattttaccgagtccctttaaagatgctgaagttctaaragttctcatcagaggaactgagttgcttatgggaagggggcagaaattgccacagaaactgtagaaactctgctctcctttataggtccacaaagctccatctgtatgaactaataacacacattcacacctaattctgcccatttgtctgtggagggaatgcagcattcaaagcagctttttaatgggtgcagcaacatctgaaagcccttccttgggtcatttcctgactgaaaatgtttcacaactgaccagcagttatgcactgaagtcctgagaaggatgttctaaagaactgga

SEQ ID NO: 68652 - DNA, 600 bp, Chicken  19866894339921_1
ttttacaagttggattcaagctgttaggaaatgcagcttatctgaataagactaataatgctaagctaattagacccacaggcattagccggcagataaattcaggcaaaaagagggacagtgtcactttaaatactgccttgggatcggaggaaaagctaatgaggagtgtcagttggggctgttttattaggtggctctccagaggatacagctcgaggtttctgtagcggggcttctgtgcttgattcaataaatcaatttatattaaatgggggtgcagcgcggccgtctgcttcwtaaagctctctgtggcatttctcaatctgcttacgcactgcccagccaggctacctgagcgcgctgtcgaaggacgtggagcggagcagtaacgaataagacagcagccacaccggcaatatttgttcaattgggcctgcgcattaccaagcaaaacatgtacattggctctcaccgtggtactctggatccccaataagtgattaatgagacactggtttttgtgagccggagactgaacccgcagactgcaaagcaggctgtgcaatgaaagcaaaaggcatccatcccaaacaatat

SEQ ID NO: 68653 - DNA, 600 bp, Chicken  19866894339940_1
cttttccccttttgttgctctctgactgagacaaagggcaccacatagctatcattgctatcagaatcagggcagaagactgccagcagagatcagccactgattcacacctctaactactgccctgcaacagcagagagtcacggctgcaatcagtgtcatgaagacagaggttcaacttcacacaggctaagaggggacaaggacaaagcaggtctaaacagggcagcccaactggagcattccctccccagctgtaagcattgctcaggtatagccagcatcccactgaaggatggrgcagagctgctgcagggctgctctctcctcatgaagccaaaacccttcctaaagcagcactgcctgagtctgtacacaaaaccttttgctgggcttttgcttttcctctcaggctctagcttcaayggctgcctgttttgcccatgaattaagatactaatggagggggagaggtttccacacagtctggagcagagttggtactataagaaccttaaaaatgctttataaattatgctgctttgtacragatgcacrgtttatgtgtccacctataacaagatttcatattaaatgcat

SEQ ID NO: 68654 - DNA, 600 bp, Chicken  19866894339940_2
gcaacagcagagagtcacggctgcaatcagtgtcatgaagacagaggttcaacttcacacaggctaagaggggacaaggacaaagcaggtctaaacagggcagcccaactggagcattccctccccagctgtaagcattgctcaggtatagccagcatcccactgaaggatggrgcagagctgctgcagggctgctctctcctcatgaagccaaaacccttcctaaagcagcactgcctgagtctgtacacaaaaccttttgctgggcttttgcttttcctctcaggctctagcttcaayggctgcctgttttgcccatgaattaagatactaatggagggggagaggtttccacacagtctggagcagagttggtactataagaaccttaaaaatgctttataaattatgctgctttgtacragatgcacrgtttatgtgtccacctataacaagatttcatattaaatgcatttatcctcattctgtcatccatacaaagttattttcaccattaaagtgatgtcagacagcttgtttatccattccaaatgtgctggacgggacctagttttccatatccagagcaaaatgttcaca

SEQ ID NO: 68655 - DNA, 495 bp, Chicken  19866894339940_3
cccagctgtaagcattgctcaggtatagccagcatcccactgaaggatggrgcagagctgctgcagggctgctctctcctcatgaagccaaaacccttcctaaagcagcactgcctgagtctgtacacaaaaccttttgctgggcttttgcttttcctctcaggctctagcttcaayggctgcctgttttgcccatgaattaagatactaatggagggggagaggtttccacacagtctggagcagagttggtactataagaaccttaaaaatgctttataaattatgctgctttgtacragatgcacrgtttatgtgtccacctataacaagatttcatattaaatgcatttatcctcattctgtcatccatacaaagttattttcaccattaaagtgatgtcagacagcttgtttatccattccaaatgtgctggacgggacctagttttccatatccagagcaaaatgttcacagcatcatagaatccttaa

SEQ ID NO: 68656 - DNA, 486 bp, Chicken  19866894339940_4
aagcattgctcaggtatagccagcatcccactgaaggatggrgcagagctgctgcagggctgctctctcctcatgaagccaaaacccttcctaaagcagcactgcctgagtctgtacacaaaaccttttgctgggcttttgcttttcctctcaggctctagcttcaayggctgcctgttttgcccatgaattaagatactaatggagggggagaggtttccacacagtctggagcagagttggtactataagaaccttaaaaatgctttataaattatgctgctttgtacragatgcacrgtttatgtgtccacctataacaagatttcatattaaatgcatttatcctcattctgtcatccatacaaagttattttcaccattaaagtgatgtcagacagcttgtttatccattccaaatgtgctggacgggacctagttttccatatccagagcaaaatgttcacagcatcatagaatccttaa

SEQ ID NO: 68657 - DNA, 599 bp, Chicken  19866894339946_1
  misc_feature (1)..(129): n is any nucleotide
nnnnnnnnnnnnnnnnnnnnnnnnnnnnnnnnnnnnnnnnnnnnnnnnnnnnnnnnnnnnnnnnnnnnnnnnnnnnnnnnnnnnnnnnnnnnnnnnnnnnnnnnnnnnnnnnnnnnnnnnnnnnnnnnntttaagctgtgtatggctgtctgtaggatgcaccaccaccacctgaagatgaggctgcccaggttagtagagaagtgatcttcttgcactagctttgtacagctattgagtctatgcctcttagtgagtttctgctgggtatgtagcaagcctaatgtaatagaagcagcstgctatcacagaagccgttggcctccttgtaggacttgactttcgttgtcactgatggctggggaggatgttacacagttctcagtttcagtggttcccagagctcagcctcgtgggaataataataaagtgcaaagaaatctgtgaaattagtataaaattattttttcaaataaaatcaacacagaaaataattttaagaaatgatcacactcactcgtctcccacattagtaggaaaacttcccaaattcgccaagtgggaaaagatgcaattagtcaagggaaacaagaattcac

SEQ ID NO: 68658 - DNA, 600 bp, Chicken  19866894339950_1
ccatgcacaaataaagttcccagaatacacttttaaaatcttttaactctgcacaaacttaggtttgtttcttcaagtgtgcaaatcacttttcttcatactatttatatgctttagaaaaaataaatctaatttctgattttcactaaaaaatagttctaatttcaagctgtatacgtagcagcagaatacctaggttctcagtcttcacagttgttcttaaattttacctcaattgactgtgttcctgggttactgtaataaaggtttgcagatatccagtccaatgctaggccaatmggagcaccaataacagctgctggagcaaaaactgtcctgttagatccatctgacctcactctgtgaatttcacccttggaaaaataacataagtgtaaacatccagagcagcttcatcaaaaacaaacaaacaaaagaaaacctgatttattccaaccatgtgagcatatactttatattgcaatcttttcttagaaaaatgaaaatttagcagtagtatttttatatgctcaattcataagcatggtaaaaaaaattactgtaaattgtaactatatggtataaagaggcattatagtt

SEQ ID NO: 68659 - DNA, 524 bp, Chicken  19866894339954_1
ttacacaagctttgagctccccagttcccacttcacctctccattgcacatcacttctacagaaagcaaaccagagacaaataccagcatgtacacacacccttccccctgccatccagaggaacatctcagacaaacccaacaggtacactcccgcaaagcttcctgagcatcaaatctgcattttaactatgctctgttccccacacacctcttggtaaccagtcctgttctctccagccctgctgcatggtttgcactgcactgctagaaaacgggctgcaacctcaagctgtacaygagcagaatggcattcccattcaggcctgtgcctcttcccctgggtcttcatggctggtgggcacctcagctgctgtcctctgcaacctctgaaggcaaatattggaggtagagctcgcaggtgtttgtttaagtattggcaaacacacggcgcttatcagaaagtgtttgttctgatctgttttgccatcagatagaggaaagagaaggggtttgttaaaaag

SEQ ID NO: 68660 - DNA, 599 bp, Chicken  19866894339959_1
  misc_feature (1)..(132): n is any nucleotide
nnnnnnnnnnnnnnnnnnnnnnnnnnnnnnnnnnnnnnnnnnnnnnnnnnnnnnnnnnnnnnnnnnnnnnnnnnnnnnnnnnnnnnnnnnnnnnnnnnnnnnnnnnnnnnnnnnnnnnnnnnnnnnnnnnnnaatgagaatccggactgacgacgggggaggacatcccccgtttgtgttaaggagcttttgctcacttcaggacacctcatggatacctcatccaccaggcctcatgttcccacatgttttggtatgggcaaaactgaaccaagaccaaaccaatgccccgtcctcagycctttgctgctttggcacaagctgagaaatctcccttacaggccaccaagagatctcctgatgaccaccaacctctgatgcctcagtccctcactcatcagctataaatgggaaagccaatcacttaagcaagaagctaagtttaayctgataaggaaagcacaaagaactcctcagttcctcccagtccctaggaaatggtggttggttcactccttttgacaatactgtcatatggctatgctgatctcacaggacctctccatttccttctctttccattgcgtgctttggccttt

SEQ ID NO: 68661 - DNA, 600 bp, Chicken  19866894339959_2
tgacgacgggggaggacatcccccgtttgtgttaaggagcttttgctcacttcaggacacctcatggatacctcatccaccaggcctcatgttcccacatgttttggtatgggcaaaactgaaccaagaccaaaccaatgccccgtcctcagycctttgctgctttggcacaagctgagaaatctcccttacaggccaccaagagatctcctgatgaccaccaacctctgatgcctcagtccctcactcatcagctataaatgggaaagccaatcacttaagcaagaagctaagtttaayctgataaggaaagcacaaagaactcctcagttcctcccagtccctaggaaatggtggttggttcactccttttgacaatactgtcatatggctatgctgatctcacaggacctctccatttccttctctttccattgcgtgctttggcctttcagtacactggcaaatttggctgctttaaagagaaaacatcggaagatcagaaaaccctgagatccatttctctagtaacacatagtgactgtatttgctgcctgagaaaggggcaggcagaggtgcttgtctgctctgcagccagag

SEQ ID NO: 68662 - DNA, 600 bp, Chicken  19866894339964_1
ttggctacagtgatgaattcctctatggcgaaagcaacaacccacttcacatctttagagattcattgcttacgaggccatgaggaactgcacaataatttaacctgtcctcctgcataagacttcagctctcagcaatcttttcataatgccttcagctggtggtaaaggagtggtttaatgagacatctttcacatatttgagttcctcccctcagcttcccatgcaggcactggggagaaggcccagcagcaaaatgactctaactggccccattttgctctcctcttgctggaggygttcaagaaacgtgcagatgtggcactaagagttatggttagtgggcacggtggtgatagattgatggctggactagatgatcttaatggtcttttccaaccttaatgattctatgattctgttgatctctcacttttctgcacttgttgtcccagactaactctgcccatcctcacaatacacaacagaccaccttcttggccactgactttgccctttcctgccatgttagtccacaggtagcacagtaccagcatttttctcccaccctgtggcccaagggcctctgagctggagac

SEQ ID NO: 68663 - DNA, 600 bp, Chicken  19866894339965_1
ctcagggttaagatcaaccaaaggaaagagccagctccgcatgcagttaccactgcttgggagtattaacatctttcacgatgttttgtgcctctgcctcagaaagaagacacccaagaaggcactgcacgatttctccatctggggcctctttgcaagaatgttttaaggcaaaggcaagaaaaggaacaaccttgttttcctattcttgacttgtaaacagatgagatcagacccttcattcctctcttttcactttactccactacctggctttagcttggggtaggagatgcaggsatgctcctagaacaggccatctccaaaaattccttctgacatagatgtttagccaacagctctcaaagccagacaatctggaagcatgttctccagcctgatggtactggagagggtaaccatacacatgctgactgaggaaacaattgagaaataaggaaagcatgtggccaggcaggaacaccccaacaagtgccatcttctcccacactgacctacagcacatcttgtctttgcagcaaggctctcccaaagtgggagctgagtgctgcttagcaacccagaagctttataaatatg

SEQ ID NO: 68664 - DNA, 600 bp, Chicken  19866894339965_2
aggaactgctggaggcagggtactcaacgcatgtggctgggttcaatcctggctgttttggctcttttcatgctgtggcaagagggtgagtaccagcagtgagggcagaaacgagcaagttggctagagacaactagatatgacttgaaattcagtagaaatagctggaaagaaacacagggtgacagtgatgaatcaggcccatacttctctgactttctcttcttaaattgttgggttttagaagtcctgcaaatcctctctgtctgctgagcccacaaggagctgcagctgttccartactggagaaataaggctccactgctctgactccagatgcactgcaaatcctctgtggaaagggacagggaatgataaaagcacacagcaggttcctaggggattctcttagcgtagagggaatttctgtgtggtacagtgatggagtaactgattcccatcccagcgccaggggtacaatttcctctgctccataaaacagattgttctgggcatcccagtgtgctgctgctgggtttttgcaggctgtaacaaacacagaccctcaggtaacctagataacccagacaaaaactttcc

SEQ ID NO: 68665 - DNA, 599 bp, Chicken  19866894339971_1
  misc_feature (1)..(168): n is any nucleotide
nnnnnnnnnnnnnnnnnnnnnnnnnnnnnnnnnnnnnnnnnnnnnnnnnnnnnnnnnnnnnnnnnnnnnnnnnnnnnnnnnnnnnnnnnnnnnnnnnnnnnnnnnnnnnnnnnnnnnnnnnnnnnnnnnnnnnnnnnnnnnnnnnnnnnnnnnnnnnnnnnnnnnnnncttggcagagatcggggctcggctctaggacaggaaaaaaaaaacagtatttaagacaagtttaattccttcatcaagatgggagccttccacctctaagcaatgattcacaagcagttactaaaagaagtrctcattaacatcgcatcttttcatcagctgctgattacaggctggggtattttcaagcagaactacatctttgtgaagatgaatctgcagttcgatgccctcgggtttaagttaatttaacttttatctcttcctgcacatattccatttcagctaaaccctggcaggcaggcaggcctgccagcctctccaagcattcatacatcttcccccagcagaaccccttcttgaatcccttaccttgtcctttttgtcctgccgagcgtaagggaagcaagggatgacagctgtgactctgc

SEQ ID NO: 68666 - DNA, 600 bp, Chicken  19866894339971_2
cccagcagaaccccttcttgaatcccttaccttgtcctttttgtcctgccgagcgtaagggaagcaagggatgacagctgtgactctgctggctgaggcaatcttgcatgcatttatcatgataaggagctccatcagattgtcattgatttccccacagccactctgcacaatgtagacgtcctccccacgtacgctctcgcctatttccacactgggaacagatggggaaggaagagttggctccaaacaggaattaaagctgcagtcattacgtatgcctgcagagcaaccaagggrctgcaatcccgagggtctgtgggtgacagcaccatgtaatcatgggtgtttggcaccaacgctgttgcttgtttgctcagtagctatttcacagtgctcactgctcacatttaatggttcaataaggctgaaagcgctcagcctctgcttttaatctcagtgcaagctgagcacgtaaaccccctcaaaacagttcctgtccccccaaatcacagargtccaaagcagcagcgtataaaggaagcrgggatgatggccagtcagcagggaaagccaagccaagcttccaacagaagccat

SEQ ID NO: 68667 - DNA, 600 bp, Chicken  19866894339971_3
ggaacagatggggaaggaagagttggctccaaacaggaattaaagctgcagtcattacgtatgcctgcagagcaaccaagggrctgcaatcccgagggtctgtgggtgacagcaccatgtaatcatgggtgtttggcaccaacgctgttgcttgtttgctcagtagctatttcacagtgctcactgctcacatttaatggttcaataaggctgaaagcgctcagcctctgcttttaatctcagtgcaagctgagcacgtaaaccccctcaaaacagttcctgtccccccaaatcacagargtccaaagcagcagcgtataaaggaagcrgggatgatggccagtcagcagggaaagccaagccaagcttccaacagaagccatgctgcagcagattattctattagagccctaacagcttttcactgccttgaacagagaagccctccagcttttcactctggaaaggcttctggggttaatttcttcctggatgtaatgcacactaatccctgctgatgaaggcactgaatacaagccaaaggttctgtttgccagcagcacgccgccagctccagcacatgtgttgggacacctgcac

SEQ ID NO: 68668 - DNA, 600 bp, Chicken  19866894339971_4
caaacaggaattaaagctgcagtcattacgtatgcctgcagagcaaccaagggrctgcaatcccgagggtctgtgggtgacagcaccatgtaatcatgggtgtttggcaccaacgctgttgcttgtttgctcagtagctatttcacagtgctcactgctcacatttaatggttcaataaggctgaaagcgctcagcctctgcttttaatctcagtgcaagctgagcacgtaaaccccctcaaaacagttcctgtccccccaaatcacagargtccaaagcagcagcgtataaaggaagcrgggatgatggccagtcagcagggaaagccaagccaagcttccaacagaagccatgctgcagcagattattctattagagccctaacagcttttcactgccttgaacagagaagccctccagcttttcactctggaaaggcttctggggttaatttcttcctggatgtaatgcacactaatccctgctgatgaaggcactgaatacaagccaaaggttctgtttgccagcagcacgccgccagctccagcacatgtgttgggacacctgcacccaaagcagggctggaagccacgcagcca

SEQ ID NO: 68669 - DNA, 599 bp, Chicken  19866894339977_1
  misc_feature (1)..(212): n is any nucleotide
nnnnnnnnnnnnnnnnnnnnnnnnnnnnnnnnnnnnnnnnnnnnnnnnnnnnnnnnnnnnnnnnnnnnnnnnnnnnnnnnnnnnnnnnnnnnnnnnnnnnnnnnnnnnnnnnnnnnnnnnnnnnnnnnnnnnnnnnnnnnnnnnnnnnnnnnnnnnnnnnnnnnnnnnnnnnnnnnnnnnnnnnnnnnnnnnnnnnnnnnnnnnnnnnnnnntgactttgaacatgctgtttttataagtttgtatgaatgttgctattgtataacttgcactgggacataagagggtataaattagatsaatatcattggaaggtgtgggaaaaaactgttcctgaaaagatacactctaaagacaaggttaactttttatttgaatagcgaagagaaacacggataacctgcttatctcaggtagtcatgattttccatcttatccatcttaacattaatggctgctcctcatttctatttatactgcagttgatatcaagtactcagatgatcacatggtacttctcttaaaatgcaagaatagaaagcagttaatgratccatctcctccctcctcagcatgagccatatcagccaartaaacgg

SEQ ID NO: 68670 - DNA, 600 bp, Chicken  19866894339977_2
ttgctattgtataacttgcactgggacataagagggtataaattagatsaatatcattggaaggtgtgggaaaaaactgttcctgaaaagatacactctaaagacaaggttaactttttatttgaatagcgaagagaaacacggataacctgcttatctcaggtagtcatgattttccatcttatccatcttaacattaatggctgctcctcatttctatttatactgcagttgatatcaagtactcagatgatcacatggtacttctcttaaaatgcaagaatagaaagcagttaatgratccatctcctccctcctcagcatgagccatatcagccaartaaacggctccgttaattatttacatggattctccatacatcatgccattgtcttcatcccaccagcacaaaataatgtgcacctgaaacactgcaataataggctgtagtggacaaagatccaggtaagaataactggttagaggcatttatgttttagtactccttactctgtctgggaaaatgtaacataaaacacaaattcccacaattaactagtaaataagtagcagagcaaaggaatgacactattgttgaa

SEQ ID NO: 68671 - DNA, 600 bp, Chicken  19866894339977_3
attagatsaatatcattggaaggtgtgggaaaaaactgttcctgaaaagatacactctaaagacaaggttaactttttatttgaatagcgaagagaaacacggataacctgcttatctcaggtagtcatgattttccatcttatccatcttaacattaatggctgctcctcatttctatttatactgcagttgatatcaagtactcagatgatcacatggtacttctcttaaaatgcaagaatagaaagcagttaatgratccatctcctccctcctcagcatgagccatatcagccaartaaacggctccgttaattatttacatggattctccatacatcatgccattgtcttcatcccaccagcacaaaataatgtgcacctgaaacactgcaataataggctgtagtggacaaagatccaggtaagaataactggttagaggcatttatgttttagtactccttactctgtctgggaaaatgtaacataaaacacaaattcccacaattaactagtaaataagtagcagagcaaaggaatgacactattgttgaagttaaatgtgattatctgatttacagtacaatactttcttt

SEQ ID NO: 68672 - DNA, 600 bp, Chicken  19866894339982_1
tattaggcaagatacagttcttccagtggttaccttatttgcattggcttatgttaaaataaattattatttagatcaggacaaaatcaaacaccaaaaactctttatgaacctatctatttgacattggcaggtagccctcaagtaatgtacagtatctctgtggaaggggaccaatgacctggaaatttccggggaagtacctcgtgttgatgtattcacatagatacagtctgaagcaaaacaggaggcacttgtttctttgaaaatcgaataaatgatcacataggtacgaaagcrttaagggaaagatatctttcgtcaaacttatgcaaggcagagttgagaacaaamttgaatttgcttgtcccttgttccattttaytctcatgctcttatggagatcaaacagatctctctctgtcttgacatacatcctttctttgtaggcaaaaatggaaaaaaatgaagaagcaacttttctcagaattaatttacaaaccttaaatgaagaatagaggtaaaatttgtctacagtgtataaatagatccatacattcatagagattcagccatccctttttttttttttcctaaatg

SEQ ID NO: 68673 - DNA, 589 bp, Chicken  19866894339982_2
taaaataaattattatttagatcaggacaaaatcaaacaccaaaaactctttatgaacctatctatttgacattggcaggtagccctcaagtaatgtacagtatctctgtggaaggggaccaatgacctggaaatttccggggaagtacctcgtgttgatgtattcacatagatacagtctgaagcaaaacaggaggcacttgtttctttgaaaatcgaataaatgatcacataggtacgaaagcrttaagggaaagatatctttcgtcaaacttatgcaaggcagagttgagaacaaamttgaatttgcttgtcccttgttccattttaytctcatgctcttatggagatcaaacagatctctctctgtcttgacatacatcctttctttgtaggcaaaaatggaaaaaaatgaagaagcaacttttctcagaattaatttacaaaccttaaatgaagaatagaggtaaaatttgtctacagtgtataaatagatccatacattcatagagattcagccatccctttttttttttttcctaaatggaatattttacttataaccgaaaaaataatactaaaaatatct

SEQ ID NO: 68674 - DNA, 558 bp, Chicken  19866894339982_3
atcaaacaccaaaaactctttatgaacctatctatttgacattggcaggtagccctcaagtaatgtacagtatctctgtggaaggggaccaatgacctggaaatttccggggaagtacctcgtgttgatgtattcacatagatacagtctgaagcaaaacaggaggcacttgtttctttgaaaatcgaataaatgatcacataggtacgaaagcrttaagggaaagatatctttcgtcaaacttatgcaaggcagagttgagaacaaamttgaatttgcttgtcccttgttccattttaytctcatgctcttatggagatcaaacagatctctctctgtcttgacatacatcctttctttgtaggcaaaaatggaaaaaaatgaagaagcaacttttctcagaattaatttacaaaccttaaatgaagaatagaggtaaaatttgtctacagtgtataaatagatccatacattcatagagattcagccatccctttttttttttttcctaaatggaatattttacttataaccgaaaaaataatactaaaaatatct

SEQ ID NO: 68675 - DNA, 599 bp, Chicken  19866894339987_1
  misc_feature (1)..(146): n is any nucleotide
nnnnnnnnnnnnnnnnnnnnnnnnnnnnnnnnnnnnnnnnnnnnnnnnnnnnnnnnnnnnnnnnnnnnnnnnnnnnnnnnnnnnnnnnnnnnnnnnnnnnnnnnnnnnnnnnnnnnnnnnnnnnnnnnnnnnnnnnnnnnnnnnnncacagagagggggatgaagaacagtcaaactaagtgccattttgaacagagcatcagaaaaaaaaaagaggactaagatgaaaatatgagaaaaatcacagtaaatttcctagtgtaacttcaacaaatcagcaggtgcttaattgtttaaaawgaattagaaagtgacagacagcaggtttatactagactttcccagcttagcatggaatttgaagaacaccttgatcaaatctcttgtgtcaagaaggccagcattaaaagggaaagtgctaatggctgagcagatgcaacagaaatacacagtccctactctttcaaaatgcattttgttgtggcagatggatgctgttgtacctgcattccgtaaaggtgttcacagcacagcctgaggcctggaccttgcaccctatttgctactagagaggcagctgtgagaagaaagaatgagga

SEQ ID NO: 68676 - DNA, 600 bp, Chicken  19866894339988_1
ttacttggggaacctacaaatttagtatagggattgagggaaaaaggaatgagaaagccagtattccctagaatactcccatcagggtaagtagagagatgtacctctcctatgaggaaaggctgagggaactgggcttgtttagcttgaagagaaggctccagggagatctcattgtggccttccagtacttgaagggtacgtataaaaaggagggggaatggctgtttacaagggtggatagtgataggacaagagggaatggttttaaactgggacagaggaggtttaggttaaatrttaggtggaaatttttcacccagagggtggtgatgccctggaacaggttgcccaaggaggttgtgggtgccccatccctggaggcattcaaggccaggctggatgtggctctgggcagcctgatctggtggttggcraccctgcacatagcaggggagttgaaccttgatgatcattgtggtccttttcaacccaggccattctatgattttatgataagattctatgtactcaatgtcacaggttcagacagccagaggggttgaggagacttctccttggatatctccaaaagcttcc

SEQ ID NO: 68677 - DNA, 600 bp, Chicken  19866894339988_2
ttgtttagcttgaagagaaggctccagggagatctcattgtggccttccagtacttgaagggtacgtataaaaaggagggggaatggctgtttacaagggtggatagtgataggacaagagggaatggttttaaactgggacagaggaggtttaggttaaatrttaggtggaaatttttcacccagagggtggtgatgccctggaacaggttgcccaaggaggttgtgggtgccccatccctggaggcattcaaggccaggctggatgtggctctgggcagcctgatctggtggttggcraccctgcacatagcaggggagttgaaccttgatgatcattgtggtccttttcaacccaggccattctatgattttatgataagattctatgtactcaatgtcacaggttcagacagccagaggggttgaggagacttctccttggatatctccaaaagcttcctgagcgtgctcctgggcaccctgctctgtgcatccctgatggagcatgggttggaccactggtaccccagagatcactgtcaacctcagccattctgtgattctgtcatacattcgcctcatttatctaggcttcag

SEQ ID NO: 68678 - DNA, 600 bp, Chicken  19866894339988_3
acagatctttaaaaggtaaagatttttaaatggccatcagactgtttttacactttctaaactgcaatttaatattatttacattatggaaaaactcacagcccctgtaggctcagggggacactgcattagtcatggtacaaatacatacgaagacatgacccctgccccagagaactttttatcagcccctaattaacctcttcctgatccttgaagccagaataatcaatgggtctctactctgagttttaaatatattcaagctggggaagaggagaacctgcagaaaaaatattwaaaaaaaatatgacttctaaattaccttctatgtaagacagcactcaaacaatactaggtctgccaaatcactcctgctctaaataaccaactctccttgtacagcatctgctgtttgaaaaggctttcatttgtttttactattatgaatagtcaagaattcaatatcacatgaatgggaagcttctagaaaacttaaacatgtttcattgtgacttgatgaatgggtgactgtygcattgttataaaaaatactaataaactagaaagatccaacttcattgctattaacccccgtgc

SEQ ID NO: 68679 - DNA, 600 bp, Chicken  19866894339988_4
tctctactctgagttttaaatatattcaagctggggaagaggagaacctgcagaaaaaatattwaaaaaaaatatgacttctaaattaccttctatgtaagacagcactcaaacaatactaggtctgccaaatcactcctgctctaaataaccaactctccttgtacagcatctgctgtttgaaaaggctttcatttgtttttactattatgaatagtcaagaattcaatatcacatgaatgggaagcttctagaaaacttaaacatgtttcattgtgacttgatgaatgggtgactgtygcattgttataaaaaatactaataaactagaaagatccaacttcattgctattaacccccgtgcacggggttgaacaggaatattctccaccccacagaaaacatctattgacatactggctcaaaaagcccagattttcaaaaggcccattgactctcagcgcaaattcaaatcttacctaaccttaggcacatttgaacatcaaaattccaaactcatctctgtacaaacagtgtatctaaatccaaattgaattggtagaaccccctatggctgtttaacccatagcgcctctcctc

SEQ ID NO: 68680 - DNA, 599 bp, Chicken  19866894339990_1
  misc_feature (1)..(72): n is any nucleotide
nnnnnnnnnnnnnnnnnnnnnnnnnnnnnnnnnnnnnnnnnnnnnnnnnnnnnnnnnnnnnnnnnnnnnnnnctactgccaaacaaaatgatgatttctaatagtgagggaaacgccacactagcacacaaacacctgctagccaaaacattccctgactattttgtctagcagttgttgctgaaaactactaaacacattaaagacaaggtcacaaaatcagcttttggtagggtgcacatgggtttattttgttttaaattcagttcaaccactcagagccaccactctgatggattrtaggcagtggattcagattcaggcaggagacragcacgcttctagaggargcaggaatataaaataccagctttacagttattttaaggttctctttctatgtagttcttcaaaaagtcaggtactctgatctaagtagtcaaagtactgcgatacctcagctttgcaaaatgaacctakcaaaaaaagatcacaagaaaaacagaagttaaaacataggtattttgaataacatttgcctcccagttctgatacttgctgcttcaactgagataaaacttccttcttaaagtgctgaa

SEQ ID NO: 68681 - DNA, 599 bp, Chicken  19866894339990_2
  misc_feature (1)..(40): n is any nucleotide
nnnnnnnnnnnnnnnnnnnnnnnnnnnnnnnnnnnnnnnnctactgccaaacaaaatgatgatttctaatagtgagggaaacgccacactagcacacaaacacctgctagccaaaacattccctgactattttgtctagcagttgttgctgaaaactactaaacacattaaagacaaggtcacaaaatcagcttttggtagggtgcacatgggtttattttgttttaaattcagttcaaccactcagagccaccactctgatggattrtaggcagtggattcagattcaggcaggagacragcacgcttctagaggargcaggaatataaaataccagctttacagttattttaaggttctctttctatgtagttcttcaaaaagtcaggtactctgatctaagtagtcaaagtactgcgatacctcagctttgcaaaatgaacctakcaaaaaaagatcacaagaaaaacagaagttaaaacataggtattttgaataacatttgcctcccagttctgatacttgctgcttcaactgagataaaacttccttcttaaagtgctgaagctcaccttgttccaccatgcttggcagaact

SEQ ID NO: 68682 - DNA, 599 bp, Chicken  19866894339990_3
  misc_feature (1)..(22): n is any nucleotide
nnnnnnnnnnnnnnnnnnnnnnctactgccaaacaaaatgatgatttctaatagtgagggaaacgccacactagcacacaaacacctgctagccaaaacattccctgactattttgtctagcagttgttgctgaaaactactaaacacattaaagacaaggtcacaaaatcagcttttggtagggtgcacatgggtttattttgttttaaattcagttcaaccactcagagccaccactctgatggattrtaggcagtggattcagattcaggcaggagacragcacgcttctagaggargcaggaatataaaataccagctttacagttattttaaggttctctttctatgtagttcttcaaaaagtcaggtactctgatctaagtagtcaaagtactgcgatacctcagctttgcaaaatgaacctakcaaaaaaagatcacaagaaaaacagaagttaaaacataggtattttgaataacatttgcctcccagttctgatacttgctgcttcaactgagataaaacttccttcttaaagtgctgaagctcaccttgttccaccatgcttggcagaacttttccaagtgatgtctga

SEQ ID NO: 68683 - DNA, 600 bp, Chicken  19866894339990_4
ctgaaaactactaaacacattaaagacaaggtcacaaaatcagcttttggtagggtgcacatgggtttattttgttttaaattcagttcaaccactcagagccaccactctgatggattrtaggcagtggattcagattcaggcaggagacragcacgcttctagaggargcaggaatataaaataccagctttacagttattttaaggttctctttctatgtagttcttcaaaaagtcaggtactctgatctaagtagtcaaagtactgcgatacctcagctttgcaaaatgaacctakcaaaaaaagatcacaagaaaaacagaagttaaaacataggtattttgaataacatttgcctcccagttctgatacttgctgcttcaactgagataaaacttccttcttaaagtgctgaagctcaccttgttccaccatgcttggcagaacttttccaagtgatgtctgactacrtgcacctcacaagaggccagtagtttctcactggatgctaggagcaytcaagmaaagaaagcactgacacgttatgagctctttggctcttcccacagcagtcaggatcctcagccttaccactgg

SEQ ID NO: 68684 - DNA, 600 bp, Chicken  19866894339990_5
gaatataaaataccagctttacagttattttaaggttctctttctatgtagttcttcaaaaagtcaggtactctgatctaagtagtcaaagtactgcgatacctcagctttgcaaaatgaacctakcaaaaaaagatcacaagaaaaacagaagttaaaacataggtattttgaataacatttgcctcccagttctgatacttgctgcttcaactgagataaaacttccttcttaaagtgctgaagctcaccttgttccaccatgcttggcagaacttttccaagtgatgtctgactacrtgcacctcacaagaggccagtagtttctcactggatgctaggagcaytcaagmaaagaaagcactgacacgttatgagctctttggctcttcccacagcagtcaggatcctcagccttaccactggcctgactcaggaagagctgttcccattaaaatttgagataaaacatcaccattcctactgcttctacagactactgaaaaaactcagaagctccttttaaaacgttctccttcacacacggggggaaagttaaaaccccctaaagccacttcagttgtatgttttaggctgggc

SEQ ID NO: 68685 - DNA, 600 bp, Chicken  19866894339990_6
gtagttcttcaaaaagtcaggtactctgatctaagtagtcaaagtactgcgatacctcagctttgcaaaatgaacctakcaaaaaaagatcacaagaaaaacagaagttaaaacataggtattttgaataacatttgcctcccagttctgatacttgctgcttcaactgagataaaacttccttcttaaagtgctgaagctcaccttgttccaccatgcttggcagaacttttccaagtgatgtctgactacrtgcacctcacaagaggccagtagtttctcactggatgctaggagcaytcaagmaaagaaagcactgacacgttatgagctctttggctcttcccacagcagtcaggatcctcagccttaccactggcctgactcaggaagagctgttcccattaaaatttgagataaaacatcaccattcctactgcttctacagactactgaaaaaactcagaagctccttttaaaacgttctccttcacacacggggggaaagttaaaaccccctaaagccacttcagttgtatgttttaggctgggcatcactcacactgcagatacaaaacctgccaccagcacgtctatgca

SEQ ID NO: 68686 - DNA, 600 bp, Chicken  19866894339990_7
cttcaaaaagtcaggtactctgatctaagtagtcaaagtactgcgatacctcagctttgcaaaatgaacctakcaaaaaaagatcacaagaaaaacagaagttaaaacataggtattttgaataacatttgcctcccagttctgatacttgctgcttcaactgagataaaacttccttcttaaagtgctgaagctcaccttgttccaccatgcttggcagaacttttccaagtgatgtctgactacrtgcacctcacaagaggccagtagtttctcactggatgctaggagcaytcaagmaaagaaagcactgacacgttatgagctctttggctcttcccacagcagtcaggatcctcagccttaccactggcctgactcaggaagagctgttcccattaaaatttgagataaaacatcaccattcctactgcttctacagactactgaaaaaactcagaagctccttttaaaacgttctccttcacacacggggggaaagttaaaaccccctaaagccacttcagttgtatgttttaggctgggcatcactcacactgcagatacaaaacctgccaccagcacgtctatgcagacaca

SEQ ID NO: 68687 - DNA, 589 bp, Chicken  19866894339994_1
ccttttgtaacgcccgagccgggccgggtctcggcaacgccgcggttgggaacggtgccgacgggcaacgctcagcccttcccggctgctgcgagaaggaaagagggacgagaaaacccaaagcaaagcagagagaggcacggtgtgagcctggccgtcccgggccgccgtgacacggcgcttctacccgaggccgaggcggctcggaacgcacgctgggcctagcgccgggcacggcctattcggggccgcggcccgcagccctcgttctcctccggcggcccgaaagaggggcggctytgccgggatgagtcctacgcagccagcggccgcctgcccgcctcgggacctcggctgacccacggacgggacagcggccgcaccgaggggaactttgttctccgtattcacccgtctcgatggagaaaagtgcctttgccgggcggatttctgctccttgcccgtattgctccttccctttctcaccctctttattttgtttctttttattttattattattattattattatttttaactcgtatttttcgatagaccacatcgcagagcaggtccgagaggagcgag

SEQ ID NO: 68688 - DNA, 599 bp, Chicken  19866894340026_1
  misc_feature (1)..(122): n is any nucleotide
nnnnnnnnnnnnnnnnnnnnnnnnnnnnnnnnnnnnnnnnnnnnnnnnnnnnnnnnnnnnnnnnnnnnnnnnnnnnnnnnnnnnnnnnnnnnnnnnnnnnnnnnnnnnnnnnnnnnnnnnnnctcccacattctgccctgtccactcatttaccgcaaagtctgccaggtaacttgtcagacagtcttgtttgtcttctgcgtcgtgagtcaccctgtatctcagcaggatgacttttaggggtgaaagcaaaattcctgtccttgctgtctgaccggtgtggtcgttgctgaaacctcyggcctccccgaggttcaaagctaggcgtagccctctgttttgctgttttgtgttagccagcacaaacgtgtgcttctgaaatgaggagcactctgcttatagcgagcgtgggttcctggaggcacttaacgttgctgcttgcatcgtsgtaagggcttattctgttaggatgaaagcttcgcctctttatgcgtagtctgccaggactgcccaaaattgaatatgctgctcgtgtggtgttttgtcactggtgacctacataaagtgtgtcagaccagaatgtcttgcgtctgtgcact

SEQ ID NO: 68689 - DNA, 600 bp, Chicken  19866894340026_2
tttaccgcaaagtctgccaggtaacttgtcagacagtcttgtttgtcttctgcgtcgtgagtcaccctgtatctcagcaggatgacttttaggggtgaaagcaaaattcctgtccttgctgtctgaccggtgtggtcgttgctgaaacctcyggcctccccgaggttcaaagctaggcgtagccctctgttttgctgttttgtgttagccagcacaaacgtgtgcttctgaaatgaggagcactctgcttatagcgagcgtgggttcctggaggcacttaacgttgctgcttgcatcgtsgtaagggcttattctgttaggatgaaagcttcgcctctttatgcgtagtctgccaggactgcccaaaattgaatatgctgctcgtgtggtgttttgtcactggtgacctacataaagtgtgtcagaccagaatgtcttgcgtctgtgcactgagctaattgcccacatctcctccacagcgagggatgcaggctgttttccttggtgctgacgatgtgatgatttttgcagttaagcctgctcctccccgtttgatgcctgcagaactgatgcataaaacagggagatgtccaaagaaca

SEQ ID NO: 68690 - DNA, 599 bp, Chicken  19866894340027_1
  misc_feature (1)..(129): n is any nucleotide
nnnnnnnnnnnnnnnnnnnnnnnnnnnnnnnnnnnnnnnnnnnnnnnnnnnnnnnnnnnnnnnnnnnnnnnnnnnnnnnnnnnnnnnnnnnnnnnnnnnnnnnnnnnnnnnnnnnnnnnnnnnnnnnnnttcaaggtgtctttgagagggatgggtagaggacaatgttgaaacataggtaaaatttgaaaatatgtgctttgattatactcagtttttttctctgctgactatgatttttaaaatcccagcacttgcagttccccagtctcactgattgtatgtgcttagtgctgaccrgtactgtcacactgatttttgagccttcactcctacgtgctcagatatgtacctgacccagtaagagctcatgtattgtgtgctgatagygataggasaaggggggatggttttaaactaagacaggggaggtttaggttagatattaggaagtttttcacacagaggttggtgttgcactggaacagcttgcccagagatgttgtggatgctccatccctggaggcattcaaagccaggctggatgtggctctgggcagcctagtgggtggcaaccctgcctgtggcaggggggttga

SEQ ID NO: 68691 - DNA, 599 bp, Chicken  19866894340027_2
  misc_feature (1)..(39): n is any nucleotide
nnnnnnnnnnnnnnnnnnnnnnnnnnnnnnnnnnnnnnnttcaaggtgtctttgagagggatgggtagaggacaatgttgaaacataggtaaaatttgaaaatatgtgctttgattatactcagtttttttctctgctgactatgatttttaaaatcccagcacttgcagttccccagtctcactgattgtatgtgcttagtgctgaccrgtactgtcacactgatttttgagccttcactcctacgtgctcagatatgtacctgacccagtaagagctcatgtattgtgtgctgatagygataggasaaggggggatggttttaaactaagacaggggaggtttaggttagatattaggaagtttttcacacagaggttggtgttgcactggaacagcttgcccagagatgttgtggatgctccatccctggaggcattcaaagccaggctggatgtggctctgggcagcctagtgggtggcaaccctgcctgtggcaggggggttgaaactagttgatctttgaggtccttttcaacccaggccattctatgatgctgtgctcarctcatgggacatgtcaggcagcttcaaatgaa

SEQ ID NO: 68692 - DNA, 599 bp, Chicken  19866894340027_3
  misc_feature (1)..(31): n is any nucleotide
nnnnnnnnnnnnnnnnnnnnnnnnnnnnnnnttcaaggtgtctttgagagggatgggtagaggacaatgttgaaacataggtaaaatttgaaaatatgtgctttgattatactcagtttttttctctgctgactatgatttttaaaatcccagcacttgcagttccccagtctcactgattgtatgtgcttagtgctgaccrgtactgtcacactgatttttgagccttcactcctacgtgctcagatatgtacctgacccagtaagagctcatgtattgtgtgctgatagygataggasaaggggggatggttttaaactaagacaggggaggtttaggttagatattaggaagtttttcacacagaggttggtgttgcactggaacagcttgcccagagatgttgtggatgctccatccctggaggcattcaaagccaggctggatgtggctctgggcagcctagtgggtggcaaccctgcctgtggcaggggggttgaaactagttgatctttgaggtccttttcaacccaggccattctatgatgctgtgctcarctcatgggacatgtcaggcagcttcaaatgaattgtgctc

SEQ ID NO: 68693 - DNA, 600 bp, Chicken  19866894340027_4
ccagtaagagctcatgtattgtgtgctgatagygataggasaaggggggatggttttaaactaagacaggggaggtttaggttagatattaggaagtttttcacacagaggttggtgttgcactggaacagcttgcccagagatgttgtggatgctccatccctggaggcattcaaagccaggctggatgtggctctgggcagcctagtgggtggcaaccctgcctgtggcaggggggttgaaactagttgatctttgaggtccttttcaacccaggccattctatgatgctgtgctcarctcatgggacatgtcaggcagcttcaaatgaattgtgctcgagctcaactcaagcaagtttgtttcaaggccccctggcactgtgaggagaaaactgctcagtctgtctcttcctgttctccttctccttccccttttctgatttgctttgatccatagctctgtttttcttctgtcagactagtacgcagtccaacaaagggaagcctgaaatccctctcctgggaaggaacaacccctatcttccattgcatgcttgggtttaaccgtgtggaatccagctttgcagaaaaggccctg

SEQ ID NO: 68694 - DNA, 599 bp, Chicken  19866894340030_1
  misc_feature (1)..(208): n is any nucleotide
nnnnnnnnnnnnnnnnnnnnnnnnnnnnnnnnnnnnnnnnnnnnnnnnnnnnnnnnnnnnnnnnnnnnnnnnnnnnnnnnnnnnnnnnnnnnnnnnnnnnnnnnnnnnnnnnnnnnnnnnnnnnnnnnnnnnnnnnnnnnnnnnnnnnnnnnnnnnnnnnnnnnnnnnnnnnnnnnnnnnnnnnnnnnnnnnnnnnnnnnnnnnnnnnttttaaaatacccatgagctaagcatctggaaagaagctgctaataccagaataaacccacttacacgtcttccagagataccgagcagagkaagagatgaaagagtaactgcacaagcccacatgtctcaagagaaacagaagctgcattacgcggactcagcacagagcacgagggttcagcatttccccaagctcctaattaagagacataggtaggtatgtctgtatgcacatgtacatacacatctctgtgtttaaacgtacatagcctatgggtagcacacaggtgagggttttctgacctcattatggtaaattcttcataaacacagcaagcagcaattgcttttataccccttatgcatccctcaagcagcactttgattac

SEQ ID NO: 68695 - DNA, 600 bp, Chicken  19866894340033_1
cagagcttcactagccatgtaattcaggaacaccttgtgacttggttattaaaaaaacacttgtttaaaaaaggacttcagattttgcgataaactcatgaaaatgacagcctttaattgcctaacatttgtgctcaccactgtggtaagcatctctacaaaaggcatttgcacatatccaaaaggagacgtgcaagggcaaaatcccttaaggaatgtggatggaaacattttagagagaaggaatagaaatttagagcaagggataagaacaccatgaggaacctcacacctgaccgktgtgatttcagacacttgtgatgcaagcttatttccttgtctgagtccagaatacatttctgttcagtgatcatatcagtttttcttcaagtcactcactttggttctagcttgaaagagggtgagggcagaaaataaagcaagaacttacattaaattcctttcattcaccttgatctcctgaaaagaggcatcttgattgttctgcctgcccagtatttacaaacagtggtaacacagtttatacgttagctgctttgtgcccagctaagactgctcagatgataacggatgttctcc

SEQ ID NO: 68696 - DNA, 600 bp, Chicken  19866894340036_1
aaaactcagtttcactacagatatttttagatatctgtgacctgtttggttggtcaggctttaacataggtcgtgatacatgcaaatggctcagagtgacacctttaagcccatgaaagatctaaaggggatttagtctggtcagaagaacctgttcctatctgaatgtcaacagaaaggctcacagtaggttttttggaataggtcctagatgtttttcttgtgttctcaatcatattcagagcagcatctcttcctcctcaccaccttccaacagcactgtgggtttatccagtgaarcttaggacagtaaatagctgttaggccaaatcccaaatcctcaaggaaaagatgcaagttaatgcacttcttgctgctgagacatggcgagagaaaaaagaaatagaagataggtttgaggaggtcataaaagaaaaatttagtccagaagtgatagggaaagcttgatgcatgaaggatctcaaaaagccataaaagaatcactccctgattacagcaagaaaaattgtaaataaaacagaacagattttctgaacagtagatgtgcttctcagtgtggccaccatttatagcactgat

SEQ ID NO: 68697 - DNA, 600 bp, Chicken  19866894340047_1
tgcatttagtcaaaaaccaaagaatatgctgggagtgcaccaatcatggcagagcaaacagatgtcttttcaagtatttaacgatattggtagtttcaaaaggaaaaatctgcctttgtgctggagattgcaggagtggaagctcagttttacataaggttataaggcatagatcagtggagagaatcccttgatttcttgtatatttcaccttggcaatacaaactgtattcagcggttgttctccaggagacactgctaataagggcttcagtcaggggagatgaagagaggaacacrgtkgtatcagacacaggagcatcacctgactgawagctgcatagatatttgtagcacaacacagttgttagcatgagaacagatattgtaactctaggctgttatttcctccaggtgttaagtaatactgttttacttgtgttatttgatctgaaaaagttcaktaacccatcagctgaagtctattccaactctcaaacagtgtttgcttkattttagctgatggcatcaaaggtgaactggcctgaccctacaaaattctaaatgtcgagctgctttaactgtttatgaccactaatg

SEQ ID NO: 68698 - DNA, 600 bp, Chicken  19866894340047_2
atttagtcaaaaaccaaagaatatgctgggagtgcaccaatcatggcagagcaaacagatgtcttttcaagtatttaacgatattggtagtttcaaaaggaaaaatctgcctttgtgctggagattgcaggagtggaagctcagttttacataaggttataaggcatagatcagtggagagaatcccttgatttcttgtatatttcaccttggcaatacaaactgtattcagcggttgttctccaggagacactgctaataagggcttcagtcaggggagatgaagagaggaacacrgtkgtatcagacacaggagcatcacctgactgawagctgcatagatatttgtagcacaacacagttgttagcatgagaacagatattgtaactctaggctgttatttcctccaggtgttaagtaatactgttttacttgtgttatttgatctgaaaaagttcaktaacccatcagctgaagtctattccaactctcaaacagtgtttgcttkattttagctgatggcatcaaaggtgaactggcctgaccctacaaaattctaaatgtcgagctgctttaactgtttatgaccactaatgacc

SEQ ID NO: 68699 - DNA, 600 bp, Chicken  19866894340047_3
gtgcaccaatcatggcagagcaaacagatgtcttttcaagtatttaacgatattggtagtttcaaaaggaaaaatctgcctttgtgctggagattgcaggagtggaagctcagttttacataaggttataaggcatagatcagtggagagaatcccttgatttcttgtatatttcaccttggcaatacaaactgtattcagcggttgttctccaggagacactgctaataagggcttcagtcaggggagatgaagagaggaacacrgtkgtatcagacacaggagcatcacctgactgawagctgcatagatatttgtagcacaacacagttgttagcatgagaacagatattgtaactctaggctgttatttcctccaggtgttaagtaatactgttttacttgtgttatttgatctgaaaaagttcaktaacccatcagctgaagtctattccaactctcaaacagtgtttgcttkattttagctgatggcatcaaaggtgaactggcctgaccctacaaaattctaaatgtcgagctgctttaactgtttatgaccactaatgaccttcctccgcccttccctgagctcccactgct

SEQ ID NO: 68700 - DNA, 600 bp, Chicken  19866894340047_4
aggcatagatcagtggagagaatcccttgatttcttgtatatttcaccttggcaatacaaactgtattcagcggttgttctccaggagacactgctaataagggcttcagtcaggggagatgaagagaggaacacrgtkgtatcagacacaggagcatcacctgactgawagctgcatagatatttgtagcacaacacagttgttagcatgagaacagatattgtaactctaggctgttatttcctccaggtgttaagtaatactgttttacttgtgttatttgatctgaaaaagttcaktaacccatcagctgaagtctattccaactctcaaacagtgtttgcttkattttagctgatggcatcaaaggtgaactggcctgaccctacaaaattctaaatgtcgagctgctttaactgtttatgaccactaatgaccttcctccgcccttccctgagctcccactgctgagcagaacactgtgtagtggggatgcttcagtaggctgtgctggctacgtcccctcccagcccgcttgccttgacactgctcaagcggtgttccacagaacaggcaaagccaccagcatcatttcagcc

SEQ ID NO: 68701 - DNA, 600 bp, Chicken  19866894340047_5
ttggcaatacaaactgtattcagcggttgttctccaggagacactgctaataagggcttcagtcaggggagatgaagagaggaacacrgtkgtatcagacacaggagcatcacctgactgawagctgcatagatatttgtagcacaacacagttgttagcatgagaacagatattgtaactctaggctgttatttcctccaggtgttaagtaatactgttttacttgtgttatttgatctgaaaaagttcaktaacccatcagctgaagtctattccaactctcaaacagtgtttgcttkattttagctgatggcatcaaaggtgaactggcctgaccctacaaaattctaaatgtcgagctgctttaactgtttatgaccactaatgaccttcctccgcccttccctgagctcccactgctgagcagaacactgtgtagtggggatgcttcagtaggctgtgctggctacgtcccctcccagcccgcttgccttgacactgctcaagcggtgttccacagaacaggcaaagccaccagcatcatttcagcctcagctaatgcaggtgcagcaccatgtgaacactagagattaaagaaa

SEQ ID NO: 68702 - DNA, 599 bp, Chicken  19866894340052_1
  misc_feature (1)..(131): n is any nucleotide
nnnnnnnnnnnnnnnnnnnnnnnnnnnnnnnnnnnnnnnnnnnnnnnnnnnnnnnnnnnnnnnnnnnnnnnnnnnnnnnnnnnnnnnnnnnnnnnnnnnnnnnnnnnnnnnnnnnnnnnnnnnnnnnnnnntgaaggagatgggcctggtttcatatatgctaaacttgtactcatgttactacaatctgcttgtgagtagtagaactaatgaagcctgatttcctcgggatttatgttctgtctacgtacagctgtgcatatggcttgattaaacatctggcagccactttactgcatrgtagaaggaattgtgttacagtttcattgataggctgctgattatttccctgatttttcaacttactgattttcagaaatgagaaagcagttagtatccttcagtcttctgtaaatggataactcctattgaaggggaccagtagctggaagcataaagcatggtctgtccgtggcatctgcactttgaacatctgcctcaggtggctttgaagagacacactgtcaccgtggaagctgcatgtttcaggaggcagttattagccaggactaaaattcagacactattttgagctttaa

SEQ ID NO: 68703 - DNA, 600 bp, Chicken  19866894340058_1
cacagctcctgctcaccctccaaccctcagagcgcagcgataaggacaggccctccctgcatctcattactcttaggagaatttcaagtccagctgtcaaggccctgctggaacagccccactgccttcagcaggacagcacacgtttaattaaaggctaggtcagactctggagcaggagggtaattacaactctcccgctgattcacaagcccagaacctggttcccatgctccaagaactggggtcacagcagcatgcagcacagctcaccacctgtccccaaccagagccaaggcrcagcactcagctgccatgggtagaggcgtcagcactgtaagcagctcctcagagtgctcacagccaaagcagagcacagagggactgctctgctgccaaggtggcaatgtgtggagcgtgtcaaacccaccatgggaagtgtgaacagaccagggctcccctcctcctcctcctgcgatgaaaggaagagccaagctttgatggcagtgccagcaggattgcctctggggaaaggcagctgcatgggagagatccacgctgagctgggagcagaactacaaagcaaagcacttgagagcc

SEQ ID NO: 68704 - DNA, 600 bp, Chicken  19866894340064_1
atgactcatgctgtcataatctgatcctgacatcaactctctgtgctgcatttctttagctttcaggtggggggaaggggaaatctgcaaagccctgggacagacagagagctgtaaataggcggtaggaggcacacatgggagtactggtcatttctgtactgtcagctgctttgcaagcccagaacaaatgagagtagagtagaagaattgtgcagcgtcagaagaattgggatttactgtctacctgtaagccctccacctgatgctgtaggctgtggtggtctctgctcaagacckgatgagcagcggatgcatggagctgtgccacctgctgcctgtggtcctgtgcctgcctgtaagtacacctgsagtgctgacctaaagcctttgcgtggtcccccagctctgtccatcacttcatcctttgtgccttttgctctactgccgtggatcctgcgagggccgggagcatccatctcagtagaggtggatctacaggcgtagaggaggtgtgtttccttccaagtccaagggagagaagagtaagcactccaggtgagagatactggagtgaaatgtacactttctatggagatg

SEQ ID NO: 68705 - DNA, 600 bp, Chicken  19866894340064_2
ggaaggggaaatctgcaaagccctgggacagacagagagctgtaaataggcggtaggaggcacacatgggagtactggtcatttctgtactgtcagctgctttgcaagcccagaacaaatgagagtagagtagaagaattgtgcagcgtcagaagaattgggatttactgtctacctgtaagccctccacctgatgctgtaggctgtggtggtctctgctcaagacckgatgagcagcggatgcatggagctgtgccacctgctgcctgtggtcctgtgcctgcctgtaagtacacctgsagtgctgacctaaagcctttgcgtggtcccccagctctgtccatcacttcatcctttgtgccttttgctctactgccgtggatcctgcgagggccgggagcatccatctcagtagaggtggatctacaggcgtagaggaggtgtgtttccttccaagtccaagggagagaagagtaagcactccaggtgagagatactggagtgaaatgtacactttctatggagatgtgttgcaagctagctgggtgtttgctaatccttttcaatttctacatgtgtaagtgcgaagtattaatgact

SEQ ID NO: 68706 - DNA, 600 bp, Chicken  19866894340069_1
catctgctgacaggacaaaagcactgacagaaaaacaggaaatgctgaaagagctctaccaaggtactctccacaaacatgccaaggtgtatttccccccaaattctacattggcccaatgtctaagaaatctttcagttcccacaacaggagtttttacatcattgcgatgcttgcaagtttgagccctagttgtttactttctgcacaagcgacatggctattctaatctgcatcgcattccttgcattgttttaggttcagttatctggaattctggttttggaaaggcagttttcyaccggggggtttgatgcccactgcttcctctgtggatctgtgctctcatgctgagaggaagaaaaaaaatctatcaacttaatctaatagaaggaatggtctcctgacctgatctttcatctagaaaaatatcaggtaattaatttaaatagccccaggaggggccgcttaggtgcaatcaaacatcctgctatcttcaatcagcgatattaaagtatgtattttatcaagacgaccaaccatgcgagctgctgcacacaagctggaatatcagcactaaactcattacaaaagctgcag

SEQ ID NO: 68707 - DNA, 599 bp, Chicken  19866894340071_1
  misc_feature (1)..(13): n is any nucleotide
nnnnnnnnnnnnnaaattcatgacaaagcacaaagggaagagcagggctttgccatcccgagatattcatccattaacacgttccctttttaggctgacatgtcatttcagacgggccttttttcctcccctttattctctcccttgaaggagcgcgcggctttgccgaggcgtttgctgaattggatcacctcagggcgagcactttattatctgcagtcaaagcgtcaccacaaataccagtctacacacacatgtgtcactttctatttgtctcctcgccgaggtattagcaccgcrcgctgccgcggcaccgtggccaacaggcrtggggatgctggctctggggacatgctaatgtcacctctgggttgctctaagggcaccacgatggctccccagttccaccccaacagcaccacracggcaccccgcttcaactccaatggcatcccggtgccaacccaacgctgtcccagtggcatcttgaggccacccgactgtcatcctgatgtcgctcttgtgacaccatgatgctgccctcgtgccgccctgatgccatcccaatgccaccccactgctgacccagtgtcatcttg

SEQ ID NO: 68708 - DNA, 600 bp, Chicken  19866894340071_2
acaaagggaagagcagggctttgccatcccgagatattcatccattaacacgttccctttttaggctgacatgtcatttcagacgggccttttttcctcccctttattctctcccttgaaggagcgcgcggctttgccgaggcgtttgctgaattggatcacctcagggcgagcactttattatctgcagtcaaagcgtcaccacaaataccagtctacacacacatgtgtcactttctatttgtctcctcgccgaggtattagcaccgcrcgctgccgcggcaccgtggccaacaggcrtggggatgctggctctggggacatgctaatgtcacctctgggttgctctaagggcaccacgatggctccccagttccaccccaacagcaccacracggcaccccgcttcaactccaatggcatcccggtgccaacccaacgctgtcccagtggcatcttgaggccacccgactgtcatcctgatgtcgctcttgtgacaccatgatgctgccctcgtgccgccctgatgccatcccaatgccaccccactgctgacccagtgtcatcttgatgccaacccgatgccgctccttggctgat

SEQ ID NO: 68709 - DNA, 600 bp, Chicken  19866894340071_3
tcctcccctttattctctcccttgaaggagcgcgcggctttgccgaggcgtttgctgaattggatcacctcagggcgagcactttattatctgcagtcaaagcgtcaccacaaataccagtctacacacacatgtgtcactttctatttgtctcctcgccgaggtattagcaccgcrcgctgccgcggcaccgtggccaacaggcrtggggatgctggctctggggacatgctaatgtcacctctgggttgctctaagggcaccacgatggctccccagttccaccccaacagcaccacracggcaccccgcttcaactccaatggcatcccggtgccaacccaacgctgtcccagtggcatcttgaggccacccgactgtcatcctgatgtcgctcttgtgacaccatgatgctgccctcgtgccgccctgatgccatcccaatgccaccccactgctgacccagtgtcatcttgatgccaacccgatgccgctccttggctgatccaacaccatctcaacgctaccccatggctgacccaatgccatccagatgccatctcaatgtcactcctttggctgacccaacaccatctcaac

SEQ ID NO: 68710 - DNA, 526 bp, Chicken  19866894340072_1
ggcagataatagcccttccctccctgaccctcagctttacatacacataaaattacaatgaaaaatatcaggcaatttaattagttaatgtttataaaaccctttcgagatgaaaggaactctgtaagtggtatgcattattaatggatattaatgtttgttcagaaattggaagttgaaattcgtcccatcactaatgtgcataaatgaacttttttcttagtttaatgcattcactaattggctttgcaaattttttttattgttttgatttacatgctctttaagagcttcagctgygtcagctagcagtgagtaaattaatatgtcattattaatgtaagacaggctgtcagaagattctaggtataacaccatcatagtatgttatctaacttgtttagatctgagttcagtagtgtttacaacagagcaatatgaaaaacaaatgatattcaggtgaaagagcagcatgcctcagtagccatacctgcttcaggaactggagggggaaaaattaatacca

SEQ ID NO: 68711 - DNA, 600 bp, Chicken  19866894340089_1
gcagcagcagtggaggagagctggtctgagagctgtttatgcagagacaccacctccaacctttccccacagctgaaaatgctatctatgtgtgtaggcgtgtgcgtatttagcgagcctgatattttatcatcaaaagttatgggactttagtgtttgcttaattgtactcttctataaatattaataggcatgctgtgtgcagtttcacaaaaacagagtctatcccagctttgcaaagtcctagtcatctgttttcctagggtaagtaatttcttttgataggcaagaatattcagkcttgctttctaaacatttattgaaaattggggatatttgggtggcttgctcaggtaaaccttcaagatctcaagaactctcaatttttcggtattctatgagctcctgtctcagtttgttgtttgtttgtttgtttgttttctttgctagtaacacggcccaatatggtatagtacaggatttagaccattttctcgataaatagaatattatattacagtgtgtacaaaggaagcaatggcaacagcttatgctaactatcctgtactactcagttctacccagtgctgtgtaagtttt

SEQ ID NO: 68712 - DNA, 599 bp, Chicken  19866894340095_1
  misc_feature (1)..(42): n is any nucleotide
nnnnnnnnnnnnnnnnnnnnnnnnnnnnnnnnnnnnnnnnnnacatgcctcccttcacacaggccatgagctgaactctgcagaaagagcacttgtgcaatctagctgtggtctccttgagctcggcagctgcttcttccaagggcttcaggctggaggaggccaaaaagccttcagtgcatctacagccctagctcagaccaccaaacggagagtaaagtcatgaagcggaaataattgctattgcctgcttccctgaaggaaaataaagctgagcaggtgcgtgtctgagctattgcrctacaggaacaattgcctccgctctttagacaccccttggagaaggggaacaagtgctggcaggagcacacgatcagaagtcgctcctctcacatagcccccagggacacactgactctcagcattataagccttgcacctgcagctcttaaatgcagactcaatccaagtctgmcccagtatgcagaagattaataatagtacaagggccaaaagcacaattttcgtaaatctgagccagtttttctcatgagagatttatgtttgaattaagaagagaatgttataaatctatccca

SEQ ID NO: 68713 - DNA, 574 bp, Chicken  19866894340095_2
agtgcatctacagccctagctcagaccaccaaacggagagtaaagtcatgaagcggaaataattgctattgcctgcttccctgaaggaaaataaagctgagcaggtgcgtgtctgagctattgcrctacaggaacaattgcctccgctctttagacaccccttggagaaggggaacaagtgctggcaggagcacacgatcagaagtcgctcctctcacatagcccccagggacacactgactctcagcattataagccttgcacctgcagctcttaaatgcagactcaatccaagtctgmcccagtatgcagaagattaataatagtacaagggccaaaagcacaattttcgtaaatctgagccagtttttctcatgagagatttatgtttgaattaagaagagaatgttataaatctatcccatgataaagcttaaaacttggaattttaatatgctgaatcccctatgcactgggctgtaaaagttgagagagatagtatttcttcctaatgctgcattaggcaagcaaccagttcatccaattactgaactgacaacactgttcctgtgaa

SEQ ID NO: 68714 - DNA, 600 bp, Chicken  19866894340096_1
atcaaagatttcacattctgagaaagagtcctaatcaattattagaatacccacataaagggatagttgaaggaatcttctggttcctttttgtagtgggtggacagtactgtaaggcggtgtttcatttacaatgctatttggaaacacagaacttaacagctcactgggaatagcctccagcttcatagatttttgcctgtaacccacaggtgaagaaagctgaattaatacttcctgaatgattggaaattacagtaagggaattttgctggcaatgagcaacgtccaactagcagytccaaagtccaaggttatctttgaaggggatagcactcacttctacaaatatttgaggttaggcatgcaaaacctaaatcaagttttaactattagaggaaaaatcagtcatagcaagtatgctattttcttattcttgaagcttggtctcttcatgttctgctatgtcccatctacaccagcctagaacgcagagctcttttctgccatctggtagacaggatgaaagcaactttcaagatattttcacacacaaagtatgcagatgcaacttcttaatcaagtcctattacatatcca

SEQ ID NO: 68715 - DNA, 600 bp, Chicken  19866894340104_1
cattctccttataaagtcttgacttcttctgaacaggtccttccctgcaaacaatggcagatgcccatcccagcactaaactgctggtgcagttgggcagttcttccaacttcccaaggcccatcggaactccccctgctcagtctgcaggaatgaaactgggggcaacctctggaagtcagaacctttgtctggagtggaggacgagcctttgttttaatgtctggttctgtgtctgagaaggttggaatgggtgtgcctgctcagggactcaatcaactgcagcgggaagataaacayataaatgtttcatctcctcgatttgccaccaaccattgtgctgggtgctagcagatttttttaattaaatataatttacctaatcccagtgagaaacataattacaggatttattttgtatcctgcgatttcagaattactttataaagaagaataacgtttccccctgaagggctgtttgtaaatgaacaaacaaaatggaaaaacaaactacgcttctctaaaagtaataaatcacgggcaggaagcaacaacaacaacaacaaaaggcatctaatatgttggagctgcagtaatgct

SEQ ID NO: 68716 - DNA, 600 bp, Chicken  19866894340109_1
gtagaaatattgcagccctgaacgcattctaacagtgacaataataaaattattgctatatttgttgtgacagctccacacagctgtcacctttgatgataatgtattgatacagacattgcatgaatgagcgattggccgacacaaattgcagaagataaacctgcaccagcaggagttttgctttaattaagaaaaggattataggtgagaaaaagtaaatgtctgggtgacagaaatatctcaatgacactttatatggcacctcacaataatccttccaatgcattttttaccacycttcatgctttctagaaactcagaagacaaacaagctcataagttatgtagaagaaaaaagagcatccacccaggtgctccaacacacactgttcctgttctgtgtgaaaggaaggcagcagctccattcctgtatgattcacagtccctcaggggtattgtcactgttgtcaatcaaaacaggattttcccaaacacatttactaagaaaatcttgtcttcttgtaaggggacattgtcaagacttgttaagagcaaacaaggcaggactgcttccgctgacacatgacatcagaagga

SEQ ID NO: 68717 - DNA, 600 bp, Chicken  19866894340112_1
atctctcaagtaccaactttctgaaataacatcccgccctgtctttttgttcctcattatttccgcagacactaaaggtgttcctgctctgcagacatttgaatgctatttttgttaaccaggaagtttttgtcagcctcttggtcagctgacaaagaaaaatctgacctttcattttcaaatacatttctatttctttttcactctactattttagtaataaacaatttgtttgtcaatatatgttactctgagatcttctaatctctgtttttcactattttttattatcttttcacrgtgacttctttttttttccccctaatattctgtgtttatctccatttgacctaaaaaacaagcaaacaaacaaacaaaaaaactcaaaccctcaaatatttatctgcatcttaaaaataatagaatttatttgtaacaaggaactgtaaaggagagaacagttgtggatgaaggattatttcccaataacttctccttgttctttccttgctctttgttgcggcttttgactcaaagcctgcacttctgtttttctgcacggaatgttcctgccatccatccattgcaaggggctttctc

SEQ ID NO: 68718 - DNA, 600 bp, Chicken  19866894340115_1
atacttatttccttcccttgcaaccctgcacttcctcaacagccagatttagctgcagcactgttttcacaagttttagttgcttgtcacccagctactgagcagcatattggcaagacttttgttccgctgtttaactaccataaaacattatttcctactgcaagcataaccagtctgcctgttttcccatcattgtgactgttagatatattttcaagctcagatagaggcttgtagctggacatgagttgttctttatcaaaaacagcatctttacttggaaaaagctgagcacarcacaagtaattgcttgtatcagcatacggctttcaataagataaattatgtatttgcactcattcatttctctaatgaccactctcaaatagattttgaaataactgctcatgcatctccttttgattaaagaagcaacctagttagcttgatccatgcaaaatgagccctcagctatcacagtagagccaaaacagaactgttagtttggaaactgttggccatcaatattttcataacaatatcagagcccatttatgtgctttttttcaagcaaagtgatttgaataaataagcata

SEQ ID NO: 68719 - DNA, 600 bp, Chicken  19866894340116_1
cttcccctgcctgaagttcttgaattcaggaaaacctaccaaaagtaactggtatattaaataccataaggttacatatgccttcccaaagataacatctttggagaggtgcttgctggggctctccatggtttcttataatgctttaacaatgttggtaggcttcattttattgaaaagcttatgtttgtgtggaaagtacacattgcttgtttgaataactgttttaagtagattttgtgtataaattttttagccatctgtagtaattgggttattatattttctgaagtttctttsaccattcctagtggagctagcctatttcatggccagctagagcacgagttctggtgaggatataagaactgtctcttaaccttcagcttcatgtcagaggatgtggcaagacatcatttctgtccctctgttcttttccatctacactcccctctcttttcctcttccagacacgcactggatgacaggacacagcaggccaggagttagggaccttgtgctcctcagctttatgtagataattttcttgttctgtgcatgcaagatgttgaattgagagcaagatgttccactggagta

SEQ ID NO: 68720 - DNA, 600 bp, Chicken  19866894340122_1
ggcaaaggctgcccagagaggtggtgttcaagaaatgcagagatgaatcactggcagctatgcttagtgggcatggtgtgggttgatggttggagtacatgatcttagtggccttttccaatctttatgattccaagccttccaaccctaccagcttgtttagctaccagtgacaatctcacagggtatgagcatggattttgtctcagcctttcctgcttctttctttttagcaaagaaagagtatgggattgtcctgagacaaagtcctgaccctgtgtctgtgtctgggtggtgacrggctctgcaggtccccagggttgatcctttctgggaggatgtttgccaaagtctgagcaattgggaccgcaggatgaaagctgaagataatctaatttaattcctctgaaagcaaatgtttaaagagctcagatccacaggtcctaagcaactagtaaaacaaagcaactgaaaggtccaaggggagcatacttggccaagttctggtattggttatacagcataaatccaaagtgagcccacagactttgtcttccacgtcattaaatccacatacctgaaactatttaggcctttctt

SEQ ID NO: 68721 - DNA, 600 bp, Chicken  19866894340122_2
aatttaattcctctgaaagcaaatgtttaaagagctcagatccacaggtcctaagcaactagtaaaacaaagcaactgaaaggtccaaggggagcatacttggccaagttctggtattggttatacagcataaatccaaagtgagcccacagactttgtcttccacgtcattaaatccacatacctgaaactatttaggcctttctttttttttcccccctagatggacaaatgacttgcagtcctttggacctggttctcctttgcagagcctggtgtgtttcacaggtgatagcacayagttgtactagaaacaagctctctgtgtgaaaggaattgagcattaggtctatttcttacacagatatactgcttttggaactgtggttttcacagatatatcagattcaggaaacagataaaaaatagatttttctcaatgtaaatataatcacattaaaaactatttcttcccttcttgttttggtgaaatactgtgccaacacacacactacatgccaaggactagcatgcccatgttgtatagatcctcttctctggtggtctggaagaaggaagggtgagtgcagctctcagtac

SEQ ID NO: 68722 - DNA, 481 bp, Chicken  19866894340125_1
cttaattggtttttttttagattttttttctgtttaataaagagaacagactttagattgcagctctgcatgttccatttgaaaatcagccagtaatgtatttatgtcaacggaaaatggagctgcaaagaaacaaagaagtggatgaatttttggcagtcttgaaacttactgtctaattcctgtatcaaaacagaaagcacagctgcatattttttgcgctaggggctgacctgcaggagaggagctctgcagagaaggacctgggtgtcctgatggacagcaggctggccgtgagcrtgatccaagacactcttctgctcaacctcctgtagggaactgcttttagcagggggggttggtctcaatgatgtccagaggtctcttccaacctctatagttctgagattgtatgagaaagaaaccaccagaaccacgtgctaattgcatgggatggatttagcagaggcaatcccttttc

SEQ ID NO: 68723 - DNA, 600 bp, Chicken  19866894340130_1
gatgtgtgaaatggttgcatatccctggggaaatgttttctgtatcagcgaagctggttctgtttagtactacttcttcccaggctgctttgttgccctgccgtcagctttgtgcatgtccatgacttcagccacagtgctttacctcgagcatttgtgggaatcagcagtgacatccactcttgttagtgtgcctggtgcacctttaagagccacttgagtgaattttctcctacagtgcgccgcatgtattctcagtgctttatttcagtccctccaacaattacagcccaacagtgygagcaaggggaaggggaaaatctgagatttattgtggagtctgagtttctgttttcacagaacaggagctttcttttaatggtattcagcaagttccttttctcacaggaactgtgccagaagatggcattgctgtacacagagcactcatctccattgaaacaagtcattaacaggagtggaaaaactgcagctcaaaagtccattaggctgacgggaaacaaatttgccttcgtatcacacagaaggacagttccattaaaatatgcagcgtgcccaggagttattctttttgttgtt

SEQ ID NO: 68724 - DNA, 600 bp, Chicken  19866894340133_1
ctgcccgcagccccgcaccgcccgttccgcgccgggggaaggcgatcgcggcggaccggggccgccatggggccggcgggcggtcggtccggcttttacgtggggctggggctggctttggcttccagcgccttcatcgggggcagcttcatcctgaagaagaaggggctgctccggctgtgcggccgcggtcgccccagggcaggtacggcccgagcccaccccgagcggggctccatcccgcagctgcactgcgccttcattgattgcctcgtccctttctccgcagggcacggaggrcacgcgtacctgcgggagtggctgtggtgggcagggctgctgtgcagtgagtaccgcgccgagagctgagcggcgctgggatcgctcccagctgcaccgacgttgggggggggaggagggatgccgggaggggggccgtgcctctgctctgccctccggaggtcccctctagcgtcctgcatccagaaggctggaagggtccggaggagcccgcggggatgctcgggggtcggagcagctctgctacagggacgggctgagagctgggagtgctcggcctggggcacagtgggctccggg

SEQ ID NO: 68725 - DNA, 599 bp, Chicken  19866894340141_1
  misc_feature (1)..(209): n is any nucleotide
nnnnnnnnnnnnnnnnnnnnnnnnnnnnnnnnnnnnnnnnnnnnnnnnnnnnnnnnnnnnnnnnnnnnnnnnnnnnnnnnnnnnnnnnnnnnnnnnnnnnnnnnnnnnnnnnnnnnnnnnnnnnnnnnnnnnnnnnnnnnnnnnnnnnnnnnnnnnnnnnnnnnnnnnnnnnnnnnnnnnnnnnnnnnnnnnnnnnnnnnnnnnnnnnnagctctatgggcccccttaccttccacacactagcccatgggataccttcaagtaggctctcctgaagtccagggtagcactcctacttaytgctttcattcttccacacaagatcttgaacactactacctcatgatcgcagcatcccaacctgcacccagccttctcatcccctaccagcccttcctcgctagtaaaaacaaggtcaagtagcacacccctccacatcagatcctccaccacctgcgtcagaaagtaatcatcaatacgctgcaggaactgcctggaccttgtgtgcctggctttgttactttgccaacaaatatcaggatggctgaagtcccccataaggacragcgccgggggtcggaaggctacttccagctgtt

SEQ ID NO: 68726 - DNA, 600 bp, Chicken  19866894340141_2
gctctcctgaagtccagggtagcactcctacttaytgctttcattcttccacacaagatcttgaacactactacctcatgatcgcagcatcccaacctgcacccagccttctcatcccctaccagcccttcctcgctagtaaaaacaaggtcaagtagcacacccctccacatcagatcctccaccacctgcgtcagaaagtaatcatcaatacgctgcaggaactgcctggaccttgtgtgcctggctttgttactttgccaacaaatatcaggatggctgaagtcccccataaggacragcgccgggggtcggaaggctacttccagctgtttgtaaaaggcctcatccacttcctcctcctgatcaggtggcctgtagcacacacccacaacagtgtcacctatgttagcccgtccctaaatttttacccacaagctatccacttgttcatcatcccccccacagtggagctcaatgcattctagcagcttctcacatacagagcaagtccaccacctccccttgtcttgccatccacaacagcatgccacttgtgtgagctgtcccaacatgtctctgcgattgcaatgagatcac

SEQ ID NO: 68727 - DNA, 506 bp, Chicken  19866894340143_1
tgaagatccccaaggaggagatcccacagcctctgggcagcctgagccagtgctctgtcacttgcagagcacataggtgctgcctgatggtcagagggaactttctgtgttccagtttgtggccatcacctcttaacttggcactgggtaccactgaaaatagctcagcatttgtgaagctttagatctctgttaggctgtgaagtcttgtgcatgcaggcctgactgtgcatgcacctgaagctcacaactgacctcctacagatgcatatttgtgtgctatgaagtaggatcagtccrattttctgcaagtgtctgggaggaattttccccaaaaagtccaacaaatcaagactgaacaaatgttcacaaataaagatggactcacgccagtgtttctagctgccatgtcttttacaaatgcaatgttcatgaaagtaactatgaacaaaggctgggtattgaccacgagccagagaaggtatgactattcagcactatatttt

SEQ ID NO: 68728 - DNA, 600 bp, Chicken  19866894340145_1
ttctaactaccaccagttctttgagattactgtggacataatacgtggacagttttttagtttggttttcttcagctatctaaatgacataaaatggggatgattcaaataaattacaccgaatttaactttgctgagagtcacttttgctcatgtgacagccaactgccaggaactgatagcaatacacctacatcagtaggaagagttgtgttggtaatttgagaacccaggtttgtttgcttgcactgggctaccctgaagtaatgatgctaaaggagaggtgtgcagagcagcagycactgtagcagcacacggctcctccttcgaacagccctgccaccttccccagagcctcaggttagatcagtcccactactttaccctgactttcagtgcttctgtaaatgccatctgctgaatttaaagccatccaatccaaagcttccagcccacactgcaaacctgcaaggatccttagcaatactgtctcgctctgcctagactgtttttttagctcctacactgaggatctgtcactgtatcaagtaggtggcactacaagctttggctgagtagcaatggagcacacactcagta

SEQ ID NO: 68729 - DNA, 600 bp, Chicken  19866894340146_1
aagagagcagctgctcaggctgtgcagtggctgctcaaaatttttatttgctgtttgaatgacataatttctccagtagtatgaaagtatgaattagagaacttctaactcacagggtacacacataccaggccctcctcctttctaaatggacatcttaagactgtgtctatggggtctggttctaagaaaaaatacagagggatttaattattatttacaaatgtatgtacctctggtgtacatgtgtagatacatctgttctgagggaggatgggaaggagggaggctgcctcactrgagtggagaagagatttgggttatgaacaagtaacagagaatgggcagggggaggtgaacttgtaggtaaagtgcataaagccgagggcgtgtctgttgtgagaaaggagaaataagaacaaagtttggacagcagcagtcagacagcactttgagagtgggcaggatgaaatgcagagggaattggaaggcagcagagacacttgagtagcaagggaggaggggaaagtcacgtccaaatggcagatagataagtagaatctgatgagcaatgagctcataaggggagaattatttggg

SEQ ID NO: 68730 - DNA, 600 bp, Chicken  19866894340147_1
tgggatttatttacaaatgcattgggaaagtgaatgtgaaaatgtcctaatttagcaaaagaaagtggaaatgtttcattctgaagcagcttctcattagacaccgaaaggctggcaagaccaagggcaaaatctaagtgaaatgttttaactgtatttaaacaaaaactacttacaatgatattttaaaatactttttaacgtatttatgtatttactgcattttccttcacggagcagctcagaaagttggggtctctcagccccgagtgcagtggatgccttctctccagccctgcmccccagcaacgccttttgccacatttggggcccagctcagacaccagcagcatgccatggttcgtgttgctctgccttggtctcaccaaggttccattgccgcagcgttcagcacagcrtgccctactgagggcccacagatgaccagcatgtacagctcaactgcgtgtttcccctgtgtatgtgttcgtggaagtttatatacatgtttaggaggtcccatgcctcctaagtcactgatctgactacaaactgctcagactctgtgatgtatttttcatcttatttattgcaggcatg

SEQ ID NO: 68731 - DNA, 600 bp, Chicken  19866894340147_2
accaagggcaaaatctaagtgaaatgttttaactgtatttaaacaaaaactacttacaatgatattttaaaatactttttaacgtatttatgtatttactgcattttccttcacggagcagctcagaaagttggggtctctcagccccgagtgcagtggatgccttctctccagccctgcmccccagcaacgccttttgccacatttggggcccagctcagacaccagcagcatgccatggttcgtgttgctctgccttggtctcaccaaggttccattgccgcagcgttcagcacagcrtgccctactgagggcccacagatgaccagcatgtacagctcaactgcgtgtttcccctgtgtatgtgttcgtggaagtttatatacatgtttaggaggtcccatgcctcctaagtcactgatctgactacaaactgctcagactctgtgatgtatttttcatcttatttattgcaggcatgaatacaggaacaggtaaacagctgagccgtaaaagtttctctccaggcatgttttcaacaaaatgccatcacacactgtctggtgatacatgctgctacccagatggaacaaaacgggg

SEQ ID NO: 68732 - DNA, 600 bp, Chicken  19866894340153_1
taggctcagggagaagaagtactgactctttgacacaatcagaagacaactggttcagatcacagaatcgtagaaacacagagtgctttgagttggaagggacctttaaaggtcgtcttgttcaactcccctgcagtgaacagggacacctacagctagatcagggtgctcagagatccatccagtctgaccttgaatgtctccagggatgatgctgcacctctctaggcaacctgttgcagatggtgatcctgtttaactgatgttcctatgtggcagtccagaaaaagtaaatccagyraaaaaaatctcatttttttagaccaaaacttcaactcagatcatgagagtccatctgaatttctaactattctgcwtctttctttaagacccacagaagaattgggattctrcaaagctcaatacttggccctgttttactagtgatggggctctatgttcccatctgaaaggactgactttagtgtaagttcatccaagacagtgagatcacttgggagtccaagacattatgtcctaaggtctcttattcctcaggaccccttggcagtcattcccaatatgccttgttgaatgaaa

SEQ ID NO: 68733 - DNA, 600 bp, Chicken  19866894340153_2
aggctcagggagaagaagtactgactctttgacacaatcagaagacaactggttcagatcacagaatcgtagaaacacagagtgctttgagttggaagggacctttaaaggtcgtcttgttcaactcccctgcagtgaacagggacacctacagctagatcagggtgctcagagatccatccagtctgaccttgaatgtctccagggatgatgctgcacctctctaggcaacctgttgcagatggtgatcctgtttaactgatgttcctatgtggcagtccagaaaaagtaaatccagyraaaaaaatctcatttttttagaccaaaacttcaactcagatcatgagagtccatctgaatttctaactattctgcwtctttctttaagacccacagaagaattgggattctrcaaagctcaatacttggccctgttttactagtgatggggctctatgttcccatctgaaaggactgactttagtgtaagttcatccaagacagtgagatcacttgggagtccaagacattatgtcctaaggtctcttattcctcaggaccccttggcagtcattcccaatatgccttgttgaatgaaac

SEQ ID NO: 68734 - DNA, 600 bp, Chicken  19866894340153_3
acagagtgctttgagttggaagggacctttaaaggtcgtcttgttcaactcccctgcagtgaacagggacacctacagctagatcagggtgctcagagatccatccagtctgaccttgaatgtctccagggatgatgctgcacctctctaggcaacctgttgcagatggtgatcctgtttaactgatgttcctatgtggcagtccagaaaaagtaaatccagyraaaaaaatctcatttttttagaccaaaacttcaactcagatcatgagagtccatctgaatttctaactattctgcwtctttctttaagacccacagaagaattgggattctrcaaagctcaatacttggccctgttttactagtgatggggctctatgttcccatctgaaaggactgactttagtgtaagttcatccaagacagtgagatcacttgggagtccaagacattatgtcctaaggtctcttattcctcaggaccccttggcagtcattcccaatatgccttgttgaatgaaacaaatctagttctaggataaatagaaacatgtttgttttggccctgctgcctggatattttcccaaaggttttgctc

SEQ ID NO: 68735 - DNA, 600 bp, Chicken  19866894340153_4
cgtcttgttcaactcccctgcagtgaacagggacacctacagctagatcagggtgctcagagatccatccagtctgaccttgaatgtctccagggatgatgctgcacctctctaggcaacctgttgcagatggtgatcctgtttaactgatgttcctatgtggcagtccagaaaaagtaaatccagyraaaaaaatctcatttttttagaccaaaacttcaactcagatcatgagagtccatctgaatttctaactattctgcwtctttctttaagacccacagaagaattgggattctrcaaagctcaatacttggccctgttttactagtgatggggctctatgttcccatctgaaaggactgactttagtgtaagttcatccaagacagtgagatcacttgggagtccaagacattatgtcctaaggtctcttattcctcaggaccccttggcagtcattcccaatatgccttgttgaatgaaacaaatctagttctaggataaatagaaacatgtttgttttggccctgctgcctggatattttcccaaaggttttgctcagttttaagtagctgcccttgccttctgcctctaca

SEQ ID NO: 68736 - DNA, 600 bp, Chicken  19866894340160_1
actagaacttctaggttttatttctgcatcacaactccagtgtgtattttgtctggaacccctgtgccacggatgcggtcactgctttgcagctcctatccactcctatccacatccaagacttgtgatggaaaaactcttgcgctcagaagagctagaaactatcacctatcaatatcattgcagaacttcttgagtgtatcacggacatctgtaggataaatagtgccctttttctaccattgctcaataaaaaaccttatgttcaaatgaaacacaaaagcagagaagaacaacctrtgagacactcactgaaaagaatatatagcaattkggagastarctaacaacttcctctctttctttcgcaagtgtggctgacatggaagtttccagaaagaaagaagtgtttacttgatttgaagaaatttactccacattacagtcatgcacatatgaaccagaggaaacccagggaaaaggtaaatttgttttatatatatatacatacaggaaaatcttggtgcgctcaagattggctacttatttttgtcagctccttgtctaattccagttcaaatctttgcttgttattgtaat

SEQ ID NO: 68737 - DNA, 600 bp, Chicken  19866894340160_2
ctccagtgtgtattttgtctggaacccctgtgccacggatgcggtcactgctttgcagctcctatccactcctatccacatccaagacttgtgatggaaaaactcttgcgctcagaagagctagaaactatcacctatcaatatcattgcagaacttcttgagtgtatcacggacatctgtaggataaatagtgccctttttctaccattgctcaataaaaaaccttatgttcaaatgaaacacaaaagcagagaagaacaacctrtgagacactcactgaaaagaatatatagcaattkggagastarctaacaacttcctctctttctttcgcaagtgtggctgacatggaagtttccagaaagaaagaagtgtttacttgatttgaagaaatttactccacattacagtcatgcacatatgaaccagaggaaacccagggaaaaggtaaatttgttttatatatatatacatacaggaaaatcttggtgcgctcaagattggctacttatttttgtcagctccttgtctaattccagttcaaatctttgcttgttattgtaatcttgcatgaatggacactgctcatcggtgtcatg

SEQ ID NO: 68738 - DNA, 600 bp, Chicken  19866894340160_3
tgtgtattttgtctggaacccctgtgccacggatgcggtcactgctttgcagctcctatccactcctatccacatccaagacttgtgatggaaaaactcttgcgctcagaagagctagaaactatcacctatcaatatcattgcagaacttcttgagtgtatcacggacatctgtaggataaatagtgccctttttctaccattgctcaataaaaaaccttatgttcaaatgaaacacaaaagcagagaagaacaacctrtgagacactcactgaaaagaatatatagcaattkggagastarctaacaacttcctctctttctttcgcaagtgtggctgacatggaagtttccagaaagaaagaagtgtttacttgatttgaagaaatttactccacattacagtcatgcacatatgaaccagaggaaacccagggaaaaggtaaatttgttttatatatatatacatacaggaaaatcttggtgcgctcaagattggctacttatttttgtcagctccttgtctaattccagttcaaatctttgcttgttattgtaatcttgcatgaatggacactgctcatcggtgtcatgaataag

SEQ ID NO: 68739 - DNA, 600 bp, Chicken  19866894340160_4
gtattttgtctggaacccctgtgccacggatgcggtcactgctttgcagctcctatccactcctatccacatccaagacttgtgatggaaaaactcttgcgctcagaagagctagaaactatcacctatcaatatcattgcagaacttcttgagtgtatcacggacatctgtaggataaatagtgccctttttctaccattgctcaataaaaaaccttatgttcaaatgaaacacaaaagcagagaagaacaacctrtgagacactcactgaaaagaatatatagcaattkggagastarctaacaacttcctctctttctttcgcaagtgtggctgacatggaagtttccagaaagaaagaagtgtttacttgatttgaagaaatttactccacattacagtcatgcacatatgaaccagaggaaacccagggaaaaggtaaatttgttttatatatatatacatacaggaaaatcttggtgcgctcaagattggctacttatttttgtcagctccttgtctaattccagttcaaatctttgcttgttattgtaatcttgcatgaatggacactgctcatcggtgtcatgaataagact

SEQ ID NO: 68740 - DNA, 600 bp, Chicken  19866894340160_5
gaaccagaggaaacccagggaaaaggtaaatttgttttatatatatatacatacaggaaaatcttggtgcgctcaagattggctacttatttttgtcagctccttgtctaattccagttcaaatctttgcttgttattgtaatcttgcatgaatggacactgctcatcggtgtcatgaataagactgaattcaggccaaatgctgcccattgaattaacattcaagttcttcacttccactgagagctcaaccataaattctcaattaaggcctggctgaggctcagtgaagcatgagcrgagattttcttatgtaaataaggcagcagtaaactcatttaacaaaccttcaatagttatttagaatcggcttgttcatattgcatctttcccctcatcttgtccttgattaaaatgacatgagctgagcttgattccctctttttttcttcaagtcctgacttgtctggcatcatttgaaacctgacagttgtttccgatggatacctctgtcaaactaattgcatgctttatctaagtccttactgggtacaactactacttctgaggtttatattttcactaagtgatgaaggctta

SEQ ID NO: 68741 - DNA, 600 bp, Chicken  19866894340165_1
agataataatctagatattatcttagataataatataatctaaaatggaataaagcatatctaatattgctggaatatatatatatattaattttactaggaattacaacaaaagaaattagcaaaacatttgacttttaattacaaattgagatgcaaaattatgagaattagtagaaatgacaatgtttcagttatattactgttaatctcagtaaccataatcgttttgtgaatatgtattctcaacagaatcagaaatcaccttcttaatgccactactgtaggatgcaagaagtrgcaagccactgaaaccaactacagagatacaaataaataacatgtattgtgaaaaatacatttatcatttggctttactttcataagcaataaactgcaataatccacaaccattttgtgtctatgtatgtagacaggaagagatgtacacactaatacattctgttcaatgtcttatttgacagtcttttaaatgcattttctttttctacacatagtctcatttagacacttttgactgcaaccaagctgaataatgacatggaactatccgaacacactgagagtactatgcttcat

SEQ ID NO: 68742 - DNA, 599 bp, Chicken  19866894340167_1
  misc_feature (1)..(130): n is any nucleotide
nnnnnnnnnnnnnnnnnnnnnnnnnnnnnnnnnnnnnnnnnnnnnnnnnnnnnnnnnnnnnnnnnnnnnnnnnnnnnnnnnnnnnnnnnnnnnnnnnnnnnnnnnnnnnnnnnnnnnnnnnnnnnnnnnngaccttgaaggactgtgctgtttccatagaagaggtaccagaggacagtgtggggtctgtaggggctgagctgtgtgatgcagctcaggttgaggggacttccttcgaggggctctgctgagcttgctacgctcagcactggggaggtgaagagctctggaaaggaaaasgaaattgggttttccttctttattttgattcmaaggtgtayacaagttcccctggaagctgtcagggtgcatcttccttgctctgccagcaaggagctgagcgtgcacaagaagcagaaccaggacagctgacccaaccgatctcaatccatgacgttcacctttcccccccttaattctctccccagtcccactgtgggagaacgagcaatgggctgcatggtgctgagctgaaccctcaccctttgtcctgcagctcccacatggggacgatggaaagcccaaagaccaatggggac

SEQ ID NO: 68743 - DNA, 599 bp, Chicken  19866894340167_2
  misc_feature (1)..(98): n is any nucleotide
nnnnnnnnnnnnnnnnnnnnnnnnnnnnnnnnnnnnnnnnnnnnnnnnnnnnnnnnnnnnnnnnnnnnnnnnnnnnnnnnnnnnnnnnnnnnnnnnnngaccttgaaggactgtgctgtttccatagaagaggtaccagaggacagtgtggggtctgtaggggctgagctgtgtgatgcagctcaggttgaggggacttccttcgaggggctctgctgagcttgctacgctcagcactggggaggtgaagagctctggaaaggaaaasgaaattgggttttccttctttattttgattcmaaggtgtayacaagttcccctggaagctgtcagggtgcatcttccttgctctgccagcaaggagctgagcgtgcacaagaagcagaaccaggacagctgacccaaccgatctcaatccatgacgttcacctttcccccccttaattctctccccagtcccactgtgggagaacgagcaatgggctgcatggtgctgagctgaaccctcaccctttgtcctgcagctcccacatggggacgatggaaagcccaaagaccaatggggactgctcacctttgatggaaatatataaaccctg

SEQ ID NO: 68744 - DNA, 599 bp, Chicken  19866894340167_3
  misc_feature (1)..(89): n is any nucleotide
nnnnnnnnnnnnnnnnnnnnnnnnnnnnnnnnnnnnnnnnnnnnnnnnnnnnnnnnnnnnnnnnnnnnnnnnnnnnnnnnnnnnnnnnngaccttgaaggactgtgctgtttccatagaagaggtaccagaggacagtgtggggtctgtaggggctgagctgtgtgatgcagctcaggttgaggggacttccttcgaggggctctgctgagcttgctacgctcagcactggggaggtgaagagctctggaaaggaaaasgaaattgggttttccttctttattttgattcmaaggtgtayacaagttcccctggaagctgtcagggtgcatcttccttgctctgccagcaaggagctgagcgtgcacaagaagcagaaccaggacagctgacccaaccgatctcaatccatgacgttcacctttcccccccttaattctctccccagtcccactgtgggagaacgagcaatgggctgcatggtgctgagctgaaccctcaccctttgtcctgcagctcccacatggggacgatggaaagcccaaagaccaatggggactgctcacctttgatggaaatatataaaccctgagattccct

SEQ ID NO: 68745 - DNA, 600 bp, Chicken  19866894340167_4
ccttaattctctccccagtcccactgtgggagaacgagcaatgggctgcatggtgctgagctgaaccctcaccctttgtcctgcagctcccacatggggacgatggaaagcccaaagaccaatggggactgctcacctttgatggaaatatataaaccctgagattccctcctctttaatgacaagtaggagtgcatgtctgcactgcagtgatatctgccgctgtggtgggccttggcttgggggatggagagctgcatggctgaggtgtagggtttggtgatgtcggctccatccctrtagaaccgcaccgcagccaaactgcccaccttccatccccggcactgcatctgcagcagctccccttcaaacactgcatgcgaygggacctggaggatcagcaggtctgcaagagagcccgagggcctctgctgaaggtcctgcatttggcctggggttatcccaaacctcagcacagaccaggggatgaatgctgccctataggaaaggactttggggtagcactgatggacgaaatattcagcacgaggcagcagtgtgactgcagtcctgaaagccaatcatatcctgggctgccca

SEQ ID NO: 68746 - DNA, 600 bp, Chicken  19866894340167_5
agctcccacatggggacgatggaaagcccaaagaccaatggggactgctcacctttgatggaaatatataaaccctgagattccctcctctttaatgacaagtaggagtgcatgtctgcactgcagtgatatctgccgctgtggtgggccttggcttgggggatggagagctgcatggctgaggtgtagggtttggtgatgtcggctccatccctrtagaaccgcaccgcagccaaactgcccaccttccatccccggcactgcatctgcagcagctccccttcaaacactgcatgcgaygggacctggaggatcagcaggtctgcaagagagcccgagggcctctgctgaaggtcctgcatttggcctggggttatcccaaacctcagcacagaccaggggatgaatgctgccctataggaaaggactttggggtagcactgatggacgaaatattcagcacgaggcagcagtgtgactgcagtcctgaaagccaatcatatcctgggctgcccatgagaagccatagatgctccatcataaggggtgttcagggccagcatggatggccctgtgggcaaccccatggcagggattggg

SEQ ID NO: 68747 - DNA, 600 bp, Chicken  19866894340178_1
agtagtaaatattggcatctgactatttgcatatacaattaaatcattaagcaacatcgggaaacttctgaagcttctctggagaagcatccttttataaaagggaaaacagattcttgtgaaacagcagacctccagggctgggggcgttaggaaacataaggtgaccgcttgcatgggtttcacaccagagagaactgataacgctgccttcaatcctatccctggtttgggagccccttctgctgccctgagcgtgccatgccggccccacgagcagcacctgcagccccatcagtkctggaccgtcatctgtgacagtgcraatcctctagaaacctcagcgctcgttttacccagaaatgacagcaaaacgctctgagttcactgttttaaaaaaggttttatatgaaaggcccatatttagaatgaaacagtttttaacaactagcaaagctgacaagtttgaaaaccagaattgctgaaaggccaataattcaagtacttcagatgaatttgctgggctcggtgaaatccaacagaccaactcagcaagtcagaagtccttatgcctgagtcaggatttgattcacaaactga

SEQ ID NO: 68748 - DNA, 600 bp, Chicken  19866894340178_2
tttgcatatacaattaaatcattaagcaacatcgggaaacttctgaagcttctctggagaagcatccttttataaaagggaaaacagattcttgtgaaacagcagacctccagggctgggggcgttaggaaacataaggtgaccgcttgcatgggtttcacaccagagagaactgataacgctgccttcaatcctatccctggtttgggagccccttctgctgccctgagcgtgccatgccggccccacgagcagcacctgcagccccatcagtkctggaccgtcatctgtgacagtgcraatcctctagaaacctcagcgctcgttttacccagaaatgacagcaaaacgctctgagttcactgttttaaaaaaggttttatatgaaaggcccatatttagaatgaaacagtttttaacaactagcaaagctgacaagtttgaaaaccagaattgctgaaaggccaataattcaagtacttcagatgaatttgctgggctcggtgaaatccaacagaccaactcagcaagtcagaagtccttatgcctgagtcaggatttgattcacaaactgatttttagcactgttaatgcactcgt

SEQ ID NO: 68749 - DNA, 600 bp, Chicken  19866894340181_1
catatctaagtgcaaggttttgcattttggtcggagtaatcccaaatatgtgtacagactgggagaagaaacccttgagagtagccctgtggagaaggacctgggggtcctgatggatgaaaaactaaacatgagccagcagtgtgctcttgcagcacagaaggtcaatggtatcctgggctccatcagaagagatgtggccagcagaggaacagggagatgattgtccctctccactctgccctcaggaggccctatctggagtactgtgtccaggtctggggcccccaacacaggaamgatgtggagctgatggatacggtccagaggagggccacaaagatgattagagggtagagcactttccctacaaagacaggcggagggagctggacttgttcagcctggagacgagaaggctgcaaggagacttcactgcaaccttccagtatttaaaagaggattataaaaagaaggggaatcatttttaacttgggtaggtagtgataggacaggggggaatggttttaagctcagagagggaggggttttgattggatgtcatgggggaagttcttcagagagagagtggtgaggtgc

SEQ ID NO: 68750 - DNA, 600 bp, Chicken  19866894340183_1
gtataagaaattatgctgaacatgaaatagcctttgcactccccagccctaatgattgcaacttttgtagcccttggaaagagaactagggaatgtttcagtgatctctgcttcatttgcacaggtgtgcagaggtaggactgagtcttgcctgttagttcctttgttgttgtccgtgaaaaaaggaaattgatgttgcaacccatttttccctttccttaaaagaaaaaaaaaagtttgtttaaaagactaagactaagatcaagagctctgcagagacattaagaattaacgaccctrgtgtaagtagcacatcccatgccaaacaatctacttcccagctgaggtgatgagtatggagacaaagtctgagagtgaatatgtcatgggaatagcagctgtatgttctgacaccaggaacaagtattgggaatgacttgttacagggaaaacaatagactagagattcagaaaacgaccagtgaccaagatgttcacagaaatgaaagttgactgatctgacaagtcttggagtttaaatttttgctgtgtgtatatctagactctagtggtactgtttttttttttcttactgccttc

SEQ ID NO: 68751 - DNA, 600 bp, Chicken  19866894340186_1
ctcaaaccatccgagaggaaacactttgtttgaaagaagagagaaatccagctgaaaccatccataaaaataagccttccagctcccaggctgccccaagatgagggagaacgcggcattgagggacatggtttagtgggcacggtggggatgggctgatgctctcagtgttttattccaaccttcataatcctacgactctaagagattcagacaccacttccatcccgaggtgtcctgctggaggttcaggagctgtttctgctcccctagatccattcccaagcagcagctcagtgyctatgggggagcagaggtctcccctggccagcccacctcacggtgcaccgccaggcacaccagcaactcttccaccaagtgtcagttctgcaataaagagcaataaacatgccagagtaattaatgtcttaacaacttattacaatcctcagataattaatcacaaaagctaaacatgctgtctcacyctcctaatgtgttaatgctctaattattatgcctcaattaaggggaagtcagcgctccttgcttagaagtgcacgtttaataagggtgctcaaatggaggcacgttgaagtg

SEQ ID NO: 68752 - DNA, 561 bp, Chicken  19866894340186_2
aatcctacgactctaagagattcagacaccacttccatcccgaggtgtcctgctggaggttcaggagctgtttctgctcccctagatccattcccaagcagcagctcagtgyctatgggggagcagaggtctcccctggccagcccacctcacggtgcaccgccaggcacaccagcaactcttccaccaagtgtcagttctgcaataaagagcaataaacatgccagagtaattaatgtcttaacaacttattacaatcctcagataattaatcacaaaagctaaacatgctgtctcacyctcctaatgtgttaatgctctaattattatgcctcaattaaggggaagtcagcgctccttgcttagaagtgcacgtttaataagggtgctcaaatggaggcacgttgaagtggggagggagggggcgatgggggttaaggaagacgacaccatccttaatgaggttgcatgggtggctgtaggcaaggaattgacagcccctctctgggatctcacacatgagtgcgcgtggaactgggggccatctgcggcggctctgcg

SEQ ID NO: 68753 - DNA, 599 bp, Chicken  19866894340194_1
  misc_feature (1)..(4): n is any nucleotide
nnnncaagagcttcttcccctcctgtccctttttcctataggataggagtctttgttatcctaaatcttttaaagtgatgtattatttatctgtttttatacttgaaatatatgcaacaagcctctgggagtcatgtttcttttgatatctgtattttgaataagaaattgacaggaatggtagaaacttccataatagaagttttgtcgttttaattacgcatctctggtaagccttcttctattcttcttcttctttgcttaacttattccttctagggtttttttttctgggagtcycttctgaacacttgctctgtggatcctgcaatgtttttctacttctttgggctattagaaagtccttactgtgctgtcagtctctccactaccttcctggctacattagctacttagctagttaaattaggggtgttatggtaggggatgcagtaaggagagcatatttcccttcaggagtttctgtacaatcattaaagttttattttggtcactgctgcaggaaagggagcagaagagatgttaacatcgtatttggaaaaatgcatgggtttcggtgccctacttatgcacacaca

SEQ ID NO: 68754 - DNA, 600 bp, Chicken  19866894340194_2
gcccaaggttcaacccaaggttgctaagtcttgcatacagtgaaactaaatgtaagcttgagtcaacaggaatgtgatgggcttcaagcaaatgaggcatgttgctgcacttgccttattaatgcgtgtccatctaaacttcatcagtacctacagaagcctgtcaaatgtgaattgagtggctcatcagggcagtgggtgtttccactgcctgctaatttgcaataaactacaattgcaggccactcacctgcctcccttcttgacacaaatgtgtatagcttttattcccggtgttgyggttttacatagtcttcagagctatcttccttggtgactctgactgtggataacaggtttaatcttcccagctgtactgaaagaccagttcagcaaggatgctggtcagggcttcttgttggtgaatgtttctggagagggggtatgatctaaggtcacacaggtaaagctgtatgggctgacagatggcaaccttagtaacagagcagacatgcagagccaaaatgcagtggatactgtcttaattttttattgaaacttttgttttttaaatccaatcttccttttatcaagggaagg

SEQ ID NO: 68755 - DNA, 600 bp, Chicken  19866894340195_1
caccacgcatggatgggaaacaatttatttaatttattggagtctaacgagcaattatgtttggaaatatcatttagaaaaagaatctgaaaagaaaaaacctttcagtttttggaaccatggagggtctttcatatgtgggtatagaaagaaaatagttggctaggttggctagtgtaattccaattccagggtttttttatgcttttatcaggaattctgccatcttcatactcaacatacaagcaaattgggtctgttgtcaggaaaagaatgaagatgagagaggagtgtgccagygggaatctcttagcactgatttcctgtataacagtcagcctttttataaatagaacctcattccatgcaataatataatattaatctgtcaccatctttggcacaacaacaggatcatgaaccacttgcttgctaattgccatttgagctcatgcacggagcacaggctgtgataatattagcttggtcagagtcacaagtatgtcagtgccagaaacagttcagggtctgtttccagtctctgaaaatgtcatatctgcatcattatatcccaggaggtaaaattctggactctcccgc

SEQ ID NO: 68756 - DNA, 600 bp, Chicken  19866894340195_2
gcttgctaattgccatttgagctcatgcacggagcacaggctgtgataatattagcttggtcagagtcacaagtatgtcagtgccagaaacagttcagggtctgtttccagtctctgaaaatgtcatatctgcatcattatatcccaggaggtaaaattctggactctcccgcttaatatgaatgctttcacttgtcactcagacctgtaaaggaaaaccatacgacagttcctgttaggggttcatttgggaaaaaagcttttaccaagagtaataaatgtttatcaggcatgcttgcrtagtatttagcaattactttttttttaaattggaaagtttcaccagccttcartacatcgttgaaacaatttgttagcacgcaccttgtaagagaattagagaaaggactggggggaggtctggggccaccgctacaaaggtactattcctgcatataactttcwcaagggagaacaaggtggatattattcttgtaagttwtacaattgcccaaatagttctgaacagtgtcaatgacactaatcartctattatcaatttgtccctgctgcttctcatccaagtcctgattagctgca

SEQ ID NO: 68757 - DNA, 600 bp, Chicken  19866894340195_3
agcttggtcagagtcacaagtatgtcagtgccagaaacagttcagggtctgtttccagtctctgaaaatgtcatatctgcatcattatatcccaggaggtaaaattctggactctcccgcttaatatgaatgctttcacttgtcactcagacctgtaaaggaaaaccatacgacagttcctgttaggggttcatttgggaaaaaagcttttaccaagagtaataaatgtttatcaggcatgcttgcrtagtatttagcaattactttttttttaaattggaaagtttcaccagccttcartacatcgttgaaacaatttgttagcacgcaccttgtaagagaattagagaaaggactggggggaggtctggggccaccgctacaaaggtactattcctgcatataactttcwcaagggagaacaaggtggatattattcttgtaagttwtacaattgcccaaatagttctgaacagtgtcaatgacactaatcartctattatcaatttgtccctgctgcttctcatccaagtcctgattagctgcagagccactacagtggcctgtcgacaggcttgggaaggaggtgctgctggaaca

SEQ ID NO: 68758 - DNA, 600 bp, Chicken  19866894340195_4
tctcccgcttaatatgaatgctttcacttgtcactcagacctgtaaaggaaaaccatacgacagttcctgttaggggttcatttgggaaaaaagcttttaccaagagtaataaatgtttatcaggcatgcttgcrtagtatttagcaattactttttttttaaattggaaagtttcaccagccttcartacatcgttgaaacaatttgttagcacgcaccttgtaagagaattagagaaaggactggggggaggtctggggccaccgctacaaaggtactattcctgcatataactttcwcaagggagaacaaggtggatattattcttgtaagttwtacaattgcccaaatagttctgaacagtgtcaatgacactaatcartctattatcaatttgtccctgctgcttctcatccaagtcctgattagctgcagagccactacagtggcctgtcgacaggcttgggaaggaggtgctgctggaacacattcagcttgyacacacaagtccgtcttcaacaaatacagatttaattttttccttgtttcaatcaaaaagcctgtaagagccaacgatttaagtcttttcattcagtagg

SEQ ID NO: 68759 - DNA, 600 bp, Chicken  19866894340195_5
gacctgtaaaggaaaaccatacgacagttcctgttaggggttcatttgggaaaaaagcttttaccaagagtaataaatgtttatcaggcatgcttgcrtagtatttagcaattactttttttttaaattggaaagtttcaccagccttcartacatcgttgaaacaatttgttagcacgcaccttgtaagagaattagagaaaggactggggggaggtctggggccaccgctacaaaggtactattcctgcatataactttcwcaagggagaacaaggtggatattattcttgtaagttwtacaattgcccaaatagttctgaacagtgtcaatgacactaatcartctattatcaatttgtccctgctgcttctcatccaagtcctgattagctgcagagccactacagtggcctgtcgacaggcttgggaaggaggtgctgctggaacacattcagcttgyacacacaagtccgtcttcaacaaatacagatttaattttttccttgtttcaatcaaaaagcctgtaagagccaacgatttaagtcttttcattcagtaggcaagctttccaaatctgaaagtttctgaatgtatttc

SEQ ID NO: 68760 - DNA, 600 bp, Chicken  19866894340195_6
tgggaaaaaagcttttaccaagagtaataaatgtttatcaggcatgcttgcrtagtatttagcaattactttttttttaaattggaaagtttcaccagccttcartacatcgttgaaacaatttgttagcacgcaccttgtaagagaattagagaaaggactggggggaggtctggggccaccgctacaaaggtactattcctgcatataactttcwcaagggagaacaaggtggatattattcttgtaagttwtacaattgcccaaatagttctgaacagtgtcaatgacactaatcartctattatcaatttgtccctgctgcttctcatccaagtcctgattagctgcagagccactacagtggcctgtcgacaggcttgggaaggaggtgctgctggaacacattcagcttgyacacacaagtccgtcttcaacaaatacagatttaattttttccttgtttcaatcaaaaagcctgtaagagccaacgatttaagtcttttcattcagtaggcaagctttccaaatctgaaagtttctgaatgtatttcaagtggagaacagtaaaactgtagcagtgcatcattttgccttttt

SEQ ID NO: 68761 - DNA, 600 bp, Chicken  19866894340195_7
acaatttgttagcacgcaccttgtaagagaattagagaaaggactggggggaggtctggggccaccgctacaaaggtactattcctgcatataactttcwcaagggagaacaaggtggatattattcttgtaagttwtacaattgcccaaatagttctgaacagtgtcaatgacactaatcartctattatcaatttgtccctgctgcttctcatccaagtcctgattagctgcagagccactacagtggcctgtcgacaggcttgggaaggaggtgctgctggaacacattcagcttgyacacacaagtccgtcttcaacaaatacagatttaattttttccttgtttcaatcaaaaagcctgtaagagccaacgatttaagtcttttcattcagtaggcaagctttccaaatctgaaagtttctgaatgtatttcaagtggagaacagtaaaactgtagcagtgcatcattttgcctttttcacatttctgtttcggtcacattgtcattggagtcagtggaatttcagatacagtaagatatgggacctgtgtctatgttataaaatcatctcttagcagtgtaactgcaattgcaa

SEQ ID NO: 68762 - DNA, 600 bp, Chicken  19866894340198_1
ttgaattaccttatgctttgttttgatgtgcttcactttcctcattgctttcaagacagctgtcttgggttattatgttcacagaggagacctgactctcagttctctctgaagctgcctttctaaatcttttagccaagtttatgtagaagatatttttcagtgtgaaacctcatgagatttcttgtttcttattcatccctgtacatagaaagagcattgtaatcagaaacgttttaatttaggtctgtctgatgcttgccttgtgctcatttgactagagttgcaattgtttcattsaagtaattctggttgaactgtttattaagaggattatattttcattatagtattttctaatgtttttcaatttatatatatttctaaataaatcagagcttaagaaccatattaaaatatatggtgtcttatatattatatacttttatatatttatatatataaaatatatattatattataaataaatatattatttatgttcaagttattttgtcaagggatgatgttaccgaaaaaattgtgttttgtatactttggagatgagtagtcctcacatggcgtaaatactgaattata

SEQ ID NO: 68763 - DNA, 600 bp, Chicken  19866894340201_1
tcctccctcatacttttcctgtagctgtgtcagatgaaaagaattgaattgggcatcaaagttctgtaggtcaggtttgaattaattgcctcaagggtcatattttacaaatgaggcaagaatacatacctttaagtgatgagtcatctgcattgtgcaatggattattattccctttgggcatagtatttatttatgcttgtgaaatgcttcataatttttacatcttttcttccttattgtcttcagatgtagattacagtcataggaagaacacaggtttggcttttaaagtgaatrtactctaaagcctaattaaataaaagttaaaggtgctgggtgataggcagtatcttaattgagtaggcaatagattgaatttgtttttttcttatagatcctcaatccaatatttcttgaaaactaaaccatcatattcttcaattgctaaaaccaatttcaaggtaaaaatgtcatgtcaaatcatgtaccaataagggcattgcaaataagatttttcttgaccttaccaatcagtcacattgcatcccctccaaagagtattattagatttttatcattctctgaaagcatcctctt

SEQ ID NO: 68764 - DNA, 600 bp, Chicken  19866894340204_1
ttcctgcctggagctttggccttgtttaattgaaagttagaatagtcaaatatgtattcttgatatgaatctttgattttagcatcccatgtctgctttgttttgaagaacctgttgctttgtaatgatgtttctttaatgcatgactgtagatgtacaatagatgtagtagatgaacaatagatagtagatgaacaagacagaagcatgatgtttggcagaaatgaagaagccttacaggaaggagttaaaacagtcaaatcaaagccatcagcaccaacagaaaagaaagaaaaataraatcagtkattgttcccattcagttkgagctgtgattctcctcagttctttcaaaccttggcccggaattttggactccaggattcggtaatttttgctgtgtctgaaaaaccttcatcactggttgggtgttataggtgaattctcaacaactgtcatttctagcattttttctgtaacagttttgaaagcctttagtgactmggaatagctcatatttttgtctgtctgtgctgtaagctgattcgtgtagaattgagctgatgtatctgtacagtaataatgcaacacctccatgca

SEQ ID NO: 68765 - DNA, 600 bp, Chicken  19866894340204_2
tggagctttggccttgtttaattgaaagttagaatagtcaaatatgtattcttgatatgaatctttgattttagcatcccatgtctgctttgttttgaagaacctgttgctttgtaatgatgtttctttaatgcatgactgtagatgtacaatagatgtagtagatgaacaatagatagtagatgaacaagacagaagcatgatgtttggcagaaatgaagaagccttacaggaaggagttaaaacagtcaaatcaaagccatcagcaccaacagaaaagaaagaaaaataraatcagtkattgttcccattcagttkgagctgtgattctcctcagttctttcaaaccttggcccggaattttggactccaggattcggtaatttttgctgtgtctgaaaaaccttcatcactggttgggtgttataggtgaattctcaacaactgtcatttctagcattttttctgtaacagttttgaaagcctttagtgactmggaatagctcatatttttgtctgtctgtgctgtaagctgattcgtgtagaattgagctgatgtatctgtacagtaataatgcaacacctccatgcacttccaca

SEQ ID NO: 68766 - DNA, 600 bp, Chicken  19866894340204_3
taattgaaagttagaatagtcaaatatgtattcttgatatgaatctttgattttagcatcccatgtctgctttgttttgaagaacctgttgctttgtaatgatgtttctttaatgcatgactgtagatgtacaatagatgtagtagatgaacaatagatagtagatgaacaagacagaagcatgatgtttggcagaaatgaagaagccttacaggaaggagttaaaacagtcaaatcaaagccatcagcaccaacagaaaagaaagaaaaataraatcagtkattgttcccattcagttkgagctgtgattctcctcagttctttcaaaccttggcccggaattttggactccaggattcggtaatttttgctgtgtctgaaaaaccttcatcactggttgggtgttataggtgaattctcaacaactgtcatttctagcattttttctgtaacagttttgaaagcctttagtgactmggaatagctcatatttttgtctgtctgtgctgtaagctgattcgtgtagaattgagctgatgtatctgtacagtaataatgcaacacctccatgcacttccacagtacctttcattaacaaa

SEQ ID NO: 68767 - DNA, 572 bp, Chicken  19866894340204_4
agcatgatgtttggcagaaatgaagaagccttacaggaaggagttaaaacagtcaaatcaaagccatcagcaccaacagaaaagaaagaaaaataraatcagtkattgttcccattcagttkgagctgtgattctcctcagttctttcaaaccttggcccggaattttggactccaggattcggtaatttttgctgtgtctgaaaaaccttcatcactggttgggtgttataggtgaattctcaacaactgtcatttctagcattttttctgtaacagttttgaaagcctttagtgactmggaatagctcatatttttgtctgtctgtgctgtaagctgattcgtgtagaattgagctgatgtatctgtacagtaataatgcaacacctccatgcacttccacagtacctttcattaacaaatctcaacactttgctgaaggaggtcagacagactggttaagttttacggacaggatgctgcagtgaagggagtagcacaaggttgcccaaccaacagcaggtgtaggagcagaacctaggacttccacgctgcctctggggtctgtccat

SEQ ID NO: 68768 - DNA, 600 bp, Chicken  19866894340209_1
ctgtgtacttagcgcgttgtatttaaattcagtagaatttcacagtaagcctggccattgtcaaatgtatctcacgtgatcaaacagcagtttatgcatctcgaacctattctcttcttcaccgtgtgtttctttggagttagaatggctataatagcttcatcaaaaacagtcttcagtcctttctgtgttaaagctgaacactccacatagcagtaggctcctatctgtcaagaaaataagttaattcaatagcaatatatttcagctgtgcagaactgtgcacttcagcaatttgtwtstatagtgaaaaccacaaagtttggctgcaatcttgaaaatttatctgaacgtgcttccccctgtagaagaacagaatgtttgtattctggccaaagacagggcatttctttaatatggtttgtcttataaaggaagcatattaaataaactcttcggacaggcagtgaggtcctccaggcattttgaataactaaacagcaaaaaagaataacacgaacaatttatgtttcaaaaggaagtctcaatagaaacgttcacagtacccacacagggtgttaaaatggtagtacagcattc

SEQ ID NO: 68769 - DNA, 600 bp, Chicken  19866894340209_2
gtgtacttagcgcgttgtatttaaattcagtagaatttcacagtaagcctggccattgtcaaatgtatctcacgtgatcaaacagcagtttatgcatctcgaacctattctcttcttcaccgtgtgtttctttggagttagaatggctataatagcttcatcaaaaacagtcttcagtcctttctgtgttaaagctgaacactccacatagcagtaggctcctatctgtcaagaaaataagttaattcaatagcaatatatttcagctgtgcagaactgtgcacttcagcaatttgtwtstatagtgaaaaccacaaagtttggctgcaatcttgaaaatttatctgaacgtgcttccccctgtagaagaacagaatgtttgtattctggccaaagacagggcatttctttaatatggtttgtcttataaaggaagcatattaaataaactcttcggacaggcagtgaggtcctccaggcattttgaataactaaacagcaaaaaagaataacacgaacaatttatgtttcaaaaggaagtctcaatagaaacgttcacagtacccacacagggtgttaaaatggtagtacagcattcag

SEQ ID NO: 68770 - DNA, 599 bp, Chicken  19866894340211_1
  misc_feature (1)..(179): n is any nucleotide
nnnnnnnnnnnnnnnnnnnnnnnnnnnnnnnnnnnnnnnnnnnnnnnnnnnnnnnnnnnnnnnnnnnnnnnnnnnnnnnnnnnnnnnnnnnnnnnnnnnnnnnnnnnnnnnnnnnnnnnnnnnnnnnnnnnnnnnnnnnnnnnnnnnnnnnnnnnnnnnnnnnnnnnnnnnnnnnnnnntcacacgatttaaatatcagtggaaggagcagagggtacagacaggcagagctggagacaagctgaggtggctgtggcatgaaacaagggaaatgaaacaaaccagggatcataaacacartattcaacacaggcaagctgcaaaagaaggatgagaagcggagagtttggaaagatcctgctctgtcagtttcctcctgaaatgcaaatacttttaattgtttataataggaaacttggtagcctttctgcctatagagggaaatattcaaaacctgaaggtcaagtgaatgaaacagaaagatgygtaaaatcattgctaaatcaggaatggggcttcacagaggtatctctcatttaaagagagatggtgctgtaactactataaaatcgtgagtatttaggaggcaagaaagtgga

SEQ ID NO: 68771 - DNA, 600 bp, Chicken  19866894340211_2
atttaaatatcagtggaaggagcagagggtacagacaggcagagctggagacaagctgaggtggctgtggcatgaaacaagggaaatgaaacaaaccagggatcataaacacartattcaacacaggcaagctgcaaaagaaggatgagaagcggagagtttggaaagatcctgctctgtcagtttcctcctgaaatgcaaatacttttaattgtttataataggaaacttggtagcctttctgcctatagagggaaatattcaaaacctgaaggtcaagtgaatgaaacagaaagatgygtaaaatcattgctaaatcaggaatggggcttcacagaggtatctctcatttaaagagagatggtgctgtaactactataaaatcgtgagtatttaggaggcaagaaagtggacggtgccatgatatttygcaatgcttcctrtaattcraataggawctatttcacagtacatcttaaggtcatgtttttctgagcatcatgtccagttttgtgctaccctttggaagaactttataggatgtggagagatcaagaagtccaaaaaaccacaaagcatggcccctcaacttcacttaga

SEQ ID NO: 68772 - DNA, 600 bp, Chicken  19866894340211_3
gctgcaaaagaaggatgagaagcggagagtttggaaagatcctgctctgtcagtttcctcctgaaatgcaaatacttttaattgtttataataggaaacttggtagcctttctgcctatagagggaaatattcaaaacctgaaggtcaagtgaatgaaacagaaagatgygtaaaatcattgctaaatcaggaatggggcttcacagaggtatctctcatttaaagagagatggtgctgtaactactataaaatcgtgagtatttaggaggcaagaaagtggacggtgccatgatatttygcaatgcttcctrtaattcraataggawctatttcacagtacatcttaaggtcatgtttttctgagcatcatgtccagttttgtgctaccctttggaagaactttataggatgtggagagatcaagaagtccaaaaaaccacaaagcatggcccctcaacttcacttagatcctcattctscacagagatgtatatgcagaagaattttgggactgtatctacacacatctcctgcagttcttaaaattcaaatgtggaggaaaaaagcaaaataatctcatagctgctgtgtacacctc

SEQ ID NO: 68773 - DNA, 600 bp, Chicken  19866894340211_4
gatgagaagcggagagtttggaaagatcctgctctgtcagtttcctcctgaaatgcaaatacttttaattgtttataataggaaacttggtagcctttctgcctatagagggaaatattcaaaacctgaaggtcaagtgaatgaaacagaaagatgygtaaaatcattgctaaatcaggaatggggcttcacagaggtatctctcatttaaagagagatggtgctgtaactactataaaatcgtgagtatttaggaggcaagaaagtggacggtgccatgatatttygcaatgcttcctrtaattcraataggawctatttcacagtacatcttaaggtcatgtttttctgagcatcatgtccagttttgtgctaccctttggaagaactttataggatgtggagagatcaagaagtccaaaaaaccacaaagcatggcccctcaacttcacttagatcctcattctscacagagatgtatatgcagaagaattttgggactgtatctacacacatctcctgcagttcttaaaattcaaatgtggaggaaaaaagcaaaataatctcatagctgctgtgtacacctcataaggttacctg

SEQ ID NO: 68774 - DNA, 600 bp, Chicken  19866894340211_5
agcggagagtttggaaagatcctgctctgtcagtttcctcctgaaatgcaaatacttttaattgtttataataggaaacttggtagcctttctgcctatagagggaaatattcaaaacctgaaggtcaagtgaatgaaacagaaagatgygtaaaatcattgctaaatcaggaatggggcttcacagaggtatctctcatttaaagagagatggtgctgtaactactataaaatcgtgagtatttaggaggcaagaaagtggacggtgccatgatatttygcaatgcttcctrtaattcraataggawctatttcacagtacatcttaaggtcatgtttttctgagcatcatgtccagttttgtgctaccctttggaagaactttataggatgtggagagatcaagaagtccaaaaaaccacaaagcatggcccctcaacttcacttagatcctcattctscacagagatgtatatgcagaagaattttgggactgtatctacacacatctcctgcagttcttaaaattcaaatgtggaggaaaaaagcaaaataatctcatagctgctgtgtacacctcataaggttacctgttaatgc

SEQ ID NO: 68775 - DNA, 600 bp, Chicken  19866894340211_6
gtttggaaagatcctgctctgtcagtttcctcctgaaatgcaaatacttttaattgtttataataggaaacttggtagcctttctgcctatagagggaaatattcaaaacctgaaggtcaagtgaatgaaacagaaagatgygtaaaatcattgctaaatcaggaatggggcttcacagaggtatctctcatttaaagagagatggtgctgtaactactataaaatcgtgagtatttaggaggcaagaaagtggacggtgccatgatatttygcaatgcttcctrtaattcraataggawctatttcacagtacatcttaaggtcatgtttttctgagcatcatgtccagttttgtgctaccctttggaagaactttataggatgtggagagatcaagaagtccaaaaaaccacaaagcatggcccctcaacttcacttagatcctcattctscacagagatgtatatgcagaagaattttgggactgtatctacacacatctcctgcagttcttaaaattcaaatgtggaggaaaaaagcaaaataatctcatagctgctgtgtacacctcataaggttacctgttaatgcgtaatttc

SEQ ID NO: 68776 - DNA, 600 bp, Chicken  19866894340211_7
gctaaatcaggaatggggcttcacagaggtatctctcatttaaagagagatggtgctgtaactactataaaatcgtgagtatttaggaggcaagaaagtggacggtgccatgatatttygcaatgcttcctrtaattcraataggawctatttcacagtacatcttaaggtcatgtttttctgagcatcatgtccagttttgtgctaccctttggaagaactttataggatgtggagagatcaagaagtccaaaaaaccacaaagcatggcccctcaacttcacttagatcctcattctscacagagatgtatatgcagaagaattttgggactgtatctacacacatctcctgcagttcttaaaattcaaatgtggaggaaaaaagcaaaataatctcatagctgctgtgtacacctcataaggttacctgttaatgcgtaatttcattttcccagtggaatacagctctcccaaccagtacagatataaaactgggattgtcttaaattgaatcattcctcattttggtatctgctctaacctccccattcggctgatagcatccagtgttagaccacaactgtcttcattaagcttg

SEQ ID NO: 68777 - DNA, 600 bp, Chicken  19866894340219_1
agcgtcaaagtgcacctatgtctcattggtcaagttgatatacataaggttaaatggtaacagtggaatagacctaccccattccaggcctacatttattactttttccattgaagaaagttggctcaaaaaataagcaaacagcaggaactatcagcttcattcacatttggaagaggttgcatagcaacaatttcatagctgtctttcttctatctggaaatttatgaatgtcagggtgattgcttggattaattacctattttgctatctttaatcactcatatactttggaattcmtatctagaacaaatgagattttccaagaaatattttgcactactctaaaaaaaattgactcacatcacaataaaatacaaagcaaaatatgtcctagattcagactctaaagccattgttcttcactgacgactgcaacactttcctggaagataaaaacttagatcaggtcactgttttaggcttaagtgtggtctaattcagtggtctaatgaataaggaaaaggtgggatataatttcccacaaaccataggagtacacagcacttctcattaatgattacrcttctacactgttgt

SEQ ID NO: 68778 - DNA, 428 bp, Chicken  19866894340219_2
atactttggaattcmtatctagaacaaatgagattttccaagaaatattttgcactactctaaaaaaaattgactcacatcacaataaaatacaaagcaaaatatgtcctagattcagactctaaagccattgttcttcactgacgactgcaacactttcctggaagataaaaacttagatcaggtcactgttttaggcttaagtgtggtctaattcagtggtctaatgaataaggaaaaggtgggatataatttcccacaaaccataggagtacacagcacttctcattaatgattacrcttctacactgttgtactcctggataatatggaaaatgtatctctcactaaaattttcagctgagtaagtgaacttttgaagtacaaaagagaaatacatttttaaccttcagtgtctttgtattcaa

SEQ ID NO: 68779 - DNA, 600 bp, Chicken  19866894340230_1
ccaaatacttccttcaagtcaggacactggccgtcacaacactgttaattaatatcagttagttcaacatttttttcagttactaaatgaaaagacactttccggcacaaggagttttaataatgcatccgttattattgatcaggtcagtctcacgttctctctcttcactacactcttctaataaattacatcagtaaaataattaggttgtgttttttagcagaaagaaaaagggctcagtcctgcagacacttttcaagtgtctgattttataaatgatgataattctattagcawacatgaagcttatgacaaaacagggtacaaatcactctaacagttattactgatatcaagtctgcagtggtcagagttacagcactgaaattgcaaggtaagaacgtaccagctaatcaggtctatgaaagagaactcatctgaggtttcctattcacttcagtgggaagatgaaagcacgtacccactttgtattaggraagaaaaacawggtaagccactgattgttttttaccctcttctttgtcaccactgaatgagaaattaagaaattgttctggtttgcactaacagataaga

SEQ ID NO: 68780 - DNA, 600 bp, Chicken  19866894340230_2
aataattaggttgtgttttttagcagaaagaaaaagggctcagtcctgcagacacttttcaagtgtctgattttataaatgatgataattctattagcawacatgaagcttatgacaaaacagggtacaaatcactctaacagttattactgatatcaagtctgcagtggtcagagttacagcactgaaattgcaaggtaagaacgtaccagctaatcaggtctatgaaagagaactcatctgaggtttcctattcacttcagtgggaagatgaaagcacgtacccactttgtattaggraagaaaaacawggtaagccactgattgttttttaccctcttctttgtcaccactgaatgagaaattaagaaattgttctggtttgcactaacagataagaaacagttcttttaaaagaccatatcttttaaaaatgtagaacttgataaaggattgatgtgtccttcactgtgtctactcaaatgcttttgactagcagccatccaccttgttttcagtctaayggtctcaaatctcctcctagatccatycttttttaccaatccaaaccaaaatgattaaggctgttttgtatctgtg

SEQ ID NO: 68781 - DNA, 600 bp, Chicken  19866894340230_3
tgtgttttttagcagaaagaaaaagggctcagtcctgcagacacttttcaagtgtctgattttataaatgatgataattctattagcawacatgaagcttatgacaaaacagggtacaaatcactctaacagttattactgatatcaagtctgcagtggtcagagttacagcactgaaattgcaaggtaagaacgtaccagctaatcaggtctatgaaagagaactcatctgaggtttcctattcacttcagtgggaagatgaaagcacgtacccactttgtattaggraagaaaaacawggtaagccactgattgttttttaccctcttctttgtcaccactgaatgagaaattaagaaattgttctggtttgcactaacagataagaaacagttcttttaaaagaccatatcttttaaaaatgtagaacttgataaaggattgatgtgtccttcactgtgtctactcaaatgcttttgactagcagccatccaccttgttttcagtctaayggtctcaaatctcctcctagatccatycttttttaccaatccaaaccaaaatgattaaggctgttttgtatctgtgtcaacttgatt

SEQ ID NO: 68782 - DNA, 600 bp, Chicken  19866894340230_4
atgaaagagaactcatctgaggtttcctattcacttcagtgggaagatgaaagcacgtacccactttgtattaggraagaaaaacawggtaagccactgattgttttttaccctcttctttgtcaccactgaatgagaaattaagaaattgttctggtttgcactaacagataagaaacagttcttttaaaagaccatatcttttaaaaatgtagaacttgataaaggattgatgtgtccttcactgtgtctactcaaatgcttttgactagcagccatccaccttgttttcagtctaayggtctcaaatctcctcctagatccatycttttttaccaatccaaaccaaaatgattaaggctgttttgtatctgtgtcaacttgatttacttagaccaaatggaacaaccattttgaggaccatcaagtggaatgattgcttgtctcagtacttcaggaaaagtcattacatccattgaaataattagtctccaacatcaccatctctgtcacctatgagccacagaaaatgaaaacctacagccaataaggcagttccaagcagatctcccagtgcagtaagataagggatagaaaaac

SEQ ID NO: 68783 - DNA, 600 bp, Chicken  19866894340230_5
tattcacttcagtgggaagatgaaagcacgtacccactttgtattaggraagaaaaacawggtaagccactgattgttttttaccctcttctttgtcaccactgaatgagaaattaagaaattgttctggtttgcactaacagataagaaacagttcttttaaaagaccatatcttttaaaaatgtagaacttgataaaggattgatgtgtccttcactgtgtctactcaaatgcttttgactagcagccatccaccttgttttcagtctaayggtctcaaatctcctcctagatccatycttttttaccaatccaaaccaaaatgattaaggctgttttgtatctgtgtcaacttgatttacttagaccaaatggaacaaccattttgaggaccatcaagtggaatgattgcttgtctcagtacttcaggaaaagtcattacatccattgaaataattagtctccaacatcaccatctctgtcacctatgagccacagaaaatgaaaacctacagccaataaggcagttccaagcagatctcccagtgcagtaagataagggatagaaaaactgtcaggatcctttccctttttccaga

SEQ ID NO: 68784 - DNA, 600 bp, Chicken  19866894340230_6
aacagagtaaacacctatggacaacaaccaaaatctgtattattctcacttgaatcacactgtaaaagagccaacagacaacaacatcctagaatttagcaatattgtacatgaatgcttttgaaaaatataaacaattaatgtgaattaattttagattgaaactacctaacggtggggacagagacatttatccaacttctcctagaaaatcatgtacacaggcagaaagaacacaatgagtcattaacagcattcttcatccagtccatgcttcagcatttctaacgatcataagarcaccaaccaaatgtgcaattgcacttcctacatgtgacatcactctgtgtacagtgaggacataaatgggctttcaagatcacacacaactgactggtgttacccagatgagagcactcaacacaagcattgctcttgtttccacagrtctagaccatagatgaaatcagacatggtataaagaatatggggtcaaattaagaacaactccatctggattatttgaaacaccgagaatgacctagacaccacwtttgtgtgtgaaataccaatgtcatgtgcagcccttctgtatgaggc

SEQ ID NO: 68785 - DNA, 600 bp, Chicken  19866894340230_7
taattttagattgaaactacctaacggtggggacagagacatttatccaacttctcctagaaaatcatgtacacaggcagaaagaacacaatgagtcattaacagcattcttcatccagtccatgcttcagcatttctaacgatcataagarcaccaaccaaatgtgcaattgcacttcctacatgtgacatcactctgtgtacagtgaggacataaatgggctttcaagatcacacacaactgactggtgttacccagatgagagcactcaacacaagcattgctcttgtttccacagrtctagaccatagatgaaatcagacatggtataaagaatatggggtcaaattaagaacaactccatctggattatttgaaacaccgagaatgacctagacaccacwtttgtgtgtgaaataccaatgtcatgtgcagcccttctgtatgaggcacacctgcaatatatattatgaaactgtcactccaggctgaatttgtcccaaagattcattcccaactgtgaatgtctgaacattctggaggtttgattttgatatcaaaggtatacttaattattaatacagttttagaaaagaatt

SEQ ID NO: 68786 - DNA, 600 bp, Chicken  19866894340230_8
cattcttcatccagtccatgcttcagcatttctaacgatcataagarcaccaaccaaatgtgcaattgcacttcctacatgtgacatcactctgtgtacagtgaggacataaatgggctttcaagatcacacacaactgactggtgttacccagatgagagcactcaacacaagcattgctcttgtttccacagrtctagaccatagatgaaatcagacatggtataaagaatatggggtcaaattaagaacaactccatctggattatttgaaacaccgagaatgacctagacaccacwtttgtgtgtgaaataccaatgtcatgtgcagcccttctgtatgaggcacacctgcaatatatattatgaaactgtcactccaggctgaatttgtcccaaagattcattcccaactgtgaatgtctgaacattctggaggtttgattttgatatcaaaggtatacttaattattaatacagttttagaaaagaattcttttaatgttacacagctgtatggtaagagattctggttcagtggaatcatgtggtgtgacatggcacaagatgaatggagaaaagaccactaactgagcttcc

SEQ ID NO: 68787 - DNA, 600 bp, Chicken  19866894340235_1
ggtctgggatccctcttgcagttttgcggaaggccaagaaaataaacccaaatggaagccactgcatttagcaagcactcatcagtttatcatggcgaggtaccttcaactggtacaaatcaaaatacgttagagggcacaacgcctatacctgttagatatgtcagagcttcaaaagggacttcttcatattcattcaaaaacatgtgtatctgctgcatgctgatcctgaggtcagactcgttgaactcatatggaatattccaacctgttcaatacaggacagatacgtggagtgartgactgctgccctgtgctgaaaactacgcttaggaaatgatggaattggtgtaacattgctattgtagagctgaagatcacaacttccagacaataccaaggtgaagccccggcatctacttgaacaataaacagcctggtgagaaacaccattctgtaacagaattgtatcccaaggctctttcactctgcagaagtaaaacatcagtatagacatctggcatcactcactcctgaaacattatgttttacccaaagtagaacagagatctgtttgtttcttcaactagtcttctgcaa

SEQ ID NO: 68788 - DNA, 600 bp, Chicken  19866894340238_1
aaagaatgcagtgcaggaggctcatgatcctgtgaaactgtatgatttaaattttctgtgtatgttttgaagcaaagcatgatgaggagagaggtgccagatgagtggagagaaatctcagtgctgacaaagttctattgatcaaagaaaaggaaaagagaattagcaatgaactacagtgttcatttgccatgaatttctaatatcttcctccagacaaatactgtgcactccatggtacttcttacgtaaacaatgatattttgagcaatgtatgtgcagtaaaccacagtttacagraaacttatatctaagttgactgtctaatgtgcattcagctatgcagttagcgtttgattgcttacatatgcatctttgaacttttatcttgatttgtgagcctgttaccaccagactctctattaacattgaagtatttcaaagttagatggaactacgttcctcatrttaccttgctttcagtataatatcacctttttgtttaagccacagacaattatgaaactctttgctcatacaggaagtgcatttctgtctaactgtgcacattaaacacattaatattccttgcatgtttga

SEQ ID NO: 68789 - DNA, 600 bp, Chicken  19866894340238_2
atgaactacagtgttcatttgccatgaatttctaatatcttcctccagacaaatactgtgcactccatggtacttcttacgtaaacaatgatattttgagcaatgtatgtgcagtaaaccacagtttacagraaacttatatctaagttgactgtctaatgtgcattcagctatgcagttagcgtttgattgcttacatatgcatctttgaacttttatcttgatttgtgagcctgttaccaccagactctctattaacattgaagtatttcaaagttagatggaactacgttcctcatrttaccttgctttcagtataatatcacctttttgtttaagccacagacaattatgaaactctttgctcatacaggaagtgcatttctgtctaactgtgcacattaaacacattaatattccttgcatgtttgatcatgtttggagataagtaaaaagtttaatctgtatctcgcatgggaaaagtcaaagcaagttcagatcatacataaaagtttaaatttacaggggtgcgttatcatacttcaattcagctaaaatggaaattacaattacctgattatggtaaggtctttttagtgc

SEQ ID NO: 68790 - DNA, 600 bp, Chicken  19866894340238_3
aactgtgcacattaaacacattaatattccttgcatgtttgatcatgtttggagataagtaaaaagtttaatctgtatctcgcatgggaaaagtcaaagcaagttcagatcatacataaaagtttaaatttacaggggtgcgttatcatacttcaattcagctaaaatggaaattacaattacctgattatggtaaggtctttttagtgccttgagttcatactcaaaatttatatacttctgtacaaaataaatccagaacatattcctttcagtcttctcacagcctaatttgcaccytctagatcagattaacaccaaagaagggacatattttaatcagagatatccatgagcatgaacatgttgccttggaaattcttctgagaggtctagcatctctgacaggtcttttcccttcagaagcactttgaatgaattaacatttcagaaacaatttccaaaccttctagaacatttgcagctgtggctggaacatgctgcttgggtactgaatgcaactccagcagttggctagaggtcagctgcaaacagtggcgttgcatctttccttttgtttcttcaggtgtgaagctggaa

SEQ ID NO: 68791 - DNA, 600 bp, Chicken  19866894340245_1
cactaaaactgtgcctagtaattgaaaaacaaaccagcaaaggatttatcaaccacacacgcaagagaaaaagaacattaactaccatgctgcaaaaccctttacttgtcataatatattaggtgtttcattacacatcctgctgaagctgcaaacgcatggaaacccagctagtgtgtgggaaggaaaggcctgaagaggaaagaactgcctgggcaaatgagacttgttagtgttgtcttcctcagatggaacagctgtcagaaggacagagctcctgcttgggagcacgagggtttyggggtgtctggaagctgcccactcagccacatgcagctcacgagggtgcgaaatccttgacgcacatcagcatcatccatagctgagttaattttgtgcattgacttcccctcattacattaattccagtttggggagaaagtaggacattcctgcctttggagctatcaccactaacgcagcttggaggctggtggaatctccgtggcagtgctaaagtgcaagcctcgttaagacaaaggaagaaatgtggtactctccctgatcaattaacccgagtttttaattaggtggcacatt

SEQ ID NO: 68792 - DNA, 600 bp, Chicken  19866894340266_1
acaatggaatggtttatgagaaatgacgatatatgatgagaatgcaaaactttgataataggtttatttattgattgaaaataaaattcatgaactgcgaagcagaaaactgcaccagtgggaattgttccaagaggacattaggaagtgagagagagacagagtgtgtgcatgtgtattacacataaactaagttaaaggttgcctaaacgcttctgattccacaagcagagcctctgaggataggatctgaaagcctttaatgctgctaaggttttgtcagtatgatatttgcatatwttgcctaaaaacccacaatgctgtattaattcatttttatttacctttctgccgcttccaaaagaaacctcgcaggaagccattaatgacacagcttcataagagataattttcagagaggctttgctggtagtgactgaaagggaaaaaaagcgtgtgtcaaatttaggctattaacaacataatccttaaacagacggtatctcaaagactaattcatcttcaaatttgactgtaaaaacatgatccttcactctgtgtgcatgtgaatttatatcgcatgtccttttttttttctcc

SEQ ID NO: 68793 - DNA, 503 bp, Chicken  19866894340267_1
acattcctaacttgctaaaaatatttgctatggctggttattttgggggatgaagtcatctgcattagacatatgcaaaatgatgaagtcatctgtatttccctgaactcttttctttaccaccctttggaacatccactgcacagtgagacggcaaggaacagttggcaccattggaagaaaaatcttgtctacgctgcagtaggaatacttctgttcatccaggaggctcgttttcctctgcctgcttccagacatggggtgttaaatgcattttggggctgccattagaagctaagsactcagtactagtagatctttggctgaacctactccatatctaatgctcagtatttaggcaagcaaaatggccttgaggagccagacatcctattcaattgtgatctattctgatgctgctggaacaaattctgttgatgaacaggcaggtggcagggttgttttctatgtgtttggtacttagggattctttattacttcca

SEQ ID NO: 68794 - DNA, 599 bp, Chicken  19866894340273_1
  misc_feature (1)..(79): n is any nucleotide
nnnnnnnnnnnnnnnnnnnnnnnnnnnnnnnnnnnnnnnnnnnnnnnnnnnnnnnnnnnnnnnnnnnnnnnnnnnnnnnagtgatcaggtactggaatgggctgcccagagaggtggtggagtcaccaaccctgaaggtgttcaaggaacatttaggcactgtgttaagggacatggtttagtgagaactattggtgataggtggacagttggactggatgatcttagaggtcttcttcaaccttggttactctatgattctaataggtgtgtgagggtgagagtgcctttcatggaacrctttagtaatgaaagttctaatagatatattagattggaattagcttgttttcttaatattatgaacacagatggattttcttttaagtttgtaagttgaatttgaagggaaaaaaacttctcgtgtttttgttttcctgtcctagagaattttacatacttcagataatgaagattccaaaacattgtttagttattgtccctgcaactatgatgtgtcttcatagtttgaacttctctaccaataatcagcagtatctatttttttaacaaaaacattttgagtggatttaggaaat

SEQ ID NO: 68795 - DNA, 600 bp, Chicken  19866894340281_1
gggagttctcttgtaacaagcttatccacatagttttgtgaattatgttctcagtgagtttgtgtttctcttcggaggccatgcatcatctttcaagtcatgcattaggctactgctcatttgttgttatacagtcaggacagcaaaaagggcagcagagctacaagagtgcatcagtcaggtgtatggttgctgtttggatcaatgcaggcttatgcatctcagatacttaaaacttgtgatgcaaaatgttcatgtacactgcaacagcgtgggtcaaactgagccctgcattgtggrgaaattgttttctttgtcatgcaggtatttaaacggcataaccccagtacagcagaagaacaggaaatgatggagaacctgtttgactctctttgttcctgcctgatgctcagttccaaccgggatcggttcctaaaaggcgagggtctccagctgatgaatctgatgcttaggtactgtgtcacatagtgactttttttgtctgcttttgacccaccagcatgtgttctggtagatacttgtacttttctgtttatacaatttgtgttctagtatgcttgacttcttccagcatgtcac

SEQ ID NO: 68796 - DNA, 600 bp, Chicken  19866894340292_1
ggatagaggggaagcagcaaagtgccctacttcttgctttcatttccaacttgacttgacaacacattgctgctgctagcacatctccctccttgttctcctttactagcaaacgcactttgactggttgaattattcattgcaaacatcttaccaggccacataagaccagcttttttctgcctctgagttatccacaaatgaacgcgtatttcttttttattgatgtatctgtttgtcaataacctctctgtgctcatttgagacacagagagctgcttgtgggccggttgcttgctyttgtccctgggtgggagcaaagagaagggagcagccaggcatggagcgagcgtggagcagcctgaccccatttacatgggaggcacctgataaccactgtcccttctgtatcacaggtgccctgatttgactgaagagcagtcgctgcaaacattaatgctagcaagccctgcttgcaagggtgtttgcacaaatcaaaccagacaaggtgaatcacgaagctgaacatatcatgtcgagtgaacgttttgcagcattaggtcaggccaattgctcacatagcatcaatttatgctgtgg

SEQ ID NO: 68797 - DNA, 600 bp, Chicken  19866894340296_1
aatgggcagaaaatttgaacaagccatttaatttttttctgtttctttttttgttccagtttagctataagatgtagaggttgcttcatttgcctacactatctttaaatgaaagttgagagattcagtgagatatggtaaagaacgaaggctagttttactcttcctaccacagttatggatttggccaggcaaaaagatgaaaaatgtgatgaacagaaacagtttttctgagaagtttatttatcagaaagccagtaggatttagagaggcgtcaatgtggacagctgactagcttyctgtcatagcaacttagaaaatttcactgggcacagaactggtatctttgggcacaaaaaatgcattctgtggtctgtaaagaccaatagggaaaataaattatttagtagaacaacttcaacatgaaattaaacttgaatgtttacatgagtacatatctgtagatgtttaaatgaagatttatttattggatttaaacttaaattatactttcaattattatcarcttcaaggaggatatgaaatagaaatggctattttttcagaaaaggaagataattattgaaattatgctatat

SEQ ID NO: 68798 - DNA, 600 bp, Chicken  19866894340296_2
tttctgagaagtttatttatcagaaagccagtaggatttagagaggcgtcaatgtggacagctgactagcttyctgtcatagcaacttagaaaatttcactgggcacagaactggtatctttgggcacaaaaaatgcattctgtggtctgtaaagaccaatagggaaaataaattatttagtagaacaacttcaacatgaaattaaacttgaatgtttacatgagtacatatctgtagatgtttaaatgaagatttatttattggatttaaacttaaattatactttcaattattatcarcttcaaggaggatatgaaatagaaatggctattttttcagaaaaggaagataattattgaaattatgctatattggtgaaaagatatttcaaagaacttataaagctaatctactagtagtctactagcttgctactaaacatcagctcaagygtaaattcattaggaattatggaagactgcaaaataaaactagtaagcaaacattgaaaaatgtattagtagaagctgctgtcttgcataacttgtttaattacagcaagagaatcaacagttcttgtagagttaaagtagttcctc

SEQ ID NO: 68799 - DNA, 600 bp, Chicken  19866894340296_3
agaccaatagggaaaataaattatttagtagaacaacttcaacatgaaattaaacttgaatgtttacatgagtacatatctgtagatgtttaaatgaagatttatttattggatttaaacttaaattatactttcaattattatcarcttcaaggaggatatgaaatagaaatggctattttttcagaaaaggaagataattattgaaattatgctatattggtgaaaagatatttcaaagaacttataaagctaatctactagtagtctactagcttgctactaaacatcagctcaagygtaaattcattaggaattatggaagactgcaaaataaaactagtaagcaaacattgaaaaatgtattagtagaagctgctgtcttgcataacttgtttaattacagcaagagaatcaacagttcttgtagagttaaagtagttcctcatttttaacccaaattcaccagttttgcaaatcaactgcaactgctctacactgactgatgcagattctcagtcacactggtaagtcctgaaatggagcccaagaccatgcacaaggctttccacgcagagcagctgaagaccccagctgtac

SEQ ID NO: 68800 - DNA, 600 bp, Chicken  19866894340308_1
agactacagctaggtaccatggaaaaacagaaactgcaaaacaacatatggagaaaataaattttctcctttactgcaatatagacatcatggtgagtctcattctgattgcttcatatgagaagcctgggattatcagcatatccacatcatcttcaaatcagtatcagcttttgcctctttcagagctattatcaaagaggaaaaaacaaaaacaaaacacgttaactgtcattaaaaaagactgatgaacatgtcatcacaagaataaagctgagtgcagactgtctgaaaaaagamtgtgcagctgactttagctggatattaagtaaatggggagcaatagccctttcgttattaractgcttctccctaaggaatgaatctgatgaaagtgagccactttttgtgaaatgcactgggataggtggagtcttataaaatgagtaaaccagaacagccaccaaaatgtcaagcaggtttccaagacaggctagagtcaaccacatggagaggaagagaacaaaaagaacagaagaatttccaatcatctgaagcagaatcactgatggataaagaaaattaagaagtaaaactgct

SEQ ID NO: 68801 - DNA, 600 bp, Chicken  19866894340308_2
ttttctcctttactgcaatatagacatcatggtgagtctcattctgattgcttcatatgagaagcctgggattatcagcatatccacatcatcttcaaatcagtatcagcttttgcctctttcagagctattatcaaagaggaaaaaacaaaaacaaaacacgttaactgtcattaaaaaagactgatgaacatgtcatcacaagaataaagctgagtgcagactgtctgaaaaaagamtgtgcagctgactttagctggatattaagtaaatggggagcaatagccctttcgttattaractgcttctccctaaggaatgaatctgatgaaagtgagccactttttgtgaaatgcactgggataggtggagtcttataaaatgagtaaaccagaacagccaccaaaatgtcaagcaggtttccaagacaggctagagtcaaccacatggagaggaagagaacaaaaagaacagaagaatttccaatcatctgaagcagaatcactgatggataaagaaaattaagaagtaaaactgctattgcgtcaatgttttattccaaaaatttcatttcaagatcatttatattgagaacttctg

SEQ ID NO: 68802 - DNA, 600 bp, Chicken  19866894340308_3
agttttacaccagacagttgttactgcacactgctaactgttctcgagttttcagaagcagtatcccacaagaaatgtctggttttcagggatgctatcatcaacttagaagtgtatgacattattgcctctgaagatgacaggcttcaagagtctgaatatggggacaaacatcggtggtgtatgaagtcagtttaatgtttgagacaaaggttttgaaagtaaacaaataatagaaaaatatcaaagcagaactgcattttggatagcaatattatgatggctgtaattctgtgtccstgtacagaggtgtttataattgcagacctgagtctcagttagttttcaggactaatgtctacaaagaggatgtagagggcaatgcttctggacagacttaagattcatggccttataaaaggaagatctattagattcacatttactactatcatgtactagcagttcttccttaaaaagcaattatttgcatatgaccatatagaaaaagtttgcatagggaattactgcttctgtgagcagcataaaaatgagtaacaaatacatctttcagtgccataagtgtagcacttggctcaa

SEQ ID NO: 68803 - DNA, 600 bp, Chicken  19866894340310_1
atacattctttcagccccttcaagtactatgttaaagttacctgtccaatgacatcgtgagtcaggatgctattactttctacatgaaaacatgaaaacttggcaagaacatgaaaacacataaacaatgacagcacttgaattcttgcaagtgacaaaagatgctctccagaggagttaatgtttttcatctcagtttttgtttcttgagccaactgtcctgtccaactgtccagctgagccccactcccaactgttagagttcataaaaaacaacttctgccttccagcaatcttacrttctactttcatctagaaagtcaaaaatatgctcaggcaaaaccacagtatttaccaccgtttgaaacagtctgtgtggctcttttccatccctatttgcagagtcccttacaaggattcagtacagtaaccacagcactaactttccaaacgtccacacacatcatcttctaggtaaatgggagaatatatagcatctgcctgtgaagccttatgactgaaatcaaaatagctccatgaaccagcgtgcatgagtactgcctttctcatctaaccaagagagactccagaattagaatt

SEQ ID NO: 68804 - DNA, 600 bp, Chicken  19866894340312_1
cattgatgttgggaaaactaggaaatgggtatttcaagtgtttgacctaccatttatataagcagtgtttttgttaaattcaaacattgttctcaatgtctcagactctttaattgcaactggttgcttaaagacttgcatgcgtggcgtggatgggcagcaaaagcagtcatctttctgtcaccatacagatactgctggcaaccacccaacttctgtgctttaataaaatgcaacttcaattctagaagctggaaggaacagaattcaaagttctgtaaaattataactgaatctgawtcttaactgttgcattgttgtggttctgttttgttgaagctctcgtgttaaaattcatccctatgtcactctggctctcgacatgggaagaagtgcctgtgtaatacagtaaagaaaataatgttcttgtcttcccagactggggggaggttttcagcagaatgactgctgaattgttgttccatctttaaaaggccatgctgatgtcagtggcttgaaggctgtatataaatgccaagaaaaagcttgctttgagtgagaatcgtcgctgtgacgctgggaaactcgtcatgcatggtg

SEQ ID NO: 68805 - DNA, 600 bp, Chicken  19866894340314_1
cctctttcatattatggcctatatccttaaaaaaaaaaaaaaaaaaaaagactaagacaaataaatcttacagagatgtgatattacatagcctagtcctcatcttagaaaaatgaaaccaaacagactaaacaaacaaaaaagcagaaaagaacatttatttcagcttttctctagccttgtatccctgacagtgtccaataattttggatgatgaaattcttcatgtctcccatgtcccattcccatggtaaagagcaatctaaatccatctccttggctggtcaggatctcatttgygacatgttgccatatttgtcaactagaagaacttcatcatcaatcgttctcaaagcacwatccaaagaacagagatgagagaccactgctgtcctctgagactcctcagggcctagagccacagacaacagaggttgttctggattctgccaaaggggatttaggtgaacacctttcrctttcacctagagaactctggtatggataccaagcttagctgtgtccatacgtggtccaccatctcacaaatttttaaggattatatgcagagtttgtagaagacagaatgaaagttcccca

SEQ ID NO: 68806 - DNA, 600 bp, Chicken  19866894340314_2
aataaatcttacagagatgtgatattacatagcctagtcctcatcttagaaaaatgaaaccaaacagactaaacaaacaaaaaagcagaaaagaacatttatttcagcttttctctagccttgtatccctgacagtgtccaataattttggatgatgaaattcttcatgtctcccatgtcccattcccatggtaaagagcaatctaaatccatctccttggctggtcaggatctcatttgygacatgttgccatatttgtcaactagaagaacttcatcatcaatcgttctcaaagcacwatccaaagaacagagatgagagaccactgctgtcctctgagactcctcagggcctagagccacagacaacagaggttgttctggattctgccaaaggggatttaggtgaacacctttcrctttcacctagagaactctggtatggataccaagcttagctgtgtccatacgtggtccaccatctcacaaatttttaaggattatatgcagagtttgtagaagacagaatgaaagttccccatatgcattcttccttttatatgtttttaaggtgttcttgtatgggaatggtgatttcaa

SEQ ID NO: 68807 - DNA, 600 bp, Chicken  19866894340314_3
cttgtatccctgacagtgtccaataattttggatgatgaaattcttcatgtctcccatgtcccattcccatggtaaagagcaatctaaatccatctccttggctggtcaggatctcatttgygacatgttgccatatttgtcaactagaagaacttcatcatcaatcgttctcaaagcacwatccaaagaacagagatgagagaccactgctgtcctctgagactcctcagggcctagagccacagacaacagaggttgttctggattctgccaaaggggatttaggtgaacacctttcrctttcacctagagaactctggtatggataccaagcttagctgtgtccatacgtggtccaccatctcacaaatttttaaggattatatgcagagtttgtagaagacagaatgaaagttccccatatgcattcttccttttatatgtttttaaggtgttcttgtatgggaatggtgatttcaagcccacagcagaaaccactgagtcctygttattctgttagagcactcattttcaatgctgccattgcacactaagggaaatatgggcacctgtcatttgtggttggggaaagagggacc

SEQ ID NO: 68808 - DNA, 544 bp, Chicken  19866894340314_4
tgctgtcctctgagactcctcagggcctagagccacagacaacagaggttgttctggattctgccaaaggggatttaggtgaacacctttcrctttcacctagagaactctggtatggataccaagcttagctgtgtccatacgtggtccaccatctcacaaatttttaaggattatatgcagagtttgtagaagacagaatgaaagttccccatatgcattcttccttttatatgtttttaaggtgttcttgtatgggaatggtgatttcaagcccacagcagaaaccactgagtcctygttattctgttagagcactcattttcaatgctgccattgcacactaagggaaatatgggcacctgtcatttgtggttggggaaagagggaccaagaccgacagttctgaaaagaaacagtcgttcttccatttggaatgtccttacaatttccactggggacaccgttcctcagtgtakcaacattccagagattcttctgactttccttatctactgcatggagtacatcaagttaaagacct

SEQ ID NO: 68809 - DNA, 365 bp, Chicken  19866894340314_5
gcagagtttgtagaagacagaatgaaagttccccatatgcattcttccttttatatgtttttaaggtgttcttgtatgggaatggtgatttcaagcccacagcagaaaccactgagtcctygttattctgttagagcactcattttcaatgctgccattgcacactaagggaaatatgggcacctgtcatttgtggttggggaaagagggaccaagaccgacagttctgaaaagaaacagtcgttcttccatttggaatgtccttacaatttccactggggacaccgttcctcagtgtakcaacattccagagattcttctgactttccttatctactgcatggagtacatcaagttaaagacct

SEQ ID NO: 68810 - DNA, 600 bp, Chicken  19866894340316_1
ctttggtgtgcctggttgattcatagggtaatctgatacactacttagctctttgcctcccagtcagtgggttaaaccttatcctcttattatgagccagaagaccataactttcagaagaaggcaaagcttttgtttttaaatgatttttgaagaggccatgcagcataatccagagggtcatgagagcatctactgggggatcagggcatgttctgcaacagcaaaaacctagctgacaacatgatagctgaaactgtattcttgttttcttaagctgacagttcttgtgctaacatmattaggatgctaaggcattcatgtttattcttcagatagcattttttagtttagttttccgggttcccatctaccagcttctccttgagctggttttattggatgcttcatacactcaggtgtattcttttgtgacgagacrcagacttgaatgattttgtagaaaaatcccatcaatggatgtggtatgggggatgtctggatgctgtgtaaagcaragagttcctttaaaacattgtatttgactgccaggctcggtccctccagtggtgttggtgtgcagggcaaggactggtgttg

SEQ ID NO: 68811 - DNA, 600 bp, Chicken  19866894340316_2
atgatttttgaagaggccatgcagcataatccagagggtcatgagagcatctactgggggatcagggcatgttctgcaacagcaaaaacctagctgacaacatgatagctgaaactgtattcttgttttcttaagctgacagttcttgtgctaacatmattaggatgctaaggcattcatgtttattcttcagatagcattttttagtttagttttccgggttcccatctaccagcttctccttgagctggttttattggatgcttcatacactcaggtgtattcttttgtgacgagacrcagacttgaatgattttgtagaaaaatcccatcaatggatgtggtatgggggatgtctggatgctgtgtaaagcaragagttcctttaaaacattgtatttgactgccaggctcggtccctccagtggtgttggtgtgcagggcaaggactggtgttgcagcagctgctggtggggtctgattctttaaaaccttcacaatgtggagtgctttttccagatgctggtttaaagggaaagtgacagaacacggcacagctgggaaacctgtttctgagcagctgtcacaccggtgggaatc

SEQ ID NO: 68812 - DNA, 600 bp, Chicken  19866894340316_3
caacagcaaaaacctagctgacaacatgatagctgaaactgtattcttgttttcttaagctgacagttcttgtgctaacatmattaggatgctaaggcattcatgtttattcttcagatagcattttttagtttagttttccgggttcccatctaccagcttctccttgagctggttttattggatgcttcatacactcaggtgtattcttttgtgacgagacrcagacttgaatgattttgtagaaaaatcccatcaatggatgtggtatgggggatgtctggatgctgtgtaaagcaragagttcctttaaaacattgtatttgactgccaggctcggtccctccagtggtgttggtgtgcagggcaaggactggtgttgcagcagctgctggtggggtctgattctttaaaaccttcacaatgtggagtgctttttccagatgctggtttaaagggaaagtgacagaacacggcacagctgggaaacctgtttctgagcagctgtcacaccggtgggaatctgatctctggcagtgtctcgttgtgctttttgtgttctgtgcacttgtctttttctttccttattttttaaatgtt

SEQ ID NO: 68813 - DNA, 600 bp, Chicken  19866894340317_1
atatggatgagtctatgagaagactatctaaagagctaatctaaaatctcattttcagagctgatactggtgtttcagaagagaacatctccctgaatatagatcttacatcaggaggattaggacgtcagtgattaatatgaatttcatttttagagacattgtgggatttgtatggcatatataaaaactgaacttgttgaacagcatgtcccttttcaattacagttttaatgaagaaatgacttttacagggaaaaagctcttgtgagcttaatattataaaaagctgtttttttkttkttgttgttgttgttgttgttgtttttaaaatatatttctttctcctatccttccatcagatacatttagttgttcctgatgaaacaataacatattcattattctggtaggttgcaaaatttttataacaaagataaccaatttctcttctaagtttatctacttcactgtagttccactggcatctggggaagtgcagtgtttgaatgagctccattggcaagctttacttgttaatttcctaactcccaaacaaggagcttttaaactgacttctaaccctagaggcatttgtgt

SEQ ID NO: 68814 - DNA, 600 bp, Chicken  19866894340317_2
tggatgagtctatgagaagactatctaaagagctaatctaaaatctcattttcagagctgatactggtgtttcagaagagaacatctccctgaatatagatcttacatcaggaggattaggacgtcagtgattaatatgaatttcatttttagagacattgtgggatttgtatggcatatataaaaactgaacttgttgaacagcatgtcccttttcaattacagttttaatgaagaaatgacttttacagggaaaaagctcttgtgagcttaatattataaaaagctgtttttttkttkttgttgttgttgttgttgttgtttttaaaatatatttctttctcctatccttccatcagatacatttagttgttcctgatgaaacaataacatattcattattctggtaggttgcaaaatttttataacaaagataaccaatttctcttctaagtttatctacttcactgtagttccactggcatctggggaagtgcagtgtttgaatgagctccattggcaagctttacttgttaatttcctaactcccaaacaaggagcttttaaactgacttctaaccctagaggcatttgtgtaca

SEQ ID NO: 68815 - DNA, 600 bp, Chicken  19866894340317_3
aaccaatgacactgcaggaaatcttttgcacatacagtgctgaaatttccattgaaaagcacatgtacaagatacacatgagtggtcttttattttgcagttgtgccttggatgtaaatcaatatatatcacatacacaaaaattcttagaaaagaatctaagccagtctagtcatcctctttagtatcagtaacaatttgatatttatatgcaaaatagagatatagatagataaacagctagaaagaaaagaaattatgttttgattaagaatcataaaatccagcccatgttgaaarggatctcttgtgagaaagaggattcaaagaataccctgatttagaaaggatcctcaaggatcatcaagtccatgccttactccgcaccggaacacccaaaaatcaaaccctgtgtctgagagcattgtctaaattcttcttcaaatacccacttctctggggagcctgtttcaatgcccaactaccctctcagtgagaccatctagcacactctctaatcacatattgaaagtctccagagataagcagtctatcatgctgctggggtggggttggttcagtgaataatcctcagtgtaa

SEQ ID NO: 68816 - DNA, 600 bp, Chicken  19866894340323_1
tacatattagtcagcttgactgcatgttcagtactgtatgtgcattaaaagtaatagctgaaaaactacacaaacttgacctgaaaatagcagtaggtgtggagcttctagtcctattatatttattcacttcacttttgtaatgaaaaggcttttcagatgtgttttaatgtactgcaagaaatataaagaaagtattaagtagcagaagatttggattattttgcataatgtggagttgccttaattcttcagtatcacattgatttatactaagtcaacagcaataccatttacatwcacaggtgatgtggatggatctgtggaagctattctgaatgttctggacagctatgatgcagatgatgagtgtaaattggatgtcattcattttggaatgggagatatcagtgaaactgatctaagtcttgctgaaacatttaatggtgagtgtatgtttaaaatgagtttacatttagtagaagctgaactgctgcaagtctgacatttcaggagacggcaaatgctttcactcactttaaaaagtcattactggctatcagttgctgattgttrtatttgacaggtgttgtttatgga

SEQ ID NO: 68817 - DNA, 600 bp, Chicken  19866894340323_2
gtcaacagcaataccatttacatwcacaggtgatgtggatggatctgtggaagctattctgaatgttctggacagctatgatgcagatgatgagtgtaaattggatgtcattcattttggaatgggagatatcagtgaaactgatctaagtcttgctgaaacatttaatggtgagtgtatgtttaaaatgagtttacatttagtagaagctgaactgctgcaagtctgacatttcaggagacggcaaatgctttcactcactttaaaaagtcattactggctatcagttgctgattgttrtatttgacaggtgttgtttatggattcagtgtgaaagccaatgaaactattaaaaagatggctgctaaaaagggaataaaaattaaacttcacaacatcatctacaaactgattgaggatttgaaagatgagctgagtagcagactacccccatctgtggtggaaaatacaataggtgagtttgcattgagtgtgtatatatataatgaataaatgacatttttgcagccttacatttattctccgataaagtcttcctgctatatcagatatttaatacttctgtgtagctgctttcct

SEQ ID NO: 68818 - DNA, 599 bp, Chicken  19866894340335_1
  misc_feature (1)..(41): n is any nucleotide
nnnnnnnnnnnnnnnnnnnnnnnnnnnnnnnnnnnnnnnnntgtgactagctgagtgagaaagctgaatctcagtacagcagaaataccagaagctagcagataagaaagccatgcaagttttgtaagcattggtaaatgcattgctctaagaagctaagtcacatgttttattatcccttactctgtcagtgagcaatagctaacctttatgcatgtgtagaggaaaaaacaaactgaaattatgggtaacattactaatacttcctgcaaaatgaattgacacttaccacattaacayaatacattatacaaagggataatttctgctgtagaatgcatactaaccagtraaaaatcytcaaataaacattttcagcacttcttgaatgaaaagatttttgttcagtaacatgttaataggtatgtctattgggtcacaaaatcacagtgtcttgagttagaaggaacattaaagaccatctagttccaaccctgctgctttggtatctgagtctgtatactactttgtcttctgtcaacataatattggttgcataatggtaagatactgtgtgtgtgattcataggaatgcttct

SEQ ID NO: 68819 - DNA, 600 bp, Chicken  19866894340335_2
gagtgagaaagctgaatctcagtacagcagaaataccagaagctagcagataagaaagccatgcaagttttgtaagcattggtaaatgcattgctctaagaagctaagtcacatgttttattatcccttactctgtcagtgagcaatagctaacctttatgcatgtgtagaggaaaaaacaaactgaaattatgggtaacattactaatacttcctgcaaaatgaattgacacttaccacattaacayaatacattatacaaagggataatttctgctgtagaatgcatactaaccagtraaaaatcytcaaataaacattttcagcacttcttgaatgaaaagatttttgttcagtaacatgttaataggtatgtctattgggtcacaaaatcacagtgtcttgagttagaaggaacattaaagaccatctagttccaaccctgctgctttggtatctgagtctgtatactactttgtcttctgtcaacataatattggttgcataatggtaagatactgtgtgtgtgattcataggaatgcttcttgctgaggacaattcatgtcagtgaagttggattgttactagtagaatacagg

SEQ ID NO: 68820 - DNA, 600 bp, Chicken  19866894340335_3
aagctgaatctcagtacagcagaaataccagaagctagcagataagaaagccatgcaagttttgtaagcattggtaaatgcattgctctaagaagctaagtcacatgttttattatcccttactctgtcagtgagcaatagctaacctttatgcatgtgtagaggaaaaaacaaactgaaattatgggtaacattactaatacttcctgcaaaatgaattgacacttaccacattaacayaatacattatacaaagggataatttctgctgtagaatgcatactaaccagtraaaaatcytcaaataaacattttcagcacttcttgaatgaaaagatttttgttcagtaacatgttaataggtatgtctattgggtcacaaaatcacagtgtcttgagttagaaggaacattaaagaccatctagttccaaccctgctgctttggtatctgagtctgtatactactttgtcttctgtcaacataatattggttgcataatggtaagatactgtgtgtgtgattcataggaatgcttcttgctgaggacaattcatgtcagtgaagttggattgttactagtagaatacaggcctggaat

SEQ ID NO: 68821 - DNA, 600 bp, Chicken  19866894340336_1
gccctgtaacagttgagctttacagagacaagtacaaaagctgcaacctcatcacaagaatttgctgaaaagatgagcacatctggaaatcttgagctgtgccacaacccataactttacctgctcagtaccaaccaaggcaaaccacatgaagaaaggatacagagaagcaggtgcaaaagcacacgttattctttcactgtaagttctctgatagactcagagcattcatcagcaaaggacaaggagaaaaagcatccaatagcttctcttccaaaataattacttaggaatgggaarcgtccacaaaatatatttcatattcctaacacatcccttaagttttccctaaattaatagaaaagccacaactgtagcatgccaggagaacagagaagaggagtaagggcatggcaaaaccctgatggcagtcatagcagtgacatatttttaatagctatgataatataaatctttaacatggataggaagagaacaactcagatgacagaaaagtggatttgcatggcacggatctggtaggtgcacgtcacttcacagagctggtgaaagcaatgagaccagtggtgggatgccaaa

SEQ ID NO: 68822 - DNA, 600 bp, Chicken  19866894340339_1
taaggacagcggcactaaatcagatcatctccccattatctttctccctaaagaggccattagcactccacaggaaaccctctggacagcctgctgtccgaattgctgcactgaaagagacagtgagaaataattccttattcacacactggctgaatgcctgcctatgtaaaattcattgtggaatacagagtttgttcagctcaaccctttaaaactactattttaatgagttcccaacaaaaccagtttaaagctagtagccttcaaaatagtagctgttaaacttcttaaaagcaygttaacaaatagaaagatgcatttatactccacgaggctccattattttagaagaaaagaattgctagaaaaaaatactatttttttttctttgcaagatgaagtygatctagacctaattttactccgacatttcagacagcatttgaggacascaggtaccactggatgttattcaaaactgtcaacatccattttcagggttctgcagcatctcaagaagaactacatgaagaaagagccacaatctcaggaaataatatctttacatgtaaattacaagcaatccctttgacaagt

SEQ ID NO: 68823 - DNA, 543 bp, Chicken  19866894340339_2
tgcactgaaagagacagtgagaaataattccttattcacacactggctgaatgcctgcctatgtaaaattcattgtggaatacagagtttgttcagctcaaccctttaaaactactattttaatgagttcccaacaaaaccagtttaaagctagtagccttcaaaatagtagctgttaaacttcttaaaagcaygttaacaaatagaaagatgcatttatactccacgaggctccattattttagaagaaaagaattgctagaaaaaaatactatttttttttctttgcaagatgaagtygatctagacctaattttactccgacatttcagacagcatttgaggacascaggtaccactggatgttattcaaaactgtcaacatccattttcagggttctgcagcatctcaagaagaactacatgaagaaagagccacaatctcaggaaataatatctttacatgtaaattacaagcaatccctttgacaagttcattaaaagccttcttgtaccttgggggtattaaacttttaaatcata

SEQ ID NO: 68824 - DNA, 494 bp, Chicken  19866894340339_3
aatgcctgcctatgtaaaattcattgtggaatacagagtttgttcagctcaaccctttaaaactactattttaatgagttcccaacaaaaccagtttaaagctagtagccttcaaaatagtagctgttaaacttcttaaaagcaygttaacaaatagaaagatgcatttatactccacgaggctccattattttagaagaaaagaattgctagaaaaaaatactatttttttttctttgcaagatgaagtygatctagacctaattttactccgacatttcagacagcatttgaggacascaggtaccactggatgttattcaaaactgtcaacatccattttcagggttctgcagcatctcaagaagaactacatgaagaaagagccacaatctcaggaaataatatctttacatgtaaattacaagcaatccctttgacaagttcattaaaagccttcttgtaccttgggggtattaaacttttaaatcata

SEQ ID NO: 68825 - DNA, 599 bp, Chicken  19866894340352_1
  misc_feature (1)..(2): n is any nucleotide
nncgtggtttcatattgacccctgtcatggatattcagtgttgccattttaactgtctctaacaccaagtttttgtaacattagcaaaaacccccatgacccagtgagcaccgcccacaggaatccacttacttcagtaaatcttctgcagctaaatatgaagcaggtctattagcattactgtagacacacctcagatctggatgttacagatgtatactacctgctgtgggaggccttgggtttcctctcagaacggaagagaattaggaattgaaaagaatcagaaggttcattctygaaatgagcttttccacctttatgtaagccccttcttgcctgttgtgccattgtacaggataagtctgttgctaccctgcatgctgacctgcacagcccacattccagctcaagycatctctgcttgagagctaccagcacccctctgctatctgtctgacccccagacatgaactgtggctactactgctaaccactgctataaaaaaagtcacagaatcacagsagttggaagagatctctctctggagatcatgtagtccaactccatcctaaagcaggatacctamaggtatcct

SEQ ID NO: 68826 - DNA, 600 bp, Chicken  19866894340352_2
cacaggaatccacttacttcagtaaatcttctgcagctaaatatgaagcaggtctattagcattactgtagacacacctcagatctggatgttacagatgtatactacctgctgtgggaggccttgggtttcctctcagaacggaagagaattaggaattgaaaagaatcagaaggttcattctygaaatgagcttttccacctttatgtaagccccttcttgcctgttgtgccattgtacaggataagtctgttgctaccctgcatgctgacctgcacagcccacattccagctcaagycatctctgcttgagagctaccagcacccctctgctatctgtctgacccccagacatgaactgtggctactactgctaaccactgctataaaaaaagtcacagaatcacagsagttggaagagatctctctctggagatcatgtagtccaactccatcctaaagcaggatacctamaggtatcctgtatacctacaggataggaaagcatttgtattgcatccaaaccacaaaaggcagaaaagtccagcacatctcagggtcatggaggtggcatgagattagacttgccctgtctgtgg

SEQ ID NO: 68827 - DNA, 600 bp, Chicken  19866894340352_3
ctgtgggaggccttgggtttcctctcagaacggaagagaattaggaattgaaaagaatcagaaggttcattctygaaatgagcttttccacctttatgtaagccccttcttgcctgttgtgccattgtacaggataagtctgttgctaccctgcatgctgacctgcacagcccacattccagctcaagycatctctgcttgagagctaccagcacccctctgctatctgtctgacccccagacatgaactgtggctactactgctaaccactgctataaaaaaagtcacagaatcacagsagttggaagagatctctctctggagatcatgtagtccaactccatcctaaagcaggatacctamaggtatcctgtatacctacaggataggaaagcatttgtattgcatccaaaccacaaaaggcagaaaagtccagcacatctcagggtcatggaggtggcatgagattagacttgccctgtctgtgggccacagtcaggactatactgccttcatgatcgcgtctccaacagcattgctacagttgtgtattctggtgggcaaagaagcagctgagaggtgccatacgcaggcacaag

SEQ ID NO: 68828 - DNA, 600 bp, Chicken  19866894340352_4
gttcattctygaaatgagcttttccacctttatgtaagccccttcttgcctgttgtgccattgtacaggataagtctgttgctaccctgcatgctgacctgcacagcccacattccagctcaagycatctctgcttgagagctaccagcacccctctgctatctgtctgacccccagacatgaactgtggctactactgctaaccactgctataaaaaaagtcacagaatcacagsagttggaagagatctctctctggagatcatgtagtccaactccatcctaaagcaggatacctamaggtatcctgtatacctacaggataggaaagcatttgtattgcatccaaaccacaaaaggcagaaaagtccagcacatctcagggtcatggaggtggcatgagattagacttgccctgtctgtgggccacagtcaggactatactgccttcatgatcgcgtctccaacagcattgctacagttgtgtattctggtgggcaaagaagcagctgagaggtgccatacgcaggcacaagataaagaccatctgatacttggtgaggctgaacaattatcttgagtgttgacctgcagctggaa

SEQ ID NO: 68829 - DNA, 599 bp, Chicken  19866894340364_1
  misc_feature (1)..(129): n is any nucleotide
nnnnnnnnnnnnnnnnnnnnnnnnnnnnnnnnnnnnnnnnnnnnnnnnnnnnnnnnnnnnnnnnnnnnnnnnnnnnnnnnnnnnnnnnnnnnnnnnnnnnnnnnnnnnnnnnnnnnnnnnnnnnnnnnnataaaatatattcctattttagtttgactgttcctacatagttttccaaacttttaacaggacaagaggtaatggtctcaagttgcgcccgggaaggttcatgttggatattaggaaaacatctcttctcagaaagagcagtgaggcagtggcacagactgcccagggaascagtggagtcatggtccctggagatgtttaagaaacatggggatgtggcactgaggaacatggttagtggacatggtggagatgggctgatggttggactagatgacattagtggtcttttccaacctacatgattttaggattctgtgattattagcattgtatttattatatttaaatccagaaaattatacatatatattaagatttgcatcctggaatattttcactgaagttgcaatgcaacatcaactttgtaatgtacaggttacagaacacagtagtatatagcagtattg

SEQ ID NO: 68830 - DNA, 600 bp, Chicken  19866894340367_1
gttttgtgagattatgaatgtccaattaaaagatcagatgtatgcaacagatagaacagctaggagatttcctgttctagccttattagtgttggggatttttgttgttggtttttgtttctcttttttcccatatgaaatatgggaaaaatataagaatccgatttgttaaaacagttttctttacatagatttttctagaacatatcaaagcacttctgaaatctaaaaataaagataagaagagaggagtaaactacgtcatttgttagactcttatcactgcacctttccatctcygtttccttyacttgcagaagccatttttggatttactaatagagtaaaaagcaagggggtcagtatgtaaaacattttctcatactgagtagccccactgctatagcatacattcaggaatagaagctgacagattcattgctctgaaatggctggaggcaaagcagcttcagtccacagtcataaagctgtatcatagtgtgctggagctaatacattctgcttctcagcaggcatgagtaatatagaattattattaatacggtaattatggtattattgcagtgtggaagatctcag

SEQ ID NO: 68831 - DNA, 600 bp, Chicken  19866894340367_2
gattatgaatgtccaattaaaagatcagatgtatgcaacagatagaacagctaggagatttcctgttctagccttattagtgttggggatttttgttgttggtttttgtttctcttttttcccatatgaaatatgggaaaaatataagaatccgatttgttaaaacagttttctttacatagatttttctagaacatatcaaagcacttctgaaatctaaaaataaagataagaagagaggagtaaactacgtcatttgttagactcttatcactgcacctttccatctcygtttccttyacttgcagaagccatttttggatttactaatagagtaaaaagcaagggggtcagtatgtaaaacattttctcatactgagtagccccactgctatagcatacattcaggaatagaagctgacagattcattgctctgaaatggctggaggcaaagcagcttcagtccacagtcataaagctgtatcatagtgtgctggagctaatacattctgcttctcagcaggcatgagtaatatagaattattattaatacggtaattatggtattattgcagtgtggaagatctcagaatgaaaat

SEQ ID NO: 68832 - DNA, 600 bp, Chicken  19866894340367_3
aagctgacagattcattgctctgaaatggctggaggcaaagcagcttcagtccacagtcataaagctgtatcatagtgtgctggagctaatacattctgcttctcagcaggcatgagtaatatagaattattattaatacggtaattatggtattattgcagtgtggaagatctcagaatgaaaatatctgtttttctaaaggctttaacctcactaaaaacatttctccatctatgcttctccctgaactgacaattttatagtagtaaaagccaaagcctcagggaattgcaacaaayaaatagaaaaaacatatataacttcagaagtttggcaaataaatggcagaaagccctttcaaataacaaggctatttcttaatgtgtcacaaatgagcaaccttgcctgggatgtatacagttatgaaggaccaccttttacaggctgcgatgcattttcagaaatgataatattcataaatktataccactgacaagttctctcacaggatttgcactccaaaagagaacctaatcaatcctcaatcgttatactgtactttaactcacaaaaaacaaccaacgatggtttgtaacagt

SEQ ID NO: 68833 - DNA, 594 bp, Chicken  19866894340367_4
aatatctgtttttctaaaggctttaacctcactaaaaacatttctccatctatgcttctccctgaactgacaattttatagtagtaaaagccaaagcctcagggaattgcaacaaayaaatagaaaaaacatatataacttcagaagtttggcaaataaatggcagaaagccctttcaaataacaaggctatttcttaatgtgtcacaaatgagcaaccttgcctgggatgtatacagttatgaaggaccaccttttacaggctgcgatgcattttcagaaatgataatattcataaatktataccactgacaagttctctcacaggatttgcactccaaaagagaacctaatcaatcctcaatcgttatactgtactttaactcacaaaaaacaaccaacgatggtttgtaacagttcttgatcacaaaactgaaatgaagagtaattgcctgccaggatttaaaccaaggctaaaatgtttacaataatgtctgttatctctttgtcctggaaccacttctcactgaaagctaagcaccaggctcgctggctttaactgacactttctgcatgtatttaatttgtgcataat

SEQ ID NO: 68834 - DNA, 600 bp, Chicken  19866894340376_1
gacaagcagtacatcaagtacctagcatcaaatctctcagttgcacactccagctttcattcaaaactctacaactgccctgctgtgctggctcatgtagtgccatcgggtccagaacttcaagtaaattggaaacagtgatcccagagaggaattctgcaagagcagttagtttttataaattggaatatgctgcaagtgtttattagacacaggaattagactgagaaccactggtctattttaatgttcagtactgctatcaacatctaaatagcagaactttgtactcctgtgacytggaagggtgattttkgagtattttgttttagaatgcaactacrttcataataaaratactaaacttgtgttttgagatactaaacagyttcattacargaacataagaygtcaatgagaacaatagttactcctatcaaattgatatctactgtaagatagaatggtgacatttctccctgatgctactctacttgccagagaaattaaacaaaaaaagagaatttttatttaaaagcaccaatcaaaaccgagctgttgctaagcaccaggaacatgggagggtgtcagcaaagctag

SEQ ID NO: 68835 - DNA, 600 bp, Chicken  19866894340376_2
agtacctagcatcaaatctctcagttgcacactccagctttcattcaaaactctacaactgccctgctgtgctggctcatgtagtgccatcgggtccagaacttcaagtaaattggaaacagtgatcccagagaggaattctgcaagagcagttagtttttataaattggaatatgctgcaagtgtttattagacacaggaattagactgagaaccactggtctattttaatgttcagtactgctatcaacatctaaatagcagaactttgtactcctgtgacytggaagggtgattttkgagtattttgttttagaatgcaactacrttcataataaaratactaaacttgtgttttgagatactaaacagyttcattacargaacataagaygtcaatgagaacaatagttactcctatcaaattgatatctactgtaagatagaatggtgacatttctccctgatgctactctacttgccagagaaattaaacaaaaaaagagaatttttatttaaaagcaccaatcaaaaccgagctgttgctaagcaccaggaacatgggagggtgtcagcaaagctaggatcaacccaaactgt

SEQ ID NO: 68836 - DNA, 600 bp, Chicken  19866894340376_3
acactccagctttcattcaaaactctacaactgccctgctgtgctggctcatgtagtgccatcgggtccagaacttcaagtaaattggaaacagtgatcccagagaggaattctgcaagagcagttagtttttataaattggaatatgctgcaagtgtttattagacacaggaattagactgagaaccactggtctattttaatgttcagtactgctatcaacatctaaatagcagaactttgtactcctgtgacytggaagggtgattttkgagtattttgttttagaatgcaactacrttcataataaaratactaaacttgtgttttgagatactaaacagyttcattacargaacataagaygtcaatgagaacaatagttactcctatcaaattgatatctactgtaagatagaatggtgacatttctccctgatgctactctacttgccagagaaattaaacaaaaaaagagaatttttatttaaaagcaccaatcaaaaccgagctgttgctaagcaccaggaacatgggagggtgtcagcaaagctaggatcaacccaaactgttgattcagcatttttctgctgaaagaag

SEQ ID NO: 68837 - DNA, 600 bp, Chicken  19866894340376_4
tcattcaaaactctacaactgccctgctgtgctggctcatgtagtgccatcgggtccagaacttcaagtaaattggaaacagtgatcccagagaggaattctgcaagagcagttagtttttataaattggaatatgctgcaagtgtttattagacacaggaattagactgagaaccactggtctattttaatgttcagtactgctatcaacatctaaatagcagaactttgtactcctgtgacytggaagggtgattttkgagtattttgttttagaatgcaactacrttcataataaaratactaaacttgtgttttgagatactaaacagyttcattacargaacataagaygtcaatgagaacaatagttactcctatcaaattgatatctactgtaagatagaatggtgacatttctccctgatgctactctacttgccagagaaattaaacaaaaaaagagaatttttatttaaaagcaccaatcaaaaccgagctgttgctaagcaccaggaacatgggagggtgtcagcaaagctaggatcaacccaaactgttgattcagcatttttctgctgaaagaagtgagaaagaaga

SEQ ID NO: 68838 - DNA, 600 bp, Chicken  19866894340376_5
ggctcatgtagtgccatcgggtccagaacttcaagtaaattggaaacagtgatcccagagaggaattctgcaagagcagttagtttttataaattggaatatgctgcaagtgtttattagacacaggaattagactgagaaccactggtctattttaatgttcagtactgctatcaacatctaaatagcagaactttgtactcctgtgacytggaagggtgattttkgagtattttgttttagaatgcaactacrttcataataaaratactaaacttgtgttttgagatactaaacagyttcattacargaacataagaygtcaatgagaacaatagttactcctatcaaattgatatctactgtaagatagaatggtgacatttctccctgatgctactctacttgccagagaaattaaacaaaaaaagagaatttttatttaaaagcaccaatcaaaaccgagctgttgctaagcaccaggaacatgggagggtgtcagcaaagctaggatcaacccaaactgttgattcagcatttttctgctgaaagaagtgagaaagaagaaaccagtgcattcataatcacaaccctcagagc

SEQ ID NO: 68839 - DNA, 600 bp, Chicken  19866894340376_6
gtgccatcgggtccagaacttcaagtaaattggaaacagtgatcccagagaggaattctgcaagagcagttagtttttataaattggaatatgctgcaagtgtttattagacacaggaattagactgagaaccactggtctattttaatgttcagtactgctatcaacatctaaatagcagaactttgtactcctgtgacytggaagggtgattttkgagtattttgttttagaatgcaactacrttcataataaaratactaaacttgtgttttgagatactaaacagyttcattacargaacataagaygtcaatgagaacaatagttactcctatcaaattgatatctactgtaagatagaatggtgacatttctccctgatgctactctacttgccagagaaattaaacaaaaaaagagaatttttatttaaaagcaccaatcaaaaccgagctgttgctaagcaccaggaacatgggagggtgtcagcaaagctaggatcaacccaaactgttgattcagcatttttctgctgaaagaagtgagaaagaagaaaccagtgcattcataatcacaaccctcagagcaccctctctt

SEQ ID NO: 68840 - DNA, 600 bp, Chicken  19866894340376_7
tccagaacttcaagtaaattggaaacagtgatcccagagaggaattctgcaagagcagttagtttttataaattggaatatgctgcaagtgtttattagacacaggaattagactgagaaccactggtctattttaatgttcagtactgctatcaacatctaaatagcagaactttgtactcctgtgacytggaagggtgattttkgagtattttgttttagaatgcaactacrttcataataaaratactaaacttgtgttttgagatactaaacagyttcattacargaacataagaygtcaatgagaacaatagttactcctatcaaattgatatctactgtaagatagaatggtgacatttctccctgatgctactctacttgccagagaaattaaacaaaaaaagagaatttttatttaaaagcaccaatcaaaaccgagctgttgctaagcaccaggaacatgggagggtgtcagcaaagctaggatcaacccaaactgttgattcagcatttttctgctgaaagaagtgagaaagaagaaaccagtgcattcataatcacaaccctcagagcaccctctcttcttctattaaa

SEQ ID NO: 68841 - DNA, 600 bp, Chicken  19866894340382_1
aggaaaatgttttctgcacaaaggtttgatgtaatggtgaagggttagggagatggagatccatagaaactcaatacacaaaatcaaaatctctaaaatatttctcaagttatttcctgaagagaaaagattgtttacaaagtcagggtagtctttgccccagatccctgtctcttgaatagagctacatgttaatatcacatgcaggaagaactaagtacctgtgcattgtaaatctaggtagtgctgaaactctgggcattgagttgtattgtggtgccatctacatcttgtgtttgyttttttttttttaaaaaaaaagaaaacatggttctaagatgtctgcagtcttttcttgtgtaacttactaatggtgtccttacagtctcacaggtaacttggttgtggtagctctccttggagcagatacaggctatgtaaggggcagtcagatattgcttgtgaacggattcaatactggaacaagttgtactgtaggtagggtcataaaactacttctgaaagattgaatgagtcaagtttatcagcacagcagtaacatgaatcttgcagggtaccaatgatctgtcacagtcttgg

SEQ ID NO: 68842 - DNA, 600 bp, Chicken  19866894340385_1
tgcttacaaagagatactcagaataaatccacattttcagttatttttaagtttctcaaaagcctcataatgaaattgttcatgctagggcatgggctcttgaattcttgaaggcatttcaaggccaatccacctaatactataatatctagggcacaaagaaatattacatgcacagtgctctcttatttctcttgtcagccagcgtctcattctgtttatggttcagagcactgtaaattctgaattatggtttcatcacaagacacttattttactggagtgctgtggtgtgcaggyctgttgattgatagatctgttgttttaggtgagacaagggaagagaggacgttcaggaactggatgaactccctgggcgttactccgcgtgtaaatcacttgtataggtaaggagaggccttacacttccttcagacaatacatgcagccacaaaattgtttatagaaaacataaaagaacttttggaccttaaaataagatgcatataaggtccaaaagtgtgtgtgtgtatatatatatatatatacacacgcgtccgcacatatatatatttaggaaactaagtttacctgtactaa

SEQ ID NO: 68843 - DNA, 600 bp, Chicken  19866894340391_1
tatgcacaatggctcttccctgactggcactgagcagttctggagatggggagcaatctttggttccagggctggaggaggttgcctcgtaattggaggtacagcatggagctgtgtagttgttttcagaggatgcaaaagggattgtgctataataaaagggaagaatgcacttgaagagaactgcatttctgtgagtatgttttcattttatctgtaggtaagaaagtctatcctgtctgtagccagtctgtgtttgcatcgtgatcttattttagaagtacatttgaactactgagygatgacaaccttgtgactgttcagtctccataaagtctgtttcagaagctgtgtccctacattattagttgggactaataatatagacaaggcataaagtttgagtagatttccctagattatctggtcccaaaaccagagattatttcaggtctcctgattgctgcccggtgtttctcctaatgaaaaatgtttgctctgaataatcagaaaccttccaaaggccgtacagctcctgcgtgtggggtgccatgtgcatgttccctggtaaacaggagctctaattcatgagactgtttc

SEQ ID NO: 68844 - DNA, 600 bp, Chicken  19866894340404_1
gtgccccaccagtgggatcctggcacaggatgtgggccgaacattcatctctgtgcaggaggaatgtggcaccacaaacccccattccagcactgggtggtgacatcagtccccattcccacatgttgcctgggctcagggaaatgctgagctgaaggaagctgcagtctgtgtgcagggaggggaagagatggggcttggccgtgtgggaaaagctcagggccagccggtgtccacagtgccctcacctgtcagcaccagctccacggggtcactctttttggatgtcctcagaggctytgacacctggtaccgacactgatatgtcccggcgtcctccaggtttgtgacagcaaaggagaactcagctgcatcctgctccttgtytttttccttcttaaatctcagagttccattgtgccagagctggacccaggcatccatgcggggcaggtggcagcgcagggtgacattgtyccccagggacaccccctggctggggtgcagcgacaggaagggttggggcactaggacaggggacagcagtcagccttgtccctgcacgccatcctcagcccctctgctctccccctgaccacg

SEQ ID NO: 68845 - DNA, 600 bp, Chicken  19866894340404_2
cagcactgggtggtgacatcagtccccattcccacatgttgcctgggctcagggaaatgctgagctgaaggaagctgcagtctgtgtgcagggaggggaagagatggggcttggccgtgtgggaaaagctcagggccagccggtgtccacagtgccctcacctgtcagcaccagctccacggggtcactctttttggatgtcctcagaggctytgacacctggtaccgacactgatatgtcccggcgtcctccaggtttgtgacagcaaaggagaactcagctgcatcctgctccttgtytttttccttcttaaatctcagagttccattgtgccagagctggacccaggcatccatgcggggcaggtggcagcgcagggtgacattgtyccccagggacaccccctggctggggtgcagcgacaggaagggttggggcactaggacaggggacagcagtcagccttgtccctgcacgccatcctcagcccctctgctctccccctgaccacgctcccctctttccatccccattctccccctgtccccgtactcacattgctgtgcccagctcacagtcaccagccaccaacctgcaag

SEQ ID NO: 68846 - DNA, 600 bp, Chicken  19866894340404_3
gggaggggaagagatggggcttggccgtgtgggaaaagctcagggccagccggtgtccacagtgccctcacctgtcagcaccagctccacggggtcactctttttggatgtcctcagaggctytgacacctggtaccgacactgatatgtcccggcgtcctccaggtttgtgacagcaaaggagaactcagctgcatcctgctccttgtytttttccttcttaaatctcagagttccattgtgccagagctggacccaggcatccatgcggggcaggtggcagcgcagggtgacattgtyccccagggacaccccctggctggggtgcagcgacaggaagggttggggcactaggacaggggacagcagtcagccttgtccctgcacgccatcctcagcccctctgctctccccctgaccacgctcccctctttccatccccattctccccctgtccccgtactcacattgctgtgcccagctcacagtcaccagccaccaacctgcaagggacacggtcctggtcccacacagggccaccaaccccagtggcaccacatccccattgtcactcaccaaggatgagggccacggccattg

SEQ ID NO: 68847 - DNA, 600 bp, Chicken  19866894340411_1
cagcctgctcagtcctgcaggcctttggctgggccaaccgttgttatttgtggctgaaacatccaagtgaaacgagcagaaaacagcaacaatccggagctggtgtccctttctggggtaaaattaccacgaagaaactggccgatgttttcagctgctgaactgtgaggtgtggtgttgcattgagtacagtgaatggaaatctcaatcctttatcagcttgatatcagagcaagatttgatttagtgggtgaaagtcggtaacaaacatgccccttttgcttgtgtagcattgagatkgggtgagctttatgtccatgcacatacgaaggcaactgccccaaatcagaatctggccccaaaatgtgaccagtctgggcactcagcaaatctgaactgtgtgaaaacgcagctgcacactcggggcacgcgcctgtttacacatcaagctgacctaaataaataaataacagtgggaaattgggttttgatgagcgtgctcccttcagcaaggccccggaacagttctggggattgtgctgccgcatttcccaaaatgaagctgttcacaaactgaggcaatttttgagcatgaacatt

SEQ ID NO: 68848 - DNA, 600 bp, Chicken  19866894340412_1
ctttcttctcatagtgtttagtcactactcgcgcacaaagcttggccctaactgcatctgaagagcttgcttgtcccagaacccagtggagctgcaatgataatctgtacccgataagctgtaccctgggatatcagctctgcattactttgcctaggtctagttgttggcaaggacacctggtaagccaggacatcagatatgtgctggaagtaggtggaagatcagaaacacgatcccgcaagccagtatcttggcatactgtatatccaggcaggcaatactgtaaagttgattgtragcaggaaactttccttccccaggaaatcaattctccattaacaaattagagagagcaatgctcggataaagtaggtccaagttgcttcagaatagacgcagctggcaagatgtcctgggtctcacaacttcttagtgatgctcaataaagaacaatttcactgaaggtttcctccaccagaatgagctgactcacatgaggggrcattggaacataattattgcgtggtggcgatgatctcttagctgtgcttttctgacatccgcacrcaaggataaaggcagacatgagttacttca

SEQ ID NO: 68849 - DNA, 549 bp, Chicken  19866894340412_2
gctggaagtaggtggaagatcagaaacacgatcccgcaagccagtatcttggcatactgtatatccaggcaggcaatactgtaaagttgattgtragcaggaaactttccttccccaggaaatcaattctccattaacaaattagagagagcaatgctcggataaagtaggtccaagttgcttcagaatagacgcagctggcaagatgtcctgggtctcacaacttcttagtgatgctcaataaagaacaatttcactgaaggtttcctccaccagaatgagctgactcacatgaggggrcattggaacataattattgcgtggtggcgatgatctcttagctgtgcttttctgacatccgcacrcaaggataaaggcagacatgagttacttcactgatgatgcacacagcgtatatttttatttcagagccatttacaaacaaaaatacatttctgagcttattatgtctaagcttaaaaataaaaattgcaataaaaattaaaaaaaaaacaacaacaaaaattgaaaaagcaaactcaaaacaat

SEQ ID NO: 68850 - DNA, 484 bp, Chicken  19866894340412_3
caggcaggcaatactgtaaagttgattgtragcaggaaactttccttccccaggaaatcaattctccattaacaaattagagagagcaatgctcggataaagtaggtccaagttgcttcagaatagacgcagctggcaagatgtcctgggtctcacaacttcttagtgatgctcaataaagaacaatttcactgaaggtttcctccaccagaatgagctgactcacatgaggggrcattggaacataattattgcgtggtggcgatgatctcttagctgtgcttttctgacatccgcacrcaaggataaaggcagacatgagttacttcactgatgatgcacacagcgtatatttttatttcagagccatttacaaacaaaaatacatttctgagcttattatgtctaagcttaaaaataaaaattgcaataaaaattaaaaaaaaaacaacaacaaaaattgaaaaagcaaactcaaaacaat

SEQ ID NO: 68851 - DNA, 600 bp, Chicken  19866894340414_1
tagcctaattctctgcccaaggtatttcccttcctggctctcttccctttcaactcggagtgatttttttttttttaatatatattttttaattctgcagtatttgcctatttccaacacctcccccacgtggcacagtgtcaaatcagcagcaagcaggccagcagaaaaacatattcccattactctcagcgctagagcagaagattttaagacatagccagtaaattgagtcttctgcagggtggctgctaagcagaagtccttcttgcaagaatgtcaccatgtgctgcagccaamaaggagccagcaggctactgctgttagtgcagatggttggaaggtcagcccgggcttctggatggttttgctaggatgaaaagctacatgtcyggggagaaaatgcaagaccacaacgaaggtctgaggaccccatgatacaccagtgagtggrtttgcccacttgtcatgaacagacactaactgtcatgattcctcatccgtgtatgctcctatgggagtaaggtccacaggcaagtgtgaaatttccccttagaatctgtttttccttcactgattccctgctgctattatttttgc

SEQ ID NO: 68852 - DNA, 599 bp, Chicken  19866894340414_2
tctgcagtatttgcctatttccaacacctcccccacgtggcacagtgtcaaatcagcagcaagcaggccagcagaaaaacatattcccattactctcagcgctagagcagaagattttaagacatagccagtaaattgagtcttctgcagggtggctgctaagcagaagtccttcttgcaagaatgtcaccatgtgctgcagccaamaaggagccagcaggctactgctgttagtgcagatggttggaaggtcagcccgggcttctggatggttttgctaggatgaaaagctacatgtcyggggagaaaatgcaagaccacaacgaaggtctgaggaccccatgatacaccagtgagtggrtttgcccacttgtcatgaacagacactaactgtcatgattcctcatccgtgtatgctcctatgggagtaaggtccacaggcaagtgtgaaatttccccttagaatctgtttttccttcactgattccctgctgctattatttttgcctcatattaagcctaaaaggaccttgtctatctgagaaaagagatagaggctcacatgaagcatataatccaagaatcattttccattctat

SEQ ID NO: 68853 - DNA, 538 bp, Chicken  19866894340414_3
agcaggccagcagaaaaacatattcccattactctcagcgctagagcagaagattttaagacatagccagtaaattgagtcttctgcagggtggctgctaagcagaagtccttcttgcaagaatgtcaccatgtgctgcagccaamaaggagccagcaggctactgctgttagtgcagatggttggaaggtcagcccgggcttctggatggttttgctaggatgaaaagctacatgtcyggggagaaaatgcaagaccacaacgaaggtctgaggaccccatgatacaccagtgagtggrtttgcccacttgtcatgaacagacactaactgtcatgattcctcatccgtgtatgctcctatgggagtaaggtccacaggcaagtgtgaaatttccccttagaatctgtttttccttcactgattccctgctgctattatttttgcctcatattaagcctaaaaggaccttgtctatctgagaaaagagatagaggctcacatgaagcatataatccaagaatcattttccattctat

SEQ ID NO: 68854 - DNA, 600 bp, Chicken  19866894340415_1
ccctaacaccccctttctccccaggacaatctcttcagtacagaggagaatcccctgcatgtgagacgtgtggccctggatctgcgtgtctaggtgagcagcacggggacacctgcaaccccacaagggcacctggggcaccctgggtgtctccggagccctgaggaccaggcatcaggggctgggaatggatggtatggaggggactgtccctggcctgttccaacagggaggcctgggcactgtcacctccagaccttcccttgcgctctatggggctgtgctgaggaggggatttgratggggcatgttcagggtgccctatggatggcccagggtcaccatgcagctgggacaggggatgtggctgctgttcccaggggacccacgtcctgccctgggtctcttggctgctgcccatccttctcctgccctaagtccctggggacaaaccttgcagggacaaggcttctcctcaccgccaatgcccttggacatcttctgatgaccagtgctgccctctaatgaccaatgacagcctctgatgaccgatgaagaccctgatgatcaatgaccccctctgatgatcattaaatcyct

SEQ ID NO: 68855 - DNA, 600 bp, Chicken  19866894340415_2
gratggggcatgttcagggtgccctatggatggcccagggtcaccatgcagctgggacaggggatgtggctgctgttcccaggggacccacgtcctgccctgggtctcttggctgctgcccatccttctcctgccctaagtccctggggacaaaccttgcagggacaaggcttctcctcaccgccaatgcccttggacatcttctgatgaccagtgctgccctctaatgaccaatgacagcctctgatgaccgatgaagaccctgatgatcaatgaccccctctgatgatcattaaatcyctcggcaaatctatactctgtgtttctgtgtccttgtcctcacgctcagcagggactactcaggtctgcctctgcctggcagtggccaccccaaagtgctgggaggggtccccagctccatgccacacacgccatgtcctatgtctctgtgggcttccccaccctctctcgtcatctgatccaaaatcctaaaggacggagctgctcacgctgctgagcagctccaataccctccctctgctctctccctacttgtccttccagttccgcccaagggacggaatttactgacgtaagggg

SEQ ID NO: 68856 - DNA, 600 bp, Chicken  19866894340419_1
gtcacctctcacaagcggaggcgatgcagcactgagcacagccccagccacctcagtccgacttacagctcctcattgatcagcagcaccgcgccacgccaccgagctgctggagccaaagtttgctgctctgggtgaccctgagtgctaattaatctgggttcagaagagacaacagccctgaaaaacagcccagggttagagagactatttatagtctgggctttgggtgagtaacagccccaggaaagcaaagcagacagagcgggattcggcaaaggtgttaccaaaccctggcamgggctctatggggcagaatgggtacggagctgctggggaaggctcccctgcgcctcgccctattggggctgctggtgagggcactgcctgggctcatcccctgcccgcccgcctcgaggcaagcatcctgcccaggccgtgctgcagccaaatcccttcgtggcaaagctccagcatgaactggaagcagcaaagaaagcaaattctccgaagggctgagcagtcagatttgctcccataaatccaggccttgatcctgatgccgaggcgagcgcaaagctcccctgcaaacctgagcca

SEQ ID NO: 68857 - DNA, 600 bp, Chicken  19866894340421_1
aatactagctcgaaaaagttaataaaccgtacatgagtccagcgatgtgaccgttaactaactggaacactttgcctcactgaggacttgaaaatcaccagatacgaacgcattgcttgtgcaacgaatacttttccaaagctgaatagaatgtcatcaaaagaaaagctgatcaaagcccacgtcagtgctctggtcttaacttaggaatggcttacgttgttgtatctatgtgatgttaaaaaacaaaacaaaacaaaaaaaacaattggcttggcctctgttgactgatttctatcwcagtatggctcagacctcaaagatcatcragctcgaatgcctccaccaccggccgggctgccacccactcaattgggctgcccagagacacatccaacgtggcctcgaacgcctccggagacgcgtcattcacaacctccctgggcatcctgtgtcagtgcctcaatacctcgagtaagaaattcctgcctcctaatatctaacctaaatcttccctcttttcgtttaaagccattccaccttgttctgtcactatcaggttgtagcggaaatgccaaatcacagcttgaatcacaggtg

SEQ ID NO: 68858 - DNA, 600 bp, Chicken  19866894340421_2
tacatgagtccagcgatgtgaccgttaactaactggaacactttgcctcactgaggacttgaaaatcaccagatacgaacgcattgcttgtgcaacgaatacttttccaaagctgaatagaatgtcatcaaaagaaaagctgatcaaagcccacgtcagtgctctggtcttaacttaggaatggcttacgttgttgtatctatgtgatgttaaaaaacaaaacaaaacaaaaaaaacaattggcttggcctctgttgactgatttctatcwcagtatggctcagacctcaaagatcatcragctcgaatgcctccaccaccggccgggctgccacccactcaattgggctgcccagagacacatccaacgtggcctcgaacgcctccggagacgcgtcattcacaacctccctgggcatcctgtgtcagtgcctcaatacctcgagtaagaaattcctgcctcctaatatctaacctaaatcttccctcttttcgtttaaagccattccaccttgttctgtcactatcaggttgtagcggaaatgccaaatcacagcttgaatcacaggtgattgcgcacctggtgggaaggcagggcca

SEQ ID NO: 68859 - DNA, 600 bp, Chicken  19866894340421_3
aattgggctgcccagagacacatccaacgtggcctcgaacgcctccggagacgcgtcattcacaacctccctgggcatcctgtgtcagtgcctcaatacctcgagtaagaaattcctgcctcctaatatctaacctaaatcttccctcttttcgtttaaagccattccaccttgttctgtcactatcaggttgtagcggaaatgccaaatcacagcttgaatcacaggtgattgcgcacctggtgggaaggcagggccaacccaggggacctcaggtgcactcaatgcagctgagtgacygggaggggtggagccaggatccgccccttcccaggcctcatttaagggtcagcagtggaggtgagggtgtcttgctggtgtttcttatatccttgaggccctctgaaggtaagcagctgcttttctttgtttctgcacccacggctgttgtgcttgggcttgttctcttttgctgcagccgtgggctttgccaccctgctgttattggtgtactttccatcgtgttacagtgttacrcagaccctgtaaaaagttggtcctcctcctgtttataagataccttcragygctagaagccac

SEQ ID NO: 68860 - DNA, 576 bp, Chicken  19866894340421_4
acctggtgggaaggcagggccaacccaggggacctcaggtgcactcaatgcagctgagtgacygggaggggtggagccaggatccgccccttcccaggcctcatttaagggtcagcagtggaggtgagggtgtcttgctggtgtttcttatatccttgaggccctctgaaggtaagcagctgcttttctttgtttctgcacccacggctgttgtgcttgggcttgttctcttttgctgcagccgtgggctttgccaccctgctgttattggtgtactttccatcgtgttacagtgttacrcagaccctgtaaaaagttggtcctcctcctgtttataagataccttcragygctagaagccacagtgaagcattttcttctccttggtaagcaaaatcaagttccatcaacaacttttcttgataggaacagtactaaagctctttgctcatctttgtggccttcccctggacccactccatcagccccacgttctctctcgtgctgagggccccaggcacaggtctccagatagagcgctgtgagggcagagtagagggggggacgattgcctcc

SEQ ID NO: 68861 - DNA, 528 bp, Chicken  19866894340421_5
tgcagctgagtgacygggaggggtggagccaggatccgccccttcccaggcctcatttaagggtcagcagtggaggtgagggtgtcttgctggtgtttcttatatccttgaggccctctgaaggtaagcagctgcttttctttgtttctgcacccacggctgttgtgcttgggcttgttctcttttgctgcagccgtgggctttgccaccctgctgttattggtgtactttccatcgtgttacagtgttacrcagaccctgtaaaaagttggtcctcctcctgtttataagataccttcragygctagaagccacagtgaagcattttcttctccttggtaagcaaaatcaagttccatcaacaacttttcttgataggaacagtactaaagctctttgctcatctttgtggccttcccctggacccactccatcagccccacgttctctctcgtgctgagggccccaggcacaggtctccagatagagcgctgtgagggcagagtagagggggggacgattgcctcc

SEQ ID NO: 68862 - DNA, 525 bp, Chicken  19866894340421_6
agctgagtgacygggaggggtggagccaggatccgccccttcccaggcctcatttaagggtcagcagtggaggtgagggtgtcttgctggtgtttcttatatccttgaggccctctgaaggtaagcagctgcttttctttgtttctgcacccacggctgttgtgcttgggcttgttctcttttgctgcagccgtgggctttgccaccctgctgttattggtgtactttccatcgtgttacagtgttacrcagaccctgtaaaaagttggtcctcctcctgtttataagataccttcragygctagaagccacagtgaagcattttcttctccttggtaagcaaaatcaagttccatcaacaacttttcttgataggaacagtactaaagctctttgctcatctttgtggccttcccctggacccactccatcagccccacgttctctctcgtgctgagggccccaggcacaggtctccagatagagcgctgtgagggcagagtagagggggggacgattgcctcc

SEQ ID NO: 68863 - DNA, 600 bp, Chicken  19866894340430_1
cacctttttgcaatgggacttctagaagtaataagagtgttctgttcacctgacctgcatgaaaatttccaatggccaataataatgcattggtgcagctacaaggtctccaacgtcagtacacgagctgaaagtcatgtaggcctggtcttctcaacaacgtgggcagagaaacctcatgcgccagcccagttctagcaggcagcatgtttggtctacgtattgttcagtgaaatgctggtggtcgtggcattttctgctgaaagcccaaatgcatgctttgcctgatgcttgaagggwagygcctgggcagagttgctttgagaatctgtgctttacctggtttctgtcatctttgagtggaaaataacatggtgcttgatgccttgggcttgctggaaatcaaggtctgctcaccatgtcttctctgcctacctgcaggttgtttgagcacaaaggcgatgggtatctgtcagtcattcaaagaaactggggggcacctcacwtccctttagttcgtttgtgktttttttgctggccaaatcttccctataagtcaagacgagtaattgctataagctaacgcagacgtcctcatca

SEQ ID NO: 68864 - DNA, 600 bp, Chicken  19866894340430_2
ctttttgcaatgggacttctagaagtaataagagtgttctgttcacctgacctgcatgaaaatttccaatggccaataataatgcattggtgcagctacaaggtctccaacgtcagtacacgagctgaaagtcatgtaggcctggtcttctcaacaacgtgggcagagaaacctcatgcgccagcccagttctagcaggcagcatgtttggtctacgtattgttcagtgaaatgctggtggtcgtggcattttctgctgaaagcccaaatgcatgctttgcctgatgcttgaagggwagygcctgggcagagttgctttgagaatctgtgctttacctggtttctgtcatctttgagtggaaaataacatggtgcttgatgccttgggcttgctggaaatcaaggtctgctcaccatgtcttctctgcctacctgcaggttgtttgagcacaaaggcgatgggtatctgtcagtcattcaaagaaactggggggcacctcacwtccctttagttcgtttgtgktttttttgctggccaaatcttccctataagtcaagacgagtaattgctataagctaacgcagacgtcctcatcactt

SEQ ID NO: 68865 - DNA, 600 bp, Chicken  19866894340430_3
atgtttggtctacgtattgttcagtgaaatgctggtggtcgtggcattttctgctgaaagcccaaatgcatgctttgcctgatgcttgaagggwagygcctgggcagagttgctttgagaatctgtgctttacctggtttctgtcatctttgagtggaaaataacatggtgcttgatgccttgggcttgctggaaatcaaggtctgctcaccatgtcttctctgcctacctgcaggttgtttgagcacaaaggcgatgggtatctgtcagtcattcaaagaaactggggggcacctcacwtccctttagttcgtttgtgktttttttgctggccaaatcttccctataagtcaagacgagtaattgctataagctaacgcagacgtcctcatcacttgcatcatattcaaagtggggtacagctttcatcatctttccagcaaaggaaaaatagcgtggatgtttccaagtggttaaaaatcagataagagggaatgctgaggatgatagccaactcgagaaatctcagctctgtgtgagccaggctatatatttttatattcattaagttttaacacctctcagtctcacctcagcaga

SEQ ID NO: 68866 - DNA, 600 bp, Chicken  19866894340430_4
tcagtgaaatgctggtggtcgtggcattttctgctgaaagcccaaatgcatgctttgcctgatgcttgaagggwagygcctgggcagagttgctttgagaatctgtgctttacctggtttctgtcatctttgagtggaaaataacatggtgcttgatgccttgggcttgctggaaatcaaggtctgctcaccatgtcttctctgcctacctgcaggttgtttgagcacaaaggcgatgggtatctgtcagtcattcaaagaaactggggggcacctcacwtccctttagttcgtttgtgktttttttgctggccaaatcttccctataagtcaagacgagtaattgctataagctaacgcagacgtcctcatcacttgcatcatattcaaagtggggtacagctttcatcatctttccagcaaaggaaaaatagcgtggatgtttccaagtggttaaaaatcagataagagggaatgctgaggatgatagccaactcgagaaatctcagctctgtgtgagccaggctatatatttttatattcattaagttttaacacctctcagtctcacctcagcagatttcattttcttggaataaa

SEQ ID NO: 68867 - DNA, 600 bp, Chicken  19866894340434_1
ggcttcctctctcaatgccatgcgcttattggggttgccatgcacttattggggttcccatgcatttattaaggtttcctcttgaggacatgcatttgttggggtttcctttctccatgccatgcacatattgtgctttcctctttccatgccatgcatttctctgggtttcctccctcggtgccatgcatttgctggggcttgctcttgattatgtgcaactgttggggtttcctctctccatgccgtgcgttcatttgggtttgctctccatgccacgcatctctgggggtccccccstccgctccacgcagtggctgaaggctgatgaggtggagaagggcagcagtggcaccgccatccgcatcgagaaccccaaccagtttgtgcccctctacaccgaccctcaggaggtgctggagatgaggaacaaggtgcggtgccatctgggtcgccccggatgcggggtcccaaagggggtcccaaggacgacaggtccgcgttttcccatcctctctctctgcatctctcctgcagatccgtgagcagaacctgccaggacgtgaagtctgcggggccgcagtcccagctgctggccag

SEQ ID NO: 68868 - DNA, 600 bp, Chicken  19866894340441_1
ttgcctacactttttttttcatgcaaatcccattctaactgcacacagtttttgacaaacaattgggtgagagatgctgacaccccacaatacaagctcattcatagctaagaatatgctagtttcatgtgattgaaaaaaacttggaacatacaacctactttcacctttaccatcaccaatactcactatgcaacattatcagttactaaggtaacatggatgagatagcatatttacatatctttcaaggccaaaaggttttgccatgtctgcagacaatgttacattaacctgaamttctgcttggcacaacagaaaacaatctgaattacgtctggaaagtatgctattaattacacataacaatagagtttttattccaatgacatttgctgttataagcacttgtagcagagggtgcatttaaaactctttcatctatttttatatatttatcactgattgttctctaacattaaatgtgttttgagaacacacaattttggtgtgcaatcacttcctgttgtgcaacatttttgatagaacaactggtgcatacagtggtgatccttctcaaacgcaaagaaatgttccagc

SEQ ID NO: 68869 - DNA, 600 bp, Chicken  19866894340452_1
aggacaagtacttaatcttgttctctcctcagtgaaaaggttgcctagcaccagtaattaggagatccacccttcaacagaaaatacttcttattgccaaatgcaaatattagaacaagcacatcctaatactaaaacgagatgacagtgatttgatgtatgatctctaactcgagaatgagaatctattctaacctacacaccttggcagaccttaaaaaaaccaaccccaaatgaagcaaattacataaaaattaaataccccaaagtgagaacaatccttatgagcagaatcaaaarcaaaaaaaggtagctttcattgtgtttctgcccacwagaaagagcatatctgccactctttgaaagagtctagaaagcaaactcatactggagtaaatgtgtaagagttctttagagatccagaggaacactttaaaaaasttgaaggcaatcccaagacataaagcatttctagatgttgacagatatatctcgttaagacttagctaatatacagataatgcctgaaaacacagaaaggaatcttctgagaaaagtgattatattccaaatcagcactgaataggatgttatcatctg

SEQ ID NO: 68870 - DNA, 600 bp, Chicken  19866894340452_2
aaggttgcctagcaccagtaattaggagatccacccttcaacagaaaatacttcttattgccaaatgcaaatattagaacaagcacatcctaatactaaaacgagatgacagtgatttgatgtatgatctctaactcgagaatgagaatctattctaacctacacaccttggcagaccttaaaaaaaccaaccccaaatgaagcaaattacataaaaattaaataccccaaagtgagaacaatccttatgagcagaatcaaaarcaaaaaaaggtagctttcattgtgtttctgcccacwagaaagagcatatctgccactctttgaaagagtctagaaagcaaactcatactggagtaaatgtgtaagagttctttagagatccagaggaacactttaaaaaasttgaaggcaatcccaagacataaagcatttctagatgttgacagatatatctcgttaagacttagctaatatacagataatgcctgaaaacacagaaaggaatcttctgagaaaagtgattatattccaaatcagcactgaataggatgttatcatctgtacacagtatttgtccatagttaccgatctcaaaca

SEQ ID NO: 68871 - DNA, 600 bp, Chicken  19866894340452_3
atgacagtgatttgatgtatgatctctaactcgagaatgagaatctattctaacctacacaccttggcagaccttaaaaaaaccaaccccaaatgaagcaaattacataaaaattaaataccccaaagtgagaacaatccttatgagcagaatcaaaarcaaaaaaaggtagctttcattgtgtttctgcccacwagaaagagcatatctgccactctttgaaagagtctagaaagcaaactcatactggagtaaatgtgtaagagttctttagagatccagaggaacactttaaaaaasttgaaggcaatcccaagacataaagcatttctagatgttgacagatatatctcgttaagacttagctaatatacagataatgcctgaaaacacagaaaggaatcttctgagaaaagtgattatattccaaatcagcactgaataggatgttatcatctgtacacagtatttgtccatagttaccgatctcaaacagttccaggaatgactgaacattaatagcaactgttctgtgatctctgyaatattaaacacaaactgggaaataagacacatcatgcatcccaatgagtagaacag

SEQ ID NO: 68872 - DNA, 600 bp, Chicken  19866894340452_4
atactggagtaaatgtgtaagagttctttagagatccagaggaacactttaaaaaasttgaaggcaatcccaagacataaagcatttctagatgttgacagatatatctcgttaagacttagctaatatacagataatgcctgaaaacacagaaaggaatcttctgagaaaagtgattatattccaaatcagcactgaataggatgttatcatctgtacacagtatttgtccatagttaccgatctcaaacagttccaggaatgactgaacattaatagcaactgttctgtgatctctgyaatattaaacacaaactgggaaataagacacatcatgcatcccaatgagtagaacagctagaatttaagccctttatttcagagacagaaaactttacataacagaattggttccagaagaatttaaagccaaactcatggtagggaaacaaccctaatctcttcagcacagaatcagctgccagtaacctgacaaatgcaccaagaattgaaaacatttcccagcactacagtccaccactgacagcttttaataaatagtacagaacaaattgcaagagacagcaagcatgtgttgca

SEQ ID NO: 68873 - DNA, 600 bp, Chicken  19866894340460_1
attatttggtaccctcattcggtacgaagccttgattggcaacgtagcaagctcaacgtcattacagtataaatgttaatgaacttcaggggaatctttggattggaggagagtcttggctgcagttacatctctctagctgatgtgggtgtgtaattcataatgcgaaatgggaaataaggaaggtaggggttgtgagtggctgacaaagcttctgttcgcatgggtctctggtgcagcagtggaagtcagggtgaggtcaattggaaaacagcagcctgtggaaataagacttgtacrtgatgactcagctgccagcacggcatgcgacacrcgaggaggctgtgagtaggtgcgagtctcacggggtatttcctacagcatgctgagcctcttcggactcagagattgagccatgcccagacatytgaagggagatccaggtgctgccagcgggaatgactctcagcaagaccttgactgctgcctaaatctccttgaaggtggtgctgtgcagctgttccgtgctacctttccccatcatcgctggctcccaaactcaaaataataatctgtgaagctctgtaggtggttgtcaaa

SEQ ID NO: 68874 - DNA, 600 bp, Chicken  19866894340460_2
attggcaacgtagcaagctcaacgtcattacagtataaatgttaatgaacttcaggggaatctttggattggaggagagtcttggctgcagttacatctctctagctgatgtgggtgtgtaattcataatgcgaaatgggaaataaggaaggtaggggttgtgagtggctgacaaagcttctgttcgcatgggtctctggtgcagcagtggaagtcagggtgaggtcaattggaaaacagcagcctgtggaaataagacttgtacrtgatgactcagctgccagcacggcatgcgacacrcgaggaggctgtgagtaggtgcgagtctcacggggtatttcctacagcatgctgagcctcttcggactcagagattgagccatgcccagacatytgaagggagatccaggtgctgccagcgggaatgactctcagcaagaccttgactgctgcctaaatctccttgaaggtggtgctgtgcagctgttccgtgctacctttccccatcatcgctggctcccaaactcaaaataataatctgtgaagctctgtaggtggttgtcaaagtctaatttaaatttcagggcacaygcattctga

SEQ ID NO: 68875 - DNA, 596 bp, Chicken  19866894340460_3
catctctctagctgatgtgggtgtgtaattcataatgcgaaatgggaaataaggaaggtaggggttgtgagtggctgacaaagcttctgttcgcatgggtctctggtgcagcagtggaagtcagggtgaggtcaattggaaaacagcagcctgtggaaataagacttgtacrtgatgactcagctgccagcacggcatgcgacacrcgaggaggctgtgagtaggtgcgagtctcacggggtatttcctacagcatgctgagcctcttcggactcagagattgagccatgcccagacatytgaagggagatccaggtgctgccagcgggaatgactctcagcaagaccttgactgctgcctaaatctccttgaaggtggtgctgtgcagctgttccgtgctacctttccccatcatcgctggctcccaaactcaaaataataatctgtgaagctctgtaggtggttgtcaaagtctaatttaaatttcagggcacaygcattctgaagccctttgctaatctcaagcaaaccatggctctcatctgcctacttgctttggttgtccttctatgaaaaaaaaaaaaaagaagtgagc

SEQ ID NO: 68876 - DNA, 399 bp, Chicken  19866894340460_4
tgcgacacrcgaggaggctgtgagtaggtgcgagtctcacggggtatttcctacagcatgctgagcctcttcggactcagagattgagccatgcccagacatytgaagggagatccaggtgctgccagcgggaatgactctcagcaagaccttgactgctgcctaaatctccttgaaggtggtgctgtgcagctgttccgtgctacctttccccatcatcgctggctcccaaactcaaaataataatctgtgaagctctgtaggtggttgtcaaagtctaatttaaatttcagggcacaygcattctgaagccctttgctaatctcaagcaaaccatggctctcatctgcctacttgctttggttgtccttctatgaaaaaaaaaaaaaagaagtgagc

SEQ ID NO: 68877 - DNA, 599 bp, Chicken  19866894340469_1
  misc_feature (1)..(62): n is any nucleotide
nnnnnnnnnnnnnnnnnnnnnnnnnnnnnnnnnnnnnnnnnnnnnnnnnnnnnnnnnnnnnnttgtaaactggagagggcagaaaatttgcttctaaggcaaaaggtaaacatttgtatgagagatcacattctgtgaaccagaaaagcgcctctgattcaacatcagatcccatggaatcagcggggatgagtcacagtgcctggccctgctgttgcacaaagcatgcaacgctttgatcccagcagcaccctcagtagtcgctggagaggaaggtcatggctattggacacagctccsagtgctgtytgtacacccctgcaccatctcacaaaaccatttcatctctttcttcctccatccccygtttataaatgtaccccatcctcttttttctgactcactcattttctggcacgcttgacagcattaggtcggtggtttttgatctgagttggagacttcaggggaaaaacaacccagcatggtgatgccagggcagctttcctgttacaaagaataggtactcgctaaaaaatgagctgcctggaaagatctgaaaatgactgccttttgttctcgtcaacagccatagaagg

SEQ ID NO: 68878 - DNA, 599 bp, Chicken  19866894340469_2
  misc_feature (1)..(53): n is any nucleotide
nnnnnnnnnnnnnnnnnnnnnnnnnnnnnnnnnnnnnnnnnnnnnnnnnnnnnttgtaaactggagagggcagaaaatttgcttctaaggcaaaaggtaaacatttgtatgagagatcacattctgtgaaccagaaaagcgcctctgattcaacatcagatcccatggaatcagcggggatgagtcacagtgcctggccctgctgttgcacaaagcatgcaacgctttgatcccagcagcaccctcagtagtcgctggagaggaaggtcatggctattggacacagctccsagtgctgtytgtacacccctgcaccatctcacaaaaccatttcatctctttcttcctccatccccygtttataaatgtaccccatcctcttttttctgactcactcattttctggcacgcttgacagcattaggtcggtggtttttgatctgagttggagacttcaggggaaaaacaacccagcatggtgatgccagggcagctttcctgttacaaagaataggtactcgctaaaaaatgagctgcctggaaagatctgaaaatgactgccttttgttctcgtcaacagccatagaaggaaaatttga

SEQ ID NO: 68879 - DNA, 600 bp, Chicken  19866894340469_3
aaactggagagggcagaaaatttgcttctaaggcaaaaggtaaacatttgtatgagagatcacattctgtgaaccagaaaagcgcctctgattcaacatcagatcccatggaatcagcggggatgagtcacagtgcctggccctgctgttgcacaaagcatgcaacgctttgatcccagcagcaccctcagtagtcgctggagaggaaggtcatggctattggacacagctccsagtgctgtytgtacacccctgcaccatctcacaaaaccatttcatctctttcttcctccatccccygtttataaatgtaccccatcctcttttttctgactcactcattttctggcacgcttgacagcattaggtcggtggtttttgatctgagttggagacttcaggggaaaaacaacccagcatggtgatgccagggcagctttcctgttacaaagaataggtactcgctaaaaaatgagctgcctggaaagatctgaaaatgactgccttttgttctcgtcaacagccatagaaggaaaatttgacatgatcagatgtgatggagaaaacaaggaaaaacgagggctggccagaaagagtttt

SEQ ID NO: 68880 - DNA, 599 bp, Chicken  19866894340475_1
  misc_feature (1)..(14): n is any nucleotide
nnnnnnnnnnnnnnaggaagccagctcccccattacctttcatcagagggggaacactctttcttggcctgcctcctcctgactacgtacctgtagaactccttgttatctttcacatcccttgccaagttcaactccatctgtgccttggctttcctaattctgtctctacacacacggacaacagccctgtattcctcccaggctacacacctctgcttccacttcctgtgcatttccctcttttcccttggtttaacctgcaggtccttgcacagccacggtagtcagctgtctccyctgctcaacttcttctgctgggggatggagagccattgcactctcagaagggtgtccttaaagagctgccagctctgttctgtacccatgcccataaggacagtttcccaggggatcccactcagcagttccttgagcagccrgaagtttgctctcccaaagcrcagggtccttagcagtcactaaagcacacagttgcctttcattagactagtgacatgcatgggcagcagagaactgtaatgggaagcaggcagaatcagcatatagacagacttctcagccctagtgcatttaaa

SEQ ID NO: 68881 - DNA, 600 bp, Chicken  19866894340475_2
tgccttggctttcctaattctgtctctacacacacggacaacagccctgtattcctcccaggctacacacctctgcttccacttcctgtgcatttccctcttttcccttggtttaacctgcaggtccttgcacagccacggtagtcagctgtctccyctgctcaacttcttctgctgggggatggagagccattgcactctcagaagggtgtccttaaagagctgccagctctgttctgtacccatgcccataaggacagtttcccaggggatcccactcagcagttccttgagcagccrgaagtttgctctcccaaagcrcagggtccttagcagtcactaaagcacacagttgcctttcattagactagtgacatgcatgggcagcagagaactgtaatgggaagcaggcagaatcagcatatagacagacttctcagccctagtgcatttaaaaggtgtcccccaccctacctctagtcagtggaaaccacacactcatttctgaaaacaatatataggaatgaataaaaagaaaagctttgcaaaaatcatctttttcatatttaaacataccatttcatttactgcatacttcta

SEQ ID NO: 68882 - DNA, 600 bp, Chicken  19866894340475_3
gtctctacacacacggacaacagccctgtattcctcccaggctacacacctctgcttccacttcctgtgcatttccctcttttcccttggtttaacctgcaggtccttgcacagccacggtagtcagctgtctccyctgctcaacttcttctgctgggggatggagagccattgcactctcagaagggtgtccttaaagagctgccagctctgttctgtacccatgcccataaggacagtttcccaggggatcccactcagcagttccttgagcagccrgaagtttgctctcccaaagcrcagggtccttagcagtcactaaagcacacagttgcctttcattagactagtgacatgcatgggcagcagagaactgtaatgggaagcaggcagaatcagcatatagacagacttctcagccctagtgcatttaaaaggtgtcccccaccctacctctagtcagtggaaaccacacactcatttctgaaaacaatatataggaatgaataaaaagaaaagctttgcaaaaatcatctttttcatatttaaacataccatttcatttactgcatacttctactggagccagcacacataaaa

SEQ ID NO: 68883 - DNA, 599 bp, Chicken  19866894340483_1
  misc_feature (1)..(119): n is any nucleotide
nnnnnnnnnnnnnnnnnnnnnnnnnnnnnnnnnnnnnnnnnnnnnnnnnnnnnnnnnnnnnnnnnnnnnnnnnnnnnnnnnnnnnnnnnnnnnnnnnnnnnnnnnnnnnnnnnnnnnnntgctttgcacaagtccagatagatgaagtcagttgctcttactttttcaacgaacattgtgattgtagaaggccacctaatgtgtaaagcatgattagcccctagtgaagccatgttggctgtcctcagtcaccttgctgttttccatgtgccttagcatagctcccaaggaggttctaayccaggatctcgccaggcacaggggtgagaacaactggcctgcagttcctctggtcttcctttctcccctttttaagaatggggttacacttccctttttcatttagtaggaacttcaccaaactgcaacaacttctcaggtatgatggacactggctcagcaacttcacctatcagttccctcaggaccctcagatgcacctcaatctcatcaggtcccattgacttgtgcaccttcatgttccttaaatggtctcaaatstgctcttcccccacagcagacattctgcctacaatgaa

SEQ ID NO: 68884 - DNA, 600 bp, Chicken  19866894340483_2
ttccatgtgccttagcatagctcccaaggaggttctaayccaggatctcgccaggcacaggggtgagaacaactggcctgcagttcctctggtcttcctttctcccctttttaagaatggggttacacttccctttttcatttagtaggaacttcaccaaactgcaacaacttctcaggtatgatggacactggctcagcaacttcacctatcagttccctcaggaccctcagatgcacctcaatctcatcaggtcccattgacttgtgcaccttcatgttccttaaatggtctcaaatstgctcttcccccacagcagacattctgcctacaatgaatagggcagtgtgggtaaagcacttgcaacaaattgaaatttgaagcagaatcagaaaagtctgcttgcaagctacaattttccaactaattcttgaaagaaacagtgtaaattaacactggcaaagctcttgcatttggattctaaaagattatttggcttcttggttccatctgaattgtctagcagtcaggaagtaactatataggaaaggcaatgctagagatttgaatgctatcttacttcctattaactatacccct

SEQ ID NO: 68885 - DNA, 600 bp, Chicken  19866894340510_1
gccggagcccggcctctgcggcccgaatgggaactcgagctacccctgcacggggcagagctgggacgtgccatgctggaagtcacgtcttcagtgacagaacagggtggaggggtgggcagaaagataacggtgtgaaacagagttcgaaatgaacagattaagagtcacgccaaggggaaggaattaatgaaagagaatgacaaaaaaatatttcgtcaagctgcactaaaacagtttttataagtaagaccaggaaaaaaaaaaatccgattggagaaaaaaatagatgaccgagtrctttatggcccacacttctgcagatgtgattccagcaactccaagtaggcactgaaacaaagtatttgtgagtatttggtaagcttaaagctcagaatggactataaaggcatgattttttccacacatgataaaaacaaaccaaaaaaaaatttaaaaatctgtcctactgcagatgacagaaaaaccaacataagaatagaattgaaggatttttgtgtgtatttttaacaagatgatgcctatttgcaggtcagcactccctagtcccatgtgaagacacagagcagctgagatatg

SEQ ID NO: 68886 - DNA, 600 bp, Chicken  19866894340510_2
ccacacttctgcagatgtgattccagcaactccaagtaggcactgaaacaaagtatttgtgagtatttggtaagcttaaagctcagaatggactataaaggcatgattttttccacacatgataaaaacaaaccaaaaaaaaatttaaaaatctgtcctactgcagatgacagaaaaaccaacataagaatagaattgaaggatttttgtgtgtatttttaacaagatgatgcctatttgcaggtcagcactccctagtcccatgtgaagacacagagcagctgagatatgcacaacttkatgatcttgaggtcccttccaactcaatccattctatgattctatcactcaacaagctgttgtcagagcagaagacactgaatcctcccaaatccaagcccatgtctaatacacttggcatgctggagaaggtcagcaaattattatctgcatcaaactcttctatgagactcttaagtaggataagctcttgccagtcaggtttaggattttgcagctctgtgctccctcacctcacaacatggaggctatctatcacaatgtgacagacaaaaaaaaaaatccatttagcccagtatc

SEQ ID NO: 68887 - DNA, 600 bp, Chicken  19866894340514_1
ctgaatgcaagtctggcacgactgggaagcctaaggctgtcatcagctgaagagataaagcattggtttatcactaggataggtttcaaagcagaaggagtagcaattgtgggctaagcagctgggaaagagcaaaccatgcagggctatggtgctacaacaaggtatctgtgagttccaggaaaaccagctctcactcatcctctcccaacagagccagcctctgatactgcacactgcaagggaacctcttctgtcactgaccagtgtctgaactcgctgcatcttagtcagggctgmagagtattcctttgtccacccttttagctacagtggggacagtgaattccaaaacctgttttgacctgtcactctatgaaattcacctcatatatatttcctggcctaaaacttcatatcctgtttgtctggatatgaatatgttcctgtacaaaatattgcatgacacttgccagtttttaaaagggtcagcatttggacagagtttggctaggctgaaatcctggcctcagcaaaatcaatgggtgtattgccatgaagcacactgggctaggatttcatgccaatttgttatttggc

SEQ ID NO: 68888 - DNA, 600 bp, Chicken  19866894340523_1
gttaaagggagggaggacatcattgggaaacaggctcttatttgccttgtataatggaagaatgtaggagtagctgttttctccactgaaaggttttgggctagatggttgctctgagctcataaagctgctcctatttcagtggggaaaactgattttatacatagctgtagaagtaaaatagatcattgttgctcatacaacacgctgagagaatgcttctaaagggaaacatcagttgactgttttaattatttacttgtggtcaccagttcaagcagggggcagattattagagcrtcagtgaaagactgataagcagcagtagggcttattgcttttattaatgcagttagaaagcagcattaatagtgctcacacactgcctttgtcagttcagattcctcatggtcctgctcaaagactattatactctgtatttacgtgtgtggcagtcattcctgggatcttttcaggaagaaaaaggaaaaggatctagtagatcattctccagacacctcattgytttagttcagcctagcaggaggcagcaaagaaaggatgtggttatcagccctgattccctctgctcagccccat

SEQ ID NO: 68889 - DNA, 530 bp, Chicken  19866894340523_2
gggaaacatcagttgactgttttaattatttacttgtggtcaccagttcaagcagggggcagattattagagcrtcagtgaaagactgataagcagcagtagggcttattgcttttattaatgcagttagaaagcagcattaatagtgctcacacactgcctttgtcagttcagattcctcatggtcctgctcaaagactattatactctgtatttacgtgtgtggcagtcattcctgggatcttttcaggaagaaaaaggaaaaggatctagtagatcattctccagacacctcattgytttagttcagcctagcaggaggcagcaaagaaaggatgtggttatcagccctgattccctctgctcagccccatctgtctgtgtctcagccttgtatcttcatgatacayccttctgctcacatgcttgtgaaagagtgtaaatacaagtctgtcaagcaaacttcttaatacttcaggccctgtctaaagatgtatttgtttttggatactgcttttgacttgaatggg

SEQ ID NO: 68890 - DNA, 420 bp, Chicken  19866894340523_3
gcttttattaatgcagttagaaagcagcattaatagtgctcacacactgcctttgtcagttcagattcctcatggtcctgctcaaagactattatactctgtatttacgtgtgtggcagtcattcctgggatcttttcaggaagaaaaaggaaaaggatctagtagatcattctccagacacctcattgytttagttcagcctagcaggaggcagcaaagaaaggatgtggttatcagccctgattccctctgctcagccccatctgtctgtgtctcagccttgtatcttcatgatacayccttctgctcacatgcttgtgaaagagtgtaaatacaagtctgtcaagcaaacttcttaatacttcaggccctgtctaaagatgtatttgtttttggatactgcttttgacttgaatggg

SEQ ID NO: 68891 - DNA, 600 bp, Chicken  19866894340525_1
ttctaaagagcagggtgaagaggaagggttagtattttggtgagcatatgcttggaagtatctatgtataaagtgcagattctcaggtgtgggaacctgaaatattgaaggaaattattgttggaaggatgaaatagttattttctaaagagttacagacagctaaaatccctgtctttgtcttgaaggtctatgtctggggttacaatggtaacggccagctgggactgggcagcagcggcaatcagccaacaccgtgccgaatagcagccttgcaaggcattcgtgtacagcgggtaygtgtgcaatgcccctctcaaaccctttaggaacaactgaaaataagctaaggaatattcacagaatcctcacagaatcatataatggcttgagttggaagggacccccaaggattgtcaagttccagcctccttgccacagggagggccgccaacctccagatctggtactagagcgtatcttttatgtgaaggaagttgttctttatctctttgtttaaagtgccatttatcagaattaaagcatatatcttagaatggacctctgagaaactgtgagcctgtagatttcagtgggaat

SEQ ID NO: 68892 - DNA, 599 bp, Chicken  19866894340538_1
  misc_feature (1)..(48): n is any nucleotide
nnnnnnnnnnnnnnnnnnnnnnnnnnnnnnnnnnnnnnnnnnnnnnnncagcgggaaagtgaaaaaaatacagcagagcagggcataaatcagtcacgtgtctccttgtgtaaagcatctacagggttaatgcttttcatttttaatgcagctggtggcctgaggccctggggggctctatggagctctgtgcttggcacaggaagccaggcaccccaacaggtgggcgctaacacactcaccctggggatgctgcaatgcctcagccctgcagcacctctctgctggtggagagcaccrgtcccacaggtggagtgagcagcccagagctgtgcccatcccccagctctccccaccacccagggctcttcctcagccctggggagctgctgcctgtgaggtaaaggcaggagtggggaacaggtgagatgtgatcacctccctgccttgggaacatggcaggaaagtcaggtctacaatttggagagaaatgctggagtggggtctgatcactgccatcttgcaaagatgtacttgagctggcagttgttcagccccagctaggctgtcctccatgggctcttgccactggcatagca

SEQ ID NO: 68893 - DNA, 588 bp, Chicken  19866894340571_1
cctagatccgctctctctggctaacgtgagcgtgcagcccggccggagaccgcaggagctgcacgtgagctgggtggagtcaggaggtggcagagagcatttggtgcagctctcggtggcggagtccctgtccgtcatcaggaacgtgtccgtgccccgtggtgtcacccaccttgacctgggggggctggtgccgggctcccggtaccgagtggagatcatctctcaggctgggcctcatcgtatctcctctcagactgccattggctacacgggtaggaaggcatcccctccgcccaygtcccatgtctggtgaggggcttgggagccacggggagacccccaggggctgttctgcagccccacagcctccccggtgcctctctcctggctcttgctgggccctgcgctcatcctgagcccagtggctcagtggggcacactgtgagcaccctgggtcaagggaagtgtggccatggccccatcccacggggggtggctctgacccgggaacaccctgcagctctcagcactcctgaggcagcagatggcagcttcgcagtcctgtggctcccagctccattctca

SEQ ID NO: 68894 - DNA, 599 bp, Chicken  19866894340579_1
  misc_feature (1)..(70): n is any nucleotide
nnnnnnnnnnnnnnnnnnnnnnnnnnnnnnnnnnnnnnnnnnnnnnnnnnnnnnnnnnnnnnnnnnnnnntatgaaaaacaaccgcactgttctacctcctaagtctttagctccaaggtacagagctgtgtactgctgcacattacgctagaggtctattaagcaacatactggtgcaccgatctggaaaaatgtagcagtcaatgatgccgctacattcagcacgagccttgtaaatcatgggcatgttttctgcattgcttataaggtgctgaggtaaaagagagctgtgctacccrcatgcgtgagtgatcgtcagcaccagtgagtaccttcaggcttctttgtcccttcactctgaggggcactctggtagggcaggcagagatgagcaggagaaagaagggcacaggggagcacccagcccataccactatctgcctatactcattgtggctacggccttggaggagctgctgaaggctgcatgccagagcagctcctggcagctgcaatgtaggtcgagagccaggcaaagagaggagacgccagggtgcctcgccctgccttggcaaacacagactcagcaaagtgaagg

SEQ ID NO: 68895 - DNA, 600 bp, Chicken  19866894340580_1
ttagcccactgtgtagtacgttacaatgcagtgaatgtaatactctgctttgaaatgtttgacatgtagtcagtgatagggctggtgagataaaatgggctgtgtttatggtttgtgtggtggagagttatgttacatgacagttttagtaatgtgcacttggaagataacttttattttctccgctcctatttttgacactttgatacaatatctcatccatacacaccactgttatttccagcttatcctctatgttctcttcccacagccaccagtggaagactcatgtccagtcaraagtttctgcatgttggctgatgcccttccattgcctttacgtgcacaacatcctcatcatttcttgacatctgagccatccttagactctcagttggtcctggaaaactgaaagaggcccatactgtcccaagagagaggaacttaatagagggggacagggtgaagattgaggcacccagtctctaacgccagaccttcagccttcccattactttccctgactgttttcttcagtcttcactgcagctggtagtttcttgttccytgtatttccttctgtttcccacgtttcacgat

SEQ ID NO: 68896 - DNA, 600 bp, Chicken  19866894340580_2
cagccaccagtggaagactcatgtccagtcaraagtttctgcatgttggctgatgcccttccattgcctttacgtgcacaacatcctcatcatttcttgacatctgagccatccttagactctcagttggtcctggaaaactgaaagaggcccatactgtcccaagagagaggaacttaatagagggggacagggtgaagattgaggcacccagtctctaacgccagaccttcagccttcccattactttccctgactgttttcttcagtcttcactgcagctggtagtttcttgttccytgtatttccttctgtttcccacgtttcacgattctcagtttccctcactttgccacagatgtttatatgtgtaatttatttacctgaaaaatcaatttgagagagcaccacatttacctgttatgttcaggctacatttcctccaacaaacagtgtgtactgctggagaaaaagatagatctttacaagatgcggtaatcctctggaggcctgtcccatcaaagaggtatggcttgaccaggcgagcatgtagcacagcctcagtaactgtaaacatgctccatttgatactaaggaggg

SEQ ID NO: 68897 - DNA, 600 bp, Chicken  19866894340582_1
acgtggcctgcataataattttcttcccctcaagtagatgaccttccccttggggaaggtaccaaggtacctgggggaaagcagggcctgtaggtgcaaaacaagcctaggaatttggggcacaggcagcaacaaataggctgtgcttgacaggctctcaaacagcagacttggcctggcaaattagataaaaagcctcagttcacgtgtctcacagctgcaggctgccatttatgctcctgggatgtcttcccatgagcacccaggccaagccaggcccctcagacttcctgatcactstgaaaataatccctaaactataacttaaaaaaccattatttatttgtagatgaatcccacagtatctgagtggactggcttgttagaatstttctagccctccttaagtatcaaatggagcatgtttacagttactgagactgtgctacatgctcgcctggtcaagccatacctctttgatgggacaggcctccagaggattaccgcatcttgtaaagatctatctttttctccagcagtacacactgtttgttggaggaaatgtagcctgaacataacaggtaaatgtggtgctctctc

SEQ ID NO: 68898 - DNA, 600 bp, Chicken  19866894340582_2
taggtgcaaaacaagcctaggaatttggggcacaggcagcaacaaataggctgtgcttgacaggctctcaaacagcagacttggcctggcaaattagataaaaagcctcagttcacgtgtctcacagctgcaggctgccatttatgctcctgggatgtcttcccatgagcacccaggccaagccaggcccctcagacttcctgatcactstgaaaataatccctaaactataacttaaaaaaccattatttatttgtagatgaatcccacagtatctgagtggactggcttgttagaatstttctagccctccttaagtatcaaatggagcatgtttacagttactgagactgtgctacatgctcgcctggtcaagccatacctctttgatgggacaggcctccagaggattaccgcatcttgtaaagatctatctttttctccagcagtacacactgtttgttggaggaaatgtagcctgaacataacaggtaaatgtggtgctctctcaaattgatttttcaggtaaataaattacacatataaacatctgtggcaaagtgagggaaactgagaatcgtggaaacgtgggaaacagaa

SEQ ID NO: 68899 - DNA, 600 bp, Chicken  19866894340597_1
agcagaaggggatttctcagctgaatagagggattgtttgtgcagtgaaggtagaattgtggatttccttgcttgagtctatgggttatggagccagaaaggactaagagaccaagggagccctgagctgtcctcacaaggaggtatttgtcttatggataaagcccaggacggcacccccagatacacaggttttcatcttatcctttccccctgaccagtggttggacactggcttacttaattcatttctggacacccctgtgccacgaagcacagggctgtgagcacagcctctgwggctttgggaactgctggctattgcaggcaggggtattcagtctgcttcattgtctgggatgatgctgaaaaaggagtactgactaattggtcttgagtgctaatggcatctctgggacagtccctgtctgctgctctggttgcagaaagtattggaggatataaatatccatcactgcgggtaygctgggtgtcatctaccagacgtccctttgcttggcacagagataagctctttcctcatgtcccgaccaggagtaggaggcatctttccacacagtagtgttgaggagggcctgg

SEQ ID NO: 68900 - DNA, 600 bp, Chicken  19866894340597_2
acacaggttttcatcttatcctttccccctgaccagtggttggacactggcttacttaattcatttctggacacccctgtgccacgaagcacagggctgtgagcacagcctctgwggctttgggaactgctggctattgcaggcaggggtattcagtctgcttcattgtctgggatgatgctgaaaaaggagtactgactaattggtcttgagtgctaatggcatctctgggacagtccctgtctgctgctctggttgcagaaagtattggaggatataaatatccatcactgcgggtaygctgggtgtcatctaccagacgtccctttgcttggcacagagataagctctttcctcatgtcccgaccaggagtaggaggcatctttccacacagtagtgttgaggagggcctggttctgccctgttggtccccatggtgagctatgccctctcctgcaggctgtctttgactgcgttgtgacatccctcaagaacgtcttcaacatcctcattgtctacaagctcttcatgttcatctttgctgtcattgccgtccagctcttcaaggggaagtttttctactgcactgacagctctaa

SEQ ID NO: 68901 - DNA, 600 bp, Chicken  19866894340597_3
ctttgcttggcacagagataagctctttcctcatgtcccgaccaggagtaggaggcatctttccacacagtagtgttgaggagggcctggttctgccctgttggtccccatggtgagctatgccctctcctgcaggctgtctttgactgcgttgtgacatccctcaagaacgtcttcaacatcctcattgtctacaagctcttcatgttcatctttgctgtcattgccgtccagctcttcaaggggaagtttttctactgcactgacagctctaaggacacagagaaggactgcatgtaygtgccccgtgggtccaatgctgctgacagctctgggaaaggcagggtgctgggcaatgttgccctttgggttcccactacagcctttggtcatgacttacacttggatgtagtttctggggatggatggcttgggctgagtcctatcccactkmktystatcagcccgtgcaatgatgtagagcccagtattttcttcctgctttttctttgcacctctctccatgtctctgctccccctatctgtcattaagcctctccccatttcttcagccccacaggaggagaggtgtccccccca

SEQ ID NO: 68902 - DNA, 600 bp, Chicken  19866894340597_4
gtgacatccctcaagaacgtcttcaacatcctcattgtctacaagctcttcatgttcatctttgctgtcattgccgtccagctcttcaaggggaagtttttctactgcactgacagctctaaggacacagagaaggactgcatgtaygtgccccgtgggtccaatgctgctgacagctctgggaaaggcagggtgctgggcaatgttgccctttgggttcccactacagcctttggtcatgacttacacttggatgtagtttctggggatggatggcttgggctgagtcctatcccactkmktystatcagcccgtgcaatgatgtagagcccagtattttcttcctgctttttctttgcacctctctccatgtctctgctccccctatctgtcattaagcctctccccatttcttcagccccacaggaggagaggtgtcccccccataacacacactgtcccaggtatagaacaaccctcctgtagcctgacactaacaaagccactgctctcttccaaccttgcagagggaactatgtggaccatgagaagaacaagatggaggtgaagtgccgggagtggaaacgacatgagtttca

SEQ ID NO: 68903 - DNA, 600 bp, Chicken  19866894340597_5
tgacatccctcaagaacgtcttcaacatcctcattgtctacaagctcttcatgttcatctttgctgtcattgccgtccagctcttcaaggggaagtttttctactgcactgacagctctaaggacacagagaaggactgcatgtaygtgccccgtgggtccaatgctgctgacagctctgggaaaggcagggtgctgggcaatgttgccctttgggttcccactacagcctttggtcatgacttacacttggatgtagtttctggggatggatggcttgggctgagtcctatcccactkmktystatcagcccgtgcaatgatgtagagcccagtattttcttcctgctttttctttgcacctctctccatgtctctgctccccctatctgtcattaagcctctccccatttcttcagccccacaggaggagaggtgtcccccccataacacacactgtcccaggtatagaacaaccctcctgtagcctgacactaacaaagccactgctctcttccaaccttgcagagggaactatgtggaccatgagaagaacaagatggaggtgaagtgccgggagtggaaacgacatgagtttcac

SEQ ID NO: 68904 - DNA, 600 bp, Chicken  19866894340597_6
gacatccctcaagaacgtcttcaacatcctcattgtctacaagctcttcatgttcatctttgctgtcattgccgtccagctcttcaaggggaagtttttctactgcactgacagctctaaggacacagagaaggactgcatgtaygtgccccgtgggtccaatgctgctgacagctctgggaaaggcagggtgctgggcaatgttgccctttgggttcccactacagcctttggtcatgacttacacttggatgtagtttctggggatggatggcttgggctgagtcctatcccactkmktystatcagcccgtgcaatgatgtagagcccagtattttcttcctgctttttctttgcacctctctccatgtctctgctccccctatctgtcattaagcctctccccatttcttcagccccacaggaggagaggtgtcccccccataacacacactgtcccaggtatagaacaaccctcctgtagcctgacactaacaaagccactgctctcttccaaccttgcagagggaactatgtggaccatgagaagaacaagatggaggtgaagtgccgggagtggaaacgacatgagtttcact

SEQ ID NO: 68905 - DNA, 600 bp, Chicken  19866894340597_7
catccctcaagaacgtcttcaacatcctcattgtctacaagctcttcatgttcatctttgctgtcattgccgtccagctcttcaaggggaagtttttctactgcactgacagctctaaggacacagagaaggactgcatgtaygtgccccgtgggtccaatgctgctgacagctctgggaaaggcagggtgctgggcaatgttgccctttgggttcccactacagcctttggtcatgacttacacttggatgtagtttctggggatggatggcttgggctgagtcctatcccactkmktystatcagcccgtgcaatgatgtagagcccagtattttcttcctgctttttctttgcacctctctccatgtctctgctccccctatctgtcattaagcctctccccatttcttcagccccacaggaggagaggtgtcccccccataacacacactgtcccaggtatagaacaaccctcctgtagcctgacactaacaaagccactgctctcttccaaccttgcagagggaactatgtggaccatgagaagaacaagatggaggtgaagtgccgggagtggaaacgacatgagtttcactat

SEQ ID NO: 68906 - DNA, 600 bp, Chicken  19866894340597_8
atccctcaagaacgtcttcaacatcctcattgtctacaagctcttcatgttcatctttgctgtcattgccgtccagctcttcaaggggaagtttttctactgcactgacagctctaaggacacagagaaggactgcatgtaygtgccccgtgggtccaatgctgctgacagctctgggaaaggcagggtgctgggcaatgttgccctttgggttcccactacagcctttggtcatgacttacacttggatgtagtttctggggatggatggcttgggctgagtcctatcccactkmktystatcagcccgtgcaatgatgtagagcccagtattttcttcctgctttttctttgcacctctctccatgtctctgctccccctatctgtcattaagcctctccccatttcttcagccccacaggaggagaggtgtcccccccataacacacactgtcccaggtatagaacaaccctcctgtagcctgacactaacaaagccactgctctcttccaaccttgcagagggaactatgtggaccatgagaagaacaagatggaggtgaagtgccgggagtggaaacgacatgagtttcactatg

SEQ ID NO: 68907 - DNA, 600 bp, Chicken  19866894340598_1
aactgatagggaaaacaacctgtgaggaaaaataaaacaaaacaacacaaaacaaaacaatgaaaaaaccacagtctcttcagacccatccattacatgcttctcatttcagtcaatgtgattttccttcccttcccttctctctccttccttactactttccttccagctgatgtgtgggcatgccactactgttcagatccttcacgtaatttcatttccaggtgtatttcccaatgaacctgtaatcccagtactcttcatctccaatttgatttacattaaaactgaagatctccyttatatatttggaggaatataaaaaactttttttttaattatttttctaggtaagtcattatataattttaatttaatttctaagtcttgtttttagttgttacaatgaaatcaccaaaaccttgttcactactacagctcttwgcctcctgataaaaacatagagtttcactggataatgttgtttcttactcaaaagtcctgtgtagagttattgttcttttaaaaacagccttccttccagggttagatgcatttgaaaaattaactgattgattcagtgtgacagttattgctgac

SEQ ID NO: 68908 - DNA, 600 bp, Chicken  19866894340598_2
tccttccttactactttccttccagctgatgtgtgggcatgccactactgttcagatccttcacgtaatttcatttccaggtgtatttcccaatgaacctgtaatcccagtactcttcatctccaatttgatttacattaaaactgaagatctccyttatatatttggaggaatataaaaaactttttttttaattatttttctaggtaagtcattatataattttaatttaatttctaagtcttgtttttagttgttacaatgaaatcaccaaaaccttgttcactactacagctcttwgcctcctgataaaaacatagagtttcactggataatgttgtttcttactcaaaagtcctgtgtagagttattgttcttttaaaaacagccttccttccagggttagatgcatttgaaaaattaactgattgattcagtgtgacagttattgctgacaaactcagcataaatcagaratcttgtrtatgtgcattactgttttgcatttgctgtggaaaaagtaggtgtgattgtgaggtatattaacaaagatttccctgtaaagtattaatgccaaaaaaaactggagggacatcactg

SEQ ID NO: 68909 - DNA, 600 bp, Chicken  19866894340598_3
aaaaaactttttttttaattatttttctaggtaagtcattatataattttaatttaatttctaagtcttgtttttagttgttacaatgaaatcaccaaaaccttgttcactactacagctcttwgcctcctgataaaaacatagagtttcactggataatgttgtttcttactcaaaagtcctgtgtagagttattgttcttttaaaaacagccttccttccagggttagatgcatttgaaaaattaactgattgattcagtgtgacagttattgctgacaaactcagcataaatcagaratcttgtrtatgtgcattactgttttgcatttgctgtggaaaaagtaggtgtgattgtgaggtatattaacaaagatttccctgtaaagtattaatgccaaaaaaaactggagggacatcactgtgtaaaacctcatttacctatctaaaggaagatgatttcaaaccagaaaaggttcaaagaagaacacagagtgattagtaaagcctgttttccaagaacaacaaaagttgtttgttttaacataacctgcacttactttcagtatagcttactgtgcaatttaatgtcaatcacaa

SEQ ID NO: 68910 - DNA, 600 bp, Chicken  19866894340598_4
ttttttttaattatttttctaggtaagtcattatataattttaatttaatttctaagtcttgtttttagttgttacaatgaaatcaccaaaaccttgttcactactacagctcttwgcctcctgataaaaacatagagtttcactggataatgttgtttcttactcaaaagtcctgtgtagagttattgttcttttaaaaacagccttccttccagggttagatgcatttgaaaaattaactgattgattcagtgtgacagttattgctgacaaactcagcataaatcagaratcttgtrtatgtgcattactgttttgcatttgctgtggaaaaagtaggtgtgattgtgaggtatattaacaaagatttccctgtaaagtattaatgccaaaaaaaactggagggacatcactgtgtaaaacctcatttacctatctaaaggaagatgatttcaaaccagaaaaggttcaaagaagaacacagagtgattagtaaagcctgttttccaagaacaacaaaagttgtttgttttaacataacctgcacttactttcagtatagcttactgtgcaatttaatgtcaatcacaaagtctacg

SEQ ID NO: 68911 - DNA, 600 bp, Chicken  19866894340601_1
gcagcactgccagcagcttcgttacatcggctttgaccttttctttattggacaataaaagtgaatgtgcaggtgaaggaaagattgttcggcgaagggaaagggaatgcgttcggccaacctgagcgtgttggtaatgagggataaaggggctttaaggttagagctggggtgaatcactcagaaacacactgtaaagttttactgcgaaatctgctcacatttcctggctgtccttaaagtctctgcacgtttcgaacagagggagcacgaggcagcgctgtgctggatgtgatgtcrgtgcatccgagcccagggcagagctgggacgaggagcagccctacgggtgtggggtggaaatgctgtgacagaacactctgcctttaatttaaaaatatggcaccaaatctgttcggatctttactaactaccaattaaacttattccgggggagggacagcctggaacgaatccatgctgagcagcatgcgtgcgctcctggagcagttttgctgtagcccacataggasgaaatcatttctctgcctgtgcatgcagaatgagcatcccagggctgctctgctgcccacctggagctc

SEQ ID NO: 68912 - DNA, 555 bp, Chicken  19866894340601_2
tgtccttaaagtctctgcacgtttcgaacagagggagcacgaggcagcgctgtgctggatgtgatgtcrgtgcatccgagcccagggcagagctgggacgaggagcagccctacgggtgtggggtggaaatgctgtgacagaacactctgcctttaatttaaaaatatggcaccaaatctgttcggatctttactaactaccaattaaacttattccgggggagggacagcctggaacgaatccatgctgagcagcatgcgtgcgctcctggagcagttttgctgtagcccacataggasgaaatcatttctctgcctgtgcatgcagaatgagcatcccagggctgctctgctgcccacctggagctcattgcacctcctgtgcagagcaaaactccgctccgttgtggtgctggaaggggaggggggggggggggggctgcacacacctcccatttggtaatgagcgctgtgcatggcaggtccccaaatgtttgtctgaatggacactcagtgccgcagcgctaacaagattaatgaagcgaacggctcaaa

SEQ ID NO: 68913 - DNA, 600 bp, Chicken  19866894340609_1
aggtcaaattcaggatcaaaagctacataaaaatacacatttttgaggaataaatgaaccggcatatgttttttaagaaaatattatattaatgaagaatctaagcgaaaactttgctgcctttcaaaccacatgaataagctttcaaaagaagtctgcctgctggagagctgggatacacatattagcagagcttttctctccagtgtactgctttcatattttcagtagcaaatgaactgagacttaaaatgaatgagctgtttaagagtaatatgcctccccttgcacctgcatacrttgatggctaccagcagagctatgtagctggaggtttagtagctctgattcttgtatcatgattattttcttaagtaatgcatttaaaaagcataagaagtgctgccactcactatagcaatctgcgctcagcccaagaaagacatcctagtttatctagttcactgttcttcagagcaaaagccaytgtgtgcaactctaccaactttatttatcctgatttatgcaattatgcatatggtgctgattcttaccttcagctgtatttgttgcaattacacactcttgctttaaaaatgc

SEQ ID NO: 68914 - DNA, 600 bp, Chicken  19866894340609_2
gcagagcttttctctccagtgtactgctttcatattttcagtagcaaatgaactgagacttaaaatgaatgagctgtttaagagtaatatgcctccccttgcacctgcatacrttgatggctaccagcagagctatgtagctggaggtttagtagctctgattcttgtatcatgattattttcttaagtaatgcatttaaaaagcataagaagtgctgccactcactatagcaatctgcgctcagcccaagaaagacatcctagtttatctagttcactgttcttcagagcaaaagccaytgtgtgcaactctaccaactttatttatcctgatttatgcaattatgcatatggtgctgattcttaccttcagctgtatttgttgcaattacacactcttgctttaaaaatgctgttgtactttcagaggctgatctttttaattccatgtttaattccattttcatgctgttccgttgacttcctttttgtatttctagagcaggagcacttgctacagcgggagtgaggcacattcacaagccttgaatctatcttgctatcactgccggtcttttaatactcttcctgaatcttttc

SEQ ID NO: 68915 - DNA, 600 bp, Chicken  19866894340609_3
ctgatttatgcaattatgcatatggtgctgattcttaccttcagctgtatttgttgcaattacacactcttgctttaaaaatgctgttgtactttcagaggctgatctttttaattccatgtttaattccattttcatgctgttccgttgacttcctttttgtatttctagagcaggagcacttgctacagcgggagtgaggcacattcacaagccttgaatctatcttgctatcactgccggtcttttaatactcttcctgaatcttttcatctgaaatatgaataacaatttaatgcyttctggaggggaagaagggcttccataaaaaaaaaaaaaatcatataatatcagtcgcatggcaaaaggatttgcaatttgaattattactgaacctcactgagtatcctctcacaatcatttgcatttatagtgatataggaactgggtctttatgtaacagctacagagcaagaaccctgtggttttggctgtgggcttccacagctgagctgtctgtaaagtcaaaacacagggccagctcagcctgacaccaggggcagcgcattagggatggtttcttgaaagcatgctgacaac

SEQ ID NO: 68916 - DNA, 600 bp, Chicken  19866894340614_1
gcaaagactacatagtttgcatatgtacagcatgtagcacataactgtagtttacctcttacccttactttcattatcaacccaagaaaaatgaaaatactgaatcatttgcatttccagggacttttgctgctctaacacacctacaaatctatagttgtgatcaagggaatacacactgctgcttcttctgctaactctgaaaagttacgttgttctagtaaaaaaagcacaaaggcataaaatataaaaatatttcaaaaaatgttcaagtcaagccacacagcaaagggctattcmgtttctattacttgtctcatgtgtgatggcactagaataaataatggtaactaaattaaaaaaaaatacttaataactgagcattaacataaataataatatgttagtggcattaaatatttgtatcttagaaatgcaactgtagttactatgaaacaactcccttaaaaaataccgagagtcagtagtcaacttctagcttctcactatttgagacatctgatttgctaattgtttgaatagttgtaaattttttaataaatccaattgaaatcattgtgcctagcatgaaagtttcta

SEQ ID NO: 68917 - DNA, 599 bp, Chicken  19866894340618_1
  misc_feature (1)..(10): n is any nucleotide
nnnnnnnnnnttgttgccactgtgtctgagtgggctttcatgctggagtctgggctttccaaatatgtgctgctgtcagtggcctgtatgcagcattcacagtcaaatctgcactttccccctctctgggattttgattttccagcttctctgatcactgccttagaatcctggaaataattcctcagttataccgagtaactgatgtttattgtttttcttggtagtaccttcagccagtgctatttctgaaaatctgtgatttggaacagtaggtcaaatttgtgaaacaacaagaaygagcaaatacagacagatggctttggatgtttgagcgtgtttcttttcatctcacatttggcttttgctgattcttcatcattgcatgagcatttgaggctgtaatttgacactggttatgtagtagttgctcctttgcagataatgttggccagtgccccttgtatgtcccatctccaaacctgcctcccctctgtaggctggcaatgtttgcccccaagggcatgggaaggttttttttttttgagaccagtgggaaactaaggatttgttttcttatggctaagaaatttgtctgt

SEQ ID NO: 68918 - DNA, 600 bp, Chicken  19866894340618_2
agccagtgctatttctgaaaatctgtgatttggaacagtaggtcaaatttgtgaaacaacaagaaygagcaaatacagacagatggctttggatgtttgagcgtgtttcttttcatctcacatttggcttttgctgattcttcatcattgcatgagcatttgaggctgtaatttgacactggttatgtagtagttgctcctttgcagataatgttggccagtgccccttgtatgtcccatctccaaacctgcctcccctctgtaggctggcaatgtttgcccccaagggcatgggaaggytttttttttttgagaccagtgggaaactaaggatttgttttcttatggctaagaaatttgtctgtgtttttcctgacmtttcttccccatgactacactgggttattccttcattcatgataaggttgccagactcacctttgttattcatgtggtaaattatggcaatctcctgtgttgtgccatgggactttgctcaattcttagacagaagctgattgattcctacttgtctggttctctctctggaccagttacatcacctggatgtggctgaactttactgaactcaggtggaaa

SEQ ID NO: 68919 - DNA, 600 bp, Chicken  19866894340618_3
gccagtgctatttctgaaaatctgtgatttggaacagtaggtcaaatttgtgaaacaacaagaaygagcaaatacagacagatggctttggatgtttgagcgtgtttcttttcatctcacatttggcttttgctgattcttcatcattgcatgagcatttgaggctgtaatttgacactggttatgtagtagttgctcctttgcagataatgttggccagtgccccttgtatgtcccatctccaaacctgcctcccctctgtaggctggcaatgtttgcccccaagggcatgggaaggtyttttttttttgagaccagtgggaaactaaggatttgttttcttatggctaagaaatttgtctgtgtttttcctgacmtttcttccccatgactacactgggttattccttcattcatgataaggttgccagactcacctttgttattcatgtggtaaattatggcaatctcctgtgttgtgccatgggactttgctcaattcttagacagaagctgattgattcctacttgtctggttctctctctggaccagttacatcacctggatgtggctgaactttactgaactcaggtggaaaa

SEQ ID NO: 68920 - DNA, 600 bp, Chicken  19866894340618_4
ccagtgctatttctgaaaatctgtgatttggaacagtaggtcaaatttgtgaaacaacaagaaygagcaaatacagacagatggctttggatgtttgagcgtgtttcttttcatctcacatttggcttttgctgattcttcatcattgcatgagcatttgaggctgtaatttgacactggttatgtagtagttgctcctttgcagataatgttggccagtgccccttgtatgtcccatctccaaacctgcctcccctctgtaggctggcaatgtttgcccccaagggcatgggaaggttytttttttttgagaccagtgggaaactaaggatttgttttcttatggctaagaaatttgtctgtgtttttcctgacmtttcttccccatgactacactgggttattccttcattcatgataaggttgccagactcacctttgttattcatgtggtaaattatggcaatctcctgtgttgtgccatgggactttgctcaattcttagacagaagctgattgattcctacttgtctggttctctctctggaccagttacatcacctggatgtggctgaactttactgaactcaggtggaaaat

SEQ ID NO: 68921 - DNA, 600 bp, Chicken  19866894340618_5
acagatggctttggatgtttgagcgtgtttcttttcatctcacatttggcttttgctgattcttcatcattgcatgagcatttgaggctgtaatttgacactggttatgtagtagttgctcctttgcagataatgttggccagtgccccttgtatgtcccatctccaaacctgcctcccctctgtaggctggcaatgtttgcccccaagggcatgggaaggttttttttttttgagaccagtgggaaactaaggatttgttttcttatggctaagaaatttgtctgtgtttttcctgacmtttcttccccatgactacactgggttattccttcattcatgataaggttgccagactcacctttgttattcatgtggtaaattatggcaatctcctgtgttgtgccatgggactttgctcaattcttagacagaagctgattgattcctacttgtctggttctctctctggaccagttacatcacctggatgtggctgaactttactgaactcaggtggaaaatcgtgggggcgttccacaacttttgctctctcatgattcattcagctgttctttccaccatcctattgggttttcca

SEQ ID NO: 68922 - DNA, 600 bp, Chicken  19866894340627_1
tcttaaaaaaggttatattaacagtatttcttgtatttggaaggacacaccaagaaatacacaacactagctgtgcagtatgtgctatgacaaagtggtataagagaagacagaatgtaaaaaactatttttgaatcagaagcagagcccaggagaaaaagatttgagatcacaaataaataaataaaaatctaatgcacactgcacaggttgcttgcaaaattaaacaattaattctgtgtaaactaatctatcaggaaagcacactgcagggatcctgatagctggtcttgcagtacrctatattaagaaagggtgctttaatgagatccccggagagcctccatgatgttggatcttcctcctggaaagatcatttttaccccatttatctgccagtatgttgcacctctggtacacgtttgaacaaaaaaagctattaacactattatcagtaccaataattattgtgcttcttaggataaaaagaaaacaacacaaaaccttttcaatatgtgagatccatcagaaataacatctgcatataaaaatccaccacacttagaaccacttgcagccagaacagtggcagcacaaaga

SEQ ID NO: 68923 - DNA, 600 bp, Chicken  19866894340629_1
tgtcagcttagagggaatgatttaattttaaaagtatttacatgtgaaagaaatattggaatgaatgaaaacagtttggtccacttccattggcatttaaaccagtgattatgctaggatagcataacgtaggagagatttgaagtagtaattaatgtcatagtatcaaagcaataaaaattaatagaaatattaaatgcaagcaacatttttcagatgtgggcacctggatctgaatagatgaatatatatttggacatctgcagaaatgtggtaagactgccataggtacggagctcrggcactttgttgtctttgttcccatctgaaaatgctcttcacttttgcaaattgttccaaatctgtttaggtttgcaaatatggacacaaataaatgaaaaatgaaaaaaaaaaaaaagttaaaggtcctatcagttattctcatttatataactattttttgcagaataaatactgctatatttttgttcgcgctgtttaatttaaatcggtagatttaatacttgctagatgtagctttgggcctgatccagttgctattaaatgtggtgggaaccttcaaatccttcatttatttat

SEQ ID NO: 68924 - DNA, 600 bp, Chicken  19866894340632_1
caaatgtgttttgtataactgtgggtagtgtagtagagatgttctctgtagctcgtcctaactgttagtatgggacatggtactgaatgtggttctgtgatgctgtgctccctctgagctttgtggacatctctggatgtgctcagaggtggtgtgaggcatctataaggcactgctgttggcagtggtaacaaaatcaaatttcctctatcagatatgcttggagatgtggtgggcggtgatgagtgcagctgtgccgtgtgagagctgttggttctcctccaaaaacaggacaggagygacaatgggatttaggaggcatggtgggggtgggttgatggtcttttccaacctcagtgattctgtagttctctgggcatcgtggagatgggtagacgattgcacttgatgaccctgaaggtctcttccaacctcaatgactccrtgattctataagttgatattttggatttgtgcaaggtcaacctcagctttttcctgattttgtcctttttttttttttttttttttaaatccaggtcctgatggagaccctgggtgcgctgggagcccagtgcaggtgggctgcctgcaacatct

SEQ ID NO: 68925 - DNA, 600 bp, Chicken  19866894340632_2
gaggtggtgtgaggcatctataaggcactgctgttggcagtggtaacaaaatcaaatttcctctatcagatatgcttggagatgtggtgggcggtgatgagtgcagctgtgccgtgtgagagctgttggttctcctccaaaaacaggacaggagygacaatgggatttaggaggcatggtgggggtgggttgatggtcttttccaacctcagtgattctgtagttctctgggcatcgtggagatgggtagacgattgcacttgatgaccctgaaggtctcttccaacctcaatgactccrtgattctataagttgatattttggatttgtgcaaggtcaacctcagctttttcctgattttgtcctttttttttttttttttttttaaatccaggtcctgatggagaccctgggtgcgctgggagcccagtgcaggtgggctgcctgcaacatctactccaccctcaatgaagtggctgctgccctcgccgagagcggtaggaaatgtcacttgctctgcttttcctgcttggaaaagatttctgcctgccccatcrtgttgatgggacttgcattcacttacattctcatatgttcacc

SEQ ID NO: 68926 - DNA, 600 bp, Chicken  19866894340632_3
cacttgatgaccctgaaggtctcttccaacctcaatgactccrtgattctataagttgatattttggatttgtgcaaggtcaacctcagctttttcctgattttgtcctttttttttttttttttttttaaatccaggtcctgatggagaccctgggtgcgctgggagcccagtgcaggtgggctgcctgcaacatctactccaccctcaatgaagtggctgctgccctcgccgagagcggtaggaaatgtcacttgctctgcttttcctgcttggaaaagatttctgcctgccccatcrtgttgatgggacttgcattcacttacattctcatatgttcacctgcattctcttctagttgttttaattattattattattgtcccttaaatttagaataaacctacaggaggatgaaatccctgcatttggttctttccattagggagtgcacattgggtgcagttcaattctgtatgaagttcagttctatgaagataagaaattgttaaatttcagtcacggctttggctacaaggggtgggggagaactttctggggcctgcattcacaaaccaggagctgttgatgttcacctgg

SEQ ID NO: 68927 - DNA, 600 bp, Chicken  19866894340635_1
gtgaagggcgcccagcatcccactggctcccagctgtgacacacagcgcgtgcggttggttgtatttctgacaggccttcagatgcagggaatctctctcagaatgtccccacgctgtcaggagcacagcctgatcacagggactgcatttccctcgctcagagggacctcctggccacttgagtgggaatccgaggaaatgcctcaggcgtccccacctgcgggcagcggtgctgtgcccacatggagttgcttgtagccatatttgccgtgccagaggcaggccaggggacacggtcrgatcgttttgtagattkttttttttaatgaaattgaattgagtgaagcattatcttcaccaaaaaaacagattccgttggagttatcaaacatcactcagctgcaaacaaagttctgttctttctctgtgcttatttgctcttttcatgtccttagcattaatttcccccaggtttcctacacccacgtactgtctgatgaggagattcattcattgggcccctgccacatagtcctctgactgcctagtgacaacagacacaattagcctgaatggggggaacagccaaagataatcca

SEQ ID NO: 68928 - DNA, 600 bp, Chicken  19866894340635_2
catcccactggctcccagctgtgacacacagcgcgtgcggttggttgtatttctgacaggccttcagatgcagggaatctctctcagaatgtccccacgctgtcaggagcacagcctgatcacagggactgcatttccctcgctcagagggacctcctggccacttgagtgggaatccgaggaaatgcctcaggcgtccccacctgcgggcagcggtgctgtgcccacatggagttgcttgtagccatatttgccgtgccagaggcaggccaggggacacggtcrgatcgttttgtagartkttttttttaatgaaattgaattgagtgaagcattatcttcaccaaaaaaacagattccgttggagttatcaaacatcactcagctgcaaacaaagttctgttctttctctgtgcttatttgctcttttcatgtccttagcattaatttcccccaggtttcctacacccacgtactgtctgatgaggagattcattcattgggcccctgccacatagtcctctgactgcctagtgacaacagacacaattagcctgaatggggggaacagccaaagataatccagtgaaatgacagctg

SEQ ID NO: 68929 - DNA, 600 bp, Chicken  19866894340635_3
tcccactggctcccagctgtgacacacagcgcgtgcggttggttgtatttctgacaggccttcagatgcagggaatctctctcagaatgtccccacgctgtcaggagcacagcctgatcacagggactgcatttccctcgctcagagggacctcctggccacttgagtgggaatccgaggaaatgcctcaggcgtccccacctgcgggcagcggtgctgtgcccacatggagttgcttgtagccatatttgccgtgccagaggcaggccaggggacacggtcrgatcgttttgtagattkttttttttaatgaaattgaattgagtgaagcattatcttcaccaaaaaaacagattccgttggagttatcaaacatcactcagctgcaaacaaagttctgttctttctctgtgcttatttgctcttttcatgtccttagcattaatttcccccaggtttcctacacccacgtactgtctgatgaggagattcattcattgggcccctgccacatagtcctctgactgcctagtgacaacagacacaattagcctgaatggggggaacagccaaagataatccagtgaaatgacagctgca

SEQ ID NO: 68930 - DNA, 599 bp, Chicken  19866894340637_1
  misc_feature (1)..(78): n is any nucleotide
nnnnnnnnnnnnnnnnnnnnnnnnnnnnnnnnnnnnnnnnnnnnnnnnnnnnnnnnnnnnnnnnnnnnnnnnnnnnnnctttgtgttcttaacaacatcaacaagatttctttcttcagtcttgtatttcagggtgaatcacttccattgttcttttctttctgagaactaagattttccaaaatttgtttgtaaaagcaaagcaagcaactggtttatttcaggatcttgtattttttttccttttgaactaggaattatctgttttatactgttttttcttttcttgtttagaaagamcctctgcagagcctgataacctatgattgcctctatcatgaatgattcgtgcagaagtatgcttgcaagtatgcctgcatatgaactgatttcattcaaaatacatagttatttttggcatttaaaactttctgattcttttatacgttggataaaaagtgtttttcacttggctctgaaatgatgtgcatttcaaagatgctgtcgtgtgattggctctaagatatttagttttgccttgggcatgtgtttggagttcttgattttttttttttttttgtcaaattcataattttttt

SEQ ID NO: 68931 - DNA, 600 bp, Chicken  19866894340645_1
cttagcttgtagactgtgcatcggctctcaagttaaggcaagctaccccgaccacactgtttgtacgacagaaaattctcctgcttaccactgtgaaggttttgattttctacctccaggtgagagattctggagagaagttcattttggtcaccaggcccagaagaactcgtgcttgcactctgcaacaaggagaatggaaatgaaacagatccgttcacctactgccaaagctcagtggttcagtgaaacaaagcagagtcaaacgttcgggggggaaaaaagttaagaactaagctmaaaaacatggacatgaaaagcttcaaagaaaatatgctagctctacataatgaagcatgaaatgaaacatcaaggagtttcatctggcaatgatgagcaaaggatgaagtcattccttgcaggctcagaccgtccgtgaacgacacaaaatgtttygaaagttatcacacggagtcccttctatggggcagccgtcccctcttacagatgagctgaggcacagaaatgaccagctaacatcacacagcaaagtcactgcaaaagctgcaaagagatcacagcatttctacactcccacct

SEQ ID NO: 68932 - DNA, 600 bp, Chicken  19866894340645_2
ggcccagaagaactcgtgcttgcactctgcaacaaggagaatggaaatgaaacagatccgttcacctactgccaaagctcagtggttcagtgaaacaaagcagagtcaaacgttcgggggggaaaaaagttaagaactaagctmaaaaacatggacatgaaaagcttcaaagaaaatatgctagctctacataatgaagcatgaaatgaaacatcaaggagtttcatctggcaatgatgagcaaaggatgaagtcattccttgcaggctcagaccgtccgtgaacgacacaaaatgtttygaaagttatcacacggagtcccttctatggggcagccgtcccctcttacagatgagctgaggcacagaaatgaccagctaacatcacacagcaaagtcactgcaaaagctgcaaagagatcacagcatttctacactcccacctcctccggtccagcctycagttcctctcaaagcaacttaagcttactttaacacaccctgagggagcaattatactgattcagcttcaaaagtatttggtttaacagcaaaaagggcttatctgtaactttagatcagtaaaaaaaaaaaaaaaaat

SEQ ID NO: 68933 - DNA, 465 bp, Chicken  19866894340645_3
aaagcttcaaagaaaatatgctagctctacataatgaagcatgaaatgaaacatcaaggagtttcatctggcaatgatgagcaaaggatgaagtcattccttgcaggctcagaccgtccgtgaacgacacaaaatgtttygaaagttatcacacggagtcccttctatggggcagccgtcccctcttacagatgagctgaggcacagaaatgaccagctaacatcacacagcaaagtcactgcaaaagctgcaaagagatcacagcatttctacactcccacctcctccggtccagcctycagttcctctcaaagcaacttaagcttactttaacacaccctgagggagcaattatactgattcagcttcaaaagtatttggtttaacagcaaaaagggcttatctgtaactttagatcagtaaaaaaaaaaaaaaaaatacagtcattcatgctttaagtgcca

SEQ ID NO: 68934 - DNA, 600 bp, Chicken  19866894340646_1
cctgaggggaaattaagaaaacctgaagaattctggctgattttatgtcagtccctaaaagccttgaattcatgtgaattcaccaaaggcaaatcacttaacgcctgaaagtatacagaagcattttgacagtagggcttgcactgtatcgccctccaacacgacttaggaagataagacatgaagagtggggagttattaatatgaataattctccttgcaaattggaaacaccacggaacaatacaattaagctacaatggctgtagcttaatgatatcaggtaatctgcggggctgracataaaatatcacggtaggaaaaaagtaacaaagataaatgctactggaacaaaactactttcataaatgagttggggcagctggactacaagatcccttctcctggatgtgggtccagaggttcagtgcccagaaaacatacctgaaatgctagagttaagaaacagatgcagattttccaaatctgaagaacctcgtgaacccgacactgtctaaacactttcaccagattcaacttcattccacctcttgaagtcaggaagattatgacagatgtttgatgggtgaactagatgat

SEQ ID NO: 68935 - DNA, 600 bp, Chicken  19866894340652_1
ctgcagttgttaacgtacgaattaacaagtgaaggatttaagtgtgtttcttcatttggtggtgaaccaaatgaagaagtttttttcttttaggaggctgtgaagagtaaacagacacaagcagttagtctagtgattcctgttctgtattctaagtcagtattggacaacaacacgtatcatttttgccttccaaatcctattttaacatgttaccctggaatattcttaaaattaccaggtaaggaagtggtaattttaagctcttgagacattcatggaaaaagaatatatgagaaragcagtagaaaagtggaaagaacataccacgtgtttaaatgagaaacaaacaaacaagcaaagccactagattggacagtgtttcctactagtatcatcgcaatacgtacaaggcagcaggctagtaggaaccttctgtctaacccaggtaccaacaagctatccgctagcaatcacagtttgttttcccrtagtgcctgaaataactagctgtcatactgcaaagatagttagacttaattgcttaaatttctaggctgtattttgttacagtacaagcctgctgcagttaagaagatg

SEQ ID NO: 68936 - DNA, 600 bp, Chicken  19866894340652_2
tccaaatcctattttaacatgttaccctggaatattcttaaaattaccaggtaaggaagtggtaattttaagctcttgagacattcatggaaaaagaatatatgagaaragcagtagaaaagtggaaagaacataccacgtgtttaaatgagaaacaaacaaacaagcaaagccactagattggacagtgtttcctactagtatcatcgcaatacgtacaaggcagcaggctagtaggaaccttctgtctaacccaggtaccaacaagctatccgctagcaatcacagtttgttttcccrtagtgcctgaaataactagctgtcatactgcaaagatagttagacttaattgcttaaatttctaggctgtattttgttacagtacaagcctgctgcagttaagaagatgccttctgcagtgtcagcaccaccaccatcatcatcatcacgtctaccgcagccaagtggtgttagcaaagcagttgtaggtatgaaatgtatgttagcaattttgtatttcttttctgaatactacttttcaggctatgtagtaaaagtagtaaaatagctggaaggacttgaaaacattggcaagtgatt

SEQ ID NO: 68937 - DNA, 529 bp, Chicken  19866894340652_3
actagctgtcatactgcaaagatagttagacttaattgcttaaatttctaggctgtattttgttacagtacaagcctgctgcagttaagaagatgccttctgcagtgtcagcaccaccaccatcatcatcatcacgtctaccgcagccaagtggtgttagcaaagcagttgtaggtatgaaatgtatgttagcaattttgtatttcttttctgaatactacttttcaggctatgtagtaaaagtagtaaaatagctggaaggacttgaaaacattggcaagtgatttaaactgaaggagwaaaaatttcataggaggagatcagtgttacaagagtggataaggcggtttctgtctttcctaataaaatttcttaatattttagtagcctgatatttttttccgattacataaatgatagctttgtacttcattgttcaagtttataccgttctttggagatgctggggagatggggaaagcatagattggatgtacacaagtgttccctcttcagcaccactccaaaa

SEQ ID NO: 68938 - DNA, 600 bp, Chicken  19866894340654_1
cattcgtgacagagttgttagaattcataaaaacaccactgcagccaacaactgtgagtacactggggactcttgccaagggacagaagttttccttcccttgctggtaaggttacagagggaatttaaactgtgtgtttgtacatgaatcatggtgatttctaagaatgtcaagagaggctacatcacagcttttcttgctaaggctaccaagatcttgtatcctcaccaagctagtcttcagataagtgagcatgcagagtatagtctgaaatgttttgaagtggcacagtgcaccgyaaagacccaagatgtcagatatctaaaagaagttaaaggatatgctgtrctgccatatartcatttgtcaggtcaacaacgctgattcaatctataggcactctccaggcccagcttccaagagccccaggtgcaaagcctgtgacagcctctggcacttcctaaagaaagatgtgcttgcagatgaactgctgctacttctaccagaacccctcacctggctaagtgggagagactatcaaccacaaaggattaaagaaatctagggaacatctagctcagcactacggcccctccgat

SEQ ID NO: 68939 - DNA, 600 bp, Chicken  19866894340654_2
aactgtgagtacactggggactcttgccaagggacagaagttttccttcccttgctggtaaggttacagagggaatttaaactgtgtgtttgtacatgaatcatggtgatttctaagaatgtcaagagaggctacatcacagcttttcttgctaaggctaccaagatcttgtatcctcaccaagctagtcttcagataagtgagcatgcagagtatagtctgaaatgttttgaagtggcacagtgcaccgyaaagacccaagatgtcagatatctaaaagaagttaaaggatatgctgtrctgccatatartcatttgtcaggtcaacaacgctgattcaatctataggcactctccaggcccagcttccaagagccccaggtgcaaagcctgtgacagcctctggcacttcctaaagaaagatgtgcttgcagatgaactgctgctacttctaccagaacccctcacctggctaagtgggagagactatcaaccacaaaggattaaagaaatctagggaacatctagctcagcactacggcccctccgattgctttcctttcagtgtaggcaaatatatacacgatcagagagagtaaa

SEQ ID NO: 68940 - DNA, 600 bp, Chicken  19866894340654_3
cactggggactcttgccaagggacagaagttttccttcccttgctggtaaggttacagagggaatttaaactgtgtgtttgtacatgaatcatggtgatttctaagaatgtcaagagaggctacatcacagcttttcttgctaaggctaccaagatcttgtatcctcaccaagctagtcttcagataagtgagcatgcagagtatagtctgaaatgttttgaagtggcacagtgcaccgyaaagacccaagatgtcagatatctaaaagaagttaaaggatatgctgtrctgccatatartcatttgtcaggtcaacaacgctgattcaatctataggcactctccaggcccagcttccaagagccccaggtgcaaagcctgtgacagcctctggcacttcctaaagaaagatgtgcttgcagatgaactgctgctacttctaccagaacccctcacctggctaagtgggagagactatcaaccacaaaggattaaagaaatctagggaacatctagctcagcactacggcccctccgattgctttcctttcagtgtaggcaaatatatacacgatcagagagagtaaaggactagattc

SEQ ID NO: 68941 - DNA, 594 bp, Chicken  19866894340654_4
tacttctaccagaacccctcacctggctaagtgggagagactatcaaccacaaaggattaaagaaatctagggaacatctagctcagcactacggcccctccgattgctttcctttcagtgtaggcaaatatatacacgatcagagagagtaaaggactagattctgttccttcgatacataagcaatatgtatccgcagtaactcctgtaaagagaatggagttatgcttgatttattttggtgtaagtcagactctaggtttggtgtagatcagactctgtgtttaggaacttacctwacagtgcagcaaacctaaaagactaaggtgagtcttcagcaagcatccagctttctgggaaggatcatttcagtcagtgtctgaagctgtgaattaactggtcatgtaccatctttcaggcattaatacagacacatagaaaggcaaaatgagcagccagcaataaaaaactgtagcaaagataactctctgctcttttgccacagtctttttcctccactgtggttttatctttgctatatgttgcttttctaaaaaaaaaaaaaaaaaaaaaaccattttgtataccatcta

SEQ ID NO: 68942 - DNA, 599 bp, Chicken  19866894340656_1
  misc_feature (1)..(22): n is any nucleotide
nnnnnnnnnnnnnnnnnnnnnnttttattagaagatggagtatttcccctggtgaagcacaaatgagttataagggcacgtggagctaatgttgctccaggaaattaagctgaaattgaaagctggtgaaaatacccaaactgttccctcaacattcacacttttctatcaacttctttctcattttttttccacgtgtttgtggtaattttgtcacctttctcaattctcagtggctatttatggagacttttaaaactggtaactaacgcttgcgaagtcttctgcttacagcttttrtgtggtgtcaagtgattcattgcctgttttttgtctatttcaacaggaccaaaaaaaagtatttacagatagaatagcagggaaaaaagtgagagaaatacatatttccttttatccataaaactgcaatataactatacaagtgccaggaacgattctaaggcaaaagcagagaaagaaaaataaacactgagtgcagctaaaggaaaatgcaaccataacctgcagttcaaactgtacggagatgaaaagatgatattatcctgaaggaaaaaaaaaatgattggtctttattcaca

SEQ ID NO: 68943 - DNA, 600 bp, Chicken  19866894340657_1
ggtgtacaacaggagatggggggagggggggaacagggggacagtgtggcgcagcggggacagtggggagtgacagcaggagtgatgttggggtgatgctgggggggacactggggtaacactagggggataatagtgagggctgaagttgggctgacaccagggagtgatgctgggtgaccactgggtgaagttgtggagtgaccctcgggagtgatgctgggcagtgatgttggggtattgctggggggtgacatcagggagagacactagatggagacattggggtgacttaatgtratgctgggggggtgggtgacattgttggcacaattctgggagtgacactggggtaacataggggtgacactcaggtgatgttggggagtgatgttggggggtggtggtgggttatcactggagggtgatatcagggagtaacattgcagtgacatagttggggtgacagtggggggtgatgcagcatctgatgcatggactcagatgtgaacgatccaaatcatttattacatgttctcacatcacttaaatatctcacaggttttctttttctagctttcccatccactcctacaactt

SEQ ID NO: 68944 - DNA, 599 bp, Chicken  19866894340658_1
  misc_feature (1)..(93): n is any nucleotide
nnnnnnnnnnnnnnnnnnnnnnnnnnnnnnnnnnnnnnnnnnnnnnnnnnnnnnnnnnnnnnnnnnnnnnnnnnnnnnnnnnnnnnnnnnnnnttgctcgggaaattcttctccctgtttttccacataaggaaatttacctcctaagagatgtggtgacttgttcacagccttgctttccatctgttccctgtatttaaggccttttgagtcccagtcttacctccagactgttgggccactcttttcccagcagctggtgtatgtctgggaacacaattagtgcttgaaatagatgcrgactggatggtgtgggagcaacgatttggggaagtggcagtatttctgccctcagccaggtggtgcggctcctccttgctcctcttctggcaccttactcctgtctgaaatcaatgagagaaaggtgccaagatgcaagttagactctgtgtctctttgtaactggtcgatgttgtaacttctcataggcactgactggaaaccaagccgagratggaccaaaagttttgcactgtcctcagcaggtccttaatctgcccatgctaacagagaaaccttcaggctctgtcttgcatagg

SEQ ID NO: 68945 - DNA, 600 bp, Chicken  19866894340658_2
ccagtcttacctccagactgttgggccactcttttcccagcagctggtgtatgtctgggaacacaattagtgcttgaaatagatgcrgactggatggtgtgggagcaacgatttggggaagtggcagtatttctgccctcagccaggtggtgcggctcctccttgctcctcttctggcaccttactcctgtctgaaatcaatgagagaaaggtgccaagatgcaagttagactctgtgtctctttgtaactggtcgatgttgtaacttctcataggcactgactggaaaccaagccgagratggaccaaaagttttgcactgtcctcagcaggtccttaatctgcccatgctaacagagaaaccttcaggctctgtcttgcataggtcagagattctttgtcagtgccaaaaagtggatttgcacacatatcattggccactgttgccaacctgccttgctccaaagagctgtcagaacattgttcaagtctctgtacttgaggaaaagcaatctccgtaatgcaggcttattttttggatgtgttttggccacccatgtgcagcactgcaacgtgaggctgcaatgggacccagtgcac

SEQ ID NO: 68946 - DNA, 600 bp, Chicken  19866894340662_1
gggggatggggctcttctgcagggtgtgctgggatagaatgaggggaaatggtttcagactaagagaggggagatgtagattggatatacgaaaataggttttagcaaggggggtggtgaggcactgggtgcccagagaggtgctgggtgcacacagcctgggtaaggctggatggggctctgagcacctgatggagctgagggtgtccctgtgcactgcaggcagtgggaccggatgatctttaaggtcccttctgactcatataattctatgattgggctgtgaaagcagcagatttmtggatgttgcccatgttcagcatcacatcagctctggactgagctgagcacatgcagtaggtggaggtactcaatgcagcattgccaggagctgctctgaaggttcggtcttgaaatccaaagttgtcctcctcccatatgggaatcatacagtcattcaggttggaaaagacctctgagatccccaagcccaacccatcccacagtgcccactgcccatgtgcctcagtgccacatccccctccaggggacagctgctgtgctggtaattgcgtgcacaaatggaagctcctgaggagt

SEQ ID NO: 68947 - DNA, 600 bp, Chicken  19866894340666_1
cacagctcttgattatcagttgcctcccttgcccagttatgatccctttgtacagtatctaacaaaactgattgaagtctcgcaggttaaactgaggaagggaacattaagttgtatcagagcagcatcctccgtgtgagctcatacaagtaactacacatggcaatgtgtgttggtcagaggcatttgtattcagactattttagaaacaagtatgaaatacataaccaaactgcaaagaactagccagaaaagcctttatagcaagtaaaaacagagctagcactactagctgttttyaaattcaccccagcaagatcattagaattcaaccaggtttctactgtgttgtaataagttaaagaaatacagaaaatgcacattatgaactgatgcagcactaagttgtcattgayaaagcagatgttcatcaccttgacaacttaaaaatcagtgctcttcttacaacagaggcaaagtctagcatatcaacaatttgtgatcaaatattgaagatgtttttattatctaagaattcaaatttgagactccgagatcatagtaacagcatcatatctgatacattttagacatacttga

SEQ ID NO: 68948 - DNA, 600 bp, Chicken  19866894340666_2
tcagagcagcatcctccgtgtgagctcatacaagtaactacacatggcaatgtgtgttggtcagaggcatttgtattcagactattttagaaacaagtatgaaatacataaccaaactgcaaagaactagccagaaaagcctttatagcaagtaaaaacagagctagcactactagctgttttyaaattcaccccagcaagatcattagaattcaaccaggtttctactgtgttgtaataagttaaagaaatacagaaaatgcacattatgaactgatgcagcactaagttgtcattgayaaagcagatgttcatcaccttgacaacttaaaaatcagtgctcttcttacaacagaggcaaagtctagcatatcaacaatttgtgatcaaatattgaagatgtttttattatctaagaattcaaatttgagactccgagatcatagtaacagcatcatatctgatacattttagacatacttgaattatataatgcaaagacacagaatctgttaattcttctgcactcaccttttaaagtgaagcagaaacatcaaaataatcttaagctactacaaaaatgtgcccccaggcctcccc

SEQ ID NO: 68949 - DNA, 600 bp, Chicken  19866894340667_1
caatatttttaaaatataaatttttataatgtcctatgacagtggtggttaaatttatcatacactctcattttctgaaagagaatgtatacatagatatttgtgtctttctttgtgtatttagaaaagaataatgacaatacagacaacacagacagaagacctattttgtcctttaaagtgaattttccttaaaacagtggattcagttatatatatatatatatgaataagccatttttacataaaaataaaattattcctaaacagaatactcattttaaaggaattaactgtaayaatttttgaccaaagttgkaaartcatcacttgcaatggtaattttaaggtgctctaagaaccatttttgattttaaatatttcaactttcttttctaattgcttatcccattcagtgttgaaattgtcaagcaagtttttcttctgtttgttcatttcatacaacagtcatttgagctatattttcttatcaaaatatcagactgtcaatctgagccacatcttcttataaagttctagataactcatcaccagtttttcactttgatttttgmtgtatatctaagaagttttcttctt

SEQ ID NO: 68950 - DNA, 600 bp, Chicken  19866894340667_2
atttttataatgtcctatgacagtggtggttaaatttatcatacactctcattttctgaaagagaatgtatacatagatatttgtgtctttctttgtgtatttagaaaagaataatgacaatacagacaacacagacagaagacctattttgtcctttaaagtgaattttccttaaaacagtggattcagttatatatatatatatatgaataagccatttttacataaaaataaaattattcctaaacagaatactcattttaaaggaattaactgtaayaatttttgaccaaagttgkaaartcatcacttgcaatggtaattttaaggtgctctaagaaccatttttgattttaaatatttcaactttcttttctaattgcttatcccattcagtgttgaaattgtcaagcaagtttttcttctgtttgttcatttcatacaacagtcatttgagctatattttcttatcaaaatatcagactgtcaatctgagccacatcttcttataaagttctagataactcatcaccagtttttcactttgatttttgmtgtatatctaagaagttttcttctttgtttataacttactaagg

SEQ ID NO: 68951 - DNA, 600 bp, Chicken  19866894340667_3
ttataatgtcctatgacagtggtggttaaatttatcatacactctcattttctgaaagagaatgtatacatagatatttgtgtctttctttgtgtatttagaaaagaataatgacaatacagacaacacagacagaagacctattttgtcctttaaagtgaattttccttaaaacagtggattcagttatatatatatatatatgaataagccatttttacataaaaataaaattattcctaaacagaatactcattttaaaggaattaactgtaayaatttttgaccaaagttgkaaartcatcacttgcaatggtaattttaaggtgctctaagaaccatttttgattttaaatatttcaactttcttttctaattgcttatcccattcagtgttgaaattgtcaagcaagtttttcttctgtttgttcatttcatacaacagtcatttgagctatattttcttatcaaaatatcagactgtcaatctgagccacatcttcttataaagttctagataactcatcaccagtttttcactttgatttttgmtgtatatctaagaagttttcttctttgtttataacttactaaggccca

SEQ ID NO: 68952 - DNA, 600 bp, Chicken  19866894340667_4
tcattttaaaggaattaactgtaayaatttttgaccaaagttgkaaartcatcacttgcaatggtaattttaaggtgctctaagaaccatttttgattttaaatatttcaactttcttttctaattgcttatcccattcagtgttgaaattgtcaagcaagtttttcttctgtttgttcatttcatacaacagtcatttgagctatattttcttatcaaaatatcagactgtcaatctgagccacatcttcttataaagttctagataactcatcaccagtttttcactttgatttttgmtgtatatctaagaagttttcttctttgtttataacttactaaggcccagagcataggatgtatagcttggaacttgagattacttttgagtaatctcatcctatttacgggagatgttcagagatagttttgctatgtttgtcaaagtatagatactattacttccaaaaatattcattatagcctcctaacagtaggcttgtatttatgagcataatcaattggattttcaaattagacattgctatgttgtgaaattatttagttatcctattggataatggacctgctcccttgatg

SEQ ID NO: 68953 - DNA, 600 bp, Chicken  19866894340668_1
ctacaatccagctctcctttgcataatcctatttcaaatacgaacaatatgaatcctccagtttatgctagcgaggaaatttgggtggttatttcatcattgcctggagaagcaggacagggaagctgccaagctgtctctgtacagcttcgttctgctgaaatctagtgtaggaagtgtagtcgtcttgataacatattcagctctttttcaccttttgctagctcgtgctatcggtgagttgtggctgtgcatttttctctcacagtagataacagcctgcccacctcctccccaaarggtacaggtcagacaaaggtcctgttgtctctttctctggctgcagcttcctgatgtatctgtctctacactggtgaccctcagatcatggtatcgattcctgcatcacctctaggattgctaataaaaaatggctagttaaaatgttcctgtagcagcatctagtaaccagctggaggcctacctgttggctgcggtgaagttttcagtgcagaagaggggtgtccagcttgagagcttggggacagcagagcctggaagcaggtggttgtgatagcatgaccaggagagcctgcaggt

SEQ ID NO: 68954 - DNA, 600 bp, Chicken  19866894340668_2
ctggaggcctacctgttggctgcggtgaagttttcagtgcagaagaggggtgtccagcttgagagcttggggacagcagagcctggaagcaggtggttgtgatagcatgaccaggagagcctgcaggtcaggaggaggcaggagaagctgctctcccctggcctctgctccagtgcccccctccttgctacagagcaaccctgtgctccgtggggctgcgtaccagtagagccatggccagtcctgctcctcctgtgccacagggcagggtaggaggctgtgtctgtgggcaccgctcaytgttgtgcagtccttgtggtgcaagaaccaaagctagttgtgatgttgcgggggggtgaggagagaatgtactgctactttgtcgagtgtagaccagttccattctaatgtaagggctttgaaactttccaattattccttttccttatgtgcaaagtatgattgccttgtgtgttttgtcaagttaggtaagaagaaaatgtccacttcctagtgcattttctccaactgttccattttcccctggagcaatttgtgctaatatctaactgctccacagacaaaatatacatggctaat

SEQ ID NO: 68955 - DNA, 600 bp, Chicken  19866894340673_1
cgcagaagaggcagcagctcgggcaccaacggcttgcagatgcagggcaggcagctctcctcacagcacgctgactgctgcaccagcttaccccaagggtgatccctcacacgttcagcctttcctcagcacatccaaaaggtatgttgcattcacgttgcgcaataaagaagccaaggggttggcagagctacagctaacatcacgctgacccacttcaagtgttccttcacctgatctgatctggtgtgcgcataagaaaataaatacataaagcaatcattagtaataagagttgcwgcctatcttctggtagagatggtcaatcgataagggttgacacccaaagcttacagcraggctggaggatccgagttaaccagctcttacaaccacaaacaaattgctaacataattatgcagctgcctgtggacaggagctgtggagtgaagttttatagtatgtgtagtacagaaatataatatagagaaaatagaagtaaaaaaatcatcaagcttttctttcactaacagacatttttaattatgtttctcctcggtgtttcatttgtttatattcacacacacattatagacggt

SEQ ID NO: 68956 - DNA, 600 bp, Chicken  19866894340673_2
cctcacagcacgctgactgctgcaccagcttaccccaagggtgatccctcacacgttcagcctttcctcagcacatccaaaaggtatgttgcattcacgttgcgcaataaagaagccaaggggttggcagagctacagctaacatcacgctgacccacttcaagtgttccttcacctgatctgatctggtgtgcgcataagaaaataaatacataaagcaatcattagtaataagagttgcwgcctatcttctggtagagatggtcaatcgataagggttgacacccaaagcttacagcraggctggaggatccgagttaaccagctcttacaaccacaaacaaattgctaacataattatgcagctgcctgtggacaggagctgtggagtgaagttttatagtatgtgtagtacagaaatataatatagagaaaatagaagtaaaaaaatcatcaagcttttctttcactaacagacatttttaattatgtttctcctcggtgtttcatttgtttatattcacacacacattatagacggtttgaggaagaaaacaaccccaaggcagcgcagaaatggatgcagtttgtactccaggc

SEQ ID NO: 68957 - DNA, 600 bp, Chicken  19866894340678_1
tcttttgtgctgaggcatggaataacgaagaatctaattcagagtcagaacaggacaaatccaaagagctttcctgttgttaaagttaagttagtaaaaagccctcatatctgcatatacctcggcagactttaacttgagcttctcccatgtatggcactcagccttacttgcaggcactctgcagatctctttctgaatattatcctcattttcttgattttttttttaatgatcataattttcaaatatatatttaagattaaaatattgagcacgtccagttgactttagaaaaaytaggagcttcatgaaaaaaaatgtaactggatttattccttgttgcaatattgatctgaaacttgaagatttaaaaacaggaagctattttcaaaggcagtattgtccattttcttggcatacacaaatcctgatgtgtagcagatgtctggccaagccgccagcagtgccagggctgccctgccccagtcctgcccagctgctcaccacgaggatggtgagtaggaccacagctggcagcaccccagaaaaagcttcagggaccctacgctactcttcctttgtaattagggcatttga

SEQ ID NO: 68958 - DNA, 600 bp, Chicken  19866894340696_1
agaagccagcctgaggctgctgctactcagccccggcattaaacctgagagcaaggcaccacctaagaggcatatgctctgcagtaaggctgaaagagaagcacagacaggctccagctcttgcctgccaaaacaacgatgtagcacggtgcctataaaaaactaaaagcctcagcgttcccgttttcctatttcttattttgtgtgaacaagttgagtagtttgaaaagaaattgcaaacctggaatcacctgagagatcgagctgtgttcagtgtgtgctgggagaggaaaatgagcsaacagcatggagtccggagggaatctttaacaggagtataatccaggcaaggtgtgctcagttcactggaggcttacccgaggccctttgtgaaagtcccagactcaaagtttatgcattaaacaaatgccatttttgcagctgctggttctcatcacccagtgtatcacaacctttccctcttgagtagctggagcagtctctacaggccagaaaggacaaggatcatagcactgctgaggcaaagagccattttcctcacacaagccatttcctttggcactttggtactgttcctgc

SEQ ID NO: 68959 - DNA, 594 bp, Chicken  19866894340696_2
gtataatccaggcaaggtgtgctcagttcactggaggcttacccgaggccctttgtgaaagtcccagactcaaagtttatgcattaaacaaatgccatttttgcagctgctggttctcatcacccagtgtatcacaacctttccctcttgagtagctggagcagtctctacaggccagaaaggacaaggatcatagcactgctgaggcaaagagccattttcctcacacaagccatttcctttggcactttggtactgttcctgctcagatctaccacccagaacctggtgaacaaacgyctcctgaaagcagatccatatgcctcagctttctccctcctcattatcttcttgccaaactattcttttcctttttacaacctcttttttccattgtaaacctgttactggcctctcccaagtgagaagttaagaaataattgccaagcttgggaaagcagagttccatttgtttgttttgtgccctggagtatgcatcatgaagtttatttcacctctgaaaactgttagtagtatgcagtagctctccataacagtaattatcacaactagagaccatccctggatctattt

SEQ ID NO: 68960 - DNA, 600 bp, Chicken  19866894340700_1
aaaaaggacatccctcttagaccccagggaagtgaaattcttgtatagaagatctatagattcttccataggttttcccatgatatttctgttagctaagctgtggctaagaaatttcagctatcaagttctctgctttccttgatcggtttaatcaccatatggggcttttaccggcggctcagtatcacaaaagctccctcagaaacagcttcctttgagagtagtgtaccaacagcttatctgttttcacagccatattgctcagctaaggttggacagcatttcacccagcaaacygtcctaattgggcacattcacctcaaagaagaggcttgcatgtagctgctagcaacacctagaccatgtttgtatgaaatatgttgaagtgctactttttttcagtcactactctgtaagttcctcagtaaagttttccctttgcaatttaagcatacaatagcactgttctgaatacgaggccagtcttgaggaggggtagatgtggtgtagaaacctttgtagaacttcaaagaggtatccagcatagatatccctcacttctggtggaggccaggaggagaacatgggcccactgac

SEQ ID NO: 68961 - DNA, 600 bp, Chicken  19866894340701_1
ttgactgccagatcaaaggatgccaactgatactgcagctgtataagcatcttgcgcttgggaaaaaaaggctgagaaaacagttgatatggcaaagagaaagtttatgcttgtagaagttttccacgaggaaaaaaagtcctgcaatctgttgttttacaacataagctgtgggctaataggatatataaagttatgttgacaactgcagatgtttcacatttactgtttcagttaaatattcctgaagtggttattatataccagcattgtaaatgtggtttttgatgttgtctaaamagtttctgagattggaaagtgatgctgtaagaataacaaagtttttgcacaaataatgctgattctgaaggtcacgatacatgtcctgatcctgaaatcttctctcaaacaggatttaagttaggtaagctctcagcaaccacaatagtctgtatcctgttagccctctcaaacaccaccaatttccccaggtcccatacttaaattacagtggtaatccttaacatttctacagtcctttgcatgttcagtgcctcctaaggtattttgttggcaagtgtatggcagtaatattgcttt

SEQ ID NO: 68962 - DNA, 600 bp, Chicken  19866894340711_1
ctttagtggttgaaggtcattcttttggcagattaatgcttaactattaggccctattcattgtctggggtcagcgctgctgctgtcatcgcatattaagaagtgctggcttggaacagcgacaacaatgctgtgaggtgggagagagctacaagtcctgggtgaacgtagctctcgttagtgttttaatctgtagagcattaatgaattttaatcccttctatgcttcacctaagtggacttccatcagcccatcttgctggcacatacttgaaccggcacccacagtgtctgggggayactgaggtattgcactgagtgaggttgggttgttggcacrcatctccttgcagctccccaccatcagctgtgcycgttggttcaggggaagctctggtggtcccacagcgctgatccatggggtctgcttgcttattccagcagtcagtgagcatcgccacgccgcatctagatccaggctttgataagccttgtgctgcttctcggcaccagacacgtctcctctgatgctatcacacattcctctctcctctctttgctcttcctaggagctggtgtcccggtgatctatgagttgtt

SEQ ID NO: 68963 - DNA, 600 bp, Chicken  19866894340711_2
taactattaggccctattcattgtctggggtcagcgctgctgctgtcatcgcatattaagaagtgctggcttggaacagcgacaacaatgctgtgaggtgggagagagctacaagtcctgggtgaacgtagctctcgttagtgttttaatctgtagagcattaatgaattttaatcccttctatgcttcacctaagtggacttccatcagcccatcttgctggcacatacttgaaccggcacccacagtgtctgggggayactgaggtattgcactgagtgaggttgggttgttggcacrcatctccttgcagctccccaccatcagctgtgcycgttggttcaggggaagctctggtggtcccacagcgctgatccatggggtctgcttgcttattccagcagtcagtgagcatcgccacgccgcatctagatccaggctttgataagccttgtgctgcttctcggcaccagacacgtctcctctgatgctatcacacattcctctctcctctctttgctcttcctaggagctggtgtcccggtgatctatgagttgtttggagaagcagcaaacactacttacgcattatatacatgt

SEQ ID NO: 68964 - DNA, 600 bp, Chicken  19866894340711_3
cgctgctgctgtcatcgcatattaagaagtgctggcttggaacagcgacaacaatgctgtgaggtgggagagagctacaagtcctgggtgaacgtagctctcgttagtgttttaatctgtagagcattaatgaattttaatcccttctatgcttcacctaagtggacttccatcagcccatcttgctggcacatacttgaaccggcacccacagtgtctgggggayactgaggtattgcactgagtgaggttgggttgttggcacrcatctccttgcagctccccaccatcagctgtgcycgttggttcaggggaagctctggtggtcccacagcgctgatccatggggtctgcttgcttattccagcagtcagtgagcatcgccacgccgcatctagatccaggctttgataagccttgtgctgcttctcggcaccagacacgtctcctctgatgctatcacacattcctctctcctctctttgctcttcctaggagctggtgtcccggtgatctatgagttgtttggagaagcagcaaacactacttacgcattatatacatgtcttgtctgttccacttgataatgccattctttaa

SEQ ID NO: 68965 - DNA, 600 bp, Chicken  19866894340714_1
ttcagtcacaaggctgaacctcgatatccatcaaaggcatgcattctaacagtctcgccttagctttatggctatatattcatatacagtcatacaggcttcagatttgtaatggtctgctaaacatcactgcatattcctaactgtagactgactgtcttcaaagcgactggattctttcttttgagggagaccactggagtcaaagcctttgcatttcaaaccgtaattctctccaaagctttccccagatacatcccctcttccaattatgcttgcgataaaatacttctgtccctkcacaaggtcctgaagaacatgagaacttggaatttataaactctcaaccccctctacccaagactcattgtggctgcttacgctgcacagtggaatgcttttccatttttttctccacttcccacatcagatgctgactcctagcgtattaatcatgtcaatctgcttgttattcatacaggttactgagcagagttataatcatttcarccaagtaattagaacgtccattttcctacctgtgccctacctatgtgctgatccagctagcatccctactcagtcagacaggcgggtctg

SEQ ID NO: 68966 - DNA, 600 bp, Chicken  19866894340714_2
tttgcatttcaaaccgtaattctctccaaagctttccccagatacatcccctcttccaattatgcttgcgataaaatacttctgtccctkcacaaggtcctgaagaacatgagaacttggaatttataaactctcaaccccctctacccaagactcattgtggctgcttacgctgcacagtggaatgcttttccatttttttctccacttcccacatcagatgctgactcctagcgtattaatcatgtcaatctgcttgttattcatacaggttactgagcagagttataatcatttcarccaagtaattagaacgtccattttcctacctgtgccctacctatgtgctgatccagctagcatccctactcagtcagacaggcgggtctggacgaggcaaattaatttaattgcaagggttgccagaaacagcagaggtatattttatgtcccacractctaggctgtttcatgactattttgaagctcatggctgtgatcatgatgactgtctactgtcctttttaaacatcttctgctttgactaatttggttaggctcatttttgcctggctttccatcaataaagccccattcaga

SEQ ID NO: 68967 - DNA, 600 bp, Chicken  19866894340714_3
attgtggctgcttacgctgcacagtggaatgcttttccatttttttctccacttcccacatcagatgctgactcctagcgtattaatcatgtcaatctgcttgttattcatacaggttactgagcagagttataatcatttcarccaagtaattagaacgtccattttcctacctgtgccctacctatgtgctgatccagctagcatccctactcagtcagacaggcgggtctggacgaggcaaattaatttaattgcaagggttgccagaaacagcagaggtatattttatgtcccacractctaggctgtttcatgactattttgaagctcatggctgtgatcatgatgactgtctactgtcctttttaaacatcttctgctttgactaatttggttaggctcatttttgcctggctttccatcaataaagccccattcagaagacggcctcaccacttttgcagaatacagcctaaaagagaacattaacaaaaggaaatgtaatatacaatggaaaattaaacaacaacatgtactttattcttaatactcttaacttatgtaacctcttcgatcatttcctaatgtttactttat

SEQ ID NO: 68968 - DNA, 600 bp, Chicken  19866894340716_1
ggtgatgagatttactgggctgtgagagtgataagaggcctgccttattcttatgagagagtccttttcaggagactcacattggaacacaaatacacattttcttgtccttctgcagttgggaaaaatagaaatatgtttgcctccagcaatgttgtatgttgttgatgatagcaaatgtaatttttgaataactcaattgatggcagagatttgcaaatcaagaccatggagttaaaatatctaaactgtatttcgatattttttttgaaatcatatgcattataatacttctgtttwtagagggtgttatttgaatggatgcaaaatactccagacttagacatcgttgccacctttctgatggtaaggcacagcatttatttgctgtaaaataatattcaacttaccattctcatttactgaaagtgcatggaaaatggagcattttgtagcttgtatataacctggacctcagtcacagaaggtgcacatgcaggattgctgaaacagcccctggaaagatataaaggtagcaatgaagccatataaaattttcaacaacggaatgtccagaccctcttcctgtgccagtgctat

SEQ ID NO: 68969 - DNA, 554 bp, Chicken  19866894340717_1
cactcattgttactgccactggatatgagaccaaggaaacagaaatgcttattggccttattattagcctatgcttatctacgccaaaatcattgactggaaatggttgaatcaagaaaatatcacacggtagccacccatatagatatccagttttggaatgagtggcttggatgattttaagtttagcaaagttttagttttgaaatacgtacctgtctgttttcactcaccatataaaatataagtcccaagtggtttgagaaggctgaggcctttcccggtattttctccacacaracaatccaaaacaatatctaccccttctgctgagattctgaaaaaacaagaaagaaacctcactttgcaataggattcacaggaatttaagccctgcagtgatcctttgargaatttattgttatgcccaactaaataagtcagtattttaacagatacaagatacaggaaaacgcattttctcttatttatctgacaagtaaaataaaaaggacatttttttcccctaagattttcttattaattccacagtt

SEQ ID NO: 68970 - DNA, 443 bp, Chicken  19866894340717_2
tcaagaaaatatcacacggtagccacccatatagatatccagttttggaatgagtggcttggatgattttaagtttagcaaagttttagttttgaaatacgtacctgtctgttttcactcaccatataaaatataagtcccaagtggtttgagaaggctgaggcctttcccggtattttctccacacaracaatccaaaacaatatctaccccttctgctgagattctgaaaaaacaagaaagaaacctcactttgcaataggattcacaggaatttaagccctgcagtgatcctttgargaatttattgttatgcccaactaaataagtcagtattttaacagatacaagatacaggaaaacgcattttctcttatttatctgacaagtaaaataaaaaggacatttttttcccctaagattttcttattaattccacagtt

SEQ ID NO: 68971 - DNA, 599 bp, Chicken  19866894340718_1
  misc_feature (1)..(35): n is any nucleotide
nnnnnnnnnnnnnnnnnnnnnnnnnnnnnnnnnnntaggacataacggacttgggaagatttgcaagatgagtcatttgtttttcagtggtgtttgcaatgaagaggtcaatgctccactcagagcccattgctgagtaattttgaggatgactttggttaatattacaaatctggattctagattcaagtcttgcttgctctatcaattaattgctgacctttgtgatgtattttgtgttcttgaagcaaggcagggacaatcagataaaatgagtctcctgggagtctgccctccggkttttcttyaataataattcttctgtctgggtggtaggcaagtacttcttccttccctggtggagtcacagtacattacccttgaatctctaatttgctttattctttccctttccacctcacattactaattgcttatcagcaactgtcctgggctcaggaagctgcatgtttttcacatttcttaccacagtttgagatcttttgtgtccagtggtggcattcagtgtactaagacacatgcaggatctgtctgctcacaccttgatacggtcattatattactgttgcccatgggaa

SEQ ID NO: 68972 - DNA, 599 bp, Chicken  19866894340718_2
  misc_feature (1)..(27): n is any nucleotide
nnnnnnnnnnnnnnnnnnnnnnnnnnntaggacataacggacttgggaagatttgcaagatgagtcatttgtttttcagtggtgtttgcaatgaagaggtcaatgctccactcagagcccattgctgagtaattttgaggatgactttggttaatattacaaatctggattctagattcaagtcttgcttgctctatcaattaattgctgacctttgtgatgtattttgtgttcttgaagcaaggcagggacaatcagataaaatgagtctcctgggagtctgccctccggkttttcttyaataataattcttctgtctgggtggtaggcaagtacttcttccttccctggtggagtcacagtacattacccttgaatctctaatttgctttattctttccctttccacctcacattactaattgcttatcagcaactgtcctgggctcaggaagctgcatgtttttcacatttcttaccacagtttgagatcttttgtgtccagtggtggcattcagtgtactaagacacatgcaggatctgtctgctcacaccttgatacggtcattatattactgttgcccatgggaatgaggtta

SEQ ID NO: 68973 - DNA, 600 bp, Chicken  19866894340718_3
tgggtggtaggcaagtacttcttccttccctggtggagtcacagtacattacccttgaatctctaatttgctttattctttccctttccacctcacattactaattgcttatcagcaactgtcctgggctcaggaagctgcatgtttttcacatttcttaccacagtttgagatcttttgtgtccagtggtggcattcagtgtactaagacacatgcaggatctgtctgctcacaccttgatacggtcattatattactgttgcccatgggaatgaggttaatagcgttctctctttgcyttgggataattgtctgctgtggtttcctgtgccacttctgtctccctttgtactgtcaccctcgtgtaattcttgctytttcctycttaccagccacatgttacttagagggaatcttctgctttcaccagtgctggcagacactggaaaagacagtggtgtttgtcttatcttccctggaggtggctatgaatctcctggattattgcttataaagcacatctcacattgctgcaccattagatgtgaaggctcgtgcctttcaagagggctgaatgcccaaacccatgctcttattca

SEQ ID NO: 68974 - DNA, 600 bp, Chicken  19866894340718_4
tttccctttccacctcacattactaattgcttatcagcaactgtcctgggctcaggaagctgcatgtttttcacatttcttaccacagtttgagatcttttgtgtccagtggtggcattcagtgtactaagacacatgcaggatctgtctgctcacaccttgatacggtcattatattactgttgcccatgggaatgaggttaatagcgttctctctttgcyttgggataattgtctgctgtggtttcctgtgccacttctgtctccctttgtactgtcaccctcgtgtaattcttgctytttcctycttaccagccacatgttacttagagggaatcttctgctttcaccagtgctggcagacactggaaaagacagtggtgtttgtcttatcttccctggaggtggctatgaatctcctggattattgcttataaagcacatctcacattgctgcaccattagatgtgaaggctcgtgcctttcaagagggctgaatgcccaaacccatgctcttattcaaaacatggaggcagtctcttcctgccctctatttttagcagctctctgtagtcccaatgtatgtgcctgtgtccacat

SEQ ID NO: 68975 - DNA, 600 bp, Chicken  19866894340718_5
ttccacctcacattactaattgcttatcagcaactgtcctgggctcaggaagctgcatgtttttcacatttcttaccacagtttgagatcttttgtgtccagtggtggcattcagtgtactaagacacatgcaggatctgtctgctcacaccttgatacggtcattatattactgttgcccatgggaatgaggttaatagcgttctctctttgcyttgggataattgtctgctgtggtttcctgtgccacttctgtctccctttgtactgtcaccctcgtgtaattcttgctytttcctycttaccagccacatgttacttagagggaatcttctgctttcaccagtgctggcagacactggaaaagacagtggtgtttgtcttatcttccctggaggtggctatgaatctcctggattattgcttataaagcacatctcacattgctgcaccattagatgtgaaggctcgtgcctttcaagagggctgaatgcccaaacccatgctcttattcaaaacatggaggcagtctcttcctgccctctatttttagcagctctctgtagtcccaatgtatgtgcctgtgtccacattgcccca

SEQ ID NO: 68976 - DNA, 600 bp, Chicken  19866894340722_1
tcagctatatccatctcatggctcacttccggatgcacactcagatcaagagtcagacagcagcgctcatcagcggattcaggtcgatcattaagcctgagtggattcgtatgttctctgcaccagagctgcagcgactgatctctggcgacaatgctgagattgacctcgaggacttaaagtaagtgaccaaccaagcctgctggtcttctcattcagcaaagcaagctgtgttactgcgtggttatttgcaggaggctgaccctttcccagctgtctgttcatcctaatgggaattasgagcagatggaagcaaatggaatgaacagcaagttacttaaagctaatctagacacagtattaatgaatggaaagggtcctttcctccactggcatgcagtggttcccaagagcagaatttctgtcctttyctttcctctgatcaagcacccagtaagcatttgtggggctctgtgctggcagcgtttgctatagcagtgaaccttgactcgtggcagcagtattgatccttcctgcactcgtgtgctggcagctgtgaccctgctgctgcagtgggatgcaaacctgtcacaacctttt

SEQ ID NO: 68977 - DNA, 600 bp, Chicken  19866894340722_2
cagcgactgatctctggcgacaatgctgagattgacctcgaggacttaaagtaagtgaccaaccaagcctgctggtcttctcattcagcaaagcaagctgtgttactgcgtggttatttgcaggaggctgaccctttcccagctgtctgttcatcctaatgggaattasgagcagatggaagcaaatggaatgaacagcaagttacttaaagctaatctagacacagtattaatgaatggaaagggtcctttcctccactggcatgcagtggttcccaagagcagaatttctgtcctttyctttcctctgatcaagcacccagtaagcatttgtggggctctgtgctggcagcgtttgctatagcagtgaaccttgactcgtggcagcagtattgatccttcctgcactcgtgtgctggcagctgtgaccctgctgctgcagtgggatgcaaacctgtcacaacctttttctccccagaaaacacacagtgtactatgggggcttccatgggagtcatcgggtcattatctggttgtgggacatcctagccaatgacttcagccctgaggagagagccatgtttctgaaggtaagtgcag

SEQ ID NO: 68978 - DNA, 600 bp, Chicken  19866894340722_3
atagtgctgcatggatggcagttttcaaaggctagaagagctgagcacagagctcagcagtattgtacggtggggcgctcggatgccagtctaagcagctgtttgctgtgactgcattagccatgtgtctgttacagccaggctgctctcactgctgctgtctttcactgtccatcactttttcagtttgttaccagctgctctaggcctccacttctgggctttgcctacctcaagcctccattttccatccgttgtgtggaagtctctgatgaccaggtaggcagcctgctgggctcrtgtctcttgcattccttgccacgcttctgccaggcctctttccctkcccagcctcctcatctctatccaaccagaaaactaaactataaagacgtatattctacagatgaaggtgaaaacagccttccactaacagaatgcatacggctgtacctccctccttcccaacacagcagcagttgggctcttcatgcttatctgcagagttgtgctttctcctcacacatgacctcctcgtgcttctgatcctgttccatggtgccccctgtgtgtgtcatggcacctggagttaaaagcagc

SEQ ID NO: 68979 - DNA, 600 bp, Chicken  19866894340722_4
acagagctcagcagtattgtacggtggggcgctcggatgccagtctaagcagctgtttgctgtgactgcattagccatgtgtctgttacagccaggctgctctcactgctgctgtctttcactgtccatcactttttcagtttgttaccagctgctctaggcctccacttctgggctttgcctacctcaagcctccattttccatccgttgtgtggaagtctctgatgaccaggtaggcagcctgctgggctcrtgtctcttgcattccttgccacgcttctgccaggcctctttccctkcccagcctcctcatctctatccaaccagaaaactaaactataaagacgtatattctacagatgaaggtgaaaacagccttccactaacagaatgcatacggctgtacctccctccttcccaacacagcagcagttgggctcttcatgcttatctgcagagttgtgctttctcctcacacatgacctcctcgtgcttctgatcctgttccatggtgccccctgtgtgtgtcatggcacctggagttaaaagcagctcattgctagcagctatgggggacagggtgggtaggatctgattct

SEQ ID NO: 68980 - DNA, 600 bp, Chicken  19866894340723_1
taggaacaataaaaacagcctttatggtgttttttattgttgtttgtttgtttcagtttaccaagtagacatgcaaaggaagcagctttcctcttttccattcactaaggattttcacatttttcttagaaagaccccagctctcctttgttctgtagtttgctttcattgccagctgtgatactcagttttactctccttgaaagcttcatctaagaaagtcgtgactcacaaatctctttcaatcactcctgacttgtgcaggcatacgttcttctctctgcctgctttttttctcarttattaataaagcactgtgcctaaactattttccttttatctggacccttactacaaatgttactattccactgcttctttctgtctcaaatattggactggactgcagaaaaatgactcttccttctcctgcagcaaagggtgcagaaattcagccctcttttgataggagatctgcatacccaaactcttaagaccctggaagggacattctcttctctgccctcagtcacccccacgcaaaagagattattgctggagttaatgtgctttttctccccttctgaaaatgagcccagc

SEQ ID NO: 68981 - DNA, 600 bp, Chicken  19866894340727_1
tttccctgttgtgtctgacacagctttgtgttctcaagtgatttctaccttctgatgtgccaggaccctccatcacacactacatgaatatgggaggtgccacctttgaactcaatgttgagcacaatgacaccactcatgaaagctggatgccatgctactctattttacaaacatccaaacctttcctagatgggttacttccactttgtatgggggaagcaaggtcagcatgagaatagagcagagccaggagttcctggttgtgacaacacaagttgagaaagacctgagatgtcycagggctttgatggctgatccacacacaattcttttttctgcatgtgggattttgaaaatgaacagcatgttccagctcagcataattcacagatgaaagagtatctgaaaaccacttcaagacagtacaggctcaaaatcctaaagctttatggctgaatcattwttttgttattagtcacagaataatggaaggttttgaatttttgtttcaattcatgactcaaaatatattaatgctctgaaaaatattgcagtaaatataagtcacaatcatcagaaaaatagacttgaatacaa

SEQ ID NO: 68982 - DNA, 600 bp, Chicken  19866894340727_2
tttacaaacatccaaacctttcctagatgggttacttccactttgtatgggggaagcaaggtcagcatgagaatagagcagagccaggagttcctggttgtgacaacacaagttgagaaagacctgagatgtcycagggctttgatggctgatccacacacaattcttttttctgcatgtgggattttgaaaatgaacagcatgttccagctcagcataattcacagatgaaagagtatctgaaaaccacttcaagacagtacaggctcaaaatcctaaagctttatggctgaatcattwttttgttattagtcacagaataatggaaggttttgaatttttgtttcaattcatgactcaaaatatattaatgctctgaaaaatattgcagtaaatataagtcacaatcatcagaaaaatagacttgaatacaacagaatagaacagaatcagatcactcctgattttagattctcatctgaaattcccttctccgttctccctaaaagacctttgttcaaagcaccatcatctgggcttcaaatttgtttctgtatgaaaaatatcatttgaaaataaagcaactcaagttttcaaagc

SEQ ID NO: 68983 - DNA, 600 bp, Chicken  19866894340733_1
agaagcgttacctctcagtctcccagttttgagcctaaaagcacatcctaaaccttcacaccgttttggtgccattgtgcagagtgggggaaaaaaatatctcaaagtggagccgcaatcacggtaaagtccttcaaaaattaattgataaaaaatatatatataaaatgaagtgaagtggcaccaaagggaacggggattaaacgcatccaacgcttccctgcagccactcctcgctgctgccccactccaacacacgcaccgtttgcagagagaaaacgatcgccctgaaatccgccytcacgatgrtaatatatttctgttaatggcaccgactgcggtaccgcagcggcgctccgttcgcggctcagaaatggggacatttcgtacggatcagaaacaacagagcccggggatgctcactgacctgcctgctttggttatgatcatttcggtgcccgcttcatggaacttcttccatagctccttctcgtggagatagactttgatgttttctatcgtctgcaaattgaaatgaaataaattaaagagaatgagaagagcaacgagcggccggggagcggccggggaagggccgtc

SEQ ID NO: 68984 - DNA, 600 bp, Chicken  19866894340733_2
acctctcagtctcccagttttgagcctaaaagcacatcctaaaccttcacaccgttttggtgccattgtgcagagtgggggaaaaaaatatctcaaagtggagccgcaatcacggtaaagtccttcaaaaattaattgataaaaaatatatatataaaatgaagtgaagtggcaccaaagggaacggggattaaacgcatccaacgcttccctgcagccactcctcgctgctgccccactccaacacacgcaccgtttgcagagagaaaacgatcgccctgaaatccgccytcacgatgrtaatatatttctgttaatggcaccgactgcggtaccgcagcggcgctccgttcgcggctcagaaatggggacatttcgtacggatcagaaacaacagagcccggggatgctcactgacctgcctgctttggttatgatcatttcggtgcccgcttcatggaacttcttccatagctccttctcgtggagatagactttgatgttttctatcgtctgcaaattgaaatgaaataaattaaagagaatgagaagagcaacgagcggccggggagcggccggggaagggccgtccgacaacac

SEQ ID NO: 68985 - DNA, 600 bp, Chicken  19866894340751_1
ccctgcgtactacatctgccctttccttaaacacctccaggaacactgactccacgacctccctgggcagcctctgccaatgcctgacccacttcttcccaaaccagctgcaggcagagatgtcccctgcccccatctgccccacacatctcagcatcattgcatcccactgcttggcttgcactaacaagaccctctgaagccccttgctgctgcagagcggtgtctcatggtgcactgggggcctgggctcctttgggagcctccccattctgaatctgatccatcaactcccttctrcacagctctgggatggtgctgctgggcggacagaggcacaaagcccgccctgatcctactgctttatgatgctgaagtttcttgcttgcttcccgcacttccacacatggatgcattaataaaagctgcccagcacccttagaatttataggcttttttgtaccataacctcttaatgcactgcagtttagtcacaaagaaggacggctgccagcttttctaggaaaaaagctgggaaggttcatgcaagatgacaggactccccagagggagccaagaattgcagcttcctttggcctc

SEQ ID NO: 68986 - DNA, 600 bp, Chicken  19866894340751_2
ggatggagagatacccactcaggtctttgaggcatggatggtttgcagtgggcttcagccacccatcactgtgctgagcctcaatatctgagcttcctttgcttctatcccgcagtcccacccactgtccctatgcaacaccagtgaggatgaacacacggagtcaggattcatcaccatcgtcaagctcgagcagccggatcgggatcccaacccgtgcctgtcgctggctaacaaggtatgtgcaaaaatgctccaaatggcacccagggcaggaaatgatgtgatgcaggaaagagmaaaagtgcagtacttcaccgggtgaggcrcatgaaggatcagcactgatcagctcagacaaaagcaaaccagacagactagaaatgggacrtgactgctgagggccaccatctgtctgccttccttaggaatgggagatctcagaggtcttcgggctgggtctctatgagacagtgcctcagtgaatggcagttactgtgccaaaagttgaggtcactggtacaattctctggtaataaggaagccaggtgggagtgagggtcattttaagccttaaaatctttgtgtctccgataaagt

SEQ ID NO: 68987 - DNA, 600 bp, Chicken  19866894340751_3
aggcatggatggtttgcagtgggcttcagccacccatcactgtgctgagcctcaatatctgagcttcctttgcttctatcccgcagtcccacccactgtccctatgcaacaccagtgaggatgaacacacggagtcaggattcatcaccatcgtcaagctcgagcagccggatcgggatcccaacccgtgcctgtcgctggctaacaaggtatgtgcaaaaatgctccaaatggcacccagggcaggaaatgatgtgatgcaggaaagagmaaaagtgcagtacttcaccgggtgaggcrcatgaaggatcagcactgatcagctcagacaaaagcaaaccagacagactagaaatgggacrtgactgctgagggccaccatctgtctgccttccttaggaatgggagatctcagaggtcttcgggctgggtctctatgagacagtgcctcagtgaatggcagttactgtgccaaaagttgaggtcactggtacaattctctggtaataaggaagccaggtgggagtgagggtcattttaagccttaaaatctttgtgtctccgataaagttgagcggaaagaggctaacattagctttc

SEQ ID NO: 68988 - DNA, 600 bp, Chicken  19866894340751_4
gcttcctttgcttctatcccgcagtcccacccactgtccctatgcaacaccagtgaggatgaacacacggagtcaggattcatcaccatcgtcaagctcgagcagccggatcgggatcccaacccgtgcctgtcgctggctaacaaggtatgtgcaaaaatgctccaaatggcacccagggcaggaaatgatgtgatgcaggaaagagmaaaagtgcagtacttcaccgggtgaggcrcatgaaggatcagcactgatcagctcagacaaaagcaaaccagacagactagaaatgggacrtgactgctgagggccaccatctgtctgccttccttaggaatgggagatctcagaggtcttcgggctgggtctctatgagacagtgcctcagtgaatggcagttactgtgccaaaagttgaggtcactggtacaattctctggtaataaggaagccaggtgggagtgagggtcattttaagccttaaaatctttgtgtctccgataaagttgagcggaaagaggctaacattagctttctcttcaggggctgtctgtgtcctttcattgactctgcctaaagcgtgttattttccataagt

SEQ ID NO: 68989 - DNA, 600 bp, Chicken  19866894340758_1
tttctaggtcagaaggcagaaagaaaatctggaaatgttaccaattactcttttggttccagtagagtgtcacatcccccctccaaactccagtgaaacaaaaacctccccagaattctgaaccctcccaaacccaaaggatgacaaagtggtactatttcattactgccctttgagttaagtctgtgaagaatcagcatttgttcatatctttggcaatcttgcatatcagacatattgatgatttgagcatttcacactctgagtttttcttttaatctttttaaccttcactttaaytaaatttggctcagatgaaaacttctcattagccttaggtgagcttgttgagtaagtggataacagagaatgcttcaaccctgaataccatatgattcttttttttcctaaaaaataatttctaaaatatggtggtttagagcggacaacagttatcccacttctgttttgcttttcccattatctgattctgctttttttcccagtatgcctctgctggttccagacaggagcaagcaacctgcttcctagtagcatttcagatgagcccaggttagactaaatttcatcttactaaac

SEQ ID NO: 68990 - DNA, 600 bp, Chicken  19866894340758_2
tcagatgaaaacttctcattagccttaggtgagcttgttgagtaagtggataacagagaatgcttcaaccctgaataccatatgattcttttttttcctaaaaaataatttctaaaatatggtggtttagagcggacaacagttatcccacttctgttttgcttttcccattatctgattctgctttttttcccagtatgcctctgctggttccagacaggagcaagcaacctgcttcctagtagcatttcagatgagcccaggttagactaaatttcatcttactaaactttttatttyggaatcacatatttgtaataacagaaagtggctgtatgtcaacacaatcctacaggaaagcaattggaaaaggagcatgtgttcaaactcaagtcctgaggaatagactaggcagagcattgtgaactctcaaaaggagaaatggtgcayggaagagctgatgtgacaacaaatgtgttaaagaaacaagaagctttatgtggaccaatagtgccacgcttctcactctatgccccaatcttctctttgttgcatagaccacaaaataattgaaacaaatacagaaaagcaggaatcaaa

SEQ ID NO: 68991 - DNA, 600 bp, Chicken  19866894340758_3
cttctgttttgcttttcccattatctgattctgctttttttcccagtatgcctctgctggttccagacaggagcaagcaacctgcttcctagtagcatttcagatgagcccaggttagactaaatttcatcttactaaactttttatttyggaatcacatatttgtaataacagaaagtggctgtatgtcaacacaatcctacaggaaagcaattggaaaaggagcatgtgttcaaactcaagtcctgaggaatagactaggcagagcattgtgaactctcaaaaggagaaatggtgcayggaagagctgatgtgacaacaaatgtgttaaagaaacaagaagctttatgtggaccaatagtgccacgcttctcactctatgccccaatcttctctttgttgcatagaccacaaaataattgaaacaaatacagaaaagcaggaatcaaaagtcatcatagaatcatagaatagaatcgctaaggttgggaaaagacccacaggctcatccagtccaatcattcgtccatcaccaatggttctcactaaatcacgtccctcaacacaacatccaaatgctctttgaacaccaccaggctc

SEQ ID NO: 68992 - DNA, 599 bp, Chicken  19866894340763_1
  misc_feature (1)..(69): n is any nucleotide
nnnnnnnnnnnnnnnnnnnnnnnnnnnnnnnnnnnnnnnnnnnnnnnnnnnnnnnnnnnnnnnnnnnnncatatggtgtggaaaaaaccttcctccctggactagatatcagcagcaattgtcagaaatcctaacaggagctaatgtaaagataatttcaaatttagagaaactcttaaactctccgttacaccttttggcaagcaataatcgtatgcagaaatcctttttttttttttcccctactgtcggagggtccacagcaaaagaaaaaacagcgaaacaaaacagaggaatacwcttaaaactgagttggcatgcatttcccagtggtcttgacagcctgacaaagcagcagtaatgccactgcccagtgttaaatacgatccacaaagaccaaagcacacagcctagaggcagagcccaggacaatgtttgcattccctttgagccgaaacattccacacgcaggcttcagcctcccaataaaacacaccagaaagcatagcatagctgcatttaatctttgattttctttcagtcagaacctctcccttcttccaacttgtatgtaagccggagtttccaagcagttttcc

SEQ ID NO: 68993 - DNA, 600 bp, Chicken  19866894340765_1
ctcccacgggcgctttcttttctccagatcatgatctgcacaaagttaataatcatctgacaggagaacagaaaacacccataaaaggaacattccaagagctccaaagatcactgtaagctgtcaacgcaaggaatgttacaaacgttatagttttacagccctggtggatcacgggcagcacagctgaccacacaccagcagaacgtgaacgttcaggacaagccgtggaagcagctgtagcatttacagcccttatcttcagttatatcatcccctgccttgacaccaacttaccartattttcaaagcagaaagggatgcaaaaaaaaacggtcaataaatcaccattaaagaagtcactcatcagtgaactggagataaaccagctttctgctgcagtccagctgccccctcctgcctctcagagcagcctgtccccagcctacccaccaatacagcttcccaggagagtgtctccctgctgcagggacccctcatgactctgctcttcccagcagacccacaggccgcacagccccaragcaggaaggcagacacacamgcagctgcacacagytccctccccwaccactgctt

SEQ ID NO: 68994 - DNA, 580 bp, Chicken  19866894340765_10
gcacttacgtgatcctctaaggtgacatcttcccttgagacrccgaggttggctttggcgatcccaggctgaataatcatctcttttaggaactgggaatacagatcccttagggagggaaatgaagcagatgatcgcatcaatgtaagcrctcggcctgrgytcaggcacacagccctgcaccgctcagcctgcatctgatccagttcaaatgcactgaccccaagaacagcacacgagagcaattccttttatgaaggcacttaattattcaaagcaccactccccttctccacagaycccattaggaggaaagaggcaagcagagccgtcctcacctctgcttcttcagcaaagagctccatagggccctctctaaggggaggtagttcagcaggatctgcgcaggacacaaacacacgttgggatctgaggagagcggtgccgaacggagagccgagccgagccgagccgagccgacccagcgcggggcagcggcgctccgcagaacgctcagcgcttcgccgcccggcgatatcagaacgcccgaagcgcaacgcagcgctgagccgcggcgaag

SEQ ID NO: 68995 - DNA, 600 bp, Chicken  19866894340765_2
atttacagcccttatcttcagttatatcatcccctgccttgacaccaacttaccartattttcaaagcagaaagggatgcaaaaaaaaacggtcaataaatcaccattaaagaagtcactcatcagtgaactggagataaaccagctttctgctgcagtccagctgccccctcctgcctctcagagcagcctgtccccagcctacccaccaatacagcttcccaggagagtgtctccctgctgcagggacccctcatgactctgctcttcccagcagacccacaggccgcacagccccaragcaggaaggcagacacacamgcagctgcacacagytccctccccwaccactgctttgccagcaactcagcagctgaaggctgctcagacacagacgcagggctgacacccaggagctgcccctcctgccagcacagggccaagagcagcacgggggtgcaggctgcagagccacagctcagagctacggggaatttcctgcgatgcagaggttagcagcacttacgtgatcctctaaggtgacatcttcccttgagacrccgaggttggctttggcgatcccaggctgaataatcatct

SEQ ID NO: 68996 - DNA, 600 bp, Chicken  19866894340765_3
ttatatcatcccctgccttgacaccaacttaccartattttcaaagcagaaagggatgcaaaaaaaaacggtcaataaatcaccattaaagaagtcactcatcagtgaactggagataaaccagctttctgctgcagtccagctgccccctcctgcctctcagagcagcctgtccccagcctacccaccaatacagcttcccaggagagtgtctccctgctgcagggacccctcatgactctgctcttcccagcagacccacaggccgcacagccccaragcaggaaggcagacacacamgcagctgcacacagytccctccccwaccactgctttgccagcaactcagcagctgaaggctgctcagacacagacgcagggctgacacccaggagctgcccctcctgccagcacagggccaagagcagcacgggggtgcaggctgcagagccacagctcagagctacggggaatttcctgcgatgcagaggttagcagcacttacgtgatcctctaaggtgacatcttcccttgagacrccgaggttggctttggcgatcccaggctgaataatcatctcttttaggaactgggaataca

SEQ ID NO: 68997 - DNA, 600 bp, Chicken  19866894340765_4
ccttgacaccaacttaccartattttcaaagcagaaagggatgcaaaaaaaaacggtcaataaatcaccattaaagaagtcactcatcagtgaactggagataaaccagctttctgctgcagtccagctgccccctcctgcctctcagagcagcctgtccccagcctacccaccaatacagcttcccaggagagtgtctccctgctgcagggacccctcatgactctgctcttcccagcagacccacaggccgcacagccccaragcaggaaggcagacacacamgcagctgcacacagytccctccccwaccactgctttgccagcaactcagcagctgaaggctgctcagacacagacgcagggctgacacccaggagctgcccctcctgccagcacagggccaagagcagcacgggggtgcaggctgcagagccacagctcagagctacggggaatttcctgcgatgcagaggttagcagcacttacgtgatcctctaaggtgacatcttcccttgagacrccgaggttggctttggcgatcccaggctgaataatcatctcttttaggaactgggaatacagatcccttagggagg

SEQ ID NO: 68998 - DNA, 600 bp, Chicken  19866894340765_5
aacttaccartattttcaaagcagaaagggatgcaaaaaaaaacggtcaataaatcaccattaaagaagtcactcatcagtgaactggagataaaccagctttctgctgcagtccagctgccccctcctgcctctcagagcagcctgtccccagcctacccaccaatacagcttcccaggagagtgtctccctgctgcagggacccctcatgactctgctcttcccagcagacccacaggccgcacagccccaragcaggaaggcagacacacamgcagctgcacacagytccctccccwaccactgctttgccagcaactcagcagctgaaggctgctcagacacagacgcagggctgacacccaggagctgcccctcctgccagcacagggccaagagcagcacgggggtgcaggctgcagagccacagctcagagctacggggaatttcctgcgatgcagaggttagcagcacttacgtgatcctctaaggtgacatcttcccttgagacrccgaggttggctttggcgatcccaggctgaataatcatctcttttaggaactgggaatacagatcccttagggagggaaatgaagc

SEQ ID NO: 68999 - DNA, 600 bp, Chicken  19866894340765_6
tctgctcttcccagcagacccacaggccgcacagccccaragcaggaaggcagacacacamgcagctgcacacagytccctccccwaccactgctttgccagcaactcagcagctgaaggctgctcagacacagacgcagggctgacacccaggagctgcccctcctgccagcacagggccaagagcagcacgggggtgcaggctgcagagccacagctcagagctacggggaatttcctgcgatgcagaggttagcagcacttacgtgatcctctaaggtgacatcttcccttgagacrccgaggttggctttggcgatcccaggctgaataatcatctcttttaggaactgggaatacagatcccttagggagggaaatgaagcagatgatcgcatcaatgtaagcrctcggcctgrgytcaggcacacagccctgcaccgctcagcctgcatctgatccagttcaaatgcactgaccccaagaacagcacacgagagcaattccttttatgaaggcacttaattattcaaagcaccactccccttctccacagaycccattaggaggaaagaggcaagcagagccgtcctcacctct

SEQ ID NO: 69000 - DNA, 600 bp, Chicken  19866894340765_7
gcagctgaaggctgctcagacacagacgcagggctgacacccaggagctgcccctcctgccagcacagggccaagagcagcacgggggtgcaggctgcagagccacagctcagagctacggggaatttcctgcgatgcagaggttagcagcacttacgtgatcctctaaggtgacatcttcccttgagacrccgaggttggctttggcgatcccaggctgaataatcatctcttttaggaactgggaatacagatcccttagggagggaaatgaagcagatgatcgcatcaatgtaagcrctcggcctgrgytcaggcacacagccctgcaccgctcagcctgcatctgatccagttcaaatgcactgaccccaagaacagcacacgagagcaattccttttatgaaggcacttaattattcaaagcaccactccccttctccacagaycccattaggaggaaagaggcaagcagagccgtcctcacctctgcttcttcagcaaagagctccatagggccctctctaaggggaggtagttcagcaggatctgcgcaggacacaaacacacgttgggatctgaggagagcggtgccgaacg

SEQ ID NO: 69001 - DNA, 600 bp, Chicken  19866894340765_8
gctgctcagacacagacgcagggctgacacccaggagctgcccctcctgccagcacagggccaagagcagcacgggggtgcaggctgcagagccacagctcagagctacggggaatttcctgcgatgcagaggttagcagcacttacgtgatcctctaaggtgacatcttcccttgagacrccgaggttggctttggcgatcccaggctgaataatcatctcttttaggaactgggaatacagatcccttagggagggaaatgaagcagatgatcgcatcaatgtaagcrctcggcctgrgytcaggcacacagccctgcaccgctcagcctgcatctgatccagttcaaatgcactgaccccaagaacagcacacgagagcaattccttttatgaaggcacttaattattcaaagcaccactccccttctccacagaycccattaggaggaaagaggcaagcagagccgtcctcacctctgcttcttcagcaaagagctccatagggccctctctaaggggaggtagttcagcaggatctgcgcaggacacaaacacacgttgggatctgaggagagcggtgccgaacggagagccgag

SEQ ID NO: 69002 - DNA, 600 bp, Chicken  19866894340765_9
tgctcagacacagacgcagggctgacacccaggagctgcccctcctgccagcacagggccaagagcagcacgggggtgcaggctgcagagccacagctcagagctacggggaatttcctgcgatgcagaggttagcagcacttacgtgatcctctaaggtgacatcttcccttgagacrccgaggttggctttggcgatcccaggctgaataatcatctcttttaggaactgggaatacagatcccttagggagggaaatgaagcagatgatcgcatcaatgtaagcrctcggcctgrgytcaggcacacagccctgcaccgctcagcctgcatctgatccagttcaaatgcactgaccccaagaacagcacacgagagcaattccttttatgaaggcacttaattattcaaagcaccactccccttctccacagaycccattaggaggaaagaggcaagcagagccgtcctcacctctgcttcttcagcaaagagctccatagggccctctctaaggggaggtagttcagcaggatctgcgcaggacacaaacacacgttgggatctgaggagagcggtgccgaacggagagccgagcc

SEQ ID NO: 69003 - DNA, 600 bp, Chicken  19866894340769_1
gactctaggaataggacaagctaattttagaaaatcttgtgaggtttcagcttgtgacagaaaaactatcacacaacttttccactacctatcacaataaaattgttatcatttattataatacatacgtattcattatataaattaagtatacatgcctgttttgtggtttccacacagttagctgtagttatgcaagtcttggagaaaaacaatattcagagtgggaatggaaaagcagcaatacattttttttcttttatttaaaaatcaaaataataataaaacacatcaactccmaaagaggtctggtgacaggactatgcatcttattctgagctgtatagtcctgtctaaggcacaacaactctaatgtgcccatttccacaagcaatgaagatgacttgtactgccctccgagaggcatccaagaatcttcactacagcttaaccacagcaaaaaaatatgyctctcttcccagttctgtcaatgggagtgtaaaaatggtatctacacaaaagactgagaaatctttcagcagtgtagataagagcagattataaaatgctactgtcagttctaaaatatcggaagtcaca

SEQ ID NO: 69004 - DNA, 600 bp, Chicken  19866894340769_2
ttccacacagttagctgtagttatgcaagtcttggagaaaaacaatattcagagtgggaatggaaaagcagcaatacattttttttcttttatttaaaaatcaaaataataataaaacacatcaactccmaaagaggtctggtgacaggactatgcatcttattctgagctgtatagtcctgtctaaggcacaacaactctaatgtgcccatttccacaagcaatgaagatgacttgtactgccctccgagaggcatccaagaatcttcactacagcttaaccacagcaaaaaaatatgyctctcttcccagttctgtcaatgggagtgtaaaaatggtatctacacaaaagactgagaaatctttcagcagtgtagataagagcagattataaaatgctactgtcagttctaaaatatcggaagtcacagagaaagtcaaaattgcatgaaggcttcattctgatgtaaggataaagggtataaaaactacaacttctacacaaatggcttttctggtaatagagtgaagatatgaaattacaggtcataggacagtcctactgatgtttggaaaacaccttctagaaattaattaact

SEQ ID NO: 69005 - DNA, 600 bp, Chicken  19866894340775_1
ttaccaaaatggctgtgggcagtcacatcctcttgctcaatggacagcttccagccagcaggtccatggctttagggtgggttagctccatgtatgggataaggatgggttatctctgagtatgggattcagatgggtttgctccacgtacaggattgcacagcgatggttctttctccaacagcctttgtcctcctatgataactccaacctaggcaatctgagaatggtttctcaattcccaatacaaagaaatccagctagatctttccaaaagtggtattgagcttctcaaaatgycaaacgtgccaaacccactctgttttctctcctacacttctaataacgagaatcacaaaatgaatggcttcactaagagctaccaacttcatggtggagctgactctttattttggcatytcctatccagaaaagtgagtttcttggctgggaaacactacgagaagccccaaatgttcttaaaatgtatgaatggaaattaaactcaatttgggctcccaacagatgagtttaggctgtttcyaagataggcatgcactaagggagctccaacctgycgaaatacagttgtgagaccat

SEQ ID NO: 69006 - DNA, 600 bp, Chicken  19866894340775_2
tatgggattcagatgggtttgctccacgtacaggattgcacagcgatggttctttctccaacagcctttgtcctcctatgataactccaacctaggcaatctgagaatggtttctcaattcccaatacaaagaaatccagctagatctttccaaaagtggtattgagcttctcaaaatgycaaacgtgccaaacccactctgttttctctcctacacttctaataacgagaatcacaaaatgaatggcttcactaagagctaccaacttcatggtggagctgactctttattttggcatytcctatccagaaaagtgagtttcttggctgggaaacactacgagaagccccaaatgttcttaaaatgtatgaatggaaattaaactcaatttgggctcccaacagatgagtttaggctgtttcyaagataggcatgcactaagggagctccaacctgycgaaatacagttgtgagaccattacaaacctatggaggttaaagctccaaccaccttcccactcacaatccagctcacaatggaaccaggcattattcagccttgtttacaagacactgtgatattagaaccacccaaaaag

SEQ ID NO: 69007 - DNA, 600 bp, Chicken  19866894340775_3
atacaaagaaatccagctagatctttccaaaagtggtattgagcttctcaaaatgycaaacgtgccaaacccactctgttttctctcctacacttctaataacgagaatcacaaaatgaatggcttcactaagagctaccaacttcatggtggagctgactctttattttggcatytcctatccagaaaagtgagtttcttggctgggaaacactacgagaagccccaaatgttcttaaaatgtatgaatggaaattaaactcaatttgggctcccaacagatgagtttaggctgtttcyaagataggcatgcactaagggagctccaacctgycgaaatacagttgtgagaccattacaaacctatggaggttaaagctccaaccaccttcccactcacaatccagctcacaatggaaccaggcattattcagccttgtttacaagacactgtgatattagaaccacccaaaaagtgggttcaccaattcaaatacctccagtaaggaagggtctgagacaccaaggtgcactgaaatcttttggttggaaacagatccagcataatcttcttctaatgaacttattttattatcacta

SEQ ID NO: 69008 - DNA, 589 bp, Chicken  19866894340775_4
ggtattgagcttctcaaaatgycaaacgtgccaaacccactctgttttctctcctacacttctaataacgagaatcacaaaatgaatggcttcactaagagctaccaacttcatggtggagctgactctttattttggcatytcctatccagaaaagtgagtttcttggctgggaaacactacgagaagccccaaatgttcttaaaatgtatgaatggaaattaaactcaatttgggctcccaacagatgagtttaggctgtttcyaagataggcatgcactaagggagctccaacctgycgaaatacagttgtgagaccattacaaacctatggaggttaaagctccaaccaccttcccactcacaatccagctcacaatggaaccaggcattattcagccttgtttacaagacactgtgatattagaaccacccaaaaagtgggttcaccaattcaaatacctccagtaaggaagggtctgagacaccaaggtgcactgaaatcttttggttggaaacagatccagcataatcttcttctaatgaacttattttattatcactacagaaaaaaatgggggggtgtga

SEQ ID NO: 69009 - DNA, 600 bp, Chicken  19866894340776_1
gagagaggctcagaaagagaaggagacctaactgacaggactgcaggcttcccagtgtcttccttggctctataaggcatgtttcatggctcagggtgatgtgtggggtgagccaagctactgctgcctaagcaggagtctccacgtgcgtttgggcacatggtgggagctggagctcggtggagcgaggcacccagcaccacagccttcagtttccactctgcacctgagtgcatctaaatcattcccatgggcagggctgcagggctgtgcctcacattgccaggaccatgagggcaytggctgcagtagggaaaggccaacctggggagggatgtatggcagctaggaggaagggctgcagatgtgtccggggaccatcttcaggctttgtgcatcccatggaggccttggcctggtgttgctttaacatatcccaaactcaatcctgctacagcgtgcacaaacgcattgcagttctgagatttgagatcagcttggtcttagccccctgcctgcttccatccctgcgtatgctcacaccttttccagctgcagcacgctgcaagcacccaagggagctgtgttctctgctaataa

SEQ ID NO: 69010 - DNA, 600 bp, Chicken  19866894340779_1
cttgggcagtgactacagcaacaagataaagtgtggcagagtgacccaggttcattttcagggtctccaggccacagagagcttgtgtggaagcctatttcaccatgtattccaatggtgcagatggtactgaagtcaggtcaggcaaaagtacacatttttcagtcatgtatcttgcatgcgacagtgtgtcatgttagagacagggagactgttgcctgttgcaacaaggagatgtgagtttgcttcagtccatgtcccttggagttaaaggatcctgcaaccattctgtaagcaccrtggtcacccartctggctgctcctgcakcttgagtccagctgctctgcagtacagagccagctgctcctgctggtttagaaatcacgacarggacttttagggttcatatcctcaagggaaacgtgggacattgggatgtgctgtcctctgtagggaacaacacttttgatttgaggagtgaaaaggaatatgcactatgaatgactgtcacagcaaataacagcagctgtctgctcaatgaacagagaatttggggcatctcagtgcaggtttccagttctattcagaagccagaaaaa

SEQ ID NO: 69011 - DNA, 600 bp, Chicken  19866894340779_2
actacagcaacaagataaagtgtggcagagtgacccaggttcattttcagggtctccaggccacagagagcttgtgtggaagcctatttcaccatgtattccaatggtgcagatggtactgaagtcaggtcaggcaaaagtacacatttttcagtcatgtatcttgcatgcgacagtgtgtcatgttagagacagggagactgttgcctgttgcaacaaggagatgtgagtttgcttcagtccatgtcccttggagttaaaggatcctgcaaccattctgtaagcaccrtggtcacccartctggctgctcctgcakcttgagtccagctgctctgcagtacagagccagctgctcctgctggtttagaaatcacgacarggacttttagggttcatatcctcaagggaaacgtgggacattgggatgtgctgtcctctgtagggaacaacacttttgatttgaggagtgaaaaggaatatgcactatgaatgactgtcacagcaaataacagcagctgtctgctcaatgaacagagaatttggggcatctcagtgcaggtttccagttctattcagaagccagaaaaagaaatgttttg

SEQ ID NO: 69012 - DNA, 600 bp, Chicken  19866894340779_3
aagtgtggcagagtgacccaggttcattttcagggtctccaggccacagagagcttgtgtggaagcctatttcaccatgtattccaatggtgcagatggtactgaagtcaggtcaggcaaaagtacacatttttcagtcatgtatcttgcatgcgacagtgtgtcatgttagagacagggagactgttgcctgttgcaacaaggagatgtgagtttgcttcagtccatgtcccttggagttaaaggatcctgcaaccattctgtaagcaccrtggtcacccartctggctgctcctgcakcttgagtccagctgctctgcagtacagagccagctgctcctgctggtttagaaatcacgacarggacttttagggttcatatcctcaagggaaacgtgggacattgggatgtgctgtcctctgtagggaacaacacttttgatttgaggagtgaaaaggaatatgcactatgaatgactgtcacagcaaataacagcagctgtctgctcaatgaacagagaatttggggcatctcagtgcaggtttccagttctattcagaagccagaaaaagaaatgttttgaatgttccttgaaaaag

SEQ ID NO: 69013 - DNA, 600 bp, Chicken  19866894340779_4
agcctatttcaccatgtattccaatggtgcagatggtactgaagtcaggtcaggcaaaagtacacatttttcagtcatgtatcttgcatgcgacagtgtgtcatgttagagacagggagactgttgcctgttgcaacaaggagatgtgagtttgcttcagtccatgtcccttggagttaaaggatcctgcaaccattctgtaagcaccrtggtcacccartctggctgctcctgcakcttgagtccagctgctctgcagtacagagccagctgctcctgctggtttagaaatcacgacarggacttttagggttcatatcctcaagggaaacgtgggacattgggatgtgctgtcctctgtagggaacaacacttttgatttgaggagtgaaaaggaatatgcactatgaatgactgtcacagcaaataacagcagctgtctgctcaatgaacagagaatttggggcatctcagtgcaggtttccagttctattcagaagccagaaaaagaaatgttttgaatgttccttgaaaaagaaaatgaatctattcaggttttagattttgaaatagatcaaagttcccagtcttattttctga

SEQ ID NO: 69014 - DNA, 599 bp, Chicken  19866894340784_1
  misc_feature (1)..(242): n is any nucleotide
nnnnnnnnnnnnnnnnnnnnnnnnnnnnnnnnnnnnnnnnnnnnnnnnnnnnnnnnnnnnnnnnnnnnnnnnnnnnnnnnnnnnnnnnnnnnnnnnnnnnnnnnnnnnnnnnnnnnnnnnnnnnnnnnnnnnnnnnnnnnnnnnnnnnnnnnnnnnnnnnnnnnnnnnnnnnnnnnnnnnnnnnnnnnnnnnnnnnnnnnnnnnnnnnnnnnnnnnnnnnnnnnnnnnnnnnnnnnnnnnnnttttgtcagcattagcaatcctcataacacatataaaatcttttctaatgataatttmtttcaaactaaaaactctcccaaagtagagagttatttttatcagaaacttagaagtgttttcaagcaaaccacagaaacgactttgtttccctggcccccgtccaccgctgacttctgaaatcaggtctgagttcactgtgggtctttcattgcattgaccttggcacttttctcaccaagccacagttttccatcacaaaaccacacagcttggtataatgattatttcttttttcctagtaaccaaacaattttttaagcagggtgacagatttccccgttgcgctgcgggaagcg

SEQ ID NO: 69015 - DNA, 600 bp, Chicken  19866894340787_1
attttactctgctctctggctgtaagccccatggttccagtgggtgggttcatcctgcgtcttgaggccatctgagtcttgcatgctgtacagactgcatgatcccctgagcccgaatacatctggatgcttaatgaagcctacagtccacaggttagcgatgtggcaggagggcaggcagaatacacagctgcattaatgatcaatgtgccgtgtccttactgagtggagagaatgagagagaaatggctctcttccttggatgtggaaacagttattcagggggggtgtcctacttcwctacttccaaagacagctgggtctggaggagggctgtgtgtgctggtggtgactgggagcagtgaaaagcctggagtatttccagaatcacctctatgctcccacgaggccagtttggtggagagatttcagcaaatgaagaataacacagtgtactgggcatgatgagggcattccttcgtgcccagttctgccagtgtaaactaccttctggacttctttgccttccaccatcaccttcagaggcagcccatgccctgtcttttatcagcctatgatcagtggctctcagtatttaaa

SEQ ID NO: 69016 - DNA, 600 bp, Chicken  19866894340790_1
gactcagctgacactacacagataatatataaaccagcacgagcctagaatggtctccagattctcatccactactttcttttcaagagcctgttcaggacaacttctgagttaaaaaaaattaaaatcagtaaaccttggacaacttccctccatagtaccctactatgatgtccagctatctatgagatgctgtttctgatggagttactgtaacatgatagcaatgtttctttggtattggaaatggtcatttttaaggaagttaagcaaaccagatcataggttttttgatataakagtgacatggtgctaaataatactatatgtctgttaaccctctttcaagagggagrgttgatcagcctatcaggaaaaaaaagcaaaaagtggtccagttgaagggagaacctggttcactatcagtcaactcactctcaccaggctgtggcagaagtagagacatttatcttttcgtattctcaaacagaaacaaagcatcagttacagagcaactaaagttggatataaaaaataagaaagcaaaacaaaactaaaaacaagaaaccagtgaggtcaccttttgaacacagaatgagc

SEQ ID NO: 69017 - DNA, 600 bp, Chicken  19866894340790_2
ccagattctcatccactactttcttttcaagagcctgttcaggacaacttctgagttaaaaaaaattaaaatcagtaaaccttggacaacttccctccatagtaccctactatgatgtccagctatctatgagatgctgtttctgatggagttactgtaacatgatagcaatgtttctttggtattggaaatggtcatttttaaggaagttaagcaaaccagatcataggttttttgatataakagtgacatggtgctaaataatactatatgtctgttaaccctctttcaagagggagrgttgatcagcctatcaggaaaaaaaagcaaaaagtggtccagttgaagggagaacctggttcactatcagtcaactcactctcaccaggctgtggcagaagtagagacatttatcttttcgtattctcaaacagaaacaaagcatcagttacagagcaactaaagttggatataaaaaataagaaagcaaaacaaaactaaaaacaagaaaccagtgaggtcaccttttgaacacagaatgagctttccatggtttgtacacaaaggcagaagcagaaccaagcagaaccagcagtggaa

SEQ ID NO: 69018 - DNA, 600 bp, Chicken  19866894340800_1
aagaacagttgttcacagctcaagtttgatttcctttttgccttatctgcactgtgacccaccttcccctgcacctcagagctccctggtagctctcattgccccacagagctgccgggcttgttttcctactgtgccttcattgtctcatcaactgctaaaggctcaatgaatgctgctgaaaacagccaacattcttggtcagctgcccaaagaaacatgttagatcaatagcagagcacagtttgcttttgctctagattattccaggctgaagctgtgaactacctgaaccctacrtgctgctttgggactgctctattaaagaaagagaaaaggtaaacttgaagagctctttcttccctttccccacagtgcatatcagaaatagcatttaagtgtgatagttcacatgcataacagagtagggaaaaagtaagcaactacaaagtctatacatggcccttmaataacagcccttaaatatttgttataccttaagaacacaggcaaatctacagtcactgtttgctcctgagcacgtggagctgtgtaaaggcaggycaaggtgagttttaccttgggtgttgcccagagtcc

SEQ ID NO: 69019 - DNA, 600 bp, Chicken  19866894340800_2
atgaatgctgctgaaaacagccaacattcttggtcagctgcccaaagaaacatgttagatcaatagcagagcacagtttgcttttgctctagattattccaggctgaagctgtgaactacctgaaccctacrtgctgctttgggactgctctattaaagaaagagaaaaggtaaacttgaagagctctttcttccctttccccacagtgcatatcagaaatagcatttaagtgtgatagttcacatgcataacagagtagggaaaaagtaagcaactacaaagtctatacatggcccttmaataacagcccttaaatatttgttataccttaagaacacaggcaaatctacagtcactgtttgctcctgagcacgtggagctgtgtaaaggcaggycaaggtgagttttaccttgggtgttgcccagagtcccacctaaaggcatcatcatcctgctacagcacacaaacctccaggagctgtcagctctggcatgcaagactatgctgggaaaactacagtgagatggagaaacaaggactattttgggatttttccattgagcacagagctctgggacacagcatgtgcactgtgact

SEQ ID NO: 69020 - DNA, 575 bp, Chicken  19866894340800_3
ttccaggctgaagctgtgaactacctgaaccctacrtgctgctttgggactgctctattaaagaaagagaaaaggtaaacttgaagagctctttcttccctttccccacagtgcatatcagaaatagcatttaagtgtgatagttcacatgcataacagagtagggaaaaagtaagcaactacaaagtctatacatggcccttmaataacagcccttaaatatttgttataccttaagaacacaggcaaatctacagtcactgtttgctcctgagcacgtggagctgtgtaaaggcaggycaaggtgagttttaccttgggtgttgcccagagtcccacctaaaggcatcatcatcctgctacagcacacaaacctccaggagctgtcagctctggcatgcaagactatgctgggaaaactacagtgagatggagaaacaaggactattttgggatttttccattgagcacagagctctgggacacagcatgtgcactgtgacttagcacatcatacacgatggccagcagcagcagaggaacaaagcagccgagaaagggatagaaattaacat

SEQ ID NO: 69021 - DNA, 600 bp, Chicken  19866894340802_1
tctttttttaaacatagtgttttgtctcctgccaagccctgcaggtcagtgtggctgcccagaggttcactgaaaaagttttatttcaaaattatacaacgtgtggtacaaggacaataaaagccataggacaactgcatccacatgatgcaagttacactatctgttgccttgccctccccttctcttccccctctccccccccaccccatcttccataacatggtacagcatgtgggtttcagtgcgctgattcatcaggttgtgtagcatacacgctgggtttgaggcttcctctgmatttgggtacagccttgtgggttccctcctctgcccaacattcaggaaagcacccgggaatacaaactaggaaggagctgagggyaagccctccctgtgtggctggcttggatggcagttagggcagacctgcttttctgcgactgcctaacttgcaaatctggagaagacacagtcaggttaaacctagagttggaagttgaatttttttgctgtatgagatgtctggtaagatgcaagaggtaacaacttagctgttaataaataagtggaaacagtcacatggatgttctgaaaaaa

SEQ ID NO: 69022 - DNA, 600 bp, Chicken  19866894340802_2
tcaaaattatacaacgtgtggtacaaggacaataaaagccataggacaactgcatccacatgatgcaagttacactatctgttgccttgccctccccttctcttccccctctccccccccaccccatcttccataacatggtacagcatgtgggtttcagtgcgctgattcatcaggttgtgtagcatacacgctgggtttgaggcttcctctgmatttgggtacagccttgtgggttccctcctctgcccaacattcaggaaagcacccgggaatacaaactaggaaggagctgagggyaagccctccctgtgtggctggcttggatggcagttagggcagacctgcttttctgcgactgcctaacttgcaaatctggagaagacacagtcaggttaaacctagagttggaagttgaatttttttgctgtatgagatgtctggtaagatgcaagaggtaacaacttagctgttaataaataagtggaaacagtcacatggatgttctgaaaaaaatgcagyatkgggcttgtatgacagcaaatgcattggcaggaaaatacaaagaaaagcaatgcagtcacactgtccctgctggtt

SEQ ID NO: 69023 - DNA, 600 bp, Chicken  19866894340802_3
tacagccttgtgggttccctcctctgcccaacattcaggaaagcacccgggaatacaaactaggaaggagctgagggyaagccctccctgtgtggctggcttggatggcagttagggcagacctgcttttctgcgactgcctaacttgcaaatctggagaagacacagtcaggttaaacctagagttggaagttgaatttttttgctgtatgagatgtctggtaagatgcaagaggtaacaacttagctgttaataaataagtggaaacagtcacatggatgttctgaaaaaaatgcagyatkgggcttgtatgacagcaaatgcattggcaggaaaatacaaagaaaagcaatgcagtcacactgtccctgctggttccaagtaactgctgctaacatgacacccagattccttatttcaatagtcttgtcatgtcttgctttgcagtacgtctcagtgcatagcaaggcttatctgacacatgcttcaatgctcttggggttgcatcagttcttttaagtaggattaacctgacaatgtcttttaatctgaggaagatgggaaaaacctccaagtttaggctatgaaacttggtaatt

SEQ ID NO: 69024 - DNA, 600 bp, Chicken  19866894340802_4
agccttgtgggttccctcctctgcccaacattcaggaaagcacccgggaatacaaactaggaaggagctgagggyaagccctccctgtgtggctggcttggatggcagttagggcagacctgcttttctgcgactgcctaacttgcaaatctggagaagacacagtcaggttaaacctagagttggaagttgaatttttttgctgtatgagatgtctggtaagatgcaagaggtaacaacttagctgttaataaataagtggaaacagtcacatggatgttctgaaaaaaatgcagyatkgggcttgtatgacagcaaatgcattggcaggaaaatacaaagaaaagcaatgcagtcacactgtccctgctggttccaagtaactgctgctaacatgacacccagattccttatttcaatagtcttgtcatgtcttgctttgcagtacgtctcagtgcatagcaaggcttatctgacacatgcttcaatgctcttggggttgcatcagttcttttaagtaggattaacctgacaatgtcttttaatctgaggaagatgggaaaaacctccaagtttaggctatgaaacttggtaattatc

SEQ ID NO: 69025 - DNA, 600 bp, Chicken  19866894340810_1
acacactcatgttgacaaattcacattttactaccaagtctatgaccaggatgccacgtgttcccagtactctggtgtcgcagcttccaataagtgctcaaaatacttgagattcatttcttagtcataatattaaaaaatacattgaaatctcattttatttgtctcagtttctgggtcattgtgatgaagtaggatcatatttccaagtttttcactttgattttaaataatacaatctttttcatttttctttccatgaaagttgaagttcattcctatttctgtgattcttgaaaytctagaaaaaaactacccaacacattcaaacagcaaggactggcaatcctattttctagcttaattcccaactatttaagtcctgtaagtaagagagatacaaatgttcactcttctttcacacacttttaagcattagattaccataaagaatcttttttaagtaagaaccagatccattttttcctttcatcatcattacaaattattatacaaattcatgttttttcaacagtttcccacctggcaagaaaaacataaactgagtgtattgctttttttgctatagtattataggaa

SEQ ID NO: 69026 - DNA, 600 bp, Chicken  19866894340810_2
tccttaacagtgaccttgtacactaatcctgggtccctctactaatgcagatctgattacaaaaaaaaggacatattttcctttaaaaataaatatccctctttggaaacccatgtaaccataaacctagcttttattcttattaaacactattaaacagtcttaaaagttttgtgggtattttcttaacgagggtttaagtttagttatagaatgtgctttcctgaatgtctgtgtgtacatcatacacaaatattttaaattatattactattatcaattatgtttcattggaaataygtccatccaaaattctatgcagccttgatggttggactagatatcttagtggtcttttccaaccttaaaggttctatggttcagggacagtacagtacaagcagtgaaatctatggagctttccaacattaactgatttctagaacaagctccagacttcatttctctataaaatatagactccaaaaaccccattatccttactgtcttcctgaaatgtcagcaaggaagggaatacgaggagaaaggttttctttgtcataggctgttaagagcacattgttgtcttctcccatattg

SEQ ID NO: 69027 - DNA, 599 bp, Chicken  19866894340812_1
  misc_feature (1)..(182): n is any nucleotide
nnnnnnnnnnnnnnnnnnnnnnnnnnnnnnnnnnnnnnnnnnnnnnnnnnnnnnnnnnnnnnnnnnnnnnnnnnnnnnnnnnnnnnnnnnnnnnnnnnnnnnnnnnnnnnnnnnnnnnnnnnnnnnnnnnnnnnnnnnnnnnnnnnnnnnnnnnnnnnnnnnnnnnnnnnnnnnnnnnnnnntactgattagagagagaaagggagctcatcctctgaggatggatgaaccttcaaagactctcagacgatggtaatgctcctctctgttggtaaatttttggggacaaactggtgaagrgcatggcctttgtaaacctatttctgagacaggaaatgcactgaaattggaccaattaattctttttacttagctatcactgaggaacttctgatctgcatgcaaaatgcacatacatgttctttcactcttgcagaaagtcctgatgattttagctcgttttctgtccaacagtctattactgccataatccatgtcacagagtaagttataggtggtgctgaatcttactgctgctcagtacccagcaggctcttcatctcctttttggaagctgccaagttattcaggatattcat

SEQ ID NO: 69028 - DNA, 600 bp, Chicken  19866894340830_1
tgaaagttttttttttattttgcatttatagtcatttaaaccagaatttctgttttgtttcttctaattgtttgctgcttcatttcatgcttgtatctcacattgtaaggtcttaatttacgtgaactactctaacacatttttctttaaaggttctcccaaagatcttgacgaagcactcttccagtctctcttagtaatttttttcattgcagtttctcatttgtctaaaaataataaggaaaaaatgacaaagcactttcaccttaactgtatctttcttgctaacttggaaatctraaggagtttgtttagttatgcatctttaccgtccttttatttttattttgatggctgtgaaagctggtatgaaatgtgggaagtttgtttcagtctagctgttccatttttaactggcctctgtcactataaatcattaagcttattttatcatccggtactattttgtyatctacagtcttgcatgctaaaatgttttaggtcagagtgccattttgaaagactttttgcctgcatttcataaccagccatgcttacgcagttgaagtttaaatttcaaaatttctattgcatgctttt

SEQ ID NO: 69029 - DNA, 600 bp, Chicken  19866894340830_2
acgaagcactcttccagtctctcttagtaatttttttcattgcagtttctcatttgtctaaaaataataaggaaaaaatgacaaagcactttcaccttaactgtatctttcttgctaacttggaaatctraaggagtttgtttagttatgcatctttaccgtccttttatttttattttgatggctgtgaaagctggtatgaaatgtgggaagtttgtttcagtctagctgttccatttttaactggcctctgtcactataaatcattaagcttattttatcatccggtactattttgtyatctacagtcttgcatgctaaaatgttttaggtcagagtgccattttgaaagactttttgcctgcatttcataaccagccatgcttacgcagttgaagtttaaatttcaaaatttctattgcatgcttttttttatttattttcgtgttgggatgaaatgctgtagtttactcttgatatgagtgtactttacccatatttgtcttgggtgactacattttactcagtttttcttgtacagtacataaaccaaccattttctgaccaaattcctgcatttcctatgtactgacctatatt

SEQ ID NO: 69030 - DNA, 600 bp, Chicken  19866894340834_1
tctggcaggagactacttacctccaagataacatctcccagtgtcattctcacattcatgaccttaaacagtcaaggcttgaaaagaacaacagtgaagctgatttctaaattgtgagagcatttgaggaggatgaatctgaagtctgtcatatgtaggaaagtcttttccccatgttattgcttggaagtcaagcatctaccaacatctatggcctgtagctagtgattatacacaactacgttggttgattttacagaaatcttgaggaatccccaatacatttatgagtctgaagakctatacaaccagagcatatgagcatctcccactactgagatggaggacaagaaggcatgtcatggtcaagaactgaagaaaacaagagtgtgaaatcctggccacatccagattcagtgccaagacccttctgggcaccattccaaagaggctcycacctgatgtttgtacagttgtcatttccctgcactttgtaagattattctattatttcatgtactgtacttctcatttccttgaactttatatatcacagtatgcatacagaagcatatatatatatctacacacacagacata

SEQ ID NO: 69031 - DNA, 600 bp, Chicken  19866894340834_2
taggaaagtcttttccccatgttattgcttggaagtcaagcatctaccaacatctatggcctgtagctagtgattatacacaactacgttggttgattttacagaaatcttgaggaatccccaatacatttatgagtctgaagakctatacaaccagagcatatgagcatctcccactactgagatggaggacaagaaggcatgtcatggtcaagaactgaagaaaacaagagtgtgaaatcctggccacatccagattcagtgccaagacccttctgggcaccattccaaagaggctcycacctgatgtttgtacagttgtcatttccctgcactttgtaagattattctattatttcatgtactgtacttctcatttccttgaactttatatatcacagtatgcatacagaagcatatatatatatctacacacacagacataattcatgtatatattacatatattgaaatgtgctacatataatatggaagtatattataaaccaatttcattcttctttacacctatataagtccaaagtaaccatgtccgtgtcagctattttgttgctcctgtttgaagtccccttgttgatc

SEQ ID NO: 69032 - DNA, 549 bp, Chicken  19866894340834_3
tattctattatttcatgtactgtacttctcatttccttgaactttatatatcacagtatgcatacagaagcatatatatatatctacacacacagacataattcatgtatatattacatatattgaaatgtgctacatataatatggaagtatattataaaccaatttcattcttctttacacctatataagtccaaagtaaccatgtccgtgtcagctattttgttgctcctgtttgaagtccccttgttgatcagtgtgatatagaggaatgtccaaaataaaaccatgtgcctgcarcatgtgcttacaacattccctgcttatcccataaggtctcactgccaaggctcagcctggcaaagcatgtagcatctgagagctttaagtatacgattagggcctatgacatcagagagtcactggccagagtcatgcattgaattgcattagtctgtgttagttacctacctagttgaaatcaaggcttgttttcattctctgacacctcgtgcctcttttggcattaattttctccagggtactctg

SEQ ID NO: 69033 - DNA, 599 bp, Chicken  19866894340837_1
  misc_feature (1)..(196): n is any nucleotide
nnnnnnnnnnnnnnnnnnnnnnnnnnnnnnnnnnnnnnnnnnnnnnnnnnnnnnnnnnnnnnnnnnnnnnnnnnnnnnnnnnnnnnnnnnnnnnnnnnnnnnnnnnnnnnnnnnnnnnnnnnnnnnnnnnnnnnnnnnnnnnnnnnnnnnnnnnnnnnnnnnnnnnnnnnnnnnnnnnnnnnnnnnnnnnnnnnnnatcagacccacgtggatgacctacagatgggcatcctgtcgctgaagccagtctaattgttagattggctcattaatgagcatggcagaaatagtgctgcaggyctgagcaagcaggttctgaatgacattggttttgactctgttgtaaacagaagtgacagaaagctggcaatcaaactggctagagggaggagggtactagacagaaaaccacaatatttctatgatgctttctggttttaatagttaagggttagctatcattagtctgstaaggttgtttgcaatgccaagctgatggggggtgggtctgaaggaggtggcaggcagcagtcctgtgttggcattatgaacttagcccctgatttggctcctttgccgtgtaattaagggaatattta

SEQ ID NO: 69034 - DNA, 599 bp, Chicken  19866894340837_2
  misc_feature (1)..(26): n is any nucleotide
nnnnnnnnnnnnnnnnnnnnnnnnnnatcagacccacgtggatgacctacagatgggcatcctgtcgctgaagccagtctaattgttagattggctcattaatgagcatggcagaaatagtgctgcaggyctgagcaagcaggttctgaatgacattggttttgactctgttgtaaacagaagtgacagaaagctggcaatcaaactggctagagggaggagggtactagacagaaaaccacaatatttctatgatgctttctggttttaatagttaagggttagctatcattagtctgstaaggttgtttgcaatgccaagctgatggggggtgggtctgaaggaggtggcaggcagcagtcctgtgttggcattatgaacttagcccctgatttggctcctttgccgtgtaattaagggaatatttaatgtccayacagaaaggagggtgcttcagaattgtgcaacaggagctgaatcacagctrttactgaataatatataatggggttctattatttacttgatgaggctgcaaaatagggcccaatttgcctttttttgtgcccctgagctgtgtgtgtgctcacagtagccg

SEQ ID NO: 69035 - DNA, 600 bp, Chicken  19866894340837_3
agcaggttctgaatgacattggttttgactctgttgtaaacagaagtgacagaaagctggcaatcaaactggctagagggaggagggtactagacagaaaaccacaatatttctatgatgctttctggttttaatagttaagggttagctatcattagtctgstaaggttgtttgcaatgccaagctgatggggggtgggtctgaaggaggtggcaggcagcagtcctgtgttggcattatgaacttagcccctgatttggctcctttgccgtgtaattaagggaatatttaatgtccayacagaaaggagggtgcttcagaattgtgcaacaggagctgaatcacagctrttactgaataatatataatggggttctattatttacttgatgaggctgcaaaatagggcccaatttgcctttttttgtgcccctgagctgtgtgtgtgctcacagtagccgttccagctgtgattttggcaaagtgcttggctgcacactgggatgaccrtgctggattgactggaaaatggcacgtaggctgggagggagatggaaccctgcagctaccaaaagcctccttcaaccccacctgaacgg

SEQ ID NO: 69036 - DNA, 600 bp, Chicken  19866894340837_4
gaaagctggcaatcaaactggctagagggaggagggtactagacagaaaaccacaatatttctatgatgctttctggttttaatagttaagggttagctatcattagtctgstaaggttgtttgcaatgccaagctgatggggggtgggtctgaaggaggtggcaggcagcagtcctgtgttggcattatgaacttagcccctgatttggctcctttgccgtgtaattaagggaatatttaatgtccayacagaaaggagggtgcttcagaattgtgcaacaggagctgaatcacagctrttactgaataatatataatggggttctattatttacttgatgaggctgcaaaatagggcccaatttgcctttttttgtgcccctgagctgtgtgtgtgctcacagtagccgttccagctgtgattttggcaaagtgcttggctgcacactgggatgaccrtgctggattgactggaaaatggcacgtaggctgggagggagatggaaccctgcagctaccaaaagcctccttcaaccccacctgaacggagagaacgtctgcttctctgttgaaggcctaaccctgcaattctgtctgtc

SEQ ID NO: 69037 - DNA, 600 bp, Chicken  19866894340837_5
tggcaggcagcagtcctgtgttggcattatgaacttagcccctgatttggctcctttgccgtgtaattaagggaatatttaatgtccayacagaaaggagggtgcttcagaattgtgcaacaggagctgaatcacagctrttactgaataatatataatggggttctattatttacttgatgaggctgcaaaatagggcccaatttgcctttttttgtgcccctgagctgtgtgtgtgctcacagtagccgttccagctgtgattttggcaaagtgcttggctgcacactgggatgaccrtgctggattgactggaaaatggcacgtaggctgggagggagatggaaccctgcagctaccaaaagcctccttcaaccccacctgaacggagagaacgtctgcttctctgttgaaggcctaaccctgcaattctgtctgtcttaagaaccgggtcctagcacgggctgtgccttccccagggtgctcacagcaggatgaactggagcagctgatggcccaggagcagcagctgctgcggcaggagaaggagcggctgcagagggaggcccgcagctctgccacggagttggtgcatgccag

SEQ ID NO: 69038 - DNA, 600 bp, Chicken  19866894340837_6
aaccgggtcctagcacgggctgtgccttccccagggtgctcacagcaggatgaactggagcagctgatggcccaggagcagcagctgctgcggcaggagaaggagcggctgcagagggaggcccgcagctctgccacggagttggtgcatgccagggaaaaggtaggggatggttcagactgcctctagtctaggattctggtctgccccctctgctctgccctgacgaggccacatctggagcactggatccccttctgggttcctcagttccaagcagacgtgcagctgctggagagmagacagtggagggctgtagaggtggtggggctcatcatctgtgacagagccctggcatgggctgcccagagaggtggtggggtctccttttctggagatatgcaaaacccacctggatacctccctgtgcaacctactggagggaacctgctttagcaggggattcatagcatcctagaatggcctgggttgcaaaggcccacartgctcatccagttccaaccccctgctatgtgcagggtcgccaaccagcagcccaggctgcccagagccacatccagcctggccttgaatgcctgc

SEQ ID NO: 69039 - DNA, 600 bp, Chicken  19866894340837_7
gccccctctgctctgccctgacgaggccacatctggagcactggatccccttctgggttcctcagttccaagcagacgtgcagctgctggagagmagacagtggagggctgtagaggtggtggggctcatcatctgtgacagagccctggcatgggctgcccagagaggtggtggggtctccttttctggagatatgcaaaacccacctggatacctccctgtgcaacctactggagggaacctgctttagcaggggattcatagcatcctagaatggcctgggttgcaaaggcccacartgctcatccagttccaaccccctgctatgtgcagggtcgccaaccagcagcccaggctgcccagagccacatccagcctggccttgaatgcctgcagggatggggcatccacagcctccttgggcaacctgttcagtgcgtcaccaccctctgggggaaaaacttcctcctcatmtccaacctaaacctcccctgtctcagtttaaaaccattcccccttgtyctatcaccatcgaccctgggttgaatggagaagctatagagggcccttccaaaacctacaactctgggatttattta

SEQ ID NO: 69040 - DNA, 600 bp, Chicken  19866894340837_8
ggtctccttttctggagatatgcaaaacccacctggatacctccctgtgcaacctactggagggaacctgctttagcaggggattcatagcatcctagaatggcctgggttgcaaaggcccacartgctcatccagttccaaccccctgctatgtgcagggtcgccaaccagcagcccaggctgcccagagccacatccagcctggccttgaatgcctgcagggatggggcatccacagcctccttgggcaacctgttcagtgcgtcaccaccctctgggggaaaaacttcctcctcatmtccaacctaaacctcccctgtctcagtttaaaaccattcccccttgtyctatcaccatcgaccctgggttgaatggagaagctatagagggcccttccaaaacctacaactctgggatttatttattaaaccttctagcattctttgtgcttaatttcccagctcacaacattaggcagattatggggaggaagaagagatgcttgaagctaaagtgttgaaagtaccagagtctgttatgagtccgaaatcagctggtactagatattgcaaatgcaattgattttgcagtgggcttgt

SEQ ID NO: 69041 - DNA, 562 bp, Chicken  19866894340837_9
gcaacctactggagggaacctgctttagcaggggattcatagcatcctagaatggcctgggttgcaaaggcccacartgctcatccagttccaaccccctgctatgtgcagggtcgccaaccagcagcccaggctgcccagagccacatccagcctggccttgaatgcctgcagggatggggcatccacagcctccttgggcaacctgttcagtgcgtcaccaccctctgggggaaaaacttcctcctcatmtccaacctaaacctcccctgtctcagtttaaaaccattcccccttgtyctatcaccatcgaccctgggttgaatggagaagctatagagggcccttccaaaacctacaactctgggatttatttattaaaccttctagcattctttgtgcttaatttcccagctcacaacattaggcagattatggggaggaagaagagatgcttgaagctaaagtgttgaaagtaccagagtctgttatgagtccgaaatcagctggtactagatattgcaaatgcaattgattttgcagtgggcttgtcagttttgac

SEQ ID NO: 69042 - DNA, 600 bp, Chicken  19866894340841_1
aaagaggaacaaatgcaacagatcctcctcatttttatatctaacttttgttatgaaatcgattagtttgtggtacctattaaacttggcctgtgtcgaggaagcttataggcctgttccaaaactgctggaaggagtaggccgggtgctggcactgctgttgtcggttgtgcatgcagtactacatcagattgctgcaagtgctcacactctgtgttgctgcgttggtggcaggagggctgtcagcagcgaaactgaaaacgtgcttagaaacagggaaactgggaaggcagcaagcaragagatacaaacaacgagatgtgggggttggaagtagaggctgaaagcagttgtatgtctctgaacttaatttatcttctcatagaagggtgaccaatataggattagtctacacaaagaaatattgtattttttttaaacacagcttcagtggagaggttgtgtgtctgagactttcacaaagttcagtgctagaaggaactattaaataatgccctatcgtttattgcattgcagctgaattattctcctgctgtctatgcactgaccctgaaaccttatgtttgattttaagagcat

SEQ ID NO: 69043 - DNA, 600 bp, Chicken  19866894340857_1
ccttgcatcacatctcccactctgccccacgcctccaggggtaccagggcccccagcaggaagtgagaaccagcttctctgtgctcctggctgacgccacggaccacagcagagtgtcctgggtgggaggccacttccttcccctgcaccacgtgccttcgtggggaaggcatccaccaccctgtttgtaacccagacagtgccacatcctgcccccaggcccagccctgctgtgtgaggaaggggctgtgcccttgctggggacagcaaggcttggtggcagatcccaagtgtggccayctctgtagggacatctctgccatcccactcttcctgcattgctggggcagaaagcccatgcaaggycctgtcccaccagtgaggcttgttcctggcttttcagagctccacagctggtacaatcaggccatgctggtttaatttttagattgtcttgcaagaagccaggatttgcacttggtgatctgtgtgggtcccttccaactcargacattctatgttcagactttggaacagcccagtgcagagtgcaaagcttatagatgtgctgtgggcttgggtctgcagggtcccatctgt

SEQ ID NO: 69044 - DNA, 600 bp, Chicken  19866894340857_2
gaaccagcttctctgtgctcctggctgacgccacggaccacagcagagtgtcctgggtgggaggccacttccttcccctgcaccacgtgccttcgtggggaaggcatccaccaccctgtttgtaacccagacagtgccacatcctgcccccaggcccagccctgctgtgtgaggaaggggctgtgcccttgctggggacagcaaggcttggtggcagatcccaagtgtggccayctctgtagggacatctctgccatcccactcttcctgcattgctggggcagaaagcccatgcaaggycctgtcccaccagtgaggcttgttcctggcttttcagagctccacagctggtacaatcaggccatgctggtttaatttttagattgtcttgcaagaagccaggatttgcacttggtgatctgtgtgggtcccttccaactcargacattctatgttcagactttggaacagcccagtgcagagtgcaaagcttatagatgtgctgtgggcttgggtctgcagggtcccatctgttcacacaggcagggccatgtgagaataggrctcctcagcagaaggggccctgggggtgtcactcac

SEQ ID NO: 69045 - DNA, 600 bp, Chicken  19866894340857_3
ctgcccccaggcccagccctgctgtgtgaggaaggggctgtgcccttgctggggacagcaaggcttggtggcagatcccaagtgtggccayctctgtagggacatctctgccatcccactcttcctgcattgctggggcagaaagcccatgcaaggycctgtcccaccagtgaggcttgttcctggcttttcagagctccacagctggtacaatcaggccatgctggtttaatttttagattgtcttgcaagaagccaggatttgcacttggtgatctgtgtgggtcccttccaactcargacattctatgttcagactttggaacagcccagtgcagagtgcaaagcttatagatgtgctgtgggcttgggtctgcagggtcccatctgttcacacaggcagggccatgtgagaataggrctcctcagcagaaggggccctgggggtgtcactcacccatggcgggtcctgtgcagcaacctgggatgtrtcactgccttgcctgtcccagggcccatccggccactccaatgcagcccagcaggctctcagtgaggctgttcgtggccttgcagcataattttggtgttagtgctgag

SEQ ID NO: 69046 - DNA, 600 bp, Chicken  19866894340857_4
ttcctgcattgctggggcagaaagcccatgcaaggycctgtcccaccagtgaggcttgttcctggcttttcagagctccacagctggtacaatcaggccatgctggtttaatttttagattgtcttgcaagaagccaggatttgcacttggtgatctgtgtgggtcccttccaactcargacattctatgttcagactttggaacagcccagtgcagagtgcaaagcttatagatgtgctgtgggcttgggtctgcagggtcccatctgttcacacaggcagggccatgtgagaataggrctcctcagcagaaggggccctgggggtgtcactcacccatggcgggtcctgtgcagcaacctgggatgtrtcactgccttgcctgtcccagggcccatccggccactccaatgcagcccagcaggctctcagtgaggctgttcgtggccttgcagcataattttggtgttagtgctgagctcacccgctgtggacaggtaggagggagcagccggctccaggcagcccggccaaatccagccaaacaccggctcaacgtggtggcctggggctccaggcatctcggtgaccgtggcttcg

SEQ ID NO: 69047 - DNA, 600 bp, Chicken  19866894340857_5
cagagctccacagctggtacaatcaggccatgctggtttaatttttagattgtcttgcaagaagccaggatttgcacttggtgatctgtgtgggtcccttccaactcargacattctatgttcagactttggaacagcccagtgcagagtgcaaagcttatagatgtgctgtgggcttgggtctgcagggtcccatctgttcacacaggcagggccatgtgagaataggrctcctcagcagaaggggccctgggggtgtcactcacccatggcgggtcctgtgcagcaacctgggatgtrtcactgccttgcctgtcccagggcccatccggccactccaatgcagcccagcaggctctcagtgaggctgttcgtggccttgcagcataattttggtgttagtgctgagctcacccgctgtggacaggtaggagggagcagccggctccaggcagcccggccaaatccagccaaacaccggctcaacgtggtggcctggggctccaggcatctcggtgaccgtggcttcggcctctgtgcaggctccttcctgcccccattgccctggtttggtttgttgcaaaagcagcccaacaggtc

SEQ ID NO: 69048 - DNA, 584 bp, Chicken  19866894340860_1
ggaagagtggagaaagacatggaccaagtctaagcatcattgtgctagctctgtgagatacatcgcttctgaaaattgtctttcaactactgtgtcacttagacaattctgaattgtgaagagcagctagtagatgatcaaattttcaccttggcttatacaccaggacattgacagtgacaaatactttcacgttatcagaggatttggtttgcagatgaaacatttatacatatgcacacatctacatgtttaaaaatgtgaagagagctaaagatttgagcttttcagcccaatcayaaaagatagcagcgttgacatttgttctaagcttctgctttactgggctaaagaaaacatctagtactaagaatgaacaatggaaccaccgtatctccagtctgcacaaaaccttctgactgaaaggagtacaacttctttcttgttctcatttgacttctacatacyattaacaaggaaagggwaattctacatctctgttgcaggttggtacaggtatcctgaatcttcattgcttcatgtgcaaattgaaccaagatgcatcagattaaagaactaaataa

SEQ ID NO: 69049 - DNA, 416 bp, Chicken  19866894340860_2
cattgacagtgacaaatactttcacgttatcagaggatttggtttgcagatgaaacatttatacatatgcacacatctacatgtttaaaaatgtgaagagagctaaagatttgagcttttcagcccaatcayaaaagatagcagcgttgacatttgttctaagcttctgctttactgggctaaagaaaacatctagtactaagaatgaacaatggaaccaccgtatctccagtctgcacaaaaccttctgactgaaaggagtacaacttctttcttgttctcatttgacttctacatacyattaacaaggaaagggwaattctacatctctgttgcaggttggtacaggtatcctgaatcttcattgcttcatgtgcaaattgaaccaagatgcatcagattaaagaactaaataa

SEQ ID NO: 69050 - DNA, 399 bp, Chicken  19866894340860_3
actttcacgttatcagaggatttggtttgcagatgaaacatttatacatatgcacacatctacatgtttaaaaatgtgaagagagctaaagatttgagcttttcagcccaatcayaaaagatagcagcgttgacatttgttctaagcttctgctttactgggctaaagaaaacatctagtactaagaatgaacaatggaaccaccgtatctccagtctgcacaaaaccttctgactgaaaggagtacaacttctttcttgttctcatttgacttctacatacyattaacaaggaaagggwaattctacatctctgttgcaggttggtacaggtatcctgaatcttcattgcttcatgtgcaaattgaaccaagatgcatcagattaaagaactaaataa

SEQ ID NO: 69051 - DNA, 600 bp, Chicken  19866894340861_1
ccttgggacctcccacaccctgctcaattcagtcagcccttatctctagtagtcacgggtctgggaatgccccagctgctctgttcctggctgaggcactgggacgtgctctggcctgaggtttagcctcaccagctgcgtggcccacatcccacacagcactctgacgtgtagggaggcctgaattctttaatgatctacagtgagtcctccaagtcccctctgagcgatctgccctagagggttcagccaagagctactttggaaatattaataagtagtaaatattcataatttggwaaaaaaaaattgagtatgagttttgcatctcgttttaaaattccttaaatgtgagacagtgaaattaattccctcaaatttgtgatttgctttccaagttgaaatatggaaycatcactgtcaatacttcttagacctttgagacatcctgcagagacattgggtgggatggagatagtgcttttagagcaaagggttacaataatacatgatcttttgattgcttatttggaaaacaaacaagcaatctttgcctattatgtgctaaaaacaataggttctaaaaacattatgttctaa

SEQ ID NO: 69052 - DNA, 600 bp, Chicken  19866894340861_2
ggcctgaggtttagcctcaccagctgcgtggcccacatcccacacagcactctgacgtgtagggaggcctgaattctttaatgatctacagtgagtcctccaagtcccctctgagcgatctgccctagagggttcagccaagagctactttggaaatattaataagtagtaaatattcataatttggaaaaaaaaaattgagtatgagttttgcatctcgttttaaaattccttaaatgtgagacagtgaaattaattccctcaaatttgtgatttgctttccaagttgaaatatggaaycatcactgtcaatacttcttagacctttgagacatcctgcagagacattgggtgggatggagatagtgcttttagagcaaagggttacaataatacatgatcttttgattgcttatttggaaaacaaacaagcaatctttgcctattatgtgctaaaaacaataggttctaaaaacattatgttctaaaaatcaataaggattttattaagagaactttgtctctgaagtactggcttgcagtctggcttaagctacttcagggcgttgtgggcaaaacagatattctaagctctgttct

SEQ ID NO: 69053 - DNA, 600 bp, Chicken  19866894340861_3
cactgtcaatacttcttagacctttgagacatcctgcagagacattgggtgggatggagatagtgcttttagagcaaagggttacaataatacatgatcttttgattgcttatttggaaaacaaacaagcaatctttgcctattatgtgctaaaaacaataggttctaaaaacattatgttctaaaaatcaataaggattttattaagagaactttgtctctgaagtactggcttgcagtctggcttaagctacttcagggcgttgtgggcaaaacagatattctaagctctgttctaarctgtgtttgaggtgttaattccttcaagctgatatggagtgactatttcagtttcatgtgattaaaagaggttctcagaaaaatatatatatacggtggcttaatttatcctgaaaactgctgttatggtattctaactgtaagaggtcgatggtttatgttgcatactttgttggtttaacagctctgcagacttcactgaaactgaataatctacttcaggtagatgtgttattcagttgttactctaataacttaataacctgcagtggacagacagtgtatctacaaagcaatggg

SEQ ID NO: 69054 - DNA, 600 bp, Chicken  19866894340863_1
agaaaaaggaaggcttctgcaggtagctcaaccagaagagaaaagtcaccctcactagtgagtggcacaggcaggctggtaccaacagagaaagagaaggctgaagtacttaacaactttttgacctgtctgctctgataactgcttatcacacaactcacaaatatttgctttgataggaagggattgaagaaaccatgtccctcccactgtaagcaaaggtcaggttcttgaccacctgaggaatctgaacgtccacagatctacatatcctgatgaagtacatcccagagtcctaarggattagcctggtgttgtcaccagccactctgagtgatacttgaaaagtgatggcaatcaggtgatgcccctggtgactggaaaatggcaacatcacatccatttctaagaagggtaaaaaggatgaccctgagaacctgtcagtctcacctcggtgccaggaaagatcatggatcagatcctcctagaagctatgctaagggccatggaaggcagagaagtgatataggaaaaccagcatggctttgttaagggcaaatcctgcttgaccaacctagtggccttttacgatgctgtcac

SEQ ID NO: 69055 - DNA, 600 bp, Chicken  19866894340864_1
aacacacaacacaaaacaaaacaatgcacacacacactctcactacctgatcaatgaacttgagagcagggcactgtcacctagttcttatgacctaattacccttttctgatcttcacatctgggccctatctaaccgaccccaaccctgggactgctgaaatgttctgctgccctgtggaggaacacacctgagtattcagtgaatatcagtccaggctttccctcatcactgaaagtttgcttttgatgaaggatcttgttgtgattctttagggaatgatttttccatgattcttyaaaaggcattggccaactctctccaagatgatggagggaatggagaagagaggcttggtggtacaasgagatgatagttgtctgctgatgagagtgactgttattgaaaaagaatgttagaacagataagaatatgtaggaggcaacaccagataggtcaacagttttgtttagggaaattcaggttctgtatcaaagtagtcacagttcaaacagttttctgttaaaattaactaattttaggtacttttatagtgcataattctgtggaacattggcttttcaggtattcaggtagtg

SEQ ID NO: 69056 - DNA, 600 bp, Chicken  19866894340864_2
agggcactgtcacctagttcttatgacctaattacccttttctgatcttcacatctgggccctatctaaccgaccccaaccctgggactgctgaaatgttctgctgccctgtggaggaacacacctgagtattcagtgaatatcagtccaggctttccctcatcactgaaagtttgcttttgatgaaggatcttgttgtgattctttagggaatgatttttccatgattcttyaaaaggcattggccaactctctccaagatgatggagggaatggagaagagaggcttggtggtacaasgagatgatagttgtctgctgatgagagtgactgttattgaaaaagaatgttagaacagataagaatatgtaggaggcaacaccagataggtcaacagttttgtttagggaaattcaggttctgtatcaaagtagtcacagttcaaacagttttctgttaaaattaactaattttaggtacttttatagtgcataattctgtggaacattggcttttcaggtattcaggtagtgttttataagtcacatgatgttggcctaaatattcttcctacatatttagaagttgaagtcagaagaa

SEQ ID NO: 69057 - DNA, 600 bp, Chicken  19866894340868_1
aaaggaaataccttttgcccactgcagtgttttgaaaatcagacttgcagaagacaacaaatcttactaaatgtaacaaggaaataatgcctttttattttcccatagtagtttatgaattaattgtgcacagaaactgcattttttctccattgcaatttcacattcctacatcccactttgtgaaaaattgcagactttactctatttacttttgataaaacacgtcttgaaataagagacatgcaagaccacaaatcactgagaaggtacatttccagtttactgtgggcacaggartttgagaataagaaatgttgcctaatattttaagaccctttctgaagacattaaatcactggattttcttcagtgcctacatacttctccccttttcttcagcttccacttaatgaacaatgcagtgctgctacatatattaggagaaaatacacacctcagcaaaatacaattagtgcaagttgtcttgccagcttatgtttctcatatcctcagaagaaataagcctttatatttacatggcaaagcaagtaaataccagctcaggcatagttttttttatagcaatccgtcaaaata

SEQ ID NO: 69058 - DNA, 599 bp, Chicken  19866894340870_1
  misc_feature (1)..(113): n is any nucleotide
nnnnnnnnnnnnnnnnnnnnnnnnnnnnnnnnnnnnnnnnnnnnnnnnnnnnnnnnnnnnnnnnnnnnnnnnnnnnnnnnnnnnnnnnnnnnnnnnnnnnnnnnnnnnnnnnntgctgatgaaatttttacatttactgttttatctgcatgcagtaactttaccttaaccggtaaggtttagaagagttttagaaagttaaacgtaactacccaaatgataaaggtctgatttctgagtttgcctttctaagatgtaatctgagttacacggatcctatgacaaaaacactcagtagtratctgaaataattgttgtataggctctaatatcatgatttgaaaaaaaaaaaagctatttctcaagacaaatcagagctgcacccacctgaggaagatctctttctttcaaagacataaaacatccagagtatgaggagtacaagagatctgtgtttaaacctatagcagagtatctggttcacgctgaacccctgacaagtgccagtttggaatgtcacaaagagaccatttgacggcctgaaaaatgccatgagtgcatttttgtgtatggtgttaaccctcattstgaaaggcaaa

SEQ ID NO: 69059 - DNA, 600 bp, Chicken  19866894340870_2
cactcagtagtratctgaaataattgttgtataggctctaatatcatgatttgaaaaaaaaaaaagctatttctcaagacaaatcagagctgcacccacctgaggaagatctctttctttcaaagacataaaacatccagagtatgaggagtacaagagatctgtgtttaaacctatagcagagtatctggttcacgctgaacccctgacaagtgccagtttggaatgtcacaaagagaccatttgacggcctgaaaaatgccatgagtgcatttttgtgtatggtgttaaccctcattstgaaaggcaaaggctccttgatcacaggcgtcattttaaaaaaagtttcagattaaggcataatattttcaaaaccagtttttgcacaatttgtatttccaacactcaatttcactgttggattctgcctctaaatataaatctcttcctcctcccttgtcctgttctatatatatatcacacccacttgtgataaagccttctgccataacagtaaggcagtggggcggggggaacagctaacctgtcggagcactgaatgcacttggctgttgctcataatgctccaaagatgtaatt

SEQ ID NO: 69060 - DNA, 599 bp, Chicken  19866894340881_1
  misc_feature (1)..(16): n is any nucleotide
nnnnnnnnnnnnnnnnaaaagaaaagacttcttgcttgccaatactaaatgtccataacccatcaattttgatctgtataatttatgtatgacaagaaaacatacttaacgtattttctatagtaaacattacaataacttaactgaaaaaaaagtcaacgtacttcaaaaaaagtgaaataaaggaaaaagttgtactgcaagtagtaagaatgaaatgaaaatgattaaagaggtaaaatgggagaactgattgctgttatggcttcccagaagcaggaaggcatctgcttctctgcwtccccaacgtttaggttgggtgtcccttctttagctttcctttggaaggtaaaatgcagacttagacaacacactgtagagccaaaaggagtacatccaacatcaaaaatcccaggatgagtagtctatttgttatgcawtaatcatcactwttttatttaaccattgtgcttatatttagcaaaaagattaaatatgtgcaacaccagggatcgctaagttttgcttacaaatctactgtatttctctaattatgtccccataaaagcaggaaataagtcctacacttttctgtttaa

SEQ ID NO: 69061 - DNA, 600 bp, Chicken  19866894340881_2
taactgaaaaaaaagtcaacgtacttcaaaaaaagtgaaataaaggaaaaagttgtactgcaagtagtaagaatgaaatgaaaatgattaaagaggtaaaatgggagaactgattgctgttatggcttcccagaagcaggaaggcatctgcttctctgcwtccccaacgtttaggttgggtgtcccttctttagctttcctttggaaggtaaaatgcagacttagacaacacactgtagagccaaaaggagtacatccaacatcaaaaatcccaggatgagtagtctatttgttatgcawtaatcatcactwttttatttaaccattgtgcttatatttagcaaaaagattaaatatgtgcaacaccagggatcgctaagttttgcttacaaatctactgtatttctctaattatgtccccataaaagcaggaaataagtcctacacttttctgtttaaatttcctaaaacctctgcttttttcatatttgtcttctagaattcaaatgattctgtgatactgaaatggaaaaattaaacttgacttcacttgagtgtaaaatgaaatataaacatacatgggccacatgagattacaac

SEQ ID NO: 69062 - DNA, 600 bp, Chicken  19866894340881_3
aagtcaacgtacttcaaaaaaagtgaaataaaggaaaaagttgtactgcaagtagtaagaatgaaatgaaaatgattaaagaggtaaaatgggagaactgattgctgttatggcttcccagaagcaggaaggcatctgcttctctgcwtccccaacgtttaggttgggtgtcccttctttagctttcctttggaaggtaaaatgcagacttagacaacacactgtagagccaaaaggagtacatccaacatcaaaaatcccaggatgagtagtctatttgttatgcawtaatcatcactwttttatttaaccattgtgcttatatttagcaaaaagattaaatatgtgcaacaccagggatcgctaagttttgcttacaaatctactgtatttctctaattatgtccccataaaagcaggaaataagtcctacacttttctgtttaaatttcctaaaacctctgcttttttcatatttgtcttctagaattcaaatgattctgtgatactgaaatggaaaaattaaacttgacttcacttgagtgtaaaatgaaatataaacatacatgggccacatgagattacaacagaaagttcaac

SEQ ID NO: 69063 - DNA, 600 bp, Chicken  19866894340883_1
gagagaaaggccaaaaattaaaggaccagcaacacattttatggcagtgagaaacagcatctccactcaggtcagaatgacagtgctgagaccagcagcaggagctggtgatggagtcagagggaaaaaccacatggtttaagtgacagcagcagaactcctatttaactcctagcatagaaatacagattctcttccttgtattttattttataaacttcttatacaagggctgcaccaaattttcagctggtctctgactgattaacaacacactaacctgcagtgattcatgaatcygaggtgacctttaaagcagcggtgaaagtcctctgtgtgatgattatcacagaacttaaagcagccacacaaggttcaagyactgtggatgtaaaacaagggctttcattcagttctgtctgcacctgcccagcacagcttttatatctaagtaaatttcaatctactgtagataccacatacagagagccatgccacagataccagtgacactcgctagattaggattgaatggagaataacaactgtcccacgggagcattcatgcactcataaattactcatagaaacacaattaaa

SEQ ID NO: 69064 - DNA, 600 bp, Chicken  19866894340883_2
agtgctgagaccagcagcaggagctggtgatggagtcagagggaaaaaccacatggtttaagtgacagcagcagaactcctatttaactcctagcatagaaatacagattctcttccttgtattttattttataaacttcttatacaagggctgcaccaaattttcagctggtctctgactgattaacaacacactaacctgcagtgattcatgaatcygaggtgacctttaaagcagcggtgaaagtcctctgtgtgatgattatcacagaacttaaagcagccacacaaggttcaagyactgtggatgtaaaacaagggctttcattcagttctgtctgcacctgcccagcacagcttttatatctaagtaaatttcaatctactgtagataccacatacagagagccatgccacagataccagtgacactcgctagattaggattgaatggagaataacaactgtcccacgggagcattcatgcactcataaattactcatagaaacacaattaaaaattcttgcttgctttccaaaggagctagagaaaagcaggagaccacctctttaaattttgctttatgcttcttgtcttca

SEQ ID NO: 69065 - DNA, 518 bp, Chicken  19866894340892_1
ggcagttctgctttcaaacaggagaggatggagcatgtcgatcctaaatctcccggtgctccaagagctgcctccggccccgctgccccgcagcaaccccagcagccagaaagtgctggcaggagggaaaggggttgagaaactgcaggcagcaggatgaggcaggagccagcgcaagcaggatgtgactggggggtgacggggacggctggaggggcgccaggaggaagcggtacccggggccatcctgttacctccctcccacggccctccagccccagcaccgctccctgcacagcrcttctctgtttcatccctgccacctaaattctctctcagcagcaaagcaacgccttctccttccatttactgcggggttttgcactcctgcccttgctgggagcacccggggctgtcactctgggctgtccctgccacaagtgccccaaccccgtcagtgcatccgcgtggcaaacctggtatttgctggtcctttttcagcacagattttacggcag

SEQ ID NO: 69066 - DNA, 600 bp, Chicken  19866894340896_1
cattcagtttcaaccccctactgtggcctggttggcacccactagttcaggctacccaggggcccatctagcatgtccttgaatacctccaggaatggggcatccacagcttctgtgggcaacctgttctagcacctcaccaccctgagtaaaatttttcttcctaatatctaactcttttagttgaaatccacttccccttgtcctatcactatcaaacttggtaaaaagttgattccccttgtaagctcccttcatgtactggtaggccacagtgaggtctccctggaaccctctctyctctgggctgaacaagtccagctccctcagcctttcttcagaggagaggtgctccaaccctctgagcatctttgtggcctcctctggacccactccaacagccccacatcctccttctgctgggggccccaggcctggatactgtattgcagatgggacctcatgagagcagagcagagggggacagtcccctccctacccagtgccacccctctgctcatgcagcccaggacactgttggccttctgggctgtgagtgcacactgctggctcatgtccagctctttgtccaccagaacc

SEQ ID NO: 69067 - DNA, 600 bp, Chicken  19866894340902_1
cacaaacatacatggctctcctgtcgctgagcaaagagaggtgtgcttcgggttactcgcgttacttggaccgtacgaagctttcccaaagctgaggtgaaatgcagtccactagccttacttgagagaaaatgataagatagcgaaagaaagcacttattaacagaaaacaagagctggctttgcatcctgcctcttctttatctcggtagagaacggccttgggtcgtgttcctgcctttgctttgctgaagccggcgggcctgctcctttggcacaccacagggctaacacagcacrgcgcttcatgccgtgccatgcggagctcgcagggtgaggccgcccagcacagggcctgcagtttgccctgaggccttgcccttcactgcgccttcgcagggcggttaattttggcctattttaaggagcactgaaacctctgtctcaaaagtcacctcrtacaactcttcccttgatagagtatttccctgtgacccagctctgggkgaagcccatgsggaggctcagaggcagcgagggcactctgaaaacactgaggattctctctgtgttcacacycctaggtctggcaccacgacc

SEQ ID NO: 69068 - DNA, 600 bp, Chicken  19866894340902_2
ttaacagaaaacaagagctggctttgcatcctgcctcttctttatctcggtagagaacggccttgggtcgtgttcctgcctttgctttgctgaagccggcgggcctgctcctttggcacaccacagggctaacacagcacrgcgcttcatgccgtgccatgcggagctcgcagggtgaggccgcccagcacagggcctgcagtttgccctgaggccttgcccttcactgcgccttcgcagggcggttaattttggcctattttaaggagcactgaaacctctgtctcaaaagtcacctcrtacaactcttcccttgatagagtatttccctgtgacccagctctgggkgaagcccatgsggaggctcagaggcagcgagggcactctgaaaacactgaggattctctctgtgttcacacycctaggtctggcaccacgaccccctgtcgaggttttttttaacaagaaagaaaacttgtgttgaatgtgtattatcttctgtgatctgtctttttttgacatgaccctgacaactgctaacgtttcctaaaacttcagaggaggaggagatgcccgcgctccttcagcagctccacatgc

SEQ ID NO: 69069 - DNA, 600 bp, Chicken  19866894340902_3
ggtagagaacggccttgggtcgtgttcctgcctttgctttgctgaagccggcgggcctgctcctttggcacaccacagggctaacacagcacrgcgcttcatgccgtgccatgcggagctcgcagggtgaggccgcccagcacagggcctgcagtttgccctgaggccttgcccttcactgcgccttcgcagggcggttaattttggcctattttaaggagcactgaaacctctgtctcaaaagtcacctcrtacaactcttcccttgatagagtatttccctgtgacccagctctgggkgaagcccatgsggaggctcagaggcagcgagggcactctgaaaacactgaggattctctctgtgttcacacycctaggtctggcaccacgaccccctgtcgaggttttttttaacaagaaagaaaacttgtgttgaatgtgtattatcttctgtgatctgtctttttttgacatgaccctgacaactgctaacgtttcctaaaacttcagaggaggaggagatgcccgcgctccttcagcagctccacatgcacgcgtgccccagctctcccacttagaccagttagggagtgggaacag

SEQ ID NO: 69070 - DNA, 600 bp, Chicken  19866894340902_4
gccttgggtcgtgttcctgcctttgctttgctgaagccggcgggcctgctcctttggcacaccacagggctaacacagcacrgcgcttcatgccgtgccatgcggagctcgcagggtgaggccgcccagcacagggcctgcagtttgccctgaggccttgcccttcactgcgccttcgcagggcggttaattttggcctattttaaggagcactgaaacctctgtctcaaaagtcacctcrtacaactcttcccttgatagagtatttccctgtgacccagctctgggkgaagcccatgsggaggctcagaggcagcgagggcactctgaaaacactgaggattctctctgtgttcacacycctaggtctggcaccacgaccccctgtcgaggttttttttaacaagaaagaaaacttgtgttgaatgtgtattatcttctgtgatctgtctttttttgacatgaccctgacaactgctaacgtttcctaaaacttcagaggaggaggagatgcccgcgctccttcagcagctccacatgcacgcgtgccccagctctcccacttagaccagttagggagtgggaacaggatggatcaat

SEQ ID NO: 69071 - DNA, 600 bp, Chicken  19866894340902_5
ccacagggctaacacagcacrgcgcttcatgccgtgccatgcggagctcgcagggtgaggccgcccagcacagggcctgcagtttgccctgaggccttgcccttcactgcgccttcgcagggcggttaattttggcctattttaaggagcactgaaacctctgtctcaaaagtcacctcrtacaactcttcccttgatagagtatttccctgtgacccagctctgggkgaagcccatgsggaggctcagaggcagcgagggcactctgaaaacactgaggattctctctgtgttcacacycctaggtctggcaccacgaccccctgtcgaggttttttttaacaagaaagaaaacttgtgttgaatgtgtattatcttctgtgatctgtctttttttgacatgaccctgacaactgctaacgtttcctaaaacttcagaggaggaggagatgcccgcgctccttcagcagctccacatgcacgcgtgccccagctctcccacttagaccagttagggagtgggaacaggatggatcaatccagcattatccgaggaagagaagaccgcccctgttgctatgtttagctcgtcgggtgcac

SEQ ID NO: 69072 - DNA, 600 bp, Chicken  19866894340903_1
caaaaaaaagtggtatgcatattatttatttatttattttcccagcttttggtatgaagtctcacaaagcattaatataactccctctgccggcaacaacacgcaatgctattgctataacagctcttgtgatcgcttagggtggatctacttctaactggagagttagcactcacagtgtagataagctacaaattcttatctaggcaagcagatctcccttatttctctctgaatgaaaggaatacaagttcaccaaactccctaagtattaaacaaccatttcagtgctcagcctgrgagtctcctcattttgcaacagattcaacactatacttggaaatgtttccaagttgccaattttcttccaattttatatactcagagctcaaaaagtaaatcataattaatgtaataaacagtatgagaagctgtatttcccacatgtggactcacactcaagtattctattcagaagttatcttttaaatctttgactacaataagaaaacatttgctgcttgacgatccaaagaaaaaatgtaagagcactgccttctgttttgaagcaccgccacacttctacagaaattcttgtgc

SEQ ID NO: 69073 - DNA, 600 bp, Chicken  19866894340918_1
agtctgtccagtaaacctgtctgttcaaagaaacatgcctaattagttttatagtaaaacatacgctgaagtaaatattagaagccagatctgaaagaccacatttcttgcaaaaaaattaaatcagataccgaggaagataagtgaaaggttaatgcatttacttgttacattaatcactagagcaaacaagtagatgcatggaagcacaatcatcttcaaagaatgcaatcagtaccacattgtatatcaagctgtacaggcacctgttaaccttttttagccttgcaatcaacattkccttgttcatatacaagcaaattctactttcaataccaggctgcccagcatataaagctatgaaaagcaagctgctgtttttcccaagctccagctaagatttaatgtcacacaaatcaaagagtacgcagccaaaatttatttcagatttccacagacagtgcaaaactatgtaaaagcaaaagtacttctgcaatgtcatacccgtattttggatgaacaacaattgctctgggatgctgaaagcagtaagtgttgttgatatccacacaccgatccactagttttttctggaatctt

SEQ ID NO: 69074 - DNA, 600 bp, Chicken  19866894340918_2
ctactttcaataccaggctgcccagcatataaagctatgaaaagcaagctgctgtttttcccaagctccagctaagatttaatgtcacacaaatcaaagagtacgcagccaaaatttatttcagatttccacagacagtgcaaaactatgtaaaagcaaaagtacttctgcaatgtcatacccgtattttggatgaacaacaattgctctgggatgctgaaagcagtaagtgttgttgatatccacacaccgatccactagttttttctggaatcttccatcaagttcagagacatagakgcaatctttgtaggcatccacccagtacaattttctgaaatgttttagagttaatttactttcttcattttacttcacgttgaatttcacctttttttttttccttctagaagcaatacctccacaataaaggaagaatatacatagtgtagtaacatctcttctataccatgctccagtttgcccttcttactcctctgtaattgtatccacaatcactggtgccaaattcaaacttgcagttgcccagttgagtaataatattccatctgctaaaattactaagcaaacttttctttt

SEQ ID NO: 69075 - DNA, 599 bp, Chicken  19866894340925_1
  misc_feature (1)..(81): n is any nucleotide
nnnnnnnnnnnnnnnnnnnnnnnnnnnnnnnnnnnnnnnnnnnnnnnnnnnnnnnnnnnnnnnnnnnnnnnnnnnnnnnnnagaaaaagagatactgagagtgaatagaactgaagatgtctaattcttagattaccaacaaaatcatattgcatacgcaggcaaattttattagttatttcaactgcttataggtaggcacaacatatagaaaatggtaacagagatttcttacagtctcctacagaattccatgaagtcagtatggtctcaatgctcctccaagaaatgtaagctttkgaaataattctgtttcatcactacttgaaaataaaaaaaatcagtagctttctttatgccttgagcaagagtatttcaaatttttggaaacatcttgaaaacaaacgaggcagacaatcctacaatatcatgtcaaaatgtaagttaaatatatgtgcttaaacgtaggattcagaatcttaaatatttaaatatctgctatatagacatattatttcatattaaaaagaaaaaatattctaatwtttttaaggattagtaataggatattcatcaaagctgaaagcctgcaaattccc

SEQ ID NO: 69076 - DNA, 600 bp, Chicken  19866894340925_2
agaattccatgaagtcagtatggtctcaatgctcctccaagaaatgtaagctttkgaaataattctgtttcatcactacttgaaaataaaaaaaatcagtagctttctttatgccttgagcaagagtatttcaaatttttggaaacatcttgaaaacaaacgaggcagacaatcctacaatatcatgtcaaaatgtaagttaaatatatgtgcttaaacgtaggattcagaatcttaaatatttaaatatctgctatatagacatattatttcatattaaaaagaaaaaatattctaatwtttttaaggattagtaataggatattcatcaaagctgaaagcctgcaaattcccttactgccaattttcagaaataagcaatggcaatacycaacaagttcttggacacagagaattaagctgctcaactaggaaatcaagtagaatgctctttatactctaacaatgtttattagagagcaaaatgagtttgccaaagagaggagacagaagacaagctttatccagtgagtgcttcatagttactgacagtgtcagtcatttacctcttgccagaaaaagtgaatcgcatcaagtcat

SEQ ID NO: 69077 - DNA, 581 bp, Chicken  19866894340925_3
aaaatcagtagctttctttatgccttgagcaagagtatttcaaatttttggaaacatcttgaaaacaaacgaggcagacaatcctacaatatcatgtcaaaatgtaagttaaatatatgtgcttaaacgtaggattcagaatcttaaatatttaaatatctgctatatagacatattatttcatattaaaaagaaaaaatattctaatwtttttaaggattagtaataggatattcatcaaagctgaaagcctgcaaattcccttactgccaattttcagaaataagcaatggcaatacycaacaagttcttggacacagagaattaagctgctcaactaggaaatcaagtagaatgctctttatactctaacaatgtttattagagagcaaaatgagtttgccaaagagaggagacagaagacaagctttatccagtgagtgcttcatagttactgacagtgtcagtcatttacctcttgccagaaaaagtgaatcgcatcaagtcattccaagaccaacagcatccgttactatctggcagaggaaaaacaccagtaagaaagctcttcattacttggg

SEQ ID NO: 69078 - DNA, 600 bp, Chicken  19866894340930_1
ctctaaaccccagatatcctaaatatccctcataaaatagcactttcagatcccaccgagctgagagcaacttaattcctgcaattgcaattccagccactgcaagtcattcacagctctcccatgaaagcattaaaagttaagatttaattagcatccctgattaaatagcaattcatacagccattatgtcttccatctagggagtgcagttctccaaagaagcaacaaaagggggacagaaacaaaacaaaaacatgtcctctccctaaagtacctaaattctccatacaacccaarctcaccacttcccattttcttcaaactttatcacggcaaacrttcacgatttatgatggaaaggcactgccagacacactttgaacacacactcttgtgcaaaggttccattgacaggcctgagaggatacagaggcttaacaaaatcatgtaattgtaatgaaataaggcagctaaagggggcagcaccaacactaagcccaaacagactcatccagcagctgtggctcacgagcctgcactactgggactggggtaaaggagaaaaatgtacatccacaataagagtttaaacaacaa

SEQ ID NO: 69079 - DNA, 600 bp, Chicken  19866894340930_2
ctttcagatcccaccgagctgagagcaacttaattcctgcaattgcaattccagccactgcaagtcattcacagctctcccatgaaagcattaaaagttaagatttaattagcatccctgattaaatagcaattcatacagccattatgtcttccatctagggagtgcagttctccaaagaagcaacaaaagggggacagaaacaaaacaaaaacatgtcctctccctaaagtacctaaattctccatacaacccaarctcaccacttcccattttcttcaaactttatcacggcaaacrttcacgatttatgatggaaaggcactgccagacacactttgaacacacactcttgtgcaaaggttccattgacaggcctgagaggatacagaggcttaacaaaatcatgtaattgtaatgaaataaggcagctaaagggggcagcaccaacactaagcccaaacagactcatccagcagctgtggctcacgagcctgcactactgggactggggtaaaggagaaaaatgtacatccacaataagagtttaaacaacaagcattttagagccttgcctcagctcctattcttccacttaat

SEQ ID NO: 69080 - DNA, 599 bp, Chicken  19866894340932_1
  misc_feature (1)..(100): n is any nucleotide
nnnnnnnnnnnnnnnnnnnnnnnnnnnnnnnnnnnnnnnnnnnnnnnnnnnnnnnnnnnnnnnnnnnnnnnnnnnnnnnnnnnnnnnnnnnnnnnnnnnntactggccggctttgtgcttcattctatcatgcctatgatgtggtggcattttgtactattactccactctcctcaaaccatgtaacctataagtactgtacagcagtcatacatacgcacagagggacctttctgtgcttcaattgaactagcggtaccatcctggccttgtttgcactgaacagattcccagcatgcygggaataaacttttgataattgagtagaaactgatttttcaccctttttcttaaagagaagatttgataagcaaagaggatcagaatgccaagttttctycaaacattttctagtactcttacagcctcaaaaacagtaagagaaacaactacagtaatttattacgaacagtaagctgaagaaaggaagtcatcctaatcaataaagaactcttcataaatacctatttttagcctattttacaaaagtgacttgatgtttgcacacatcagctttcaggatcagccatggtctggtg

SEQ ID NO: 69081 - DNA, 600 bp, Chicken  19866894340932_2
tactggccggctttgtgcttcattctatcatgcctatgatgtggtggcattttgtactattactccactctcctcaaaccatgtaacctataagtactgtacagcagtcatacatacgcacagagggacctttctgtgcttcaattgaactagcggtaccatcctggccttgtttgcactgaacagattcccagcatgcygggaataaacttttgataattgagtagaaactgatttttcaccctttttcttaaagagaagatttgataagcaaagaggatcagaatgccaagttttctycaaacattttctagtactcttacagcctcaaaaacagtaagagaaacaactacagtaatttattacgaacagtaagctgaagaaaggaagtcatcctaatcaataaagaactcttcataaatacctatttttagcctattttacaaaagtgacttgatgtttgcacacatcagctttcaggatcagccatggtctggtggagagctctgtcaactgctgcaagctgacacagcagaaggcaaacatcatattaacattcttgtaagcgagatgaaatggttaaaaacaactaaaacccaa

SEQ ID NO: 69082 - DNA, 599 bp, Chicken  19866894340933_1
  misc_feature (1)..(105): n is any nucleotide
nnnnnnnnnnnnnnnnnnnnnnnnnnnnnnnnnnnnnnnnnnnnnnnnnnnnnnnnnnnnnnnnnnnnnnnnnnnnnnnnnnnnnnnnnnnnnnnnnnnnnnnnncattatcacaggtacacgggcaggatttttactgctgcattaccaaaaaggtaaataatctaaaaagcccctccttgatgtataaattatgtttatttgagtttatttcatgtactgaagaggtgagccacgctgtgtgttttagtacttgtggaacacctcctgatagtgcacaagcttatatggaatttggamgatgacttttgtttaagttctggcctgtgaaaatgcacttaacaaaaagtccatgacagccatgcaatatgatgrctttcagtgtattcctgttcagctggagaygtgatacagtctcttgagatctgtcagtcagacttcaatgagtgagttaatactgattgcattcttgtctctattcttgtgttttgttctgttttgcttctgttgccatcctttgtcttttaagtgtgtcaagaaagtttattattcrggagatttcctttttctctttaaaaatactctcatgtagtgtgttc

SEQ ID NO: 69083 - DNA, 599 bp, Chicken  19866894340933_2
  misc_feature (1)..(30): n is any nucleotide
nnnnnnnnnnnnnnnnnnnnnnnnnnnnnncattatcacaggtacacgggcaggatttttactgctgcattaccaaaaaggtaaataatctaaaaagcccctccttgatgtataaattatgtttatttgagtttatttcatgtactgaagaggtgagccacgctgtgtgttttagtacttgtggaacacctcctgatagtgcacaagcttatatggaatttggamgatgacttttgtttaagttctggcctgtgaaaatgcacttaacaaaaagtccatgacagccatgcaatatgatgrctttcagtgtattcctgttcagctggagaygtgatacagtctcttgagatctgtcagtcagacttcaatgagtgagttaatactgattgcattcttgtctctattcttgtgttttgttctgttttgcttctgttgccatcctttgtcttttaagtgtgtcaagaaagtttattattcrggagatttcctttttctctttaaaaatactctcatgtagtgtgttcttaagtgtcagtttttggtttttttaatggtgcttttgtagttgaagtgctttcaggcagcaaattatatatatg

SEQ ID NO: 69084 - DNA, 600 bp, Chicken  19866894340933_3
cattatcacaggtacacgggcaggatttttactgctgcattaccaaaaaggtaaataatctaaaaagcccctccttgatgtataaattatgtttatttgagtttatttcatgtactgaagaggtgagccacgctgtgtgttttagtacttgtggaacacctcctgatagtgcacaagcttatatggaatttggamgatgacttttgtttaagttctggcctgtgaaaatgcacttaacaaaaagtccatgacagccatgcaatatgatgrctttcagtgtattcctgttcagctggagaygtgatacagtctcttgagatctgtcagtcagacttcaatgagtgagttaatactgattgcattcttgtctctattcttgtgttttgttctgttttgcttctgttgccatcctttgtcttttaagtgtgtcaagaaagtttattattcrggagatttcctttttctctttaaaaatactctcatgtagtgtgttcttaagtgtcagtttttggtttttttaatggtgcttttgtagttgaagtgctttcaggcagcaaattatatatatgtatataattgtgatagaaaataatgagcagt

SEQ ID NO: 69085 - DNA, 600 bp, Chicken  19866894340933_4
ttgtggaacacctcctgatagtgcacaagcttatatggaatttggamgatgacttttgtttaagttctggcctgtgaaaatgcacttaacaaaaagtccatgacagccatgcaatatgatgrctttcagtgtattcctgttcagctggagaygtgatacagtctcttgagatctgtcagtcagacttcaatgagtgagttaatactgattgcattcttgtctctattcttgtgttttgttctgttttgcttctgttgccatcctttgtcttttaagtgtgtcaagaaagtttattattcrggagatttcctttttctctttaaaaatactctcatgtagtgtgttcttaagtgtcagtttttggtttttttaatggtgcttttgtagttgaagtgctttcaggcagcaaattatatatatgtatataattgtgatagaaaataatgagcagtgagtaggaggtagaaaccaagtcagagtggttcagagatgatacatttccttccagatgattagcgaagtctttgcggtactatcttagaccacagaccatagcactgtgccgtgtaaacttactggtttgttctcacagtgcttggt

SEQ ID NO: 69086 - DNA, 576 bp, Chicken  19866894340935_1
gagctagatcagcacttaatcacaaagatgaaccgttggaagagagcgggaaaggtcaggaaggatgatgctgtgaatgcaggagaccagggagccaataacgtctgctggatgcggctgggcatcttgagggtaaattgccttgaagctgtgagagaaaacaaagtgcttgtttaattacagtgtggaaagcattagatctttttcaaacttaactcatgttctacagaacagagcgcacaacccctgctctggagcagctctggtgggagttcaaccgctgctctcacaaacccaggytgggctccagggcagccgacagcacttcacacccagcactgtggggcagaagaatggtgcaaagcacagcaccccctgctctgcttttctgaagtttctcctcaatyttacagccccgrcggcagcaccatcaaccacttgtttaacaaaatattttgtaatgattgaacaagtaataggatatctttgttttttgcatgttcaagtgatttcacattttattgcttgtttactaaacaataacaacaacaaaaagccattttgaaacaaaagtta

SEQ ID NO: 69087 - DNA, 469 bp, Chicken  19866894340935_2
ctggatgcggctgggcatcttgagggtaaattgccttgaagctgtgagagaaaacaaagtgcttgtttaattacagtgtggaaagcattagatctttttcaaacttaactcatgttctacagaacagagcgcacaacccctgctctggagcagctctggtgggagttcaaccgctgctctcacaaacccaggytgggctccagggcagccgacagcacttcacacccagcactgtggggcagaagaatggtgcaaagcacagcaccccctgctctgcttttctgaagtttctcctcaatyttacagccccgrcggcagcaccatcaaccacttgtttaacaaaatattttgtaatgattgaacaagtaataggatatctttgttttttgcatgttcaagtgatttcacattttattgcttgtttactaaacaataacaacaacaaaaagccattttgaaacaaaagtta

SEQ ID NO: 69088 - DNA, 457 bp, Chicken  19866894340935_3
gggcatcttgagggtaaattgccttgaagctgtgagagaaaacaaagtgcttgtttaattacagtgtggaaagcattagatctttttcaaacttaactcatgttctacagaacagagcgcacaacccctgctctggagcagctctggtgggagttcaaccgctgctctcacaaacccaggytgggctccagggcagccgacagcacttcacacccagcactgtggggcagaagaatggtgcaaagcacagcaccccctgctctgcttttctgaagtttctcctcaatyttacagccccgrcggcagcaccatcaaccacttgtttaacaaaatattttgtaatgattgaacaagtaataggatatctttgttttttgcatgttcaagtgatttcacattttattgcttgtttactaaacaataacaacaacaaaaagccattttgaaacaaaagtta

SEQ ID NO: 69089 - DNA, 600 bp, Chicken  19866894340936_1
gcgtgttcatcagaaagctagaaatttgacttgtgtggactttgtaaagcagagtgtgttgcatgtctgttcatggaacacaccattcaggagtaaaatatgcaacatgatagcagtttttcctttggttttctattgtttgtttaaggctttgtttacttcaaaactgtccatctaaacagtttcaggtggaagcatctaatgtcatgcaagtgtgggtctaattgcagatgtgcttctggtttgatgtgaaaatttattgacttgtctcttttcagcccagttcttgcactatatttrtcataccagtatctgaacaaacggcatrtatttaaaggagaggagggattacatgtaccaatacttagtttatttgaggtttaaatttcttttaaaaaaagaatcttaaaggcaaacttatatatttatatattttacaggttgatcctgctttgaaggaaaaattgaagcagaacaatgtgacgttggagtctgaatatgaggtaaaataaatctgttgcttggggctcataaccttggctaccctttactaccctagctgctggtggggtgggtctgtccctatctaaaattagatca

SEQ ID NO: 69090 - DNA, 600 bp, Chicken  19866894340936_2
acttgtgtggactttgtaaagcagagtgtgttgcatgtctgttcatggaacacaccattcaggagtaaaatatgcaacatgatagcagtttttcctttggttttctattgtttgtttaaggctttgtttacttcaaaactgtccatctaaacagtttcaggtggaagcatctaatgtcatgcaagtgtgggtctaattgcagatgtgcttctggtttgatgtgaaaatttattgacttgtctcttttcagcccagttcttgcactatatttrtcataccagtatctgaacaaacggcatrtatttaaaggagaggagggattacatgtaccaatacttagtttatttgaggtttaaatttcttttaaaaaaagaatcttaaaggcaaacttatatatttatatattttacaggttgatcctgctttgaaggaaaaattgaagcagaacaatgtgacgttggagtctgaatatgaggtaaaataaatctgttgcttggggctcataaccttggctaccctttactaccctagctgctggtggggtgggtctgtccctatctaaaattagatcagccatctgcctttgactcactgatgtcc

SEQ ID NO: 69091 - DNA, 600 bp, Chicken  19866894340936_3
atcttaaaggcaaacttatatatttatatattttacaggttgatcctgctttgaaggaaaaattgaagcagaacaatgtgacgttggagtctgaatatgaggtaaaataaatctgttgcttggggctcataaccttggctaccctttactaccctagctgctggtggggtgggtctgtccctatctaaaattagatcagccatctgcctttgactcactgatgtccaataaaaacaagtttttatgtaaagaaagatttttgaacatgcagtacttctttctgaacacagctttactctratgcccaggtgccaagtacaatgctacaaataaatttcactatatctgtggtttacctggtctataaaagtagagctgatgctgggcttagatggtatgtgtatatgtcaacacttctgctgcataagttttgacgatctttagcctgaacagtgtaccttgatgtgctgcctcttaccatttcttgctttttaaacttctgtatagttttcaaacaactctgattactttttcactatttcagggcgttttatagagaaatacttccttctttcctccacagcacattttcttcaaaca

SEQ ID NO: 69092 - DNA, 600 bp, Chicken  19866894340946_1
gtggttttggctggcatactaagataatccattgatgctagcacactcagctagataggcctaaacctgctagctccccagcggtaccttcaagcctagctttctttgtttgattaatgaacgatgttagcaattaaaagcaaagcacacgatagaactagtagattttttacaatccaatttcatcttctgctgagaggtaatgatgagtaaacaagaagctgagatacactgggttgataaagagcacagcctgtatatctccttgacttcatttgcacaagtcccagaaaaaagtcwgtgagcagccatcaggttgagatttatttgtttgctcaacttgattaataattttgtacttttgacttggtttagtgttttgtttacattcgtccagatatttgaaccagataagtagtaaatggcagcttaaaaggcattaagtgggcaaatatacaaacacaccctactgtatctgccttggattgttatgtgagtgacacatgtcaacttgaccaagacagagagatgcaatgattcactctttttgaaactgtttacagccatgtttgtgtgaaaaattgtttaagtaaatcagtt

SEQ ID NO: 69093 - DNA, 600 bp, Chicken  19866894340957_1
tctatgattaagatcctacataaaaaaaagagaaaagttctgtttgatttcctgagaagaaccacatgagaacttatctcaagagacacttctggactgtgagtcccaaggtgtcttttgcatagccaggtcctagttgacgtacgtatttaccagcacaactctatgcacagctttctctattgctttcctccaggtgggggctttctctgcctcttgctactgtcagtcctaatctggggtgcccctctctctccatttgcacaacctggacaggaggctacctgctatggctcttcrgagtggtgtgaaatctggtcctccaggaactagctcagatatgtggatgtggtaaacgctgttggattcacccraaaacatcacacttttttgtacaactctcacatagaagctgttgcttcttgtatatccatcttcacatcagcatcaattgcaaagcactatctgtgttctcagcttttctttttggtgtgtcyggatttcctttgggttttcttggccaaaatctrgaagaattgagaagaaatttcataagaaagcctargggtatatcacttctgtgatttccattagacacat

SEQ ID NO: 69094 - DNA, 600 bp, Chicken  19866894340957_2
tatctcaagagacacttctggactgtgagtcccaaggtgtcttttgcatagccaggtcctagttgacgtacgtatttaccagcacaactctatgcacagctttctctattgctttcctccaggtgggggctttctctgcctcttgctactgtcagtcctaatctggggtgcccctctctctccatttgcacaacctggacaggaggctacctgctatggctcttcrgagtggtgtgaaatctggtcctccaggaactagctcagatatgtggatgtggtaaacgctgttggattcacccraaaacatcacacttttttgtacaactctcacatagaagctgttgcttcttgtatatccatcttcacatcagcatcaattgcaaagcactatctgtgttctcagcttttctttttggtgtgtcyggatttcctttgggttttcttggccaaaatctrgaagaattgagaagaaatttcataagaaagcctargggtatatcacttctgtgatttccattagacacatcctgagttaagagtagcaatgagctgaggaaatgggttgcacttaacccttagcaaagatctgccaaaacttat

SEQ ID NO: 69095 - DNA, 600 bp, Chicken  19866894340957_3
tgggggctttctctgcctcttgctactgtcagtcctaatctggggtgcccctctctctccatttgcacaacctggacaggaggctacctgctatggctcttcrgagtggtgtgaaatctggtcctccaggaactagctcagatatgtggatgtggtaaacgctgttggattcacccraaaacatcacacttttttgtacaactctcacatagaagctgttgcttcttgtatatccatcttcacatcagcatcaattgcaaagcactatctgtgttctcagcttttctttttggtgtgtcyggatttcctttgggttttcttggccaaaatctrgaagaattgagaagaaatttcataagaaagcctargggtatatcacttctgtgatttccattagacacatcctgagttaagagtagcaatgagctgaggaaatgggttgcacttaacccttagcaaagatctgccaaaacttatagcacttataatgcaaatatatgctctatatcattagaaaagtgatggcttccaggcagcagcaacaattctacaggattctttaaaatatttaagttgtttaaatgaatatgccttgtcagt

SEQ ID NO: 69096 - DNA, 600 bp, Chicken  19866894340957_4
cctaatctggggtgcccctctctctccatttgcacaacctggacaggaggctacctgctatggctcttcrgagtggtgtgaaatctggtcctccaggaactagctcagatatgtggatgtggtaaacgctgttggattcacccraaaacatcacacttttttgtacaactctcacatagaagctgttgcttcttgtatatccatcttcacatcagcatcaattgcaaagcactatctgtgttctcagcttttctttttggtgtgtcyggatttcctttgggttttcttggccaaaatctrgaagaattgagaagaaatttcataagaaagcctargggtatatcacttctgtgatttccattagacacatcctgagttaagagtagcaatgagctgaggaaatgggttgcacttaacccttagcaaagatctgccaaaacttatagcacttataatgcaaatatatgctctatatcattagaaaagtgatggcttccaggcagcagcaacaattctacaggattctttaaaatatttaagttgtttaaatgaatatgccttgtcagtattataacctgaacatatataattgccacgatc

SEQ ID NO: 69097 - DNA, 600 bp, Chicken  19866894340957_5
aacctggacaggaggctacctgctatggctcttcrgagtggtgtgaaatctggtcctccaggaactagctcagatatgtggatgtggtaaacgctgttggattcacccraaaacatcacacttttttgtacaactctcacatagaagctgttgcttcttgtatatccatcttcacatcagcatcaattgcaaagcactatctgtgttctcagcttttctttttggtgtgtcyggatttcctttgggttttcttggccaaaatctrgaagaattgagaagaaatttcataagaaagcctargggtatatcacttctgtgatttccattagacacatcctgagttaagagtagcaatgagctgaggaaatgggttgcacttaacccttagcaaagatctgccaaaacttatagcacttataatgcaaatatatgctctatatcattagaaaagtgatggcttccaggcagcagcaacaattctacaggattctttaaaatatttaagttgtttaaatgaatatgccttgtcagtattataacctgaacatatataattgccacgatcattagggctttactgaagaagtgcgatacatagtg

SEQ ID NO: 69098 - DNA, 405 bp, Chicken  19866894340959_1
ccgagggtgcggaggtgccgcctgaaggggtctacatgggtgcagcccaagggctgcagcgacgaggaggacaacggggacgaggcagacgcgctgcggggctcgcaggatggcaccttcctggacgacagggattccgacggggcagcctccaaggatgacgcctaccgggcctccagcgaggcggcctccaagctgggaaccacctcaggtaaggccctgctgcccgtccctacacggggcagtgacttggccacttgtttcaagggaaaggccaagcttctgctggctgtgtctgcscaggagagggctggagaccccaagtcccctatcagaggcctgcctggctgctcttgggagtgtgaccattttggctctgctccacagtaccctccctgagtgggg

SEQ ID NO: 69099 - DNA, 600 bp, Chicken  19866894340961_1
gtgctacttgtgtattttcttcctcactttgctttgccaaagtgttttgcttagttttatttctatgaaacaggttgctttatttgtgaacaaagccttgatggtctttgtttttcctccagtgctttttcaggcaaagctcaagaaacattaaataaaaacacgaaactgaggagcagctgatggactgtggctctggacccagaataattaagactgaggctgttatcacttctttttgtattatgaacattgtgatgttagcgttgataaaatcaatgcatacatctttaaaaaaartatcagaamgaaaaaacatagagcctggattcacctttcagggggactcggtgagaaggaaatgattgtttgtcactctggatgcatcagaagaaggatgtaggtggttctctcagagtgacactctcccttcagtgctggggaggagtgttgtagcagttcaaagccatggaaatcaatggaaatgtccctggagaagcgagactgggtttgcatggaaagagcatggacacatttaggaacctgctcgagcaggcatctgcaggaaagccactaaggtatgtatctggcagcgagtgg

SEQ ID NO: 69100 - DNA, 600 bp, Chicken  19866894340961_2
gtgtattttcttcctcactttgctttgccaaagtgttttgcttagttttatttctatgaaacaggttgctttatttgtgaacaaagccttgatggtctttgtttttcctccagtgctttttcaggcaaagctcaagaaacattaaataaaaacacgaaactgaggagcagctgatggactgtggctctggacccagaataattaagactgaggctgttatcacttctttttgtattatgaacattgtgatgttagcgttgataaaatcaatgcatacatctttaaaaaaartatcagaamgaaaaaacatagagcctggattcacctttcagggggactcggtgagaaggaaatgattgtttgtcactctggatgcatcagaagaaggatgtaggtggttctctcagagtgacactctcccttcagtgctggggaggagtgttgtagcagttcaaagccatggaaatcaatggaaatgtccctggagaagcgagactgggtttgcatggaaagagcatggacacatttaggaacctgctcgagcaggcatctgcaggaaagccactaaggtatgtatctggcagcgagtggtactgctgc

SEQ ID NO: 69101 - DNA, 600 bp, Chicken  19866894340961_3
gaaggctcggggctataaacaacacacagcagtggctggtcactgaagtacaaccttgggagctaggaaagactggcttaggagaacagcagcagaaaaatagctgagcagggggataaggtctggggaagcaataccttcaatcacagtataatccaggggttgaggccaggggctaagagcctgtgtccatggaatccagcatcttacaaaaggatgaaatagaattaggcaagcctgactgatcatgtaagcatgacccaccatgcattcagtgccagctattatgagcaccctcgwctttcttgggcttgtgccacacaagtagttttagatgatataaatattttaaatgagctgctcacattattctttgttcatagtgcacaagcctctttgcaaagtggatccttgtgtctgattctcagcatgaaatgactgcatggctccagcccaagaacagcactgacatctccggcttgcagacagtttctgtgcatcatcttgccatgctgctgatgggaaaggcaggtcaattcagtagtgatttcctggctgggcaatcactgatagaaatattcattcctccatgtatatgtt

SEQ ID NO: 69102 - DNA, 599 bp, Chicken  19866894340969_1
  misc_feature (1)..(99): n is any nucleotide
nnnnnnnnnnnnnnnnnnnnnnnnnnnnnnnnnnnnnnnnnnnnnnnnnnnnnnnnnnnnnnnnnnnnnnnnnnnnnnnnnnnnnnnnnnnnnnnnnnnaaaaatccagatgatcatccccagtcaaacaacaaaaggcagcccactggcattcgaatcacatgcatcaatttagcttcatgtcacctttctaagtaaaataataccatctgaaaatattctaaactaaatgactctgcttaattacaaaacataggaaatttcttaacatataaatactttcaaataagtttaagtacmgttaactattgcagacaactactttttcccttacagtcattcaaagactaaagccaagtttcatttctcagacattacttgggatattcaccaaacttatgaaagagtggggaaaatatgacagatcctcttaaatttgtaatgcaagtacaacagcaacaatgttttctcatcatacttgaccgtgcatgagtaaatatgatacaaattgtcagtaataaatgtcctgctttcagctaggacagaggtgggttggttttgttttgttttttagccttcagagtgtttggatgctatgc

SEQ ID NO: 69103 - DNA, 600 bp, Chicken  19866894340969_2
gggcagacagcaaatgctgaaattttaactctgaaagaataaataaataaacagaaatgaaacgacctccaaacacagtcatctctactctcttctattatagcacttctttgatcacattcttccttccttgacctttcccccatgcactatatggtagaagaaagacaaggagaatgcgacagcatgtcctgtccttctgactctcacagacaactgtggatgcagtgagacttgcaatgatccagaccatacagatgccataatcgtgacatgcaagtgaaagctgtcacggaaaawttttacaagcgttcatatctgtttgctgcttgatgtaggtcttaacaaatatatggacaaatgggccagcagtctactccaaacatctcttattaaatcacaagatacagcaagcatctggaaaagaaatagcacagaaaattacggaaagagaaaaagaaaatcaatcttccctatgggctggattccataaatccagcaagtgacaccaaagacatgattctataatatgcattactggaggtagggcaacaagtcctgatcatcttttaagtatgattttctggaggaaaggtgttc

SEQ ID NO: 69104 - DNA, 600 bp, Chicken  19866894340970_1
catgggtgtgagggcacccttagcaagtttgccaacaacactaagctgagtggtgtggttgacacactggagggaacagatggaacagatgccatccagagggaccttgacaggactgagaggtgggcccatgagaacctgaccaggttcaacaaggtcaagtgcaaagtcctttatctgggttatggcaatcccaagcatgatatgtcaggttgggtattaggaaaaatttgttcacagacagagttgtcaaacattaggaacaggctgcccagggaggtggtggagtcgttgtccctrgaggttcttttgaggaattccttgttactgaaggataaatccttatgatactgtttgttgttttttttttttttttaaagtgaaagaaaaattcagacaattcattacatttttagctttacagagaataatttcatattttcttactatttaaaaggataaacttacttgaaactatcctattaatattttcccacactaacagatgaactctaaactagtagtaactgctctttcctttacctttcaaatggcagaaccagctgtgctagaaattgtgtggagactgatagcagcttt

SEQ ID NO: 69105 - DNA, 600 bp, Chicken  19866894340977_1
ctctgttctctctttatttggagtaaagagctgaaggggtctgattctttatgatacaaaaattaggttaatagagaataattgctaaattagaacccagaggtattcacatacaaggctgacagtggggctaacccaatctcagtggctgataagggctttttttctttaaatcatatttcagaatagaataagtgtaatcctagtaattcttgtaaggggtctgtaaggctatgctaggcgatccacagttccttcctgtagagtcacaagtggtatttttcaggattttaaaaaaawtttatttcaaatgtgatgttgattggtgattgtcgttaccagatactgagagttaaaatggagcccttcttccaagagaaaagaacactggttttgcccaacagtttgtagggttctggtgagctctttcaccaaagatagattaaagaggaaacagaggatgaacataccaaaaatatgccttgcttcagctagctctattcacagattgatggtatcactgtttgtttttggttgttttttttaggcctgagcaagcatttacgagggggcggaaggtacagatgagtataatgctaa

SEQ ID NO: 69106 - DNA, 599 bp, Chicken  19866894340982_1
  misc_feature (1)..(4): n is any nucleotide
nnnntactcagattgccccagcaattagggcacacagaacaattcaccttttccagttgtttgggtgctgatgttcctcagctacagcacagacctcacattcagctgagccaagagaggaactacaaacccaactccaagcatcccaactcagctatctgcttccagaacaaaacaaaaccagccacgaggccaagaggggccccaaacacacccagttccattccccccatcactccagagcccacgcacacccatcttccagcagagcagagagagccccatactcacaagcgcacygcaatggaagcggtcccatcagctctccrtccccaggcaggacggtcccccagacagctccagatggcgtgtgctgccccaacctcctccaaagtcccttctccyagcagtacccacagccccaatgccatccaggcatccccrtccgcctcctcctccccagcaccaaccracagcrgtggacgcagcagactgagcagctgaaaacccgtgtctgttcctctgtaagcttttctcttctccctccagtatttattggcatgtttaccaagccaactgcacagtaaccgaaaacctca

SEQ ID NO: 69107 - DNA, 600 bp, Chicken  19866894340982_2
gcacacagaacaattcaccttttccagttgtttgggtgctgatgttcctcagctacagcacagacctcacattcagctgagccaagagaggaactacaaacccaactccaagcatcccaactcagctatctgcttccagaacaaaacaaaaccagccacgaggccaagaggggccccaaacacacccagttccattccccccatcactccagagcccacgcacacccatcttccagcagagcagagagagccccatactcacaagcgcacygcaatggaagcggtcccatcagctctccrtccccaggcaggacggtcccccagacagctccagatggcgtgtgctgccccaacctcctccaaagtcccttctccyagcagtacccacagccccaatgccatccaggcatccccrtccgcctcctcctccccagcaccaaccracagcrgtggacgcagcagactgagcagctgaaaacccgtgtctgttcctctgtaagcttttctcttctccctccagtatttattggcatgtttaccaagccaactgcacagtaaccgaaaacctcaggggcatttctaaatgctcgctctgtcttt

SEQ ID NO: 69108 - DNA, 600 bp, Chicken  19866894340982_3
ctgagccaagagaggaactacaaacccaactccaagcatcccaactcagctatctgcttccagaacaaaacaaaaccagccacgaggccaagaggggccccaaacacacccagttccattccccccatcactccagagcccacgcacacccatcttccagcagagcagagagagccccatactcacaagcgcacygcaatggaagcggtcccatcagctctccrtccccaggcaggacggtcccccagacagctccagatggcgtgtgctgccccaacctcctccaaagtcccttctccyagcagtacccacagccccaatgccatccaggcatccccrtccgcctcctcctccccagcaccaaccracagcrgtggacgcagcagactgagcagctgaaaacccgtgtctgttcctctgtaagcttttctcttctccctccagtatttattggcatgtttaccaagccaactgcacagtaaccgaaaacctcaggggcatttctaaatgctcgctctgtctttaaggtttgctgaggtctctaataagagcaagctgaaaccttcttgtgaacatcagctgagcacagctgctgactgc

SEQ ID NO: 69109 - DNA, 600 bp, Chicken  19866894340982_4
cccaactcagctatctgcttccagaacaaaacaaaaccagccacgaggccaagaggggccccaaacacacccagttccattccccccatcactccagagcccacgcacacccatcttccagcagagcagagagagccccatactcacaagcgcacygcaatggaagcggtcccatcagctctccrtccccaggcaggacggtcccccagacagctccagatggcgtgtgctgccccaacctcctccaaagtcccttctccyagcagtacccacagccccaatgccatccaggcatccccrtccgcctcctcctccccagcaccaaccracagcrgtggacgcagcagactgagcagctgaaaacccgtgtctgttcctctgtaagcttttctcttctccctccagtatttattggcatgtttaccaagccaactgcacagtaaccgaaaacctcaggggcatttctaaatgctcgctctgtctttaaggtttgctgaggtctctaataagagcaagctgaaaccttcttgtgaacatcagctgagcacagctgctgactgcctgcattcatggcttgttttcctgcagctcctcagatgt

SEQ ID NO: 69110 - DNA, 586 bp, Chicken  19866894340982_5
aaacaaaaccagccacgaggccaagaggggccccaaacacacccagttccattccccccatcactccagagcccacgcacacccatcttccagcagagcagagagagccccatactcacaagcgcacygcaatggaagcggtcccatcagctctccrtccccaggcaggacggtcccccagacagctccagatggcgtgtgctgccccaacctcctccaaagtcccttctccyagcagtacccacagccccaatgccatccaggcatccccrtccgcctcctcctccccagcaccaaccracagcrgtggacgcagcagactgagcagctgaaaacccgtgtctgttcctctgtaagcttttctcttctccctccagtatttattggcatgtttaccaagccaactgcacagtaaccgaaaacctcaggggcatttctaaatgctcgctctgtctttaaggtttgctgaggtctctaataagagcaagctgaaaccttcttgtgaacatcagctgagcacagctgctgactgcctgcattcatggcttgttttcctgcagctcctcagatgttgcccttctcagca

SEQ ID NO: 69111 - DNA, 580 bp, Chicken  19866894340982_6
aaccagccacgaggccaagaggggccccaaacacacccagttccattccccccatcactccagagcccacgcacacccatcttccagcagagcagagagagccccatactcacaagcgcacygcaatggaagcggtcccatcagctctccrtccccaggcaggacggtcccccagacagctccagatggcgtgtgctgccccaacctcctccaaagtcccttctccyagcagtacccacagccccaatgccatccaggcatccccrtccgcctcctcctccccagcaccaaccracagcrgtggacgcagcagactgagcagctgaaaacccgtgtctgttcctctgtaagcttttctcttctccctccagtatttattggcatgtttaccaagccaactgcacagtaaccgaaaacctcaggggcatttctaaatgctcgctctgtctttaaggtttgctgaggtctctaataagagcaagctgaaaccttcttgtgaacatcagctgagcacagctgctgactgcctgcattcatggcttgttttcctgcagctcctcagatgttgcccttctcagca

SEQ ID NO: 69112 - DNA, 600 bp, Chicken  19866894340988_1
tgccctggtgcaatcccaccagagcggtgtgtggacattcgcaggtcctgtccctgtctcttagtgctggcacatacggggaggaggtggttgggtgcctggtcctacggggcatggggcatggagaggagggggcaagcaaaagtgaggtacccaagggggcctggtagcacccagggggtgatgggcaccgtgggatggtggacaccaggaatatatgggtccccaggggttcgtgggcccccaggaattcacatgcaccttgatgctgttggggactcaagacccaaagggcatctrgggctccatggggactctgaaatccaggggaacaaggaactacaggcacccaagacctaaaggacacccaagagttgatgactacccaagagttgacagacaccaaaagatacctaggagttcacgtgcacccaggtggtgatgggctccaggagtcagtggcaatagagccgatctggtgcaccctggggctgttgggaacctagaagctgatggagctggtgacactgaggagctgatgggcacccaggagtcacccaaggacttcatgggtacgcacaagcttatagacacccaaga

SEQ ID NO: 69113 - DNA, 600 bp, Chicken  19866894340992_1
tgcttttttctatcagctgagaaaacttcttttggcatttgggcacacatttcttgcagggataaacactatcattctcctggaaggcagagatgttttttttttctgactgtatgttaacacaggaacttaggaagccctacagacagtgacactgaaaatgacttcccactgccacaggtattgattggagaaaagctattcaatatcaggttccagagccttttcattctttatcattacatgtatattatctctactctccccttttcacaaggaataccatgtagtatatttttmtttgggttcataatcacatggtgtggtaaatcctttttttttcagctgcagcaagaaggtcttaaaatgggtatgtattaattggaaggccaaaagtgtcaacagcaacatctgaaattgctctaaccatggaaattcagtatgagtcatactggacaaactgaaatgctagatacaggtcaaataattatgtaacgaaggaaaataggtcagaataagcagaaattcattttgtgtttatggatagtacatgaacatgtaactggccttgatataaatacaaaacaatatgctgaatat

SEQ ID NO: 69114 - DNA, 599 bp, Chicken  19866894340994_1
  misc_feature (1)..(188): n is any nucleotide
nnnnnnnnnnnnnnnnnnnnnnnnnnnnnnnnnnnnnnnnnnnnnnnnnnnnnnnnnnnnnnnnnnnnnnnnnnnnnnnnnnnnnnnnnnnnnnnnnnnnnnnnnnnnnnnnnnnnnnnnnnnnnnnnnnnnnnnnnnnnnnnnnnnnnnnnnnnnnnnnnnnnnnnnnnnnnnnnnnnnnnnnnnnntttctagcccagtaataaaacttgttctaccttggatgcatctaaaacgtcctttcttcccaccatcctcgcttcatgttcttgtccatcctcattgcatcagtccttgaargtgtcagctatttgtatacggcaccctcaggcactgttaacgtgtctactaattccaaatgatttcacttggcyttcccaatacagaccacacatttaagggagtcggagctctccttgccgtttggcaccacaattaactttgtgggtgtaaacaactttgagagcggaaaagttggcattgttagggactgctattcatctgggtgtccctgggtatgtccttctttttccaccccaaattttgtctggatggaaaaatgatgattttggctatttgtcccagaactctggacagcc

SEQ ID NO: 69115 - DNA, 599 bp, Chicken  19866894340994_2
  misc_feature (1)..(114): n is any nucleotide
nnnnnnnnnnnnnnnnnnnnnnnnnnnnnnnnnnnnnnnnnnnnnnnnnnnnnnnnnnnnnnnnnnnnnnnnnnnnnnnnnnnnnnnnnnnnnnnnnnnnnnnnnnnnnnnnnntttctagcccagtaataaaacttgttctaccttggatgcatctaaaacgtcctttcttcccaccatcctcgcttcatgttcttgtccatcctcattgcatcagtccttgaargtgtcagctatttgtatacggcaccctcaggcactgttaacgtgtctactaattccaaatgatttcacttggcyttcccaatacagaccacacatttaagggagtcggagctctccttgccgtttggcaccacaattaactttgtgggtgtaaacaactttgagagcggaaaagttggcattgttagggactgctattcatctgggtgtccctgggtatgtccttctttttccaccccaaattttgtctggatggaaaaatgatgattttggctatttgtcccagaactctggacagccttcttggagccagtagttcctactggactggactgggaccgtagagagataggagaggtgactattctttcccc

SEQ ID NO: 69116 - DNA, 600 bp, Chicken  19866894340994_3
atacagaccacacatttaagggagtcggagctctccttgccgtttggcaccacaattaactttgtgggtgtaaacaactttgagagcggaaaagttggcattgttagggactgctattcatctgggtgtccctgggtatgtccttctttttccaccccaaattttgtctggatggaaaaatgatgattttggctatttgtcccagaactctggacagccttcttggagccagtagttcctactggactggactgggaccgtagagagataggagaggtgactattctttcccctcctccytttttttttctttttttacaagacctaggtttcagtcttctcatctttctgatagttttgtatccaaaaatgtgattccactacgcagtagcttaaaacttagtttctgtggcgcccacccatcagagaaccaaccacctcagggtggcagtaagcataaaataagtcagagcgtggcaagttcagtttgatgcaaagccaaagaaagtcagacagtaaactagaagaactgcttctttactgtgaaagttcaaaaacgatgggtttgaagctgtgtcttgttaggtacacaaagttgta

SEQ ID NO: 69117 - DNA, 600 bp, Chicken  19866894340999_1
accaaatgctgggtcctgcactttggccggaataaccccaggcagcgctacaggcttggggcagagtggctggaagactatgtagaggaaatggacctgggggtgttgattgacgctagactgaacatgagccagcagtgtgcccaggtggccaagaaggccaatggcatcctggcttgtatcagaaatattgtggccagcaggaacagggaagtaattatccccctgtactcagcactggtgaggccgcacctcgagtactgtgtccagttttgggcccctcactgtaagaaagacatmgaggccctgragygtgcccagaggagggcaacaaagctggtgaggggtctggagcacaggccttatgargagcggctgaaggagctgggattgttcagtctagagaagaggaggctcaggggagatcttattgctctctataactacctgaagggaggttgtagtgagctggaggtcaccctcctctctcgggtgactagtgacaggactagagggaatggcttcaagctgcaccagggaaggttcaggctggacgttaggaaatactacttctctgaaagggtggtcaggcactggaat

SEQ ID NO: 69118 - DNA, 600 bp, Chicken  19866894340999_2
gggtcctgcactttggccggaataaccccaggcagcgctacaggcttggggcagagtggctggaagactatgtagaggaaatggacctgggggtgttgattgacgctagactgaacatgagccagcagtgtgcccaggtggccaagaaggccaatggcatcctggcttgtatcagaaatattgtggccagcaggaacagggaagtaattatccccctgtactcagcactggtgaggccgcacctcgagtactgtgtccagttttgggcccctcactgtaagaaagacatmgaggccctgragygtgcccagaggagggcaacaaagctggtgaggggtctggagcacaggccttatgargagcggctgaaggagctgggattgttcagtctagagaagaggaggctcaggggagatcttattgctctctataactacctgaagggaggttgtagtgagctggaggtcaccctcctctctcgggtgactagtgacaggactagagggaatggcttcaagctgcaccagggaaggttcaggctggacgttaggaaatactacttctctgaaagggtggtcaggcactggaatgggctgccca

SEQ ID NO: 69119 - DNA, 600 bp, Chicken  19866894340999_3
tcctgcactttggccggaataaccccaggcagcgctacaggcttggggcagagtggctggaagactatgtagaggaaatggacctgggggtgttgattgacgctagactgaacatgagccagcagtgtgcccaggtggccaagaaggccaatggcatcctggcttgtatcagaaatattgtggccagcaggaacagggaagtaattatccccctgtactcagcactggtgaggccgcacctcgagtactgtgtccagttttgggcccctcactgtaagaaagacatmgaggccctgragygtgcccagaggagggcaacaaagctggtgaggggtctggagcacaggccttatgargagcggctgaaggagctgggattgttcagtctagagaagaggaggctcaggggagatcttattgctctctataactacctgaagggaggttgtagtgagctggaggtcaccctcctctctcgggtgactagtgacaggactagagggaatggcttcaagctgcaccagggaaggttcaggctggacgttaggaaatactacttctctgaaagggtggtcaggcactggaatgggctgcccagag

SEQ ID NO: 69120 - DNA, 600 bp, Chicken  19866894340999_4
ctggaagactatgtagaggaaatggacctgggggtgttgattgacgctagactgaacatgagccagcagtgtgcccaggtggccaagaaggccaatggcatcctggcttgtatcagaaatattgtggccagcaggaacagggaagtaattatccccctgtactcagcactggtgaggccgcacctcgagtactgtgtccagttttgggcccctcactgtaagaaagacatmgaggccctgragygtgcccagaggagggcaacaaagctggtgaggggtctggagcacaggccttatgargagcggctgaaggagctgggattgttcagtctagagaagaggaggctcaggggagatcttattgctctctataactacctgaagggaggttgtagtgagctggaggtcaccctcctctctcgggtgactagtgacaggactagagggaatggcttcaagctgcaccagggaaggttcaggctggacgttaggaaatactacttctctgaaagggtggtcaggcactggaatgggctgcccagagaggtggtggagtcactgaccctggtggtgtttaaagagcgcttggatgttgtgttg

SEQ ID NO: 69121 - DNA, 600 bp, Chicken  19866894341000_1
agggttcaattcttgtgggtgatgctacagtttaaggtgccaggaaagcatttaaaaggcttacgtatggaaagtagcagtgaaatcattccagccatttggagctccagaggaataaacttgcagcactgcaggggagtgacatcacaaaaaaattgtgctgtataaacaaaagagtggagggtagagtagcctgtgaagcaggctaatacatgtccatggagtgctcttagagtaactccaagtcctgactttgtccttccactctggcctcccatctcctgcactgctttctgtgcyttgaattgattgtctttcctttctttaggaaagcattttaaaactgattcttcccagtgagaaytgctcaggtttccattyagtgtacatgtactatttttgtctctcaagttctcagaccagattccactacattcttattttattaaatacaatgatgcacatgctcaaaatgagatcagtctccttctctctttatatagaatgtatatacacttctcgtatatctaagtataagttgagcaattcatatatagaaaatcattagagtttcacacattaaatctgagaggatgctgt

SEQ ID NO: 69122 - DNA, 600 bp, Chicken  19866894341000_2
gtatggaaagtagcagtgaaatcattccagccatttggagctccagaggaataaacttgcagcactgcaggggagtgacatcacaaaaaaattgtgctgtataaacaaaagagtggagggtagagtagcctgtgaagcaggctaatacatgtccatggagtgctcttagagtaactccaagtcctgactttgtccttccactctggcctcccatctcctgcactgctttctgtgcyttgaattgattgtctttcctttctttaggaaagcattttaaaactgattcttcccagtgagaaytgctcaggtttccattyagtgtacatgtactatttttgtctctcaagttctcagaccagattccactacattcttattttattaaatacaatgatgcacatgctcaaaatgagatcagtctccttctctctttatatagaatgtatatacacttctcgtatatctaagtataagttgagcaattcatatatagaaaatcattagagtttcacacattaaatctgagaggatgctgtacaggtgttgcaaagcagtgatttcagttagctcagtggaagtcaataattatggcagacatta

SEQ ID NO: 69123 - DNA, 600 bp, Chicken  19866894341000_3
gaaatcattccagccatttggagctccagaggaataaacttgcagcactgcaggggagtgacatcacaaaaaaattgtgctgtataaacaaaagagtggagggtagagtagcctgtgaagcaggctaatacatgtccatggagtgctcttagagtaactccaagtcctgactttgtccttccactctggcctcccatctcctgcactgctttctgtgcyttgaattgattgtctttcctttctttaggaaagcattttaaaactgattcttcccagtgagaaytgctcaggtttccattyagtgtacatgtactatttttgtctctcaagttctcagaccagattccactacattcttattttattaaatacaatgatgcacatgctcaaaatgagatcagtctccttctctctttatatagaatgtatatacacttctcgtatatctaagtataagttgagcaattcatatatagaaaatcattagagtttcacacattaaatctgagaggatgctgtacaggtgttgcaaagcagtgatttcagttagctcagtggaagtcaataattatggcagacattaatcccaggtgttgaagg

SEQ ID NO: 69124 - DNA, 600 bp, Chicken  19866894341000_4
aggcaggaaatcataccatttgatttccatctgaaaaatagccattggaaacctaactgaattccattaaaaatcagcaattctgttatacctatgtggatgagcactttgtgaagcattgagagctggtgctggaggttcatttgcttcctctttgtctaattttgattaaagagtctcatttatgtggtgaatctgggtactaactgcttgaatgtatatctcaggaaaaaaatatgcatacacctgtcaagtttgagcactaacgccaaagcatttcatgtcattgtgtactgattyttttgtctctttagataaatactatatcagtaagacttcttaacaaagtgtgtgaactgttacaaacacagtgaaattgcagtataactttttagtctagaattcatatttctctgttgttcccaacaaggtgtaaccatccacactgcagtacaaagtgtgagaacagtgatcagtcagtcataagtctgtatcattgagctggtatactctggttaamtctatcagtgctttcmtgtaattaatattctttgggaatctctttacagtctttgaytggtgattttattcccttgcaca

SEQ ID NO: 69125 - DNA, 600 bp, Chicken  19866894341000_5
atctcaggaaaaaaatatgcatacacctgtcaagtttgagcactaacgccaaagcatttcatgtcattgtgtactgattyttttgtctctttagataaatactatatcagtaagacttcttaacaaagtgtgtgaactgttacaaacacagtgaaattgcagtataactttttagtctagaattcatatttctctgttgttcccaacaaggtgtaaccatccacactgcagtacaaagtgtgagaacagtgatcagtcagtcataagtctgtatcattgagctggtatactctggttaamtctatcagtgctttcmtgtaattaatattctttgggaatctctttacagtctttgaytggtgattttattcccttgcacagataaaggtggaaccagttgttccggctccatcaccagttattcctcggctgacactaagagtgggtgcaggccaagacaagatgtaagtacaaaataaaccatctacaatatgccttacacagttcttcatctctgatgtgttgcagctcttgctttcagttggaaacactttaatgttagtggtaaatgacattcatacagccatgatcaggttggat

SEQ ID NO: 69126 - DNA, 600 bp, Chicken  19866894341000_6
atgcatacacctgtcaagtttgagcactaacgccaaagcatttcatgtcattgtgtactgattyttttgtctctttagataaatactatatcagtaagacttcttaacaaagtgtgtgaactgttacaaacacagtgaaattgcagtataactttttagtctagaattcatatttctctgttgttcccaacaaggtgtaaccatccacactgcagtacaaagtgtgagaacagtgatcagtcagtcataagtctgtatcattgagctggtatactctggttaamtctatcagtgctttcmtgtaattaatattctttgggaatctctttacagtctttgaytggtgattttattcccttgcacagataaaggtggaaccagttgttccggctccatcaccagttattcctcggctgacactaagagtgggtgcaggccaagacaagatgtaagtacaaaataaaccatctacaatatgccttacacagttcttcatctctgatgtgttgcagctcttgctttcagttggaaacactttaatgttagtggtaaatgacattcatacagccatgatcaggttggatgggatcctgggcagcc

SEQ ID NO: 69127 - DNA, 600 bp, Chicken  19866894341000_7
ttcatgtcattgtgtactgattyttttgtctctttagataaatactatatcagtaagacttcttaacaaagtgtgtgaactgttacaaacacagtgaaattgcagtataactttttagtctagaattcatatttctctgttgttcccaacaaggtgtaaccatccacactgcagtacaaagtgtgagaacagtgatcagtcagtcataagtctgtatcattgagctggtatactctggttaamtctatcagtgctttcmtgtaattaatattctttgggaatctctttacagtctttgaytggtgattttattcccttgcacagataaaggtggaaccagttgttccggctccatcaccagttattcctcggctgacactaagagtgggtgcaggccaagacaagatgtaagtacaaaataaaccatctacaatatgccttacacagttcttcatctctgatgtgttgcagctcttgctttcagttggaaacactttaatgttagtggtaaatgacattcatacagccatgatcaggttggatgggatcctgggcagcctgatctagaggttggcaaccctgcccatggcaggggagttg

SEQ ID NO: 69128 - DNA, 600 bp, Chicken  19866894341001_1
tgcctgtgtattttggggtttccaggaccgggtcgatttagtagaaggcaaaagtaatttggatgacctactttctgtaaagttagttgtatcctgtaacagttcacacatttcaaggcctgatgtgcaggctgtctctcactgattagaatgaagggaagaggaactatcacagcaaaagtgcatgcccaaatcattatgcatttatttactattgttctgctagttgttaagccatttactagtactcatcccaaattcatgaagtactataaatactcagagaaacttcattacttwtttataaaggacaagaaatgtagttgggaaaattggtttaatattcatgcttccaaaaagaaaaaaagaaaaagagggctctctgggttcccattaaaagcttgttggatgttgcctcatgttgagccctgggtgggttattttgactgcaaaatggagaagttaagcatttctaataagataatttctgataagatgtattcccatatgtgagagaggcaatcatcccatgatgtatgaattctctagaagctagggaatgctctctacctaccaccacctgccaagctgcatgcttga

SEQ ID NO: 69129 - DNA, 599 bp, Chicken  19866894341004_1
  misc_feature (1)..(79): n is any nucleotide
nnnnnnnnnnnnnnnnnnnnnnnnnnnnnnnnnnnnnnnnnnnnnnnnnnnnnnnnnnnnnnnnnnnnnnnnnnnnnnncttcttaaaaatcccagtaagttattaagaaaattgagaaaaccttaatagttaaatacttaaaaacagaacactcttttattatacataataatatgttaaaaagtgaatattgtttcagttgttgtgagtcagtggtgaattataaatatatttttgaagaactataactgaggatcaattctaaaaagatgtatgagttaaacaagtataagtctaayagtgatcctgttacattcaatgacatattttaaattagacatagttcagaatatatttcagaagtgtaattccaccaatatttgagaaaaggccttatattactcacagtacatcaatatatttttccatactacagattgaaagctggcatataattccatgtaaactggaaactgatatttattacattaaagaagatgttagcttagttttttgttttgttggttttagttttttccatctttctaacaggttttttaagaaacaaataacaaaaagccaaactagkaaaaagctt

SEQ ID NO: 69130 - DNA, 579 bp, Chicken  19866894341004_2
taagtctaayagtgatcctgttacattcaatgacatattttaaattagacatagttcagaatatatttcagaagtgtaattccaccaatatttgagaaaaggccttatattactcacagtacatcaatatatttttccatactacagattgaaagctggcatataattccatgtaaactggaaactgatatttattacattaaagaagatgttagcttagttttttgttttgttggttttagttttttccatctttctaacaggttttttaagaaacaaataacaaaaagccaaactagkaaaaagcttccaatrtatctgcaaagaagtgaactgagctgacaaaagtgtgaaaggctaaatcagtctgtaagattattaaatcttatacacaacattyattctacttgcatctcatgttttataggatttttcattaaataagtgcctctaatacagttctagaatcacttttgtccattatttcacccattatttatgcgaacaaaccaatatggaactaggtgggtaaatcatagactcaccaaggtggaagacctacaaggtcatccagtccaa

SEQ ID NO: 69131 - DNA, 564 bp, Chicken  19866894341004_3
tcctgttacattcaatgacatattttaaattagacatagttcagaatatatttcagaagtgtaattccaccaatatttgagaaaaggccttatattactcacagtacatcaatatatttttccatactacagattgaaagctggcatataattccatgtaaactggaaactgatatttattacattaaagaagatgttagcttagttttttgttttgttggttttagttttttccatctttctaacaggttttttaagaaacaaataacaaaaagccaaactagkaaaaagcttccaatrtatctgcaaagaagtgaactgagctgacaaaagtgtgaaaggctaaatcagtctgtaagattattaaatcttatacacaacattyattctacttgcatctcatgttttataggatttttcattaaataagtgcctctaatacagttctagaatcacttttgtccattatttcacccattatttatgcgaacaaaccaatatggaactaggtgggtaaatcatagactcaccaaggtggaagacctacaaggtcatccagtccaa

SEQ ID NO: 69132 - DNA, 479 bp, Chicken  19866894341004_4
ggccttatattactcacagtacatcaatatatttttccatactacagattgaaagctggcatataattccatgtaaactggaaactgatatttattacattaaagaagatgttagcttagttttttgttttgttggttttagttttttccatctttctaacaggttttttaagaaacaaataacaaaaagccaaactagkaaaaagcttccaatrtatctgcaaagaagtgaactgagctgacaaaagtgtgaaaggctaaatcagtctgtaagattattaaatcttatacacaacattyattctacttgcatctcatgttttataggatttttcattaaataagtgcctctaatacagttctagaatcacttttgtccattatttcacccattatttatgcgaacaaaccaatatggaactaggtgggtaaatcatagactcaccaaggtggaagacctacaaggtcatccagtccaa

SEQ ID NO: 69133 - DNA, 600 bp, Chicken  19866894341006_1
tcaaaaccaagctcttcatctccaggcatttcattattccaattacgacttgggggtctacagcctgtaggagaaaccactgaaaagacaagagaattagcgctcagctttcagaactaggatctcagggtaacagctgtttctgagagctttctgaatttgcagagcttcccatgttcctattcctaatctttgtatcactttcaagacaataccttgtttttctttttctccctctaaactcagaaggctcctaaccaggcaggaatatcaccaagtcagtcacctaatctcaggatrttggttycttttcttaaatcttgcacttatattatcttcctctgaatataaccatcataatagcagaaaagtcaatcattttaaccattttaaaaaagcacacaagcagtgctgggatatggtaagttttcagttgcttccaaatgtaaaaaggagagacaatttataccttcagagcaacatggaagcaagagaaagcaacagtgtgggaagaatagagattaagttattattatccagtggacattttctgtttgaaaatccctcaagatctgaaatctcagaagattccctttgcac

SEQ ID NO: 69134 - DNA, 600 bp, Chicken  19866894341006_2
caagctcttcatctccaggcatttcattattccaattacgacttgggggtctacagcctgtaggagaaaccactgaaaagacaagagaattagcgctcagctttcagaactaggatctcagggtaacagctgtttctgagagctttctgaatttgcagagcttcccatgttcctattcctaatctttgtatcactttcaagacaataccttgtttttctttttctccctctaaactcagaaggctcctaaccaggcaggaatatcaccaagtcagtcacctaatctcaggatrttggttycttttcttaaatcttgcacttatattatcttcctctgaatataaccatcataatagcagaaaagtcaatcattttaaccattttaaaaaagcacacaagcagtgctgggatatggtaagttttcagttgcttccaaatgtaaaaaggagagacaatttataccttcagagcaacatggaagcaagagaaagcaacagtgtgggaagaatagagattaagttattattatccagtggacattttctgtttgaaaatccctcaagatctgaaatctcagaagattccctttgcacattcaag

SEQ ID NO: 69135 - DNA, 600 bp, Chicken  19866894341016_1
aaacccgaaggtccagtgctcatacatattttactgttagctggcttatccaagcgcatttaaaatattgccaaaaagccttggttgtccactttttctgttgttaatgcagaatcccttcaatacttcttcaaaatatttcagttattaaagtacaacaatttttcaaacgtgaaatttcagaagaattatgctaaactactctgcaagtatggtagtgtgtagtaagtactatagagatcatttgcatttttggatgagtaattagtattaaatgaaacttctgtacagttttcattstgcaaggcctgaaagttctgaggtgctgtgtgccttacagaacatgagggtctttttcaaatccttctttaactttatggacctgaaataatgaaattattttagatataagagaaaactgctttagaggttttggggatggcagagttaaaattcataagtatgagtttgtgagtagtaaaagacgtgccttatttttttcttattcagaatactaatctaaatgtaagttgggagttcataattcttaaaaatgatagcatgtttttttctgatctagtttttcacaaagagtctcat

SEQ ID NO: 69136 - DNA, 600 bp, Chicken  19866894341016_2
tgctgagccagtattgagaatagccagttcttctgtctcattctttcttttttttccaatatctgcatagaatcatagaatggtctgggttgaaaaggaccacaaaagatcacctagtttcaacccacctgctatgtgtagggttgccaagcaccagaccaggctgcccagagccacagccagcctggccatgaatgcctccagggatggggcatccacaaccttcttgggcaacctgttccagtgcgttaccaccctctgtgtggaaaaacttcctcctaatatctaacctaaacctcycctgtctcagtttaaaaccattcccccttctcctgtcactgtccacccttgtaaacagccattycccctcctgtttatatgttcccttcaggtcccggaaggtcacaatgaggtcttcccagagccttctcttcttcaaactaaacaagcccagttccctcaacctttcctcataggagaggtrctccagccctctgatcatcttagtggccctcctctggaccagttccaagagctctgcatccttcttgtgctggggtccccaggcctggatgcagtactccagatggggcctccctc

SEQ ID NO: 69137 - DNA, 600 bp, Chicken  19866894341016_3
gcatagaatcatagaatggtctgggttgaaaaggaccacaaaagatcacctagtttcaacccacctgctatgtgtagggttgccaagcaccagaccaggctgcccagagccacagccagcctggccatgaatgcctccagggatggggcatccacaaccttcttgggcaacctgttccagtgcgttaccaccctctgtgtggaaaaacttcctcctaatatctaacctaaacctcycctgtctcagtttaaaaccattcccccttctcctgtcactgtccacccttgtaaacagccattycccctcctgtttatatgttcccttcaggtcccggaaggtcacaatgaggtcttcccagagccttctcttcttcaaactaaacaagcccagttccctcaacctttcctcataggagaggtrctccagccctctgatcatcttagtggccctcctctggaccagttccaagagctctgcatccttcttgtgctggggtccccaggcctggatgcagtactccagatggggcctccctctccctgctggctaccccttttttaatacagtccagaacacagttggccttccgggctgcaagcg

SEQ ID NO: 69138 - DNA, 600 bp, Chicken  19866894341016_4
ctggccatgaatgcctccagggatggggcatccacaaccttcttgggcaacctgttccagtgcgttaccaccctctgtgtggaaaaacttcctcctaatatctaacctaaacctcycctgtctcagtttaaaaccattcccccttctcctgtcactgtccacccttgtaaacagccattycccctcctgtttatatgttcccttcaggtcccggaaggtcacaatgaggtcttcccagagccttctcttcttcaaactaaacaagcccagttccctcaacctttcctcataggagaggtrctccagccctctgatcatcttagtggccctcctctggaccagttccaagagctctgcatccttcttgtgctggggtccccaggcctggatgcagtactccagatggggcctccctctccctgctggctaccccttttttaatacagtccagaacacagttggccttccgggctgcaagcgcacactgctggctcatgtccagcttctcatccatccaccaggacccccaagtccttctctgcagtgctgctctcaaggagatcttcccccagtttgtataaatacctgggattgccctga

SEQ ID NO: 69139 - DNA, 600 bp, Chicken  19866894341021_1
gcctgagaagggatcaggctgaatttacacgtcctgctgtgccaggcctctcttggtaaccttccagccctgctcagggcagagcactgggcacgctggcacccactttgccaaccacacagtgtgggattgcaggctgctcacctccgctcatccatggccttctgccctcagtgcttcaggctcttggcactgctcggattcatgttcttctttccgttttaaacaaagtaaatttactggcggtttgtatttaccactaacaccctcttatgcaatcaccctcatgtttttgttccrtttatttatttatttatttattttaaatgaagaatgggacggagtcatttccarcgtgatcactgagtcgagccgtagttcgtggccgttgtctgtccgtgtcctttggtgtttcatttggagtagcaccgtgacagagaggggagttggtttgctgttgtactcaaaggaaaatgtaacaacaacaacaaaatcagttcgcttacagtagaaaaaaatccaygaggtggaaaggatggcctttgttttttattggtctgtctctatggcagtgacttgtgccctgcagggcctctgctg

SEQ ID NO: 69140 - DNA, 600 bp, Chicken  19866894341021_2
ggtaaccttccagccctgctcagggcagagcactgggcacgctggcacccactttgccaaccacacagtgtgggattgcaggctgctcacctccgctcatccatggccttctgccctcagtgcttcaggctcttggcactgctcggattcatgttcttctttccgttttaaacaaagtaaatttactggcggtttgtatttaccactaacaccctcttatgcaatcaccctcatgtttttgttccrtttatttatttatttatttattttaaatgaagaatgggacggagtcatttccarcgtgatcactgagtcgagccgtagttcgtggccgttgtctgtccgtgtcctttggtgtttcatttggagtagcaccgtgacagagaggggagttggtttgctgttgtactcaaaggaaaatgtaacaacaacaacaaaatcagttcgcttacagtagaaaaaaatccaygaggtggaaaggatggcctttgttttttattggtctgtctctatggcagtgacttgtgccctgcagggcctctgctgggctgcttctcccttcatgctgtgygctttgataagtgtgtgatgtgcagtggg

SEQ ID NO: 69141 - DNA, 600 bp, Chicken  19866894341021_3
aaacaaagtaaatttactggcggtttgtatttaccactaacaccctcttatgcaatcaccctcatgtttttgttccrtttatttatttatttatttattttaaatgaagaatgggacggagtcatttccarcgtgatcactgagtcgagccgtagttcgtggccgttgtctgtccgtgtcctttggtgtttcatttggagtagcaccgtgacagagaggggagttggtttgctgttgtactcaaaggaaaatgtaacaacaacaacaaaatcagttcgcttacagtagaaaaaaatccaygaggtggaaaggatggcctttgttttttattggtctgtctctatggcagtgacttgtgccctgcagggcctctgctgggctgcttctcccttcatgctgtgygctttgataagtgtgtgatgtgcagtgggcattaggcagcagccaacgcctgtggctgaggtgaatcaacagaggacctgtttctgggaactctggaaaaaacccgaattgggggagatttcagatgaataatggataaagaatttctgagagcaagaatcagctccaggggaaagcccctttgctgcagcactgtga

SEQ ID NO: 69142 - DNA, 600 bp, Chicken  19866894341021_4
aatgaagaatgggacggagtcatttccarcgtgatcactgagtcgagccgtagttcgtggccgttgtctgtccgtgtcctttggtgtttcatttggagtagcaccgtgacagagaggggagttggtttgctgttgtactcaaaggaaaatgtaacaacaacaacaaaatcagttcgcttacagtagaaaaaaatccaygaggtggaaaggatggcctttgttttttattggtctgtctctatggcagtgacttgtgccctgcagggcctctgctgggctgcttctcccttcatgctgtgygctttgataagtgtgtgatgtgcagtgggcattaggcagcagccaacgcctgtggctgaggtgaatcaacagaggacctgtttctgggaactctggaaaaaacccgaattgggggagatttcagatgaataatggataaagaatttctgagagcaagaatcagctccaggggaaagcccctttgctgcagcactgtgaagtgtgtggaggggaggtgggcaggcagcgcatcccacacctgggttcagtgctgggcttctgccctgagtctgagctggtcctggcgagtgcctgggggag

SEQ ID NO: 69143 - DNA, 599 bp, Chicken  19866894341030_1
  misc_feature (1)..(171): n is any nucleotide
nnnnnnnnnnnnnnnnnnnnnnnnnnnnnnnnnnnnnnnnnnnnnnnnnnnnnnnnnnnnnnnnnnnnnnnnnnnnnnnnnnnnnnnnnnnnnnnnnnnnnnnnnnnnnnnnnnnnnnnnnnnnnnnnnnnnnnnnnnnnnnnnnnnnnnnnnnnnnnnnnnnnnnnnnnnaatgttgtatgtaaaatacaaaggagagttgacctagatgttttttgaaagggctgtgtattcatcactgggacagcctgagagcagttctgccagaggagggtaacagagcggccttgttaaagcccrgaggcaattgaaaaggactggagaaagcgcagctatctggtgcacactgctgtgctgaaatctagggacagtgatgcttccacgagtggcttatctgttatggttatgttttaatgcgtctgccgactctgagagtgaattaggaggaatatgatagcccyacccaggaattagaattgctctcctcactgaacagcgtgttctgcaatggctcatcccatagaaaggmgatggtgcagtcagcagaggcaaaatggggaccctgatgtgtctctgttgcatgtcactttaaggatgac

SEQ ID NO: 69144 - DNA, 599 bp, Chicken  19866894341030_2
  misc_feature (1)..(10): n is any nucleotide
nnnnnnnnnnaatgttgtatgtaaaatacaaaggagagttgacctagatgttttttgaaagggctgtgtattcatcactgggacagcctgagagcagttctgccagaggagggtaacagagcggccttgttaaagcccrgaggcaattgaaaaggactggagaaagcgcagctatctggtgcacactgctgtgctgaaatctagggacagtgatgcttccacgagtggcttatctgttatggttatgttttaatgcgtctgccgactctgagagtgaattaggaggaatatgatagcccyacccaggaattagaattgctctcctcactgaacagcgtgttctgcaatggctcatcccatagaaaggmgatggtgcagtcagcagaggcaaaatggggaccctgatgtgtctctgttgcatgtcactttaaggatgacctctttccattctggccatgaggatgctggttttaggggctggttgatgcagcccttggcttcgtaagtgaagttttamcagtaagcaggagcagggatggattaaaagcaggcagctaaatgaacgtaaatggcttcagggattcagaaagtatctggtg

SEQ ID NO: 69145 - DNA, 600 bp, Chicken  19866894341030_3
tattcatcactgggacagcctgagagcagttctgccagaggagggtaacagagcggccttgttaaagcccrgaggcaattgaaaaggactggagaaagcgcagctatctggtgcacactgctgtgctgaaatctagggacagtgatgcttccacgagtggcttatctgttatggttatgttttaatgcgtctgccgactctgagagtgaattaggaggaatatgatagcccyacccaggaattagaattgctctcctcactgaacagcgtgttctgcaatggctcatcccatagaaaggmgatggtgcagtcagcagaggcaaaatggggaccctgatgtgtctctgttgcatgtcactttaaggatgacctctttccattctggccatgaggatgctggttttaggggctggttgatgcagcccttggcttcgtaagtgaagttttamcagtaagcaggagcagggatggattaaaagcaggcagctaaatgaacgtaaatggcttcagggattcagaaagtatctggtgtgttgtgttgtgttcgttggttctgaggcaaaatctgttgtttcactctcctgctcaacaaatgaagcg

SEQ ID NO: 69146 - DNA, 599 bp, Chicken  19866894341030_4
tccacgagtggcttatctgttatggttatgttttaatgcgtctgccgactctgagagtgaattaggaggaatatgatagcccyacccaggaattagaattgctctcctcactgaacagcgtgttctgcaatggctcatcccatagaaaggmgatggtgcagtcagcagaggcaaaatggggaccctgatgtgtctctgttgcatgtcactttaaggatgacctctttccattctggccatgaggatgctggttttaggggctggttgatgcagcccttggcttcgtaagtgaagttttamcagtaagcaggagcagggatggattaaaagcaggcagctaaatgaacgtaaatggcttcagggattcagaaagtatctggtgtgttgtgttgtgttcgttggttctgaggcaaaatctgttgtttcactctcctgctcaacaaatgaagcgctgcttccacttcttccaggaacatgttggtgggaagggtcaagcccctctgctgttactgctgtgcttgttagagaagaggaagcttttgacagctcccagcaccgaatacttcctctgatcagctgtttctggtgcagcaacagca

SEQ ID NO: 69147 - DNA, 599 bp, Chicken  19866894341036_1
  misc_feature (1)..(180): n is any nucleotide
nnnnnnnnnnnnnnnnnnnnnnnnnnnnnnnnnnnnnnnnnnnnnnnnnnnnnnnnnnnnnnnnnnnnnnnnnnnnnnnnnnnnnnnnnnnnnnnnnnnnnnnnnnnnnnnnnnnnnnnnnnnnnnnnnnnnnnnnnnnnnnnnnnnnnnnnnnnnnnnnnnnnnnnnnnnnnnnnnnnntattttagtggttcttctgatctggaaaggagaacagggaatcaggagctttggattctgcccttgttgctagtaaccattcactgcagaaatttaggcaagccatcactaaattccaasaaccctccctttctctttccccatgcatgggctcagcagcccttcctgcctcagaaaagtacctcagtgtttgtcagataagaatccaaaaaagtatgtgggccttgacctgccttctctgcagagactattttcacccaaatagcacagttttgtctgaattcaattccatgaaaggatattattcctgaattcaaatgttgtatgtcatgggatgttaccaaatagtacaaatgacagataaattatgggagtacattgttaaagaatgtgtacaatcctcctctgaaatggctaga

SEQ ID NO: 69148 - DNA, 600 bp, Chicken  19866894341036_2
ccatgcatgggctcagcagcccttcctgcctcagaaaagtacctcagtgtttgtcagataagaatccaaaaaagtatgtgggccttgacctgccttctctgcagagactattttcacccaaatagcacagttttgtctgaattcaattccatgaaaggatattattcctgaattcaaatgttgtatgtcatgggatgttaccaaatagtacaaatgacagataaattatgggagtacattgttaaagaatgtgtacaatcctcctctgaaatggctagagactctacactctcactgcamgcttttgcattctctaaaactcagatgacattgcttgattaatatctgttatacactttctatcttcttgtctatgttaccaattgcaaatgttttctaatgctttgtctaatgtttaaccttattctcacagtctttgaacttttttgatcaacctttgatatgtgagtcttcaaatatgtaaggatctttgttatcttaatattcagtaagcaagttataggcaagtggatttactcttcagtacacttcaattctgttgagctatgacaatttataccaagataggatttatcttct

SEQ ID NO: 69149 - DNA, 599 bp, Chicken  19866894341051_1
  misc_feature (1)..(135): n is any nucleotide
nnnnnnnnnnnnnnnnnnnnnnnnnnnnnnnnnnnnnnnnnnnnnnnnnnnnnnnnnnnnnnnnnnnnnnnnnnnnnnnnnnnnnnnnnnnnnnnnnnnnnnnnnnnnnnnnnnnnnnnnnnnnnnnnnnnnnnnagcttgtataggctctaaagctgaacaaagggtatctctcaggtttagctcatgctcgttgctgatgtggagtctattttctttctgttactttgcctttctatgagcatatcttagagattatcatgaacaggagaactggagggtagaggcttggagacaggragttctttttcactgttcacatggggaaattaaaaaaaaataataataattctcaaagattatctaagtcagaaagtttataaataaccaaggatggctgaaacaccttggagaagataatcagttctgtttattctagatgattgttaataaccctgtaattattgactactattagtgaaaatgtamaaacaactaacagttgcttaaaaaggggagaaggtaaaaacctctgagatttaatgcaaatgggcttcaatcaatgggcttttaagcttcctctaggttttagatcaaca

SEQ ID NO: 69150 - DNA, 600 bp, Chicken  19866894341051_2
ctcgttgctgatgtggagtctattttctttctgttactttgcctttctatgagcatatcttagagattatcatgaacaggagaactggagggtagaggcttggagacaggragttctttttcactgttcacatggggaaattaaaaaaaaataataataattctcaaagattatctaagtcagaaagtttataaataaccaaggatggctgaaacaccttggagaagataatcagttctgtttattctagatgattgttaataaccctgtaattattgactactattagtgaaaatgtamaaacaactaacagttgcttaaaaaggggagaaggtaaaaacctctgagatttaatgcaaatgggcttcaatcaatgggcttttaagcttcctctaggttttagatcaacagcaaagtcagggctggcatggcttgtagcggctgttaatgcaacacatgcctatcatttgctgttgacaggcattaataaaaaactaatctgaggaaattatgaaaaacctacatattatggaatctggtttatgttttggcatgtggcaagcattggtctaatacaaaggaaaccatcatgtataaact

SEQ ID NO: 69151 - DNA, 600 bp, Chicken  19866894341051_3
tgagatttaatgcaaatgggcttcaatcaatgggcttttaagcttcctctaggttttagatcaacagcaaagtcagggctggcatggcttgtagcggctgttaatgcaacacatgcctatcatttgctgttgacaggcattaataaaaaactaatctgaggaaattatgaaaaacctacatattatggaatctggtttatgttttggcatgtggcaagcattggtctaatacaaaggaaaccatcatgtataaactttacagccattgtttccactgtaagggcaattatttttcttttygttttttttctttttttttttttctttctttttctttttactatgtatgatcttttaattgcctcaaggccygtacaggtttgctttgtggtaccaagggtgttagtttaaagcyttctttcacagaagcaagaaccttaaacagctgttactgactcctgtcagcaataggaaagttcagctctgcgacatcccttcttgagctgactctgctcctctgctcctcttcctcccaaacactggctcctctggcatgtttcctgcattttgttaaatttgaaaccttcttagatttccttt

SEQ ID NO: 69152 - DNA, 594 bp, Chicken  19866894341051_4
gcaaatgggcttcaatcaatgggcttttaagcttcctctaggttttagatcaacagcaaagtcagggctggcatggcttgtagcggctgttaatgcaacacatgcctatcatttgctgttgacaggcattaataaaaaactaatctgaggaaattatgaaaaacctacatattatggaatctggtttatgttttggcatgtggcaagcattggtctaatacaaaggaaaccatcatgtataaactttacagccattgtttccactgtaagggcaattatttttcttttygttttttttcyttttttttttttctttctttttctttttactatgtatgatcttttaattgcctcaaggccygtacaggtttgctttgtggtaccaagggtgttagtttaaagcyttctttcacagaagcaagaaccttaaacagctgttactgactcctgtcagcaataggaaagttcagctctgcgacatcccttcttgagctgactctgctcctctgctcctcttcctcccaaacactggctcctctggcatgtttcctgcattttgttaaatttgaaaccttcttagatttcctttttttt

SEQ ID NO: 69153 - DNA, 533 bp, Chicken  19866894341051_5
tcagggctggcatggcttgtagcggctgttaatgcaacacatgcctatcatttgctgttgacaggcattaataaaaaactaatctgaggaaattatgaaaaacctacatattatggaatctggtttatgttttggcatgtggcaagcattggtctaatacaaaggaaaccatcatgtataaactttacagccattgtttccactgtaagggcaattatttttcttttygttttttttctttttttttttttctttctttttctttttactatgtatgatcttttaattgcctcaaggccygtacaggtttgctttgtggtaccaagggtgttagtttaaagcyttctttcacagaagcaagaaccttaaacagctgttactgactcctgtcagcaataggaaagttcagctctgcgacatcccttcttgagctgactctgctcctctgctcctcttcctcccaaacactggctcctctggcatgtttcctgcattttgttaaatttgaaaccttcttagatttcctttttttt

SEQ ID NO: 69154 - DNA, 490 bp, Chicken  19866894341051_6
cctatcatttgctgttgacaggcattaataaaaaactaatctgaggaaattatgaaaaacctacatattatggaatctggtttatgttttggcatgtggcaagcattggtctaatacaaaggaaaccatcatgtataaactttacagccattgtttccactgtaagggcaattatttttcttttygttttttttctttttttttttttctttctttttctttttactatgtatgatcttttaattgcctcaaggccygtacaggtttgctttgtggtaccaagggtgttagtttaaagcyttctttcacagaagcaagaaccttaaacagctgttactgactcctgtcagcaataggaaagttcagctctgcgacatcccttcttgagctgactctgctcctctgctcctcttcctcccaaacactggctcctctggcatgtttcctgcattttgttaaatttgaaaccttcttagatttcctttttttt

SEQ ID NO: 69155 - DNA, 600 bp, Chicken  19866894341052_1
tcctcacccactcctctcctttccaaaggctgttgtctttggctgctcctttctgcttgatgttacacttcactgcctcctcactcgtattgttacaatcgttgcgccataatgatttaaaagcagattgcaaaaataatttggattttaaagtcctccttttgaagcactggttttggtttgtttctttgttcgttcgttttgcagtgctttttattattattatttttgtaatgcagatgatatcagtgacccaaattgatcacgtatcccacatatacactgatacaatatggtacyaaaatacagwgtagtgggaagaaaaagcagctgggaatatgagaaaatgggatgagaacttcctaaactagtcacccactactgagaatatgttgaactatgtgtttcaggcagatcgatttgtcaccaaggaagtaagtttagtaactgtgactcaccagtgaagaggttttcttgcaacatttttttctatccacttttctactgatgactctgaaaagagctttacctacgggaaaaaaaccatcagatcttagggataacttgctagaaaaaaaatagcattcttttcccaaagtc

SEQ ID NO: 69156 - DNA, 600 bp, Chicken  19866894341052_2
ctcctctcctttccaaaggctgttgtctttggctgctcctttctgcttgatgttacacttcactgcctcctcactcgtattgttacaatcgttgcgccataatgatttaaaagcagattgcaaaaataatttggattttaaagtcctccttttgaagcactggttttggtttgtttctttgttcgttcgttttgcagtgctttttattattattatttttgtaatgcagatgatatcagtgacccaaattgatcacgtatcccacatatacactgatacaatatggtacyaaaatacagwgtagtgggaagaaaaagcagctgggaatatgagaaaatgggatgagaacttcctaaactagtcacccactactgagaatatgttgaactatgtgtttcaggcagatcgatttgtcaccaaggaagtaagtttagtaactgtgactcaccagtgaagaggttttcttgcaacatttttttctatccacttttctactgatgactctgaaaagagctttacctacgggaaaaaaaccatcagatcttagggataacttgctagaaaaaaaatagcattcttttcccaaagtctttagtaatt

SEQ ID NO: 69157 - DNA, 600 bp, Chicken  19866894341052_3
gaaaaagcagctgggaatatgagaaaatgggatgagaacttcctaaactagtcacccactactgagaatatgttgaactatgtgtttcaggcagatcgatttgtcaccaaggaagtaagtttagtaactgtgactcaccagtgaagaggttttcttgcaacatttttttctatccacttttctactgatgactctgaaaagagctttacctacgggaaaaaaaccatcagatcttagggataacttgctagaaaaaaaatagcattcttttcccaaagtctttagtaatttttgtcattmaaataacttmaatccttttcaatctctgggagaaaaataaaasaggaaaattttaaataacwctttaattttatttctctaaaatctacagagttgccactccctttggtggttttgagagagcatcaaagctggttaaattcaaggtgccagattataatctactgatgctaaatgatccaagattcatgattcttgcaaatcctcttgctaccagaagatccttcaataggactcctaaaggatggacatctgagaatattccagtagtgttcattcaaccttcagattccaacaatg

SEQ ID NO: 69158 - DNA, 600 bp, Chicken  19866894341052_4
ctgggaatatgagaaaatgggatgagaacttcctaaactagtcacccactactgagaatatgttgaactatgtgtttcaggcagatcgatttgtcaccaaggaagtaagtttagtaactgtgactcaccagtgaagaggttttcttgcaacatttttttctatccacttttctactgatgactctgaaaagagctttacctacgggaaaaaaaccatcagatcttagggataacttgctagaaaaaaaatagcattcttttcccaaagtctttagtaatttttgtcattmaaataacttmaatccttttcaatctctgggagaaaaataaaasaggaaaattttaaataacwctttaattttatttctctaaaatctacagagttgccactccctttggtggttttgagagagcatcaaagctggttaaattcaaggtgccagattataatctactgatgctaaatgatccaagattcatgattcttgcaaatcctcttgctaccagaagatccttcaataggactcctaaaggatggacatctgagaatattccagtagtgttcattcaaccttcagattccaacaatgttccagaaac

SEQ ID NO: 69159 - DNA, 600 bp, Chicken  19866894341052_5
taaactagtcacccactactgagaatatgttgaactatgtgtttcaggcagatcgatttgtcaccaaggaagtaagtttagtaactgtgactcaccagtgaagaggttttcttgcaacatttttttctatccacttttctactgatgactctgaaaagagctttacctacgggaaaaaaaccatcagatcttagggataacttgctagaaaaaaaatagcattcttttcccaaagtctttagtaatttttgtcattmaaataacttmaatccttttcaatctctgggagaaaaataaaasaggaaaattttaaataacwctttaattttatttctctaaaatctacagagttgccactccctttggtggttttgagagagcatcaaagctggttaaattcaaggtgccagattataatctactgatgctaaatgatccaagattcatgattcttgcaaatcctcttgctaccagaagatccttcaataggactcctaaaggatggacatctgagaatattccagtagtgttcattcaaccttcagattccaacaatgttccagaaacagaggacctgtgagagaagctgcactctatact

SEQ ID NO: 69160 - DNA, 600 bp, Chicken  19866894341052_6
tgagaatatgttgaactatgtgtttcaggcagatcgatttgtcaccaaggaagtaagtttagtaactgtgactcaccagtgaagaggttttcttgcaacatttttttctatccacttttctactgatgactctgaaaagagctttacctacgggaaaaaaaccatcagatcttagggataacttgctagaaaaaaaatagcattcttttcccaaagtctttagtaatttttgtcattmaaataacttmaatccttttcaatctctgggagaaaaataaaasaggaaaattttaaataacwctttaattttatttctctaaaatctacagagttgccactccctttggtggttttgagagagcatcaaagctggttaaattcaaggtgccagattataatctactgatgctaaatgatccaagattcatgattcttgcaaatcctcttgctaccagaagatccttcaataggactcctaaaggatggacatctgagaatattccagtagtgttcattcaaccttcagattccaacaatgttccagaaacagaggacctgtgagagaagctgcactctatactgtacaaagtttggaaagct

SEQ ID NO: 69161 - DNA, 599 bp, Chicken  19866894341066_1
  misc_feature (1)..(1): n is any nucleotide
ntggtatagactggacagaagttgatttttctaattattcaggctggaaaagcacagtgattcatggagggattcaggagtgcagtataaatctagctgatttcttacagacacaacaatagaggaatgtcatgcacaactgtcatctggagccttctttgtgaatagaatttgcattttgtcatggtatcaacgtcccagtctccactgtgcctgagaatcaggaacctcaaattgtcccttgcatggcagcagctaatcaagttttgaaggtatgttttgcaaggtaaagtctaaccraagtgcagtttctaagaccaacttcaaattcactagtgctaagaattgtgaagagacacaggtcattggcaagcctataataaggtaatagcaattatctctgtgtgacagtcctcctagtgccttagattaccagcaccaccttttatgtggtaagaaataacagcatctgtaggaacagggcttgtggagctgactgagaagagaatggctttggactttgatgatagagaaatytgagatgaatcctcaccatactgatggtatatttcatgtctaactctggacattgtaggatg

SEQ ID NO: 69162 - DNA, 488 bp, Chicken  19866894341066_2
tcccttgcatggcagcagctaatcaagttttgaaggtatgttttgcaaggtaaagtctaaccraagtgcagtttctaagaccaacttcaaattcactagtgctaagaattgtgaagagacacaggtcattggcaagcctataataaggtaatagcaattatctctgtgtgacagtcctcctagtgccttagattaccagcaccaccttttatgtggtaagaaataacagcatctgtaggaacagggcttgtggagctgactgagaagagaatggctttggactttgatgatagagaaatytgagatgaatcctcaccatactgatggtatatttcatgtctaactctggacattgtaggatgtggatttcccctttgcctctatgcacttcttctcaaataccccaggtttagaattcagattcataaaaatacaaaagtagtggactccaatttcattctctgttctttgggtaaagcagtgaattt

SEQ ID NO: 69163 - DNA, 599 bp, Chicken  19866894341067_1
  misc_feature (1)..(119): n is any nucleotide
nnnnnnnnnnnnnnnnnnnnnnnnnnnnnnnnnnnnnnnnnnnnnnnnnnnnnnnnnnnnnnnnnnnnnnnnnnnnnnnnnnnnnnnnnnnnnnnnnnnnnnnnnnnnnnnnnnnnnnnggaagatttgttcagactgcattcaaaatgaggaagggtgaggttgttacctgcctttctcctcagaaatattccatgatgttatatcatggttggaagcagcagtaacttgagtagagggagggaaatatctgctgcctgtataatgtcaaacactgactgtattttctacttccttacygatagtgtgttgctttcttcattactgattctctaagcattgtttacttgttatttaacagcttgataaaaccgggttcaaagccacctacaactccagtgaaactaaagaaagtcagcaccttccaagagtttgaaagtaatacaagcgatgcttgggatcctggggatgatgatgatgaactcttagcaatagctgctgaaaacttaaatacagaagtggtcatggaaacggctcacaaagtaattcagaatcacagcaagttacaagaacagcataaatttctggaagagcatcta

SEQ ID NO: 69164 - DNA, 599 bp, Chicken  19866894341069_1
  misc_feature (1)..(152): n is any nucleotide
nnnnnnnnnnnnnnnnnnnnnnnnnnnnnnnnnnnnnnnnnnnnnnnnnnnnnnnnnnnnnnnnnnnnnnnnnnnnnnnnnnnnnnnnnnnnnnnnnnnnnnnnnnnnnnnnnnnnnnnnnnnnnnnnnnnnnnnnnnnnnnnnnnnnnnnntgctatttttgttggcacttctttagcaggcagacaaaaagattaataaaattcaacagtgatggctgagacactcatattaatacaattagggtgatgggaggttgcaaggatacatcatgcatcaaacacaaggtctgccttcccygatgtacacacaagataaggcttctgtgcttccctcrtggctcacctgtacggccaccagcaccatgagcacacaccctatctggcatcattttaaaagaacagtgcagatatggaaaggacaatcagatcatccatgtgaaaacagcccctctaaagatcaaagatctttactcttttccattaattgtgttggactttattttacatcctttctccccagaaaatgtggtattcacttaagataaacacttatcagtgtcctccttttccttccaaaatgcrgcacactgatcaatc

SEQ ID NO: 69165 - DNA, 599 bp, Chicken  19866894341069_2
  misc_feature (1)..(115): n is any nucleotide
nnnnnnnnnnnnnnnnnnnnnnnnnnnnnnnnnnnnnnnnnnnnnnnnnnnnnnnnnnnnnnnnnnnnnnnnnnnnnnnnnnnnnnnnnnnnnnnnnnnnnnnnnnnnnnnnnnntgctatttttgttggcacttctttagcaggcagacaaaaagattaataaaattcaacagtgatggctgagacactcatattaatacaattagggtgatgggaggttgcaaggatacatcatgcatcaaacacaaggtctgccttcccygatgtacacacaagataaggcttctgtgcttccctcrtggctcacctgtacggccaccagcaccatgagcacacaccctatctggcatcattttaaaagaacagtgcagatatggaaaggacaatcagatcatccatgtgaaaacagcccctctaaagatcaaagatctttactcttttccattaattgtgttggactttattttacatcctttctccccagaaaatgtggtattcacttaagataaacacttatcagtgtcctccttttccttccaaaatgcrgcacactgatcaatcatgtgccatccagatccctatccatatagagaataaa

SEQ ID NO: 69166 - DNA, 600 bp, Chicken  19866894341069_3
aaggtctgccttcccygatgtacacacaagataaggcttctgtgcttccctcrtggctcacctgtacggccaccagcaccatgagcacacaccctatctggcatcattttaaaagaacagtgcagatatggaaaggacaatcagatcatccatgtgaaaacagcccctctaaagatcaaagatctttactcttttccattaattgtgttggactttattttacatcctttctccccagaaaatgtggtattcacttaagataaacacttatcagtgtcctccttttccttccaaaatgcrgcacactgatcaatcatgtgccatccagatccctatccatatagagaataaatagcccaagttctaaatcacagcttttggaaaaaaacagcatctttgcatgaaaaacaattccatctatatatacagtgtcactgaaatgatgagccaaaccggaaagtacagataactggagacccctctaaggctggaaagcagctgaggaagcacacgtggaaggctcagctcccagatggtgccacacacatckccccttggccccacagaggagctccagctgcacatccatggcacttcatg

SEQ ID NO: 69167 - DNA, 600 bp, Chicken  19866894341069_4
tcacttaagataaacacttatcagtgtcctccttttccttccaaaatgcrgcacactgatcaatcatgtgccatccagatccctatccatatagagaataaatagcccaagttctaaatcacagcttttggaaaaaaacagcatctttgcatgaaaaacaattccatctatatatacagtgtcactgaaatgatgagccaaaccggaaagtacagataactggagacccctctaaggctggaaagcagctgaggaagcacacgtggaaggctcagctcccagatggtgccacacacatckccccttggccccacagaggagctccagctgcacatccatggcacttcatgcagctcccactgttggtttgttcctgcttcaaggtttgttgagatttttagaacaagaaaatagcaaagggaaaatatttatatgcaaatagttgcagtcatacatacatttagttgtttgtacaaaaggagttgttttctgtgcataaaagcctccttgtaaacagacatagcagtgaatattatcataaagaagaaatccttcaaagcaaggcttacaaattcagttgacctcaggataagtttatat

SEQ ID NO: 69168 - DNA, 599 bp, Chicken  19866894341086_1
  misc_feature (1)..(145): n is any nucleotide
nnnnnnnnnnnnnnnnnnnnnnnnnnnnnnnnnnnnnnnnnnnnnnnnnnnnnnnnnnnnnnnnnnnnnnnnnnnnnnnnnnnnnnnnnnnnnnnnnnnnnnnnnnnnnnnnnnnnnnnnnnnnnnnnnnnnnnnnnnnnnnnnnatgctaacaactttcatattcagtgcattcgacaaagcatctggaggaacaagacaaaaaaaaaatcctaataaatatagacttttaaaatttagtcttgcataagtcctcaggtgatgctgtgattgtgcagtccaaaggaaaatagagaagtratgcacttaaactgacattggcatctaatagaaaataagatattccagactttcagattactctgtgaccagcacagtctatttcaagttttatgagataaacagatatatggtactgttcctgcaagtaacaactagcactaaagcatgctcattgagaacaagtcctggaggaaaagaacatttatttttcattaaatgggcacttcagggaatgcctggctttatgatttgtacagttccaagtttctctggaggcagtttggagagcatgctaggagctgcctgttcctcaggtc

SEQ ID NO: 69169 - DNA, 600 bp, Chicken  19866894341089_1
tgtcaaacttctattctcctggctgtaagcaaaaataatgtctgagcagagtcaatgtcttgggttatcagaactgcagatgcctcttggtacttgattgaacaaacaagctatttcataacctgcagatgaaaatgattcaataaatcagattttttcttctgctaatgaaaaacagagttttcaaattctttaaattactgacatgaaatgcataagacgctgaagagactgcatttttacccacttgttttcagtgcaccactcctccagccattgagccacattaaaagcctcagyaggtatagtctcacccagcatccccttctgcagactgaacttaattactttaataagagacgaagatatgatttcctacacacgagcacatgatgaggaaccggcaaactgtagaaaacattcacattatcacaaataaacatgcactgtttttctataacttttctcagtctatttgccaattgccacatatttttggactgaagcaagtgtttgctcgagcatagagaaatgataacacaaatatccaaacagggctttcttttgtgcttaggcgatttattaaatcaatgagacatt

SEQ ID NO: 69170 - DNA, 600 bp, Chicken  19866894341089_2
atttcctacacacgagcacatgatgaggaaccggcaaactgtagaaaacattcacattatcacaaataaacatgcactgtttttctataacttttctcagtctatttgccaattgccacatatttttggactgaagcaagtgtttgctcgagcatagagaaatgataacacaaatatccaaacagggctttcttttgtgcttaggcgatttattaaatcaatgagacatttcagcatggcacgatattggaaagagtaagtaggagagagtcttcagaaccatcaagcaccagaaacaaygtgctgctccatgggcagtcatagggacattcagggaaattaaagcagattaacataggacaaccagacacagaaaccattctgctgagccctcctttcctgagcttaggggagcagtgcttcaagctctttatgagctcaagaggtcttctgagacatcataaattcagccttggttgtcttcctaacatacagaccacaaaggctgtggctgcaccatccccagaggtaaaaacaccaggaaaacactaggctacaggacaatgctccattgaaaaaccaacttccacaggattaamt

SEQ ID NO: 69171 - DNA, 600 bp, Chicken  19866894341089_3
ygtgctgctccatgggcagtcatagggacattcagggaaattaaagcagattaacataggacaaccagacacagaaaccattctgctgagccctcctttcctgagcttaggggagcagtgcttcaagctctttatgagctcaagaggtcttctgagacatcataaattcagccttggttgtcttcctaacatacagaccacaaaggctgtggctgcaccatccccagaggtaaaaacaccaggaaaacactaggctacaggacaatgctccattgaaaaaccaacttccacaggattaamtgagaaaacaccaacatgttcagactgattaagcaggcggartcttcctggatttctccatattcacccaactggggtgtcaggaggcaaacaatggcaaattagattttgrgcaattgacacataacgaaatagctttgaagcactcatgttttgcttgctcgctgcctgtttctttcttcataattaattttgcactgaagttttaagatggcattaactaaatcctcactacaaaaacagctggtttatctctcttgtatcttttccagcacattaaatcttggggtgggaggcttc

SEQ ID NO: 69172 - DNA, 600 bp, Chicken  19866894341089_4
aaagcagattaacataggacaaccagacacagaaaccattctgctgagccctcctttcctgagcttaggggagcagtgcttcaagctctttatgagctcaagaggtcttctgagacatcataaattcagccttggttgtcttcctaacatacagaccacaaaggctgtggctgcaccatccccagaggtaaaaacaccaggaaaacactaggctacaggacaatgctccattgaaaaaccaacttccacaggattaamtgagaaaacaccaacatgttcagactgattaagcaggcggartcttcctggatttctccatattcacccaactggggtgtcaggaggcaaacaatggcaaattagattttgrgcaattgacacataacgaaatagctttgaagcactcatgttttgcttgctcgctgcctgtttctttcttcataattaattttgcactgaagttttaagatggcattaactaaatcctcactacaaaaacagctggtttatctctcttgtatcttttccagcacattaaatcttggggtgggaggcttcccaccggctgccgaggtgctggcactgggatttcccattggg

SEQ ID NO: 69173 - DNA, 600 bp, Chicken  19866894341089_5
gagcagtgcttcaagctctttatgagctcaagaggtcttctgagacatcataaattcagccttggttgtcttcctaacatacagaccacaaaggctgtggctgcaccatccccagaggtaaaaacaccaggaaaacactaggctacaggacaatgctccattgaaaaaccaacttccacaggattaamtgagaaaacaccaacatgttcagactgattaagcaggcggartcttcctggatttctccatattcacccaactggggtgtcaggaggcaaacaatggcaaattagattttgrgcaattgacacataacgaaatagctttgaagcactcatgttttgcttgctcgctgcctgtttctttcttcataattaattttgcactgaagttttaagatggcattaactaaatcctcactacaaaaacagctggtttatctctcttgtatcttttccagcacattaaatcttggggtgggaggcttcccaccggctgccgaggtgctggcactgggatttcccattggggattccatcccccctctgtttgttcctacagcataagagacagatactttataactaagcaagacctatc

SEQ ID NO: 69174 - DNA, 600 bp, Chicken  19866894341090_1
tcactaattggtcttgtgattagtgcagacaagcaatggagaaggtagttacaagcctttaatatttctaggtggaggcagcttctaggccatctgttacttgatatagtcactaacgtattcagcttctcatctttctgagggatcttcctcagaggcagggtagtacttttctgggttttatcaaggtgacagtgtagccttcttttgcattgttaacccaaactgtaatgtttgcttcctgcagtagacaccaaaccagtttgtcagaaggttaacctacatacctccacttgcaayattttcagcccagtctgacaaataaccatttgaagtattttagtacycatgtaaagcccaagactaggtacaggaaactttagttttactgttgaacaaatagttttactgttgatagtctgaattttcctcaaacatcagtggacagacaaagtaaaatactgatagttacatacaagaaaaacacttaaaaccatgtttctctaaacactgttggagacaaacagctgcaaaagagtttttttactccaattctcactcagataatgagtgagcctcaaagcccacaaccagtgctgt

SEQ ID NO: 69175 - DNA, 600 bp, Chicken  19866894341090_2
gttacaagcctttaatatttctaggtggaggcagcttctaggccatctgttacttgatatagtcactaacgtattcagcttctcatctttctgagggatcttcctcagaggcagggtagtacttttctgggttttatcaaggtgacagtgtagccttcttttgcattgttaacccaaactgtaatgtttgcttcctgcagtagacaccaaaccagtttgtcagaaggttaacctacatacctccacttgcaayattttcagcccagtctgacaaataaccatttgaagtattttagtacycatgtaaagcccaagactaggtacaggaaactttagttttactgttgaacaaatagttttactgttgatagtctgaattttcctcaaacatcagtggacagacaaagtaaaatactgatagttacatacaagaaaaacacttaaaaccatgtttctctaaacactgttggagacaaacagctgcaaaagagtttttttactccaattctcactcagataatgagtgagcctcaaagcccacaaccagtgctgtatccagagccctacatttctgaccttgtttttatttcctgcctttct

SEQ ID NO: 69176 - DNA, 600 bp, Chicken  19866894341092_1
gttccaggggaggatgctgacgaggaagaaagccaagaatggcttattgttccagaggtaatggtggtgggttgcagagctcaggaagtggttttcattctggcccgctctcaggatgcacacacagggcttaccacagtaagtgaaaacagacacaatgctgattaacctaagaaagccctcctggctccgggcacaactgcagcccagggcaatttccaggctgtgggtccccagagcagcctgcagggcaacagcgccatgaacggctgcctgcactgagtgcctgcatagggccgsggtgtcaccgtccttggcaagtattaacaaactctcaagcattaacaaactctcgtccagtacgtttatgacagcttaactcttaggaaaactccatttcctccctcacctccaacaatcaaagctggcttcgctgtcactgcagagtaactcgtatccacatggtgtgctttgggccgtccccaaagagatcagcagcaaaaggaatgagtgtccattgtaggctggcagatacgagatccagttctgcacactgggccaggagaaaagctacagcggtgcccctttcatgtagctcag

SEQ ID NO: 69177 - DNA, 600 bp, Chicken  19866894341095_1
gtaactgtagcaatgtcctaaattgctgttctctggcattgaaactgcttgcattttggtctctggttgtccccactgagctgtctgttgtgtgtcttcctctgttcctgactaccactgtgtttttgatatatgatgaaatgaaagtgggagttaattgccaactgtgagtgaaaaggggaagttcacttggtcagctagtggatgaaatctcacagtgttatttactgagtcttgaatcttatatatggtgggaaaattttcctctaaaagtagtttcatagtcctgtgctgtctgtraatatattatgtatttgatcttcatatctgacggcaagatctgtgcctgattcaatttccctttccctcagagggtaagcatgaaccagacttgaggcttcaggaacacctatttaagaaactggcaagcacaaaagtttttaagagaatattcttcaagctaatccagtacaccgtaaagtcctgggaaatcaacaagcatcatcagaaaactagagactttgaaacaaatatttcatttgtccctaggaaagtaaaaaaaccatcatttcagcctatgagatttgcatgtcaaaatct

SEQ ID NO: 69178 - DNA, 599 bp, Chicken  19866894341099_1
  misc_feature (1)..(61): n is any nucleotide
nnnnnnnnnnnnnnnnnnnnnnnnnnnnnnnnnnnnnnnnnnnnnnnnnnnnnnnnnnnnncattgcagccctgagttgctggaggtagcttgttcaacttctgtataataaatagctcagagaacacctgagcttaattggaagatattcagtgctttttctcacagtggcagtgtgtttccatggtcattggtgttagccaagagaggcatctttgttatggtgccctctcttaacgtaactgaaaggacttgaagtctttattgttgcctggtaagcaacagaggtgacagaggtcrttttgttcttccttgtcttagtcttcatgctaattgaagttcacaaacacatttaaatgtttttttttccattggtgggctgttctttttgttgttgctgtttttaatgaagaaaacaatcatcaaagtccagagaaatagtggacctgcaaagtgtctgctaatataaaagagatttctggaggaaagcaaatgcagagaagtcagtcctgcttttttgttcaagaaagtgccctgaaacaataaacctgccatttctgggacacagaggatgtttcaatattgtcttaacctcaaat

SEQ ID NO: 69179 - DNA, 599 bp, Chicken  19866894341099_2; identical to SEQ ID NO: 69178
  misc_feature (1)..(61): n is any nucleotide

SEQ ID NO: 69180 - DNA, 599 bp, Chicken  19866894341099_3; identical to SEQ ID NO: 69178
  misc_feature (1)..(61): n is any nucleotide

SEQ ID NO: 69181 - DNA, 599 bp, Chicken  19866894341106_1
  misc_feature (1)..(27): n is any nucleotide
nnnnnnnnnnnnnnnnnnnnnnnnnnntctcctaaatcagagaacagtgagccaaggaatacaaaaaaaaaagtctttatttgccttgcaggcagtattttctatcatttcatttttcattaaaaatctaaacaaatctaatacatcttttgcatccctttgtatatgaaaaatcatcaggttattgcatgattattttgcatatagatagctatcagtgaattataaacactaaacatctgaagttatcaacaagagagaaaataagtatgacaaaatttcttttccctaaaatgtgtygttctgtgttttgggagcttcagagattccactcatttcattttctgtggattgagaagtccaggtgtcyactgtaaggcaaatastgctctttacatcttctattattctgacatcctccttatcatccattcttctttggagtgtctaaatagtggagtgtcatgggcaaacacaaactgctctgagcaaagraaagtgatgacagagcagctaatggaaagcttcccatcatgaagaggttacagattaagatgtgacacagaaaaggagaaagtaaagaaaaaggcagaaatgtg

SEQ ID NO: 69182 - DNA, 600 bp, Chicken  19866894341106_2
aagtctttatttgccttgcaggcagtattttctatcatttcatttttcattaaaaatctaaacaaatctaatacatcttttgcatccctttgtatatgaaaaatcatcaggttattgcatgattattttgcatatagatagctatcagtgaattataaacactaaacatctgaagttatcaacaagagagaaaataagtatgacaaaatttcttttccctaaaatgtgtygttctgtgttttgggagcttcagagattccactcatttcattttctgtggattgagaagtccaggtgtcyactgtaaggcaaatastgctctttacatcttctattattctgacatcctccttatcatccattcttctttggagtgtctaaatagtggagtgtcatgggcaaacacaaactgctctgagcaaagraaagtgatgacagagcagctaatggaaagcttcccatcatgaagaggttacagattaagatgtgacacagaaaaggagaaagtaaagaaaaaggcagaaatgtgactatgatttttagaaaggattttgcaattagctgtcagacatgcatgcatttttgatttccaattgcatt

SEQ ID NO: 69183 - DNA, 600 bp, Chicken  19866894341106_3
tgcaggcagtattttctatcatttcatttttcattaaaaatctaaacaaatctaatacatcttttgcatccctttgtatatgaaaaatcatcaggttattgcatgattattttgcatatagatagctatcagtgaattataaacactaaacatctgaagttatcaacaagagagaaaataagtatgacaaaatttcttttccctaaaatgtgtygttctgtgttttgggagcttcagagattccactcatttcattttctgtggattgagaagtccaggtgtcyactgtaaggcaaatastgctctttacatcttctattattctgacatcctccttatcatccattcttctttggagtgtctaaatagtggagtgtcatgggcaaacacaaactgctctgagcaaagraaagtgatgacagagcagctaatggaaagcttcccatcatgaagaggttacagattaagatgtgacacagaaaaggagaaagtaaagaaaaaggcagaaatgtgactatgatttttagaaaggattttgcaattagctgtcagacatgcatgcatttttgatttccaattgcattagattattcttgtaat

SEQ ID NO: 69184 - DNA, 600 bp, Chicken  19866894341106_4
ttttgcatatagatagctatcagtgaattataaacactaaacatctgaagttatcaacaagagagaaaataagtatgacaaaatttcttttccctaaaatgtgtygttctgtgttttgggagcttcagagattccactcatttcattttctgtggattgagaagtccaggtgtcyactgtaaggcaaatastgctctttacatcttctattattctgacatcctccttatcatccattcttctttggagtgtctaaatagtggagtgtcatgggcaaacacaaactgctctgagcaaagraaagtgatgacagagcagctaatggaaagcttcccatcatgaagaggttacagattaagatgtgacacagaaaaggagaaagtaaagaaaaaggcagaaatgtgactatgatttttagaaaggattttgcaattagctgtcagacatgcatgcatttttgatttccaattgcattagattattcttgtaatggtagatttcaggaaaagggttttataagtaacttgcaaacaggaagaatgaggtctgtaaacagggattaagaaggcattccatgaatgtgagacagctagacagaga

SEQ ID NO: 69185 - DNA, 599 bp, Chicken  19866894341108_1
  misc_feature (1)..(138): n is any nucleotide
nnnnnnnnnnnnnnnnnnnnnnnnnnnnnnnnnnnnnnnnnnnnnnnnnnnnnnnnnnnnnnnnnnnnnnnnnnnnnnnnnnnnnnnnnnnnnnnnnnnnnnnnnnnnnnnnnnnnnnnnnnnnnnnnnnnnnnnnnntaccaacaggaactgggaacagctcccttagaaaaagttctttctcactatatcagctcagtcatttttatctgataatttggaagctaagcatttccataagtttcttcctccaaacagtggaatgctctttaacttcagacatctcaagtttaatggagygtgcagattctttccctactycctctcctttcttgctttaggaaaaagagataataaaagcatcagatagcatttgcaattaaataaataaatcttaccctggaataagatagttgttctcccatctgtagcgcatttctaacacaaactcttgccaaagatgtgccactccttttactcctccatggtagaagtttatcatacaaagacacaaagctagtttgtacgtcagactatcagaaggagcagatttaaactgactgaagagattctatataagaaataaaagaaagcaggaa

SEQ ID NO: 69186 - DNA, 599 bp, Chicken  19866894341108_2
  misc_feature (1)..(117): n is any nucleotide
nnnnnnnnnnnnnnnnnnnnnnnnnnnnnnnnnnnnnnnnnnnnnnnnnnnnnnnnnnnnnnnnnnnnnnnnnnnnnnnnnnnnnnnnnnnnnnnnnnnnnnnnnnnnnnnnnnnnntaccaacaggaactgggaacagctcccttagaaaaagttctttctcactatatcagctcagtcatttttatctgataatttggaagctaagcatttccataagtttcttcctccaaacagtggaatgctctttaacttcagacatctcaagtttaatggagygtgcagattctttccctactycctctcctttcttgctttaggaaaaagagataataaaagcatcagatagcatttgcaattaaataaataaatcttaccctggaataagatagttgttctcccatctgtagcgcatttctaacacaaactcttgccaaagatgtgccactccttttactcctccatggtagaagtttatcatacaaagacacaaagctagtttgtacgtcagactatcagaaggagcagatttaaactgactgaagagattctatataagaaataaaagaaagcaggaatacagaaccatacaatctgtg

SEQ ID NO: 69187 - DNA, 599 bp, Chicken  19866894341134_1
  misc_feature (1)..(161): n is any nucleotide
nnnnnnnnnnnnnnnnnnnnnnnnnnnnnnnnnnnnnnnnnnnnnnnnnnnnnnnnnnnnnnnnnnnnnnnnnnnnnnnnnnnnnnnnnnnnnnnnnnnnnnnnnnnnnnnnnnnnnnnnnnnnnnnnnnnnnnnnnnnnnnnnnnnnnnnnnnnnnnnnnacagaagcaaataagatgatggattaacacagcctcccattcagcgatgctcagttaagctattaactccttggactgtcagccacccacctctgctccagcactgacagctcttgcagtggccactgtgcgtcacgcygtcggctggctggctgctgctttgtctgaattaaccactgcattttagccttgacagttattttcatccctatgccccattacagtgaaatccaagcctccggttcagcgaggagctggggatgrgggtgggcagraggctgcctttccgggctgagctcagacagtaattcctcaacagcagcagatggccacagctaacctccaccagctccacctttggccattttgacttttgagcgaggaaagaatggggcagaggtgaggtgtccatctgatgtgcagaaccagagtctctgc

SEQ ID NO: 69188 - DNA, 599 bp, Chicken  19866894341134_2
  misc_feature (1)..(36): n is any nucleotide
nnnnnnnnnnnnnnnnnnnnnnnnnnnnnnnnnnnnacagaagcaaataagatgatggattaacacagcctcccattcagcgatgctcagttaagctattaactccttggactgtcagccacccacctctgctccagcactgacagctcttgcagtggccactgtgcgtcacgcygtcggctggctggctgctgctttgtctgaattaaccactgcattttagccttgacagttattttcatccctatgccccattacagtgaaatccaagcctccggttcagcgaggagctggggatgrgggtgggcagraggctgcctttccgggctgagctcagacagtaattcctcaacagcagcagatggccacagctaacctccaccagctccacctttggccattttgacttttgagcgaggaaagaatggggcagaggtgaggtgtccatctgatgtgcagaaccagagtctctgcatcacactgatacctcccccattgccctgaaatattccagagccacaaaatgaacctcaaactgagcccatgggaagcctccgctcatttcaaaggatgagggatcagtgctacatggagctttc

SEQ ID NO: 69189 - DNA, 599 bp, Chicken  19866894341134_3
  misc_feature (1)..(25): n is any nucleotide
nnnnnnnnnnnnnnnnnnnnnnnnnacagaagcaaataagatgatggattaacacagcctcccattcagcgatgctcagttaagctattaactccttggactgtcagccacccacctctgctccagcactgacagctcttgcagtggccactgtgcgtcacgcygtcggctggctggctgctgctttgtctgaattaaccactgcattttagccttgacagttattttcatccctatgccccattacagtgaaatccaagcctccggttcagcgaggagctggggatgrgggtgggcagraggctgcctttccgggctgagctcagacagtaattcctcaacagcagcagatggccacagctaacctccaccagctccacctttggccattttgacttttgagcgaggaaagaatggggcagaggtgaggtgtccatctgatgtgcagaaccagagtctctgcatcacactgatacctcccccattgccctgaaatattccagagccacaaaatgaacctcaaactgagcccatgggaagcctccgctcatttcaaaggatgagggatcagtgctacatggagctttccaattagatgg

SEQ ID NO: 69190 - DNA, 599 bp, Chicken  19866894341137_1
  misc_feature (1)..(15): n is any nucleotide
nnnnnnnnnnnnnnnccccccaccctcaccacagcctctttccagggagcaataaggtctcccctgagcttccctcctccgggttgatcaatccctcttccggaggagcaaagcaggaggagagattagaaacttttccagcacatgaacaactccaacacctcctgggcccagcccccagctgcagggctttcagtacttggccaggggacatttctcagtgtccccaagagcctcctgtggtgccaagacacagcgatgccctggaagccagagatgggagccaacagcttcagtccrtctcccaaaggccagagctccgtgtccttgcagcccatacaccgcagagcacagggctgccgtgtcccatgtggatcttcagataaccaaagttgaataaaaaaagtgaaatccaaagagttaatgcacccaacgctgcastgcacaaaggaagaagcagtccctcaacaggcctgttccaaataataactcaagttctttagaaagcaggtcagcagcgctgagtaataagttcattataatccaataaagttcattagtccttgaaaagtctaagatgcaaaagcaatgttaccgac

SEQ ID NO: 69191 - DNA, 600 bp, Chicken  19866894341137_2
cacatgaacaactccaacacctcctgggcccagcccccagctgcagggctttcagtacttggccaggggacatttctcagtgtccccaagagcctcctgtggtgccaagacacagcgatgccctggaagccagagatgggagccaacagcttcagtccrtctcccaaaggccagagctccgtgtccttgcagcccatacaccgcagagcacagggctgccgtgtcccatgtggatcttcagataaccaaagttgaataaaaaaagtgaaatccaaagagttaatgcacccaacgctgcastgcacaaaggaagaagcagtccctcaacaggcctgttccaaataataactcaagttctttagaaagcaggtcagcagcgctgagtaataagttcattataatccaataaagttcattagtccttgaaaagtctaagatgcaaaagcaatgttaccgacggaatcgccctctggcgggatcatttctgggtgggaaaaaaagggtttgagataaaaggaaataaaaataggcagcaaaaattgggaataggagaaggagtcgctgggagagctgcagacacctccagcacagccagagcca

SEQ ID NO: 69192 - DNA, 600 bp, Chicken  19866894341138_1
tggcaagacctgtcgctgttttgtcatcttcagagtatgggagacgcacagacaagcacacagagcagcagatccgaagtcatgcaaggattaattgtgtgcaggcagaattctacaggaaaaatggcatcacctgcctattggaaaaaccttctccaagactggatccgtgctaaaatctcttacagctgacattgccagcagtatttgtgtgcacagaaacatgtcaaaatgcaaaatagtgcttctgccttttcctttgcattttcattaatgaaaatgatttatatgaaataactscacttttcctcatgttgattcaaatgtatgttttctcctttgagtctcytagaagtctcatgtagaacatccacaaaagctgaacrtttcaggaagcaacactggaaattaaatctgttgggtcaacagccatctgtgctatttcaggcagtaactctacataactgttcactgacttaacatgaaatttgctccttgtggtatcagtggttgctgatttcttcatacttatagttcttaatccctacaaaatcagaaagcatcttttttttcttttttctgcagaacagtaattcaatc

SEQ ID NO: 69193 - DNA, 600 bp, Chicken  19866894341138_2
agacaagcacacagagcagcagatccgaagtcatgcaaggattaattgtgtgcaggcagaattctacaggaaaaatggcatcacctgcctattggaaaaaccttctccaagactggatccgtgctaaaatctcttacagctgacattgccagcagtatttgtgtgcacagaaacatgtcaaaatgcaaaatagtgcttctgccttttcctttgcattttcattaatgaaaatgatttatatgaaataactscacttttcctcatgttgattcaaatgtatgttttctcctttgagtctcytagaagtctcatgtagaacatccacaaaagctgaacrtttcaggaagcaacactggaaattaaatctgttgggtcaacagccatctgtgctatttcaggcagtaactctacataactgttcactgacttaacatgaaatttgctccttgtggtatcagtggttgctgatttcttcatacttatagttcttaatccctacaaaatcagaaagcatcttttttttcttttttctgcagaacagtaattcaatcagtaattcaacccagattttcccaactggatgagcaagtaaataaagat

SEQ ID NO: 69194 - DNA, 600 bp, Chicken  19866894341138_3
aggattaattgtgtgcaggcagaattctacaggaaaaatggcatcacctgcctattggaaaaaccttctccaagactggatccgtgctaaaatctcttacagctgacattgccagcagtatttgtgtgcacagaaacatgtcaaaatgcaaaatagtgcttctgccttttcctttgcattttcattaatgaaaatgatttatatgaaataactscacttttcctcatgttgattcaaatgtatgttttctcctttgagtctcytagaagtctcatgtagaacatccacaaaagctgaacrtttcaggaagcaacactggaaattaaatctgttgggtcaacagccatctgtgctatttcaggcagtaactctacataactgttcactgacttaacatgaaatttgctccttgtggtatcagtggttgctgatttcttcatacttatagttcttaatccctacaaaatcagaaagcatcttttttttcttttttctgcagaacagtaattcaatcagtaattcaacccagattttcccaactggatgagcaagtaaataaagatctgatttctagaagtactgaggaatttcactggagtt

SEQ ID NO: 69195 - DNA, 600 bp, Chicken  19866894341138_4
ccaactggatgagcaagtaaataaagatctgatttctagaagtactgaggaatttcactggagttcaaatggaagtcaagttaaagggaacttctcagtgcttagcatgtaaaaagacactaaaatttggccttagataattttaggcatccattttgctgacatcagttaaaaaaatgttgtcacagggattgatccatcacaagaaaaatcacttttggttccttacccaattctctactactaagagagcagtaactgattgtttggtagaaagaattaaaaaaaaacaaaaacaayccaacaatatatgtcacttaaaaagtatctctggaggtaaatgtctaaagccactgaaacacctgcttccttctattctcattgaatgtaggagtggagttttaagatattttcaggaaaagaaacatcttctgcagggtgtccatccttgtggttctgcagtgccattgatcctgttgttggttaaagttgaagcaatactgatactgttcaatatcgaacatttagccagaccgatcacacctgtttaagaaggattggaagtccacagcattgactgacactgcacttctgtcagat

SEQ ID NO: 69196 - DNA, 600 bp, Chicken  19866894341143_1
tctgtacagagattttgaagtagaatatgcttacgtgacaatttaaattaagaaacatcttgctgacagggccaaaaagaaaaagatcttaggataagtaacagtagatgatcccatataccatctaatagtaaatctgtaatagtatgattctacaatacaagcaaaataaaattcaaacttaatgtaaaagtatttccattcatggatgcaagaaccatttttccttattaataatgcacttgacttgacctacaggatgatgtccccattccttcagtcgcctcaatgttagcacaytttcatctccgggaaaatagaggggaaaaataaaagaacatttatgtcagaaatagtggtgaggtactagctgtgaaccaccacagacaattacacctttgcactctgggatggaatttacttgcattgatataccctgatctggaaatgagtacacttttatcatctcttgttcttacacttctttgaggtccaatttcatacacaagcaaggtgctaatgtaatattttcagtctctagtcctaggtaattttcttttctattttaatgggattagcttggaatatgccatgacttac

SEQ ID NO: 69197 - DNA, 599 bp, Chicken  19866894341148_1
  misc_feature (1)..(45): n is any nucleotide
nnnnnnnnnnnnnnnnnnnnnnnnnnnnnnnnnnnnnnnnnnnnngatagaccttcttttgtaggaattctttagcacctgtaggttatgcattcaattagcatctatatcctgaactgagctgagttgcaccagctttgaaaaaagtaacaaccaaatggctaattaggtcaaatttggggcgtatcaaacttgacagtgtctggcttacatcactatggatttacataatggaacttaacagcactgaagagtctgttgtgtcaactccgatgactgtaagaaaggatttttttgtaytttttttttttaacataaaatattcactcagaagaatatcctcccaatacattttccatctgtgctgcgctgtgcccatcactgctcattacctggcctaccaccgcagtggtatttcaattggttattttatttttcagaactcagtaatcagcatcagcaaccaattgtttaacaaatttcctctttaaaaccaaagcaattttttcagctaaaccagagctatttctcaaagtgcaaatgcctgggagggaaggcaaaaccataaggactcaagtaaatgcccttggtagtttttc

SEQ ID NO: 69198 - DNA, 600 bp, Chicken  19866894341151_1
tcttccaaaatctggctcacttggaagcttgaacaaagataacagagatctctgcatgatttcaccagtgcttcaaaccagagcaatttagagcagaaacatctgccaatggccaccttgccccagccaaagagacaacagccagtcaacgagagatacagcagcagccagtgtatggggcatgcacagacatgcacacagccctgtatggggcagggccagcactcggtgctctccccatgaagcctcccctctggtgtcctgctcgctccttggctcttggcacatgggacgtggccrtgtctccatccatgagcagcatgcaatgggggatgcagggcaccacaggggttaacctatcccctacagggggcacagctcacaaactgttttcctccaagccaggtccagctgtcctccaagtggccagcagccaacaaggcaatccatccctctgcaggacgctgacccgacactcccaagcacagcctgcccagggcctttcctttgccagaagcagctccaggggggtcatgttttctcacccatgtctgcaaaaccacaggtgaattcctgtaagaaatgagcagctccccctgc

SEQ ID NO: 69199 - DNA, 599 bp, Chicken  19866894341154_1
  misc_feature (1)..(174): n is any nucleotide
nnnnnnnnnnnnnnnnnnnnnnnnnnnnnnnnnnnnnnnnnnnnnnnnnnnnnnnnnnnnnnnnnnnnnnnnnnnnnnnnnnnnnnnnnnnnnnnnnnnnnnnnnnnnnnnnnnnnnnnnnnnnnnnnnnnnnnnnnnnnnnnnnnnnnnnnnnnnnnnnnnnnnnnnnnnnnnctcttctacctttctggagccatttcccactgctctcatcccttagccctccgtaaccttccaagcactttgcacaaaggcacaccgagggcagatgaggcttcagagaggaccagagccaacgcrctgctggcgtccatcagcagagggagagcagagctcccaggggtgggtgaccgcttctgcttgaggggtgcagggtgagcrcgccaggacctctcctgctccgtgcccatcgggctgccaacagattggtggcatgcatttaaacttcgctcatcacaaagcatgattagctgtgaaaagggggcttagtgtgggctggaaaactactgaggcagccgaattccccacacagcctcgctgccagctgagccaggggagaagcaatggggcaaagccgcggccgggagagcaccgcgcag

SEQ ID NO: 69200 - DNA, 599 bp, Chicken  19866894341154_2
  misc_feature (1)..(93): n is any nucleotide
nnnnnnnnnnnnnnnnnnnnnnnnnnnnnnnnnnnnnnnnnnnnnnnnnnnnnnnnnnnnnnnnnnnnnnnnnnnnnnnnnnnnnnnnnnnnnctcttctacctttctggagccatttcccactgctctcatcccttagccctccgtaaccttccaagcactttgcacaaaggcacaccgagggcagatgaggcttcagagaggaccagagccaacgcrctgctggcgtccatcagcagagggagagcagagctcccaggggtgggtgaccgcttctgcttgaggggtgcagggtgagcrcgccaggacctctcctgctccgtgcccatcgggctgccaacagattggtggcatgcatttaaacttcgctcatcacaaagcatgattagctgtgaaaagggggcttagtgtgggctggaaaactactgaggcagccgaattccccacacagcctcgctgccagctgagccaggggagaagcaatggggcaaagccgcggccgggagagcaccgcgcagcccctgccctccccgagcacgtagcccttatattaaatccaggaataggaaattccacttcttcagaaaaaaaaacagaat

SEQ ID NO: 69201 - DNA, 600 bp, Chicken  19866894341160_1
ctcacaaagaagcacacagttacagtcagtctggattcacatttttccatacatatgctaggatttctcacatgtttttaaagggtgacagcccatcctaccctcctttctcactcagtttattttgcataaatgcctgagcagcagcaggtctttcaggtcagggaaatgactttaagcacttgcagtttgcagtcacagctttttccttcttctccatcctgaagaacttgagctgggctgacagctgcctcacagcactttgtgacccagagatcattgggctcagatcagctccasgtttgagatatgtgtgcctatgtccatagtgaactcctcctcaaaaacaagctaaatctgaaagccaagmgtaacttttgaatagcagaaaacaggttgagaaggtgcaatataattcaggcacattttactgtcaggcctctaccattcctccaccatcatgcagaacagtcccaagaatttcacatccgtctgccatcactgggattctctgattgacactaaagacagctgaaaatcaactacaacatttgggatgagtttaaaaacaaaaacaaaacaagtaaaagaaacagatga

SEQ ID NO: 69202 - DNA, 549 bp, Chicken  19866894341160_2
catgtttttaaagggtgacagcccatcctaccctcctttctcactcagtttattttgcataaatgcctgagcagcagcaggtctttcaggtcagggaaatgactttaagcacttgcagtttgcagtcacagctttttccttcttctccatcctgaagaacttgagctgggctgacagctgcctcacagcactttgtgacccagagatcattgggctcagatcagctccasgtttgagatatgtgtgcctatgtccatagtgaactcctcctcaaaaacaagctaaatctgaaagccaagmgtaacttttgaatagcagaaaacaggttgagaaggtgcaatataattcaggcacattttactgtcaggcctctaccattcctccaccatcatgcagaacagtcccaagaatttcacatccgtctgccatcactgggattctctgattgacactaaagacagctgaaaatcaactacaacatttgggatgagtttaaaaacaaaaacaaaacaagtaaaagaaacagatgagcaggaatcagattaacat

SEQ ID NO: 69203 - DNA, 600 bp, Chicken  19866894341176_1
atgctggtgctgcttggtcagatcctctttccagcaaaagaagagacagaacaaacactggtgagttcatcagaaacaagagatgatttattgagaaagtgttcaacaattactcctttgaagaatgttggcacttcatccccacaacagtgcctctcataatctgatccacaataaaacaagcaaatccctcctggccttgtctcaccaggaagagtatcagtctactgaatccacaaaccctacatatttgatataaagtgacaattgatagtcaatagtattggcagacacacacaytgaagctaactgcatgrcaggaaacatcctttttcagttcatcattgtgtaattcaatgctgtattattagagatatgaggaaagtttccataggaagagaaattgaaaagaagaggacttatastttaaagaaataacaaaaamcatggccttactaccctacacaatccacaaaaaaaattacttttgtcctatttactgttccttataatgaaagaacaagagataactgaaaaaaaaaaaattgaaaggcattcaattgaaaacgataaaaggatttatttatttgtacacaacat

SEQ ID NO: 69204 - DNA, 600 bp, Chicken  19866894341176_2
tcagatcctctttccagcaaaagaagagacagaacaaacactggtgagttcatcagaaacaagagatgatttattgagaaagtgttcaacaattactcctttgaagaatgttggcacttcatccccacaacagtgcctctcataatctgatccacaataaaacaagcaaatccctcctggccttgtctcaccaggaagagtatcagtctactgaatccacaaaccctacatatttgatataaagtgacaattgatagtcaatagtattggcagacacacacaytgaagctaactgcatgrcaggaaacatcctttttcagttcatcattgtgtaattcaatgctgtattattagagatatgaggaaagtttccataggaagagaaattgaaaagaagaggacttatastttaaagaaataacaaaaamcatggccttactaccctacacaatccacaaaaaaaattacttttgtcctatttactgttccttataatgaaagaacaagagataactgaaaaaaaaaaaattgaaaggcattcaattgaaaacgataaaaggatttatttatttgtacacaacatacaagtgacttctggag

SEQ ID NO: 69205 - DNA, 521 bp, Chicken  19866894341176_3
tgttggcacttcatccccacaacagtgcctctcataatctgatccacaataaaacaagcaaatccctcctggccttgtctcaccaggaagagtatcagtctactgaatccacaaaccctacatatttgatataaagtgacaattgatagtcaatagtattggcagacacacacaytgaagctaactgcatgrcaggaaacatcctttttcagttcatcattgtgtaattcaatgctgtattattagagatatgaggaaagtttccataggaagagaaattgaaaagaagaggacttatastttaaagaaataacaaaaamcatggccttactaccctacacaatccacaaaaaaaattacttttgtcctatttactgttccttataatgaaagaacaagagataactgaaaaaaaaaaaattgaaaggcattcaattgaaaacgataaaaggatttatttatttgtacacaacatacaagtgacttctggagctaactgtcaacagatatgattgaagcaa

SEQ ID NO: 69206 - DNA, 501 bp, Chicken  19866894341176_4
aacagtgcctctcataatctgatccacaataaaacaagcaaatccctcctggccttgtctcaccaggaagagtatcagtctactgaatccacaaaccctacatatttgatataaagtgacaattgatagtcaatagtattggcagacacacacaytgaagctaactgcatgrcaggaaacatcctttttcagttcatcattgtgtaattcaatgctgtattattagagatatgaggaaagtttccataggaagagaaattgaaaagaagaggacttatastttaaagaaataacaaaaamcatggccttactaccctacacaatccacaaaaaaaattacttttgtcctatttactgttccttataatgaaagaacaagagataactgaaaaaaaaaaaattgaaaggcattcaattgaaaacgataaaaggatttatttatttgtacacaacatacaagtgacttctggagctaactgtcaacagatatgattgaagcaa

SEQ ID NO: 69207 - DNA, 600 bp, Chicken  19866894341198_1
caaacgcgtgattttcgggttaaatgggggattctcgaagagaaaatgtgtgattttcgggataaatgggggattctcgaagagaaaacgcgtgattttcgggttaaaagggggatttccgaagagaaaacgtgtgattttcgggttaaatggcagatttccgaagagaaaacgcgtgattttcgggttaaatgggggactctcgaagagaaaacgcgtgattttcaagttaagtgtgggattctcgaattaaaaacgtgtgattttcgcttaaatgaacgatttgcgaagggaaaacgygtgattttcgggttaagtgggggattctcgaagagaaaacgcgtgattttcaggttaagtgggggattctcggtgagaaaacgcgtgatttttcacttaaatgggggattctcgaagagaaaacgcgtgattttcgggataagtgggggattctcaaagaaaaaacgggtgattttttcttaaatggcaaatttcaaaatataagccgcgtgattttcaagttaaatgggtgattatcaaagagaaaatgcgtgattttggggttaaatgggggattctcgaagagaaaatgcgtgattt

SEQ ID NO: 69208 - DNA, 600 bp, Chicken  19866894341203_1
taaacgggggatttccgaagagaaaatgcgtgatatttggtttaaatgggggatttccaaagagaaaacgcgtgattttcgggataagtggggaatttccgaagagaaaacgcgtgattttcaagttaaatgggtgattatcaaagagaaaacgcatgattttctcttaaatgggggattctcgaagagcaaatgtgtgcttttcgggttaaatgggggattctcgaagagaaaatgcgtgattttccggttaagtgggggattctcgaagagaaaacgcgtgattttcgcttaaatggkggattctcgaagagaaaacgcgtgattttcgggttaaaagggggatttccgaagagaaaacgtgtgattttcgggataaatggcagatttccgaagagaaagcgcgtgattttcgggttaaatgggggactctcgaagagaaaacgcgtgattttcaagttaaatgagggattctcgaattaaaaacgtgtgattttcgcttaaatgacggatttgcgaagggaaaacgcgtgattttcaagttaagtgggggattctcgaagagacaacgcttgattttcgggataagtgggggattct

SEQ ID NO: 69209 - DNA, 446 bp, Chicken  19866894341204_1
tgatttttcacttaaatgggggattctcgaagagaaaacgcgtgattttcgggataagtgggggattctcaaagaaaaaacggatgattttttcttaaatggcaaatttcaaaatataagccgcgtgattttcaagttaaatgggtgattatcaaagagaaaacgcatgattttctcttaaatgggggattctcgaagagcaaatgtgtgcttttcgggttaaatgggggattctcgaagagaaaatgcgtgattttccagttaagtgggggattctcgaagagaaaacgcgtgattttyggkttaaatgggggattctcgaagagaaamcgcgtgattttcaggttaaatgggggattctcaaagagaaaccacctgattttcgcataaatgaaggatttgcgaagaggaagcgcgggatttttgattaaatgggggattctcgg

SEQ ID NO: 69210 - DNA, 443 bp, Chicken  19866894341204_2
tttttcacttaaatgggggattctcgaagagaaaacgcgtgattttcgggataagtgggggattctcaaagaaaaaacggatgattttttcttaaatggcaaatttcaaaatataagccgcgtgattttcaagttaaatgggtgattatcaaagagaaaacgcatgattttctcttaaatgggggattctcgaagagcaaatgtgtgcttttcgggttaaatgggggattctcgaagagaaaatgcgtgattttccagttaagtgggggattctcgaagagaaaacgcgtgattttyggkttaaatgggggattctcgaagagaaamcgcgtgattttcaggttaaatgggggattctcaaagagaaaccacctgattttcgcataaatgaaggatttgcgaagaggaagcgcgggatttttgattaaatgggggattctcgg

SEQ ID NO: 69211 - DNA, 416 bp, Chicken  19866894341204_3
agagaaaacgcgtgattttcgggataagtgggggattctcaaagaaaaaacggatgattttttcttaaatggcaaatttcaaaatataagccgcgtgattttcaagttaaatgggtgattatcaaagagaaaacgcatgattttctcttaaatgggggattctcgaagagcaaatgtgtgcttttcgggttaaatgggggattctcgaagagaaaatgcgtgattttccagttaagtgggggattctcgaagagaaaacgcgtgattttyggkttaaatgggggattctcgaagagaaamcgcgtgattttcaggttaaatgggggattctcaaagagaaaccacctgattttcgcataaatgaaggatttgcgaagaggaagcgcgggatttttgattaaatgggggattctcgg

SEQ ID NO: 69212 - DNA, 553 bp, Chicken  19866894341217_1
tcagcattgagaagggccgctggggaaatccagaaatttatatacatttaataataaaaaggattcttacgaaaaagagctgttctacttcacttgggcacttccctggtgacctccaaatgagccctggcacatgaagtgcaaactcacatgggagactcagtagatggcactcctcctcctgagtcaacacaagggctcagttttggattaaaatctgttcttgcaaggagaaaagtgtgaaatctcttctataagatacagaactcaatatatgtgtacaaatacaaatatctgaaytgaaaacatctataaaacttacactgcctaggacccagcttgctcagagattacctctctgcatatgccctagtgtgacccatttgttcctaattccagacacaccagttggggtgacagatgctctgggtcatggcatggaccagaggagcagacatcaggccattgcaatatgaaattgcctttggagtctgaaagaagtctgtccaatcttcctgcattcatgggacaggacaaatgctggttttagttg

SEQ ID NO: 69213 - DNA, 600 bp, Chicken  19866894341231_1
ctcataatttctcttctcttcaatctcgtaatacaataaaacaactttccgacttcctccactgccttatttctttaaagactgtgagtttgttattttatatccactgtcaacagagatgtgatggaagtcaactctctcagtcaaaagccagtagtgagacatacatttgagtctcgtttgtatgcgtgaagcacatgcttgtatttgtgtttatatggactatagggttcagcacattggaaacttttgtcttcttagttctgccaagaggaggaggtgagtaatcctggcgtaagwacagcacatcactatttcccaaggcatgaagaaaggcaatatctcataggagcgaatactgaaagtcaggaaaatcagaacagtgagtaaaggaagggagattatttcagcaaggacaaaagcaagtcccaagtaggaatcggagcataaaaactagtctggttcctccttcaaaaggaaaactcggaactcaagtgttccatggctatctgagggagccacacaccttcaagataagaggacagaataagaaagtgcatcaaacatggttcctccctgctggtattttttacagtgccc

SEQ ID NO: 69214 - DNA, 600 bp, Chicken  19866894341232_1
tgaaacttaattttatgtattaaattgattttttttccagtctacctttcattcataaacactttattatctatttataagaagaagaaaaaaaaacacacacaaataggaaaaccacatgaataatctggcactggtgctttatgtgaaagttgatttacacaaccattcctacatcttcagttttttcctccgacatttattaactttttatgaaaggcagggggatttctttccccagtgggcacttcccaagtttcttttcagatgtctgatttttggcaattaccctcaaaatgrtgactgctgtcagagccctgctggcacaaagaccatgtggagagctttagtttcccagcaaaggcccatcatgtcacagagccctccattcatgggtgagtattgtctactgtacaacactgctctaatgtcttcctccaggttcacctcctcttwctccttcctgagctcctctcttcctccgtaatgtgtactaagaaaactgaaaagttgtcaggaaagttaataaagcttttgacccttcctgtgcaatgctgctgaccatgcaaagcccgtgaaaaccagattctctccttgtac

SEQ ID NO: 69215 - DNA, 600 bp, Chicken  19866894341232_2
tttacacaaccattcctacatcttcagttttttcctccgacatttattaactttttatgaaaggcagggggatttctttccccagtgggcacttcccaagtttcttttcagatgtctgatttttggcaattaccctcaaaatgrtgactgctgtcagagccctgctggcacaaagaccatgtggagagctttagtttcccagcaaaggcccatcatgtcacagagccctccattcatgggtgagtattgtctactgtacaacactgctctaatgtcttcctccaggttcacctcctcttwctccttcctgagctcctctcttcctccgtaatgtgtactaagaaaactgaaaagttgtcaggaaagttaataaagcttttgacccttcctgtgcaatgctgctgaccatgcaaagcccgtgaaaaccagattctctccttgtactgctgtgagtagctggtgcagtgttcaggcagctcaggtcctcctcagacagagcccaagaccattgctgtaaatatccaaagctgctgtagcatgttgggatggggaatggatgaagtggtaaaaggcttttcaagctgtttcaggggatgggag

SEQ ID NO: 69216 - DNA, 444 bp, Chicken  19866894341234_1
cctactgtcctccccagctccaggagcactcttataaaaggaggctttgtttcaggagcagttaaccgatgggcccagtggcagaggggcagcactgcataatgaacaggatattgttggggaatcaggaggtgtaactgaaccaccccccatcagctgtctgtttctctccttatctcttgctttgtgtacctagactgttgattttggggccatgacctgtgctctaccaagggacccttttcctatccatggcttatcagtcctggacatcagcttcctaggagagatgagagcaarccctcatacaagcctaaggcaaaggaccgtgtcagaatctggccatcacctcaaagcagttttaaggaacctcaacattaaacatgaaacctgtgggtttttgtttttattggtccatccagttgtgattgtagtcactggatt

SEQ ID NO: 69217 - DNA, 599 bp, Chicken  19866894341239_1
  misc_feature (1)..(166): n is any nucleotide
nnnnnnnnnnnnnnnnnnnnnnnnnnnnnnnnnnnnnnnnnnnnnnnnnnnnnnnnnnnnnnnnnnnnnnnnnnnnnnnnnnnnnnnnnnnnnnnnnnnnnnnnnnnnnnnnnnnnnnnnnnnnnnnnnnnnnnnnnnnnnnnnnnnnnnnnnnnnnnnnnnnnnncttttcattttatgtaatgaagccaaagtattaaaaatgtaagcccaaaactctgtagctcttctcacagaagtaattctctggtttaagtgcacctcttcagtagagacttcttgtgccccatactgataaaratgtaataaatgtgtggggtttatttagatgttgatgagattatgtgtaaagctgtttttggatcagctcctggatgtaatcagygaaggaatggtgttgactgaataattttatcaggggaaggttttgacaaattggacgttaacaatttgttgcatttggtttatgctattccagaaaagcagagctgttttttgtctcaaatctttgttctaaactgtctaactacccataaaatacatctttttggtacagtgcatgccagtcaatccgtagaaattcctatcttgttctgata

SEQ ID NO: 69218 - DNA, 599 bp, Chicken  19866894341239_2
  misc_feature (1)..(81): n is any nucleotide
nnnnnnnnnnnnnnnnnnnnnnnnnnnnnnnnnnnnnnnnnnnnnnnnnnnnnnnnnnnnnnnnnnnnnnnnnnnnnnnnncttttcattttatgtaatgaagccaaagtattaaaaatgtaagcccaaaactctgtagctcttctcacagaagtaattctctggtttaagtgcacctcttcagtagagacttcttgtgccccatactgataaaratgtaataaatgtgtggggtttatttagatgttgatgagattatgtgtaaagctgtttttggatcagctcctggatgtaatcagygaaggaatggtgttgactgaataattttatcaggggaaggttttgacaaattggacgttaacaatttgttgcatttggtttatgctattccagaaaagcagagctgttttttgtctcaaatctttgttctaaactgtctaactacccataaaatacatctttttggtacagtgcatgccagtcaatccgtagaaattcctatcttgttctgatagctttgatctttattattagctttcctgcatttgtttttggagaacaatcttagaaaacctgaaggataaggttaggttagcaaa

SEQ ID NO: 69219 - DNA, 600 bp, Chicken  19866894341242_1
gtaagtctctgtaagcacaaagagaatgcagagagcagtttagaaagcagtgctgtaagattctttacttacaagagatcatactattctctgtaaaacatgatctccaaggagaaaaaaagcatttatttttgcatggatccccttgttttctctatccactctatagctttatctcccacagactataaaccacatcctcaaatgacggaaaatgaaagcacagcaccttattcttccagctgcaatgatgagtttaaagagggagttgtctggagaatcaatgtattgattatttawcttcttaaggacaaaatgctacaggagtctttggatgcttggaaactatatgtctggaaataaagcacttgattcataggccaaatgttgaacaaaaaaaaaaaatcagactgtgaaaattcaataattgtggattctgtccgataggaaagaggcggacagatcagtaaaaagcagaagaactctctgtttcagtttgtaccatctaagcaaakcatacctccaaaatacagaatgtacagaacatgagcaacaaaaatcatgcaaaatgattaattataaagctacactattgttatc

SEQ ID NO: 69220 - DNA, 584 bp, Chicken  19866894341242_2
tgaaagcacagcaccttattcttccagctgcaatgatgagtttaaagagggagttgtctggagaatcaatgtattgattatttawcttcttaaggacaaaatgctacaggagtctttggatgcttggaaactatatgtctggaaataaagcacttgattcataggccaaatgttgaacaaaaaaaaaaaatcagactgtgaaaattcaataattgtggattctgtccgataggaaagaggcggacagatcagtaaaaagcagaagaactctctgtttcagtttgtaccatctaagcaaakcatacctccaaaatacagaatgtacagaacatgagcaacaaaaatcatgcaaaatgattaattataaagctacactattgttatctggcaactgtagtcttcagtactcttttggaaaggttttgtagtgttttctcagtattatctcttaatattatcaattagcattatatttggagatgtgtattagcatacattttacatgctcttgcagcagttttaaatgcagttattatagaggtgcacaaaataacggtggttaagtacccaattagaagcaaagt

SEQ ID NO: 69221 - DNA, 600 bp, Chicken  19866894341244_1
gaattaagttgatgtgacaaacataagagtctttgtgaacttctaggcagcacaatacagatctgccctcgtttactatgggtttacagttaatactgttcaaaaattacaagcagtattgtactagttaacaattctcttgtcacattacagtgagagtggggtaggtctctcctcactggtgacaagtgacaagacaaggggaaatggcctcaagttgcaccaagacaagtttaggttggacgttaggaaacacttctttacagaaagggtggttaagcactggaataggctccccargaaggtggttgagtcaccgtccctggatgtgttcaagagccgtttggatgtggtgctcagacatatgatttagcggagggttgttagagttagggtactayggttaggctgcggttggactgaccttgacagatgtcctggcaacagtattctgcaaatagctatggccatgctgcagcaagtgcttggacagccacacctgcctgactacatgaattgggacccttctctggcagctttgtaatgaccctcccaagtctgtcctttccactgcayagacttcagcaggatgactttaag

SEQ ID NO: 69222 - DNA, 600 bp, Chicken  19866894341244_2
aaaaattacaagcagtattgtactagttaacaattctcttgtcacattacagtgagagtggggtaggtctctcctcactggtgacaagtgacaagacaaggggaaatggcctcaagttgcaccaagacaagtttaggttggacgttaggaaacacttctttacagaaagggtggttaagcactggaataggctccccargaaggtggttgagtcaccgtccctggatgtgttcaagagccgtttggatgtggtgctcagacatatgatttagcggagggttgttagagttagggtactayggttaggctgcggttggactgaccttgacagatgtcctggcaacagtattctgcaaatagctatggccatgctgcagcaagtgcttggacagccacacctgcctgactacatgaattgggacccttctctggcagctttgtaatgaccctcccaagtctgtcctttccactgcayagacttcagcaggatgactttaaggaactgcagcacagcaacttgcatgtgaattaaaatttcctgctgatgatatctacaggttctactctgcaatgcgttcagtggctgatttggcagatgtg

SEQ ID NO: 69223 - DNA, 600 bp, Chicken  19866894341244_3
taagcactggaataggctccccargaaggtggttgagtcaccgtccctggatgtgttcaagagccgtttggatgtggtgctcagacatatgatttagcggagggttgttagagttagggtactayggttaggctgcggttggactgaccttgacagatgtcctggcaacagtattctgcaaatagctatggccatgctgcagcaagtgcttggacagccacacctgcctgactacatgaattgggacccttctctggcagctttgtaatgaccctcccaagtctgtcctttccactgcayagacttcagcaggatgactttaaggaactgcagcacagcaacttgcatgtgaattaaaatttcctgctgatgatatctacaggttctactctgcaatgcgttcagtggctgatttggcagatgtgccagaacgtgagtatttagcccacattatcacctttctagagcataaacgcaactctgaacacagtgtaaagattttgcacttggccatatgaagcagcacatcttccacaatccacacaccttttttctgatagcaggtagttgacaataaccacaaagctggtatagcctgtt

SEQ ID NO: 69224 - DNA, 600 bp, Chicken  19866894341246_1
agatctgccaacagataaaagcttgtatcaataggaaagtaaattagtcagcccagctggaagacttaatcctccggctgcgttgggttaagtgcttcacaacgccatattttctactgtgagaacagcaagaaaagtggtactgtcctatgagggccttgtttgcgggtcctctcaggctagcattcttcactggcctggatgggctcctttcctctatcgctgctccaaatgtctctaatttacttttgagattctgctcccttcttcctcatctgaacactgtaaaatacagtgcayagmactggtcagacagcagcrttcggtgggaaaaaggcaaactggaggacagcagctgtcttgatgatggcttttgatggctcctcttccaccacgaccagcacaatgttggctttccattctttttgcagtatttcaaatctcatgcatttctgccaccataccttccattttaaggttgggaaaaaaaaaaaggaagaaaatccccttctccctcagctcatcttttgctgccattgctagtagttcacctcattagaccttacagctaatctgcgagcttctcctttttggggtgat

SEQ ID NO: 69225 - DNA, 600 bp, Chicken  19866894341246_2
tctgccaacagataaaagcttgtatcaataggaaagtaaattagtcagcccagctggaagacttaatcctccggctgcgttgggttaagtgcttcacaacgccatattttctactgtgagaacagcaagaaaagtggtactgtcctatgagggccttgtttgcgggtcctctcaggctagcattcttcactggcctggatgggctcctttcctctatcgctgctccaaatgtctctaatttacttttgagattctgctcccttcttcctcatctgaacactgtaaaatacagtgcayagmactggtcagacagcagcrttcggtgggaaaaaggcaaactggaggacagcagctgtcttgatgatggcttttgatggctcctcttccaccacgaccagcacaatgttggctttccattctttttgcagtatttcaaatctcatgcatttctgccaccataccttccattttaaggttgggaaaaaaaaaaaggaagaaaatccccttctccctcagctcatcttttgctgccattgctagtagttcacctcattagaccttacagctaatctgcgagcttctcctttttggggtgatctt

SEQ ID NO: 69226 - DNA, 600 bp, Chicken  19866894341246_3
cttgtatcaataggaaagtaaattagtcagcccagctggaagacttaatcctccggctgcgttgggttaagtgcttcacaacgccatattttctactgtgagaacagcaagaaaagtggtactgtcctatgagggccttgtttgcgggtcctctcaggctagcattcttcactggcctggatgggctcctttcctctatcgctgctccaaatgtctctaatttacttttgagattctgctcccttcttcctcatctgaacactgtaaaatacagtgcayagmactggtcagacagcagcrttcggtgggaaaaaggcaaactggaggacagcagctgtcttgatgatggcttttgatggctcctcttccaccacgaccagcacaatgttggctttccattctttttgcagtatttcaaatctcatgcatttctgccaccataccttccattttaaggttgggaaaaaaaaaaaggaagaaaatccccttctccctcagctcatcttttgctgccattgctagtagttcacctcattagaccttacagctaatctgcgagcttctcctttttggggtgatcttctttaaagaagaccaact

SEQ ID NO: 69227 - DNA, 599 bp, Chicken  19866894341256_1
  misc_feature (1)..(161): n is any nucleotide
nnnnnnnnnnnnnnnnnnnnnnnnnnnnnnnnnnnnnnnnnnnnnnnnnnnnnnnnnnnnnnnnnnnnnnnnnnnnnnnnnnnnnnnnnnnnnnnnnnnnnnnnnnnnnnnnnnnnnnnnnnnnnnnnnnnnnnnnnnnnnnnnnnnnnnnnnnnnnnnnntgaatgtgggctgtgtgcatcttcagatgactgaatacactggtttctgtcaagagcactacattcacttttacaagaggagacacagaacgtttcctcttgctaaagccaacagcatttgttgattttcaactttttwaattaacgatccaggaaaaaacaaccattcttgagttaattgacgtgttcactgggttagtcattttggaaaggttgtgttgtcatggctacagattagatcctatttgtatgttacgctgatacttcttattttcaggcaacttcttctgtaacgtcagagaatggatagcggagtttygaagcattgcgttactgattggtacataccatagaacagatccactagtatttaaccagtatagatttctcatcrtatctcctgccaactgctcaaggctgtttaatcacaaaatatta

SEQ ID NO: 69228 - DNA, 600 bp, Chicken  19866894341256_2
tcttcagatgactgaatacactggtttctgtcaagagcactacattcacttttacaagaggagacacagaacgtttcctcttgctaaagccaacagcatttgttgattttcaactttttwaattaacgatccaggaaaaaacaaccattcttgagttaattgacgtgttcactgggttagtcattttggaaaggttgtgttgtcatggctacagattagatcctatttgtatgttacgctgatacttcttattttcaggcaacttcttctgtaacgtcagagaatggatagcggagtttygaagcattgcgttactgattggtacataccatagaacagatccactagtatttaaccagtatagatttctcatcrtatctcctgccaactgctcaaggctgtttaatcacaaaatattacttcagtcttgagtgttatttgccctgttgcacaacatacacatatgtaattttgaatttgctcgagttyggtttgctttctgaattttgaccatgggatttggagttgtgcaaagaaggaaatctgttcaattgtcctgatgttttctccttctatttctgttgatgtctgtcatcacct

SEQ ID NO: 69229 - DNA, 600 bp, Chicken  19866894341256_3
tcctcttgctaaagccaacagcatttgttgattttcaactttttwaattaacgatccaggaaaaaacaaccattcttgagttaattgacgtgttcactgggttagtcattttggaaaggttgtgttgtcatggctacagattagatcctatttgtatgttacgctgatacttcttattttcaggcaacttcttctgtaacgtcagagaatggatagcggagtttygaagcattgcgttactgattggtacataccatagaacagatccactagtatttaaccagtatagatttctcatcrtatctcctgccaactgctcaaggctgtttaatcacaaaatattacttcagtcttgagtgttatttgccctgttgcacaacatacacatatgtaattttgaatttgctcgagttyggtttgctttctgaattttgaccatgggatttggagttgtgcaaagaaggaaatctgttcaattgtcctgatgttttctccttctatttctgttgatgtctgtcatcacctaagtccaatcaacgtctcttagtaaaaagggagataatagcagaaatgagcacaatagttttcataatgttgtcc

SEQ ID NO: 69230 - DNA, 600 bp, Chicken  19866894341256_4
aaaggttgtgttgtcatggctacagattagatcctatttgtatgttacgctgatacttcttattttcaggcaacttcttctgtaacgtcagagaatggatagcggagtttygaagcattgcgttactgattggtacataccatagaacagatccactagtatttaaccagtatagatttctcatcrtatctcctgccaactgctcaaggctgtttaatcacaaaatattacttcagtcttgagtgttatttgccctgttgcacaacatacacatatgtaattttgaatttgctcgagttyggtttgctttctgaattttgaccatgggatttggagttgtgcaaagaaggaaatctgttcaattgtcctgatgttttctccttctatttctgttgatgtctgtcatcacctaagtccaatcaacgtctcttagtaaaaagggagataatagcagaaatgagcacaatagttttcataatgttgtcctttacaagaattctgaaaggaaaggtctgtagcgatcagattccaaatactggcatctcttgaacttgtaatgggagttttggtgttgatacagatgaaagcaggatcgtactc

SEQ ID NO: 69231 - DNA, 600 bp, Chicken  19866894341257_1
gcatcccctactgcctctgatcctggtacttgtgagcaagctgccatgtatctaactaggtcatagttccatcaaatgttggagagatttcagaacaccaagaaatccaaaccaaaatctctaaaaatgccttgatttccttacctgggagttgactataagctcactatcgtctcaaagctgcaagaactagccttgaaacacatgcatcattcttggttgtgagctgcaggcactagtggttaatttatatgatatatatgtatatgttacagcagataaagaattcatgaagtaagygttgaatccctttgttgccaagcagatgggaacatttctaccatagcaggcttatgattaatttatacagaagtgctgggacagcagacaaaaagttccatttattgtctacacaggagacattcccacctttcttgtcctaaaawgtactgccctttctagaactcaagcaaagcctgcccacaattcttcaagaagtgcattaacctacctgctcagttwcacacaaaagggagggatggaggggaggctcagatgtaaacatatctaataatttaatgtacagtgtttgtaatgacc

SEQ ID NO: 69232 - DNA, 600 bp, Chicken  19866894341257_2
gggagttgactataagctcactatcgtctcaaagctgcaagaactagccttgaaacacatgcatcattcttggttgtgagctgcaggcactagtggttaatttatatgatatatatgtatatgttacagcagataaagaattcatgaagtaagygttgaatccctttgttgccaagcagatgggaacatttctaccatagcaggcttatgattaatttatacagaagtgctgggacagcagacaaaaagttccatttattgtctacacaggagacattcccacctttcttgtcctaaaawgtactgccctttctagaactcaagcaaagcctgcccacaattcttcaagaagtgcattaacctacctgctcagttwcacacaaaagggagggatggaggggaggctcagatgtaaacatatctaataatttaatgtacagtgtttgtaatgaccccatcacaattcccaaactgtaaaaccctacaaactgcatctataacaattgcaatagaaatcatgttctattttacttcttgctcatctccaaatccaaggactgtgtattttgactgtagtgaattctcattgttccatccttg

SEQ ID NO: 69233 - DNA, 600 bp, Chicken  19866894341257_3
tgagctgcaggcactagtggttaatttatatgatatatatgtatatgttacagcagataaagaattcatgaagtaagygttgaatccctttgttgccaagcagatgggaacatttctaccatagcaggcttatgattaatttatacagaagtgctgggacagcagacaaaaagttccatttattgtctacacaggagacattcccacctttcttgtcctaaaawgtactgccctttctagaactcaagcaaagcctgcccacaattcttcaagaagtgcattaacctacctgctcagttwcacacaaaagggagggatggaggggaggctcagatgtaaacatatctaataatttaatgtacagtgtttgtaatgaccccatcacaattcccaaactgtaaaaccctacaaactgcatctataacaattgcaatagaaatcatgttctattttacttcttgctcatctccaaatccaaggactgtgtattttgactgtagtgaattctcattgttccatccttgtagtgcttagctggcaagatcacctccctcaggttaaaatgttgtttaggtgaaaaccgagttggaagctggaaaa

SEQ ID NO: 69234 - DNA, 599 bp, Chicken  19866894341259_1
  misc_feature (1)..(197): n is any nucleotide
nnnnnnnnnnnnnnnnnnnnnnnnnnnnnnnnnnnnnnnnnnnnnnnnnnnnnnnnnnnnnnnnnnnnnnnnnnnnnnnnnnnnnnnnnnnnnnnnnnnnnnnnnnnnnnnnnnnnnnnnnnnnnnnnnnnnnnnnnnnnnnnnnnnnnnnnnnnnnnnnnnnnnnnnnnnnnnnnnnnnnnnnnnnnnnnnnnnnncttttcttcagagatgctttcgagtccacatcatgtcctcgtgcctgtggtttctgccttattctagggtcaggatttacagatccttttgttgaaaatcatraggttctttccagcctatttcttcattttctgaggtatctggatggcagcatggccttctggtgaatctatcacttctccagttttgcggcattcatgaatttacgaagagtttattctaccctgttatctacactgttagtgaagaagtgaagactggatccagtgctgactcctggaatgctccactcataactgggctccagttagattttgcaccactgacaactacccttaggatatcctctgttcagacagatatttatcctccttgctgcccatcctacctatacatcaaca

SEQ ID NO: 69235 - DNA, 599 bp, Chicken  19866894341262_1
  misc_feature (1)..(133): n is any nucleotide
nnnnnnnnnnnnnnnnnnnnnnnnnnnnnnnnnnnnnnnnnnnnnnnnnnnnnnnnnnnnnnnnnnnnnnnnnnnnnnnnnnnnnnnnnnnnnnnnnnnnnnnnnnnnnnnnnnnnnnnnnnnnnnnnnnnnnagttttgccgcatgtattccccctcccgctccccaccagagcacttctcagtttctatccgctgccgcccgctttcagagctcaggctaaaaatattctggaattaatctttcctgaggattatactaaaatgcttgtcttggacttagcaggttactttgctgtcrgctgaagtttcagccctctgctctgtcatttcacgcggtattaccacctttccctggccacaaacaacttttaaaaataggaagcttagagggccttgcttgctgtcgtaagctgaaagccattgccagcggttcgtggggagcttacgtagccgagaaacaaaactgtgattaaacgggttttgaaggtgatttttggcatgctcctttcacaagtggtttcatgctaactgctgcagtccacgcgctgctttctcagagctgggtaccgttagaaaggtgaagtgcttccgcttgac

SEQ ID NO: 69236 - DNA, 600 bp, Chicken  19866894341276_1
atacaccccacctatcgtcttcattctgccaactgggaatcgtggtgcctttgggaggtgttaggtgggaattgcagcagggcctgcaggctgggctgcagccaggcattccggcgtggcaccgctcctcctgcacgcgggaagggcctgcctcagccagaggttacccagccgaggtgatagctctgcattcctgccatgtcttagcttttttaaattaaattcttgcaacatgaggatttaatcccttctgctatatacggcgcggctgtgtgtgtgtgtatttatatatatatatayatatatatatwtwtttttttccctacaaaaatttcatcaggagagttatttgtgtgtttgagaattggcttggatacagggtcggtaactttccacccggagcccatggaaagtttggggtttgaggcagaatatagggtcaggtttgggcttgtactgagtcgaaactagatctggggttgagagccactggggatgaaatctgttgcgttgctctttatgtattattttttattaaaaaagatggaaaagagcagttttcctgtgcccaggtcttccaaaagcagtgagatttatcac

SEQ ID NO: 69237 - DNA, 600 bp, Chicken  19866894341276_2
cctatcgtcttcattctgccaactgggaatcgtggtgcctttgggaggtgttaggtgggaattgcagcagggcctgcaggctgggctgcagccaggcattccggcgtggcaccgctcctcctgcacgcgggaagggcctgcctcagccagaggttacccagccgaggtgatagctctgcattcctgccatgtcttagcttttttaaattaaattcttgcaacatgaggatttaatcccttctgctatatacggcgcggctgtgtgtgtgtgtatttatatatatatatayatatatataywtwtttttttccctacaaaaatttcatcaggagagttatttgtgtgtttgagaattggcttggatacagggtcggtaactttccacccggagcccatggaaagtttggggtttgaggcagaatatagggtcaggtttgggcttgtactgagtcgaaactagatctggggttgagagccactggggatgaaatctgttgcgttgctctttatgtattattttttattaaaaaagatggaaaagagcagttttcctgtgcccaggtcttccaaaagcagtgagatttatcactgttaagatg

SEQ ID NO: 69238 - DNA, 600 bp, Chicken  19866894341276_3
ctatcgtcttcattctgccaactgggaatcgtggtgcctttgggaggtgttaggtgggaattgcagcagggcctgcaggctgggctgcagccaggcattccggcgtggcaccgctcctcctgcacgcgggaagggcctgcctcagccagaggttacccagccgaggtgatagctctgcattcctgccatgtcttagcttttttaaattaaattcttgcaacatgaggatttaatcccttctgctatatacggcgcggctgtgtgtgtgtgtatttatatatatatatayatatatatatwtwtttttttccctacaaaaatttcatcaggagagttatttgtgtgtttgagaattggcttggatacagggtcggtaactttccacccggagcccatggaaagtttggggtttgaggcagaatatagggtcaggtttgggcttgtactgagtcgaaactagatctggggttgagagccactggggatgaaatctgttgcgttgctctttatgtattattttttattaaaaaagatggaaaagagcagttttcctgtgcccaggtcttccaaaagcagtgagatttatcactgttaagatgg

SEQ ID NO: 69239 - DNA, 600 bp, Chicken  19866894341276_4
atcgtcttcattctgccaactgggaatcgtggtgcctttgggaggtgttaggtgggaattgcagcagggcctgcaggctgggctgcagccaggcattccggcgtggcaccgctcctcctgcacgcgggaagggcctgcctcagccagaggttacccagccgaggtgatagctctgcattcctgccatgtcttagcttttttaaattaaattcttgcaacatgaggatttaatcccttctgctatatacggcgcggctgtgtgtgtgtgtatttatatatatatatayatatatatatwtwtttttttccctacaaaaatttcatcaggagagttatttgtgtgtttgagaattggcttggatacagggtcggtaactttccacccggagcccatggaaagtttggggtttgaggcagaatatagggtcaggtttgggcttgtactgagtcgaaactagatctggggttgagagccactggggatgaaatctgttgcgttgctctttatgtattattttttattaaaaaagatggaaaagagcagttttcctgtgcccaggtcttccaaaagcagtgagatttatcactgttaagatggca

SEQ ID NO: 69240 - DNA, 600 bp, Chicken  19866894341294_1
aggaaataacatctctatacattctctccttctcatctgtaggaaaaaagtggacttcaatacagcacaaaatgatcttgtatttgtaagcacatgaaagtactttgtgaaggaagggtaatagaggaaagtttatccctgggaaatgttttgtttatgaaggtggttgcttcaccagcttctgaaaacccacctactttctctaggtgcagtcaagccattaaaaatcttacggaccttcagatggactatatattgcatgagaggaaacaggaaagatttaagctgggacaacatgtmcactgcacttgtgtacattgctctgtgggtggctgccatgaacagcgtataaccatttctgattacagggacttgtatgctactagtagtgggcctgagcatggattatcgcctgtctcttacttcttcccccatggcagagagggctcatgagtcccagtggacatatgcaaccgcgctgctggctgggtagaagaagtgatttaatgctataactctacttttgcaggttaaagtactaagattagcagttagagagttggacgtctagttctcatgggttcacatgctgtcagcagc

SEQ ID NO: 69241 - DNA, 600 bp, Chicken  19866894341296_1
tcagctcttaccactgctcagtcactctgttgctcctctgagtttaagcatgacaaaaggaaggacaaaggctatgaactaacagcatttcactctagcaggaaaagaacacactatttaaaacgtattttgagaaaaagataaatagagaattattctgggtaataagagatgcacttgatcactatgccttctaagcatgactgctatttctagttgcaacatctttaatgaaagcctcagatggtaccactgggtttaccaaaggatctggtgtattaaaacaattgtgagcctcakcaagactataaaagaaatgataagtctaagcaagctgtgatgtgctawctaaacagccacaaaacataaagtatgattttgaagttctttcggtaagcagaaatacttattcccctcactctacagtgtaaataatgtgatgctttcaatcctttatctgctcactcmaagaatgttgtaagcctgacctcagacacttcrcaagtggatgctgtggcatgatcaaatatttggctttggaggaatgttgtcgagcatttgaatgcctgcaatattttgtctgatccagaagcccaagta

SEQ ID NO: 69242 - DNA, 600 bp, Chicken  19866894341296_2
catgacaaaaggaaggacaaaggctatgaactaacagcatttcactctagcaggaaaagaacacactatttaaaacgtattttgagaaaaagataaatagagaattattctgggtaataagagatgcacttgatcactatgccttctaagcatgactgctatttctagttgcaacatctttaatgaaagcctcagatggtaccactgggtttaccaaaggatctggtgtattaaaacaattgtgagcctcakcaagactataaaagaaatgataagtctaagcaagctgtgatgtgctawctaaacagccacaaaacataaagtatgattttgaagttctttcggtaagcagaaatacttattcccctcactctacagtgtaaataatgtgatgctttcaatcctttatctgctcactcmaagaatgttgtaagcctgacctcagacacttcrcaagtggatgctgtggcatgatcaaatatttggctttggaggaatgttgtcgagcatttgaatgcctgcaatattttgtctgatccagaagcccaagtagttcagaacagtcgctactacttccagaaggcctacttactgtagtca

SEQ ID NO: 69243 - DNA, 600 bp, Chicken  19866894341296_3
gagatgcacttgatcactatgccttctaagcatgactgctatttctagttgcaacatctttaatgaaagcctcagatggtaccactgggtttaccaaaggatctggtgtattaaaacaattgtgagcctcakcaagactataaaagaaatgataagtctaagcaagctgtgatgtgctawctaaacagccacaaaacataaagtatgattttgaagttctttcggtaagcagaaatacttattcccctcactctacagtgtaaataatgtgatgctttcaatcctttatctgctcactcmaagaatgttgtaagcctgacctcagacacttcrcaagtggatgctgtggcatgatcaaatatttggctttggaggaatgttgtcgagcatttgaatgcctgcaatattttgtctgatccagaagcccaagtagttcagaacagtcgctactacttccagaaggcctacttactgtagtcattgcatccctctctagtactgcttgtgcatgacaactagtgccttcctgaagttcaccttcatccacctcattgtaaccccaggctacgtacctccctcaaagctctacagactggtgtc

SEQ ID NO: 69244 - DNA, 600 bp, Chicken  19866894341296_4
cttgatcactatgccttctaagcatgactgctatttctagttgcaacatctttaatgaaagcctcagatggtaccactgggtttaccaaaggatctggtgtattaaaacaattgtgagcctcakcaagactataaaagaaatgataagtctaagcaagctgtgatgtgctawctaaacagccacaaaacataaagtatgattttgaagttctttcggtaagcagaaatacttattcccctcactctacagtgtaaataatgtgatgctttcaatcctttatctgctcactcmaagaatgmtgtaagcctgacctcagacacttcrcaagtggatgctgtggcatgatcaaatatttggctttggaggaatgttgtcgagcatttgaatgcctgcaatattttgtctgatccagaagcccaagtagttcagaacagtcgctactacttccagaaggcctacttactgtagtcattgcatccctctctagtactgcttgtgcatgacaactagtgccttcctgaagttcaccttcatccacctcattgtaaccccaggctacgtacctccctcaaagctctacagactggtgtctggctgct

SEQ ID NO: 69245 - DNA, 600 bp, Chicken  19866894341296_5
gatcactatgccttctaagcatgactgctatttctagttgcaacatctttaatgaaagcctcagatggtaccactgggtttaccaaaggatctggtgtattaaaacaattgtgagcctcakcaagactataaaagaaatgataagtctaagcaagctgtgatgtgctawctaaacagccacaaaacataaagtatgattttgaagttctttcggtaagcagaaatacttattcccctcactctacagtgtaaataatgtgatgctttcaatcctttatctgctcactcmaagaatgttgmaagcctgacctcagacacttcrcaagtggatgctgtggcatgatcaaatatttggctttggaggaatgttgtcgagcatttgaatgcctgcaatattttgtctgatccagaagcccaagtagttcagaacagtcgctactacttccagaaggcctacttactgtagtcattgcatccctctctagtactgcttgtgcatgacaactagtgccttcctgaagttcaccttcatccacctcattgtaaccccaggctacgtacctccctcaaagctctacagactggtgtctggctgctctt

SEQ ID NO: 69246 - DNA, 600 bp, Chicken  19866894341296_6
gactgctatttctagttgcaacatctttaatgaaagcctcagatggtaccactgggtttaccaaaggatctggtgtattaaaacaattgtgagcctcakcaagactataaaagaaatgataagtctaagcaagctgtgatgtgctawctaaacagccacaaaacataaagtatgattttgaagttctttcggtaagcagaaatacttattcccctcactctacagtgtaaataatgtgatgctttcaatcctttatctgctcactcmaagaatgttgtaagcctgacctcagacacttcrcaagtggatgctgtggcatgatcaaatatttggctttggaggaatgttgtcgagcatttgaatgcctgcaatattttgtctgatccagaagcccaagtagttcagaacagtcgctactacttccagaaggcctacttactgtagtcattgcatccctctctagtactgcttgtgcatgacaactagtgccttcctgaagttcaccttcatccacctcattgtaaccccaggctacgtacctccctcaaagctctacagactggtgtctggctgctcttactgcttgcttacttgcccttc

SEQ ID NO: 69247 - DNA, 549 bp, Chicken  19866894341298_1
ccacaggctgctcctcaagaaggtctggttgtccttcctgtcctcgattgtggtggggaaggatgttaggccaaaccaggaatgccgtctggaggtctggcttttggtctgctacatggcctgctcctcaggaaggaccaggttgttcgttgtgtcctcgatcctgacagggcaggaggtcaggccaaaccagcagcgccaggtggaggtctggctgttggactcctccataggctgctcctcaggaatggcgtcattgttgttcttctcctcagtcctgactgggcaggaggttaggcstaaccagcagcgccaggtggaggtctggctgttggtctcctccatagactgctcctcaggaagggactcgttgttgttgttctcctcagtcctgacagggcaggatgtaaggcctagccagcagtgccaggtggatgtctggctgttggtctcctccacaggctgcttctcaggaaggtctggttgtccttcctgtcctcgattgtggtggggaaggaggttaggccaaaccaggaatgccgtctggag

SEQ ID NO: 69248 - DNA, 599 bp, Chicken  19866894341303_1
  misc_feature (1)..(146): n is any nucleotide
nnnnnnnnnnnnnnnnnnnnnnnnnnnnnnnnnnnnnnnnnnnnnnnnnnnnnnnnnnnnnnnnnnnnnnnnnnnnnnnnnnnnnnnnnnnnnnnnnnnnnnnnnnnnnnnnnnnnnnnnnnnnnnnnnnnnnnnnnnnnnnnnnnaatgacataagttcatgtaaagacagagtggtgtatgttatgcttatcagatcatcagctgtctttccaagggaggttccctcttgagagcctctgatcacttccatgcaaagcaatcctactgaggtaacaggcatatatgactgtagtttgratcagattgctggaatgccagaggacagggaaacacccatttcaccccacagctgatctcaagcatctcaaatcaagtgttctagtagtactggctaatatcaggaaaacacatgttatactcctacaaactgtgtgagctccattccaaacagcaaaagaaaagaaaggaatccaaagaaaaatagttaaagaaaatcatgtcacaaccctggggaaaattttaaccgaggatgaaatagtgtttcctaggatcgcagctgaatacatcagtctaaatagcacgctgcttactaaaya

SEQ ID NO: 69249 - DNA, 583 bp, Chicken  19866894341303_2
gratcagattgctggaatgccagaggacagggaaacacccatttcaccccacagctgatctcaagcatctcaaatcaagtgttctagtagtactggctaatatcaggaaaacacatgttatactcctacaaactgtgtgagctccattccaaacagcaaaagaaaagaaaggaatccaaagaaaaatagttaaagaaaatcatgtcacaaccctggggaaaattttaaccgaggatgaaatagtgtttcctaggatcgcagctgaatacatcagtctaaatagcacgctgcttactaaayagaatgtacatttctgcttttcagtagtaggaagtagccaaaaaaaaaaaaaaaamcagtctaggaggacataagacatctgtcatattaactatttaactgtggaaatactttttcacatcagagttctaaaaatcaacggggatatgtaggcatctatattacgtctcttattctctaaaatctacagtgtagcttgctcttaaatttttataattaagaaacaaagctgaggtttcccgtggacaagttaacactccatttttctctcttttcatgtgaa

SEQ ID NO: 69250 - DNA, 527 bp, Chicken  19866894341303_3
gatctcaagcatctcaaatcaagtgttctagtagtactggctaatatcaggaaaacacatgttatactcctacaaactgtgtgagctccattccaaacagcaaaagaaaagaaaggaatccaaagaaaaatagttaaagaaaatcatgtcacaaccctggggaaaattttaaccgaggatgaaatagtgtttcctaggatcgcagctgaatacatcagtctaaatagcacgctgcttactaaayagaatgtacatttctgcttttcagtagtaggaagtagccaaaaaaaaaaaaaaaamcagtctaggaggacataagacatctgtcatattaactatttaactgtggaaatactttttcacatcagagttctaaaaatcaacggggatatgtaggcatctatattacgtctcttattctctaaaatctacagtgtagcttgctcttaaatttttataattaagaaacaaagctgaggtttcccgtggacaagttaacactccatttttctctcttttcatgtgaa

SEQ ID NO: 69251 - DNA, 600 bp, Chicken  19866894341306_1
taaggcaaaagcagtgtgcatatatctattcaggttgttaaatcatctagtaacatctatttgatcacaaatgtggggcttgattgctactctgtcatatacgtcaacttattttttagggtgactgtttcatcttttatgattttctttcactgaatttcttcagctcaagatattttctgcactagctgcaattgtagcacatctacctctcatatataccatattctaatagtcttttttctagatctgtcatcttactatgaagtcacacacataacagtaaggcatcctgtacaytcacactaaaagaggataggaatcatccaccaaatggggagctcattttttccaattgtatccaggtctgggctcctcggttcaagaaagattgagaacttctagagaatgtccagtggagggccacaaagacaatgagggtcctggagcatctcccttatgaggaaaggctgagaggcctgggactgttctgtctggggaagagaagactgagaagggatcttatcaatacttataaatatctagaggatggggccattgggagatatccaaaacctacctggatactttcctgggcaa

SEQ ID NO: 69252 - DNA, 599 bp, Chicken  19866894341310_1
  misc_feature (1)..(169): n is any nucleotide
nnnnnnnnnnnnnnnnnnnnnnnnnnnnnnnnnnnnnnnnnnnnnnnnnnnnnnnnnnnnnnnnnnnnnnnnnnnnnnnnnnnnnnnnnnnnnnnnnnnnnnnnnnnnnnnnnnnnnnnnnnnnnnnnnnnnnnnnnnnnnnnnnnnnnnnnnnnnnnnnnnnnnnnnngtgcagcttacatccacctgcaacttgggatgctgaagtgaacatgtggctcttcacagaacaaagtccttacaaccagtgtctgcacaaagggcttcctttaattgctggaaggtcgagcgagttcagayccttgggttctggttaattctctgcaacagcactgagttttttgtctttattttagtttcctgtgttggagctgctaagcagatgtatttcaaatggttgaaattgctctttgtagatgtttaatgaaagtccctgaatgcaacatgattcttactaaaccaaaaagaggaaaaaaaagaaaaaacttgccaggcatgtttttcccagttgtgagagaaatgtaagggaaaggggttgyttttcccaaagtatgtttgagaatccacgttgctgtgtggtctgagcactcacagcaagg

SEQ ID NO: 69253 - DNA, 556 bp, Chicken  19866894341310_2
tacaaccagtgtctgcacaaagggcttcctttaattgctggaaggtcgagcgagttcagayccttgggttctggttaattctctgcaacagcactgagttttttgtctttattttagtttcctgtgttggagctgctaagcagatgtatttcaaatggttgaaattgctctttgtagatgtttaatgaaagtccctgaatgcaacatgattcttactaaaccaaaaagaggaaaaaaaagaaaaaacttgccaggcatgtttttcccagttgtgagagaaatgtaagggaaaggggttgyttttcccaaagtatgtttgagaatccacgttgctgtgtggtctgagcactcacagcaaggctgatccagcacacactgctgttaagagtaacttctgagaatcgtgccttacaaaaaatgcctgtattgttatattcagcacaaaatgggaacctacggggcctgggctaggagaaagggagaagtaaaaggaggaaatgccttgtttggggaatgagctgtgacgctgaacagaagggacaaggcttgagcattt

SEQ ID NO: 69254 - DNA, 596 bp, Chicken  19866894341311_1
acacattctccttgaaatggatttttgctacctttcccctgttttatatctcattaatcaagcactgtttccttctgttttcattatctatgtaattaccatttatgggagtatattattttagagaagacctttccctgcaactgggaagcacagacaacttattttaaatgccaaaaattagagggaaaaaaggagaggacctgctggaacttcaaatagagtcctgaaatggattccctctgctactcttcttgccactaaaacaaaagcagcttaatatttgcctttatcagctasttttataacaaaatgtaaactagaaggaaaatctgttcaccctcactactagtgaaatctaagtctcctgaaagagcacaagaagcttgttgatgtttgagtgttcagagagacatttcagacctctccacagtctgaaatcccttgctatttatttgttttcttattttaagagaattgttagttctgccataagtagaaaactttcaacccaaaggaagacaggagaggttgcttaccagccactttacctaaccttgaggatcacactggagaatcaagagcacccattcagt

SEQ ID NO: 69255 - DNA, 600 bp, Chicken  19866894341312_1
tgaggctagcacagagcacagagctgtgaaatgctcttctgagaggagcatttctgaccctgctgcatacagttcttctctgttgtgggattcaacacacttgaggaacatgcacatcccacaggtgcaggttcatttctagtgatacggtaaaataaaattactaaacccatgaatgatctttgaatatagaaagtatgcatgtgagtgaatttgggactggtgactcatgcatattaatgtgtctgttaatgatattaacagcaacattattacccatgtcgttgctcttgcaaattktgtctgctcagatgttgggtgttatgataagttccggtgtagcagtctgcagtgcctgctttaagtcaagaaacgttaacaaactgttgtgttggtgtattgcaagctagatgtatatcatagtaaagcaattcctttcgtctattctaaattatttcccttcagggcttttaacatctcagtgtgtttcatttcatataactcttattgtacaaattgaacaagataatggcagggattatgaatgtatagctaaaagatttccaaatccaggcgactttactgtctaactgcttttct

SEQ ID NO: 69256 - DNA, 600 bp, Chicken  19866894341320_1
agaagttgcaaaccaagagtttaatagaataacattaaaagaagctctggaaaagaaattaaatcagttcatatgtatttgtttatgctaatatattcttttattttcagtgttgtctgacgatcttgtttaaattcatttagctcttattagctctctgctaataaaaatctttgaagttattttatggaaattaactcaagcagaaggttttattttcaatgaaatcttctcttctctttgaagttccaacaatctaaactgaaataggagtccagtgtgatttgaaaatgggaattkctggagattttgccaacactgataacatgasagttctgctttattcagatatttctacagaarctcatcrtttgatcccacaygtatgaaacatgtcaaatattgaaaggagtatcaccctattcctgtacaytgcaagcacctacgtatttcaattactcatctgaaaagcacaaacctattagtgatatcaaatgtataagacaatataattccaacattcccactccaagcataattttgctgtttgtatttcagttaaagcaatgaccatgggaggcgtgttttcagtgaacaagc

SEQ ID NO: 69257 - DNA, 600 bp, Chicken  19866894341320_2
acattaaaagaagctctggaaaagaaattaaatcagttcatatgtatttgtttatgctaatatattcttttattttcagtgttgtctgacgatcttgtttaaattcatttagctcttattagctctctgctaataaaaatctttgaagttattttatggaaattaactcaagcagaaggttttattttcaatgaaatcttctcttctctttgaagttccaacaatctaaactgaaataggagtccagtgtgatttgaaaatgggaattkctggagattttgccaacactgataacatgasagttctgctttattcagatatttctacagaarctcatcrtttgatcccacaygtatgaaacatgtcaaatattgaaaggagtatcaccctattcctgtacaytgcaagcacctacgtatttcaattactcatctgaaaagcacaaacctattagtgatatcaaatgtataagacaatataattccaacattcccactccaagcataattttgctgtttgtatttcagttaaagcaatgaccatgggaggcgtgttttcagtgaacaagcattcycatactagcgtcatcgtgatccaccc

SEQ ID NO: 69258 - DNA, 600 bp, Chicken  19866894341320_3
tcagttcatatgtatttgtttatgctaatatattcttttattttcagtgttgtctgacgatcttgtttaaattcatttagctcttattagctctctgctaataaaaatctttgaagttattttatggaaattaactcaagcagaaggttttattttcaatgaaatcttctcttctctttgaagttccaacaatctaaactgaaataggagtccagtgtgatttgaaaatgggaattkctggagattttgccaacactgataacatgasagttctgctttattcagatatttctacagaarctcatcrtttgatcccacaygtatgaaacatgtcaaatattgaaaggagtatcaccctattcctgtacaytgcaagcacctacgtatttcaattactcatctgaaaagcacaaacctattagtgatatcaaatgtataagacaatataattccaacattcccactccaagcataattttgctgtttgtatttcagttaaagcaatgaccatgggaggcgtgttttcagtgaacaagcattcycatactagcgtcatcgtgatccacccagtagagaagagcagagcaggacactcactag

SEQ ID NO: 69259 - DNA, 600 bp, Chicken  19866894341320_4
atatgtatttgtttatgctaatatattcttttattttcagtgttgtctgacgatcttgtttaaattcatttagctcttattagctctctgctaataaaaatctttgaagttattttatggaaattaactcaagcagaaggttttattttcaatgaaatcttctcttctctttgaagttccaacaatctaaactgaaataggagtccagtgtgatttgaaaatgggaattkctggagattttgccaacactgataacatgasagttctgctttattcagatatttctacagaarctcatcrtttgatcccacaygtatgaaacatgtcaaatattgaaaggagtatcaccctattcctgtacaytgcaagcacctacgtatttcaattactcatctgaaaagcacaaacctattagtgatatcaaatgtataagacaatataattccaacattcccactccaagcataattttgctgtttgtatttcagttaaagcaatgaccatgggaggcgtgttttcagtgaacaagcattcycatactagcgtcatcgtgatccacccagtagagaagagcagagcaggacactcactagtgaagta

SEQ ID NO: 69260 - DNA, 600 bp, Chicken  19866894341320_5
tatgctaatatattcttttattttcagtgttgtctgacgatcttgtttaaattcatttagctcttattagctctctgctaataaaaatctttgaagttattttatggaaattaactcaagcagaaggttttattttcaatgaaatcttctcttctctttgaagttccaacaatctaaactgaaataggagtccagtgtgatttgaaaatgggaattkctggagattttgccaacactgataacatgasagttctgctttattcagatatttctacagaarctcatcrtttgatcccacaygtatgaaacatgtcaaatattgaaaggagtatcaccctattcctgtacaytgcaagcacctacgtatttcaattactcatctgaaaagcacaaacctattagtgatatcaaatgtataagacaatataattccaacattcccactccaagcataattttgctgtttgtatttcagttaaagcaatgaccatgggaggcgtgttttcagtgaacaagcattcycatactagcgtcatcgtgatccacccagtagagaagagcagagcaggacactcactagtgaagtagaaaaatagagaa

SEQ ID NO: 69261 - DNA, 600 bp, Chicken  19866894341320_6
attcatttagctcttattagctctctgctaataaaaatctttgaagttattttatggaaattaactcaagcagaaggttttattttcaatgaaatcttctcttctctttgaagttccaacaatctaaactgaaataggagtccagtgtgatttgaaaatgggaattkctggagattttgccaacactgataacatgasagttctgctttattcagatatttctacagaarctcatcrtttgatcccacaygtatgaaacatgtcaaatattgaaaggagtatcaccctattcctgtacaytgcaagcacctacgtatttcaattactcatctgaaaagcacaaacctattagtgatatcaaatgtataagacaatataattccaacattcccactccaagcataattttgctgtttgtatttcagttaaagcaatgaccatgggaggcgtgttttcagtgaacaagcattcycatactagcgtcatcgtgatccacccagtagagaagagcagagcaggacactcactagtgaagtagaaaaatagagaaatgtcccttggtttcacgaaacaccactacttgtctgtagcaaagcagta

SEQ ID NO: 69262 - DNA, 599 bp, Chicken  19866894341320_7
gattttgccaacactgataacatgasagttctgctttattcagatatttctacagaarctcatcrtttgatcccacaygtatgaaacatgtcaaatattgaaaggagtatcaccctattcctgtacaytgcaagcacctacgtatttcaattactcatctgaaaagcacaaacctattagtgatatcaaatgtataagacaatataattccaacattcccactccaagcataattttgctgtttgtatttcagttaaagcaatgaccatgggaggcgtgttttcagtgaacaagcattcycatactagcgtcatcgtgatccacccagtagagaagagcagagcaggacactcactagtgaagtagaaaaatagagaaatgtcccttggtttcacgaaacaccactacttgtctgtagcaaagcagtatttgcttaaagcaggagtagcaacttaaagtagcaggagccattttacaattaattaatctgcacagttggatttacgtatctctttcttttaagagttttaaataccggcccaccaactcagcatctgagcacctgccacatgtaaatcaacaatagagtagggatcata

SEQ ID NO: 69263 - DNA, 556 bp, Chicken  19866894341326_1
gtacccacgcagttcccaagtctactaatctactccttccctacacagcattgaggtactttcccctatataaagagagggtgaagggatgttttctttgctgcagatgtgtgccagggtgacacagctgcttctggctgcgggaaacaacccaaactggtaaggtcaacattaaggcttgaaagtgcaactgctttctgcatggcacaaaggcaacctcaagaaacagctcagctgcacagtgtggcccagtgccaaaaggcaaagactacagtgctgcatgcagccaaggggcacccraatctgtcaggctttcgttcctcagcacctcgaaaaatcaagacctgattgtatagtcaggtgcttgtagagaacacagcaggtcttaggactgagctttatagagctgaggaaataaaataacacattattctcagtgaaatttcagattctactgccagaaatcaatgagctatagcagacttagctcctgaaaacccacggacactgacactagagacaaagttttaaaacaaagtgagagaaaataaactaa

SEQ ID NO: 69264 - DNA, 475 bp, Chicken  19866894341331_1
aaataatcccagttccctcagccgttccccgtaagacttgtgctgctttgttgcctctctctgaacacgctccagggccctgatgtctttcctgtagtgaggggcccaacactaacacagtactcgaggtgcgaccgtaccactgctgagtacagagggataattacctccctgctgctgctggctgcactatttctgatacaagtcaggatgccactggccttcttggccacctgggcacactgctggctcatgtttagccaaccgttgaccaacacccctgaatcattttcctccgtkcagctttccaaccactctgccccaagcctgtagtgttgcctggggctgttgtaggcaaaatgcaagatctggcacttggtcctgttgaacttcatcccactggcctcagcgcagctatccagcctgtccagatccttctgaagggccttcctacccccaggcagatcgacacttt

SEQ ID NO: 69265 - DNA, 599 bp, Chicken  19866894341332_1
  misc_feature (1)..(124): n is any nucleotide
nnnnnnnnnnnnnnnnnnnnnnnnnnnnnnnnnnnnnnnnnnnnnnnnnnnnnnnnnnnnnnnnnnnnnnnnnnnnnnnnnnnnnnnnnnnnnnnnnnnnnnnnnnnnnnnnnnnnnnnnnnnncatgtatggttgtacctacattctttctgtgcctgcctgcctccccccattagggcggattttgcagcacgaaggcagagtaaacacagatacagcataagatatatttaaatcctgttcagcactatccacagccacctgatgtttttccctgagaacatagcaaatgctacacwaacaggatggatcaaatttattttctcaccatccctactttgatggtgattgtcttgaaggaaatgggcaccttttgcagagtcgtgaaatcagtgagcaaagctgtttacaaaatccagtttgcaggcagccctacaagtatattgtgtacatgcacttgatttttttatcattccagtgatggtgagaacgctgcccatggtgaaagaagtgaacacatgattatcartgagtagtccctcagaagtattcccaaagccttttgrcatatttggaagaaaggcagcttcagattatg

SEQ ID NO: 69266 - DNA, 600 bp, Chicken  19866894341332_2
tttaaatcctgttcagcactatccacagccacctgatgtttttccctgagaacatagcaaatgctacacwaacaggatggatcaaatttattttctcaccatccctactttgatggtgattgtcttgaaggaaatgggcaccttttgcagagtcgtgaaatcagtgagcaaagctgtttacaaaatccagtttgcaggcagccctacaagtatattgtgtacatgcacttgatttttttatcattccagtgatggtgagaacgctgcccatggtgaaagaagtgaacacatgattatcartgagtagtccctcagaagtattcccaaagccttttgrcatatttggaagaaaggcagcttcagattatgtgaagcatataggcaacacagtgtgcttactgtactgataaccrcagtagtctagctaakcagtttctggtccagttctagaaatattttaccagtatgaacactgtcacgattcatacaagatggaggatttctcccagaacaaaatgttagggaagagcagacagggaggggcttggcacagtgaaagatccaagtgtttttaaaaagggactcaattcactgagtata

SEQ ID NO: 69267 - DNA, 600 bp, Chicken  19866894341332_3
gtttttccctgagaacatagcaaatgctacacwaacaggatggatcaaatttattttctcaccatccctactttgatggtgattgtcttgaaggaaatgggcaccttttgcagagtcgtgaaatcagtgagcaaagctgtttacaaaatccagtttgcaggcagccctacaagtatattgtgtacatgcacttgatttttttatcattccagtgatggtgagaacgctgcccatggtgaaagaagtgaacacatgattatcartgagtagtccctcagaagtattcccaaagccttttgrcatatttggaagaaaggcagcttcagattatgtgaagcatataggcaacacagtgtgcttactgtactgataaccrcagtagtctagctaakcagtttctggtccagttctagaaatattttaccagtatgaacactgtcacgattcatacaagatggaggatttctcccagaacaaaatgttagggaagagcagacagggaggggcttggcacagtgaaagatccaagtgtttttaaaaagggactcaattcactgagtatattttacactattaggggtctgttcagataacaaggca

SEQ ID NO: 69268 - DNA, 531 bp, Chicken  19866894341332_4
tggtgattgtcttgaaggaaatgggcaccttttgcagagtcgtgaaatcagtgagcaaagctgtttacaaaatccagtttgcaggcagccctacaagtatattgtgtacatgcacttgatttttttatcattccagtgatggtgagaacgctgcccatggtgaaagaagtgaacacatgattatcartgagtagtccctcagaagtattcccaaagccttttgrcatatttggaagaaaggcagcttcagattatgtgaagcatataggcaacacagtgtgcttactgtactgataaccrcagtagtctagctaakcagtttctggtccagttctagaaatattttaccagtatgaacactgtcacgattcatacaagatggaggatttctcccagaacaaaatgttagggaagagcagacagggaggggcttggcacagtgaaagatccaagtgtttttaaaaagggactcaattcactgagtatattttacactattaggggtctgttcagataacaaggcaatgctgt

SEQ ID NO: 69269 - DNA, 515 bp, Chicken  19866894341332_5
ggaaatgggcaccttttgcagagtcgtgaaatcagtgagcaaagctgtttacaaaatccagtttgcaggcagccctacaagtatattgtgtacatgcacttgatttttttatcattccagtgatggtgagaacgctgcccatggtgaaagaagtgaacacatgattatcartgagtagtccctcagaagtattcccaaagccttttgrcatatttggaagaaaggcagcttcagattatgtgaagcatataggcaacacagtgtgcttactgtactgataaccrcagtagtctagctaakcagtttctggtccagttctagaaatattttaccagtatgaacactgtcacgattcatacaagatggaggatttctcccagaacaaaatgttagggaagagcagacagggaggggcttggcacagtgaaagatccaagtgtttttaaaaagggactcaattcactgagtatattttacactattaggggtctgttcagataacaaggcaatgctgt

SEQ ID NO: 69270 - DNA, 600 bp, Chicken  19866894341333_1
tttttaattttatgtctgaagacatgttctgtcactgcatttcatacaaagaaattaagtatgggtaaaagtatgttcagggcaactctttatttaaaaacaatcttaattaacaagtgcctttatttttccaaagggagaaagagccaaaagacttcttgtatatttctgcaagcaccattgttccaactcgtgttgccaagtgtgcctttacaaacaatgtacaaccactgtgttcaaaatgccttactgaaatcttgggtgcaaggttgtgtttctcctccattccttatttttggktttttttttcagctgtctgtgcaggatgtaaattgatgctaatgctttgtgacttttgcgttgcccattcatggccctttcatgttcttaccagcagctctctgtccagcctgcattcggcaagacgacggctcgcagtacccaggagggccgggagggccaggaggaccrggaatcccaggctgaccggccaccccagggggacctcgtacaccatcacggccttccctgccatagctgggtttgcctggttcacctggaaaagcggatgcaggtctaaatttgggagcacgtgatgtg

SEQ ID NO: 69271 - DNA, 600 bp, Chicken  19866894341333_2
caagcaccattgttccaactcgtgttgccaagtgtgcctttacaaacaatgtacaaccactgtgttcaaaatgccttactgaaatcttgggtgcaaggttgtgtttctcctccattccttatttttggktttttttttcagctgtctgtgcaggatgtaaattgatgctaatgctttgtgacttttgcgttgcccattcatggccctttcatgttcttaccagcagctctctgtccagcctgcattcggcaagacgacggctcgcagtacccaggagggccgggagggccaggaggaccrggaatcccaggctgaccggccaccccagggggacctcgtacaccatcacggccttccctgccatagctgggtttgcctggttcacctggaaaagcggatgcaggtctaaatttgggagcacgtgatgtggtcagtacacagctggctttaccacttttttagctttactaaaaactttactgaaagctgtgtgaagatggggttccctttttaatgctctcagtgtcttcccaggagaagtgaccactcagagggacggttattttctaacagagaaccagactgcatttacacatctgt

SEQ ID NO: 69272 - DNA, 600 bp, Chicken  19866894341335_1
tttgtatgtgtacatatgtgcaatatcaaatatagtttaaaatccaatcttaaaatttatttgaattcccaggttagaaatacatggtgacatgtgaacatagacactgtcaacagaaaggagtgggtggatctgaaagcctacaggttttagttgccaatgtttagatacctgatttgggcgcttaatacaacaacagatgggttctcaatctggtcatcttcaaatatattatagagagactttagcccttaacttttggactacactgtttgctccaacaaacagctaaagccatcrgttgtatgcttgcattagaggaattgaaatttctcctgaaatatcttaaagacaagttttcaaaatgacatcataaggacttttctttaaatcctcttaaatgtgccaaaaggccagaaacactttctcctctacatggtgagtaaaaatgaagagggagagtggaagacttaactatgcataaagtttatggtcttacaaaactgaatccacctataatgctgaaagctttaccaagtgggcatgcacaaagtattcctacaaaaaacttcctgatggagttgcttgaccaaaacaata

SEQ ID NO: 69273 - DNA, 600 bp, Chicken  19866894341338_1
aagttactgaacacttacagaaaggcctagagatacacagtattatgcagcaatctttttgttaggtttgtatttttgtagtttttaatgtttcactactttatgtaaaattcagtcctgtcttctcctttataaccacagcatgttaatgttacttatcattagtacttatattaaaacttgattattatcatgcaagtttaattctatcgacatttatttcttatcccacctcttcacacagtcaaacttccactggaagcaatgtaataattatagcatggcttttatagtatgatwtttttactaaagatgatccagattgcaagaatatttattaacatatctataccatgttgataaatattttgttttgcmcawgataactttttcagttaagtagactttgaatgaaaagtcagaagatattttgtgccacagggagtagtagtgttccaaatccagctaaaattgataagttcaggagtcctaatggtttttaaatgatttgaaagatcattatgtgatatgatcatgtgagaaaattaaaaactgggtcaagtgaggagaaccaagaaattaacaaaataccttgtcttt

SEQ ID NO: 69274 - DNA, 600 bp, Chicken  19866894341338_2
tagtttttaatgtttcactactttatgtaaaattcagtcctgtcttctcctttataaccacagcatgttaatgttacttatcattagtacttatattaaaacttgattattatcatgcaagtttaattctatcgacatttatttcttatcccacctcttcacacagtcaaacttccactggaagcaatgtaataattatagcatggcttttatagtatgatwtttttactaaagatgatccagattgcaagaatatttattaacatatctataccatgttgataaatattttgttttgcmcawgataactttttcagttaagtagactttgaatgaaaagtcagaagatattttgtgccacagggagtagtagtgttccaaatccagctaaaattgataagttcaggagtcctaatggtttttaaatgatttgaaagatcattatgtgatatgatcatgtgagaaaattaaaaactgggtcaagtgaggagaaccaagaaattaacaaaataccttgtctttgcaaacccagtgaaaatcatttttgaaagactcatgtgaaggatagttgtggccacaggtatcacaaggacagaatac

SEQ ID NO: 69275 - DNA, 600 bp, Chicken  19866894341338_3
tttttaatgtttcactactttatgtaaaattcagtcctgtcttctcctttataaccacagcatgttaatgttacttatcattagtacttatattaaaacttgattattatcatgcaagtttaattctatcgacatttatttcttatcccacctcttcacacagtcaaacttccactggaagcaatgtaataattatagcatggcttttatagtatgatwtttttactaaagatgatccagattgcaagaatatttattaacatatctataccatgttgataaatattttgttttgcmcawgataactttttcagttaagtagactttgaatgaaaagtcagaagatattttgtgccacagggagtagtagtgttccaaatccagctaaaattgataagttcaggagtcctaatggtttttaaatgatttgaaagatcattatgtgatatgatcatgtgagaaaattaaaaactgggtcaagtgaggagaaccaagaaattaacaaaataccttgtctttgcaaacccagtgaaaatcatttttgaaagactcatgtgaaggatagttgtggccacaggtatcacaaggacagaatacagt

SEQ ID NO: 69276 - DNA, 599 bp, Chicken  19866894341344_1
  misc_feature (1)..(198): n is any nucleotide
nnnnnnnnnnnnnnnnnnnnnnnnnnnnnnnnnnnnnnnnnnnnnnnnnnnnnnnnnnnnnnnnnnnnnnnnnnnnnnnnnnnnnnnnnnnnnnnnnnnnnnnnnnnnnnnnnnnnnnnnnnnnnnnnnnnnnnnnnnnnnnnnnnnnnnnnnnnnnnnnnnnnnnnnnnnnnnnnnnnnnnnnnnnnnnnnnnnnnncacacccctattaggtacagccctgggaggcacagggcaaccaaatccaaacccatcgtgtccatcactctcactggtacagattgcccagagggtgggtgycccatccctgaaggtgttcaaggccaggttggatggggcactgggcaacctgacctgatgggagcaacgagcccacggcagggactggaactaggtgatccttaaggtcccttccaacccaagccattgtgtgactctacaaacacaaggaacaatttgactaacagctcctgcatccaacagcggtggcagaaacaaaccccccgccgagatgaacggcgcagcaccacgagatccagagggcaaaggacatctccacgggcagcaatttgtacagccccgtgcacggcactgagcac

SEQ ID NO: 69277 - DNA, 600 bp, Chicken  19866894341346_1
tggacatccaggctattgccaaagagctactcaccagtatcgtgtacttaggaattttgtgggcacgcatcagctgaatttttcagttttacattggttgaaatgtgtagtgcctgtggaatgcaacaatatgtaaatgctttttttccctccagtaactggtttggatctcagtatagaggatggactgtaagatgaagtatatccataactgtatgtagatgagatgtctgctggagtaggacaacatggaagtcgttgttgtggagctgatttgccttatcctgcagtgtaggaagktgtgctttactagtttgcaggaatttcatgagcatcaagctggagaggaggggagctgcagcaaacaaatgaaatataggaaatcaaatgctgtgaaagtcatgagcaacagaagtcatactttttattggagggaatacagtctatgctctgagcagttaccagaactgctgtctgtagtaccctcttttttagcattaagctttgggttggttttggtacatttgtgttggttcagactaaccagtttcactttccagagcctgggcttcttggtttgctgtgcagccatgagctttg

SEQ ID NO: 69278 - DNA, 430 bp, Chicken  19866894341346_2
gtaccctcttttttagcattaagctttgggttggttttggtacatttgtgttggttcagactaaccagtttcactttccagagcctgggcttcttggtttgctgtgcagccatgagctttgtcttgctgatcctcagacacaatccacttaatattgatttgaagcagttgcttttaattttgtcagtgatgattttctctttgggccttttgataatctaatgtaacctgaatgctgactataatgtcacgtgtcaatgaaaatgatgcatcttcagtcttctttccaaatgtcagtcrctgttgttttttttgttgttgttgttgttgttgttgttcatttgtcttcaacatccatatggttaatttttgcttctcttttattgagtggagtcctctgatatttttaggctggtgtttctagtgtttt

SEQ ID NO: 69279 - DNA, 600 bp, Chicken  19866894341360_1
gccacgtagccctggggaagctcccaagcagcgagcccaggagatggagggcattggtggcggtggacagaggcacgatgggtggaacacagggtgccaggcagctggcagtggctctgggggctgctcgtgtctcctggccaacaaagagagaactgggagtgtggtgggacaggtccttcacagggggagcagagagtggtcaaatggggcctcttggtggaagtggctgctttgggtcctgcaatggagggaacagattctgtactttcaacattttcgttgtgttgattgaaaaargggttttgtttttgttttaaggttccgtcttccttgtatgagcctcttgcacagcagaggaagagaaacacttttaacaaaaatagagcatgtgttttcttaagatgagattgctgtggcatgtttaggactcgaaactgtgtgacttttgaagttgacttcatttcacgctgatgatatccttttaactgtcttaagtaaacaatacagttcagctctgagaagtgtcttgtgaaagccgcgctgggtttctaattctgactgtttcaaagatgttcattacaaatatgctcttcttac

SEQ ID NO: 69280 - DNA, 600 bp, Chicken  19866894341364_1
ggtctggagctatctgatatggctttgaagatagtcctgctttgagcaaggtgctggaccaggtgattttcagctgcccgttccagccagaagtactggaaatcactctaattacttgaacttcagaatatcagttcttgcaaattgctgactttgttcaagtgagtaattttacttgcattcttacgtttgaagaatcaggactagaacaagcagtaggacccaggggccatattctctcatttttatagaaattcattacgttaattatcttcctgctggtgtaagactgcaggcacrcaaatagtgtgggttttgtctctctgtaatgcactaatgtactgtgcttcttcacatgtgtggtatactacagatctatatgggggtgtggtgacagagcaatgaaagcctcttatgatgagtcctaaagctctgagtctaagtcttctcctgtaattgtgctgaaagtgatgctgaagatgaaagggagtgagatagcagagagccaaagtataatttaattgataagaactccaatggcctagaaatagtgcagtttgggaataaatcaggtgaaaaataaacgtcctgaggattttg

SEQ ID NO: 69281 - DNA, 600 bp, Chicken  19866894341367_1
gccagagcagcagctccgagctggcagcagcacttgctcacatcagtgcccgaaagccacggaaggcagcaggaggtgtggggtaagcaccgacacgcaggcaccatgcacagagccagctggagcctgctcagaggcgatgctcccaggaccctccgtgcccctccagcaacccagagccttccaagcaccagctgtacctcgtacccacgcgtgcttctatgcttcagctagcagaataaatacaaagcagcaagcagcagcaaacatcttcctcttgactgctgccgagggaaaacrctcttcatttcagcccctctgctgctaacgtgagggctaagagttaagctggcagctgtccttgctgggtggaaaggagcagtgcagtcctaacagagctcctggctggtggaggaagygcagacctatttaaaggagtcagagcccttttcatctgccttcttcgaaagggaaagagcccacgtgaatatatctaaccagagctagagctttgaacccctacgggaaagccctattcacctctttcagccaattgcccagcatggcaagagctgtttctctggcaatggcaacgttggc

SEQ ID NO: 69282 - DNA, 600 bp, Chicken  19866894341367_2
ctggagcctgctcagaggcgatgctcccaggaccctccgtgcccctccagcaacccagagccttccaagcaccagctgtacctcgtacccacgcgtgcttctatgcttcagctagcagaataaatacaaagcagcaagcagcagcaaacatcttcctcttgactgctgccgagggaaaacrctcttcatttcagcccctctgctgctaacgtgagggctaagagttaagctggcagctgtccttgctgggtggaaaggagcagtgcagtcctaacagagctcctggctggtggaggaagygcagacctatttaaaggagtcagagcccttttcatctgccttcttcgaaagggaaagagcccacgtgaatatatctaaccagagctagagctttgaacccctacgggaaagccctattcacctctttcagccaattgcccagcatggcaagagctgtttctctggcaatggcaacgttggctcattttgaagtctttcctcccacagacagcaaagcctccctggtcccacataccccaaaagggcaagcgtacagcatgaatgcaactcacagcacccagcagcacctgtgggacccct

SEQ ID NO: 69283 - DNA, 600 bp, Chicken  19866894341370_1
catcactgatggttcagatattttaaatgaatccagtgcaatttgggatctatgcattcaggaggtcacaaatgacaatcccacctgtatttgctgatttcctccttgcctgtgggtcatagcatggcaggttgcctccttgcctgcagagtgacctgtgcaatgttcctgagccacagggtgagccatggggccaaccatgtcacagcgatgggagcgaagtggctggagctctagatttacaagagtctggatttacaagagtctcgctttagccttcagcatagactgctggctgtktttggtgtcatgaacatsggctatttttcatggagtgcctggtttcaaaggaaatctggctgacatatcccatagcatctcagagacaaatgtgttatcaatacaaacaccttttcctgatgattgatctgaggatagtggtccttccaaagcaagaggcatgaacgcactgtgaattaatacctaacaccagaaataaaggaaaaaggttcatgtgaatgtcacaggctgtgtatggatcccatccaggtgaaattccttctggttattttaaatgtaacaacaactgacattagtagc

SEQ ID NO: 69284 - DNA, 600 bp, Chicken  19866894341370_2
tattttaaatgaatccagtgcaatttgggatctatgcattcaggaggtcacaaatgacaatcccacctgtatttgctgatttcctccttgcctgtgggtcatagcatggcaggttgcctccttgcctgcagagtgacctgtgcaatgttcctgagccacagggtgagccatggggccaaccatgtcacagcgatgggagcgaagtggctggagctctagatttacaagagtctggatttacaagagtctcgctttagccttcagcatagactgctggctgtktttggtgtcatgaacatsggctatttttcatggagtgcctggtttcaaaggaaatctggctgacatatcccatagcatctcagagacaaatgtgttatcaatacaaacaccttttcctgatgattgatctgaggatagtggtccttccaaagcaagaggcatgaacgcactgtgaattaatacctaacaccagaaataaaggaaaaaggttcatgtgaatgtcacaggctgtgtatggatcccatccaggtgaaattccttctggttattttaaatgtaacaacaactgacattagtagcatttttttttttaccctg

SEQ ID NO: 69285 - DNA, 600 bp, Chicken  19866894341372_1
agttctctaaacaaaaggggattctgttaggaagtctgcactactgccaaagtattctccatctatgtgtttcttttagaaagattaacttttcacatcagccttgctggacactccagcactgcttcccccccactgcccctcacccataagtcactatagatatcttctgctcatttttaatttgatgcaaaaactacctatgaataaccaactaaagatttatttggctatcatcatcagtagcacagctgaaaacctcagttctgagttccagaaatgagttttttcattggttgragtttcctgtagttgtagaaaactttaccatttcctaattagttagcaatgtaagtattttccattaccaattacatgtgatgttaccatgattagaagcaggtcatcagagactgacctgctggagaggagcagtgcagagaaggacctgggggtcctggtggacaacaggttgtccatgagctagcagtgtactcttctggccaaggccaatggcatcctggggtgcatcgcacagagagtggccaacaagacaagggaggtgatcttcctcctctgctctgccctggtgaggccaca

SEQ ID NO: 69286 - DNA, 600 bp, Chicken  19866894341376_1
ttagagtggaagttcaaatttcactaaaggttcctcccatgtaactcctttgatgtattcgtcattccaaagcacagagaaaagtactgagtagagcgtgggtggaggaagaatggtgcatgtcttggaaggaaaattcactattcaaactagtagcaaaataagcagacctgcagtacaaaaacttacagattgctcccgcacaccttctaaaaatataattcagttaaagtggcagttcagcagagccaatagagtcaacaacagttagtgttagtattcttacacggaatctgctgwtggttgaaggaagtgggatttccaaataggttttcattaaaaagctggcacgctgtgaccaaatccttcaaactgtcyttagatcttctatttctttaacaagcttaattyattttgcacacactggaagaacataagccaagcaaaagtcttccttttaactgatatttcaaaacttgcactgattagtaaaatggagtacaagcggaattcactggaaatcctccttccctrgacaatttacatcgtaattgttacatgagacctctctgttgcctgccgatggctcagattcagcag

SEQ ID NO: 69287 - DNA, 600 bp, Chicken  19866894341376_2
gaaaagtactgagtagagcgtgggtggaggaagaatggtgcatgtcttggaaggaaaattcactattcaaactagtagcaaaataagcagacctgcagtacaaaaacttacagattgctcccgcacaccttctaaaaatataattcagttaaagtggcagttcagcagagccaatagagtcaacaacagttagtgttagtattcttacacggaatctgctgwtggttgaaggaagtgggatttccaaataggttttcattaaaaagctggcacgctgtgaccaaatccttcaaactgtcyttagatcttctatttctttaacaagcttaattyattttgcacacactggaagaacataagccaagcaaaagtcttccttttaactgatatttcaaaacttgcactgattagtaaaatggagtacaagcggaattcactggaaatcctccttccctrgacaatttacatcgtaattgttacatgagacctctctgttgcctgccgatggctcagattcagcaggagggacaacgtcagcaggagcagctgtgtagagatgttggtggtggttttgttgtagaggacagacactgcacatgg

SEQ ID NO: 69288 - DNA, 600 bp, Chicken  19866894341376_3
aatggtgcatgtcttggaaggaaaattcactattcaaactagtagcaaaataagcagacctgcagtacaaaaacttacagattgctcccgcacaccttctaaaaatataattcagttaaagtggcagttcagcagagccaatagagtcaacaacagttagtgttagtattcttacacggaatctgctgwtggttgaaggaagtgggatttccaaataggttttcattaaaaagctggcacgctgtgaccaaatccttcaaactgtcyttagatcttctatttctttaacaagcttaattyattttgcacacactggaagaacataagccaagcaaaagtcttccttttaactgatatttcaaaacttgcactgattagtaaaatggagtacaagcggaattcactggaaatcctccttccctrgacaatttacatcgtaattgttacatgagacctctctgttgcctgccgatggctcagattcagcaggagggacaacgtcagcaggagcagctgtgtagagatgttggtggtggttttgttgtagaggacagacactgcacatgggcacattgccaaagcttttactcagttcctggt

SEQ ID NO: 69289 - DNA, 600 bp, Chicken  19866894341376_4
gcagttcagcagagccaatagagtcaacaacagttagtgttagtattcttacacggaatctgctgwtggttgaaggaagtgggatttccaaataggttttcattaaaaagctggcacgctgtgaccaaatccttcaaactgtcyttagatcttctatttctttaacaagcttaattyattttgcacacactggaagaacataagccaagcaaaagtcttccttttaactgatatttcaaaacttgcactgattagtaaaatggagtacaagcggaattcactggaaatcctccttccctrgacaatttacatcgtaattgttacatgagacctctctgttgcctgccgatggctcagattcagcaggagggacaacgtcagcaggagcagctgtgtagagatgttggtggtggttttgttgtagaggacagacactgcacatgggcacattgccaaagcttttactcagttcctggttaaaaacggagtttaatatcaaattcttgaagctcagtgttttacatttcataaaccacttttatcctaattgcaaaatcaaactaaggccaaacaaaaaaagcaaaacaaaatgaaaaccta

SEQ ID NO: 69290 - DNA, 600 bp, Chicken  19866894341378_1
ttccgaatgcagcgcacacccagaggcagaacgtacgctgccatgtctaaggggacctgcaaggtacaatgtatgcaggagaaagcaggagagcctctccatgcggctgtcatgtgcctgtggaggctgtaatctcacaagtacacagatacggccacgcaaatatgggttatgcctgtgataacaaccagtgtgtgtcccaggactcctgcatggcctttaatctggctgctaccacatgtgagagcctgtgctgaagcagcttgattgctcctgtttgccaggaacacaccgcccttsgatgccctgaggtgaaagctgaggacgtgagctgccaacttcttggcttgagcctctggaggtggccacgccaggatgggtgtcacagctgcaggcagagggcaaggaagagggtgtgcagctggcagcaggcattgagaaactgagcacgctttcaacacagccttcaacttttccaacatccccttcaacaaagccaccttcagtgccagccttgccaaacccaggctgaagctagcacagctttgcttatcctcacagccatgactcctccactctgctacactagtgaccttgctt

SEQ ID NO: 69291 - DNA, 600 bp, Chicken  19866894341383_1
tcatttaccatttgagaactaaagacagtatcaaacattgttattatatgaaacaggtgtcgtcaactgcttcccacaatcttcgcatttctctggcaaagagatcacattttctagagatgctattcagcaaaggaggaaattcagtgttggaacactaacagatgctttttcagcactgacctgctgtgtcaagagcaaaggacagtgtaaaacagaggtttaagagtctactggactcctacagtgtttgtatgaaccaaatccatagatatgttaatgtgaataatatttaggttktttcccccacctttttctattctaaacccatttcaatctagaacagtgagaaaattaatattcaacttcatattagggctttgaaaaaaaaagctttagccaattcacttgctgacctcaacttaaagcataacgtaacttgaacacatactaaaaagttataatcttaggcttatgctatgttaccagctgtagttatgttagaagggtctcctaagttttatagactaggtatgtacatgagcaataagtaaataatttatataatgattccaattaaaaggatacaaaagcctaatt

SEQ ID NO: 69292 - DNA, 412 bp, Chicken  19866894341385_1
ctctctctcctccctaccccatctgtatttgatagtcctttctgtgtgaaaacaggcagaatgctaatgaaagagctattaatgcagcaagtagcatccttttatctacacagagggagtcagcaatgcctgcacaattaggtttgtgaaacaatttaaatactctcccagatccctaatgagcctgtacgatattttttttcctttgtgactctttttgtagcccatgaagagggatttagtgcttgatgtgagcaactttcctgctttcaaaaattctttatctgcgtagaaacaccraccctactgagcaagggacaagggcagcctgtggtgaacaaggttcgcagtgaagaaagaacaagtctagctggcatgtctctgaatgaacaagacttcaaaatgtgtttgg

SEQ ID NO: 69293 - DNA, 600 bp, Chicken  19866894341389_1
tccccagtggttcggagagatggtgggacttgcctggagacgcacatcaaatctttagctgagatgggtttggaaactaaattcttgatcttatttcttactctctagaaaaagctgccttgttactgcatgttgtagtgttgactacattttaaatatgctttcaaataagcacccttttttttttttttttttttttttttaaagagagtggaaaaagagaaatttgcccaaacatgagaagatttggtagtgatattagctaggtactatcaccttcgtgttttgaggtgcagacckattcctgtgataaaaccattcaatgctttactcagatgcttttgaagtctgrccacagttgtgctgtggatattagtcttccccagctgggtcatctggatgagaggaagggcatcttttcttcttttggctttagccgagaatactgtctctgaagccgagttgttgtaaatactgccactagaagaattccagatagatgagaatgaaaaatgttgtcttgaaaaggcctgagctcttcccgtagacttatattttttaaattgttctgctgattagagaatcatactaaggtaccat

SEQ ID NO: 69294 - DNA, 600 bp, Chicken  19866894341389_2
ctttagctgagatgggtttggaaactaaattcttgatcttatttcttactctctagaaaaagctgccttgttactgcatgttgtagtgttgactacattttaaatatgctttcaaataagcacccttttttttttttttttttttttttttaaagagagtggaaaaagagaaatttgcccaaacatgagaagatttggtagtgatattagctaggtactatcaccttcgtgttttgaggtgcagacckattcctgtgataaaaccattcaatgctttactcagatgcttttgaagtctgrccacagttgtgctgtggatattagtcttccccagctgggtcatctggatgagaggaagggcatcttttcttcttttggctttagccgagaatactgtctctgaagccgagttgttgtaaatactgccactagaagaattccagatagatgagaatgaaaaatgttgtcttgaaaaggcctgagctcttcccgtagacttatattttttaaattgttctgctgattagagaatcatactaaggtaccatttgaataatgtctaagcaggggagagtaacctttgaggaataagcttgctag

SEQ ID NO: 69295 - DNA, 600 bp, Chicken  19866894341389_3
agaaatggccacattatgctggcgtggagttcacaggtcagtactgcaaaatattgtgagacggaagaaaacgactggaatgcctaaatgaacagtatgcactgatacatgattaaatccttttttccccctcttttggagttccaagatccatccttcctccctttccctgagcctataacctttttacatgcagctttatcttttcagagcagcgtacggttataattacatgccattcttttccctgaggcactgtatgcctcgtgttctctagacttctctttttagttccccaartttttttttattgtctcatcatgacaaattcaccagtaacccttagagtaaaatcttcaacccttagagctctgacatctctcttttgttatataattttatttttacaaaatccagctacgtaagtagcaacatcatgtttccaggtcacagcccttgcaagctccagctgagttctggcatgggaagcatactccctaaccttgcaatcgaagcagggattatcttaggatgtaggcatacttctaaaattatctcagtgcatgaatgtgccccaataattgcttttcacgaacaagt

SEQ ID NO: 69296 - DNA, 600 bp, Chicken  19866894341398_1
tgaaattacaggtatgaggacttaacatttcccttgttttccaagggaatactaagtctgaaaccaactaccaccatttcaatgagggtattgttagctgttttactgctgaatgttttaacaaatccagctaactcctatgctaaaattccagaaatgctcaaaatcatctgtgtcctgagatggctgttcaggaaaagtcatcaagctactggagtctgcattatattcttggcatgagaaaatgggaaatgggctgagcataaaataaacaaacttcttcaggaaaagagttcatawtattttgaattgtgcctgcaagtatttttcttcttacataagttattgcaatttgatcttaaatttaatttgtattaaaacgtctcaatttttaaccagtgtagccaaacttggatatcttatcataggctttaagtctaccgggtcagagttagcacaagaatctgatctgaggccagcagtgttagcagctacctctctctgttcaatttgcacccccaggatttgttccaacgtatggttttgggatcatgaattctgttgttttgcagttggcacggtatgcttgtaccaatagga

SEQ ID NO: 69297 - DNA, 599 bp, Chicken  19866894341402_1
  misc_feature (1)..(92): n is any nucleotide
nnnnnnnnnnnnnnnnnnnnnnnnnnnnnnnnnnnnnnnnnnnnnnnnnnnnnnnnnnnnnnnnnnnnnnnnnnnnnnnnnnnnnnnnnnnngaaagagctctatgagtcctgcaaatgtgggcaaggtgctcgggccaggggaggtccctgagcagtcttgcagcttgttgagcagctatggagcactgccccatgggaggcctgctcctgctccacgcattataacacaccgtgggactgtggggatgtggctgcagcagctccaaggtcacacttgggctgctcaggggaacctgcrgcacccccacacagcacccatgcctcctgagggctccgaaaccctttgggcaggtggtggagctcctcctgtgcttgtacctctctcaccttccttgtgctgccagcatgcttccagcatcgttacctctgggccggagaggggacttctgcaaacagccacaactcaaactgaaagagagcattcagttttgagtttctagcaaccacattttccattgaaggaccakccagagagacaatcttcaaacaattctacttgcctagttttataataattgatgttagaaaacagtgaag

SEQ ID NO: 69298 - DNA, 600 bp, Chicken  19866894341402_2
caccgtgggactgtggggatgtggctgcagcagctccaaggtcacacttgggctgctcaggggaacctgcrgcacccccacacagcacccatgcctcctgagggctccgaaaccctttgggcaggtggtggagctcctcctgtgcttgtacctctctcaccttccttgtgctgccagcatgcttccagcatcgttacctctgggccggagaggggacttctgcaaacagccacaactcaaactgaaagagagcattcagttttgagtttctagcaaccacattttccattgaaggaccakccagagagacaatcttcaaacaattctacttgcctagttttataataattgatgttagaaaacagtgaagaataatagcaggcagaagcacaaagaaaggcttctgagcagttggctctaccggacttgtgtcccttcacttgcaaacactggtgagcaagcagaaacatttttcacatcacagtgctaattgtcatcttcctttcatatcattcctcagtgatgaacgttcatcagcaaaaatacctggaaatacttgcctagattcctattgcaacgcaatcagtgactgaccttgca

SEQ ID NO: 69299 - DNA, 599 bp, Chicken  19866894341404_1
  misc_feature (1)..(120): n is any nucleotide
nnnnnnnnnnnnnnnnnnnnnnnnnnnnnnnnnnnnnnnnnnnnnnnnnnnnnnnnnnnnnnnnnnnnnnnnnnnnnnnnnnnnnnnnnnnnnnnnnnnnnnnnnnnnnnnnnnnnnnnncccccccaaaaccagacaaacacaaaaaaacccaccaacaacaaaacctgaaagaactggaaagctgggaactggaaccagatagagctgcaggtcagtaactgctttgttcattgctcttaaaggaaggaaagcataatagtagaggcagaaggaaatggtttaaagacaaggtttaamtccagaacataacatgggcagatttttaatccaagtttaatgggaattgctctttaaatccaggaatacgaggtatgtctgaagtaccaggccaggcgttcctcttgtgtgttttgtgttgaagttaatgtggcygaattctttgggcttgcagcgttgttaagccagaccaaatgagaaaagagccaagcctattattttcaaaaacttcagaaatgcaaacaattatattctgctggggagaaactgaggagttaaaagaccgatttcatttgttgcatactccttcagcaaacatc

SEQ ID NO: 69300 - DNA, 600 bp, Chicken  19866894341404_2
acaaacacaaaaaaacccaccaacaacaaaacctgaaagaactggaaagctgggaactggaaccagatagagctgcaggtcagtaactgctttgttcattgctcttaaaggaaggaaagcataatagtagaggcagaaggaaatggtttaaagacaaggtttaamtccagaacataacatgggcagatttttaatccaagtttaatgggaattgctctttaaatccaggaatacgaggtatgtctgaagtaccaggccaggcgttcctcttgtgtgttttgtgttgaagttaatgtggcygaattctttgggcttgcagcgttgttaagccagaccaaatgagaaaagagccaagcctattattttcaaaaacttcagaaatgcaaacaattatattctgctggggagaaactgaggagttaaaagaccgatttcatttgttgcatactccttcagcaaacatcatggagatgaatgtcatagactccatcgttctatgattctaactcaacgctcagaccatgaaaccagtaagaaaaggaccaaggtacaaatgtggcatcaggctaaaacctgatgatagttattaattcgtgggct

SEQ ID NO: 69301 - DNA, 451 bp, Chicken  19866894341404_3
tatcacaatggtgtctaccacatgctagaaatgttttccaagcacataaagactctattcattgccggagagcttgtcctttaaaagacagcataagggcaaagcttgacagaaaggaacatgcagtatacaaagcaaaatgacccacaggatggctgccaaaactaagggggagggcattgcttccctcctttttctgcaggtaactcttcatgtgctcctgaatttgacatttccaaacagtttgtgttttgtgtgtgtcactgagtgttggagaagggcttgattggtggataggtwatgatgagacacaattgatccacagagaatacagataaaaagtcttcaaagctgtaccagtcctaacaggagggtgatgtgggataaacttaatgcaaggtcagagggtatttttatcacctccttgatatagatctgatatgtttattag

SEQ ID NO: 69302 - DNA, 600 bp, Chicken  19866894341407_1
gtattctactggatgttgagtttttcttagctatccatagccagcttaaagatctccatatgatggaaaatgcagcacatccctggaagcaccaccttctcccttcctcttttagaaagtacttcttttcagcatgaatttgtctagttcttacaggacttctgctagtgcatcaccactgttttccctctgtttgttggaaaatctctttgcacatcactcaggtcaggctcaaagggtgaccagagttgccgcctccatttgccaggctcacaactggagctgaattcctcagctttytgagcaccaggcagcaaatagttaaggcagctgagcctcaggcccagaacattttgctagggagccaggtgagcaaagaacagataaaggcagcacctgcctatgggtttggaacagcctggggccatggatagaatgtaaatacactctgaaaatcttattgtctgactctgtgccagcgtcttctgggctcttgtcatggaaaatatttcggctgaggtcattcagtcagcaaaaaaacagcatttaataccctcctaggtgccaacttgcttctttctttgtgtcgataaataaata

SEQ ID NO: 69303 - DNA, 449 bp, Chicken  19866894341411_1
tgcaacatcccccccctaaaaaataatttacaaaccaaaagagtcctgtcctcaacaggccaaaatcaagtgcaccagggccagctcctgcccagcccttttcaagcctttctcccttctttgtctacctgggtacaggacaccacgagcatccatgtggctgggagggacccacagtgacacagagaaggcagtgggaagggatacctcaatcagtagtcaacactgcccatctaagaccttcttccagttcccctgtttgaaggttgtgctggcaaaaccaaaaaggggaaagacagraagagagcaggaatgagaagtgttgcagaatgggagaatccccaacatccacagctgccctgccaagaccacctaccttccacgtgcacaaaaggccagtcgggctgcccttggttcttgccagcgagagcagttcaaagaacttatta

SEQ ID NO: 69304 - DNA, 600 bp, Chicken  19866894341412_1
agcgtgccactggaggagatcccaggagcaccgggacatgttcctcatccaccaccttcctggtcactgccaatgtcaaggggaatcgtagagtcatagaatcatagaatggcctgggttgaaaaggaccacaatggtcacctagtttcaacgcccctgctatgtgctgtgtgggaagcagctgctctcccccctcttgcgtcaacctgtggggcatccagctttgtgcaactctgatggtgccccacagcagctccagctgtgtcttctggtcaacagaatcaggggatgctgaaacayaasgttctgcagaaggccaattcagaacaggatggctaacgaggagcaagggacacagagctctgagttcagcagcttgagcctgaaggaagagctccagcaccctgatgctgagagatggcagacccatgggctgcaagcaactgtgcctcctgtgttccacatcccatcttcctcatcccatattctgcatcctacattctgcatcctgtgttccatctttcaggtcccacatctcatgcctcgcacgctgtatttcctatttcacagccacgagtttggggccgagggaaagaaaac

SEQ ID NO: 69305 - DNA, 600 bp, Chicken  19866894341412_2
gtgccactggaggagatcccaggagcaccgggacatgttcctcatccaccaccttcctggtcactgccaatgtcaaggggaatcgtagagtcatagaatcatagaatggcctgggttgaaaaggaccacaatggtcacctagtttcaacgcccctgctatgtgctgtgtgggaagcagctgctctcccccctcttgcgtcaacctgtggggcatccagctttgtgcaactctgatggtgccccacagcagctccagctgtgtcttctggtcaacagaatcaggggatgctgaaacayaasgttctgcagaaggccaattcagaacaggatggctaacgaggagcaagggacacagagctctgagttcagcagcttgagcctgaaggaagagctccagcaccctgatgctgagagatggcagacccatgggctgcaagcaactgtgcctcctgtgttccacatcccatcttcctcatcccatattctgcatcctacattctgcatcctgtgttccatctttcaggtcccacatctcatgcctcgcacgctgtatttcctatttcacagccacgagtttggggccgagggaaagaaaacggc

SEQ ID NO: 69306 - DNA, 600 bp, Chicken  19866894341412_3
gtgttccatctttcaggtcccacatctcatgcctcgcacgctgtatttcctatttcacagccacgagtttggggccgagggaaagaaaacggctcagcattggtgaaagaggcaaaaagaaagaaaagaagtcacactggtgtcagtgtgaagtgatttgttgcagcttagccttgttttaatctttgaaaggtggatttttctgcatttcattttgccttccttgcagctttctgcactttcgaagggcttggaggaaaaaaaattccaacaaaccccaaacagctgaatcccaaatgrctcccagttcctcctccggagcgggtttgttcctccttcccttggcccatttgtgaaagcagatctgtgagtgcacaccaggtgtgggctcacccrgcagagagagaaaactgggatttgcagctttgcttatccctagctggagttcttagagggtttttagcaagcagatagaaaccccgagtgatcctgcctctgcgctgaataggactacttgcactgccttaactttaagtatttcctatttgtttctgtcacataattttaagatcattatagcccggagaagcccatgacctc

SEQ ID NO: 69307 - DNA, 600 bp, Chicken  19866894341412_4
gcattggtgaaagaggcaaaaagaaagaaaagaagtcacactggtgtcagtgtgaagtgatttgttgcagcttagccttgttttaatctttgaaaggtggatttttctgcatttcattttgccttccttgcagctttctgcactttcgaagggcttggaggaaaaaaaattccaacaaaccccaaacagctgaatcccaaatgrctcccagttcctcctccggagcgggtttgttcctccttcccttggcccatttgtgaaagcagatctgtgagtgcacaccaggtgtgggctcacccrgcagagagagaaaactgggatttgcagctttgcttatccctagctggagttcttagagggtttttagcaagcagatagaaaccccgagtgatcctgcctctgcgctgaataggactacttgcactgccttaactttaagtatttcctatttgtttctgtcacataattttaagatcattatagcccggagaagcccatgacctcattcagtcagagcagagcagagacacacagagccgctccctctgcccgctcagcacaaaatcctgctgacaccagagtgaggactttgggcaaaac

SEQ ID NO: 69308 - DNA, 600 bp, Chicken  19866894341414_1
gcttttgaaagtcatgttactaacattgaattttaggacaatcttagaagtttttattcttacatggaattgaaaagggtttctctcacttcatgatgtagtgttcgtaagaacaggcccttgagtggttgatctatccttgagtacatatgtaggtctgcagagtaggtctgaacaacagtgtatcccctcaaaattctccatcaatatacagaataaaagtcttcaagaatagagacttacactccaaatccttcaaaagctcaaatttagacccattctggatattaagttgcttcytactcatttactatacttatctatcctggtacatcagttgtgtgtcttgtttaaaactaaagacatcttgactatttgcagtttatgacattttcaaatatgagctgatcactattaaatatgcacatatgcaatatttttcagatactgaatgcactataaaataacacagttgaactgttttcctgaaaggtgtttgatattgtcatttagagaacaaatcttcatttttaagttagctatttaactctgaatgtgaatacctctgctagaattagttaaccatattcaaagcagttg

SEQ ID NO: 69309 - DNA, 599 bp, Chicken  19866894341417_1
  misc_feature (1)..(50): n is any nucleotide
nnnnnnnnnnnnnnnnnnnnnnnnnnnnnnnnnnnnnnnnnnnnnnnnnnacatgagatttctccttcagattttattttcttttagattgataatgtatgtaaatcagttaatggagtaacactgatttacagcagctgcagtccaactccctcctttaaaaatgcaaataattcctctggtattggtctcatgaagaataatgacagcaagtacatgcagccaaagtcagccttggctcaagcaaaggccagctccaatgttttcgttggcattaattctaattagtctgtggcatgytcttggcttttcacattgcatattgccatgatgaaacacatggtagatgtattactctatctgttagcaccatgcaaagagccattaacatgtgttactgtttatctcccctgtgtctttcttgtaggaattatgtctgaccaccagtttggaaatcagttcatgtgcagtgtggtcgcgtcacacgtgagccatctcccaaccaccaatctcagttttgtttggattgctccacctgcggggacaggctgcgtgaacttcatgtacgtatatacagagcacatatggcttctatagcc

SEQ ID NO: 69310 - DNA, 599 bp, Chicken  19866894341421_1
  misc_feature (1)..(230): n is any nucleotide
nnnnnnnnnnnnnnnnnnnnnnnnnnnnnnnnnnnnnnnnnnnnnnnnnnnnnnnnnnnnnnnnnnnnnnnnnnnnnnnnnnnnnnnnnnnnnnnnnnnnnnnnnnnnnnnnnnnnnnnnnnnnnnnnnnnnnnnnnnnnnnnnnnnnnnnnnnnnnnnnnnnnnnnnnnnnnnnnnnnnnnnnnnnnnnnnnnnnnnnnnnnnnnnnnnnnnnnnnnnnnnnnnnnnnnatccccccgttcctccctgcgagccaccaacagggcaggatggaggtgagcttcacccggatgctctacrygctctgtctggttgccatggcctgtgcgttcacccaggaagggttcaaagaagtgatgctgaagcagctggggctctctgaagtccctaagcttcataagagagatctggtggacctggtcatccccgagcatgtgaagaacaagtacatctccatgctgaagcggcacagggggaagcgtcgtgcctctcccagcttggccagcatcctgcaggggatccccggcaatgcaggtaacaccctgggcagggcaagccayggggagtggggctggggtcaggctctgagggggagcaga

SEQ ID NO: 69311 - DNA, 599 bp, Chicken  19866894341421_2
  misc_feature (1)..(229): n is any nucleotide
nnnnnnnnnnnnnnnnnnnnnnnnnnnnnnnnnnnnnnnnnnnnnnnnnnnnnnnnnnnnnnnnnnnnnnnnnnnnnnnnnnnnnnnnnnnnnnnnnnnnnnnnnnnnnnnnnnnnnnnnnnnnnnnnnnnnnnnnnnnnnnnnnnnnnnnnnnnnnnnnnnnnnnnnnnnnnnnnnnnnnnnnnnnnnnnnnnnnnnnnnnnnnnnnnnnnnnnnnnnnnnnnnnnnnatccccccgttcctccctgcgagccaccaacagggcaggatggaggtgagcttcacccggatgctctacrygctctgtctggttgccatggcctgtgcgttcacccaggaagggttcaaagaagtgatgctgaagcagctggggctctctgaagtccctaagcttcataagagagatctggtggacctggtcatccccgagcatgtgaagaacaagtacatctccatgctgaagcggcacagggggaagcgtcgtgcctctcccagcttggccagcatcctgcaggggatccccggcaatgcaggtaacaccctgggcagggcaagccayggggagtggggctggggtcaggctctgagggggagcagaa

SEQ ID NO: 69312 - DNA, 600 bp, Chicken  19866894341421_3
cagggcaggatggaggtgagcttcacccggatgctctacrygctctgtctggttgccatggcctgtgcgttcacccaggaagggttcaaagaagtgatgctgaagcagctggggctctctgaagtccctaagcttcataagagagatctggtggacctggtcatccccgagcatgtgaagaacaagtacatctccatgctgaagcggcacagggggaagcgtcgtgcctctcccagcttggccagcatcctgcaggggatccccggcaatgcaggtaacaccctgggcagggcaagccayggggagtggggctggggtcaggctctgagggggagcagaagtggaaaaaatccttgtactccatgaccctggaaaagggcgggtgttrgaaaaacccaggtacccagcacatagcatcctgggcagcaagggcaaacacctggtcattgcagttcatgcaatttcctggtatcaggcacggcgctggcacaaagcgatgcatgccctttggtgcttgctctatttaggatgaattaygcacaggagatttcttcgtattgtccccacattstggtttcagatctagaagaattagtttat

SEQ ID NO: 69313 - DNA, 600 bp, Chicken  19866894341421_4
aagaagtgatgctgaagcagctggggctctctgaagtccctaagcttcataagagagatctggtggacctggtcatccccgagcatgtgaagaacaagtacatctccatgctgaagcggcacagggggaagcgtcgtgcctctcccagcttggccagcatcctgcaggggatccccggcaatgcaggtaacaccctgggcagggcaagccayggggagtggggctggggtcaggctctgagggggagcagaagtggaaaaaatccttgtactccatgaccctggaaaagggcgggtgttrgaaaaacccaggtacccagcacatagcatcctgggcagcaagggcaaacacctggtcattgcagttcatgcaatttcctggtatcaggcacggcgctggcacaaagcgatgcatgccctttggtgcttgctctatttaggatgaattaygcacaggagatttcttcgtattgtccccacattstggtttcagatctagaagaattagtttattygcaagatattaagtatgcatyagaaaaagtgtgtttaggggctgtctctgtcacaagggatcatattggagcatgcaagcaatgtg

SEQ ID NO: 69314 - DNA, 600 bp, Chicken  19866894341421_5
cacagggggaagcgtcgtgcctctcccagcttggccagcatcctgcaggggatccccggcaatgcaggtaacaccctgggcagggcaagccayggggagtggggctggggtcaggctctgagggggagcagaagtggaaaaaatccttgtactccatgaccctggaaaagggcgggtgttrgaaaaacccaggtacccagcacatagcatcctgggcagcaagggcaaacacctggtcattgcagttcatgcaatttcctggtatcaggcacggcgctggcacaaagcgatgcatgcccrttggtgcttgctctatttaggatgaattaygcacaggagatttcttcgtattgtccccacattstggtttcagatctagaagaattagtttattygcaagatattaagtatgcatyagaaaaagtgtgtttaggggctgtctctgtcacaagggatcatattggagcatgcaagcaatgtgctgtgatgactgtggatgaaatgcagaggatggcaatgacaggctgtctttttgtctctacatcatggacagaagtcttctactctgaccccatgcgccagaacttcatctttgacatg

SEQ ID NO: 69315 - DNA, 600 bp, Chicken  19866894341421_6
ttggccagcatcctgcaggggatccccggcaatgcaggtaacaccctgggcagggcaagccayggggagtggggctggggtcaggctctgagggggagcagaagtggaaaaaatccttgtactccatgaccctggaaaagggcgggtgttrgaaaaacccaggtacccagcacatagcatcctgggcagcaagggcaaacacctggtcattgcagttcatgcaatttcctggtatcaggcacggcgctggcacaaagcgatgcatgccctttggtgcttgctctatttaggatgaattaygcacaggagatttcttcgtattgtccccacattstggtttcagatctagaagaattagtttattygcaagatattaagtatgcatyagaaaaagtgtgtttaggggctgtctctgtcacaagggatcatattggagcatgcaagcaatgtgctgtgatgactgtggatgaaatgcagaggatggcaatgacaggctgtctttttgtctctacatcatggacagaagtcttctactctgaccccatgcgccagaacttcatctttgacatggaggggaggataccaaaaaacagtgaagtg

SEQ ID NO: 69316 - DNA, 600 bp, Chicken  19866894341421_7
caggtaacaccctgggcagggcaagccayggggagtggggctggggtcaggctctgagggggagcagaagtggaaaaaatccttgtactccatgaccctggaaaagggcgggtgttrgaaaaacccaggtacccagcacatagcatcctgggcagcaagggcaaacacctggtcattgcagttcatgcaatttcctggtatcaggcacggcgctggcacaaagcgatgcatgccctttggtgcttgctctatttaggatgaattaygcacaggagatttcttcgtattgtccccacattstggtttcagatctagaagaattagtttattygcaagatattaagtatgcatyagaaaaagtgtgtttaggggctgtctctgtcacaagggatcatattggagcatgcaagcaatgtgctgtgatgactgtggatgaaatgcagaggatggcaatgacaggctgtctttttgtctctacatcatggacagaagtcttctactctgaccccatgcgccagaacttcatctttgacatggaggggaggataccaaaaaacagtgaagtgacaatggctgaactgaagcttttcaagaagcccc

SEQ ID NO: 69317 - DNA, 600 bp, Chicken  19866894341421_8
ggagtggggctggggtcaggctctgagggggagcagaagtggaaaaaatccttgtactccatgaccctggaaaagggcgggtgttrgaaaaacccaggtacccagcacatagcatcctgggcagcaagggcaaacacctggtcattgcagttcatgcaatttcctggtatcaggcacggcgctggcacaaagcgatgcatgccctttggtgcttgctctatttaggatgaattaygcacaggagatttcttcgtattgtccccacattstggtttcagatctagaagaattagtttattygcaagatattaagtatgcatyagaaaaagtgtgtttaggggctgtctctgtcacaagggatcatattggagcatgcaagcaatgtgctgtgatgactgtggatgaaatgcagaggatggcaatgacaggctgtctttttgtctctacatcatggacagaagtcttctactctgaccccatgcgccagaacttcatctttgacatggaggggaggataccaaaaaacagtgaagtgacaatggctgaactgaagcttttcaagaagcccctggacagggtgaacctgccagccaggcagcc

SEQ ID NO: 69318 - DNA, 600 bp, Chicken  19866894341421_9
tctgagggggagcagaagtggaaaaaatccttgtactccatgaccctggaaaagggcgggtgttrgaaaaacccaggtacccagcacatagcatcctgggcagcaagggcaaacacctggtcattgcagttcatgcaatttcctggtatcaggcacggcgctggcacaaagcgatgcatgccctttggtgcttgctctatttaggatgaattaygcacaggagatttcttcgtattgtccccacattstggtttcagatctagaagaattagtttattygcaagatattaagtatgcatyagaaaaagtgtgtttaggggctgtctctgtcacaagggatcatattggagcatgcaagcaatgtgctgtgatgactgtggatgaaatgcagaggatggcaatgacaggctgtctttttgtctctacatcatggacagaagtcttctactctgaccccatgcgccagaacttcatctttgacatggaggggaggataccaaaaaacagtgaagtgacaatggctgaactgaagcttttcaagaagcccctggacagggtgaacctgccagccaggcagccccatcggcccgtctccaatgc

SEQ ID NO: 69319 - DNA, 600 bp, Chicken  19866894341431_1
caagttggggctcaaatgcttaatttctagggatcagtataggggatatgggaaatggggataatgtccccattttcgcctggcaggttgttggctttagttaatttttttcactgctgtttttgttttgtttttaattaatttttaagtaatgttggtagtttgaggaactttgtcatgaatttaggttattctctgtgatagtggctgcagatttattccaatatgcaagtggaaaaaatgcaaaatacctacatctagtttatttttttaaagtgcattaaatacatgagaagctayaggtgtaatgtgcactctagtaatttggatacaggcatcagagaaaagaggtctctttacaaagtttctgttttgttgacccttctgaagcatgaaaatacttaaaatcccacttaaaaacttgattcttttctctctttctggacttggttctagtatacatatgtgtatatgtgtaatccccttgactcctctgcacttaggatgtggaatgcaaggggtagaagatgacttatctatgagtactcatctttttataccttcttgtaaagtgacttttctcacactttgggctgaaag

SEQ ID NO: 69320 - DNA, 600 bp, Chicken  19866894341433_1
ttcaagttacaggacaacatgtgttttccagtggaaaagaacagactcaagactcacaataagaataaagaaggactttcaaggacactcacagagagaaagtaacaaagacgttctttaaatctgtattcctttttttttcttttgggggcttaaaaacttattatatcaaatcagggaagaaaaacaagtaaaaataatgataaaattaaaatgtatccagattttaatatggaaatcaattttgcatatcatcggttttgcacagtactttagacctcaattcctaatacaaatctmacatgcactttttctcaactttgtcccttgacatttacaaaatagtaggaaaagctcaaattaattgcttaattaggaagcataaagtcatatttcctgtggagaggatctgtttcaatacaacttgtacaccatgtactagtaccaaacacatacgtcttgtaccgctactcaccagaaagtccattaaatgacaagtccataagcacactccagctgttttacactgctccaccaagagagcctgaggtaaaatacccctttttagagggattggctatcacacaacagctacaagtg

SEQ ID NO: 69321 - DNA, 600 bp, Chicken  19866894341434_1
taaatacactaatgaatggatgttttagaactgcagccttcaggtaaagcttcacaaattcaggaataacttgtgaaccaaatagaactttggctgcataggtggtaagataagaaatgcagaggctttcatgggagcctttaaaaaaaaaaatctaataaccaggaccaatcctggcacagctttcagacagaaaatttccactcttttccatgagaaaagctgagatgcctgcatagacagccttgcctatgtaacaaaagctcccctggacacccactccagttgtaccacaggagstatcagcccatctgcacaagcccagagcagcacaagggatcagcaatgggaccagaagagccccggcccactctgcaggcgaaagcaccaggccttggcgcagaacggctatcaggagctggggtatcctgatcagccatgtgaatatacagataacagtctgttccagcaackggggacacwgggatgcagcagctagcagcaggaccctcagtgtctaagtgcagttgctagagggatccatcttagaaatacaaacatatatagacatatctattaatttatacctattatcaatgt

SEQ ID NO: 69322 - DNA, 600 bp, Chicken  19866894341434_2
tggcacagctttcagacagaaaatttccactcttttccatgagaaaagctgagatgcctgcatagacagccttgcctatgtaacaaaagctcccctggacacccactccagttgtaccacaggagstatcagcccatctgcacaagcccagagcagcacaagggatcagcaatgggaccagaagagccccggcccactctgcaggcgaaagcaccaggccttggcgcagaacggctatcaggagctggggtatcctgatcagccatgtgaatatacagataacagtctgttccagcaackggggacacwgggatgcagcagctagcagcaggaccctcagtgtctaagtgcagttgctagagggatccatcttagaaatacaaacatatatagacatatctattaatttatacctattatcaatgtggacctccatcctactcagagaagggagatgagatggttgatgctgtctgtctaatctatgtggctggctatgcatacaaatatattgtgtatgctctgtgtgcctgctgggaatacatctctagccttggtactcatgggacctggggacgtggagcacgcagcacgcctcac

SEQ ID NO: 69323 - DNA, 600 bp, Chicken  19866894341434_3
tttcagacagaaaatttccactcttttccatgagaaaagctgagatgcctgcatagacagccttgcctatgtaacaaaagctcccctggacacccactccagttgtaccacaggagstatcagcccatctgcacaagcccagagcagcacaagggatcagcaatgggaccagaagagccccggcccactctgcaggcgaaagcaccaggccttggcgcagaacggctatcaggagctggggtatcctgatcagccatgtgaatatacagataacagtctgttccagcaackggggacacwgggatgcagcagctagcagcaggaccctcagtgtctaagtgcagttgctagagggatccatcttagaaatacaaacatatatagacatatctattaatttatacctattatcaatgtggacctccatcctactcagagaagggagatgagatggttgatgctgtctgtctaatctatgtggctggctatgcatacaaatatattgtgtatgctctgtgtgcctgctgggaatacatctctagccttggtactcatgggacctggggacgtggagcacgcagcacgcctcacctgcctcag

SEQ ID NO: 69324 - DNA, 600 bp, Chicken  19866894341444_1
ggggaaaagtaaggaaacagctagtttggggcaatagggtggtgagataaagtggacttctcaacagtcctgagatgtgaatttcccacttctggaaggtcagtatcaccatgacaaaataatagtagtaaatacgacattaagattaatgtcatatttatatgacatatgctacataatatgctacataagttaccctagctgatttgaaggagtgtgttttttgtttgatttttctcccccatatgtgtaacttgtaaattatctttcctctttgtgataatgcatttagtatgtgtragattgttttctttctccttagtcatttgacaactctccacctgggccctgaaacctaggataaagaygctctgcatagtcctatccttttgctgtcttgaggatgatatataagcattatagaatctttttatagcacatttttttgtcgtcttatttgtcccagttgtttgctgctgcagcaaagctgtgctttcagcatagagtaagagttgagagaaaaaaagcaggcttagaaatgctgaggatgctcagaatatccatcatatttttctaaaattagcttagcaaactgatcaa

SEQ ID NO: 69325 - DNA, 560 bp, Chicken  19866894341444_2
cctgagatgtgaatttcccacttctggaaggtcagtatcaccatgacaaaataatagtagtaaatacgacattaagattaatgtcatatttatatgacatatgctacataatatgctacataagttaccctagctgatttgaaggagtgtgttttttgtttgatttttctcccccatatgtgtaacttgtaaattatctttcctctttgtgataatgcatttagtatgtgtragattgttttctttctccttagtcatttgacaactctccacctgggccctgaaacctaggataaagaygctctgcatagtcctatccttttgctgtcttgaggatgatatataagcattatagaatctttttatagcacatttttttgtcgtcttatttgtcccagttgtttgctgctgcagcaaagctgtgctttcagcatagagtaagagttgagagaaaaaaagcaggcttagaaatgctgaggatgctcagaatatccatcatatttttctaaaattagcttagcaaactgatcaatctgtcatgcgcttaggaacaaaaatat

SEQ ID NO: 69326 - DNA, 600 bp, Chicken  19866894341456_1
cactggaatcccggctcggaacaggaggcagagctctccgcatcaaattaatccctggtgcaactctgcccaacttacaccggggctataattggcctgaaacattttaactatctcatttaatgttattcatgctctgctggagatgagaatgtttatcccaaatgagagactttaatgctgcgtagcactaatagcgcgaggctgatgaggtttctcatttatgggggtgctggggggggggcaggttgtcacagaagatgtggctccccacatctttaaccatttccaaggctcctrtggaggctgctgttcccgtcgtccttctcattccttctgcctccgggctgtttgtaggcattaccctcttgtggatttccagggtttccagactgcttttaacaatgctgagctttcaagttgcttccttctaactttctcttgtgctttctcagagcctaaacagcatcgattgctcccagatgtctgcagtttgctaaccccggagcagtgttgtgcaattgcttggaaagaaggctggtagcaagcaacgttctctttcctggttcaccagattacttcctgagcagaacagcaatg

SEQ ID NO: 69327 - DNA, 600 bp, Chicken  19866894341459_1
cacaggggttcaaaaacagtttctgctcttcttaagtggaaaaaaaaaataaagattcccatggatttagaccagtagttaaattaatccagctgcaattttactgggtatgactgcacagcccaataacagtgacacgtggaaaagaggcagaatgacactactaaccacacttctgaaggttactgtgactgtaaaggttcttgcagcaaccaagggttttcattaaaaactattttttaagagaactttcattttttcaaggagaaatatctacagtttcctctaaagtctgggaayggtcctagaaaatcattgaaaaacagtrtttattcaggtcaaaattaaactaactattggctatcaaaagcacagcttacaacagaataggaaagagcaatcaaaacttccttgcaagaaagtcagcatccctcaaacaaaaaaaggatttgacaaaaaaaaaaagcaaagctcttttgttttccttgttggtgaagtcttcccctactcttccaggttatatttaccaggtcactgctacaagctcttcctcttcttcccttttacatgaatgtttaataccatcttcccccttggcca

SEQ ID NO: 69328 - DNA, 600 bp, Chicken  19866894341459_2
ttcttaagtggaaaaaaaaaataaagattcccatggatttagaccagtagttaaattaatccagctgcaattttactgggtatgactgcacagcccaataacagtgacacgtggaaaagaggcagaatgacactactaaccacacttctgaaggttactgtgactgtaaaggttcttgcagcaaccaagggttttcattaaaaactattttttaagagaactttcattttttcaaggagaaatatctacagtttcctctaaagtctgggaayggtcctagaaaatcattgaaaaacagtrtttattcaggtcaaaattaaactaactattggctatcaaaagcacagcttacaacagaataggaaagagcaatcaaaacttccttgcaagaaagtcagcatccctcaaacaaaaaaaggatttgacaaaaaaaaaaagcaaagctcttttgttttccttgttggtgaagtcttcccctactcttccaggttatatttaccaggtcactgctacaagctcttcctcttcttcccttttacatgaatgtttaataccatcttcccccttggccaccccagagcatcccttcccaatgctcct

SEQ ID NO: 69329 - DNA, 599 bp, Chicken  19866894341461_1
  misc_feature (1)..(4): n is any nucleotide
nnnnctttgactgttagggggctcctgtcagctatagctatataggacccctgttctatgtatctatgttctatgttctatctatatgtgatcactccaactggctgaaagagatttgttagtaaaacatgcatcagataaaatagtactggtggtcacatttaagagcctaacacagaaaaggggtataagaattacttctgaagtgcactgggtgctcataatttgaaaatgagatcatcttacagtgttctgtgatagacacccataaataacaaattccatatgtaattcatcacragaattttgcaagtttgtgcataaaactagatgtgtcactagcagtaaaaacccttacraagtcttctattccattcttgccttctgttcgtggtacattcttggtgacactcaccaatttcagaaagtaattgaaaatgaagtcatgaagagtgtacttagataaatggacttacatcaacatattagtttgatttcttatattttagcagatacgtatgggaattagagaaatgaatctaaacaaagccatgcttacctactagaactcacaattcatctgatcttttctgttatgt

SEQ ID NO: 69330 - DNA, 599 bp, Chicken  19866894341461_2; identical to SEQ ID NO: 69329
  misc_feature (1)..(4): n is any nucleotide

SEQ ID NO: 69331 - DNA, 600 bp, Chicken  19866894341461_3
gtatctatgttctatgttctatctatatgtgatcactccaactggctgaaagagatttgttagtaaaacatgcatcagataaaatagtactggtggtcacatttaagagcctaacacagaaaaggggtataagaattacttctgaagtgcactgggtgctcataatttgaaaatgagatcatcttacagtgttctgtgatagacacccataaataacaaattccatatgtaattcatcactagaattttgcaagtttgtgcataaaactagatgtgtcactagcagtaaaaacccttacraagtcttctattccattcttgccttctgttcgtggtacattcttggtgacactcaccaatttcagaaagtaattgaaaatgaagtcatgaagagtgtacttagataaatggacttacatcaacatattagtttgatttcttatattttagcagatacgtatgggaattagagaaatgaatctaaacaaagccatgcttacctactagaactcacaattcatctgatcttttctgttatgtagctgtttcatttttgcagtggtttcagttatgtgaagcaaataaaaatgctttcaagtc

SEQ ID NO: 69332 - DNA, 600 bp, Chicken  19866894341461_4
tgcttacctactagaactcacaattcatctgatcttttctgttatgtagctgtttcatttttgcagtggtttcagttatgtgaagcaaataaaaatgctttcaagtctgtacttgtgcttaactgctgttttttatgttaatcttgaagatcattatatctcttattatatctcttaatgcgtggccttcaaatgtgcatgttgttgcctttgtggtctttcattacccacaactgagaacataacacatgatgagctgtggtcttttgaaagtgcgtcagatagttaaactatgatccygtgttttcaccaagaaaaaaaacccaaatctatcattctcacctggcctcactgtayatgtattttcattttaagatggcaaaaccagcacaagcttaccaactgaagcacctttgatcaaaattagtttcttggttacatatcataagtctaaaatttaggcgtttgctaacttggttttaacgtgaaccatcaaacaaggcagctatcctattaaacacatcatgcttttaaatatttttcacaaaaccaatctcttaggaagccaaaaaccttaaatgtgagggaacaatacagaat

SEQ ID NO: 69333 - DNA, 600 bp, Chicken  19866894341461_5
tttttgcagtggtttcagttatgtgaagcaaataaaaatgctttcaagtctgtacttgtgcttaactgctgttttttatgttaatcttgaagatcattatatctcttattatatctcttaatgcgtggccttcaaatgtgcatgttgttgcctttgtggtctttcattacccacaactgagaacataacacatgatgagctgtggtcttttgaaagtgcgtcagatagttaaactatgatccygtgttttcaccaagaaaaaaaacccaaatctatcattctcacctggcctcactgtayatgtattttcattttaagatggcaaaaccagcacaagcttaccaactgaagcacctttgatcaaaattagtttcttggttacatatcataagtctaaaatttaggcgtttgctaacttggttttaacgtgaaccatcaaacaaggcagctatcctattaaacacatcatgcttttaaatatttttcacaaaaccaatctcttaggaagccaaaaaccttaaatgtgagggaacaatacagaataaaaacaaattgagtacaaagaaaaagaagacatctttatagatatacctagactga

SEQ ID NO: 69334 - DNA, 600 bp, Chicken  19866894341463_1
aggctttcttttctttttttattccctggaatatttgttaagagtataaaacaacagagagataaaaaacattaatacaatccctttgggaaaaaaaaaagatgtaaagtctgtcctgtcattgcagaacattaattcaggtagtgcgacgtgcagcaaaaagggctttcacttactgtctttgtgtagtgagctggcaaacaattgagagtaggatgacttctgagtctttaccaccctctggagatcagcagagccagcaagtgaaagtacctactgtccctctgccaacaccagcartgtgagcaaaataattgtgtaaaaccttscttcttctccagatgctttattcctctctctgggtaagatgctcacaaggactgcgttctctgtcctggttttggacactgcaatcctgctaccttcctcccttccaaagaaatggaaactttcccatgcaggcaagtggcataacaggaatcagccaagttctggaagtttggagcaccgggcagtgtcactgtgagcgcaggctggtgggaaaagaaggagtgctggtggagtggcttgtttcttaagtctggctttctggactagctc

SEQ ID NO: 69335 - DNA, 600 bp, Chicken  19866894341463_2
aatatttgttaagagtataaaacaacagagagataaaaaacattaatacaatccctttgggaaaaaaaaaagatgtaaagtctgtcctgtcattgcagaacattaattcaggtagtgcgacgtgcagcaaaaagggctttcacttactgtctttgtgtagtgagctggcaaacaattgagagtaggatgacttctgagtctttaccaccctctggagatcagcagagccagcaagtgaaagtacctactgtccctctgccaacaccagcartgtgagcaaaataattgtgtaaaaccttscttcttctccagatgctttattcctctctctgggtaagatgctcacaaggactgcgttctctgtcctggttttggacactgcaatcctgctaccttcctcccttccaaagaaatggaaactttcccatgcaggcaagtggcataacaggaatcagccaagttctggaagtttggagcaccgggcagtgtcactgtgagcgcaggctggtgggaaaagaaggagtgctggtggagtggcttgtttcttaagtctggctttctggactagctctgccaagaattacatttgactggcttcct

SEQ ID NO: 69336 - DNA, 600 bp, Chicken  19866894341466_1
ttcaaacattaagagatgtgaaagcccagactgctgcttggctcttcaggtggtattgaaccatttgcttcttgctgtcgctgagcccaaggaggtcagctcatttcaaacagaagcccacaaacatacgaggtagatgcagtgggcctctgtgctaagtactggtcagtactaatctactgatgaacttctgccctcaaatgacttgatagattgcaagggtatttttggctacatcaacataagcaagtagtgatgttaggaaatcctgagtgcaagttgagagtgcttctaagtgtrgtagygtagacgttgataattaaactacattttgttatttaatgataaatgattwaaaaaaaaaaaggtgagagaacaacttcatttttccaattaaattttgactttagacaaaaaacaaaatctcaaacttcctttcttgaaagtaataaggtctatttcaaagtgtattgtagattttataccttcacatttattctcaaagcagcagtatttttaactgccgtgtttggtggtggtagttgcatagagtgcattttgtgtaggcaagttttgtttaacatagcacctcattatttt

SEQ ID NO: 69337 - DNA, 600 bp, Chicken  19866894341466_2
acattaagagatgtgaaagcccagactgctgcttggctcttcaggtggtattgaaccatttgcttcttgctgtcgctgagcccaaggaggtcagctcatttcaaacagaagcccacaaacatacgaggtagatgcagtgggcctctgtgctaagtactggtcagtactaatctactgatgaacttctgccctcaaatgacttgatagattgcaagggtatttttggctacatcaacataagcaagtagtgatgttaggaaatcctgagtgcaagttgagagtgcttctaagtgtrgtagygtagacgttgataattaaactacattttgttatttaatgataaatgattwaaaaaaaaaaaggtgagagaacaacttcatttttccaattaaattttgactttagacaaaaaacaaaatctcaaacttcctttcttgaaagtaataaggtctatttcaaagtgtattgtagattttataccttcacatttattctcaaagcagcagtatttttaactgccgtgtttggtggtggtagttgcatagagtgcattttgtgtaggcaagttttgtttaacatagcacctcattattttctttt

SEQ ID NO: 69338 - DNA, 600 bp, Chicken  19866894341466_3
ttgaaccatttgcttcttgctgtcgctgagcccaaggaggtcagctcatttcaaacagaagcccacaaacatacgaggtagatgcagtgggcctctgtgctaagtactggtcagtactaatctactgatgaacttctgccctcaaatgacttgatagattgcaagggtatttttggctacatcaacataagcaagtagtgatgttaggaaatcctgagtgcaagttgagagtgcttctaagtgtrgtagygtagacgttgataattaaactacattttgttatttaatgataaatgattwaaaaaaaaaaaggtgagagaacaacttcatttttccaattaaattttgactttagacaaaaaacaaaatctcaaacttcctttcttgaaagtaataaggtctatttcaaagtgtattgtagattttataccttcacatttattctcaaagcagcagtatttttaactgccgtgtttggtggtggtagttgcatagagtgcattttgtgtaggcaagttttgtttaacatagcacctcattattttcttttaaggtgctctaaaaatgctgtatgagctaatggtatcttggtggaagaag

SEQ ID NO: 69339 - DNA, 600 bp, Chicken  19866894341472_1
aatatcactgttggtttttgctcctcccagaaagctccctagggggaagagatattagtatgtctagtttttctggatctttagcagcatgagaggaagcagggtcaagatcagcctgagagcacaaactggttcttatttgttttcttcttctactacacaactgcatgtgctttgcagttgtggtctcactgacagcacaggactgaaatcacagcttcaggctgctttccctgtaatagagctggggtaaatggcagatgtgaaagcttccctggtgcacacaaaggcctatatgtrgaagaactaaaacacttggaacccatctttcatgtatgttcaattcagcctcctctctctagtctcctcttgctttctccctgctgaagaagtgcacacagagtagtactagttaccctctccagcttccatcagggctgcttcaaaagtaaagcctcctattttatactggcccttgatttcggaggtggatggtagtgattttacagtacacattaaaccctcccctgttctgctgcacatgggtggtgtgtgacagatggcaatagagcagcagagtgaccaaatagcaccagacat

SEQ ID NO: 69340 - DNA, 600 bp, Chicken  19866894341476_1
aatttcagtaacactgctgtagatagctagtttaggatactcttagtctatgtaatgttatggaaaataggtttgtagaattggttctgaatatgaagacaggtaatacctacaagtacgtggcccattatagctaggtgtgggattcttgctgtcctgatttcagcagaattaagtctccttctttttagtttttttttcttcttcttcttaatcaaagacatctgatgctaatagtgagattcattcagcactagcacacatgcttttgtaaaagccattttttaattatctatcttkcttcggttttgtattgtaagacacggaaaatatacagttgtaacctgtgctgtacattcggtgagtcacagctacaggctgcgagagcatcactctttcagtgctgactatttgagagctgactcatgtaaattaaaattctcctccatcgtacaagaaaattggctatacaaatccaataaatagaaaagaaatgttgatcctaatcacaacagacaacaagatcaatttctgcagcacgctgttagaagcacatgttataaaatcaatctgatatgcattccattccccttcgtttat

SEQ ID NO: 69341 - DNA, 600 bp, Chicken  19866894341480_1
ttgctgtcacagtcctgccatggtatacctgtggtagtacaggagacctcttctgcagctgttggcacgttggctttggaggctaccgaggtgatggagtcctacatttcagatgcaaataagaaaagacacagataaggaaagacaaagaaatgtagaagacaagaaggatgtaaaaatgctataatgaactcgcgtgtcttgagaaaacctctaatctaatgagaatggattttgtttgagagattgtcgtagtacaattaattattcatggcagcgacatcattaggatttcatttyatttaaaggcctttaagtgacttggaaaattttgttaagctgaagaggagctttaggagagagacaggaaagcttttcattttattggctttgtctagtattttttagagaattattagwtakgtaaacagaaattgcagttgagacctaaaatttctgcattaaatgtgggcatatatttgaactcataaatacaaaatctasgccaaatgagamtctagatggctttttgtggaatcaactaracaccatttaagcgagcacttgggtgaagagttgcagtatttcagcattgcatat

SEQ ID NO: 69342 - DNA, 600 bp, Chicken  19866894341480_2
aagaaaagacacagataaggaaagacaaagaaatgtagaagacaagaaggatgtaaaaatgctataatgaactcgcgtgtcttgagaaaacctctaatctaatgagaatggattttgtttgagagattgtcgtagtacaattaattattcatggcagcgacatcattaggatttcatttyatttaaaggcctttaagtgacttggaaaattttgttaagctgaagaggagctttaggagagagacaggaaagcttttcattttattggctttgtctagtattttttagagaattattagwtakgtaaacagaaattgcagttgagacctaaaatttctgcattaaatgtgggcatatatttgaactcataaatacaaaatctasgccaaatgagamtctagatggctttttgtggaatcaactaracaccatttaagcgagcacttgggtgaagagttgcagtatttcagcattgcatattaacaccaaccagtgatcggtggctctctgtctgagtttccaagcctagaatcctaatgtctcctgtagaggaatatgggactatataactttttttcttggcctgtagtagcataagta

SEQ ID NO: 69343 - DNA, 600 bp, Chicken  19866894341480_3
aaaagacacagataaggaaagacaaagaaatgtagaagacaagaaggatgtaaaaatgctataatgaactcgcgtgtcttgagaaaacctctaatctaatgagaatggattttgtttgagagattgtcgtagtacaattaattattcatggcagcgacatcattaggatttcatttyatttaaaggcctttaagtgacttggaaaattttgttaagctgaagaggagctttaggagagagacaggaaagcttttcattttattggctttgtctagtattttttagagaattattagwtakgtaaacagaaattgcagttgagacctaaaatttctgcattaaatgtgggcatatatttgaactcataaatacaaaatctasgccaaatgagamtctagatggctttttgtggaatcaactaracaccatttaagcgagcacttgggtgaagagttgcagtatttcagcattgcatattaacaccaaccagtgatcggtggctctctgtctgagtttccaagcctagaatcctaatgtctcctgtagaggaatatgggactatataactttttttcttggcctgtagtagcataagtatag

SEQ ID NO: 69344 - DNA, 600 bp, Chicken  19866894341480_4
agaaaacctctaatctaatgagaatggattttgtttgagagattgtcgtagtacaattaattattcatggcagcgacatcattaggatttcatttyatttaaaggcctttaagtgacttggaaaattttgttaagctgaagaggagctttaggagagagacaggaaagcttttcattttattggctttgtctagtattttttagagaattattagwtakgtaaacagaaattgcagttgagacctaaaatttctgcattaaatgtgggcatatatttgaactcataaatacaaaatctasgccaaatgagamtctagatggctttttgtggaatcaactaracaccatttaagcgagcacttgggtgaagagttgcagtatttcagcattgcatattaacaccaaccagtgatcggtggctctctgtctgagtttccaagcctagaatcctaatgtctcctgtagaggaatatgggactatataactttttttcttggcctgtagtagcataagtataggcacaacctgagaaccatgggggttgttcccctaaaaccaaaaaggctttagcctgaggtacatccagaacaaagttagct

SEQ ID NO: 69345 - DNA, 600 bp, Chicken  19866894341480_5
atctaatgagaatggattttgtttgagagattgtcgtagtacaattaattattcatggcagcgacatcattaggatttcatttyatttaaaggcctttaagtgacttggaaaattttgttaagctgaagaggagctttaggagagagacaggaaagcttttcattttattggctttgtctagtattttttagagaattattagwtakgtaaacagaaattgcagttgagacctaaaatttctgcattaaatgtgggcatatatttgaactcataaatacaaaatctasgccaaatgagamtctagatggctttttgtggaatcaactaracaccatttaagcgagcacttgggtgaagagttgcagtatttcagcattgcatattaacaccaaccagtgatcggtggctctctgtctgagtttccaagcctagaatcctaatgtctcctgtagaggaatatgggactatataactttttttcttggcctgtagtagcataagtataggcacaacctgagaaccatgggggttgttcccctaaaaccaaaaaggctttagcctgaggtacatccagaacaaagttagctgtctttgccttg

SEQ ID NO: 69346 - DNA, 600 bp, Chicken  19866894341480_6
attgtcgtagtacaattaattattcatggcagcgacatcattaggatttcatttyatttaaaggcctttaagtgacttggaaaattttgttaagctgaagaggagctttaggagagagacaggaaagcttttcattttattggctttgtctagtattttttagagaattattagwtakgtaaacagaaattgcagttgagacctaaaatttctgcattaaatgtgggcatatatttgaactcataaatacaaaatctasgccaaatgagamtctagatggctttttgtggaatcaactaracaccatttaagcgagcacttgggtgaagagttgcagtatttcagcattgcatattaacaccaaccagtgatcggtggctctctgtctgagtttccaagcctagaatcctaatgtctcctgtagaggaatatgggactatataactttttttcttggcctgtagtagcataagtataggcacaacctgagaaccatgggggttgttcccctaaaaccaaaaaggctttagcctgaggtacatccagaacaaagttagctgtctttgccttgctgcagtataaagaaaggaaagaaatgtt

SEQ ID NO: 69347 - DNA, 599 bp, Chicken  19866894341481_1
  misc_feature (1)..(115): n is any nucleotide
nnnnnnnnnnnnnnnnnnnnnnnnnnnnnnnnnnnnnnnnnnnnnnnnnnnnnnnnnnnnnnnnnnnnnnnnnnnnnnnnnnnnnnnnnnnnnnnnnnnnnnnnnnnnnnnnnnnggaagtgggttgccctgcggctgtacttgtttcacatggtggttacactgatgctttggaaaaaaaaattctggcatatttggttggctcatttttgtaaggcacagggcctttactagtagatctagggagtggaaagatgttaaatgatgaaaggagctcagcatgcccttcaaatgctactygtgttagtgtttgttcctaccgtaagaatgcaccaaatttgagaaggcwctttacagccccttgctcactcttggctttaaatacactggacaataagaaacttggacatcaccacttaatttattctcctgctgcaactggagtcactggaaaataatctgtacttcagtatgcacagtgaaacacctggaggcaggcaggcttgcctttgccagactgggattacagggtccttgggcccggggcactaatggcctttgtgsctttgcccaactccatgggggtaccactgctccca

SEQ ID NO: 69348 - DNA, 599 bp, Chicken  19866894341481_2
  misc_feature (1)..(66): n is any nucleotide
nnnnnnnnnnnnnnnnnnnnnnnnnnnnnnnnnnnnnnnnnnnnnnnnnnnnnnnnnnnnnnnnnnggaagtgggttgccctgcggctgtacttgtttcacatggtggttacactgatgctttggaaaaaaaaattctggcatatttggttggctcatttttgtaaggcacagggcctttactagtagatctagggagtggaaagatgttaaatgatgaaaggagctcagcatgcccttcaaatgctactygtgttagtgtttgttcctaccgtaagaatgcaccaaatttgagaaggcwctttacagccccttgctcactcttggctttaaatacactggacaataagaaacttggacatcaccacttaatttattctcctgctgcaactggagtcactggaaaataatctgtacttcagtatgcacagtgaaacacctggaggcaggcaggcttgcctttgccagactgggattacagggtccttgggcccggggcactaatggcctttgtgsctttgcccaactccatgggggtaccactgctcccagtgacccaggacaccccaaaacttgtaggttcagaatcagaccaacata

SEQ ID NO: 69349 - DNA, 600 bp, Chicken  19866894341481_3
atgaaaggagctcagcatgcccttcaaatgctactygtgttagtgtttgttcctaccgtaagaatgcaccaaatttgagaaggcwctttacagccccttgctcactcttggctttaaatacactggacaataagaaacttggacatcaccacttaatttattctcctgctgcaactggagtcactggaaaataatctgtacttcagtatgcacagtgaaacacctggaggcaggcaggcttgcctttgccagactgggattacagggtccttgggcccggggcactaatggcctttgtgsctttgcccaactccatgggggtaccactgctcccagtgacccaggacaccccaaaacttgtaggttcagaatcagaccaacataatgcagacgtaataaacacatatatgtaactttaatgttcagcagatggagtactaaaaagtagaagggataggggaagtaatgaacagaaaacttctgcagtcatcccacaaaaaattctgctgttacattttgcagtgggttctgtattctcacaaggatgggcttacaggtatgtctgcacatattctgcagtaaaagttacagttctttctt

SEQ ID NO: 69350 - DNA, 562 bp, Chicken  19866894341485_1
attggcccaaacagatggtcagtggtaggatagtccaaccaagactggtaatgtgcttcacggtcttcaaactggtgtggggcctggagttactgtgttgcaagaaaaaggttgtcttctctggtctgactctggaagtttgaaccttctgctcagtcagccttgcaatgtagcagtagaggtgatggtttatccaagttccaggaaatccagaaggatcacccatttcctatcccaatagacagttattttgaggtgataaagtattacgtgtgaggagtggtaaggaaaacagatggmtctttccgttactgcatcacagattaaaacgtattggaaattttgtagttctctagagatgctcataccgtaaatagcacaaaatgggacagtggtgtgtttgtggttgtgttttgggactcttgtgcaaagtgtaacgccagttaatcagataggtgctttataatgttgatgtaattacacgttgcctaaaaatatccagtataatttccctgccctcccagtgaaagctgagctctgacaactagactgccctaagagt

SEQ ID NO: 69351 - DNA, 600 bp, Chicken  19866894341497_1
cctgaaaaataaaatacccacttaaaatagctaaatgcaagttatggaggaaatattattcagctttatctcatgtcatttccatggtgttttttgtttttatctttcttttgcacttttatattctacttttgaggagaggttggaaggaaagaaagaaaggcagcatcagggactctgtctctggcatacagagaatttcaagtagaatacaggacagcaatctagaagggtcaaaatattaatattgctattaaaatgcctgagtatcacataaaccaaacttttacccatttctcrgcttcaaatactttcctaagattttattttcttaaatagaacatatttaacaatgaaatcttcaacattacttcatagyatgtgtctcgtgctctgggaatacaaacatattcaaatccctaccctcgtaagtcaatttttttcttcacattttaattttcaagcaaaagagctacaatgcaaaatttgccagacatgcctaaataataccactcaacatgaagacttaggtccaaaataaagacatctacctaaactgatgaagaattaatttttactagaagataaagaataataggc

SEQ ID NO: 69352 - DNA, 600 bp, Chicken  19866894341497_2
ttccatggtgttttttgtttttatctttcttttgcacttttatattctacttttgaggagaggttggaaggaaagaaagaaaggcagcatcagggactctgtctctggcatacagagaatttcaagtagaatacaggacagcaatctagaagggtcaaaatattaatattgctattaaaatgcctgagtatcacataaaccaaacttttacccatttctcrgcttcaaatactttcctaagattttattttcttaaatagaacatatttaacaatgaaatcttcaacattacttcatagyatgtgtctcgtgctctgggaatacaaacatattcaaatccctaccctcgtaagtcaatttttttcttcacattttaattttcaagcaaaagagctacaatgcaaaatttgccagacatgcctaaataataccactcaacatgaagacttaggtccaaaataaagacatctacctaaactgatgaagaattaatttttactagaagataaagaataataggcttttatcctcaacttaaacaaggcatgagaaataaacatagaagacaaatagtgtaatatgtggataacgcttgaaaaa

SEQ ID NO: 69353 - DNA, 599 bp, Chicken  19866894341504_1
  misc_feature (1)..(68): n is any nucleotide
nnnnnnnnnnnnnnnnnnnnnnnnnnnnnnnnnnnnnnnnnnnnnnnnnnnnnnnnnnnnnnnnnnnncattgctgtcactgggaactggattggaaatgacaaactcagcagctcagacttatatgtttacagtcaagatacagtggttatttttacaagctacaataagaaagtacagaagagggctcaattgagtttgctctcagcattagatgaacagctattggccagcaaaacttttgaactaatattggaaattttggcatacataatgagtgctgaagaagctcagggcagycrgaagcgtgatacagtaggtaatactcccyaaggtaaaggtaatrtgcttaaactctgtcaagtacagatgtctcccaagttctggatcatgttgcaggttggagagcacctttcatgtggcactgctgattctttgttcttttcgctataaagctatgggttgcctggggctgagctatagcagaaaaagaaactgattaaaaagcaagtatacaatcattttcacaaagaccctgaggagaacagcccacatttcagaaggtcacataagtaatatatataccaaagccttatctc

SEQ ID NO: 69354 - DNA, 599 bp, Chicken  19866894341504_2
  misc_feature (1)..(66): n is any nucleotide
nnnnnnnnnnnnnnnnnnnnnnnnnnnnnnnnnnnnnnnnnnnnnnnnnnnnnnnnnnnnnnnnnncattgctgtcactgggaactggattggaaatgacaaactcagcagctcagacttatatgtttacagtcaagatacagtggttatttttacaagctacaataagaaagtacagaagagggctcaattgagtttgctctcagcattagatgaacagctattggccagcaaaacttttgaactaatattggaaattttggcatacataatgagtgctgaagaagctcagggcagycrgaagcgtgatacagtaggtaatactcccyaaggtaaaggtaatrtgcttaaactctgtcaagtacagatgtctcccaagttctggatcatgttgcaggttggagagcacctttcatgtggcactgctgattctttgttcttttcgctataaagctatgggttgcctggggctgagctatagcagaaaaagaaactgattaaaaagcaagtatacaatcattttcacaaagaccctgaggagaacagcccacatttcagaaggtcacataagtaatatatataccaaagccttatctcca

SEQ ID NO: 69355 - DNA, 599 bp, Chicken  19866894341504_3
  misc_feature (1)..(37): n is any nucleotide
nnnnnnnnnnnnnnnnnnnnnnnnnnnnnnnnnnnnncattgctgtcactgggaactggattggaaatgacaaactcagcagctcagacttatatgtttacagtcaagatacagtggttatttttacaagctacaataagaaagtacagaagagggctcaattgagtttgctctcagcattagatgaacagctattggccagcaaaacttttgaactaatattggaaattttggcatacataatgagtgctgaagaagctcagggcagycrgaagcgtgatacagtaggtaatactcccyaaggtaaaggtaatrtgcttaaactctgtcaagtacagatgtctcccaagttctggatcatgttgcaggttggagagcacctttcatgtggcactgctgattctttgttcttttcgctataaagctatgggttgcctggggctgagctatagcagaaaaagaaactgattaaaaagcaagtatacaatcattttcacaaagaccctgaggagaacagcccacatttcagaaggtcacataagtaatatatataccaaagccttatctccataagatggagagtcttcagttttcagaaa

SEQ ID NO: 69356 - DNA, 599 bp, Chicken  19866894341504_4
  misc_feature (1)..(22): n is any nucleotide
nnnnnnnnnnnnnnnnnnnnnncattgctgtcactgggaactggattggaaatgacaaactcagcagctcagacttatatgtttacagtcaagatacagtggttatttttacaagctacaataagaaagtacagaagagggctcaattgagtttgctctcagcattagatgaacagctattggccagcaaaacttttgaactaatattggaaattttggcatacataatgagtgctgaagaagctcagggcagycrgaagcgtgatacagtaggtaatactcccyaaggtaaaggtaatrtgcttaaactctgtcaagtacagatgtctcccaagttctggatcatgttgcaggttggagagcacctttcatgtggcactgctgattctttgttcttttcgctataaagctatgggttgcctggggctgagctatagcagaaaaagaaactgattaaaaagcaagtatacaatcattttcacaaagaccctgaggagaacagcccacatttcagaaggtcacataagtaatatatataccaaagccttatctccataagatggagagtcttcagttttcagaaatatgcatgcaaarca

SEQ ID NO: 69357 - DNA, 501 bp, Chicken  19866894341504_5
atrtgcttaaactctgtcaagtacagatgtctcccaagttctggatcatgttgcaggttggagagcacctttcatgtggcactgctgattctttgttcttttcgctataaagctatgggttgcctggggctgagctatagcagaaaaagaaactgattaaaaagcaagtatacaatcattttcacaaagaccctgaggagaacagcccacatttcagaaggtcacataagtaatatatataccaaagccttatctccataagatggagagtcttcagttttcagaaatatgcatgcaaarcataagtttggcaatagcaacagactttgtctccaaataatatagggttactagaacaactttattagttggctacgcattgctacgaagaaaatgtctgctgtttaataacatccagataaacaaaatgaaattaatcacagcctaacatgtgaaattccaggcacaaggccaccgtataaagacttaacacatgtctac

SEQ ID NO: 69358 - DNA, 600 bp, Chicken  19866894341508_1
ggctctgccagtttctctcaattctgtaaggccccgaggtttttaagttaaacattttgtgagagattagtgttgaaaagaagcaaacacttactaagcagcaacaggtaacaccctttgaggcaatgcagaaggatttcttaaagccatatggcttgtgcctcaaccactccacgcaaattagctctgagcagcatggcccatacacagcacatactataggctgtgcaacttctagaaaagaaaaacacagagaaataaggcaggaattgcatacgcaatgaaacaaagcagaattgsccctcttcagggcaattcaggatctctcgctgcctggtatcaggtggcagatgatgaacacttagtagcttaggccctgractgctagaggatgacartggcaagatccaatcatctcacatgcccatcagcattgtatctgaatgctgaagtgaaaacgtcaggcatttagccaaagactcagctcataggatacgctggtctgtaggtgctgcaagaactaagcagcaaagaaggcttgcagcaacatctttctcaccaaaaccatgcagaagaaaatttactcttcccaagcagttt

SEQ ID NO: 69359 - DNA, 600 bp, Chicken  19866894341508_2
aagcaaacacttactaagcagcaacaggtaacaccctttgaggcaatgcagaaggatttcttaaagccatatggcttgtgcctcaaccactccacgcaaattagctctgagcagcatggcccatacacagcacatactataggctgtgcaacttctagaaaagaaaaacacagagaaataaggcaggaattgcatacgcaatgaaacaaagcagaattgsccctcttcagggcaattcaggatctctcgctgcctggtatcaggtggcagatgatgaacacttagtagcttaggccctgractgctagaggatgacartggcaagatccaatcatctcacatgcccatcagcattgtatctgaatgctgaagtgaaaacgtcaggcatttagccaaagactcagctcataggatacgctggtctgtaggtgctgcaagaactaagcagcaaagaaggcttgcagcaacatctttctcaccaaaaccatgcagaagaaaatttactcttcccaagcagtttctgttgtctagaggaaaacattttaggttttaggcatcagttttctcagccattttcacaccatgacaatttaattcttt

SEQ ID NO: 69360 - DNA, 584 bp, Chicken  19866894341508_3
cagcaacaggtaacaccctttgaggcaatgcagaaggatttcttaaagccatatggcttgtgcctcaaccactccacgcaaattagctctgagcagcatggcccatacacagcacatactataggctgtgcaacttctagaaaagaaaaacacagagaaataaggcaggaattgcatacgcaatgaaacaaagcagaattgsccctcttcagggcaattcaggatctctcgctgcctggtatcaggtggcagatgatgaacacttagtagcttaggccctgractgctagaggatgacartggcaagatccaatcatctcacatgcccatcagcattgtatctgaatgctgaagtgaaaacgtcaggcatttagccaaagactcagctcataggatacgctggtctgtaggtgctgcaagaactaagcagcaaagaaggcttgcagcaacatctttctcaccaaaaccatgcagaagaaaatttactcttcccaagcagtttctgttgtctagaggaaaacattttaggttttaggcatcagttttctcagccattttcacaccatgacaatttaattcttttt

SEQ ID NO: 69361 - DNA, 600 bp, Chicken  19866894341511_1
tagcaccaattcctgcattttctccattccaccccagtgcccacgtagttttctatgccagaaacacaaccagccctttggcagcatttaaaacccttctaaggtgaatggatgtctcctggtggcacaacagcagcttgaaggtgaccaacaccacctttgcatctccagatcagcttctgggaccaccatgaaggacaagacctcgcatccaaatctctgtcatctctcccttgtctgccagggcagactttttcctatggcatctcagggtgtgaaggtgcctcagccaaccactcrcagaatgtttgagttcacagtttggttggaaaaaacagcatcacttaaatcaaggagggaggcaaaagccctcctcctttcagaggggaagccagacgaacgggcccacaagcacgacagcatgtggctgtgttgagattaatttgcttaattgttgcacgctgttagcaacagttaccatgtttaccggttgagtcagtaatgcttgttaaaactccaattcaaaggacctcaagtaataaaaaacagccttggaatggtctttcacattagctactgttgctttgctacagcaaacat

SEQ ID NO: 69362 - DNA, 600 bp, Chicken  19866894341514_1
acaaagactatccagcagtatgacaaggacaaattttaaaaagatttgcttcaaataccaacttaaccttaagcatttcaatcctaaatcacaatgtcttacagacaggaaaccacttgcttctgtctccaaaggtgtcttgtggtctgccagtgtagtttgtgggtacacaagttaattctaatcttttgtaccactcctgtaatctaggtaatacatatgagccttgcaacatccaacaggaagtagagacagctgctgtgtaatatatacacacacacacacacacagtgactgtaygcataaaggggtagtatatgaaatgaagaacttaagcagtttgtaaatcatttaatttcattcagtttgaattaaaagtaaaaaaaaagcaaactacaaagtacctcttcccctttcctccctccagtacttcatttcaacataaatgacaaactagtttataaccctctgttttccttaagccgtcaactttacttaatggaacatgagagcagcccaaactttccatgcattttaccttccccaccctcccccaagttagctgcttacttcagcgctacctactaaagatgttttgtt

SEQ ID NO: 69363 - DNA, 599 bp, Chicken  19866894341522_1
  misc_feature (1)..(8): n is any nucleotide
nnnnnnnnattcacgtagctgaaatttgatccatcttcagacttcctacaattcctcttccatgtgcccagatacagacatcagttcctccttccgtaaattgtctgttgtgaatggaaaagcacgctggtgaattcagtgctggcattaaagaatagaagcctttcctacccatgagctgctgctgcaaacggtatgtgtaaggtatgaagagctgtttgagtacaacctggtctaatatttgctattcataaaggcaaaataactacagtaaattaattctaccaagattctttgcartaacaacacgagcactacaggtgcatttgtaaagccaaagggcatagcactaaaatagaataatctcttgtgacataaaaaagcagtgtctgatttgcttctatcatccaaagacatttgcttgtagccgtgtgctacgtaaatctaaggtgttaatgtactagcctgacttcagaaatctcaagagttgctcaccccaggcaaaagatatgcatctttttggggggcactatgtaacataacacatgaagctctgtttcttagaggaataaggcagcatcttagataacatctaaggg

SEQ ID NO: 69364 - DNA, 600 bp, Chicken  19866894341525_1
aagagttaactggtttcttggtacttaaaattccacaatagcaccatagttctccttggttagacagcatctttaagcacagcaaagtgaggagaggcccagcaagtggcagtgcttcagggattaacgtgttactgcatgtcaaacaacccatcattgcacatacaataaaacatggctcaactcgtttgcactgccttttatctgctgagggctggcagggttgtcatgcatagttatcaactgcagagtaactgcagaagcgcagtaattaacatagtaatgtcccagctggaaacragagttggttattgcagacttcaagagaacgcagcccagtcacagctgtgttcctgagggcagcctcagtcacctcgacccgggctgcatggggactctgtgggactgtggggtgcactgcacgctgctttctcagggatctcactgggttgagctgctcagagatggaaatgagagcacaggcacagagctgttggctgggagatctgctgtgcrttgctttgcatcacagtggtgaacagtcctaaattcaaattgtctgtttagcttttaaaatgctgctgagttgccaggtcttct

SEQ ID NO: 69365 - DNA, 600 bp, Chicken  19866894341525_2
ggcagggttgtcatgcatagttatcaactgcagagtaactgcagaagcgcagtaattaacatagtaatgtcccagctggaaacragagttggttattgcagacttcaagagaacgcagcccagtcacagctgtgttcctgagggcagcctcagtcacctcgacccgggctgcatggggactctgtgggactgtggggtgcactgcacgctgctttctcagggatctcactgggttgagctgctcagagatggaaatgagagcacaggcacagagctgttggctgggagatctgctgtgcrttgctttgcatcacagtggtgaacagtcctaaattcaaattgtctgtttagcttttaaaatgctgctgagttgccaggtcttcttcctaaaagtttggagaaatggcctcaagttgcttggatcaagcattggaacaggctscccaggtggtggagtcacagtccctggaaggtgttcaagaaacatgtagatacggcagtgagggatgtggtttagtgggcatggtggtggtgggttgatggttgggctagatgatcttagatatcgtttccaaccttaatgattctatgaaatacata

SEQ ID NO: 69366 - DNA, 600 bp, Chicken  19866894341525_3
ggcagcctcagtcacctcgacccgggctgcatggggactctgtgggactgtggggtgcactgcacgctgctttctcagggatctcactgggttgagctgctcagagatggaaatgagagcacaggcacagagctgttggctgggagatctgctgtgcrttgctttgcatcacagtggtgaacagtcctaaattcaaattgtctgtttagcttttaaaatgctgctgagttgccaggtcttcttcctaaaagtttggagaaatggcctcaagttgcttggatcaagcattggaacaggctscccaggtggtggagtcacagtccctggaaggtgttcaagaaacatgtagatacggcagtgagggatgtggtttagtgggcatggtggtggtgggttgatggttgggctagatgatcttagatatcgtttccaaccttaatgattctatgaaatacatatgtataggatactcttcagacttccaaagaaggaacatatatgttttgggcttctttttgtagtttcctacactttagcattttgtttgccaattcctagaataaaattgtattttattgtagttccattggtttgatttct

SEQ ID NO: 69367 - DNA, 600 bp, Chicken  19866894341527_1
gccatgggcctgttgccccccacactggaccaggctgcccagggctccatccagcctggtcttgtgcacctccggggatggggcatccacagtctctctgggcagcctgtaggacaactcatcaaactgcctcatcaaactcataacctcttttttcatggttcgttttcatgctaaacctcacataaaatagacaagtaaatgcatacatatatacatgcaaatatttaaatggaaaacctttattgtggatactcttcccacacacccagctcaacccctgttaaccctctgtgtatkaggagataccagaactatatctgttttcctgtctgtataatagaggagattcaagatggcctgcaatagtgacacacgggaaccaaaagtgctgacrccckgcatggcaaaaaaccaaatacccacataaagaaactcactatgcatacaatctttttggttgttttgttgttgttgttgttgtcttttttattattattaatattattcaaattagtaatgaaattcctaactaatttaagatgaaagtgcctcaaatgtttatagtctatacaaatagaggctgaaatttgatggggg

SEQ ID NO: 69368 - DNA, 600 bp, Chicken  19866894341527_2
ctgggcagcctgtaggacaactcatcaaactgcctcatcaaactcataacctcttttttcatggttcgttttcatgctaaacctcacataaaatagacaagtaaatgcatacatatatacatgcaaatatttaaatggaaaacctttattgtggatactcttcccacacacccagctcaacccctgttaaccctctgtgtatkaggagataccagaactatatctgttttcctgtctgtataatagaggagattcaagatggcctgcaatagtgacacacgggaaccaaaagtgctgacrccckgcatggcaaaaaaccaaatacccacataaagaaactcactatgcatacaatctttttggttgttttgttgttgttgttgttgtcttttttattattattaatattattcaaattagtaatgaaattcctaactaatttaagatgaaagtgcctcaaatgtttatagtctatacaaatagaggctgaaatttgatgggggtgattattaaatgaatagtctagacaagagatctgaaaggtaagataaaaaccattcacrttcttactgcaattggaatcatttccatagcatgcat

SEQ ID NO: 69369 - DNA, 600 bp, Chicken  19866894341527_3
gcagcctgtaggacaactcatcaaactgcctcatcaaactcataacctcttttttcatggttcgttttcatgctaaacctcacataaaatagacaagtaaatgcatacatatatacatgcaaatatttaaatggaaaacctttattgtggatactcttcccacacacccagctcaacccctgttaaccctctgtgtatkaggagataccagaactatatctgttttcctgtctgtataatagaggagattcaagatggcctgcaatagtgacacacgggaaccaaaagtgctgacrccckgcatggcaaaaaaccaaatacccacataaagaaactcactatgcatacaatctttttggttgttttgttgttgttgttgttgtcttttttattattattaatattattcaaattagtaatgaaattcctaactaatttaagatgaaagtgcctcaaatgtttatagtctatacaaatagaggctgaaatttgatgggggtgattattaaatgaatagtctagacaagagatctgaaaggtaagataaaaaccattcacrttcttactgcaattggaatcatttccatagcatgcattttt

SEQ ID NO: 69370 - DNA, 600 bp, Chicken  19866894341527_4
ctgcaatagtgacacacgggaaccaaaagtgctgacrccckgcatggcaaaaaaccaaatacccacataaagaaactcactatgcatacaatctttttggttgttttgttgttgttgttgttgtcttttttattattattaatattattcaaattagtaatgaaattcctaactaatttaagatgaaagtgcctcaaatgtttatagtctatacaaatagaggctgaaatttgatgggggtgattattaaatgaatagtctagacaagagatctgaaaggtaagataaaaaccattcacrttcttactgcaattggaatcatttccatagcatgcattttttttcatgactcatttgagctcactagaatctcagtcagtaaaaaawttctattaatgagttggatatgtgttacaaatgcaacagttctgagtgttgaaggtatgtagtacaagactcctccattagtctacatatctgagcattccaactccttagtgtagcctgggaaagtttgtttctagttgtactgattttgcttttactaacatagattataaagatttgcaactatagcaaatacttgcttttgtaacaaat

SEQ ID NO: 69371 - DNA, 557 bp, Chicken  19866894341527_5
acaatctttttggttgttttgttgttgttgttgttgtcttttttattattattaatattattcaaattagtaatgaaattcctaactaatttaagatgaaagtgcctcaaatgtttatagtctatacaaatagaggctgaaatttgatgggggtgattattaaatgaatagtctagacaagagatctgaaaggtaagataaaaaccattcacrttcttactgcaattggaatcatttccatagcatgcattttttttcatgactcatttgagctcactagaatctcagtcagtaaaaaawttctattaatgagttggatatgtgttacaaatgcaacagttctgagtgttgaaggtatgtagtacaagactcctccattagtctacatatctgagcattccaactccttagtgtagcctgggaaagtttgtttctagttgtactgattttgcttttactaacatagattataaagatttgcaactatagcaaatacttgcttttgtaacaaatattttggcttgcattctgcataatcagtaaccaccacaccacag

SEQ ID NO: 69372 - DNA, 600 bp, Chicken  19866894341529_1
gcagagcgtctacttcttaaaatcctcgttaacatttcacaacatgcagtgcagaggaagaaatgcataaagtcagctggcttgaaataggcgaaactatttttcgggatttgctttctaagctgacagagtactggcacagcgtataatggagtgcccaaactcactcagttccttaaggaaggattcagtgctccaggtttgacacgacaggattccgtgctggactgtaagctgctttcagtgcaggaaacaaacctccttcctgcacaccttcactgccaccacctctgtgtctcycctcaatgtaatttttccaaacactttcaaaataaatagaagctcttycgtcaaacagagtgaaataaataccagcaggattgggtttgcactgttyactcgtcccttgtctttcctttcactctgcctttgcctggggcagttttggaaggctctgccacatcctctgttctgctctaagtgtgtcattaagagaccaagggcttctgtcccacagttgcattctacactcatacagcacattcctctgagcagcactgtccatctgtggtgaggggaagcagtccgtagggtttgatg

SEQ ID NO: 69373 - DNA, 600 bp, Chicken  19866894341529_2
gtgcagaggaagaaatgcataaagtcagctggcttgaaataggcgaaactatttttcgggatttgctttctaagctgacagagtactggcacagcgtataatggagtgcccaaactcactcagttccttaaggaaggattcagtgctccaggtttgacacgacaggattccgtgctggactgtaagctgctttcagtgcaggaaacaaacctccttcctgcacaccttcactgccaccacctctgtgtctcycctcaatgtaatttttccaaacactttcaaaataaatagaagctcttycgtcaaacagagtgaaataaataccagcaggattgggtttgcactgttyactcgtcccttgtctttcctttcactctgcctttgcctggggcagttttggaaggctctgccacatcctctgttctgctctaagtgtgtcattaagagaccaagggcttctgtcccacagttgcattctacactcatacagcacattcctctgagcagcactgtccatctgtggtgaggggaagcagtccgtagggtttgatgacattctgcattttggttatttttaaggccatcttcactgctagatca

SEQ ID NO: 69374 - DNA, 600 bp, Chicken  19866894341529_3
tatttttcgggatttgctttctaagctgacagagtactggcacagcgtataatggagtgcccaaactcactcagttccttaaggaaggattcagtgctccaggtttgacacgacaggattccgtgctggactgtaagctgctttcagtgcaggaaacaaacctccttcctgcacaccttcactgccaccacctctgtgtctcycctcaatgtaatttttccaaacactttcaaaataaatagaagctcttycgtcaaacagagtgaaataaataccagcaggattgggtttgcactgttyactcgtcccttgtctttcctttcactctgcctttgcctggggcagttttggaaggctctgccacatcctctgttctgctctaagtgtgtcattaagagaccaagggcttctgtcccacagttgcattctacactcatacagcacattcctctgagcagcactgtccatctgtggtgaggggaagcagtccgtagggtttgatgacattctgcattttggttatttttaaggccatcttcactgctagatcaaccagtgcttgctgagtctgtctaccaaagcagccatcagccctgcatg

SEQ ID NO: 69375 - DNA, 492 bp, Chicken  19866894341530_1
cgtagctgatggtttcttactgtaatataatttatatactctgcaatgagtgagttcatcatgagtgaggatccataaatggatcctccatctcaaaagctgaaagatcattggtgcgtatagattttgcaccctaaatctacttgatctctggaaaaatcaaataatcctttttcgtccagatttcaggagagctttccactcctgaggtgtttaccttttatcaacgtaaacttatgccccttatccacagttacagatattatacccactcatccccatatactttgctgcctgacrtaatttaaaggacccctagagcaggagttgtgctgttaacctgttgccatgcatgatgtggtttgtatctccagaaatattttcttggkggattctgcagtcattaacaggtcacttacaggtgaactgtctgcaactacaagaagcttatagctaaaaaaggcatggctgaagatctgatgctgatgtgta

SEQ ID NO: 69376 - DNA, 403 bp, Chicken  19866894341530_2
atctcaaaagctgaaagatcattggtgcgtatagattttgcaccctaaatctacttgatctctggaaaaatcaaataatcctttttcgtccagatttcaggagagctttccactcctgaggtgtttaccttttatcaacgtaaacttatgccccttatccacagttacagatattatacccactcatccccatatactttgctgcctgacrtaatttaaaggacccctagagcaggagttgtgctgttaacctgttgccatgcatgatgtggtttgtatctccagaaatattttcttggkggattctgcagtcattaacaggtcacttacaggtgaactgtctgcaactacaagaagcttatagctaaaaaaggcatggctgaagatctgatgctgatgtgta

SEQ ID NO: 69377 - DNA, 600 bp, Chicken  19866894341531_1
ataatcaggaaaataaatattggcagaagtggaaagcgttaatctacaggaaaacaaagtaggacaatcagcttacaagttaaatatttactcaagtatctcagatggtaactaaactgttattcaacaggaaagaaaaccaccttgcagttctagctttcgctcctggctgttgctaatgccagtgaggcaaggtagctggcctataagctagagaaccaggaaaagaaaagcacacaacagaaaatactaaaataactgaaggtttatcagttaaacagattggctgctcaagaacaygactttcattttaacatcagaacagcaataaatgctgtgtagcagaagccacatcttctattcagcccaagtccagtgatggttacaaccacagcaaccgagcttcattctctccatggtacaattgccctgcattcatccagaaatcttcggcactttcaaggctgttgtgggtcccttccarctcaggatattgcatgattctgtgactgcccttcaagtaaatccaaaatcgttgcctggttggaaagcatcatgggaggagagagaaattaaaaacagtggatttggatttgctcc

SEQ ID NO: 69378 - DNA, 600 bp, Chicken  19866894341531_2
gtgaggcaaggtagctggcctataagctagagaaccaggaaaagaaaagcacacaacagaaaatactaaaataactgaaggtttatcagttaaacagattggctgctcaagaacaygactttcattttaacatcagaacagcaataaatgctgtgtagcagaagccacatcttctattcagcccaagtccagtgatggttacaaccacagcaaccgagcttcattctctccatggtacaattgccctgcattcatccagaaatcttcggcactttcaaggctgttgtgggtcccttccarctcaggatattgcatgattctgtgactgcccttcaagtaaatccaaaatcgttgcctggttggaaagcatcatgggaggagagagaaattaaaaacagtggatttggatttgctcctgtcttctaaatgaaacttctgatatacgcaaagctgcatatgatcataatccagtccaagaataccacatccaacatgcaactgcacgggatttatacgccacgcgatagcatatagccatgttcccactaacattttatgggagcaggcagacattccagagatgaggcttcgcactgcatg

SEQ ID NO: 69379 - DNA, 599 bp, Chicken  19866894341538_1
  misc_feature (1)..(25): n is any nucleotide
nnnnnnnnnnnnnnnnnnnnnnnnntaccattgtatttataaatgtacgaattaaaagataaataaattttaaaaaaaccaatcctgttatcttgtgatttcagagggattcagcaaagtccaacacttgcggtgatcagactaagggtacgtaaccatctatatttagacacataagggaaaaaagccccataagttgccctacgctttttccctttccttgttatgacttcctcaatacactaagtaaaaaacagatgttcaggagacagtctgttctctacgtatctgctcccagcrggttgcctcacagcaaacttccacaagagtttgcacaacactgtgcccagtttttgagcagaagtgattatttgtccctttaacacaccacaggtcaagtggaattgctgctgccagcaagccctttgcagggaaatgaaggtgacttcagaagactaaaaaagatgtattcttaattttaccagagagaggaactttatcaacccagtcgttagagcatctaccttgaactgaggcaaccagaaacagyaaggtactgaagcccacctctgcccccatgggggcatccctcatgatgg

SEQ ID NO: 69380 - DNA, 600 bp, Chicken  19866894341538_2
aaaacagatgttcaggagacagtctgttctctacgtatctgctcccagcrggttgcctcacagcaaacttccacaagagtttgcacaacactgtgcccagtttttgagcagaagtgattatttgtccctttaacacaccacaggtcaagtggaattgctgctgccagcaagccctttgcagggaaatgaaggtgacttcagaagactaaaaaagatgtattcttaattttaccagagagaggaactttatcaacccagtcgttagagcatctaccttgaactgaggcaaccagaaacagyaaggtactgaagcccacctctgcccccatgggggcatccctcatgatggtctttcttggtcaccagagtactcaggaatccctaycacaccaccgtataccttctgtttgcaagtcctttgctacatgtaaagattccaagtgatgccagccaagaccctaacaaattaacttttgacttttgtgttccttacacaacactttgagtcacgtaaaaaaaagaaatagtttttgtcatcctgcagcacggagaacacatcctatacgctgccttaaacacaagcaaaggaagcatttcctt

SEQ ID NO: 69381 - DNA, 600 bp, Chicken  19866894341538_3
caacactgtgcccagtttttgagcagaagtgattatttgtccctttaacacaccacaggtcaagtggaattgctgctgccagcaagccctttgcagggaaatgaaggtgacttcagaagactaaaaaagatgtattcttaattttaccagagagaggaactttatcaacccagtcgttagagcatctaccttgaactgaggcaaccagaaacagyaaggtactgaagcccacctctgcccccatgggggcatccctcatgatggtctttcttggtcaccagagtactcaggaatccctaycacaccaccgtataccttctgtttgcaagtcctttgctacatgtaaagattccaagtgatgccagccaagaccctaacaaattaacttttgacttttgtgttccttacacaacactttgagtcacgtaaaaaaaagaaatagtttttgtcatcctgcagcacggagaacacatcctatacgctgccttaaacacaagcaaaggaagcatttccttcccttttcagtagtctttcagtaattggcttattgcctaacttctagtctctttattacagtggcatgtttttaacatggttaag

SEQ ID NO: 69382 - DNA, 600 bp, Chicken  19866894341538_4
tggcttattgcctaacttctagtctctttattacagtggcatgtttttaacatggttaagcatggaaggtctctgctcatagcagtatcagctcagtcagtgacattatccttcaaaagataaagcaattccattcgcataagtcatctctgatggttgttgggaaaacacacccagccaaaatcaaataaaggatttggagttcccacatggaggcagggactaggatcaaatactgggcaaagtgttgaaggaatacagggagaacttgggtgaagcacagcactcccagcaacacasgttaggtgtgccaagaatttggcttgatttcacatctcaagctttctataccacaacatttctattatatatccttctgtagttttgatgaaactgtgtcatataggaaaaaaagtgtagtgagaagagatgctttagctcttggaaaacataccgggcttttatttcattacaaacatcctcctctttttgactgatacttgctcttagcctcagggcagggttaatcatataggtggagcaggctgttggctccatttttgtcctggggattttttgcggttctgttactgccacact

SEQ ID NO: 69383 - DNA, 600 bp, Chicken  19866894341539_1
cagatgcttccagatattcctaatctgattaaactaaaggttatcatatctcctgacagtctttgttgtcttgtatttacctgcaatgtctttcaccccactagctgtaggagcattacatctatcatgcatgttcaaactcatcttctaaacagtagtaaaagctcaccagagcaatgatctctccacatccttcagatgacatatctttgcttcatacccacttccacatcagacatcattttgtcagatccctctgttgtcagctgctgtacaacaacaaaatgtaatataatattrgtaggaaggttcaaactctattyccataccactaacatccacttctgaggttgtgtgtcaatgtaataaaataggaggcattactttcagagtagcccttgtatatgtaagcactgagtcaaaatgcttgcagaataagtgataagggaattttatctttaagtccagtagacatgaaataaaactgtattttccartaagtgtaaatagcaaggctatatttgccaattgcaacactatgatgtggattcaaataatttaacagccaataggatgaaacacatgatgcatgttgtgaag

SEQ ID NO: 69384 - DNA, 600 bp, Chicken  19866894341539_2
tctgattaaactaaaggttatcatatctcctgacagtctttgttgtcttgtatttacctgcaatgtctttcaccccactagctgtaggagcattacatctatcatgcatgttcaaactcatcttctaaacagtagtaaaagctcaccagagcaatgatctctccacatccttcagatgacatatctttgcttcatacccacttccacatcagacatcattttgtcagatccctctgttgtcagctgctgtacaacaacaaaatgtaatataatattrgtaggaaggttcaaactctattyccataccactaacatccacttctgaggttgtgtgtcaatgtaataaaataggaggcattactttcagagtagcccttgtatatgtaagcactgagtcaaaatgcttgcagaataagtgataagggaattttatctttaagtccagtagacatgaaataaaactgtattttccartaagtgtaaatagcaaggctatatttgccaattgcaacactatgatgtggattcaaataatttaacagccaataggatgaaacacatgatgcatgttgtgaagtgctgaactcagagatgtagttt

SEQ ID NO: 69385 - DNA, 486 bp, Chicken  19866894341539_3
gatgacatatctttgcttcatacccacttccacatcagacatcattttgtcagatccctctgttgtcagctgctgtacaacaacaaaatgtaatataatattrgtaggaaggttcaaactctattyccataccactaacatccacttctgaggttgtgtgtcaatgtaataaaataggaggcattactttcagagtagcccttgtatatgtaagcactgagtcaaaatgcttgcagaataagtgataagggaattttatctttaagtccagtagacatgaaataaaactgtattttccartaagtgtaaatagcaaggctatatttgccaattgcaacactatgatgtggattcaaataatttaacagccaataggatgaaacacatgatgcatgttgtgaagtgctgaactcagagatgtagtttacaagtttgtattggagttttaaagcttacagataaaaataagatgcttagggaaaggag

SEQ ID NO: 69386 - DNA, 600 bp, Chicken  19866894341541_1
taagatgacagaagaaaagtatagaggggagttatatatactaccaggtgcagaggactgaaactgtgtattaaacagataacgtacagtctgagaggtgacttttaaaattttaatcaagccatatctttgaactggttggatgaaacatatctggttcttcacaacttttccttggattacttgactgaaattaatgttttacagcaaatatccacatttactaatatccactttcttcccttttctctctctctctctctcttttttttcttttttcctagaaattcacatgctctrctattctaaaagaactttaactaattgttacccttcagaagacttattcaggagagctaaaaccacatgggcacctggatatgtgtactttgttgttcattggctttctttatcatttagtggtatgcattcttgtctcttatttcccactcatggtttgagttagagaagtagaaaaccaagatgaaagarcaatacaaaattcttataaagcaatttgccattgactttacatatgaatttatctttgctgagttttcttttttaaaaatgatcaaatttttatatttaagattgtgt

SEQ ID NO: 69387 - DNA, 600 bp, Chicken  19866894341541_2
attaatgttttacagcaaatatccacatttactaatatccactttcttcccttttctctctctctctctctcttttttttcttttttcctagaaattcacatgctctrctattctaaaagaactttaactaattgttacccttcagaagacttattcaggagagctaaaaccacatgggcacctggatatgtgtactttgttgttcattggctttctttatcatttagtggtatgcattcttgtctcttatttcccactcatggtttgagttagagaagtagaaaaccaagatgaaagarcaatacaaaattcttataaagcaatttgccattgactttacatatgaatttatctttgctgagttttcttttttaaaaatgatcaaatttttatatttaagattgtgtctttcatgctaatgcttcatgcttccccgaattttaaatatcactgtgcatacctgtgtatattttttccttattaaaagcagagatatttttagataattcttctgattgtagagattctagaacataattttctgtggtctactgtccaaagcccaaccaaaacgtaatgttagatatcaagattaattt

SEQ ID NO: 69388 - DNA, 600 bp, Chicken  19866894341545_1
ctaaaggaaaaaaatggaggaaaagggaaatgggggtgcccagaaagtgctgtaccaagaattcttccttcagtgagcgtgtaagtcagagtgtgggcagactaatggtgtaaccagtgccagaagaacaaaaaagagtaatggctaatctatcatagtcttaaagtcagtgctaaaattggagtggggcagtggtttatttcatgctacataaaaggagaaatcatagatttgtactgcttgcagaagtggctgcaacaagacaagctggtgacgctggttgtgctttaaacaagaatytggaattttttttcttggcatggagctattccacatgctgctccattgaccgccactactggtatattatagagcacggacccttttcaaacattgagggagagaagagtgccataccaaagtgaatttgtaatgcyktgttctttggtgaagttttacagatgccyccacataattgcaaaacaagaaagaggattatatccttttgaaatggacgtggtccccctgtctagaaagattattttaacacatacgtcaatattttccccctcggcttctccggaggcaaaaaccttgcaa

SEQ ID NO: 69389 - DNA, 600 bp, Chicken  19866894341545_2
gtaatggctaatctatcatagtcttaaagtcagtgctaaaattggagtggggcagtggtttatttcatgctacataaaaggagaaatcatagatttgtactgcttgcagaagtggctgcaacaagacaagctggtgacgctggttgtgctttaaacaagaatytggaattttttttcttggcatggagctattccacatgctgctccattgaccgccactactggtatattatagagcacggacccttttcaaacattgagggagagaagagtgccataccaaagtgaatttgtaatgcyktgttctttggtgaagttttacagatgccyccacataattgcaaaacaagaaagaggattatatccttttgaaatggacgtggtccccctgtctagaaagattattttaacacatacgtcaatattttccccctcggcttctccggaggcaaaaaccttgcaacaagctgttgcaaggaagatgcatgctgttcattggcatccacgccagaaaaaatacaaaacacaaaatgccattgacgtagctgtgttcttaatcactgctactgcacaaaatatctattcagcagttttgcaaat

SEQ ID NO: 69390 - DNA, 600 bp, Chicken  19866894341545_3
taatggctaatctatcatagtcttaaagtcagtgctaaaattggagtggggcagtggtttatttcatgctacataaaaggagaaatcatagatttgtactgcttgcagaagtggctgcaacaagacaagctggtgacgctggttgtgctttaaacaagaatytggaattttttttcttggcatggagctattccacatgctgctccattgaccgccactactggtatattatagagcacggacccttttcaaacattgagggagagaagagtgccataccaaagtgaatttgtaatgcyktgttctttggtgaagttttacagatgccyccacataattgcaaaacaagaaagaggattatatccttttgaaatggacgtggtccccctgtctagaaagattattttaacacatacgtcaatattttccccctcggcttctccggaggcaaaaaccttgcaacaagctgttgcaaggaagatgcatgctgttcattggcatccacgccagaaaaaatacaaaacacaaaatgccattgacgtagctgtgttcttaatcactgctactgcacaaaatatctattcagcagttttgcaaatc

SEQ ID NO: 69391 - DNA, 600 bp, Chicken  19866894341545_4
cagtgctaaaattggagtggggcagtggtttatttcatgctacataaaaggagaaatcatagatttgtactgcttgcagaagtggctgcaacaagacaagctggtgacgctggttgtgctttaaacaagaatytggaattttttttcttggcatggagctattccacatgctgctccattgaccgccactactggtatattatagagcacggacccttttcaaacattgagggagagaagagtgccataccaaagtgaatttgtaatgcyktgttctttggtgaagttttacagatgccyccacataattgcaaaacaagaaagaggattatatccttttgaaatggacgtggtccccctgtctagaaagattattttaacacatacgtcaatattttccccctcggcttctccggaggcaaaaaccttgcaacaagctgttgcaaggaagatgcatgctgttcattggcatccacgccagaaaaaatacaaaacacaaaatgccattgacgtagctgtgttcttaatcactgctactgcacaaaatatctattcagcagttttgcaaatctaaaatgcttacgaacgaaatacacgaat

SEQ ID NO: 69392 - DNA, 600 bp, Chicken  19866894341546_1
tcgagagagagaatcagatggaaataatgatatgtttatttactgctaaacacagtttaaaatatgaccattagaagagtttcctaaaatctgatttgttgtgactcctatcaggggccatgacaaatccaaaataatttccaagggtcgatatttcatatagtatctgttgaatgattgttggattttctattttaatctcataacagtgcatttgttggttgtattattttactgcctattgtaacaacttgtctaatattgtttacatttacagaaacacataaagtgatctgtcarttaatatctatcatgctgttattgttttactaaygttaaattaactgcatcaatgaaatgcataattagtttaaaagttaactgatttatttttcgtgttatttaaattacatgtactttcacaataaagagttgtactctgtggctaaatgaaatagtgtttatctgttctgtaatcacagtttatgtgtgtaaaagctgtaactggactacattaatctaatgtagtcaaagtacaatagaggtactacggtttcaaattggtttagtgctcacttgtcctcatgagtcaaaaggaaa

SEQ ID NO: 69393 - DNA, 600 bp, Chicken  19866894341546_2
tttatttactgctaaacacagtttaaaatatgaccattagaagagtttcctaaaatctgatttgttgtgactcctatcaggggccatgacaaatccaaaataatttccaagggtcgatatttcatatagtatctgttgaatgattgttggattttctattttaatctcataacagtgcatttgttggttgtattattttactgcctattgtaacaacttgtctaatattgtttacatttacagaaacacataaagtgatctgtcarttaatatctatcatgctgttattgttttactaaygttaaattaactgcatcaatgaaatgcataattagtttaaaagttaactgatttatttttcgtgttatttaaattacatgtactttcacaataaagagttgtactctgtggctaaatgaaatagtgtttatctgttctgtaatcacagtttatgtgtgtaaaagctgtaactggactacattaatctaatgtagtcaaagtacaatagaggtactacggtttcaaattggtttagtgctcacttgtcctcatgagtcaaaaggaaaatctactacgttcactaaggttgaatctgagttt

SEQ ID NO: 69394 - DNA, 599 bp, Chicken  19866894341554_1
  misc_feature (1)..(48): n is any nucleotide
nnnnnnnnnnnnnnnnnnnnnnnnnnnnnnnnnnnnnnnnnnnnnnnnaaactccctgaggtgtaccaatatgtttttacatcctcttgctgattcactgaatgatcccactggggttgtattctttactttgttgtacaaaattattttagcaaacaaaacaataacatgaaggaagaaaaagagaaaaaatcccattacttcatgtatcatcttagcatggaaaccagctgcatgagacccaagaagaaagaactgctttttacagagcccatgtactgattatgtggggtgctgtgyctttggcttatgtgcttttcactacagcttttctggtgacttttactcccacggtgtaggttaggacggtccaaaagctccagggatctaagatgtgagaacaggagctgctagcagcagtgctgacaagctgtagggatccagcagcggtctcactttggacaccaaaagtcccagcttggccaaatgagaagtcccagagaggtgagggctgtgcacagctttctcccttgtgctggcatggatttgtcaaagtaaaatytctgggaccctttctttgcagctcaccaaccggttcc

SEQ ID NO: 69395 - DNA, 489 bp, Chicken  19866894341554_2
ttacagagcccatgtactgattatgtggggtgctgtgyctttggcttatgtgcttttcactacagcttttctggtgacttttactcccacggtgtaggttaggacggtccaaaagctccagggatctaagatgtgagaacaggagctgctagcagcagtgctgacaagctgtagggatccagcagcggtctcactttggacaccaaaagtcccagcttggccaaatgagaagtcccagagaggtgagggctgtgcacagctttctcccttgtgctggcatggatttgtcaaagtaaaatytctgggaccctttctttgcagctcaccaaccggttcctggtttctgttcctccgacctaccagcagctcagcagatgctcaaagatgtcacccagctcatgctgagtttccttttcatgtctgggatttgctaactcttctaatgagatgtccccacttggaatttatacaggcaaaacgatgtgctct

SEQ ID NO: 69396 - DNA, 600 bp, Chicken  19866894341556_1
tgtaaagtgcccatgacatttaggatacagtacttatcctctttggcgttaactgtgtgcagagttctcttaagaagagcacagcctacaaatcacaggaagaaatgcttctaatcttctcacagctggcaaggcttcagctggactgcattgtccagctctgggcattgctcttcaaggaaagaagtgaactactatgggtagtccagggaacagcagtgggaatgattgtaagtcaagaaaacacattcagtgagaaaagactgaaagaacagtcattgcatgccctaaaggagagamttctagagagaagggtatatatgcatagttctcccagtccatgaagacaagacttcttgtatgacaagaaatagtggacttaacttcgggaaggaagaatcaggttagctgtgaaaacttgcataaagtagacatactaaaactctggagcaggtttctcttagcagctgctagaatgtgtatcactgaaggctttagtacaggttaaacaatctactgaaaccacaaaaatttgatagatgttgatgatgtctcaaactcgatgagcatacagcatacagcttacttttcagtctttta

SEQ ID NO: 69397 - DNA, 600 bp, Chicken  19866894341560_1
cttttccagtgcttaccttgccctgttgtgctgcctggacaatgtgttgatagacaacaggctttctattttggcagagccctgtaaatcacagccaccagcctgcccacatcatgcttgggtttaactgaatcaggagccggtggctgttgctagcacaacgctgatgcaggaaacctcctcttatgcgcacagtagcagcaggagccttgcaagcatgacacagcacacagctgggagcaccacacagaaagcagggactcactgctgctgtaggggacagcagctcccacagacacrgcatgggtcacagcagttggtgcggttcacatgtgcgtacttctggtttcagagggatttctgggtgcagaaggacctgcaggtataacgatgcctcasactctgaaattcacgtggattatctgccaaattcragggctctcccttttgtgcrcacaagacaacaacccargcctggaactctctttaggcacatctaaatcacaacccaaacactggtgctattggtacaaaaygccygtggtacctttcggactatataccagaatcccactgaacaaagctttatttgtagcccaa

SEQ ID NO: 69398 - DNA, 600 bp, Chicken  19866894341560_2
agcctgcccacatcatgcttgggtttaactgaatcaggagccggtggctgttgctagcacaacgctgatgcaggaaacctcctcttatgcgcacagtagcagcaggagccttgcaagcatgacacagcacacagctgggagcaccacacagaaagcagggactcactgctgctgtaggggacagcagctcccacagacacrgcatgggtcacagcagttggtgcggttcacatgtgcgtacttctggtttcagagggatttctgggtgcagaaggacctgcaggtataacgatgcctcasactctgaaattcacgtggattatctgccaaattcragggctctcccttttgtgcrcacaagacaacaacccargcctggaactctctttaggcacatctaaatcacaacccaaacactggtgctattggtacaaaaygccygtggtacctttcggactatataccagaatcccactgaacaaagctttatttgtagcccaagccgcgtggcctatcaaacattaaacacagcatcttcctttttcccatttggaagaacgctttagctagcaatgagatgtgcacccatttcaaaatgta

SEQ ID NO: 69399 - DNA, 600 bp, Chicken  19866894341560_3
aggagccggtggctgttgctagcacaacgctgatgcaggaaacctcctcttatgcgcacagtagcagcaggagccttgcaagcatgacacagcacacagctgggagcaccacacagaaagcagggactcactgctgctgtaggggacagcagctcccacagacacrgcatgggtcacagcagttggtgcggttcacatgtgcgtacttctggtttcagagggatttctgggtgcagaaggacctgcaggtataacgatgcctcasactctgaaattcacgtggattatctgccaaattcragggctctcccttttgtgcrcacaagacaacaacccargcctggaactctctttaggcacatctaaatcacaacccaaacactggtgctattggtacaaaaygccygtggtacctttcggactatataccagaatcccactgaacaaagctttatttgtagcccaagccgcgtggcctatcaaacattaaacacagcatcttcctttttcccatttggaagaacgctttagctagcaatgagatgtgcacccatttcaaaatgtaaatatagcagggcaggaaaacaaaaaggagtgttt

SEQ ID NO: 69400 - DNA, 600 bp, Chicken  19866894341560_4
agcacaacgctgatgcaggaaacctcctcttatgcgcacagtagcagcaggagccttgcaagcatgacacagcacacagctgggagcaccacacagaaagcagggactcactgctgctgtaggggacagcagctcccacagacacrgcatgggtcacagcagttggtgcggttcacatgtgcgtacttctggtttcagagggatttctgggtgcagaaggacctgcaggtataacgatgcctcasactctgaaattcacgtggattatctgccaaattcragggctctcccttttgtgcrcacaagacaacaacccargcctggaactctctttaggcacatctaaatcacaacccaaacactggtgctattggtacaaaaygccygtggtacctttcggactatataccagaatcccactgaacaaagctttatttgtagcccaagccgcgtggcctatcaaacattaaacacagcatcttcctttttcccatttggaagaacgctttagctagcaatgagatgtgcacccatttcaaaatgtaaatatagcagggcaggaaaacaaaaaggagtgtttgactgctaatgaatcaccct

SEQ ID NO: 69401 - DNA, 600 bp, Chicken  19866894341560_5
gaaacctcctcttatgcgcacagtagcagcaggagccttgcaagcatgacacagcacacagctgggagcaccacacagaaagcagggactcactgctgctgtaggggacagcagctcccacagacacrgcatgggtcacagcagttggtgcggttcacatgtgcgtacttctggtttcagagggatttctgggtgcagaaggacctgcaggtataacgatgcctcasactctgaaattcacgtggattatctgccaaattcragggctctcccttttgtgcrcacaagacaacaacccargcctggaactctctttaggcacatctaaatcacaacccaaacactggtgctattggtacaaaaygccygtggtacctttcggactatataccagaatcccactgaacaaagctttatttgtagcccaagccgcgtggcctatcaaacattaaacacagcatcttcctttttcccatttggaagaacgctttagctagcaatgagatgtgcacccatttcaaaatgtaaatatagcagggcaggaaaacaaaaaggagtgtttgactgctaatgaatcacccttgtagaaagtttcctttg

SEQ ID NO: 69402 - DNA, 600 bp, Chicken  19866894341560_6
ggagcaccacacagaaagcagggactcactgctgctgtaggggacagcagctcccacagacacrgcatgggtcacagcagttggtgcggttcacatgtgcgtacttctggtttcagagggatttctgggtgcagaaggacctgcaggtataacgatgcctcasactctgaaattcacgtggattatctgccaaattcragggctctcccttttgtgcrcacaagacaacaacccargcctggaactctctttaggcacatctaaatcacaacccaaacactggtgctattggtacaaaaygccygtggtacctttcggactatataccagaatcccactgaacaaagctttatttgtagcccaagccgcgtggcctatcaaacattaaacacagcatcttcctttttcccatttggaagaacgctttagctagcaatgagatgtgcacccatttcaaaatgtaaatatagcagggcaggaaaacaaaaaggagtgtttgactgctaatgaatcacccttgtagaaagtttcctttggggcacgctgccatctgagtcactcagctctgcatgctttttaggtcagctttctcccggcttt

SEQ ID NO: 69403 - DNA, 600 bp, Chicken  19866894341560_7
caccacacagaaagcagggactcactgctgctgtaggggacagcagctcccacagacacrgcatgggtcacagcagttggtgcggttcacatgtgcgtacttctggtttcagagggatttctgggtgcagaaggacctgcaggtataacgatgcctcasactctgaaattcacgtggattatctgccaaattcragggctctcccttttgtgcrcacaagacaacaacccargcctggaactctctttaggcacatctaaatcacaacccaaacactggtgctattggtacaaaaygccygtggtacctttcggactatataccagaatcccactgaacaaagctttatttgtagcccaagccgcgtggcctatcaaacattaaacacagcatcttcctttttcccatttggaagaacgctttagctagcaatgagatgtgcacccatttcaaaatgtaaatatagcagggcaggaaaacaaaaaggagtgtttgactgctaatgaatcacccttgtagaaagtttcctttggggcacgctgccatctgagtcactcagctctgcatgctttttaggtcagctttctcccggctttattc

SEQ ID NO: 69404 - DNA, 600 bp, Chicken  19866894341561_1
ctccataggttatccagcacatttggtccttttcccattttctgtttcttaggcctagattacatcagggtaaattgtcctgagaaaggagaagtgggaagcagactgatattgtctcattttctgctttgtctcttgggcattggtccaataaactgccatggagacaggcaaataaagctgacttccccaagacagtctttaaggcagaagctgaagaactgaaatatccacagcagcagcttcacacggctctgtaattgattgtgacagccacacaaaagaaagctccttagtgawgtgagtgagaagagactgtatgattttgcatgaattggcaggcaaaaaagcatttcacagagtcctctcacatcragctctgcagctcccagaccatccaggaacacggggacaccgacctcctggtgtcctttggaccaagcatggggattctccacatcaacagcacttcagtcacagtcattatcttcccaaaactgggtgaaactttcctttaaaatcactggaatcaagcagtttgatggcacccaaagcatcaccataatcagttacaaccaacactagtggcacttcccatgg

SEQ ID NO: 69405 - DNA, 600 bp, Chicken  19866894341561_2
tgtcctgagaaaggagaagtgggaagcagactgatattgtctcattttctgctttgtctcttgggcattggtccaataaactgccatggagacaggcaaataaagctgacttccccaagacagtctttaaggcagaagctgaagaactgaaatatccacagcagcagcttcacacggctctgtaattgattgtgacagccacacaaaagaaagctccttagtgawgtgagtgagaagagactgtatgattttgcatgaattggcaggcaaaaaagcatttcacagagtcctctcacatcragctctgcagctcccagaccatccaggaacacggggacaccgacctcctggtgtcctttggaccaagcatggggattctccacatcaacagcacttcagtcacagtcattatcttcccaaaactgggtgaaactttcctttaaaatcactggaatcaagcagtttgatggcacccaaagcatcaccataatcagttacaaccaacactagtggcacttcccatggggattcctgatccccacagctttttgccaagatcatctgtgatgactgaacgtttctgacatccctacagtcagt

SEQ ID NO: 69406 - DNA, 599 bp, Chicken  19866894341564_1
  misc_feature (1)..(54): n is any nucleotide
nnnnnnnnnnnnnnnnnnnnnnnnnnnnnnnnnnnnnnnnnnnnnnnnnnnnnnccctaatatccatttgtaaacagatttcttttcacaaaatacagtaagaaccatttcatcaaaactgcagtgcctaaatctccactttctgaattgacgtatttatcaccagggcttctcttcctttttttcctagtaagcatattcccgttcttcactgcagtagagaaagcagcagtagcctaacagctgggtcttggcagcaaaaagtcagaaggcaacaaacagcaaaacgttcagttcackcttttctgtttccttcttcacagcactacacactccttgcagcccgacttgtgccacttgaggctggcagcaggtgccaggatggccacggttggacattgggaatagtaacccacctatattcatctctgttttgtytaaagttcatcttcatatctgtgtagggcctcaggaagtgtgtgaaatgtcccaggcactttcagcccagcaactctgctccagtttctcagtggattcctgcagtcacctctggattatgctcatggaaccattgtgcagaaaatgcttcagaagtcctg

SEQ ID NO: 69407 - DNA, 600 bp, Chicken  19866894341564_2
ctttctgaattgacgtatttatcaccagggcttctcttcctttttttcctagtaagcatattcccgttcttcactgcagtagagaaagcagcagtagcctaacagctgggtcttggcagcaaaaagtcagaaggcaacaaacagcaaaacgttcagttcackcttttctgtttccttcttcacagcactacacactccttgcagcccgacttgtgccacttgaggctggcagcaggtgccaggatggccacggttggacattgggaatagtaacccacctatattcatctctgttttgtytaaagttcatcttcatatctgtgtagggcctcaggaagtgtgtgaaatgtcccaggcactttcagcccagcaactctgctccagtttctcagtggattcctgcagtcacctctggattatgctcatggaaccattgtgcagaaaatgcttcagaagtcctgccttggggccatgtgtggctgggtaaatatcttgttctgtatgggggcatggctttctctcccttgtaaaagcatgcacacactgagcatgcactgcatgcagcagggcttcaccacagcaaatctgcccattgctcat

SEQ ID NO: 69408 - DNA, 600 bp, Chicken  19866894341564_3
ggctgggtaaatatcttgttctgtatgggggcatggctttctctcccttgtaaaagcatgcacacactgagcatgcactgcatgcagcagggcttcaccacagcaaatctgcccattgctcatccaggacaggctaagtgctctgtagaggtgagtcctctgtgaaagaggcagcaaaatgtcatttcctaagtaatgtgagagcttcctgggcagggcagcttctataaagctattacaataatgttagctttgtaatgtgaggtgtaatgaggcagaaagcagggcatgattctgaartgcagttctgagmcagaggttcagttcttggccttctgaaggttctctgcaagcacctkaactggctgaatgtgatggaagtgccagcacagtgacatcctcactgcacattgcactgagctggatcagcacacagcatgccaggggctggaagcatcccgtggcatttggttggtgctgtacaaagcattgccccagcacctcccaccataacagccttgtctagaataatagtggctggttggcctttggcatggtcacttacacctcaattaattgaatcccacatcctatcagagc

SEQ ID NO: 69409 - DNA, 600 bp, Chicken  19866894341564_4
tcttgttctgtatgggggcatggctttctctcccttgtaaaagcatgcacacactgagcatgcactgcatgcagcagggcttcaccacagcaaatctgcccattgctcatccaggacaggctaagtgctctgtagaggtgagtcctctgtgaaagaggcagcaaaatgtcatttcctaagtaatgtgagagcttcctgggcagggcagcttctataaagctattacaataatgttagctttgtaatgtgaggtgtaatgaggcagaaagcagggcatgattctgaartgcagttctgagmcagaggttcagttcttggccttctgaaggttctctgcaagcacctkaactggctgaatgtgatggaagtgccagcacagtgacatcctcactgcacattgcactgagctggatcagcacacagcatgccaggggctggaagcatcccgtggcatttggttggtgctgtacaaagcattgccccagcacctcccaccataacagccttgtctagaataatagtggctggttggcctttggcatggtcacttacacctcaattaattgaatcccacatcctatcagagcaagaaaacagagc

SEQ ID NO: 69410 - DNA, 600 bp, Chicken  19866894341564_5
gcacacactgagcatgcactgcatgcagcagggcttcaccacagcaaatctgcccattgctcatccaggacaggctaagtgctctgtagaggtgagtcctctgtgaaagaggcagcaaaatgtcatttcctaagtaatgtgagagcttcctgggcagggcagcttctataaagctattacaataatgttagctttgtaatgtgaggtgtaatgaggcagaaagcagggcatgattctgaartgcagttctgagmcagaggttcagttcttggccttctgaaggttctctgcaagcacctkaactggctgaatgtgatggaagtgccagcacagtgacatcctcactgcacattgcactgagctggatcagcacacagcatgccaggggctggaagcatcccgtggcatttggttggtgctgtacaaagcattgccccagcacctcccaccataacagccttgtctagaataatagtggctggttggcctttggcatggtcacttacacctcaattaattgaatcccacatcctatcagagcaagaaaacagagcagcagggcctgttcagacaagtagaccaccagggctagatggtatt

SEQ ID NO: 69411 - DNA, 600 bp, Chicken  19866894341564_6
ccacatcctatcagagcaagaaaacagagcagcagggcctgttcagacaagtagaccaccagggctagatggtatttctcttgaatattttgaatcaatttatcatgaataatagctgtagctaacattaaaaataagtcaatgaaacgtttctgccatcatatgatttagaaaagaaatagtcttaactgtaagttcctcaggagaatctcaagagcccactttcctgccatgggggtttacaaaggcagctaaaccccagtgaaagcctcctagggctgaattctggtgtccagccaygtgggaggaagcagcatctttgattttgtaaggacatgggcattgcccacttgagatctcaagttagcaccttgccttctgacccttaaacaatcacctgcttgcctgcagccaagctcaggacttcatgccctgaggttggagcacaggctgggagctgctgggagctcagagccacacagcttaagggagtgaagggagggcatgctgggcagctcagcgtgccctgaaggtgggcagtcgggcggccgaaccctgcacccagcacacgtgagtgcatggaaaatgacgaacgtgggt

SEQ ID NO: 69412 - DNA, 600 bp, Chicken  19866894341565_1
gacctccttatcgtgctgtgaatattacatgtcagcttctacgtgtatcttaatatggtgttaatcacctctgttccttgtttccttgtagcacaaacatatttttcttttctttctcctagggtagtgtacaatgaagtcatacagactgccaagtactacatgagagatgtgactgccattgaatctgcatggctcgtggaactggcacctcatttttaccagcaaggaacggtacggaatcggcataaagcccaaacggtaccactgctgtattaacagctttgtatctgaattgtycagggattttttttctttgttattgtttccatctatttaatagtggaaaaaattagttttttttttcattttaggggttttaatgtaaagaaagaaaacagtaaattgatgcatgaaagctttttgtcatattatccaaccaagagacatgattgagaaactgtagaacagtccctccaaaagatgaaatcttgacctactctacacttaaatataggtgtttggtgtttcttctgcgagcatcagtgtgactgacagtggtcatactttgcacaatcattyacaaaagtctttgtatcc

SEQ ID NO: 69413 - DNA, 600 bp, Chicken  19866894341565_2
ctttgtatctgaattgtycagggattttttttctttgttattgtttccatctatttaatagtggaaaaaattagttttttttttcattttaggggttttaatgtaaagaaagaaaacagtaaattgatgcatgaaagctttttgtcatattatccaaccaagagacatgattgagaaactgtagaacagtccctccaaaagatgaaatcttgacctactctacacttaaatataggtgtttggtgtttcttctgcgagcatcagtgtgactgacagtggtcatactttgcacaatcattyacaaaagtctttgtatcctttgcaaatgtttgtgcaaatcccaaaccctttgtttttgattatctactacaaaaagtcacctgatctgttaaaaacatgaaatgtaagggacagctgctgtttctacaaactttattgcaaattctgttgtgtagtatacatacttagaggaagaagaaagagaagtctataaatacctgaagggaggatgcaaagaggactgagtcaggctcttttcagttgtgcccagtggcaggatgagaggcagtgagcacaaactggatcacaagaagttccatc

SEQ ID NO: 69414 - DNA, 599 bp, Chicken  19866894341566_1
  misc_feature (1)..(161): n is any nucleotide
nnnnnnnnnnnnnnnnnnnnnnnnnnnnnnnnnnnnnnnnnnnnnnnnnnnnnnnnnnnnnnnnnnnnnnnnnnnnnnnnnnnnnnnnnnnnnnnnnnnnnnnnnnnnnnnnnnnnnnnnnnnnnnnnnnnnnnnnnnnnnnnnnnnnnnnnnnnnnnnnnggccatggaagggatccctgagatgggataatatgctgaacctcagctgtgagccgggcaattgcttaagcaaaaataaccattggaaatgggtcagcaaggcaaggtatggctccagaaggctatttctaggatgggyttgtgcttgggatattttcagagcagcagtttactcaggagcaggtgaaggccatcaggtgggggcactgatagcttatccttagcacctgggagagccattccctaaaatgagatttcaaccttgctgtagcctcactcaactcgatgggaacctctgagatcaagtaaggactttccttttttaataaatacgggagtatagggtcactcccacatgcagtataaagtaataaagggcttttatgtgggaatcttgctgtcctctgaagagctgtaaagatcaaaggcttaaagcag

SEQ ID NO: 69415 - DNA, 600 bp, Chicken  19866894341566_2
gatattttcagagcagcagtttactcaggagcaggtgaaggccatcaggtgggggcactgatagcttatccttagcacctgggagagccattccctaaaatgagatttcaaccttgctgtagcctcactcaactcgatgggaacctctgagatcaagtaaggactttccttttttaataaatacgggagtatagggtcactcccacatgcagtataaagtaataaagggcttttatgtgggaatcttgctgtcctctgaagagctgtaaagatcaaaggcttaaagcagtgtctaattgyaggtgaggttagcactgtgaaacaattagcctatgtgtacatgtgtgaaaatagagagagggtgcattgctagcaaactaagtgtctgctagacaactagccaygagcttaagggtggttagctgttccctgctgagttatgaattgtcaaagtgacyggtttgagcctacaaaagcttatgccccactgcttcctgtcttcttcctagactcttagccaaaatatgtgcccaaagatcaagcacaggacttaaacagtagggagaaaatcctaggagcaaatgggcatggsatgctggg

SEQ ID NO: 69416 - DNA, 600 bp, Chicken  19866894341566_3
atttcaaccttgctgtagcctcactcaactcgatgggaacctctgagatcaagtaaggactttccttttttaataaatacgggagtatagggtcactcccacatgcagtataaagtaataaagggcttttatgtgggaatcttgctgtcctctgaagagctgtaaagatcaaaggcttaaagcagtgtctaattgyaggtgaggttagcactgtgaaacaattagcctatgtgtacatgtgtgaaaatagagagagggtgcattgctagcaaactaagtgtctgctagacaactagccaygagcttaagggtggttagctgttccctgctgagttatgaattgtcaaagtgacyggtttgagcctacaaaagcttatgccccactgcttcctgtcttcttcctagactcttagccaaaatatgtgcccaaagatcaagcacaggacttaaacagtagggagaaaatcctaggagcaaatgggcatggsatgctgggggaggaactgtgttctttggtccgtgagagctgttaatgtagcacagaggaaaagtaagtttgaaagtataatttgggggtcttgaagactttgtctcaagcct

SEQ ID NO: 69417 - DNA, 600 bp, Chicken  19866894341566_4
aaggactttccttttttaataaatacgggagtatagggtcactcccacatgcagtataaagtaataaagggcttttatgtgggaatcttgctgtcctctgaagagctgtaaagatcaaaggcttaaagcagtgtctaattgyaggtgaggttagcactgtgaaacaattagcctatgtgtacatgtgtgaaaatagagagagggtgcattgctagcaaactaagtgtctgctagacaactagccaygagcttaagggtggttagctgttccctgctgagttatgaattgtcaaagtgacyggtttgagcctacaaaagcttatgccccactgcttcctgtcttcttcctagactcttagccaaaatatgtgcccaaagatcaagcacaggacttaaacagtagggagaaaatcctaggagcaaatgggcatggsatgctgggggaggaactgtgttctttggtccgtgagagctgttaatgtagcacagaggaaaagtaagtttgaaagtataatttgggggtcttgaagactttgtctcaagcctttatgggatcgttcagtgatttgaaggaaaacagtaaaatactgccataatttg

SEQ ID NO: 69418 - DNA, 600 bp, Chicken  19866894341566_5
ctaattgyaggtgaggttagcactgtgaaacaattagcctatgtgtacatgtgtgaaaatagagagagggtgcattgctagcaaactaagtgtctgctagacaactagccaygagcttaagggtggttagctgttccctgctgagttatgaattgtcaaagtgacyggtttgagcctacaaaagcttatgccccactgcttcctgtcttcttcctagactcttagccaaaatatgtgcccaaagatcaagcacaggacttaaacagtagggagaaaatcctaggagcaaatgggcatggsatgctgggggaggaactgtgttctttggtccgtgagagctgttaatgtagcacagaggaaaagtaagtttgaaagtataatttgggggtcttgaagactttgtctcaagcctttatgggatcgttcagtgatttgaaggaaaacagtaaaatactgccataatttgaaactgtctagactgcaaaaacaggatgagaacaggcagttttccacaaagctgaaggcccctaaggaggtctctgcattgggcagtcaaccccagtttgtttattggtgctgtggaaactgtgatgaattgga

SEQ ID NO: 69419 - DNA, 600 bp, Chicken  19866894341570_1
gcctcccactacaaccctactcacgtagacggtgaagtccttcggggcactggggatagttccctggggtgacagtgctttggggacgtgttccagtgtcacggctgtggggcggatgaggctggacaggcggatgacagcaaagccctgggagccacggaaggcccagcagttcccggggttgacgtctggctacgcgcacagaaaaggaatgccagctcttaggtagcagcagcaacattatcaccatcagcaccgttttttcctcccgtcaatgccagcccaaccactgcgcccagscgtgagctctgcatcagcccggggaactcaacccactctcagtgcccacctgcaggatgacacgtggagactgcgagtggtaccacagagggatcccraacaggctcagcagtgctgtctttgtctcataggtttcagagcagcgggtgttgatgacgctggcccctggcacagggagaggagcacaagggtaaagcagagtgccagcactccctggctttcacccccagctcacccccctgccacctacctgctgactccagggcgtagtcraccatccctacccggtcctcactgtag

SEQ ID NO: 69420 - DNA, 600 bp, Chicken  19866894341570_2
tcacggctgtggggcggatgaggctggacaggcggatgacagcaaagccctgggagccacggaaggcccagcagttcccggggttgacgtctggctacgcgcacagaaaaggaatgccagctcttaggtagcagcagcaacattatcaccatcagcaccgttttttcctcccgtcaatgccagcccaaccactgcgcccagccgtgagctctgcatcagcccggggaactcaacccactctcagtgcccacctgcaggatgacacgtggagactgcgagtggtaccacagagggatcccraacaggctcagcagtgctgtctttgtctcataggtttcagagcagcgggtgttgatgacgctggcccctggcacagggagaggagcacaagggtaaagcagagtgccagcactccctggctttcacccccagctcacccccctgccacctacctgctgactccagggcgtagtcraccatccctacccggtcctcactgtagcgtttcaatgcttggtccacgatgaggtgcacttgctgtgggggtcaagaggggcccgatcacagccatggggtcctgtcmccgcctccagcccacgg

SEQ ID NO: 69421 - DNA, 600 bp, Chicken  19866894341570_3
aatgccagcccaaccactgcgcccagccgtgagctctgcatcagcccggggaactcaacccactctcagtgcccacctgcaggatgacacgtggagactgcgagtggtaccacagagggatcccraacaggctcagcagtgctgtctttgtctcataggtttcagagcagcgggtgttgatgacgctggcccctggcacagggagaggagcacaagggtaaagcagagtgccagcactccctggctttcacccccagctcacccccctgccacctacctgctgactccagggcgtagtcraccatccctacccggtcctcactgtagcgtttcaatgcttggtccacgatgaggtgcacttgctgtgggggtcaagaggggcccgatcacagccatggggtcctgtcmccgcctccagcccacggggtcagggcccttctcacgggacaggcagtgatgaatcactgcggcaaaaaggagcaggcgtgcgctcggctgcaaagcctcattagaggctgctaaaaatacccgggacaagaagtgctgtgcaaggaaggggcagtgcctgggctggctcggctcacccttcccactgctgat

SEQ ID NO: 69422 - DNA, 600 bp, Chicken  19866894341570_4
accacagagggatcccraacaggctcagcagtgctgtctttgtctcataggtttcagagcagcgggtgttgatgacgctggcccctggcacagggagaggagcacaagggtaaagcagagtgccagcactccctggctttcacccccagctcacccccctgccacctacctgctgactccagggcgtagtcraccatccctacccggtcctcactgtagcgtttcaatgcttggtccacgatgaggtgcacttgctgtgggggtcaagaggggcccgatcacagccatggggtcctgtcmccgcctccagcccacggggtcagggcccttctcacgggacaggcagtgatgaatcactgcggcaaaaaggagcaggcgtgcgctcggctgcaaagcctcattagaggctgctaaaaatacccgggacaagaagtgctgtgcaaggaaggggcagtgcctgggctggctcggctcacccttcccactgctgatggatgaggagggggrcatggaccaggcccgaggccacacrgtgcccccagagctgatcctaaaggctcagtgtcccagtgtcaccacgtgcacagagcccgtacaggg

SEQ ID NO: 69423 - DNA, 600 bp, Chicken  19866894341570_5
tcctcactgtagcgtttcaatgcttggtccacgatgaggtgcacttgctgtgggggtcaagaggggcccgatcacagccatggggtcctgtcmccgcctccagcccacggggtcagggcccttctcacgggacaggcagtgatgaatcactgcggcaaaaaggagcaggcgtgcgctcggctgcaaagcctcattagaggctgctaaaaatacccgggacaagaagtgctgtgcaaggaaggggcagtgcctgggctggctcggctcacccttcccactgctgatggatgaggagggggrcatggaccaggcccgaggccacacrgtgcccccagagctgatcctaaaggctcagtgtcccagtgtcaccacgtgcacagagcccgtacagggtgaggggatcgcctccctccctccgcagggagctgccaacaaatatttccaaagcaaacaggctcattttttcctcygctgtcatccctgctgtaacattctgccccaaatgactcagcagcgctgctggggacagggcaaacaaggtggccctggttgtttgcaagctccatggaatccccccccatgtccccagggctcggccac

SEQ ID NO: 69424 - DNA, 600 bp, Chicken  19866894341570_6
ggtccacgatgaggtgcacttgctgtgggggtcaagaggggcccgatcacagccatggggtcctgtcmccgcctccagcccacggggtcagggcccttctcacgggacaggcagtgatgaatcactgcggcaaaaaggagcaggcgtgcgctcggctgcaaagcctcattagaggctgctaaaaatacccgggacaagaagtgctgtgcaaggaaggggcagtgcctgggctggctcggctcacccttcccactgctgatggatgaggagggggrcatggaccaggcccgaggccacacrgtgcccccagagctgatcctaaaggctcagtgtcccagtgtcaccacgtgcacagagcccgtacagggtgaggggatcgcctccctccctccgcagggagctgccaacaaatatttccaaagcaaacaggctcattttttcctcygctgtcatccctgctgtaacattctgccccaaatgactcagcagcgctgctggggacagggcaaacaaggtggccctggttgtttgcaagctccatggaatccccccccatgtccccagggctcggccaccactcacctcttctgtcacccctcc

SEQ ID NO: 69425 - DNA, 600 bp, Chicken  19866894341570_7
gtgcgctcggctgcaaagcctcattagaggctgctaaaaatacccgggacaagaagtgctgtgcaaggaaggggcagtgcctgggctggctcggctcacccttcccactgctgatggatgaggagggggrcatggaccaggcccgaggccacacrgtgcccccagagctgatcctaaaggctcagtgtcccagtgtcaccacgtgcacagagcccgtacagggtgaggggatcgcctccctccctccgcagggagctgccaacaaatatttccaaagcaaacaggctcattttttcctcygctgtcatccctgctgtaacattctgccccaaatgactcagcagcgctgctggggacagggcaaacaaggtggccctggttgtttgcaagctccatggaatccccccccatgtccccagggctcggccaccactcacctcttctgtcacccctccagctcccccctgccgcagggccacaccaatgctgtcccgtgctgccagcccacgctcctcccgcatttgggcaaggatccggagctccagggcacgcagctccgcctgtaagtcctcccgctggaggagcagtccagccgtgccg

SEQ ID NO: 69426 - DNA, 600 bp, Chicken  19866894341573_1
tatgacatctaggctgtaaatctgtaggatactcagtgaacaggtctttcctatactttgtagtaccctcttctagacaacagagcagaaatacattgggcagcctgatctagtcactgatttaatggttggcaactctgcccatagtaagggattggaactacatgatctttgaggtcccctccaacacaagccattccatgattctatgacatatgagaaaaaagaccagttctgccctttatcccatatgctactgacttcccagtttcctatgaggatttatgacccagagtgaargagtggaggcataatcttttatatgaatttcattaaaatctctacattcatttccaggtttttacagcttctgatgcttgtttgggaatattttcaaatgttcaggtgrtttaggagcagatttgatgtgatacaagtcctttatgtcataaatgttatctcagatcagcaaacctcatataaataaaacgttttgtctaattcccccaaaaggttttccagaactgcacacttctaaaagattgtcagacagtcaaatggcaagttgccctttgtgtctgtttgtctttctctcataaa

SEQ ID NO: 69427 - DNA, 600 bp, Chicken  19866894341573_2
ctagtcactgatttaatggttggcaactctgcccatagtaagggattggaactacatgatctttgaggtcccctccaacacaagccattccatgattctatgacatatgagaaaaaagaccagttctgccctttatcccatatgctactgacttcccagtttcctatgaggatttatgacccagagtgaargagtggaggcataatcttttatatgaatttcattaaaatctctacattcatttccaggtttttacagcttctgatgcttgtttgggaatattttcaaatgttcaggtgrtttaggagcagatttgatgtgatacaagtcctttatgtcataaatgttatctcagatcagcaaacctcatataaataaaacgttttgtctaattcccccaaaaggttttccagaactgcacacttctaaaagattgtcagacagtcaaatggcaagttgccctttgtgtctgtttgtctttctctcataaagaactcaaccaattttgctatgatttttttttcctcttcactagaggatgagggaataaaggtaaagtacatatgccactgccttttctctctgagctcaggttaaaat

SEQ ID NO: 69428 - DNA, 599 bp, Chicken  19866894341576_1
  misc_feature (1)..(107): n is any nucleotide
nnnnnnnnnnnnnnnnnnnnnnnnnnnnnnnnnnnnnnnnnnnnnnnnnnnnnnnnnnnnnnnnnnnnnnnnnnnnnnnnnnnnnnnnnnnnnnnnnnnnnnnnnnnactacgtaacaatttctacaaagcatttacagagaccacatctctgggtaacatacagaaggatctccttctttgtgttttctaagctcattttataaagaagtctgcaatcttgcttaaactgttttttaataaatctgccttttattaatctcagcactttgtcttccaggattattttcaaataagtgayccayaccacatctgtttttctacaaggcaagtaaatcctgcacagggtagactagcttacatttaaagtggctctcaaaccagcaggacagaatcctctatagttaaagcatgccacttgcactgtaactgaaaggacttcctgagtcaatttcctatcatgatggagactaaaacctgtttctgtgggagtgaggcatgctaatgcctctgacgattttgtcctccgatgtctgtctgtaaaacttacactcttggtcatggaggaaggagagggcacaggggcaagcacgttatgtg

SEQ ID NO: 69429 - DNA, 599 bp, Chicken  19866894341576_2
  misc_feature (1)..(103): n is any nucleotide
nnnnnnnnnnnnnnnnnnnnnnnnnnnnnnnnnnnnnnnnnnnnnnnnnnnnnnnnnnnnnnnnnnnnnnnnnnnnnnnnnnnnnnnnnnnnnnnnnnnnnnnactacgtaacaatttctacaaagcatttacagagaccacatctctgggtaacatacagaaggatctccttctttgtgttttctaagctcattttataaagaagtctgcaatcttgcttaaactgttttttaataaatctgccttttattaatctcagcactttgtcttccaggattattttcaaataagtgayccayaccacatctgtttttctacaaggcaagtaaatcctgcacagggtagactagcttacatttaaagtggctctcaaaccagcaggacagaatcctctatagttaaagcatgccacttgcactgtaactgaaaggacttcctgagtcaatttcctatcatgatggagactaaaacctgtttctgtgggagtgaggcatgctaatgcctctgacgattttgtcctccgatgtctgtctgtaaaacttacactcttggtcatggaggaaggagagggcacaggggcaagcacgttatgtgaaca

SEQ ID NO: 69430 - DNA, 600 bp, Chicken  19866894341579_1
tgtgtggagtcaatcctcaaatgtgcttcgtgcaggaaaaaatgcatcctggtgctgcccgcagctcccgcagggagctcagtgctggccctgccaccgacaccaccaattcctactgctgccattagtggcatctttaggaagcagagtcgtctggaagttctcctgccctgggggcctctggagctgctccaggttggtgcccacccctcagactcacagccccacactcagctcccagcgggcagtgaaggagcctcaggtgtcaacttgtgtgtgctgcaacagttctgagctggraacgtggaaacaaagggctgcattgtgytgtgtccatccccaaacatatccctaacagctttcctttycccagccccagttcctgtgctaagaccaaaggctccattagggaaaaagaggggaaaaaatagttctggcaaggagcagagcagatgcatgacacgtagttttgcttaaaaacatgttgggtggtggagatttctgctctgcagcagagtggctggagccatacaaacactgcagcagggagcacccaggcctcctggctgcagctctgagctcaccagtccctgcacrggg

SEQ ID NO: 69431 - DNA, 600 bp, Chicken  19866894341579_2
cgtgcaggaaaaaatgcatcctggtgctgcccgcagctcccgcagggagctcagtgctggccctgccaccgacaccaccaattcctactgctgccattagtggcatctttaggaagcagagtcgtctggaagttctcctgccctgggggcctctggagctgctccaggttggtgcccacccctcagactcacagccccacactcagctcccagcgggcagtgaaggagcctcaggtgtcaacttgtgtgtgctgcaacagttctgagctggraacgtggaaacaaagggctgcattgtgytgtgtccatccccaaacatatccctaacagctttcctttycccagccccagttcctgtgctaagaccaaaggctccattagggaaaaagaggggaaaaaatagttctggcaaggagcagagcagatgcatgacacgtagttttgcttaaaaacatgttgggtggtggagatttctgctctgcagcagagtggctggagccatacaaacactgcagcagggagcacccaggcctcctggctgcagctctgagctcaccagtccctgcacrggggcacttacagctcagctcccactcctgt

SEQ ID NO: 69432 - DNA, 600 bp, Chicken  19866894341579_3
cgcagggagctcagtgctggccctgccaccgacaccaccaattcctactgctgccattagtggcatctttaggaagcagagtcgtctggaagttctcctgccctgggggcctctggagctgctccaggttggtgcccacccctcagactcacagccccacactcagctcccagcgggcagtgaaggagcctcaggtgtcaacttgtgtgtgctgcaacagttctgagctggraacgtggaaacaaagggctgcattgtgytgtgtccatccccaaacatatccctaacagctttcctttycccagccccagttcctgtgctaagaccaaaggctccattagggaaaaagaggggaaaaaatagttctggcaaggagcagagcagatgcatgacacgtagttttgcttaaaaacatgttgggtggtggagatttctgctctgcagcagagtggctggagccatacaaacactgcagcagggagcacccaggcctcctggctgcagctctgagctcaccagtccctgcacrggggcacttacagctcagctcccactcctgtgtccccaagcatctcagatctgggtgtgtttctctctgtt

SEQ ID NO: 69433 - DNA, 600 bp, Chicken  19866894341579_4
ggraacgtggaaacaaagggctgcattgtgytgtgtccatccccaaacatatccctaacagctttcctttycccagccccagttcctgtgctaagaccaaaggctccattagggaaaaagaggggaaaaaatagttctggcaaggagcagagcagatgcatgacacgtagttttgcttaaaaacatgttgggtggtggagatttctgctctgcagcagagtggctggagccatacaaacactgcagcagggagcacccaggcctcctggctgcagctctgagctcaccagtccctgcacrggggcacttacagctcagctcccactcctgtgtccccaagcatctcagatctgggtgtgtttctctctgttttcccaaacggtccaatctgtcagcaggctgaaagctgaagcctggcatcgtttccatctccagtttcaccacctcgatctgcgctgccccagcttttccttcctctgaacccgaaagctgagagcagcggtgaccccatagcactgtcctcagcctttcccctttctttgggcctgacccaaccccatgtgatggggagcagccatccgggggctccttggagctgag

SEQ ID NO: 69434 - DNA, 600 bp, Chicken  19866894341587_1
tatgttatttggtagtaagacaaaggaaagacaggaagtcactgcatcattactgatgctgatgcatctttgtttcatgtgtacatttactacctagatcttcaagctgttatcagctgcagagaagatgagaacatgttgtcagtttgctggtataattataaatgagctgacacttgaaaaactagatttgccacagactagttatcaatgaattatttattctattaaaaatgtggtattcactgttaatgaatagagacagaatgcagatcatattaaaggggggggacaaacttrctgcagtattctatgtattctccgatatcttatgaactttctctttacattccatgtatcagttcagattggtctgcaccaaattacaayaggactttggtaagaaccaaatagagtggtatttggataccaatatgtaggacatgatctactgcccacctagagagtttactggcttctttacaacatctagtgaggacttytgtctgttcacctacagcataaacactagtcaattcctggaatttaataggactaccaaaatctccaaactacttttatcattggacaagatccgat

SEQ ID NO: 69435 - DNA, 600 bp, Chicken  19866894341587_2
tacctagatcttcaagctgttatcagctgcagagaagatgagaacatgttgtcagtttgctggtataattataaatgagctgacacttgaaaaactagatttgccacagactagttatcaatgaattatttattctattaaaaatgtggtattcactgttaatgaatagagacagaatgcagatcatattaaaggggggggacaaacttrctgcagtattctatgtattctccgatatcttatgaactttctctttacattccatgtatcagttcagattggtctgcaccaaattacaayaggactttggtaagaaccaaatagagtggtatttggataccaatatgtaggacatgatctactgcccacctagagagtttactggcttctttacaacatctagtgaggacttytgtctgttcacctacagcataaacactagtcaattcctggaatttaataggactaccaaaatctccaaactacttttatcattggacaagatccgatgaaatatgtaacaaggtaacatgctgagaacactgatgatcttgatcttagcaattgtagagacataaaacactgacaagtttaaactca

SEQ ID NO: 69436 - DNA, 600 bp, Chicken  19866894341587_3
gttatcaatgaattatttattctattaaaaatgtggtattcactgttaatgaatagagacagaatgcagatcatattaaaggggggggacaaacttrctgcagtattctatgtattctccgatatcttatgaactttctctttacattccatgtatcagttcagattggtctgcaccaaattacaayaggactttggtaagaaccaaatagagtggtatttggataccaatatgtaggacatgatctactgcccacctagagagtttactggcttctttacaacatctagtgaggacttytgtctgttcacctacagcataaacactagtcaattcctggaatttaataggactaccaaaatctccaaactacttttatcattggacaagatccgatgaaatatgtaacaaggtaacatgctgagaacactgatgatcttgatcttagcaattgtagagacataaaacactgacaagtttaaactcacagatcagatgttagagtagtctaataaaagctccaggacaaggtatcagactgtttgttttctgacatacatcatctcaatataattgcaattccatgacagctctattttt

SEQ ID NO: 69437 - DNA, 600 bp, Chicken  19866894341602_1
tggcttgctgctgctgttcatgcttctgttacttcaagaccatgctaagccaatgccatccctagaggctagtgccttgaaatcattactgcagagcacatctgctctcttcacaaatgggaaatcatgccaaaacatgggatgagatttgtccaggagctgtaaactgacttcccacgggaaccctgaaggttactaaagatgaaagtggccttcctgacctccctcagttgcctccctgtgccagactgcaacatccacagccagcagagacacctcatttggatgctcctcattagyaaaaaacagtggtgttgtactgtgttttgaaaagtacacagtgtttctggaattttttgatttcttggtccaagaaccatttrgcatgtgtttgaagaggctgatctcttccactggagttgtgaaaaggttcctttgttcaggagctgctgacacagtcagtaggtaagagtggcataacgaatgaggtgttaggggttgtgtgtggcacattccagtgtcttggataaaacatttcaagtattattcacatctaaataaatacttgtgaataaacaagatttcagagggtgcctatcc

SEQ ID NO: 69438 - DNA, 600 bp, Chicken  19866894341602_2
cattactgcagagcacatctgctctcttcacaaatgggaaatcatgccaaaacatgggatgagatttgtccaggagctgtaaactgacttcccacgggaaccctgaaggttactaaagatgaaagtggccttcctgacctccctcagttgcctccctgtgccagactgcaacatccacagccagcagagacacctcatttggatgctcctcattagaaaaaaacagtggtgttgtactgtgttttgaaaagtacacagtgtttctggaattttttgatttcttggtccaagaaccatttrgcatgtgtttgaagaggctgatctcttccactggagttgtgaaaaggttcctttgttcaggagctgctgacacagtcagtaggtaagagtggcataacgaatgaggtgttaggggttgtgtgtggcacattccagtgtcttggataaaacatttcaagtattattcacatctaaataaatacttgtgaataaacaagatttcagagggtgcctatccaaggtgtgaatgaaccctggtccatttgtgtgcggggctttataactagcaaaggctttaggactgccaatgctgcctgttta

SEQ ID NO: 69439 - DNA, 600 bp, Chicken  19866894341602_3
tcttccactggagttgtgaaaaggttcctttgttcaggagctgctgacacagtcagtaggtaagagtggcataacgaatgaggtgttaggggttgtgtgtggcacattccagtgtcttggataaaacatttcaagtattattcacatctaaataaatacttgtgaataaacaagatttcagagggtgcctatccaaggtgtgaatgaaccctggtccatttgtgtgcggggctttataactagcaaaggctttaggactgccaatgctgcctgtttaagattttgtgttgaaaggatacratacagtctcagtccttatagttcaagggttgcatttcccaagcagaacactttacccacagaaagacaacctacaggcttctcagaaatgccatttcagtgaaagttttctgacccttttcctgaaagtttatatatctgagtgcaacaacactgtctacacttatcaatacttgatgagtggatttaaagaatgttttttgtttcctgtcgtaaaggagagcactgtgaataaacactgtgaataaacaggcagtggtaaaactgtgttaaaacagcactcaaagtaatatatggact

SEQ ID NO: 69440 - DNA, 599 bp, Chicken  19866894341605_1
  misc_feature (1)..(9): n is any nucleotide
nnnnnnnnnaatgttctttggtttgaaatctacctagcttttattgacacctgcactgcaggttcagtgactgtcgcgtgcatcagaaacaatttgattcaccttgcttctcctgtttcatcaccagcacctgctgcaccgattaggggctccatgatgtacagaagaagaatttttgagtatggtgtagactggtgacttccgtccagcgagaaattgaagtgctctatcacgtaaaataagtaaaacgtgaagtaaagaaaaatatcctcaaatgagttaagaactttgtaacttacyctgctgcagacaagctggacttctgagggaggttgtacagacatttttcagagaataaatgtctttgattctgtttttactggaggaaaattaaaaatgcaaacaaagcaagagggatgtgggattatctgtgcagctttgaagtggcagttggagtgaatccattcttatgatccaacatattcaaaacaataaagataaaagtgatgctttacatggaacatcatctgtgcctatagcatatgtaaagactttgccttgaataagttttgcacatttccatggtgaattaaaccctt

SEQ ID NO: 69441 - DNA, 600 bp, Chicken  19866894341607_1
ttatttttgctttaacctgagttaatgctggttactgtagcgtaaggtaatataattaaattctatcagattgtttaagaaatgccagtgtgttaacaatctaagcataagttactgctagggcttctgcaacatcaactgacctttcaaaaattccattttatgtagtgctaaggaaagcccttgagtagaaatatggtgcatcaagatactgctaggaagattaattaccacgcagcacacatatgttaactgcaggcattaactaatagaaaaaaaaattagttattttaatatttwaaaagcattctatcttcacatattttaagttttttttaatgatgatgaattctacgaacgtcttgtaatgaatcagcactagctgaacgcagccagttcctgsttttagacagctgtgtatttgaagcagagatatcccttcttgatgtgatcagagaagataattagcagtaacaaaagtactcaaatgaagactcacaaggaatctttgagaagtgaagatatgttcacatatctgaatgcttatcataagtctgtctacacatgcaattgcctgatgtaatgctactgtcccattgg

SEQ ID NO: 69442 - DNA, 600 bp, Chicken  19866894341607_2
agcataagttactgctagggcttctgcaacatcaactgacctttcaaaaattccattttatgtagtgctaaggaaagcccttgagtagaaatatggtgcatcaagatactgctaggaagattaattaccacgcagcacacatatgttaactgcaggcattaactaatagaaaaaaaaattagttattttaatatttwaaaagcattctatcttcacatattttaagttttttttaatgatgatgaattctacgaacgtcttgtaatgaatcagcactagctgaacgcagccagttcctgsttttagacagctgtgtatttgaagcagagatatcccttcttgatgtgatcagagaagataattagcagtaacaaaagtactcaaatgaagactcacaaggaatctttgagaagtgaagatatgttcacatatctgaatgcttatcataagtctgtctacacatgcaattgcctgatgtaatgctactgtcccattggcttcaatgcttaggcagcaactagtacctctgaatattgtttccctcagaggaaaaactcagaagtacatgccagctatctactaaatagacattcctttttg

SEQ ID NO: 69443 - DNA, 599 bp, Chicken  19866894341617_1
  misc_feature (1)..(192): n is any nucleotide
nnnnnnnnnnnnnnnnnnnnnnnnnnnnnnnnnnnnnnnnnnnnnnnnnnnnnnnnnnnnnnnnnnnnnnnnnnnnnnnnnnnnnnnnnnnnnnnnnnnnnnnnnnnnnnnnnnnnnnnnnnnnnnnnnnnnnnnnnnnnnnnnnnnnnnnnnnnnnnnnnnnnnnnnnnnnnnnnnnnnnnnnnnnnnnnnttctgcttttaacattttccttttttttgttactaggcaaccaaagcaaactgtttcactctaagagagcagctcaccagaaataaaagcttttgctctgatactacracaagcaatatacaaatggacattttaaaaatgaagaaaatattaatttgctagtattgtacacaatgaaatagttatatctaagacgtttagctagtctcaaaattgaggcctccagtttacatcttctgggtcattgccaaagtatcagctggttttaaggggagcagactaaagctagctgtaaactctcttggaaaaattcaggcatctaaaacagttatgtcataacaaataggtgaaaacaaaagccactcatcatcctcaggaatgagctaattatattcaagacaatggta

SEQ ID NO: 69444 - DNA, 554 bp, Chicken  19866894341617_2
tccagtttacatcttctgggtcattgccaaagtatcagctggttttaaggggagcagactaaagctagctgtaaactctcttggaaaaattcaggcatctaaaacagttatgtcataacaaataggtgaaaacaaaagccactcatcatcctcaggaatgagctaattatattcaagacaatggtaatattacttattaacacactgagtgcttgctagcattatgtcattgagttctgactggttctgatagaagagtgtctaataactgtcttttcagatggtaagtcataaaaattrsaatgaaagagaaaagcatatgtatgcagaaaagttttaggagaaaacattaaaatataaaatgaatgtgagacagaaaaagcagtttgagtttcacggcaaaatgagggaacatttagatactgtactggaatgaacgttgcagattgcctaagatttagttgtaatactgcagcaggcctgtaaaacaatgcatcaggctagttattttacacctaggatatacatcatggatgccgttcactcagccttca

SEQ ID NO: 69445 - DNA, 553 bp, Chicken  19866894341617_3
ccagtttacatcttctgggtcattgccaaagtatcagctggttttaaggggagcagactaaagctagctgtaaactctcttggaaaaattcaggcatctaaaacagttatgtcataacaaataggtgaaaacaaaagccactcatcatcctcaggaatgagctaattatattcaagacaatggtaatattacttattaacacactgagtgcttgctagcattatgtcattgagttctgactggttctgatagaagagtgtctaataactgtcttttcagatggtaagtcataaaaattrsaatgaaagagaaaagcatatgtatgcagaaaagttttaggagaaaacattaaaatataaaatgaatgtgagacagaaaaagcagtttgagtttcacggcaaaatgagggaacatttagatactgtactggaatgaacgttgcagattgcctaagatttagttgtaatactgcagcaggcctgtaaaacaatgcatcaggctagttattttacacctaggatatacatcatggatgccgttcactcagccttca

SEQ ID NO: 69446 - DNA, 600 bp, Chicken  19866894341618_1
tgagtgcaagaatgttttccatcttcaaatttcagcactatatgcccaaggcagcttggaagggattagtttttattttaaaatgctatttgggagtaataaaaattcctgattaagtttttcaaataacatagaagacttgttaaagggataaatctggggtttccttatgtctcttctttcagcatacaatatttcacattgaagatattatacccacttgaatatcaagtcccaagagcacgtaattctctccactgccttgcatgtactcctctgccttgcactacccactgtacrggaaagggaaagaaaaagtatgcctgattcctgagatcaggctggaatgtcttcatttagctgggtagtagtgttcacaaagagtatctctgtgattttctgatgccamtggggytgggacaatctgtttacactcttgaagggcacaaggactaccagaatttgctcacttgagtgtattgatgtatagagcattgctgtgtgtacaagtggcactcagcatgctggcaactgtgtatatcttacaacaataaccagctgaactagtctctttcttcttgaccctttgtccactaccag

SEQ ID NO: 69447 - DNA, 600 bp, Chicken  19866894341618_2
tgattaagtttttcaaataacatagaagacttgttaaagggataaatctggggtttccttatgtctcttctttcagcatacaatatttcacattgaagatattatacccacttgaatatcaagtcccaagagcacgtaattctctccactgccttgcatgtactcctctgccttgcactacccactgtacrggaaagggaaagaaaaagtatgcctgattcctgagatcaggctggaatgtcttcatttagctgggtagtagtgttcacaaagagtatctctgtgattttctgatgccamtggggytgggacaatctgtttacactcttgaagggcacaaggactaccagaatttgctcacttgagtgtattgatgtatagagcattgctgtgtgtacaagtggcactcagcatgctggcaactgtgtatatcttacaacaataaccagctgaactagtctctttcttcttgaccctttgtccactaccagttctctctctctattttttttccctttctctttttctcattttcttcccaccactgttggaaatttaacaagaaaatttcctattcccagacttgtagtgaactgtagc

SEQ ID NO: 69448 - DNA, 600 bp, Chicken  19866894341618_3
agtttttcaaataacatagaagacttgttaaagggataaatctggggtttccttatgtctcttctttcagcatacaatatttcacattgaagatattatacccacttgaatatcaagtcccaagagcacgtaattctctccactgccttgcatgtactcctctgccttgcactacccactgtacrggaaagggaaagaaaaagtatgcctgattcctgagatcaggctggaatgtcttcatttagctgggtagtagtgttcacaaagagtatctctgtgattttctgatgccamtggggytgggacaatctgtttacactcttgaagggcacaaggactaccagaatttgctcacttgagtgtattgatgtatagagcattgctgtgtgtacaagtggcactcagcatgctggcaactgtgtatatcttacaacaataaccagctgaactagtctctttcttcttgaccctttgtccactaccagttctctctctctattttttttccctttctctttttctcattttcttcccaccactgttggaaatttaacaagaaaatttcctattcccagacttgtagtgaactgtagctctttc

SEQ ID NO: 69449 - DNA, 600 bp, Chicken  19866894341619_1
tcggccacgatcagatgacatcagcccccaatgatcatgagccagggctggcactgcgtttgcttcagaaccagataaagaggcagagctggatttaacagcatggtaggaagggatgcacacagtaccccaaacaccacgcagtcattctggcaaataaacaagacacaattggtaccgcacacaaacaaaatgccctgctttgaagtgagcacatcttgagcctgcaaaaagtacccctgcaatagctctgtgcttccaccattaagcctcaccttggtgcaacaaagaactgaattktcaccttagggtaacaaacgctgcggactgcattacagagcccagcatccccagccccagccccagccgtgcccccacctgctgcagggtggactgcagctgctgctccctctcctccgtcttctgcagcaccgcctcccagcacgcattcagcccctccaggcggttccgaaggctgctggcgtcgtcccctgcgctcgactccaggagctcattgcctgctctgttcaccgtgtccacggtcgcttggtgggccaggacgtcgttcttcagcacctaacagacacgttgggaaagtgt

SEQ ID NO: 69450 - DNA, 600 bp, Chicken  19866894341619_2
ccgtcttctgcagcaccgcctcccagcacgcattcagcccctccaggcggttccgaaggctgctggcgtcgtcccctgcgctcgactccaggagctcattgcctgctctgttcaccgtgtccacggtcgcttggtgggccaggacgtcgttcttcagcacctaacagacacgttgggaaagtgttggacgcctctccaaaacgtctgcttaattccagcatgctctcatggacttgaaccaactcaaacccttcacaagagtgaaaacccagcgacgggaatggatcaaacaaatggcaygcattggggaactcacgtggtgcttcgcaagttcaacctcaatgacttttgggtctccattgatgggcttctgcgcatcgagcagctcctcggtgtgggtcagccaggccatcagctctgccagcgcgtgctggaactgacccagggccaggagggcggcttcgagcttgtgctgagcgatggcagggaggaaaaggaacgtttaagtcaggaaggagtgggagcatccaagtgaacttcaaacccgccttgaacraacccaggcctcccctgtacctgtctgtgagcaatcttctcgcc

SEQ ID NO: 69451 - DNA, 600 bp, Chicken  19866894341619_3
aagagtgaaaacccagcgacgggaatggatcaaacaaatggcaygcattggggaactcacgtggtgcttcgcaagttcaacctcaatgacttttgggtctccattgatgggcttctgcgcatcgagcagctcctcggtgtgggtcagccaggccatcagctctgccagcgcgtgctggaactgacccagggccaggagggcggcttcgagcttgtgctgagcgatggcagggaggaaaaggaacgtttaagtcaggaaggagtgggagcatccaagtgaacttcaaacccgccttgaacraacccaggcctcccctgtacctgtctgtgagcaatcttctcgcccaaattctcccagagatgtttcagctctgtcaggggctcctttatgatgtctctgtctgtctcatctgtagctttttttagcatcagttcaccttggtgattaagcttttccatctcaatctgctgctggtaaacctccattttaaactcctgccaaaacaagcaggacaaaaaccagaacaaaatgaatcattggagtgagagctctatgatgcaaaggattggagaagcagtgtgactccacccacgtaccttc

SEQ ID NO: 69452 - DNA, 600 bp, Chicken  19866894341623_1
aatggtaaatcatgaaatcacagagtgatagaatcgaagggtttgaaagggacctcttgagatcacctggtccaacactcccactaaagcaggttctctacagtagattacacaggagagtgtctagatgtgttttgaatatcagaaaaggagactccacagcttctctgggtagcttgttgtaaaagtaaagctctctctcatttgtatggaatttcctatgttcctgtttgtgcttattgcccctttttctgtcactgggcaccaagaaaaagagcctgtctctatccatttgacaayctcccattagatatytataagcattgatgagatcccctctcagtcttctwtaggctgaacagtctgaggtctctcagcctttcttcataagggagatgctccaggcccctcatcatctgaaaaytgtgcattatgaacaaaaaaycctttgtaacttatttcttttcacaataacagctttgtggtttttccccttcccttgctatgtcttctcattaacagtatattcttttggctttgttaacgcctccatctgctttttttatctggactatttcctgcttcttttggtatattcag

SEQ ID NO: 69453 - DNA, 600 bp, Chicken  19866894341623_2
aatcacagagtgatagaatcgaagggtttgaaagggacctcttgagatcacctggtccaacactcccactaaagcaggttctctacagtagattacacaggagagtgtctagatgtgttttgaatatcagaaaaggagactccacagcttctctgggtagcttgttgtaaaagtaaagctctctctcatttgtatggaatttcctatgttcctgtttgtgcttattgcccctttttctgtcactgggcaccaagaaaaagagcctgtctctatccatttgacaayctcccattagatatytataagcattgatgagatcccctctcagtcttctwtaggctgaacagtctgaggtctctcagcctttcttcataagggagatgctccaggcccctcatcatctgaaaaytgtgcattatgaacaaaaaaycctttgtaacttatttcttttcacaataacagctttgtggtttttccccttcccttgctatgtcttctcattaacagtatattcttttggctttgttaacgcctccatctgctttttttatctggactatttcctgcttcttttggtatattcagtattttgaggttagc

SEQ ID NO: 69454 - DNA, 600 bp, Chicken  19866894341623_3
gacctcttgagatcacctggtccaacactcccactaaagcaggttctctacagtagattacacaggagagtgtctagatgtgttttgaatatcagaaaaggagactccacagcttctctgggtagcttgttgtaaaagtaaagctctctctcatttgtatggaatttcctatgttcctgtttgtgcttattgcccctttttctgtcactgggcaccaagaaaaagagcctgtctctatccatttgacaayctcccattagatatytataagcattgatgagatcccctctcagtcttctwtaggctgaacagtctgaggtctctcagcctttcttcataagggagatgctccaggcccctcatcatctgaaaaytgtgcattatgaacaaaaaaycctttgtaacttatttcttttcacaataacagctttgtggtttttccccttcccttgctatgtcttctcattaacagtatattcttttggctttgttaacgcctccatctgctttttttatctggactatttcctgcttcttttggtatattcagtattttgaggttagcctgctttgtgatgttagggtttatgtatatcgatc

SEQ ID NO: 69455 - DNA, 600 bp, Chicken  19866894341623_4
tagatgtgttttgaatatcagaaaaggagactccacagcttctctgggtagcttgttgtaaaagtaaagctctctctcatttgtatggaatttcctatgttcctgtttgtgcttattgcccctttttctgtcactgggcaccaagaaaaagagcctgtctctatccatttgacaayctcccattagatatytataagcattgatgagatcccctctcagtcttctwtaggctgaacagtctgaggtctctcagcctttcttcataagggagatgctccaggcccctcatcatctgaaaaytgtgcattatgaacaaaaaaycctttgtaacttatttcttttcacaataacagctttgtggtttttccccttcccttgctatgtcttctcattaacagtatattcttttggctttgttaacgcctccatctgctttttttatctggactatttcctgcttcttttggtatattcagtattttgaggttagcctgctttgtgatgttagggtttatgtatatcgatcgagcctcttaacaatttcatctgacttgtgaattacatccttatcgtccactaatgctacattcatctgatttt

SEQ ID NO: 69456 - DNA, 600 bp, Chicken  19866894341623_5
aaaaggagactccacagcttctctgggtagcttgttgtaaaagtaaagctctctctcatttgtatggaatttcctatgttcctgtttgtgcttattgcccctttttctgtcactgggcaccaagaaaaagagcctgtctctatccatttgacaayctcccattagatatytataagcattgatgagatcccctctcagtcttctwtaggctgaacagtctgaggtctctcagcctttcttcataagggagatgctccaggcccctcatcatctgaaaaytgtgcattatgaacaaaaaaycctttgtaacttatttcttttcacaataacagctttgtggtttttccccttcccttgctatgtcttctcattaacagtatattcttttggctttgttaacgcctccatctgctttttttatctggactatttcctgcttcttttggtatattcagtattttgaggttagcctgctttgtgatgttagggtttatgtatatcgatcgagcctcttaacaatttcatctgacttgtgaattacatccttatcgtccactaatgctacattcatctgattttttttccattagcctgattatt

SEQ ID NO: 69457 - DNA, 599 bp, Chicken  19866894341637_1
  misc_feature (1)..(199): n is any nucleotide
nnnnnnnnnnnnnnnnnnnnnnnnnnnnnnnnnnnnnnnnnnnnnnnnnnnnnnnnnnnnnnnnnnnnnnnnnnnnnnnnnnnnnnnnnnnnnnnnnnnnnnnnnnnnnnnnnnnnnnnnnnnnnnnnnnnnnnnnnnnnnnnnnnnnnnnnnnnnnnnnnnnnnnnnnnnnnnnnnnnnnnnnnnnnnnnnnnnnnnnccagaagccagccatcactatgataacagtttcccactcccccactgtttctaacttagaccacatggaaacgtgattctacttcattataatgctccaartaaaatttgtaaagtaaagcaaaacacataaaaagatttcaaagtactcatggtgtttctacacgttttatcatgtcaatatgacctccagcttttccttcatgagaacttgcttttgcacatggtgacctgataagttaccttcactacaaagaggcttctttttttctcacagtttttatttgcaaggacacaaatgctggaatgcggcagtacttttaagtgacagtctgaaaacatgggcagactgaactttgtaaagtctttcattagcgagtaacttgaaaaattaagtcagc

SEQ ID NO: 69458 - DNA, 600 bp, Chicken  19866894341639_1
tctgtgtttcagcactgacttgtggtctagtaattgcaggtatccagcaagccatatcatacttcattgctactgctgtgctggtctgctagactgatgaaaatctctgttagactgcctcatctctctttttctgcctggataagacttattgaaggagaaaagctgagatatcactctcagattttctagatcatgaaaatattggcggtgcaggagccattcaatccagctcatactccatttaaatgctgatcagaacacttagtgcatccacgtacgttcccagagagctccttsttggtgcctttgccaaggagggctatcccatgaaagcacacaggaatgctgcctccggcagagacctgtctgcctccaccttctgattaacacaaaggtacccaagactatgcaaggcaagctgatatttcagataagaagttgcctcagtttacagaaggccatgaaaagctctggttcattttccatatctgcttcttctctctgcttttggaaaataattcttatttcctactagcaagtccagactagtgtaatatttagtcttgatttgttaaatcatcgtgaattttagctttt

SEQ ID NO: 69459 - DNA, 600 bp, Chicken  19866894341647_1
taagagggttaaatctgcaatttctgggatagatttttagataggatgaatctagtttgattatctaagactgtttaataactcatcaaagattgtatctggcagtgtcttcagtaacagttctgtaatttcagaacattctatttgcatctttcattccaggatagttcctcattataattaatttaagataactcaatttatgaaaaatatatccacctaatgctacttagcctgcactctacttgactgcagttactaattctctaatatttctagtgtcatgtaaagactgaggcwttttgcttgaaatactgtgtgttgatgaattactacttagctatcggtctctgcattttgtatatacacattcttttttctcaatagcttacaggttttacagtgtgaaaactttttctttaattattcttttaacagtagcaagccagagaaaaaattgyrtagttgtagtctataaatttgtaaagaccaaataaaaaatgtgtcagtcctatgtatgactgaagtatttcatctgtacctttcttcagggactgcctatttgaggatgaattagtttctggaaattaataatcaaac

SEQ ID NO: 69460 - DNA, 600 bp, Chicken  19866894341647_2
ggatagttcctcattataattaatttaagataactcaatttatgaaaaatatatccacctaatgctacttagcctgcactctacttgactgcagttactaattctctaatatttctagtgtcatgtaaagactgaggcwttttgcttgaaatactgtgtgttgatgaattactacttagctatcggtctctgcattttgtatatacacattcttttttctcaatagcttacaggttttacagtgtgaaaactttttctttaattattcttttaacagtagcaagccagagaaaaaattgyrtagttgtagtctataaatttgtaaagaccaaataaaaaatgtgtcagtcctatgtatgactgaagtatttcatctgtacctttcttcagggactgcctatttgaggatgaattagtttctggaaattaataatcaaactagataaatctgaaggaaaaaatgaaagattaaggatgtagtgagcaattcatatgtctctgccagtcataacagctgttagaaatgtctgttagatgctttcttcagctttgctttcaacctgtgactaacaggatagctgaaaagaaatgtgtaggttt

SEQ ID NO: 69461 - DNA, 600 bp, Chicken  19866894341647_3
gatagttcctcattataattaatttaagataactcaatttatgaaaaatatatccacctaatgctacttagcctgcactctacttgactgcagttactaattctctaatatttctagtgtcatgtaaagactgaggcwttttgcttgaaatactgtgtgttgatgaattactacttagctatcggtctctgcattttgtatatacacattcttttttctcaatagcttacaggttttacagtgtgaaaactttttctttaattattcttttaacagtagcaagccagagaaaaaattgyrtagttgtagtctataaatttgtaaagaccaaataaaaaatgtgtcagtcctatgtatgactgaagtatttcatctgtacctttcttcagggactgcctatttgaggatgaattagtttctggaaattaataatcaaactagataaatctgaaggaaaaaatgaaagattaaggatgtagtgagcaattcatatgtctctgccagtcataacagctgttagaaatgtctgttagatgctttcttcagctttgctttcaacctgtgactaacaggatagctgaaaagaaatgtgtaggtttt

SEQ ID NO: 69462 - DNA, 599 bp, Chicken  19866894341648_1
  misc_feature (1)..(25): n is any nucleotide
nnnnnnnnnnnnnnnnnnnnnnnnntaaggttggaaagaccaataagatcatcaagtccaaccattaactcgtgcctgtgactggtctagaccatgccacgcagtgtgacatctaccacttgggagcagatgaatccctctattgggctaacatagtgggtggagatgtgggtgcgttggtgtccctctacttgcaaaatggacccactaggcaaggtgaaggacaggggactcttctggtgatatgaatagcagtgagatcaaaagcttgccaggagtttgcagtggtaaatttcagtrgaatcctattgagacaaggcaagatagaggcctaaggatgaaaatgagttggcaaaatgaggttaggagcagttcatgtggagaagacacagcattccctttactttgtctctcctttgcacagatacccagcagcagtgtgcctgctggtatctctcttccctcattatgattttccaggttgatttgacctgttgttcagccatgatttcccctggagaagcttcctacagccaccttgcggtaggagtcatcctgctctgctttgatgtgtgtatttgctccttgagttgagtcct

SEQ ID NO: 69463 - DNA, 600 bp, Chicken  19866894341655_1
gcatgtaattttcactgagctaaattggagccttgcctgcttagagactgcaggaaggatgcttttgtatttaaggactagactgaaactcaagaggcaagtttaatccttgtctttccttaagacttccttttgattctgggaaagtcaccaaatctctgcatcacaattgcctactgataaaatgatcagtagctccacttattttctcctgaactcttctttccttttgtagatgataaacccttcaggctggtggtttgtttgcactgaaacctgcaggactccagtaggagaggractgaagtcaacagaaccttttgaaggttactgcacagcaaaatacaaaactgggctactaaatgaagcactgcaacatactgcatatatgggatcaccaagagagatgttaaacatgacttgaaatttattgactgtgtctttcaatcatgttatatcagacatcttcagggaatgcacaggctggcttaayatttagcattgtaaaagcaacaaaatctccaaccaaacaggatacagtattagagtgagaaataaatctattcatttttgtttcctgataggtattttaataaggga

SEQ ID NO: 69464 - DNA, 600 bp, Chicken  19866894341655_2
agctccacttattttctcctgaactcttctttccttttgtagatgataaacccttcaggctggtggtttgtttgcactgaaacctgcaggactccagtaggagaggractgaagtcaacagaaccttttgaaggttactgcacagcaaaatacaaaactgggctactaaatgaagcactgcaacatactgcatatatgggatcaccaagagagatgttaaacatgacttgaaatttattgactgtgtctttcaatcatgttatatcagacatcttcagggaatgcacaggctggcttaayatttagcattgtaaaagcaacaaaatctccaaccaaacaggatacagtattagagtgagaaataaatctattcatttttgtttcctgataggtattttaataagggatcatagaatcatagaatggtttgggttggaaggggcatttaacatcacctagttccaaccccattgctaaaggcagggacgtctcccatcagaacaggagtagcaatatactagcctagtagccctgacctatgaaaactgctaagtaaatgttgagattatgggcaattgtgggttatttaacacttttctc

SEQ ID NO: 69465 - DNA, 600 bp, Chicken  19866894341661_1
gtttctttagtgtaaatattttagaaagcttaaatgtagaagactggctccactacgatcataatttggatatagcctagctaagtgccctcccccaaaaaatcaaatcaacaaaagcaagcggatcttctagcctttactgagtgcaacagagagcatagttttcatgtggtctgttaaactatgtttgaaccaaatagaaagctggagacaaaaacatgcgacaaaaggtaatcgtgtcacttaattcatattggatgacatgaacatcctggagcgggagcacaaagtaaggaactraagacaatggaattttattaggctctttgacttaaatctgtagcccagaaccaatattttttaattaaggtccaattttaaaatgtattaactttttaattgagaatatagctgggaatcctgcagttctgatgttcttggaaataatgctggataagtaagcctccgtttaaggaaagaaaaacaccaaaacctttgatctttcattgtataggcaaagatacggtatcatttacatgctgaaaggcttgcattctcctatcaaaatgcatgcaaagggaatttcaagcctctcaaggc

SEQ ID NO: 69466 - DNA, 600 bp, Chicken  19866894341668_1
ttatttcagatgtggaaacttttatttaagggcggctgttttcacctcaggacaatctttatcctaaaactctcagttataaccaaagtcagtaataaaagttgtgttattgagtgtctacattctgtgagtaaattctgaattctttcaattctgctagttgagcacatctgtgtttaaaaataaggaagtctcagaactacagaaggattacagtatcgtatagactgctgtgcttgtattttaaataccatatatctattgagttaccttttagtatgtgaatgtttctaggaacascagatacagcagtgtaagttaagaaataaaagtcataagtgaactctgaattttcaaccttctsttgttctctcaagcactatttggtgcttctaacataagtattttttatttatgtattttaaaaaggctgaaagatgaagaatagttcttgggaggactccttctacttattcctttgattctttccatagaaatgtaattgaaagaacaccaaagaaaggcgggagctttttgagctctgactgttcatttgtgccagttgtttacaaaaagtgataaatgtaatatggaactttt

SEQ ID NO: 69467 - DNA, 600 bp, Chicken  19866894341668_2
taaaactctcagttataaccaaagtcagtaataaaagttgtgttattgagtgtctacattctgtgagtaaattctgaattctttcaattctgctagttgagcacatctgtgtttaaaaataaggaagtctcagaactacagaaggattacagtatcgtatagactgctgtgcttgtattttaaataccatatatctattgagttaccttttagtatgtgaatgtttctaggaacascagatacagcagtgtaagttaagaaataaaagtcataagtgaactctgaattttcaaccttctsttgttctctcaagcactatttggtgcttctaacataagtattttttatttatgtattttaaaaaggctgaaagatgaagaatagttcttgggaggactccttctacttattcctttgattctttccatagaaatgtaattgaaagaacaccaaagaaaggcgggagctttttgagctctgactgttcatttgtgccagttgtttacaaaaagtgataaatgtaatatggaacttttgcagggaaatcttcttataaattttgtttttctacagctgctttcagagctgtgaaaaaagtga

SEQ ID NO: 69468 - DNA, 599 bp, Chicken  19866894341673_1
  misc_feature (1)..(144): n is any nucleotide
nnnnnnnnnnnnnnnnnnnnnnnnnnnnnnnnnnnnnnnnnnnnnnnnnnnnnnnnnnnnnnnnnnnnnnnnnnnnnnnnnnnnnnnnnnnnnnnnnnnnnnnnnnnnnnnnnnnnnnnnnnnnnnnnnnnnnnnnnnnnnnnncaggatgtgttggcagtccctctccccgctatgcttctgtggctctgaaaataaggatgcgtcttgcttgcattatttaatggttgctctggggcttttctgcatcactctccccactttgcagctggtttaagaccctgctttgcacagcaacartgaagtcttcatcatggagccacagagacgcctctttaattagcaaaatagaaaacagtcctacaaaatccagctgaaatgcgattacctctgggtggagaggaggccaaatgagattgcaggtacaaaacaaggaggagatggcatggcagtgtgggtctggggccaactttgcccctgccagagcagcaggagttgcatcaggcacgagcctgatccatgatttacactttggagagattattcaatctgagctgctaggaggagagagtgcaagaacagagcaaggctacagagcc

SEQ ID NO: 69469 - DNA, 600 bp, Chicken  19866894341680_1
aaaaaaacaaatattgaccatacttgtgatccttttgctctttttccctctgttttactcaaagaatagcaattatgttcaataatcactgtgcatgtttacagaaattagttttccagaggctttctcaaatgtttctagaatccatttatcaatatttggtttcctgaaatattttcagcagaagtttgatttttgttactgacttgcattagaaatctgattatttaagagagcccagggcatcattttgtggggcattatacagagattgactagaacacagttcttgatctgaarggattacagttttaactgtcagggcagacaaagaacaaataascattgtgtaagctatgctccagtaatgaggacgaaagaccaattccttgtgatttcagtggtgatttcactactgaacaattgagcatactgtaataatattgaggatcacttaaattaagtgatgcttaaatgcaggggaaaaagttatcaaattatgttacttgctatgaatcactcattattctatatttgcatttcttatggcaaagaatcttaactacctaatctgcatgtgcaaataataattattattaa

SEQ ID NO: 69470 - DNA, 600 bp, Chicken  19866894341680_2
ttccctctgttttactcaaagaatagcaattatgttcaataatcactgtgcatgtttacagaaattagttttccagaggctttctcaaatgtttctagaatccatttatcaatatttggtttcctgaaatattttcagcagaagtttgatttttgttactgacttgcattagaaatctgattatttaagagagcccagggcatcattttgtggggcattatacagagattgactagaacacagttcttgatctgaarggattacagttttaactgtcagggcagacaaagaacaaataascattgtgtaagctatgctccagtaatgaggacgaaagaccaattccttgtgatttcagtggtgatttcactactgaacaattgagcatactgtaataatattgaggatcacttaaattaagtgatgcttaaatgcaggggaaaaagttatcaaattatgttacttgctatgaatcactcattattctatatttgcatttcttatggcaaagaatcttaactacctaatctgcatgtgcaaataataattattattaaataatgaaagtagtgcaattgttaaataatgcaacaatatcaa

SEQ ID NO: 69471 - DNA, 600 bp, Chicken  19866894341689_1
aaacagtctgaaaaagtaattactgtgcatatgcagattttcttctttttgaagtttatagcacccagccatactgaaagcaagcagaatgagaatgggggaaatggaagaaatgcagatttctgttgcttgctgtctatatttcctagttcgtaaaaggtctacccagactcctgaatcaggagagtaggagctgaaaaacagcagctgcctgtagagtaaccctgcttcagaaatgtatggccgtccatgggcatgcttacccttcttttagctgtgccaacttctttaggctttatscctacgacaaagagcaagaacagcttttagatggtgaacttyagaggacgtaacatttaaaaatggaagtgtctgtcccagcagggcaatagaggactgttaatcctatcagcttggttccttgaataatcaatagaagcagtagtttcaggcatttaaatgagatagttacctgagctatttgagtaaggggagtatatacatactttggaggagcagtcagggtctycactgggccaaccagggcaagaaaggatccagaaggctgcagtgatcattttttgtgctatgccttagtga

SEQ ID NO: 69472 - DNA, 600 bp, Chicken  19866894341689_2
ttctttttgaagtttatagcacccagccatactgaaagcaagcagaatgagaatgggggaaatggaagaaatgcagatttctgttgcttgctgtctatatttcctagttcgtaaaaggtctacccagactcctgaatcaggagagtaggagctgaaaaacagcagctgcctgtagagtaaccctgcttcagaaatgtatggccgtccatgggcatgcttacccttcttttagctgtgccaacttctttaggctttatscctacgacaaagagcaagaacagcttttagatggtgaacttyagaggacgtaacatttaaaaatggaagtgtctgtcccagcagggcaatagaggactgttaatcctatcagcttggttccttgaataatcaatagaagcagtagtttcaggcatttaaatgagatagttacctgagctatttgagtaaggggagtatatacatactttggaggagcagtcagggtctycactgggccaaccagggcaagaaaggatccagaaggctgcagtgatcattttttgtgctatgccttagtgagtagggcttttgtccaagaagtgagagtagtggatctgttct

SEQ ID NO: 69473 - DNA, 544 bp, Chicken  19866894341689_3
tcagaaatgtatggccgtccatgggcatgcttacccttcttttagctgtgccaacttctttaggctttatscctacgacaaagagcaagaacagcttttagatggtgaacttyagaggacgtaacatttaaaaatggaagtgtctgtcccagcagggcaatagaggactgttaatcctatcagcttggttccttgaataatcaatagaagcagtagtttcaggcatttaaatgagatagttacctgagctatttgagtaaggggagtatatacatactttggaggagcagtcagggtctycactgggccaaccagggcaagaaaggatccagaaggctgcagtgatcattttttgtgctatgccttagtgagtagggcttttgtccaagaagtgagagtagtggatctgttctctggagctttggactcatatctttagtttctcaggagcatagatgaactggatttgggcctctgagatttgtgaggccaggaaaagagtaagcaaaaatagttgactcggtatgctagtgagaagtgcctt

SEQ ID NO: 69474 - DNA, 600 bp, Chicken  19866894341690_1
acctgtagctgctggttggaatgttcagtcctgctatagttggcatgtttcagtacaagttctgacatgataatcttgatcttggcctcagcaaagaaaaatggtgggttatgccagtctatgctgtcactgctctacaaagatgattaagaaattgaagcatctctcatgaaaagagactgagagagctaagactattcagccttcggaagtgaaggctcagggggaagttatcaaaacatgtaagggcttgaagggaaggtatataaaggaaacagatcaggctttttcagtgacacycagtgtcagaaaaagaggcagtgggcacaaaatggaacacaagaggttcctcctgaacctctgraaatacttatttaatttgcaggttgctgagcattgcaacaggttgcccagagagattgtggagattcctttattggaaaaataattgaaaccctgctggtacagccccaaccaacttgctctaattggacttgttttgagcagggtttggactagacagtctccagaggttctttctgacctgaactagtctgtgattctgtgatgatgaggtggtaaatataaacatcayttatt

SEQ ID NO: 69475 - DNA, 600 bp, Chicken  19866894341690_2
acatgataatcttgatcttggcctcagcaaagaaaaatggtgggttatgccagtctatgctgtcactgctctacaaagatgattaagaaattgaagcatctctcatgaaaagagactgagagagctaagactattcagccttcggaagtgaaggctcagggggaagttatcaaaacatgtaagggcttgaagggaaggtatataaaggaaacagatcaggctttttcagtgacacycagtgtcagaaaaagaggcagtgggcacaaaatggaacacaagaggttcctcctgaacctctgraaatacttatttaatttgcaggttgctgagcattgcaacaggttgcccagagagattgtggagattcctttattggaaaaataattgaaaccctgctggtacagccccaaccaacttgctctaattggacttgttttgagcagggtttggactagacagtctccagaggttctttctgacctgaactagtctgtgattctgtgatgatgaggtggtaaatataaacatcayttatttgggaagccctgctttttactgtcattatgctgccatccaccttttagtcaaatggccctgttc

SEQ ID NO: 69476 - DNA, 600 bp, Chicken  19866894341690_3
acacycagtgtcagaaaaagaggcagtgggcacaaaatggaacacaagaggttcctcctgaacctctgraaatacttatttaatttgcaggttgctgagcattgcaacaggttgcccagagagattgtggagattcctttattggaaaaataattgaaaccctgctggtacagccccaaccaacttgctctaattggacttgttttgagcagggtttggactagacagtctccagaggttctttctgacctgaactagtctgtgattctgtgatgatgaggtggtaaatataaacatcayttatttgggaagccctgctttttactgtcattatgctgccatccaccttttagtcaaatggccctgttcaaggcctgagctcctggtttgtatgtttggaattgtgctgttcaggattggttatcactctacagaaaaaaatgttattaagatgcctcaaggtcttagcctgcaaagtgatattgaacatgcatggtaaaaatgtctctaacaagtttctggtccttgggctgagaagcataccttctattttgttatacaagcaataagatgtgcatgtcttactagacgtgagggttt

SEQ ID NO: 69477 - DNA, 600 bp, Chicken  19866894341691_1
aaagaaagttagagaaagttttctatggtagtaagaaatccaatgtaatctgaagtaattccttatttcatattttatttttccattattatttttaacaaatggaaataaaccaagtatatctcacacatttctccaaactgcaacacaagtgaacacattgctgccaacagaattcagtttttcagatttagtaacagccacaatggcactgaatttagacttctaaatccatactgaatgaccacactgaaagcatttaaggtttgtttctagagagaagacaggcttttattttcytttttttttttttaaataaaacaacatacttcttatattccactgttgacaacttcagaagttttagtatttacttcttaaagtaaatactcttaaagtaaatattcttaaaaagactacgtcttttttcattaaaaattgaccataacatatcccaatgtacaaaacagtaacatgttgtagaaaatatgaggaactaagaggttagtttgattttttttaaaaacgcactgtcatggagtagatctgcatttttatattacaaatactacataaggaacacgatcagtcttttgaagg

SEQ ID NO: 69478 - DNA, 600 bp, Chicken  19866894341691_2; identical to SEQ ID NO: 69477

SEQ ID NO: 69479 - DNA, 600 bp, Chicken  19866894341697_1
gaaaggatggaaaaaaaaatactgagctggcttgaagaatctaaaagaaggatatgttagttttttaaaataaaagtataataattctttcttatcagcaatccaagcctaaatgaacaaatgttaacctcttcagagatgtcttcccagaaggtaatagtgcaggtacactgtatagctctccagtggaatggccaaactgtctctctatatattgtatacgtatttttatatagacatatacatatgtatttgaacatgtatttcactgctcatgccctgtagtacggagaaaaaaawtactttttatattttgactgacatgtgcttcctgtctcatcccaggagccagaaaagcatcttgagcgctaaaagccagtaaacacgtggcaggcggccagaagttccattgacattgagcatgggaacttgtggaagatacaaatatttgaaggtgcctgttacacagtgctgggttggaaacctaagaagttctcagagtatgtacacaattaccatcgtaatatatgctccatttaagaaagatctaagcacctttttagcttaatattaaagttagtgaaatttatacacctttgg

SEQ ID NO: 69480 - DNA, 600 bp, Chicken  19866894341697_2
agacgataattcacataaaatgtgtgctcacaaatgaaggaagcaacataagagtaccataatgcaaatttccatatgtagtaaatgaataatagctgttttcttcattgtgcctttttctcttgagaacgttttagttcaactgtcatatttattttagttaatacaagcaataaagcttgctttctccttcactgtttctgttttaaaaatatacttgtttcttggcaagctaatggttttaaagagaagaagaagagacctgattacaagtcattttgccttttgcccagttgatcygttcatgtacctttaatatctctccgcactatcaacaacaagaagaaaaaaaattaaaaaaaaaggagctctgagtgaaacaaaagtgaagctgcaatcaaacactcatgaactcggctaataaagaagttagaatgctatttgttacatttcagtgttataaaacaaaacagtaagtctaagggtaaacatacagcaatcagctgcaaatctatttaagcaaaacaaaacacaagctggcagatgttgccttaatgactgaaaaacttgctttggctgaactattgccaataggcaaag

SEQ ID NO: 69481 - DNA, 515 bp, Chicken  19866894341703_1
aatttaagaaaatagtggggagacaccagaataggttgtccagtgaggctgtggatgccccctccctggaagcattcaagaccaggctggatggggctttggacaacctggtctagagggaaatgaccctgcctaaagcagggaggttggaactagatgagcttaaaggtcccttccaacccaaaccattctgtgacttcataatatcacaaaacatttacacagaagctagatatcaagtattaagcaactaaaatgagttgagaagaccattgcctgcttttcatgcccacacagacrcagaaaagatgaatgaactcataacatatcaccaaattcaatgcgggaataagaacctagaaaactctaaatgaacagacaagcctacatattttgcacagcgatctacttaatgtttttaacagaatgtcagccatcatacttcattactctcgttctgctttcagcatccaacataccagatttcatggtgatactgaggattccgttaacag

SEQ ID NO: 69482 - DNA, 600 bp, Chicken  19866894341715_1
aagacacagtgatgcatttcattcttctactgttaaattggtagcaggcagtgcagctgagtgagctggtgctcctattacatttcaaaaggtagcttgaaggattcatcttcccgcagtgtgcactcccatattctgtgtgaatgagatggtgttactggagctgctatctcctactggcaagatgggtatattccaggaaagccattaagcaaaatgcccaagtctgatgctgacggtatctcctccccccaagcaaactttccttcttcttcctggctgccttgtgtattagcacaygtgaaaacttcactgatatgaattatacaaatccaccagggaggctgtgtggcagcagtgcagaataaggaggctcaattgtaacacaagagcacatcatggatgaatgtgtgtcacagaaaaacagaacatcgttaacagttcaaaggccagctaactgtgctgaccatgatttattcatatttgcttcggtttctcttccgattctgactagacatgaattagaaaacctgttcagccatgtcatggatcccagggagaaagatacacgttgtatttatggttcttcccctgcatagg

SEQ ID NO: 69483 - DNA, 600 bp, Chicken  19866894341717_1
ggactgcgatgtgctgatggatatctgccatcaaacttgtgttcaaatgcaaggataagtctgcttgcagaatcactcgatcactgaggtttctacttagctgtgtcttctatggaaagctttttgatatcaccagaatacagaatgctttttttgcaaatgaccccagatttaggattgccagaatatatgggcagatagtcctatcccatgttccagagggtgtctttccctttagtgaaatagaagaataactactttgaatagatgaataaatgattaaaacaataaaatgaaacrcagactagaaaaccttggcagtgtttgttggattttaaaaggcatttgtgtttactctgaactcatctaaatccaacctgcccttcatgctcrcaaggggattgagcttgaaaatctctgtttttatcattccaactgtggataatcgaattaacatcacaagtctgacagagwttcttgggctgaaagaagtaacctaaatattggctttatcaatttgttttggaaaatggaaacagtaattatttatggggttgtgcaatacctcatgacaagcaatttcatttccaacaggtcact

SEQ ID NO: 69484 - DNA, 600 bp, Chicken  19866894341717_2
tacttagctgtgtcttctatggaaagctttttgatatcaccagaatacagaatgctttttttgcaaatgaccccagatttaggattgccagaatatatgggcagatagtcctatcccatgttccagagggtgtctttccctttagtgaaatagaagaataactactttgaatagatgaataaatgattaaaacaataaaatgaaacrcagactagaaaaccttggcagtgtttgttggattttaaaaggcatttgtgtttactctgaactcatctaaatccaacctgcccttcatgctcrcaaggggattgagcttgaaaatctctgtttttatcattccaactgtggataatcgaattaacatcacaagtctgacagagwttcttgggctgaaagaagtaacctaaatattggctttatcaatttgttttggaaaatggaaacagtaattatttatggggttgtgcaatacctcatgacaagcaatttcatttccaacaggtcactattatataacagggaatgagatttgcaaatccagggtacaaagccaagccccttcgtactgtaagcttggatgattcttaacaataaacctgg

SEQ ID NO: 69485 - DNA, 600 bp, Chicken  19866894341717_3
ggattgccagaatatatgggcagatagtcctatcccatgttccagagggtgtctttccctttagtgaaatagaagaataactactttgaatagatgaataaatgattaaaacaataaaatgaaacrcagactagaaaaccttggcagtgtttgttggattttaaaaggcatttgtgtttactctgaactcatctaaatccaacctgcccttcatgctcrcaaggggattgagcttgaaaatctctgtttttatcattccaactgtggataatcgaattaacatcacaagtctgacagagwttcttgggctgaaagaagtaacctaaatattggctttatcaatttgttttggaaaatggaaacagtaattatttatggggttgtgcaatacctcatgacaagcaatttcatttccaacaggtcactattatataacagggaatgagatttgcaaatccagggtacaaagccaagccccttcgtactgtaagcttggatgattcttaacaataaacctggatgtttccctttttgagctcttattagttttgatgaattatggatttgatcttgcacgtgcataagygtgaggaagtataa

SEQ ID NO: 69486 - DNA, 600 bp, Chicken  19866894341717_4
aagtctgacagagwttcttgggctgaaagaagtaacctaaatattggctttatcaatttgttttggaaaatggaaacagtaattatttatggggttgtgcaatacctcatgacaagcaatttcatttccaacaggtcactattatataacagggaatgagatttgcaaatccagggtacaaagccaagccccttcgtactgtaagcttggatgattcttaacaataaacctggatgtttccctttttgagctcttattagttttgatgaattatggatttgatcttgcacgtgcataagygtgaggaagtataaatttcttcagccgttgttattatgactttcacttaaatgacctctgcaatggacattttcaagggcagtaaaacagcaaactttctgtaaatctcacgtaaagctctttccaagcaaaatacttcaaataacacggaagaaataaaacaacccaggcctggaagttattcttatttttatttttataccattattttttcccatttcaactcttctgacttcagctggagtttctactttctttttaacatcaaagtattctttattagaaatgttgctattggtt

SEQ ID NO: 69487 - DNA, 600 bp, Chicken  19866894341719_1
tccttcccctgcctttctctctccccatgtgatgagcactgactcaatcctggagatccgcatcatctccacagtcaggcagtagagaagcatggtgaggaaagagactgagttggaccatggtggatttttttatttggtttattttaattggatgtgctaaggttattaaagcaaactgctgctgatttcttatattaccataaacataaagaaagctgagcgaaagtggtactgtagaaactaatactgaaacttgtattcacttaaatgaaaggatggagcagcagtatgtcagcycctcactgctggagaagttttaaatgcaaatgtatttgtgctcattatgtgttggtcacagtttaaatctcccttttcaatagatttggatgcagattttagttttatagtggtgtacataatagtgggaaagaaaatgcgccctttccctactgtgtggcagcttttgtgtgcaagggaaatagatgagcttaaactattcttttatgtttgagataatgtaaggaaagaagataaatggcaagctgtgagtctcatttagtgtgatcttgattgccccaagkgtgctggtgcagcaag

SEQ ID NO: 69488 - DNA, 600 bp, Chicken  19866894341719_2
cagcagtatgtcagcycctcactgctggagaagttttaaatgcaaatgtatttgtgctcattatgtgttggtcacagtttaaatctcccttttcaatagatttggatgcagattttagttttatagtggtgtacataatagtgggaaagaaaatgcgccctttccctactgtgtggcagcttttgtgtgcaagggaaatagatgagcttaaactattcttttatgtttgagataatgtaaggaaagaagataaatggcaagctgtgagtctcatttagtgtgatcttgattgccccaagkgtgctggtgcagcaaggcccctcagatgccctgcaggcagagcagaaaacaaacatttttgagtcacccgaagttaaaccgttcccaggagtctgctcagaggagctgaatgtctgctgctaaacctaggcttctgcactagaagcrttttcagcttacattaaccttacatgctctagtggtgggaggctggtccactggcagatgttgagggccttgggggtttagtctgctccaggctagacttgcacaggggcaaaacaggctgtgggaagcaggtgtaggtgctcgcttgtagtt

SEQ ID NO: 69489 - DNA, 600 bp, Chicken  19866894341719_3
agaaaatgcgccctttccctactgtgtggcagcttttgtgtgcaagggaaatagatgagcttaaactattcttttatgtttgagataatgtaaggaaagaagataaatggcaagctgtgagtctcatttagtgtgatcttgattgccccaagkgtgctggtgcagcaaggcccctcagatgccctgcaggcagagcagaaaacaaacatttttgagtcacccgaagttaaaccgttcccaggagtctgctcagaggagctgaatgtctgctgctaaacctaggcttctgcactagaagcrttttcagcttacattaaccttacatgctctagtggtgggaggctggtccactggcagatgttgagggccttgggggtttagtctgctccaggctagacttgcacaggggcaaaacaggctgtgggaagcaggtgtaggtgctcgcttgtagtttcaccactacatttgtgtaaggtaggatgtagaataggacagtaatggctgtcctggccttcattagtgttagcttgcaataactgtgtgcctctggtataggtgatgtattatcttaaatttccattggttaaaaagcaagtagtt

SEQ ID NO: 69490 - DNA, 600 bp, Chicken  19866894341720_1
ctgtcactgacagtgccagctcattggcttctgtgggccctctctgggcacatttaaagcagtgcacgttgacagacctccggcgcagtgctgcatgccccggtgcagggttgggctgtgagggccatggggacttttcctggcagtcaggcccaagaacagtctgccccgccacttcttggacttccttcgacaccgtggatatccgtcacaatatttctgtgaagagtatttcacttcattagcctgcattgttaatggcagaaagtccggtccgtttttatctattatttcctgccragtgtgttaaacagtcggggctgcatttcacagctctcttcccgcaggcggtgcagcactgctgggcctggtgctgtgtggggrcacggatcggtgtccaaaggctgcccccagcaggagcagacagtggggaaacaaagatgtgtgccccgtctcaaccaaagggatgggagaatcctatcagcgccgatgcrgtgaggcgcttctctccagaagatgttaaactggtgcccaagtgttgtgttaaatagaggagaagtttaaaaggcacatttagagctgaaatgcacctctcggatg

SEQ ID NO: 69491 - DNA, 600 bp, Chicken  19866894341720_2
gcagtgctgcatgccccggtgcagggttgggctgtgagggccatggggacttttcctggcagtcaggcccaagaacagtctgccccgccacttcttggacttccttcgacaccgtggatatccgtcacaatatttctgtgaagagtatttcacttcattagcctgcattgttaatggcagaaagtccggtccgtttttatctattatttcctgccragtgtgttaaacagtcggggctgcatttcacagctctcttcccgcaggcggtgcagcactgctgggcctggtgctgtgtggggrcacggatcggtgtccaaaggctgcccccagcaggagcagacagtggggaaacaaagatgtgtgccccgtctcaaccaaagggatgggagaatcctatcagcgccgatgcrgtgaggcgcttctctccagaagatgttaaactggtgcccaagtgttgtgttaaatagaggagaagtttaaaaggcacatttagagctgaaatgcacctctcggatgagattgctgaccaaaatgaagggaataacagagtgctgcgtgcggttgtctcatgatttgcaaaacataaggtcaatgcataag

SEQ ID NO: 69492 - DNA, 600 bp, Chicken  19866894341720_3
accgtggatatccgtcacaatatttctgtgaagagtatttcacttcattagcctgcattgttaatggcagaaagtccggtccgtttttatctattatttcctgccragtgtgttaaacagtcggggctgcatttcacagctctcttcccgcaggcggtgcagcactgctgggcctggtgctgtgtggggrcacggatcggtgtccaaaggctgcccccagcaggagcagacagtggggaaacaaagatgtgtgccccgtctcaaccaaagggatgggagaatcctatcagcgccgatgcrgtgaggcgcttctctccagaagatgttaaactggtgcccaagtgttgtgttaaatagaggagaagtttaaaaggcacatttagagctgaaatgcacctctcggatgagattgctgaccaaaatgaagggaataacagagtgctgcgtgcggttgtctcatgatttgcaaaacataaggtcaatgcataagcaaatgctgatggaggtacataaataagcggcctacttttctgggatgctgaatccattaaaatcaatggaagttctgcatctccgaacaaaatgtcacttgttttgctc

SEQ ID NO: 69493 - DNA, 600 bp, Chicken  19866894341721_1
tgtgttttcaccacttcggtcttccctgagcaacaacatttctcttttttacctgctgtggagttggcacctgctatttagcagcttctccgttttggtgctatttctgcaattaagatgtcaagctgataagcagggaaaattatgcaaatgctgtctgagggaactctgaaaaaagcaaagtaaaaggtgttatgacaatacctggcaaaagcaggctgttttaaaaagaaaagcatctccttttaccagatcacctcagagccatgcatggcctccccagtcacacaacagctcctyggcttcacctcccaggcaagagacatgaggcacagacttgaggccccgagatctggggaatggctttcccaaggacaggcaatccttgcacatcagggctaccaacagaacacaacaacaatctccttactggcaaaataaacaaatgtggggaatggacactcctatcttgggacttgctaaggactcacaggagaattgtggtgaattttatcatgtttgggctaaatcctctagtctgtagtctttttaatccacttggtatcacaagagcccttgagcctcactctccacctccac

SEQ ID NO: 69494 - DNA, 600 bp, Chicken  19866894341724_1
accgactctggaggtgttcaaggaacgtttggatgttgtgttgagggacatggtttagtgaggactattggttgacggttggatggttggactggatgatcctgtggctcttttccaaccttggtgattctatgattctatgatctttgatgcaagaatttcttgcatcacgtggctctgtgataaggagctcttattaggggcaaaatggaatgatgcatttgcagtcctcatctgagagggaaagcgagacaatgtgccccccaaaggttcagaaagcaggcacaggaaaaaaaaaayaggagaaaaagtaaccctaatcaatgttataattttttaaaatcctattatttttaacctgcttgttcacatctcctgctctcctggggtcagctgctgtaatggcttccaagattttccctgaaatgtggaaatcccccttacacaaacaatggcactgtccgtcttgctgattttctggaagtacaaaaacatgtttgttttcagctgcgatccactggggraatttcctcactgatttggagtttgggatttttatttttttttatttttactcttccaaaagccatttctgccagt

SEQ ID NO: 69495 - DNA, 600 bp, Chicken  19866894341724_2
ccgactctggaggtgttcaaggaacgtttggatgttgtgttgagggacatggtttagtgaggactattggttgacggttggatggttggactggatgatcctgtggctcttttccaaccttggtgattctatgattctatgatctttgatgcaagaatttcttgcatcacgtggctctgtgataaggagctcttattaggggcaaaatggaatgatgcatttgcagtcctcatctgagagggaaagcgagacaatgtgccccccaaaggttcagaaagcaggcacaggaaaaaaaaaaayggagaaaaagtaaccctaatcaatgttataattttttaaaatcctattatttttaacctgcttgttcacatctcctgctctcctggggtcagctgctgtaatggcttccaagattttccctgaaatgtggaaatcccccttacacaaacaatggcactgtccgtcttgctgattttctggaagtacaaaaacatgtttgttttcagctgcgatccactggggraatttcctcactgatttggagtttgggatttttatttttttttatttttactcttccaaaagccatttctgccagtt

SEQ ID NO: 69496 - DNA, 600 bp, Chicken  19866894341724_3
cgactctggaggtgttcaaggaacgtttggatgttgtgttgagggacatggtttagtgaggactattggttgacggttggatggttggactggatgatcctgtggctcttttccaaccttggtgattctatgattctatgatctttgatgcaagaatttcttgcatcacgtggctctgtgataaggagctcttattaggggcaaaatggaatgatgcatttgcagtcctcatctgagagggaaagcgagacaatgtgccccccaaaggttcagaaagcaggcacaggaaaaaaaaaaaaygagaaaaagtaaccctaatcaatgttataattttttaaaatcctattatttttaacctgcttgttcacatctcctgctctcctggggtcagctgctgtaatggcttccaagattttccctgaaatgtggaaatcccccttacacaaacaatggcactgtccgtcttgctgattttctggaagtacaaaaacatgtttgttttcagctgcgatccactggggraatttcctcactgatttggagtttgggatttttatttttttttatttttactcttccaaaagccatttctgccagttt

SEQ ID NO: 69497 - DNA, 600 bp, Chicken  19866894341724_4; identical to SEQ ID NO: 69496

SEQ ID NO: 69498 - DNA, 566 bp, Chicken  19866894341724_5
cagtcctcatctgagagggaaagcgagacaatgtgccccccaaaggttcagaaagcaggcacaggaaaaaaaaaaaaggagaaaaagtaaccctaatcaatgttataattttttaaaatcctattatttttaacctgcttgttcacatctcctgctctcctggggtcagctgctgtaatggcttccaagattttccctgaaatgtggaaatcccccttacacaaacaatggcactgtccgtcttgctgattttctggaagtacaaaaacatgtttgttttcagctgcgatccactggggraatttcctcactgatttggagtttgggatttttatttttttttatttttactcttccaaaagccatttctgccagtttccaagaacctcaayaaactacaattaccgtgattaagagtgttaygtgttatgtggttggcatccaacacagaaacagaccctgaattgtgatcactttggtggaaaccggcagaaacagctaagtggaatgacctcttttcctgcagtgtctgagagtgtaaaacgaatgtgccctgttcggtacaa

SEQ ID NO: 69499 - DNA, 474 bp, Chicken  19866894341724_6
ctaatcaatgttataattttttaaaatcctattatttttaacctgcttgttcacatctcctgctctcctggggtcagctgctgtaatggcttccaagattttccctgaaatgtggaaatcccccttacacaaacaatggcactgtccgtcttgctgattttctggaagtacaaaaacatgtttgttttcagctgcgatccactggggraatttcctcactgatttggagtttgggatttttatttttttttatttttactcttccaaaagccatttctgccagtttccaagaacctcaayaaactacaattaccgtgattaagagtgttaygtgttatgtggttggcatccaacacagaaacagaccctgaattgtgatcactttggtggaaaccggcagaaacagctaagtggaatgacctcttttcctgcagtgtctgagagtgtaaaacgaatgtgccctgttcggtacaa

SEQ ID NO: 69500 - DNA, 443 bp, Chicken  19866894341724_7
ttatttttaacctgcttgttcacatctcctgctctcctggggtcagctgctgtaatggcttccaagattttccctgaaatgtggaaatcccccttacacaaacaatggcactgtccgtcttgctgattttctggaagtacaaaaacatgtttgttttcagctgcgatccactggggraatttcctcactgatttggagtttgggatttttatttttttttatttttactcttccaaaagccatttctgccagtttccaagaacctcaayaaactacaattaccgtgattaagagtgttaygtgttatgtggttggcatccaacacagaaacagaccctgaattgtgatcactttggtggaaaccggcagaaacagctaagtggaatgacctcttttcctgcagtgtctgagagtgtaaaacgaatgtgccctgttcggtacaa

SEQ ID NO: 69501 - DNA, 600 bp, Chicken  19866894341737_1
tcattattaccattttccttcagttcctttcctaaatgtctttcccatttctgtgtcatttcacatcctgaagctgtttcaaggtagtgtcacaccaccagtcttcatctcttacgcattcttctactcactgacttatgtgccttcattaaactgagatctcccccccttcaaaatttaactttgttcactgaacagtgacagcagaagatgtaggcttgttctggacagtaggtctctcaaactcaacactaaacttgaaaagatgccactgaggaaagttttagatggtaactacartaccagcgatccatttcacagttgtcacctcaggaaaacagccagagaaccattgctatttatttatttatttattgctcgacaattcctcctgaaattgaatatctaactagtgtgaaaaattggtcatggaaaaacatgttctgaattatctaaggttagaaaaagaaatgtatgcaatctacgattgtgtacattaaatagtccacaccatggaggaagctgagccaacctgaaattattcctcagtcatagcacacaagggtggagcagcaacagtctgtgtattgtaagcaaagg

SEQ ID NO: 69502 - DNA, 600 bp, Chicken  19866894341737_2
ttctcgcagattgctgattggagtgggtcagagacttgataaatcagtggctgttcaaacgagccatgaatggcagaggagagaaatgatttctttacattcatgttctggaaatatttcctagtaactcgtttatcctcattctctgtttggaagaatgcatgtgatttcctaatcctaataagatttcagtgattaattattatgttgacatagcacttcgtttctaagtgttgtctatgtgttactttttcatccatagattattctctacaattcttcttgcctgtttagtgatcmgccagagctttctacacttcttttcagcttaactgaatgtgttgtttactgcctcagccctgtttctgccatggcctcggtttcctctttgatcatccagcagttcacaaatttctggatttcccccagtcactggaagctctctcacagtctaagtacatctttttcctacccaaatttcagcacttcttaatcttcactgacctctcaatatcatctgttagtttctaagatacagtcttcaggtaggctttattttttcattttgtctgattttccttctaattcttggctatttct

SEQ ID NO: 69503 - DNA, 600 bp, Chicken  19866894341737_3
aacttctttctccgtatggactagaagattcagccttgatgagtgtctcagctgcctgtcacttcacacctcagctattaacaacttcattctctaattcctgtgcctttcactgtgttcttctaaagtacattcaaaattgcattgtgaggattatcttctttgctgacataatgtctctgtctcttttcagttcatcagcatcaaaggcaaattctttgtcctcttcaaactttcagatcaattgactctatgctgaatcagctttattgtttcattgagcatcagccctcatgtacygtctgtcactaatactagtcttcactgtctcattagagtatttctcacccaatcacctttggcctttttacaaaatgcctcttcctttgttggaagttcctcacaaatgttaaaggaattagttcatgctgttaatcagccaagacttaattctgcactgttgaacagagttgtttcccagagttgaatatgtaaaatatagtcatcgtgctttgtaccttccattctcttcaccagtagtagttatctggtgaatgttccattccttgaaaaaccgataaactcttctttttattacaa

SEQ ID NO: 69504 - DNA, 600 bp, Chicken  19866894341738_1
ctcctgctgtgctcccataggagagcctcccactggcacgagtgacccgaattgagcctggtgatgcaaagggcagtgcagtaactccagtgaaaagccgtaataaatcatggtgacacaattacacagggccatgccacatctcagcagccacctaattaaaaagtggactaaaacaagggaagaaaataacttaatttgggcgctatttgccttgctaatgcggtggcagttttctgcgctggatgagtgtttataaaatcttaattaggttccatgtgtggaagagaggctgatacrgggctgtattcatgcactgagtcctggtaggacgctgcggctctgcccacatcctgagctgggtggtgtttggtggggagagtgggatgggaaatgggatgggggaaaaggggtggcaaacagctgcaggtggatggctgcaagcttcccattggctttttttccccctctctttttcttcttcttcttcttttttttttttcctcggttctttttaatcaaaacttcaaattgggctcaaagcagctatttataaacctgtcaggggaggctggcatttcactatcaggtttgaattga

SEQ ID NO: 69505 - DNA, 600 bp, Chicken  19866894341746_1
gaaaacaacacaatatatcatgtgctaatggtatcatttttttttttgctaactgcttagccagacatgctttcctctgaaactgtagcatgtggcaattaaagcaaggcaaaaatacaatctttccttaagaagtcactgaaatttaaacctgttcattgacaaaaatttattcatgacctctggtagtttctggctttatggactgatacttgagggtttatatgcatgtattcaaagtggtatgtattctagatatttatataacgagcatatacaaatgcagctccagattttcartctygatttccctaagtagaatgattcttattttcaaaaattagatgtccactactttgagggaaatcaaagtgctttagggaaaatcaagctggacactcagaatctgaatgcctgacagcacaggccctaatgctttttgtgagtttttgcctccaacaatgtcacctggcaatgagttcctggcattatttctatgcacaagcattgcaggctttgtcagtcaccttaagcagatttttcccattgaatagagaagacgacccatagttgggccttacagttcattatcacataaaa

SEQ ID NO: 69506 - DNA, 600 bp, Chicken  19866894341746_2
acaacacaatatatcatgtgctaatggtatcatttttttttttgctaactgcttagccagacatgctttcctctgaaactgtagcatgtggcaattaaagcaaggcaaaaatacaatctttccttaagaagtcactgaaatttaaacctgttcattgacaaaaatttattcatgacctctggtagtttctggctttatggactgatacttgagggtttatatgcatgtattcaaagtggtatgtattctagatatttatataacgagcatatacaaatgcagctccagattttcartctygatttccctaagtagaatgattcttattttcaaaaattagatgtccactactttgagggaaatcaaagtgctttagggaaaatcaagctggacactcagaatctgaatgcctgacagcacaggccctaatgctttttgtgagtttttgcctccaacaatgtcacctggcaatgagttcctggcattatttctatgcacaagcattgcaggctttgtcagtcaccttaagcagatttttcccattgaatagagaagacgacccatagttgggccttacagttcattatcacataaaaattc

SEQ ID NO: 69507 - DNA, 599 bp, Chicken  19866894341747_1
  misc_feature (1)..(196): n is any nucleotide
nnnnnnnnnnnnnnnnnnnnnnnnnnnnnnnnnnnnnnnnnnnnnnnnnnnnnnnnnnnnnnnnnnnnnnnnnnnnnnnnnnnnnnnnnnnnnnnnnnnnnnnnnnnnnnnnnnnnnnnnnnnnnnnnnnnnnnnnnnnnnnnnnnnnnnnnnnnnnnnnnnnnnnnnnnnnnnnnnnnnnnnnnnnnnnnnnnnnaacgtatgtgttttccttaaaatgtcagagacgtcccagtgtagcaggatggaaaggagatatcctgacactgacaagaagatcttaagtcagcagtgaagatygttggggtggcagtaactcaaaaacaagaaggtaggcagacatctttgatgcctactggaagtcagttaacactatttcgtcagaaggagaagacttcatttacgtctgttggtggcaccttaaatgaagttggagctacascatgtgtaggatttgtttctttgtattcttccaaacagcttcccctcttcctcccttctgtcttcagactgcaaccctaagatacatcaagccagatccaccagacctttctaaactccagattcatgctgttactccttcactggaaagaacaatg

SEQ ID NO: 69508 - DNA, 599 bp, Chicken  19866894341747_2
  misc_feature (1)..(54): n is any nucleotide
nnnnnnnnnnnnnnnnnnnnnnnnnnnnnnnnnnnnnnnnnnnnnnnnnnnnnnaacgtatgtgttttccttaaaatgtcagagacgtcccagtgtagcaggatggaaaggagatatcctgacactgacaagaagatcttaagtcagcagtgaagatygttggggtggcagtaactcaaaaacaagaaggtaggcagacatctttgatgcctactggaagtcagttaacactatttcgtcagaaggagaagacttcatttacgtctgttggtggcaccttaaatgaagttggagctacascatgtgtaggatttgtttctttgtattcttccaaacagcttcccctcttcctcccttctgtcttcagactgcaaccctaagatacatcaagccagatccaccagacctttctaaactccagattcatgctgttactccttcactggaaagaacaatgcatgtttcttcaaaccaagcctaggccagtaccaaagcttttcctgtcatccttcaaatggcaatattcccactgacctcagcagatgcttgaacatacaactgagcccttaatttcaaccagcttcactggtttatgtcaa

SEQ ID NO: 69509 - DNA, 600 bp, Chicken  19866894341747_3
atgttcattgtgtatatgtaggacacgctgagagactcagattaagtgttgcagtcaaatttcaggcgttccaaagagaatttcagcacctcagcaaacacctgctgaataagttgtgcaagtaaaaccccacattatttttagaacagccctccctatcttagatttgttttccaggggagctcagagcagcccgcagatctgccctcaggctgggccacaacaatacatttctgcatctctcagtctctagcacagtaactcttcgggggaggcagacaagttgctctcccctaaatytaactagctgctaagccagccagaatccagagttctcttggcctgatttctcaatggagacttgaggaaaaagttttcatctgcagaggactggctggtgcttgggagattttagatgatccttcaggactctgtggtcaaaaatkagctcaggctgcagcaagaagaatcacctttgcaactgcaatcctacttcaaaagaagcaatttctgctgacctgcatagcccagtgtgcttgctgttccctgccagagggactgttagtcccatcagacatattcccaacgtgacaataaggc

SEQ ID NO: 69510 - DNA, 600 bp, Chicken  19866894341747_4
cagccctccctatcttagatttgttttccaggggagctcagagcagcccgcagatctgccctcaggctgggccacaacaatacatttctgcatctctcagtctctagcacagtaactcttcgggggaggcagacaagttgctctcccctaaatytaactagctgctaagccagccagaatccagagttctcttggcctgatttctcaatggagacttgaggaaaaagttttcatctgcagaggactggctggtgcttgggagattttagatgatccttcaggactctgtggtcaaaaatkagctcaggctgcagcaagaagaatcacctttgcaactgcaatcctacttcaaaagaagcaatttctgctgacctgcatagcccagtgtgcttgctgttccctgccagagggactgttagtcccatcagacatattcccaacgtgacaataaggctttcactgccccgacaagcagtagggagcagtcatcagtgctgggatagacaaatgcaccaggcatkaaaggctcattttatatcatcttgtccctcaccaagacagcaggaaacttgtgataccagccttcgtgttagttcaccc

SEQ ID NO: 69511 - DNA, 600 bp, Chicken  19866894341747_5
aaaaagttttcatctgcagaggactggctggtgcttgggagattttagatgatccttcaggactctgtggtcaaaaatkagctcaggctgcagcaagaagaatcacctttgcaactgcaatcctacttcaaaagaagcaatttctgctgacctgcatagcccagtgtgcttgctgttccctgccagagggactgttagtcccatcagacatattcccaacgtgacaataaggctttcactgccccgacaagcagtagggagcagtcatcagtgctgggatagacaaatgcaccaggcatkaaaggctcattttatatcatcttgtccctcaccaagacagcaggaaacttgtgataccagccttcgtgttagttcacccagggtatcattctgagcaaaggatgatggatgaccatacatttaatgaagatgtattcacagcagaaataggccacaaagccacagctttctcattttcaccagcttgtctgtccaagcaggtaattctacaaattcacctggaatgctgcataccaacagccttctccaccattcatcaatagctttttatcacacaaaaactcagtcccaagccctttg

SEQ ID NO: 69512 - DNA, 401 bp, Chicken  19866894341749_1
caaagattatatatcaaatgaactttgtgtaactttttcctttttcttccaggaaatagttatataacaggcaagctgtgtccaacttttgtccctaaggaagattttaagtcatgctattgacatcagagtagttgaaatgaattaatataacaataaaccaatgtaagtcctgacaatggcatgcacacaagctaatcctacgtgcctatcactaaaattagcagctcacttgaaatgtacttatgaatacaacattgacctgtccatcaagagtgtcttctgacatctacaattttyacatttatttaagtataccagaaatgctttcttacacccaaagcccattctktactcagtttccattaaaaccactggccggatgccctgctgactggcaa

SEQ ID NO: 69513 - DNA, 349 bp, Chicken  19866894341749_2
gaaatagttatataacaggcaagctgtgtccaacttttgtccctaaggaagattttaagtcatgctattgacatcagagtagttgaaatgaattaatataacaataaaccaatgtaagtcctgacaatggcatgcacacaagctaatcctacgtgcctatcactaaaattagcagctcacttgaaatgtacttatgaatacaacattgacctgtccatcaagagtgtcttctgacatctacaattttyacatttatttaagtataccagaaatgctttcttacacccaaagcccattctktactcagtttccattaaaaccactggccggatgccctgctgactggcaa

SEQ ID NO: 69514 - DNA, 599 bp, Chicken  19866894341751_1
  misc_feature (1)..(92): n is any nucleotide
nnnnnnnnnnnnnnnnnnnnnnnnnnnnnnnnnnnnnnnnnnnnnnnnnnnnnnnnnnnnnnnnnnnnnnnnnnnnnnnnnnnnnnnnnnnncagagaagagatttcttcccttcttttcctctggcctttctcctcttccctctcctcctgtctgctgggacagcctggagatgtgctgggtctgcatagggcatttcttcaagttttcctttccccttcaactttacttcttacttttttgtccaaatgcacttatcaaacagcagacgacttctctttgtagggaaatctgttcagratttgagatggtgggtacagttacagaaagtctgaacattttttgtatttctttcctaagttgcttaagagctacatggagagttaagtgactgcatgcatgtagtaaagtgcataatactggcacagagaatggtgcttcttttttagagttcttttgtttgtcctaaaaatcatgtggaggagccagtgatgtttctaaatatgtatatatatatatatatatatatggagttagttctatacatagtggaaccaatgatcagcacttttatgagatagcaacttacttatttcata

SEQ ID NO: 69515 - DNA, 600 bp, Chicken  19866894341753_1
gtaaagaaggttctcccaccatccaatctaaatcttccctcttttatagaaatcacagaatcattatggctcgaaaagatcacaaagatcatcgcgtcgaaccgctgatcctcatcaccacgcccactacagcaggacacagctcatgtccagcctgatgtgaccctgggtgagcccggctggagccatggcgccggcatgctgtgtgtgtgccaccacgtgccccagggacgctgatgacctgccgggccagacgcagtgactcccatttgtgcaatgtgcacgcgatgcccaggaccrgtcagacctgccgggctgctggagctgggcagcgggcgtgtgggctcygagcgctgcgtgaccacggcccaggcagctcctaggatgtatcctgacccccacggtgcagcagggccacgggcaaggcctaccttcttctggcacgactgccggatctcctccacctcctcgtcrcggctctccacctccttggcgtgggtctgccgcagccgctccatctccatttcaagccgcagcttggcctgaaaaaggggggtccatcagagcccggtggatgtggggacryggggacaccgcagc

SEQ ID NO: 69516 - DNA, 600 bp, Chicken  19866894341753_2
gaaatcacagaatcattatggctcgaaaagatcacaaagatcatcgcgtcgaaccgctgatcctcatcaccacgcccactacagcaggacacagctcatgtccagcctgatgtgaccctgggtgagcccggctggagccatggcgccggcatgctgtgtgtgtgccaccacgtgccccagggacgctgatgacctgccgggccagacgcagtgactcccatttgtgcaatgtgcacgcgatgcccaggaccrgtcagacctgccgggctgctggagctgggcagcgggcgtgtgggctcygagcgctgcgtgaccacggcccaggcagctcctaggatgtatcctgacccccacggtgcagcagggccacgggcaaggcctaccttcttctggcacgactgccggatctcctccacctcctcgtcrcggctctccacctccttggcgtgggtctgccgcagccgctccatctccatttcaagccgcagcttggcctgaaaaaggggggtccatcagagcccggtggatgtggggacryggggacaccgcagcctgctgccccgctcacccagagaaccccctgctgctctgggtctgccc

SEQ ID NO: 69517 - DNA, 600 bp, Chicken  19866894341753_3
cccggctggagccatggcgccggcatgctgtgtgtgtgccaccacgtgccccagggacgctgatgacctgccgggccagacgcagtgactcccatttgtgcaatgtgcacgcgatgcccaggaccrgtcagacctgccgggctgctggagctgggcagcgggcgtgtgggctcygagcgctgcgtgaccacggcccaggcagctcctaggatgtatcctgacccccacggtgcagcagggccacgggcaaggcctaccttcttctggcacgactgccggatctcctccacctcctcgtcrcggctctccacctccttggcgtgggtctgccgcagccgctccatctccatttcaagccgcagcttggcctgaaaaaggggggtccatcagagcccggtggatgtggggacryggggacaccgcagcctgctgccccgctcacccagagaaccccctgctgctctgggtctgcccgcgccactcgccctgccgcaacgtgccgtgccatggcaccaggggttctgggaaccaggcctgatggcgcggtgagggcggccgcctccgcgggcccatccccagtaatgagagctctgtgcgaaa

SEQ ID NO: 69518 - DNA, 600 bp, Chicken  19866894341753_4
cgatgcccaggaccrgtcagacctgccgggctgctggagctgggcagcgggcgtgtgggctcygagcgctgcgtgaccacggcccaggcagctcctaggatgtatcctgacccccacggtgcagcagggccacgggcaaggcctaccttcttctggcacgactgccggatctcctccacctcctcgtcrcggctctccacctccttggcgtgggtctgccgcagccgctccatctccatttcaagccgcagcttggcctgaaaaaggggggtccatcagagcccggtggatgtggggacryggggacaccgcagcctgctgccccgctcacccagagaaccccctgctgctctgggtctgcccgcgccactcgccctgccgcaacgtgccgtgccatggcaccaggggttctgggaaccaggcctgatggcgcggtgagggcggccgcctccgcgggcccatccccagtaatgagagctctgtgcgaaaccaccccgcccagaaaccctccccgcccgccctacctgctccagcatctggatggtgccggcctgctcatccagctcctcctcctggtccttcgccttggcctccaggtca

SEQ ID NO: 69519 - DNA, 600 bp, Chicken  19866894341753_5
gatgcccaggaccrgtcagacctgccgggctgctggagctgggcagcgggcgtgtgggctcygagcgctgcgtgaccacggcccaggcagctcctaggatgtatcctgacccccacggtgcagcagggccacgggcaaggcctaccttcttctggcacgactgccggatctcctccacctcctcgtcrcggctctccacctccttggcgtgggtctgccgcagccgctccatctccatttcaagccgcagcttggcctgaaaaaggggggtccatcagagcccggtggatgtggggacryggggacaccgcagcctgctgccccgctcacccagagaaccccctgctgctctgggtctgcccgcgccactcgccctgccgcaacgtgccgtgccatggcaccaggggttctgggaaccaggcctgatggcgcggtgagggcggccgcctccgcgggcccatccccagtaatgagagctctgtgcgaaaccaccccgcccagaaaccctccccgcccgccctacctgctccagcatctggatggtgccggcctgctcatccagctcctcctcctggtccttcgccttggcctccaggtcac

SEQ ID NO: 69520 - DNA, 600 bp, Chicken  19866894341754_1
aaacaaaccctgagtgaagatcatagggggtatttataacatcaaccagctcattaatctagtggatagcatagttatattactgagagagaagcaaatcaaacaagatttataaggaaaggaacaacagttgtgtaaattgcaattcaactatgccttctttacagtgcagtttcaaaaagcatagataaaatagaactgggaaggcttcatttctaggcagtaaagttgataaaatataaaacaatttgttttttagtaagtaaaattgcaagtaagcctagagtcttccttctgggraaaaaaaaaaaaaaaaaaaaaaagtcttgtgggggtgtgatgttacagatttacaaaaataaaagcactgtattcaggttcagtgaagcttcctgagcttttcttctgtgaggactagttactgttataaagagctaatagaagttgggtttaaaacaaacgaaaataagtaatcatttatagttgttcattacaagggatatgttacttcatgcttaacaaaagaaatatcatgcataccttactgggttttgttttgcccttgccatctatttacatctactgcataaatatcagtgc

SEQ ID NO: 69521 - DNA, 600 bp, Chicken  19866894341755_1
tttaaaagccatgttctgttaaaagaaacttgcaaagctctaatctaaatttaagatcaagatgaaaaggtaatctaaattcagacatttacaacctaacttgtgctggcctcatcatcaggaggcaggtttgtgatttagagcagtggagcaagaatacctccaggcatcattcagtaagaagattaccaaactcttctgatatatatacatatagctaatgctcaagctctggttccagtcctccctggctgatctcagccacatttattttctgttgcatctcattcattcctctcryggggcactacctggaataagctatgtggggttaaactgggagtttcatgccataattgcaggaacttggctaaaagaaatgaaatgtgctattcaacaaatgaagggtctaataaaagctaagagtttccaggcttcctttgctgataatggggtaactgaaagagatttgcttaggtccctgaatattagtgcaagtttgagcccacatttggcagcttcatttattgatatgcattcctagagttacttgctctgtctgcatccccaggaagcacttctttgtatatataactttca

SEQ ID NO: 69522 - DNA, 600 bp, Chicken  19866894341755_2
ttaaaagccatgttctgttaaaagaaacttgcaaagctctaatctaaatttaagatcaagatgaaaaggtaatctaaattcagacatttacaacctaacttgtgctggcctcatcatcaggaggcaggtttgtgatttagagcagtggagcaagaatacctccaggcatcattcagtaagaagattaccaaactcttctgatatatatacatatagctaatgctcaagctctggttccagtcctccctggctgatctcagccacatttattttctgttgcatctcattcattcctctcryggggcactacctggaataagctatgtggggttaaactgggagtttcatgccataattgcaggaacttggctaaaagaaatgaaatgtgctattcaacaaatgaagggtctaataaaagctaagagtttccaggcttcctttgctgataatggggtaactgaaagagatttgcttaggtccctgaatattagtgcaagtttgagcccacatttggcagcttcatttattgatatgcattcctagagttacttgctctgtctgcatccccaggaagcacttctttgtatatataactttcat

SEQ ID NO: 69523 - DNA, 599 bp, Chicken  19866894341759_1
  misc_feature (1)..(98): n is any nucleotide
nnnnnnnnnnnnnnnnnnnnnnnnnnnnnnnnnnnnnnnnnnnnnnnnnnnnnnnnnnnnnnnnnnnnnnnnnnnnnnnnnnnnnnnnnnnnnnnnnntgcaagagcaaattactgctaacattttaacttcttttaatatctcaggatctcttatttctgtgaaagcagtaatcagaaagagaaatcagctggtttggttttatgtcttctaaaagccatttccttcccccctccactttttgcaggtgaaattagtttggggatgtgaatacaatgagtgtaaaccagcatactcacrcggggcctccttatgggcaacctcagcctggatatcagggctaccagcagcctgcctacggaggacagccattgccaggggttcctcacacacagtatggagcttataatggtccgatgccaggataccaacagccaagtccctccacaaggtacttctcaatcgaaacatcatgaytgataatctgtgaattgttgcctttatagaatttttgtttcctatcattgtgtttctatttcttgatagcagttatcttctgcacacagcttacgtgatgttaaaaatcatgttctttctgt

SEQ ID NO: 69524 - DNA, 600 bp, Chicken  19866894341759_2
aaagagaaatcagctggtttggttttatgtcttctaaaagccatttccttcccccctccactttttgcaggtgaaattagtttggggatgtgaatacaatgagtgtaaaccagcatactcacrcggggcctccttatgggcaacctcagcctggatatcagggctaccagcagcctgcctacggaggacagccattgccaggggttcctcacacacagtatggagcttataatggtccgatgccaggataccaacagccaagtccctccacaaggtacttctcaatcgaaacatcatgaytgataatctgtgaattgttgcctttatagaatttttgtttcctatcattgtgtttctatttcttgatagcagttatcttctgcacacagcttacgtgatgttaaaaatcatgttctttctgtatgtgctcagatcgttcctgtcacttgtctgattcagcaggacttactcttctcttaatagcttgtaaaattaatgtgttgagaaactcagcctactttatttctgtacatccctgcccccatggtactgaaacaactcagtgggggtagtattcccgaagaggttacrctgggggca

SEQ ID NO: 69525 - DNA, 600 bp, Chicken  19866894341759_3
catcatgaytgataatctgtgaattgttgcctttatagaatttttgtttcctatcattgtgtttctatttcttgatagcagttatcttctgcacacagcttacgtgatgttaaaaatcatgttctttctgtatgtgctcagatcgttcctgtcacttgtctgattcagcaggacttactcttctcttaatagcttgtaaaattaatgtgttgagaaactcagcctactttatttctgtacatccctgcccccatggtactgaaacaactcagtgggggtagtattcccgaagaggttacrctgggggcagcagtgagagactgtaatggatttatagcagagactgctttacattactgtgtagaagggtctgtgctccatggcaaagagttaagatagatagcattaggtaggaaacatgtctggaactagcttctttagtatcttggaaagcaacagaaagtttatggatatgtgagcatgctaatgtattccagaattctcctggttctgcaggatcgtgtcagttttttagaaaggcaaaataagcctaagcttgtgtatttttttaacagaatagttcaactctttttttctgta

SEQ ID NO: 69526 - DNA, 600 bp, Chicken  19866894341766_1
cagctgcagctctatgtgctgtgaacatgtctgtcccaatgtgtgccctcttctgcttgctcagctctgttatagctctctgtatgctctgctccacctttcagcctctgaatttagcccatattgccagccagcagcaggcagctcaacctacagcagagtgagggctcaccactgccaccaagcaaggtgcaagcttctttctcctgcctcattcagcctggccaagcctgtccagacaacagtctccctgccagctaagggaccaattctcttcccagagcctgggctggctgtgtmtgaactgcgggctggaagggaggcaggagcagagagcccattcccaggagccaggcaagagcagtttgaaagcatggagcagagcagttcagggagaccctgtctccacagctgggaaaggcttttctagtcatctccggctccctgctggaggaaactattcatgctcacagcactccaccacaattatttccattttacaaaagctgattttttggtagggtgcttgtaacctcctcaaacaagcctctggggagggaaagcagtctcggagcttgctgactctcctttggtgccctc

SEQ ID NO: 69527 - DNA, 600 bp, Chicken  19866894341767_1
ttttgaaattaagctctcttctagtttgtcggggcgttttcacttgattacttttaatgtggaatgataccatctcccttatttaatatagtaaggaaacagaggtcactcagcaatctactccctggtttgactgaacgtcaaacatgcatgctgctgggacccattcaagggacattgtgacagtaaagtggaacaggcctttaacataagttcggctctctaaactcacttcagggaaactacatacctcagagctctttgtttttgagccagttggccaagcagtgctatttgcakagaactgcccctatacttttgtcattcataaactatttaaataagtatatgcagcttactgttggaggctgagggtggcccaacagatggggactgtatacaaagagtgactgttttccactgttaaattctactttatttctttaatctaaacacctcctctacaacctcactccctcacgtgcaaataccaattgtgcccagctgacagaaattaacactaagtccacatacactctccagccttctgactgatctgtacatttacttaacactgcgcatctgataggctgtctatac

SEQ ID NO: 69528 - DNA, 599 bp, Chicken  19866894341773_1
  misc_feature (1)..(151): n is any nucleotide
nnnnnnnnnnnnnnnnnnnnnnnnnnnnnnnnnnnnnnnnnnnnnnnnnnnnnnnnnnnnnnnnnnnnnnnnnnnnnnnnnnnnnnnnnnnnnnnnnnnnnnnnnnnnnnnnnnnnnnnnnnnnnnnnnnnnnnnnnnnnnnnnnnnnnnntaaagaatgaatacttaagtgaaagaaacatgttacttaaagaacgtgaacttaaaaaaagttcaaaatgccttgagatacacataacaaagagtctcagtgctaaactatacatcacagctaacgcctgtttttactgtgtctctttyttmccctttttctaaggcagctcacattacagtgacttacacagtaagttaaatagcaaaccacctacacaatttccatatctatgctacagaagcagcccacatttcttcacagttgtgtctcagcttccaacccccacatactaagttcctgcaatcagttacctggctcttcatcctcatgagtatgtagttcttaatttttccatatggttcagccagtttgagcackgcgttatcggagtaccccgaatgaggtaaattgctgaggtgaatcacacgaccaagttctggttttg

SEQ ID NO: 69529 - DNA, 599 bp, Chicken  19866894341773_2
  misc_feature (1)..(148): n is any nucleotide
nnnnnnnnnnnnnnnnnnnnnnnnnnnnnnnnnnnnnnnnnnnnnnnnnnnnnnnnnnnnnnnnnnnnnnnnnnnnnnnnnnnnnnnnnnnnnnnnnnnnnnnnnnnnnnnnnnnnnnnnnnnnnnnnnnnnnnnnnnnnnnnnnnnntaaagaatgaatacttaagtgaaagaaacatgttacttaaagaacgtgaacttaaaaaaagttcaaaatgccttgagatacacataacaaagagtctcagtgctaaactatacatcacagctaacgcctgtttttactgtgtctctttyttmccctttttctaaggcagctcacattacagtgacttacacagtaagttaaatagcaaaccacctacacaatttccatatctatgctacagaagcagcccacatttcttcacagttgtgtctcagcttccaacccccacatactaagttcctgcaatcagttacctggctcttcatcctcatgagtatgtagttcttaatttttccatatggttcagccagtttgagcackgcgttatcggagtaccccgaatgaggtaaattgctgaggtgaatcacacgaccaagttctggttttggtg

SEQ ID NO: 69530 - DNA, 600 bp, Chicken  19866894341773_3
acataacaaagagtctcagtgctaaactatacatcacagctaacgcctgtttttactgtgtctctttyttmccctttttctaaggcagctcacattacagtgacttacacagtaagttaaatagcaaaccacctacacaatttccatatctatgctacagaagcagcccacatttcttcacagttgtgtctcagcttccaacccccacatactaagttcctgcaatcagttacctggctcttcatcctcatgagtatgtagttcttaatttttccatatggttcagccagtttgagcackgcgttatcggagtaccccgaatgaggtaaattgctgaggtgaatcacacgaccaagttctggttttggtgcctccgttttttggtcaggtttaccttcaggtttctaaaattaaagagtgaatgaattgtttaaaatagacattataagaagtacacttaacaccgtaccacttaaagcaagtaagtaaattatatcccttgcttaatttgatacagctgagaagtacataaagtaacaatttaaaagcagtggccaggtaacaatcactgcctcaaattgaaatagcattaaataagca

SEQ ID NO: 69531 - DNA, 599 bp, Chicken  19866894341774_1
  misc_feature (1)..(67): n is any nucleotide
nnnnnnnnnnnnnnnnnnnnnnnnnnnnnnnnnnnnnnnnnnnnnnnnnnnnnnnnnnnnnnnnnnnaattttttcctataggacaagataattttccatgaaaattccaaagctgagcgaagttttcatgaaatgccttcttcattatttgttcaactaattacagcaattgtagtttattgacgtaaggaattctcaatacagagatagtaatttgatttttgcccttcagcttgcaaggcccatttgatttgaaaaatggaatctgaatgtttccatactttaataaataagtatgkaaaaagtattgttgctattgctaatagttctgctctttaaaagtactttttgattccagctatctatgaaatatttcaggagaaacttataagaataagacacatcaggcttagcgatcgatgtaattatgcagtattgaattccacagttatatttatatacttgtccataaaaatgcaaggccagtagttcccttcatctaaaagtacagctataagaatatacaatctctttctaatgaaattcagaattgcagttagctctaagaaataagtaaataaagaacacacatacaaca

SEQ ID NO: 69532 - DNA, 599 bp, Chicken  19866894341775_1
  misc_feature (1)..(66): n is any nucleotide
nnnnnnnnnnnnnnnnnnnnnnnnnnnnnnnnnnnnnnnnnnnnnnnnnnnnnnnnnnnnnnnnnncaaaaaaaaaccctggaatatattaagatttctttattatatatttttatatttgcagggtatatcttcattattaataaaacacaccgttaaaaggattataaaaaattattagtgcatatgcaagcaaacaaacaaaattttcaatcaaggcaatattagtttgaacgtacgcagaaatattttaaggcaattctcaaaattgacctttagtatggttctaaaatatcctawacagggatgtctagggaaattaagattacactgacgtgaatttctgcatagctcctagaagtctgaatatttacactgccattagtttggaagcgtgccaggtccccttcctaattaaatggtcattctgactgttatatactgctcttcagagagagttcatgtcatcttttgtatamkgtttcatcaagattcactaggctatcagacttttagcaggcaaggggagatgtaaattcagtcatttacaaagctatggatatttaacaccattgaaatgaaacctaaacaggatactg

SEQ ID NO: 69533 - DNA, 600 bp, Chicken  19866894341775_2
agtgcatatgcaagcaaacaaacaaaattttcaatcaaggcaatattagtttgaacgtacgcagaaatattttaaggcaattctcaaaattgacctttagtatggttctaaaatatcctawacagggatgtctagggaaattaagattacactgacgtgaatttctgcatagctcctagaagtctgaatatttacactgccattagtttggaagcgtgccaggtccccttcctaattaaatggtcattctgactgttatatactgctcttcagagagagttcatgtcatcttttgtatamkgtttcatcaagattcactaggctatcagacttttagcaggcaaggggagatgtaaattcagtcatttacaaagctatggatatttaacaccattgaaatgaaacctaaacaggatactgacaatagtaaggacagatttccttcttaatattccaaataggctccctggcttggaagttcagtatcctcagaatgaactgacacagtctgtctactcttacctcattgcattgcagtctggattgccctcatctgctcagcctccctgacgttgtacatttctacacagtagagctttc

SEQ ID NO: 69534 - DNA, 600 bp, Chicken  19866894341775_3
gtgcatatgcaagcaaacaaacaaaattttcaatcaaggcaatattagtttgaacgtacgcagaaatattttaaggcaattctcaaaattgacctttagtatggttctaaaatatcctawacagggatgtctagggaaattaagattacactgacgtgaatttctgcatagctcctagaagtctgaatatttacactgccattagtttggaagcgtgccaggtccccttcctaattaaatggtcattctgactgttatatactgctcttcagagagagttcatgtcatcttttgtatamkgtttcatcaagattcactaggctatcagacttttagcaggcaaggggagatgtaaattcagtcatttacaaagctatggatatttaacaccattgaaatgaaacctaaacaggatactgacaatagtaaggacagatttccttcttaatattccaaataggctccctggcttggaagttcagtatcctcagaatgaactgacacagtctgtctactcttacctcattgcattgcagtctggattgccctcatctgctcagcctccctgacgttgtacatttctacacagtagagctttcc

SEQ ID NO: 69535 - DNA, 600 bp, Chicken  19866894341775_4
atattctttccttacattttttttttttaaccaaactatctgagagaaaatacatcgcgagagggatgagctgcagctactaaattaataaaaaatgttctgcaaaacacattacatagaaaatttatagagaaattgaatctgctctgtatttgctctacgtttaaacagctacaggatctgtgtacctgctccttcagacttttgtcttgagtcttgtttttctagattgtttaccttctaatagtaacgtccttgaaatgaagaagagtggtctgtaatttctctttaatggttcasactgccatcctcatgcttttaagaacttaagagaataatcacaaaatttgaccaatgatcatgatccactgcagcatttatccctctcttctgagctcctaatgatttgtatttttatagacatctactacagactcaggtgtcagtcctttggaaaacattctgtatcatcacagaaaactcctatgtactaaatgatgcacatgatggaaataaactgatgttcctgcctgtattttggttgcattttgtggaatgctgggtgtgtggcagctattcagagcaaattaaattatattt

SEQ ID NO: 69536 - DNA, 600 bp, Chicken  19866894341775_5
aaaactcctatgtactaaatgatgcacatgatggaaataaactgatgttcctgcctgtattttggttgcattttgtggaatgctgggtgtgtggcagctattcagagcaaattaaattatatttcttacagtttcctagggaatcttcaaaccgtcatttgtactttgtataatttattttcccaactctgttcttgtaaaccttgatattcctcaggagtatcagattcataatgaaatctgtcacttatttcttcctttatctatttgataaccttcaggaatagttccttttcagcyctttctcctctgcaaaccatcattagcttttatatcttttccttcattcaatccataaacttttttccccattcagaattagtagggcatccaaatggcaacattaatgtctttcaaacttcactagatcagcagtagaaaactgcttcgtttttcattcagatgggaatacagagttaagacaattcagggacacagagacctcgaaaatgtatggagagcatgtctaatccagtaacggagaaataatcccttctctgagaaagtattttgatatttgcttaccattgctgattataa

SEQ ID NO: 69537 - DNA, 599 bp, Chicken  19866894341781_1
  misc_feature (1)..(80): n is any nucleotide
nnnnnnnnnnnnnnnnnnnnnnnnnnnnnnnnnnnnnnnnnnnnnnnnnnnnnnnnnnnnnnnnnnnnnnnnnnnnnnnncgccttttgcatttcaagtaaactttgctctgaatgtgcaaattctttcagtatctgtttctgctgtggctttaactcttaagtgtccaacacaatccctcactgggagtgcaggaagccttgtgggacactgtcttggtgcgggagcagtgctgggacagtggtggccccatgtgctgtgtgtgctgggtcctggctctgtgctggggcacctcggggkcagcccatggccggggctccctgctggatgaattatgggatgcaaacaatgcattttcaagcatttatgaccgtaggaggccagatacggatggtgcaattacatgaaaaaaaggctgatgacagcctggcatcatctccccgactgaaatagagagctcatttcttgacttttcctttctaaaacaataagttagtcgagttccttccaggctgragcttatctgcagcctttctccatcatacctggcgtaaagagaaaacttgctgcttctgctgcaggaaaggggctccttctgg

SEQ ID NO: 69538 - DNA, 600 bp, Chicken  19866894341781_2
tggtgcgggagcagtgctgggacagtggtggccccatgtgctgtgtgtgctgggtcctggctctgtgctggggcacctcggggkcagcccatggccggggctccctgctggatgaattatgggatgcaaacaatgcattttcaagcatttatgaccgtaggaggccagatacggatggtgcaattacatgaaaaaaaggctgatgacagcctggcatcatctccccgactgaaatagagagctcatttcttgacttttcctttctaaaacaataagttagtcgagttccttccaggctgragcttatctgcagcctttctccatcatacctggcgtaaagagaaaacttgctgcttctgctgcaggaaaggggctccttctgggtgccagagagcatcgctccccgctccgcggtgggctcaggatctgggctayggggctcgagcttccatctctggcagctttgtttgtgagcatctcagctgaagagcagccaaccccaggctggaggaagcaggggtgatttgcagcccatctccaggcgctctgtgcactgtgtgctgcaccagggctcggctcgctgtcatcctcatcctgtgt

SEQ ID NO: 69539 - DNA, 600 bp, Chicken  19866894341781_3
cattttcaagcatttatgaccgtaggaggccagatacggatggtgcaattacatgaaaaaaaggctgatgacagcctggcatcatctccccgactgaaatagagagctcatttcttgacttttcctttctaaaacaataagttagtcgagttccttccaggctgragcttatctgcagcctttctccatcatacctggcgtaaagagaaaacttgctgcttctgctgcaggaaaggggctccttctgggtgccagagagcatcgctccccgctccgcggtgggctcaggatctgggctayggggctcgagcttccatctctggcagctttgtttgtgagcatctcagctgaagagcagccaaccccaggctggaggaagcaggggtgatttgcagcccatctccaggcgctctgtgcactgtgtgctgcaccagggctcggctcgctgtcatcctcatcctgtgttgagtaagagcgcttttgtcttgggctaaaacgctgcgggtgaggagctgccacacatctcaacatgtcagtgccacacggcaggcccacaggtttccatccatcctcgctgctctgaaggggccgcaggaggtc

SEQ ID NO: 69540 - DNA, 599 bp, Chicken  19866894341783_1
  misc_feature (1)..(74): n is any nucleotide
nnnnnnnnnnnnnnnnnnnnnnnnnnnnnnnnnnnnnnnnnnnnnnnnnnnnnnnnnnnnnnnnnnnnnnnnnncccaagtttgtaaataccagcagaacttttaagcagaaatctgaagctcctgacaaaagggatctgtgaagctttgttacacttgtaaatgagtagattatgagtgtgggcttttagatagcaattttcagggttcaaataaaaagataccacttcctattgagataagacagcagcttgtggcagcagtgatgttgatagtgcaattacacatttttataagaaygtgatratgcagaagaacttctttatggtaagggtgatggagcactggaacagactgcccrtagaggtagtggagcctccatctgtggaggtattcactacccaactggatgcccacctgtgcaacctagtttagggagcctgctttggcagggggttggactccatgatctcttgaggtcccttccaagccctgtaaagggatgtgtaaaattgaacagagagaacatagttaatcacggcaatatttcagagtgaaagaatggaaagctgtgagtrtttggagtttgttgttttgct

SEQ ID NO: 69541 - DNA, 599 bp, Chicken  19866894341783_2
  misc_feature (1)..(68): n is any nucleotide
nnnnnnnnnnnnnnnnnnnnnnnnnnnnnnnnnnnnnnnnnnnnnnnnnnnnnnnnnnnnnnnnnnnncccaagtttgtaaataccagcagaacttttaagcagaaatctgaagctcctgacaaaagggatctgtgaagctttgttacacttgtaaatgagtagattatgagtgtgggcttttagatagcaattttcagggttcaaataaaaagataccacttcctattgagataagacagcagcttgtggcagcagtgatgttgatagtgcaattacacatttttataagaaygtgatratgcagaagaacttctttatggtaagggtgatggagcactggaacagactgcccrtagaggtagtggagcctccatctgtggaggtattcactacccaactggatgcccacctgtgcaacctagtttagggagcctgctttggcagggggttggactccatgatctcttgaggtcccttccaagccctgtaaagggatgtgtaaaattgaacagagagaacatagttaatcacggcaatatttcagagtgaaagaatggaaagctgtgagtrtttggagtttgttgttttgcttttatt

SEQ ID NO: 69542 - DNA, 599 bp, Chicken  19866894341783_3
  misc_feature (1)..(13): n is any nucleotide
nnnnnnnnnnnnncccaagtttgtaaataccagcagaacttttaagcagaaatctgaagctcctgacaaaagggatctgtgaagctttgttacacttgtaaatgagtagattatgagtgtgggcttttagatagcaattttcagggttcaaataaaaagataccacttcctattgagataagacagcagcttgtggcagcagtgatgttgatagtgcaattacacatttttataagaaygtgatratgcagaagaacttctttatggtaagggtgatggagcactggaacagactgcccrtagaggtagtggagcctccatctgtggaggtattcactacccaactggatgcccacctgtgcaacctagtttagggagcctgctttggcagggggttggactccatgatctcttgaggtcccttccaagccctgtaaagggatgtgtaaaattgaacagagagaacatagttaatcacggcaatatttcagagtgaaagaatggaaagctgtgagtrtttggagtttgttgttttgcttttattttgcacaatctaaatcactttgaaatgtaagaagcattgtaccgaacattttaaa

SEQ ID NO: 69543 - DNA, 600 bp, Chicken  19866894341783_4
aattacacatttttataagaaygtgatratgcagaagaacttctttatggtaagggtgatggagcactggaacagactgcccrtagaggtagtggagcctccatctgtggaggtattcactacccaactggatgcccacctgtgcaacctagtttagggagcctgctttggcagggggttggactccatgatctcttgaggtcccttccaagccctgtaaagggatgtgtaaaattgaacagagagaacatagttaatcacggcaatatttcagagtgaaagaatggaaagctgtgagtrtttggagtttgttgttttgcttttattttgcacaatctaaatcactttgaaatgtaagaagcattgtaccgaacattttaaaaatataatgtctataaaatttctgtgtaaaaacagtatttgttgttggtatctctcagttttacataacatctctaatgagttatgaaaattagacaactcctttgagctttgtcttgcttttatttttttggtttatcaaaacagacaattctgatagtgtttcctctggtccaagatacacaactttgaggagggggttgtgtttataggaatatt

SEQ ID NO: 69544 - DNA, 600 bp, Chicken  19866894341784_1
tttcaacgtttgctgaaaggaaggagggaaggaattttagttgtaattcattgaattagtattttattgcaaagaatcacacaataaccaaaaaaagaccagcgttgaaaagcaaatgcaccctaattaacattctcctactatctctataattcacttaaccttatttcatggtcctgtccctccagatggcccagcagaagcaaaaggttttggtgcttaacagcatcgaatggtaaatcaaatcacacatccaattaaccatcactgaaatagttcattattaaacctcagcagctyagcaaattcattttagttgaccttaaaaaggtacatgagtcttttgaagcaagcacagactgggttccaaacgcacccagaactcctccatttctgctcagatgaaacaagcaaacatgcctgtgaccaacacttccaacacggatccaaactgtcataattcaagacacagcactcatcatacagacaaaaatacagaaacagtcatagagtggtttgggttgggaagggacctttaagaccatctagtccatgccctcactataggcaggcacttacaatcacagaattgtcattttc

SEQ ID NO: 69545 - DNA, 599 bp, Chicken  19866894341785_1
  misc_feature (1)..(33): n is any nucleotide
nnnnnnnnnnnnnnnnnnnnnnnnnnnnnnnnnagatgctttttccctctatttgaaggcgttttcccacaaagcccccctccacctttccattcactgtgccctcccccattcctcatccacagagaggacccaaagagcggtgtagctttaccagctccccagcgactggctgtcttttgtccattagccagtatgagaacaattccaattacaaacaacagcaaaaagaaaaaaaaaaaaaaagaaagccagaataaaacatcatgagacgccgttcctccattcatttttgcaatyatggttttaattatttctgacaatgctgctgctgcttctcctatgtgctctttatttatgcattggtagccgtccaccgcagtctgtctcccagcaaaatagaagcagcaggagcaggcagcagcaggaccacgggctgcgggtgtaggtctgggaagtcaaggggtcagcttggctgcttgctttctccattgccctcacacataggcttggtcagacagctgccagcccttgctttccctccccrttaatgggggtggtgacactccccgtgcaacctgcaaccggtggaggacggg

SEQ ID NO: 69546 - DNA, 569 bp, Chicken  19866894341785_2
aaagccagaataaaacatcatgagacgccgttcctccattcatttttgcaatyatggttttaattatttctgacaatgctgctgctgcttctcctatgtgctctttatttatgcattggtagccgtccaccgcagtctgtctcccagcaaaatagaagcagcaggagcaggcagcagcaggaccacgggctgcgggtgtaggtctgggaagtcaaggggtcagcttggctgcttgctttctccattgccctcacacataggcttggtcagacagctgccagcccttgctttccctccccrttaatgggggtggtgacactccccgtgcaacctgcaaccggtggaggacgggagctttaacacagccacctctctgctgttaaatccgtgctgagaagtgggaagaggctcctgctttttgtgtgcagatgctctaagcgtggggattaccgtggagcacattagcgaggacttgctccatcgctgcccctttcctccccctcctcccccaaaagttttctggagcagctaaatatatacctgccgtttccaaggtagagctcactgca

SEQ ID NO: 69547 - DNA, 600 bp, Chicken  19866894341794_1
aaaggttaggcataaattgaaggaatgcttttgaaaatcccacttgttgtacagcattcctcacatgttaaccctgcacaatattctaatatattctttgcttgtatttacttttaaagctttacctttgcttcccattccatgccggcaacagagatgccaagaagacatacaacagttatggtacctattattctgatatcattggactcatctaccattattgtatcactctcctggaaagagtaagaaatagtgttaaaaccagactttctctatccagctggtggggttaggtarcaagrtgaaataaaagggratgagttgtcatagtttaattagtttcaacactttgtgagacgargtattcatatttcatgctccagcttgcacttagctggagctatttggctatccagttggatggatatctatctcctttcctgatttttgaggctcttgttgagaaatcattagcatattcataagacagaaataatggagaagcattctgtcacagttagaccagagtctttcctggtaaagacattgcttaaagtgtagctaaaaagtatcataatttaaacaaatactaaacaa

SEQ ID NO: 69548 - DNA, 600 bp, Chicken  19866894341794_2
ttaggcataaattgaaggaatgcttttgaaaatcccacttgttgtacagcattcctcacatgttaaccctgcacaatattctaatatattctttgcttgtatttacttttaaagctttacctttgcttcccattccatgccggcaacagagatgccaagaagacatacaacagttatggtacctattattctgatatcattggactcatctaccattattgtatcactctcctggaaagagtaagaaatagtgttaaaaccagactttctctatccagctggtggggttaggtarcaagrtgaaataaaagggratgagttgtcatagtttaattagtttcaacactttgtgagacgargtattcatatttcatgctccagcttgcacttagctggagctatttggctatccagttggatggatatctatctcctttcctgatttttgaggctcttgttgagaaatcattagcatattcataagacagaaataatggagaagcattctgtcacagttagaccagagtctttcctggtaaagacattgcttaaagtgtagctaaaaagtatcataatttaaacaaatactaaacaacaaca

SEQ ID NO: 69549 - DNA, 600 bp, Chicken  19866894341794_3
aaggaatgcttttgaaaatcccacttgttgtacagcattcctcacatgttaaccctgcacaatattctaatatattctttgcttgtatttacttttaaagctttacctttgcttcccattccatgccggcaacagagatgccaagaagacatacaacagttatggtacctattattctgatatcattggactcatctaccattattgtatcactctcctggaaagagtaagaaatagtgttaaaaccagactttctctatccagctggtggggttaggtarcaagrtgaaataaaagggratgagttgtcatagtttaattagtttcaacactttgtgagacgargtattcatatttcatgctccagcttgcacttagctggagctatttggctatccagttggatggatatctatctcctttcctgatttttgaggctcttgttgagaaatcattagcatattcataagacagaaataatggagaagcattctgtcacagttagaccagagtctttcctggtaaagacattgcttaaagtgtagctaaaaagtatcataatttaaacaaatactaaacaacaacaaaaaaakgccccaa

SEQ ID NO: 69550 - DNA, 600 bp, Chicken  19866894341794_4
atgttaaccctgcacaatattctaatatattctttgcttgtatttacttttaaagctttacctttgcttcccattccatgccggcaacagagatgccaagaagacatacaacagttatggtacctattattctgatatcattggactcatctaccattattgtatcactctcctggaaagagtaagaaatagtgttaaaaccagactttctctatccagctggtggggttaggtarcaagrtgaaataaaagggratgagttgtcatagtttaattagtttcaacactttgtgagacgargtattcatatttcatgctccagcttgcacttagctggagctatttggctatccagttggatggatatctatctcctttcctgatttttgaggctcttgttgagaaatcattagcatattcataagacagaaataatggagaagcattctgtcacagttagaccagagtctttcctggtaaagacattgcttaaagtgtagctaaaaagtatcataatttaaacaaatactaaacaacaacaaaaaaakgccccaacttaacaatatrcacaraacrgctacgtttaccttaagaagctct

SEQ ID NO: 69551 - DNA, 600 bp, Chicken  19866894341794_5
aaagggratgagttgtcatagtttaattagtttcaacactttgtgagacgargtattcatatttcatgctccagcttgcacttagctggagctatttggctatccagttggatggatatctatctcctttcctgatttttgaggctcttgttgagaaatcattagcatattcataagacagaaataatggagaagcattctgtcacagttagaccagagtctttcctggtaaagacattgcttaaagtgtagctaaaaagtatcataatttaaacaaatactaaacaacaacaaaaaaakgccccaacttaacaatatrcacaraacrgctacgtttaccttaagaagctctacgactgtttcagcaaatccaactacatacatagcaactgccacagcatttgcaaaagcaaagataagtcctatagatccaccaaactctgggcctagacttcttgagataagataatatgctccacctgcaagcagaaaatgttatttcagcacatctaaatgctcagtgtttgcttatttttctcacataataccacaggaatctctactttaaacctaacaaacataataaagattaatagagga

SEQ ID NO: 69552 - DNA, 598 bp, Chicken  19866894341794_6
agtttaattagtttcaacactttgtgagacgargtattcatatttcatgctccagcttgcacttagctggagctatttggctatccagttggatggatatctatctcctttcctgatttttgaggctcttgttgagaaatcattagcatattcataagacagaaataatggagaagcattctgtcacagttagaccagagtctttcctggtaaagacattgcttaaagtgtagctaaaaagtatcataatttaaacaaatactaaacaacaacaaaaaaakgccccaacttaacaatatrcacaraacrgctacgtttaccttaagaagctctacgactgtttcagcaaatccaactacatacatagcaactgccacagcatttgcaaaagcaaagataagtcctatagatccaccaaactctgggcctagacttcttgagataagataatatgctccacctgcaagcagaaaatgttatttcagcacatctaaatgctcagtgtttgcttatttttctcacataataccacaggaatctctactttaaacctaacaaacataataaagattaatagaggacactgaaaaacagggaa

SEQ ID NO: 69553 - DNA, 593 bp, Chicken  19866894341794_7
aattagtttcaacactttgtgagacgargtattcatatttcatgctccagcttgcacttagctggagctatttggctatccagttggatggatatctatctcctttcctgatttttgaggctcttgttgagaaatcattagcatattcataagacagaaataatggagaagcattctgtcacagttagaccagagtctttcctggtaaagacattgcttaaagtgtagctaaaaagtatcataatttaaacaaatactaaacaacaacaaaaaaakgccccaacttaacaatatrcacaraacrgctacgtttaccttaagaagctctacgactgtttcagcaaatccaactacatacatagcaactgccacagcatttgcaaaagcaaagataagtcctatagatccaccaaactctgggcctagacttcttgagataagataatatgctccacctgcaagcagaaaatgttatttcagcacatctaaatgctcagtgtttgcttatttttctcacataataccacaggaatctctactttaaacctaacaaacataataaagattaatagaggacactgaaaaacagggaa

SEQ ID NO: 69554 - DNA, 589 bp, Chicken  19866894341794_8
agtttcaacactttgtgagacgargtattcatatttcatgctccagcttgcacttagctggagctatttggctatccagttggatggatatctatctcctttcctgatttttgaggctcttgttgagaaatcattagcatattcataagacagaaataatggagaagcattctgtcacagttagaccagagtctttcctggtaaagacattgcttaaagtgtagctaaaaagtatcataatttaaacaaatactaaacaacaacaaaaaaakgccccaacttaacaatatrcacaraacrgctacgtttaccttaagaagctctacgactgtttcagcaaatccaactacatacatagcaactgccacagcatttgcaaaagcaaagataagtcctatagatccaccaaactctgggcctagacttcttgagataagataatatgctccacctgcaagcagaaaatgttatttcagcacatctaaatgctcagtgtttgcttatttttctcacataataccacaggaatctctactttaaacctaacaaacataataaagattaatagaggacactgaaaaacagggaa

SEQ ID NO: 69555 - DNA, 600 bp, Chicken  19866894341798_1
actactggaatggtgtgagtgctttttattcataaaaaatagcaacatgtaaaatgaaataaaacctcccaagtgaatgaatgactgctaagaataagaccttatgaactgtggttttttatggttcagtccccaactatttttaatttcctccgtcctggagatcatgtccccatcacagggctggcagaagcgattgcatgtccacacttcagctgctgcaggcaaagtctcgtggcataaccctgattcttcttcactcctcgtgcgagcatggctgttggtgctgggcaccgacaygtattccttttctgcttgctttgccacaggaggggtaacctctgcaaaaaggtgaaacacacagttgggtaatagctgcaggagccactagagttcatctggtgaaacatttctttcttgccttctaaaaagggttttctgctagaaaaggaggatttttttaagctacatatttggattaagtatatatcctgaaaaaaaaagccaacaaaaaaacacaacaacaacaaaaatatcacctccctcaaaataattaacaaaatgtaagcctcagaaatggaataattcctctctgtctcc

SEQ ID NO: 69556 - DNA, 486 bp, Chicken  19866894341806_1
tcactttgattatcttttttcaatctctgcttggaggtaccatgtattattatgggcatactgtgtaggttatacagtggtatgacttcacttcgtgtttttatggctgatctggttgtgttgtctgatacacatgctaataacaacaaggcatgctggtagattctcaaattgaattgtattctaagtgagtgaggcaaatcctgcccaagaagtaggcacacagtattgggtcctacagctgttaattcagggtgctgctctcccacatgccaggttgatctgattcttacaggatargtgagaagaaatcctgtggaaaacctctctgcaggagactaataaacaggaagacctcatcaccatctgatgtatctgttgtttgggggttttgtttgtttttcaatttctactgactttctggttaaaaggggcaatgggggatcaggcaggcgtgggatgacaccagaatacctggagttactt

SEQ ID NO: 69557 - DNA, 577 bp, Chicken  19866894341809_1
taagagtggagaaaggactctgcattggttccacatacatatttactggggtattctcaacaccagtaacgattacaaggcatgtgggatgcagccaggacttacagctgagcacgatgtaggaattcctgtgctagtactgagctgagccactgtgtgagcttaccagctccatttggaccagtgtaaaattgcttgagccagccagtatgtgctcctgctggtgtgcctctatgcctacaggcagcccaggtgaagccagctcagggctcccagcatttatggtaaggccatccctcrcccatgtttgtacaagagtttctcccactaaagaaatctaggcctggcacttattctttcagcctcctctgagatgatctgttgtttttccccccctttagtttaatttcctggtactgctctctgaccagcctgcctcagattcatttgagtgtacacccaaatgcagatctctcagtcagttaagaacaacaacaaaaccccaaacaaacaaactggcaccacagtttaaaagccagtattatctcaggttttgcaaagcaaacatgcaacacag

SEQ ID NO: 69558 - DNA, 600 bp, Chicken  19866894341810_1
tcagtcccttcagggctgacaagtcctctaatgtttaaaaaaaaaacaacaaaccctgcaacctgctaggatcagattatccagtaatgcccctctaactatagatgtaggcatcagggactcttttctagtttcttcagcccttttaagcaggctgtgtcagtgcttgatgacagcagagcggggaacatctacacaaacatatttttccccacatggctgccaaaccacactgatcattggagacggcaagtactcatgaaaatggcagtgccactccataaagcagtcacagctctyttctgctaaatgtgcttcataatggctccttgaaattcgtgatctgaaaagtggcctggcctgcacctgtctaaagccaaaggagctttaaacatgtggaaattgtgccgaggctggagtggaagctggagtgcttgcatggatagttctgcttattcccacatgttcctacagtgtttcggaaacaaattcccacaattcctatttctttcagacatttaagctaatgaggaagcagctgaggcagaagtagaagacatgcgagtggctatccctgccaggctgaaggcagagtggttt

SEQ ID NO: 69559 - DNA, 599 bp, Chicken  19866894341815_1
  misc_feature (1)..(23): n is any nucleotide
nnnnnnnnnnnnnnnnnnnnnnnaacaacagttaaggacagaccttctttggctcaagcttgcttctcattgtctgctttgcagactgtaattgctgacctttggtgtaagaatgctgctgattcttatttttcaatgttcctggaagtgtgtattaaaaccctgaagccttccctaagccctaagcttaacatcacagacaagaatgtttgctaatgaatttccatttactcacagtcttttaggcaaaaaggtacttaaaatatctcacaaagcagtcctcagccatttttctccacrgagcttctccaaataccatccttcaccctctacatttgggctttataattccttcttaggtgcatggttgttcgagaaggcaatagtcttgtgtaactgttccattcttcctaattatttaccattccattaatcagcaccatttgtgatggttatttacagcaattgagaagttgttcatgaatagcatagaccactgttagaagacatgggaaacacatgggtctgggcatcccccagccccttacactgccttcttccctgctgtaggaagagctacttctgtcagcgctgagaaa

SEQ ID NO: 69560 - DNA, 600 bp, Chicken  19866894341820_1
tatttattgatgtaaaaaccacaccttttttaggtgttctcaggtttttatctctatatacaccactaatagccgtttaagtagaaattaccctgttactaccctacccaaggattttgctgacacaaaaatacagatgataatttcttaagcatcctattccttgaatctaaaatcactagtcatttaggtataccatatctttgctagctaacatgatagtcagttccaaagaatcattcatttttcgtgatccatgtatgttggtacctctctaaagaaattaacgtttacatcttyggatatcatttcattgcatactgacgttgcaccttycctatggaagtcatagtccgttatcatttttcggttaagggtttgtacagtaatactatctagtgttgtttttaatgtgcataagtattctttggattactatctaaaagttaaattccatacaacaacaacaaaacatttaacatactgttacaactgctaatttcacatatgctaaaaaaaatcctcatgatcacrtacaacttttaktaagagtttaactgcaagctattaatcttatcaactaaaaataaaaggaaatgg

SEQ ID NO: 69561 - DNA, 600 bp, Chicken  19866894341820_2
ttctcaggtttttatctctatatacaccactaatagccgtttaagtagaaattaccctgttactaccctacccaaggattttgctgacacaaaaatacagatgataatttcttaagcatcctattccttgaatctaaaatcactagtcatttaggtataccatatctttgctagctaacatgatagtcagttccaaagaatcattcatttttcgtgatccatgtatgttggtacctctctaaagaaattaacgtttacatcttyggatatcatttcattgcatactgacgttgcaccttycctatggaagtcatagtccgttatcatttttcggttaagggtttgtacagtaatactatctagtgttgtttttaatgtgcataagtattctttggattactatctaaaagttaaattccatacaacaacaacaaaacatttaacatactgttacaactgctaatttcacatatgctaaaaaaaatcctcatgatcacrtacaacttttaktaagagtttaactgcaagctattaatcttatcaactaaaaataaaaggaaatggcctatctctttcctgtaatcctgcaattaagatgca

SEQ ID NO: 69562 - DNA, 600 bp, Chicken  19866894341820_3
aatcattcatttttcgtgatccatgtatgttggtacctctctaaagaaattaacgtttacatcttyggatatcatttcattgcatactgacgttgcaccttycctatggaagtcatagtccgttatcatttttcggttaagggtttgtacagtaatactatctagtgttgtttttaatgtgcataagtattctttggattactatctaaaagttaaattccatacaacaacaacaaaacatttaacatactgttacaactgctaatttcacatatgctaaaaaaaatcctcatgatcacrtacaacttttaktaagagtttaactgcaagctattaatcttatcaactaaaaataaaaggaaatggcctatctctttcctgtaatcctgcaattaagatgcactttagttattaaagmcagaatcccagattaatcctctaggtctgtcactcaagcacgccatataagagctatgatgattcttttcctcatcgtactgacatttccattttcatccttctgtcatttatataagccacactgaatggtcaccatgaattttaaagagctcaggtcacttcaaggtctctcttcttgat

SEQ ID NO: 69563 - DNA, 600 bp, Chicken  19866894341820_4
ttcgtgatccatgtatgttggtacctctctaaagaaattaacgtttacatcttyggatatcatttcattgcatactgacgttgcaccttycctatggaagtcatagtccgttatcatttttcggttaagggtttgtacagtaatactatctagtgttgtttttaatgtgcataagtattctttggattactatctaaaagttaaattccatacaacaacaacaaaacatttaacatactgttacaactgctaatttcacatatgctaaaaaaaatcctcatgatcacrtacaacttttaktaagagtttaactgcaagctattaatcttatcaactaaaaataaaaggaaatggcctatctctttcctgtaatcctgcaattaagatgcactttagttattaaagmcagaatcccagattaatcctctaggtctgtcactcaagcacgccatataagagctatgatgattcttttcctcatcgtactgacatttccattttcatccttctgtcatttatataagccacactgaatggtcaccatgaattttaaagagctcaggtcacttcaaggtctctcttcttgatgaaatttcaaaa

SEQ ID NO: 69564 - DNA, 600 bp, Chicken  19866894341820_5
tccgttatcatttttcggttaagggtttgtacagtaatactatctagtgttgtttttaatgtgcataagtattctttggattactatctaaaagttaaattccatacaacaacaacaaaacatttaacatactgttacaactgctaatttcacatatgctaaaaaaaatcctcatgatcacrtacaacttttaktaagagtttaactgcaagctattaatcttatcaactaaaaataaaaggaaatggcctatctctttcctgtaatcctgcaattaagatgcactttagttattaaagmcagaatcccagattaatcctctaggtctgtcactcaagcacgccatataagagctatgatgattcttttcctcatcgtactgacatttccattttcatccttctgtcatttatataagccacactgaatggtcaccatgaattttaaagagctcaggtcacttcaaggtctctcttcttgatgaaatttcaaaaaaaggagaaaggctgcatacttaaaattagcaccctaaacaaagaactcaaaaatatggatcatatttcatttttttccacaattttttttaaaattatgtagcca

SEQ ID NO: 69565 - DNA, 600 bp, Chicken  19866894341820_6
agcacgccatataagagctatgatgattcttttcctcatcgtactgacatttccattttcatccttctgtcatttatataagccacactgaatggtcaccatgaattttaaagagctcaggtcacttcaaggtctctcttcttgatgaaatttcaaaaaaaggagaaaggctgcatacttaaaattagcaccctaaacaaagaactcaaaaatatggatcatatttcatttttttccacaattttttttaaaattatgtagccattttgaataccaaaatgtcttcttaatggttaatgwtttttttctttatgatgaacacaaaacaagaagttatttacatcctgaaagacaatttaaataccaaatgttgaaatactgttacgattaaaaaatcctcagcaataggtgcgtatatttatttgtttattaaacactatttagaaagagtttactcaaattctttgctagtcttgttactacaattctggaaatgcaatgcatgcaacataagtattaacgtcttgcaaaatatgttattttcttgaaccatgtatgtacttgggataattgaaaatgctttcagtagttatctctgcc

SEQ ID NO: 69566 - DNA, 600 bp, Chicken  19866894341821_1
cagccacgctggacactgcttcttctcactaaaccaaggtgtaccgagctgctcaagctgtgttaaagcaaagttttcagctgccattacaatgacctaatccagtgctggtgctatatcagctggaaagctattaggcagctccacttttcacctgcaaacatcatctgtaccagctgctgttttcagaaagtggctgagaaatgcgcaggcagccaatagatcagttagaatcaaagcaataaaactctgtacagcttctcgagagaaataatttgaaaccccagttcagtggccaaytgaaaagggcagcatcaggaggaagtagagtggggaagaggcagctgggaattactggagcagcttttcagtgctcccttttctctctgcgttgttccatatgtctaaatgaccctcagactggaggtgggctgaagtggaccctccttagaggtccttgcttcttcagtagtcatctgcactcctgagaatctgctgtagacagataacatatgttgcaaagcgtgaggaatttttaataaaaatataaagaactttctgaatgaaagtgattacctaagtgtgggaatgccagagaga

SEQ ID NO: 69567 - DNA, 600 bp, Chicken  19866894341821_2
ttccatatgtctaaatgaccctcagactggaggtgggctgaagtggaccctccttagaggtccttgcttcttcagtagtcatctgcactcctgagaatctgctgtagacagataacatatgttgcaaagcgtgaggaatttttaataaaaatataaagaactttctgaatgaaagtgattacctaagtgtgggaatgccagagagaagagcggaatggtaggtgcagatggcacctcagccagcaggtcatcaaggtgacaacgggtctgtgtgagactaaccagaacctcctaaaaccraagacagtctacacagcgagcaaaatgaaggacaggctaataaaccagagccctcaagaagtgatgaaaggaagaaaaaagcaggcaaggrgccataaaacacccasataaggacagaaaagmaaatactaagccaggggtggaacaggatgaggaaacaaaagatcacactgtcaactcttaggagatccaagagcagcacttggcttccagtccgtggagaacctaggcgacatgttgagatgcctacagatgtccctttccatcttcaccaccacaagtcacctgggccagagcacc

SEQ ID NO: 69568 - DNA, 600 bp, Chicken  19866894341821_3
tgagaatctgctgtagacagataacatatgttgcaaagcgtgaggaatttttaataaaaatataaagaactttctgaatgaaagtgattacctaagtgtgggaatgccagagagaagagcggaatggtaggtgcagatggcacctcagccagcaggtcatcaaggtgacaacgggtctgtgtgagactaaccagaacctcctaaaaccraagacagtctacacagcgagcaaaatgaaggacaggctaataaaccagagccctcaagaagtgatgaaaggaagaaaaaagcaggcaaggrgccataaaacacccasataaggacagaaaagmaaatactaagccaggggtggaacaggatgaggaaacaaaagatcacactgtcaactcttaggagatccaagagcagcacttggcttccagtccgtggagaacctaggcgacatgttgagatgcctacagatgtccctttccatcttcaccaccacaagtcacctgggccagagcacctggacccatccattttggtgtttggaagcatgaaggtatgtgaatgtgtaaaccctgttttgtttcaagtaaaatcccctctgtcctgttt

SEQ ID NO: 69569 - DNA, 600 bp, Chicken  19866894341821_4
acagataacatatgttgcaaagcgtgaggaatttttaataaaaatataaagaactttctgaatgaaagtgattacctaagtgtgggaatgccagagagaagagcggaatggtaggtgcagatggcacctcagccagcaggtcatcaaggtgacaacgggtctgtgtgagactaaccagaacctcctaaaaccraagacagtctacacagcgagcaaaatgaaggacaggctaataaaccagagccctcaagaagtgatgaaaggaagaaaaaagcaggcaaggrgccataaaacacccasataaggacagaaaagmaaatactaagccaggggtggaacaggatgaggaaacaaaagatcacactgtcaactcttaggagatccaagagcagcacttggcttccagtccgtggagaacctaggcgacatgttgagatgcctacagatgtccctttccatcttcaccaccacaagtcacctgggccagagcacctggacccatccattttggtgtttggaagcatgaaggtatgtgaatgtgtaaaccctgttttgtttcaagtaaaatcccctctgtcctgtttcagctcacatagcagt

SEQ ID NO: 69570 - DNA, 600 bp, Chicken  19866894341821_5
gcaaagcgtgaggaatttttaataaaaatataaagaactttctgaatgaaagtgattacctaagtgtgggaatgccagagagaagagcggaatggtaggtgcagatggcacctcagccagcaggtcatcaaggtgacaacgggtctgtgtgagactaaccagaacctcctaaaaccraagacagtctacacagcgagcaaaatgaaggacaggctaataaaccagagccctcaagaagtgatgaaaggaagaaaaaagcaggcaaggrgccataaaacacccasataaggacagaaaagmaaatactaagccaggggtggaacaggatgaggaaacaaaagatcacactgtcaactcttaggagatccaagagcagcacttggcttccagtccgtggagaacctaggcgacatgttgagatgcctacagatgtccctttccatcttcaccaccacaagtcacctgggccagagcacctggacccatccattttggtgtttggaagcatgaaggtatgtgaatgtgtaaaccctgttttgtttcaagtaaaatcccctctgtcctgtttcagctcacatagcagtttgttgcatggttacg

SEQ ID NO: 69571 - DNA, 599 bp, Chicken  19866894341822_1
  misc_feature (1)..(136): n is any nucleotide
nnnnnnnnnnnnnnnnnnnnnnnnnnnnnnnnnnnnnnnnnnnnnnnnnnnnnnnnnnnnnnnnnnnnnnnnnnnnnnnnnnnnnnnnnnnnnnnnnnnnnnnnnnnnnnnnnnnnnnnnnnnnnnnnnnnnnnnngtaatgtagcccttccttggcatgtcccagtgccaagctgatccatggctcctttgtgccatacgcctatggcagcagattgaggttgggggaaatatccagttgcgccatgttgttaaagagcagttggtttcttcgaagtcaaatggggcatcccgtgcgcygatgacatttgcactgtggtgagcagggtcaggttagtctgtttactcccagtagtgaacttgtgtcttttggatgcagttttgggtacgccttgcatggcttagccagtggaggctgaggtcagctggcaaccacttacaaatcctcagtaggaactctgctgcttgtggggtttccttccctttgcaaaatgagaaccaagtgcttgcaggtgcaggatggggctgtgatccctctgcaatgtgtcccaggataggacaggtgaggtgggctgggagccaccagctgctgatggggc

SEQ ID NO: 69572 - DNA, 497 bp, Chicken  19866894341824_1
aaacttaagaccactagaaacagctagaaacacatctttttgaaagaaatcatataaaaaaaaaccttaagatttctgtgactgtaaggtccttttgtgtaggcaaactttcggagaggttctttccaatattgacactagaagtacaaacacttccaactggcaggatacatatagtcactttagtttcaggataatggtatgcaaggcacacaaaacaacttccatctctgcaacgggagagaagcaaaaccacatcagttttaagagaactctcagactacttttggagttgagttygtttgacgcctgtgctttcaattggttgggagctgcacacagtcaaagctttaagagataaacacacagattcgaagacgctgtcacagaaaagaagcgaaacaaagccaggaggattttagtcacagctgttgtaaacaccatacatcaaagtgcattctcccaggccttactgatactttgcaccttacatatgt

SEQ ID NO: 69573 - DNA, 600 bp, Chicken  19866894341826_1
gctgttaggcaacacacacatgcttctttgcttttgaggatcttacactgaactgcaggcagacctgactccacagaattctactgaaaaacgaagaatcccaagggaaacatacatgtatgggaataatgtgcattctgggagaactctactgaaaaataatctgcctttgccttaaaaaaaaaccaacaaaaagccctttcctccctttataaagtccctacacttgtgagaagctaatctacaattctcagtactgaagaaaatcagaaaatctgtccaaaaagaagaaaaaaacayatgccagctcgccaactttcaaaatatttactccataaacagctacaaaaagaaaaaaaaaacaacaactgagaatatagaaatagagctttaggcaattacctatttgtaaaacaatcatttttacacaatcaagtgttataaaatcctcagtatgaagctgaatgtttgtctaaaggatatattctgcccttttcattgcctaattcctcccttccaatatgaggctacttgtaccagtggaagatgaaccagtcattaactgttttctggaaagttaacgttctggtataattgatc

SEQ ID NO: 69574 - DNA, 600 bp, Chicken  19866894341830_1
atctgaggcatcttttcatcagtccagtggggactaaggaccctcaaagtttcttacgagtctctcagtaactcataaaacctgggccttgagaccttaactaagtcattcagtttttctctgtgaaaaacattctgtctgtaaaatttatattcagtgctgctgccactgtatggagaaaaaaacaatcatgagaagaaaacagtgttcagtaatcaattgtttccatctttctaattctcctttaggaagattttatttttgctaaccttgtgttctataggttaaggaaaaggtgcygttctgacaaaatgtacatggtgcatgattcctcaagcttagcctgcaactcacataatgattggtagcttagccagccaacagctgatgcacacacaaagctactgaataaagaatctgaataaattttctgtcaagaacttcagggcttggaagaaaagcaggatgtcatttcatgcaaaagcagtaattttagcattttktgtcataaaatccaaggtcaaaattgtcacgataatgaataatccttgcttatgtagcttataagttttaaagtaaaaatgaataattcagcttact

SEQ ID NO: 69575 - DNA, 600 bp, Chicken  19866894341830_10
cagctggacagggtcagaaaaaacatcctgttccacgctctgcagctcacctttgttcccagaagtagcatgtcataccttattggcattataagacattgctttaaaaatgtgcacaagcagaaggggcctgggtcctgtggtatataatcaagctgctgaagggaatagcaaragggatggtaagaaatcctgaaatattagtagtacctataattacaaaaagagttygtactaacagatgcrtttgagtaatgagcagcagcaatagtaagaattaaggcaaagtgtattatactytaacaaccatctactgtacttgaaaggtaatgactgaaaatattaagtagaatataaaagaagactttatatggcattgcaaaacaatgttaagaaaatgtgctttacaaagcaggtattaatattcaggaagacatatcttaatcaaaagtaaaagccttgacaacgtaatgagttcaaaactctgagataagtaaggaccttggtaaatagcagaggtctttaaaaataccaaatgaatcaattttttttttagtggttcttcctggtaatcattttagcgctttcaaaatgttgcta

SEQ ID NO: 69576 - DNA, 600 bp, Chicken  19866894341830_2
agtgttcagtaatcaattgtttccatctttctaattctcctttaggaagattttatttttgctaaccttgtgttctataggttaaggaaaaggtgcygttctgacaaaatgtacatggtgcatgattcctcaagcttagcctgcaactcacataatgattggtagcttagccagccaacagctgatgcacacacaaagctactgaataaagaatctgaataaattttctgtcaagaacttcagggcttggaagaaaagcaggatgtcatttcatgcaaaagcagtaattttagcattttktgtcataaaatccaaggtcaaaattgtcacgataatgaataatccttgcttatgtagcttataagttttaaagtaaaaatgaataattcagcttactagtayrgtgcaataagataaccacacttaatcgatgcatcattgtgaatataaatttgaattttattaagtaaaaggttacaataataacagtttttaagtctgtttttaagagaaaattttgctcaaagtcacataacacaasatggaaaaaaaaaaagagttgcagctgtgaagaacagaaagaacagctggacagggtca

SEQ ID NO: 69577 - DNA, 600 bp, Chicken  19866894341830_3
gacaaaatgtacatggtgcatgattcctcaagcttagcctgcaactcacataatgattggtagcttagccagccaacagctgatgcacacacaaagctactgaataaagaatctgaataaattttctgtcaagaacttcagggcttggaagaaaagcaggatgtcatttcatgcaaaagcagtaattttagcattttktgtcataaaatccaaggtcaaaattgtcacgataatgaataatccttgcttatgtagcttataagttttaaagtaaaaatgaataattcagcttactagtayrgtgcaataagataaccacacttaatcgatgcatcattgtgaatataaatttgaattttattaagtaaaaggttacaataataacagtttttaagtctgtttttaagagaaaattttgctcaaagtcacataacacaasatggaaaaaaaaaaagagttgcagctgtgaagaacagaaagaacagctggacagggtcagaaaaaacatcctgttccacgctctgcagctcacctttgttcccagaagtagcatgtcataccttattggcattataagacattgctttaaaaatgtgcaca

SEQ ID NO: 69578 - DNA, 600 bp, Chicken  19866894341830_4
acaaaatgtacatggtgcatgattcctcaagcttagcctgcaactcacataatgattggtagcttagccagccaacagctgatgcacacacaaagctactgaataaagaatctgaataaattttctgtcaagaacttcagggcttggaagaaaagcaggatgtcatttcatgcaaaagcagtaattttagcattttktgtcataaaatccaaggtcaaaattgtcacgataatgaataatccttgcttatgtagcttataagttttaaagtaaaaatgaataattcagcttactagtayrgtgcaataagataaccacacttaatcgatgcatcattgtgaatataaatttgaattttattaagtaaaaggttacaataataacagtttttaagtctgtttttaagagaaaattttgctcaaagtcacataacacaasatggaaaaaaaaaaagagttgcagctgtgaagaacagaaagaacagctggacagggtcagaaaaaacatcctgttccacgctctgcagctcacctttgttcccagaagtagcatgtcataccttattggcattataagacattgctttaaaaatgtgcacaa

SEQ ID NO: 69579 - DNA, 600 bp, Chicken  19866894341830_5
agggcttggaagaaaagcaggatgtcatttcatgcaaaagcagtaattttagcattttktgtcataaaatccaaggtcaaaattgtcacgataatgaataatccttgcttatgtagcttataagttttaaagtaaaaatgaataattcagcttactagtayrgtgcaataagataaccacacttaatcgatgcatcattgtgaatataaatttgaattttattaagtaaaaggttacaataataacagtttttaagtctgtttttaagagaaaattttgctcaaagtcacataacacaasatggaaaaaaaaaaagagttgcagctgtgaagaacagaaagaacagctggacagggtcagaaaaaacatcctgttccacgctctgcagctcacctttgttcccagaagtagcatgtcataccttattggcattataagacattgctttaaaaatgtgcacaagcagaaggggcctgggtcctgtggtatataatcaagctgctgaagggaatagcaaragggatggtaagaaatcctgaaatattagtagtacctataattacaaaaagagttygtactaacagatgcrtttgagtaatg

SEQ ID NO: 69580 - DNA, 600 bp, Chicken  19866894341830_6
ttggaagaaaagcaggatgtcatttcatgcaaaagcagtaattttagcattttktgtcataaaatccaaggtcaaaattgtcacgataatgaataatccttgcttatgtagcttataagttttaaagtaaaaatgaataattcagcttactagtayrgtgcaataagataaccacacttaatcgatgcatcattgtgaatataaatttgaattttattaagtaaaaggttacaataataacagtttttaagtctgtttttaagagaaaattttgctcaaagtcacataacacaasatggsaaaaaaaaaagagttgcagctgtgaagaacagaaagaacagctggacagggtcagaaaaaacatcctgttccacgctctgcagctcacctttgttcccagaagtagcatgtcataccttattggcattataagacattgctttaaaaatgtgcacaagcagaaggggcctgggtcctgtggtatataatcaagctgctgaagggaatagcaaragggatggtaagaaatcctgaaatattagtagtacctataattacaaaaagagttygtactaacagatgcrtttgagtaatgagcag

SEQ ID NO: 69581 - DNA, 600 bp, Chicken  19866894341830_7
ttattaagtaaaaggttacaataataacagtttttaagtctgtttttaagagaaaattttgctcaaagtcacataacacaasatggaaaaaaaaaaagagttgcagctgtgaagaacagaaagaacagctggacagggtcagaaaaaacatcctgttccacgctctgcagctcacctttgttcccagaagtagcatgtcataccttattggcattataagacattgctttaaaaatgtgcacaagcagaaggggcctgggtcctgtggtatataatcaagctgctgaagggaatagcaaragggatggtaagaaatcctgaaatattagtagtacctataattacaaaaagagttygtactaacagatgcrtttgagtaatgagcagcagcaatagtaagaattaaggcaaagtgtattatactytaacaaccatctactgtacttgaaaggtaatgactgaaaatattaagtagaatataaaagaagactttatatggcattgcaaaacaatgttaagaaaatgtgctttacaaagcaggtattaatattcaggaagacatatcttaatcaaaagtaaaagccttgacaacgtaatgag

SEQ ID NO: 69582 - DNA, 600 bp, Chicken  19866894341830_8
ttttgctcaaagtcacataacacaasatggaaaaaaaaaaagagttgcagctgtgaagaacagaaagaacagctggacagggtcagaaaaaacatcctgttccacgctctgcagctcacctttgttcccagaagtagcatgtcataccttattggcattataagacattgctttaaaaatgtgcacaagcagaaggggcctgggtcctgtggtatataatcaagctgctgaagggaatagcaaragggatggtaagaaatcctgaaatattagtagtacctataattacaaaaagagttygtactaacagatgcrtttgagtaatgagcagcagcaatagtaagaattaaggcaaagtgtattatactytaacaaccatctactgtacttgaaaggtaatgactgaaaatattaagtagaatataaaagaagactttatatggcattgcaaaacaatgttaagaaaatgtgctttacaaagcaggtattaatattcaggaagacatatcttaatcaaaagtaaaagccttgacaacgtaatgagttcaaaactctgagataagtaaggaccttggtaaatagcagaggtctttaaaaata

SEQ ID NO: 69583 - DNA, 600 bp, Chicken  19866894341830_9
cataacacaasatggaaaaaaaaaaagagttgcagctgtgaagaacagaaagaacagctggacagggtcagaaaaaacatcctgttccacgctctgcagctcacctttgttcccagaagtagcatgtcataccttattggcattataagacattgctttaaaaatgtgcacaagcagaaggggcctgggtcctgtggtatataatcaagctgctgaagggaatagcaaragggatggtaagaaatcctgaaatattagtagtacctataattacaaaaagagttygtactaacagatgcrtttgagtaatgagcagcagcaatagtaagaattaaggcaaagtgtattatactytaacaaccatctactgtacttgaaaggtaatgactgaaaatattaagtagaatataaaagaagactttatatggcattgcaaaacaatgttaagaaaatgtgctttacaaagcaggtattaatattcaggaagacatatcttaatcaaaagtaaaagccttgacaacgtaatgagttcaaaactctgagataagtaaggaccttggtaaatagcagaggtctttaaaaataccaaatgaatcaatt

SEQ ID NO: 69584 - DNA, 600 bp, Chicken  19866894341833_1
gttatgttacagcatgtatctgttttctttttatttccccacccctggataatggttattttaaacaggctatgtggtgagttttattgactgccaaaagtagcgagacgtcaactgttattcagtattttgaagctcagtgctcaaaaactgtagagtaccattagcactgaatgaatgtgtacttatttgtttaaagtttggtttccactgtcttgattctctttaaataatatttaaacaaatgaagaaatgtatgtataggataaactcactttgtaattctttggagacattgcyttcagaatagcaggaaaattgctgtacttggaaaggtagatattgcccttagcaatrgacmtaagaaaatgtgtgcatgcaaacagcagtgcctgtacttgatcttttagaaattatatgtagatatgtttctcacttacatgtgatctgaaattttgtattcttgctaaatagttaatttcggtcaatggttcaaatcactggttctcagagggtctttcatatgtaataaatgtaatcagtatgactaattggcacattttgagctaacccccggtttaatgtcttatttggatcaga

SEQ ID NO: 69585 - DNA, 600 bp, Chicken  19866894341833_2
attttaaacaggctatgtggtgagttttattgactgccaaaagtagcgagacgtcaactgttattcagtattttgaagctcagtgctcaaaaactgtagagtaccattagcactgaatgaatgtgtacttatttgtttaaagtttggtttccactgtcttgattctctttaaataatatttaaacaaatgaagaaatgtatgtataggataaactcactttgtaattctttggagacattgcyttcagaatagcaggaaaattgctgtacttggaaaggtagatattgcccttagcaatrgacmtaagaaaatgtgtgcatgcaaacagcagtgcctgtacttgatcttttagaaattatatgtagatatgtttctcacttacatgtgatctgaaattttgtattcttgctaaatagttaatttcggtcaatggttcaaatcactggttctcagagggtctttcatatgtaataaatgtaatcagtatgactaattggcacattttgagctaacccccggtttaatgtcttatttggatcagaagtttctttgtaatgacattacgaagtttccagtaggttgtggacaaattccaggtt

SEQ ID NO: 69586 - DNA, 600 bp, Chicken  19866894341833_3
taaacaggctatgtggtgagttttattgactgccaaaagtagcgagacgtcaactgttattcagtattttgaagctcagtgctcaaaaactgtagagtaccattagcactgaatgaatgtgtacttatttgtttaaagtttggtttccactgtcttgattctctttaaataatatttaaacaaatgaagaaatgtatgtataggataaactcactttgtaattctttggagacattgcyttcagaatagcaggaaaattgctgtacttggaaaggtagatattgcccttagcaatrgacmtaagaaaatgtgtgcatgcaaacagcagtgcctgtacttgatcttttagaaattatatgtagatatgtttctcacttacatgtgatctgaaattttgtattcttgctaaatagttaatttcggtcaatggttcaaatcactggttctcagagggtctttcatatgtaataaatgtaatcagtatgactaattggcacattttgagctaacccccggtttaatgtcttatttggatcagaagtttctttgtaatgacattacgaagtttccagtaggttgtggacaaattccaggttcttg

SEQ ID NO: 69587 - DNA, 600 bp, Chicken  19866894341834_1
gtttgctcttaacttgaaactacttttggagctagcaagccttccacagttgtgatcagactgtgaaaagattgcttttgcttgtatccattttgttcctagagggaaaagcaaaacaaccaaaaacatctacccttttctggtacaactgtgtctccactggagttctactgactacagagcagtgaagaatggctctaaactgatcaggatgctgcacttggctcctttttttgtgttggcttgaaaaggttagggaacatgaatgggcaacacagtttcagaaaattctcggtgtgrgacctgtttttattgctagtcaaaggcaaggactgcacacaattaataacccttgtaaaagtgttattgagatgtttgctggcagcaaataaaaggacttttgttgaaagaggtgtggtttaatggtctcaacatagggctgtgactgagaatcccctgcgttcttcctgcagctttgacagtgatagccagtctgtcttttgcctggtcatatattttctatggacttgtttgccttctctgaaatgggatagaaacagttttacttagtttataattatttactgttctcaaaataat

SEQ ID NO: 69588 - DNA, 600 bp, Chicken  19866894341837_1
ttaagcatagtattattgaattattttgttcagaatgaatcaatggacctcatttagccctgctcatagcaagctcattttcaaaatttgttaagggccacattgaaccaagtttgaatatcttgagggacagagatatcaaaacttccctgggatcctgattgaatgcttaaacttctctcaatgaaaacagttttcctttggtccaggcaactttcctttgctgtactttgtgacaatcctctcttgtgtttttgcttgtcacttctgaggcaaacttgactctgtctcctctatagyatgctattacatcatagaaagcagcaatctgatgacccttttaccttcttttctccaggctgaaaaagcccatttctcttgatctctctttatatgtcatatactgctccctacccttcttagtcaccctttgctaaaggggggttccaaaaatacttgttattttggatgtggctcggcaagggcaaaacaaaaggaaataaagactctaccttctggctacacttttgctaatgtatgatcttatccatcccaaacacaagggtgtactgctgtgtcacgttccatcttgctcttatc

SEQ ID NO: 69589 - DNA, 600 bp, Chicken  19866894341841_1
taggttattgagttttaagccaatcgaaccaaatcctaataatatggaatggtatcgtttggatcttcatcagttgaaccttggattgaatctgtcatctgcgtaattctgagagactgtgccgctcattaaaagcaatcagatgtttctgcatatccatgtagtaaattacactttccaatcccttgtagcctgaagccattattcttcacttattgggagaaggaggagggtctggaaggaaggaagggagcactttccataacagactctcacacaactgctgtatatcaggacttycatgcgcatattttacttcaaagaacatgggcaagctgaatcaagcagtctccagtcagaggatacaaccgtgtacacacatacagctagttaatcccatacatagagagcacagcttcaccacaaccagtgcaaaaaccagaccctggacagggctcaatagaaaaaggagtaaaccacaaaatagagtgcagcacggatacagtgagcttaaaagcagtgttgcacaagtttgttttctactcatccttctcaatgcatttcttggtaaatctgttactcccacacaggtattttctc

SEQ ID NO: 69590 - DNA, 599 bp, Chicken  19866894341842_1
  misc_feature (1)..(3): n is any nucleotide
nnngggggcctgtgtattttaataatgcttctaatctaatcagctgtcatgatctgacctaggcagcagccccatcagtacctcaactcttaattgaaagataggctttgcggctggctgataagccatatatttttgacaaccttttaaggatggagagaggctgtgtgttataggaaatctaattccctgagcagccagcgtgtccacccttgcttttcagggatatttgaagcagcttgtttcaagcctctgtgataggtgtggcagtgctggtcccaacttctggtacggggctcrttactctcctccctctgtgaggtttggccaaatcctggtaccttggtcttatctttccccaaaccaacagcaaaatgctgtaggcagcatgctccctccctgacaaatcctgttgcactgggtgcctattgcagcttggtcacatcgaggcaactctaatgcaccagttttgaactgatgyacctgtgcacattcagagtttatggctataaggccatgtggcttaattcactttctagtccaaattaagatctgcccttgaggtgcacaccaagcgatccagcaatgttaaacaaatc

SEQ ID NO: 69591 - DNA, 600 bp, Chicken  19866894341842_2
ctaattccctgagcagccagcgtgtccacccttgcttttcagggatatttgaagcagcttgtttcaagcctctgtgataggtgtggcagtgctggtcccaacttctggtacggggctcrttactctcctccctctgtgaggtttggccaaatcctggtaccttggtcttatctttccccaaaccaacagcaaaatgctgtaggcagcatgctccctccctgacaaatcctgttgcactgggtgcctattgcagcttggtcacatcgaggcaactctaatgcaccagttttgaactgatgyacctgtgcacattcagagtttatggctataaggccatgtggcttaattcactttctagtccaaattaagatctgcccttgaggtgcacaccaagcgatccagcaatgttaaacaaatctgttttccttcaggtgagttatcctgcctgccctcacacaagcagagttgtagagggtgacaggcacatggccaagcgaaaaaagtacgtgcttagccctaaggaaatggagctctctgtcgtgttcaggttttgggaatgatttacaacttccatttccatggcaaccccatcccaagacc

SEQ ID NO: 69592 - DNA, 600 bp, Chicken  19866894341842_3
ttatggctataaggccatgtggcttaattcactttctagtccaaattaagatctgcccttgaggtgcacaccaagcgatccagcaatgttaaacaaatctgttttccttcaggtgagttatcctgcctgccctcacacaagcagagttgtagagggtgacaggcacatggccaagcgaaaaaagtacgtgcttagccctaaggaaatggagctctctgtcgtgttcaggttttgggaatgatttacaacttccatttccatggcaaccccatcccaagacctgttctgtaaagggactgyttgatgttgacgtaatgtcatcagtttttctcagctctgttccttgctctgcttaactaaagtgttggttgcagtcttttgttttgcactgctggacgtggagctgtcacattacccttggcctttgggtaaggcagtatttggactgagtcactgcagtgaggctgctcctttggtcaagggagcctttatgctgagataagatcccatttagtgattcagcctccaggaagagctcagatgaggaaaaaggcactgttgtgtcacactgtgaatgtatgggatgtccagactgcaaat

SEQ ID NO: 69593 - DNA, 599 bp, Chicken  19866894341845_1
  misc_feature (1)..(39): n is any nucleotide
nnnnnnnnnnnnnnnnnnnnnnnnnnnnnnnnnnnnnnntggaataggtgatacagcccttggataatctttgtggcacttttctggaccctctccaaaagctccacatctttcctatattggtggccccagacttggacacagtagaggcagagggcagactagaagaggataatcacttcactgtcctcactggccaccctgcttctgatggaaccaaggatacaagaaagacagagagctgttagagagagtccagaggaggtccacaaaagtgatcagagggctagagcacctccmctatgaagacaggctgaaggagatgggctttttcagcctggagaagagaaggctgtggggtgacctcattgcagccttccaatacctaatgggagyctacatacaggaggggagtcaactctttacaagggtagataatggcaaaacaagggcaaatggttttaagctgaaggagggaagatttagattagatatcagggagatgttcttcaccaagagagtggtgaggtgctagaactggctgaacagagaggttgtggatgccttgtccctgggggtgttcagggccaggttgtatg

SEQ ID NO: 69594 - DNA, 600 bp, Chicken  19866894341845_2
aaaagctccacatctttcctatattggtggccccagacttggacacagtagaggcagagggcagactagaagaggataatcacttcactgtcctcactggccaccctgcttctgatggaaccaaggatacaagaaagacagagagctgttagagagagtccagaggaggtccacaaaagtgatcagagggctagagcacctccmctatgaagacaggctgaaggagatgggctttttcagcctggagaagagaaggctgtggggtgacctcattgcagccttccaatacctaatgggagyctacatacaggaggggagtcaactctttacaagggtagataatggcaaaacaagggcaaatggttttaagctgaaggagggaagatttagattagatatcagggagatgttcttcaccaagagagtggtgaggtgctagaactggctgaacagagaggttgtggatgccttgtccctgggggtgttcagggccaggttgtatggggccctgggcagcctggcctagtattgaatatggaggctggcggtcctgcctttgctgggggcggggggttggatcttcatgttccttgaggtctc

SEQ ID NO: 69595 - DNA, 600 bp, Chicken  19866894341847_1
ttctattggatggtaatagtacaaaaatgtactttctatttgaggtcattgattgtcaaaacaataatatcttaagtctttagagtgttcaaatctcagatattcttgaaatactttctgcaagaagcatgaaaatgttgtcttgaataatatcttgctgaattcttcatggcaatccatattaacaaaaaatctgctcagctcttctgcaacaagtgaaaacttaaatatattagatactctcttctataggaagataaagctacaatccaatccagagcagtcacaagattttatgcyctggaatgagagaygtatgtacagtgttatggcatgctgatggtgaagtagagtggttacagtccctctgtacttttccttccctccatccagtatatccacatctatcttactcttatcagtgagagttcaagctgtatgagagctgatatcaacatacagattgctactcatcaactacattggaggaaatattccttccttctcggaaagaataatgtctgtcacccacttgtctttatatgcaacatgttcacctcatacattcatacaaatgaagtaccagtctacatatttcaa

SEQ ID NO: 69596 - DNA, 600 bp, Chicken  19866894341847_2
aatagtacaaaaatgtactttctatttgaggtcattgattgtcaaaacaataatatcttaagtctttagagtgttcaaatctcagatattcttgaaatactttctgcaagaagcatgaaaatgttgtcttgaataatatcttgctgaattcttcatggcaatccatattaacaaaaaatctgctcagctcttctgcaacaagtgaaaacttaaatatattagatactctcttctataggaagataaagctacaatccaatccagagcagtcacaagattttatgcyctggaatgagagaygtatgtacagtgttatggcatgctgatggtgaagtagagtggttacagtccctctgtacttttccttccctccatccagtatatccacatctatcttactcttatcagtgagagttcaagctgtatgagagctgatatcaacatacagattgctactcatcaactacattggaggaaatattccttccttctcggaaagaataatgtctgtcacccacttgtctttatatgcaacatgttcacctcatacattcatacaaatgaagtaccagtctacatatttcaagttgtgccattgtg

SEQ ID NO: 69597 - DNA, 600 bp, Chicken  19866894341870_1
aagggataaaacagacctgtcggaaacatgggcttgaatatttagagtcgtactgggaaatctggagattgagaaacatggaaagattgtttaaataactgttcataacatgagtccatgtagttcagtgatgcttctccaataggagccagacatctgagaaacaggttgacagatgtagatggcattttacaaagcactttgaaggaactcaaaggggaaacaactgcattgttagctgcagcacgcaaactcttgttctaaattgcctctgtgttcaaggctaagagagcagagagwgtaggagcacattttaracatatttttttaggtactgaggaattacagatttataatcatgatgtctgttccaggacaattactaaatcagaaggtatagttcagaccgaaaaaatcagcaacaggcaaaatcaactcattaagtatgagaattccattcaagaatggatttgacctcagagaataacagtgagtgtaagctggagcaataaaggatttctgcacctacaagttagaagtcacaaaacacccagtgaagggatgcagaagagaagtgaatgaaccagagcagaaaacagg

SEQ ID NO: 69598 - DNA, 600 bp, Chicken  19866894341870_2
tgtcggaaacatgggcttgaatatttagagtcgtactgggaaatctggagattgagaaacatggaaagattgtttaaataactgttcataacatgagtccatgtagttcagtgatgcttctccaataggagccagacatctgagaaacaggttgacagatgtagatggcattttacaaagcactttgaaggaactcaaaggggaaacaactgcattgttagctgcagcacgcaaactcttgttctaaattgcctctgtgttcaaggctaagagagcagagagwgtaggagcacattttaracatatttttttaggtactgaggaattacagatttataatcatgatgtctgttccaggacaattactaaatcagaaggtatagttcagaccgaaaaaatcagcaacaggcaaaatcaactcattaagtatgagaattccattcaagaatggatttgacctcagagaataacagtgagtgtaagctggagcaataaaggatttctgcacctacaagttagaagtcacaaaacacccagtgaagggatgcagaagagaagtgaatgaaccagagcagaaaacaggaaaatccatcccagtgt

SEQ ID NO: 69599 - DNA, 600 bp, Chicken  19866894341870_3
gctctggctggatgcctgctggaggccaaggagccatccttgcactgcaacatttggtcccgattcactctcttcacagcactcatgatcttatgcatgtcagatattttccttccactgtcctttaccaggacagacagacctagcccacatcagcattccatgatcagatgcgtttcagtgtgtttgaccatccttgtaacccctcactgaatcttttccaccttttattattcttgaaatgagaaagtacgttgattcctatccaacttccacatggcctttttgatatttattgayttctgtcatgcccttcccgtagttgtctctgtgcaactgacgagtcataaccatagccattccattatggaaataagtccatcctgtccattatccttgtttcctttctcttaaccttttccttttctactcaattatttctaatgattgattctgtaggcttgtcatccttatgcaacagagtaaacccctgacctccattttcttgactgcttatgatgtctcaagcagattctgttctgtccttgcaagttgcttctgtcagagtttggacactgttggagacatgatgctgcatga

SEQ ID NO: 69600 - DNA, 600 bp, Chicken  19866894341872_1
gacactagccaagggcttaataaaatacacaagccccacacgcaaaaaaaataggcaaaataaacagaaacctatggcaactccaaacataacaagatggacctcataaggaggaattaacagtaaatctctcaataatgtgcctttcgtggccagaggtctgctatctccccagggtatggagcacagagaaaccaaattaagctgtggttatctgatgtctctggtgagattcacttcgtcctacgctggagctcagtgggtagctcaagcccaggactgggagtcagaaagtctgcrttcagttcccagttctgccacaggcttgctctgtagcactggttgacttacacagcctttgtttgcctcagtttccatggcttagaaagtgagaggttgcaacagggctgcgatacaggaggatgctgcaaagcccagaacaaggckacttgcacatctgccagctcacgggaggtaaccactgtccaatgtggcagcttctggatgttcaccgtcacatattattgagttcttcagattcctgaggggaaggacacctttcagaactgccctgttctatggacagcagactgagtgatt

SEQ ID NO: 69601 - DNA, 600 bp, Chicken  19866894341872_2
cgtggccagaggtctgctatctccccagggtatggagcacagagaaaccaaattaagctgtggttatctgatgtctctggtgagattcacttcgtcctacgctggagctcagtgggtagctcaagcccaggactgggagtcagaaagtctgcrttcagttcccagttctgccacaggcttgctctgtagcactggttgacttacacagcctttgtttgcctcagtttccatggcttagaaagtgagaggttgcaacagggctgcgatacaggaggatgctgcaaagcccagaacaaggckacttgcacatctgccagctcacgggaggtaaccactgtccaatgtggcagcttctggatgttcaccgtcacatattattgagttcttcagattcctgaggggaaggacacctttcagaactgccctgttctatggacagcagactgagtgattgctggaagatgtggcacttcttaattgcaggaggtttgtgagcctgaatgctgagcagtatggagagggaagactgcagcaccctggtccctggagcctgaagctgcattgctcagtgtggtgctaacagtgtgggcaaggtgggct

SEQ ID NO: 69602 - DNA, 600 bp, Chicken  19866894341874_1
gccatggagctcatgcattagcagccccacgtgctgcgttttactttcttaaatccaggtttctggttttgaagcttgcatgagaagagccaaagaaatgaatatttctaatttttgagactctctttctggaaaagcagtttccaaaagggagcagtgagtgaggctgtacctccatctgaataaacggcggttttgccattcattgcagcagaagaaagattttaccctctcctgcagaagcaatcagctccacataacttacttttatttcatttcttaaaattagatctacaaaascaatggtttctttaagcaagaggagctgtaaatttcatgccttgaatgcctgtgcattattaaaaataataggttatatttgtcaaatggataatgagtaggtttctttctctgtttttcagtattttaatgagtacaggaaatgtttgctatttatttgctttcaggttttaccaaggagctctggagataattgtcaaatttccaaatgcgtatcaatatttcatgaagtgctgtttttcctctgttcatgaaggagttggtctattagcactaggaacactcctgcaatgccacagc

SEQ ID NO: 69603 - DNA, 600 bp, Chicken  19866894341874_2
ttagcactaggaacactcctgcaatgccacagccccatgtcctgccacatcccccccttggccccatgcctgggctgtgcaggtcggggtgtgccttacacagatactggatccatccaggttgtgctatggaaaaaaatattccacctttcctaccagcagccaattaaatgctcttgaattattaaagctcagattgcttttaaatatagcagtgttggtagtgttgtgcatgggtgttggctgtccacctttcagttggttctgtgtggtcagcttgactgggacatgcagtgctgrctgtgtgttagcagctattgttctggtytggatgcttgccattgagaagtggtttggttgtgcatgcagtagagtgcttccttctttgcttctgacatttcagtttcatgtgaaattcctgttcttgctattaggctacttaccctgtttctggtttactccccctaaaactcagatgtgtcagactctgctcctgttaatgaatgataagcctgttgagctcattgcagtgctcttgaggaagaaaacataactcagaaggtgaaaatgattcatagatatcggcccactgtgtgctgc

SEQ ID NO: 69604 - DNA, 600 bp, Chicken  19866894341874_3
acagccccatgtcctgccacatcccccccttggccccatgcctgggctgtgcaggtcggggtgtgccttacacagatactggatccatccaggttgtgctatggaaaaaaatattccacctttcctaccagcagccaattaaatgctcttgaattattaaagctcagattgcttttaaatatagcagtgttggtagtgttgtgcatgggtgttggctgtccacctttcagttggttctgtgtggtcagcttgactgggacatgcagtgctgrctgtgtgttagcagctattgttctggtytggatgcttgccattgagaagtggtttggttgtgcatgcagtagagtgcttccttctttgcttctgacatttcagtttcatgtgaaattcctgttcttgctattaggctacttaccctgtttctggtttactccccctaaaactcagatgtgtcagactctgctcctgttaatgaatgataagcctgttgagctcattgcagtgctcttgaggaagaaaacataactcagaaggtgaaaatgattcatagatatcggcccactgtgtgctgctctggagagagctgtacaaaaatattca

SEQ ID NO: 69605 - DNA, 600 bp, Chicken  19866894341874_4
aggaagaaaacataactcagaaggtgaaaatgattcatagatatcggcccactgtgtgctgctctggagagagctgtacaaaaatattcatgggtaaactgttgtggctttttaactgttacaaatggctgggttgccatacctgcttcactggtcatagcggagaggtggctgtgcaaagagcaaaaattgagacttaaagttttactcagctgagcccaaggtggaacatcagcgtggaaacctaaagagggtatggagagctggaaggtgagtgggaattgcacccaggtctacagsctactcagaaggagtggtaatgcrttggcacagctgcccagggagtgctggggtcaccgtccctggaggtgttccagaactgtgggaatgtggcactgagggatgtgggcatgatgggggtgggtgggctgggcctggaggattttggaggtcttttccagctgtgatctccatgactaagattttatgacaaagggagatgggacgtgctgtagaggcaggacgtggcacgtgctgtgacagcagcagatgtgcaagacctgtgggtcaggagacccagaaagagcttgcttggctgct

SEQ ID NO: 69606 - DNA, 600 bp, Chicken  19866894341874_5
tgaaaatgattcatagatatcggcccactgtgtgctgctctggagagagctgtacaaaaatattcatgggtaaactgttgtggctttttaactgttacaaatggctgggttgccatacctgcttcactggtcatagcggagaggtggctgtgcaaagagcaaaaattgagacttaaagttttactcagctgagcccaaggtggaacatcagcgtggaaacctaaagagggtatggagagctggaaggtgagtgggaattgcacccaggtctacagsctactcagaaggagtggtaatgcrttggcacagctgcccagggagtgctggggtcaccgtccctggaggtgttccagaactgtgggaatgtggcactgagggatgtgggcatgatgggggtgggtgggctgggcctggaggattttggaggtcttttccagctgtgatctccatgactaagattttatgacaaagggagatgggacgtgctgtagaggcaggacgtggcacgtgctgtgacagcagcagatgtgcaagacctgtgggtcaggagacccagaaagagcttgcttggctgctccatggcaagagcagtggctgttg

SEQ ID NO: 69607 - DNA, 462 bp, Chicken  19866894341885_1
agtcacctaaagtagctttctctcagcaaaatcttggtgaatttatactgaataaatactgccactttttgtatgaaaagccaattttgacatagttttaaggaggctgagacactcccaggcttggtcacacagagctgcacctcgggtgaggcagcatcactgtctgacccaccagtatttacttgcaggggtgcactgatgcctgttcaaacaagacgtgggtaaaaccagttgggcaccacagtaggtaaagagtgacagctgttttgtgagttactgctcagcctctcagtgctscatttgcacctctccacacaccacaggtggtgcagtaacacacaaatcacccggcaacagtaatgcagactaaagtccaagttacactttggggtttctaaaatctaagcttcttccccagcaaaggaccacattggaaaacactccggtgaaggtattctg

SEQ ID NO: 69608 - DNA, 600 bp, Chicken  19866894341886_1
atattaaaagtactcagagttttaatcacctgtcttattgagtaaaataggaattgttcttaaagctagcctggagaatgtgtgtgggaagtgggcactgcggggaggtgttgataggcatgatcatctactaagtcaaactgtgttttgagaaaagtggaggaatgcacgtttcatgagccctgaaggagttgagtgatgggaaatgaagtctgcagttcactgctgtcagattgcagacagatatgtacatagctagtaagaagaatttggtgccatagcaattttagtaaaggaagyataggctctggaagactcagttttgatagtgtttttgtgactgctagcattgkcttgaaacaaagttttactggaattaaattacgttaccttacccaagtaatccttgtgggtataatgatcatataacaactgaaaaagtggtcaaaagacagggaccggagaaggaaacaaacattagagctgttcttattatttttaatatatttccacctgatccagaatgacagaatcaacagaattgtaatatttcataccaagtagacatctgacttttctttgctaattttataatcatgt

SEQ ID NO: 69609 - DNA, 600 bp, Chicken  19866894341886_2
ttgttcttaaagctagcctggagaatgtgtgtgggaagtgggcactgcggggaggtgttgataggcatgatcatctactaagtcaaactgtgttttgagaaaagtggaggaatgcacgtttcatgagccctgaaggagttgagtgatgggaaatgaagtctgcagttcactgctgtcagattgcagacagatatgtacatagctagtaagaagaatttggtgccatagcaattttagtaaaggaagyataggctctggaagactcagttttgatagtgtttttgtgactgctagcattgkcttgaaacaaagttttactggaattaaattacgttaccttacccaagtaatccttgtgggtataatgatcatataacaactgaaaaagtggtcaaaagacagggaccggagaaggaaacaaacattagagctgttcttattatttttaatatatttccacctgatccagaatgacagaatcaacagaattgtaatatttcataccaagtagacatctgacttttctttgctaattttataatcatgtataaaatcattatatatttaggtattgttagtatatatttaagttttcttttt

SEQ ID NO: 69610 - DNA, 600 bp, Chicken  19866894341887_1
ttagatagtcactgatcagcacaactgagagcttctgcctgaaactaccaaatcaaaatgaggtctctgaagaagagattacttcagtcatccacatgaatctcaaaactgtgtcagtacacttaaagtgttaggagactggtagcaatcaaaggagtatttggttttctagcgcacaaaaagacccaagagcgtacaggctgctattcagtaactaaacactgaccctgttgaatgtaatgttaaaagtcagattgattttaatgagatcagaattgaacccttggggcttaaaagggraaaaaaaaaaaaaaaaaaaaaaaaaaaagatgagtgagggaagacttaatctttcctttagattttagcaagatttttctaagattttgcaaagcattgatcagactgcaccttatcccatagcagagcttatgtcagtcaacacagctgtacaagtctgctttgactcaagcgccaggaattagctggaaatttagcgtcactcaactaaccatgttccttgctcagcctgcaggcccaaaacattctgatgctgttcacagaaggggattaatagtttgcatgcagttcacattttgt

SEQ ID NO: 69611 - DNA, 600 bp, Chicken  19866894341891_1
ctgaaggcagagcggcattatctgctaatccacattgtgctcacagcatcagctgagcatcgatgggatctgagtaagagcaagacaaaagccaaagaaagagcaactgggctccatttcccaggacaacacgtaccgttacaatgcaatgttctgttcatcactggaaggaatgtaaaatggcatttcagccttttccagtgagcaaagtcttctgttaggctattccatagatatctgggtaggtgttttgcactatcaccagtggaacaacagtggccatttttctttctttcactmaatttgaacactgatgcaccaagtatttcgtacacataaattggtactacaaagaattggttagcacctgaataaatgaagagattctcatgggcagtgctggataacagagcagcacagctgcagagtccaggggaagttacagctctgctgtcactgtcactcctttcattcagctatcttcagtgcgatgggtgaaaaattctcaagcctttaaaatgccccagaactgaggcacacamatcatttctccatgtcataggtgaagccaactcacatacaaagggctcggggaagtca

SEQ ID NO: 69612 - DNA, 600 bp, Chicken  19866894341891_2
taggtgttttgcactatcaccagtggaacaacagtggccatttttctttctttcactmaatttgaacactgatgcaccaagtatttcgtacacataaattggtactacaaagaattggttagcacctgaataaatgaagagattctcatgggcagtgctggataacagagcagcacagctgcagagtccaggggaagttacagctctgctgtcactgtcactcctttcattcagctatcttcagtgcgatgggtgaaaaattctcaagcctttaaaatgccccagaactgaggcacacamatcatttctccatgtcataggtgaagccaactcacatacaaagggctcggggaagtcacagtcctcccagcactgtccggctgtgccggagtgcaccatgagggacgctttgggtggaagcagtgatcggcggtagccgtgctgcagagcagatgcttgggggaagataacagtagcactgtggctgtgcatcctctcggcttccggcagtctgcagctcggcgacttcctgaaccagaactttcatcctgagagttttctcttccacgaatgttttttgtttctttttgaacccatctc

SEQ ID NO: 69613 - DNA, 599 bp, Chicken  19866894341895_1
  misc_feature (1)..(57): n is any nucleotide
nnnnnnnnnnnnnnnnnnnnnnnnnnnnnnnnnnnnnnnnnnnnnnnnnnnnnnnnntcaccatggtgagcttaagtgcagtgatgtttatttgctttgaagttggtcagagtatgtgacaaaccacgaatgttgggtagatcatgatgatggagcgtattccagtatgatggaaacagcagacttcctaatatgagtcatttatactatgaggatgtttccggtagtattctgcagctctgtgtagtttaaatctcttttgttttggacacttctgcttttaagctttttttttttttycccttgatctaccagggaaaaatagatgatgatcttgtaaatacaaatgtgtaccaatcagggctgtgactaaggagaacattttcttttaaatttgatagaacaaaggtcgtgactgttgtgttttgatataaatgcatctagagataaattctgaatagctatggctaatctacttagagagaaattgtagatacctgaatttgaaaagctatttaacacttgaaaggtttttatggaatgtaaccattctgaaagacagagttttatcaacttagttctgaagtggtgccgcagat

SEQ ID NO: 69614 - DNA, 600 bp, Chicken  19866894341902_1
aattaataagtacttcagatacaactgagaacaatgtcaatagttaacaccattcccttcaaaataatacagataatatattacttgtataacaaaaatgtataaactacaaagcaaatcaagttgttttggaatagctattgagctgtaacactaaaatagactagagatatttaaaaaccatagaaaagatagaaataacattgccactgttcttcttaaagaacaataacaataatatgaatgtgtgggtaagcacttttgccctcactacttttgggcccctccactgaacaactkcttgtttgtccatgccttacctgcactgaagggtccaaacagcatgcagtactataggaatggtctgacaaatgatatgcagaggaaataaactgcttgatccactgactatacttatcctgacatagctgaagatgctgctagccttcatcactgtcagcacaccctttggctaatgggcctaccagaatatctgggactttcccaacagagctgttccctggcctgccagttcctagatagtatcagtgcaggggattagtccatgccaagtgcagggctctgcacctgtcctggcta

SEQ ID NO: 69615 - DNA, 600 bp, Chicken  19866894341914_1
gacttaggatctttgcacatttagttccgtagctaatgtcttataagtattaatggttgtatttcttcagatagtagttttctgttgatacagatgtgggataccacaaatgctatgtttagactttactgtggaaaaagttcacttgacattcatatataactggagatactctttgtgacaaatagagaatgtactgtacattttagtaatacaattttaaacataaatattagcaattcatggaagttaatgtcactgcagtctctttagaagtcttactgctctcagtcaggaaarctacgttaattgattttgtgtgttaaaatttgagataaattcattttataaaaccgacattaatgcaaattgttgaaaattggaaggtctaccagtgtctgctctaaagaaggctgcaaaacttcaagcaaagccgatgtatgcaagtgtacgtcagtatgcatatacacatcttgccaccaaattaagtcaaaggaatatgctttaatgctctgtaacagatgtgaagtaccactggagttaaaacccaaacaaacaaaactccttttcactttgatactacccttgacgttttttcag

SEQ ID NO: 69616 - DNA, 600 bp, Chicken  19866894341916_1
gatttggtagtccttgtgattactgtcagcttcagttacaggtctagctaggatccagctttccaagcacttctgcatgttcaactggttgagtgtctcttatctctcagcctctgcactgcttccttgcacacagggatgggactgcagggtgcataatttcatttgacttgctctaatattaatatctccatgtgcagccgtcattgcactgagaataaactgttattttttattttaaatggttaatattcatcaaatgtttatgaaaatacttaacccataatgatgacaaacacrgtgcctaataaagatagaagtgaagatcctctttgtgaatatgtaaccagaagagtaaagaaaattacattaaaaagacttcattatgccattaaatgtgagaaatgactttttcttctccattttaattttagcatatttctttttttcttttttgctttttaaatatcctaacactttcatgagacgggtacataaagagacactggctgctgtaaccagaagaactctgactggtggcatccatcattctcatccacattttcacttcatttatcattaagaaaaatcaacacaatt

SEQ ID NO: 69617 - DNA, 600 bp, Chicken  19866894341916_2
actgcagggtgcataatttcatttgacttgctctaatattaatatctccatgtgcagccgtcattgcactgagaataaactgttattttttattttaaatggttaatattcatcaaatgtttatgaaaatacttaacccataatgatgacaaacacrgtgcctaataaagatagaagtgaagatcctctttgtgaatatgtaaccagaagagtaaagaaaattacattaaaaagacttcattatgccattaaatgtgagaaatgactttttcttctccattttaattttagcatatttcrttttttcttttttgctttttaaatatcctaacactttcatgagacgggtacataaagagacactggctgctgtaaccagaagaactctgactggtggcatccatcattctcatccacattttcacttcatttatcattaagaaaaatcaacacaatttctaccaatgattgtaatttttttctttattttccctagggagcgagagatccttattactgctttgaatgcaacaygttgtctcaaaaccatctgtagagctgctggcccagagtcattcctctaactaaggggtttactaa

SEQ ID NO: 69618 - DNA, 600 bp, Chicken  19866894341916_3; identical to SEQ ID NO: 69617

SEQ ID NO: 69619 - DNA, 600 bp, Chicken  19866894341916_4
ggtgcataatttcatttgacttgctctaatattaatatctccatgtgcagccgtcattgcactgagaataaactgttattttttattttaaatggttaatattcatcaaatgtttatgaaaatacttaacccataatgatgacaaacacrgtgcctaataaagatagaagtgaagatcctctttgtgaatatgtaaccagaagagtaaagaaaattacattaaaaagacttcattatgccattaaatgtgagaaatgactttttcttctccattttaattttagcatatttctttttttrttttttgctttttaaatatcctaacactttcatgagacgggtacataaagagacactggctgctgtaaccagaagaactctgactggtggcatccatcattctcatccacattttcacttcatttatcattaagaaaaatcaacacaatttctaccaatgattgtaatttttttctttattttccctagggagcgagagatccttattactgctttgaatgcaacaygttgtctcaaaaccatctgtagagctgctggcccagagtcattcctctaactaaggggtttactaatttgtaa

SEQ ID NO: 69620 - DNA, 600 bp, Chicken  19866894341916_5
acttcattatgccattaaatgtgagaaatgactttttcttctccattttaattttagcatatttctttttttcttttttgctttttaaatatcctaacactttcatgagacgggtacataaagagacactggctgctgtaaccagaagaactctgactggtggcatccatcattctcatccacattttcacttcatttatcattaagaaaaatcaacacaatttctaccaatgattgtaatttttttctttattttccctagggagcgagagatccttattactgctttgaatgcaacaygttgtctcaaaaccatctgtagagctgctggcccagagtcattcctctaactaaggggtttactaatttgtaagtatgcatgcacctatttttgcctgatggcctggggcttgaaactcacacctctgaaactaatagggtgaatctttgctgttcgaattgaaatgttaaaagtagggtcttctgatagattcatttagggctgtgtgttggtaggtccaaaaaaaaaatgggtcagacaataggtggcatgtcttccacaactgcccaaaacgtcacattcccaggccagtaagaaat

SEQ ID NO: 69621 - DNA, 599 bp, Chicken  19866894341927_1
  misc_feature (1)..(118): n is any nucleotide
nnnnnnnnnnnnnnnnnnnnnnnnnnnnnnnnnnnnnnnnnnnnnnnnnnnnnnnnnnnnnnnnnnnnnnnnnnnnnnnnnnnnnnnnnnnnnnnnnnnnnnnnnnnnnnnnnnnnnnctcttagagtactgactgacagggagagcagcaggtatctacaggatgcctgcagggctgcagagaacagaaggatccagcgtgctgtaggcaaactccagtccttctgtgctgctttgttatcccaactagaaactattggcaacagagccatcactttgctaccacaaacgcaggacagyggagcaattaatagttttaacagttcgagatgaattgcagcaaccctacagttcaggctcaccaacaaattccagctcagctctcaggatcacctacctgatcctaaaagctcttctagtctttcaagtataagatatraggcattatcctcacaaatggttacttcattttgttagaagtgcccaaactttgcaagtttcaagcacagaaagttttgtgctggtaatctagctattccctctactacttctctgttctcttttacacaaagtatatctgaagtcctaaaacagctcca

SEQ ID NO: 69622 - DNA, 600 bp, Chicken  19866894341927_2
gggagagcagcaggtatctacaggatgcctgcagggctgcagagaacagaaggatccagcgtgctgtaggcaaactccagtccttctgtgctgctttgttatcccaactagaaactattggcaacagagccatcactttgctaccacaaacgcaggacagyggagcaattaatagttttaacagttcgagatgaattgcagcaaccctacagttcaggctcaccaacaaattccagctcagctctcaggatcacctacctgatcctaaaagctcttctagtctttcaagtataagatatraggcattatcctcacaaatggttacttcattttgttagaagtgcccaaactttgcaagtttcaagcacagaaagttttgtgctggtaatctagctattccctctactacttctctgttctcttttacacaaagtatatctgaagtcctaaaacagctccactttccttacaagcagtacagggtagcagacatttggaacatcagcctgtaactaaagttcccaaagttttgctttatgatcatttatggactaagggacagcagaatggcaggtataataaaattaactgcagtataat

SEQ ID NO: 69623 - DNA, 389 bp, Chicken  19866894341933_1
ccctgaccaacagaggcaggaaatagcaatggtgagctaataaataaatggtacagcggcggctctgccttacatggtcttcgtggggagtttcctttgtttaccaggttggttatttataccttgaagcatgagaatgatgtcaaccagccctgaggctttctgtgagattgagatgtcctccagcatggggctgcccacgcttcatctccatcctgtccatctcagtggtgtcccccaaaagggaatgtggggatgggggtcccccacctgacagggctttgctgcagcgggatgggragagagaaggcatcgggagttcaaggattgcttgtgaacttgagacaagcagagctcttgccggtgacacatgcatcaggtgttccaag

SEQ ID NO: 69624 - DNA, 600 bp, Chicken  19866894341940_1
gccaatgacagcaggggcaggggaggtgctgtgctggcagcttattgctgtatgtacttgttggctcacgtgatgggctatgctgttacaaggggcacacacagcgctctgctggctgggaacacatctggggccactactgctgtgataaccatcagctcgtctggatgcagagagcacagcgcccattgactgagcactgctgcctgaccatcagtacatcacaggaccctagatgctttctatatgcccttacatttcagttttaaggatgctctaaaatggaaaaaacgcagcttmgattctcttagggggattcttcacatttcatgcccatgttttattacttccagtctcccaggctttccacgctgatgggaagtacgttggacagaatgcacctttgaatcaaagyagctgccagttcctatcgctgggagtttaggtagacagccaaccctgctatcctactgccctgctgattgcacagcacaattaccccggataacggcaatcactgtcaggttcacggccattaaaccacccatgtactcactyaactccagtaaacaaagttagcagtaggctgacttctcatca

SEQ ID NO: 69625 - DNA, 600 bp, Chicken  19866894341940_2
ctgggaacacatctggggccactactgctgtgataaccatcagctcgtctggatgcagagagcacagcgcccattgactgagcactgctgcctgaccatcagtacatcacaggaccctagatgctttctatatgcccttacatttcagttttaaggatgctctaaaatggaaaaaacgcagcttmgattctcttagggggattcttcacatttcatgcccatgttttattacttccagtctcccaggctttccacgctgatgggaagtacgttggacagaatgcacctttgaatcaaagyagctgccagttcctatcgctgggagtttaggtagacagccaaccctgctatcctactgccctgctgattgcacagcacaattaccccggataacggcaatcactgtcaggttcacggccattaaaccacccatgtactcactyaactccagtaaacaaagttagcagtaggctgacttctcatcaagactgtaacagtttccagttgactttggcttgcgtttccatgcctgagaaataaaacacagtcccagraaagacacagaaggccgcagatgctccgattggtgggacaaaacgc

SEQ ID NO: 69626 - DNA, 600 bp, Chicken  19866894341940_3
ttcagttttaaggatgctctaaaatggaaaaaacgcagcttmgattctcttagggggattcttcacatttcatgcccatgttttattacttccagtctcccaggctttccacgctgatgggaagtacgttggacagaatgcacctttgaatcaaagyagctgccagttcctatcgctgggagtttaggtagacagccaaccctgctatcctactgccctgctgattgcacagcacaattaccccggataacggcaatcactgtcaggttcacggccattaaaccacccatgtactcactyaactccagtaaacaaagttagcagtaggctgacttctcatcaagactgtaacagtttccagttgactttggcttgcgtttccatgcctgagaaataaaacacagtcccagraaagacacagaaggccgcagatgctccgattggtgggacaaaacgcggatcacaaacgactctatttttatagatggcttggaaggtggcattgccgctccacgaccccggggaggatgtttggtgtgtcaccctccaggaaggtctgcctgcatcgccagggaacgtcagggaaaccaacacagagtg

SEQ ID NO: 69627 - DNA, 503 bp, Chicken  19866894341940_4
cgctgatgggaagtacgttggacagaatgcacctttgaatcaaagyagctgccagttcctatcgctgggagtttaggtagacagccaaccctgctatcctactgccctgctgattgcacagcacaattaccccggataacggcaatcactgtcaggttcacggccattaaaccacccatgtactcactyaactccagtaaacaaagttagcagtaggctgacttctcatcaagactgtaacagtttccagttgactttggcttgcgtttccatgcctgagaaataaaacacagtcccagraaagacacagaaggccgcagatgctccgattggtgggacaaaacgcggatcacaaacgactctatttttatagatggcttggaaggtggcattgccgctccacgaccccggggaggatgtttggtgtgtcaccctccaggaaggtctgcctgcatcgccagggaacgtcagggaaaccaacacagagtgactcagcccagcgt

SEQ ID NO: 69628 - DNA, 600 bp, Chicken  19866894341942_1
gagtctcagcctccaagaaaaccctacaaacagtcatactcactaaattttagaactttggaaaggaaacggcattagattggactaccaaaactggaattatgaagtggtacaagaaactaaacagaatgaaaatgacatctgctgctgcataaactaagcaaaacgcccccatttactgctaaggttgaatcgatgaactggtattactttaaaaaaatggtaaaacctattcacataatcaattccatcaacagcgctggcaatagagtgatgtgcaagaaaagatgcttatgcacrcmggtaactgaaaggctttgttgcagattaaattgttcataaagatgtgccatcatcaaggtgcgacagactgttctcaacagaatatactcaaatcagtattgatgaaacaatactcccctgttgttttaagcaccttggattacaaaatacaaggaaggaacagtttgggactgtaagcaccgaggtggctgtagactattttagtaaatttctcattattttgaggtaaagccctctggaaagccagaaactgcacagaacactgcaggcctaaagcaattcattttccatcctaaa

SEQ ID NO: 69629 - DNA, 600 bp, Chicken  19866894341942_2
gtctcagcctccaagaaaaccctacaaacagtcatactcactaaattttagaactttggaaaggaaacggcattagattggactaccaaaactggaattatgaagtggtacaagaaactaaacagaatgaaaatgacatctgctgctgcataaactaagcaaaacgcccccatttactgctaaggttgaatcgatgaactggtattactttaaaaaaatggtaaaacctattcacataatcaattccatcaacagcgctggcaatagagtgatgtgcaagaaaagatgcttatgcacrcmggtaactgaaaggctttgttgcagattaaattgttcataaagatgtgccatcatcaaggtgcgacagactgttctcaacagaatatactcaaatcagtattgatgaaacaatactcccctgttgttttaagcaccttggattacaaaatacaaggaaggaacagtttgggactgtaagcaccgaggtggctgtagactattttagtaaatttctcattattttgaggtaaagccctctggaaagccagaaactgcacagaacactgcaggcctaaagcaattcattttccatcctaaaaa

SEQ ID NO: 69630 - DNA, 600 bp, Chicken  19866894341942_3
ttgttcataaagatgtgccatcatcaaggtgcgacagactgttctcaacagaatatactcaaatcagtattgatgaaacaatactcccctgttgttttaagcaccttggattacaaaatacaaggaaggaacagtttgggactgtaagcaccgaggtggctgtagactattttagtaaatttctcattattttgaggtaaagccctctggaaagccagaaactgcacagaacactgcaggcctaaagcaattcattttccatcctaaaaacagttaaacgccatcatgtccttatttacycactgatgcatgtcaagcctgggtttgctgtcctttccttttcttaaatacatgttttatccaacttaatacggaatttatttaagccacgagatgagttattaatatgttctttcaatttttggaagataggaatatctcctttggctgagctgcataatagtccatttatcagtgagaaaagtctccagaggaatgagatttttgtctcaaatacacttttgcagctattggaaaagattcagcgtttttcttggagaagtatgtcattaaaggagaaagatgaggaaaatgcttgta

SEQ ID NO: 69631 - DNA, 599 bp, Chicken  19866894341951_1
  misc_feature (1)..(109): n is any nucleotide
nnnnnnnnnnnnnnnnnnnnnnnnnnnnnnnnnnnnnnnnnnnnnnnnnnnnnnnnnnnnnnnnnnnnnnnnnnnnnnnnnnnnnnnnnnnnnnnnnnnnnnnnnnnnncggcactgattttcacacatggagaaaacaaggggtaatctgagggctaaaaagaaaacattttgttttctcaaaggaggaccacaatgctgaatcgcacacaaaacatcagtaacgattacaaattatccaaaagacttcttctacttgatattatttcatttagctggcttagaaatagctcttcagcrcttctgtcagtgctttgaaccccatayagatrgcattaagtgttagaggaacataaaataagaccacataaagccttgtaaaagaacacctatacacaagaattccctgcattccatggaagagaacatagacaaagtgtttccagaagaacagaatggttggtggtgatcagtacctctgtataccaaatatttttaaaacaaatcacaaatgggagttaagctctgcagttgctttcatggagagcttgtgatgtacagagaaggctttataaatttggatgcatttcttttagttg

SEQ ID NO: 69632 - DNA, 599 bp, Chicken  19866894341951_2
  misc_feature (1)..(82): n is any nucleotide
nnnnnnnnnnnnnnnnnnnnnnnnnnnnnnnnnnnnnnnnnnnnnnnnnnnnnnnnnnnnnnnnnnnnnnnnnnnnnnnnnncggcactgattttcacacatggagaaaacaaggggtaatctgagggctaaaaagaaaacattttgttttctcaaaggaggaccacaatgctgaatcgcacacaaaacatcagtaacgattacaaattatccaaaagacttcttctacttgatattatttcatttagctggcttagaaatagctcttcagcrcttctgtcagtgctttgaaccccatayagatrgcattaagtgttagaggaacataaaataagaccacataaagccttgtaaaagaacacctatacacaagaattccctgcattccatggaagagaacatagacaaagtgtttccagaagaacagaatggttggtggtgatcagtacctctgtataccaaatatttttaaaacaaatcacaaatgggagttaagctctgcagttgctttcatggagagcttgtgatgtacagagaaggctttataaatttggatgcatttcttttagttgagactcatctaagcagcagagaaacca

SEQ ID NO: 69633 - DNA, 599 bp, Chicken  19866894341951_3
  misc_feature (1)..(77): n is any nucleotide
nnnnnnnnnnnnnnnnnnnnnnnnnnnnnnnnnnnnnnnnnnnnnnnnnnnnnnnnnnnnnnnnnnnnnnnnnnnnncggcactgattttcacacatggagaaaacaaggggtaatctgagggctaaaaagaaaacattttgttttctcaaaggaggaccacaatgctgaatcgcacacaaaacatcagtaacgattacaaattatccaaaagacttcttctacttgatattatttcatttagctggcttagaaatagctcttcagcrcttctgtcagtgctttgaaccccatayagatrgcattaagtgttagaggaacataaaataagaccacataaagccttgtaaaagaacacctatacacaagaattccctgcattccatggaagagaacatagacaaagtgtttccagaagaacagaatggttggtggtgatcagtacctctgtataccaaatatttttaaaacaaatcacaaatgggagttaagctctgcagttgctttcatggagagcttgtgatgtacagagaaggctttataaatttggatgcatttcttttagttgagactcatctaagcagcagagaaaccaaaaag

SEQ ID NO: 69634 - DNA, 599 bp, Chicken  19866894341956_1
  misc_feature (1)..(135): n is any nucleotide
nnnnnnnnnnnnnnnnnnnnnnnnnnnnnnnnnnnnnnnnnnnnnnnnnnnnnnnnnnnnnnnnnnnnnnnnnnnnnnnnnnnnnnnnnnnnnnnnnnnnnnnnnnnnnnnnnnnnnnnnnnnnnnnnnnnnnnntctggatttggcacttcatgacttccatctgtttcgaccaatgaaatatggactgcgtggccaatattttccttgcaattactctgtcagagtagctgtgaaacagtggtcacctccactggtgcagatatttacgagcatggcatgcatgctcttgttcaccgmtggagaaaattcacagctaatggtactatgttgaaaaacagtgtctgtagctgagaaactgctctatcaaataatgctagtgtggtttttgtatctgttgtagtttccatggaaataaataggaggcattacttttagagcaacctatgtattattctgmtaacagcagtaaagctttgagaacacatttctctgggaattcagagatgtgctagcaaatgttttctaaaatctatacaggaaagtaagtcaatcttccagaaaagagctcagtgaatttactcagtcctattcaattt

SEQ ID NO: 69635 - DNA, 600 bp, Chicken  19866894341956_2
catctgtttcgaccaatgaaatatggactgcgtggccaatattttccttgcaattactctgtcagagtagctgtgaaacagtggtcacctccactggtgcagatatttacgagcatggcatgcatgctcttgttcaccgmtggagaaaattcacagctaatggtactatgttgaaaaacagtgtctgtagctgagaaactgctctatcaaataatgctagtgtggtttttgtatctgttgtagtttccatggaaataaataggaggcattacttttagagcaacctatgtattattctgmtaacagcagtaaagctttgagaacacatttctctgggaattcagagatgtgctagcaaatgttttctaaaatctatacaggaaagtaagtcaatcttccagaaaagagctcagtgaatttactcagtcctattcaatttatggtaactcaatgaaataaaagcctgcaaggaagaaaatgggtgcaatatatacaagagaatttcaaaactaaatcacatcttcagaaaagacaatggaattttgcttgattaaatattgaaatcaaatacaagtcttcacaacagtaaggccagaaatc

SEQ ID NO: 69636 - DNA, 600 bp, Chicken  19866894341956_3
caaatgttttctaaaatctatacaggaaagtaagtcaatcttccagaaaagagctcagtgaatttactcagtcctattcaatttatggtaactcaatgaaataaaagcctgcaaggaagaaaatgggtgcaatatatacaagagaatttcaaaactaaatcacatcttcagaaaagacaatggaattttgcttgattaaatattgaaatcaaatacaagtcttcacaacagtaaggccagaaatcttgcattatttacatggttcccaactaaatcctctttatgtattacaaaacacamtcccaatatttttgtagctggatgtgatgtgaagccaaatgygtatctgcactgttttactgactgtagtgcaaaaaaaccctataaaacctgtattcagtgccttgagggggaggtcattctatttttctttaaaaaaaaaaaacagaagttttctaccacagattttacatctgtgctctaaaaccaaaaatatttttagcaaaggagacacatcctttacatccctacctacagatattagatgttgggtttgttctgcgctcaaatatcttttcttcgcttttgttatgaatgtga

SEQ ID NO: 69637 - DNA, 600 bp, Chicken  19866894341956_4
ccagaaaagagctcagtgaatttactcagtcctattcaatttatggtaactcaatgaaataaaagcctgcaaggaagaaaatgggtgcaatatatacaagagaatttcaaaactaaatcacatcttcagaaaagacaatggaattttgcttgattaaatattgaaatcaaatacaagtcttcacaacagtaaggccagaaatcttgcattatttacatggttcccaactaaatcctctttatgtattacaaaacacamtcccaatatttttgtagctggatgtgatgtgaagccaaatgygtatctgcactgttttactgactgtagtgcaaaaaaaccctataaaacctgtattcagtgccttgagggggaggtcattctatttttctttaaaaaaaaaaaacagaagttttctaccacagattttacatctgtgctctaaaaccaaaaatatttttagcaaaggagacacatcctttacatccctacctacagatattagatgttgggtttgttctgcgctcaaatatcttttcttcgcttttgttatgaatgtgaactacgatgcacaagcgtacgccttgctaatgcaaatcttca

SEQ ID NO: 69638 - DNA, 599 bp, Chicken  19866894341961_1
  misc_feature (1)..(213): n is any nucleotide
nnnnnnnnnnnnnnnnnnnnnnnnnnnnnnnnnnnnnnnnnnnnnnnnnnnnnnnnnnnnnnnnnnnnnnnnnnnnnnnnnnnnnnnnnnnnnnnnnnnnnnnnnnnnnnnnnnnnnnnnnnnnnnnnnnnnnnnnnnnnnnnnnnnnnnnnnnnnnnnnnnnnnnnnnnnnnnnnnnnnnnnnnnnnnnnnnnnnnnnnnnnnnnnnnnnnntgtggtgtccccaaaatactcatcaaagtctgtccagcattttttttttttttttttgcattatatgaatgagaaatccaccaaaaygcaaagcctgstgtgaaaacaaacyaaacccgtatacaccatgcagtgctttccaagaggcaagaaaaaaacatcccaacaactcaaaaggagttcaatctctgamattctgcacaactcgagtttgtaccgagcactacaacctgtgcgttatttctataatactgagtgctttctcttcatttctttctacaaatgatatgctgatgatgtttgagatgggattatattgaagttatgccccatttatgcccttaatgatatgtcgttgtgtaagttgtgctacttaggggattact

SEQ ID NO: 69639 - DNA, 599 bp, Chicken  19866894341961_2
  misc_feature (1)..(202): n is any nucleotide
nnnnnnnnnnnnnnnnnnnnnnnnnnnnnnnnnnnnnnnnnnnnnnnnnnnnnnnnnnnnnnnnnnnnnnnnnnnnnnnnnnnnnnnnnnnnnnnnnnnnnnnnnnnnnnnnnnnnnnnnnnnnnnnnnnnnnnnnnnnnnnnnnnnnnnnnnnnnnnnnnnnnnnnnnnnnnnnnnnnnnnnnnnnnnnnnnnnnnnnnnntgtggtgtccccaaaatactcatcaaagtctgtccagcattttttttttttttttttgcattatatgaatgagaaatccaccaaaaygcaaagcctgstgtgaaaacaaacyaaacccgtatacaccatgcagtgctttccaagaggcaagaaaaaaacatcccaacaactcaaaaggagttcaatctctgamattctgcacaactcgagtttgtaccgagcactacaacctgtgcgttatttctataatactgagtgctttctcttcatttctttctacaaatgatatgctgatgatgtttgagatgggattatattgaagttatgccccatttatgcccttaatgatatgtcgttgtgtaagttgtgctacttaggggattacttcttccaagtt

SEQ ID NO: 69640 - DNA, 599 bp, Chicken  19866894341961_3
  misc_feature (1)..(188): n is any nucleotide
nnnnnnnnnnnnnnnnnnnnnnnnnnnnnnnnnnnnnnnnnnnnnnnnnnnnnnnnnnnnnnnnnnnnnnnnnnnnnnnnnnnnnnnnnnnnnnnnnnnnnnnnnnnnnnnnnnnnnnnnnnnnnnnnnnnnnnnnnnnnnnnnnnnnnnnnnnnnnnnnnnnnnnnnnnnnnnnnnnnnnnnnnnnntgtggtgtccccaaaatactcatcaaagtctgtccagcattttttttttttttttttgcattatatgaatgagaaatccaccaaaaygcaaagcctgstgtgaaaacaaacyaaacccgtatacaccatgcagtgctttccaagaggcaagaaaaaaacatcccaacaactcaaaaggagttcaatctctgamattctgcacaactcgagtttgtaccgagcactacaacctgtgcgttatttctataatactgagtgctttctcttcatttctttctacaaatgatatgctgatgatgtttgagatgggattatattgaagttatgccccatttatgcccttaatgatatgtcgttgtgtaagttgtgctacttaggggattacttcttccaagttatgctggaagacrc

SEQ ID NO: 69641 - DNA, 599 bp, Chicken  19866894341961_4
  misc_feature (1)..(107): n is any nucleotide
nnnnnnnnnnnnnnnnnnnnnnnnnnnnnnnnnnnnnnnnnnnnnnnnnnnnnnnnnnnnnnnnnnnnnnnnnnnnnnnnnnnnnnnnnnnnnnnnnnnnnnnnnnntgtggtgtccccaaaatactcatcaaagtctgtccagcattttttttttttttttttgcattatatgaatgagaaatccaccaaaaygcaaagcctgstgtgaaaacaaacyaaacccgtatacaccatgcagtgctttccaagaggcaagaaaaaaacatcccaacaactcaaaaggagttcaatctctgamattctgcacaactcgagtttgtaccgagcactacaacctgtgcgttatttctataatactgagtgctttctcttcatttctttctacaaatgatatgctgatgatgtttgagatgggattatattgaagttatgccccatttatgcccttaatgatatgtcgttgtgtaagttgtgctacttaggggattacttcttccaagttatgctggaagacrcttcaaaagcaagttgctgctcagagcctcacgcttcccgtgttggctttgctacgtttcacattaggttctgagcataaag

SEQ ID NO: 69642 - DNA, 600 bp, Chicken  19866894341961_5
cyaaacccgtatacaccatgcagtgctttccaagaggcaagaaaaaaacatcccaacaactcaaaaggagttcaatctctgamattctgcacaactcgagtttgtaccgagcactacaacctgtgcgttatttctataatactgagtgctttctcttcatttctttctacaaatgatatgctgatgatgtttgagatgggattatattgaagttatgccccatttatgcccttaatgatatgtcgttgtgtaagttgtgctacttaggggattacttcttccaagttatgctggaagacrcttcaaaagcaagttgctgctcagagcctcacgcttcccgtgttggctttgctacgtttcacattaggttctgagcataaagcttttcttctaaaaaggaaaaagtatttctgttgtgaagatggttatcaaaatagaagcagatgtgcttttgcactgtcaatccagttttgtaagatgctgtctctgagctcacttgcatcagcagtgcgtggattttatggcctgagacaatgcaaaagctgtacagggacgtgctggagccttcctgctccgtaaggactcaaacaccagaagttc

SEQ ID NO: 69643 - DNA, 600 bp, Chicken  19866894341962_1
ttcttcttcattgctggaacagaggataaaaagaggataaaacatacctggcaggtaaatcaagcaaacaatgcagaatttatgattccccttcttaatattcacggagtatacattgcagaataatataattcctcacaaaaaggcactcagatcaatataaacagaatataaacatgaatctggaaaataaagacagagtcactgacagctcctgaggtagggtgttattaggaaggagtgagggaacaacagaaccaaatttttatgtttcaaaggatctaaattcattattcccartcagatggtgctyttccctacagaaagacacctctagtttactttgtttagactttccattttctactcaggtgaggtggctcacccactctcccatccctacggagagctggctttaccttcacttgctttccaacgtaccactcaggagaatttttctgctttcagtagctggtcttcaaatcactccattattaaaactccaactttatttttgcaatacaaacaaaatacacgctgagtttaaagctagaggtgttgcaagcagagcgttttaatcaatatttaatttagctggac

SEQ ID NO: 69644 - DNA, 600 bp, Chicken  19866894341962_2
ctggaacagaggataaaaagaggataaaacatacctggcaggtaaatcaagcaaacaatgcagaatttatgattccccttcttaatattcacggagtatacattgcagaataatataattcctcacaaaaaggcactcagatcaatataaacagaatataaacatgaatctggaaaataaagacagagtcactgacagctcctgaggtagggtgttattaggaaggagtgagggaacaacagaaccaaatttttatgtttcaaaggatctaaattcattattcccartcagatggtgctyttccctacagaaagacacctctagtttactttgtttagactttccattttctactcaggtgaggtggctcacccactctcccatccctacggagagctggctttaccttcacttgctttccaacgtaccactcaggagaatttttctgctttcagtagctggtcttcaaatcactccattattaaaactccaactttatttttgcaatacaaacaaaatacacgctgagtttaaagctagaggtgttgcaagcagagcgttttaatcaatatttaatttagctggactcatcacttaaga

SEQ ID NO: 69645 - DNA, 600 bp, Chicken  19866894341962_3
tcaatatttaatttagctggactcatcacttaagagcgagtagccaagttccacacattaagaatggtcttttgcaatgcccatcttgacaagcaagctttaccatcgcaagcactgctgctgaattccagcacatcactacctgcatctgaaaggacgcagataatgaggtacagacgtttctttcgatgctgcagggagcttgaggaaacctaaagtgaaagagcttccagaacgcttcactgtattcatcagtacagttcaaccaaattaataactctaccatcttggcttgcaaarcaggcaaacatttcatcttagaactggttcattaaaaatgtcaaacccagcaacccagaccgggmacactaaagggctgtgtcttcagtacagatggtgcagcggggtgtctaggggacactgatcaaaatctgcctgagctggtgatttaatatgcaaagaaatatgttggtttacaacttgtagcaactccttaaagaatatctggagacaaaacaaacaaacaaaaccaaaaacacccaggtaatcttctctttagaagaggaacctacacttttcatagggttttaagaagcttat

SEQ ID NO: 69646 - DNA, 600 bp, Chicken  19866894341962_4
ggtcttttgcaatgcccatcttgacaagcaagctttaccatcgcaagcactgctgctgaattccagcacatcactacctgcatctgaaaggacgcagataatgaggtacagacgtttctttcgatgctgcagggagcttgaggaaacctaaagtgaaagagcttccagaacgcttcactgtattcatcagtacagttcaaccaaattaataactctaccatcttggcttgcaaarcaggcaaacatttcatcttagaactggttcattaaaaatgtcaaacccagcaacccagaccgggmacactaaagggctgtgtcttcagtacagatggtgcagcggggtgtctaggggacactgatcaaaatctgcctgagctggtgatttaatatgcaaagaaatatgttggtttacaacttgtagcaactccttaaagaatatctggagacaaaacaaacaaacaaaaccaaaaacacccaggtaatcttctctttagaagaggaacctacacttttcatagggttttaagaagcttatagtctgcaaggggcagcattgaaggtaatataactcattttatctatctcttccccattcccaga

SEQ ID NO: 69647 - DNA, 600 bp, Chicken  19866894341966_1
ttcagacccttcactccgagagatcaaagctgtttcttctctctgtctgcagggaaactcattagaaggaggttgtcagggttataatcatgcaacagttttacttctgggttataacgcttttcctttcttatcagtctgtgaggtccaaagtgagaagaacaaagtaggtatcactgacatatgatacttctaataccttctgaaattgctgtggtctgctatctattttattcaattcttcaaatttaaagtgtttcgcatttgtaactcaactatataacaaggttgttgggcggyggtggggttatctggcttctaacatttaaaaatcagcaactatataaacaggctattttcacattaaatcttcattggtttgaatgcatcaggtgtttaacatggtagatgtatgcacattaaatttgtcttaagaactatgtatcatttaataatttccccattgtttycatgtacttttagaaaagtatagaaaaatatatacaaatacagaaaactaaaattaagatatgttcctattttagacgacaaattaatcttatacagtgctttcaactgtatgttctccaattaggaatt

SEQ ID NO: 69648 - DNA, 600 bp, Chicken  19866894341966_2
gtatcactgacatatgatacttctaataccttctgaaattgctgtggtctgctatctattttattcaattcttcaaatttaaagtgtttcgcatttgtaactcaactatataacaaggttgttgggcggyggtggggttatctggcttctaacatttaaaaatcagcaactatataaacaggctattttcacattaaatcttcattggtttgaatgcatcaggtgtttaacatggtagatgtatgcacattaaatttgtcttaagaactatgtatcatttaataatttccccattgtttycatgtacttttagaaaagtatagaaaaatatatacaaatacagaaaactaaaattaagatatgttcctattttagacgacaaattaatcttatacagtgctttcaactgtatgttctccaattaggaattattcaacttttattctgataagctctctgatgtgattggtaacttcaaaagaagagacaaatttactttccaacatcaaaacccctagattctaatttcatgtcattttctgtcttccacagtattaaatattcactgtgtgtgaatagtgagttctgattaagagacca

SEQ ID NO: 69649 - DNA, 600 bp, Chicken  19866894341971_1
ttttacttaagtttgtgggtttgttttgaaatcatccaaaaaagttaaccttttaatacctttccgtagcagttcaggacaagcttgtactgcacattccacttttgcattttcaaaataggtttcagcattatttacttgctgtttctgtggaacatcagaaccctgaggaaaaaaaaaatagattaacttccccaactcttaatatacaatagcaataacatcacacagtagcacaccagactgtatttttatgactgtacgcctactgatatacccaagaagcctcacagaaagatkatttgctatcacttgcaactcatttttatgtattaaagttagaacaagtatacacacagcctattatctgaacagaaattctacattttattctaacagcactacccaaaactttaaccaatagggtatttttcaaaagtttcccatttgaagcaatggcctgcaagcattcgatacaaaagcaattgatagatttcagacatatgcacattacctgagccacagttaaacttggaagctacacaacagctcaacagctctgaacttccagtaatttagctctagctgaaatggtagcct

SEQ ID NO: 69650 - DNA, 600 bp, Chicken  19866894341971_2
cagcactacccaaaactttaaccaatagggtatttttcaaaagtttcccatttgaagcaatggcctgcaagcattcgatacaaaagcaattgatagatttcagacatatgcacattacctgagccacagttaaacttggaagctacacaacagctcaacagctctgaacttccagtaatttagctctagctgaaatggtagccttaaaagacagaactgctatagcctgaaaaacaggactgttttccaataccaattttctgtagtttctaaaaaagaacttattcttgtgggcacatyaaaaatccagcagatacagtcagatacacaaaatttaagcttataatgtccttaagaaggtacttaaaacagctgccagctttgggatagtaaytattacataacataggtgtagaatccttgaaaacagcttyartagctataaytttgccttaatttacaagaaatttcagcaacttgagactttatatactactcaaaattcaactcccacctaacaccagtttgtaactgcaagttctccctagaggaaactattcccctgaacatacagcatagctgaccttttttattctataa

SEQ ID NO: 69651 - DNA, 600 bp, Chicken  19866894341971_3
agatttcagacatatgcacattacctgagccacagttaaacttggaagctacacaacagctcaacagctctgaacttccagtaatttagctctagctgaaatggtagccttaaaagacagaactgctatagcctgaaaaacaggactgttttccaataccaattttctgtagtttctaaaaaagaacttattcttgtgggcacatyaaaaatccagcagatacagtcagatacacaaaatttaagcttataatgtccttaagaaggtacttaaaacagctgccagctttgggatagtaaytattacataacataggtgtagaatccttgaaaacagcttyartagctataaytttgccttaatttacaagaaatttcagcaacttgagactttatatactactcaaaattcaactcccacctaacaccagtttgtaactgcaagttctccctagaggaaactattcccctgaacatacagcatagctgaccttttttattctataaatcaacagtggtaggcaaaaaatagaaaacaaacatgtagaccaacaatagatattaactgcacttcaatgcatacatttccacatgtattttg

SEQ ID NO: 69652 - DNA, 600 bp, Chicken  19866894341971_4
cttggaagctacacaacagctcaacagctctgaacttccagtaatttagctctagctgaaatggtagccttaaaagacagaactgctatagcctgaaaaacaggactgttttccaataccaattttctgtagtttctaaaaaagaacttattcttgtgggcacatyaaaaatccagcagatacagtcagatacacaaaatttaagcttataatgtccttaagaaggtacttaaaacagctgccagctttgggatagtaaytattacataacataggtgtagaatccttgaaaacagcttyartagctataaytttgccttaatttacaagaaatttcagcaacttgagactttatatactactcaaaattcaactcccacctaacaccagtttgtaactgcaagttctccctagaggaaactattcccctgaacatacagcatagctgaccttttttattctataaatcaacagtggtaggcaaaaaatagaaaacaaacatgtagaccaacaatagatattaactgcacttcaatgcatacatttccacatgtattttgtattatgactgtaaagtcattgggacagatcagctggtac

SEQ ID NO: 69653 - DNA, 600 bp, Chicken  19866894341971_5
tggaagctacacaacagctcaacagctctgaacttccagtaatttagctctagctgaaatggtagccttaaaagacagaactgctatagcctgaaaaacaggactgttttccaataccaattttctgtagtttctaaaaaagaacttattcttgtgggcacatyaaaaatccagcagatacagtcagatacacaaaatttaagcttataatgtccttaagaaggtacttaaaacagctgccagctttgggatagtaaytattacataacataggtgtagaatccttgaaaacagcttyartagctataaytttgccttaatttacaagaaatttcagcaacttgagactttatatactactcaaaattcaactcccacctaacaccagtttgtaactgcaagttctccctagaggaaactattcccctgaacatacagcatagctgaccttttttattctataaatcaacagtggtaggcaaaaaatagaaaacaaacatgtagaccaacaatagatattaactgcacttcaatgcatacatttccacatgtattttgtattatgactgtaaagtcattgggacagatcagctggtactt

SEQ ID NO: 69654 - DNA, 600 bp, Chicken  19866894341971_6
acaacagctcaacagctctgaacttccagtaatttagctctagctgaaatggtagccttaaaagacagaactgctatagcctgaaaaacaggactgttttccaataccaattttctgtagtttctaaaaaagaacttattcttgtgggcacatyaaaaatccagcagatacagtcagatacacaaaatttaagcttataatgtccttaagaaggtacttaaaacagctgccagctttgggatagtaaytattacataacataggtgtagaatccttgaaaacagcttyartagctataaytttgccttaatttacaagaaatttcagcaacttgagactttatatactactcaaaattcaactcccacctaacaccagtttgtaactgcaagttctccctagaggaaactattcccctgaacatacagcatagctgaccttttttattctataaatcaacagtggtaggcaaaaaatagaaaacaaacatgtagaccaacaatagatattaactgcacttcaatgcatacatttccacatgtattttgtattatgactgtaaagtcattgggacagatcagctggtacttcaagcctgac

SEQ ID NO: 69655 - DNA, 600 bp, Chicken  19866894341980_1
aaggtaattagtgtaatttgactgcaaactaaattatgctggtacatattgtaagcaaaccatttaaaaagcacatcttgaaaatgcatttgtaatgaactacagacttgctagactgggtctagaatttagaaacagcccttgaaggggttatgcaccctggcaagcctttccctttcctaggctggtcactgacaatgcgtaagtcataaccaaaaggagaatgtggaatgtgatatagcaatagtttgattcatgcccgtttactgagaggagaaaaaaaatactatcatcaccacmacaacaacaaaaatcctttcttgaattcaacctacagtyttatgccgagtcctttgggtaaaagctaattctttctgatctaattgctcttcagtaaatcaaatggaaacattaggcagcattttactggataacaaaccatttaaccttgcacactgagtgcagtcacagtgctagtcttatggctattcaaaacacactgctgagccagataaattcagaggtactgaacttaagcatggctggcaaacatgcaacttttgcactatacctcctgagaagggagccctgggtgtgcac

SEQ ID NO: 69656 - DNA, 582 bp, Chicken  19866894341980_2
tggtacatattgtaagcaaaccatttaaaaagcacatcttgaaaatgcatttgtaatgaactacagacttgctagactgggtctagaatttagaaacagcccttgaaggggttatgcaccctggcaagcctttccctttcctaggctggtcactgacaatgcgtaagtcataaccaaaaggagaatgtggaatgtgatatagcaatagtttgattcatgcccgtttactgagaggagaaaaaaaatactatcatcaccacmacaacaacaaaaatcctttcttgaattcaacctacagtyttatgccgagtcctttgggtaaaagctaattctttctgatctaattgctcttcagtaaatcaaatggaaacattaggcagcattttactggataacaaaccatttaaccttgcacactgagtgcagtcacagtgctagtcttatggctattcaaaacacactgctgagccagataaattcagaggtactgaacttaagcatggctggcaaacatgcaacttttgcactatacctcctgagaagggagccctgggtgtgcactgctttacccacactgaaatg

SEQ ID NO: 69657 - DNA, 600 bp, Chicken  19866894341984_1
tctctgaaagtaacataaatatttaggttgagtcagaagcaaccgtgggctgagggattgctgccatccatgcagaacagatagttctgcattagctgttgtaagatgaattctaagaaataccaagaatattgattcttctctgtgggcaagtctttaattagtttgtgttgaaggctcctttctctgttcatgatgttaactgctacaggatataaaacctttatgaactttattgtaaaaagatggcagcagtagttctttacactgttttcttaggtccttaaaaggctgtgattmtcaaagcatagccctcagtcattgacattttctctgtgcctgcatacttcctgttcactcgcttcrtggygttttcttaattcctcactttctttaaaattcttgtaattaccatactttgttttcatatacatattatttttttttcattccagagaaagcagagagagtgtaggaaatgggacagccatcagaaaacagaagaaaatatwgtttaaaagtacttgtaacttctatctgtagttgaaaaatcattcttaaggattgttctcatgattctacaacattagcaataaggat

SEQ ID NO: 69658 - DNA, 600 bp, Chicken  19866894341984_2
tccatgcagaacagatagttctgcattagctgttgtaagatgaattctaagaaataccaagaatattgattcttctctgtgggcaagtctttaattagtttgtgttgaaggctcctttctctgttcatgatgttaactgctacaggatataaaacctttatgaactttattgtaaaaagatggcagcagtagttctttacactgttttcttaggtccttaaaaggctgtgattmtcaaagcatagccctcagtcattgacattttctctgtgcctgcatacttcctgttcactcgcttcrtggygttttcttaattcctcactttctttaaaattcttgtaattaccatactttgttttcatatacatattatttttttttcattccagagaaagcagagagagtgtaggaaatgggacagccatcagaaaacagaagaaaatatwgtttaaaagtacttgtaacttctatctgtagttgaaaaatcattcttaaggattgttctcatgattctacaacattagcaataaggatgttggtaggaattatcatctagagattgataattagctgctggttagtgataatgtggtatacttt

SEQ ID NO: 69659 - DNA, 600 bp, Chicken  19866894341984_3
tgcagaacagatagttctgcattagctgttgtaagatgaattctaagaaataccaagaatattgattcttctctgtgggcaagtctttaattagtttgtgttgaaggctcctttctctgttcatgatgttaactgctacaggatataaaacctttatgaactttattgtaaaaagatggcagcagtagttctttacactgttttcttaggtccttaaaaggctgtgattmtcaaagcatagccctcagtcattgacattttctctgtgcctgcatacttcctgttcactcgcttcrtggygttttcttaattcctcactttctttaaaattcttgtaattaccatactttgttttcatatacatattatttttttttcattccagagaaagcagagagagtgtaggaaatgggacagccatcagaaaacagaagaaaatatwgtttaaaagtacttgtaacttctatctgtagttgaaaaatcattcttaaggattgttctcatgattctacaacattagcaataaggatgttggtaggaattatcatctagagattgataattagctgctggttagtgataatgtggtatactttcttc

SEQ ID NO: 69660 - DNA, 600 bp, Chicken  19866894341984_4
atataaaacctttatgaactttattgtaaaaagatggcagcagtagttctttacactgttttcttaggtccttaaaaggctgtgattmtcaaagcatagccctcagtcattgacattttctctgtgcctgcatacttcctgttcactcgcttcrtggygttttcttaattcctcactttctttaaaattcttgtaattaccatactttgttttcatatacatattatttttttttcattccagagaaagcagagagagtgtaggaaatgggacagccatcagaaaacagaagaaaatatwgtttaaaagtacttgtaacttctatctgtagttgaaaaatcattcttaaggattgttctcatgattctacaacattagcaataaggatgttggtaggaattatcatctagagattgataattagctgctggttagtgataatgtggtatactttcttccgattggatcttaattccsaagcaatattatatgttaacagccttttaaattttacttggttttgagcaagcagttgtatgtttattaggaacataacttacacttttggtatgtgtatgtgtacgtgtacatacgttcaca

SEQ ID NO: 69661 - DNA, 547 bp, Chicken  19866894341984_5
ttctttaaaattcttgtaattaccatactttgttttcatatacatattatttttttttcattccagagaaagcagagagagtgtaggaaatgggacagccatcagaaaacagaagaaaatatwgtttaaaagtacttgtaacttctatctgtagttgaaaaatcattcttaaggattgttctcatgattctacaacattagcaataaggatgttggtaggaattatcatctagagattgataattagctgctggttagtgataatgtggtatactttcttccgattggatcttaattccsaagcaatattatatgttaacagccttttaaattttacttggttttgagcaagcagttgtatgtttattaggaacataacttacacttttggtatgtgtatgtgtacgtgtacatacgttcacatacacacacattcccaaatctataggtgtgtgtatatatacatatatacacacaaagacttaagtgtatgtagatttaagcgtatgtataatcactttatgtatgtatgtatatcagtatcgtt

SEQ ID NO: 69662 - DNA, 600 bp, Chicken  19866894341985_1
aaaggataagcaagcatgcaatttcaaaaattggaccatttgaaacataaatgatgaaaaggaggaagccacagtgtaaaactcgatagcaacatcctcttcgacagttctcggaggtatccaatagggtttgaagaatgaatacgtggaagagttgtgcgacagacaactacttcacagagaagccagactcctcagtgagcgttatccaaacactcacagcttctccattagtagcttgactttcttcctgtcactccagaacatccgcagtgaaggctgcattgttttcttgttttyggtacaggacagagattcaaactttacatctttggaaargaatcttcctctcatgcaaaaaaactgctttgcaaatcaaaatggaagaaggggcaactgagaaaacaatccttcagagcagcactgttgcttcaaaccaaaatattaatgtagaaggtggrggattcggtctaaattacaaacycagtgaaattaatgccctgattgcagatctgtgcggcctttctaacaactgtcacactgtgagagctgtwtttccttgctataataccaatgcaaaagctctctgcaacctgtgta

SEQ ID NO: 69663 - DNA, 600 bp, Chicken  19866894341985_2
ttgaaacataaatgatgaaaaggaggaagccacagtgtaaaactcgatagcaacatcctcttcgacagttctcggaggtatccaatagggtttgaagaatgaatacgtggaagagttgtgcgacagacaactacttcacagagaagccagactcctcagtgagcgttatccaaacactcacagcttctccattagtagcttgactttcttcctgtcactccagaacatccgcagtgaaggctgcattgttttcttgttttyggtacaggacagagattcaaactttacatctttggaaargaatcttcctctcatgcaaaaaaactgctttgcaaatcaaaatggaagaaggggcaactgagaaaacaatccttcagagcagcactgttgcttcaaaccaaaatattaatgtagaaggtggrggattcggtctaaattacaaacycagtgaaattaatgccctgattgcagatctgtgcggcctttctaacaactgtcacactgtgagagctgtwtttccttgctataataccaatgcaaaagctctctgcaacctgtgtagaaacagagaagtatttatctgcaagctggacgtttttt

SEQ ID NO: 69664 - DNA, 600 bp, Chicken  19866894341985_3
acagacaactacttcacagagaagccagactcctcagtgagcgttatccaaacactcacagcttctccattagtagcttgactttcttcctgtcactccagaacatccgcagtgaaggctgcattgttttcttgttttyggtacaggacagagattcaaactttacatctttggaaargaatcttcctctcatgcaaaaaaactgctttgcaaatcaaaatggaagaaggggcaactgagaaaacaatccttcagagcagcactgttgcttcaaaccaaaatattaatgtagaaggtggrggattcggtctaaattacaaacycagtgaaattaatgccctgattgcagatctgtgcggcctttctaacaactgtcacactgtgagagctgtwtttccttgctataataccaatgcaaaagctctctgcaacctgtgtagaaacagagaagtatttatctgcaagctggacgttttttggagggtgtaggggaagtggagatcaatagactgcatagagctctaattttctgccacataaaccttgagtatagtggaagaaagcactctgtttgatgaagcttgctagcgggtctaaatg

SEQ ID NO: 69665 - DNA, 600 bp, Chicken  19866894341985_4
gccagactcctcagtgagcgttatccaaacactcacagcttctccattagtagcttgactttcttcctgtcactccagaacatccgcagtgaaggctgcattgttttcttgttttyggtacaggacagagattcaaactttacatctttggaaargaatcttcctctcatgcaaaaaaactgctttgcaaatcaaaatggaagaaggggcaactgagaaaacaatccttcagagcagcactgttgcttcaaaccaaaatattaatgtagaaggtggrggattcggtctaaattacaaacycagtgaaattaatgccctgattgcagatctgtgcggcctttctaacaactgtcacactgtgagagctgtwtttccttgctataataccaatgcaaaagctctctgcaacctgtgtagaaacagagaagtatttatctgcaagctggacgttttttggagggtgtaggggaagtggagatcaatagactgcatagagctctaattttctgccacataaaccttgagtatagtggaagaaagcactctgtttgatgaagcttgctagcgggtctaaatgaacaagaaattactatatgctcc

SEQ ID NO: 69666 - DNA, 600 bp, Chicken  19866894341985_5
cactccagaacatccgcagtgaaggctgcattgttttcttgttttyggtacaggacagagattcaaactttacatctttggaaargaatcttcctctcatgcaaaaaaactgctttgcaaatcaaaatggaagaaggggcaactgagaaaacaatccttcagagcagcactgttgcttcaaaccaaaatattaatgtagaaggtggrggattcggtctaaattacaaacycagtgaaattaatgccctgattgcagatctgtgcggcctttctaacaactgtcacactgtgagagctgtwtttccttgctataataccaatgcaaaagctctctgcaacctgtgtagaaacagagaagtatttatctgcaagctggacgttttttggagggtgtaggggaagtggagatcaatagactgcatagagctctaattttctgccacataaaccttgagtatagtggaagaaagcactctgtttgatgaagcttgctagcgggtctaaatgaacaagaaattactatatgctcctttcactgtacaggagcagctgacgcactccctgccacaaaatttttctcctcagacagttcaatcacgt

SEQ ID NO: 69667 - DNA, 565 bp, Chicken  19866894342000_1
tccttttgactttcccctggtagggcaagcaagtggagatctagaacaagacatgtttttcggagccttttacacttttttgtgacttttcacctgtcttgggagggagtttttcaaaataatggtgacatagcaataacatggacaacaagcaaactgattttaatggtacagttaatgcacatgaggggacctaagcagggagaggggtgaggggtgaagaggcaagaattcaaacaacccttgaaacaatagccttgtttctgtctgatgtagacctttgtgtccttgtgtgagatktgtctcatctcccagaactgttaaggcagaaatatcagctttgcagatgaactaagaggaagaaaaagggacacattcggggctcataagagactttcaaagaggacgggggaagggctgatgaagatgtagaggtgagaaagcgatatcctcactgcttgctgtgcatatcccagaaccacctcataaatgacatcgcacagaccaagcaggcagcaagacttcagggctggactagctttcgggtctagggagcgagaacatt

SEQ ID NO: 69668 - DNA, 599 bp, Chicken  19866894342004_1
  misc_feature (1)..(99): n is any nucleotide
nnnnnnnnnnnnnnnnnnnnnnnnnnnnnnnnnnnnnnnnnnnnnnnnnnnnnnnnnnnnnnnnnnnnnnnnnnnnnnnnnnnnnnnnnnnnnnnnnnnaatcttagcataatattagtttatccactacattatttttggcaagtcagtctcttgaataaatgtgcaagctgaaactaggaagtttgaggcaatcctcttgtcctgttgttgttgtgaaaagtgatggtagaagaaaacatcacatttatcagcacatatgtgacagatttaaaaagctttgtgatggacttggcttcrcatagagcctgctccttgtttgcacacaggtgaaatatcagctctgaggtttggcagaaagcaagaagactcatgggaaaaaggaagaaaatagctaaaactgaaggagacgagatgaatgtgtgtcatttctatattttgccccgttttggtgctgaaaagtggrggattaccatcatccctccatctagggacacagggaaaggatatttccttaggtctacagctgggcaaatattcctcagacctcatttgctactgaaacataagatgtaggaacaacacagcagttaagtatc

SEQ ID NO: 69669 - DNA, 600 bp, Chicken  19866894342004_2
caagctgaaactaggaagtttgaggcaatcctcttgtcctgttgttgttgtgaaaagtgatggtagaagaaaacatcacatttatcagcacatatgtgacagatttaaaaagctttgtgatggacttggcttcrcatagagcctgctccttgtttgcacacaggtgaaatatcagctctgaggtttggcagaaagcaagaagactcatgggaaaaaggaagaaaatagctaaaactgaaggagacgagatgaatgtgtgtcatttctatattttgccccgttttggtgctgaaaagtggrggattaccatcatccctccatctagggacacagggaaaggatatttccttaggtctacagctgggcaaatattcctcagacctcatttgctactgaaacataagatgtaggaacaacacagcagttaagtatctaaattcctaagtggatcaaagagcatttaaaaacagaaagtaaatatttaaatattyaaagagttttaaatagtgaatagagatagggattagagaatatatataaatcctccatatttcctaaggagcttttcttgatgccatgcataaaawgactgcatactgt

SEQ ID NO: 69670 - DNA, 535 bp, Chicken  19866894342004_3
aaagcaagaagactcatgggaaaaaggaagaaaatagctaaaactgaaggagacgagatgaatgtgtgtcatttctatattttgccccgttttggtgctgaaaagtggrggattaccatcatccctccatctagggacacagggaaaggatatttccttaggtctacagctgggcaaatattcctcagacctcatttgctactgaaacataagatgtaggaacaacacagcagttaagtatctaaattcctaagtggatcaaagagcatttaaaaacagaaagtaaatatttaaatattyaaagagttttaaatagtgaatagagatagggattagagaatatatataaatcctccatatttcctaaggagcttttcttgatgccatgcataaaawgactgcatactgtatagtattttgcactgcctaacagacaccaacaagcatatgatgctgaagaagtaaatagtaaatgtatttctctgggaaggaatcctttaacaaagttttcttccaccataagcaactcaaataa

SEQ ID NO: 69671 - DNA, 439 bp, Chicken  19866894342004_4
gctgaaaagtggrggattaccatcatccctccatctagggacacagggaaaggatatttccttaggtctacagctgggcaaatattcctcagacctcatttgctactgaaacataagatgtaggaacaacacagcagttaagtatctaaattcctaagtggatcaaagagcatttaaaaacagaaagtaaatatttaaatattyaaagagttttaaatagtgaatagagatagggattagagaatatatataaatcctccatatttcctaaggagcttttcttgatgccatgcataaaawgactgcatactgtatagtattttgcactgcctaacagacaccaacaagcatatgatgctgaagaagtaaatagtaaatgtatttctctgggaaggaatcctttaacaaagttttcttccaccataagcaactcaaataa

SEQ ID NO: 69672 - DNA, 600 bp, Chicken  19866894342005_1
cagcagtgcttaactaactgcagcagcctgccctgtgagtgtgaggggttgggtgcaagtgtggctgtgtccacatgtgtgcagtgcttgtggatcactggcacagcctgcagccgtgctgggactgccagtggatggtgtgctggtgttttaatgacacccctcaccgaagcaatcctgctgtcaaaatcttaaatgcaggctaggcatctgctcaccgggacagtgattaaactgcagaactgtcctttgccctcgtggagcagctgccttgtgctctctgcgctgctatagtcccasaagaaaaatacaactaaagagaagcaatctgtttaccagaatggcaattagtcccataaaagcagcccgtacaccttgctgcttgttagctcttcatttgtcagrcaacaaaagttctgtcaggtgcaataagagggaagaaatgcaggattaactttcaagaagcccgagttaagcaataatggctttttaacccgtggaggatgcagccctcacctttcaaagcttgcaagccgtgagcagtgtgccggcattagctgagccctgcagaattaatctggggagtcatccgctctgaca

SEQ ID NO: 69673 - DNA, 600 bp, Chicken  19866894342005_2
gcctgcagccgtgctgggactgccagtggatggtgtgctggtgttttaatgacacccctcaccgaagcaatcctgctgtcaaaatcttaaatgcaggctaggcatctgctcaccgggacagtgattaaactgcagaactgtcctttgccctcgtggagcagctgccttgtgctctctgcgctgctatagtcccasaagaaaaatacaactaaagagaagcaatctgtttaccagaatggcaattagtcccataaaagcagcccgtacaccttgctgcttgttagctcttcatttgtcagrcaacaaaagttctgtcaggtgcaataagagggaagaaatgcaggattaactttcaagaagcccgagttaagcaataatggctttttaacccgtggaggatgcagccctcacctttcaaagcttgcaagccgtgagcagtgtgccggcattagctgagccctgcagaattaatctggggagtcatccgctctgacacagggtatggtagcatgccctacataaagatgaagaagggagctaatggctttgactcccctatgagccaaaattacttgcccgaagcaaaaagcaagtaaattt

SEQ ID NO: 69674 - DNA, 600 bp, Chicken  19866894342005_3
gtgccggcattagctgagccctgcagaattaatctggggagtcatccgctctgacacagggtatggtagcatgccctacataaagatgaagaagggagctaatggctttgactcccctatgagccaaaattacttgcccgaagcaaaaagcaagtaaattttgctgggctgtgttggtatttcagcatatatttatgttaatctgtggctgccgcatgcaaactttgatctttcttaagaacttttgctccctttcaaggtgttgatattactttaaaagatcagtaaatatagcacctygactttaatctgcatccagagccccacccgggagtataaacattttccttccctcgcatatggaaatcgcgtatggagaatataacgcacagtggcagaaatgcactgggcctgacccagctaccacagaacaactggtgttggaggggctgggccgagccgagccgctggctgctggttgagtttgtgcgaggctgacatcctgcagctgctctttatgaaaatatttaccgacttatctgagagaattattgtccgcgttaaaataggttctggtgctcacaagggaagaggaaactg

SEQ ID NO: 69675 - DNA, 600 bp, Chicken  19866894342006_1
taccatcttgccaaagctttctgtgctaatggtgcctattttctctatagggaagaaaaaggcagggagagaattcaatttttatgcttctgagtttcctactgatgcgcatgtattcgactgctcttggtcccattaacacccagcatgggcagatttaaacaacttcagagctgctacaagctgggatcaaccaagagatagagcatatgttaaaaaaacacacacaaaaaaccaaacaaaagttgtatttcatttaaagatttttctgcactaaataataaatatagatttgacttyaaaaaaaaaaaaacaaaacaccacatctactccccaacagaaatattcttgggcagcaatggcacagaacagagagctgcctgcctctgtttgcactcgcaatcctcaccaacacctacagggagcagtgcttgcagagcaggttcccgcaggggtcctgggggcaatgcactgactccagcacgacagggactacacggctgtctccggcttagtcaggtggaagaacacacacagtgctcgttctggaggaaaaaaagggtctgaaacggtcaatgaaagaaatccctccaggatcca

SEQ ID NO: 69676 - DNA, 600 bp, Chicken  19866894342006_2
accatcttgccaaagctttctgtgctaatggtgcctattttctctatagggaagaaaaaggcagggagagaattcaatttttatgcttctgagtttcctactgatgcgcatgtattcgactgctcttggtcccattaacacccagcatgggcagatttaaacaacttcagagctgctacaagctgggatcaaccaagagatagagcatatgttaaaaaaacacacacaaaaaaccaaacaaaagttgtatttcatttaaagatttttctgcactaaataataaatatagatttgacttayaaaaaaaaaaaacaaaacaccacatctactccccaacagaaatattcttgggcagcaatggcacagaacagagagctgcctgcctctgtttgcactcgcaatcctcaccaacacctacagggagcagtgcttgcagagcaggttcccgcaggggtcctgggggcaatgcactgactccagcacgacagggactacacggctgtctccggcttagtcaggtggaagaacacacacagtgctcgttctggaggaaaaaaagggtctgaaacggtcaatgaaagaaatccctccaggatccag

SEQ ID NO: 69677 - DNA, 600 bp, Chicken  19866894342006_3
ccatcttgccaaagctttctgtgctaatggtgcctattttctctatagggaagaaaaaggcagggagagaattcaatttttatgcttctgagtttcctactgatgcgcatgtattcgactgctcttggtcccattaacacccagcatgggcagatttaaacaacttcagagctgctacaagctgggatcaaccaagagatagagcatatgttaaaaaaacacacacaaaaaaccaaacaaaagttgtatttcatttaaagatttttctgcactaaataataaatatagatttgacttaayaaaaaaaaaaacaaaacaccacatctactccccaacagaaatattcttgggcagcaatggcacagaacagagagctgcctgcctctgtttgcactcgcaatcctcaccaacacctacagggagcagtgcttgcagagcaggttcccgcaggggtcctgggggcaatgcactgactccagcacgacagggactacacggctgtctccggcttagtcaggtggaagaacacacacagtgctcgttctggaggaaaaaaagggtctgaaacggtcaatgaaagaaatccctccaggatccagc

SEQ ID NO: 69678 - DNA, 600 bp, Chicken  19866894342006_4
catcttgccaaagctttctgtgctaatggtgcctattttctctatagggaagaaaaaggcagggagagaattcaatttttatgcttctgagtttcctactgatgcgcatgtattcgactgctcttggtcccattaacacccagcatgggcagatttaaacaacttcagagctgctacaagctgggatcaaccaagagatagagcatatgttaaaaaaacacacacaaaaaaccaaacaaaagttgtatttcatttaaagatttttctgcactaaataataaatatagatttgacttaaayaaaaaaaaaacaaaacaccacatctactccccaacagaaatattcttgggcagcaatggcacagaacagagagctgcctgcctctgtttgcactcgcaatcctcaccaacacctacagggagcagtgcttgcagagcaggttcccgcaggggtcctgggggcaatgcactgactccagcacgacagggactacacggctgtctccggcttagtcaggtggaagaacacacacagtgctcgttctggaggaaaaaaagggtctgaaacggtcaatgaaagaaatccctccaggatccagca

SEQ ID NO: 69679 - DNA, 600 bp, Chicken  19866894342008_1
agcagagccagcacaactttgggctgttacacatttgttttccacaaagaaaagggttccacctatcaccacgtcacacagcattttgtatttactttggaagcctctcatgtgagttatgatatgacctcagcactcggcaatattttacaagctctcagattaataggacagagctacaagcagcaaggcatgctgcagaagaacgatgggctgccagccccacagtgcagcctggctccttgggcaggcagcaagggacccggagctgatgagcagggtctcacctggcactggaawgcatttgctttcgggcaaacaaatatactagcctcccttttgcaaggattgctcctgagcatgaagcttttgattacagctgtttggataaagaagcagaaagcttccccgtgcatacagatattcaggacgtgtgtacatgagaaatgccactgtgccaacatttcctccaatgtctgcagcagtgagatatgcacacctttgagggtcaactataaacagacattctcaygcactaaatgcattgcacagctgtcactttgcgctctccttagggagctgcactgtgggcaaggatgt

SEQ ID NO: 69680 - DNA, 600 bp, Chicken  19866894342008_2
gcctggctccttgggcaggcagcaagggacccggagctgatgagcagggtctcacctggcactggaawgcatttgctttcgggcaaacaaatatactagcctcccttttgcaaggattgctcctgagcatgaagcttttgattacagctgtttggataaagaagcagaaagcttccccgtgcatacagatattcaggacgtgtgtacatgagaaatgccactgtgccaacatttcctccaatgtctgcagcagtgagatatgcacacctttgagggtcaactataaacagacattctcaygcactaaatgcattgcacagctgtcactttgcgctctccttagggagctgcactgtgggcaaggatgtaaataaacctacacctcagctattttggtcaagccttggctcctcgaagttgacaacatacaaccagactgcatttgacttagagaagaaaaacactgccctcaccacagatctgtttgatatccacctgaatgggagtaaagcagcaggcgcttactgcttttgtctatgcttgatctattggagcacttgttttaaaaatccccacctctgaacattttggaagagatga

SEQ ID NO: 69681 - DNA, 600 bp, Chicken  19866894342008_3
agagacacagatctgcacaaaaagtacaccaactgtattctgatttctgcctctctctccaatagctgggtctccttcttggttaggtcagtcaagattgacaatccatatgtcttatctttaagcttgacttatatatagttgcaacatacatttggaacgtcagctctcaacagtgactacacatggagacagtcagtatgaagctatccagagctctgaaattgtcagaaggtttgattaagagtttcgtgcaccacattcaggacaccatcgatctgcatttctatcaccagcatyttytttctcccttcactgaagtggatgcaattccatttgtgaagtgattttgtcaatcaatttattccaaatatgcatgcaaaatgggatgcacaggaatgtattcacccagcttttatttgcctataaactccacgtgtgaaacctcattaacctgtcagtctgaacttgcaaaaaatgcttccaaaaataatcctgcagagttcagggtcagcttcaacaaaggggtctgactgaattcgaagagtatctttcatgacaaaggctgatgtctttatttctggttaagtgcctgcccca

SEQ ID NO: 69682 - DNA, 600 bp, Chicken  19866894342008_4
gacacagatctgcacaaaaagtacaccaactgtattctgatttctgcctctctctccaatagctgggtctccttcttggttaggtcagtcaagattgacaatccatatgtcttatctttaagcttgacttatatatagttgcaacatacatttggaacgtcagctctcaacagtgactacacatggagacagtcagtatgaagctatccagagctctgaaattgtcagaaggtttgattaagagtttcgtgcaccacattcaggacaccatcgatctgcatttctatcaccagcatyttytttctcccttcactgaagtggatgcaattccatttgtgaagtgattttgtcaatcaatttattccaaatatgcatgcaaaatgggatgcacaggaatgtattcacccagcttttatttgcctataaactccacgtgtgaaacctcattaacctgtcagtctgaacttgcaaaaaatgcttccaaaaataatcctgcagagttcagggtcagcttcaacaaaggggtctgactgaattcgaagagtatctttcatgacaaaggctgatgtctttatttctggttaagtgcctgccccagca

SEQ ID NO: 69683 - DNA, 600 bp, Chicken  19866894342008_5
actggacatggagggccgtctggccccgcatccattctttttaactgcagtgaataacagcagtctgcaagcaagttcttatttacaaaacttgcatggatacaaatacaccagtaataatgccagtcagtagggaacataaaaggagtgtaatctgcagactatagagattttttaatatgtgcagtaagaagcaatgcacatgtttggattagatgtagtaggaaagaccttgctaaccaggagttagcacagcacccacctgcatgagcaccaagggtagctgaggttcatggcttwaaatcctttacctgaagagcattctgacaacacctcctgccaaacaagcgagacaactccaagcacctcatgcttacaccggatacagctctgctccagaacctgccctgccacccccagccaygttcccatggagatgcagcaacagaagactcctgaacagatmataatatccagaaaaacctttctcaatacatacaagttgtgcattaaatgctgctgtgtaaggggttatacgttcagtggggactcccttccaaccaaaacaactcttcctgagccttcacgacttcatcttaa

SEQ ID NO: 69684 - DNA, 600 bp, Chicken  19866894342008_6
agtcagtagggaacataaaaggagtgtaatctgcagactatagagattttttaatatgtgcagtaagaagcaatgcacatgtttggattagatgtagtaggaaagaccttgctaaccaggagttagcacagcacccacctgcatgagcaccaagggtagctgaggttcatggcttwaaatcctttacctgaagagcattctgacaacacctcctgccaaacaagcgagacaactccaagcacctcatgcttacaccggatacagctctgctccagaacctgccctgccacccccagccaygttcccatggagatgcagcaacagaagactcctgaacagatmataatatccagaaaaacctttctcaatacatacaagttgtgcattaaatgctgctgtgtaaggggttatacgttcagtggggactcccttccaaccaaaacaactcttcctgagccttcacgacttcatcttaacaatcactcaaactcaagcacagctctgtattacaagagaacaccttcactttacttaagaagcttcagtttgytgcaaaccagttcatcttcaacagagatcaaagcccacgctatggattcc

SEQ ID NO: 69685 - DNA, 600 bp, Chicken  19866894342008_7
gagattttttaatatgtgcagtaagaagcaatgcacatgtttggattagatgtagtaggaaagaccttgctaaccaggagttagcacagcacccacctgcatgagcaccaagggtagctgaggttcatggcttwaaatcctttacctgaagagcattctgacaacacctcctgccaaacaagcgagacaactccaagcacctcatgcttacaccggatacagctctgctccagaacctgccctgccacccccagccaygttcccatggagatgcagcaacagaagactcctgaacagatmataatatccagaaaaacctttctcaatacatacaagttgtgcattaaatgctgctgtgtaaggggttatacgttcagtggggactcccttccaaccaaaacaactcttcctgagccttcacgacttcatcttaacaatcactcaaactcaagcacagctctgtattacaagagaacaccttcactttacttaagaagcttcagtttgytgcaaaccagttcatcttcaacagagatcaaagcccacgctatggattcccacagtctttacaaaatagtgaaaacagcacaaattaatcag

SEQ ID NO: 69686 - DNA, 600 bp, Chicken  19866894342008_8
tacaccggatacagctctgctccagaacctgccctgccacccccagccaygttcccatggagatgcagcaacagaagactcctgaacagatmataatatccagaaaaacctttctcaatacatacaagttgtgcattaaatgctgctgtgtaaggggttatacgttcagtggggactcccttccaaccaaaacaactcttcctgagccttcacgacttcatcttaacaatcactcaaactcaagcacagctctgtattacaagagaacaccttcactttacttaagaagcttcagtttgytgcaaaccagttcatcttcaacagagatcaaagcccacgctatggattcccacagtctttacaaaatagtgaaaacagcacaaattaatcaggattgctgcgtctttgtggtattgatttaagtcattcacagtaatgagttactcagaataattgcaagcctcagtacagacaacatggaaagcgattgtttaactcctcacagcacattaacatggagccttgaggaaagtattctccgtggaacttgagctcagacctccatttgctgaatcctttggtgcttcttggtttatttgg

SEQ ID NO: 69687 - DNA, 599 bp, Chicken  19866894342014_1
  misc_feature (1)..(53): n is any nucleotide
nnnnnnnnnnnnnnnnnnnnnnnnnnnnnnnnnnnnnnnnnnnnnnnnnnnnntgacttagtcacccaagctccctttatagtcaaaggacaaagggcagcacctgcagagggctgtatgtctcatccccatgcaaggtcagttctgctgcccttggagagtgcctggctctcgccactgacactgaaagaaagcccacagtgactgatgtggtcttagatctctctgagcccccacattaagtgtgatgactctgtgcttgagcagaagtgtctccacagtgttgttgagggcagaatsctcacgtgcatttacagagtagaaggtttcaggatggctccttttaaaaataaggttagatgtgtgacatgcatctgatgtataggagtgacttctcttgccaagtatattgtatgatatttacttgggtctctgcgagacttcaaaggctctaatggatgccagacttcttgtggtttgattagattgagcagtgcagagcccttgtggggatgctgcaggtttgctctgaaaagaaagcaagaattgcactgttctctgtgttacttagttaaggctatctggcaagatagactgcc

SEQ ID NO: 69688 - DNA, 600 bp, Chicken  19866894342015_1
cagtgtaagcatgctgcagtcccagcagtgagcgtgcagaacaggtaaaagtctctcagcctcattccctgtctgctttaatcacacccagacagcggatggtggtggaaggggcagcctggaaacactccttggtgacacacacaaaagagagcagtgcctgtgcagactcctgcactccaacactactgggtgtcagaaccacgtgggttaagtgcattcactgcaggcaatgcactttaatgattctgtagcctgaggacgctgccccttccatatctgtctcttatctacactcckacaccttcctactgtaacaggtgtctgctaacagctagcacacacgttgcccttccattcctccacctatcagccccagctctcccccagtcccagagtgtttggccctccttccccacacctcctgatcagggtgaccttctaagctgccatcaactcctcgaacctttaaatgagttcagatagaaaacggtcaggagtgtgaaccagctgcaaataaaaacatcccatcctgcctttatctgctggctttcctaggttctgcccatcagactcgaggacagaacccctcaaccatgg

SEQ ID NO: 69689 - DNA, 600 bp, Chicken  19866894342019_1
gtaattctttaaagatttgtcttaaccctaatctcacaaaacccacccctgcagttccctcagtgacactataaacaccttgccacataaactcaacacagctatctagagtattagtcataaaatttgatgtctttgtcttcaaatggacatttggtggaattttaatgtgtggtgacataattctcttaaaatgtattttcatgaaacaaaactgatggagagaagtaaaagtttctaaggagaaagagttctttacttttatgtcattgcagcaaattaatatttcagcttactgtycttgctgctagagcaatttcttgatactcttactgttgtttgaagtataaacaatccaaatgtctcctaacatacttctgctaaaaccaccaattagtaccatctacataaattaaatttacattttaatgtaatactaggctttgttttcaacattattgttgaatgaaaaattattttggcaattgcatactgctaaaatctttcctcaaaggacttcagaaagctgagttggcttggctctactcaccaaatagctagcaggttttggaaacttcaggagtgctgctgaaatgtact

SEQ ID NO: 69690 - DNA, 600 bp, Chicken  19866894342025_1
tgaccatgctgcgttctgcggggaaggaagcagattgcaggttggcattggcggttttaagacagttattaattcaattacaaagcatggaaggatgctgggggcagccaggcatctcctcgcttatcactgcagaaggggatgctgcctcatgtcccattcctgctaaggggcatggctccaggtgccagggatgcgtgctagcagtggttaccttgctggctgcttttgggttagaggtttccaggcagctttctgctttgttcttgcttatttgcattgcaatttctagcgtctgcrgcactggtttgcacccagctgcaagcagcagtcgtgactcaaagagagagctgaggatgctgcagctgcagggatggagggagcagccaggtgcgtgcaggaggtcagcacagagctgagatctagctatgtacacccagaccgtgctctcctctcttgtcctcagtaggacataggaagaacaaagcagcagcgttggtacatgggaggcagcggcatgtcttcacttccaggatgctgagagcaccccggcattcccagctcccaccccatctgtgcttcacaagaggttgtgccaga

SEQ ID NO: 69691 - DNA, 599 bp, Chicken  19866894342035_1
  misc_feature (1)..(91): n is any nucleotide
nnnnnnnnnnnnnnnnnnnnnnnnnnnnnnnnnnnnnnnnnnnnnnnnnnnnnnnnnnnnnnnnnnnnnnnnnnnnnnnnnnnnnnnnnnntagtgatgagagctaacagtcttacgttgtgccagaggaggttcagttttcagaagaatttcttatcagaaagaacagttaggcactggaacaggttgcccagggaggtggtagagtcactgccccctgaagttcaagaaatgggtagatgtcgcactgagcaacatggttcagtgggtatggtggtgatgagccgatggttggactgratggtcttagaatcattaagagtggcaactaccatgatgatctgtttctgttatatgaatcagtacaaagaaatacttacatagctgtgcatatgatcactacaaatgtttttccacctggtggtatgacaatttcttcagttatatcagtgtcatctattggttgctgcacatcttctctttgctcttcttctccatgacacagattttcacctttaaccaaggaaaagttttcttctgcctttgatagatttatttcctgaggatttactccttctgcagaaaacaataaattttat

SEQ ID NO: 69692 - DNA, 600 bp, Chicken  19866894342035_2
tcttctccatgacacagattttcacctttaaccaaggaaaagttttcttctgcctttgatagatttatttcctgaggatttactccttctgcagaaaacaataaattttattgtcagaattgttatggctagtatagacaagccttttcaaacagacatatgggtcttctgtggagtctgtactcacaattaaaaatggtaatgtttgactgtacctgaaatgactccattcttcataatggatgtactagtcaatgactcagatgctgctccacaggaattcactgcagcttttgcaaygctttcttgatttactggagaagatgacagatatgctgctggactgttctggtatttttgaggaatctgaaaactaaattgcttgtctttcacccatccagctaatctgcagctgattaaggactgtggtacactccctttattcctagaagtagttacaagattaatcacataattaagcacactgtgagcactgataacaggaagcttaatcctacataaaatcataattgttcgtggagttaattcatcattacttcataaccactatcagaaagaaattgatctgcttcttctaat

SEQ ID NO: 69693 - DNA, 600 bp, Chicken  19866894342044_1
ttttttttttttaatccttgaattaataatatacattcagttagagtgtaactctagtagagcagtaacttgttgcactgagtcatgcccttttgtcttttcatgaagttccttgagcaagaagatatttatgatggagcagcacttcagaataatggagctctaatcccatttgggaaatgtattatagtgaaaataatgcatgtggctcaattcaaatgacaattctctgcaactgcagaaatattcacagaactgcttcttgtaaagctgtgaaatgtatagttttcctgttaatgygcatcattcagattgcattgattgtcttttattcttgggggaggaagggggacctgtaaatacatttgatctgaattctgtttgagtattccttctgagcacaacagtgcctgggctgtgctgtaaggctctagtagaaaggtaaaagaagggctgcatgtaatatgataaggatctgatgtgtcctgaatcactggaagttttatattctgattttttttattcattcctaattgtaagtcattttactgctcaaatagaagataagggtttaatatggaagttgctggatgaggttgt

SEQ ID NO: 69694 - DNA, 600 bp, Chicken  19866894342045_1
actgaaaactcattgtaatcactgttaatgaacataagagaaacgaggaaaagtgaaaaatgaagccttacagaggtgcaccaagcttactcagaagtacagctctaacaggaagagaagcaagctcagcctcttcatcttcactgttactgtaactccatctgtacgcctaagagtgccagcaatgccagcaaaccaagccagtttaaaaataaactgcccatagggcttccctagttggtgccatttacaagaaaacctcaagcaatgctgcagcacacacaagactttaaggcatgmaatagtattgaaaactatctttctccttcctgagtactgtacgaaatccacctatctcacggcagaggtactagatcaaatctacctggaagagaaactcaaacagcattagaattggcttttaactgccttttagggtacaaggctgttagctcaaattcagccactaagtaatacaagcatttccacgtgtcttgttgcagggtttgagagatcaaaagccaggacctagaaatgtcaatgcagaaggttttggagacttcaaaatgagcaggtttcccagaatgttacttctcagtc

SEQ ID NO: 69695 - DNA, 600 bp, Chicken  19866894342047_1
agcctcgagccagctttctcttttgccattgtaatttaacccagctattgcatttaatcaccaggtatgaggtagctactgtctcccatccctcaggtaactttctggaaattcagtaatttgaaaagtttcagctctttcccatcatggctaaatagctgaaaaatacagttaaagtcctttctcaaacatttcaaatgaaaataaggcacttagttgggaacctcccattcccagttgtgtgttggtggcatttgaagaggaaaacagatttcagtgcattgagatgttgcggtgagrtgcctgagggaaggcaagggaacatctgacttgcagtgaacccagacttgcaggaatctgatatgcttctctcacaacaaaactgaggaagtttcgtgccggtgggagctggaagtgcttagccttgtgtgaacaatctcatcatttacacctgcacagagcrctgcaggaaagggcctggtggttacagtgaggctgaaaatgagacaacagcatggtccataggaaataaggcaaaccacataccaagatgcactgggagggatgaagtcagcagatagagaaagaagagagttcatg

SEQ ID NO: 69696 - DNA, 600 bp, Chicken  19866894342047_2
aaatacagttaaagtcctttctcaaacatttcaaatgaaaataaggcacttagttgggaacctcccattcccagttgtgtgttggtggcatttgaagaggaaaacagatttcagtgcattgagatgttgcggtgagrtgcctgagggaaggcaagggaacatctgacttgcagtgaacccagacttgcaggaatctgatatgcttctctcacaacaaaactgaggaagtttcgtgccggtgggagctggaagtgcttagccttgtgtgaacaatctcatcatttacacctgcacagagcrctgcaggaaagggcctggtggttacagtgaggctgaaaatgagacaacagcatggtccataggaaataaggcaaaccacataccaagatgcactgggagggatgaagtcagcagatagagaaagaagagagttcatgtccattctggctttgttcttctgggagtaatgatggctgkaatgatttttcttgtcttgttttgagtaagaatgtatgtactgtatctgactctgggcacgtttacccgcattagctcacctgcagtacttagctggagctaaatacctgagctcagttagag

SEQ ID NO: 69697 - DNA, 501 bp, Chicken  19866894342047_3
cccagacttgcaggaatctgatatgcttctctcacaacaaaactgaggaagtttcgtgccggtgggagctggaagtgcttagccttgtgtgaacaatctcatcatttacacctgcacagagcrctgcaggaaagggcctggtggttacagtgaggctgaaaatgagacaacagcatggtccataggaaataaggcaaaccacataccaagatgcactgggagggatgaagtcagcagatagagaaagaagagagttcatgtccattctggctttgttcttctgggagtaatgatggctgkaatgatttttcttgtcttgttttgagtaagaatgtatgtactgtatctgactctgggcacgtttacccgcattagctcacctgcagtacttagctggagctaaatacctgagctcagttagagaatacttgagttttgcttgaatcaaatgtatggattattgaagaataacttccaaagcacataccagacaccttaagt

SEQ ID NO: 69698 - DNA, 600 bp, Chicken  19866894342050_1
aggactacagagtgagaatcttgacactgtaatgaaagaaatttgtgatcttaatgcaacatggttttggctagtttgagtggtaaataataaataatacacaagtatcctgaatcaaatactaatatctatgtggtgcagtcaaaagacttgtgagattagcttgtaacattcagagaaacctaaatagaacaggtactctgagatctttccactcagtttgccaagagctttgcctttgccatttggtttgaaggcatatgcccaaagctaacacccagtgctgtttctgataatcaytgggctaaggaaaggcaggacctacaggacttacacagatggatgctgtgtttctttgtcatgtagtctgtgtaattgtgcatgaaagagagtggacattcagtgatttcatctaggccttggaaaagaatctgtacagtaaagtatgagtgcattttctcaagtctacatgtttccacaggagagaatacctattgcatactgaaactccttctctctctcacttagacatgcctgtcttcaacatttggtaaacaaggtattgcagaattattaatgcatttatcttcattggtctcc

SEQ ID NO: 69699 - DNA, 600 bp, Chicken  19866894342050_2
acggtgcaggcctgggcagctccttcatcagtaggttccagaagtgctgaagtttctacatggaaatactgctgacctgagccattcaacagtgtaaattgcccctggctgtgcagccctatttgcagatgtgttgtcaggaaattttttgtcatttgataactgtctgccttgctttaacacatgacctgaaaaagagaacatttgtctcaccacctcacggaagtgcaaaaaaagagagcagtactccattgacttctcatagagaagaggggagataaatgaaatgaaccgatgggmaggcctgagacacgtttattttgcatgtgatattttattatgtttgggaggaatttctggtaaaaggaggagcataattaagtggaagaatgtttgtaattgtaaacagggatagaagtctgggccaaggagcttcagtttggtgtccctggggtgagttggtcagcctcacctgggcaatcacttccagaattggaatgcaaaagttatagcctcaaaaaaaatatatatacagcaaaccaaaaccaaaatgggagagaggcaaaacagaaaaggctttgattaagtttttctttaaag

SEQ ID NO: 69700 - DNA, 599 bp, Chicken  19866894342051_1
  misc_feature (1)..(75): n is any nucleotide
nnnnnnnnnnnnnnnnnnnnnnnnnnnnnnnnnnnnnnnnnnnnnnnnnnnnnnnnnnnnnnnnnnnnnnnnnnnatgtgctgaccaagccatgatttagatcatgtaaaaccagctgcttctcattattccagataatgctggagctgacatttttactacttcatgcatgaatccatgtttttggcttcatccaaacagcagctgaaaatgaatagacaccaaacactagtctcaaggagagagtgtactggcacttggccccagctacacaggcaaatgaagcagatataaagaaayaagttataatttacygtaatcctgatccagcaactgttgaagtaactggaaagattctcattggattcagcaggcctcaagagacaaaccctaatgggcatagtaaaatacagcarcaatgtaacatcttaggaagagatacagtagaataatagtaatgcagacttgccaaatgtgaaggtaatgggaagagaatcactaattataaaggctgagaaatcagacaattctttcatcactgtatgtgtttgaacctgataagcaataggaagatggtgggaatgttttgaagctaaata

SEQ ID NO: 69701 - DNA, 599 bp, Chicken  19866894342051_2
  misc_feature (1)..(60): n is any nucleotide
nnnnnnnnnnnnnnnnnnnnnnnnnnnnnnnnnnnnnnnnnnnnnnnnnnnnnnnnnnnnatgtgctgaccaagccatgatttagatcatgtaaaaccagctgcttctcattattccagataatgctggagctgacatttttactacttcatgcatgaatccatgtttttggcttcatccaaacagcagctgaaaatgaatagacaccaaacactagtctcaaggagagagtgtactggcacttggccccagctacacaggcaaatgaagcagatataaagaaayaagttataatttacygtaatcctgatccagcaactgttgaagtaactggaaagattctcattggattcagcaggcctcaagagacaaaccctaatgggcatagtaaaatacagcarcaatgtaacatcttaggaagagatacagtagaataatagtaatgcagacttgccaaatgtgaaggtaatgggaagagaatcactaattataaaggctgagaaatcagacaattctttcatcactgtatgtgtttgaacctgataagcaataggaagatggtgggaatgttttgaagctaaatatatttttgatgtgat

SEQ ID NO: 69702 - DNA, 600 bp, Chicken  19866894342051_3
tgcttctcattattccagataatgctggagctgacatttttactacttcatgcatgaatccatgtttttggcttcatccaaacagcagctgaaaatgaatagacaccaaacactagtctcaaggagagagtgtactggcacttggccccagctacacaggcaaatgaagcagatataaagaaayaagttataatttacygtaatcctgatccagcaactgttgaagtaactggaaagattctcattggattcagcaggcctcaagagacaaaccctaatgggcatagtaaaatacagcarcaatgtaacatcttaggaagagatacagtagaataatagtaatgcagacttgccaaatgtgaaggtaatgggaagagaatcactaattataaaggctgagaaatcagacaattctttcatcactgtatgtgtttgaacctgataagcaataggaagatggtgggaatgttttgaagctaaatatatttttgatgtgatatgcatcttctttgatgtagacactttcattaaatgtttatctgtttaattattatttatcttgtacagaactttgggatttactaagatgaaagaggctat

SEQ ID NO: 69703 - DNA, 599 bp, Chicken  19866894342053_1
  misc_feature (1)..(150): n is any nucleotide
nnnnnnnnnnnnnnnnnnnnnnnnnnnnnnnnnnnnnnnnnnnnnnnnnnnnnnnnnnnnnnnnnnnnnnnnnnnnnnnnnnnnnnnnnnnnnnnnnnnnnnnnnnnnnnnnnnnnnnnnnnnnnnnnnnnnnnnnnnnnnnnnnnnnnngcgctaagtttggccttagcacactagattcactgtaatggtcaacaactcacgtagacacactatactgttaatagtgaaggctatgaaatactggtctgaaggatgattccctgtagatatgcttcatcacttctgtgtcaggaatgyatgtttaattacataattatgttgatatcacggaatataatgtcaattgacaaggaaattagggccggtggtagatctattaacatttaaattatactttcacccctaaatgatggtctctgtttatgctgccttttgcagtgaggtgcttgtcccttgaacagctgaagaaatccactaaatgaactgaacatatcctagctgttcagaggacatgaccctgcagtggtggtattacaacatactttttcacaatatagcctattcccctctgattccattacagcatgttttttttg

SEQ ID NO: 69704 - DNA, 484 bp, Chicken  19866894342053_2
tctctgtttatgctgccttttgcagtgaggtgcttgtcccttgaacagctgaagaaatccactaaatgaactgaacatatcctagctgttcagaggacatgaccctgcagtggtggtattacaacatactttttcacaatatagcctattcccctctgattccattacagcatgttttttttggtttttagctaaagaaagtttgcatagtgtattggaaatataaacagagctgtaaaagccacaaggcgtccttaacaacagtgccatcaaaccttctgtttcacaattaagtatcaygttttccttggatttattagcattttcttgctgttactttttccatcagcaatgctatctcagaatgaaataagctttaacaggtacaaaacttctacactgcaacaacactgccttgggattgtcctcagaatgtaaggctctttctcattaaacattttttttttaaagtgaataagtattc

SEQ ID NO: 69705 - DNA, 600 bp, Chicken  19866894342058_1
attgcaggtggagagatctactttgtggctgcttcacgtacagaaatcataccgctatatctaagcttatactgggataaatatactaatgtaaaagccattatcttgcttcagtcctttcagaacaggacaatgaactgtatcaattcacagaacgaattcagttaaaaaagagaaggattaaagataaataaaaaaaaaaactatgcaaattacataacctcaccaaatacagtaacctaacctctataacatgtcccattcacttcctaactacttttggcactacagaacactcckaagtgacaaacactcctaagtgataaggagtttgcatcacaccttcttgcacgacacagcatccattttatgtattccatttaacgcaggtcactttgaaaaccacgtaagttacatacatgcactaccatctaaactcatgtaaaggccattgaaattaaagtaaccaagtacccagtctttccacctttccatccagcttatgcagccacaggctaaagcaagtttctttagtgggcaattagcccacgtacacactcgaagatctgggaagtccaagtccaatgaacgtacagttgc

SEQ ID NO: 69706 - DNA, 600 bp, Chicken  19866894342058_2
tcgctgttcacggtgtagactcagcacagaatcaaagacagaaagactatcattaccccaaagaagcttttctatcctgcaacagcataaattgaaattgggaaggagacatctgtgcatgtgtgtgcacaggacatgctcaagaaataaagaggacaggacaaattacttccacagttattaggatgatgaaaataggattttcttcatttagctgttctcaccttaactttcaattcaggtctagagaagaccttatacataccaaagcatagttagaacataaggctatttcctatyacgtagaacatgaactcacatattctctcctcattcccttctcacataaaggaagcaagacattgcttcaatctctggatattaccataccattaatttctcagcagatttagaaggacagactcctgacaaagtgtgaggaatatctaaatatcaaaaggaggataagattgtacatttcaaaaaggattctgtgctaaaaaacaaatgtcagtgactcattgagtggcacgtgctttaacacaataggatgaccaactctacaatccaagcataaaaactaaaattttatggagcatg

SEQ ID NO: 69707 - DNA, 600 bp, Chicken  19866894342060_1
tttcttagtagaaaaatgataccattttttagggttttcttgtgtttttgttttttatcttcatgacaaaagatgacagctacgccatgtctctaggttggtaagtgttgaggacttttacaagactgttactgtgatcctaaactacaacggggagtttgtccacctgctgccttgtagttaaacctggctggcatcctggctgtgcacagcctgatcgaacctgagctgttttattccaagtcagtagagaagtacttccaagctggatgctcttagttgaaacaaaattaaggaatsctatttttttaacttggtaacagtctttagattgtaagctccgtggggcaggggccatcttgcttgtatttttccagtgcctagataggtttccagccctagtcatgatgaaactgacacccttaggaattggtaccaggatcatagattatctcattcttcattggaaatacctcaaatctctgtacaaattctagactaggtaaattttgaaagtgacgtgaaagaaagcaattcaaagggaaaatatttcagagaaggtgaaaacagtgatgcagtcctgctaccagtagtctggct

SEQ ID NO: 69708 - DNA, 600 bp, Chicken  19866894342061_1
agatgcaggtgcccacagctcacctcctgcagttggattttacactcctttaacccaaagagcatatctctgcctatttctcacccaagggaagaaggcctctggactcctcttttacagtagtctagcagtgaaaaggctaaaccaaggtcttatgccaaatgtctcaccagtttgagagaatttaaactccagtcactcctctcaaggatatcccaaacgctggaaggaggatgtaccctctatcctttatcttggagctagaacagaaaactattggaacaccaaaaggcaggagaygaggctgtgttgtgttcctgcctcctctgcctgttttctaattcttaattcagtgactgtccagagtgaggcacaggaacgtccagggctgagggcctccacaaccctcctgyccctcttctggctcctgatctttattcagccttctggttcaaaatactcttgcctgttattacataaaatgctacagaggagcgaagaactggaattttgtctctgactcacagacaactgctgtgtagcaaacccaattttcatgtttcagagcaacattcttacactgagagatggatcaataca

SEQ ID NO: 69709 - DNA, 600 bp, Chicken  19866894342061_2
tttacagtagtctagcagtgaaaaggctaaaccaaggtcttatgccaaatgtctcaccagtttgagagaatttaaactccagtcactcctctcaaggatatcccaaacgctggaaggaggatgtaccctctatcctttatcttggagctagaacagaaaactattggaacaccaaaaggcaggagaygaggctgtgttgtgttcctgcctcctctgcctgttttctaattcttaattcagtgactgtccagagtgaggcacaggaacgtccagggctgagggcctccacaaccctcctgyccctcttctggctcctgatctttattcagccttctggttcaaaatactcttgcctgttattacataaaatgctacagaggagcgaagaactggaattttgtctctgactcacagacaactgctgtgtagcaaacccaattttcatgtttcagagcaacattcttacactgagagatggatcaatacagcaaaatatacttttcacatgggcacccccaaagctattccagttttatactgttagactggaagctgagtcaggttaattatgtttatcagatattaagggaacagatttta

SEQ ID NO: 69710 - DNA, 600 bp, Chicken  19866894342068_1
atggggaagctggaaaaggggaattaggggctcggggcagagatcagagcctgggatcctgcctgggatcagagaagccttggcatttgccagcaccaaggagcaaacaggacttgcaagtagtgacttccacccatgggagccagtcaagctttgatgaacagtgaagagctctacactgaagagctcagtgaagagctttatcctgctaaagacaccaatggtggggaagcaaacaactgagactgggcaagtgatctttcacaccatatttcagactccttttgcacagaagcaacktgtgtctgggctatggacagcctgcttgctgagtgcttgctgtctttgtgtcagctctcttcagctcatctcaccctttgaggactgaagtattcacaggttggtttaggagatttcagcagtctgacaaccagatttggaattagtgtttcacatgggggaaaactacaccacagaattgcaaatgatgcagcagaaacagaaataaatcgatctgaattgactccatgtgtcctccatggccgtttctccccaggcagatcagacaccttcctaccaaagtcagctctgatgttgaag

SEQ ID NO: 69711 - DNA, 599 bp, Chicken  19866894342071_1
  misc_feature (1)..(52): n is any nucleotide
nnnnnnnnnnnnnnnnnnnnnnnnnnnnnnnnnnnnnnnnnnnnnnnnnnnntggtcttaatccatgccctttgatgtcaacaaaaatccccagtgttgcaataagttctaaaactttgagaaagtaaaatgtaccaaagaagtccaggagatttagatgtatgcgcactagaaatgcaatgtgtgtacatgcaattggagaagttctggttcaagttccaaccgcactgacaacacaacacccagacatgacacccataagcttcccagtaaaggagaacataactaacttccacagawgatactgctttaagaatagttcaagattatgcaatgtaaaaggccacttaaaaacaatgaagttcagaaaacctaaatgccagccaccccaatggctacatttgaagcccaccaacccacgcatgcagaatttttcctcaccagcattgtcttcccatttcctggtgggccaaagagcaacaatccacgtgcaggagctctaagtcctgtaaataacttgaagaatacaccatcgtaagttaacttcaaaaagaactgaagtrttagaaacagtaaatatacacttggttagagcatta

SEQ ID NO: 69712 - DNA, 542 bp, Chicken  19866894342071_2
ttcccagtaaaggagaacataactaacttccacagawgatactgctttaagaatagttcaagattatgcaatgtaaaaggccacttaaaaacaatgaagttcagaaaacctaaatgccagccaccccaatggctacatttgaagcccaccaacccacgcatgcagaatttttcctcaccagcattgtcttcccatttcctggtgggccaaagagcaacaatccacgtgcaggagctctaagtcctgtaaataacttgaagaatacaccatcgtaagttaacttcaaaaagaactgaagtrttagaaacagtaaatatacacttggttagagcattacatagactcaagactgcaatttctttaaactctgaatgagggttgggttttttttttcccccataattttattaagcaccagaagaaatcctaaaatctgtttcatggccttgccagcattaacagccaccagttaagcttaactcctaaagttacatactgcttttaactaactgtgacaagagaggaaaagcaagccattcaat

SEQ ID NO: 69713 - DNA, 600 bp, Chicken  19866894342075_1
caacattttcagaatcatcaataaaggcaactttagccttctgtgtcacaaaataaggcaaatgcccagcctatttgctatatatatctgtgcaaataatttttagctatatttgcagtatgtatcagcacagctcctttggaattggttatttaatactgatttacattggctcagtagctggtctttctttttagtttaaattccttaagatttcccccccagtttgcataaaaaccttaaagactaaagcgttcttgatttttcatctatgcatgcatattttctttaaaaaatgcrtatgtgtcttttaatctttcttcttattttaatctcctgattgttctgtttattattaagataacttttccgatgttaatgaagatgtaattagtactggatcctctactgtgacttgcttcatgcataaaaatgaaacgataggaaagggagtaagatatgccatgagagcaaaggataagaaaggcagcccacaatacagggcaaacaatagctcccctaaagctaatgtgtgacaataacagaacatgagtcaccattattcaaatcatattaataattaatagacctgtgtgcgac

SEQ ID NO: 69714 - DNA, 600 bp, Chicken  19866894342075_2
aacattttcagaatcatcaataaaggcaactttagccttctgtgtcacaaaataaggcaaatgcccagcctatttgctatatatatctgtgcaaataatttttagctatatttgcagtatgtatcagcacagctcctttggaattggttatttaatactgatttacattggctcagtagctggtctttctttttagtttaaattccttaagatttcccccccagtttgcataaaaaccttaaagactaaagcgttcttgatttttcatctatgcatgcatattttctttaaaaaatgcaratgtgtcttttaatctttcttcttattttaatctcctgattgttctgtttattattaagataacttttccgatgttaatgaagatgtaattagtactggatcctctactgtgacttgcttcatgcataaaaatgaaacgataggaaagggagtaagatatgccatgagagcaaaggataagaaaggcagcccacaatacagggcaaacaatagctcccctaaagctaatgtgtgacaataacagaacatgagtcaccattattcaaatcatattaataattaatagacctgtgtgcgaca

SEQ ID NO: 69715 - DNA, 600 bp, Chicken  19866894342075_3
attttaatctcctgattgttctgtttattattaagataacttttccgatgttaatgaagatgtaattagtactggatcctctactgtgacttgcttcatgcataaaaatgaaacgataggaaagggagtaagatatgccatgagagcaaaggataagaaaggcagcccacaatacagggcaaacaatagctcccctaaagctaatgtgtgacaataacagaacatgagtcaccattattcaaatcatattaataattaatagacctgtgtgcgacagtgctctcccacaattttctcccygctctcttgattctgaacagtttctactgatttcaactgaygtaaaatacatctgactaaggctgctattattttgcctagaatttagttgctgttttgttgcatttatagctgaaaaaaaaaaaaaggctttaaaaaaaattaattatttacagattagaaagaagcagaggaggaactttccatgcagcctataccttgatgtaaaagctgagaaccacatttgagaatcacatctcttccagaacagtaatggaaggttccagtttcagtcaacactggtcaggtgagtttatcttg

SEQ ID NO: 69716 - DNA, 600 bp, Chicken  19866894342075_4
tttccgatgttaatgaagatgtaattagtactggatcctctactgtgacttgcttcatgcataaaaatgaaacgataggaaagggagtaagatatgccatgagagcaaaggataagaaaggcagcccacaatacagggcaaacaatagctcccctaaagctaatgtgtgacaataacagaacatgagtcaccattattcaaatcatattaataattaatagacctgtgtgcgacagtgctctcccacaattttctcccygctctcttgattctgaacagtttctactgatttcaactgaygtaaaatacatctgactaaggctgctattattttgcctagaatttagttgctgttttgttgcatttatagctgaaaaaaaaaaaaaggctttaaaaaaaattaattatttacagattagaaagaagcagaggaggaactttccatgcagcctataccttgatgtaaaagctgagaaccacatttgagaatcacatctcttccagaacagtaatggaaggttccagtttcagtcaacactggtcaggtgagtttatcttggttgctgggttactgtgaatatatgcatgttaaaaataaag

SEQ ID NO: 69717 - DNA, 600 bp, Chicken  19866894342075_5
atgccatgagagcaaaggataagaaaggcagcccacaatacagggcaaacaatagctcccctaaagctaatgtgtgacaataacagaacatgagtcaccattattcaaatcatattaataattaatagacctgtgtgcgacagtgctctcccacaattttctcccygctctcttgattctgaacagtttctactgatttcaactgaygtaaaatacatctgactaaggctgctattattttgcctagaatttagttgctgttttgttgcatttatagctgaaaaaaaaaaaaaggctttyaaaaaaattaattatttacagattagaaagaagcagaggaggaactttccatgcagcctataccttgatgtaaaagctgagaaccacatttgagaatcacatctcttccagaacagtaatggaaggttccagtttcagtcaacactggtcaggtgagtttatcttggttgctgggttactgtgaatatatgcatgttaaaaataaagaatttgagggaatggcacagaactgcactagaggagggtcagattaggcatgtatgtcagtgttcagagggcattttggataatgtcctcaat

SEQ ID NO: 69718 - DNA, 599 bp, Chicken  19866894342083_1
  misc_feature (1)..(77): n is any nucleotide
nnnnnnnnnnnnnnnnnnnnnnnnnnnnnnnnnnnnnnnnnnnnnnnnnnnnnnnnnnnnnnnnnnnnnnnnnnnnnatttatgctgaggaagagagggagtagatatagggtttatttaaatgaaaattatatgcagaatacagaaataaaattgtttcattgttaagtgtcataagaatgaatttaccctgaatatatgagattagaaactccaacagtgaaattatcaaagtaaaattacatttggtctcttaaatagtcaagtgttaataaatatacacaaacatacactcaaaayaatttaaaccagtagcagctgtcaagtttgcagcatttatttgttcattttttatttgttctcctcccaagaaaaagcaaacaagccactactgtgtagcttctgaattcaattagtgacaagaaaacaagccacagaataatatgagtgaggatgtgaaatgacaggtacatgagttgtttgtttttgttgtttttcctttttgttgttttttgtttttaacaacagtttaagaaagtctgatttggataaagtgaacagacaaaagttttcacacaaactgtaatagattttttact

SEQ ID NO: 69719 - DNA, 577 bp, Chicken  19866894342083_2
accagtagcagctgtcaagtttgcagcatttatttgttcattttttatttgttctcctcccaagaaaaagcaaacaagccactactgtgtagcttctgaattcaattagtgacaagaaaacaagccacagaataatatgagtgaggatgtgaaatgacaggtacatgagttgtttgtttttgttgtttttcctttttgttgttttttgtttttaacaacagtttaagaaagtctgatttggataaagtgaacagacaaaagttttcacacaaactgtaatagattttttacttgtctcawtagtgttttctccaaggacgttttagcattttatcttagatctagagtaagaaattaaatgcgacttgattaaggcagtttaaagacgtgtcactacatactagtattggagatgctataaagccaggaacatctgctgcagtaacgcgaaggtttagcaaagtataaaccaattagtacacagtcgtttaatgttacttaataaaactgacatgttttaatccttttttattggagttacacactgaagggcattcaactgtgtatatgtctttca

SEQ ID NO: 69720 - DNA, 600 bp, Chicken  19866894342100_1
tgtggtaattaaagatatgtatttttattccaatttgctttttaaagttttggaaagaattgataatttttctctgttcaaattcttggcacctcatatgattttatagatcttcatactttcccttttgctttctctttctgggactgaaaagtcctaagctaatcagcctttttttttgtaaggactcatgtgtagaacctgttccataactgtggccaccttcatgttatactacccttccaccctaactattctgttttatgaagcatttccactacccttttaatggctttcttstgtttcaaatacacaatgagtctgcatgagcagaagactttgtcactgaagggctcttccagagcatttactaatatgtagaataatgctgacaccattacagacatttggtgaaccctgctagtagtcttttccacttgggaaaactgtctcctctttcttccataatctcaaaacaagaccttctatgttatcagaaatttccctggcattttttagtaacagagatcattgaaagtatcccaaagctacgtccacagtaatatgtaaattaaaaaaaaaaaaaaaaaatctactggt

SEQ ID NO: 69721 - DNA, 599 bp, Chicken  19866894342101_1
  misc_feature (1)..(38): n is any nucleotide
nnnnnnnnnnnnnnnnnnnnnnnnnnnnnnnnnnnnnncgcctactgttttacttctcagcagtttttgagagtgagttctctttactacactgaataatctgatatgacagaatttttgccaacattcctagcaatgtgttgaacagcacatatttgtgtgtatttgtgtggttcactgtggaaactggctattcatttcttccttttgattcttatttactcttaaaagtccaggttaaagcagtccatctttgagtctgtagatgggcctcagcaagtgcagcttctacagactcaycagttactcctagcctctagacaacacagcaacttgaattctatcatccaacataatgagagttgttgttcattcacgacttggacgcccagtttccttcatcttacagcaacatccccctttcagacctcagactttcatctgtttgagtcaaatattctgtctggtgtagcagaaaagatgaactgattaggctccatctgcttagtgcttgtacaggccaatttgctttgttacataaaagactgcagtgcagatttawcacacaaattgacttctggaatccagaaagataatac

SEQ ID NO: 69722 - DNA, 600 bp, Chicken  19866894342101_2
tagatgggcctcagcaagtgcagcttctacagactcaycagttactcctagcctctagacaacacagcaacttgaattctatcatccaacataatgagagttgttgttcattcacgacttggacgcccagtttccttcatcttacagcaacatccccctttcagacctcagactttcatctgtttgagtcaaatattctgtctggtgtagcagaaaagatgaactgattaggctccatctgcttagtgcttgtacaggccaatttgctttgttacataaaagactgcagtgcagatttawcacacaaattgacttctggaatccagaaagataatacaggtttgttattgttgcttttgagttctcatatttaaacagacttccctttcaggtctattcctcccacattcctttctactgtagggtggtatggattttccgctttgggtctgcaaaactggttttgttctgttgtactgacagaacttgacatttgacatctaacacttgacactcaacacttctaaattctcttagcattgcttctttgctgaattttgctttgaaatcaactgatcctatatccgtaacccccagaag

SEQ ID NO: 69723 - DNA, 600 bp, Chicken  19866894342101_3
ctgtgctgtttcaaaatgaaatgacatgcaggcataccaatctgagacagatttatgtgctctgagacagagctgagacagtgattcaagtatggcccctctcatttgagtacagatgaaaagagaaatgacagcatgctcatgagtagaaaactcttattcaagtcagccagactatgggcatgtgagttaaacttagggcaaagagccatgaactcctgaattctaaatcagttatgtcactgactttctgtgtgagctctcataaatctccatggctaatatttcctatcctgagtytgtacatccatatttaggtctcaaatgatttgcagacatgctgaagacccacagtttmtatttatttttaaggtcagatacaccttttcaagtacaataatctattgttttttgttggtacatatttgtaatttgattgttgaaacagaactttatagttggaaaaaaatatgaacagcatttttattctatttcttttcaatttatctgaacattcatttttccttcatgaaaacacttacagaaaattacagaggaatatttgttttcagacaacagaggtaaagaaaacatgaaatg

SEQ ID NO: 69724 - DNA, 600 bp, Chicken  19866894342101_4
gctctgagacagagctgagacagtgattcaagtatggcccctctcatttgagtacagatgaaaagagaaatgacagcatgctcatgagtagaaaactcttattcaagtcagccagactatgggcatgtgagttaaacttagggcaaagagccatgaactcctgaattctaaatcagttatgtcactgactttctgtgtgagctctcataaatctccatggctaatatttcctatcctgagtytgtacatccatatttaggtctcaaatgatttgcagacatgctgaagacccacagtttmtatttatttttaaggtcagatacaccttttcaagtacaataatctattgttttttgttggtacatatttgtaatttgattgttgaaacagaactttatagttggaaaaaaatatgaacagcatttttattctatttcttttcaatttatctgaacattcatttttccttcatgaaaacacttacagaaaattacagaggaatatttgttttcagacaacagaggtaaagaaaacatgaaatgctatgaaataagtttttgaagtgactactgatagttatatcaatatttatatacataa

SEQ ID NO: 69725 - DNA, 599 bp, Chicken  19866894342106_1
  misc_feature (1)..(59): n is any nucleotide
nnnnnnnnnnnnnnnnnnnnnnnnnnnnnnnnnnnnnnnnnnnnnnnnnnnnnnnnnnntgtacccagatacgatggcaagaagtaaccccagcccgtgagccaggggtcaccacggccacgaattccatccccctccaccccaagccctaccctctcccagtccatccagctcaaagaaaaacaaacgcaggacttaccaaagggcacagagaaggaaagatcctgaacgaagagaaggagcgggcagcaaaatccctttccttcgctccttccaggggacccggtgcggtggcagctygagcggcgcctgcagccggctctacgtgtccgtccaggacaggagctgatggccggcgctggctttgggytggcgtttgtccctttggctttgctttccctctcacggagctattccccaccgcaacgccgtgtccccggggccaatttaggggcaccccgagcgcagcggggggaccgtggggctcrgacctrgcgcagcagcagggagcaagggcgggatggaggagggaaggacggaggaggttggaggcaaggaggtgccggttccctcccctctgcccagaccacacagaggag

SEQ ID NO: 69726 - DNA, 600 bp, Chicken  19866894342106_2
acgatggcaagaagtaaccccagcccgtgagccaggggtcaccacggccacgaattccatccccctccaccccaagccctaccctctcccagtccatccagctcaaagaaaaacaaacgcaggacttaccaaagggcacagagaaggaaagatcctgaacgaagagaaggagcgggcagcaaaatccctttccttcgctccttccaggggacccggtgcggtggcagctygagcggcgcctgcagccggctctacgtgtccgtccaggacaggagctgatggccggcgctggctttgggytggcgtttgtccctttggctttgctttccctctcacggagctattccccaccgcaacgccgtgtccccggggccaatttaggggcaccccgagcgcagcggggggaccgtggggctcrgacctrgcgcagcagcagggagcaagggcgggatggaggagggaaggacggaggaggttggaggcaaggaggtgccggttccctcccctctgcccagaccacacagaggagaggcagcggggaggcgttcgggggctgccggagccccagccctgtttaacccagcgaggggcgagccgcca

SEQ ID NO: 69727 - DNA, 600 bp, Chicken  19866894342106_3
gcaggacttaccaaagggcacagagaaggaaagatcctgaacgaagagaaggagcgggcagcaaaatccctttccttcgctccttccaggggacccggtgcggtggcagctygagcggcgcctgcagccggctctacgtgtccgtccaggacaggagctgatggccggcgctggctttgggytggcgtttgtccctttggctttgctttccctctcacggagctattccccaccgcaacgccgtgtccccggggccaatttaggggcaccccgagcgcagcggggggaccgtggggctcrgacctrgcgcagcagcagggagcaagggcgggatggaggagggaaggacggaggaggttggaggcaaggaggtgccggttccctcccctctgcccagaccacacagaggagaggcagcggggaggcgttcgggggctgccggagccccagccctgtttaacccagcgaggggcgagccgccatggagggagggcagggaggacagccggacagacagctcctggttatgaatattaactacttcctccagaggcagccagcgcagcgccgcgttaaccatttccttcggcgttgcagaca

SEQ ID NO: 69728 - DNA, 600 bp, Chicken  19866894342106_4
cttaccaaagggcacagagaaggaaagatcctgaacgaagagaaggagcgggcagcaaaatccctttccttcgctccttccaggggacccggtgcggtggcagctygagcggcgcctgcagccggctctacgtgtccgtccaggacaggagctgatggccggcgctggctttgggytggcgtttgtccctttggctttgctttccctctcacggagctattccccaccgcaacgccgtgtccccggggccaatttaggggcaccccgagcgcagcggggggaccgtggggctcrgacctrgcgcagcagcagggagcaagggcgggatggaggagggaaggacggaggaggttggaggcaaggaggtgccggttccctcccctctgcccagaccacacagaggagaggcagcggggaggcgttcgggggctgccggagccccagccctgtttaacccagcgaggggcgagccgccatggagggagggcagggaggacagccggacagacagctcctggttatgaatattaactacttcctccagaggcagccagcgcagcgccgcgttaaccatttccttcggcgttgcagacagatgga

SEQ ID NO: 69729 - DNA, 599 bp, Chicken  19866894342108_1
  misc_feature (1)..(143): n is any nucleotide
nnnnnnnnnnnnnnnnnnnnnnnnnnnnnnnnnnnnnnnnnnnnnnnnnnnnnnnnnnnnnnnnnnnnnnnnnnnnnnnnnnnnnnnnnnnnnnnnnnnnnnnnnnnnnnnnnnnnnnnnnnnnnnnnnnnnnnnnnnnnnnncatcactaagtgaattcaccttgctttactgaactgtcttgctccaagtcaaagtgattctgcgtatatgttcatagaaattagttatatgtctgcagttctgctatggatcttttcaagacatcactgccaaaggagtggaattcaaaaaaaaagsaagtaaaattcataaaatgaatgatatgagaatatgttaatgtgatcctagtggtcatcagggatttttcagcatttgtacagaaaacaagtataaatcttaacctcaaattcaacctacaaagcctctccttccaacagaatctcctgtataaaacagacgcctactgaatcatttagcctatcctgctttagtcagaaaaaaaaataaatcagtgtctgaayagttcaacctyaacaatgcaacaaactgctgtgttagcatcactataaattgcaatcttgctaagcagcctagga

SEQ ID NO: 69730 - DNA, 600 bp, Chicken  19866894342108_2
tagttatatgtctgcagttctgctatggatcttttcaagacatcactgccaaaggagtggaattcaaaaaaaaagsaagtaaaattcataaaatgaatgatatgagaatatgttaatgtgatcctagtggtcatcagggatttttcagcatttgtacagaaaacaagtataaatcttaacctcaaattcaacctacaaagcctctccttccaacagaatctcctgtataaaacagacgcctactgaatcatttagcctatcctgctttagtcagaaaaaaaaataaatcagtgtctgaayagttcaacctyaacaatgcaacaaactgctgtgttagcatcactataaattgcaatcttgctaagcagcctaggaactagttgctcagaatgattaaaaaaacccaccaggtaaaaacaatggyagccttaatcttcaaacacatattcatcacactttgcagttacttgtttgacacatcttacaagcctcaagcactggaggatgatgtcttcatttcttaaaatgtatatattaagcaatttcatgtgcatttacagaattatcctttattgctttgaatgcatattggagattttt

SEQ ID NO: 69731 - DNA, 600 bp, Chicken  19866894342108_3
ctgcagttctgctatggatcttttcaagacatcactgccaaaggagtggaattcaaaaaaaaagsaagtaaaattcataaaatgaatgatatgagaatatgttaatgtgatcctagtggtcatcagggatttttcagcatttgtacagaaaacaagtataaatcttaacctcaaattcaacctacaaagcctctccttccaacagaatctcctgtataaaacagacgcctactgaatcatttagcctatcctgctttagtcagaaaaaaaaataaatcagtgtctgaayagttcaacctyaacaatgcaacaaactgctgtgttagcatcactataaattgcaatcttgctaagcagcctaggaactagttgctcagaatgattaaaaaaacccaccaggtaaaaacaatggyagccttaatcttcaaacacatattcatcacactttgcagttacttgtttgacacatcttacaagcctcaagcactggaggatgatgtcttcatttcttaaaatgtatatattaagcaatttcatgtgcatttacagaattatcctttattgctttgaatgcatattggagattttttttttttcttt

SEQ ID NO: 69732 - DNA, 600 bp, Chicken  19866894342108_4
tagtggtcatcagggatttttcagcatttgtacagaaaacaagtataaatcttaacctcaaattcaacctacaaagcctctccttccaacagaatctcctgtataaaacagacgcctactgaatcatttagcctatcctgctttagtcagaaaaaaaaataaatcagtgtctgaayagttcaacctyaacaatgcaacaaactgctgtgttagcatcactataaattgcaatcttgctaagcagcctaggaactagttgctcagaatgattaaaaaaacccaccaggtaaaaacaatggyagccttaatcttcaaacacatattcatcacactttgcagttacttgtttgacacatcttacaagcctcaagcactggaggatgatgtcttcatttcttaaaatgtatatattaagcaatttcatgtgcatttacagaattatcctttattgctttgaatgcatattggagattttttttttttctttgacatataatctaagagggtgtttttgagttacaataaaatgtataaagttattaatattccatttcaattaataataaaattttgaattcatcagtacttttttgagagctt

SEQ ID NO: 69733 - DNA, 600 bp, Chicken  19866894342108_5
caaaataatggaggtggcagaagtccttgcacgtgcaagtgttcaaagcaggcattaaaaaatgaagtactgtaatgggaaacaaacaaacagaaacaattcaccttcaaccttatagatagacaataaaaaaaatgatcactaactttaggtataagggaacaaggagattctcgacaaaggaaatttataataggaatacatattttaaagtaacatctgcatgcttgtatgcagttttcctccacagacatagaggtcacccaaaagaaatcctgattgcaaggaaaattaattagygtaagtagaawggggcaaaaaatatgtgtaaggaattatatatacatatataatagctgtcagctctcataaatctctttagttccactcagcttggttaaaacatgttagtgtatgccagccaaggaaattactcactggttataaaaagatgcagtgaagagataatggaagtcaatatgtctgggtgtttaagtctttttggtacaattcaaaaatccattcagtgtttttgcatgataaattagtatattatgttattatgtagtatgcatggctaattgtttagctctaaacata

SEQ ID NO: 69734 - DNA, 600 bp, Chicken  19866894342108_6
aggtggcagaagtccttgcacgtgcaagtgttcaaagcaggcattaaaaaatgaagtactgtaatgggaaacaaacaaacagaaacaattcaccttcaaccttatagatagacaataaaaaaaatgatcactaactttaggtataagggaacaaggagattctcgacaaaggaaatttataataggaatacatattttaaagtaacatctgcatgcttgtatgcagttttcctccacagacatagaggtcacccaaaagaaatcctgattgcaaggaaaattaattagygtaagtagaawggggcaaaaaatatgtgtaaggaattatatatacatatataatagctgtcagctctcataaatctctttagttccactcagcttggttaaaacatgttagtgtatgccagccaaggaaattactcactggttataaaaagatgcagtgaagagataatggaagtcaatatgtctgggtgtttaagtctttttggtacaattcaaaaatccattcagtgtttttgcatgataaattagtatattatgttattatgtagtatgcatggctaattgtttagctctaaacataaactacccaag

SEQ ID NO: 69735 - DNA, 600 bp, Chicken  19866894342114_1
cagaggggccgtgagctccatgcttggctcacagcgacatgttttaatgaccagcaagcacgtgccatgtctggatggagaagaggttgcagcatgcccagggctggagcacagcccacgtgcctaaggggaagcacagccgtgcatcatttctgtcccgcgccgttccaggcatggcaggggaagcaccaagggctatctgcagcactattgcttcctatgctgtccgttctgcagcatggtttccaacttggccctttatctctgagagccatttcccagctgacctcacttcctcawwgcttctcagctcagagccctcttggaagcgtggctgcggggcgagcagtgtgggtcagctccctccagtgtgatgctgtgtgatgctctgccctatagcccgccgggaggggggaaaaagcatccagtcagtgtgggctgtgtgctcagtgcacccctgctctggtgccgtgaccttggtgtgagggaagtggcactgctttgcacattcctctgcacatgcacgggctgaaaagaaagccttgaaacagatttcatgtggtttgaacgtgggccaggaaccaggacctgtaaatctgc

SEQ ID NO: 69736 - DNA, 600 bp, Chicken  19866894342114_2; identical to SEQ ID NO: 69735

SEQ ID NO: 69737 - DNA, 600 bp, Chicken  19866894342114_3; identical to SEQ ID NO: 69735

SEQ ID NO: 69738 - DNA, 600 bp, Chicken  19866894342114_4; identical to SEQ ID NO: 69735

SEQ ID NO: 69739 - DNA, 600 bp, Chicken  19866894342114_5; identical to SEQ ID NO: 69735

SEQ ID NO: 69740 - DNA, 600 bp, Chicken  19866894342114_6
agaggggccgtgagctccatgcttggctcacagcgacatgttttaatgaccagcaagcacgtgccatgtctggatggagaagaggttgcagcatgcccagggctggagcacagcccacgtgcctaaggggaagcacagccgtgcatcatttctgtcccgcgccgttccaggcatggcaggggaagcaccaagggctatctgcagcactattgcttcctatgctgtccgttctgcagcatggtttccaacttggccctttatctctgagagccatttcccagctgacctcacttcctcatwgcttctcagctcagagccctcttggaagcgtggctgcggggcgagcagtgtgggtcagctccctccagtgtgatgctgtgtgatgctctgccctatagcccgccgggaggggggaaaaagcatccagtcagtgtgggctgtgtgctcagtgcacccctgctctggtgccgtgaccttggtgtgagggaagtggcactgctttgcacattcctctgcacatgcacgggctgaaaagaaagccttgaaacagatttcatgtggtttgaacgtgggccaggaaccaggacctgtaaatctgcg

SEQ ID NO: 69741 - DNA, 599 bp, Chicken  19866894342119_1
  misc_feature (1)..(2): n is any nucleotide
nntacagcagcgctacaggggaggaagaggctgctcatctgcttcaaggagtctgttaaggcattttgagcatagtcatattttgctgaaagtcaggactgctgtgttttgtagcaattgtgtatccctatgcgaacacaagttcttaacagtaaaatacaactgtggctggtgccaggtgagcaggaacatgctgcagacatcatcacttggaaaatgatttaagatgtcttttcttcaggtttcagtcttcacctgtgtgatgtctaagtggtgaccacatctaggtttgcagtctgyacgtagcacaggcagcttctcagtccaggagcacagtgtccatgcacttggtgagaggagcagttgatacaggaggttcctgcatcaccaggcagccctccccagaaaggaaattaggaaaataccctttctgctttcattagcctagccacatagaataggagctgaaatgtgacctcaggaaatacatctctgctgaagtagtttagtcagggaaggagaacataaatttcaacaattattaattgctcttgaagtaatatgtgtaggagagtgctattttctgtggtttgaatggc

SEQ ID NO: 69742 - DNA, 600 bp, Chicken  19866894342124_1
ttcactttaacatcatgcatggttcgtgcctgtgtgctgcagcgaggactggccagaagaggagccattgtgatgagcggaggtgcagggaaggaactagcagaccctgagggaggtttgtaacatctctgtgggaggcctgcccccccaccttcctctaccatcagcagctgcccttcagtcagatgggctgagcttggaaaacggggcacaaggctgaccggccagctggaaaagggccagcttgttttagcagcataaccaggggttctggaggggactattccctgctagattccygcttccagttttctatgggtgacaggccaaccctgcctccctgagcccagcaggacctgggtatggggcaccatgctcctggggagctgccccttgacgttcagtgtgtactgatgctctgggatacaaggcaagccagggctgttcgctgactgcttttwctgcccacagtaccttgcacygaaggcgatgtgtagtccttgtggggacrgcctggtgtgacaagccatccagcccctttgtccgattgctttttcccctctctctgaaagaggagctgtaaagacgcagagctgatcc

SEQ ID NO: 69743 - DNA, 600 bp, Chicken  19866894342124_2
catcagcagctgcccttcagtcagatgggctgagcttggaaaacggggcacaaggctgaccggccagctggaaaagggccagcttgttttagcagcataaccaggggttctggaggggactattccctgctagattccygcttccagttttctatgggtgacaggccaaccctgcctccctgagcccagcaggacctgggtatggggcaccatgctcctggggagctgccccttgacgttcagtgtgtactgatgctctgggatacaaggcaagccagggctgttcgctgactgcttttwctgcccacagtaccttgcacygaaggcgatgtgtagtccttgtggggacrgcctggtgtgacaagccatccagcccctttgtccgattgctttttcccctctctctgaaagaggagctgtaaagacgcagagctgatccacttgcaaggcctggccttcctcccagggggtgccctgtgggggttggttggtgaagctgaaactgcccctgcacaaatactgccacactatagatctgccctgtgaggtgtctgctgtatgctggagatactgatggcagtggtgtctctagctcacatc

SEQ ID NO: 69744 - DNA, 600 bp, Chicken  19866894342124_3
cagatgggctgagcttggaaaacggggcacaaggctgaccggccagctggaaaagggccagcttgttttagcagcataaccaggggttctggaggggactattccctgctagattccygcttccagttttctatgggtgacaggccaaccctgcctccctgagcccagcaggacctgggtatggggcaccatgctcctggggagctgccccttgacgttcagtgtgtactgatgctctgggatacaaggcaagccagggctgttcgctgactgcttttwctgcccacagtaccttgcacygaaggcgatgtgtagtccttgtggggacrgcctggtgtgacaagccatccagcccctttgtccgattgctttttcccctctctctgaaagaggagctgtaaagacgcagagctgatccacttgcaaggcctggccttcctcccagggggtgccctgtgggggttggttggtgaagctgaaactgcccctgcacaaatactgccacactatagatctgccctgtgaggtgtctgctgtatgctggagatactgatggcagtggtgtctctagctcacatcccagcccggttcccagttacc

SEQ ID NO: 69745 - DNA, 600 bp, Chicken  19866894342124_4
caaggctgaccggccagctggaaaagggccagcttgttttagcagcataaccaggggttctggaggggactattccctgctagattccygcttccagttttctatgggtgacaggccaaccctgcctccctgagcccagcaggacctgggtatggggcaccatgctcctggggagctgccccttgacgttcagtgtgtactgatgctctgggatacaaggcaagccagggctgttcgctgactgcttttwctgcccacagtaccttgcacygaaggcgatgtgtagtccttgtggggacrgcctggtgtgacaagccatccagcccctttgtccgattgctttttcccctctctctgaaagaggagctgtaaagacgcagagctgatccacttgcaaggcctggccttcctcccagggggtgccctgtgggggttggttggtgaagctgaaactgcccctgcacaaatactgccacactatagatctgccctgtgaggtgtctgctgtatgctggagatactgatggcagtggtgtctctagctcacatcccagcccggttcccagttacctctcagctgggatgcctatcaatgcaaag

SEQ ID NO: 69746 - DNA, 600 bp, Chicken  19866894342127_1
tacgagcttcagtttaagacctgcaggttcctacagcatcaagaaatacttgcacttaccaccttgtggatacataatctgtgtaaggaggtctagatcggatttctcgggctaagccaaagtctgctattttcacaagttctggtcccatacaaaggaggttttcaggtttcaagtctctgtgaaagaatcctaaaattcaaatgaaacactgatgtacgttgcaatgccacagtcggctcttacctttattttacctacattgttttgattcttactgctggagcttgaatagcaccrcacagagctgaatgctttcagtgcccaagaaagccagtcagtataatgattgttcaacagtctatgaagaactaatcaactattctgtaacaattctgaatattcagtcaggtaactccctttcagatgactcctcctttaaaaaartaaccaatactattttaatgttagctttattctaactatgatggaaagygtgcaaggaagtaatcaaaactttttacttcaaagcttttttaagcaatagaaattgaaataggaggtgatttttgtactttcaaacctgttttttttccccat
